United States Patent Application Publication US 2011/0214205 A1 - sequence listing, part 15

SEQ ID NO: 57208 - DNA, 267 bp, Setaria italica
  Peptide Sequence Number=SeqID_123182
gaagggaagagcagcgagcgtcgcaggcatcggctccgcctccgccccgcccgccgccgccgccgcctcaccggcccccctcctcctcatcccccgatccaatccccgatcgccgaccctcgcatcgcctcgccgcgcggcaatatttggaacccttgtcaccgatcgcctcatgccgcaccagcctcccgattcgcaaagcctccgcctcccctcccaccctccgccgccgcgcgcgcagacgaccagcgacccgcaggcatgggg

SEQ ID NO: 57209 - DNA, 390 bp, Setaria italica
  misc_feature (56)..(56): n is a, c, g, or t
  Peptide Sequence Number=SeqID_123183
ctgagcagaggtatgcaaattaactctaaaacttgtaccttgccaaaacattggangtgaaagaagaatggtgcatgtccctacataccagtgagaaaccgccgccatgcaagtcacaaactttgctatctaatgcaggttgcaacgttgcacacgatgctttaaccatttgcaaaagattcaacaagttctgcatccgttgataatgcggggtggtcaatcagcacaactcgctcaagagctaagtctctcgttgcaagacttggtggtgatctaaaacaagtcgggtgaagttcatcccatacggcagagtagatacaattctttttggcgagaagtacccacggttgtgtagcttgtaattttgccatagctttgcaagtgggtcct

SEQ ID NO: 57210 - DNA, 491 bp, Setaria italica
  Peptide Sequence Number=SeqID_123184
tcacgtgacgcaggggatactgaatcacgtgaactccattgcatttcttcatttgtattgtttttcaccaagaaattaatatttgtttgataggtaccaagtggatcaaccaagttatgatgatagattgagatacttcaatatattgtttgagtcattactctctttccaaactgaggaatcaagaaacaagtcgaagaaacagaaatccgctattgatcttcccaaagctccaaaggaagtggagggcccaaagatttcagagctaaaggctaaggcagaagctgagcagcatgctgttcgtcgaatgaggatgtgcctccgagatatctgtaaccgcattttatacaacaaaaggttcaatgtgtttcacttcccagtatcagaagaggaggtacctgactatcgatcagtaatacacaagcccatggatatggctactgtcttgcagcgggtggactctggacaataccttaccagagcagccttta

SEQ ID NO: 57211 - DNA, 374 bp, Setaria italica
  Peptide Sequence Number=SeqID_123185
atcaagatgcctcttcaggcagggagcgataactgataaaataatggaacggatttctgatattttcccttttctttcatccgtagatgttagcaagttctctgccctttcttatggatcttccatccctcttgtttatagacctcgccttttgatatgtggtggtgagagtgttggactggatcatgtgggaccagctgttttgcatgagcttgagaagttttccgttcactcattgggactgccttctcttctctctgatccaagtgcaaagacacctgaagaagctcttgtgcatatttttggggaagccaagagaacaaccccatccattctctacctacctcagttccatctttggtgggatacggcac

SEQ ID NO: 57212 - DNA, 337 bp, Setaria italica
  misc_feature (299)..(299): n is a, c, g, or t
  Peptide Sequence Number=SeqID_123186
tgtaagtctacctagttaagttaccttgtcttccttccttgtaaccctatggagactgacagcagtgaagttgccaccaccttgactactggtgatgacttactcgggcagctagaagccctaaagcaacgcttcatggagctcacggcaggctatggcgtgccacagctcgagaggctgtattcccggataatgaaaggcgcgatagagttgacaagtaaagaaagcaatgaagatcatagggggttagttgttagatatttgttgacatttgttgagaacagcgacaatttttaacnccgcgtaataagattcttgtttccatgtgtacattctc

SEQ ID NO: 57213 - DNA, 367 bp, Setaria italica
  Peptide Sequence Number=SeqID_123187
tgaagtagctaaagacggcaaaagaaaaagactcagaaaatgatcagggcatgctaaagatgcggctgcaagagatgaaaggtctccagaagatgtagatttatcaaaaccaatttccccagaagaagctccaaaagaaccagattcaaatggcactctgaaagaaaccgacaattcaccagctgaagcaccagaagtacctgctcctcctgaacccatggagactgacagcagtgaagttgccaccaccttgactactggtgatgacttactcgggcagctagaagccctaaagcaacgcttcatggagctcacggcaaggactaataggacgtagaccaacaagactacgaagaaggacttagta

SEQ ID NO: 57214 - DNA, 132 bp, Setaria italica
  Peptide Sequence Number=SeqID_123188
taacgggcattgaagataggagatattggaatttcattcccaatgatgaatcaaggtgctttcatctactagcaatcaaaatctcacttgtcaatttttagtgatcatgtttcattgtttatgtatgtgttg

SEQ ID NO: 57215 - DNA, 154 bp, Setaria italica
  Peptide Sequence Number=SeqID_123189
tagccctcaggcaccctgctctgagtttttacgcatgcagctagggtaggcacatctgcctttacatctaggaaagtagcaatcttgagcagcaaatggaagtcctggaccggacaaagcatctgacattttgttgaggtcggtattcttcggt

SEQ ID NO: 57216 - DNA, 208 bp, Setaria italica
  Peptide Sequence Number=SeqID_123190
cgcttctaccaccactgttgatccatggtggctccatcagtgctccagtaactcccccactaagctcaccatctgcccggacacctcggatgaagccaccatggatcaacagtggtggtagaagcgggtgcttctttgatggagtaccgttggacaatgtcttgagccatggtaggatagggttgccatcgataccattagccatttc

SEQ ID NO: 57217 - DNA, 298 bp, Setaria italica
  Peptide Sequence Number=SeqID_123191
atccatcctctttcagggatctgaacttgttctagcctaaataaataagttaaccatttgcttaggctagaacaagttcagatccctgaaagaggatggatatcatctccagaggaccacggtacgatctctgaatcccttctctctttctacaaacactgaacccataaaatagaggagcaccgtccaaataaatatgaaatgtaattcccaggcgaataagaggcactgactcttgcagaaagatcaggagggatcagcacgggtctttgaactcccaagggtgagctccagctcg

SEQ ID NO: 57218 - DNA, 316 bp, Setaria italica
  Peptide Sequence Number=SeqID_123192
ttttagttaagttctttttttgtttctttggttttgttttaccgaacaaggggaaatagactggtaaagtttcactattttcttgggctggagcatctgcatttgcatgcctcataaactcctccggggacatgtgagtgccatggcaggcacatactatcttcacctcatttctaccaaacttgtatgttacacctgatatggttctgccatttggtccagtaccagtggtagaaacccaaggaagatcaggataggatccagaccctccaaatttgacatttggtgcgatgcctggccttatagcagaacccat

SEQ ID NO: 57219 - DNA, 257 bp, Setaria italica
  misc_feature (59)..(59): n is a, c, g, or t
  Peptide Sequence Number=SeqID_123193
aagagaggcccaaactaagctcaaggccattctcctcgtccatttccagttattggttnaattctaatgatatgtatgcctagttacagactatttcttcaacatactaaggatagcatagaccacactattgtatagtccttgacattcaaaccatcatcctgcaataaataccttgggtaagagagaggcagaatttttacggtaactcgatagcttatggcaggtggaaacatagattaactaagaatcattta

SEQ ID NO: 57220 - DNA, 248 bp, Setaria italica
  Peptide Sequence Number=SeqID_123194
gagctaaaaatacacaattttttgtcctcaaacaaagttcaatccaagcgtctaaacttgcataataaataccttatgagatgaactgatagtgatgcaatgaattggtgatatagacacaaatggggcagcaattatttgtcattctctctgaaaccggcaaattagttttcagcattccctgtcggcaaccaagcagcttctgctggtaaagtttcactattttcttgggctggagcatctgcatt

SEQ ID NO: 57221 - DNA, 353 bp, Setaria italica
  misc_feature (45)..(45): n is a, c, g, or t
  misc_feature (51)..(51): n is a, c, g, or t
  Peptide Sequence Number=SeqID_123195
tcatgcatcagtacatgtgtcagcccgcctttttcgcccccacgngaaaanagggttcaagttggccgcctgcaacttttttcaaagggcatctgccgccttcatttcttattggaggtgagatgagtgtcgcctgacatgctgacagtctcctcggcatggcacgcctatggtctgtggcctatcatttccctgcaattacaatactacaatagacaatacgaaactactaggtacggaataggtacaactacgggaacaaaaaggacccaagttagacttagactagactagactaccaagtaaagacaagaagacaagacaaggacaacgaagacgaaattagtacaaca

SEQ ID NO: 57222 - DNA, 347 bp, Setaria italica
  misc_feature (304)..(347): n is a, c, g, or t
  Peptide Sequence Number=SeqID_123196
ttatggttacgtcacagggagggatgctggagagtccaggctgcgcacggcagcttatgagactctaaatgaagttgtcaggtgctccactgaggagacagcccattgttatgcagttggtacctgtcatcatgatggaactgcatcagactcttgaagccgaaaagttgtcaactgatgagagggagaagaggagcgaactgcagggcctcctttgtggctgcctgcaggtcattatccaaaaatagatccatcatctgatctgcatactgcaagaagagtacttggttagaaactaaaaccnnnnnnnnnnnnnnnnnnnnnnnnnnnnnnnnnnnnnnnnnnnn

SEQ ID NO: 57223 - DNA, 351 bp, Setaria italica
  Peptide Sequence Number=SeqID_123197
agcatcctccctgtgagtaaccataagaaggttctgaacaatatcttgaaagaaaggggataatggagagtccaggctgcgcacggcagcttatgagactctaaatgaagttgtcaggtgctccactgaggagacagcccctattgttatgcagttggtacctgtcatcatgatggaactgcatcagactcttgaagccgaaaaagttgtcaactgatgagagggagaagaggagcgaactgcagggcctcctttgtggctgcctgcaggtcattatccaaaaagttgggagggatggagtcaaccaagtactctttcttgcagtatgcagatcatctgatctgcatactg

SEQ ID NO: 57224 - DNA, 259 bp, Setaria italica
  Peptide Sequence Number=SeqID_123198
gctaatagcaaccagcagggagggtatgtcttgacataatggacttgaccgccctgctggttgctattagcttgtttttttctcctagcattcttttcccctttgtccacttgcattgtcttgcatttcattcttggtcctgttttgtaagagttctttttttctgggcaaaacttgtgtcctgtccggtctggaaccgcacgctgtttgtacaagtgcagtccctgcgtgcatatcagtttatttccaggtcatggga

SEQ ID NO: 57225 - DNA, 235 bp, Setaria italica
  Peptide Sequence Number=SeqID_123199
agctgggtcatgataccgtcgcagaagggcaaaattttgtcttcaagtgccctacacaagtcacccacaacacccacggtaatggcacatacctggtactcctcgaagttttgaagtcccatctccaaatactgataaaactgtggcatgtactttgcaaagtttgcgccacagtgcatgaggaggctatgcttgctattggtgcattggcatatgcagctggcgcaaactttgc

SEQ ID NO: 57226 - DNA, 248 bp, Setaria italica
  Peptide Sequence Number=SeqID_123200
atgtgcgtatgtcgtagaccgatacagcatcagttctgtatgaggcgataaattaacatcaagtggttgcatgaacaagtgcaggtaataactttgactctacttcttcatatttggttctcttactttttttccagatatagaaggatttctaatgttctaataatcagttaatcactgagagttatagaaagataaaatcgttaatatttatttttagaagttaattttatcttctgctaacaata

SEQ ID NO: 57227 - DNA, 241 bp, Setaria italica
  Peptide Sequence Number=SeqID_123201
aatcagtgagaggacggtaattcccccctcgcaccagcagcgggtcaatttcgtcgagcacctccgctgcgacatgcgtccgccagcgccgcggccagagtcgaagagcgtcacggccacgccgcgcgctgcgaggagcgatgcgctcacggccgccccgtaacttcccgcccaccgatgacggcgacattagcggcgacggcggcggagctcatggctcgacgcttcccgacggctggcc

SEQ ID NO: 57228 - DNA, 387 bp, Setaria italica
  Peptide Sequence Number=SeqID_123202
gagaaggaggaacttgctagacattattggagtcttgaccttctcacaaatcgattccacagtaagtctttcaactgctggcataaagcaaggaatctcggcacgagcatgacagagtgtgtttggtttactacctatcatccgtatgtgtttgacttctgctccgtctccaggaacgtagatatcgacgagagacacaggcagcacgggcagcatcttcaataggtaagtaggaaaataagttatcaacaatatcctctggaagcctgtcaagcatgaaatgtcccatcacttgcaaacattgctcatcttgtgaggtgtgaccttgcaaactagctggctgcagctcccgctttcgacatgttccggtgtacatctccgcgctct

SEQ ID NO: 57229 - DNA, 127 bp, Setaria italica
  Peptide Sequence Number=SeqID_123203
aacgtagatatcgacgagagacacaggcagcacgggcagcatctctggaagcctgtcaagcatgaaatgtcccatcacttgcaaacattgctcatcttgtgaggtgtgaccttgcaaactagctgat

SEQ ID NO: 57230 - DNA, 229 bp, Setaria italica
  Peptide Sequence Number=SeqID_123204
tgcatatatggaccatggacctctacgcacctctcatctgtggcaacgggactactagtctagtctcaagttgagaggcagtctatagtaccacgaggagcagccgcatcgcggattcgcggtcgccgccgcttccactccaagtgccaattcaattcatacaaggctgtaggctggtgaaagcaaaaggagacagcatcacagcagcagcagcttcctttcttctgcc

SEQ ID NO: 57231 - DNA, 327 bp, Setaria italica
  Peptide Sequence Number=SeqID_123205
tggttattacgtacttttcccttgtaggtcctaagtctattgtctactaagttttgagtctacccacactgtgttagaggtggtctcatggacaaagtttcagccaggattcttaaaccgccagattattacattactgtcctccttgaatgtcccggatgctatcttttcacaaatgcaggaagccatgctatctaatctcaacaatattttgtcggacactgatgtcgcttttgatgttgtaaccacctcttgtgctgagcaaggaaacaccgcggcactgatgttgagtgctggcttttcacctggaactgaaccgcacctgaa

SEQ ID NO: 57232 - DNA, 358 bp, Setaria italica
  Peptide Sequence Number=SeqID_123206
tttgttagttcttagttctttgttatttgttcgttaatttggttgttatttgtccttgtttctttgttccgttagtcttcttttgttcgtagtcctagtagcagcaattttctgtgctgcaatctgaggctcaagtccaaccctaagagcttcaacaataacaccactaatctcattgttgtataaattgtcaaaaagtccatctgtgccagcaacaataacatcaccaggagcaaccggaaagtggaaaacctgagcagaacttggaagatcactgccacccccactctcgagctgataagtaaattgaaatcatgctgctgtgaaggtgatctgagaacagtgcgaccatctctga

SEQ ID NO: 57233 - DNA, 309 bp, Setaria italica
  Peptide Sequence Number=SeqID_123207
tgctgaaaacaaattttgttgtaaacagtttcgattgttatagacttgtttgctgcagtaacgagtaaaatggcataatggtttgctaacatcttccacggctaaagagcaaccatgctaaatccagcgcacgtgcttccgggatcaggggatttcaccccttctaaatcttctacgcgactacgccccggtgcatacacgcgccataagtttgggacaagatttatgtacattacatccaaaggaatgcttgcatcatgcggctcaggcactcttcacatatgacacaacgactgtgatatcgtcaag

SEQ ID NO: 57234 - DNA, 162 bp, Setaria italica
  Peptide Sequence Number=SeqID_123208
ctcattcatggcatctattgttgtaatcatgtttctgttgaatgagatagagttgaagcagaagaatatttcgtagcgctgaggattaatatcaagaagaacaggattgcctgccaaatattcttctgcttcaacagaaacatgattacaacaatagatgcc

SEQ ID NO: 57235 - DNA, 160 bp, Setaria italica
  Peptide Sequence Number=SeqID_123209
gcaggttcaaaaattagaggaaagcaaaaaattaggatccaacacaatcacgacggcttgagattgaggggagcgtaatacatataatgaaagcattgtcgagccatcaatctgctgcaccaagtttaattgaagatgatgccctacaagtccttttcca

SEQ ID NO: 57236 - DNA, 240 bp, Setaria italica
  Peptide Sequence Number=SeqID_123210
aagaatttcaagtaggaagggggtggaggccaaggcgaaggcgagtaggcgacccacctcgttgagccagatgcggcgggcggcgaggagggcgtcggcgagggaggtgaagggggaggcggccgccatcgcggcggcgaagcggcggctgccgttgacgcgcagcacgtcctccacggtgagaggcgtcggcgtcgccatctcgccggcggccaattcgacagcgcgcgggggcgtgag

SEQ ID NO: 57237 - DNA, 384 bp, Setaria italica
  Peptide Sequence Number=SeqID_123211
aagttcttcctgtgctgcagcctcaagttcaacaattggcctattcacataacgtctcttaagctcagccaagacttcaggtgcagtcctcccagacgcgcaaatcatgaacacgaagccgaatttctccctgtacttggcattccactctgccagctcctgggaagtcgaatctgtggctgtggagatagctgccgattgttcttccttgctccacctaaaccaaaaagctaacagagattaccaacacagagactggtgccattttgtttgtccttagtcatgtcgagtgaaagaatccatcagttcaatttccgcgttttaatgctttggattcaacataacgcgcaagcatgtcatgtacttgttttcatgccttttaac

SEQ ID NO: 57238 - DNA, 239 bp, Setaria italica
  misc_feature (28)..(28): n is a, c, g, or t
  Peptide Sequence Number=SeqID_123212
gttgctgaacgacggaggagctgaacanccttccacatctccagatgaacttcgattccagaagcaggggatccacgggcaacatccagcacatgggttgtaatggggggccgacttcggttggagctacctgtaatgtcaggagctttattggcacaaggctgggggagagctccaagatgtgctccaataattccgttattgtcgtattcttgcttgtcttttattcttgttatttt

SEQ ID NO: 57239 - DNA, 307 bp, Setaria italica
  Peptide Sequence Number=SeqID_123213
aacggtcataattacgctcctagtgtgtgtggttctcacaactactgctttccttgcggcgaaagtagtatacggtggtgacaaggaaagcagtagttgtgagaaccacacacactaggagcgtaattatgaccgttttactggagacatgccttttcccttcctctgaacttccggatgtgcagttacaggaagtgaagcaactcctatcacgtagcacagcgtgttcttctttcagaagggtcttgtcagaggcacatgtgcagttccatgaccccgttccaccatcctcatcttgttgacagtg

SEQ ID NO: 57240 - DNA, 327 bp, Setaria italica
  Peptide Sequence Number=SeqID_123214
caacgtggacagagttgatgcgcagagtctacatgacagcgaagtgaccttcaagccggtgcatgataatatacgcagatgaagggtgctgggaatttgggagagagcagatctgtcgatgtcgatacattcagccagtgcagctccgtgtacaacatagagaaggctgggagttcatactctgaagattacagttacagcagctctgggcctgctaggaaaggcagttcaccatatgcatattcagcatcgccactggttggtttgcctgagttattactctttgcaaaccgattcgtcgccagctactagtgcgactgagtcgga

SEQ ID NO: 57241 - DNA, 198 bp, Setaria italica
  Peptide Sequence Number=SeqID_123215
aataatgtgggacaggcagagaaggaatttagagttgaagttgaagccatcggtcatgttcggcataagaatctggtgcggcttctgggatactgtgtggaagggatacacaggttagcatttcatacttttggaacttcctttctgctcagttcatttacttttgtaatggaagatcataaaagctacaaggaccag

SEQ ID NO: 57242 - DNA, 182 bp, Setaria italica
  Peptide Sequence Number=SeqID_123216
tgcaaccagtgatgtgcatatatgctcttgtcaaattacagaaggaaaagtgtccaacagccaagaagaggataaattctattgtttactttaacatgtcaaattttggaatataaatatcaccatacattgctggagtggacggtttgacgtgtcattattctggaagcaattccatgcca

SEQ ID NO: 57243 - DNA, 258 bp, Setaria italica
  misc_feature (134)..(134): n is a, c, g, or t
  Peptide Sequence Number=SeqID_123217
ggaacggtaccaatagaaaacgacttgtgccgagaatccgtaacgctgttgacggacccgccatttaccgaggcaagtcctggtttcgtcacaagatatctccacctctccaaatcgattatctacaaaagcgngatgatcgcagttgttacacgagctaggactataggctgatgttcatggtgccatgtgagaagagagtcttgctcttgatttagcggtgtcgttaggagtgcaaaccgacacagacctttggtg

SEQ ID NO: 57244 - DNA, 354 bp, Setaria italica
  Peptide Sequence Number=SeqID_123218
tctgagagcacgcgcgatggcgagtgctagtttcatccgtctgggccaggatagctgccacccttccccatcgtgaagatgctcatagagtgtcccgtttggtgggtactgaaacaccagcattcttgaaaacggctcggactccttgcagtatcccaccatctttgcaacattttcatgactcagcctggccatttcatcacctgaagaatttgagcatgctatgagatatgattccaggaatgtgagttctgtgagaatagaactggtgagcgcgtgcctccttctgaaagtacagctccacatagtcattccagtaaggcactgaaacggacagtgacacaacagcgatcc

SEQ ID NO: 57245 - DNA, 216 bp, Setaria italica
  Peptide Sequence Number=SeqID_123219
gtacagaaaaaataaacatgctttcaagttcatgcttactgaaaacaacttttgggggttttgagacactgaagaacagttacttacatgttcgaatcattacttgccggaataatccctgtaaggcggttattgctcaaccgtagctcaaggaggtttcccaacttgccaacctcgggagggattgcgccatccaaccgatttgcgtgaaggtct

SEQ ID NO: 57246 - DNA, 278 bp, Setaria italica
  Peptide Sequence Number=SeqID_123220
agagcgtatgaaggaggatgtagaacagatgcttccacgaaagaaagagataatcatttatgccaacatgactgaacatcagaagcaaatccaggatcatttggttgaaaaaacatttgatgactacttgcatgaggaatcagatatcgtattgaagagacccggcatcaggtcaaagttgcataatctattaattcaaactgaaggaaagaaattagacaaaccaatacctagaatacttttaggaaatactaccgtttagaattacaacaactttg

SEQ ID NO: 57247 - DNA, 463 bp, Setaria italica
  Peptide Sequence Number=SeqID_123221
gagcttcgtgcatcccagggtggacatgactcctccctgcacaataaatttctcatttatcaacaagacacatccgtcatcatttaactattatgctgcaagtctttgtgctaaatgtcgaacagttttcatttcactcgcctctgttattgatgcaatgtagatggcttgcatgttctccctgagtggcagattgatattatctcatttgtttcttccacaggataccagaactactgattttgactggagttggctctttgcaccgtttccatatggtgcaagatacaaatgctttctccgcatagttctctctgctccgatggctgaagaattacgtgactgggttggatgggtaaaatcacgattccgcaaccttattctcaagctggagagtcttggtgtttctgtcgacccagatccatcggagcaagttgatcataccatcaatgagccaaatgtt

SEQ ID NO: 57248 - DNA, 210 bp, Setaria italica
  Peptide Sequence Number=SeqID_123222
tttgactggagttggctctttgcaccgtttccatatggtgcaagatacaaatgctttctccgcatagttctctctgctccgatggctgaagaattacgtgactgggttggatgggtgaaatcacgattccgcaaccttattctcaaggtttacctgttcttaagcatgtgtacttttgttcttcacatttctgggttgtgttaatgctga

SEQ ID NO: 57249 - DNA, 211 bp, Setaria italica
  Peptide Sequence Number=SeqID_123223
cagggaggtaccatatagctgtataccaattgctatgctgtgtacatgaatatacatgtacctgcgcaagcctcagaagttttggctgtttttttagatgtaggggcttgttcatgcctctggcacaaggaacgtggaagttttttcatggagctggatgttgagagctggatttttcttcaagcatccagcacaaaatgggtcatccgag

SEQ ID NO: 57250 - DNA, 420 bp, Setaria italica
  misc_feature (415)..(415): n is a, c, g, or t
  Peptide Sequence Number=SeqID_123224
tcgtctacgttattcttcagcatctatcatttctgcaatagctgttacgtcttggtctgttagatccagctgcacgaccatctcggttgcaacactgattgaagtgtcagcttcaatatcaaatgggaagtggatgttttgggcatgacctgtgcattggaaggaaaaatggatagaggagaagtaccagattaacaatacgatgataactcaacaagattttatcataaaaacctgttgaatcagcaatgcgcagcttcaaaaatattgtattcaaatccttccgttgactctcaactgtgatacttcgaccaattgacgcatgtggatccacagtgtcatgtccatagttgtcattaggatgtgaatctgacatactacctgtgcgttcatggcagccctggatgatgttacnctgtc

SEQ ID NO: 57251 - DNA, 481 bp, Setaria italica
  Peptide Sequence Number=SeqID_123225
gctatgtgtaaaaggttagtttctgcattcatcttatagctaccatgacaacgtaatcagtgtacttgcattgagagtgtactgcggatatgcatcatccgtcctagtatatataaggttttcacctttgtacaagtgtaactagtgttgttttttcctgtaattcagggtaagcttactccagaagtggaagatcaagttgattactgtgagagaaagtcggtctgaggatgggaaaacaatcggtgtcgattgcaactacgctgttgtttcaactacacctgaacagtgaaaagcatctagcatactgtgtacttgtaaggaaagaagagaaagtggcctgcatccttatacttggaaattcatgaccccagttgagtttcatcgctgctagtcatggtgcctggcaatgttgtagacaacacttaccaaatgttgtgcatatagcaataataaatgtgtgctgaaactctctttccca

SEQ ID NO: 57252 - DNA, 192 bp, Setaria italica
  Peptide Sequence Number=SeqID_123226
tgcttttacctcgatcatggccattttcatcatcgaaagggttgatgatagagcaggagcaaagtcccttgcaccacttgtgattgctggtgccctgagcatcctgtattggaggcaagttttctcaagtgttcaaatcttcttcccttttggaatatttccattgcttccaccccctccatttttcatgtc

SEQ ID NO: 57253 - DNA, 416 bp, Setaria italica
  Peptide Sequence Number=SeqID_123227
atgtgcgaccaacacacacacacactacttgtctgcttaacacacctaaacctagtactgtacagagctagggtaggtttttttttcctcctaaaatcagctccaccagatcatcgtgtcagctaaaagagcagtgaaccaccctgatttacaccgtgctttccattcctacgagatacttacaatgcgtgtggcatattgttgtggcttatccgttaggataggtggaaggaaccctggccttccgtgatcgcgtagatgagtttctccctcatcttttcctgcaggcaagtgcaagaaggttagtgttaaagcttaaaacaagaaagcttacgtgtttccagaacaaacaaaacatagctcaaaccattcgcaaagattgtcgtgtaagaatttctatgactactcacactgag

SEQ ID NO: 57254 - DNA, 310 bp, Setaria italica
  misc_feature (59)..(59): n is a, c, g, or t
  Peptide Sequence Number=SeqID_123228
cgcactcaggtacttggtgctggaagtagttctcaatcttcttcatcacaacattatcngtttcaccacatagcatgttgaacacagcacctttccggccgaaagcgcccagctctgccaattctgtgcaagtacacctcataatcaggctcatctcttgtcccaaatttgattaggacaatagtacaataagttagaataaaccaaggttagaacctagtagacttaggtacaaaaaaccaacgaagacaaagaaacaatacaagttagaataataaagaaaccttaagtagtaacccaatactttaga

SEQ ID NO: 57255 - DNA, 264 bp, Setaria italica
  Peptide Sequence Number=SeqID_123229
ccctctcacagtcccactccactccgctccaatggccgcctcctccatcctcccgctccacctcccgtccggcgcgcacacggcggagctgagcgtgcggaacggcagctccctgcagctccggctcggcgacggcctcgtcacgtcgtacaggcccaaggtgtactggaaggacgacgggtgcagggaggtgctgcacaccgtggcggagcccggcggcgaccccgccaaggtcaagggcggcgtcgggctcgtgctcaacgg

SEQ ID NO: 57256 - DNA, 351 bp, Setaria italica
  Peptide Sequence Number=SeqID_123230
gcggccaaatgcgccggacgtcgtctccggcaacggccacgagtcaggtcagccctgagctgtacggggacagcaggcccaggctcttcacctactggacagtgagaatcatcttgctactaaccttgtttttaaatttgcttggaaattcaattgctccatacaataaaataaatgaacgatgcaaataattaaaaaaccataaaatatgtgcagagcgacgcttacgaggccactggttgctacaacgctctttgcccgggcttcgtgcagacgagctcccgcatcgccatcggcgcctccatctcgccggtgtcctcgcccggcggcgcgcagtacgacatgacgctg

SEQ ID NO: 57257 - DNA, 396 bp, Setaria italica
  Peptide Sequence Number=SeqID_123231
tctaggcgttgctggcttgggttgtgaggatgctcttgtccatctgcttaactatgtgtggcctaaacattttttgagacatctccccatgtcataaatgctgtcatggaggcgattgaggggatgagggtcgcactaggtgcagctgtgattttgaattattgcctgcaaggcctcttccatccagcaaggaaagtgcgtgaagtgtattggaagatctacaactctctatacattggtgcacaggatgcacttgttgctgcatatcctgccctggaggatgatggggataacatctttagccgtccagagctggcaatgtttgtctgattaacgtgagtcttgcttactcccaactttctgcatgcaattattattgaaagaactattttcaca

SEQ ID NO: 57258 - DNA, 359 bp, Setaria italica
  Peptide Sequence Number=SeqID_123232
gaagatctacaactctctatacattggtgcacaggatgcacttgttgctgcatatcctgccctggaggatgatggggataacatctttagccgtccagagctggcaatgtttgtctgattaacgctactttgggttgaagcttctgaagagttgcaacgggtttaggaccagtccccggcacgatgttttatccctgcggcatgttaagcttatacatatgatcctatgttttgaaggagaaatgacaatgctagtatgctgtcgtcttgttatgaatattaaggattgtgttatatacttagtaatgtagactgtgaaccatgtagaatgcgagctccttcgtgttttttgtttcctc

SEQ ID NO: 57259 - DNA, 310 bp, Setaria italica
  Peptide Sequence Number=SeqID_123233
cggatgcagcaagggatatgagggcaatccctatgtcaccggagggtgcaagaatattaacgagtgcaagcttggagattttaatgcatgtggcagtggtagcatatgccatgacttggatggtggtttcgagtgcaaatgcaaattctggtacagacgtgatggtaggagtggtacgagctgccagcggatattttctaccactacaatatggacaatcatagaatgcgagctgaaaaaggtgacagacggctacaaaaaggtcatcggagaaggcgcatttggcaaggtctacaagggaacaatcaaa

SEQ ID NO: 57260 - DNA, 188 bp, Setaria italica
  Peptide Sequence Number=SeqID_123234
gactatcctggagcctaggccttaattaggcagttagctcaaccgcatcacggctagtacatgtatgatatatgctggattgagctaactgcctaattaaggcctaggctccaggatagtcaggagcaatgccaattcttgtgtcagattgtatcactttatctatcagtgacctgcttgtgaaaact

SEQ ID NO: 57261 - DNA, 385 bp, Setaria italica
  misc_feature (241)..(241): n is a, c, g, or t
  misc_feature (364)..(364): n is a, c, g, or t
  Peptide Sequence Number=SeqID_123235
gtagaatgaggatttgtccctagactagtcgcaataacatcaagtgagcgtactccagttttctcacaggatcccctttttcatttccagttgtcctataaaaggggatcctgtgagaaaactggaaatgaaaaagttggcgtcccaggaggatttctggaactggacagtgcatctctccccactgacctggatgcagcatttccttctgttgctctagactcttacaagtctaccaacngtatgtccgttggtttgagaactgatagcatgaatgttggaatggatcctggaactgagcatattgttctagagaaaaatcactgtgaagcacatttgcctatggaaaatcataagtataccncttttgaacaagatacattct

SEQ ID NO: 57262 - DNA, 388 bp, Setaria italica
  misc_feature (76)..(76): n is a, c, g, or t
  Peptide Sequence Number=SeqID_123236
acttaccttcctttgttatatgactttgaagagctagaaggagaactaaactttttaaatcgggttgttgcattancttttcatccatctgccatatcaaggacacccatcactcttggtgagattgaagtacttggaatttctcttccatgggcagacatgttaaacaatagtggacgtgctcctgaatttatggagcttctccataaaaaatcaagcgctcactgtgatctaggttcgaagtcttttgcaaattcttcggggcctgtgaatgattctcttggcagtgaggggtcttatactaaaagtcatataacaaaggaaggtaagtgctctcttgaacattgggcctagcacttttccctgtaacagctaagtcctctggatc

SEQ ID NO: 57263 - DNA, 339 bp, Setaria italica
  misc_feature (9)..(9): n is a, c, g, or t
  Peptide Sequence Number=SeqID_123237
agggcgcanccctttttagctcgatatatctggtggcgtggaactataccggttatggtggggtgcagaataaaaaatgctgtgtcagtagaagctgaaatttatgttgctgatgatccttacaacgggagcttacaatactaccaacgattgagtaaagatacggcaataaatcatctgaagcgaatgtatctaggcaaaagaaatctggaatggttcccattgtttgtgttaacttactaagatatgctgaaggtaaaactgagtggctcaaaagctatgcacagtgagattctgaacaattaattttaaagggtaaggtaaaaccggtaaaagtta

SEQ ID NO: 57264 - DNA, 234 bp, Setaria italica
  Peptide Sequence Number=SeqID_123238
agaagctgaaatttatgttgctgatgatccttacaacgggagcttacaatactaccaacgactgagtagaagatacggcaataaatcatctgaagagaatgtatctaggcaaaagaaatctggaatggttcccatttgtttgtgttaacttactaagatatgctgaaggaaaaactgagtcagttcttgtctgagacacgcaacaggagataggcaaggcacacaggggatagg

SEQ ID NO: 57265 - DNA, 229 bp, Setaria italica
  Peptide Sequence Number=SeqID_123239
agaattgtgttttgagttggatgatgtgtagggtaaggattctgacaaaatagtaatctctaacacacagcataaaacggtaccagcaaacagtctgacgacttaactgataatgtctgccactgccttaaccaccttgaagggactcacccttgctttcctccctttcgcggttccactgctcaatcttagccctgcgttcctcgctgttctccctgactgggcttct

SEQ ID NO: 57266 - DNA, 297 bp, Setaria italica
  Peptide Sequence Number=SeqID_123240
tcgtactaaacgtagttactaagtttgtctttgttggtcttgtcttgtctagtttgatgccgatgatggtgtatttccggtggcatttaatgtggttgaagatgaaaattatgatagctggggttggttcttaatgcagctgaaaatggctctccaaatacacaactacccttgcaccgacatgacattcttgtccagtggacaaaagggtctagatgctgctgtctctcaagtgtttgaggatagccaacatgccttctgtttgcatcatatcatggaggaattcaaaggagagct

SEQ ID NO: 57267 - DNA, 290 bp, Setaria italica
  Peptide Sequence Number=SeqID_123241
ggtgcttcaaaagctttctctacctcatctatctcattgaacaaaatacatgtagaatgagatagatgaggtagagaaagcttttgaagcactggatggccaaatgactaaggactctggtgggcgacttcaaaagcatgtgctgatgaagcgtgacaatggagattgtggtgaactttcttacgttccggtaagtattggttatacagttcccagcccaaccagttcgaagttccaaagaagagaccacagcctactgaggatgctgatccccatcggcatgttctttc

SEQ ID NO: 57268 - DNA, 391 bp, Setaria italica
  Peptide Sequence Number=SeqID_123242
atgcagtagtaggtaaattggcatacttaaagatgtaggctgtatcaataaccttaccacataaatctctatataagctgtggccaatcaaaatctttcctttggacaagatcctcttcagcgatttctgaacatcaactaatgatgatgtgactccttctagatccttcttagatacaccggtgatgtgtgttctatagtcagtaatagctttagaaggatttacaagtgtgtccagcttcacctccagattgttgtctacaacacatactcggaccacagcctcagtgccatcatggcaaaggaccatctcacagtcaattgccaacatagcacttgagctcaccaaacttgagacatctcctatccgcaacactttccatccctcttg

SEQ ID NO: 57269 - DNA, 197 bp, Setaria italica
  Peptide Sequence Number=SeqID_123243
attggcatacttaaagatgtaggctgtatcaataacctgagagcaatcaatctttaaggctgcaaaagagaaaaacatggtagaaattgaattaactgctactgagcaaacaaaaaatgaagcatgttcaaataaacacaaaggacacatcgaatagttacatcaaatagatcagaaacgaaataaatcacacctta

SEQ ID NO: 57270 - DNA, 201 bp, Setaria italica
  Peptide Sequence Number=SeqID_123244
tcgcttactgaagcgccaaacttcctgtcgttccgagccaagaaatccttccacgccccatcggagcctttcaacccgttcttctgagtgaacctcacgacctcaacgagcacctctttctcggcggcggcgagccgcttggccatcggacgaccgcacgggaaccaaaagcagtggctggttcgggggagaggaaggacg

SEQ ID NO: 57271 - DNA, 206 bp, Setaria italica
  Peptide Sequence Number=SeqID_123245
tacatggatcatgacttgacagggctatcggacaggcctggaatgcagttcaccataccacagattaaggtaaaaaccatccatatatgtgtgtgatggttcttggttgccagaaggtgttgttcatgaagtaatgatggtgtctggtatgtcctgtaccagtgctacatgaggcaactcctttttggccttcactactgtcatat

SEQ ID NO: 57272 - DNA, 413 bp, Setaria italica
  Peptide Sequence Number=SeqID_123246
tcttttgaatgactgatgacaatattaggtggattccgacttggtatagatccttacagcaacagccaaacccaatatcggccaaggggaccaaaaactggaggatcttgatgatgaactctggggtcttatcctggttgtagtgtggctgcttcgggggcatgtacttcaccttagtgggtattgtagttgcatcaatttcgccgactaggtactcatccatcatcgcacgagcagtggtgctgtggcccacatcttcaaagtcatcagtagcatccttggcagtggaagacagcagaacatcatcacctccagggtgatcctccaaaaacttggtcacattgtacaccttgccgccgatgatgaagaccaagacaaagtaacgtaaccttaaaggtaaagttaaagtaaaa

SEQ ID NO: 57273 - DNA, 283 bp, Setaria italica
  Peptide Sequence Number=SeqID_123247
ttgctgtaaggatctataccaagtcggaatccacctaatattgtcaaggggaccaaaaactggaggatcttgatgatgaactctggggtcttatcctggttgtagtgtggctgcttcgggggcatgtacttcaccttagtgggtattgtagttgcatcaatttcgccgactaggtactcatccatcatcgcacgagcagtggtgctgtggcccacatcttcaaagtcatcagtagcatccttggcagtggaagacagcagaacatcatcacctccagggtgat

SEQ ID NO: 57274 - DNA, 296 bp, Setaria italica
  misc_feature (241)..(241): n is a, c, g, or t
  misc_feature (282)..(282): n is a, c, g, or t
  Peptide Sequence Number=SeqID_123248
tagcaccggaaggaaggaggactcagcggccgccgccccccgactccccaatctcgagaggaaggagagaccccgggcttgggctcgtgccgagcggaggaggcgaaggacgatggggaagggcgtcctggaggtgcacctcgtcgacgccaagggcctttacggcaacgatttcttaggtgcgtgcgtgcacgggccgcgtctcgcctctcgtcgccgaatcgcgctcgtccccccggtnttgttcattcgggttgtttcgtttcgttcttgcgtttttcngtgggtgcccgcgg

SEQ ID NO: 57275 - DNA, 227 bp, Setaria italica
  Peptide Sequence Number=SeqID_123249
actactaggccaacgaatagtttctcataagtgaaaggtaggaaagacaaaggactagaagggtaccaataacaaatcaatgggagacacgaggagaaggatgtacggcactcagagggaatagatggggagtagggagaagcaatggcaccgagacctagaggagaaacattataagaggggactggatgacgcttacaccagtgaagagctgatgaagcaagttc

SEQ ID NO: 57276 - DNA, 433 bp, Setaria italica
  Peptide Sequence Number=SeqID_123250
aaggactaggacggaactagacgacgttacgacgttacttagtttagggacgacgcccctaaagtcgtgctgcgacagcctgcgcgaggagcagaaggggtgcctctgcgtgtacgcgcgcgacccgcagtacagcggcttcctcaccaccagcaccaccgtccgcaacgcgctcgcctactgcaaggtcgcctacccaagctgctaggcgcccgcggcgcgccgtgcgcgtgcgggctgtgcgatttgcctcgcatctatatacaacaactactactacgtacttgtgtgatgtgacgaatggatttgaataaatggggcgaaccaggtgatcccccggggagagcatatactatatatgcatgtcgatcggtcggtcttatagtatatttgcgcttgagataaatggagattactacagagtgatgaaact

SEQ ID NO: 57277 - DNA, 376 bp, Setaria italica
  Peptide Sequence Number=SeqID_123251
taaaagtaaaacgtaaaaaacgtaaaaactaaaaaacgtaaaaaggtaaactaaaggaacggaactagacgacgttacgacgttacttagtttagggaacgaacgacccctaaaagtacgtagactagacgaacagcctgcgcgaggagcagaaggggtgcctctgcgtgtacgcgcgcgacccgcagtacagcggcttcctcaccaccagcaccaccgtccgcaacgcgctcgcctactgcaaggtcgcctacccaagctgctaggcgcccgcggcgcgccgtgcgcgtgcgggctgtgcgatttgcctcgcatctatatacaacaactactactacgtacttgtgtgatgtgacgaatggatttgataaatggg

SEQ ID NO: 57278 - DNA, 286 bp, Setaria italica
  Peptide Sequence Number=SeqID_123252
tacaaccgttaccgcaaacgacgctcggtggtgctggtggtgaggaagccgctgtactgcgggtcgcgcgcgtacacgcagaggcaccccttctgctcctcgcgcaggctgtcgcagcaccgtccgcaacgcgctcgcctactgcaaggtcgcctacccaagctgctaggcgcccgcggcgcgccgtgcgcgtgcgggctgtgcgatttgcctcgcatctatatacaacaactactactacgtacttgtgtgatgtgacgaatggatttgaataaatgggcgaacc

SEQ ID NO: 57279 - DNA, 177 bp, Setaria italica
  Peptide Sequence Number=SeqID_123253
accgtgggtcagaagcggggctagtggtggatccatacctgcagcattgtgtggaaactgcagtgcatctagccaaaatcggcgcaaccgcaactgtcgtctctgccggccttctccatgacacaattgatgattcgttcatggactatgatcatattcttccggatgtttggtgct

SEQ ID NO: 57280 - DNA, 415 bp, Setaria italica
  misc_feature (340)..(415): n is a, c, g, or t
  Peptide Sequence Number=SeqID_123254
ctcgagcacgacggtgatgcttacgtggcggagatcgacggcaaggtgatcatgaagattgggtctaggttggacgtcgggcacctcatcccggcagggtttgaggtagcagcccacggcaacgactacgccgtctgggagaatggcgcggcgtagaatcgaacagagcataatttgctcctagtatgatttgtttctctgctagatgcagagacaagtatacacgattggggtaccaccatttatacctgtatacacaggatcgatgagctatacgaattatacacagaatgataaaataaagtgatttttcatctctctgtattcaggggaagaaatnnnnnnnnnnnnnnnnnnnnnnnnnnnnnnnnnnnnnnnnnnnnnnnnnnnnnnnnnnnnnnnnnnnnnnnnnnnn

SEQ ID NO: 57281 - DNA, 189 bp, Setaria italica
  Peptide Sequence Number=SeqID_123255
aggccgtcacgttcgtcgacaatcatgacaccggctccacgcaggccgtgtggccgttcccctctgacaaggtgatgcagggctacgcctacatcctcacgcaccccggcaacccatgcattgatgagatcgcggcgctaatggcggtgcggaagcgcaacggcatcacggcaacaagtgagttgacga

SEQ ID NO: 57282 - DNA, 230 bp, Setaria italica
  Peptide Sequence Number=SeqID_123256
gttttttttttttttaaaactttgtgcaacaaacatataatccgctaataggtggaataaaggaccacgattacaagaacggcaaaaccgtcccagaacaactgtacatcacatttgagatggccagacatgaccattttattcaccgaacaatatgtacaatgatgttgtacttgtacatgccccagagatccaatatacagtgtcttaatacgtagagatagtttccg

SEQ ID NO: 57283 - DNA, 230 bp, Setaria italica
  misc_feature (1)..(43): n is a, c, g, or t
  Peptide Sequence Number=SeqID_123257
nnnnnnnnnnnnnnnnnnnnnnnnnnnnnnnnnnnnnnnnnnntttttttttttttttttttcccttagaacaactgtacatcacatttgagatggccagacatgaccattttattcaccgaacaatatgtactggatgaggtggagatccgacagctgctcattgatcatgttgggcatcgatgctgttggggaagtcgtcctgcccgcacatggaaaattacctccgt

SEQ ID NO: 57284 - DNA, 429 bp, Setaria italica
  Peptide Sequence Number=SeqID_123258
ttaagtttaagttaaattttagttaccctttcctaactaattctatttcttgtactagtccttttacttattcttgggtcctattcgttatttagactttcacgacaaatatgggaagcttgtggtatttggcaacattgtgaatccaaggattctgcttcatttcagaacttgatgcaagaatcacatcagctgctccaatgtcatctgttacatctagttcatcatcaaaacccatcaccgttgctacttgcaatatatcagcttctgaaatctggtatgtgtacacacggacaagagactttccaggtgcagatttcttgccttttgtttccttgtataacaaatcatcaccaagttccatccgaggcatgctcttgtctttttgtttgtccttggagggagcgaaatcatctctgatggtgtctt

SEQ ID NO: 57285 - DNA, 216 bp, Setaria italica
  Peptide Sequence Number=SeqID_123259
aatgattgttggaagggacaattcaccatcaaatatgggaagcttgtggtatttggcaacattgtgaatccaaggattctgcttcatttcagaacttgatgcaagaatcacatcagctgctccaatgtcatctgttacatctagttcatcatcaaaacccatcaccgttgctacttgcaatatatcagcttctgaaatctggtatgtgtacacacg

SEQ ID NO: 57286 - DNA, 242 bp, Setaria italica
  Peptide Sequence Number=SeqID_123260
tttgatggtgaattgtcccttccaacaatcattctgacagcctttactatctgggccatcgtattagacttcacgacaaatatgggaagcttgtggtatttggcaacattgtgaatccaaggattctgcttcatttcagaacttgaagcaatggcagctagcaccattactcagagaggcgttcaattagtcggaactgctcatggggtgacaattgagagcataattaaaacccttgcttg

SEQ ID NO: 57287 - DNA, 238 bp, Setaria italica
  Peptide Sequence Number=SeqID_123261
gatcgggctgccagagtcatcggatgatgcgctggatgtgccctccgatggagggctggtggccacaggaggtggcacgaaggtaggcatctgtggtggaggagcagacatcggttcgaccttccgtgcctcagctggctttgatttcttgccctctgcgatgaaactggccaccacaacctgaacaggagttgctggaatgctcatggcagcaactcctgttcaggttgtggtggcc

SEQ ID NO: 57288 - DNA, 435 bp, Setaria italica
  Peptide Sequence Number=SeqID_123262
aggacaaagcagtggcgcaactcctagtggtgctgatgatgcattcgatgttggtctccagaatcctagcacatctacatggagcctgaacccctccaacgaagaggccgacgatcttcaggacattgatgcatcgatgacctattcctcaagtgatgatgatgatgagtcagcgagtaaaatcttcttcaactgatgaagatgaagtaaataggaatgcactgggacaattggagcttgtgcatcaatttggagccgtggcctgcattttcgggtctgtacatgacatgagggttttcaacgacgcaataaacaaatatggtgataagttccctcatccgccacaagggaaattttatcttgtggattcggggtaccctaatcgaaccggggtttaattactttagacaacctttaattaaagggtaaacgtaa

SEQ ID NO: 57289 - DNA, 286 bp, Setaria italica
  Peptide Sequence Number=SeqID_123263
aaactttaactacgaaatagaaaattaatagtaagaagaccaatcgaagcaaggattatgagggatcaagactttgatatgtgtgaccaagatgaggagtacatgccaatgccgacgacagctgcttctcaagcaagtggtgctacgaatcttttaggtgacgaggatatcgacatgaatgcgtttcgagatgctatagcaaatgctttgtttcataatgaagagtaaagctatgtgagagggtgtttgtattgacaaatattgtgtagaacctgtatgccgttgc

SEQ ID NO: 57290 - DNA, 476 bp, Setaria italica
  Peptide Sequence Number=SeqID_123264
aagctgaaaatcgttttgagaggtcgattgagacggttagtaggaaatttgaacaagtcttggatagtgtatttaggctctcagctgatgttataaaacctagagatcctcattttagaacagtccatcctagattgcggaatcctcggttctcacctcactttgacaattgcattggggcaatagacggaacgcacatcccggttgttgttccatcgtcaaaagtgcttcaacatgttggtcgacatggttactcgagtcaaaacgtattggctatttgtgacttcgacatgaggttcacgtttgcggttgcgggatggccagggtctgtacatgacatgagggtttttcaacgacgcaataaacaaatatggtgataagttccctcatccgccacaaggtaaataagcatgttatttaaatgtgtcaaaaattattggttctatgttacaattatgcaattttatgtattaggg

SEQ ID NO: 57291 - DNA, 352 bp, Setaria italica
  Peptide Sequence Number=SeqID_123265
gttatggttatatattagtcatcaccttttatttgtagatttttgtttgacgtatttttgtgttatgtagatgacctattcctcaagtgatgatgatgatgagtcagcgagtaaatcttcttcaactgatgaagatgaagtaaataggaatgcactgggacaattggagcttgtgcatcaatttggagccgtggcctgcattttcggtatgtactacgaatctgctttcatgaacaaaactaagaaggtgaaaactggtctttctggatatgagtgggtcatgacaacacttagcaatccaacagcttgctacgacatgtttagaatgagtagggaacttttttggcggctt

SEQ ID NO: 57292 - DNA, 250 bp, Setaria italica
  Peptide Sequence Number=SeqID_123266
accacgtcctgctggaggacaaagcagtggcgcaactcctagtggtgctgatgatgcattcgatgttggtctccagaatcctagcacatctacatggagcctgaacccctccaacgaagaggccgacgatcttcaggacattgatgcatcgaccgacgacctatttgacaaggctgactgggccaatagcgccaataatgctgcattcttgttgagcttttgttgtttgtaggtaaatttactagtccgt

SEQ ID NO: 57293 - DNA, 230 bp, Setaria italica
  Peptide Sequence Number=SeqID_123267
agcaaaataatccttgcttcgatggctaactcggcaagtctaacaacatccgccatttcatttggagtattgaagatgaaatggcggatgttgttagacttgccgagttatccattgaataagcaaagcaaaataatccgttgcttcgatggctctacataatttcattcgagaaagtaatatgagggatcaagactttggcatgtactcctcatcttggtcacacatat

SEQ ID NO: 57294 - DNA, 283 bp, Setaria italica
  Peptide Sequence Number=SeqID_123268
gctggggttattacagagacagcagatcttgtgatttgttgatatagcggtcttattcggattagtcgaggcacatattggcatataattataatcatcaagatctgctggggttattacagagacagcacgggctggtgctgctttcaatcttttacttacatgcttgccagtcatgtccttggagcaatttggtacttgcttttctattcaacgccaagaatcctgctggagacaggagtgtagaaataatgcaacatgtgatgctaaatatatatactgt

SEQ ID NO: 57295 - DNA, 253 bp, Setaria italica
  Peptide Sequence Number=SeqID_123269
atttgtagttcctccaagtattctaaaacatggctgtatgcattgtaacagaacttcaatgtaatttgaaagcaatttttcaactgttgcaggtccttggagcaatttggtacttgctttctattcaacgccaagaatcctgctggagacaggagtgtagaaataatgcaacatgtgatgctaaatatatatactgtggggctgtcaataataatgagaaaatgcttttttaaagactgtttgctcattaacg

SEQ ID NO: 57296 - DNA, 386 bp, Setaria italica
  Peptide Sequence Number=SeqID_123270
cgtggaattcaaatgattttggaataccatatcctacatacttccaccctgccaaggatgctgatgtcttcctttggcaggatagaatgaggagcttggaacgcccatggctcttctcgtttgcaggcgctccacgtcctggtgatccaatgtccatcaggggacaactcatagatcaatgcaggagctcaagtgtttgtaaattgctggagtgtgaccttggggagagcaagtgccactccccgagcacagtcatgaaaatgtttcagagttctttgtctgcttgcagcctcagggtgactcctacacaagaagatctgcctttgactccatgttggctggctgcatacctgttttcttcctatcctggttcagcgtacgtccaa

SEQ ID NO: 57297 - DNA, 365 bp, Setaria italica
  Peptide Sequence Number=SeqID_123271
tggttggtttgtaggtaaagttacgttcgtccgttagggtcgggtaagttcttgtcctttgtattgtattggttgtttgtattgtccgtttgtttgtttgtccggggttcctacgtattggtagttcgtccgaagacgtatgagggcagccgcctgatgaggcttgtcgtcggcgttgggcctgtgctgctgctgcttggctgatctcgtggcgttggcagctgcagcacaagtgctagcaggggccaacaagatgagcaggagcaacaagagcagctgggagctgcgactgatgatcattttgtacttaattagctactatatattgtagtatatatgtatagtatatatgcacatatgtggaa

SEQ ID NO: 57298 - DNA, 248 bp, Setaria italica
  Peptide Sequence Number=SeqID_123272
acctggcttagtgacatttggggtatgaccttatgattattctgttgctgtgaattccagatattttctctttcttatttactttatcaagtgcttagcattccagattaaatattgtgttggctcttcttttctaaacaatcaatcttattgctggtcctgctgatcaaacttgtttcctgttaaaatatgcagcctgatcgagtaacagaattctgtaagagaaacaaattgcaattgatcataag

SEQ ID NO: 57299 - DNA, 198 bp, Setaria italica
  Peptide Sequence Number=SeqID_123273
tttgccgtaatagctcacctgtaattgtagtgcacatagctaagaaggcttttttccatgtgtttgtcgtaatagctcacctgtaattgtagtgcacatagctaagaaggcttttttccatgtgtttgtataccatgcctccagtgtggagccgcagtttaaacacaatagctatacaactcagaatctgataagttg

SEQ ID NO: 57300 - DNA, 393 bp, Setaria italica
  Peptide Sequence Number=SeqID_123274
aaaggtttaaagaaaagaaacgttttaaaagaaactaaacaaaataaggtaacaaaattagaatacaactttagttttacaagacaaactaaattaactgtggtactgcgaacaatgctggggccatacttgtggttggcaggggcttagttgttgtaccgaagctaattcatccacttccaccacctgttaattcacctgagtcctcccctgaacgtggggatgccacatggatgcaggaacttaacattcagcggccacctactccaaccagagggcggccacaagctgccggtgacaggaattctcttgcttacatatgatacatgacagagccacctcaagcttctggatctgttgtttgtaatcagaaatttgttggcagtttcaagg

SEQ ID NO: 57301 - DNA, 423 bp, Setaria italica
  Peptide Sequence Number=SeqID_123275
gcgggccattttctgctgctgctgctggaggcgggaggagccggacggcgaggtggcggcgccggagctagggttttgtttgggctcgggaggcgtggaggcggagagggggaatggcaatggggtggcgacctttgaatgatgcagttggaattggggatggaattgtatgggtcagggaaagtgtttgatcagaattggttcaggaggttcatcaataagggcttcccgtcgggaaagaattggatccacgggcagcgtagtctcttgtttggggtattggatttcatttggagggtccatttgcaattgtgatctcggagaagtgtaattgactggaaggaggagagttcgttcattttcttcttttataaagtgttcaaattgttcttgtgttaaataaacaaaaaaaaaaaaaaaaaa

SEQ ID NO: 57302 - DNA, 462 bp, Setaria italica
  Peptide Sequence Number=SeqID_123276
accgggccatcaccacaacttcatcacgctcatgcgcctgggcttcttcgacggcgatccgcggaagctcccgttcggcagcctcggccccagcgacgtgtgcacgtcctccaaccaggagctggcccgcgaggccgcgcgccagggcatcgtgctcctcaagaacagtggcgcgctcccgctctccgccaagaacatcaagtccatggccatcattggccccaacgccaatgccagcttcaccatgatcggcaactacgagggtacaattactgcaaaatttcttgcagttcagttacagaacagaatttgatccctgactgatgcctgtcgccgatgacatacaggcacgccgtgcaagtacacgacgcctctgcagggcctgggcgcgaacgtcgccaccgtgtaccagccgggctgcacaaacgtcgcgtgcagcgggaacagcctccagctcgacgc

SEQ ID NO: 57303 - DNA, 372 bp, Setaria italica
  Peptide Sequence Number=SeqID_123277
tggtggtggcgcgcaggaccgccgcggaggaggaagaggtggtcggcgtggtagagcgcgggcgatgcacaacgtggggctggcgggctcacgttctggagccccaacatcaacatcttccgggacccgccggtgggacgcgggcaggagacccccggcgaggacccgctcctcaccagcaagtacgccgtcggctacggtcacgggcctgcaggacgccggctccggcgccggcggcgacagcctcaaggtcgccgcgtgcctgcaagcactacaccgcctacgacgtcgacaactggaaggcgtcgagcgctacaccttcaacgccgtggtgtcgcagcaggacctggacgacacgttccagccccgttc

SEQ ID NO: 57304 - DNA, 248 bp, Setaria italica
  Peptide Sequence Number=SeqID_123278
gttgttgctcctagtggaatgcttggtaggcttgtcggctgttgtccaagtgatcttgtcagacaagtatatccaagcaagtcctcggcacctaatttgccaggttttactcaacctactgtatgtcagctgagaggccaaagttactacgttgaagttgcacttggcttccctgctgcttcagctgacagagtttctgaatcagaacagattacaaaataaaaaaggaatggattcagtgaaggact

SEQ ID NO: 57305 - DNA, 399 bp, Setaria italica
  Peptide Sequence Number=SeqID_123279
ttgatcagatggaagagggatatctggaagatcatgaaaatcatcaagatcgttcttacatggtgaaatatcattacgctcagccgcttggccacgcttcaacttggatttcttagcctttcttgttgtagctgctacttcttcctttgaccgaaggtgctattacttgtaactgcagaccttcaagatatgatgcctccatctgtttcttcttttcttcagccacaaggatagttttgtctacctccatgtatactgtttctgataattttagaagggaactcccatggcagcatttttggtacagtagaatgtactgcatccaaatcaagtgagaaaggaccacacagacatttcattttggcctctctgtgaatttgcttgcttttcctttggtta

SEQ ID NO: 57306 - DNA, 233 bp, Setaria italica
  Peptide Sequence Number=SeqID_123280
aaataagcggaccatggagctaccatccaacttccatcagtatcctacccacttctccactcccttcttgagtatatctacacaggttctacacaggtaattaagctgctttcattttgtatcctacattcagctctttccataaatacaacctaccaaagtctggatactggaaagccttcatttccttgtctgtctagattgctgaatgtctactaagttccctgctggag

SEQ ID NO: 57307 - DNA, 191 bp, Setaria italica
  Peptide Sequence Number=SeqID_123281
ccttctgttttttcagtatttcagtctactattacttggtggcttgatactggtgctaatgttcatgtgtgtgccgatgcctccttgttttcatcttacaaggtcactcgggattcctccgtcctaatggggaatgggtcacatgcttctgttcatgatgttggtacggtagatttgaagtttacttcagg

SEQ ID NO: 57308 - DNA, 269 bp, Setaria italica
  Peptide Sequence Number=SeqID_123282
cagccagtgaccgaagacacggccatgcttcttccaaactccaaaggctcttcggcggtctcggacaagtcaagcctgaaaaaggcggtgaaaatccttttcagcacatatttcctgtcgaatcgaaaaagaaaaaagtcgcgataagatcgcagcacggcacacaaatggagagatgccatcccacagatctatccaatccaagaagtaaacaggaacccttcttggaagacctcaccgcaacactaataattaatagtggggggtaa

SEQ ID NO: 57309 - DNA, 228 bp, Setaria italica
  Peptide Sequence Number=SeqID_123283
ctaacccagccagtgaccgaagacacggccatgcttcttccaaactccaaaggctcttcggcggtctcggacaagtcaaggccataagatattggctggccaccatcagtccatcacaccagaagggcagagcttccaggtcaagagctgtgtgccattacctctcccggatgctgctggctgcatcggtgaaaagcagctcgaattgaccagcgacctcgtcgccca

SEQ ID NO: 57310 - DNA, 432 bp, Setaria italica
  misc_feature (41)..(41): n is a, c, g, or t
  Peptide Sequence Number=SeqID_123284
tattggtgtttgactatgtcccgtctggtagcctcgctgcngttttgcatggtaacaaatctgctggaagagctccattggactgggagacaagagtcaagatatcgcttgatgtagcccgtggtattgctcatcttcatgctgagggaggtggcaagttcatccatggcaacatcaaagcatcgaacgtccttctatcacagaaccaggacggttgtgtatctgagtttggcttggcacagctcatgaccactccacaggctgccccacgtcttgttggataccgggcaccggaagtccttgagaccaagaaatcaactcagaagtccgacgtctacagcttcggtgtcttgctccttgaaatgcttaacttggtaaaagtccccttcttctagtattcttcccggtccgtttgttaggttattttcctta

SEQ ID NO: 57311 - DNA, 321 bp, Setaria italica
  Peptide Sequence Number=SeqID_123285
tctgctggaagagctccattggactgggagacaagagtcaagatatcgcttgatgtagcccgtggtattgctcatcttcatgctgagggaggtggcaagttcatcccaatggcaacatcaaagcatcgaacgtccttctatcacagaaccaggacggttgtgtatctgagtttggcttggcacagctcatgaccactccacaggctgccccacgtcttgttggataccgggcaccggaagtccttgagaccaagaaatcaactcagaagttccgtacgttcttacttagttctttcggtttgtttcttttgttctttcctt

SEQ ID NO: 57312 - DNA, 382 bp, Setaria italica
  Peptide Sequence Number=SeqID_123286
ttttttttttttaggtataagatgtacttattggccacaagatggtaccatacaacagtagtcatgcaaagcaccatattgaaagaaggtaacatcatgatgacccctttggaactagaaggaaacaaacacaaaacagacggcatactggctgggatatgatattcggggtgacctgagacgcgcggatcactcggcgtgggcctcggcggcggcgagctcctgctgctggaggcgctcgagcgccttctggtgcgcccaggtctcgatggtgaggtcgggcttggcgttgagcccgacgccgaggatgacgacggtgaggaaggaggtgacgtagaagggaagctcccagtcctcccacatgcgcgactcccctgggcgg

SEQ ID NO: 57313 - DNA, 426 bp, Setaria italica
  Peptide Sequence Number=SeqID_123287
agacaaactagacttagtactagcccctataccatgtgcctgtgcaagagaaactgggggtgaatttgcatatacaccaggaggtttggttaagacaacattcctttatgagtgtttctctatgaatttattcccagaaaaacatcataagttcttctgtaaaccactggagaggcccaggaatgaagctctaccagagcctagcagacgccatcttgttaggaaggttatcagggaatgctggagtaaatgtggttgtaacatgcaatgcggtaaccgtgtggttcaacgtggtatagcttgcaacctgcaggtaacatctaatgcttctgtaaacttatgttgacgaatatttatgtggcttgccatgaatggctgtcatttatttcatgagaattatacagctaaattacaacaatttacctg

SEQ ID NO: 57314 - DNA, 395 bp, Setaria italica
  Peptide Sequence Number=SeqID_123288
ttttttttcgtcgaagatcaggtgctcccctgctctccatttcaaaaaaaaaggtagctcccttgctctgcatccaagagaagcgtttgttgcagaggctgctggatgtggaatgaagcgatggcacctgatggaggatcctctaccttccgggggttgtacggcaacatccacaccccggcagtggtcactggcgccgcgtttgcggttgtcgctctcctcatctcgctctggctcatcctgcagcacctcagatcgtacaacaatccagccgagcagaagtggatcatagctgtgctgtttatggtgcctgtatatgcctctgaatctttttcgattcttttcagataatttcactgtggaattcgaagttctctctggcttgtgatatattg

SEQ ID NO: 57315 - DNA, 481 bp, Setaria italica
  Peptide Sequence Number=SeqID_123289
tgttctaagtaggttattattccttttactattgtttggtacttttctaatttcaattgatatttcactcatatcagccaagtgacccttggcgataagggtctccggaagcttgccatgataccttccagaaacacacagtggatattttgcagaaatgtctggaatatattcagaatccacctgattggaaaagaaaagcttgaatgtaagaaacatattttttgcagatagggaaactaatgtctaagatatggggacagttcactcaacatcaatcaactgcttactgcaatgaaaatgacctaaaaatacatgcatgtgaaagggactccttccttctcaaaatagctgcacaatctacgggattcatagtttaaatagttgatttgccttttgctatcctctttcctgccaaatatatcaattggtatggacagctcattcctagttgatctgtgtgcatgatgtagttgaacag

SEQ ID NO: 57316 - DNA, 333 bp, Setaria italica
  Peptide Sequence Number=SeqID_123290
aaaccattcctgtttcaaaagacccccattctcgggcaaggaaatcttcacagcactgttatcctccgtatcaatgacatgagtattgtacgatcttttcccaacagtaacctcagcgcctagaattgaaccctattagtgaaattattcttagattgcagccagcagaaaatcacatttgagaactactgccaataaaaacaaagtagcaaagacatttttattaattaaatgtttacagtcatggcatgtacatttctcgatattgaagaatctgtactgtatgcacactaatggctacataaatgagattggctttcacttattgttggt

SEQ ID NO: 57317 - DNA, 384 bp, Setaria italica
  Peptide Sequence Number=SeqID_123291
atgctttcattttggatatcctcttttccttatacttcaaggtactgacactgtgacacgaattggtatcccattccagtttttcgattcttttcagataatttcactgtggaattcgaagttctctctggcttgtgatatattgcggaattgttacgaagcctttgctctgtatgcctttggacgatacttggtcgcttgccttggtggggaacggcaagtgttccggttacttgagaacagaaaaagggaagagctaagtgaacggttgctcgagagtcaagacaagacacaagctcataaccaaagtagagtgtggaatttctttcgtgaccctaatgctatgggagaaagcttgtacacaattattaactactcacactg

SEQ ID NO: 57318 - DNA, 247 bp, Setaria italica
  Peptide Sequence Number=SeqID_123292
gcattggtcgatgtaatcttacatcaggacagcagcaaaaaagtgaaggacattattgctctttcacgggcaccaacagaaccgtgaaagtacactaaagtaactcacctcaaaatcttgaatatgctttatggcatcaatggaaatatttgatactactgtgcttgaggctttctggaaccattgaaccattcgaccctcaattgatcctgtatcaaatgcagcggcatagtgacccttacgattg

SEQ ID NO: 57319 - DNA, 231 bp, Setaria italica
  Peptide Sequence Number=SeqID_123293
tagaagctgaaatctagctagcactaatagcaatgaacctagaaactaggtgaacctggacacaaacaggattatttgcaacaaatagctcagagtaattgtaaaacaatcaactgagtgaaaataacctaaatgaagagaatgggatatcttactttgtcaagaggtatatcctttacatgttggactttcaattcaattgatatttcactcatatcagccaagtgaccc

SEQ ID NO: 57320 - DNA, 205 bp, Setaria italica
  Peptide Sequence Number=SeqID_123294
ccaaagtttaagttcattccattctatagcactttcattgttttatcatttacttgctccaaacatgatgagaatgagtgaagctcatcattaaatgctattatgttgaaaaaagtctccttgaataagatcagagagtgtcaagaatgccatgtccactgctctctctgatcttattcaagaatgccattgttccactgctctc

SEQ ID NO: 57321 - DNA, 229 bp, Setaria italica
  Peptide Sequence Number=SeqID_123295
cctcctctccaaatgacagcatgaagttgtgttcctgtggctgagatcaagtgcggttctcatgcatatgcacctgaagagcaggagtgagaaagtatatgacgaattcaaggtacgtgatgggcgcttcttagatatcaatccctttatgatggtctggcctccagtcttcccagcattgagggaagaagacaatgtggagggatgatttgccttggtatgaccactt

SEQ ID NO: 57322 - DNA, 257 bp, Setaria italica
  Peptide Sequence Number=SeqID_123296
ggaaataataatgtgcagatgggatagaaaattaggctgacgatctcccagagtgcatgaagcatgcgcttgggaaaattttggatagctatgaaaccatggacaatgagctggcgcaggaggagaaatatcgcatgcccctatctgaaaaacttcgtaagttacatttcttttatttttatttaacctatatatcttaatctaaaaagtataaaaaatagaatatatagttgcataccacatatgtatacttatag

SEQ ID NO: 57323 - DNA, 228 bp, Setaria italica
  Peptide Sequence Number=SeqID_123297
gcaatgaattagaatgaactgtcttcgcattaccaactctcactatataaggcctatacatatttccatcagtaccatacaatccctcactgagtcttgacacaagctcatcaactgcagcatttgactgcgcacaaattaaagcccttcctttggcaaaccgctctgtcgttccgggacattctgtctgagaatccttttccaattgtttagcaagggctgcatgga

SEQ ID NO: 57324 - DNA, 392 bp, Setaria italica
  Peptide Sequence Number=SeqID_123298
ttcggcgataataatgaacaaataggtagtttatacatagggggatgaatactttaaacaatcaatttggcaaaaaacaggcggagttccttacggctgcaggggcgaaaacaggcggagttccttacggctgcaggggcggaaccagcagccattacatagaagcagctgtaccatcggcggatcagtcgattaggctgcgttctggccaaaaaagaagcttccggatctctggcaatttcttgcggaaaacaacttcaagtcttgcatcaagagtactctcgtacacaatctttccatctcgagaagccaggacaacacctccatagcaaaattgtccatgagcgtcatgatggcttgggggcaggtggcaggtacacatcatggtcaac

SEQ ID NO: 57325 - DNA, 437 bp, Setaria italica
  Peptide Sequence Number=SeqID_123299
taggacaaaaacaaggacggaagttaccttaacggactagcaggggcggaaccagcagccattacatagaagcagctgtaccatcggcggatcagtcgattaggctgcgttctggccaaaaagaagcttccggatctctggcaatttcttgcggaaaacgacttcaagtcttgcatcaagagtactctcgtacacaatctttccatctcgagaagccaggacaacacctccatagcaaaattgtccatgagcgtcatgatggcttggggcaggtggcaggtacacatcatggtcaacatgtatctctggctgatggacatctgcttttgatgcatactcatgctttgccgaatgcagtactgattccacgtgatggtggtcttctttacggcaacggagtaatacagctggctctttcaaccggagcaagccctgaa

SEQ ID NO: 57326 - DNA, 387 bp, Setaria italica
  Peptide Sequence Number=SeqID_123300
gaaagctacaaagattgagaacaaaaattggtcttaggatggttcagaacggtgatatagtttttaataaagtgttcgtccctgaggaggaccgattgccaggtgtcaattcatttcaggatataagcaaggtcctcgctatttcgcgtatcatggtggcatggcaaccaatcggcatatcaatgggggtcttcgatatgtgccatcggtacggaccactataccattttacacttcttttgccattagcaattactttacaatttcgtcaaaattgaaccagatacctgaaagaaaggaagcagtttggagttcccctgacagcttttcagctgaaccaagagaaacttgtccggatgctcggtaacatccaatccatgcttcttg

SEQ ID NO: 57327 - DNA, 229 bp, Setaria italica
  Peptide Sequence Number=SeqID_123301
ttcagacagagccagccactgcaagcgcaccgtgctctgatccatcaatggcccgggacgacacgctgcgtggccatggcgccggagccgccgccggagttgcgccggagcgtgcgcggctgcacgtggcgatgctgtcgctgcagttcgggtacgcggggttccacgtggtgtcgaggctggcgctcaacatgggcgtcagcaagctcgtcttccccgtctaccgcaa

SEQ ID NO: 57328 - DNA, 257 bp, Setaria italica
  Peptide Sequence Number=SeqID_123302
aaaaagccaaaacgtatagtaatttgggacagagggagtatatattattaggtattgaaactacataagagttattttggtgaagatgaagatatgcacaaagaatgtcaaattgaagcaaggtcattctggagtctgcaattctgacaacagtggttgtccttagcctaactgcttacactttctgggctgtgaggaggggcaaagacttcagcttcctgggtcctttcctgttcgcctccctcatagtgctgctt

SEQ ID NO: 57329 - DNA, 265 bp, Setaria italica
  Peptide Sequence Number=SeqID_123303
ttctatccctatcacatacccattcttttcccattccataaatccgaacaagggatatgttatgggaaaagaatgggtatgtgatagggatagaatgagattatttcccaccgctacatacccagcaggaggggtgggttttggctgggaaacaaggaggggtgaatctgacttattatttatcttctcggagcagaccgtcgggcacggatcaccttcctgccgatctccatcgacggctactactgcccgccatgtcctcatc

SEQ ID NO: 57330 - DNA, 334 bp, Setaria italica
  misc_feature (221)..(221): n is a, c, g, or t
  Peptide Sequence Number=SeqID_123304
gggaggttgcctcgccccgcttcgattcgtctcgtgccttcagattgctgagagagcttggcacaaatgtaacagaagatttggttgtgctgatgccaaatttgctgtcatttttgaagcatgatgatcctgcggttgttaagcaatctatagctagtgggacaaatttatttgctgctgtattggaagagatggcacttcaggttgttctttgtaaaacngatatttatcaatgaataaatccacagttgttgtaactacctaccgttgtgatgttgctatggttattttatgaggttgtttgcttaattgtttctgcaacgtctcacaaaat

SEQ ID NO: 57331 - DNA, 230 bp, Setaria italica
  misc_feature (222)..(222): n is a, c, g, or t
  Peptide Sequence Number=SeqID_123305
cctgctgaagttctgattgcaattcatgatattaatccggagaaagataaagttgccttaaaaaagcttctgatggagactcatttcagatcacagatgcttgcaaagcatgctttgagcagcgtacggtatttactcaacaagtcttggagaaggcactgaatcaaatggttgacaggataccaattcctttactttttatgagaacagttattcaagcgntgtatgtc

SEQ ID NO: 57332 - DNA, 205 bp, Setaria italica
  Peptide Sequence Number=SeqID_123306
ataatcggcatctcccatgctggagactcatccttggtagtgcgagaagcacgctctatatttctagacatcttctctgcctgcctaatattttgttccattgcctcgccagggctgagagcacgaagccgcctcaccaggcaatgattgagtccaaagacatattggtaaggcggcttcgtgctctcagccctggcgaggcaat

SEQ ID NO: 57333 - DNA, 450 bp, Setaria italica
  misc_feature (124)..(124): n is a, c, g, or t
  Peptide Sequence Number=SeqID_123307
ttggtggaatgttaggtgttgctgcacataatatgatattatataaacaagacttgtccattcggccgctgctaggtagtgctctaatagtcgcaacagtctcggtcagtggtcacctgggganatacttttgctcttcaggtcgcgctcgctttgaggtttaagtcaaaggaactgatgccaattatctctagtccattgattagatgctttttggtgggtatttgcagatggggcagccaataccttcactctgatttttctattttttaaaaaggttcctatttttccctcattttatgttgttaattgttgcacgttaccaatttgccattactcattcttggatctgttttcgaaaggtagttgtgtgtgactccactgaactgccaaatgttcataaaggaggaggtcgagaagccaataggaagcttgatcaagaaccacccc

SEQ ID NO: 57334 - DNA, 282 bp, Setaria italica
  misc_feature (79)..(79): n is a, c, g, or t
  Peptide Sequence Number=SeqID_123308
ttccagaggtcgcggtgcacgtaatgattgggccgcggtgatccatcgttctcccctccacttcatttttacccctttntggtggtgatcttgctgattcttttttctttttttttcttttcacccttgttcagatactaatgcaatgagaaatgtaccttattgcaatgcaaaagtgataagctgtaatcagttttccccttttccttttcttcttccaccctgctgtccctctcattccggtgaatatatgttcagagctcatttcttaccaaaaaaaaa

SEQ ID NO: 57335 - DNA, 379 bp, Setaria italica
  Peptide Sequence Number=SeqID_123309
ttccttgagtagcattctgactagctccacatcatcagaatccagcgctctgtgtactcttcgtacatgtatgttagggaagcccttgcttcaggcgaaactaattcaagacttagccttgcatcaacaatttgtttgacaacatctgaggcaaagccttctcaagagtaatcatatcaagatttgaccgaactactatctcaaggcatctctcgagaagtttcacacaagatttgctgcataagtttgcaacagataggatcaatgggaggttgtctacttcaaccttatcaaggacatacaaaggaagactagaccgactaggaaagaaggactaggtagaagacttacggtacgtaaccttacgtaaaggttagta

SEQ ID NO: 57336 - DNA, 286 bp, Setaria italica
  Peptide Sequence Number=SeqID_123310
ctatcattctcaaagagtgaaaaaggaaaaagtagtccttgtttcacagactaattcatggagtatctaacaagatatttgacagtaaacttctaaaattgaagaccaaagaaaacagatatatgttaaagaggcgaacagcaatagattgaaaaatagaaaaaaaaatagcagtttaaaggggggaaaaaagtagcaagccaaatgtcacctgttttggagagggcgctcatccgagtcaagtgttcttccttctattttgaaaggagtgtcatttagatcaaca

SEQ ID NO: 57337 - DNA, 151 bp, Setaria italica
  Peptide Sequence Number=SeqID_123311
ctggaggttcttgttgccgccgccgcggagcacctcgaggctggccatccgcccgatggccgccggtatcctgccggcggccatctacacggcgctgctctctgggccgataccgccggagctcggccagtgcacaagcctcgagaacatc

SEQ ID NO: 57338 - DNA, 549 bp, Setaria italica
  Peptide Sequence Number=SeqID_123312
gacgggactacccgctgagtttaagcatataaataagcggaggagaagaaacttacaaggattcccctagtaacggcgagcgaaccgggaacagcccagcttgagaatcgggtagcttcgctactcgaattgtagtctggagaggcgtcctcagagacggaccgggcccaagttccctggaaagggacgcctgggagggtgagagccccgtccggcccggaccctgtctcaccacgaggcgccgtcaacgagtcgggttgtttgggaatgcagcccaaatcgggcggtaaactccgtccaaggctaaatacaggcaagacgtgtggacctcgcggttgccgaacctatcgtttatacgaacgatcaatctgccgtggcgtaacgcttcgagccttcgatatgcgctgaaaatcctcggtggcttttatgtagggttcgtcagctcattccgtgaacgcgtgaaagggactatgcaataagtgttattcggcctcttgtcattagactgccgtagcatgtgttagggatggagttttaagtatttgacat

SEQ ID NO: 57339 - DNA, 257 bp, Setaria italica
  Peptide Sequence Number=SeqID_123313
cattttgcatcctgatctgcatgggaccagtggttgaaggcaaaacatgaactcttcctattcttgttaaggcccaatctcttgttcacgcggctacctgagacaaataataaaccatcgcgattcgttttgcaggttataagtttgacgaacacgatcgcgactcagcccatttgcggctgcaattctcacgctttcctggtccgaggtcagctggcgggcctcgcggtaggcgttaagacgtgtggacctcgcgg

SEQ ID NO: 57340 - DNA, 250 bp, Setaria italica
  Peptide Sequence Number=SeqID_123314
gcctgcgacgcagagatcaactccgtttactattttatctccgcaggggattttggtctctggaatgtctcgatcaaactatttggctgcgttctggaatgccaatttgcaaggtgagtctatcccccaataactcataatgttatcgttatctgttccttcaatccataccgcagccatgcgccatggtacacgtacctgcagcatcggccaggtagccgttcgcccaggcctccggcggcgcgtccgt

SEQ ID NO: 57341 - DNA, 248 bp, Setaria italica
  Peptide Sequence Number=SeqID_123315
gccatccctgtcatagcttccaccaccccttgggccactcctatcatagccgccgccgccgccactaaacttggatgagaatctgcccgaacgaccaccagcagcattagggcagtcacgaacccaatgtccaggacgaccacattcgaagcaattgccggggggtggaccatcacttctaccaccacgatactctgctcgtccaccaccactgtcataccttgtgtcatctgtgttcatcttaggct

SEQ ID NO: 57342 - DNA, 293 bp, Setaria italica
  Peptide Sequence Number=SeqID_123316
cgaatgccacctcgccagagagaggatcttcttgtcggcagcgatgaagtaggccatgccagcaactgcaggatgatcaagacatgtatcgtcagcactaggttacagaacacgttttcagaggtcagcgaggccgatgatctttcaaagtgacagaggaggtgatagagatcgatcagcttgtaagagatgcagtagtgcgtcgtaacctagtggaagaatagaatagaagtaagaacctaaggaacccgtaaggggttaagaaataagttaaggaaaccttaacgaaccaa

SEQ ID NO: 57343 - DNA, 463 bp, Setaria italica
  Peptide Sequence Number=SeqID_123317
acgtgcccgccccgtgccgagcgccagtgtaagcgtatttggagtttcgccaacttccatgcaatgctcttatgatagaagaggaaacagtgtgccaacaatactcttgactatgcaaaggaagttatattcacttgggggtcttcaggtaaggaatggggaaattttgtaatcggagtggcagcacccatggttctgaaattgttgttttcttattctactaggctgaagggatattcaggataaatgcagataatacccaggaactatatgtgagggatcaactaaacaggggagttgtccctgatggtgttgacttgcactgcctcgccggtctgataaaggcatggtttcgggaacttccaaatggagtattggactcgttgactccagaacaagtgatgcactgcaacactgaagaagagtgtggacaccttgcaagtacgctacctcctgtagaagc

SEQ ID NO: 57344 - DNA, 286 bp, Setaria italica
  Peptide Sequence Number=SeqID_123318
ctcgccgtcgatctgctcgagctccgggctcatgggcaagtcggtcgccatggcgggcggcccccgactccgcccgctgtccccgccgttccgctcacggatcgaagaaccctagcacgccggcctcctcaggccgccattcccggtggggtccgagcggaggcggagggcggggccgcggccgcggagagggagcggtcgggggcggggaactggggaaccggagaggaagacgatggggaaaagaagaggagggaggggcaggttggggacttggggtcttggg

SEQ ID NO: 57345 - DNA, 373 bp, Setaria italica
  Peptide Sequence Number=SeqID_123319
tgatgaaattaaaggaagcaactcctgagaaattgggcacttaattggcttgatttcacatggcaacctatcgatgaaatttactcgtactttggaacgaaggtacaactgtgttcagcacagcttacacctaataacatatttagtttatgtaccattctgtctgaaggaaggtagtaaattttctacccactactttgtaaaaactccgtttcaagttgtattgcagattgcaacatactttgcattcctaggaatgtatacacgatggcttttcttcccagctgtttttggactggcaactcaacttatagattttgggtcattgcagtggttggttcttcctgctttctttatctttgttatttcttgg

SEQ ID NO: 57346 - DNA, 274 bp, Setaria italica
  misc_feature (44)..(44): n is a, c, g, or t
  Peptide Sequence Number=SeqID_123320
gcatgtgcattccgttgattttctgctttgctgctctgaacaangttactgaaatcagagcagatgcattgaagttattagtcatgttgaaaagacctgtcccccgagctgcagctacaattggagcatggttgaatatattccagttcttggtggtaatggccatatgcaccaactgcttgcttcttgtttgtctctacgatgaggagggaaacttggtaggtattggtagtccttaggttacttttgttcttagttcttaatttccttctta

SEQ ID NO: 57347 - DNA, 255 bp, Setaria italica
  Peptide Sequence Number=SeqID_123321
cggcggcgcccagcaacctcggcgggagcagcggctacttcgtgatacgcgtcgccgcgggcgtgtacgaggagaatgtggtggtgcccaagaacaagaagtacgtcatgatgatcggcgacggcatcgggcagtcggtgatcaccggcaaccggagcgtcgtcgacggctggacgacattcaactccgcaacgttcggtgagtgtctcgctgatctgtcttccttcttgaatttaagtttggtcttgcagaaaa

SEQ ID NO: 57348 - DNA, 163 bp, Setaria italica
  misc_feature (98)..(98): n is a, c, g, or t
  Peptide Sequence Number=SeqID_123322
aacgcctgtcccacaccttacaaagagtatcatcacttccagagtacaatatattgccactttcatcagcaaaggtcacagcattgacatcatccgtnctcatacggatgatgtcaatgctgtgacctttgctgcaagatcataaacatatattgatctttca

SEQ ID NO: 57349 - DNA, 406 bp, Setaria italica
  Peptide Sequence Number=SeqID_123323
ctataaaaaggatcatacattttctaatataaagaagccagagagcatagttgtcacaactgaagaagtttgtgcatattccaatcaatcctgacaagattcactcacctcaccaagcaatttcatatccatttcctctgcagttctcttggctccaccttccccaaaaatgtacgatttctcaccacatttggggcacttaaaacaactcatattctctactaatcccaaaatctgccaaaacaatgaagtcagtttagctaggaagactagacatggcaaatgcaacatgaaactaaatattttccattagcaaaataaaataggcctctttttaggtgtaatgtgtgatccgttcaattgttgagcttgtataaaagtgactacaaagtagcatcttgttgag

SEQ ID NO: 57350 - DNA, 259 bp, Setaria italica
  Peptide Sequence Number=SeqID_123324
tattatttcctaattctaattccttgtactaagtatttctacttcaccttcaccaagcaatttcatatccatttcctctgcagttctcttggctccaccttccccaaaaatgtacgatttctcaccacatttggggcacttaaaacaactcatattctctactaatcccaaaatctgccaaaacaatgaagtcagtttagctaggaagactagacatggcaaatgcaacatgaaactaaatattttccattagcaaaat

SEQ ID NO: 57351 - DNA, 344 bp, Setaria italica
  Peptide Sequence Number=SeqID_123325
caattgaactattacatcttctatgaggtctaacattatatcgtctgggttatcactaggagcagcaagttctgggtcaaatgtatatacaccaatgaactcaataacatcatttagcttcacctggctatcaggcatgtcatagaccttcactagacatgaaaaggagcttccaggtatatgatcacccctattcatctctggcacaccttctgccacatccttgtgattctcacctttgggagcgtcatctctttcactgtgtgcctgcgcctggacaaaattcttggacaatggagtcttcaccaggacctgatctgcgcaggatgttctaagtcttagta

SEQ ID NO: 57352 - DNA, 356 bp, Setaria italica
  Peptide Sequence Number=SeqID_123326
ttctattcaaaagaagttacatccagttgtggggtaagaatttgcaagcccaccatttgaagcagcctgaaccagacttgctgagtaaaaacacatgagacaagcaagtgatttattgttccatcctcttggttgcaaaggggacaccgatcaggatgtgggagaccccttctggatagacgatctgctgtccagcatctgttgtgtgcagccaaccacaagaagaatttgcacttgcccggggcccaacttttccaaatcctatcacagggtccaaactaagtagacccaataaacagattgtcgtaggcagacttcactaagtactgttgttttgaaacttcttgattttgaag

SEQ ID NO: 57353 - DNA, 382 bp, Setaria italica
  Peptide Sequence Number=SeqID_123327
ttgtttttgttattttcccggttaatttgttaggttttgtttggttaggttaaagttgttgttcttctttaattgtaaggtaagttcaaggttaaccaaagttttagtgatgttcctaagaagtttttaaagaagacatcatgtgggacaacgaatactgaggaagggacttcagggcataagagtctctcttcttcgacgcggaggggaaccagaaatgttgaacctgcactggcaaatgagagaggaagcttttctcttttatacaagtctgagaatatgaaagtaagcagggtcgaactaacttcagaaacagccttaaatcaattatctggtgcaagtaaagtgaataaaaaaagatgactacgcatcctacagattt

SEQ ID NO: 57354 - DNA, 211 bp, Setaria italica
  Peptide Sequence Number=SeqID_123328
gccatgcttctatcataattcattctgatgtcgtaacagtgaatctaatatagagaactgtgacacaatggttctatttacacgtttgttactttcctgaaataacttacattatatgcaggggaaccagaaatgttgaacctgcactggcaaatgagagaggaagcttttctcttttatacaagtctgagaatatgaaagttaagcaggg

SEQ ID NO: 57355 - DNA, 308 bp, Setaria italica
  Peptide Sequence Number=SeqID_123329
gaaagatgctaaacttgccttggaggaaattaaccggctcttgggtttcaagttagcattggagtgcctggagctccggatttgtctatacttggctctagaagactacaaatctgccatctgtgatatccatgcgattcttactctttcacctgagtatcggatgttagaaggacgtgtagctgcttccaaaattggcactcttctcggcgcacatgtcgagcagtggaatacagctgagtagttggactccaaactagtaatagaagacgttaggtacaatacaagtaggaatagaataattagga

SEQ ID NO: 57356 - DNA, 231 bp, Setaria italica
  Peptide Sequence Number=SeqID_123330
gtggggagagcacaaagaagtggatgacgatgccagtgtgggcaccgttgcgaaggacaagagtgcacttgaagtaggctcgctgtagaggactctggtggtgacgctagggccgggatgtggcgggtgggagatctgctgctggactcgatttgtcaggcggggggtgctgcggtggagacggcggccgccgcgagcccggcgccggtgggggcgaatggtccggcgccg

SEQ ID NO: 57357 - DNA, 308 bp, Setaria italica
  Peptide Sequence Number=SeqID_123331
tagtcctattggtcgtctaccttcggttggttgtctagtctttttggtcctaggttctacggttgggttgtctttctaaacctagtcttggtcgagccatgtccgtgcaggtaacctgtatgatgaaatgctactgaagagtgcaaatgcagcagctctgtggagagcacagagcactagagcagacagtcttcaatgcagtgctgctgtacagggtatggttttcgcttgttgcagtgctgcggctggagttccttcagccttcatcgtcgacctcatcgtgtattttttccattcagattgatcca

SEQ ID NO: 57358 - DNA, 252 bp, Setaria italica
  Peptide Sequence Number=SeqID_123332
atcacaagccagcacaagcaagcacccaaagtttctggttgaacaaatcaattctacaatagatccttagtaacttagttatgcaaggcaacatattttcgtgaaatgaagcatcagttgccattgccaccatcctagtcagtcgatacgactattatcggggaaagtttctatccgagacttcatttttgcgaaggaggtccgtttaggtacctacagtgcaagggcatccactctgccacctgcagctaa

SEQ ID NO: 57359 - DNA, 273 bp, Setaria italica
  Peptide Sequence Number=SeqID_123333
tttcttatatttgcatttgatcattttagtacatttattttactgtggcaaatgaaaattcggccattggcctgctttcagtgatagtgtttaatctgattcctaactcccatccataggttcctgtggcggaagaaagcaacttttgcaatatctcggcattacaaacgctttgatgtgtttgaagaagcagaagctaataaagctgcgggaaagtatgacaacgcgtcagttgattaaccaaaataagaagttttaacaaagaaaaacgaa

SEQ ID NO: 57360 - DNA, 329 bp, Setaria italica
  Peptide Sequence Number=SeqID_123334
taggtacttaggtactaacttacctaaccgttacggtctaaagttgggtcttcgcgttggagaacatgaccatcctcggcgaggacgtgcacgtctgcgacgagatctacagcaacggcggcgtcgtgctcccgcacaaggagatcaagtccagcatcctcaagcccgagatcgtcatgtgaccgcggtgtcacgcgtcattgtcacggtgcgaagcgcgccagagttacaagtgcgtccgatgtgcttcatgtgtctgcattgttgtttgatttgttgctcggttgtctgcaagtgtaacaagttttcccgatcccgatcagtgtttg

SEQ ID NO: 57361 - DNA, 235 bp, Setaria italica
  Peptide Sequence Number=SeqID_123335
cgagcacatttcgtgcatctgtcggacgcccggatctcactggtggcgttgcttttggtgaaatcgcaggtgatgctcaactttctcaaggacttcgagagcaagcttggcatcaagatcacctgctctcaggagacggaacccctggggaccgccggcccgctggccctggcccgcgacaagctcgtcgacggctccggcgaccctttcttcgtgctcaacagcgacgtgatca

SEQ ID NO: 57362 - DNA, 426 bp, Setaria italica
  Peptide Sequence Number=SeqID_123336
attattttgtcagatattgctgaactcaaccttcccaagaccaccaagatctcttttccgaatggcaaggatgatctgatgaactttgaagccactattaagcctgatgaaggatactatgtgtaagtgtttctgaggattcatatttgaattataatctgctaatatatgtctaggtttttttgggtgtgtgtgggggttgtattctgaatactttctccttaatgcaataatgcacagatctccctgcgaattcgagaaaaaaaggaattaagaaatactctacccatcttatcaaaaattttgcccacagattttaaacaaacattcaattatgatagatgtaaatctgccttgtatatattatttataagtaggaaattgggtttgcagatagagttgctagcatggaaagatactctgtca

SEQ ID NO: 57363 - DNA, 247 bp, Setaria italica
  Peptide Sequence Number=SeqID_123337
atctcttttccgaatggcaaggatgatctgatgaactttgaagccactattaagcctgatgaaggatactatgtgggtggtaaatttgtttttaccttccaagttcctccagcttatcctcatgaacctcctaaagtcaagtgcaagactaaggtttaccatcccaatattgacttggagggaaatgtctgcctgaacattctgcgtgaagattggaagcctgtcttgaacatcaagccatagacaa

SEQ ID NO: 57364 - DNA, 345 bp, Setaria italica
  Peptide Sequence Number=SeqID_123338
gcagcatttgcggagaaaagaaaacctgtatacacaggaaagtagggctttagatgatcttgagtgtgcaggacttgctcgtagcattcttcttcaacagccagtgccgaggtcatgtctacctctgccccttgattgatggccttcttggccatttttatcgctaacggacctttctgatttatctcccgtgcaagttcaagagccttttgataagcttcgccagcaggtacacagtagtttactactcccatagttacagcttccgccgcatcgaatctacgaccagtgaatattagctcctttgctctggaccttccaacaatcctaggaaggcgttgtgtt

SEQ ID NO: 57365 - DNA, 240 bp, Setaria italica
  Peptide Sequence Number=SeqID_123339
gatactgtaatctcagatgcttcttgctgagaattctcagatggcaaaattgatctttttgacaaatgaagcacatgattatttcagcggcttcttactttctgatttatctcccgtgcaagttcaagagccttttgataagcttcgccagcaggtacacagtagtttactactcccatagttacagcttccgccgcatcgaatctacgaccagtgaatattagctcctttgctctggta

SEQ ID NO: 57366 - DNA, 170 bp, Setaria italica
  Peptide Sequence Number=SeqID_123340
aaaatggccaagaaggccatttttatcgctaacggacctttctgatttatctcccgtgcaagttcaagagcccttttgataagcttcgccagcaggtacacagtagtttactactcccatttttatcgctaacggacctttctgatttatctcccgtgcaagttcaagag

SEQ ID NO: 57367 - DNA, 256 bp, Setaria italica
  Peptide Sequence Number=SeqID_123341
tctacggtgatgccagaaacaccgtgtgaccttgatttgtaaagttaaggatatcagggcaactagagaaagttaatgtgtaaagtattagcaaacaagttaggttagatatccttaactgaaaaaatcaagtgcttacttggttaatggaatcctgatgtttgttgcatggctggtggcaaggatatttttgttcatatatgtattttaccacatctatttgcactacagtcagataatgcagatgcacgccttt

SEQ ID NO: 57368 - DNA, 270 bp, Setaria italica
  Peptide Sequence Number=SeqID_123342
ctgaccggatcaagggacctattacatttcgtaattcagtcatatccacttgtgcattgggggtactgaataccatttattatgataaagtttctgtcggttacttcatcactgatcttgcaatgatattctggctgtatccttcccttggtggaatggaatatgtcctccatcatactctttccctagttgccatagcttacacaatgttatctggggaagggcagttttacacatacatggttcttatctcagagacaaccacccctg

SEQ ID NO: 57369 - DNA, 182 bp, Setaria italica
  Peptide Sequence Number=SeqID_123343
aatatctaaaagctgcactttgtcatgtcttccagcttcatacaggcacaatagaacagaaccccaatccttttgtaatttcagtaggttactaggaagtatttggtgcctgttgagtgtttaccttttcatgaaattatctgcttcaagaatgttagtgttctgcaatctgcgctgattgg

SEQ ID NO: 57370 - DNA, 374 bp, Setaria italica
  Peptide Sequence Number=SeqID_123344
acccggaagacgcaatgtgagcactccgatccatctcacgcaccacatctttctttcactgctaatgcttcgatcgtcgagaattttgtaaccaagcaactaagaaagcgcctcatcatgaccaactaataactagttctcggtcgtttccggacgcgacgacggcagatccatggagtcctgaacgcggtgagctggggcgtgctgctgcccatgggagccatcgtcgcgaggtacctcaagacgttcaggtcggcggacccggcgtggttctacctccacgtcgcctgccagctggccggctacggcgtcggcgtctccggctgggccaccggcatgaacctcggcagggagtccgagggcgtcacctacgc

SEQ ID NO: 57371 - DNA, 265 bp, Setaria italica
  Peptide Sequence Number=SeqID_123345
cagttatatggcaaagtgtttgacaaatttggtgaattccatctgcgtgagaatggtatggaagatcaacacagattttcttcattttagggcttaacattgaattacttatagtgagcaaaaacgtgatgttttaatgcagtgtattctggtgtatcttttgaggataaaaattgttgcctttgttcattgcattaaagcagacagagtttactatccttcacttaatataatatatttctaaattcgaatttactttgttaaa

SEQ ID NO: 57372 - DNA, 184 bp, Setaria italica
  Peptide Sequence Number=SeqID_123346
ttacatgatcagctccatgttcagagctggctcttgtgatcactcttgaaaaacagggagcgttgtaagctggatgaaatcagtgacctgaactcccacaggccatgggaagcaggccttatccagcaactgcattccaagcctggggccttcgtcgtacccttcgcagatcatctcccccttc

SEQ ID NO: 57373 - DNA, 211 bp, Setaria italica
  Peptide Sequence Number=SeqID_123347
ggtcacagcaacacctaatctccgtactctgtttggctttggctttggacttccatcattctccatacccaagctgagattcctcagagttctccatgtggaaaagtctgaggaatctctgtttggctttggctttggacttccatcattctccatacccaagctgagattcctcagagttctccatgtggaaaaaatcaatcaggatcga

SEQ ID NO: 57374 - DNA, 130 bp, Setaria italica
  Peptide Sequence Number=SeqID_123348
caagttgtggactacatggagaagagaaacatgatcaagaaggactgtgtcggtgccatttcaagatcttatcaaattatggatagcggaaggcttcattccacctataacaaggcacacaggggatagg

SEQ ID NO: 57375 - DNA, 375 bp, Setaria italica
  Peptide Sequence Number=SeqID_123349
gcacaatgatgcttacagaaaaacatatcataaattggtataccaatgactgaacgttgtgttctatatgtataatggagtagtgactagacgtttatttgtaagactttaattgaacacttactttggtgaaaatacgctccaaacaaacaagtgattcctcatgagtagcaaaacaatggtgtatgaagtcaaagcaacagagtttatgagcaaaggaagcaaacatggcaatgtgaccattttgtccagaatatagctccatgtcaactgccgtgcagtagagatatcatcagtattgttcactgatatataaacaaccatcccaaggtataacatcaaaggtgatccatatgtaatagtgaacatcagtat

SEQ ID NO: 57376 - DNA, 377 bp, Setaria italica
  misc_feature (149)..(149): n is a, c, g, or t
  Peptide Sequence Number=SeqID_123350
cccagatcacatatccaggtctccatgtcatatgcacatacacagtgtaggccatacaaagcatgccaggtactattattacatgagacgaaataacttgtcattctaagcattgaagtatgcagcaagccttgaaacacctcgtcctntcccccctgccagatggtggtatttctcctccaacttgacttgtaccagcacttgcaatgatcagaaaattagcttctactccataagtagggatgattctcatccaagtatgcaatggcttcagggcacttctcctgtatcctagccatgtgccaattgaacttctcaatggtgtaactcttggctgctggccactattatttattaatttgtaactaattaggtta

SEQ ID NO: 57377 - DNA, 359 bp, Setaria italica
  Peptide Sequence Number=SeqID_123351
ggttattagcacagatgcaggcaaaggaattgagggggctgtggatgatgtctatccaggagtggagcatagagaatgtatgaggcatttgtggaagaatttcaagaagttatactatggaccattgttcaattataatatgtggccagcagccaagagttacaccattgagaagttcaattggcacatggctaggatacaggagaagtgccctgaagccattgcatacttggatgagaatcatccctacttatggagtagaagctaattttctgatcattgcaagtgctggtacaagtcaagttggaggagaaataccaccatctggcagggggagaggacgaggtgtttcaaggctt

SEQ ID NO: 57378 - DNA, 235 bp, Setaria italica
  Peptide Sequence Number=SeqID_123352
ccgtgcatccttccaaaaaaccatcaatgcatgaggcatttgtggaagaatttcaagaagttatactatggaccattgttcaattataatatgtggccagcagccaagagttacaccattgagaagttcaattggcacatggctaggatacaggagaagtgccctgaagccattgcataagtagggatgattctcatccaagtatgcaatggcttcagggcacttctcctgtatc

SEQ ID NO: 57379 - DNA, 166 bp, Setaria italica
  Peptide Sequence Number=SeqID_123353
gcctcaagcggcctcggcttgcgacgggaagcaaagtgtggccatggaatcgattgctcaacaggatggtgcaaatcagcattaacccagcatgcaatattgaatggttatgctttccgtactgtgaagaaagacaagaaacgctttcaggtcaagtgtttgagag

SEQ ID NO: 57380 - DNA, 241 bp, Setaria italica
  misc_feature (65)..(65): n is a, c, g, or t
  Peptide Sequence Number=SeqID_123354
tgcattagattttgattacagctctctgaaggaaaatgatgtgattttgttttcggatctctcanccttgaacgacatggacgaggataacgagaaactggatgagcatgcaaatagaaatagaaaacaagaactacttacgactaatagtacaaccgactacaagtagttagaagggaatagaataggtagactagaatagacggaatagaaaacaaatacaacaatttactagtagaca

SEQ ID NO: 57381 - DNA, 290 bp, Setaria italica
  Peptide Sequence Number=SeqID_123355
ccgcgctggaacgcgagctccacgccccagaagcagccggcgccgaactgcgcgaactcgttgccgggcgcgggctggtcctcgtcggggccctgcgccagcgccgccgacgcctccgacgcgcgcgggccgccgagcaaggaatcggaagcagggacgggacgaggaaaacccaaccaccaaccgaccaagggcgccgagccgtcgaagcttctgggccacgccgccacaaaaggggaaggaagacaaagccgtcgcccccgatgcctccgctccccacctcacccgcc

SEQ ID NO: 57382 - DNA, 168 bp, Setaria italica
  Peptide Sequence Number=SeqID_123356
tcatactgccagttccactttatgttcatgttttctgctctgtaggagctttggcatttgacatggagtatgcacgctggttggaggagcacaacaaacatgtaaatgagttgagggctgcagtcaatgcacatgccggtgataatgatcttcggggtattgttgata

SEQ ID NO: 57383 - DNA, 114 bp, Setaria italica
  Peptide Sequence Number=SeqID_123357
ttggtgagatattggacatactagagacagtacctaaaattatcctaaattcaattaattgataataggataattttaggtactgtctctagtatgtccattatcaattaattg

SEQ ID NO: 57384 - DNA, 383 bp, Setaria italica
  Peptide Sequence Number=SeqID_123358
actcaggtgtagctgctgaaataattcttttctacatttttagcttggtgtatattcatcatgcttaatcaagtagtcagttggtttatgcttcccattaacacacttaatagatttattgttggaaagaatgcttcattgtaaatatgctcatcttttagtaacattgatcagcttatactaaagtatattctgcccatcagtttgaacaaggactggttgctggcccacagcttctgattctagtgacaaatcaagggacaaactagatcagaagacacttcgccgtcttgcccaaaatcgtgaagctgccaggaaaagccgtttaagaaagaaggtgacttggaacgtttttgaactttacaactaattaagtaaacaaa

SEQ ID NO: 57385 - DNA, 215 bp, Setaria italica
  Peptide Sequence Number=SeqID_123359
cagatccaattagcatttctgtgtctatgactctaccttcccccccccttcccaattctatttatcgtttgttgcaccattttggttagaatcaatttgcaatgtttcatcgcgtattttgaccaggcctacatccaaaaccttgagagtagcagactgaaacttactcagttagagcaagagcttcagcgggctcgccaacagggttattttta

SEQ ID NO: 57386 - DNA, 428 bp, Setaria italica
  Peptide Sequence Number=SeqID_123360
cccatttatcatcaaaatgtattctgtttttaccagtaataacatgtgtttatgataactgggtaacctagatctagctaaaacacccgagctaagtttctgttagcaacataggctctgtttaggtcaagcttcttgggacttcaaaagcaaacctaagatggcttctagtaagattgtttctgaagataaactctcctccaaaagggctcgggcttatctaagccctgttttacagggaatccaaatgcccttccactggcttaagcttatatacaacctctcgtatgtttataagtttaggcttacaggagaagtccaactgcccaacaagatccagcatgttggacaaggttaagcttcaagcccctagactaaaacttaagcatggacagtatcctgaaagagtcgaggatacattcttcctt

SEQ ID NO: 57387 - DNA, 167 bp, Setaria italica
  Peptide Sequence Number=SeqID_123361
aagagagaccgaccatgaagcacatctcagcgagggatgcaacacttttaatctcttgttcagttgcttcttcgcggatatgagcatctactatttctttgtttgttgacgatgattctgttaatttgggactaacaacagcgtactactacaatcctgttccacgg

SEQ ID NO: 57388 - DNA, 178 bp, Setaria italica
  Peptide Sequence Number=SeqID_123362
ttttagcatataagatgaattacatgcaacagctggtaaaatatttgcatgataaaaggaaaacagagatttgctgtatttaacatacccaagagactgattttgacaagaaagacattgtcatgatgtctatcttcattcgctgctccaatccaggatactggacctagatgtcacc

SEQ ID NO: 57389 - DNA, 364 bp, Setaria italica
  misc_feature (327)..(327): n is a, c, g, or t
  Peptide Sequence Number=SeqID_123363
ttttagttttaaaaatttttagttttacttttaagtttaaaggtttcctttatttttgttagttaaagttacttactttggttagtaaaatttctaaattaagttgtagttcttcattagttccactgactctccttgtaactccatgctccaacttcagacgaatagatctccacccctgccacagtgccgtaagtattctcaacaaactcaaacacatggaagtgcgcggaaacagcgggatcgaaacccaaacgggcaaacaaacggctcatacaatcttacaacatcgtcaccatggctgccggagtcgggcaagacaacccngctcttggcagccggattgcacacgacgtatcgggac

SEQ ID NO: 57390 - DNA, 170 bp, Setaria italica
  Peptide Sequence Number=SeqID_123364
agcacccaccatgactcccccaccacatctacagccactacctcgaactgaatggtggagaaatgcagaaggccattgagaaagacacttggagaaaattcaaataagtgagtctcatagttccactgactctccttgtaactccatgctccaacttcagacgaatagat

SEQ ID NO: 57391 - DNA, 252 bp, Setaria italica
  Peptide Sequence Number=SeqID_123365
ctccgcgcatactactacgcccccgacgagaagcttctcatctacgactacctccccaacggctccctccactccgctctccacggtggcccgacggcgtcgccgacgccattgccgtggtccgtgaggctgtccatcgtgcagggcgcggcgcggggcctggcgtacctgcacgagtgcagcccgcggcggtacgtgcacggctgcatcaagtcctccaagatccttctcgacgacgagctccgcgcgcac

SEQ ID NO: 57392 - DNA, 199 bp, Setaria italica
  Peptide Sequence Number=SeqID_123366
cttgccttctcttgcccgtgcattgcatccaaagctaacgccggcgagtcttccatctctcaggtggcccgacggcgtcgccgacgccattgccgtggtccgtgaggctgtccatcgtgcagggcgcggcgcggggcctggcgtacctgcacgagtgcagcccgcggcggtacgtgcacggctgcatcaagtcctccaa

SEQ ID NO: 57393 - DNA, 257 bp, Setaria italica
  Peptide Sequence Number=SeqID_123367
gtcactgtagtaacggatatcagttgctgtggtgatgtagtcaaagatgcgccttttgcacgtccgattgagccagttgactcagattgttgcttagcctcagctttcagttcagccatctttgactgatatagctgcctgagtgatgcctgctcaaaattctgtgtactcgtctttgtgagcaacatatatggattcagtgagacgagtacacagaatttgagcaggcatcactcagccatctttgactgatatag

SEQ ID NO: 57394 - DNA, 236 bp, Setaria italica
  Peptide Sequence Number=SeqID_123368
tgatgcagcatcaaaccgagccaataatctattctccagttcgttacaatattcttggagattcgcgacagcaacctccaaaccacggcttgcattagccgagcctacagctggtgttacaccatgtctaccaacatcctcctcggcaaatgatcgcaatttctgtgcgatgaggggctgcaagctgattccaattatattgcggatggtttatctacattgtacaaggaaattgc

SEQ ID NO: 57395 - DNA, 373 bp, Setaria italica
  Peptide Sequence Number=SeqID_123369
gctgaatgatgtgtaacagaggtaccattgggcatgactgctttctgagacaggtgttaaagtccaagtatgaacaggaagaacttgggagaatatgtgggctcccaacttgccttcggttgtatggcctatgcatctaggaaacatgccactcatggtttttcaaccttttaccgtcgaggacagtccaacagaagcagaaggttgaacaaagttttggacgtggtagtatgcatggtcaacaaccatactggtgagccatccgagggcacccacagaatgcacttcaggtttataactggttttgagattcgttgatgtatttcattcattaacctggagtatagcgtgggctgttatggtcccacctatt

SEQ ID NO: 57396 - DNA, 342 bp, Setaria italica
  Peptide Sequence Number=SeqID_123370
tgtgggctcccaacttgccttcggttgtatggcctatgcatctaggaaacatgccactcatggtttttcaaccttttaccgtcgaggacagtccaacagaagcagaaggttgaacaaagttttggacgtggtagtatgcatggtcaacaaccatactggtgagccatccgagggcacccacagaatgcacttcaggtttataactggccaacattggtgaactaaaacagcaagatatccatgcagggatgacaattaaataaaattactaggtgcaggtgatcaaaaagtaagagaattgtttcttccacgcaatgtttagactattattgaaaaagtact

SEQ ID NO: 57397 - DNA, 253 bp, Setaria italica
  Peptide Sequence Number=SeqID_123371
gagggcacccacagaatgcacttcaggtttataactgggatgacaattaaataaaattactaggtgcaggtgatcaaaaagttttgagattcgttgatgtatttcattcattaacctggagtatagcgtgggctgttatggtcccacctattgcattggagaggccagctcttagtgctgaactgcagaaacatcagttcatgtttgctactgaaaccaagcgtccaatttctcgggtatctgcttctgtttg

SEQ ID NO: 57398 - DNA, 358 bp, Setaria italica
  Peptide Sequence Number=SeqID_123372
ttagttctgcagaaattaatttgaactaacagatgctttgcaagagagaacataaagagcttcctacaaggacttttattgaatctgcatatgctgagatggggtctattagtgatgtagagcatgaattgcagcttgtcgagaaaaatacatgatgctcagcagaatgatgacggcgatttcgtgcagtccttactgctatcacccttcgcagcagaccagtagttccatgtctccactccagtcgtaggccatgcagccacctcgccgttcctttagctccccatatggatcccttgacgtccttgttgactctgccatggatttggtgctttggtgtgctctgttccagagtttt

SEQ ID NO: 57399 - DNA, 191 bp, Setaria italica
  Peptide Sequence Number=SeqID_123373
aactgcagttagatgataccaagaagctttctgctgacaataatcatgatactgctgtggatacctccgaactagtggctgaaatgatggtttggtcgtgatttatccttttacttcattgcaactaatcctcattatctaagcaagaacctgaccattgactattgctacctacttctgcagcaagtgaa

SEQ ID NO: 57400 - DNA, 219 bp, Setaria italica
  Peptide Sequence Number=SeqID_123374
aacaagctcctcatgtcgatgccagcagcccccgtggagatgagagaagatcactgcgatcttgctgataacaacggtgaggagtcagcgaggacaaagaggaggcgtttggatcatccctccgcggcggcgcttctgatctttgtgcagccagtggcggaggttacagcatgtgaatcatcacaggggctacaaggaggagttgatcatgatgcaaag

SEQ ID NO: 57401 - DNA, 242 bp, Setaria italica
  Peptide Sequence Number=SeqID_123375
ggagatcaatttgtttggtcttttgaatgtatcatgtaacttttggagtggtcccaagccttaactctagatctacttcatgttgatccacaagcagaagggaactagagctagggcttgggattgttgcttgtggtacctttggatcatccctccgcggcggcgcttctgatctttgtgcagccagtggcggaggttacagcatgtgaatcatcacaggggctacaaggaggagttgatca

SEQ ID NO: 57402 - DNA, 242 bp, Setaria italica
  Peptide Sequence Number=SeqID_123376
caaaaattaagaaaatcagctcagcggaacgcttcatttttcacccagaggaagtttataccgcacttcttctctgcatgaggtactaaggtctgatgaacagtgcggtataaacttcctctgggtgaaaaattcttgtcatcttgaatcctaattcaggatttcgaagcactcgggatgttttctacaagaaagtgcaatcgaaactaaacctttgcatgaccagcatatgctgtttcgac

SEQ ID NO: 57403 - DNA, 256 bp, Setaria italica
  misc_feature (218)..(256): n is a, c, g, or t
  Peptide Sequence Number=SeqID_123377
ggacgtgcgcctggacatgaagcggttccgccctgtcctcaagaaggcactctcgcgccttagagccaagcccaagagtaactaatcatctaatgtgttttcatcatcacagtataatctctcatcgtcagagtgtaatttagtagtatgtccttcttgacacattttcaagaacagacaaaaaaaaacctcttaaacctaaaaaaaaaaaaaaaaannnnnnnnnnnnnnnnnnnnnnnnnnnnnnnnnnnnnnn

SEQ ID NO: 57404 - DNA, 251 bp, Setaria italica
  Peptide Sequence Number=SeqID_123378
ggacattgagaccctcgccgacgacgccgacgtggcgctcgcccgcgacagcggcggcgaggccgagcgttacgaggccgccgaggccgaggccgacctcctccgtgaccgcctccgcctcgccgtcatcagcatcgccaccgccgaagggaagaaggcgggaatgacggtcgccgagccggttgttgcctgcatcgccgatttggcatacaagagcgcagagcagctggctaaggatgcagagttgtttg

SEQ ID NO: 57405 - DNA, 499 bp, Setaria italica
  misc_feature (172)..(172): n is a, c, g, or t
  Peptide Sequence Number=SeqID_123379
ccgatcgagacagggtgcggctctcgtccatgtctattttgtggaacagctttctgatgacatcttcattgggtgtgccgtcctcgttgagcagccgaccgagtgactgcatttgggcgtgcctcaggataccggagatcacatgtttgtgcttggcgtacgcaagcttccncctttgaatccatggctggaaaacctgatacacgcagtaggaaagcacaagcaagaacgacacgataagggccaacaagacagccaggcgctgcccatggtgggtcttcaacatcttggggaactgagcaatgacaaaggggataacagatagccccatgatccgtgctgcgtagctggtctgcacatcagttgtaatacaagtgccagtcaagctgaagcccttggtgttcgttaaatcaactgcctcaccgtttggcccggcgttctactactttgtccaactaacgtactactaggtttcccctaaagtctagggttgtaggta

SEQ ID NO: 57406 - DNA, 261 bp, Setaria italica
  Peptide Sequence Number=SeqID_123380
ttccggaagtagatgagcgccaggaacacgcccaggcacagcgtgttgttcatcgtcacgccgccgtacacctcggagaaggtgagggagcaggtccgctgcttcttcctgctggcgaagatgatggcggagacggcctcgctggagttggtggccaggcgggagggcgatgaacgagatgaagaaggacgggatgtgggtggcgttggagaagttgtaggaacggtagtaccaacgaagacgggtacggaacaaaacgac

SEQ ID NO: 57407 - DNA, 248 bp, Setaria italica
  Peptide Sequence Number=SeqID_123381
tacgtcgttgcgggacgtgtcaaagtcgtccatgaccttgttgaccgcatccatcttgtcaaagtcaagctcctcgaagttaatcccgacaatgagtgcgtgcagctccgatcgagacagggtgcggctctcgtccatgtctattttgtggaacagctttctgatgacatcttcattgggtgtgacgccgggccaaacggtgaggcagttgatttaacgaacaccaagggcttcagcttgactggcta

SEQ ID NO: 57408 - DNA, 261 bp, Setaria italica
  Peptide Sequence Number=SeqID_123382
cgacgtcgttgcgggacgtgtcaaagtcgtccatgaccttgttgaccgcatccatcttgtcaaaagtcaagctcctcgaagttaatcccgacaatgagtgcgtgcagctccgatcgagacagggtgcggctctcgtccatgtctattttgtggaacagctttctgatgacatcttcattggtgtgccgtcctcgttgagcaagaccgaaccgaagtagaactaagaacaaatttaagggaacgtaagaacctaacaaagaa

SEQ ID NO: 57409 - DNA, 251 bp, Setaria italica
  Peptide Sequence Number=SeqID_123383
cgccgacgagccccggccccatgatctcgagcagcagctcgctccccgaggacaggtacgtggccgccttgaacatgaggaagccgtagacgaggatgaggaagaggttcccgagcacggtggtggtgcaggggaggaatccgtacgactgctcgcacttcccctccaccgccgccgccacggccggcgacgcgaggcggatcaccgaggcgagaaggagcccagcccaccagtcacacgcccccggcccc

SEQ ID NO: 57410 - DNA, 225 bp, Setaria italica
  misc_feature (13)..(13): n is a, c, g, or t
  Peptide Sequence Number=SeqID_123384
cgacggagcaggnaaccgaatgcttggcaattcatcaaagcaaagcacagaatgagctagtgagggaagcaagcgaggacgagggcggagcagacctagcacgaggagcgcgtcggggagggcgccgaggatagggaggaggagtccgccgacgagccccggccccatgatctcgagcagcagctcgctccccgaggacaggtacgtggccgccttgaacatgag

SEQ ID NO: 57411 - DNA, 211 bp, Setaria italica
  Peptide Sequence Number=SeqID_123385
agcaaagcacagaatgagctagtgagggaagcaagcgaggacgagggcggagcagacctagcacgaggagcgctcggggagggcgccgaggatagggaggaggagtccgccgacgagccccggccccatgatctcgagcagcagctcgctccccgaggacaggtacgtggccgccttgaacatgaggaagccgtagacgaggatgaggaag

SEQ ID NO: 57412 - DNA, 435 bp, Setaria italica
  Peptide Sequence Number=SeqID_123386
cgtcctcggacgcgaagacgcgagctggccaccgctcgctactggtcgagcgcgttgggtccggagcagtagctgagcacggggttccacacccactgcacgaggaacctgcgcccgccggcgccgttcacgttgtacgctgcccccgaccgcgcgtccgtcagcagctgccccgtgtacgcgccgccgccgccggtcccgtagatcccctcgcagaggtccgcgatctccgtcgggaacgacgggtccgtcccggcgtaccacgcgttggccagcgggttggacgccagctccgccagctcgtgcgcgatgacgctgaccatcccgtcgacgccgacgtcggcgttagggacggacgaactacgggacctaccggaccgtaaggaaacgtaaacgaaccgggaaataggacgaaacgggtaacgacgacaacaa

SEQ ID NO: 57413 - DNA, 141 bp, Setaria italica
  Peptide Sequence Number=SeqID_123387
taaagttaaagggtaaaccggaaagaaacaaagtaaagaactaagaagacaacggggttaccaacaacccaactagacaacgaaggaacctgcgcccgccggcgccgttcacgttgtacgctgcccccgaccgcgcgtccg

SEQ ID NO: 57414 - DNA, 380 bp, Setaria italica
  Peptide Sequence Number=SeqID_123388
ttaaacgttaaaaaggtttacttaccttgtctagggtcttgtcttgtctagtcttaatttgtacaatttacatcaaccccgaagtggaacggcaaagctgcttccgtggtgtctctggctgctatctagagttgtcctttaaagcatctggcgtggaggtaccatcagaattccttgcctccgacttctcatttgagtaagttgacagtatcgtgacccagattagctcaacacagtcgacccaaagtagcctttgctcaacaggaatcacaccatatgtaaccaagtgtgcaaaaaggccacaatttccacccagcggtaagcatgggccagaacgtggacttgagctcgctgtagatagtggtaggtgattccaaccg

SEQ ID NO: 57415 - DNA, 172 bp, Setaria italica
  Peptide Sequence Number=SeqID_123389
aggagggcttcaggcaagccttgttgatctccattcccttaaatacaaaggaaggaatttagaatgctgaataatagtttgtatttaagggaatggagatcaacaggagggcttcaggcaagcttgtccaataatccgcagccaatacaaaggaaggaatttagaaatgctg

SEQ ID NO: 57416 - DNA, 382 bp, Setaria italica
  Peptide Sequence Number=SeqID_123390
aaagccaggtcgcggtgggcccatgccaggtccaggaagaggaagaggattccaaaagaacatgtctaagaaagattttccacctccacaaaatggtgttggcaagagaagttccgatgacattgatatccttcacaccgagagcctaataaaagaggtggagaaagtttttagcgtgaataatcctgatccccaggaagtagagaaggcaaagaaagcactgaaggagcaagaacagtcactgattgacgcgatagcgaggcttgctgaggcatcagatggtgaaagcggtaaatactaatccactgtgttccttgaccataggtttatggaacttgcaatgctgcagaaaagtcatttgtgcttcagttttttcgatggg

SEQ ID NO: 57417 - DNA, 473 bp, Setaria italica
  misc_feature (1)..(35): n is a, c, g, or t
  misc_feature (119)..(119): n is a, c, g, or t
  Peptide Sequence Number=SeqID_123391
nnnnnnnnnnnnnnnnnnnnnnnnnnnnnnnnnnncgttatatttattcaaccataaaatgcatatgataattgttagtccttttttgcatggctagatgtaacatgtgcccttattcnctttttttgcatggctacatgtgcacttatcctcttttgaaaaatgtaataagcacagatcgtgatacaatgatgatgccatcattttacatgtatcgacaagcttgcagttgattcatgcgaagcatttgataacgtccctttctcttggtgggaacagatgggcacaaccatgggcgaaggaatgcattgtatgctggtaaccagcatcaagcaaactacgttgatgcgatgcctgttgatggtgaccaagcttctgtttggagaatcttgaattttgggtagactgtatttcagaatgctgaccatgtaaagcttagatgtggcaccaaggttttccttttgttggcgtga

SEQ ID NO: 57418 - DNA, 303 bp, Setaria italica
  Peptide Sequence Number=SeqID_123392
ttgccatatctgttcatgtaggtggagaaagtttttagcgtgaataatcctgatcccccaggaagtagagaaggcaaagaaagcactgaaggtaaaccagaatgcacaagttaactaatcaataatcatgcatttttgtcttaactgtcaatgcctgtttttgtcttcactgtcaatgtctgcaggagcaagaacagtcactgattgacgcgatagcgaggcttgctgaggcatcagatggtgaaagcggtaaatactaatccactgtgttccttgaccataggtttatggaacttgcaatgc

SEQ ID NO: 57419 - DNA, 496 bp, Setaria italica
  Peptide Sequence Number=SeqID_123393
ctgcatccaagcccatgtcatctgcagcgggtcctagtggaagaggaccgcacatgaatagaaattttccaggtgctgctgaagctcaagcacagaatgttcacccgttaattggtcgtaaagtgatgattcggtggcctgaagataacagcttctatgaagcagttatatctgattataatgcagatacgggcctttatgcgctggtttatgacatgaatacagcaaacgaaacctgggagtgggttgatcttaaagagatgggacctgaagacataagatggaaagaggatgaaatatctgggatagacttgaagatgtatttgcaaggccgaggtcccccaactagtgggggtaggaagccaggtcgcggtgggcccatgccaggtccaggaaagaaggaaagaaggaattccaaaaagaaacaatagtactaaagaaaagaattttaccaacctaccaacaaaaataggtaagttaaggaacaaagaagaaa

SEQ ID NO: 57420 - DNA, 424 bp, Setaria italica
  Peptide Sequence Number=SeqID_123394
cggcacttgttgaacttgatacaaaatcattggaaaacatgcttcctgagattcctctttggataaaaatccagacttcgatcggattgattggctgaacaagttcattgagactatgtggtcctatcttgacaaggcaatatgtaaaatggcaaaggaaatcgccaagccaattattgctgagaacactgcaaagtataagattgattcagttgaatttgagacattaacattaggctcattgccgccaacatttcaagggatgaaggtctacaccactgacgaacaagaacttataatggaaccttcagtaaagtgggctgggaatcctaatatcactgttgtagtcaaagcatatgggctaaaagcaaatacttgcaaatcaattacctgtgccgttgcttttagcccatatgctttgact

SEQ ID NO: 57421 - DNA, 363 bp, Setaria italica
  Peptide Sequence Number=SeqID_123395
tagtaagtaaaaccctaattagtttagtaacttttaggttacttagtaaaacttctttaaggtagtctagtattcttgatggcaattcctggcctttatggatttgttcaggaaactatcaagacccaagtagcaaatatgtacttgtggcccaaagtactcgaggtgcaaatcatggatcctgcaaaagcacaaaagaagcctgtgggaattctctttgttaatgtagtacaggctgttaaactcaccaagaaagatcttctgggcaaatcagatccatatgtgaagttaaagctaaactgaggacaaacttccatcaaagaaacatcagtgaagcgaagcaacctgaaccctgaatggaac

SEQ ID NO: 57422 - DNA, 284 bp, Setaria italica
  Peptide Sequence Number=SeqID_123396
aattgactcgaaaaatggccgcattcagttggaattgcaatggagaacatcctaaaagacctcacgggctgaagccgtgaacctgtaaagtttgtctttctatttgaagctttccacacatgtacctatcagcatttggggacatctttttagttatttgtaactgcttatatgaattctgtgattaatcacgacaagctctttccgttcagaaccatatctactaaaactggagaaaacaataagaaaataaaagtaaaaaccaaaaaagaaaaaaacaaaaa

SEQ ID NO: 57423 - DNA, 184 bp, Setaria italica
  Peptide Sequence Number=SeqID_123397
attaatgagaagtaccatctaattgactcgaaaaatggccgcattcagttggaattgcaatggagaacatcctaaaagacctcacgggctgaagcccgtagaaacctagtaaaagttttagtactttactaatttagaaagactttaccaacaacaatagtaacctaatacaagacaatttaga

SEQ ID NO: 57424 - DNA, 366 bp, Setaria italica
  Peptide Sequence Number=SeqID_123398
ccatcaactaatacaccttcttttgtgttgtccatctggcttatatagttcacaatgttctttgtcttgtggctaggaacttccaagtcctcaaatacaaacagctttccttcagcagtccgagcagataaggttatcttcagccccagacgccgaaccttcttttgcaacttgattgcatggcttcgtggtttaggcccatgcatggttgcaccaccacggaactgagggccacgcagtgttccatgacgtgctcttccagttcccttttgcttgtaaggctttcttcctgtcccacttacttcgctgatagtttttgttgaatgtgttccctgttgtcgtttagcaagttgccaccgtacaaca

SEQ ID NO: 57425 - DNA, 342 bp, Setaria italica
  misc_feature (7)..(7): n is a, c, g, or t
  Peptide Sequence Number=SeqID_123399
tgttatnttcgttccgttcgttcttagggttcgttaggttccctttcctttggttccctttccttaggttcttttgtacgtagtatttcggtaaggagcattggtacaggcctaggttgctgtggtatgtagatcttgttacagtgcttgcaagcaaaggtttacagtctgaggtcgacaaagcctgttcatacctgaagagggaacaactggagccagacactgaaggtttcaatctgcttctgaaggcactcctagatgctgggttcacacaattagcaatggattgttccgtctgatgaaattgtgggacagtgatcctgataggataacatatacaac

SEQ ID NO: 57426 - DNA, 484 bp, Setaria italica
  misc_feature (153)..(153): n is a, c, g, or t
  misc_feature (483)..(483): n is a, c, g, or t
  Peptide Sequence Number=SeqID_123400
ggacgtagcagaactcagcgtctcagcggttcagcggatacaccggatcggcacctcacagcagccggtggaaatgggtagcaagaagacggtggaagaagccgccgcccgccggtcaggaactggttggaccagtcggcggcgctgccgacncgggggatgctggcgtcctgcttcttcttggtcttcgtcttgttcgtaccttgaaggtggagccgcacatctggccctggctgtccacgcgcggcaccgccttgacctcgtgcagcgggtgctcgtagctctgcagcccgccggaggtggtgtagaagcaacctttagggaatggcgcgaacgagttgccgcagccggtcttgagtagcccagcatcgtcagagaacaagaggtggtcctccgagtcgacgccccagaagaaggggatgctgcctattctagtcgttctagtctagtctaacgtaaggttggtactttcgtactaggttnt

SEQ ID NO: 57427 - DNA, 245 bp, Setaria italica
  misc_feature (22)..(22): n is a, c, g, or t
  Peptide Sequence Number=SeqID_123401
cctccgagtcgagccccagaanaaggggatgctgccatcagcgtcagcagcaacgaaggtggacttcgacagggtgtcatacaagatgaatgcgaactttccactaagatctctcacaacctggctggctgggacgggacccctgtccctcagggttctgtaggcctcgtatgtaggtattagttctaccttcgtttggttcggtttcttttgttctttcttaggttccgtttagtttgttcttt

SEQ ID NO: 57428 - DNA, 250 bp, Setaria italica
  misc_feature (2)..(2): n is a, c, g, or t
  Peptide Sequence Number=SeqID_123402
cngttgcaacaatgaatgacggccaaagtatagaagctggaagggaataatagaaagctgggggacactgtgtgtattctgagctatataggcagcttggccagtatactgcaaaagaaggcagggaaacacaaccacggtgtccatggcatggatcctaggccttggtccaagccttggtcttgtcagggtgcccagtgtacaccaggccaacaccgggcaccctgacaagaccaaggcttggaccaag

SEQ ID NO: 57429 - DNA, 256 bp, Setaria italica
  misc_feature (37)..(37): n is a, c, g, or t
  Peptide Sequence Number=SeqID_123403
cccctttcacctgaaattgaacgcgcagctgccgtcngaaacaaaatgttgctctgttctgtccaagatctgttgaattcccaaattgacggtagaacagatgggattggcgcttgcctggtacaggaactgcgcgtagttcctcaagaagaggccgttgcaggggtcctcctcgatcatcttcttgtaatgcatctcgatgccggaccggtcccctccgttgccagaagtgaccaggttgctgccaccgccgccg

SEQ ID NO: 57430 - DNA, 219 bp, Setaria italica
  Peptide Sequence Number=SeqID_123404
gttgccgaagccagagacgaatgagcaggagcaaaccccacgtagccaagcgcgccgatgccgctctcctccggcacgtcggcgtcctccgtgtcccacaggaacgcggcgtgcgcggcgaggacatggctgcatccgtggacggaaccggtgatcagaaactatgctggcgatacgaaacagatccaagtgatgaggggtaaggtgtaagctttaacc

SEQ ID NO: 57431 - DNA, 268 bp, Setaria italica
  Peptide Sequence Number=SeqID_123405
ttaggttagtaattagtcttaactttgtatttctattagtattggtattcttttggtttgtaaattaattaatttcttagggggaagacggagatggagccagagtggcaacagagaaactgagaggatagggagcaattggcatgtcagataggggtaaagcagatgaactgtagcctagtgtacccattgggtgatcatattgcatgcaactccatatactagacaaataataccattttagggcatagtatgcacaaggctgagc

SEQ ID NO: 57432 - DNA, 295 bp, Setaria italica
  Peptide Sequence Number=SeqID_123406
tggtctaccgtaccggtaggtacgtccgtcttggtacgttccgtctaccccctaactacctttcgtacaacaagttactacgtcaacctggtgaaccgggaggggctcttcacctccgaccaggacctcttcaccaacccggcaacaaggcccgttgtcgacaagttcgcgcagaaccagaaggccttcttcgaccagttcggctcctccatgatcaagatggggcagatcaaggtgctcacggggtcgcagggccagatccgcaggaactgctccgcgcgcaaccctggcaccg

SEQ ID NO: 57433 - DNA, 301 bp, Setaria italica
  Peptide Sequence Number=SeqID_123407
accctcaacgccaccttcgccggccacctcaggcagacctgcccggccaagggcaccgaccggaggacgccgctggacgtccgcacccccaacaccttcgacaacaagtactacgtcaacctggtgaaccgggaggggctcttcacctccgaccaggacctcttcaccaacccggcaacaaggcccgttgtcgacaagttcgcgcagaaccagaaggccttcttcgaccagttcggctcctccatgtattctaagtattggggtctagtatttcttaaggtttgttctttcttacggggtt

SEQ ID NO: 57434 - DNA, 494 bp, Setaria italica
  Peptide Sequence Number=SeqID_123408
ttcttagttctttattttcttagttgttgtctattgtctaggtattgttgtcgtatttctttctattacttagagagatctctaatggacttgacacaacagcgcatgggttctgtgattgtctatggagagatgctttggtgattgatgccatgcctcttgttgtgcaagtaaatgtaataagcatgtacgttcgttttcagaattgtgtaatttaatcaactttatgttacattcttagatcaatgttagacccatgcatgtattgtaccttcgattctctattcggtccaagtactaggtattatttgttggaattagagatatcgtcgtatgtatcttggatcatgtaatcctagagatataggtgttgagactttggtttggttgttagagatagagataggaatcttgttgtaatcatatccaaccaaaccgaatatctgcaacaccctaggttgtaatatgttgggattctcctatatattaacatg

SEQ ID NO: 57435 - DNA, 446 bp, Setaria italica
  Peptide Sequence Number=SeqID_123409
gttgacatcagtacaaactattcagtgtgcatgcaggatgtgcgattcttcatactagaattcaatttggagtctttcgctagagaacatgggatttctgagaacattcagagagatctctaatggacttgacacaacagcgcatgggttctgtgattgtctatggagagatgctttggtgattgatgccatgcctcttgttgtgcaagtaaatgtaataagcatgattagggaacgaagaaaattatccaccaaggtagatgcaaaggaggtctttatcccctggaatctaattcgccccaagaaggagttagcaagaagtctatggagtcagtaaaccatctgcatctaagtggcatagtcgtttggatcatcttacttttcctattgtctttgcgtgtgcttaacaataataatcttccttactaccatgaatcaacacgaac

SEQ ID NO: 57436 - DNA, 346 bp, Setaria italica
  Peptide Sequence Number=SeqID_123410
gaatttatgaaagcatgggccaatactcatggcagcagtccaggacatgtgttttaatataaactctgcaagcatggtaccatgggacagctcacttcaaaagaatcaagttttgaaaaaggacagctgcaacagacttttggataatgaatcggacgttcagatttgggatgatagttggaagaaaatcctctaagggagcaggtatcattaattcaattctgtcaccaagttatgagtgtggctggctagtgcattaagctgtgtggtgctttagcattttgctgaaataaaaaaattcagcaaccagtcgaaacaaaaatagattgcactttaaatcctaatt

SEQ ID NO: 57437 - DNA, 425 bp, Setaria italica
  Peptide Sequence Number=SeqID_123411
cttgatctctaccggtgcaattcgattaccgatgatgggttggcagcattagcaaatggctgcaagaagattaagttgctaaacttgtgctactgcaacaagattactgatagtggtttgggccacataggctctatggaggagctgacaaaccttgagctgaggtgcttggtccgcatcacaggcgtagggatctcctcaattgcaatcggatgcaagagcctgatagaactggacttgaaacgttgctattccgttgatgacgcttgtctgggggcccttgctcgtaatgcgtttaaccttagacaggacatcaagatggtgcacctctcgtgggtctccatagaagggttcgagatggcgctgcgagcagcctgcacaaggctgaagaagctgaagatgctcactgggctgaagaccgtgct

SEQ ID NO: 57438 - DNA, 183 bp, Setaria italica
  misc_feature (3)..(3): n is a, c, g, or t
  Peptide Sequence Number=SeqID_123412
aanctttatcatgattctttctgtcttcatgcatgaaataacatgtctgtaatattccttccttcaggtgcaattcgattaccgatgatgggttggcagcattagcaaatggctgcaagaagattaagttgctaaacttgtgctactgcaacaagattactgatagtggtttgggccacatag

SEQ ID NO: 57439 - DNA, 229 bp, Setaria italica
  Peptide Sequence Number=SeqID_123413
tgcacattcctgctatctggtttacaatggatacatatggctcgatgaattctccctgtttcttactatgaaaatccaagaatgctccaatttcttgtctcttgttttgcaggtaagcaatgaatcccttagatcactctccactctcgagaagttggaggatataacaatggtctgctgcttgtttatagacgatgatggcctacagatgctaagcgcaggcaactca

SEQ ID NO: 57440 - DNA, 185 bp, Setaria italica
  Peptide Sequence Number=SeqID_123414
cttgtctggacaagttttcaaacctctctgcgttcagtgttcacggtcagtaggacagcaggcatggcaaattgtagtcctataacaaggtttgtctgaccctaatcacttcagtttacaacataatactctgaagtgagtaccaaaaggattgcgcgactgatggggtagtggaagaacgaagt

SEQ ID NO: 57441 - DNA, 174 bp, Setaria italica
  Peptide Sequence Number=SeqID_123415
ccttcaattggtaaggaagggccgttacagcagagctctagtcacccacttcatggtgaagacggaggggcttagccaggcccatcaatccaatgtgtccggaatatcagtagtaactgggaattgtccatcagaaacaaccctacgtacccccaattctggattcttcgttat

SEQ ID NO: 57442 - DNA, 183 bp, Setaria italica
  misc_feature (172)..(172): n is a, c, g, or t
  Peptide Sequence Number=SeqID_123416
taggacttttaaacaatcgactcctgtgccttcagctgaatgtagtggtttcgcaggagaagaattactcagatggcttaaggtgccattcatgacatcaaacagttccttaaacacaacctctggctcaccactgagattgtgcttaaggtgccattcatgacatcaaacngttccttaaac

SEQ ID NO: 57443 - DNA, 400 bp, Setaria italica
  Peptide Sequence Number=SeqID_123417
tacttagtaagtactttgtactttttttgtaggttcttattctagttcgtattgtctaaaaaaattgggggtagtctactaaggttggttaaaagtctaattgttgttttttgcgaatctttggatgatagatttataataaagcaagttacaaagacagagctcgaatcattcctaaaatttggcacagaatattttaaatatctgtcagagtccataagcactggaagtcctacatgcctagcaaaaattttggggatctatcaggttaccattaagcatgtaaagggtggcaaggagtcaaagatggatttgcttgtgatggaaaatctttgtttggacggaatatcaccaggctgtacgatctcaagggatcttcaaggtcaaggtataatgcaga

SEQ ID NO: 57444 - DNA, 242 bp, Setaria italica
  Peptide Sequence Number=SeqID_123418
ggagctggacttgtcaaggtgcacaaaggtctctgacgctggcctcagacatatagtgatcattcaaagcttggagaggctgcacttatctggtactaggttgactgacaatggagtgaagctcatttcttcgctgacaaatctaagtttccttgatctgggaggaattcgtatcacagataaaaccttaaggtctttacaggtattgacacgactcgagcatcttgatatatggggtatag

SEQ ID NO: 57445 - DNA, 282 bp, Setaria italica
  Peptide Sequence Number=SeqID_123419
gtagaacttgaagccgaggtcgaggtgcgcgaggctgtcgtcgtcggtgacgccgtagccgtggacgcgcgagtcctcggcggtgatgggcacgacgttggccattatgcggaagacgcccctgagctcgacgacgacggtgttggcctgcgcggtcctggtgacggagagcgcgggggcggtgggcggggaccaccgggcgccggtgaacgccggcgagggggacgcctcgtcgtccaaggacagggagaggtggtcggcggcggcgtcccagcggacggt

SEQ ID NO: 57446 - DNA, 265 bp, Setaria italica
  misc_feature (260)..(260): n is a, c, g, or t
  Peptide Sequence Number=SeqID_123420
tcgtagaacttgaagccgaggtcgaggtgcgcgaggctgtcgtcgtcggtgacgccgtagccgtggacgcgcgagtcctcggcggtgatgggcacgacgttggccattatgcggaagacgcccctgagctcgacgacgacggtgttggcctgcgcggtcctggtgacggagagcgcgggggcggtgggcggggaccaccgggcgccggtgaacgccggcagtgctagcttcttgagtgagcttaccatggtaatcaaagngatcg

SEQ ID NO: 57447 - DNA, 252 bp, Setaria italica
  Peptide Sequence Number=SeqID_123421
aaaggtaaaaacaaacttaacaaggacttagtacttacggtagtgtcatattgtagttgaagaagattgtgaagtttgaccatgttacctttcactgatgagttcgttgtcaggcatacacataacacactacatggtgatctggggccatcgctgaaccttgatgtgtatgtaagagttacaatacacacaagaactgtgtttctgcccagttgcgtgggcagagttgtagttgccgtttgtatttcatca

SEQ ID NO: 57448 - DNA, 326 bp, Setaria italica
  Peptide Sequence Number=SeqID_123422
gaaaaatcagcccaggcaaagaaatgggctgagccccatctggaaactgctaagacgaaatggatgcctgttgctaaagaaaaaatggttaacttgaagaaaaatatggagccttatgtccaaatggtctcagagaaatcagtggaggtttatcaaacatcaagtgattttatcaggcctcatcttgtaaatgcacataaagttgctgatccctacttccaggaagcctgataaaatcagtggaggtttatcaaacatcaagtgatttctctgagaccttatgtccaaatggtctcagagaaatcagtggagccttatgtccaaat

SEQ ID NO: 57449 - DNA, 249 bp, Setaria italica
  Peptide Sequence Number=SeqID_123423
aaagcgtgagccgctcaaggcgggggacgcggcgggagagcgcggtcggtgcccgttgcgccgcagcggaggcactccgcctcggcgccgtcggcggacggtgctggcgctgtccgcgggaggagggcttcgcgggcgcggttggtgacagatacagaggcaagggatgcggcaaggaaactgcagtcatggaggagtcggcatttgatttcagaggtatgtacgctggttctggacctcagattggat

SEQ ID NO: 57450 - DNA, 368 bp, Setaria italica
  Peptide Sequence Number=SeqID_123424
cgaattctaacgctaaagatgcccttgttctttacagcgttggcatttacactgacaatgagcttggagcaatggtggatcgcatggaatcgtatctgtatttaaattcagtaatattcatccggccaaccaattccgtgaatcttttgaagcttccctgctcctctggcagaaatgtagctagcactgcttcccgttttcgaccaacatcagcaagttcagttactagtctaagtcggtcaaagttcatatttgctccactagttattgcaacaacagtttctcctttcaagttatagtatttgcagtaggcttcagcccctgccaatgcaagggcaccagcaggttcaaggatacttctttctcct

SEQ ID NO: 57451 - DNA, 377 bp, Setaria italica
  misc_feature (1)..(1): n is a, c, g, or t
  Peptide Sequence Number=SeqID_123425
ntttccgctcagagactggggatgtgatgccgtcatcgtcatgccggtgacaacaccagaaatcaagtggaaatcagtggagaggtgggtgcaacggtagtcctcaggggggactcatacgatgaagctcagtcatatgcaaaattacgatgtgagcaggaaggtcgcacattcatacctccatttgaccatcctgatgttatcactggacaaggaactgtcggcatggaaattgttcggcaactgcaaggtccactgcatgcaatatttgtacctgtgggaggtggtaggaattaaaataacgaactaaaggaaaaattaaagaaactaaagaaacttaaaataaagtaaagaaaaaacgggttaaacgaaccaaa

SEQ ID NO: 57452 - DNA, 517 bp, Setaria italica
  Peptide Sequence Number=SeqID_123426
accttgaacctgctggtgcccttgcattggcaggggctgaagcctactgcaaatactataacttgaaaggagaaactgttgttgcaataactagtggagcaaatatgaactttgaccgacttagactagtaactgaacttgctgatgttggtcgaaaacgggaagcagtgctagctacatttctgccagaggagcagggaagcttcaaaagattcacggaattggtataccctgtgatagtaatgccaacatgatatagtttaaaatccaattcaattcttgtgacttctcattctgcaggttggccggatgaatattactgaatttaaatacagatacgattctaacgctaaagatgcccttgttctttacaggtacatataaagttggacactctttcttattattcatccgtatcaaattgccaatgttcttttccttggctgagatgtacatttttagtttattatttgatcttttatttattaatgcacagcaatggttaccttaaatactt

SEQ ID NO: 57453 - DNA, 457 bp, Setaria italica
  Peptide Sequence Number=SeqID_123427
tctattactaagttgtcctacctaaaagtactttcgtattgtaatttctaagtagttcgttgctgagagtcttgggtacgagtacatgtcagagcacaacaatgagatataccgactgctgttgcgtgatccaaagatttaatgcaccacatcacatgatgaatggatggctattttcctttgcccccataaattggtgagactttgcaaggaaggttcgactccaaggtagaaggcacaccttgctgcttctgttggagtaaagccatcgccatacctatttatgtagtgctggtttggcttttgttaacttgttagattgtgtagtgcatctgttgttgtgtgtctgtattgtggtttatggtatcaactttactggtgcaagtcaccttagtatttctcaaataatgataataaatatgtaacccgaatatctgattaataattatgtaattga

SEQ ID NO: 57454 - DNA, 389 bp, Setaria italica
  misc_feature (3)..(3): n is a, c, g, or t
  misc_feature (10)..(10): n is a, c, g, or t
  misc_feature (197)..(197): n is a, c, g, or t
  Peptide Sequence Number=SeqID_123428
ttnttatttnttctttttaagttttctttttacttttatttttttcttttgtttcctttagtttaggtttagtttctttagggtttaagtttcttttcttaaaagttattttctacggtaattggttggccggatgaatattactgaatttaaatacagatacgattctaacgctaaagatgcccttgttctttacngcgttggcatttacactgacaatgagcttggagcaatggtggatcgcatggaatctgcaaaactgaggactgttaaccttactgacaatgatttggcgaaggaccatcttagatactttattggaggcagatcagaaataaaagatgaacttgttaccggttctattttccagaaagcctggggccctcatg

SEQ ID NO: 57455 - DNA, 347 bp, Setaria italica
  Peptide Sequence Number=SeqID_123429
accggcgaccgaatggtgcgggtggtgccggagtcgctgcagcgggagagcgggtgcctcgtggcgggattccgggagcgaggcgcgggcgcggcggatggggatgggttcggggacgcggcgcctgggggaggaggagggcccggcgcgatggagtacctcaccagcgtgctgtcgtccaaggtgtacgacgtggcaatcgagtcgccgctgcagctcgccaccaagctctccgaccgcctcggggtcaacctctggatcaagcgcgaggacctgcagccggtattctcattcaagctgcgtggggcatataatatgatggcaaagctctcccctgagcagttgga

SEQ ID NO: 57456 - DNA, 354 bp, Setaria italica
  Peptide Sequence Number=SeqID_123430
ttgtaacttttgtaccgtactttagtacttagttaacttgtaactttgtcttgtattgtttggttcgaaaacgggaagcagtgctagctacatttctgccagaggagcagggaagcttcaaaagattcacggaattggttggccggatgaatattactgaatttaaatacagatacgattctaacgctaaagatgcccttgttctttacagcgttggcatttacactgacaatgagcttggagcaatggtggatcgcatggaatctgcaaaaactgaggactgttaaccttaactgacaatgatttgcgaaggaccatcttagatactttattggaggcagatcagaaataaaa

SEQ ID NO: 57457 - DNA, 205 bp, Setaria italica
  Peptide Sequence Number=SeqID_123431
cattgtgtcatggcaagagggtcatgttgagcatgttggtggttttgcagatggtgtagctgtcaaaactgtaggggaggaaacatttcgcctgtgcagagaactagtagatggcatcgttatggtcagtcgagatgctatttgtgcttctaataaaaggaataatagtttagaaggaagaaaaagaaagtaataccttagtaaa

SEQ ID NO: 57458 - DNA, 417 bp, Setaria italica
  Peptide Sequence Number=SeqID_123432
agaggaaagtcaatactctgctttacatttcaaataagagagaaaatgacaactctaatattgttttcttcgtataaacttatgtcaatgaagagaccagcaattaactaattaaatactctcacctttgatataatcgaggaagattttaacacttgtatttaatgtagattgcatcaatggcccgattaccaatgatgggcaaatggttaccatgtccagcccagtttttgctgcataagcagaagcctcacgctctgacaatattttagaaagcaaataccattcctcattctttctgcaataatcttcatctgaccaactgtcttcatcaaaggccttgcccttgggccacttaggattattgaacacagcagcaactgaagagactaacacaactctcttaactttgcctca

SEQ ID NO: 57459 - DNA, 247 bp, Setaria italica
  Peptide Sequence Number=SeqID_123433
gtcatatgtgaagtcgtcttgcacttccacaaagccattaccttttgggccaacgggatgttggatgcatagtccttagtatgtccataatatcacggacccttattggggttgaactgcaaatatatcgtccagatgcctttgatataatcgaggaagattttaacacttgtatttaatgtagattgcatcaatggcccgattaccaatgatgggcaaatggttaccatgtccagcccagtttttg

SEQ ID NO: 57460 - DNA, 290 bp, Setaria italica
  Peptide Sequence Number=SeqID_123434
ttctgtacagctgttgaacactcaagatcggacataggtcatttgttagggttgggatgggattccccccttaccagttagaaagggccgtatcttttaaagcggggcaaatgattctttgtaggtcaacatcaaccaatcttttacccaagggtggtaaggagggggagaggcaatgttagtagcctctccccagttatagattttgtaaattatatactgtaaatcaaacagtgcaaggaaaaagaaaggaaagctatataaccaaaaaaaaaaaaaaacaaaaaaaa

SEQ ID NO: 57461 - DNA, 271 bp, Setaria italica
  Peptide Sequence Number=SeqID_123435
atgttcttttatccgttgctttttgagtttttaggagtagcaagcttattatttttgattttttttccctgtcaccactcactttgtctcatgtttgatgcagaatgaggacgacaattgcaaccttgcctactggctgtcgaatacatctagcttgctattcctactgcagagaagtctcaaggctgctggtgctcctggtagcgtttcacgaaagaaacctcctcagccgacatcattatttggcaggatggctctaggcttgcgttct

SEQ ID NO: 57462 - DNA, 231 bp, Setaria italica
  Peptide Sequence Number=SeqID_123436
atattgtctcgtacgattccatatatcttctccacatatgcagctagcatgctgcgggtttctgcaagattatctggtcaatctcagaatcagagcaacaactggcagaaaattattgaaagcttggataagctcttgaggacactgcaagataaccatgtacccccagttttagctcagaaaatatttacccagatattctcgtacattaatgtacagctattcaacagt

SEQ ID NO: 57463 - DNA, 272 bp, Setaria italica
  misc_feature (111)..(111): n is a, c, g, or t
  Peptide Sequence Number=SeqID_123437
acacagcatcactgggtttgtcggtaatggagtgtcaggttccaagaatcaccagtcagaacgttgtaagtgattcgactggtgattcttggaacctgacacagcatcacngggtttgtcgatggagtacagcaaaactcatggtgcgaagccaccagaggcatgggggctgttcttttggttaatgtcactggcagcgcctcgactgagaccatcacacacagaatcaatgtccagcattgttgcccagtgcattcagctcccccacccgt

SEQ ID NO: 57464 - DNA, 331 bp, Setaria italica
  misc_feature (320)..(320): n is a, c, g, or t
  Peptide Sequence Number=SeqID_123438
tggtctttccttttggtcttttcctatttttggtcttcgtaggtttctaacctattcagttcggttctcattgaaccgggagaaacaatggaagttgctgtgcatcatgaagaattcttcacaaaggaagaatttgtcgatggagtacagcaaaactcatggtgcgaagccaccagaggcatgggggctgttcttttggttaatgtcactggcagcgcctcgactgagaccatcacacacagaatcaatgtccagcattgttgcccagtgcattcagctccccccacccgttaacccacactccattaccgacaaacccngtgatgctgtg

SEQ ID NO: 57465 - DNA, 241 bp, Setaria italica
  Peptide Sequence Number=SeqID_123439
tctcccaaaaaaaatacagttccccacagtgaaagcacatgtgcattttcctctataactttcacatattaaaatccttctaacttagtccacagaaatcaaacagtagataaatccttccattagttataggttatatataaccctaaaactgtaattttaataagtgcacactggcatactgaactatgattattatcttaacacgttgcatcgactacacacttagtgagtaccaaaa

SEQ ID NO: 57466 - DNA, 183 bp, Setaria italica
  Peptide Sequence Number=SeqID_123440
aggaaggaaggatgaatagtagccttgtccacctacacctgatggggtggaagtgcaagcatgccacacgcatcaggtgtaggaggaaggatgaatagtagccttgtccacatggaattcacagcaggaactcttatcacaccagcgcattctctgtttatcagataggatataaaatcctgg

SEQ ID NO: 57467 - DNA, 435 bp, Setaria italica
  Peptide Sequence Number=SeqID_123441
aagaggagggtactcagagaaggtctccaccaccatgggcttggtgggaatcatcttcaccataccagcatcaccattcttcaggaacttgggctccttctcaagctccttaccggatcgtctgtcgatcttggtaatgagctcagcaaacttgacagcaatgtgggaggtgtggcagtccagcactggggcgtagccattgccaatctgcccagggtggttcatgatgatgacctgggaggtgaagctggcagcctccttggcagggtcatccttggagttggaggccacgaacccacgcttgagatccttcacagcaacgttcttcacgtggcaagtacaactaccagaacagcgcgcggtgcgggatgtccggcgcgtcggcgtgctccaacccggagtcgtcgctcagctgggatggcatccacctcacgg

SEQ ID NO: 57468 - DNA, 248 bp, Setaria italica
  Peptide Sequence Number=SeqID_123442
gtacgagcaggttgcaagagctacctggccaactccctattcgtgttcggtgaattcggcggcaacgactacaacgccatgatttttggcggctacaccaccgagcaggccaggaaatacacgcccaagatcgtcaacaccatctccaggggcatcgatgtgagctctcgctgtgctacgtttctgcctctcacctgcaagagtactggggcgcttgtgtcttgaggaattacattgttgcgaccgtt

SEQ ID NO: 57469 - DNA, 222 bp, Setaria italica
  misc_feature (27)..(27): n is a, c, g, or t
  misc_feature (41)..(41): n is a, c, g, or t
  Peptide Sequence Number=SeqID_123443
cctatcccctgtgtgccttggcagtcncttttagttttttntttttttttgtaacgaaaacctgtaccattttgattgattttgtaactgatgacaaccggtgataagttacagcaaggacgaactgtagcatgtggaataatgtcaccgttcgtccttgctgtaacttatcaccggttgtcatttcttttagttacaaacctgtaccatttgattgatttg

SEQ ID NO: 57470 - DNA, 196 bp, Setaria italica
  Peptide Sequence Number=SeqID_123444
ttctacagcggcgtctacgacatggtcaagaaccccggcagctatgggttcagcacggcgttccagacgtgctgcggctccggcggcggcaagtacaactaccagaacagcgcgcggtgcgggatgtcgggcgcgtcggcgtgctccaacccctgagacacgcaacaggagataggcaaggcacacaggggatagg

SEQ ID NO: 57471 - DNA, 330 bp, Setaria italica
  Peptide Sequence Number=SeqID_123445
atcgtgggatttaagcaacgtaggcgtaatttggtgggttgttgtttccgcaagggagtaatgtctaatccggtggattgaacggcactttagtgtttggacagggtggagttcgtcctactcccaggagttgcttcgcttggtgctgcacagaattagcgcggaagcaggtggagtgttctctgccctgaaatctgctcaccgggtgccaggaaacaggcggttgaagagaattgcttgggaattcgccaagacgcgaccaaaatctttgcaggtgcttgtgcacttgtatgctgagactgaatggaggcggtagataagattgccgag

SEQ ID NO: 57472 - DNA, 310 bp, Setaria italica
  Peptide Sequence Number=SeqID_123446
aaagaaaattaaactaaagtaaaccaaaggtaaggaacgaaataactagacaataactactgcgacagagacaaccagggaaacatttctcagagtatgctgcaagattctatgctgcagaagtactttctagctctggagtatctacacatgttgggagttgtctacagggatctgaaaccagaaaatgttcttgtgcgtgatgatgggcacataatgctttcagtattttgacctctccctaagatgtgcagtctcacctacactcatcagaacatcagctttcgatactgatcccagaagagcgggt

SEQ ID NO: 57473 - DNA, 141 bp, Setaria italica
  misc_feature (9)..(9): n is a, c, g, or t
  Peptide Sequence Number=SeqID_123447
gcctattangaaggaaattctacagcttctggaccacccattcctcccaaccttgtatacacattttgagaccgacaggttctcttgtttggtgatggaattctgtcctggttgtctctgtcgcagagtatgcagatcgcc

SEQ ID NO: 57474 - DNA, 252 bp, Setaria italica
  Peptide Sequence Number=SeqID_123448
cgtcatcttctggagggcgcgcgggtgctgggcgtgctggccatgtcccgcgccatcggggacgggtacctcaagccgtacgtgtcgtcggtgcccgaggtgacggtgacggacctcgtcgaggacgacgagtgcctcatcctggccagcgacgggctgtgggacgtggtgagcaacgaggccgcctgcgaggtggcgcgcgcctgcctccgcaggggcagggagaagtggtgcgccgaggccgccgcgctg

SEQ ID NO: 57475 - DNA, 247 bp, Setaria italica
  Peptide Sequence Number=SeqID_123449
attcaaacttgagcaagaatgctagagtcatgttgagattggatctcacttgacttagacttgtttgagttggttaaggaccgatcttggtagctggactcttgagcactattccatacaaaccacatacttaatatgggaatggtaagccaagtagcataagtcgcaccttgccttgactggattcggccagaaatatatagatgcaccggacatggccgatcacacctcatcccatcccacaccg

SEQ ID NO: 57476 - DNA, 468 bp, Setaria italica
  Peptide Sequence Number=SeqID_123450
cgagacaggggagaacctgatgcttactgaaaacgtcggtcctgaacaaattgcagaggtggtgagccgatggactggcattcccgggtgaccccgggctcgggcagaacgacaaggagaggctggttggcctggctgacaggctgcaccagagggtggtcggccaggcagaggccgtgagcgccgttgcggaggcggttctcaggtcgagggccggtcttggccggccgcagcagcccaccggctccttcctcttcctgggccccgactggtgtgggcaagaccgagctcgccaaggccctcgccgagcagctgttcgacgacgagaacctgcttgtccgcattgacatgtccgaatacatggagcagcactctgtcgctcggctgatcggagcaccacctggctatgtttggtcctattgtaggtagggtcgggtacaaactaaaacggaaagaacaaaaagtaaa

SEQ ID NO: 57477 - DNA, 418 bp, Setaria italica
  misc_feature (395)..(395): n is a, c, g, or t
  Peptide Sequence Number=SeqID_123451
ttccttctagtccttggtagggtctaaaggtctttcttactttcttattgtagttgtcctttctacggttccgtagttggtattgaaggtctaagtttggtggttaggcttcggggcaagagcccatccaagaagttcctcgccacagaaatcaccaggttttagagtgattgaattgaagaagcccgagcggccaccattcgttgtggagctttccagtttcccacgaatgataaagagcatctcagtcactgggtcaccctcacggacgatatgcgtgccctttgtgcaaagtgatgatacaagacgctcacagatggcatcaagaagctgatcatccatctgggagaaaaatggaacccgtcgaacaagacccaagcaaaggtgcgcttaangtcacgccgaagatctgctggta

SEQ ID NO: 57478 - DNA, 396 bp, Setaria italica
  Peptide Sequence Number=SeqID_123452
taggaatagaaagacaacgaaggacccaaagttacgaccaagtggtgcgagtagtaccggaaagtgtgctgcaacttcttgctgtgcagccgcctgaactgattggcaacaaacttgagatcctcagcctggagggcaaaggcttctacttctatgagtgccttcacggtccgagtggatgaaggcaagttggtggtaggcttcggggcaagagcccatccaagaagttcctcgccacagaaatcaccaggttttagagtgattgaattgaagaagcccgagcggccaccattcgttgtggagctttccagtttcccacgaatgataagagcatctcagtcactgggtcaccctcacggacgatatgcgtgccctttgtgcaaagtgatgatacag

SEQ ID NO: 57479 - DNA, 381 bp, Setaria italica
  Peptide Sequence Number=SeqID_123453
tgtctattaggtacctttagttctattctaggtttctagtcttgtagtaaattccggtttcgttcttggtctttcctttagtcttttggctaatttccttcgttctctgaggagctttcctagtcctagctatgaatttgagtgcgaggctattcttgggtggagattcatcttcctcatccacttcatctaatctgacggaattgaatgactccctcatactcaagtcctttgccatcttcctcctcttgtaccgccgccaaaagctgcttggatgaagcacgaggcccaagttcgccagtggtgcgagtaggtaccggaaagtgtgctgcacttcttgctgtgcagccgcctgaactgattggcaaacaaacttgagat

SEQ ID NO: 57480 - DNA, 217 bp, Setaria italica
  Peptide Sequence Number=SeqID_123454
ctggaatgcggatgactgggcaacgcaaggcgggcgggtcaagaccgactggtcacaggagccattcacagatggtggcgtacaccctcatcggataatagtatgggtatggggcaccatacatctggttgtttttgatctgccggtacagcttgtcatcgacaaggaataagatccagtctttattccagatgatggtgtacttgtggtaatcttg

SEQ ID NO: 57481 - DNA, 378 bp, Setaria italica
  Peptide Sequence Number=SeqID_123455
aactaacaaagaacaaacgtaaccaaaataaataaccttaacaaagaaaactagtagactacaaggtccaacaccaggatagtccagcccggcactgatggagtggggttcaataacttgcccatcatcatcctgcagcaaatagctcatagatccatggagaactccaacttcaccctttgtcaaagttgcagcgtgcttgtcagtgtcaacaccatgaccagcggcctccactccaatcagcctcacatcttgatcatcaacaaactcgtggaataggcccatagcatttgatccaccaccaacgcaagcaaccaacacatcaggcttgccacccccatttcgtccatggcctgccctccgggtctcctggccaat

SEQ ID NO: 57482 - DNA, 250 bp, Setaria italica
  Peptide Sequence Number=SeqID_123456
gatatatcaagaaaattcagaatgtccatgttgttaattagaacagttagtcctgatatcaggatgttcaaagttcacaccataaacctgttgctatcagtatttggtaggtggattggaaatcaactagaccaaattggattgcaaaggatggtaagagatagcaataaacataccgtccagtgcctcctgatctgttacactgtcgtactcagcacgtccaatatccttcaagaaactgtgctcacgg

SEQ ID NO: 57483 - DNA, 226 bp, Setaria italica
  Peptide Sequence Number=SeqID_123457
ctttcaagcgtgtctctcgtctggagggcatcatccccgcatgggaggtctccagggcggggatgatgccctccagacgagagacacgcttgaaagcgtccagtgcctcctgatctgttacactgtcgtactcagcacgtccaatatccttcaagaaactgtgctcaggtccaacaccaggatagtccagcccggcactgatggagtggggttcaataacttgccc

SEQ ID NO: 57484 - DNA, 419 bp, Setaria italica
  Peptide Sequence Number=SeqID_123458
atctccagcttttcatatggagggtacagcgcagtacaactctcactggaaaacttgcaaatgagggttcagtttcttatgctcgtactgaacctccatccagcatgccaaatcttgaagctcttgccttaaattcacaaacagaggtatggatcattggatcctttagctgactgttgacttgttataggcatatcttatgatactatacaatctattgcttggtgcataattaatctgatggtctgacctttttatgcagagggcccatgcaccaatgctgcaaagtaaattccttcgcctcagacacttgagcattgctcttactgcggcaaactatgattatttgtccttggtttccttttttgatgctgctccttctctggagactttttgactttgtaattgttatttgtcta

SEQ ID NO: 57485 - DNA, 155 bp, Setaria italica
  Peptide Sequence Number=SeqID_123459
tcaatttgcagcaggaatcaagacagtactgcttgtaccagtggttcctcacggggttcttcaattgggctctttacataaggtacgctcagcttgtctaataaaataattttttagtatgattggtatttgataaccaatgtgtctacattgtt

SEQ ID NO: 57486 - DNA, 199 bp, Setaria italica
  Peptide Sequence Number=SeqID_123460
gcttgcaagggcttcatgtttggactccaggtcacggagctgctggagatctggcctgagcaggtcacccatggcaggagatgggtgagcatgtcattccacagctgcaacttaatctggagacgtgattccaaatcagcagcaagctcatagagttcttccatgaatttgtgcatatatgttcaggtaccagttgagg

SEQ ID NO: 57487 - DNA, 196 bp, Setaria italica
  Peptide Sequence Number=SeqID_123461
ggcagatctctgaagatgttgattacatgggttcttggtgctggcctgaatgtctgtggttcaggagactaaagttgaagtgagcttttcttagcatctgcaaacttgaggtacatcatcagtgtttgcattgatgtgcaattgtcctttttcttttcttttcttttttcagggctcactttaactttagtcgcct

SEQ ID NO: 57488 - DNA, 244 bp, Setaria italica
  Peptide Sequence Number=SeqID_123462
tgggagcagtgttgagtgccgtatcgacatgaagaatctgattggcgaggcttcttgtagaatctgtcaggagaacttcagcaccactgttaatggtatgtcaaaactatatatacaactgcactattttcccctaatttagctgttatgtgtactactttgcatctagaaagttcaaacaaagaaaaattgatatcaagtaactcatgaatttgtttcttattattgggctgatgaccatggc

SEQ ID NO: 57489 - DNA, 245 bp, Setaria italica
  Peptide Sequence Number=SeqID_123463
gtggaaggtgatgatgatgcgtgagctttgcccccatgcggatgaaacatggggaagagaaagtcagctgctaagccacctcctaagaagcggatggacaagctcgacactgtcttttcctgcccattctgcaatcatgggagcagtgttgagtgccgtatgtgagtatagtttccccagttttcttgttcatttgttgataccggatttggtaatgcattcagaattttgactcggtttctcta

SEQ ID NO: 57490 - DNA, 225 bp, Setaria italica
  Peptide Sequence Number=SeqID_123464
ttacagcactctgcagcgagcgaagcagagcaccctagccagtgttctgcatgccggcggcgatgcccttcatggtgaggatgagcgtgagctttgcccccatgcggatgaaacggttacttgcaactgtgtaatgtactggcattctcgaatgccatagtcaaccatagcttgaaatgacgccataagggtgtattggctgtttgatacgccattaggcagtat

SEQ ID NO: 57491 - DNA, 132 bp, Setaria italica
  Peptide Sequence Number=SeqID_123465
ccagatacgttatctcctcgatttggtactgcagacaatgcattgactgagtgggaatttcagccagcttactactatcagttagccgcaacttacttgagagagaagaggtatgccattgagtgctcatct

SEQ ID NO: 57492 - DNA, 243 bp, Setaria italica
  Peptide Sequence Number=SeqID_123466
tgttgcaatgtgaatggcggcttaaatgttgatggtaaaataaagccacgctagcctgatgcttctttggaagtggtcaggctagcgtggcttaaatgttgatggtaaaataaagccacgctagcctgatgcttctttggaagtggtcacggagacattttaaagtgctatctgtatgcgcctggagtttacctttggttctaacttactagcaatgaatccatgctattttttttggagaac

SEQ ID NO: 57493 - DNA, 360 bp, Setaria italica
  Peptide Sequence Number=SeqID_123467
taaaagaaaaaggaaaaaaggggtaaaaagtaaaaaccctaaaaagtaaaaaggttaaaagaaataacccgaacggaactttaagaaggaacgaacgaaggacaataacgacccgtagacgactagacaaggatgctgaggagcgtgaggtcgctgcgcggcttatggctctcgctggtctcagcgattggcgagcagtggatgtggagcatgaggaggatcatgtgaatgatccacaggaggcatggcaggaggttgatccagatgaatactcttatgaggagctagttgcattgggcgaagtagttggtacagaaagcagaggtctctctgctgatacacttgcttctttaccttcag

SEQ ID NO: 57494 - DNA, 248 bp, Setaria italica
  Peptide Sequence Number=SeqID_123468
gagcaccccgccgggcgatgttgatggcgagggcgagggcgccgagggctccgaggtgccgaggggagcgactacgaggaggagttcgaggaggatgaggaaggggagccagaggtagatcccgcggactttgaggacgacgaggcatacgcccgtgcgctgcaggatgctgaggagcgtgaggtcgctgcgcggcttatggctctcgctggtctcagcgattgtgagtacaaacgattcgtttcacc

SEQ ID NO: 57495 - DNA, 231 bp, Setaria italica
  Peptide Sequence Number=SeqID_123469
tttgaattgcagaaccgcgttacaacaattattgtcacagcacatatggcaagatctcatgaaacagatgttcatcagtagacatcaacagctagccctttacccacaaggaagaggagctgtactagagtgctcgtgcgttcggtgcttcaatggcggcgcagtcgccgagaccatgccataccatggtagagattgttggtggggaaagggctagctgttgatgtctac

SEQ ID NO: 57496 - DNA, 189 bp, Setaria italica
  Peptide Sequence Number=SeqID_123470
atgaacatctgtttcatgagatcttgccatatgtgctgtgacaataattgttgtaacgcggttctgcaattcaaactgcaagtgtttttcgagcagcaatggcaaaaactgcacattatgatggaagttgcaaaattggtgtttgaagttaaattgcagatttctttcagagttgtggacaaaaaaaaa

SEQ ID NO: 57497 - DNA, 423 bp, Setaria italica
  Peptide Sequence Number=SeqID_123471
gtatgtctcattcagttttacagacaagtcgacgaagttgagcactagtatttcccaaactctcatttattccgcgggctcgccaggtccatcggaggaacggcaggaatggatgggggagaatggagataaaggaggggaaaaaattgcttcagggaagaactctatacatgtgcactcaaagcatccttttcagaagctgccttcataggtgatctcagtattttcagaaacatcagctgctgggcttctgctctgcaccaggtgatgcccaactgatgtcacaaaattgcagactgcgcatttcacagacctagctccatactggtacataagcagcatacggcagttcccgcagtttacatgtgcaacttgattcgctgcaacagaaaataagggaatcatttatcacttgtaatgttt

SEQ ID NO: 57498 - DNA, 430 bp, Setaria italica
  Peptide Sequence Number=SeqID_123472
tacggtagtcttgttcggtatttcgtattgtaagtctagtaagtattcccggggtcggtagttacgagggggtttcggaggcagcccggacaagcctctgcagtccaactacttcctcaacatcatgctcctcatcgcggggctggcgttcctgacgtctctggtcggcaactgatgaggatgttacggtcctgaagtttgcgagtgtccatatagcaaattctgtgaacatatatggaacatatacacggcgtgccaccatgtgactagcatcagagctacgtacactgtaaacatttttttttgcgaaattcggaaagaagactagagaaaaggagatgtatagaaagtgttccaagaaccatcgacctaactaataataatgatgtatttactatgaaactgtgaatggatggatgtgcacatctgt

SEQ ID NO: 57499 - DNA, 284 bp, Setaria italica
  Peptide Sequence Number=SeqID_123473
ttccgggtcggtagttacgtaggggtttcggtaggtctagtcccggtactaagtccttcttgtctagttcctaacttactttccttctaactattctattgtcttccttcatcgcgggctggcgttcctgacgtctctggtcggcaactgatgaggatgttacggtcctgaagtttgcgagtgtccatatagcaaattctgtgaacatatatggaacatatacacggcgtgccaccatgtgactagcatcagagctacgtacactgtaaacatttttttttgcg

SEQ ID NO: 57500 - DNA, 238 bp, Setaria italica
  Peptide Sequence Number=SeqID_123474
ctgctctttcgatggaagctggctcagaaacttcatgtccttgaagtaactgagccagcttccatcgaaagagcagaaggatcaggatcttctagttttgcccactgatgccgcattatttgaggatccatctttcaaggtgtacgcagaaaagtacgcagaggaccaggaagccttctttaaagactatgctgaggctcatgctaaactgagcgaccttggtgcaaagtttgatcct

SEQ ID NO: 57501 - DNA, 259 bp, Setaria italica
  Peptide Sequence Number=SeqID_123475
ggaactgagtgaggacccaaacctaaaggggtcaatgcaccagagatactctgacaaggaatctccaataaggccaccttcctccccaagtatgaggtggtttttgaagttcttcatgacaacttccaaaattactgattcactcaacttatctgtgctgaacaaaatatagagcagtatattcaaatgctaatcgtgttccactttactgtatgaaaagatgacttaggcaacatttgaagtcttatgtgaaaggcac

SEQ ID NO: 57502 - DNA, 506 bp, Setaria italica
  Peptide Sequence Number=SeqID_123476
attgttaatttattactgttccgtatgaggatcattgtggaaagtaaagtaagatattgatttggagctagcatagatggattgagtggtaggtttcaaactaacacgttttgggattggaaagcaaagaagacttcttataaacctatagaagcaattaccctgggcaagcctttccttatgcatggaaaatatatatgtcgaatgatccacttatgaacaggctgaaaaaatgtagaacaattatcagtacttgaaagatatcaatgccaattaattagacaactatctcaggctttgtgacaggtcttatcagtcactaccataacaattgtattagttaattagttacagatcttatcagtccctaccataacaatggtattagtcaagtaatggacatctagatagataagagtaaagaagtatgaagatgtaggtaacaagaagattaccatgttccacattctccagtactgagccaatccaaatattgtattcgtcta

SEQ ID NO: 57503 - DNA, 524 bp, Setaria italica
  misc_feature (1)..(1): n is a, c, g, or t
  Peptide Sequence Number=SeqID_123477
nttttaactcgatagtactttgaatcaaatttggattagtgctttgaatgtgacgtttttgaaccaccttttctgctttccaaatctgtaggcttcccttttttgttttctttcccccagttagatttgatttgtagctactcatagctgattttcggtcaatgcatatatcatttcagatttccagtaccaatttggggagcagcagaacctgatgtgcctaaccctgtttttctcaccccctactcgattgctttttacagatggtcggtggaatccggcacgccgggggccgcggcaacagtgggtaagttcttgaaccaatcctcccccctttgcagggtcaggaaaagccacgctggtgtgctcccttatcttggagcaaacatggccgggatccatcatcatcctctgtaccactttcagtgcctggtcatatggccactgagcccccttcatcatccttgtgcattctcactcagagagggctgggccggaccggacctgaccaacctttctttcac

SEQ ID NO: 57504 - DNA, 308 bp, Setaria italica
  Peptide Sequence Number=SeqID_123478
taattacccttttaggtaattagttactaattctaattgtcaatgtcacattaaaggggtgccaagtccttgcgtcgaagatgccgatgctcaatgtggagatcatgaatgaactagatggaagcagtgaaatggaggaaaaccatggtgacccctctagagtggataagttatatgtttaccgcacaactgctggagcgagggatgatgcaccaaattttgtaaaatcctatagagctagctgcagtagcctggtatcttctcaccctaaagatggtcgtggaatccggcacggccggggccgcggc

SEQ ID NO: 57505 - DNA, 186 bp, Setaria italica
  Peptide Sequence Number=SeqID_123479
cggatgcagagtctgaatccggcttctttggctcaaggatacagagtctgaatctttgagccaaagaagccggatgccataacaaaccagccgttagatgaaggatttggtgctattgttcgtgagtgcagggggctaagacgactgtcaatatcaggtcttctcaccgataaggttgttttgcat

SEQ ID NO: 57506 - DNA, 177 bp, Setaria italica
  Peptide Sequence Number=SeqID_123480
aaaagccacgctggtgtgctcccttatcttggagcaaacatggccgggatccatcatcatcctctgtaccactttcagtgcctggtcatatggccactgagccccccttcatcatccttgtgcattctcactacagattacaggggggtgaaaagaaaaggttggtcaggtccggtc

SEQ ID NO: 57507 - DNA, 225 bp, Setaria italica
  Peptide Sequence Number=SeqID_123481
catctggagggctggatgttcacccagatgattttagcttggacaaatatttcgctgcaaagacccttgtctcttcaaggtccttccagatagataactatcatggatttggaatggttccactggctgaccttttcaatcacaagactgatggtgaacatgttcacttcacgtctgcatcagatgactcagactcagatggtgaagatcatgatgaacagagtg

SEQ ID NO: 57508 - DNA, 478 bp, Setaria italica
  Peptide Sequence Number=SeqID_123482
gacccaaaaacctaccgttaaataggaccgacgacaacggacaatacaagtgccgccgcgcgtggccgtcgccgcaccctctttgaccggccgcatcagaggacgcgcgcacgacatcaggaccgtcgtacgcatccacctaccgcagccggtccgccgtttcgccgtcatcccgaactccagcggacttcaggtatggccgccggcgctcttcagcttgacgtgtcgcgtgccgatccgttgacgccgtcgggcttcagacccgctcgccgtcgtcaccagaccgcctcgccataaggtccacagcggggcccctcgacggatccgcgcgcgactaggttgcacgccggctccggcgagaggacccgtagtggagcacggcaagggcggcggcacggcggccatcggcggcgctgtgtggagaagaagggaggaggcgagagagaaaggctgctcggtgtcgggtacttttgcggcg

SEQ ID NO: 57509 - DNA, 255 bp, Setaria italica
  Peptide Sequence Number=SeqID_123483
ggagagggtgatatgttagcttttgacatctgctccttaaaaaacctcaacttgcgagccatttcactacaccttttgatctgggcagcatatgtccgttgaaatgggctcttctctgcattaaggtctttgaactggatgaggccgaggtcatcatacccgccgagtccgcgcgcacctcaccgtctcctaccttggcgacctcggcctcatccagttcaaagaccttaatgcagagaagagcccatttcaacg

SEQ ID NO: 57510 - DNA, 166 bp, Setaria italica
  Peptide Sequence Number=SeqID_123484
tttagtgaagttttcgttcaccaactgatccacacaatcgaatttgttcttggtgccgtctcaaacacagcttcgtaccttcgtctttgggctctgaggtaatgctgctttaagcagtatcttcaaacacatcctcacctactcaccatcctatacttcattattt

SEQ ID NO: 57511 - DNA, 230 bp, Setaria italica
  Peptide Sequence Number=SeqID_123485
tcatcaaattccagatgagcttcatttagttgtgtaggagagggtgatatgttagcttttgacatctgcttgctttggtgtccgtgccttggatgttgattccaaagccagttctattgaagaagcaacatgagcgaaggcatcaaggtcaccaatacgctatgcttcagggcaccgatgaatcagtgggagcagagttggggaacttcactaaactcaaactcctcatg

SEQ ID NO: 57512 - DNA, 230 bp, Setaria italica
  Peptide Sequence Number=SeqID_123486
taaactactagtctttcgttacctttcgttcttttgggtcttcttgtagttcttgcacactcggagttgtccactgtattctacgataaagttctcatgttaacgtggaggatgaacaatggttgttgcccttattcttggcgtcatcatcttcatctttgccacgattggtgtcttgcttgttatggagactctgagtgcattccttcacgcgttgaggcttcactggg

SEQ ID NO: 57513 - DNA, 231 bp, Setaria italica
  Peptide Sequence Number=SeqID_123487
ctattgaagaagcaacatgagcgaaggcatcaaggtcaccaatacgctatgcttcagggcaccgatgaatcagtgggagcagagttgggggaacatcatgatgaatcacatgaccatgaggagtttgagtttagtgaagttttcgttcaccaaactagaataccaacaacaaatacgaaatttagttacttaggtagaccgtactacaaaacaactaagtactttaactaa

SEQ ID NO: 57514 - DNA, 225 bp, Setaria italica
  Peptide Sequence Number=SeqID_123488
tccggctgcaagatgcactgaacgacaggctaagagatgagattcagcagctgaagattgcaacaggacaggtaaatgccaacattggtaaaatgggaagctttggtctgtccacatttggaggcaatccacaaagtttccagcgcagccatatactagttcgtctttcttggtcttgttctttcttagttcttagctgcaagcagctccagatccactcccagc

SEQ ID NO: 57515 - DNA, 336 bp, Setaria italica
  misc_feature (67)..(67): n is a, c, g, or t
  Peptide Sequence Number=SeqID_123489
atgtcaacttaatactgcatcttaaaccttgcccactcacagaaacgatgcgaagccgtatttgtanacctgaatccaacttgtgcacatccaataattctctcttgttctccctgccaagacgcattatcaattttattctagacgcccactaatcgcattttgctgttgcagctgcaagctctggttggttttgagaagaccatcaagcatctcgataaccatctggtggaaattggcaccaaggtaaagacatagccacccagcagcaagattattgtcatttgcaacagattagttcaatttcatcacaaattcgcagagtatcaccaagcc

SEQ ID NO: 57516 - DNA, 515 bp, Setaria italica
  Peptide Sequence Number=SeqID_123490
cctaaaaagataggaacatcctcagtacagaaaactatgaatggattaaaatatagaccatgcataatgtaactagaaaattacctgctcagtcatctgttgatacattccaggaccaatttgtcgatggtaaacttcgttcctacaattgcactgcctctttcccgctgctggttttatgacatttttctctctccaaacctatcacatgtgaaaatagaaaataataaacttttcctttgtgcacgacacagtacagcccacttaagaaatatactaggaacaatactagaggtaacacttttcaaagcatgtttggagttgtcaggacaaaattataaaagcaaggtgaacactcagctatacttgtctgtaagctagataaatcaagttacctttagagaaccgcccatgtacaagtcctctagtgaagcatccagttcaacaaccacctcgtcaccctttaagatctgttcttcctcctcttccatcccaccaccaccaccaaaaagcta

SEQ ID NO: 57517 - DNA, 260 bp, Setaria italica
  Peptide Sequence Number=SeqID_123491
tcctccgacgcgcccttgggcacttgcagcacgtcgtagtagctcttcccggcgatcgccgcaacgagatgcagtaggacgaggaaggcggcagcgatccgcgccgcccctcccttccccggtgccgccatcccgctcccgcctccgccgcccctctgccgctgcgcctccgccgcccctccgccgcgccctccgcctcactcactcctccgcgcccctccgccgcgcctcctcctccgcatccatccgcagcgcccccc

SEQ ID NO: 57518 - DNA, 253 bp, Setaria italica
  Peptide Sequence Number=SeqID_123492
ctttctctccaaacctttagagaaccgcccactgtacaagtcctctagtgaagcatccagttcaacaaccacctcgtcaccctttaagatctgttcttcctcctcttccatcccaccaccaccaccaaaaaagctgctgaagataaggcaatgacctgcatgcaacagctacaatctccctgctgcaagctctggttggttttgagaagaccatcaagcatctcgataaccatctggtggaaattggcaccaa

SEQ ID NO: 57519 - DNA, 251 bp, Setaria italica
  Peptide Sequence Number=SeqID_123493
gcgtggcgaacgcggcggtcggcgagacgcggctgcaggcggcgctggactacgcgtgcggccacggcgccgactgcagcgccatccagcgcggcggttcgtgcttctatcccgacaccaagctcgcgcacgcctcctacgcggtcaacagctactaccaaaacaagggccgggcagccagcgcgtgcgacttcaacggcgctgcctcggtagtcttccagaaaccagaaggcacctgcgacgcgtcggcg

SEQ ID NO: 57520 - DNA, 238 bp, Setaria italica
  Peptide Sequence Number=SeqID_123494
tgcacagccatctcctctgccaacgcaggcgagcatggcgcttactcgcggcctcatcgtcgtcgtcctcggtgccacattgccgctcctcctcctctcccacgaagcagaggcgagcgaggttggcgtgagctacgggacggtagccggcaacttgccggacccggcgaaggtgtcgaagctgctcaaggataacggcatcaccatggtcaggatatacgacgccaactcagcggtg

SEQ ID NO: 57521 - DNA, 443 bp, Setaria italica
  Peptide Sequence Number=SeqID_123495
tggtgaaggtggtgatgcaattgttttttaacccccaaaattggcagcgcggagaatggcagatgaaagcgatgcataggccaaattagaagtgatccgaaaatactgctagtttaattagatatgtggtttctttgcgcccactggaatctgaatttgtttgtacctacacacgcagatttgaactagggatacgaaattgcagtcatgacaacaatctgaaagtgccgtcttgagttcccaatgcaaaagagaacgaacgaaaggcaaaattgcggcacatacctcgatgccgtcgatctccaggaacaccttctcgccgcccttgatggtgaactcggacgccggcttgggcgggccgttctcgaggtcgccggcgcggctcagccgccgtactgcaccggcaccagctccggccggatgaacttgtatagcgtctctgc

SEQ ID NO: 57522 - DNA, 265 bp, Setaria italica
  Peptide Sequence Number=SeqID_123496
ccattaaatttaacaatggataaaatatttgtttccttttttattctctttgcagctatggtgccgtactggagaatctacaatccagagctgacataactgagagaataagaggatgcattgtagactctgcaccagttctagagataagaccagaggtttgtgcacctgtcctattttcttactgaatcaggtttagaattaaatgagcttttaactgttagtagaaaacgtcccaaggttctccatacattagcaaactgat

SEQ ID NO: 57523 - DNA, 310 bp, Setaria italica
  Peptide Sequence Number=SeqID_123497
accttcaactgaatctcttgatgggcctattgtaaatggcagcttgaacagagtttagtcttcttaatgtcatgcgaccatcatggggggaatgctttattctgtcaactctgcagaaattcttcgagattgtcctttacgtgcctgatataaacacgtaagtccatttactgtttttagtgacttccctggttaagtgtcatggacagctcatatatttgtgccaaccaacattcaccattgtatccattaaaattagcatggctattctgttaatctgatgttacgagccttttagtatcatacttca

SEQ ID NO: 57524 - DNA, 440 bp, Setaria italica
  Peptide Sequence Number=SeqID_123498
atcgcggcgtttcttgagttttgcagctggtgaagcaagccatgattcaagcatattcccttgtggtgcttcattgaagaataagaaccattaggattaaggagctaagtgtctacaaaataagcaagtcccagacgcttatttaggaaaatgagggtagtgtttgctggttatagagctactttttttacaaatttagcttagcgtgcgaatttttgagaattaaaggggtaatgtataaattgtaagaactgttgaattgttgcatcaatttacagtataagcatcttgttatattattatttcaggcatatcaacaacagtgtttcctttataagaaaaacattgcaaaagcgtttaaaaaaattgaaaatgttacagaggactaaagcaacatgtgatgggaatattgcagtggttccagcatgcacatatctcaa

SEQ ID NO: 57525 - DNA, 426 bp, Setaria italica
  misc_feature (28)..(28): n is a, c, g, or t
  Peptide Sequence Number=SeqID_123499
ggctgacatggaaattgttcttgtacgntaaaatcactagaatttagattcatgtataagagtttcatcatcatttcatttgcatccgtacttgttgtcaatgatctgaattagaagtatttttgtagccggagaagaaaaacccgacgcttacacctatggattgggtcaagtttctcatttctgctgttatcggtttggttaccctagttggttctcttgaaatgccaaaggctgatgtatgggttgtcatagcaatcttgtctggtgtgattgggtactgtgctaagatctacttcacatttcaacaaaatatgacaatttatcagaatttgattacaaaatcaatgtatgacaaacagcttgatagtgggaaaggaactcttctccacttatgtgatgacgtgatacagcaagaagttaaag

SEQ ID NO: 57526 - DNA, 291 bp, Setaria italica
  Peptide Sequence Number=SeqID_123500
ctaggattgatagattgttttcttaagaaaacaagcatttgtcaacccaaaaaagaaaaaagaaacaaaccaaaagaaaagaaactagatgaaattaaatgaagacgaggaagaaccagaattatttgttgagagaattcgattagaaaaaattgaactaaggtttctcagtgttctcattcaaatttggtatactaccaaacttatcctcttacatgcctctacccttttggtgacagtatgaaaaatctgatgagtaagatgacaattcaagaacctacatttgatagg

SEQ ID NO: 57527 - DNA, 264 bp, Setaria italica
  Peptide Sequence Number=SeqID_123501
ctgatgaagagtatgatattgcgcaatctggaaaatatctattgaatcttccaatcaaagttgacgaatctaagctagacaagaagttgttgacaaaatattttaaagagcatccacatgaaaatctaccagaattgcggacaagtatattattttcgccggggcgttggaattgatcgaacaactgactacttttcatggagaaagtagatgttaattgttatttatttcccgttagttcttggaggtcattgctcaggttta

SEQ ID NO: 57528 - DNA, 392 bp, Setaria italica
  Peptide Sequence Number=SeqID_123502
gggatgccatcttttagcatccattcatccattgtgtgaaagaatcattgaatccagtattcgctacgcatcatttaactgtttggtataataatatttttgtcttgtgtcagatttcacgattacgtgagtatcagggtgtagatccacattttgatgtgattgcaaggcagtaccacgagattgtaaagaaactggagggtatgcagtggacaattcaccaggtggaaatggatctgaaacctcaccatgatcacgcagctgtctaaaatccatttttctggaagccatgtttgttacctgaatgctgtggacgtaagtaagtggttgtggtcatagtgatttgacttgacgatgtgttgtttgtgctgcagaccgatcaggctggatcg

SEQ ID NO: 57529 - DNA, 425 bp, Setaria italica
  Peptide Sequence Number=SeqID_123503
tgttggttaatttcggtaggtctagtttgtaaccttggtagtttggttggttgtttccttgtattcgttttctcggaatcacatctgattatctctaccaggtgcaacaagagcagccagcgatgtctgtggacatggttgattatcagagaactttggctagggagattgaagcccggttagaagccaagtgtgatgctttagctgatctatttgctatggatgaaagggattcatcatccatcagtcaaatctcaagtgccaggcttccagaaagggtgaaattaatcatcgaagagatagagaaggaagaggcacatttactggaggatcttgcttcaatggatagaaaatttgcagaacactataatgtaactggagcaaattcttgctgtgcttatacagtttgttaaagacaagaaatt

SEQ ID NO: 57530 - DNA, 413 bp, Setaria italica
  Peptide Sequence Number=SeqID_123504
gcggttccattaaatacttataatacatagatataaaaagttataaacagccacagttagatcttggggagagcaaaagaaaaggacaataacttcaagtaaaaaagaatagaagaattagcatgcaatagaactcagtaggataacaaatattacatctaggtatttttttacaaagaagcacacatacctggtcaccacggcgtggatcaacacctaacatcacatgagcttcaaccgtttcaacaaaattcctcttcttctcgtttgtactagtcttgactaggcggatggcgtcaacgagatcaatggtgaccttctgcggtcgcttgacgacaggtatgatcgtcgggtacggcacctgttcctcctcgaccggcaccccgatacgctcctcgtggcccgcgctgcgt

SEQ ID NO: 57531 - DNA, 505 bp, Setaria italica
  Peptide Sequence Number=SeqID_123505
gatggccgctgcatgttcgggcgtggtaagttgtcgcataatcttcttctgtgtgcgcgtagtatgatgattattgtgaacctttattactcgaatctattaccttcgagtttgaattctagttgaaacaatgtctcttcaagcggttttttggcatctatgcaaattcacatcacagagaaacccggtgcgttgcttgtaggctaaaggaatggcaaagaataaggggattcctttgaccccgagggaggagttacaagatgcaggtagcctgaaacaatgcctcgaacatactccctccgtcaaaaaaaaacaagtcattctagaaattttaggacaaattaacaagaaggtaaaatgaccttgtttgcccctatttattagccatatttggtgctaattgacagctgcatgcacatgcacataccatatagagtaaaacgacttgtttcttggacaaattttgaatcatagaatgacattgttttttgggacggagggagta

SEQ ID NO: 57532 - DNA, 253 bp, Setaria italica
  misc_feature (235)..(235): n is a, c, g, or t
  Peptide Sequence Number=SeqID_123506
aaaggataaggcggccagatttctggggtggagagtcagaactcctggttttgtctagactgtgtcggcagccaatcattatttatattccagagcgcgagcttggctcatatctatcctgtatgtttacagtaccatggtcgtggtaatggcttcatccccatagctgaatatggattggaattcgccaaaaattcaaagaattggaagaaaaaggcacctgtaagacttttanatagcgggagaatcacta

SEQ ID NO: 57533 - DNA, 234 bp, Setaria italica
  Peptide Sequence Number=SeqID_123507
cacagtgataatctatgctcttgatgcacttctgtaactctttatatttatgagttcagctctagctttttaatttgaaatatatgtcatccgcttgtcttgcaggtcagggaagacccagttagctcatactctatgtgtctccactcagcttccaatccacatgcatgggggaaatgggaaggttgcctacattgacactgagggaacattccgacctgaacgtattgtgcc

SEQ ID NO: 57534 - DNA, 349 bp, Setaria italica
  Peptide Sequence Number=SeqID_123508
cgcaggagacgtgaagaagctgcaggatgccgggatttacacttgcaatggcctgatgatgcataccaagaagagccttacaggaatcaaaggtttatctgaagcaaaagttgataagatctgcgaggcagctgaaaaacttctgagccagggcttcatgacagggagtgatctccttcttaagcggaagtctgttgttcggattacaactgggagccaggcacttgacgagctgcttggtggagggattggaaacactttgcatcacagaggcattcggggagtttcggtcagggaagacccagttagctcatactctatgtgtctccactcagcttccaatccacat

SEQ ID NO: 57535 - DNA, 368 bp, Setaria italica
  misc_feature (28)..(28): n is a, c, g, or t
  Peptide Sequence Number=SeqID_123509
agtctagttgctgcttcttgatgttacnggaaaaaaatagtctaggttactgatggaaacagttatttttgactgacaaattgattattttgaacaatagaaattgaatgccattggaatgaattatcaagaatagtctgacagcattaagtgcccttagttgcagttttctaagctacttgctcaatcttatgctggtgtaatgcttcctttttttaccccatactgtattatatgttctatttgctatttttctcacatgatttccctccttctgtcaatattgtttctttctttatagggctatgagacatggacttttcattttaaacaacatctagaggaccacctggacttaagtcttttta

SEQ ID NO: 57536 - DNA, 404 bp, Setaria italica
  Peptide Sequence Number=SeqID_123510
tttctgtcaataccccaactatgcaacttctctacaatgagattagcatagttggggtattgacagaaaactagctgctgttgtactagacaactgcagtggtggtgaccttgttgccagagagcttctcagagttttgcagcccaggagacttctattaaatggagatttgttccaagtacgctcttgtgcgcatattctaaatctcactgtccaagaaagctgggaacatgcatcggatataaccgatagagttcgcaagatgattaactatgtcaagtttgaaaggttccaaaagtttcaagatatctcaaagctactgcatatggatcaaaagctgttagttgttgattctcctgatagctggtcgtccctttacataatgtttgagtcagcatgttact

SEQ ID NO: 57537 - DNA, 161 bp, Setaria italica
  Peptide Sequence Number=SeqID_123511
agagacctttctagtattcgaggcttcactaagagcagcccttgcttcaagtgcttgtagtcttgaatctagttcctcagtaccagaatcacgagccaactcttccgttggatcataatgacagcacaaatgcccatgatactacatcctctattggagaa

SEQ ID NO: 57538 - DNA, 193 bp, Setaria italica
  Peptide Sequence Number=SeqID_123512
ttagttaagttactttgttcttattgtccctagtaaggtattctaggtagtcgttaaagtcgtcttctattgacatcaggaacaacgcggacacgactatctacagcatcgaaaagagcttgggagagtacagggacaagatccctgtggaggtcgcatctgagatcgaggcggccatcgctgacctccgcaa

SEQ ID NO: 57539 - DNA, 437 bp, Setaria italica
  Peptide Sequence Number=SeqID_123513
ttttttttttgttcttaaaaaatttggttattttactttttaacttctaactattattaaaggatttacaggagagaacaaaccacttgatgtttgctatgaaatataaacatatgctcacaccaccaccctactattcccactaaggcagcaaaacctgcttaaattatcataccttgaattaaagaagaaaagaaaacagtggcttctatatccatacgtgctccctgcggtactctcgtacaatgactggtacactagtaggtgggagcattccataatctgttatgagcattgaaacataatcagaaggggtgatgtcatacttaagattcagaatatgaagattttcgttctcagcccagtttttgagatgactcaaactttcacccctgggaactcttgaaatagcatctgggtcaccaagttcattgaag

SEQ ID NO: 57540 - DNA, 206 bp, Setaria italica
  Peptide Sequence Number=SeqID_123514
atgagcatggtcaaaaatcatttcgacgacagagggtgacccatatgtcaatagcacaaaaatcagagatgatgatgtgctattgacatatgggtcaccctctgtcaatagcacatcatcatctctgatttttgtgacagcatgactaacaatgaccttgcctgcaactgacatcgatcgctttattaagttgagaagtattaatt

SEQ ID NO: 57541 - DNA, 248 bp, Setaria italica
  Peptide Sequence Number=SeqID_123515
gccacatgtatccactctgatgcacttagtttctgacagcaacctatggctaaaatctcactgaagtttaacctctctgtaaaatggaaaacctcagctctcatcatccgtgtccatgctggagagcaagcccttcaatgtctcgtatgtcataaaggcaattccaacactaggaacgaccttgaggtactcaggggcgatacctctataaaagccacgagggccttccttctgcaaaatgtcagaaa

SEQ ID NO: 57542 - DNA, 226 bp, Setaria italica
  Peptide Sequence Number=SeqID_123516
ctaaccccttgaaacacagtgtcggcaacaaaatcattagatacacctttaattgataatgagaaagaagtggcagttgctgacagagagcatgctcaagttgatacgctggataatgaccgtcttcaagatgttccatctgatttgcagaggagtactgatgcaaacggttcacgcccagatgtggctctagatagctcttctggccaaacttatgctcaagcag

SEQ ID NO: 57543 - DNA, 449 bp, Setaria italica
  Peptide Sequence Number=SeqID_123517
aacaaacggtgaagatatagctattgaaagcaatgttgttgtaaaacagcttctaggtcttcagatcaacgcagagaaatatattttggaataaggaaaagtcttgttgagttcgatgaagttctggaggtccaaagaaagcatgtatacaaccttaggcaggtgatattatctggtgactctgaaagctgcagtgaacaaattttccagtaagttgacttttgcctcttgtatttagcttttcaaagtagttaatgaaatggtagagctataaaccatattaatacactgaatcatttgggtcaaagttatgaagtagaaagaattaagaatccatcgtactttacgctcattattttttatctttctttttctcgaacatacaggagagctgcgtatctttgtattaagagagaatagatggtccaattacaaaaaagaatacccca

SEQ ID NO: 57544 - DNA, 317 bp, Setaria italica
  Peptide Sequence Number=SeqID_123518
ttgttctttgttccgtttcttttcttttcttatttctttcttaatttgttctttagttgtcctactacggtcgtactgactgtggaagccctactgcactactggtcgtctcccatggaatccgacgagatcttcaacacagaggatcaatagctgagaacaccagtctaatgcagagtaaagtttcaagggagcagtagagcaagagatctagtagtgcacatttgtacactcccgagccccgattcgcctcctctccctttgttgaagaatcagcatcgcagtgggctcctccaactcctgagttgggctctcac

SEQ ID NO: 57545 - DNA, 371 bp, Setaria italica
  Peptide Sequence Number=SeqID_123519
aaatctcaccttgtgtaggttcaaatcatcctccttgcaaaataagggtaaggctgcctaaaaatatgcttccctaaccctaccttttgtgggagctctctgcactgggtatgccctatacagttttgagttctgtgattttcaaacaactattgtctatatctattgcagtgttgagagttctgaatacttgtcagatctacttaaagctcgcaatattcctcacaatgtccttaatgcgagaccaaagtatgctgcagagaagctgaaataattgcacaagctggacgaaaacatgctattacaatttcaactaatatggctggcagaggaacagacattatttttaggtggtaaccccaaaatgcttg

SEQ ID NO: 57546 - DNA, 417 bp, Setaria italica
  Peptide Sequence Number=SeqID_123520
aaatttagcatattcctaaactcaagcaatcaaaagcatagctacttagtaccaatggcctctagcatacttgacatccattatcagaaattgcaaatggatcagctggtacgtagtaagggtttggatcactcaaaatagcataatcacaataacaacatcgagaagtaaaattcctaaagcatgcatgcaaagctacacacatcatttgacagcatcacagctaatttatgagacaaataaataccaacatcaagtcgccaggagcacttgagctcattgaagtgcaagtgcaaccctaggcacaaaatgattcgccactagaggaaatgcgaaacacttacctacatgagacggcagcacagtgatgtgagggtgcgagtggtaccatccgatcacccttgttagtttcttaat

SEQ ID NO: 57547 - DNA, 247 bp, Setaria italica
  Peptide Sequence Number=SeqID_123521
ttatagctggactcaaactaaatgacaaaacgtgaaccaggtaagttgacatacattatggagtatatttggctagaatgagacaaggaggctgtgttctcaccaatattccattagtttacagagagaagagttgtatgtagatgtatggtgaatagatgtaaggggatgaattttcccatcacaaatattttgttgcatagcttgattatatgctgtttgctcctcttcgaaaaggactcgttgc

SEQ ID NO: 57548 - DNA, 235 bp, Setaria italica
  Peptide Sequence Number=SeqID_123522
aggaggaggttgtttgcctgcaggaagcacaccatggccatcaaatgcagcacggacagcacttcgtaccaaggatctgccatggacgtctcctgcagctcagcaatacaccactctgaaacgttcagaaggattcgcacagatgcgtattgatggggactcgtccttacctcagcaacatcttcttggttagcccatacaaattgtactttgtttctcagctcactccctcttt

SEQ ID NO: 57549 - DNA, 442 bp, Setaria italica
  misc_feature (25)..(25): n is a, c, g, or t
  Peptide Sequence Number=SeqID_123523
ttttctaaatctaatcattgcaccnaaatttcccatctacacagccactttgtacagggtggagaaagccaagaacaagtgaaagaaagaaagaagaagaagcaaagactgaccatggatggatcgagtgagctagtggacagcttgctagagatcgagagatcagagcacttatgcaggaaaaaatacacaatttttttttgctcttttcaacgggccatctagcacacaagcaaactcacaacaatctacaaaacctagcccatggatgatgatgatggtgacaagcacaattcaagaggttgatcaacagcatcaggaaggagagggaggacacaaaagctttcattgttggtagttgtcgttggtcttttgttgtcccctattgtccttgttcttcttcgttcttttccccatcggtcacctcaccatcatagctcct

SEQ ID NO: 57550 - DNA, 259 bp, Setaria italica
  Peptide Sequence Number=SeqID_123524
cctatcccctgtgtgccttgcctatccccttttgcgtgtctcagcctggaggacctcgtgaggatgttcaaagtccaggggctcaacgaaaccgacgtggtcaccctctccggcgcgcacagcatcggccgcgcccgctgcctgttcctcacgaaggaccgcctgtcggccatgaactccacgtacgccggtcagctgaatgagacctgcaagatcaacgacacggtgaaccaggaccccttcagccccgaccctcgac

SEQ ID NO: 57551 - DNA, 252 bp, Setaria italica
  misc_feature (209)..(209): n is a, c, g, or t
  Peptide Sequence Number=SeqID_123525
gggcggcgagcgagaaggggtgggcgaggagggcggcggcgagggagagcgcgacgacggcggcgtagttgacgcggaagccgccgtgacggccgccgtggagaaggccatcaagcagcagggccgcggcgttggcgccggcatcatccgcctcttcttccacgacgccttcgtccggggctgcgatgcctccgtcctcctcaacaacncggtcgccgcgggaacaacacggagagggaagccctccaacaa

SEQ ID NO: 57552 - DNA, 281 bp, Setaria italica
  Peptide Sequence Number=SeqID_123526
ctaatgcacatgaacatgctgtttattctgcacaggagccaaatggagcaaatgggcgccatagatggctgtttattgcagcagctccagttgtaagtcttgtcagtttagctctagttctatgcttcaccaaccctgctggcaatgttagaaggcaactttaccatagatcccagagtacaactacaacacgtgtagatacaagaagaagttggtggtctatgttctaattatccagtacaacactggcaacaatcacacgtcatcaaacagcaatttgg

SEQ ID NO: 57553 - DNA, 224 bp, Setaria italica
  Peptide Sequence Number=SeqID_123527
ctttccttgagtccagttcatgtctcaagaagtgcctcacatttgagatttgacagaaccagcttttcaatgtctgatcagcaaagccactccagcagctatggactcctcaacactcagccggatgtgcaatgcctagtttgcacaagaccttttactctggatactgagattgccgatagctttgaagctttagccatatgcagggagtgcaagatgactgt

SEQ ID NO: 57554 - DNA, 220 bp, Setaria italica
  Peptide Sequence Number=SeqID_123528
tttaacgttaaaggtaacttaacttaacttaagttaactaaattacttagaaactaattttagggaagatagaagtaatacaggagattatggataagtggtcgcaggttcgttccattagcttttatggattgcaggagcaaggaatccctcatctgcaagagctgtattccttgagagtactggtttttttatatagcagccatcttggtaaccaaca

SEQ ID NO: 57555 - DNA, 271 bp, Setaria italica
  Peptide Sequence Number=SeqID_123529
ttagaatactaaaaattgttgatgccagactggaatcagagataaatgggcacatgtttttctgcagcacatggtgacacccaaatttagctttgctatttcttgaagctgccattagagaaacactctcctctttttttcatttttttggtactgacttaactcatccatggtgcttgattcacacagggtactgcagaggtgggcagattatgttcttcgtggtgagcataatatgtggagagctctaatactatacgttgctgctgga

SEQ ID NO: 57556 - DNA, 309 bp, Setaria italica
  misc_feature (2)..(2): n is a, c, g, or t
  misc_feature (4)..(4): n is a, c, g, or t
  Peptide Sequence Number=SeqID_123530
ananaattagaaaccaacaaattagactacttagacttaaatgccattgagcttaattgcccataattcgcagcaaatgaaaggataccatggcatgacaagctcgatggtgaagaggctttgcaaaaacgtgttcatgagcttgtctctcttgggaacttagaagctgcggtctcactgttactttcgacgcccccctgaaggatcaaatttttacccaaatgcattaagagcagttgtgctgtcatctgcggtttcacagtccttgcatgaacttgcagtgaaggttgttgcagccaatatggttag

SEQ ID NO: 57557 - DNA, 147 bp, Setaria italica
  Peptide Sequence Number=SeqID_123531
gtttcagcttcaagatgctgggtgctggattgatgctgctactttagccgcaagccatttgcatggatctgactatgcaaggtataatttaactatggcaatttattatatgccggtatatgaatagattcatggatgcttcgtgct

SEQ ID NO: 57558 - DNA, 263 bp, Setaria italica
  Peptide Sequence Number=SeqID_123532
tagtaaacgaccaacaaaccgaggcaaagccttacttgatcatgggtgagcaaatgcctatcggaatgggtgaggaggcgcccccgacgccgccggtgacgtcgctgtacgtcgacggctgccccggctgcgccatagagcggaagaaggagagcaacaagggcattccctacaaggagttgttctttgtcgccatcaccaccattgcctcgggtaggacgaagaccaagtagagtatatatgtagcgttacctagctcacta

SEQ ID NO: 57559 - DNA, 259 bp, Setaria italica
  Peptide Sequence Number=SeqID_123533
tgtcggaccacatcagctccaccaggtaaccacgggtgtacttgagcttgttctggtggaacttggaccaccacatcgcgccctgcccatcgatcgtcccgttgttcccggtgatgacgacgtcggtgaggttggatccgccgatgaggctcgcgtaccgccgtggttacctggtggagctgatgtggtccgacaccatcttcatctcgaacgtgacgctggtgaactcgccggcgtggaacatccacccggtgtacag

SEQ ID NO: 57560 - DNA, 243 bp, Setaria italica
  Peptide Sequence Number=SeqID_123534
tttgtagagcaagatgcaggatttcaggtatacggtactgtaactcacaatccttctgctgctgtttctgggtccagcagcttgtcctcctcctcgtcgccgcgtcgggaacagtggtggccgcgcgccaccaccactcctccccggcggagtcgaggaccgggcagagcatgtacctggcgccgagctgccgtgcgcacacggcgtcgctggccgacttcggcggcgtgggcgacgggacga

SEQ ID NO: 57561 - DNA, 183 bp, Setaria italica
  Peptide Sequence Number=SeqID_123535
aggaggggaggggggagtacgggacgtgcgcgccgaggacatcacggcgatcaactccgagtccggcgtgcgcatcaagaccgccgtcggccgagggaactacgtgagggacgtgttcgtgcgggggatgaagctggacctgagacacgcaacagaggataggcaaggcacacaggggatagg

SEQ ID NO: 57562 - DNA, 436 bp, Setaria italica
  Peptide Sequence Number=SeqID_123536
aaaaagagtaatcgttagtgctgttccgtatctgcagagtactgaattactgataactgaatctgcggttgcaatttttgggaccagcaagccgatggagcaaagcgtcaagacccgggcatgcgcgacgtggtacaagaaggggtactcgaaatcctgagcgttgggatcctcgtactcgccgaagccgaggtggcacatgcgcgcgtcccgcagggctggcatggtcatggtggtgtcgtcgcccagttcgatgggaacggcgtagtcgtcggcctcgctgaagtagacccggccgtggaaggcgaacgactcgagcgccggcgcggcgacccggagatcgcgcaaggcgcggcaaccgaggagctccaggacccgcagcctctcgctgccgatggtcaccgaggtgaggagggggcagctcctgagggtgagg

SEQ ID NO: 57563 - DNA, 233 bp, Setaria italica
  Peptide Sequence Number=SeqID_123537
acggtggccatcagcagctgcagctcttctaggttcggcaggtctgcatatgccatctcgtcataggtttgctgttcacgaagaagcagcaagccgatggagcaaagcgtcaagacccgggcatgcgcgacgtggtacaagaaggggtactcgaaatcctgagcgttgggatcctcgtactcgccgaagccgaggtggcacatgcgcgcgtcccgcagggctggcatggtcag

SEQ ID NO: 57564 - DNA, 230 bp, Setaria italica
  Peptide Sequence Number=SeqID_123538
agattatgattacattgagggtatggatgcaataatacctgcttccgtttcaacttaaatgtcagatgatctccaaccatggatgcgctggggttattgggcctcgccattcacctattctcttaatgctgtcgctctgaatgaatttattgataggagatgggctacggtaactgccctcctcgatattgtagtgctattatacattattatgttctgcacattatcag

SEQ ID NO: 57565 - DNA, 224 bp, Setaria italica
  Peptide Sequence Number=SeqID_123539
atcaaagtaatccttggaacgagttcctgagctagcaatctgaaaaacaacaaaataagatcagagggaaactcagatagctgactaaagagaggatgtgagggagcagctgtgaccttccgaggcatctttccaagagtttccatcatcagtgccaagtggtcctatagatagattacaaatagacggatgaattggttgattgatgataaacacgtaacaat

SEQ ID NO: 57566 - DNA, 398 bp, Setaria italica
  Peptide Sequence Number=SeqID_123540
agcatcaccactctgtcttcagcttctaccaggacaaccatccctgtcgtggctttgaggaggttcttgtaaggtatcgacaaattgttccacatttgaatctttcaggaccaacttcttttgcacctctgatttatgcagcgatttctgttgttgaaaatagtaattggcaataccatgtcctcgtaatcatagccgatggacaggtgacatgttcataatagcagcaaaatacttcgctataagcatcaacatgtttgacctgagcaaaagttgtaggtgactgctgctaatacaaatgatggaagattaagtccacaggaacaggcaactatacaagcaattgttgatgctagctactatcctctttcaatagtaatggttggagtgggtgatgg

SEQ ID NO: 57567 - DNA, 351 bp, Setaria italica
  Peptide Sequence Number=SeqID_123541
actacctaccaaaccgacaaagctcccggtcaactggcattggcaaaagtgctgccgacgagcaggtatgccccatatgtttaaccaatccaaaggacatggcttttcagtgtggtcacctggtaagatttctatccacgtgctatctccaagggtgaagtatctaattgcaaaagggtgaaatggtcaacaataattaagtacctattgctagtgaacttacccaaataaagtaacctaacttaagatttgaaagtatggttaacctaattaagttgaatagtgacagaacatggataaaaattcagacaagttcttttgttggatgagtgattgatagacccttttttt

SEQ ID NO: 57568 - DNA, 240 bp, Setaria italica
  Peptide Sequence Number=SeqID_123542
aggacagaccgaccacggcgcaggagagcagagcaagtcagaggagactggacgagtcgccctccctggtgtggagagcttcgaggatgctgcgaggagcgggcaaggccagcggaagcgtgcacgacggtgctggaagtaaccgagcagagcagaccatcgcaagcaacccaaaaggagagagatcccgccgcggtcacatgatacggcatcatccccatagatttcgctttcgtttcc

SEQ ID NO: 57569 - DNA, 194 bp, Setaria italica
  Peptide Sequence Number=SeqID_123543
cctatcccctgtgtgccttccctatccccctgttgcgtgtctcagtcagaagagaaaaagtttcaaggtcctgcaaaactactgtatatagcctagttgtgcaggtcgttaaactccttgctacttgttatgatccactcttggcagtactggtctatgcttacgtgttacttatttggtgtgcaggaccaact

SEQ ID NO: 57570 - DNA, 337 bp, Setaria italica
  Peptide Sequence Number=SeqID_123544
cgatttctgttgttgaaaattagtaattggcaataccatgtcctcgtaatcatagccgatggacaggtgactgctgctaaatacaaatgatggaagattaagtccacaggaacaggcaactatacaagcaattgttgatgctagctactatcctctttcaatagtaatggttggagtgggtgatggaccatgggattgccatgcagcattttgatgactgtatccctgaaagagctttttgacaatttccagtttgtgaacttcactggtattatgtcaacaagtaaggatatgtcaaagaaaggaggctgcaatttgctacttagacaagactaca

SEQ ID NO: 57571 - DNA, 144 bp, Setaria italica
  Peptide Sequence Number=SeqID_123545
ggccagcggaagcgtgcacgacggtgctggaagtaaccgagcagagcagaccatcgcaagcaaccccaccagggagggcgactcgtccagtctcctctgacttgctctgctctccctgcgcccgtggtcggtctgtcctcaccg

SEQ ID NO: 57572 - DNA, 160 bp, Setaria italica
  Peptide Sequence Number=SeqID_123546
aagccataatatctataattatcctatggtatctaaatcacggtattcaaatcatgatattcaagtgacgtatatatccaatcgatagtgaaaattcagatagtgaaaatccagagatgtagtattcaattcagaaaaacatgtagcgccgatggtccaa

SEQ ID NO: 57573 - DNA, 287 bp, Setaria italica
  Peptide Sequence Number=SeqID_123547
tagttgtcatgcgcctatgtgcgacattcttcttacaggccactccttttacaacaatactttcactgcggtgcccgcatgctaaacacttaaccttgacatatccaccaggatccatgcccccaccttggctcgtgtctggcttgaggaagttggcagcttcccatgatacagaagtaacaatctccaaccagcccatgtcatcatcttcatgcaacgaaatattctccacctccaacagctgagaaatcagagccctgaaatgtccatcaatgacattcttcatt

SEQ ID NO: 57574 - DNA, 383 bp, Setaria italica
  Peptide Sequence Number=SeqID_123548
ttacctagtaggtagacaaatacgacccaaagaaagtaagacctcattatgaaactccttttcaccttgctttgaattgttagaaagcactttaacagccagtatctcaccagaagacatatctgctttgtaaacagggccgaaggctccttggcctaatactgttgtgaaattgctggtagctttctgtagttccctttgacacccaaacatccccatgtggttggatgctttggtcaacactgaagcacatgtcctccatgtatgcagttcaatcaaattggatttggcctcagtgaaatccacatgaattgttttacttgacatatataacgtaattttaaattgtgaccgatgttcccatccttcaatcttgcttctca

SEQ ID NO: 57575 - DNA, 232 bp, Setaria italica
  Peptide Sequence Number=SeqID_123549
cttcaagcttattcaggttacatctctggcttgctgtgtcgcaagcagaacaatttgagcctggaagacatcaaagatgatatggatttctgctgccggcttgcaaaggaagaattggtggtggttttaccaggatgtgctgtgggatacaagaactggctccggattacctttgcaatcgcaccatcttctcttcatgatggccttgacaggctactaaatttgttctgct

SEQ ID NO: 57576 - DNA, 298 bp, Setaria italica
  Peptide Sequence Number=SeqID_123550
cgaccccaacagaggtgtcactgggcatgcattcaacacgttcttcagtgaaacatgcttccctgcgcttgtttcactgaagaacgtgttgaatgcatccctcgcgaccccaacagaggtgtcactgggcatgaggccatcaggctggataccatgctccaggcagtagagctcccagcaagaattccccacctggatgcccgcctgcccgatatggatgctaatgatctccctcatctcgccctactactactaccgtagacttacaagttactagacggacccaagggaccgacaa

SEQ ID NO: 57577 - DNA, 253 bp, Setaria italica
  Peptide Sequence Number=SeqID_123551
tatatatatgggatcacatgatatccaggcttatacttaatatagtaactctcaagaagttctgttgagaaaattacttttggtccaatcaatgataggtgaatgtcggccacggaaggatatttttctgtagataagctgcggtgaaggataaatcgtgaaaccaagcttcgacttcctaccataatcaactgatagacgctctaaaagtaatgaaccaagtccagagccagttccaccaccaacagcattg

SEQ ID NO: 57578 - DNA, 228 bp, Setaria italica
  misc_feature (35)..(35): n is a, c, g, or t
  Peptide Sequence Number=SeqID_123552
atgacaaaaagtcagaagtgtgagaattggcatanaaagggggcctcacctgggcatgaggccatcaggctggataccatgctccaggcagtagagctcccagcaagaattccccacctggatgcccgcctgcccgatatggatgctaatgatctccctcatctcgccctctctctccgtgcttcagttctgcggccctgggagcgcaggagcagagactttcacgag

SEQ ID NO: 57579 - DNA, 463 bp, Setaria italica
  misc_feature (358)..(358): n is a, c, g, or t
  misc_feature (463)..(463): n is a, c, g, or t
  Peptide Sequence Number=SeqID_123553
tactaatttagttactaagtaagtctactaacgtactattcttgtgtgttcaatcagggaatgtgtggagagcacgctgttatatggctcgacaacagctgttgaaatctgcggtgaaggataaatcgtgaaaccaagcttcgacttcctaccataatcaactgatagacgctctaaaagtaatgaaccaagtccagagccagttccaccaccaacagcattgaaaactagaaaaccttgaagaccagtgcagttatctgccaattttcttattcgatcaaggcaaagatccactacttcccttccaactgtgtaatgtccgcgggcaaagttgttcgcagcgtcttccttgtggganatgagctgctctggatgggaagagctggcggtacgtcccggtcttcacctcgtcgatgacggtggctccaagtcaacgaacaaggctctcggaacatgcttcccn

SEQ ID NO: 57580 - DNA, 194 bp, Setaria italica
  misc_feature (142)..(142): n is a, c, g, or t
  Peptide Sequence Number=SeqID_123554
caggttggtgtatgttggacgctcaatgtcgagggacctcttgcatatgtcatagatagcttcattgtcaagaagcacaacgacatctgtgtgttcaatcagggaatgtgtggagagcacgctgttatatggctcgacaacngctgttgaaatctggcggtgaaggataaatcgtgaaaccagcttcgacttcc

SEQ ID NO: 57581 - DNA, 171 bp, Setaria italica
  Peptide Sequence Number=SeqID_123555
cctatcccctgtgtgccttgcctttcccctgttgcgtgtctcagaacagggaaagaaatggcaggacaacaatgccatccaagcactcttagtcttagttgactgatacctaaggaaaataagcatgcttccagatgagatgactcaatattcagcttcgtcctcatcgtc

SEQ ID NO: 57582 - DNA, 323 bp, Setaria italica
  Peptide Sequence Number=SeqID_123556
cacgtacatatcttggtctccagcaaaccattcccaaactctgtggcttcacaggtcttatcaaccgaagcgcagcgcttctctattggaagcggtagaccagtgtgggcagcgctggtaggagagtcatcgccagatgtcactactggcacgctctcgagacagcaggaacgaccgtccatcaaggcactggcttgctacttgcagggtgatacaccaaaactgcaagcgtacaaccacgctgcactgacgctaactcccagcagcgcagatctgaataccaagaaaagacgaagacaaaccgaacccaaaaccaaatacca

SEQ ID NO: 57583 - DNA, 250 bp, Setaria italica
  Peptide Sequence Number=SeqID_123557
gagaggaggagatctgagaggagggagggaaagggttttgctatttctccagtatcacaccaggccataactccaaacacctcagacgcaaacgcaacacaacagacacgacaacagcaacaacaacggcatgctggatttatttatatacatccatcatatttacagaattctatacagagttcgtctgcaatggaggtttctgatcatgggtcgaaaggtgttagcaccactggtggtaagtcttcag

SEQ ID NO: 57584 - DNA, 226 bp, Setaria italica
  Peptide Sequence Number=SeqID_123558
gaaaactgaagtgcagatgttcttcggcggttgtagcatcttccgtcaaattttttttggtattatctgcttcatctgcaggtgttctttagatctgtagaatcgaagggatctgccttttgtcgacatgtaacaggggatctttatgtgggaaaccctggtaccgtaaaggttgtttcactcattgagtcatccgagtctattttttactaaaaaaaaaaaaaaa

SEQ ID NO: 57585 - DNA, 358 bp, Setaria italica
  misc_feature (24)..(24): n is a, c, g, or t
  Peptide Sequence Number=SeqID_123559
ccgccttattaacctttcactatnaccatttcatcagtatcaccatcaagaagagaagaacctattgtcaagctttggtttcctattctgaagagagaacggttcggaatttggtggctccagccatggctcaacatccaaaaaagcagatttgccttttccatagactgccatctcagtgccttcgcctgtttgatctctctttggaggtggtgcaaggccatagtatccctgcagaagactcatggctggtgaaactttgggctttggtgttttcaatattgaatccaagattattctattctattgtaattgttcggttcgtttggtttagttttactttattttccctttgttt

SEQ ID NO: 57586 - DNA, 244 bp, Setaria italica
  Peptide Sequence Number=SeqID_123560
aactttttcaaagatggagacaaatatccggattggcccaatgatcttgaagagaagcctgcagaggtttcatggtggatggatgcagtggagtcagctaaagcttatgggaatgagaatttcaagaaacaggactataaggcggctctcagaaagtacaggaaagctctgcgctacttggatgtttgctgggagaaagataaagggaatgggggtagttcgctctatggagcatgtccctgtt

SEQ ID NO: 57587 - DNA, 385 bp, Setaria italica
  misc_feature (358)..(358): n is a, c, g, or t
  Peptide Sequence Number=SeqID_123561
acctaggaaaaaccttagtttagaaaacgaatacgtaaattaagtaaggactacaagctgtcttaaatgggcgttcccctagtacccggactagatcatcttggtggagaacctccttctcaagcagcagctctgcaatctgtgcaacctgctccttgtgcgtcttgatcaggtcaagagttttttcataggcctttgccacccattccctcacctcagtgtcaatgatggatgcagtctcgccaccatatggcttgctcattccaaaaccatcctccctttgagggaaagaagaagcccaacctttcactgaaaccgtatactgcaacctgggcataagtcatcttggtgactttcnccaggtcattttgagccccagtagaga

SEQ ID NO: 57588 - DNA, 267 bp, Setaria italica
  Peptide Sequence Number=SeqID_123562
cgcgggccttctcctccgtcaggccccccacgaactgcctccgggccgccgccgcgccgtcctgcgccaccgccaccaccggcgccggggcctccaggtagtcggccttccccgaccaccccaccagcggcgcccaccacttgccgccgccctccgccgcggggaacgagacggcgtgtgaggacggtgccatcgccattgaatctgtgttggttgtttctcttgccctgaccgggtgcagtgcagttgcttgattgcttttgcttg

SEQ ID NO: 57589 - DNA, 251 bp, Setaria italica
  Peptide Sequence Number=SeqID_123563
ctcttgtctcgcggactccagggctggtgctggcgtgctgcctccacgtgttccccgcgggggcgtgctgccgcgaccatggcaaccggcgccgtcacgccgccgcccctggccgccgcgcggcgtggcatccgtggccggggagtcctccaccggcgcctcgccgcctcgcctatatcgctgcatggttaagagcagaagatcactatgaagatcagtcaggcaaccgctatgtcgaaagctttaaaaag

SEQ ID NO: 57590 - DNA, 233 bp, Setaria italica
  Peptide Sequence Number=SeqID_123564
gatcagccaaaatttgggtatttaacaaatgtatgcgttgctaaatatgcaaggcgtcaagggatcgccagcaacatgttgttgttggccatagatgctgcaagactcaatggtaacaacaatgacctattccggattagcatgccctagatgataatgcatgatccactgatatcctcaaccctattccaggtgctgaaaatatttacattcatgtgcataaagataattta

SEQ ID NO: 57591 - DNA, 237 bp, Setaria italica
  Peptide Sequence Number=SeqID_123565
gaaagtgattgcaaataacaaaagaattatttggctgctatgttgctcgtgaggctttaatcgatgaggaatactggatcgctgcatggttaagagcagaagatcactatgaagatcagtcaggcaaccgctatgtcgaaagctttaaaagaaagtttgcatcacaggaatttcatgcattaaagaagcgatgcagcaaacagcatggagaaaagtatatatgttttgttgcggtag

SEQ ID NO: 57592 - DNA, 209 bp, Setaria italica
  Peptide Sequence Number=SeqID_123566
catcctctacacggagagaaatttcctgaggagcctggaagtggaaggtcatcattcttcaccgcaacaaaacatatatacttttcttcatgcattaaagaagcgatgcagcaaacagcatggagaaaagtatatatgttttgttgcggtgaagaatgatgacctcaggcggactgtcctgaatagtgtagaggatgccttacacatac

SEQ ID NO: 57593 - DNA, 184 bp, Setaria italica
  Peptide Sequence Number=SeqID_123567
gtggaggtagtgaacggaattcttcaacgaacagattgggaggaggcaataaagatgccaattgggctaattccagcgggtacaggaaatggcatggctaaatcactcctgcatgctgccagtgagaaatgctctgtttcaaatgctgtatttgccattatcagaggtcacaagcagtccttgg

SEQ ID NO: 57594 - DNA, 237 bp, Setaria italica
  Peptide Sequence Number=SeqID_123568
gtaaaacaaatattaactacaacactaccacaagaaaattactgaaagccacagaacaggcctggtcttgtcatgtgtgcaggtacaggaaaatggcatggctaaatcactcctgcatgctgccagtgagaaatgctctgtttcaaatgctgtatttgccattatcagaggtcatctctctatttcctttctttctcatgtacggaagtacatgaatcatgcggtatttccgtgggg

SEQ ID NO: 57595 - DNA, 196 bp, Setaria italica
  Peptide Sequence Number=SeqID_123569
ccctttgattccaccatctgtgatgatgggtttagacaggtgaatcatagaacatcaaagaatcatcctctggcataactgaatttgttatagaagaatgcgaggggtcaatgataccttgagccaaaatgggaatcttcttgtattgactgcaacaactgctccaagctcatcaggctggaaggtctggtcatca

SEQ ID NO: 57596 - DNA, 239 bp, Setaria italica
  Peptide Sequence Number=SeqID_123570
taataataacgtgagtgtggcccgaggaatccgctgatgcgatctgagtgtttcttcaggcgaagacgagtagcggcggcggcagcaaggggagctcggaggggaagaagaagagatcggaggagcagcaggggtcggatgggaacacaaagaagtccaagaatgaggcctcctcgcccacgtcgtctctcaaggcatcgcaggtgccgaaagtgaagttaggagacaagatcactgcg

SEQ ID NO: 57597 - DNA, 401 bp, Setaria italica
  Peptide Sequence Number=SeqID_123571
actcacctatcctccaactggtatacgtccatttgctagatcatctgctggtaatctggcactccagccaaagctctcaagcagtgctcaccgtttcaattcaatggttcaggatttctttgaggatgttggaccactggttagcttacagctaggtggttccgcgatggatgggcttctgaaaatattcgactcgtatgtaaacttgctcataagtgctctaccagggtctgtggatgatgaagttaatttggaaggtttagggaataagattgttagaatggcagagatggaggatcagcagttagcattgttagctaatgcatctttactagctgaagagttgctaccaagagcagtcttattgtaagtcttgttacttcttattgtaaccctagtct

SEQ ID NO: 57598 - DNA, 424 bp, Setaria italica
  misc_feature (281)..(281): n is a, c, g, or t
  Peptide Sequence Number=SeqID_123572
tttttgttttttacgttttttactttttggttttttctttttatttttcgttttacgttttgtttcccttaggtagtagtatcagtaggatcagcgggaagccacgagttgccaatggggagagggaggtgaacagcccgacggcctccgtgtctgcacagtccgtgtcgtcggttaaatctcatggcagctcctagtgtgcagtgcaggttagagatgcaggtccttgtacaaatactgtagtgtattcgttcctttaatttgtagtatatattttttcncatctgcactccctaggctagggaccctagctttgcctggatatgtttgtgccggtatatatatgtatatgaatatgagtgggttgtctacctataggaatggaaaatccttgaaccattgttctgagactccaaggcacaca

SEQ ID NO: 57599 - DNA, 186 bp, Setaria italica
  Peptide Sequence Number=SeqID_123573
tgctggtgttttctctctgctttgtatcttcgaagcatatttggtggaagtatcattatgataaaaatcttcaaaattcttggagaagtgaaatagtgctgatattctaaatctatgacaggaaataaggcacctgtgttcttatttgcaagatcttaagaaggcttctgctgaagagatgcgcag

SEQ ID NO: 57600 - DNA, 423 bp, Setaria italica
  Peptide Sequence Number=SeqID_123574
cgaagcccaccggattcccacccggttccccatgcctcctcgcctgctaccccagtagcctcccctctctcggcagctcgattcgccgcacaggaccgcggcttggggtttggatccggcaatctcttgccgacgcgccgcagatccgaacaaatcccagccttcccggtgagcggtgaactcctccctccagcggcagtttctgtgaccgcgctcttcgttgctgctgctgatacttgggcttgcattctgtctgtgcaatcaggtgctctagggtttcttttgggtttcttcttcccttcgattcactcgcgctcgcactgtccgagtgtgctgacgctggttgcccggaggcctcacgttgctgcatcattagcattaggattagactccctgggtgcttgttctactgtctctggtcgc

SEQ ID NO: 57601 - DNA, 233 bp, Setaria italica
  Peptide Sequence Number=SeqID_123575
tgaataattaaattaaggtgctcaccacatcgagcaggaggaggaggaagacggtcttggctgcggaagcggagcccgagatgagtctcatcgagccgagcgccgtcagcaggctgtacaggcacgtcacgcacagcgccaccagcaggtatctatatacgtggccatcgagcacacgaaggaagagatcgtcaagccaaacggccggatcagtagtgcaggtcagcgacgaa

SEQ ID NO: 57602 - DNA, 171 bp, Setaria italica
  Peptide Sequence Number=SeqID_123576
aggcgacgaggccgaggaagacggaggcgccgatgtggcggcagaacttgccgtaggtgtcgcagatcttggcccaccgggtgtgcgagttgcccttttccccttctctccactcgcctctctaggtttccttgcagctgcatgctgtcccgctgcagctgttgacctctg

SEQ ID NO: 57603 - DNA, 187 bp, Setaria italica
  Peptide Sequence Number=SeqID_123577
aagaaacacactcgagacaaacaacagtagtgtatacacacgatgcaatatatcatttgtctacattttcccgtacaaggctacactagatgtcactcacgtcgtacaccacatgcagggccacggtggctgttctgacggccggggactgcttggaattgtgtcgtcctctgtgtgtttcccgttg

SEQ ID NO: 57604 - DNA, 511 bp, Setaria italica
  misc_feature (258)..(258): n is a, c, g, or t
  Peptide Sequence Number=SeqID_123578
tgtccgtttcttcctattggtacgtcccttgtattcttgtcttccgttctttggtcgtttcttcggggtagtccggtaaccttgtcgtctaagaactttgccgctgctgcgctccacgcggtgccaggtgtccgtcttctcctcctgctccttgttgcgctcgccgctgatctggaggacgttgccgtcctcgacctccaccttcacctcctccttcttgagccccgggatccgccttgaacacgtgcgcctcgggtntctccttccagtcgatcctcgcgccggcgaaggccgcggtctccgagctggtgcgggggaacgaggggaagaggctgccgctgctgctgccggagccgaaggggaaaccctcgaaggggtcccagagatcgagggagaaggggtcgaacacgttgctgcgtcggatcagcgacatggtcagtgggatttcttgctggtggtttggacgaatcgaggttcccaagtgaggatttgagtgattggtgagcttctg

SEQ ID NO: 57605 - DNA, 204 bp, Setaria italica
  Peptide Sequence Number=SeqID_123579
gatgcgcgcgccggcgaacgccgcggtctcggagtcagaggggatgcgagggaagaggctgccgctgccggagccgaacgggaagccctggaaggggtcccagaggtcgagggagaaggggtcgaacacgttgctgcggcggatcagcgacattgttggattttttttttgggtgcttggagttgttgagaggcttctgatcgt

SEQ ID NO: 57606 - DNA, 235 bp, Setaria italica
  Peptide Sequence Number=SeqID_123580
tgggtagtaggcaagaacacatctttttcagcggaaagcaagcacgaaagggattgattgagaggtagcaagcagctcactggtaatcacacgcctgacgcctcccttcttgtcatcaaaaggggcactgtctctcgtctcttcctcctggctagcttggtgctagcctccacccaccaagtagctctgcgctgctcagctcaccgccggaaaaaggctctagtggatcctgctg

SEQ ID NO: 57607 - DNA, 246 bp, Setaria italica
  Peptide Sequence Number=SeqID_123581
cagggaccagcagtacatgttcaataattggacgaagacgggtataaagatatattttactgctatatttatttatgttcagtaggatgtgtccgtctgtcggtgacagtttataatcctatctttgtttctcattttatgaacactatgatgaagtcatcagctttaggcgtgcgcttctgttccaagctaactaagaaacagccaatccaaccgcgtgtcccatgttcaagcataaaagtgcaa

SEQ ID NO: 57608 - DNA, 254 bp, Setaria italica
  Peptide Sequence Number=SeqID_123582
tggatgagctacaagagcatgtggaatccattgacatggcaaatgatcctctacttagttacttgaaaaattcacatgctggcatccgagcaagggcggcagaagttgtgagtacaattgtgcagaacaatcccaagagtcagcaacttgtcatggaatccaatggactcgagcccctgttgacaaacttcaaatcagatccaagtgcaagtgcacgcacgaaagctttaggagcaatatcctctttgattcgt

SEQ ID NO: 57609 - DNA, 349 bp, Setaria italica
  Peptide Sequence Number=SeqID_123583
actaccaagaaagaatgtcttggagtctcagggtgtgaccccagagaacattgaagatatgttggatgagctacaagagcatgtggaatccattgacatggcaaatggtaagattcgtagttgaaaatcaatgcttcctgtaaatgtttattctggttattattccgaatgactccacatatacaattattcaaacagatctacattctattggtgggttagatcctctacttagttacttgaaaaattcacatgctggcatccgagcaagggcggcagaagttgtgagtacaattgtgcagaacaatcccaagagtcagcaacttgtcatggaatcaatggactcgag

SEQ ID NO: 57610 - DNA, 236 bp, Setaria italica
  Peptide Sequence Number=SeqID_123584
accatagttgtacttcaagtatgttaaatttctggaatagcaatttacttgctatacttgcagatatgttggatgagctacaagagcatgtggaatccattgacatggcaaatgatctacattctattggtgggttagatcctctacttagttacttgaaaaattcacatgctggcatccgagcaagggcggcagaagttgtgagtacaattgtgcagaacaatcccaagagtcag

SEQ ID NO: 57611 - DNA, 250 bp, Setaria italica
  Peptide Sequence Number=SeqID_123585
gttctccacagacagcaatgcaaggtcgcattcgatgcccctagctaaaaccttggcaatatactttttgtcatctcctcttctctttactttgacctgggtgtcatgctcaacgcaatgtgcattcgtcaagagtttgccatcaccaatcataaaagcactgtaaaacaaagttcaagacatgtgattcattaaagttcaaaactatttaggtacggatatacgtcaagataatcatacaccattactt

SEQ ID NO: 57612 - DNA, 277 bp, Setaria italica
  Peptide Sequence Number=SeqID_123586
ttggcctgcaacaatgccaatatcccctccatcgtagtggagggtccactctatttatcagcccaattaatgaacttctgaagctgagcagaaatggaggaatgaatgatagctagacaaacaatggcagcaccaaaaatattgcgtattgtaccttcactcgcaatttggcaggtgagagtttttgtgttcggttgggaatgttttggaatgcttatttatgggttcacccgttcactcgtttatttacctctttcaaatgtcaatttagctgagg

SEQ ID NO: 57613 - DNA, 303 bp, Setaria italica
  Peptide Sequence Number=SeqID_123587
ccgacgacgacgagaagtgcgggaacccgtgcggcaacccctgcggcgtgccgtgcatctacgccagcccgccgccgccgccggcgcccgtgtactcgcccccgccggcgcccgtgtactcacccccgccggcgccggagtactacccgccgcctactccggagaagcccggctgcccgccgccgccggagggggaggaggagggtacaacccgacgccgtacacgcccggcggcggcggctacaacccgacgccctccgggtggtacacgccgcccaaccagctgccgtcctacaacacccc

SEQ ID NO: 57614 - DNA, 181 bp, Setaria italica
  Peptide Sequence Number=SeqID_123588
agggttaactactacaaacttttactttagttagaacccttttacgtttactaatagttgtcagttcaggggaagctacacttcagatgatttacatggggtgtcacgtcatgtattcacaggctacctttggtccaatctactgaaacaagagtataccatacacacgggttactctcaa

SEQ ID NO: 57615 - DNA, 256 bp, Setaria italica
  Peptide Sequence Number=SeqID_123589
aaagcaatgtgtgacatccgtgatttggggctattttacgttgtcttttcttttcccggtgaactccaaccctccagtttttgacaaatgtgatgggtattgtccttgttctaacatcccgtaccctttacattttggattcaggcaactgtatgtagcgcagttgtatttcaaactactgtagctgagaattgtgaaatgtagaaaacaccattgtgcatggattagcatctctacattagttcaatctcatctc

SEQ ID NO: 57616 - DNA, 217 bp, Setaria italica
  Peptide Sequence Number=SeqID_123590
gttgagcgtgccataactgatgtatttctctttcctcagatgcagctcatcctgcttgttgaggttgtcagcagcatttccagcttctggggaggagcagaaaggaattggtgttatccagtgcaaccctgatcaatccaagcacttggaaactgctaggatgcttatacttgacatattgattgattttgttaacttgagatctgaaaagtatgct

SEQ ID NO: 57617 - DNA, 376 bp, Setaria italica
  misc_feature (126)..(126): n is a, c, g, or t
  Peptide Sequence Number=SeqID_123591
gaatcaagatgtataattacaaagattatctttactgtttgtgacagagatccttctcacatctcagagcagttaaacaacaccgtttcagtaaactgcagaaaggattcgggtgtacaaagctcncttttgcaaataagcccacatcgatacaaatgtccccaaattatttgcgtccatgaggagcttcataattacttccagaattacctgctgctcgcccagacccatagactggaggctgtgtggccaacccatagggagaggaaccctgtgcaacagcaaaggcagacggtgcctgtgctagaccataggatgacggtagctgttgttgttgttcctattaccctagtcttggttgtccttgttgttcttt

SEQ ID NO: 57618 - DNA, 250 bp, Setaria italica
  Peptide Sequence Number=SeqID_123592
gcaggcaccactttcgagcttgaagatttaaacgaatcacgcaaatatcttggtccttcttgattatcagtaattcccgctttcgtaggattgagtctagcgctgcttcccagaatcagaacgaatgaacagtcactttctcaacaaataatacgaagcagcaacagaaaccaacaggaatcggcagtttcagttaggacaagacgaccttctcatgccactacactgagggctcctgatgaaagagcag

SEQ ID NO: 57619 - DNA, 247 bp, Setaria italica
  Peptide Sequence Number=SeqID_123593
agaggaactgcagggtaccttgcccccgagtggcttgggggaggttgctattacatcaaaagttgatgtttacagcttcggtatggtactgttggaaatcatatcaggtaggagaaattcacctgaagcatacagcagcggaaactatcatattgaatatttccctgtgcgagctatcagcaagcttcacgagggagatgtgcagagtttgatggatccacaattacagggcgacttcaatttggaa

SEQ ID NO: 57620 - DNA, 409 bp, Setaria italica
  Peptide Sequence Number=SeqID_123594
cttgaagtcgcaccgccggtggaagtccgtcgcgctgaagccgtccacggtggccttgtagcagcacttgagctcgcggcctgcgccattatcaatttatcatgcgcatggatcatctgagcgacaaaagattggacttcaccaattaacaaataaccaattaatccacgagattattgattacctctgaggtgtgtgttcgccacgagcgacatggggaacggcagctcgacgtcgtggtactggaacttcagctgcggcggcggcggcgactcagctcctccggcgcctttgccccagttgaagaagctgcgaggagtgacgaagctcggcctggtcgacgtcatggccctgccgctcgccatgaacgccatgcccatcgattcactcaggcgtggtggtgagatcg

SEQ ID NO: 57621 - DNA, 240 bp, Setaria italica
  Peptide Sequence Number=SeqID_123595
tgatctccgaatatttgtggtggatgaagaatttagtgtatagcaggtttatacgtcagaagcaggtaaggcatctttagtttcacatgtagtcccaagaaagtagacataggctaaatcctttgttcccatgacttttcttttcctgcaggttacctgactctgctctgcgcaatctgtgataagattaaattgcacaaattttcgctagcacatataccatccatgctgacttttatt

SEQ ID NO: 57622 - DNA, 197 bp, Setaria italica
  Peptide Sequence Number=SeqID_123596
ttcttgtacatgttcacaggaaacaccgcccggtgccttgtccgatcactattagtggaggacaaggcaccgggcggtgtttcctatgtcgagtttcttgtacatgttcacaggcaaatccaaaacaagatgacctgaggtgaaccccacctcattgttgtaacaatttggttctggattcctaccaaccaaattgt

SEQ ID NO: 57623 - DNA, 282 bp, Setaria italica
  Peptide Sequence Number=SeqID_123597
attctgcaaccacttacaacatcggttttggtgtaggcgatatatgtttctgtacagagacgagtgaactttcgtgtgctcaattttgaaagtatttattctagtgaacagcggctgtattttgtcaagaggaagcttatagaggttgggcaataatgtaagtttagccatgggagtcatatggttaaacttacattattgcccaactctcttaaaccccaaaataaaatccccctttcttcctcttctcgctcgcctcacccccgataagaatccctcccc

SEQ ID NO: 57624 - DNA, 336 bp, Setaria italica
  misc_feature (235)..(336): n is a, c, g, or t
  Peptide Sequence Number=SeqID_123598
tctattgtttgttattactagtagtattgtagaggttgttggtagttgcgaaggctctgtttttgtgttttcgttagcattgtgcatcctccctatttatctcttgtgcacaggggatgtaccatgtttaaaggaaggttatagaagttaagtgataaaactgtatctagctatagtatgaatcagatgtataacttttggagtttttgttcgaacagttgacattgtcgaaatnnnnnnnnnnnnnnnnnnnnnnnnnnnnnnnnnnnnnnnnnnnnnnnnnnnnnnnnnnnnnnnnnnnnnnnnnnnnnnnnnnnnnnnnnnnnnnnnnnnnnn

SEQ ID NO: 57625 - DNA, 409 bp, Setaria italica
  Peptide Sequence Number=SeqID_123599
taaaggtagtattattattttccgtctactaaggtattactagtcaaagaagcggcgattccagatcactgggtggagcatcaagttagctcggaaaatagaattgcaggcattgaggcctgtggtgtttgcagcaccgtttttggagtgggtggtacatgttgtatacagagatgagaggtgtggagtgcgaaggctctgtttttgtgttttcgttagcattgtgcatcctccctatttatctcttgtgcacaggggatgtaccatgtttaaaggaaggttatagaagttaagtgataaaaactgtatctagctatagtatgaatcagatgtataacttttggagtttttgttcgaacagttgacattgtcgaatataagttggtgtgatctgtgaactgttgactcg

SEQ ID NO: 57626 - DNA, 385 bp, Setaria italica
  Peptide Sequence Number=SeqID_123600
gaggtggtgaatgaaataaggcgtcagagatgctcttacctgagattgagactatgcaaaaagggtgacccatctggagatttcttccgatcactattagtggaggacaaggcaccgggcggtgtttcctatgtcgagtttcttgtacatgttcacaggcaaatccaaaacaagatgacctgaggtgaaccccacctcattgttgtaacaatttggttggtaggaatccagaacaaaattgatttctgcatgaggataaaacagaaatgaatgaacctgggactctccaatcagtgcaacctaattcacacctggagagtcatcgcagaatcgacaggatttcttgtctaacctacttttacttaacttattcggttttttggtt

SEQ ID NO: 57627 - DNA, 241 bp, Setaria italica
  Peptide Sequence Number=SeqID_123601
tgttgttgtagttagttggtttaattgtaagtttgttaaattgtaaattaagtacgtcctagtagtattgcttcgttacttgaggctaagactatgcagaaggggcgagccatctggcgatttcttccgatcatttttaatagaggacaaggcacctgccggtcttttccgtacgttgagttccttgtgcatgtgcacaggcaaatccaaagcaaaatgacgtgagaggcctggtcccctt

SEQ ID NO: 57628 - DNA, 375 bp, Setaria italica
  Peptide Sequence Number=SeqID_123602
cagcagcagcctttgatgctcatcgtcctgatgttcaagatgtatatacacctcttcagacagatcttattctcccagtttccgagtgccgggagaatctggagcagttgttggaaagcatcccgaacatgtttgaaaataatagggttgctgattctgcttttggagcagctatgaaggctggcttcctggcgattaaatctaccggtggaaaacttcttgttttccaatcagatgcatgcttggcttaatcatacttccatcgcttggggttggttctttatctgctagggaagctgaaggtagagcaaatgttacaactggtgataaggaagcccataaactgttgcagcctgttgataatactctcaagac

SEQ ID NO: 57629 - DNA, 214 bp, Setaria italica
  misc_feature (37)..(37): n is a, c, g, or t
  Peptide Sequence Number=SeqID_123603
cagtgaacttcaacttgtgaaggatactggcaattgnaacccccgtttgatgagatgcacgatgaatcagataccatgtacaggcgatctcttgacaacgtcaggaatgccattggccttgttggtgcagccttttgctcttcctcatccatctgaggaaacctaataccaagacttagtaggaattttagacaagacgtagaaacaaccttaa

SEQ ID NO: 57630 - DNA, 170 bp, Setaria italica
  misc_feature (78)..(78): n is a, c, g, or t
  Peptide Sequence Number=SeqID_123604
tagtagtagacccggccacctgtagtctgggcacaacagatatagaagcaatattcaggtctctgtggatgtattccncaccacacaatcctatgttgatattgcttctatatctgttgtgccccagactacagatatagaagcaatatctgttgtgccccagactacag

SEQ ID NO: 57631 - DNA, 218 bp, Setaria italica
  Peptide Sequence Number=SeqID_123605
agcaggtcagcggcggcagcggcgacgaccggaggaccatcaggatgatgaggaaccgggagtccgcgctccgatccagagccaggaagagggcatacgttgaaaatctggagaaagaggttcgccggctggtggatgagaacttgaagctcaagaagcagtgcaaagaggtaacagaacatactgaacgcctgaaccatgcatgtacgatgcctgat

SEQ ID NO: 57632 - DNA, 170 bp, Setaria italica
  Peptide Sequence Number=SeqID_123606
ctcgttcgggtacattgttcatgcgacgccccaggagctaggcgctgccatgtctgtggcgttcaagcacgagcaagccaccggtcccggcgtgctaagggagtggttctgcttggtgtgtcaggcctgagacacgcaacagaggataggcaaggcacacaggggatagg

SEQ ID NO: 57633 - DNA, 448 bp, Setaria italica
  Peptide Sequence Number=SeqID_123607
cggcggcgttggggaagaagtcctcggcggagaagctggccatcatgtccacggcctcgtcgaccgcgtcacggggctcgtcgcccgccgcgagcgcatcttcagggagctcgacgccttcttcgagacggtcatcgaccagcacacggaccccgcgcgcgtcgtccccgagaacggcggcgacctcgtcgacgtcctcgtcagcctgtggaaggagaaccggggcacgctccgcttcacccgagaccacgtcaaggccctcatcatgaacacgttcatcggcgggatcgacacgagctcggtgacggtgctgtgggcaatgtcggagctgatccggaagccgcgggcgctgaagaaggcgcaggacgaggtgagggccgtcgtgggaaacaagccgcgcgtggagcctgacgacgtgcccaagctcccgtacctcaagatggttgtg

SEQ ID NO: 57634 - DNA, 210 bp, Setaria italica
  Peptide Sequence Number=SeqID_123608
tttgttgcattttccagcatgattcaaccattattcaatctgttttccttttttgcacaaacaggttgcaatagagagaaatgagctgcaggatgagaacggtgtgctccgcaaagaaatttcagagcttcaagacgagttgagaatgcggacttccagcaatccagcggattggggccatggcaacgctggattgaactcccctgttcc

SEQ ID NO: 57635 - DNA, 424 bp, Setaria italica
  Peptide Sequence Number=SeqID_123609
gtttacttctcatttgatgagattatttgttttgatcagttacctttagtgtccaatattttctgaataactccaagaagaatttgaatattttccaggaatcaaagaaaagttaagttcagggtctactaaaaaaatgagaatattttcttccttggaacttaaaaatcaagaatttctaagcagttttggatttaatgtttctctatcttagtaatagcatgcagttatcatttcaaagaactgattactaactcgtactatatctgaaatttgtctcttccttacagatggttcagaccctaatatcagttgaagggattgaaatcaatgcggttaatagagctggagagactgcttttgctattgcagagaaacagggtaatgaagagctcattaacatcctgaaagaggttggtggtgt

SEQ ID NO: 57636 - DNA, 242 bp, Setaria italica
  Peptide Sequence Number=SeqID_123610
gtgagattttgaaggcttgtgatgtgcagtcagcagggatcaaggccagcaacagcttcgatgcattccatattgcagcaaagcagggccatctgggttaggtttctttccttcatcactgaatttggtcccaatgagtacctaccaagtcgattagttgaggatttggctagtcttaattggaattctttaatatgtggattcactggcttatactggcagttctatctgacctttcatta

SEQ ID NO: 57637 - DNA, 365 bp, Setaria italica
  Peptide Sequence Number=SeqID_123611
ccgcagggacaagatatggctgcggcgaactaaaccgaattaaaaggaaatttaccaagtggttattgccattgatgattcacgaagtatgtctgagggcaaatgtggaaaagttgctattgaggcattagtcacagtgtgccgtgctatgtcacagcttgaggttggacagtttgcagttgcaagttttggaaagaaggggaatgttagagttctacatgattttcatcagatcttcaatagtgaagctggagttctaaaaattgtattcttctagtttgtcctttgagtcaagattaacaaaatttgtaggtacctaacctagttttcttgtattcttccttgttacgttcttatttctttaa

SEQ ID NO: 57638 - DNA, 231 bp, Setaria italica
  Peptide Sequence Number=SeqID_123612
ttggctgacctgcttagacaggtatgaagtatcatttttaactcttttgatccattattagcaaatatatgccctgctcatatatcttgttatatgctgtgcagtggtttgagctcatgcagagtgctaacgagtgatccatttgggacgtcagctggccaaattttgtagcgggggtgccctctgtggcttgacgtcattattagcaaatatataccctgctcatatatc

SEQ ID NO: 57639 - DNA, 263 bp, Setaria italica
  Peptide Sequence Number=SeqID_123613
ggttaactttttgtttactagtcaggttgaggagaagttttctaaagacacagacataatactagtgtgccagaaaggacttaggtaatttcttaatctcatactgaagctggatttgttattcatgtgaagcagccagagcacatttgtaattttttcagcttgctttcgtttggatagcgcattcagtaatggattcttcattgctttttttcgagtaatgtcttggtgtttctgtatttttggatcattgcatagaaagt

SEQ ID NO: 57640 - DNA, 255 bp, Setaria italica
  Peptide Sequence Number=SeqID_123614
ttctttgttctcgtgtaaatgcattaagtgtttgaaactttgaatcctgcaccatggaattatacaatctttggtgatatgccaattttgaaatgctgagctcctgtttacttgtatgactctgaaatgctctgcctgaagattagggagcagaaaattaaaaccctcacacccagggaagccggttatacctacaaactgacagacaaggctcttctggatgtcaggccctcaaatgagcgtcaaaaggcctgg

SEQ ID NO: 57641 - DNA, 263 bp, Setaria italica
  Peptide Sequence Number=SeqID_123615
acggcatgggcgtcgacgcctcctcgctccagatcctccaggcctccgccaacctgcccatggtcgccaagccgctcgtcggcctcctctccgacgccgtccccatacgcgggcaccggcgcctgccctacgtcgccatcggcggtacgcgccctctcctccattcccctttactaatctgctcttgcatttcctgccagatcccaaacccacttagttctgccgttactaattcacgtcgtcattatgtgatcctacgaacc

SEQ ID NO: 57642 - DNA, 241 bp, Setaria italica
  Peptide Sequence Number=SeqID_123616
caccgccgcccgccgcacgccaccgccgccgcgcgcagattcgccggctgcgacaccctgtgcctctctccgtctcccggtgacttggccgctcgtctgcacccggctcctctcggagaggggcgaggagacccaggctcttcgacaccgcggcggcggctcctcacggaatcggggacggtgagagatcaaactgatcttgccactctgcctcccagcaggttgcatactctttgtatga

SEQ ID NO: 57643 - DNA, 364 bp, Setaria italica
  Peptide Sequence Number=SeqID_123617
ctagatatattagatttttgaaacggagggagtagttgctactagcttcatacatggactaaggaaatgtcgaatgtaactcaacatgagtacaaagctatgaaaatatgagggtgtttcaacttcaaaatcctgaacttatggaccgcaacttcaggacctggtatcaaggaacgctgaccattcaagggcagtgctggcagacttgctacaaggtctattacgatttgagccatcggagcgtctcactgcccaagaagctctggaccatccattcttcagaaacccgacataacttgttgaagaggcttgagttgcctcatgtaacattgtactccaagaaggtggtcaggagaaagcaggc

SEQ ID NO: 57644 - DNA, 124 bp, Setaria italica
  Peptide Sequence Number=SeqID_123618
catcccctagatgtcctcgtttgatgccgccggcgcttgtcatcaggctttgtagttgcttgacagtaatggtttgacccattgttactccgtttggcattgtaattgtttttttccttttcat

SEQ ID NO: 57645 - DNA, 469 bp, Setaria italica
  misc_feature (445)..(469): n is a, c, g, or t
  Peptide Sequence Number=SeqID_123619
acggggttaggaacgggggaagggttacgacggacggcgaaaggaagaagacgtaagaaaaggtagttaggtaggtaggtggtggtcgtcgtcgtcgtggttgtcgtggtggtggtggcgcgcaggaccgccgcggaggaggaagaggtggtggcgtggtagagcgcggtggtggaagtgtctgaattgctggcatggctgaggcacctactgtgtattttgttggggcaccttgattcattacattacattactactatatattgttattgcatttttgtagagaggtgggatgtgtgtatcctggtattaataaggtaaatgaggatgtgtgtactatgttcctgtcttccaagtgtcttgagattttgttcaaactggttgtattacgtgacgatctgctgcatatgtatatttttgtgctttccttggttttttaaaaccnnnnnnnnnnnnnnnnnnnnnnnnn

SEQ ID NO: 57646 - DNA, 440 bp, Setaria italica
  Peptide Sequence Number=SeqID_123620
agggcccaaccgtttaggaagtacaaggggcgaaaggggtcgtcgtcgtggacggcgccgccgttggcctggggcatgccgaagggcgagggcggcgcgtcggagcggaaggcgtaggggtccggggaggccgggaatccgtcggcggaggcgtggacgtcggccgagccgtcgaagtggaggaaggcgaggaaagataaggagaaggagaagaagcctgggatcgtggtgatccagggcccaaagcctgggaagccgacggacatggctcggatgcggcagatattgctgaagctgaagcacactccccccgccacacatgaagccacctccgccacctgcagcagccgccggcaaggatggtgcgccagctgctgctggaaaggcggagctccagctgctgctgcaaaggatggagcaaagccagcagccctgcgaac

SEQ ID NO: 57647 - DNA, 260 bp, Setaria italica
  Peptide Sequence Number=SeqID_123621
tcaattcatgtaaatttcgttggttgcctgcttctttttatttgagtctttaacatttccatctcatcaccatgccatcggtgtctgattaacattctgttccttcttccaggttctctttcaaggcttcagaagcaccaaaatttggaggtttcactgtctaccatggcatgtgagatctacactatttcaccgataaaggttttcggtgaagccgttcagtttgcgcctctcggactgatcaacatgttcaactccgg

SEQ ID NO: 57648 - DNA, 173 bp, Setaria italica
  Peptide Sequence Number=SeqID_123622
aagttagctatcaaagatcaaaggaaacttcaagcatattgaggacaaggagatccctgcaaatttggactggtttgggtggtgcacctgggatgcattttacaaggctgttaacccagcagggatcgaggaggggccttaagagatgatggaattagagctgaagaagctag

SEQ ID NO: 57649 - DNA, 330 bp, Setaria italica
  Peptide Sequence Number=SeqID_123623
aattagactccatcatccgatgtgacaggcgctaaactttagcgggtggtatccaaacatccccttatatgtgtcagttttcttgttgcagtgcggagatgctggtgaacctgcaggtgccatgggtcattttggggcactctgagcgcagagctctgttgggtgaatccagtgatttcgttgccgataaagttgcatacgcactctcccaaggtctcaaggtaattgcttgcattggcgaaaccctggagcagagagaagcaggaacgaccatggatgttgttgctgcgcaaacaaaggctattgctgagaagatatcgagattggact

SEQ ID NO: 57650 - DNA, 210 bp, Setaria italica
  Peptide Sequence Number=SeqID_123624
cgccggataaaagtacggacagctgtgatccacttacctcttcctatgcactcccaaatcctgaatcctaaaaagcttgccggagctttgcggtggtggagaagagcctgcgccgaccgcctgatctcaccggactccatggcctccctcaccgtcctctccacgcggccctgtcgcacacgtccttcatgtccacgccccgtcctccac

SEQ ID NO: 57651 - DNA, 236 bp, Setaria italica
  misc_feature (2)..(2): n is a, c, g, or t
  Peptide Sequence Number=SeqID_123625
tnatgaatctgctgaaaacattgagctgaacagtagtgcataatgcaggaaatggaaggcagggagatcagggtcaacttggcccttggaaagaagtaacagagttgaaatagggaggaagttcttttaaaaaaagagagataggaagttgcagttgacatgtgatgcctccttgcaatgcaaagtgtgaaatgcgaccaagacggcgacgcttacttaccggagcactgcaggag

SEQ ID NO: 57652 - DNA, 186 bp, Setaria italica
  Peptide Sequence Number=SeqID_123626
catgaccggctgctggctcactcgacaacctgttcctcctcttctccagggccccggggtgctggcgctgctggcgtcgtgggggatcacgctgtacacgctgcggctgctgatcgagctccacgagtgcgtccccggcgtgcggttcgaccggctccgcgacctcggcgcgcacgcgctgggccc

SEQ ID NO: 57653 - DNA, 461 bp, Setaria italica
  Peptide Sequence Number=SeqID_123627
atggatccaatataagccgctccttttcgctgcgctgccattgccaacagcggcggcagcagccccttgtacccttcaattcgagccttcaccttcgtgaatctgatgactagctattcatgctatgtgatatcctggagggagatgtttacctctgctttggtcgtttctcagattgtgctaaacttggcattgaggcacagcccacatgatatagcccggttgatgcagaaaaaactggagaagagaaacagtaaagccgaagccgacttcagttccggagttcagggagagaacaaccaatagagcagtcgagtgctgtgtgtaaccagaaccgagcctggtaccagctgagtcgccaaaacgaaaattcgagagacgagcgtactgtaaccatcgtatcatgcatgtgtgtttttggagatgatttgaccattaatttcgtatatccttccttaaaa

SEQ ID NO: 57654 - DNA, 268 bp, Setaria italica
  Peptide Sequence Number=SeqID_123628
cgtttctcagattgtgctaaacttggcattgaggcacagcccacatgatatagcccggttgatgcaggctagtattcaagctgaatattaggtgtcctttttcccttttttttacaaatttgagtgtcgatttcatatactactacatttttttgaacagaaaaaactggagaagagaaacagtaaagccgaagccgacttcagttccggagttcagggagagaacaaccaatagagcagtcgagtgctgtgtgtaaccagaaccgag

SEQ ID NO: 57655 - DNA, 314 bp, Setaria italica
  Peptide Sequence Number=SeqID_123629
atcctcactcacatctcttagctaatgagaaactaaagggcaaaaaaaaggtgctgataaaaaacagtctagcaagtatctctgtctagctctcctcctccagggcttgctgaagaagagatgggctcctaacaaaccttccctgcaagaaccagaacagaaaataaacatgtcagtacttcacacactgtgatatggttaactgcatctgcaggttaaacacatggtatttttgtgtgattgaacagtgagtttttgcagttttgccttacgaacagatcttttatgctttctaatcagttctagtgcttgcc

SEQ ID NO: 57656 - DNA, 253 bp, Setaria italica
  misc_feature (244)..(244): n is a, c, g, or t
  Peptide Sequence Number=SeqID_123630
agctctcctcctccagggcttgctgaagaagagatgggctcctaacaaaccttcccttacgaacagatcttttatgctttctaatcagttctagtgcttgccttcatccgaggccggcagtcggcgttcaccttccgcacttggtaccggatcttctttgagaacagccgggtgcgcctcttctccttgtaccgcaggacactggcttccctgatgccaccagcagctccattctctggaaacnggtcaatgt

SEQ ID NO: 57657 - DNA, 348 bp, Setaria italica
  Peptide Sequence Number=SeqID_123631
aactgaaatttgtaatacatgaaagtggttgtaaaggcaagtaccgttactactagaagacagcctttaggacctgttacagctcggatagcctgcagtgttagaacaaaggagaaaagttttgaaatccaagtgatttcagttctttagaagcattttgagaaggagcatacagccaaaatagagttgactggtggagaagtgaaaacatctccagaaacagcagcagtcagcattccttgaccaacaaatccaccatgggctggttcgtgaccacttccacctcctatgtaacgaaacaggttatcaaaccatcacatagtaattaatatgtttatccagcagaaa

SEQ ID NO: 57658 - DNA, 248 bp, Setaria italica
  Peptide Sequence Number=SeqID_123632
gttttctgcctaccatgtttttcttttcaagatctggtgcattaggtcatggaggatcgcgtgctgctgagtatttgaaggaacacttatttgaaaaccttctgaagcaccccgagttcttgacagacacaaagcttgctataagtgaaacatatcagaaaacagatacggatttcttggaatcagaagcaagtgccttcagggatgacggttcaacagcttcaactgcagttttggtgggtgaccat

SEQ ID NO: 57659 - DNA, 171 bp, Setaria italica
  Peptide Sequence Number=SeqID_123633
ggatctcccgcaggtcgacgccggccgcggtcgccaccgtgaagtccacgccgcggccgctgcacaggagctccggctcgccgtcggcgttggccaccacctccccggccagcgggtagtacgccacctgagacacgcaacagaggataggcaaggcacacaggggatagg

SEQ ID NO: 57660 - DNA, 456 bp, Setaria italica
  Peptide Sequence Number=SeqID_123634
acttgctgctttagaagagatgcggtccatgaagtctagacatgccggcgtctctgtcgaccagatgcttgaaattttgaaacgttcagctcatgagaaggaggaaaaagcaattgcagagctggatgaagaagatgaacaacttatcaagtcaatcacttttcgaaactccggattttatgtaaagcggatagaagatgatgatgatgacgacgacgatgatgacgatttggtcccaggccaatcgagtaaaacaataaagatcaacggatcttcagaatcagtggcaaagccaacagatgttttaagcaaaactaatggatcagagggtgccgataaagaagggagcaagagctggatgcccaaattttattagttaaaacctaaagttcgtacttagtcgtcagattccttaagtagtactagtaagtactagaataccaacggactagtaca

SEQ ID NO: 57661 - DNA, 376 bp, Setaria italica
  Peptide Sequence Number=SeqID_123635
gagcaagagctggatgcccaaatttatagtaaaaccaaagtctgctggtgcagatcctaagaggcagaagactgaatcaacagctgtccaagacaatggcaaagcaccagtaggagatcaaaagagtgaacctgcaatgcaaaccaatgttctccagtccctttgccagaactacgatagcgatgatagtgagtgcggacagcccttgaagccacagtagtactgattgtcaatactgtaacaatattgcacccgaggatagttgacaatagtcggcagagagcaagcagctgcagcagcacgcaccagcaggcagcggcggcagcagcagcagtcatgcaccagccgaacagcgccctagttcccttgcgctacc

SEQ ID NO: 57662 - DNA, 503 bp, Setaria italica
  Peptide Sequence Number=SeqID_123636
tataatcagaggctgcagagtgtgtgcatatagaccttaatttttgctgcgtgtaacaaaagccctttcaagggacaaagaatggaatgcaatcttattcagaagtacaaatggtcttctgataatatatgttagttctgaaatggtgtttccatatcgaatcatagccacaacaatactcgaaatgtttcccattttctttacatgcttttggttttctggtatgttgtttgatactctacatttggtacagacactactggaggctaaagaacatgatggacatggttcaaaaatggaatataagttattagttgctgggtaacattaccacaagatcttttatttgcgtgcttctagaagcaaatgcagactattgttgaagaaaaaaaagaggctttagtaatgatcagcagcacctgtggtcaagatgaaatttatcatttggatttttatctacctatcaatctagcccacagtgaaatatttccatggttgtatgt

SEQ ID NO: 57663 - DNA, 169 bp, Setaria italica
  Peptide Sequence Number=SeqID_123637
cctccagttcagacactactggaggctaaagaacatgatggacatggttcaaaaatggaatataagttattagttgctgggtaacattaccacaagatcttttatttgcgtgcttcgagaagcaactgagacacgcaacaggagataggcaaggcacacaggggatagg

SEQ ID NO: 57664 - DNA, 250 bp, Setaria italica
  Peptide Sequence Number=SeqID_123638
ttgttcatgcaaaaacttgatgtacttgatcgtctcaaatagcactgatgctgtatcagtctgaaagaagatgaaataattgtgtataaaaaaggttagattggaacattctttcgcagtttaatttctctgcttgcacagagtaaattttaatacaacattaaccatatgggagtaccttcccgaatggcgaaacgatctgctgcaatgcggtgatcttctctcctatcttcactttaggcacttgtgg

SEQ ID NO: 57665 - DNA, 453 bp, Setaria italica
  Peptide Sequence Number=SeqID_123639
caacagcaaggtgttgccaaacccaaagggccgctggaggcacttaggccaaagctgcaggtatcactggtagtggctccatctaataacacattgctgcacgtgacattacattgttgctctatcttgttctggtttgtttcagccaacacgccaacaacagcagcaacgttcaaggcgctccatttacacttcgtcagaaaacgagggtatgcactttgttggcgatgcctttgattccagtccatgtgtacaaggaaagcaaagctgagctaagctaagtagcaagtgaggctgggctttagttgctgtctgaattgttgtgacattcgtgcttgcagatggagacggtgctggtgctgaagatatgaacatcaactgaagtagcctggaatcgtgctgtgttaagttgttggagaacattgcgtgattgaatattgattgataagaaaa

SEQ ID NO: 57666 - DNA, 243 bp, Setaria italica
  Peptide Sequence Number=SeqID_123640
ccccaaaagggccggctggaggcacttaggccaaagctgcaggtatcactggtagtggctccatctaataacacattgctgcacgtgacattacattgttgctctatcttgttctggtttgtttcagccaacacgccaacaacagcagcaacgttcaaggcgctccatttacacttcgtcagaaaacgaggatggagacggtgctggtgctgaagatatgaacatcaactgaagtagcctgga

SEQ ID NO: 57667 - DNA, 195 bp, Setaria italica
  Peptide Sequence Number=SeqID_123641
tacttattccgcaacgatgtacattgctgctacctatcttgatttacatccagatgcaggccaagtgctgtgcacttcatgtggagaactctgcatatcacgaattgctaatacagaggctaacaggggaaggaagttctataaatgtgaagaccctggctgtggcttctttaaatgggaagacgaactggataa

SEQ ID NO: 57668 - DNA, 304 bp, Setaria italica
  Peptide Sequence Number=SeqID_123642
tacgtaattgatatactcaaagagcttacggaaataagtaggttcggaagtcgtagccaggctgcaacaccagcaagaggacagactccgaatggtgtgaggcaggggcctccaaggcaggatttacatactaattttcgtccagcaggccagcttaataatgagaacccatcggttatgcattctcaaggtttccgttcaacccatacccaaaaccaagtaacacatcagatgcaggccaagtgctgtgcacttcatgtggagaactctgcatatcacgaattgctaatacagaggctaacga

SEQ ID NO: 57669 - DNA, 455 bp, Setaria italica
  Peptide Sequence Number=SeqID_123643
cgacgagcttcaacgcgtacgtgtttgcgggaagcgcgccggtgctgccggagacgcagcggctgtacaacaagctcatctctctcggcatcacgccggtgttcctgacgggccgcagagagaaccagagggccatcaccgtcgccaacctccgccgcgagggctactccggctggatgaagctcctgctcaagcccgtcgggtacaatggcaccgccatcggcttcaagtccgacgagcgccagaagctccaggacgccggctacgtcattgtcggcaacatcggcgaccagtggagcgacatcctcggcgcgccggagggggtgcgcaccttcaagctgccgaccccctctactacatcggctaatgagctaggacccgctcgacaacaccggccgatcacaaacaaacactaaacactgcaaacccctgaatcatggacagattattgatgg

SEQ ID NO: 57670 - DNA, 363 bp, Setaria italica
  Peptide Sequence Number=SeqID_123644
tcggcttcaaggcctccgccatcggcttcaagtccggcgagcgccagaagctccaggacgcggggtacgtcatcgtcggcaacatcggcgaccagtggagcgacatcctcggtgcgccggagggggcacgcaccttcaagctgcccgacccgatctactacatcggctaagcgaagatggcctccgatccgtaacatccagcgccggctactctccctcgatccatcgcctgttttgtaatgaactgcgtgatgttacccctcggttcttaataaaccgttccatgtcgtcttttactcaacggttaggattttgtagttggtaattaagtatttcgtatttagttctaattaaaaaaaaaaa

SEQ ID NO: 57671 - DNA, 242 bp, Setaria italica
  Peptide Sequence Number=SeqID_123645
cgacggccaagctcctcgtcgtcctcgtggctctcgtggctgccgccagctcctccttcggcacatgggagctcaacatccgcatgcccacggcgcgcgcggtggaggacgccgctgccggcgtggcggcgccgctgattcacgcgctccgcccgctggtgggatccgccggtgacctcggccgtcgcggcggcgtgccgtgcgacagctggcggctggccgtggaggcgtacaacaagcgc

SEQ ID NO: 57672 - DNA, 236 bp, Setaria italica
  Peptide Sequence Number=SeqID_123646
tcgctgagactcgagggcacatcaatatcgatgagttgtgatgtagtttagcagaaacattctttataatgtcacaagttctttgcaaaagtgagattgtcatgatacatacctctttaaacaccgcactgtatgaagcatccttgaagcccaactttctgaagagcttaagggatgccgtatttgattcaattaattttgctctggaatgtgtgaattccatatttctctactgc

SEQ ID NO: 57673 - DNA, 233 bp, Setaria italica
  Peptide Sequence Number=SeqID_123647
tggttgaaggaggcaaaggaggttggaggaggttggtgaatctgatggaagcggtggagggacatcaggtagagggaggagctcaaagatcaggaaaaatatgagtatgtttacagtttccggcatgaggaggctgaggcatcaggggcagtggtggcagaccgggtaatgggacattcaagggttgttgaagggtctgtgaggaagaaggaaagcagcaggaagcagcagcg

SEQ ID NO: 57674 - DNA, 358 bp, Setaria italica
  Peptide Sequence Number=SeqID_123648
tgtaattagttaacttgtctaggtacctagttctttttgtctacttgtcttggtactatttccttcttcatcctggtcaatggtgagaaattcctcgagaagaacgatgtgtgcgcgcttgtacaagcttgtccagccagcccgtaagaggacagcccatctcagtggaggagggggtattgctcagtgatgcttgaaggttggaagaacatgtgaagtgtgtagcaatggtgcaaatagtgtgtttggtgccgtgttgtacataaggtcataaatggatgaaggatggtgtctttgtgcttctgcattcttttcatttttgtatcgtaaacagtgtgttatgtaattttttaacgac

SEQ ID NO: 57675 - DNA, 253 bp, Setaria italica
  Peptide Sequence Number=SeqID_123649
acgacaacaacaaaaacaaaagtgtataagtttattataactatcattaacacgtttctatctctgcagtgcatcgagttgatgcagtcctatgcagctctcctgttttccaagattgcagagatcaagccagaagagttctgcaaacagcatggcatgtgcagggacattgcccatttatctggtgtgagaagtgacagcacgtgtgtttttgccaccacctgcttgatgaaattatgtaccaaactgaaag

SEQ ID NO: 57676 - DNA, 326 bp, Setaria italica
  misc_feature (9)..(9): n is a, c, g, or t
  Peptide Sequence Number=SeqID_123650
tcttgctcncttgctgcttgtggcctcaggacctgcacgagccaaggatgctggttacggcccagtctacaaggacaaattcttcaatcaagattcctgtccatctcaagagtagcaacccaatatgctcagcctgtgaaaacttcacgaatgaagctgtcagttatctcagtaagaagcaaacacaagataagattgtagaattccttcatgatgcttgttctcagtcattctccttggaacagaagtgcatcgagttgatgcagtcctatgcagctctcctgttttccaagattgcagagatcaagccagaagagtttcttgca

SEQ ID NO: 57677 - DNA, 313 bp, Setaria italica
  Peptide Sequence Number=SeqID_123651
ccgatccagtgactgcaattatatactatgaacacaggcactcatcatgcatcgtacagaactaatcgatatatgttgacggcaggaggtcttgatcatctggggcgagttcgaccagatcttccctgtcgagaaagcgcacaagatgaaagagtaagttcatgatgttcctgcttactcaatttctgtcgatttcttcagtaatcaggcagtcagtcagtcaatcagtactgaacatttggttcttcaactcaactcaacgttgattagccgaataaacatgctaattaacgcatggccgatgagatgaaac

SEQ ID NO: 57678 - DNA, 212 bp, Setaria italica
  Peptide Sequence Number=SeqID_123652
ttgttcttagttcttaggttaggttatttcccttaagttctttctttcttaaccttaaattccttccttcgtacttcttgctgcacccttccacctctaacggcagcgccgccgccaaatagctcgggtgcagctttctgttgcagtgttgcatgcatccggagttacgttcatggagattctgccttcttttgtacttccagctggtttgg

SEQ ID NO: 57679 - DNA, 252 bp, Setaria italica
  Peptide Sequence Number=SeqID_123653
acggagtacgtgcaggtatagcacatgtattgtactgccttttcgcagctgctgcatatgtgccaaccgcaatcccacttgccccgagaccggaagaaggacgcgtcgcgcttgatgcacgcgggatggtacaccttgggacaacccctccggtcgcagaccacgaggtcgcccccgtcgaagcagatgaagcacaccacctcctcgtccttcttgttcacgggcttcaccggcgcgggcgccgccgccggc

SEQ ID NO: 57680 - DNA, 147 bp, Setaria italica
  Peptide Sequence Number=SeqID_123654
aatgagtctatactaaacacagagaagccggagtccaagagaagagctcaccgcaatcccacttgccccgagaccggaagaaggacgcgtcgcgcttgatgcacgcgggatggtacaccttgggacaacccctacagtcacaattga

SEQ ID NO: 57681 - DNA, 184 bp, Setaria italica
  Peptide Sequence Number=SeqID_123655
tcagctccgccgcccaggataccgatggtgatcatcagctggaaaccgatgttgagcatgccccggaggcgagcgggagccatctcagacagatacaccggcacagactgcatgcagcagcgatcatcattagttgggaatttttttatgtaaagtaacaaacacatagttgattaacgtcaat

SEQ ID NO: 57682 - DNA, 417 bp, Setaria italica
  Peptide Sequence Number=SeqID_123656
tacttggtcttattggtagtctagtctaccgtaaaacccctattcggtcgtccttcgtagaggatagcgatataggtgatccgcagacctgtccaatctgctggaaccaagcgaagaaccttgctttcgggtgtggccatcagacgtgctccgactgcgcaaaggatctgaaggtgtgcccgatgtgccaaaaggcgatctcggtgaggctgaagctctactgaagcccttgagaaactcatcatatgcaatcaccagttgaaggagcagctagcttttgatatgaattaaatactatgaggttttgcaacttgcagtatggacgacgacgaggctcaaacttaatacactcgtgcctggttatagcagcataaacacagctgataactaaagaacagtccatattataagcgattc

SEQ ID NO: 57683 - DNA, 480 bp, Setaria italica
  Peptide Sequence Number=SeqID_123657
gcacttcatatttagatcaaacattgcaaatactaattatcctgtttcaatgcagtttgtgaacttcacacagatcatgtctagacctatacccacaagcaaaaaggaggccgaatttgctctttcagcattgatggagatcccagaacagttcaaagcagcaatgagtctccagcttcttgggtatttttcttgtctatatagttgcagccacacccatttctagaaatttggatcccctgtttcttttttcataattgaagcggtcatctctaattgttttgtatctggtttcttgggcacagcaaacgaagaggatttcccaaccggccagtgttgcctccacctgtgagcaatcagcaacagtactctggattttcagcagtcaaacagacccaatctactagctactctggctgttcagcagccaaacagacccaatctactggctatggagcagcaccgaaaaccccatcggcg

SEQ ID NO: 57684 - DNA, 241 bp, Setaria italica
  Peptide Sequence Number=SeqID_123658
ggcgatggcgatgagcgggacgatggcgagcgtgacgaggctgaatactagaccaacaacctagacgaagaaagaccgatggcgaagccggccacgaaccggctgatgtagtgcatgaagttgcccacatggtgtttgggagacttcaggtttctcactaggctatacgaggcttgatctcctcgggtggctaggccccagaggcagatccggtgtattgtcacttgggtaatgcgcgaaa

SEQ ID NO: 57685 - DNA, 391 bp, Setaria italica
  Peptide Sequence Number=SeqID_123659
tttttactacaaagaacttgtgcagttcctctgaagttcttgagaaaaagggttacacccagtttactcctcattatatcacatggtattgtccagaaacttttgtcacgagcaagcaatgcaaatcacagtgcatcaatcatgggagatattgtgcaccagaccctgagcaggattttagccaaggatatgatggaaaagatgttgtgattcaaaatctgcatcaaatttgtttattcaagattgctaatgagactggcaagccatggttgtggtgggattatgtgcatgactttgcacttaggtgcccaatgaaggataagaaatacacacatgaatgtgccagtgatgttatcaaagtcaacttggattggacgttgagaaggtaaac

SEQ ID NO: 57686 - DNA, 261 bp, Setaria italica
  Peptide Sequence Number=SeqID_123660
ccaaagctcccattctgccatgcacggacgcacgagggccggccgccacgagaacgggcgccctggccccaccagtcaccgatccaacggccgcgcacgtcgcgacgccgacgcgggcggtcgctgacagccttccgtgccgcgtggttcggttaacttggttggctggactttacttggacggggcaggagcagccgacgacttcccccgcgcggaggcgttccaggtcgtccaacgcctccatctccatcccacccccc

SEQ ID NO: 57687 - DNA, 226 bp, Setaria italica
  Peptide Sequence Number=SeqID_123661
tgtatttcttatccttcattgggcacctaagtgcaaagtcatgcacatatgaatgtgccagtgatgttatcaagtcacttggattggacgttgagaaggtaaacaaatgtgttggggatcctgaagctgacgaggagaatgaaattctaaaggcagaacaagatgctcaaattggtaatggtaaaagaggagatgtcacaatacttccgacccttgtcatcaacaa

SEQ ID NO: 57688 - DNA, 328 bp, Setaria italica
  Peptide Sequence Number=SeqID_123662
cttcaacttgaaagggatgctagcatgtttcttgatgaatttgtacatctctacgacggttcggtccccctcaaaggtgataggctcaaagcttttcttcccagctggatagaagagaatcgaaagatgtccttctggagatatatgcaccttggtgtgggcactgtcaatcactggagcctatttacaacaaactagctaagcatctacgtggcattggctcccttgtgatagccaaaatggatggcactaccaatgagcatccacgtgcaaagcctgacggataccccacgattctcttctatccagctgggaagaaaagctttga

SEQ ID NO: 57689 - DNA, 276 bp, Setaria italica
  Peptide Sequence Number=SeqID_123663
gttgggaagaatcttgatctaatagttttggatgaatcgaaagatgtccttctggagatatatgcaccttggtgtgggcactgtcaatcactggagcctatttacaacaaactagctaagcatctacgtgggcactgtcaatcactggagccctaatttacaacaaactagctaagcatctacgtggcattggctacccttgtgatagcccaaaatggtatggcactaccaatgagcatccacgtgcaaagcctgacggataccccacggattttc

SEQ ID NO: 57690 - DNA, 319 bp, Setaria italica
  Peptide Sequence Number=SeqID_123664
catggtcgagttctacgccccctggtgcggccactgccaggtgctcgccccggactacgccgcagccgcgtcccacctcgccgcccaacacgcccaggccgacgtcgccctcgccaaggtcgacgccaccgaggacaccgacctccagtacctcatcgacaacgccggcgacacccccgccagcgaccccgacggatggctccggaccctgagggcgaagacgactacggcgacgacctcttccaggaccaagaccaggacctcgacctcccagcccaccaccagcagatcgacgagacccacgtcgtcgtcctcaccg

SEQ ID NO: 57691 - DNA, 216 bp, Setaria italica
  misc_feature (213)..(213): n is a, c, g, or t
  Peptide Sequence Number=SeqID_123665
cccggggtgcaaaacattcaccaccgtcgacgacgcccagaggatactcacaggggatgacaaggccgtcctggccttcctcgactcgctatctggtgctgacagcgatgagcttgctgctgcatcaaggctggaagataccgtcaacttttatcagacttcaagtacctagaatagttagactaaagactttaccaacaatacgaacccaanaca

SEQ ID NO: 57692 - DNA, 154 bp, Setaria italica
  Peptide Sequence Number=SeqID_123666
ggaagaggtcgtcgccgtagtcgtcttccaggaccaagaccaggaagagggcgaagacgactacggcgacgacctcttcctggtcttggtcctggaagaggtcgtcgccgtagtcgtcttccaggaccaagaccaggacctcgacctcccagcc

SEQ ID NO: 57693 - DNA, 393 bp, Setaria italica
  Peptide Sequence Number=SeqID_123667
aaaagtgcgtagttatactatagaggttgtatgtgctgaacccttttctgctgaaaaggagaggctacgaagtgtggaggcaaagataattgcaaaacgatctgagctgtctaaatttgagtctgagtatagggaggtatgccctcagcttttaaatagtttgcttacttgtacagtattaatgctcaacacactataagagctaaaattgacaggttttggcaaagttcaccgagatgaccagtagatacgctcaagaaatgcaaacggtatgtgtattcatgaattgctgtttgtgcttctcattgtggtctgatcttttcttttctttgtttcatagattgatgagctgcttaaggaaaggaatgcaattcatgcatcctataccaacaa

SEQ ID NO: 57694 - DNA, 258 bp, Setaria italica
  Peptide Sequence Number=SeqID_123668
gaacccttttctgctgaaaaggagaggctacgaagtgtggaggcaaagataattgcaaaacgatctgagctgtctaaatttgagtctgagtatagggaggtatgccctcagcttttaaatagtttgcttacttgtacagtattaatgctcaacacactataagagctaaaattgacaggttttggcaaagttcaccgagatgaccagtagatacgctcaagaaatgcaaacgattgatgagctgcttaaggaaaggaa

SEQ ID NO: 57695 - DNA, 245 bp, Setaria italica
  Peptide Sequence Number=SeqID_123669
gtctcaatactgtaaatacagtgttcgcggctttgtttaggtagcttctcgatgatatatctgctattatgctttacttgatattatctgccttgttctgtgatttaatatctttatgcagtaaactaggtgttccaataaagaccactgtctcagcaacagttttggaggaggcattgaatgggtcagtagagatttctcagcttcagctgggcaaatctgtatgtaggaaggtagaaaagcag

SEQ ID NO: 57696 - DNA, 327 bp, Setaria italica
  Peptide Sequence Number=SeqID_123670
cataccaccacgcaggcggagcaccaggtggagagtggactccttctgtatgttgtagtcagcaagggtacggccatcctcaagctgcttgccagcgaagatgagacgctgctggtccggaggaatgccctccttgtcctggatcttggccttcacgttgtcaatggtgtcagatgactcaacctccagagtgatggtcttgccggtgagggtcttcacaaatatctgcataccacccctgagcctcagcaccaggtgaagggtggacccttgccgactacaatatccagaaggagtccacccttcacctgagcctcagcaccaggt

SEQ ID NO: 57697 - DNA, 237 bp, Setaria italica
  Peptide Sequence Number=SeqID_123671
tcttgttatgttgtagtcagcaagggtacggccatcctcaagctgcttgccagcgaagatgagacgctgctggtccggaggaatgccctccttgtcctggatcttggccttcacgttgtcgatcgtgtcagaggactcaacctcaagcgtgatggtcttgccagtgagggtcttcacaaagatctgcatcttgagaggattgggagaggcttcttcgcttcgcttcgattgctcggg

SEQ ID NO: 57698 - DNA, 260 bp, Setaria italica
  Peptide Sequence Number=SeqID_123672
gcttcatcaccaccgccaacaagctcttcaccaagaccgtcaccaagggggacgtcttcgtcttccccagggggctcgtgcacttccagcagaacagggggccaacgtggcgagcttcccgggcgtgaacacactgggcgtctccatggcgcgcatcgactacgccccgggcggccagaacccgccgcacacccacccgcgcgccaccgagatcatcttcgtcctcgagggcaccctcgaggtcggcttcatcaccaccg

SEQ ID NO: 57699 - DNA, 193 bp, Setaria italica
  Peptide Sequence Number=SeqID_123673
ccgttcagcttgatcggggatgcgaggtccgcgacgcagacgtcctggagcatgtcgggggacgacttcttcttcgacggtctgaggaaccccggcaacaccaacaacccggcggggtccctggtgacggcggccaacgtggcgagcttcccgggcgtgaacacactgggcgtctccatggcgcgcatcgact

SEQ ID NO: 57700 - DNA, 210 bp, Setaria italica
  Peptide Sequence Number=SeqID_123674
taaagagagccaaggggtgtgctggctctcatcatctcatgaatcactgtaaatgaatgcactgcaagatcacatgcatgtgatgaaatttatgcagctttagatgtatactcacacaaggtgcttctgagtgatgggaaacaatatgctcttccgcacgcaaatcatccataaattggcatgcggatatgggctggtagatctgtggta

SEQ ID NO: 57701 - DNA, 229 bp, Setaria italica
  Peptide Sequence Number=SeqID_123675
gcttgtgccactaagcaaaacttactgacccaaacaaatcctaaaaccgaaaaaagacgaatcaagagtgcctactaaccagccattcaggcactgcgatgtgatcactgcctccttcccaacaaatttatcaggcgtccttttgtttccctgcaccatcaaagagtccgcctctcagcaaaatggttctgcattagctcacttcttcatggtaactgtcaccaacaat

SEQ ID NO: 57702 - DNA, 372 bp, Setaria italica
  Peptide Sequence Number=SeqID_123676
tgcatccataagctcagtcacttcttcctgcgcttccgaagggcggcattatgaaacagccttctatcgtcttccatcttcaccactgtagctaccgctcttagagctaacacccaatacaaggttagggaataaggaggcagcatcaacttcttcattgcaaatgctgcaccttgcctaattagataaagtaaaaaaaatggagaaagggaaacatgaactgggatgtttactctaacccaaaataccagaaaccatatccagtttcttatgacaaatgtcacttcagatcataatgactgcctcagttgaattaacaaaaatatgccagtgcagagaattttgcttgtaagggattgccgtactaactac

SEQ ID NO: 57703 - DNA, 505 bp, Setaria italica
  Peptide Sequence Number=SeqID_123677
gctccataattataatctttgaattcaaggtccttccagtcaccactaaaggcgaaaaattcattccaaaatagataacttcacaatttgcacggataataatgtagcaaatattccatatccttataaattcattcagaagcagataacatatgtgttggttgagaaacaagcattagttaaaaatgctaaatttaacataataaactgataataccaggcaggcaacctaaaaaagcaatctggagtactaaatttcgtatatagagtataccaagctagcaatttaatcatatagtcaacaaacaggagaatctgctcaactttggaaactaacttaaaagaaatgacataaaattacctcctaaggtgttctgttgtcacatcagttgccaaagtttttctcttcacaacaaactcaggccctttctttagtgagtaccaaatcgatttctctttcgtaataagctttcttctcttcaaatcatcaatcactttatcagga

SEQ ID NO: 57704 - DNA, 194 bp, Setaria italica
  Peptide Sequence Number=SeqID_123678
gtacgtacgaccggacgtaggaaggtacgaaggaaggacggaaggaaggaaattagatcgcggctcatggtgggcggtggcggtggacgcgagctgctgctggagagggatggggagtgaggagtgaaaccgcggcgaggcgagatgttgttggattcggagggggaagcgatgacggcgaccgtgatgggaag

SEQ ID NO: 57705 - DNA, 261 bp, Setaria italica
  Peptide Sequence Number=SeqID_123679
catcctctgcatcatgtagttccttggatagcatcataatgtcttcatgaaaactttatgatgctatccaaggaactacatgatgcagaggatgctgaaaattctagacacagggagagattgaaggagataaatacgcagtaccaggagaaactattagcacttcgggctcggcaagcaaactatagagatgaattcctgcgtaaggaatctttggcacgccagcagcaataccagcaggccagcatgagccattatgcc

SEQ ID NO: 57706 - DNA, 309 bp, Setaria italica
  Peptide Sequence Number=SeqID_123680
tacttgtaaactaagtattattgtaggtatttattaattctttccttcggtactattttgtaaggttcttgagcaaagttttcatgaagacattatgatgctatccaaggaactacatgatgcagaggatgctgaaaattctagacacagggagagattgaaggagataaatacgcagtaccaggagaaactattagcacttcgggctcggcaagcaaactatagagatgaattcctgcgtaaggaatctttggcacgccagcagcaataccagcaggccagcatgagccattatgccaataattccgg

SEQ ID NO: 57707 - DNA, 414 bp, Setaria italica
  Peptide Sequence Number=SeqID_123681
caaggcaattataagtaaataacctaattctaaaagctcagaatttataagagaaagacctatatgatccattctggcaaatacatggcctggggttcaatttagccaattataataaagtagtcgaacttgtaattacctggaaaattggagatggaacccaatctggttcttcaacagtattatccatattgatatacatttctgcgctgagatgggtatcaccatcatctgtaaatataagttcaagagcatgctgcctgcaaaagctatctcttagtctgtccaccattcgttgtagttttcttttccattcacgttgctcaggcacacggttttgcttatctgttcctcttttacgcaaatcatccatgctagactggtttattgatgataacttcatagctgccctag

SEQ ID NO: 57708 - DNA, 210 bp, Setaria italica
  misc_feature (25)..(25): n is a, c, g, or t
  Peptide Sequence Number=SeqID_123682
cctatcccctgtgtgccttgcctanccccttttgcgtgtctcagctgcatactttttatttccttgtgaactatgcgaagctgttcacgggcgttctgcagttcacatgaaagctttatccgctcctcctcagatttcagcagatcagttgccttactaaaattcttgggtttatgtgtcaatgcagtagatgtatcaagattatcaata

SEQ ID NO: 57709 - DNA, 372 bp, Setaria italica
  misc_feature (371)..(371): n is a, c, g, or t
  Peptide Sequence Number=SeqID_123683
gaaaaacacaagctgagagacacctggcgagcgcaaagatcgccagccagaccactcccacccgactcgtttacagacaaatacagcaacgccaaacttacagcaccaaattcgtcgaaatcatgaagggaaaaacacggtacatactggacccatgaacaagcaagcggtatcgatcgggaggcaagacggaagcgcgcgtgcacgcgcgtctagtgatccctggtgatggtggaggagtccttgttggtgttgccggtgtcgccgccctgcttgttgccctcgcccatccccagcgtgttcatcaccgcgttcctttggtcgtcccgtccgtccgtcggttctttctaccttgtattcggtttggcctnc

SEQ ID NO: 57710 - DNA, 260 bp, Setaria italica
  Peptide Sequence Number=SeqID_123684
cagaattatggatgttcaatgaggtgccggagaaggagagggagataaaactgactgatggtggtttggatatatgtgggttaacaaacattaaacttgtacataaagaagggaatgctgtcatcaggcggcacttggaaaacttgcctctggagacatttgactcggtgagtacaattgcttcttttttagagacattatagaaaagttctttgttcaataaaagaaataattattgaatctacagcgaggtcataaca

SEQ ID NO: 57711 - DNA, 201 bp, Setaria italica
  Peptide Sequence Number=SeqID_123685
agaattggatggcatgaggtttggggatgtgttgatctcatttcctgatgctgtaccctgtggagtcaagaagatgatgatacttatgctcctgccccactaccagaggtaaataagggtttcctgcctaacataccgacccctcccaaatatccagagaagattttgttctgtggctggcgcccgtgacatccatgatat

SEQ ID NO: 57712 - DNA, 163 bp, Setaria italica
  Peptide Sequence Number=SeqID_123686
tcttgcagatgagtcagtggaggactccatcgtacattctgattcacgttctttggctacacttcttctaattcgtgacattcagcgcctggattcgggaaatgcagaatgcatcagacaaatctataattatcagtgagatactggactccagaacaagaaa

SEQ ID NO: 57713 - DNA, 251 bp, Setaria italica
  misc_feature (10)..(10): n is a, c, g, or t
  Peptide Sequence Number=SeqID_123687
gacaaaaaanaaaagaagaagaattacagcaagtagttgatgacaatataatgtattgtatagtaatcagagtaagaatgaatgagaaaacttaaagggggcacttactttcagatttatcatgaagattataatctgatccaaatacatgcgtaccatttttgaatgcagggtagagtctaattggtggaggccctagaagtttaatgtttggatatgtaaacaaatatgattctgctcctcgtagctac

SEQ ID NO: 57714 - DNA, 353 bp, Setaria italica
  misc_feature (236)..(236): n is a, c, g, or t
  misc_feature (243)..(243): n is a, c, g, or t
  misc_feature (266)..(266): n is a, c, g, or t
  Peptide Sequence Number=SeqID_123688
ttttactttatttttggttcttagttaagttcttacttaaagtaactaattgttaactaagcacttaggaattctactccacactaaccgaagtcttcctagctttcttgtcattaacatatatctggtagccatatgaaataaatcccccagatggccaacaacatagcaataatcttcactccatccatcttgtcgtggaagaaaatcacagcaaaaactggaatgatgggtanagctagngtgcttatcacatttgaaaaagngggatgacaccacaaagatcaaaccaaccactccaacagaagctatctgccaagatatagcagtccacagaagtgtcatcacatagg

SEQ ID NO: 57715 - DNA, 318 bp, Setaria italica
  Peptide Sequence Number=SeqID_123689
ctgagctgaaggcatgcatctccccctttaaagtcttccattcaccacttgcgaataacccaataagagaagctattgttgccactaatgctgtatatatctgcatgttcagcacgactgagaaagtttccctcttaataaccttctcaaatgtaacttgcattaaagacagaatcagtgagtatgtggccgatgctcctagcgtcaacatgaaacccaatatgtatctcccatgcgataaaccaaaagttcactgcattgattttcaactctgtaatcctccttaccttttctgccgcacttcttggagttgatgaa

SEQ ID NO: 57716 - DNA, 320 bp, Setaria italica
  Peptide Sequence Number=SeqID_123690
gcacgaccgcactgttccagtttcattcatccaaatgatgagctggaaaacaggttttcagctgaaagcaatttttacggtggatctaatggatccataatatcagaagatacttttccaaactcttcacctctgaccctgggcaatgaaagaataaactctgatactcattgtgatgtaccagaagggagctcagcaaatacatcaacaggaaaatatatggattaccttcaaggagttgcctcaaagctgaaacatcttgtattttgtaaactaatttagtaaactaaggttagtactaacggttaaactttagttaa

SEQ ID NO: 57717 - DNA, 261 bp, Setaria italica
  misc_feature (27)..(27): n is a, c, g, or t
  misc_feature (39)..(39): n is a, c, g, or t
  Peptide Sequence Number=SeqID_123691
ctaatggtttgtgtcatgttctccagngttttatgtccngtaaatgtgcatttagacatgtccacaaaatagcaggcgtggtttgaaatctctcataacgatattaacaaccgaagcgacatttctttttttcttgaagaccatacacctagctcgaaattcagggcgcagaagttgagaaaatcatcacagtaaggccttcggaaaacttggcatcagccatgtgagcattgtggtagtcatcattgatatccgcaaaga

SEQ ID NO: 57718 - DNA, 195 bp, Setaria italica
  Peptide Sequence Number=SeqID_123692
acactgagttgtagcgattgaaacatggcacgcgtggactgtgctcacgagaagcatcgtatcgagtttgcgcagcgccgggatgttcgcctggagatcccgtctctgctgcgtccccatcacctccatttcggtgccgttgtccaggacttgtttcttggcgacgaactcgacgatgtgatcggcaacggagag

SEQ ID NO: 57719 - DNA, 155 bp, Setaria italica
  Peptide Sequence Number=SeqID_123693
ttcacgtaccagaactctttgcgctccttgaagttgtccaggtaatcgagaagcatcgtatcgagtttgcgcagcgccgggatgttcgcctggagatcccgtctctgctgcgtccccatcacctccatttcggtgccgttgtccaggacttgttt

SEQ ID NO: 57720 - DNA, 386 bp, Setaria italica
  Peptide Sequence Number=SeqID_123694
ttgttggttggagcttgctgtggtggtgcgaatggagcaaaagcagcaggatggtatgcagctggatgagggagatggggaacatatcctgtaggagctgtactgattgctttaacttgctgctccagcctctccttttctgccttcagtctcactttctcttctcggagctcattcttctcctccttcaggtccttgatattctctcgcagcttctcgtttgattctttaagcttttctgcctcacctctaagttgtgccaccatacgagctgcatcactcaagatatttgctttatccaacttagcttgcttaaccaaggaattacaataaactagaaacttaaattaccaagaaaacctagtacaattactaagaccttagta

SEQ ID NO: 57721 - DNA, 246 bp, Setaria italica
  Peptide Sequence Number=SeqID_123695
gtgcgaatggagcaaaagcagcaggatggtatgcagctggatgagggagatggggaacatatcctgtaggagctgtactgattgctttaacttgctgctccagcctctccttttctgccttcagtctcactttctcttctcggagctcattcttctcctcctggaaaaacaatatagcattccgtaaaattaaaacctacaaattggttcactggtaggctctatatagatgtagaggaggttaga

SEQ ID NO: 57722 - DNA, 443 bp, Setaria italica
  Peptide Sequence Number=SeqID_123696
tttgaagacctcgctaaagcaagttgctttgaagcaactgcggaaccagatataatgcatttcagcaagcttctctgttcttcctaaatgatgccttgaaataacttgtggccgtaacacagcacctttatccattacaggccctgaatcacagctgacatcttctaccaataggttcgcattaaaaccattgtcagtttctgaagtaactggtggtggaaattgaatatattgtgacccttcttgctcatgaaggtctggatctgaaatagccttgaaactttgaatgccaggataacatgttgcgtcatccatgattttgggtaactgaattgccacatcatggtccttgaggtcttttaacctctgttctttctgcctaaagtttacttacaataccgacttacctttaccaatacaagttacggacttagaccttacaa

SEQ ID NO: 57723 - DNA, 399 bp, Setaria italica
  Peptide Sequence Number=SeqID_123697
aagttagtagtgtggaatttactgtataattgctgaagtttgaatattgactttgattgggtatgtagcatgtaagaatatggtttagcaggaatattgaaatacttcatgataagctataaaactgccacaagttacttgacattcttctctacaggcttttccgaaggaagctactgctatagttccacttgttatatttgatgatgcaattggtgatcctttatctactcttgaccagttttgataattcgtttttggatctggaacgtactagaggcgacaaaaagaagttgaaatgagactattagaggaggaaacagcaaaaagagttgagcaagctaattaggaaaaaaggttgaggagagttgaatcgtgaggaaattaaacatgagatac

SEQ ID NO: 57724 - DNA, 223 bp, Setaria italica
  Peptide Sequence Number=SeqID_123698
cggctgctcccaaggaagaagagaagaaggcggaagagcctgctgaggaaagagaagtccaagtgtcactagctctccaatcaccgcatcccaaagttcccaccttgggttggcagagaataagaatgctactgataagcaaaggctagaagaagaaaagaaaaggcgacaaaaagaagttgaaatgagactattagaggaggaaacagcaaaaagagttgag

SEQ ID NO: 57725 - DNA, 309 bp, Setaria italica
  Peptide Sequence Number=SeqID_123699
ccactaataagtagtagtgtggaatttactgtataattgctgaagttttgaatattgactttgattgggtatgtagcatgtaagaatatggttttagcaggaatattgaaatacttcatgataagctataaaaactgccacaagttacttgacattcttctctacaggctttttccgaaggaagctactgctatagttccacttgttatatttgatgatgcaattggtgatcctttatctaactacttagaaccaagtttttagaataaattacgtttttaggaatactaggtaaacgtaactaaagaa

SEQ ID NO: 57726 - DNA, 411 bp, Setaria italica
  Peptide Sequence Number=SeqID_123700
aatatgatcggcatcaggctccatagactatgttggcatcaaccactacacttctttctacatgaaggaccctggtacatggaacctgatgccgatcagctaccaatatgattggcatgctagttttgtctgtaagttctgactccataacaccaaattcttggattgtgcatcgtatatcactttacagtcttgtgctgctgtcgactgtgattagatgctcattcagtcatacacttttcacatatatctgcagatgaaagaaacggtgtccctatcggcgctcatgtaagtttactgctagatgtctacaaatatcaaaggcagggagaaatgaaagttggtttgtctgtgattatgtaactgtaacttctttgagttgtccaggcaaactcctactggctgtacatt

SEQ ID NO: 57727 - DNA, 257 bp, Setaria italica
  Peptide Sequence Number=SeqID_123701
cggctcatgtaagtttactgctagatgtctacaaatatcaaaggcagggagaaatgaaagttggtttgtctgtgattatgtaactgtaacttctttgagttgtccaggcaaactcctactggctgtacattgtaccatggggaatcaacaaggctgtcaactatgtcaaggaaacctatgaaaatcctataatgatccttgctgaaaatggaatggaccaaccaggtaacatcagtatttctcagggtgtgcacgac

SEQ ID NO: 57728 - DNA, 253 bp, Setaria italica
  Peptide Sequence Number=SeqID_123702
catgcagctgcggttaagcgataccgtgataaatatcaggtggaatggtaaatcagttcaatgtagaagtgtgcactgcacattgcaatttcggttcagttaaaaattcagtcctttcaactgaacagctctaccaaaaggggaggattggaattctcttggattttgtgtggtacgaacctttcagtgacagcaacgcggatcgagctgcggcgcagcgagccagggacttccacctcggctggttcctccg

SEQ ID NO: 57729 - DNA, 416 bp, Setaria italica
  Peptide Sequence Number=SeqID_123703
tccggcggaagcgcggcggatttcggcggttcgccggtctcgtcgggtccccggcgggggttatgaaggcggcgggatacgacctctacgatagtagcggtgagtttccccgaatcgaccggggtttccaggccaatagatttttcgttgcaggaaatccacgttctgttggggtcgatttagtaatcttagcttggttgtatgatgccccgcttgggtaataatgtgcggatagatgcggagagtctgctagaaaatttgtctattcgccacaaattttttttatgaatgtaatgaaatgaaagaccggccatttgagtagttcattgcgggcgttgttgtgaaacatgacatcagactccaagaaaattttgtaaggagattggtctccataaaaaaaaacattacgttctact

SEQ ID NO: 57730 - DNA, 196 bp, Setaria italica
  Peptide Sequence Number=SeqID_123704
aaaggaacctaaccaaagtaacccctaagtagaatagaccttacccaactacaagttccaatctgcaaaatggggcccactatcagcaagaggcaaaaagccaaagacgcccatgccatcggcactaccatctgcggacccaaactcattaataaatcacaaagtttatacaaggtggccagatgacaacaacttc

SEQ ID NO: 57731 - DNA, 170 bp, Setaria italica
  Peptide Sequence Number=SeqID_123705
taggattacatagtctgcatgtctgcttattgactttctatcaagttgtgcgttgcatactacagtattgattcctctcccattgttgtagggactgatgatgatcctccccccagcacaaaatagaggactaagaggacgatctttcagtgggaacggacgcgcatctg

SEQ ID NO: 57732 - DNA, 189 bp, Setaria italica
  Peptide Sequence Number=SeqID_123706
aacacggaggagatggagagccagcggcgcaaccacattgccgtggagcgcaaccggcggcggcagatgaacgagtacctcgccgtgctccgctccgtcatgccgccctcctacgcgcagcgggtacgtacgagtacgatctccatggctccagccgtgttaagcgtacaccgcgctctccggcagcat

SEQ ID NO: 57733 - DNA, 242 bp, Setaria italica
  Peptide Sequence Number=SeqID_123707
cgggcagatgaacgagtacctcgccgtgctccgctccgtcatgccgccctcctacgcgcagcgggtgccaggcgtcgatcgtggcgggcgccatcaacttcgtcaaggagctggagcagctgctgcagtcgcttgaggcgcagaagcggcgcgcgggctcgtgcaccgaaccacagccggcggcggcgccattcgccggcttcttcacgttccctcagtactcgaccggcgcgaccggtgct

SEQ ID NO: 57734 - DNA, 257 bp, Setaria italica
  Peptide Sequence Number=SeqID_123708
caagtcatcaggaaccatgagggtttcagagactggccactcaaacttaccaccacagttccagggcctcctacccatgccaagcaaagtgaaaagaaattgtagatgacccaagcatcatagctaaaacacaattcagcaagtaagttttgatatattctagcttttgtactgcttgaaatagctcaaagttgtcagggaactacagaaacaataaaagacaacaggaggtacaacacatgaaccttgactatcct

SEQ ID NO: 57735 - DNA, 181 bp, Setaria italica
  Peptide Sequence Number=SeqID_123709
ggggcccgtagaggtcgatgtagccctcgagcatgatgtcccggagcttctgcccgccgcgcgccgtccggtagtgcacgtccggcgtcccgtccggcagcagccgcggctgcataggcatcgcaccgcgcgagccaagcggcgtcagctagtaattcgcaatgaaaacgaaaaacccagg

SEQ ID NO: 57736 - DNA, 243 bp, Setaria italica
  Peptide Sequence Number=SeqID_123710
cgtttgattttgtagatatgtaatgctgttgttgctgcacgaatcatgaatgctacactagtgctgccagagttagacacaaattcattctggcatgatgagaggtatgtaatttgtctgaaatgctttatcatacaggaagattattgcacgtatggcttaccacaaaccttgtattctttgtgaataattctgtttcaccacttagttttttaatctctacgagatataattagtttgccc

SEQ ID NO: 57737 - DNA, 244 bp, Setaria italica
  Peptide Sequence Number=SeqID_123711
atgggcatactctactctgaaatcctgggtccgccactgactgcgctcgcaggggtctcggcagcgagacgtcactacgccggcaccgcggaccggcttggctgtggatcgccgtagcggtgctggtgaccggcaccatctggctctggtcctcctccttcgttggcctcctcggcacctacagggtccaggattatgttgtaaatgaattatggagaactgcagattcaaatggttggagagc

SEQ ID NO: 57738 - DNA, 221 bp, Setaria italica
  Peptide Sequence Number=SeqID_123712
gctacacagttctgccagagttagacacaaagttcattctggcatgataagagataataaggtggccattgcatttagcatgctgcactccttgcaatttatctgatatatatgatgttccccacttcatcaactcattgaaatatgatgttcgaattgttatgagtgttccaaaaatcactgcacagggaaagaccaagaagcttagagcatataagata

SEQ ID NO: 57739 - DNA, 181 bp, Setaria italica
  Peptide Sequence Number=SeqID_123713
agtcaaaaatgaagaagtcaaaaaatattgatctgaaatcaatgtgggaaagggctacgaagacacgcaggggtctcggcagcgagacgtcactacgccggcaccgcggaccggcttggctgtggatcgccgtagcggtgctggtgaccggcaccatctggctctggtcctcctccttcgt

SEQ ID NO: 57740 - DNA, 252 bp, Setaria italica
  Peptide Sequence Number=SeqID_123714
tgtagtctgaagccttatgttaactttgttttcagcaggatgagggatgctgtatccacaaaatgccacccttgggtcctggttgagaacaaatctgacagagttggcgagggtgtggtcctcctccatgatggagaacgacgaagcgctcgaatcctgcagtgacccgtgctccatcgctccctggtgcggaagcacaggagggggcgagggcgcgaggcgaagacgctgccggtgcgggcggagccgagg

SEQ ID NO: 57741 - DNA, 335 bp, Setaria italica
  Peptide Sequence Number=SeqID_123715
caaacacaagactcttccaggagaaatttgaaagaaaaaaaaagcagccaggataccaacgaagaacgagaacaaaacatcacacaatgaaacccaacggcgcatgcgtatctacaagctgatggattcatctgcaaccacgacctggtaattaaaactcacggcgtcgccttctcatcagcaccttctgccgcgccgcggtcgtgtccgttgtcggtcggtcttagttcggttcgttacggtttcgtttaggtttccggttttcgggttttacgtttttttgttttttctttttttgtttttttcccttttttttaatttttttgttttttaac

SEQ ID NO: 57742 - DNA, 416 bp, Setaria italica
  Peptide Sequence Number=SeqID_123716
agtggctttgttggtgcgggcaggcggccaatgctatcaaccttgtcttgctgcttgggtggaggccgtgccgcctttggcagaaggcggcccttcttctcaaaccactcaggcttcaggagcgcccggaatccaagcttgttgtaatacactaatcttactgttccaccagcagcttcaactgcagcttttgccctagcagtcgtccttgatacctcaaggtgaataggccatttgatttcttatgctccacggcccattaaacggataccatcttttatttgctttccaatggcacctgtttcctggcaaagtgggatacagatgctcatgtcaatttaaaaaacacagaagtatacaatgttacaagaaataattctatagtaccttcagtgtcttcatcgtgatcagttcag

SEQ ID NO: 57743 - DNA, 266 bp, Setaria italica
  Peptide Sequence Number=SeqID_123717
gggccgatgatatggaggaggaggaggccggggtggcggcggtggctcgtcgacatcacccgctggcgcccctcccccgccccagttcgatgccgcagcctccctccttccctcgcacgagcgccccgccatcgccaggtaaactcaactgcccaccttcgcacgaatcgccggcgccggcgccggcgctgccgagggagccgctttcatctccgcgggagacacacctgtgggtgagggaagcgcggcagaaccggaggtgctgg

SEQ ID NO: 57744 - DNA, 181 bp, Setaria italica
  Peptide Sequence Number=SeqID_123718
gaatcgcctctgtgtgtccgccaattcagctagcatgcacgttgcggttaccttagaaccagatggcatcaaatcgacctcctccatgcccctgcaggtttgtgaaagaagatgacaggaagcgggcgctcgtcagtcgtctgctgcagtactcgcttgtaccgccgtcgttcctccgcta

SEQ ID NO: 57745 - DNA, 188 bp, Setaria italica
  Peptide Sequence Number=SeqID_123719
cagtaatgaggccacctgtgcttgtgccagcaatggacgtcaaagtagttagctaagcgtgcattgctcccatcaagctcctaaaaatggcaaaacataccagcaaataaataaccctcaaacatgcatgcgtgtgaagaaaaaaatgttggtcaccaaaacagaccaaaattcaacttacggagatc

SEQ ID NO: 57746 - DNA, 246 bp, Setaria italica
  Peptide Sequence Number=SeqID_123720
ctaatttactagattcttataattgataatattgcacattattctcaaatagcacgaaatgtacactacatttacatacctggatcttgacaattcgctgcctaataagaagaaattcctttctccccttccatcccctgaacttattctgtatacgagttgcagcagaatgcaggggatcaagctgccctggcttggatggcttgacagaaaggagcgaaagggcacgctcatctgacattccac

SEQ ID NO: 57747 - DNA, 211 bp, Setaria italica
  Peptide Sequence Number=SeqID_123721
gggttaccagccaggtgcacgatcaaatcagtagcactcgagaaaatgggcaatctacagaggcgaacaattaatcatcaacgctagaaataaccatgaatagatgtatcatcattcaaaagctcctgtaattcattcatcaaataaccatcgtccatctctgctgactgagacacgcaacaggggaaaggcaaggcacacaggggatagg

SEQ ID NO: 57748 - DNA, 174 bp, Setaria italica
  Peptide Sequence Number=SeqID_123722
gatattatcttcgggaataaacataacccttctccaatgcaggttatctactcgattatacacttgctccgtacatgggccgtattagagaagccagcctcataggatttgggttatgtttattcccgaagataatatcaattctgctaggagcggctgctacttgctggtcat

SEQ ID NO: 57749 - DNA, 358 bp, Setaria italica
  Peptide Sequence Number=SeqID_123723
atctaaaatgtgattattttggatttcaccataaccatgaagttatcgaacaaatgttctgtacaaccaatcctgtgaacatcatcttggcatagcaatcattgtgtccaccataaccatgaagttatcgaacaaatgttctgtacaacaatcctgtgaacatcatcttggcatgcaatcatgtgccaccaaaacttcaaccttccacaacactacaccagagttacaaatcttaccaatacctaaagtagcagaacactagagaaacttcttctcaagtctctgcagatgctacaacagttctgctgcaccttcaaagttcaaacgaacaattgtcctgctgtggactagtgcgact

SEQ ID NO: 57750 - DNA, 195 bp, Setaria italica
  Peptide Sequence Number=SeqID_123724
acctggatcaaaaggccatctgcttaaatagttgccaagattcatcaaaaggtaagcagcccacattgtagggaggcattgtctggataattgatgacacatttacattgcgggtagttacaagtattgaagaaaacaaagcaccgtttcaggtgaattggcatacggacatagctcaactttaaggctggcaac

SEQ ID NO: 57751 - DNA, 462 bp, Setaria italica
  misc_feature (29)..(29): n is a, c, g, or t
  Peptide Sequence Number=SeqID_123725
atacttctgttcttcatttattcttgtcntaactcaattctgattctgtcaatgctgtttctttgatctcattagcttttcgagtggtggtgaagatggatatgtaaggctgcaccattttgattctgactacttcaacatcaagatgtagataaaggacaccacaaactaatccgaggtaatgcttcccctggcctcaaataatgaagatctctgagttggtttgttcaagaattttgtatcctgatgccttttgatgcaccagtgtattgcgtgatattgtctatgtaactgtttagataagagacggacagtattgagttcccagcattacacccccttgattgataaatttagctgttgcacgcaaattcctttttttgattatggatatgtcgagtcacttggtacatttttgcatgcaaaccaaccatggtcaatttatttacttgtttattgttt

SEQ ID NO: 57752 - DNA, 438 bp, Setaria italica
  Peptide Sequence Number=SeqID_123726
tgtcggtcggttggtagttgggttggttgtaaaattggttagtccttgtttactttggttagtcttccttgtcggttggttttgttaggggtccacttggcccagttgttggcacagatgaatccaaaaggctagacggtaccccatgaggaggcggaggcagaggcggttgaggcggggatgagctgttcattgatagagtagcactggattcagaatcttcagtagtaggatcacgatcaatgttctccgagtcagatgagtttccaccatgctgaaccttctcatgatcagctgaaccaacagaatcagaagccacggaatatttttcttcatcagaatcaagtggagacatcagtggcatctgtagaccaactttagcttgcatttttgagagttctttcatgtcattgagtataagcttttgaaatttctcct

SEQ ID NO: 57753 - DNA, 220 bp, Setaria italica
  Peptide Sequence Number=SeqID_123727
tttttttttggttttttcgtcccacctcaaggctgtagctgtagttcttcgcgtcgttctcgtctcccatgaagcgaaggaaggccatgtatactggtgccatcccaagctggaaggcctcaaagtgcaggcagaaatactgcccaaagcagtgaaacacctacataaagacaccaaatcaatttgtcagtttcctattggcattctatttcgttcaaag

SEQ ID NO: 57754 - DNA, 453 bp, Setaria italica
  Peptide Sequence Number=SeqID_123728
aaataagataaataacatgaatatagagaaaacaagttcctgcgagtagcttacatacatttgatcttatcttccataggtgccaacggatggaagacactaagagcatgaatgaactcatcaaactctattacaccatttttcttctcatcaaacaaaatcaaaaacctgtatcacggggacaatcttagtttcatgtcattatttaaggaggccccatgcaatgtaaaatgtttttgaggataatcaggagaaaatagagtatgatatggtaaatatatcaagaatttaaaaacattttgaaaagagcaaagtaaagtaaggactcaccctatcaagaaaaagattctggccacttggagttttgaacaaagcgagctggagctcttcctgaggaacgattcaacagaggaacagttacgaaaaatattttatgaccactccaggtttttt

SEQ ID NO: 57755 - DNA, 466 bp, Setaria italica
  Peptide Sequence Number=SeqID_123729
ccaagactaggttagggggtagaataaccatcaacactatctcaacttcctaatttgaagatattggacttggctcaaaacaagctaagtggtgaaattccaaacctaatatattggaatgaggttcttcaatacttgggattgcggagcaataatttagaaggaagcctctctccggatatgtgccagttaactggcctgtggtactttgatgtgaagaataatagcttgatgggtacgataccagaaaccatagggaactgtaccagctttcaggtcttggatttgtcaaacaatcagcttactggagaaatcccattcaatattggtttcctgcaagtggctacgctgtctttgcaagggacaagttctctggcccaattccatcagtgattggccttatgcaggcgcttgcagtgctcgatctgagtttcaatgagctatctggaccaataccatctatact

SEQ ID NO: 57756 - DNA, 329 bp, Setaria italica
  Peptide Sequence Number=SeqID_123730
atcgaccgacgatgcatgaggtcgtgcgcgtcctggacagcctagtctgcccagacccgcccccaaagcaggcacagccacagggatcggaacagtcagccacagctccgagctacgtcagtgagtatgtcagcctacgaggcggcaccgcgctctcctgtgccaattcatcgagtgcgtccgatgccgagctcttcatgaagtttggcgaggtgatatcacggaacacagaataagatcgatcgtctcaagagttcagcctgcgattttgcagcattttggttcctaattcttactaagtaggttattcttggtcgtcccttgttgta

SEQ ID NO: 57757 - DNA, 267 bp, Setaria italica
  Peptide Sequence Number=SeqID_123731
cgttccttctaaattattgctccgcaatcccaagtattgaagaacctcattccaatatattaggttttggaatttcaccacttagcttgtttttgagccaagtccaatatcttcaaattaggaagttgagatagtgttgatggtatcaccccaaccagctggttgttcttcaaaatcaggttctcaaggtgcttgagcttagatatggagaataatagcttgatgggtacgataccagaaaccatagggaactgtaccagctttcag

SEQ ID NO: 57758 - DNA, 467 bp, Setaria italica
  Peptide Sequence Number=SeqID_123732
cctgctggcagttcttgtaaggtagatagaatttcacttagttaagcacttaaactctggaataatttctcatatttcagaaatattatgaattttacttacaatgtaatctacatccaggaaacaaagaggatatatatcttcctccagaaccatgccattgcctttacttttaaatttgaaaaatctgcctacttgatcatttgtgtttgttgaaaatgcttatgaaaacagagcatgcggtttctttccggggcatatatatatttgtatgtgagtttatcagacgtttgattcttatgcataacctaaatcttatcgacaagttttaccatccgtgttttgaattgctagtaacttttcatatttgcaggaagaagagcaaaataaagcgactagagaggcttaaaattggagagacaaaaagaggattgccacaagaggtaatgggaagggtccagggagtg

SEQ ID NO: 57759 - DNA, 231 bp, Setaria italica
  Peptide Sequence Number=SeqID_123733
atcaagagtttctggatccttgctatccgagttatgtccaatgatgaacttgttatgtctggcgaagggagaggctatattgatggtgaaatgaaggagatagaagctggtggtgggaggtacaggagagggacaggtgatgacttcatgattaatggtcaggaaagccatatagacagaagtagcctgttggatcctcttgcaggaggcccgttacaagaatcctgatca

SEQ ID NO: 57760 - DNA, 233 bp, Setaria italica
  Peptide Sequence Number=SeqID_123734
gcgaagggagaggctatattgatggtgaaatgaaggagatagaagctggatagctctagtcctcccattggtcgaaagtcacatagaaagagtaagaggtcaggaaagaagaagcctagtgtagttgttatcaagaatgtgaatgtaacatctaaaaagcatggctcatcagagagtgagtcgcaatcaagttctgatgtgtctggaggacagtgatgattcgcacacgaaat

SEQ ID NO: 57761 - DNA, 393 bp, Setaria italica
  Peptide Sequence Number=SeqID_123735
tagaaatttgatgatcccatcccacgataggtacggaaccgtcatatatcgtattgtctcgaaacccaacacaaccttaatcattcattaagattaaggggtaaaaacgctacaccacatttgaaaataagacacgaaattagtcaccggccgttgattgatgcatcgttgtagtaatacggagatatttcagtaccaatccaagccttcgcatgaagcgctagcttaacaccctaaaacataagaaaatacgaagccaaaaagtgagcaatgcttcctcatgataggtagatgtaggacacagtgtcccctggcgcaaggctcttttctggagctactgttgcttgtggagactctccatagccacttcgagcttcttggcgtcagcaccca

SEQ ID NO: 57762 - DNA, 162 bp, Setaria italica
  Peptide Sequence Number=SeqID_123736
atcataaagggcaaaagctaatgaaatggaacgtaggcaccgagtatactttgagatcaccaagcttgcttccaagtccttccatagaaatggaacgtaggcaccgagtatactttgagatcaccaagcttgcttccaagttcctttcctattattctaatt

SEQ ID NO: 57763 - DNA, 204 bp, Setaria italica
  Peptide Sequence Number=SeqID_123737
tattgagttgtacagatgtcacacagaatttgatgcccatctcatatcagctgcaattttgcttgcaaagtaccaaactccatagggtttaaactcagctgtctgacttcaccagcttcactttctccttgagaaactgtcgaatgtgctcccgcttccactgagacacgcaacaggagataggcaaggcacacaggggatagg

SEQ ID NO: 57764 - DNA, 352 bp, Setaria italica
  Peptide Sequence Number=SeqID_123738
tgtgagaacactagctggaaatgggactaaaggttccgattacaaaggaggaggtcaaggaactgatcaggcatggcttgacttttcttttcctgctacaattctggaaccataatataaaaaatgagcaccttattttcatgcaactcccacgaggcacatagtcagttgcttaacactgtttggtttagcctcaagtgtaactaatggcttttagagagacaagaactttagttaaaaactatgctaagatcattgacattacattgttcagtctaaaagttgattctcgtacaagtgaaccaagagagtgagagccaaagatctgtcatagcccaccacaatattggcg

SEQ ID NO: 57765 - DNA, 253 bp, Setaria italica
  Peptide Sequence Number=SeqID_123739
ccaatgaacctgactataccttggcatctttctacccgctattaattgcgcaccacctgaattatctcttggcgtcacagaataggatagagtaatttgtgttggactgggctctggcccctcatggaatttgacatcaaaagcaatgggaaggataaactgcaaggtctactactgtaaagaagatgaagtttgtctttatcaatccattgcttttgatgtcaaattccatgaggggccagagcccagtcca

SEQ ID NO: 57766 - DNA, 293 bp, Setaria italica
  Peptide Sequence Number=SeqID_123740
gttgtggacagccaactcagagatggtaccatgtcccacggtcatggtttcatccatcagagaacacccttgttgtttttgaggagaagggtggtgatcccacgaagatcacattctcaagaagagttgtgtcaagcgtatgctcctttgtgtcagagcactatccttccatagacttagagtcctgggataaaagtatcacaaatgataccacagcccgaaccacaacctgatccaaagccagatcccaaaccaacaccacaaccagacccaaagccagatcccaaaccaac

SEQ ID NO: 57767 - DNA, 276 bp, Setaria italica
  Peptide Sequence Number=SeqID_123741
ccaggatggttccagacgtttggtgaaagtaatcccacagaccacctgaagacgttgcgtttgccgttgcacgtttttttgagaaaggtggcagtgttcagaattactatatgtaccatggtggaacaaactttggtcgcactactgggggcccattcattacaactagctatgactatgatgcaccaattgatgaatatggtcttaggagatttccaaagtgggcgcatcttgagggagctttctactaaattcttattaaaatttgttgtcgta

SEQ ID NO: 57768 - DNA, 258 bp, Setaria italica
  Peptide Sequence Number=SeqID_123742
aatttcacgaggcgttgtcctgtttaccttgtccaggtacatacaattaaatatttagttctatttagtactctaatgttctaatagtcagattacactgcagaatctaatccactggaaacactacagaagaagaggaatcatattcctctcctatcacgacaaacagagccctcttacgaggagcgtatagcaaaagtcaaaacaaagcagacaaatattctctagcagagtgtccgccttgaataggaacatcta

SEQ ID NO: 57769 - DNA, 382 bp, Setaria italica
  misc_feature (207)..(207): n is a, c, g, or t
  Peptide Sequence Number=SeqID_123743
tggggttcttgatctggttgtgggcagtacaaatcatctgctgccgaccaggaaagtgctgccactgaggcatcctcgtcgttgtcaacagcaatgagctcttcatcgtcagaagtcggttcggcaaatggtgcgtccacgctctcccagttcaggtcatctctgcagagaaggctaggatgttcgctgacccattcatccaaaacnttgatgttgtccaggctgatgggatcgatggtgtccttaagcttgttcctgcgtgacagtagtgaactgtaagtagaaactcatggtgggaactacacatgaaattattccaggtttttatacctttctcgaagcttcagattgtaacgaacaaatactatatcatgtaaccttg

SEQ ID NO: 57770 - DNA, 409 bp, Setaria italica
  Peptide Sequence Number=SeqID_123744
agaccagtttagacacatacagaccaatttacatactatagttcaaatacaggaacttctgcatggcttctactactagaaatacacatactagcagctctagtcgcattttgcacaatgaatatctacaaattgaaacacatccatggctccttttatagaactgacaacaaaaggtattactgacaactatcatttgtgagaatccttttctagaatccacaaaactacaaaaccattgtatggtgctacacaacaatactaaatgatgtccattcatgtttcatacttaatttgtcaattctagcaaagagacaggtgcatctaaagttcaaaaattgcagagtatggacaggtattgttcatgctagtggtctctagtttcctcacgtcaagattctcagccttg

SEQ ID NO: 57771 - DNA, 245 bp, Setaria italica
  Peptide Sequence Number=SeqID_123745
gtaactggtcgtatagcctgcattcttgttttacagtcaagccatttaacagaaagacatatctttatataatgtgtacacctactagcagctctagtcacgttttgcacaatgaatatctacaaattgaaacacatccatggctccttttgtagaactggcaacgaatgctataactgacagtactcaactatcatttgtcaggatccttcgagccagtgctatttttcatattaaacacagaa

SEQ ID NO: 57772 - DNA, 373 bp, Setaria italica
  Peptide Sequence Number=SeqID_123746
tagaagacaacaataggcggatgaacagctgcaggccttcgtcaatggtgcaatggcacagcacgaggagctgctgaacctcaaaggtgccatggccagggctgatgtcttccacctcctgtctggagtgtgggcaagccctgctgagcgttgcttcctttggttgggaggctttcgcccctcggaggttataaaggttctagtaccttgatgggtaagaaggattttggattcaacgtaagaggaatcgatcagggagtaggtaataaacggacaggaacaggtgatgctgaagcatgtggaaccgctgtcagagggtcagatccttggcatatacaaccttcagcagtcagtgcaggaggagggaggaggc

SEQ ID NO: 57773 - DNA, 268 bp, Setaria italica
  Peptide Sequence Number=SeqID_123747
atatatattatatctagatacataccaaatgctatgtacttagaaaagccaaatcgaatagtaatttggaacggagggagtataattgagaggagttcaaaaagaatcttagctaatgtggtagacaggttctagtaccttgatgggtaagaaggattttggattcaacgtaagaggaatcgatcagggagtaggtaataaacggacaggaacaggtatggaagatgttaccagatgtgtgatggggatagtttctggactaatggat

SEQ ID NO: 57774 - DNA, 216 bp, Setaria italica
  Peptide Sequence Number=SeqID_123748
tcggcaagcttgttggtgaaatcgaccatccgttcagtggattccacgcacaagtggcgtccctgtgccgacgagttctcatacaacgctacgagcgactgcgccacgccccggacgtcaacacagccaaggaagtactcgtccatgtcaaacctctggcccttcataatctgcagaaatacttggagactgccagtgatcgagggcgtcaatgtt

SEQ ID NO: 57775 - DNA, 202 bp, Setaria italica
  Peptide Sequence Number=SeqID_123749
atggtcgatttcaccaacaagcttgccgacctttaccctgaacttccggttcaaaggtgaaacgtttctgacaacgctacgagcgactgcgccacgccccggacgtcaacacagccaaggaagtactcgtccatgtcaaacctctggcccttcataatctgcagaaatacttggagactgccagtgatcgagggcgtcaatg

SEQ ID NO: 57776 - DNA, 382 bp, Setaria italica
  Peptide Sequence Number=SeqID_123750
gacttatcagccatagcagggattagttgaccatatactgctctaaatttgtctgttgagtaaaataagtcgacatagttctccagaggtgcattgctgagtgatgtgatgaatgctatagcatgcttgcatggaattccagaaacttgccatgctctacaagaacatgtcctatcatgcaagttcaccacaaacctgaagccactgcctcccaatgcagtcacttcagccacttctagtgctagagcaagtatgagcacattggttctttttcaccattacagtgctcatgtcttccattgttgaagcatgtagcctccagggaacaatttaatacttacccttttactttagacaacaaataatagaccgtagaaaccta

SEQ ID NO: 57777 - DNA, 452 bp, Setaria italica
  misc_feature (429)..(429): n is a, c, g, or t
  Peptide Sequence Number=SeqID_123751
ttattttgttcttagggtttcttatttcttttgttctattagttgttacctcaccaatctcatcctcttcaacctcatcattgttctcttcaacctcgtcattgtccacttcaacctcatcatcttctgggccatcagcattaagtcccttttctttctcacaacaaacagcaacatctaaagcaagtacaggttcattgctcaagtatatagcctcctcgtccacaccaacatgttcattctcaggtaatgggttttgtaaataactttcatcatctggttgtgtgctgctaggcttgcattgctcaggctgaacaggtacactactagcatagccttgccactcagtgataagctgatatggtttggagagctcagcatatgcaatgaacaggtgcactacctttgtcataatgtgtttctcaaacnttgacatcaactcttggtctgtt

SEQ ID NO: 57778 - DNA, 149 bp, Setaria italica
  Peptide Sequence Number=SeqID_123752
gagcagtatatggtcaactaatccctgctatggctgataagtcacagtggcctaaatttgtctgttgagtaaaataagtcgacatagttctccagaggtgcattgctgagtgatgtgatgaatgctatagcatgcttgcatggaattcc

SEQ ID NO: 57779 - DNA, 464 bp, Setaria italica
  Peptide Sequence Number=SeqID_123753
cgagcaatatgcatcttctcatcagttatatatccagctattgcaatgatctccatcctatccagcaatggatttggtatcatctctataacgtttgctgtgcaaacgaacagaacctaattttcataaacaaagttacagaagatgacaagaatattacaaacagaaagtagcatgaaagaaatagttgagcacaactgaacacactccaaaaacagcaataatagaagattggaaaggcagagcatagtgtgaaaaaccatcttaagctgaaccgaagaccatcctactgtcaaaaaatctcatcatataaaacagaacataatactaagaatattgcaccattgacatagcacactaagaccacaacttactgtagcacactagcacgtagcaccattgacgtgaatgatgtgatagcacaataaccaacaacgtatacccaatgattgcagcaagcgcca

SEQ ID NO: 57780 - DNA, 188 bp, Setaria italica
  Peptide Sequence Number=SeqID_123754
aggcgaaggccgaggatgcgaccgttgcggagggggaggcggacggcaaggcgtcctccgccatcgtgcccaccaaccccaagatcgaggactgcctctcggttgtagcattacctcttccacatcgaccactctttcctggattttacatgccggtctatgtaaaggaccaaaagctgttgcaagcc

SEQ ID NO: 57781 - DNA, 227 bp, Setaria italica
  Peptide Sequence Number=SeqID_123755
cagccaaacctccaacagaaaacctgtagaattgacggttgagtgcacgtgcaattgaacgaccaatactggttttaccaactccaggtggcccagaaagacatatgatcttgccttgtgaagtccctcttaacttcccaactgctatgaattccagtattacctcttccacatcgaccactctttcctggattttacatgccggtctatgtaaaggaccaaaagct

SEQ ID NO: 57782 - DNA, 342 bp, Setaria italica
  misc_feature (148)..(148): n is a, c, g, or t
  Peptide Sequence Number=SeqID_123756
gtggaaaatgacaaaacagaaataacacaaacaccttaccaaagatttgagtggctaaaaatatgcatttaaatcaaagaccataatatggcataaaaaatacattcaaatgaacttaaagagatcttaaattaaactacacccaacngtaaaatatcagcaagctatgccaatgcagttttttgttacccaaacggaaaaggataaaaaattattctacaggtcaaaggatcaaagtgtacaatgccaaaagtcaaatagcttaagcatccttaccaggtttcaggtctctatgtataatgccattggcatgtaaacagtccattgcatgagctatgtcta

SEQ ID NO: 57783 - DNA, 257 bp, Setaria italica
  Peptide Sequence Number=SeqID_123757
gatacagctagcatattactgtaatgagagtaaaatgtttggtggttttggtttctgtatgtaattttgctagctttaagataatgcagaaaatagtgtttacaacctctggggccatccatcggtaagtcccagtttcagccgtcatcatttcagtcacagtttcttcacgtgcaagtccaaagtcagtaagtttcagcttcttacggtttgctgtaagcaataaattatcaggtttcaggtctctatgtataatg

SEQ ID NO: 57784 - DNA, 491 bp, Setaria italica
  Peptide Sequence Number=SeqID_123758
acaagcatccggatgatctggctgaactgggtcgcatgctaggatcctcgacccagcatgattgtactatgaacacaagttcctggggtgtatcctcaggaagtgttggccgcttttgctgaaaagcagcagcatatgcagcttgtagatttgacatgccttcgaatggcatcctattggtcaacaattcccacaaaacaatgccaaagctgtacacatccactttatttgtgtaatgctttttctcaccacgtcgaagtgtgactgtgctgtatagctctggggccatccatcggtaagtcccagtttcagccgtcatcatttcagtcacagtttcttcacgtgcaagtccaaagtcagtaagtttcagcttcttacggtttgctgtaagcaataaattatcaggtttcaggtctctatgtataatgccattggcatgtaaacagtccattagtactaattaagtaaagtaacttaaattaaagtttaaa

SEQ ID NO: 57785 - DNA, 228 bp, Setaria italica
  Peptide Sequence Number=SeqID_123759
catgagctatgtctagtgcatagccaattgcagtgtgtgtgtctagttggctaggacgaatgctgttcaggtaatttttcagtgacatcccaggtagtagctcgctaacaatcaccatcaatggttccttgcaggccccaatgatcaagcggccaactctgcacttgcaacgactgacgaattcggcaacttcacaatagatctcccttcccagctccacgccacagc

SEQ ID NO: 57786 - DNA, 335 bp, Setaria italica
  Peptide Sequence Number=SeqID_123760
ctctcatcctcaaattgtacataaccaacttcctttctcttggttggcggccgtcctcgcccccttcctcgacctctcccacgtcctctagggctgatgttcacgcttcttatggcctgaaaaagcaaagatccattaccacacagccatttataacattattaatcacatggtctgtgacagttgatgtaggcataccattttgctggatcttgattcatcattctctgggtcactgccatttgactttctgtaaaatgaatttcaatcaagcactaataaggcacttgttgcagtgagtcatgaatagctgattataacactgaatttacctt

SEQ ID NO: 57787 - DNA, 143 bp, Setaria italica
  misc_feature (1)..(22): n is a, c, g, or t
  Peptide Sequence Number=SeqID_123761
nnnnnnnnnnnnnnnnnnnnnnaagtttttaggtcaactaccaagcaattattgggaaacaaaagttacacaggacaactacataactgcatcgtggcagcaggactaccagctacagcctgaactaattaagtagcacgagc

SEQ ID NO: 57788 - DNA, 289 bp, Setaria italica
  Peptide Sequence Number=SeqID_123762
ccgacctgccgcgcccaccccaccccaccaccgctccacgccgcgcacgaccggcggcggcacggcgtccggtccggcgggtcgagttgagtacttgagttgagccggcggcgcgcggggggcgatcgcgtcggctacggcctccaggagtttgatctgatcgggcggccgttctcggatttgaggatcccgattcggtttgcgcgacggggtgtagccgcactcttttccttgtccccgtttggcggctcctcacgtgggatttgactgaaggaattggttttctcca

SEQ ID NO: 57789 - DNA, 264 bp, Setaria italica
  Peptide Sequence Number=SeqID_123763
taagtaaaaaagttaagttttaagttacttaactactagtagaataactagaagacaagaccggtagtacaacaaagacgtgtgtaagctgtggagccaatatgggagagtatttctgcgatatatgcaaattttacgatgatgatacagagaaagggcagtaccattgcaatgattgtggcatatgcagggttggtggcaaggaaaactttttccactgtgtgaagtgtgggtcttgctattctgttgcactgcgtgataacc

SEQ ID NO: 57790 - DNA, 196 bp, Setaria italica
  Peptide Sequence Number=SeqID_123764
attgaaaaagtagtttgtctactctgtgatactgagcagccggtgtcacaagcgtgtgtaagctgtggagccaatatgggagagtatttctgcgatatatgcaaattttacgatgatgatacagagaaagggcagtaccattgcaatgattgctgagacacgcaacaggggataggaaggcacacgaggggatagg

SEQ ID NO: 57791 - DNA, 366 bp, Setaria italica
  Peptide Sequence Number=SeqID_123765
agaagaagacaaggtaggactacccaaactacttactactagtagacaagcgaaaacaagattgctattactgcagtattaggatgtgacagttacatcgtcatgcgacatggtgctggtccaggaactagtgggggtacagatgaagtggctgctcagatagaaaatttgtccacagaagatgctcttagccatcagagattgggctgttgtttctgcaatgatgctgcttccctttttaatgtacatcagataaagacttttgttttgtgaacattcctatttgtttctgttttgtacttatcatttttccttgtcttattattggtctgtcatgttcaatgttattcttttgcagacaattcc

SEQ ID NO: 57792 - DNA, 223 bp, Setaria italica
  Peptide Sequence Number=SeqID_123766
tcattaatagattttgctatgtccagaatgcgtagcaaaaatttatagatctacaatttgaaacggagggagttcggttgtatttccacatcaactagcaactcaattacacgtaccattagttagttgttgtacaatagattagcagccacacggtccctctaaacgcaagtagtcatacatcagcccctgaaatgggctctggttcctgggctgcttcagg

SEQ ID NO: 57793 - DNA, 467 bp, Setaria italica
  Peptide Sequence Number=SeqID_123767
attttctgcatctctcagcatctgtcgaggagcttggagtttctgtttcagttcatctgagcaaaattcataaacatccagttcctcgacagatgctgagagatgcagaaaatgcaaagtttggattgaaaacacaggggaaagctagcagctcaaaagaaaatgaggggtcatcaagtagtgctggggactcatccagcatggacattgacaaagctgatccttctgtaccaaagaaacaattgactggtgtctacgatttggttgctgtcttgacacacaagggaagaagtgcagactctggccactacgttggctgggttaagcaagataatggaaaatggatcgagtttgatgatgacaacccaaacattcgcaaggaggaagacattttgaaactatctggtggaggagactggcacatggcttatatctgcctgtacaaagctcgtatagccaagagacct

SEQ ID NO: 57794 - DNA, 391 bp, Setaria italica
  Peptide Sequence Number=SeqID_123768
gagtcactcgtggcatgagaaatgtagaaccggtataggcgtatagccaagagacctcttaactctttgattcggccacacgagctttgtacaggcagatataagccatgtgccagtctcctccaccagatagtttcaaaatgtcttcctccttgcgaatgttgggttgtcatcatcaaactcgatccattttccattatcttgcttaacccagccaacgtagtggccagagtctgcacttcttcccttgtgtgtcaagacagcaaccaaatcgtagacaccagtcaattgttctttggtacagaaggatcagctttgtcaatgtccatgctggattgtagttcccctagtctacttactttgttatttgtttaccctttctttatttctt

SEQ ID NO: 57795 - DNA, 116 bp, Setaria italica
  Peptide Sequence Number=SeqID_123769
acaagggaagaagtgcagactctggccactacgttggctgggttaagacagcaaccaaatcgtagacaccagtcaattgtttctttggtacagaaggatcaattgactggtgtcta

SEQ ID NO: 57796 - DNA, 362 bp, Setaria italica
  misc_feature (283)..(283): n is a, c, g, or t
  Peptide Sequence Number=SeqID_123770
tttcttaattcgtaaagtagtcttgctagtatttctactttgcattctgatgtaagagtttgagaaagtgtatacacaagctgtgtccagcattcttctgcatcctgttgcatgtagacattattgtgctgctgggcaaattgtgggtattttttacgcagtgtctgcaagaattgtagaggtgcaacaggacggacactttgatcaagctcaccaaaggtgttacgagttgcaagagtcaaattatgagaggcttggtcaacaccattacctcttgcagtanctgaatagcttagtagcgctgacttcagctctggaacagaatgcagacattgcaacgtggaattcatgtagcatgtatt

SEQ ID NO: 57797 - DNA, 358 bp, Setaria italica
  Peptide Sequence Number=SeqID_123771
taggtagggtttctattgtactaattagtattggtaggttgtcttttttctatttccttgtcttcttttggttttcttttttctccttggtcgtgactgagtcaattaactgcttcacttcctccttcagaagcatcttcagcgagctggagtatagcttgttcttgaatttgtcgataccaatgtctgaagaagcttcagaacagtgaagcaaagagatgcagatagaaaaacgcctgcaacgctgatagtcgtgcatgaaaatccaccgagaaatgtccattcccatccgccttcatcaaaagggcagggagaacttctttgttaccctgagcaaatagctccataggaactttac

SEQ ID NO: 57798 - DNA, 260 bp, Setaria italica
  Peptide Sequence Number=SeqID_123772
gtactggaacagcgggacggcgacgttctacggcggcaaggacggttccgggacgatgggcggcgcgtgcgggtacgacaacctgtacaaccaggggtacggcgtgctgaacgcggcgctgagccaggtgctgttcaatgacggcgcgtcatgcgggcagtgctacaacatcaagtgcgacaccagcaagtccgcgtggtgcaagcccggctactccgtcaccatcaccgccaccaacctgtgcccgcccaactacgccg

SEQ ID NO: 57799 - DNA, 245 bp, Setaria italica
  Peptide Sequence Number=SeqID_123773
tactggaacagcgggacggcgacgttctacggcggcaaggacggttccgggacgatgggtacgtactgctaccaatgcagcatgtcggcgcgccgcgtcgcaaccagcagcctccgccactgcagatggcgagcttcattgcaacagcttcgttcctgacggtactctgcaattctgagcttgcaggcggcgcgtgcgggtacgacaacctgtacaaccaggggtacggcgtgctgaacgcggcg

SEQ ID NO: 57800 - DNA, 350 bp, Setaria italica
  Peptide Sequence Number=SeqID_123774
cggcagctaggaatcctggtacaacagatctgcaagtggtgttctattgtttttgaagagctctgttctgttgtcaatatggatctttgttattcctgtttttgattggactcctttttgagctactggtcattgttccgatgagggtgcctatcgatgagagccctgtcttcctattataccaggattgggcgcttgggttaatattcttgaagatatggactcggctggttatgttggatcaaatggcacctttggttgatgagagctggaggtcaaagtttgagagagcagtaaggagcttggtgactatcggcattataatttcatggaggacccacaaacccctt

SEQ ID NO: 57801 - DNA, 148 bp, Setaria italica
  Peptide Sequence Number=SeqID_123775
acttcatgacatccatgaaaacttgtttgtgaagttgactggaccgtggagccgagctatggttttcatggatgtcatgaagtcccttcagaattcaacaagataaccatagctcggctccacggtccagtcaacttcatgaccctca

SEQ ID NO: 57802 - DNA, 419 bp, Setaria italica
  misc_feature (400)..(400): n is a, c, g, or t
  Peptide Sequence Number=SeqID_123776
atccccacttgtggttttacacaccagcatatggatgagtaagtacaaccatatacatacttcacttaaatgttctagttatgaagttaatgatgtactttttgtgacctttatgtactttggtaacactgtttgcttgccattgcattcaggtattctagtggtgataatgtaactccacaaaagaaggaatttgaggccccacttctggcaacccttccagagacagtcaatggattattgcttcaggatatctacctgaaattgttaaatccatttcgactttccaagggggctaactcacttagtggttttgcagggtctaatggtgaccctgttgatctgatggatggaatgccttctgattcagacagtaattttcagaacattcaattggaanatgacactgaaagcagtaa

SEQ ID NO: 57803 - DNA, 293 bp, Setaria italica
  Peptide Sequence Number=SeqID_123777
taaaaaactagaaaggttagaagaatagaaaataaacgttagttaatagacctgctaattcagtcagtgagattgacagacgaattcatggagcttgcaaaggagaatacaagcaataatctagagacttgcggaattcttggcgcttcatttagggatggaacttactttgtgacaatgttgattataccaaagcaagaaggaactgctcactcagtatgtcagtaattgaatggtttcaaacatataattaatatatcaattgttagattattatatgctctgacaaatat

SEQ ID NO: 57804 - DNA, 249 bp, Setaria italica
  Peptide Sequence Number=SeqID_123778
tatggctgtaataacattgataataacttgtactcagaattgctaagtctgtctttgacactttgtttgtcaaactcaaaaccgcttcaacacctgagcttcacctgctttagcatgtctttaactttgcttgatgaaaatggctggattcctgcaggttatgttgccagaggctgttgcaattgtggttgcacctaccgaccctaccaggagttatggaatatttaggctgactgatcctggtgggat

SEQ ID NO: 57805 - DNA, 336 bp, Setaria italica
  misc_feature (299)..(299): n is a, c, g, or t
  misc_feature (310)..(310): n is a, c, g, or t
  Peptide Sequence Number=SeqID_123779
ttattttcgtttattttgttttatttctttagttattgtcttctaactaagtcttgttcctacttgtcctaagtcttactagtaccgtcttattgtctggttcctgcgctgtgaagcatcacttcccgtctccaatcgtatcttggatagaagatctatcgagctttggcaatgtttcttttagccccgacactgaatatgtggatgagcaagccagagcttcagtgggacagtcttcaacatcaagcaatttgcatgacatgcaaatatcagtgagattgacagacgaattcatggancttgcaaaggngaatacaagcaataatctagagactt

SEQ ID NO: 57806 - DNA, 345 bp, Setaria italica
  Peptide Sequence Number=SeqID_123780
ggggtgctatggggtcaattttgaatctaaacataatgtagaattgtacatgcttcaatgctcaattaatgttgaactcatactgtttgcatccgttatgttacctctcaaggaaagataaaatgcaaacttactctatgttgcctgcatctcaaatgatttgtaccgaagtcctcagatgttgaattgatatacctctctcttctttggcagaggcgaggggttgttggtggcactgattatggattcactggtgaagttaagaaatagatgttcatggataagagaaaggcttgatagagatagtatagttgttgtgagcaatatgggatactccagtgcagg

SEQ ID NO: 57807 - DNA, 233 bp, Setaria italica
  Peptide Sequence Number=SeqID_123781
atctctttccacgacgatgaatgacgtcaatgcttcaagaagcggctccaggttgcagagattgggcttatggctgtcaacgggtttgccatgagatgattcaatgctagtttacagatctagttgctgcacacgagggttgtttgatgacccctgcagcgcttgtacattgtagaactgtgtttatgcaagtaaatattcgatgtatttgcaataaaaagggtaaataatcg

SEQ ID NO: 57808 - DNA, 228 bp, Setaria italica
  Peptide Sequence Number=SeqID_123782
agttcatccacgccaggacactttcagctgctgacctacgtgatccggagatttcagctatcatagcctccaaattgagggaatttcacaaccttgacatgcctggtccaaaatctgtgctcatttgggaaagattaagcacctcatctgcactaggaactggctcaaaactgccaagagcttgtgctcccctgatgaagccaaagagttctgcttggatagcatgga

SEQ ID NO: 57809 - DNA, 179 bp, Setaria italica
  Peptide Sequence Number=SeqID_123783
agaatgaattttcaggggaaggtgagtgcataggattttgccacaacgatctccagtatggaaatatcatgattgatgaagagaccaaattgctgaccatcattgactatgagtatgcaagttttaacccagttgcctatgacatcacaaaccatttttgtgagatggccgcagactac

SEQ ID NO: 57810 - DNA, 393 bp, Setaria italica
  Peptide Sequence Number=SeqID_123784
aaaagttaaagttttagactagactaggactagaccctaaatgataatatcaggactaatctgccagcctattggatttttttcctcgaatacacaggagatctgcacatcattgcattaagaagagaattatggagtatgaaacacccaacacaacaccaccttttgttggataaataggccaaacatatcagtaactgcaatagcagtcatgcttgcgtaaaactcactgttctcatgcaaataggtctaacgtcaacatatttcatccagctattcgacaataaattatggcaactttgaacattgagttaataatgctttttaatccatgaactctattaaacatcaaataccacaatacaaaagcaacggtataacatcaacgacagt

SEQ ID NO: 57811 - DNA, 209 bp, Setaria italica
  Peptide Sequence Number=SeqID_123785
caactgaacaaatatatccaggtgcaactctggatctacctggagcagctgccttttagttgctgcatgtatgcatcccacttgttgaaatctttggggtattttccctgcagcgccaccgagtttaatcagtcaagtacaacactactgcctgcatcatttatcatcttctttctttttcaacaggaaagcacttctcccttattaag

SEQ ID NO: 57812 - DNA, 254 bp, Setaria italica
  misc_feature (23)..(23): n is a, c, g, or t
  misc_feature (74)..(74): n is a, c, g, or t
  Peptide Sequence Number=SeqID_123786
acgggtgtgttacgtaggaagcnttaagatcaaatttctagtgtccttgagaaagcattaagatataccgatgnttaaaaatttccagagtataatacatgcctgatcaaagagactctttttcatggatgcagcttgacgtcgcaaactagaataatccatttgtatgaatgaactagggaaaaggtggcaaggcgaaggtgaataggtgatacagataggaacacacttcacaagttacaatacaataactg

SEQ ID NO: 57813 - DNA, 177 bp, Setaria italica
  Peptide Sequence Number=SeqID_123787
ctatctctggaagtgtaggaggagggaatgatgaagacatcttggcagcagcaaagaattccagctgatttctgaacacactttcttctatgcgctcacgttctgtgctggttgagaagggaacattatccaaaggagcagaaatcttgacattgtagccagcatttttatctcatt

SEQ ID NO: 57814 - DNA, 182 bp, Setaria italica
  Peptide Sequence Number=SeqID_123788
acctgcgaatgctatctctggaagtgtaggaggagggaatgatgaagacatcttggcagcagcaaagaattccagctgatttctgaacacctgtcaattatttaatgtgaacaacaaatactaattgtagcttgaaattcgcacaacaaagtgccagataacatcataactgtgtggtagat

SEQ ID NO: 57815 - DNA, 268 bp, Setaria italica
  Peptide Sequence Number=SeqID_123789
ggcctcgacgccggccggaacgccacccgcgagtctccgcgacgccatcctctccttccacccgggcctccagatacacccgtgcctagatccgatcggggacgcccccgccgtggaggagggaggcggagaggcggcggaggtgtgggcggacagcgtgaagaagaagcgcaagcgcaagatgaacaagcacaagctccgcaagctccggaagcgactccgccgccagacatgagcgctctctccgctccggttcaaaggttgttgg

SEQ ID NO: 57816 - DNA, 412 bp, Setaria italica
  Peptide Sequence Number=SeqID_123790
tcctgcgcttgtcgcccaagtgaggtctggcccaatcaactaagttctgctctatgcctggctttgatttgtccagggctcttcttccagtgagcaattcaagcaacaccaccccaaagctgtagacatctgcctttgcagagaggcggcctgcaaaatttcaagcaacatgagaataaatagatccggaaataaccatgtatgtttgttatcattatgtttgattatttcctaaatccaggaatattatgccccctgcacttagtaggaacaaaattcactggagcattcactacatgaaaggactaacgtgacgtatcaaaatgaagtgcagcatttcagggaatgtaacacaaaaacagaacatttcactccaacttgctagaaacaaaaggaatgacaaagacactta

SEQ ID NO: 57817 - DNA, 465 bp, Setaria italica
  Peptide Sequence Number=SeqID_123791
agtagtacaatagaatagacggtaataagacctagacgacttgtcgcccaagtgaggtctggcccaatcaactaagttctgctctatgcctggctttgatttgtccagggctcttcttccagtgagcaattcaagcaacaccaccccaaagctgtagacatctgcctttgcagagaggcggcctgttgcaatgtactcaggagctgcatatccatgagtgcccatgacttgtgtggatacatgggttttatccccggttggaccagcttttgccaagccaaaatctgagagttttgcgtggaattccgaatcgaggagaatgttcgaggccttgaaatcacgatatataacttggttttcagcatcatgtaagaatgacaaaccctagcagctccaatagcaactttgagccttattgcccatgacaaaggatcagcacctcttctgaacagatgattctccaaa

SEQ ID NO: 57818 - DNA, 243 bp, Setaria italica
  Peptide Sequence Number=SeqID_123792
cagatggactgatcgatccttcatcccatccactctctgaaaatctaaacttgaattcagattccaatggcagtacttcaggttgtttacctcaaagtagccaacctggaaaccaaattccattcattaattctgctaatccagtcatgtcactggttgcattttggcctctgaagtaggaccaagggttgcagcagcctgtgcaagtgcagcgttatcggtttgacaagagatgattccagg

SEQ ID NO: 57819 - DNA, 247 bp, Setaria italica
  Peptide Sequence Number=SeqID_123793
ccatcatcttgcagctcataagttttccccttattgaagaatgatacaatactctgctgtcgtccacggacctctggaagatatcttgcagctgatggtgggatattatgaactggaagttcaggaatttctttcagtaaaaatataaactggaatatgatcggatccttctagcttactacttctcccccctttccacattcttctacatggcaaacaaaaaaaatgctaatagaatacctaccaa

SEQ ID NO: 57820 - DNA, 224 bp, Setaria italica
  Peptide Sequence Number=SeqID_123794
tatttgttgttatcctcgatcttccgcagctgaagttgtacactgcatgttttcttggcagactatcatcatttggaacacatgtttgattggtatggtgtactgtttccactggagtaactaaggtactgatgcggacattttgttcttttcaacatatatggcccagctgtcgaagaagatgataaagagcgggttcgttttaagctactattttataagat

SEQ ID NO: 57821 - DNA, 280 bp, Setaria italica
  Peptide Sequence Number=SeqID_123795
ggtaaaagctgcttccgaaatttgaccagttttacattgaaaaattgtcattttttgtactactggaagcctttattcttatatgcagatggcaaatgctttgcttggactggggagaatgaacttatatgcagatggcaaactgggaattattcttacatgcctccgttaggagaaagaacttgtgaatacttgccctatgctgctcttctagacgcttgtgtttcattgtatccgtagatgactgttcgaactccctgaccagataaagtacatggtc

SEQ ID NO: 57822 - DNA, 246 bp, Setaria italica
  Peptide Sequence Number=SeqID_123796
gtttgttttttttttttttttgtagcaatgaagaaatgtgactagttataatatctcaaagacatctcaaacttattggttccgtctactatttctatctgggtaattctatcgtatcattacccatgaaattggagcaagcaaggtaacgacagtactagtacgagtgtacgacaacaggagagcaacaaaacttgagagcacaccgagagctgctttgctctgctttttctttttctatttctt

SEQ ID NO: 57823 - DNA, 173 bp, Setaria italica
  Peptide Sequence Number=SeqID_123797
ttttatctcaaagacatctcaaacttattggttccgtcacattcatctgggtaattctatcgtatcattacccatgaaattggagcaagcaaggtaacgacagtactagtacgagtgtacgacaacaggctgagacacgcaacaggagataggcaaggcacacaggggatagg

SEQ ID NO: 57824 - DNA, 249 bp, Setaria italica
  Peptide Sequence Number=SeqID_123798
tcttgctcgggtttccccgagactccgagcaaagaatggccgaatccttcgttctcaacaccggcgcgacgatcccatcggttggtcttggcgtatggcaaataaagcctgaagctgtcggcgacgccatctatgctgctgtcaagcttgctggcgactccatgtgttgagcctgaattgccggttctcttcatcaggatactgggataggatctgactgttttgtcttgggcctgtaaaatttgtatt

SEQ ID NO: 57825 - DNA, 255 bp, Setaria italica
  Peptide Sequence Number=SeqID_123799
gctcggtccatggcacaccaccaacattcatcccgaaaactggacaaattgtgcaattataagtcatgtaagtgagaaccaaagaaatgaattggggaaagtagacatgaatgagaaccagtagaaagaacttacctcctgtgacaatggatagaggaaggaatattatggagagaaatgaaagatagtataagcttttgtttatctgctcggattgccaactgtccagactagcctgaagtgttgtcactctta

SEQ ID NO: 57826 - DNA, 402 bp, Setaria italica
  Peptide Sequence Number=SeqID_123800
ttacttaacggttactaattttactttacttttgttgtccttggtagtccggtagtacttgaaacctcagtataaatttttagtggaatgtttttctgctggtactgctctaataatttgtagtctttcccatgaagatgtaaccagtagaagtttctggagagtattccattgtctgacagcctgaaaaagtttgagtagcagaaaaatacacaggcttggcatccttcatcttcgggtatttcatctccatgatctgcttcactttctttggtggtacaactattttctcggaaactttgtaatagggggatgcaccatccagatcccatactgaaacttcgacagccacatctgcgagttcatcagctgtagtgtttaccacctctataaagtagctgg

SEQ ID NO: 57827 - DNA, 366 bp, Setaria italica
  Peptide Sequence Number=SeqID_123801
gcgcaacttccaagagtcttggtggtaaaagtaagagtggcaagaacagggcatcaagcaccagctccaaaaccggtggctcaaaaaccgaaaggtaagtaaggaatagaacaagacaaacaatttaggaacaatagcgatcagtgcacatatgcaaaccccaaatctgccagagcctgccaggcctgtgaccgccaacatcgatagcgctagtcagttcccatttgagttttggactctattcggttgcgaatcctcaggtgttaccccgtcatgcactgcatacatgaaatttaagtgttaactgatatctggggcaagcgaggaggtatcagtaggaggattgcggcatactgttatgaaagt

SEQ ID NO: 57828 - DNA, 455 bp, Setaria italica
  Peptide Sequence Number=SeqID_123802
ataagaatacagacatattagccccatgaatacagacacatagtgtgagaggtactggagataggccacatatacctccagcagcaacaagtttctctacgcgtgctactatgtgcttcccgtaggtgtacttcttgagggtgttcagatgtgtttttatccttgtaaggatcatctctctctgctgatcatcacaagtttctaacaccttctgcaccacatagttagcaaactggtctttcatcattacctcaagaggttcgctttcactagtggatccaagcatctcgccaatcagaacctggcgctctacaggatttccaaaggctaagcacttctcaatgacatttgaagcaaacttttgctggctcatttgcacaatttggccaattaacttctcaataatagcagatctctcatggggtttgccatgttccagaacatgctgaacaacg

SEQ ID NO: 57829 - DNA, 282 bp, Setaria italica
  Peptide Sequence Number=SeqID_123803
gagcactgtgaataactcgacaaccatatggatgagtggatagcattacaacttggccatagaacgttgagacaataaactcgatagcatgctgagggttctagagcactgtgatgatcctaaaacacagcaaataatgatggatgagattctccagtctgtttgcttgctagctcaggaccagtatggcaattacgttgttcagcatgttctggaacatggcaaaccccatgagagatctgctattattgagaagttaattggccaaattgtgcaaatgag

SEQ ID NO: 57830 - DNA, 249 bp, Setaria italica
  Peptide Sequence Number=SeqID_123804
tcaatgtacactcttcggcgcaaacgtacagtatttatttccggcaaggccaaaagggccttatataaggtttttagtagagaaaaaacgtagagtgcaaacctagcaactgttagctgtacaactagattgtttgcccttcaggcagcagtgcatgctggttgaagcccaaggcgcttctctgcaagcataagaatacagacattattagcccccatgaatacagacacatagtgtgagaggtactgg

SEQ ID NO: 57831 - DNA, 208 bp, Setaria italica
  Peptide Sequence Number=SeqID_123805
ctttgttgtcgcatgcagcaaaagatcgtgatcagggtgagccagctggcgagcgagaagacacggtccaaggccatggcgctggtcgccaaagcggacggtacgcacgggcacgcgttgttctagtgttctaccatgtcgatgctcttgtcctgtttatatgtgagctacggccagtgctaactgttctattgctgcgtgcgtgggt

SEQ ID NO: 57832 - DNA, 211 bp, Setaria italica
  Peptide Sequence Number=SeqID_123806
cctatcccctgtgtgccttgcctatccccttttgcgtgtctcagatctgctgcagcaaatccaaggtagttgtaggatcccaaattgaggcatctagtggtatttgaggtacgcgccgatctgtctgggcctggaggatttctatgtgcgccgcctgtaccttcggatccaggattgctttggtaggccgattgcaagcgcaccagattcc

SEQ ID NO: 57833 - DNA, 157 bp, Setaria italica
  Peptide Sequence Number=SeqID_123807
aaagatcaagcttgggaaccccaataagaagtgccatggagaatagagacatcattattcatacctgccactagaaaggaaagcaagaaaaaaatgaattccagctctccgagcttgcagtgtgcatgttccactatcatccttaaggaattcatgg

SEQ ID NO: 57834 - DNA, 304 bp, Setaria italica
  misc_feature (53)..(53): n is a, c, g, or t
  Peptide Sequence Number=SeqID_123808
aagcagaaataatatattcattgccattgtttgcaacttttaaaagtatagcnctttttacttgtgacaacgttaataacgaacattacatgaacgcaaaaactggatcacaaccattggttcacctaaacatttttacttcaagcaactgggatttctggtgcaaggggcctcatgagctcatcctcttccttaggggggtgaattgtaacaagatcaggtaaaggcatgcttgactgggatcccaagggaaagcaagggccaatcatgcctttacctgatcttgttacaattcacccccccc

SEQ ID NO: 57835 - DNA, 423 bp, Setaria italica
  Peptide Sequence Number=SeqID_123809
taccaatatatctaggaacgggaaaaagatttccactctgcaaggtctgacagaggaatgtaggataattccttggacttttttcctcacatttcgtgacatgaatattcaagccaaaaaaaacacgacatgaattatgcaccatttaagaaatagttactggacttgtatgcaatgagaactacagtttaatctgaacatctcaaaagaaaaactgaccaatctaatgatccaaaaaacacagggaagataaggcagaaaggaaattcagtagaactctgagcaatgatagtttacctaagtcctcgtcagtttcaaacatggttgatacttgacacgattcttgctcactgcaatcagagcggcgtttaaaggatggtatagaatctacatctagaatttgcactaactaaaactaaaaat

SEQ ID NO: 57836 - DNA, 281 bp, Setaria italica
  Peptide Sequence Number=SeqID_123810
ttaagttggtattccctttgttgtacgtccgtaagtacttgtcttggtaatttgtagttctaattagtctaaaagtctaattattctacttctagtcttctaattctacttgtcctaaagttctaagtagttaattggttgttggtcttttcccttaagtcctattctttgtaattagttgaaaaaccgatcaccatcataataatcagtgactggaatgaacttttggcatgttttcacaatgaagttatcggatagatcagattcttcttcttcttcag

SEQ ID NO: 57837 - DNA, 180 bp, Setaria italica
  Peptide Sequence Number=SeqID_123811
ataatttcatatgctgtaatatattaagcttgagcatactattgtttaagttacactgtaaattgtggttttgatgcccatcatgttcagaatatactctatgtgctaccttaagcaacaggcattacaaggaccgctgagacacgcaacaggggaaaggcaaggcacacaggggatagg

SEQ ID NO: 57838 - DNA, 347 bp, Setaria italica
  Peptide Sequence Number=SeqID_123812
acagcctctatcgtctctctcaggcaatgtgatcacttggaaatgaggcaaaaagcttcataggggttccaccttctttacccggctgtggtcatctcaatagggggttgtagagcacatgcacgagcaatctgttccattggtgcctctttcaaacaggcgtttgttacggttagtcaacaactttatcagtggtgcttttagggatacttggcgccatatctcattgactggtccattcggatcttcatactcaaagaattgttttacctgaaacgggcattcgcatttaagcaaatatgttgaaaggaattccatatgcataacacaaaactgaactaagacat

SEQ ID NO: 57839 - DNA, 385 bp, Setaria italica
  Peptide Sequence Number=SeqID_123813
agaatagaatagaaatactttactttagacttaggaaaggaatagaattaccaaagaaactaacgaagaaactaccttgaggagttgaaggctgaaaagagtatccaaatggttctcgcatcttgctgaaagctcagacgtgaaagccctaccgaatggtctttcgctcctccttaacaagatgaatccttcgaagagggagcaggtcattgatggcctcaggcagcttcttggttgatcgatggttgtctttgcatcccaaccaaataatgtcctcttttttgcacataagcactcggcggtggcatatcaatcctaaactgtgtctgctctgttggatgtttgagttgagttcttgctagagcggagtgaagcatgaaatcca

SEQ ID NO: 57840 - DNA, 361 bp, Setaria italica
  Peptide Sequence Number=SeqID_123814
tgcgtggcttttctcaaggcgatgtcatacagatacaacagatatcctgatcaagtaattatttggttgggatgcaaagacaaccatcgatcaaccaagaagctgcctgaggccatcaatgacctgctccctcttcgaaggattcatcttgttaaggaggagcgaaagaccattcggtagggctttcacgtctgagctttcagcaagatgcgagaaccatttggatactctttcagccttcaactcctcaaggtagttctcgtagttcttggaatcatccttccaagcaaagaaagattcatcatcgttccacttttcactatctccttcagttcccttggatgctagataccatttcttg

SEQ ID NO: 57841 - DNA, 246 bp, Setaria italica
  Peptide Sequence Number=SeqID_123815
gttttgaagttagttgaggccatcgatcccattgttcgaaccattgatggcattgtaggagagagtgtctccatgagagtatgtattatgcatctctttaaaaaaataaaagagaaaagttgccccagagaaaatgtggtggcacatgaatcctaagcaatatgcatctccagtaagcaggaacctggactaataaatcgcattatgccaatcgaattcattttctttctgcaggtagacttgcag

SEQ ID NO: 57842 - DNA, 326 bp, Setaria italica
  Peptide Sequence Number=SeqID_123816
cctatcccctgtgtgccttggagtctcagcagaggatatgatcatatcctctgggacgacgtacgttgcagtgttcacgtactcgccggagctgcacgacgtggtggaggtgaccaagcggggtacgacgcctgctccagcgccaacaacatctccgccttccgctccggcaacgacgtcgtcgccctcgccgacgtcggcacccgctacttcctctgcggcctcacgggccactgcgacagcggcatgaagatccggcccggcggcggcggcggcctcttccgccgggatcgccgccgcctgcttgctcctgcagcacgccgccg

SEQ ID NO: 57843 - DNA, 443 bp, Setaria italica
  misc_feature (35)..(35): n is a, c, g, or t
  Peptide Sequence Number=SeqID_123817
gttgatccactaaaatacactggcaaacaatatcncttttgccacggaggtggaagtgcagcttggaaacgccttcaggcctctgtcgtcaggcaaatgaaagattcagaaatggcgatgcagtggacgctgatatatcagctaactagtaggctccgtgttctcttccagtctaccccatccaataggcttctcttcgagtactcagccacatcgcaggattgattcatttttgccattgcatgcagcaagaacaccgggcgtagcagctgtgctacacaaagattaggtcccctgattaattgtttttgtagatatgcaagttttgacaaggagctgtacgtgtacatttgctctgtggtagttacattctttctcggaaacaaagtttactagaaggactagtaaaataaataaggtaagacgaatacttaaagaacgaa

SEQ ID NO: 57844 - DNA, 380 bp, Setaria italica
  Peptide Sequence Number=SeqID_123818
ctactacctctttaacccttttctgtagacggtaaaggccttcagtagtgatgcttctcaaagtacccccaaattcaacaattgcaggggtggcatcaagggcttttccagctttgacatatgtaaccgagaccacttggctgtgaagaggatcatcttctcttgaaatgagctgctgtagcgacaggatggcaaatgatgcagcaacaataggatccacgtttaagtgtggggtttcagccatcccagttttaccttctatttttgcttcatagaaacatacagcagcttgcgtgggtcatgcatgttgactatcggataccaactggtgtaatagcagctcatccaggacccacgcaagctgctgtatgtttctatga

SEQ ID NO: 57845 - DNA, 259 bp, Setaria italica
  Peptide Sequence Number=SeqID_123819
cgatccagtggtcggtgggcgggaactacagcgactggtcagccgcacacccggtcagcgtcggcgacaccgtcgtgttcaagtacgcgccgccgcacaccgtggcgcagctgtcgtcggaggcggcctacaaggcgtgcaacctcggcagcaaggtgttcttggacagcagcggcggcaccggcttcacgttcgacgagcccggcacgtggtacttcgcgtgcgtcacggggtcgcactgcgcccgggcagaaggtgg

SEQ ID NO: 57846 - DNA, 189 bp, Setaria italica
  Peptide Sequence Number=SeqID_123820
tatttgagtggttattttgttcctaggatctcattgggcgattttttattcttatgctgattcggccgagacttggtacataaatattaccttttgccttacagtaggtagtgggagcatatttgagtggttattttgttcctaggatctcattgggcgattttttattcttatgctgattcggccgag

SEQ ID NO: 57847 - DNA, 475 bp, Setaria italica
  misc_feature (255)..(255): n is a, c, g, or t
  Peptide Sequence Number=SeqID_123821
tcacatcatcgtgtagtgttgctacagaggcatgctaatgtgattttagtttgtataatttttttaagttcatcagctaagttggtggttcgtttatagaattaaatgtggctcttactggcacactttaagatgcaactgcactgtgtcaatggagaaactgtttttcataaaattttcatcacaatgttagtcttattggattaccttgtagaaattcatgaattcaggttctatttttagatctcctatgcngtttctgcgaggtgctttcctgttcccttgacctacttccccagaagataaagatgggactaggaaatcttgaggcaacttttgagaccttggttgatgcatttgtcttcctggataagaacaaagatgggtacgtgagcaaggatgagatgatccaagcaataactgagaccacaacaggagagcgctcatctggacgtatagccatgaaaagatttga

SEQ ID NO: 57848 - DNA, 247 bp, Setaria italica
  Peptide Sequence Number=SeqID_123822
tggggtattgataagaaggattctttttattgggcaatcacatttatcacaacattgatttttggcattgagattggcgtccttgttggtgttggattctcattggcctttgtgatccatgagtcggcaaatccacatataggtaggagagctggttgcagtcagctaaatagtgtcgtagttccctggatcatggatcgttagattcagggtttagtcttacatttgcaaaccttttaaaagtaag

SEQ ID NO: 57849 - DNA, 255 bp, Setaria italica
  Peptide Sequence Number=SeqID_123823
ctgaagcctttatttcttgctgactcgtgccggtgattgaaaactgttggttatcctcccagttcttttttttttggtatgaaacaggaggggcacgcccctactgattaatatcctcccagttcttgctgatcagattgcctcgattatcacccagatgtggttgaagttgggaactgcgaactgtagtctgacttgatcttgtttaacttcactaccacatcattcattggtatcctttcctcaggtgcagct

SEQ ID NO: 57850 - DNA, 276 bp, Setaria italica
  Peptide Sequence Number=SeqID_123824
tgggaattggcggcggtcgaagaggtggagcgggcgggcgaggatcggcgagaccgtgataccaagttgtcaaggatgtcgagtcctcggctggccggaccgcgactacgaagctcgtagccgtcggccgtcttctccggcgaggttatacccctcaaccgtaggctttaggagacaaggaagataagatatgtaattcttgcttaattgatctcacgagtacagcagtttatatatggccaatggcctaaccaaaacatagaaagtaaagctacg

SEQ ID NO: 57851 - DNA, 252 bp, Setaria italica
  Peptide Sequence Number=SeqID_123825
aaagttcatgtgggaatgcttgactaacccactgtctcaagctcaactcaccgataaacattgcatcagtcggctttttcctagtaaaaacttcaaggagaactggccacaagcattcaattgctatttctgtgatttgagtgccttggcaattgaatgcttgtggccagtgcttctgaactgaagcctttatttcttgctgactcgtgccggtgattgaaaactgttggttatcctcccgatctttactta

SEQ ID NO: 57852 - DNA, 225 bp, Setaria italica
  Peptide Sequence Number=SeqID_123826
actcaccgataaacattgcatcagtcggctttttcctagtaaaaacttcaaggagaactattccatagctatagcaattgtgcaggattggaacatcaagaaagatcgggattggcatatttttccagtgcaagtgcaggcagaaggtggctgcaaccttataccattccataggaaacgaagggttgcaatttatggtcttgcctaaagaatagcacattactg

SEQ ID NO: 57853 - DNA, 503 bp, Setaria italica
  misc_feature (410)..(503): n is a, c, g, or t
  Peptide Sequence Number=SeqID_123827
tagtctaacgtaagttttctagttgttggtattttgtaagtcctagtattctactttgttgttggtattattaactttggtcttctaagttgcttcaaccacataaatggtggccagctgaatgtgtgatctgctacctgcatgtccaggcatgcggccatcggcctcacgggcttgtccgcattttatatattccaatcggacgtagcctgacttgtcatttgcaagattgaagcttggcttccatatacatgcttgttagtcttgaagcagctgtatattgtttttgaactattgagtagttgagatttttctggagggcacaatgatgtcttaggcaatgttgatatgatgtacatgcccagattttgattctgataaaaaaaaatgttctgttcttcctgaaattnnnnnnnnnnnnnnnnnnnnnnnnnnnnnnnnnnnnnnnnnnnnnnnnnnnnnnnnnnnnnnnnnnnnnnnnnnnnnnnnnnnnnnnnnnnnnn

SEQ ID NO: 57854 - DNA, 450 bp, Setaria italica
  Peptide Sequence Number=SeqID_123828
gtggatgggaaggtcacgggtgaacaagtttgtgctcaccaccatcttgatgttgctggccaaggaaagaaaggcttcgaaaggtacacaagggtaaggaatttttttactgctctgtgtagtggatatctattgctgcgtattaagcaattttgttgatgttatagagtacattttgaaagcatagtttacaatttgcaacatggttcaactatgattgttttatctcagcttcccagagaggagctttgccaatggtgttttccttagggaggtacttttaattttggaaccttatttttttttatttttgtcggcttgctgtgtcaaaatgaccataccgaggattttagtttgcaagttgtgacagcttatttgctttcttacatttttccttgtgctagaattttagaaagcaaagaactaggcaacgagtcaagcatactgagc

SEQ ID NO: 57855 - DNA, 160 bp, Setaria italica
  Peptide Sequence Number=SeqID_123829
gaagtcatccaagaatctcttcaaggaactgtccttttcaaagcttccaggttgtgttatagccctgattcggtggtgtatgatggcacttttgtaggattgttgtcttgtccttgttgttaaacttatttacgttttcttactttgtttagttttcttt

SEQ ID NO: 57856 - DNA, 387 bp, Setaria italica
  Peptide Sequence Number=SeqID_123830
ccaccatatcgctgaagtcacttgaaagccaccgatgtcatgtggtgatgaagctagggctttggtgttgaataatgcgacgcgtccgtgcctgagccttttccgttgaattattgccacccgcagaccccccgcttctttttatagcaaagaagagtgaaccaggatatcacaaaccttgagcaaccctctcctctgctacttccaacaaagagagaatggagagagtaccatggctgaagttgggtcttgatgcgccaaaaagtgaagaagctcagcctcctgctaagcctcccgaggccaaatcggtggccactcaacataggactttctcctgcaattaagatttcaaatgatgatgggcctccctccagctgcttcctttct

SEQ ID NO: 57857 - DNA, 396 bp, Setaria italica
  Peptide Sequence Number=SeqID_123831
acaaaggaattagtaacaatagggactagtatgaaatcaggggttgtcgtaagcgaagagggccaacaatggtatgaacctgagtggtggaaattcggagattcaaaaacgtattttcgccatgcttctggttctttgtttattctctcaaagaatttggctcgttacatcaacataaataggtaattgtttttgtctccctgttttatcttaaccaccgctaagttaaatggattctgagcaacaacatcccagttagcctgagcagtggcatgtgtgatatctcctgagcttttgaattgaaaacatcatatgcacaagttgatcagcacgaactgtattattagtccgaatcttccatactctgcagttgttttttaatttttactctttata

SEQ ID NO: 57858 - DNA, 247 bp, Setaria italica
  Peptide Sequence Number=SeqID_123832
caaaaacaattacctatttatgtttttgtctccctgttttaacttagcggtggttaagataaaacagggagacaaaaacaattacctatttatgttaaccaccgctaagttaaatggattctgagcaacaacatcccagttagcctgagcagtggcatgtgtgatatctcctgagcttttgaattgaaaacatcatatgcacaagttgatcagcacgaactgtattattagtccgaatcttccatac

SEQ ID NO: 57859 - DNA, 194 bp, Setaria italica
  Peptide Sequence Number=SeqID_123833
gaaggcatcgttctggctgcttactgatgaagaagttttcgtacatctggcattttgtatacagtggacttttgtctagaactactgcagcacaaccggtcatcatcaacgtaagttgcatttactcccatcatccatgaacctaccgatacatcaacataaatagtgcgtcacttgagagctatgcacatgat

SEQ ID NO: 57860 - DNA, 333 bp, Setaria italica
  misc_feature (1)..(1): n is a, c, g, or t
  Peptide Sequence Number=SeqID_123834
ntaatataacatatcaatttctgcttactgattgttcttcaagatgcaaggatgctgctaagcatgcccttgtcaacctttgagcattagaagtttctgctcagaaatatgtgctgtcaaaatcccccctggagaaaggccatccatttttttggtgcttaatttctacaaaccaggtttctcatcatctaagtttttaatctggataaaattcttcacttcatcatgcagtgcgtcacttgagagctatgcacatgatgatatatcggtaggttcatggatgatgggagtaaatgcaacttaacgttagaattagtaattagtaaccggtta

SEQ ID NO: 57861 - DNA, 417 bp, Setaria italica
  Peptide Sequence Number=SeqID_123835
agtctaaaaattgttttgtttggttgagtcttaatttgtaaactagaccaaggaataagtagaatagaactgaaaggaaggattctggacccattaggccttgccacatcagggaagcatacagaagactgaagcttgaagggaagataccacgaagatctgttcctaggctcttccgttagaattcaagcatatctgttgacatcaatcaggagtgaggtgggtctttctgaaacatgaaagtatgatgtggaacaatggccatgcatttcccttgtatctgcaagtatcatcttacatatcttgggggaaaagtgctgtgtataaagtaaaatctaggactattaaccaagtgtactgtatcttgactatcgagcaaatctgatttgcacgttccatttgggtacatttaaatgt

SEQ ID NO: 57862 - DNA, 341 bp, Setaria italica
  misc_feature (1)..(47): n is a, c, g, or t
  misc_feature (237)..(237): n is a, c, g, or t
  misc_feature (251)..(251): n is a, c, g, or t
  Peptide Sequence Number=SeqID_123836
nnnnnnnnnnnnnnnnnnnnnnnnnnnnnnnnnnnnnnnnnnnnnnngggaactacctacctagacaacaaaaaggttagaaaaggaagtgtcagcatatctttttcatctgtcaagaaatgtgcgctacaaatttgaccaagttggaattatcatttcaggattcatagcatgtctatcatacatgatgatacaaacaaacattaagctgcatcatggcttgtaatagatttacgngctgcagcctggancataaactatttaatggaatgtatgagtactttgtttatctgatcatatatgattcattaggtcacctgactaaaattgatcaaagttta

SEQ ID NO: 57863 - DNA, 188 bp, Setaria italica
  Peptide Sequence Number=SeqID_123837
tccaaacctttaagtggcttcttgtcctctgagagttgggttatcatatagatgactgctgctgcaattgagatagggctcctcctgcacaaaaggttgaaaggaagtgtcagcatatctttttcatctgtcaagaaatgtgcgctacaaatttgaccaagttggaattatcatttcaggattcatag

SEQ ID NO: 57864 - DNA, 254 bp, Setaria italica
  Peptide Sequence Number=SeqID_123838
gtaaaagttatacaggattctagacctatacatgacaaagttgtcgattctttcttgaacaaatttttcccatcaggttatccatacagcgtgaatgagggttacttaacttataccaagttccgagcactccagcatttttctagtgcaatgctgcacgtgctgtcaacacaggtcagtaactctttaagcaacacaagcactagttgatatcttgtctccgttgattcaatgagtttctattgctctattag

SEQ ID NO: 57865 - DNA, 253 bp, Setaria italica
  Peptide Sequence Number=SeqID_123839
gtaaaagttatacaggattctagacctatacatgacaaagttgtcgattctttcttgaacaaatttttcccatcaggttatccatacagcgtgaatgagggttacttaacttataccaagttccgagcactccagcatttttctagtgcaatgctgcacgtgctgtcaacacaggtttgcgacctacccctgcgcaagcaactgctgtaagttggattctgaaagatggaatgcagcacgcagggaaactcta

SEQ ID NO: 57866 - DNA, 250 bp, Setaria italica
  Peptide Sequence Number=SeqID_123840
cgacgtgcttttcctcggctaatcatcttcgattgtgtgcgagcagggccaaggccatgaaagtacccaatgtaccatacccctggagatatctggtcgtttgttagcacaactgttgtgtttttctgaaatggtatgcactgcgccagatttgactgattaattatattgccgttgccaaaaggcccagctgggagaaagtttgataataaattgtccagataagaatcagatatatcaggaataggag

SEQ ID NO: 57867 - DNA, 460 bp, Setaria italica
  Peptide Sequence Number=SeqID_123841
ttagttagaaaaattaaaaggttcagaacagtaaaatgccgttcttcgttctttgcatctgaacaaataaaacatgctgagtggcatagctaattttgaagtaagactgcaaacaagtctgttgattcctgacacgtagaaagcaacaatgtgttgggcaatatttgtgttagtaagtagtaactaagtcttacctagttacctatattagttgtttctgtatgaagtttcctttctttcttccgctgtagaatattaatcacattcttgttcttgtttgtggacacatgcctgataaaatcactctgttttctcagtgctagatggcatctgctggtctaaaaccagggggtgcctgttattctgggggaactagaaccatcctcagagatgttcaagcaaggagcatcccttcgagtcacaggaattcttcagtcatacgatgtggactctgcaattg

SEQ ID NO: 57868 - DNA, 263 bp, Setaria italica
  Peptide Sequence Number=SeqID_123842
acccctcccccacgttccccacctcgccgtcgcgacgtcgccccggcggccacccgaacgccgtcgctgtcaccactccagcactctgttttggtgtcaagatctgtagaggaagcatttctcccaaagaaaagaggccagagtgctagatggcatctgctggtctaaaaccaggggtgcctgttattctgggggaactagaaccatcctcagagatgttcaagcaaggagcatcccttcgagtcacaggaattcttcagtca

SEQ ID NO: 57869 - DNA, 245 bp, Setaria italica
  Peptide Sequence Number=SeqID_123843
tttgataggtacataagcacagtagcaatgcggtggcccccaagggcttgattatttctgtcatggaagtagtcatagtggggctcatacttctcaccgttctggtagtgtaatatctgaatggattcaccattctctgggtggaagaaatgtccaagcagatatcctctcttctattctctttaccacttcatcctgccaagtgaatagcttagttaatatactgatgtttcattttgttgtcc

SEQ ID NO: 57870 - DNA, 254 bp, Setaria italica
  Peptide Sequence Number=SeqID_123844
gcttcttctcgaggaacatgccggagctggtgcgcacctcgctctggacgctcttcccggactcgttgtccgccaccatcgacttctccagcttgtccttggccagcgcgatcaggtggtcgcactcggcatccgtcaggaaccccttgtgcaggaacgccctacagccacacggaaccacagccgtcaaacccgcgcgcgacctagagttttgtgggggaggggagagcagagtgagagggagatcggatcgt

SEQ ID NO: 57871 - DNA, 205 bp, Setaria italica
  Peptide Sequence Number=SeqID_123845
ttctagttccttattcttactacccgggtaatttgggtactaacttactattaactattgtctagtcggatttaatggcttactctgcgcatactttgcagctcttccggcagaagccaggtgcttccttggtccctaccatgtagttagggttcttcgcgcactcacccacagccgcccactgggggcagagaacattgcgtcc

SEQ ID NO: 57872 - DNA, 191 bp, Setaria italica
  Peptide Sequence Number=SeqID_123846
taaacaaaaaaaaggaatagaaattgatacgactcagaaggaaatggtgtcatccagtgcctgttattgatgaaagaaaaggtcaagcatgcaactggtggcacttgcactcttgtatttcgtcaaacaataacaggacactggatgatacgactcagaaggaaatggtgtcatccctgagactgtcctaa

SEQ ID NO: 57873 - DNA, 242 bp, Setaria italica
  Peptide Sequence Number=SeqID_123847
attcgggagaccaatgatcccagggaactggggccaacaataaccttcctcaaacccatgaatggtattgtcgttggggattctatcacagggtgcacgaatccatccaatttgccctctctcattgtcatatatcaccatctgatcctgcatggtaatgtctccaagaatgttcagatccttgagaccaacttccgatccgttgaggatgcccaaacatgcattcccatatttagtgacaa

SEQ ID NO: 57874 - DNA, 504 bp, Setaria italica
  Peptide Sequence Number=SeqID_123848
acttatgcctaggcttggagaacatcagtttgaactgtggggcaacgatttagatggatgtcctctggcttcctgtccaactgctaaaggtattgtcgttgagggctgcccagtgtatacatgagaactcatggtgtgacctgattaattttttgaaagcccaatgacataagttccacaagaaaaaagtctcagaacaaataagaagttccaggcttccagccataatctgaattctttattgctacaaatttagcaccaaatcaagatgctttttccaagtttcatttgtatctaccactttcctgataaatatttcccatgattcaccatccaagaaatcccgaccactcaaagctgcagcttcaacaattagttgtctaaaaggtttatcatcatgacttggctcagaaaggctatcaaccaatactcggtaaataaacttgcttggagtacatcctttggtcaccatctccttaaatagtgcagcaaccttcatttgac

SEQ ID NO: 57875 - DNA, 270 bp, Setaria italica
  Peptide Sequence Number=SeqID_123849
gtccagaaactttgtttccgatcgaggatgtaaagaaaccaaagatacaaacagatgtagtagaattcgaacaaacagtttttcgaatgcatgttgttcctcaacacacactttttacaatgtatctgtaatccgttcaccagggcgctccatgagaaagaacagcgggtgaaagggggcttgacacggaaccagttcttcctggtggcgttcatctgcagcttcgcctactacatcttcccgggctacctgttccagatgctcaccctt

SEQ ID NO: 57876 - DNA, 214 bp, Setaria italica
  Peptide Sequence Number=SeqID_123850
ttctgttgcgtcactaagcagcttttcttacaacatgataggtggttggaactctgattgcagcatttgtatacatcggaacagcatggtggttaatggaaacagtccccaacatctgcaatactgagctcctcccacgagacagcccttggacctgcccgggtgatcatgtgttctatgatgcatcagttatatggggccttattagcccacg

SEQ ID NO: 57877 - DNA, 237 bp, Setaria italica
  Peptide Sequence Number=SeqID_123851
cgttgtaccctggacgtcctgttgcaaatatgtgcttcaaggtatatggttacatcagcatgagccaagctctgacctttttgcaagattttaagctgggtcattacatgaagattcctccaaggaccatgtttatggcacaggtaagctctgctagccatttctcgacacagatacatatgtggctctgttctgttgcgtcactaagcagtcttttccaaccacctatcattgttg

SEQ ID NO: 57878 - DNA, 368 bp, Setaria italica
  Peptide Sequence Number=SeqID_123852
ggggatctcgtgcaccaccctgacgggcttgagcacgccctcctcgtccggctgccccgccgacgaccgcacctccaccgtctgcaccgtcttcttcaccgtgtcctgctgctgctgctgctgcttgtccgctccatcagcagcggcgtcctacatgtaacaaattaagatcaagatcagcaacagatcatttcatcgccaaatgaagcacagcaagctaattaaccaagatatgcgcacctgggaggtggccgggctgccggcgttggtgttgttggtcgacatgccgtgcgcggccggcgggccgcagcaggcaacgggcggcggcggggccggacagactctgttggggcgatgcgttagattgg

SEQ ID NO: 57879 - DNA, 172 bp, Setaria italica
  Peptide Sequence Number=SeqID_123853
cgcctcgaccctgtcctctctcgtcctgccgttgtaaacgggtatccacgtgctgaacagctgcataccaagtacaatcttgtcgtcgacgtaggaggcccagaaccgagcgacggcgcggtcgtacgggtcgtcggggaggaggtgcgggccgcgggatgggaacgcctcg

SEQ ID NO: 57880 - DNA, 286 bp, Setaria italica
  Peptide Sequence Number=SeqID_123854
agactagggacgtttaccccagaacaaaagaaccggggaataagaatacaaggactacaagggtaccggggatataatgccatacagcagaatcaactagcggcggccatggggaatggggcgctatgctccaactacactcgtaccactcacctacaagatcccagcggaaagcatcggtgctccagctggtgaagggaatggtacaggatgctatgcagcaaaatggacctcaaagcaagttgttgttaggaggttttcacttcgctttttcagcttgacctgg

SEQ ID NO: 57881 - DNA, 336 bp, Setaria italica
  Peptide Sequence Number=SeqID_123855
ctggaatgctaatcgcaatccagggaattatgttgcatatataaaccaggatacagcgacagcacaaagccaagtcgaaaactggatataaatctgtacatggttcgtagcctatccttcttctataaatctgtacatggttcgtagcctatccttcttctagcaatcttgagcagactgaatctcccgcatcataaatctctagcaaaaaaagatccttcagagttcagacccgaggaggggttcagtccagaattatttgggacgcagacgcgcaggccgactgcaaatgggactggcgatctccatcagttgaggacatcctacgggcctagt

SEQ ID NO: 57882 - DNA, 401 bp, Setaria italica
  Peptide Sequence Number=SeqID_123856
ccattcacctccatggtgcaggcaggtacaaaagttatcagtgttcaaatgcgaaactgtacctttaaccagtgatccagtctggcttctctgatcgccccagatttttcatccttgatttgcacaactgttttccgtacatcagtcttgcccatacttgccactgacaaagaaacacaagtagcagtctttccttcagttacataccagcgctgcagcttctcagcctcaggaaagtctgggtttatttttaattgggttgagctgattgagctcacagatctaccactgaattcagtaacacgaacacttttcaaagctagtacaggattcaaaccagaatcacactgcaactgcagctgctggccttcagcatcacagaatttcccccaaaaggttta

SEQ ID NO: 57883 - DNA, 479 bp, Setaria italica
  Peptide Sequence Number=SeqID_123857
gtgcacatggtcaatatttttggactccaaagaaaatgacagcatgaataagtagacataagtttgagttgtttaagtgacttacctcattagtagcagcaggttgtagtgctagaagtttcactgtagtgctgtcataatcagccaataccatgtagattgaaaatggcagcttatcggcactacatatggggatctcagaatcactacaccatgacatcccctttttatcttcattctttttaaagctttcagccacctatccctgttatctggatatggaaatcaaaatgcagcaacaagtcaaaagtattcacatggcttcttctactggatagattgaccaccagaaatattctaaaaaagaagaaccacaagattaatggaaatgacgacaactgtgtaatatgaacactcaagaggaaacagctcatcatcttttctttggatgtcaatttaacagcacatgttggcaacac

SEQ ID NO: 57884 - DNA, 262 bp, Setaria italica
  Peptide Sequence Number=SeqID_123858
tttttctttttgttttattgtgatcgatagagttgacaatttaagggtacattgattaatctagattcatcattgtacccttaaattgtcaactctatcgatcacatcaagggcacaatgatgaatctagattaatcaatgccaaaatcagaaaaacgttctgcaacacgtgatcttgaaaatccagattggcttaaggatacaagaaatctgctgaactagaaattggcaatgaacgctgcacgtctgcagcaaggtgtat

SEQ ID NO: 57885 - DNA, 360 bp, Setaria italica
  Peptide Sequence Number=SeqID_123859
taacaaagactacaaaggaataataatgacttcagtcttgtccttgtcagcatggtacaatgtctcaatccgggtcaggtccatctgccccgtgggcttgcagttcacatctgaccctgcatttgcccattctccaacccaaccaaaaccatggtgagccctggtatggacagatcatcataaattcagtaacagaaaagggatgagcagaagcctgtagctgattttgcatgctacaaaggtagtttagattacttggtggtgttagttgcaatagggacaagccaccgcaaggtcttctccatttcagccttgatttgagaaacggtagctcttccttgactcaaacgatgcagctta

SEQ ID NO: 57886 - DNA, 229 bp, Setaria italica
  Peptide Sequence Number=SeqID_123860
catctctacctctcttggtgccttcaaacgcaccacgacgccggttcgtttcaagcatacaccttgctgcagacgtgcagcgtcatgccaattcagttcagcagatttcttgtatccttaagcaatctggattttcaagatcacgtgttgcagaacgtttttctgattttggcattgattaatctagattcatcattgtacccttgatgtgatcgatagagttgacaat

SEQ ID NO: 57887 - DNA, 362 bp, Setaria italica
  Peptide Sequence Number=SeqID_123861
cctagtatcatgctgactgctaaagcccactttcattttctaattcacgggtgccatcccacatacagcgtacctcttccttgactccaaacgaatgcagcttagaacggagagatgattttatggtaggtggcaaactctggtataacgcatcccttgtgtttggaggaatagaacttgatcgagaaacaagagtatcgatctgactgatgatattggcataatgcagtgcaaggcctgctggacccaatctattacgacgtttggtaggttcctgtgattcttcattgtctgaacgcccaaaggcattatggatctccaaatgtaagaagtgcacaatgtccacaaagtacttaccccta

SEQ ID NO: 57888 - DNA, 326 bp, Setaria italica
  Peptide Sequence Number=SeqID_123862
gctggaggatggccgcacccttgctgactacaacatccagaaggagtccaccctccacctggtgcttcgcctccggggtggccagtaacttcacagggctcattgtgctgctgtcgtccatgggttcacaagtttggttgtctctccaatggagattgtctgtgtcgtgctgtgttctgtgtcctggtcttctactggtgcaagtcctatgtcgtccggttgtgtttgtgaacatttgctgctgtgcaagcaatcttaggttagaaactagtagaatagaaaataaagtagaaaccctagaaatttagtttaggacaaaaaaaaaa

SEQ ID NO: 57889 - DNA, 226 bp, Setaria italica
  Peptide Sequence Number=SeqID_123863
tcgccgtgactggtacgtacatacctcctgagctccgaggtacaggcaaagctacagcggcctcagatagtcagatatggacggcacccgggtgaaggaccgcgacgccatactgcactgggagatctatgggttcgtggagtacatcgagtccggccacacgcaggaggacatgatcctgccggtgccggagggcgaccgggccgtgcggctgggcaacgacgca

SEQ ID NO: 57890 - DNA, 195 bp, Setaria italica
  Peptide Sequence Number=SeqID_123864
atccacaaccccggccacgaggacaacccggcgtgtgggcccctcatcgacttcatcgccatcaagaacctccaccctccccatcacaccccggtcaacatgttgaggaacggtgactttgaggaggggccctacatcttccccgacgtgccgtggggcgtcctggtgccgccgatgtcggaggacctgtactcg

SEQ ID NO: 57891 - DNA, 176 bp, Setaria italica
  Peptide Sequence Number=SeqID_123865
ctccatggtgacgcacggcaacatcaggtcctccaacatcctcctcagccggtcggtggacgcgcgcagaggccagcgcaatgcgcctcctcgactcccagctcagcggcgaccggccggagccgcggttgccgtgaagcatggaggagaggctgcccatggccacgaactcgtac

SEQ ID NO: 57892 - DNA, 412 bp, Setaria italica
  Peptide Sequence Number=SeqID_123866
aagggcatcagcaataacaaaagctgcatcagatggcactaggaacctatcagagagcatggatcttactgaaaatgataacagtacactctcctcatcagtttcatcacccagcatttcaccaagtgcatcggtgtcaagtgtgtctaatgctgcatcacagactaccgcaaaatcatctgagagactaatggacccgtttccaacctgtcttcatcaagaggactttcacctagaagaactacttctggtggcattggtactttatcgaaaagtgttgatttcccttgggcaccagggcggtaaggcgagcgtaggcttcagaggacgcggggagcgcgaaggcgaggaaggcggagacgttcgtacggggagggggccgcgcggtggagcctcaggcagcggacgagcg

SEQ ID NO: 57893 - DNA, 313 bp, Setaria italica
  Peptide Sequence Number=SeqID_123867
taaactgatgaggagagtgtactgttatcagtttcatcacccagcatttcaccaagtgcatcggtgtcaagtgtgtctaatgctgcatcacagactaccgcaaaatcatctgagagactaatggacccgtttccaacctgtcttcatcaagaggactttcacctagaagaagtacttctggtggcattggtactttatcgaaaagtgttgattttgcggtagtctgtgatgcagcattagacacacttgacaccgatgcactaggaacctatcagagagcatggatcttactgaaatgataacagtacactct

SEQ ID NO: 57894 - DNA, 260 bp, Setaria italica
  Peptide Sequence Number=SeqID_123868
ctacatcaactcgtttcatgacggcaattgcagcgctactcgtgagctccaaagtccagtttggtctagtttacgcagcagtgatgctagagacgacagatagcaggagcaggggaaaaaatcggttcttttaccttgggcaccagggcggtaaggcgagcgtaggcttcagaggacgcggggagcgcgaaggcgaggaaggcggagacgttcgtacggggagggggccgcgcggtggagcctcaggcagcggacgagcg

SEQ ID NO: 57895 - DNA, 376 bp, Setaria italica
  Peptide Sequence Number=SeqID_123869
cttcgtcagtgtcatcacagggggttcaccaagaagaatcacctgcttctagtggtgcaaatgatgtgcctaaaagcatcggtgttggtaaagatctcaaacctgcatcctgaaaatgataacagtacactctcctcatcagtttcatcacccagcatttcaccaagtgcatcggtgtcaagtgtgtctaatgctgcatcacagactaccgcaaaatcatctgagagactaatggacccgtttccaacctgtcttcatcaagaggactttcacctagaagaactacttctggtggcattggtactttatcgaaaagtgttgatttcccttgggcaccagggcggtaaggcgagcgtaggcttcagaggacgcggga

SEQ ID NO: 57896 - DNA, 258 bp, Setaria italica
  Peptide Sequence Number=SeqID_123870
ttttttttcctactggaacgtacccagacatcagcattaagactattgtacgaggaaacagattgtaccgattacactccatgcggtggcaatgcaaaaaccctgtctaacttaaatacggaaaaaagaaagagaacaacaatgtctaagagcatggatctcactgataaattagtaggtctgctcttccatcagttccatctcgtgggtttccatctcgtgggtttcaccgaagagaacaacaatgtcctccgctgc

SEQ ID NO: 57897 - DNA, 325 bp, Setaria italica
  Peptide Sequence Number=SeqID_123871
aggaaaaaaagtaatacaaaggaatagtttttacctagaactactagttaatgctgagaaagacaatgggaagtgcccgaatgcattaacagagtcaggaaaagtatcaaggatgtttttctaaagcaatcattggccgcatacttgtgtgggcatcttcatacaaggttcgggaagaacttgaaacgatactaccatcgagcagtccaggaatcatcattttcagaacattattaccaatttaacatgcaccaaggatatgcaatccagagtaataaggaaaactgttctgaagaagcagctcacattgaagagttctgggaat

SEQ ID NO: 57898 - DNA, 360 bp, Setaria italica
  Peptide Sequence Number=SeqID_123872
gtgatcagcaaaggaaagttatttattcccaaagtgtgcaaaatgtgtagaacaacaaaatttttgtgataaaccacattacaagagtattgtctcatccatactgtacctcaggcacactgcacactactcattccaatctagctgcagcatttcctgtacgttatgaaagttctactggagtaccacagagctcaccaatctccttctccagaagctgcacaagatttgctccggtccgcttgtatatccaaccgtctgttgatgcatacccaaatacaaaacctaagaaaggacccaaactacaacaaaggtaagaaaagaaataaaaccaaagaaatttaagaacctaagtttaga

SEQ ID NO: 57899 - DNA, 386 bp, Setaria italica
  Peptide Sequence Number=SeqID_123873
acctatcttattacagagtactttcggaggccgcagattcctaccgaatcagatgtcatgaaacagatacttaaatctaactgcactcacagaatgaagtcctatcttgaagctggttgcaggcttcacagccaaaatatctcaaacataaatcagtgtgagttatatggcttaattagtgaaagagtttcttattcttgctaataatttatatgagttgtttcttattcttaataatttttcccctaaactggagtggtactgactgtaaagttttgtctcatattgtgattttgagcaaatttatgtattctactgtggttcttggttatctttgttgaagtatgagttttaaacaactacaattgttctcttcaatgatgact

SEQ ID NO: 57900 - DNA, 262 bp, Setaria italica
  Peptide Sequence Number=SeqID_123874
ggattttcctctacatttggccgcaatttcccaccttgagaatagacagagggaaatatttggctaaggtgtccattaattccttttaattgtcgtcttcgattcatattttaaagctggaactatggtttataatattgccgtatcattttagtgagactcccaattctaattgagctgttgttctattattttctgctagttaaggctttgcttgaagagcttgaatgtctagtcgaggatgtctatggcatcacactta

SEQ ID NO: 57901 - DNA, 432 bp, Setaria italica
  Peptide Sequence Number=SeqID_123875
cattcctaatgtgatttgttgtgtggaggctgtgatggatcatggattgccttccttccttgcgcaaggtctgctcagttgaaaaataggtttcttccgttgattgatttggcgcaaggtcttggtgattctctgctgttaagattttgtcgtttggaaatttactgtgcagccattctcaattctttgaaccaccaacccaatagccggagtgggtgtcaacatgaacaacgcccaacaaccgctcgaggaaatgcctccaagtctgctccttccatttttgatccgcagcaaagattcttcatgaatccccttgcaaaattgccatggatttgggttaggagctgttcgctgacactggctgctggtggacagcttcctaaaggtatgtgccgtgtttgataatatgttctttgaaccatctattttcca

SEQ ID NO: 57902 - DNA, 418 bp, Setaria italica
  Peptide Sequence Number=SeqID_123876
cctctccttgcatccgccattctaatgtgatttgttgtgtggaggctgtgatggatcatggattgccttccttccttgcgcaaggtctgctcagttgaaaaataggtttcttccgttgattgatttggcgcaaggtcttggtgattctctgctgttaagattttgtcgtttggaaatttactgtgcagccattctcaattctttgaaccaccaacccaatagccggagtgggtgtcaacatgaacaacgcccaacaaccgctcgaggaaatgcctccaagcaaagattcttcatgaatccccttgcaaaattgccatggatttgggttaggagctgttcgctgacactgggctgctggtggacagcttccctaaaggtatgtgccgtgtttgataatatgttctttgaacctattctt

SEQ ID NO: 57903 - DNA, 192 bp, Setaria italica
  misc_feature (15)..(15): n is a, c, g, or t
  Peptide Sequence Number=SeqID_123877
gtttttctagccggngaaaccatcagccgaacagacacaaagtaattgactagtgatcaatagggtgatgatttgcttttgtggttctgttacaaattttgtgtagcttggttgtgtaatctcagtagtgcatagcaaatgagctatgtaagtgattcttttttctttctgcgggaagctgtgtaagtttta

SEQ ID NO: 57904 - DNA, 337 bp, Setaria italica
  misc_feature (45)..(45): n is a, c, g, or t
  Peptide Sequence Number=SeqID_123878
tacgggagcctaggatgttgtgcagaccacaagtgaggttgacanccttgatgatggctaccgctggcgcaagtacgggcagaaagttgtcaaaggaaatccaaacccaaggagctactacaaatgcacttatgcaggctgcacagtgcgcaagcatgtggagagagcctcaaatgatctcaagtccgtgatcacgacgtatgagggcaagcacaaccatgaagttccagctgccagaaacagctgcgggatgctgggttgtgccggttctggcctccggtgaaggttgctaccctgtggcgcagcattggaaccagagttcggatgcccgcttaca

SEQ ID NO: 57905 - DNA, 447 bp, Setaria italica
  Peptide Sequence Number=SeqID_123879
aagagttttctttgatgaccgtctaaaaagaaaagtcatttcttccgagacattggcttgctggtcgcttagagcacgatagaaatgtaaactaagcaatgaaaaccatttgcctgcgcacagcccatgacaaggttatgtgcttcgtaataaacagtgttgatcttgtgctgtggttgtttggaattttaatgttaagtagaataataaatgctgattttgggagaacaggttgcaactctaactggacatacgatgcgtgtgctttaccttgcatcatcgcctgatggccaggtaaatctgaatccagctagttgaatatttgtgcatcctagaaagaaattatgtgaaggaagagaagttagatgatgagatgtaatttgcagaccatagtaacaggagcgggcgacgaaactctacgattttggaacattttcccatcagttg

SEQ ID NO: 57906 - DNA, 233 bp, Setaria italica
  misc_feature (227)..(227): n is a, c, g, or t
  Peptide Sequence Number=SeqID_123880
gggtattcccaaaatcaaatcatggtgtggaaatatccatctatgtcaaaggtattgtggatctcagtacttgacatatcttgatatatcagtaagccaattgtatgatgcttcctctggatgtacttccagtttacgcaacttgctttttctcggcttgcttctgataaacaacatttcattgctgtgggctgagacattgaattatggaatgacttaaaaaaacngtgaaa

SEQ ID NO: 57907 - DNA, 229 bp, Setaria italica
  misc_feature (212)..(212): n is a, c, g, or t
  Peptide Sequence Number=SeqID_123881
ggatggttttcccatcgagaacgaagctgccgttggcgattctattggctactcgtccaaccacagttccaaaggcagaagaagcatccacatattctgcaagggtgtcatacccaaggacaacatcagccagatttcctttggaatcaggaacaatcacagacatgagggtggctccccagttggtgaccttgatggagaaatcccccttnttgttcttgagctcgta

SEQ ID NO: 57908 - DNA, 427 bp, Setaria italica
  Peptide Sequence Number=SeqID_123882
cgtgctcgtggaagccccagaatagccaccagcccaccgatgaaacgatgcaccggctgccaccgcaaaagcaggcgcatttccaccgccgaacagttcatcccatggtccactaccaagcgacacaataatctgtggtatgacaatagctaaatttaggatacccattgccagacctgcaggggagaaatagaaaaaagttaagaaatgcaatcatgatgatagtacgtactcaaaatggaaataccttggccaagacccagattttcaacacgactagcagccattgcatatggtatactgtatgtgatcgccaggggtgcccctaaaaattgtaaaaaccaccagggaagcaatgacaatgccagttggaggtactccactgggaggataatccatgttcttttgcaacatatgttaattaaca

SEQ ID NO: 57909 - DNA, 394 bp, Setaria italica
  Peptide Sequence Number=SeqID_123883
gatgcaccggctgccacgcaaagcagcgcatttccaccgccgaacagttcatcccatggtccactaccaagcgacacaataatctgtggtatgacaatagctaaatttaggatacccattgccagacctgcaggggagaaatagaaaaaaagttaagaaatgcaatcatgatgatagtacgtactcaaaaatggaaataccttggccaagacccagattttcaacacgactagcagccattgcatatggtatactgtatgtgatcgccaggggtgcccctaaaattgtaaaaaccaccagggaagcaatgacaatgccagttggaggtactaccaactagggaaggaataaataccaatagttactttagacaaacaataatagttaattaaca

SEQ ID NO: 57910 - DNA, 248 bp, Setaria italica
  Peptide Sequence Number=SeqID_123884
ttgcactggactccatatacacatagtactgaaccaaagccgacaaaaacattaataaaggtaattacctgtggtatgacaatagctaaatttaggatacccattgccagacctgcaggggagaaatagaaaaaagttaagaaatgcaatcatgatgatagtacgtactcaaaatggaaataccttggccaagacccagattttcaacacgactagcagccattgcatatggtatactgtatgtgatc

SEQ ID NO: 57911 - DNA, 232 bp, Setaria italica
  Peptide Sequence Number=SeqID_123885
taaatgtcaagaagaaaggcagacttgaggttggcacaactgatgctgcaggatggtgtaacagtgaaaggaaatatcctataccagccactgtatgctccggtggcatatccaagtatgtttcccagggccatgaagagtgaaaagtatgcattagcaatccgagtcctccttgggtcattctcatcacagagtagcgtcgcatcagatgttgcctcttagcatacaagcc

SEQ ID NO: 57912 - DNA, 214 bp, Setaria italica
  Peptide Sequence Number=SeqID_123886
cttcgggctgcacgccacgcatgcattagaaattttaatgtgtgtccgtgcgcaaggaacagaactgctgctagctgatcgacgaagggatataattgatagctgctctcagtatagtactttgggtggaagagaaggggtgggtggatgagcgactcgtggtagatgaactcgtccacctccgcgctctgcatcttgccgtcgattatcagag

SEQ ID NO: 57913 - DNA, 251 bp, Setaria italica
  Peptide Sequence Number=SeqID_123887
gcagaagctcgtccatccctgcagcctctccaggatctctgcatcaggtatcacactgccttccttctggcagatccgtgattgctccatctccaggtcttcgattcctgaagatacgaatttcacaagttgctgcccactaagagtctttgcaggtagatccttcgctctagtgaaatgaaactggctgaaataaaactagacaagtttaccttactacaaaacttactagaaaggaagaaatactacaa

SEQ ID NO: 57914 - DNA, 346 bp, Setaria italica
  Peptide Sequence Number=SeqID_123888
taaccaaagaaccctaaccaagacaaggaccgacccgaccgaacgaccgtagaaccggccggccatggtctccagcaacaccatcccgtagctgtacacgacgccctccctgtccgccagcgccggggaaggggcaaggactcctcctcccggggctcgtcgcagaagaagacgtcggagatcttggcggcgaagtcgtcggtcaggcagatggtggacgtgtccagcgtccgcaggatctccggcgggctcagctggtgcatgtgctccaggcagtaggcgacgcccaccgccacgcgcaggcgcgtcggccagtccaggtggccgtcttctctgacgtggagat

SEQ ID NO: 57915 - DNA, 249 bp, Setaria italica
  Peptide Sequence Number=SeqID_123889
cttatgtacagatggacacaaacttcactgaatacaaactgaaacccaaaaacaaaatacaaaaaaaaaacggtgtattatctactgaacagctctttgggggtgcatttgagcgagagattgttctgggaacttcagggattcagatccttgcaaaataaacatgcccatatgcccgtcagttgacctccgtggagattgattcttcctagtcttccgtccctacctactagtcggtcgtactacctt

SEQ ID NO: 57916 - DNA, 227 bp, Setaria italica
  misc_feature (12)..(12): n is a, c, g, or t
  misc_feature (41)..(41): n is a, c, g, or t
  Peptide Sequence Number=SeqID_123890
ttcctgaactgngtttcgcagtgcttggaccatctttggcngagctcttggtcgtcgacaccaccgcgatctcgacgccgctggacagcgtcccccttgtacaccatgtaatccggcagggagccgatgacgttgctgaagtcctcgcaggcgagctcgagctctgatctcttctagtcgtacggtctactaccttgttctactaaacgtcttttcttgtctagtct

SEQ ID NO: 57917 - DNA, 195 bp, Setaria italica
  Peptide Sequence Number=SeqID_123891
ccccttcaaaacatagaatacggaatcccctcttatctcaatattacaatggtatacttttgttttacttgggtccaaatcaagattctttggcctatctgatgcagttctattggatgcctgaaaattcttccggccgaatttgctccaaatttcggactcaaaatgagcaatggacagaaacttcaacgattt

SEQ ID NO: 57918 - DNA, 419 bp, Setaria italica
  Peptide Sequence Number=SeqID_123892
tcaggcaaactcctggggcctggggagcagcctgccaaagctacagtgactacaagagagaagatagctctagggagccatcaatgtcggtttgaattacctccagagtgcatgaatctccaattctccataggttatagcagtacagaatacgaacatcttagcgggtttgattccatcccaaaccagcaccatgtttgttgatgataggctgtataggttctacaataccctttctgctttttccaagggcctccccctccttccagcccatgttctccattattctcttagcagactgcaaaccactggaacggaaattcatatctactgatgcagttcccatcgaattaatgtcatcaattgattcctcatattcatcaaaactgatgatgttacattgcttctgtccaggccct

SEQ ID NO: 57919 - DNA, 352 bp, Setaria italica
  Peptide Sequence Number=SeqID_123893
aaaactaagaatagaattaattttagtactaattctagggcttgtcaatcctgaaattgttccttttcttttattggtgcagaggctgatggtgctcttgacaaggctaggaaacataagaaaagacagcttgaggatacatataatcttattgttaagaaaagaaaggaatatgaacagaaaatgaaggagaagggtgagcagccggttatgttcggccatcttggaccaccaaagagacggcctgcagcagaggaagaagatagagcaaatcctaagcctgaggactctgtttactatcatccaaccttaaatccatctggagcaccaccacctggaaaacctcccatgt

SEQ ID NO: 57920 - DNA, 334 bp, Setaria italica
  Peptide Sequence Number=SeqID_123894
aagttaacggaccaatacttaggaaccaaccaaaagaagaacggacctagacaagacaagaaggaagaagatagagcaaatcctaagcctgaggactctgtttactatcatccaaccttaaatccatctggagcaccaccacctggaaaacctcccatgtacaaatcatctataggaccaagaatcccactgccttcctcatccaacgcgggggcctcatcttccatgtcagagtctgaagcaggtccatccaccctgccaccccctccaccaccacccaccattgcccagccacctcagaatccattgatccatctgcacctcctttcccttg

SEQ ID NO: 57921 - DNA, 163 bp, Setaria italica
  Peptide Sequence Number=SeqID_123895
gaatatttgaatacatacttaccacgtttgtattacaggactctgtttactatcatccaaccttaaatccatctggagcaccaccacctggaaaacctcccatgtacaaaatacaatactaataaggttaactaatactttaatactactacttttaagacta

SEQ ID NO: 57922 - DNA, 283 bp, Setaria italica
  misc_feature (246)..(246): n is a, c, g, or t
  misc_feature (255)..(255): n is a, c, g, or t
  misc_feature (273)..(273): n is a, c, g, or t
  Peptide Sequence Number=SeqID_123896
ctaggacaaaagaatgcttgtgttgcagtacctggatctggatggctaccacctaatagctggagactgtacgtagtttgcactagcgtttattttcctcggtctgtaacgaaccgctttagaaccaataatactgcaaaccgtagatgtagcttgggatgctatccatcaggcttcaagaacagttttgctgtgctcactgctatggtctacatttgtgtctgtttgataaaacaaaaaaaaaanaaaaaaaanaaaaaaaaaaaaaaaaanaaaaaaaaaa

SEQ ID NO: 57923 - DNA, 272 bp, Setaria italica
  Peptide Sequence Number=SeqID_123897
ggtttaaattcttctttatgtcaaaaacctagcttcgcagtagaggcagattcaccactattcttagtatctgcccagttgacagtaggagcatttgtatctactgcgaagcaggttaaatctctttatgtcaaaaacctgcccaagactgttactgaagagcagctgagaacgctgtttgagcaccttggagaaattaccaaagttgttcttcctcctgcaaaagctggtcatgaaaatcggtacggttttgttcactttaaggaacggta

SEQ ID NO: 57924 - DNA, 248 bp, Setaria italica
  Peptide Sequence Number=SeqID_123898
tgcaaaagcagacaagaaggatgatactatatcagtacctactgcaaaaggaggtccattgctgcttttgcaagtgaacaatccagtagctgaccatcaagttcatatctctcagtgttcttcagagccttaatagccatgtaccgttccttaaagtgaacaaaaccgtaccgattttcatgaccagcttttgcaggaggaagaacaactttggtaatttctccaaggtgctcaaacagcgttctcag

SEQ ID NO: 57925 - DNA, 402 bp, Setaria italica
  Peptide Sequence Number=SeqID_123899
gccggtgcctcctcggcagcaggagcggcggcctctggctccggctcggtggcgggcgccgcgtgcgcgcgtacacggcacgggctcgccgttcagtacgctacggtttttaccggtgtgtgcgcgcgtgtgtggcgtagtcgtagctagcagtagtaagctgctgccgtgtgggctagctgtcgtgtgctgctgcggggctgcgaggagtggagtggagtggagtgacgtgggctaaaataaaagtgtgtcgcgggtggtggggcccggtgtcagcggcccggcgcccccatgccctgccgctgcagcttgtgtctttgtgtgctgttggttcgtattacctgtcatgtatggggtgtcgtgtcaagttaattatcaaccaacagcacacaaagacacaag

SEQ ID NO: 57926 - DNA, 244 bp, Setaria italica
  misc_feature (9)..(9): n is a, c, g, or t
  Peptide Sequence Number=SeqID_123900
gtgctgctncggggctgcgaggagtggagtggagtggagtgacgtgggctaaataaagtgtgtcgcgggtgtggggcccggtgtcagcggcccggcgccccccatgccctgccgctgcagcttgtgtctttgtgtgctgttggttgataattaacttgacacgacaccccatacatgacaggtaatacgaaccaacagcacacaaagacacaagctgcagcggcagggactagtgcgactgagt

SEQ ID NO: 57927 - DNA, 208 bp, Setaria italica
  Peptide Sequence Number=SeqID_123901
cggagccagaggccgccgctcctgctgccgaggaggcaccggccactgaggcggcacccgctgaggcggagcccgcggcggccgagccggccgccgaggaggacgcgaaggccgccgacagtgagtgatgaggccgtgcgcgacggcgcccacggtggatcacgctgagacacgcaacaggggaaaggcaaggcacacaggggatagg

SEQ ID NO: 57928 - DNA, 173 bp, Setaria italica
  Peptide Sequence Number=SeqID_123902
agtgacgtatgtacgcttaagtgagaagttcaaggcaacagagagcccagaaggtgagaagaccgtctgggagtatcactggttccccaatcaaactcggaagatgcagggcctccaggatgagctttcaggtactgggtcagctgtctcttgctcttgatctcctcgccagt

SEQ ID NO: 57929 - DNA, 264 bp, Setaria italica
  Peptide Sequence Number=SeqID_123903
ttacacctgcttacaagctttttagagagcagcaagaccttgaatatttgggggcctactagtaccagaattatgaaaaaaaatataactgtggaagtgattaacaaatgatgagatctagatgcctactggttccccaatcaaactcggaagatgcagggcctccaggatgagctttcaggtactgggtcagctgtctcttgctcttgatctcctcgccagttggggacacaaaaataacctcaaactttccccctctaattg

SEQ ID NO: 57930 - DNA, 227 bp, Setaria italica
  Peptide Sequence Number=SeqID_123904
ggcagcgacattattagtctgctcttggccttcggcgccttgttcagtcttctctgcagcatctgcaccaggggcctcatctttcttctcttcacctccttcggtcttctctgcaacatctgcactgggggcatcctctttcttctcttcttcagcatccttcatctccacaccagtgatactcccagtgcagatgttgcagagaagaccgaaggggcctcatcttt

SEQ ID NO: 57931 - DNA, 421 bp, Setaria italica
  Peptide Sequence Number=SeqID_123905
caaacaaggagaagctgattttgatgcagagatggacagtgtttgcaatgcattgcaggctgtgaacttgcagacagcaacagatcgcagcagtcagaaggtgccactcttcacttctaacatgctccattgtttactctagaaaatcagaaatctgctttcattgagattttggatgttctaagagctatttgtcatgcacacatgcttccattggcccttacatgggttcctacatcaaacggtattgataatggttattgtgtcagaaataatattggagttgattcacaatcaggaaaaacagtacttcgtatccatgaatcagcttgttatattaacgatgcaaagatgcaggggtttcttcatgcatgtgctgaacgtcatcttgagaaagggcagggtattgctggtcgagcac

SEQ ID NO: 57932 - DNA, 249 bp, Setaria italica
  Peptide Sequence Number=SeqID_123906
ttaatatgaccatctctgctgctggaattaagcgaggcccctacttgctatgtcttgcattgtgcgacttgccatggtcccttgttcccaaaagttgctttcccccactcagaagtagtttacccccaatattcatagcctggcattgataatagattataataatgtaggtgcaaatttgactgtgaacgtaccggttagcatattcatgtgtgttttcctctgtgatggacttcagtttagccctct

SEQ ID NO: 57933 - DNA, 272 bp, Setaria italica
  Peptide Sequence Number=SeqID_123907
cgcggagcccgtccaggggagcccgagatcgagtgcaccggggaaggcgtgtggttcgtggaggccgaggccagctgctccctcgaggaggcgcggaacctcgagcgcccgctctgcatccccaaggaggagtctgctcccgcgcccgcccgccggggtgcgcgtcgaggacaccgtgctgctcgcgcaggtccgtccgatccccccattgcctgttgctcgagtcccctccggtcatttcggatagtaaatttgaggcgcaattttcggtc

SEQ ID NO: 57934 - DNA, 211 bp, Setaria italica
  Peptide Sequence Number=SeqID_123908
gccgaggttcgcctgggctttgctgccagcacgcgccacctgctgagcaatgtgctgccttcggtcgaaggctactatgggaactgcgtgtaccctgggggtctcaccaagaccagccaggaggtgaaggaagcttcacttgtggagatcgtgaccgcaatcagggactgagacacgcaacagaggataggcaaggcacacaggggatagg

SEQ ID NO: 57935 - DNA, 398 bp, Setaria italica
  Peptide Sequence Number=SeqID_123909
cccacgttctccagccttagcaaacaatgaccttccgacctcattagtcatctgtttatttgagacattttgtgttttcaggccactttgatcataaatcaaaattaagaggtagagggaaagtgatgttcagtctcccatttgcaaaccttttgacctgatggccataagtttgggttgaaccggacagcacgatatttttcttgtacaatcagatgttcgagctgtttaatcccactaccatcatctgcaggattcgcaaggcagcaaccaatgaatttggatgggtatttcttcaacacactagttaccaacgaatgatcaaacatatgattaacaggttggacaatgagagccccatccactccagcttcatccatgcactacgaagaacaaaa

SEQ ID NO: 57936 - DNA, 242 bp, Setaria italica
  Peptide Sequence Number=SeqID_123910
cccaaggccgagcgtcggctcgggtccggtgacagcaatcgctgccgtcttgccctgccccccaccgaggagcacaccatcaggtctgcctccattttcctattgcttaatcaatcgcctccgcatcattagctcctgcctgttggttgcagcagcagcaacagaaattcttttggtgcatattctctggataacacgattcggtttgctcgctctggttcttgctcttcttctcggcttcg

SEQ ID NO: 57937 - DNA, 174 bp, Setaria italica
  Peptide Sequence Number=SeqID_123911
tatgtaggcaaagcattgatagattccgatgtagcccctcttgtgttgtttgtatcttctctaaaaacccataacagatataatgcatggaaggcagcagcatatcatttgtacaggttatgtattgtgttcctcacttttagttgcattgggtatgccatgccgttcatcctc

SEQ ID NO: 57938 - DNA, 419 bp, Setaria italica
  Peptide Sequence Number=SeqID_123912
aaactttactcttatatatgtttattcctcgtatgcatctagagtcggagaggtggatggcgctacttggacacagggcaagtgttaatagaaagtgcatgctcagtggagagagttgaagagactttggatacgctgataccaatgcttcctgaaatgcaatatttccgctttaatccaggtagttcaacttgaggaaacccttaacatttttctcaagaaaaagggaagccattaacgtgatgggagcccaacataaccatcatttgtgatgcactacttttgatatgtttgaacctaataagcctgcatattcaaatcagtgagcttgttatttcggcagttgatgaacggtgtggtatggagttagatgagactgatcctgctatctggcttaagctggaagctgcaacgtgagg

SEQ ID NO: 57939 - DNA, 294 bp, Setaria italica
  Peptide Sequence Number=SeqID_123913
tcctatatagtcctgagggcactcaacggatcggtcgaatcgacctagttcctccacttagcttggatgggcacccaacttcaaagtcctcaccgccaacatcaccattgaagtcaaggcagccatctgcacatgttcgatcactgtatgataaattgcagaatatgcctcaagttggtgtgatacacctggctcttcaaaatgattcaactggttcagtaattgaagttggcaagaaatagaatagtaatttagtaggttagactagaaacctaggaagaaacttagacaaga

SEQ ID NO: 57940 - DNA, 430 bp, Setaria italica
  Peptide Sequence Number=SeqID_123914
ttttagggcatctgaattcatgacatatatggatgtcccaggttggagcatggagggagaggatcattgtatgcagtggtaagtatggccttacacatggcctggtcaaggcattcatggactctggcgccaaagcagtcatctcttcatccatcgagcctccagattcccagacaatagcctactacgggatggatgtaaatggaagcctggagaacgggaagtttgtcatcggggatgaggaagccgatgagtcagagcctgaacctgtcagccctataagcgactgggaggacagcgacgccgagaagagtggcaaccatgacatggatgatgaggagtacctggctcagtttatgtgcttgttgtacttcaacttgggatgcgtaccggtagtcgtccttgtcttgtctagtagtcggttgttcct

SEQ ID NO: 57941 - DNA, 232 bp, Setaria italica
  Peptide Sequence Number=SeqID_123915
caagaaattggtgcatatatgtttaggaggacagtgcctgctgttcacatggcacctgaagatgttcgatggatggtaagtcaatatgtgtagcttgcactccctatgcgctgttcttgatattatgttcagtgccacaattgattcctcagatcacgtggcaactgtggaagttgctaagtatggcaacaaaattgagttgtacgtgaactgtgaatgggattttagtaag

SEQ ID NO: 57942 - DNA, 251 bp, Setaria italica
  Peptide Sequence Number=SeqID_123916
caggagagcaacgccgagaaggcgctcgaggcgctcaaggagatccagtccgagcacgcaaccgtcaagcgtgacggtcggtggtcgcatggcctaccggcgcgcgacctcgtccccgggggaccatcgttgagctccgcgtcggcgacaaggtccccgcggacatgcgcgtagactaccaagaacttaataacaaagaactaactaaaccctaaccgaaactaaaattaaacgtaaaagtaaactaaaaa

SEQ ID NO: 57943 - DNA, 379 bp, Setaria italica
  misc_feature (102)..(102): n is a, c, g, or t
  misc_feature (369)..(369): n is a, c, g, or t
  Peptide Sequence Number=SeqID_123917
tttcccacgcagcagatgccgtgcatctgggaagatgagaatgtcatagggctttctcgctgcaataagcgagttgatgagccttgcggtatgcctaaaatntacgttctcatcgaccatgccgtgaacgaggagcagcttccccttgagattgttcacatgatgcatgatcgatgcaaattcatacacgtccttattctctgatggcaggcccatgtacttctcagtgtagaacgtatcatacccatcccaggctgtaactggagcaccagctactgcacagcaagaaataatagtacaaggaaaccttagacaaaggacaacaattagaactaagaaacaaagaaataaataaccaaaaccgtaaanaataaccaaa

SEQ ID NO: 57944 - DNA, 259 bp, Setaria italica
  Peptide Sequence Number=SeqID_123918
cggaggagaagtatgccttgcggatgacgaggttgaggtcggcgatgacctggacgacggcgagcagcgtgccgtggctgttgacgctgtccaccctgatcaccgtggcgtcgtcggaggcatcgttgtcgatcacaaccctgtaatttgcacggcatatgtaagtaatcgatcggagaacagagaaacccaagcaaaatagaacaaaagtgaaggaagaagaaagaaagggagggcctaaatccaagcttctctgttt

SEQ ID NO: 57945 - DNA, 213 bp, Setaria italica
  misc_feature (201)..(201): n is a, c, g, or t
  Peptide Sequence Number=SeqID_123919
aatcgagctagcttagcagaggacctgaggtccatagagaagcagcgcaagcccccaaggggaatccagcaactcagcggcgggcggcggcggcagcaagagcaatctacaggggggagcagagcagaggccggtcgcgcgcccgaggtggacccgaggacgcaccgcctcaagaagcccgcgccgccggtgccccccggngcgccccccgtg

SEQ ID NO: 57946 - DNA, 399 bp, Setaria italica
  Peptide Sequence Number=SeqID_123920
ttactacaaaaaagtaagttttaagacaattaccaccaagtcggatgagattcagaaagttatacgaaataggaggtaatgctaaaactacttttgagaagagaatggggaacattgatgatgcagttcccttctttgggagaggcttcaacaggatctacccactgattatggttgtttatacgctattggttgctagtaatttctttggccgcgtgattgacttttttggaagctggaaaaggttcaagttccagcgtgaggaagagaatatagatggtttagatccgtctggaatgattattctacaaaaagagagatcttggattgaacaaggatgcaaagtgggtgatcaggttattccattggcaagggatttcaacggtgtgagcacagata

SEQ ID NO: 57947 - DNA, 250 bp, Setaria italica
  Peptide Sequence Number=SeqID_123921
caagtcctcaccagtcggctccgccgccgccgccatggctggtacgcggggaggagaaggtccgtccggatccgaggaagggtgcggcaacggtaagcctcattctgtttggctttgtatgctaccgcgtagtgcgtagtatgtagcatccaattgcagatagtgtgttgttactcttgccggcctcgatccagcgacgaaatttctattcattttcagcaattcttattaccactgttgtaatttatca

SEQ ID NO: 57948 - DNA, 231 bp, Setaria italica
  Peptide Sequence Number=SeqID_123922
tcccctcgtgtgccttgcctatctcctgttgcgtgtctcagcgaaggtgcccacaggtagcaaatgacacaaagaagtgagaaagacaagacatgccagaaggcaggaataatccatgcgtattgccatcgttcattgaatacatctgttgatttgaagtaaatctcatagccaatccagccaacagacaccagaacagatacaatcaatgcaattgcgaatttcctataa

SEQ ID NO: 57949 - DNA, 365 bp, Setaria italica
  Peptide Sequence Number=SeqID_123923
tcattccagaaatcgccaactttggagaccactccagaacatcatcaattatgttagaaaccttcttttggtacctggctctagctgcttcatctggagcatggtgcctaaggagcagtatcaccaatacagcaacaagagcatagaaaagtcttgatgtccactttggccgctcccttcatccttttcaggccaaaaacgaactagttctctaaacgtcgtctcctctgcatttatattggggaagaaccacacacgcttcccaagaagaacccataggatgccgaagatagcagctcttactcattctaggtcagtcagcatagatttaaactaattggtactagtaagttttaatttactta

SEQ ID NO: 57950 - DNA, 252 bp, Setaria italica
  Peptide Sequence Number=SeqID_123924
aagtaagatttctcctatggcaggtgtacctgctcctaacttaatgtggctcttaggtcagaacatgaaataagaaaatctttgcagataagaaattacctggctctagctgcttcatctggagcatggtgcctaaggagcagtatcaccaatacagcaacaagagcatagaaaagtcttgatgtccactttggccgctccccttcatcctttcaggccaaaaacgaactagttctctaaacgtcgtctcct

SEQ ID NO: 57951 - DNA, 320 bp, Setaria italica
  Peptide Sequence Number=SeqID_123925
ttaattttatttgtttttagtttaaacctttttctttttttggttttaccttttggtttcttttctttagttctttgttcttttcttatttcttggtagtcatggtgcctaaggagcagtatcaccaatacagcaacaagagcatagaaaagtcttgatgtccactttggccgctccccttcatccttttcaggccaaaaacgaactagttctctaaacgtagtctcctctgcatttatattgggggaagaaccacacacgcttcccaagaagaacccataggatgccgaagatagcagctcttagacaaaagaatggag

SEQ ID NO: 57952 - DNA, 447 bp, Setaria italica
  Peptide Sequence Number=SeqID_123926
gaactcatgttgcttatgactggttgctacttgcaattggttggggatctttggtccccatgctaaagcttttctgccttcaattttttgtgtgtttcgttatcatgacggttttaacacgatttcttgtttatgtggtaccgtaactatctccaatttgggggtagtagtaacaagtttcatgaaacttccctttggtcatctgcagacgcatacgatccactcgatccgaatggaaacatacaatcaagtgggatgtaatgcagtggactccagatggctacgtggctgttgtttcactttacaattaccagcagtatcgtcacatccaagcaccgggatggaaacttgggtgggtttgggcaaagaaggagataatctgggccatgaccggtggccaagcgactgagcaaggcgattgctccaaattcaaaagcaacatccccc

SEQ ID NO: 57953 - DNA, 345 bp, Setaria italica
  Peptide Sequence Number=SeqID_123927
tcctatttgaaggtatgaatggggtaacactctctacgcgcttcttggtatgtgtggtttgaggggaaaaaattcctttatcaccttaatcatcagtgtcattcatatgtttgtcttatattctttgattttctagcaatttattaaatatgtgattcagtccgtgtagactgcatgtgaagtgacaaaacttagatacttgtgtgtttgtagtgcatactttttcagcttgatggtacatgtcaatagttgttgtgtatgcaggaaccttttctgggaagatttttatacgacaatccctatgccgttaactgtgcccatcaacaaagagactctaaagttatt

SEQ ID NO: 57954 - DNA, 276 bp, Setaria italica
  Peptide Sequence Number=SeqID_123928
aacttaaaaccggaaaacggaaaacccgaaaaaggaaaacggaaaaggaaaagaaactaacgtaaggaaggaaggtagaccggcgaagggggaggcagtgtcggcggcggcggcgcggcgaggccggcgttggtgacgtcgtcgtgggtgccccagaagaggacgttggtggggaagacggggaactcgacgggctcctcccttggcagggcgccgaggtcggcggcgacggctgagacacgcaacagaggataggcaaggcacacaggggatagg

SEQ ID NO: 57955 - DNA, 273 bp, Setaria italica
  Peptide Sequence Number=SeqID_123929
cgttagttttttcgtttactttagtttaagttactttcgggttagttcctacgtacgtcgccgccgccgccgccgccggagatccagtgactacctccgcataaaagaagatgccttcacttcagaaagctttgcctcctgaacttgctgataatgtgctcaggtgctgcaaggggccttatcaatcatattctgtatgagtccgaaaagataactgggcgcaaattttcaggataagaaagaaagttgagacaagacttgcaccatgcttta

SEQ ID NO: 57956 - DNA, 319 bp, Setaria italica
  Peptide Sequence Number=SeqID_123930
ccaagcgtccaaacaagcatgtttattttgctgaagacagagaagaagccaaagaaatacgatccaggataggagaaagcagcaacatgcctagtttttgacaacatcccttctcgtataaagagaaaacagcttcttcatacagggagttagatgagaggaagcagaggcttcaaaagcttgagaaattgtatggagacatgaccttgcaaaaagaattgaagaaacctggacacaagaggaaactccgtgaagatgagacagtgaattcctaactattctactagtccttgttttattaagttggtcgtagtctact

SEQ ID NO: 57957 - DNA, 369 bp, Setaria italica
  Peptide Sequence Number=SeqID_123931
gccatacattggcattctttcttcagagttcacctattctggagaagctcactttgcggcactgccagttcccaaaatgtcctaacaaaaaagaaaggaacacccatactttaacaagatttcatcttctgggctccatggcctggatttgctgtgtgagaacctcaaggttgaaatcatatatagacatggctatggcccccacctcctacagcttctgctgcgtgtttcagtgaatctgtcacagaaaaaacattaagctcaccaaagttaattagtgttattgttagcccaggccttctatgtatctcaccttatggttcatatagaatttatgtgcacattatatgctcccttcagatgcactag

SEQ ID NO: 57958 - DNA, 489 bp, Setaria italica
  Peptide Sequence Number=SeqID_123932
aagtaaacttaagtaacgttaagaaataagtaaagtaagaatagttagactacgacaacaatgcgatgagctggatgacggagcctaagaggaggaaagtgcagttgaagaagaggcccatgttcctccaatgcttccccagcagcccgtcaagcacctcaaaccactggatgacatggttcctgaagtcgaccttctcccgttccttccttgttcggtactcgacgtagaggacgctgatgaggtatgccgtccagctgcccatgaggccgtagaagagctggaagacgatcccggacgccatgcccagctgcgagaaggagtagggcagcgtcagcagcacctgcgccacctggttcgacgcgcagctgaaccacgcgtcgtacaccgacccgccgtgccagaacaggctcgacagcgccttgttgccgccccttctcgacgtcgccgccgacgccgcttctctccgccgcctccggcgtcgccgcc

SEQ ID NO: 57959 - DNA, 261 bp, Setaria italica
  Peptide Sequence Number=SeqID_123933
cgatgcccatgaccccgacctcctcctccttgccgttgccgtcggccacgatggactcctccagctgctcgcgcgccatcctgaagcgcccggccttcccgtctccggccgctgtgtgctatagacggggaggctctgttcgcctacaaggggggcgggctagcgtggtggccgcgccgcgcggttagcaggcgtcgtcgtgccggagttgcagagcagagagctgggattacggggcctcttctctcctttccggcacgg

SEQ ID NO: 57960 - DNA, 221 bp, Setaria italica
  Peptide Sequence Number=SeqID_123934
ccgaggaaagaccagatccggtagttgtggaagaggggatgaagacggtggtggcgcagcaggcgccgaagatgtacgtccacgtccgcttgtcgtacttgtcgttgatgtagtagatgttgctgcatgcccatatatgcatcatccatggatatcatcatcagtgcacacatcgtcagatcacagattatctacaagactatataatattgtgactatta

SEQ ID NO: 57961 - DNA, 160 bp, Setaria italica
  Peptide Sequence Number=SeqID_123935
tacccagctgcgcgaacgagtagggcagcgtcagcagcacctgggcgacctggttggaggcgcagctgaaccaggcgtcgtacgccgacccgccgtgccacaggaagccggagagcttggacttgacgctggactcgccgctgccgccgtgctcctcctc

SEQ ID NO: 57962 - DNA, 218 bp, Setaria italica
  Peptide Sequence Number=SeqID_123936
ccatagaagacctgcagcagcacgccggagaccatgcccagctgagagaacgagtagggcagcgtcagcagcacctgtgccacctggttggaggcgcagctgaaccaggcgtcccagacggagccaccgtgccacaggaggctcttgaggccgaacccgccgtcgcgctgctgctgctgctcggcgtcgtcgccgatgcccatcgcgcgcaccctccc

SEQ ID NO: 57963 - DNA, 250 bp, Setaria italica
  Peptide Sequence Number=SeqID_123937
tcctgctgtctggcgcctagtgcatggactggctatcgtttacctcgttgctcttacctttcttcttttccagaatcgtgacgatgctcgccagttcatgaaacaacttcaccctgatcttggagtcgaattgccggagagatcttatggagctgattgccgtctgtatgttccagaaaaccctaaaacaagttcataaatatttatgagacattgtttgatgaatttgttgttgcccatatccttgggt

SEQ ID NO: 57964 - DNA, 242 bp, Setaria italica
  Peptide Sequence Number=SeqID_123938
tctcccgatccctatcagcacgtcgatcatccctcctaggctcttctgatctgggacgcccaccctgctgctgctccctagcagaatcctttttatcagtctctgcaccacccatcctgcttgatcccagtccaccacccaatctcctgggacgaccaattcggaacagttctgccacgctcaagtgtgagacaagggctgaaaagaggctaggattcgtgataataagctcgagcaaggtg

SEQ ID NO: 57965 - DNA, 191 bp, Setaria italica
  Peptide Sequence Number=SeqID_123939
ctcttctgatctgggacgcccaccctgctgctgctccctagcagaatcctttttatcagtctctgcaccacccatcctgcttgatcccagtccaccacccaatctcctgggacgccaattcggatgggtggtgccagagactgataaaaaggattctcctaggctcttctgatctgggacgcccaccctgc

SEQ ID NO: 57966 - DNA, 296 bp, Setaria italica
  misc_feature (133)..(133): n is a, c, g, or t
  Peptide Sequence Number=SeqID_123940
accctgctgctgctccctagcagaatcctttttatcagtctctgcaccacccatcctgcttgatcccagtccaccacccaatctcctgggacgccaattcggaacagttctgccacgctcaacatcaactaanacccttttattgtccacttttctcccatctgcctgcttgtaggcatttttcatgtcccgtgtgtgcatgtactctatgaaagcatatcctctaggtttacttgtatcctttgcaggttcggcttgtaactgagaaggatacaagcatatcctctaggtttact

SEQ ID NO: 57967 - DNA, 123 bp, Setaria italica
  Peptide Sequence Number=SeqID_123941
cgcagttcttggaaggacttatattaatttccagaactgcgaattcagaccccaaacatcagcaagtcaaggacagaggagtgagatgatgatatcgacgggccgtgcagggtctgtagatat

SEQ ID NO: 57968 - DNA, 243 bp, Setaria italica
  Peptide Sequence Number=SeqID_123942
ttcaaagcctttgtgcgatggtacttcgtctggcctcggtgctcttgccgttcttcttctgctccggcagtggcctcggcaacgacggcggtggacgacgagcggtctgtatgcgtacgtctccaactctcctacaggatttcgacgagatcggcatcagcgttcggcgacgcgtcttctgtcttgaacctcttcatctttatgatgacttctcaatccagttcttagtattatataactcca

SEQ ID NO: 57969 - DNA, 165 bp, Setaria italica
  Peptide Sequence Number=SeqID_123943
cacctagagcgcccgctcttcttctcgccgtcgccgtggccgccgcggcgacggcgagaagaagagcggcgctctaggtgccattgcacaggatcggagctgtggaaagcggcgcgatgctattagcttgatgagagctagctttacttgctcgactgcttgttg

SEQ ID NO: 57970 - DNA, 232 bp, Setaria italica
  Peptide Sequence Number=SeqID_123944
ggcagcaggtggtcgataatagcggctaaggattatcttgtcctcctcctccgagaatcctccgtgcttgtgtgcctgggccttgtgcagggctgaagaggtgcggcaagagctgccgcctccggtggctgaactacctccggccaaacatcaagcacggaggattctcggaggaggaggacaagataatccttagcctctacatcagcataggcagcaggtggtcataata

SEQ ID NO: 57971 - DNA, 250 bp, Setaria italica
  Peptide Sequence Number=SeqID_123945
gcggggggcaaggaagcagccctagcagctctctctgaggattcaatagcaggacgaggagttgatgatgtaacctgacgagtatcagctttcgggctctgttccaattttttagtgaattcgcacaagtcatatattcctcgtgttgtacgatcctaagacatttcagtaagagattagaaacatacgagtcactggagaaaattagttgcagtgatgtaaatgtctacttacttgagtataagctagg

SEQ ID NO: 57972 - DNA, 239 bp, Setaria italica
  Peptide Sequence Number=SeqID_123946
tgtcttcctttagtaaagtcctaaaccctacctaaactagggtttgtaacttagttagtattctttcttggggtcttcggtttcttgcttgagcttggcgcaccacttggtaactcagaggatccttccttcatagaacttgctctgctaaaagcaccctggtgatctcttttaggtggcattgtagttccaactagcatactaagtcctgatgctgacatggtgtagagcgcacaacc

SEQ ID NO: 57973 - DNA, 213 bp, Setaria italica
  Peptide Sequence Number=SeqID_123947
cgcagcttgagatcctacttcggcgaaattgtggccatgcagggaatagctcagagcctgccgccggcttgcaccgcccgtctggacgccacctcggtgtgctgttgctgagctgctcctcctcccctctcactattttttttgtccctgcacatggatcaagcaactactgaattttaaaataaaaaaaaaagttcaatgaccacaaacaca

SEQ ID NO: 57974 - DNA, 193 bp, Setaria italica
  Peptide Sequence Number=SeqID_123948
gaaaggcagctgggcaaagttgggaggacccaaccttggctgattggcctgaaaatgacttccgtttgttttgtggtgatcttggaaatgaagtgaacgatgatattcttacaaaggcattctcaaagtatccgtccttcaacatggccagggttatacgggacaagtggactggtaaaactaaaggatatgg

SEQ ID NO: 57975 - DNA, 403 bp, Setaria italica
  Peptide Sequence Number=SeqID_123949
tagtatgattttattgattcagttctgatatgagcaatgtatgcatatatggagtttgcaggagcaaatgctgaagagtggccatgtatggcatttcaagatttacgacaagcgcccagaatttgcacagtgggagagagaggcaagagctgcacgtcgagggctttgggcgtcagagaaccctgagaagccgtgggattggagaagagagcagcgcagtgcaaacgttcaggtctactaacggagctgaaccaaaacatctgatggccacgtagtgaggttcttgtacaacttgctgtgaatgatcgagtgcgcgagataccaaagccagagtgtacgtttatgtatcaacgtatgtgcatcagaagtgcttcgtttagtgtgaacctggaatgtacagatg

SEQ ID NO: 57976 - DNA, 313 bp, Setaria italica
  Peptide Sequence Number=SeqID_123950
aagttaacagcctatctcaatgcgcatcttgaccaaaaaccgaagcctgatgatccaagtctcggggaaatgaacagttttcagcagcgcaaccatgcagtgctcattttcccaatgaagaattgctgatcgtcccaagatctgtcttgtagttctctctcaattcttttaacttcacaaatgatgaatgctgaataaaataaatgttttactattaggacataatcacatattggaaatgcaagttattggcgtaacatacatgcattacggagtgcagtagatattaactaataagctgagcttatattca

SEQ ID NO: 57977 - DNA, 243 bp, Setaria italica
  Peptide Sequence Number=SeqID_123951
tggagcttggccgcttcaaacttgtcttggcagaccatcaacgaccgattcaatcgctcctgaaacctggccatttcattctcaacaagattgttggcagtcaggacaggcacactacagttctccacgcagttgttgatcccttcttggttcctttgccgatcgaagcaagcatacttcaagtgcgcatatgagtgcttcgatcggcaaaggaaccaagaagggaatcataatgacgcaact

SEQ ID NO: 57978 - DNA, 405 bp, Setaria italica
  Peptide Sequence Number=SeqID_123952
attgatgacagctatgctcctgctctgggtattcatgggctgcttgctggctactcttcctcacgcctctacaagttgttcaagggctcagaatggaagaacattgccttgaggacagcattcactttccctggcagtgtgtttgctattttcttcttcttgaatgctcttatctgggggcagaagtcctcaggtgctgttccattcaccaccatgtttgcccttgtcctcctttggttcgagatctcagcacatgtgacgataaggatcaggaagacaaggaagaggaacccaaagatgtagtagaactggtgcagccagatggaagtaaggatgaagaagagctcaatgaacacagctccaaatggaagtatccctccgatcagaatagaaaagtatttgggt

SEQ ID NO: 57979 - DNA, 298 bp, Setaria italica
  Peptide Sequence Number=SeqID_123953
tttgttctttgttccttcaaggcaatgttcttccattctgagcccttgaggacagcattcactttccctggcagtgtgtttgctattttcttcttcttgaatgctcttatctgggggcagaagtcctcaggtgctgttccattcaccaccatgtttgcccttgtcctcctttggttcggtatctctgtgcctttggtttttgttggaagcttccttggcttcaagaacctccattgaagatcctgtaaaagacaaataagataccaaggcagatccctgagcaggcctggtacatgaa

SEQ ID NO: 57980 - DNA, 202 bp, Setaria italica
  Peptide Sequence Number=SeqID_123954
tattgtattctattgtcttccgttacttctttatcgggatatctccaagtataaccagatgatcagatccactggttctccattgtgaattctctcatgatcgttctcttcctttcgggaatggttgcaatgatcatgctccgtactctttatcgggatatctccaagtataaccagcttgggcctcttcctgagtctcaag

SEQ ID NO: 57981 - DNA, 417 bp, Setaria italica
  Peptide Sequence Number=SeqID_123955
acggtagaaataatacaacaagggaacgaaacaaaagggaatagtttactaaggaattagtaggacctttagaagtgaaaccgtacagtgttaagcatgaatatgaagggcagtggaatgataagaagacccgcctgacaacatgtgatcctcatgctcaacgtgtaattacatcatccgattctcctcaggaggttgaagttggcaaggaaatcatatttacttacgatgtggatttcaaggagagtgatatcaagtgggcatctcggtgggacagctatctgctgatgacagatgatcagatccactggttctccattgtgaattctctcatgatcgttctcttcctttcgggaatggttgcaatgatcatgctccgtactctttatcgggatatctccaagtataaccagcttg

SEQ ID NO: 57982 - DNA, 380 bp, Setaria italica
  misc_feature (18)..(18): n is a, c, g, or t
  Peptide Sequence Number=SeqID_123956
ttatctgcagaatccatntccttcgtggcaacaagaattaggcaagaaagcacttcaccttactcaatcttgacggaagagtagatcaaccttgtgaacaggaagcaagcatagaatccgattgtgccagtcaaggcaaagaaggcatatgaagcaatgagcatgtagccaaagtaaagaacggcagagacgaacttggtgatctctagctttgtgaagaagtagaaggtcgcatacaagaagaggtagagagcagaggaaccagatgtcaagtatgacctccaccaccacaagtaatcctcactgcagagctggaagtagcagagcacaattcgtagtattctttcttagtttcttttacttttattgttgtacgtatt

SEQ ID NO: 57983 - DNA, 285 bp, Setaria italica
  Peptide Sequence Number=SeqID_123957
gacaacgccgtcaggaacaggaacggatcatgtgaaccgaaattcctcctgcaaagaacatggagagcgaaaatttgggaccaaactctgtgggttcccttttttatcgatgttcctcgcactttcaccaaccttccaaaaggctacgcacgaggggaacgacgaagatctcgggggcacaaatggagatgccgagcttccattccaccaaccaagaaccctaaaagaacaggggaaagaattctcaacaaagcaagattttgctgcctctttccgcctctcttt

SEQ ID NO: 57984 - DNA, 271 bp, Setaria italica
  Peptide Sequence Number=SeqID_123958
tctccgagaccaaatgatttgcttcctcttctctccaccgaaaaaagcgaagcagcagcagggtggggcggattggaatagagggcgacaacgccgtcaggaacaggaacggatcatgtgaaccgaaattcctccttccaaaaggctacgcacgaggggaacgacgaagatctcgggggcacaaatggagatgccgagcttccattccaccaaccaagaaccctaaaagaacaggggaaagaattctcaacaaagcaagatttgctgcctc

SEQ ID NO: 57985 - DNA, 258 bp, Setaria italica
  Peptide Sequence Number=SeqID_123959
gtagaaggccatcggagatttctggggcatcgcaaaactattactcctgataggagaggattggtggaactctttgatttactggaaaaaggggaactcatggaaggtccaaagctatcctcagttgttactgacatgcataaatacagacaaggggctccaaggaaaagatatggctccttgccaggaagcaagggcagagcacgacttaggactgaggaatctttttatgaaaacccatttcctgagtgcatctgt

SEQ ID NO: 57986 - DNA, 415 bp, Setaria italica
  Peptide Sequence Number=SeqID_123960
gacctttaatcgagtcatcacatgaactagtacttcaaaacaacagtagtgatgttgaattaattgtagttcttgatatctctacttccttcgttgaattgaacattgcagacctgaaagtttctgtggacagcatggagaaagaaagagatctctacttctcgaagctgcgtgatattgagatattgtgtcaacgacctgagttggagcatctattggtaagaacaaaaacaatgcagattgtagacctgagttggagcatctactgatattgagatactatgtcaacaacgtgagatttctactaagtttttctacttgctagttgctacctcccttggctgaaaccattctttcattttctttgtttgttcaaatatgcaaaatttcacatgttgcaatattgtcttttaac

SEQ ID NO: 57987 - DNA, 222 bp, Setaria italica
  Peptide Sequence Number=SeqID_123961
gctggatgtccgctgtgaaacaaaaacaaaaggcattctccaataccattctattttatatctgatttgtgttttgctgaagctattgtcatgatcaacctgttgcctggactttatctgttcaggacaatgtcttcgtcactgttgttgcatctgtccaataccgtgcgcttgctgataaagcatctgatgccttctacaagctgagcaacaccgaggaac

SEQ ID NO: 57988 - DNA, 410 bp, Setaria italica
  Peptide Sequence Number=SeqID_123962
gtgctcgaatgtcttctttcttctttggattcggttcttggactgctggatcccttcctgatgttgccggagctggttaccggagcatttgggctgcggtttgtggaggaagcgcggtggtgccagatcgaggagactgacggctgacgttctattaccgagaacctcttgcagctatccaaagcttggagtccgttcttcgatttggcttggcgagtttgggggattgatactcgggtatcagccttggcgaatagggaagcagaaccggatctttgttccgacgaaggagaagaagaacagtaggtgtagcagggatcttgttgtaattctcattttactcagggtcctttctgcaagaaaagggaatagtaactagtagacaaaccaagttaatacttactaaataa

SEQ ID NO: 57989 - DNA, 263 bp, Setaria italica
  Peptide Sequence Number=SeqID_123963
gggatttgaggttatagatgagatcaaagccgcacttgaagaagcatgcccacatacagtctcctgtgctgacactattgccctagcagccagaggttcaacagtactggtaaatttctgttctttgaagtgacaagaacatgtactaattacagaaagagaaataaatacaaggattcttactaaaacatttttgtttattttctttgaaaagactaaaagctggcatcctcaggtagaacttaatttagctccacttgata

SEQ ID NO: 57990 - DNA, 401 bp, Setaria italica
  Peptide Sequence Number=SeqID_123964
taaacagccatgagccatcacatcttccaaatctgatgcattctgtaccgcttctattcatccgtggattcttctgccgaatcctctgaaggtgtgtccgatgacaatggtcctaggattccctctgaactgaggtcaaaccactctctggctggaatctcaacatgtcagcacgagccattgcctctgcttgagctattctctgcctgaatatctgagccatctcatcggcctgatttgagccaaagaaaccgtatgtcagtttgttagctaaagcatacccagcaaatgtgcaaacattatttatttttacacttaccttttcgaaaacaagcttgggattgcggatcatgtcgccaggtgttggctcaagcttctttgtagaaaggctgacacggcct

SEQ ID NO: 57991 - DNA, 368 bp, Setaria italica
  misc_feature (214)..(214): n is a, c, g, or t
  misc_feature (354)..(354): n is a, c, g, or t
  Peptide Sequence Number=SeqID_123965
agtacaaaccaactctgaagaggcaatgcaggacgacgatttaataagatcagttacacgcgtagtgatttactcttacagttgaagttagatgaaatacgttttgacatgttatattattataacaaggggggtgctagcaatacctctggctggaatctcaacatgtcagcacgagccattgcctctgcttgagctattctctgcctgaatntctgagccatctcatcggccttttcgaaaacaagcttgggattgcggatcatgtcgccaggtgttggctcaagcttctttgtagaaaggctgacacggcctctttcacggtcatggctcagtatcatcaccttaagggtntctcctggtgcaga

SEQ ID NO: 57992 - DNA, 356 bp, Setaria italica
  Peptide Sequence Number=SeqID_123966
gattccgccgatatcaatgaaagcaccataaggttttaggctctcaacagttcccatgacaactgaaccaataccaagctgggcctgactgtcagccattgccttgcgattgctgaggacaagcctgccttgttcctcatcaacctctacaaacttcagaggcagttctttgccaagcagctcttccgcagttgttttcgatgacacttgggaaaatggaacaaatcccttaagcccttccacaagagctactacacctcctttgtttccgcctatcacctgcaagcatgattgacaagaaacacaaatgaataacactgaagaaactaaggtaacccagcaaagctaacaaatgg

SEQ ID NO: 57993 - DNA, 252 bp, Setaria italica
  misc_feature (1)..(1): n is a, c, g, or t
  misc_feature (6)..(6): n is a, c, g, or t
  misc_feature (10)..(10): n is a, c, g, or t
  Peptide Sequence Number=SeqID_123967
ncgtgnacantctggcctgaagttgccggcacctttcccatgcaagttcttgttgaattgcttgcaaactcagaatcaaagtttcgtcgctaggattctcatcaattatcatgaattcttcaactaaaccagggcgaatgcccgcatcttcaacattatcaatatcaagaaggcatgcctcatctaaaggcaagaaagcaagtaagaactttagaattaggaatagtacaaataataatagacaaccaatta

SEQ ID NO: 57994 - DNA, 357 bp, Setaria italica
  Peptide Sequence Number=SeqID_123968
gagatgatgactagaccaagaaatttcaggcttagggaggaatgcacgaaggccctcaattctagacagcaagccaccagcattccactcataaattttgaccttgatgggtagaccaagaaatttcacagatctaaagaataaagttggtcaagaaattcatgtctgtattacaaggattgatgaaggggctaacgaattgataattagtgaaaaagaagcatgggtaagttgcgtgcattgacctctgctgcctgttacgaggtgtacaccaaatacttcagtacttcatcttactctttttttattgttgtatttgttcgaagttaggtattagttgtttacgtgtttaaaaac

SEQ ID NO: 57995 - DNA, 277 bp, Setaria italica
  Peptide Sequence Number=SeqID_123969
agaaatggcatcagtaaaaacaagattagggtcttgagatgttaccctctgttagtctcgccaatcctaatttgtgcaccatacggaaataacttgcggactgttccttgcaagagagtcccttctctaaggtatgtcaccgcctaaacaagtaagcaattttttaaaaagaaaagaaagataactcaactcctgagttcactaataaattagagcgtgttgaaaacatattgcaaagtgatggaggtaatttggagagtactctggaaacagatag

SEQ ID NO: 57996 - DNA, 364 bp, Setaria italica
  Peptide Sequence Number=SeqID_123970
gctgacatcttgctgtggtaatctttggtcacacctggcggtgatcatgatacccgtgagattttgtaaaaacttggttcacttccgattaccgctgctttaccacagggatgccagagatgcatcttctgtttgtcgaagccaatacattgccagtgccaaacggaagatgcatctctggcatccctgtggatatgctgaattctgatgaggcctgcattcttgctgtgagtggaaggaagcagatcatcctggatgcgtttgccgatggaagcagcttcatttgcctgaaatgtggtgggctctatagcacatctcgtaaggatgagcacttggcctactggtgcaggactgcatgatcctg

SEQ ID NO: 57997 - DNA, 184 bp, Setaria italica
  Peptide Sequence Number=SeqID_123971
tcgtaggtaccttgggttctagtacccttgttggtattattgtctgaatttcttgatgaggcctgcattcttgctgtgagtggaaggaagcagatcatcctggatgcgtttgccgatggaagcagcttcatttgcctgaaatgtggtgggctctatagcacatctcgtaaggatgagcacttgg

SEQ ID NO: 57998 - DNA, 251 bp, Setaria italica
  Peptide Sequence Number=SeqID_123972
ttagtccctatatctgattagattgatagagcagttattccatccatagtgaacctaacatttattttcataggttgaggaactgctgaagaactacgagaatgtatgcacccttcgtgtaaggatgcctatttcatcggatctctccaatcctcgtaatttcattaccaaaatcaccagatacgagaaggttgtcaacatcccgaactcaatgacaatattggatgaacttcttcccatctcaattgaaa

SEQ ID NO: 57999 - DNA, 360 bp, Setaria italica
  Peptide Sequence Number=SeqID_123973
tgtggtcggcaccagcaatgccggggcggcatggaccaagatatggtccacacaggcctggattgccaacgaaagatgtggcattgaagtaggtgaactgcccagtccccggcacaagcccagacaagttgttatacgagaagtcgactgctgtcaagctctgcattgtcgcgatggatggaggtatctctccatcaaggtggttccgggataggttgaggtagttcagtatccacattccagagaatggaccggaaggtaatacttacccaagaagaaggttaagttttaaggaactaacaaataagtaaccaaaagtaaaagtaagaaagaaaagaaccggaacaaatttaacccaaa

SEQ ID NO: 58000 - DNA, 193 bp, Setaria italica
  Peptide Sequence Number=SeqID_123974
cctatcccctgtgtgccttgcctatcccctttgcgtgtctcagccgcgtgatttctatcctcaagagggagacgtgggtccgcaaggtggcgctgtaccggagcttcggggtgtgcgaggctgacctgctcagggcgttcaagacgcagcccaccatactgctcgtctctgacgagagcgtaaagaagaagat

SEQ ID NO: 58001 - DNA, 427 bp, Setaria italica
  Peptide Sequence Number=SeqID_123975
cttcatcatcattgtagatgtcatgatctgaatattgctcagcttcagagtaagattcattctatctggaatttcaatgtctttcatcgtcctaactattttgtcaaacaagacaaatgtatgtgctgctgattctttgaaacacagcaaaaatcttctcccactcatcattggagagcttgcttgcaagtccttctgttaaacgctgaaaaactgatatacctgtgctagctgattgcttatatgggcttctgatgaaatttgtaacaacagaagtaactctagaaagttctggccgcatcacttcaaaaaaggtaatgtacaaatctgataaacattttagagccaccattttagtttcgaaattccaagaatcatcctcaagtaactaatttaacaacttagaaaataatagaaccaatttaga

SEQ ID NO: 58002 - DNA, 333 bp, Setaria italica
  Peptide Sequence Number=SeqID_123976
taaggttcttgccagaagctttgcggacaggaaggagacggtcacccagttcgtcaacagcaacctctccccgatccagctaattaatctatcttatgtccagtctggatgctgcaagccacccaccggctgcaacttcacctaccagagtgagaccgtctggatcaaacccactggcttcaacactaccaccgacgaccccgactgcaccacatggtcgaacgaccagaccgccctctgctacgactgcatggcgtgcaaggcaggtgtgctcgccaacctgaagaacgactggaagaagattgcaaccatcaacattgtcttcttgatctt

SEQ ID NO: 58003 - DNA, 303 bp, Setaria italica
  Peptide Sequence Number=SeqID_123977
ccaaagaatatgcggcagcaccttttggaaattgtggaccatttttgaatcaggacaaatttcttcaaaaggctactcgagttttgtctcaaatcgtgtgcagaagttgcaggagcttcaggtaattatttacatttttggtatgctttttctcgtcatccagttgtccactttcagttgtcacctgctaatgttttaggtttagaacaaggaaatttattttgtactagataagaaagtgaagaggaactcgagcctttttcttgataagaagtcatagtcttgtgggaagacaccatttta

SEQ ID NO: 58004 - DNA, 415 bp, Setaria italica
  Peptide Sequence Number=SeqID_123978
actttgtatctctcattgttcttctgaaggatttattctttctccggtaactatgtaaatatgtaatatatattgagctccaatttgttcccatgtcatgtgggcgtttcagagaagacacatccaggtttcttgtttgtaaattaaattgttctctgagagattggttttcttttcttcttttgtttatattcctgataaaaagtctgggacttttaagggttcatttatctgccattcatgcgttgatctaaccagtggtttttctaatttgtagttcacaagatcaggccatactcagcaacctagcaacgcgattatgatcaccagcacaatcattgttgttcttttcagcacatttgtctttgggctactgaccaagccgctgatcaggctcttgattccaccaaggcac

SEQ ID NO: 58005 - DNA, 316 bp, Setaria italica
  Peptide Sequence Number=SeqID_123979
gctatccagaacttcgatcttgggaatatcaatactgctaaattactaaaatttattggcagcttcctttatttgttcagcagcagcaccattcttggagtagctgctggacttctcagtgcttatatcatcaagaagctgtactttggcaggcactcgacagatcgtgaagtttcaattatgatgctaatggcttatttatcatacatgctagctgaagtgagctccctgtactatcgaccaatttgcttatgtttttaattaaaaaaacagctaaatgcagccataattgttattcattggttgctttgtctgt

SEQ ID NO: 58006 - DNA, 266 bp, Setaria italica
  Peptide Sequence Number=SeqID_123980
ccttggtcctggtgtcaagagctgcttttgtttttcccgtctatcctttctatcaaatttgaccaagaaaactaccagaaggaaagatatcttttaagcagcaagtgagtatttgagcaaaattatagacttcttttgtcctcttgaaacagttgttatgttcctcacatgatattggttgttcaggtaattgtttggtgggcgggtctcatgagaggtgctgtgtccattgcgttagcttacaataaggttaaattttttgtgtt

SEQ ID NO: 58007 - DNA, 196 bp, Setaria italica
  Peptide Sequence Number=SeqID_123981
tatcagatgttatgtggctttgatagatctatgctacaccattttgatgttcttggtgttgcaatcttcttcagcacagcgataaggtatgtctctacaaaagcacttttatctgcaacccttggtatgcgaggactaaatgtcagttatactatttggtaatgtgtttttttatagaactcattagcttggatac

SEQ ID NO: 58008 - DNA, 400 bp, Setaria italica
  Peptide Sequence Number=SeqID_123982
ttgctccttcgttctcaactgatcaaagcaaggttacttcaataatgctgctaaaaagatctgtaatagccctgagccttgttgcctcctttccaatgtcttgctcaattgggaaatagaccccatgccttgcttcctctggcagtgtctgagctgacaaagtattgcggaatattttttgatatattaattgcctcctcttcagacaggttgccatgacagagtccctcaatgtgtaactgggaaaggatcttcggtacaaatgttactagatcagtaaatgttaagttcataagaacttcgagtttttcatcaacatcccaaaatatttcacgcaagacttgttagccttctaagttaggttagtaattggtcttctattaggtctttctatttgttt

SEQ ID NO: 58009 - DNA, 199 bp, Setaria italica
  Peptide Sequence Number=SeqID_123983
cacaaagcatgcttgactaattccggatcccagtcctcatgtatatactctccacaaacaatgtgcttctcagagtaaaaaagacatattttcttcaagatcattcttcacgcgcacacttctaacgaagtttgcaccattagggatgcaaataactcgtaccccatgccttgcttcctctggcagtgtctgagctgac

SEQ ID NO: 58010 - DNA, 300 bp, Setaria italica
  misc_feature (15)..(15): n is a, c, g, or t
  Peptide Sequence Number=SeqID_123984
tcggtagtaatattntaagttcggtactattggttgtattccggtaagtaagttggttggtcgtctttctaaccttctttctttccggtattcaccatgtccgacttgatgttctccgagaagaagaggttgaagcgccaccacttcttgagcaagggcaagggcaagggaggaagaaagtgaggagaggatcccatggtttggcacagtgagctatctgctcagcttgttaattgtaatctttttgcaggttttggtttagaaatttgatgttgttgtctatcaattctgtaactgttg

SEQ ID NO: 58011 - DNA, 258 bp, Setaria italica
  Peptide Sequence Number=SeqID_123985
gttgtgagagaaaatactgttaagggactgataagccggctgataagctgaagctcacgggctgaagaaaatttagacgggattggaacaactcgaactgggttgatgatatagccgagcgcgatcgagatcagaagcggcagaccctccggcgtctgcctccgatccgatcctaccacgccacgggctccgattccgatcggggcctgcaaagcgcccagccgcccaccaatggcgtcaccaatccgatccgaccaa

SEQ ID NO: 58012 - DNA, 243 bp, Setaria italica
  Peptide Sequence Number=SeqID_123986
aacttctggtacccagttgccttctccagcgatctgaaagatgacacaatggtaccaatagattgtttcgaggaacagtgggtgatattccgcggaaaagatggaaggcctggctgtgttcagaacacatgtgctcacagagcttgcccccttcatctcggttcagtaaacgagggcagaatccagtgcccccttcatctcagttgagtactcccagccatggtaagggcactggattctgcc

SEQ ID NO: 58013 - DNA, 345 bp, Setaria italica
  Peptide Sequence Number=SeqID_123987
caatctaatacaaatgtaaggtatcttcgtttcgaacccatctcatcttttgggaatgtctgtgatctctatggcctccctgtcacgccatgctctggcagtgcacggttctggagcgcgtcaggatgtatagcggccagcagacagtggtggatcttggatttaatcacagaaaataccctttcaacactcgttgttgccactggtaaaagcaatatcaatttgagaagcaagtaaaccatatcatacactttgtgccttcgtatttgaacaagcttaactgagagatcaacgatgctgtctggacccttgaagctatcatctcgtcgcatgtcatcaatataa

SEQ ID NO: 58014 - DNA, 256 bp, Setaria italica
  Peptide Sequence Number=SeqID_123988
tcaacacgcatgaagattgcgctgggtgccgcaagggggcttgagtaccttcatggagccgagagatccatcatctatcgggatttcaagacgtcaaacatcttgttagatgcggttagtgtctcatctattatgtttgaatgtgtgttggtacttttccccccatttaagtactagtttaaggttgttttctgaattgaatttcccatatgtccaaccaaccaaattgtatggacaagatattctactgatgaac

SEQ ID NO: 58015 - DNA, 332 bp, Setaria italica
  Peptide Sequence Number=SeqID_123989
gcagcatagtgtcccaggagtcttctctgtccttgctcatgtgttgactaagtaaagtttgcagccatggaagtaaacaaaccaatactgcgcccctagattgtatttgcagtacgaagaacttgagaagctttacaacatctgctggtgttaggagtgatatagattttgcgataaccttttcatctctattgtaacaagcaagttagcaatgacatgttatcatcagcacgcagagcttgcttgagcaaaatatggactggctatggcactaccaagtgcagattcagtccatattttgctcaagcaagctctgcgtgctgacgataacc

SEQ ID NO: 58016 - DNA, 375 bp, Setaria italica
  Peptide Sequence Number=SeqID_123990
aaggagagcctcttcagttggatgttgtgcttttgatgatagtgtcaaggtcacagggatcgcgataggtgaaataagaagtaatgagtaggatcacagtgagagaattaaccacattgtcactcagttgcatgaaattttggactagcatgacaccaacaagatatgaggcgaggagcaagcagatagtgtagatgaacatgaagctgttcttgtccgacgggcgcacctggcggtgacctccaacaggcctaataataaacatcaagccaatggcaaccaatgatggaccgactgcaaccatgaagacaagttgtttgtcattggttcttggttgttgttgttcttatttctttacttttgtttctttatttt

SEQ ID NO: 58017 - DNA, 137 bp, Setaria italica
  Peptide Sequence Number=SeqID_123991
tatgtgccttgggtatgtgtgctccctgacaacaatctcagagaagtagcctcctccatcacgaccaggacgacagtgctcccgtccccaaagacaaacacaaggcagcaagcgcacacgcccgcccccccaccccc

SEQ ID NO: 58018 - DNA, 245 bp, Setaria italica
  Peptide Sequence Number=SeqID_123992
aactggaatgaaaattacaatcaatacatggagtcatggaatcatgagattaataaaggttttgctcatgttccagagtcatggtagccacaacatttatcgtctttggcaacatcttcttagtttcctttggcaaccatcaatcacctggtatggttccatccacgatttctattagagtactatatatagtccttatgataaatttaaacctacattacttattctttgtttttgttcttaaa

SEQ ID NO: 58019 - DNA, 247 bp, Setaria italica
  Peptide Sequence Number=SeqID_123993
aaatgcatgactgattttggaacaaattttcattgccctcactgttgttaatagcggaaagcttttctgtgtactgctggattttggatggcaagattgaatgaagggctgtcattatttgatgcaatactgattgttccaatgtttcaaattgcatggaccttcttctctatttgtacaggatttgtttactttcaagaatatcaagtatttgatacactaagaagacgaatgtcatgcccaatac

SEQ ID NO: 58020 - DNA, 433 bp, Setaria italica
  Peptide Sequence Number=SeqID_123994
agtaagacaatactaagtacttaaacttcggttttttcatggttcctaagtagatttgctgatactaaaattatgttgacagtttacacgccggagcagctgatcgcaaaatacagcaatttggtgtttgttctttattgcatgtcattggtatttgtggttgcattcaaccattatctctataggagtggagaaactattatttcaaatagctcaaaagatgctggtacatattggcgaacaatgttgccattttcttatgctgttgtatcgggtgctattggatcttgctcagtcttgtttgcaaaatcattgtaagttatattgtatttcgtcaagatccatgcatctagtgttactgattctttcaggtttatttgatgctgactaccatgttgttcgttttccccctccttcccaattcctgtccagg

SEQ ID NO: 58021 - DNA, 247 bp, Setaria italica
  Peptide Sequence Number=SeqID_123995
aggaaactaagaagatgttgccaaagacgataaatgttgtggctaccatgactttcaccgaaatagtcttgttcaatacaaagtaggcaaatgcaatgttggacacaaactggattgatccaagagctgcaagaagtgactgtgcagcatatgcaaaggaccttcttctctatttgtacaggatttgtttactttcaagaatatcaagtatttgatacactcaggataattatgtttgtattgggca

SEQ ID NO: 58022 - DNA, 438 bp, Setaria italica
  Peptide Sequence Number=SeqID_123996
tttgttacgtttacctttggttagttaacttaaccgggttcggggttattctacggttgttacggtcttcgtggtggaccgggcgtggctgcacgcgctcttcatgatcgagttctcgctcgtcatgtggctgctcggcaagacggttggcatctcctgatgcagagcttccacctccctctcctttttccctcccgtgccccccccatccctgatgcagagcttcacttcgcataccagaccagtttgtacaaattatcgagtgcagatagtgcagtgcttttgtttcgatccatccgtagtattgtagatgattcttcttactttttggccgttttctttctagtagggcagaaattctgatggttgtgcagtgtagattcatttgatttgacgatgatgatagtcaggatgttagctgcccaggttgatttgttg

SEQ ID NO: 58023 - DNA, 246 bp, Setaria italica
  misc_feature (10)..(10): n is a, c, g, or t
  misc_feature (93)..(93): n is a, c, g, or t
  Peptide Sequence Number=SeqID_123997
cgatacagcngaaaattcttgactcatttctaattatgacatggacactgtcagcattatgcaacttatgtgtgaagttttgtgctatttgcntttaaaaatttagattatgaatgatgattttcttcttcctttccctgcaaaacatccaggaggaatttgttgaatgttcttgactttctcaagaagcccaatgcaagcgagcttgtctcggggaccaaggacagagtgaacctgcacgacaag

SEQ ID NO: 58024 - DNA, 241 bp, Setaria italica
  Peptide Sequence Number=SeqID_123998
cctagctgcttgaatgtctcttcctgcttcagcatggccatcttcatgtgctccttctcgtactgcttcaggtgatatcttgacatgttgtagcagcagaagctgcaaagaatagcaagtgaagaagtgcagacctcccacacttggacgcttatcgggatcgaggcctcgaggaaccttgcaacagggggcactttccggtgtaggaggagggtagggttaggggcacttagctttctcg

SEQ ID NO: 58025 - DNA, 234 bp, Setaria italica
  Peptide Sequence Number=SeqID_123999
aggtttatgtcgaccatgtcctcctgctttgctgacgagatcgcgtccagcccaggaagggatccagcgatcttgcggaacagaggctgcaggatccaagtgttccgtaagaattgtcagatgtttgagcagtcatcgatgagcaatagagagcttttgcaagtgaaagttaagatgcgagttggaaccttgatgttgaacccagcctttgcactggtttctatgaacatggca

SEQ ID NO: 58026 - DNA, 458 bp, Setaria italica
  Peptide Sequence Number=SeqID_124000
taaattagtgccgcacgtcctgagttccacgctcgttcatccacaaagagcaaaatctatcactacaagatctataatgaagcaatcatggacccctttcataattgttatgcttaccatagtgcttacaaacttaatccgcatgccatgcgacaggctgcaaaacactttgttggaatccatgacttcacatcttttgctaatgcagcacataatgatcgggaacgcagtcccataaagaagattacacgatttgatgttactgaaatggtagttgatgcccaaactaactatgtttttggtactattgttttttaccctctggttttatctttagtttctggagggaaatcattctgtgttggattatggtttggtgtttgttgtacatgatcttcttttcttggtactctccaggtgctctcttacagcttgaggttgaaggcacaggttttctg

SEQ ID NO: 58027 - DNA, 381 bp, Setaria italica
  Peptide Sequence Number=SeqID_124001
actacaattttaatacctaggtcaaccacgggatgatggaagagcaactgtggttgacgccggaacctgaacaggataaaaatgagtttgcttctcagttagttcgtgcctgttctgccctcaggcagcagtcgtttttgaattatcttatggatattctgcagcaacttgttcatactttcaagtcatcatccataaatggagaagctggttcttctggttcaggctgcggatccctattgacagtaaggagagagctaccagctggaaacttctctccatttttttcagattcatatgctaaatctcatccaactgaatctgttcacggattactacaaattgttgttggaaaatactttccggcttgtatatagcatt

SEQ ID NO: 58028 - DNA, 289 bp, Setaria italica
  Peptide Sequence Number=SeqID_124002
attactacaaattgttgttggaaaatactttccggcttgtatatagcatatgaatctgaaaaaaatggagagagctaccagctggaaacttctctccatttttttcagattcatatgctaaatcctcatccaactgatctgttcacggattactacaaattgttgttggaaaatactttccggcttgtatatagcatggttcgaccagaaaaggagaagtctgctgagaaggatagaagctacaaggttcccaacacaaaggatctaaagttggatggatatcaagacg

SEQ ID NO: 58029 - DNA, 420 bp, Setaria italica
  misc_feature (246)..(246): n is a, c, g, or t
  Peptide Sequence Number=SeqID_124003
tcccggttttcttcctaagtttccttttcccgtaagtctagtactaattgtattagtcttaattgtattgtattgtcttccttgtaaaacctattgtctaaaaaccgtagttgctattctgctatggttccagcagtggaaatgctcaggttatgattgaagaagatcctgcatcatcatcagtgcgatactgttgtgatggctgttccactgttccaatacttaggcgaaggtggcactgtaacntatgtccagattttgacctatgtgaaacttgctatgagatacttgatgcagatcgcctaccggtaccgcattcaaaagatcatcccatgtcagcaataccaattgaacttgatacatttggaggcgaaggcaatgaaatccatttctctattgatgagctaacagattctggtg

SEQ ID NO: 58030 - DNA, 207 bp, Setaria italica
  Peptide Sequence Number=SeqID_124004
attatgtggcccatatcatgctcaacaatggagcagcaatcctgctgaaattgatcagcaagttcacagctcgccctgttcgctatctgccgatcatggccttcgccattgccaaacaatgcagcgaggggagctttgattagttcggcatcaaaatctaccctacttggttgtcttggtattaccctagtagtctagtaactatta

SEQ ID NO: 58031 - DNA, 231 bp, Setaria italica
  Peptide Sequence Number=SeqID_124005
aatgacgaagaagagaaggcattctcatcatttctaaacttatccagattcccacaggtttatgtcaaatacagtgctcttttccgcatctcaagagaagcatatccatatgaggacactgctcagcttctttcccatgtgatatctatctatggagccaatcgaataatgtggggaagtgacttcccttatgttgttcctgaatgtggctacaaaggagcaaaggatgca

SEQ ID NO: 58032 - DNA, 354 bp, Setaria italica
  Peptide Sequence Number=SeqID_124006
ctttaaggaaagattgggagtcagccttgattacaatgtcatcaggctgagctcctgagcgccacgaaggcgaatcaactccaccacgatgtagttgtttggaagaaatgaagtccaagcattcatttagcttctcagtctcgaacttgacaaagtggagcctccctccaagaatcgggtagcttctcctgccaccattaaacatcccaagtcttctctttgtggatatcttacgcttatcctcagttgagagctcagcatgtcgtgagaagtataccagtttgataagagaaccgccgatgtcaagggcgaggtgggagatgtcgtcggactggttgggcagcaggatggtgg

SEQ ID NO: 58033 - DNA, 156 bp, Setaria italica
  Peptide Sequence Number=SeqID_124007
ctttcaaaacctcccatacctgttgtagctcgagatccccaatcaaatatgtttgcagcaaggacaccttcaattagtgcaagcagcctagcttcctcattcatactatgggagttccagctacaacaggtatgggaggttttgaaaggcctactt

SEQ ID NO: 58034 - DNA, 453 bp, Setaria italica
  Peptide Sequence Number=SeqID_124008
attgttagtaacttgagcgtatttaccccagacaactttccggcaggagtcacaagaccaagttcactcacattaacctcaatgatggtaccccttgtcataacaccaagagatgtatacattggaccattaggatttttctttactgagataatgtcaagattaaacgtgcacttcaattcaggatgggtcacatgagctttggtgaaacgcaagccagttggccggtatgaaccgctcatactttgggggcttccttgtaaatccagatccaacaaatgttgcttttgtgaccattctcttccactgcttagttttccgtttgccagtccgaagaactttgaacatctcttcttttgccaaaggttagacctgtggcagaagaagagatgttcaaagttcttcttctgccacaggtctaacctttggtaaatgggatgttcctttgtccta

SEQ ID NO: 58035 - DNA, 150 bp, Setaria italica
  Peptide Sequence Number=SeqID_124009
ctatggaactgtattgtacttgcactgttgccttcctgcttacagtaacagagtaatactatggaactgtattgtacttgcactgttgccttcctgcttacagtaacagagtttagtcaaaccgaccagaattcttttccttactgtttc

SEQ ID NO: 58036 - DNA, 410 bp, Setaria italica
  Peptide Sequence Number=SeqID_124010
taactacttaatttaagtctaaaagtaggtaaggtagtaaagtcttggttaaattgggtattgtttccttttgtcctaaaggttagacctgtggcagaagaagagatgttcaaagttcttcggactggcaaacggaaaactaagcagtggaagagaatggtcacaaaagcaacatttgttggatctggatttacaaggaagccccccaaaagtatgagcggttcatccggccaactggcttgcgtttcaccaaagctcatgtgacccatcctgaattgaagtgcacgttaatcttgacattatctcagtaaagaaaaatcctaatggtccaatgtatacatctcttggtgttatggacaaggggtaccatcattgaggttaatgtgagtgaacttggtcttgtgactctg

SEQ ID NO: 58037 - DNA, 338 bp, Setaria italica
  Peptide Sequence Number=SeqID_124011
gcactccatcttgatatcatgtcttttcatctggtctgcaatggtgtccacctgatcttctttagtcccttcaggcggatctcttaaccgatgctgtgcactggtgattagacagagacgccgctttcctttggtattaccatatttcctaatcagcatatccaagccaacaacaacagcgtccagaactttgccttagtcaaggaatttctatactgttttggtcaaattccatcagaacaaaacaagaccatatttgaaacatcaaaaaaaaaccataaactaaacaaaccatagattgttattagttttctttatttacttattttatttttaac

SEQ ID NO: 58038 - DNA, 550 bp, Setaria italica
  misc_feature (465)..(550): n is a, c, g, or t
  Peptide Sequence Number=SeqID_124012
tttctttaaagggttacttaagttctttcttaacgggttatttcgttcgtcttccgggttgtccctaccccgtaacgttctccgtcgtcgacctcgtcgtgcaggtctccaagaagaccctcgccgaggaggtgaaccaggcgttccgcgacagcgccgccaacgagctcgccggcatcctcgaggtctgcgacgccccgctcgtgtccgtcgacttcaggtgctccgacgtgtcctccaccgtcgacgcctcgctcaccatggtcatgggcacgacatggtcaaggtcatcgcgtggtacgacaacgagtggggctactcgcagagggtcgtcgacctagctgacattgtcgccaacaattggaagtgaagcctcgcattgtaataacccatcctcggcttcaaaatttcccagggtcttcccttatgataatttgtaatgagaaatcgaggacccaactcccnnnnnnnnnnnnnnnnnnnnnnnnnnnnnnnnnnnnnnnnnnnnnnnnnnnnnnnnnnnnnnnnnnnnnnnnnnnnnnnnnnnnnn

SEQ ID NO: 58039 - DNA, 309 bp, Setaria italica
  Peptide Sequence Number=SeqID_124013
acgaaggaagtagaaaccaaggacgttaccgacgaacaagacgaccgaccaaacgaagctcgccggcatcctcgaggtctgcgacgccccgctcgtgtccgtcgacttcaggtagactccgacgtgtcctccaccgtcgacgcctcgctcaccatggtcatgggcgacgacatggtcaaggtcatcgcgtggtacgacaacgagtggggctactcgcagagggtcgtcgacctagctgacattgtcgccaacaattggaagtgaagcctcgcattgtaataacccatcctcggcttcaaaattttccca

SEQ ID NO: 58040 - DNA, 322 bp, Setaria italica
  Peptide Sequence Number=SeqID_124014
taaagtttaaaaataagaacaaaaaggaaaaggtaagaacaaaacttagacaagaataagacaacgggaggtgataatggatttatccatatttgggccctcaaaaagactagcagcagaagcaaagaaaaggtggatataactccagaccgccgttatgaacataagtactattctaatcatctccaaccagagaaaatcaagattccaagtacttccgatgatgaggaggacgacgaggacgttgacaaagaggtggtgagggaaggccctttggaggtggtcgtggagtatgtggataaggaggtggtcagggtggcac

SEQ ID NO: 58041 - DNA, 270 bp, Setaria italica
  Peptide Sequence Number=SeqID_124015
gtcaactgcttcaacctccccgggctgcccaccaggcacgacaacgttgacatcgtcgtcatcagggagaacaccgagggcgagtactcggggctcgaacatgaggtcgtgcccggcgtcgtcgagagtctcaaggtacggagaatttcccgtatcgctctctctcggataagtaatttgctcactgatgcagcatgtgctaagcttctagagattgtgaataaccgtaagaaattaaagaaaaataaactaaaactaaagactaactaa

SEQ ID NO: 58042 - DNA, 265 bp, Setaria italica
  Peptide Sequence Number=SeqID_124016
atggttacacctaatctttatggcaatttggtggctaacacagctgcaggtattgtcggagggactggtatcatgcctggaggtagggttgcacctcatactttattgtgtttcaccccttaataaaaataatggatgcttccaaaaatttcttggaaatctcacaatactggctgttgcctgacaagtgtaattctcatagatttctttgttgcaaattatttcggaaacaatactgtgggcttcagttgactttcctttctgt

SEQ ID NO: 58043 - DNA, 255 bp, Setaria italica
  Peptide Sequence Number=SeqID_124017
cgtttgcgctgctgctctcatctgctatgatgttgaggcacttgcagttcccatcgtttgccgaccggctggagacagcagtgaagcgtgtcattgcagaaggcaattacagaaccaaagatttgggtggcaccagcacaacccaggaagtcacggatgcagtcattgccaaactggattaacgaccagccgtgtgtttttcaaactttgtttctgtcttttggttggtacttaggttaacttagttccttgtac

SEQ ID NO: 58044 - DNA, 196 bp, Setaria italica
  Peptide Sequence Number=SeqID_124018
ttctttgttctttttaacctttcccccgggttcttgtccctacctaggtctacgtactaacgttgacatcgtcgtcatcagggagaacaccgagggcgagtactcggggctcgaacatgaggtcgtgcccggcgtcgtcgagagtctcaaggtgataacaaagttttgctcagaaaggattgccaagtatgctttg

SEQ ID NO: 58045 - DNA, 259 bp, Setaria italica
  Peptide Sequence Number=SeqID_124019
ctgcgccgcctcgtctccgcctcctccccgcccgcgccgcagccctcccgggccactgcggcggcctcgcgcggcgcacggtgacctacatgccgcggcccggggacggcaccccgcgcgccgtcacgctcatcccgggcgacggcatcgggcccctcgtcacgggtgccgtgcgccaggtcatggaggcgatgcacgcgcccgtctacttcgagacctacgaggtccacggcgacatgcccacggtcccgcccgccgt

SEQ ID NO: 58046 - DNA, 374 bp, Setaria italica
  Peptide Sequence Number=SeqID_124020
tggaaaaatgaccatgtggtgggggtccttccctaagccccgcacaagcagcaagacatcttccacaacaatgctgtctggcaattgcaataccttactgccatcttcagcagctttgggcacagatgcctttggcgtaccaaccggcttacgggggagcacatccacacccaagttggtgtatggaggcgagaggtacttactcttcttccgctctctcttcctggacgttacaggcccagggctgtcactctggtcctcatcctccaccatatccaggtccttcatcactgagggggcactgcgcttcttctgcactggtgtctccagtggtctcttcaatggcatgcgctcgtcctcagcgagccaatcgt

SEQ ID NO: 58047 - DNA, 238 bp, Setaria italica
  Peptide Sequence Number=SeqID_124021
gcacatttgtttctgactttgttgtccccaatttagcctcatcaatatcttttgtggtttcttcatgcagcatattgcccaaggcctgaggtttctccagaatagatttatcattctctttgacctgctcatgccctggttttgctgccccaggaactgtagctgaaacaggacatttgaaaagtgatagcttgtttttctcatcctgaactataccccttgcgctgtttcctgcctt

SEQ ID NO: 58048 - DNA, 187 bp, Setaria italica
  Peptide Sequence Number=SeqID_124022
caacagagacagataccctccccacgaaaatagatgcatcggcacttgtcctatcagaatcaattacacattccccacctaggttttgcttcagaagggcaagaaacgtgagaatctgaccaaaaagttgtatggaacatccacaggaagaagaagaagtgattggcatcgtgattgggaagttgaa

SEQ ID NO: 58049 - DNA, 434 bp, Setaria italica
  misc_feature (241)..(241): n is a, c, g, or t
  Peptide Sequence Number=SeqID_124023
tttctttaatttttttccgtttttcggttttcttttaaatttttttctttttttgtttatttttccttaaatttttcctttcttaggtttccttcttgtctacttgtcagcaatttttccaggatctccagctacctccagggtaagggtggtatcagatatatcaacaacttttgctctgaaaatatcaaactaaaaaccatgacctcagggcgctgatgaggtttgacgtttagtttanaagcatcagctctctctcaacctgaggttctttagatagatcttcgacactgaggacgttgacaagcttattgagctgctcgatgacttggttgagcaccttgtcggtcccggagacgacaatggtgaagagggctttgtccttgttgagccccaggcgagacgaactcgatgttgtagcctctcctggcgaa

SEQ ID NO: 58050 - DNA, 343 bp, Setaria italica
  Peptide Sequence Number=SeqID_124024
ttggcagtctcagttaacaagatggttgcattacaaaggttattggagcattatggcatttgtgaggtcgccagaacaggtcgtgtggcgctggtccgcgaatccggagtggactccaagtacctccgcggcttctcgctcccgttgtagcccggcatttgtgatgatggcccagcaaagcgcgtgcctggttgctagagcagattgtgtagggaacccttgttcggttttgtgcatctgcaggacttgtttctttcatttcatttcgtcgactccttgactttctttccaccaaggagcatattattaagaaagaaagtcaaggagtcgacgaaatgaaatg

SEQ ID NO: 58051 - DNA, 209 bp, Setaria italica
  Peptide Sequence Number=SeqID_124025
tttttgttttagtttaaggttaaggttcttattttcgtcggttatttactaactagttcgttcctggtactaatgaatccattgagaagttagttcagcagctttataagcttattgatgtgcatgaggttcatgacattactcacttaccttttttctgaaaggggagctgatgcttattaaggtttctgtaaacactgctgctcgga

SEQ ID NO: 58052 - DNA, 105 bp, Setaria italica
  Peptide Sequence Number=SeqID_124026
ggaccaggacaatcattcacaaggatggagagggtgtcctcaacattgtaacaggggtctttgctcgcaggggctacaatatacagagccttgctgttggcccag

SEQ ID NO: 58053 - DNA, 226 bp, Setaria italica
  Peptide Sequence Number=SeqID_124027
tacgtacccggaagaccccctacggtagtaggtagactacaatacaatctccgcatggaactaccctttcctgctctctattgacccggtcattggagcaatcgctgctggaaatgctgttgtcctgaagccatcagaaatagcgccagcaacatcggctatgtttgcaaagctgctgcctgagtatgttgatagcacatgtattaaagttgtggagggaggtgtt

SEQ ID NO: 58054 - DNA, 355 bp, Setaria italica
  misc_feature (80)..(80): n is a, c, g, or t
  Peptide Sequence Number=SeqID_124028
tgcctttcctctctgcttatatccaaaataagatcaatccaatgatgtagattctcagatacataatctgactccaatgnttcccgatgcttcctaatgaattctctggtactgcctttagcccaaggtggcagaacaacatcaccaaccttctctcctgattgcttctcgcccagatccagattaaaccggttttccaaaaattaaggcaaataatagaactcagggatcagttctttcacatcagatgtgttgacttttagaccaagaacaaagaacaaacttaaacccaaataagtaaataactttaacaaaacaaaactaaagttaaagaaataatacgaatactagacaa

SEQ ID NO: 58055 - DNA, 161 bp, Setaria italica
  Peptide Sequence Number=SeqID_124029
tatcgtgctatctcccacaagttatagagtttatttcgagttaaagctaagtgcggggagcttccagtggtctaagctttacttgtcttacctcggatggaagtcggcgtttcccccacttgggttgacttgagaatatcacgataagttcacagtatcat

SEQ ID NO: 58056 - DNA, 176 bp, Setaria italica
  Peptide Sequence Number=SeqID_124030
acagttatccgttgttttaagatgtggctgcacagattcccaaatcttcttcttttgtatctgaacaaagcaaaatgatgcaattagctgcattgcacacaatttattccagcagtaagaatccaatttcttagggtctgtttggtagagctccatctgattctaattctctgaga

SEQ ID NO: 58057 - DNA, 390 bp, Setaria italica
  Peptide Sequence Number=SeqID_124031
tggagaccggaggcgacgccgctcgtcaacaagttcaggctcgtcgaggcgcccgcccacgaatccatatttcctaaaggtgctacatggactaggttctatggaaactacaaagacctccaccttgaccttgtgatgcctggaaaggatgttgtttttggagttgacagtgttggtactgtatcggcatctcttgtggcttatgcttccattcaagcattgaagccagaccttatcattaatgctggcactgctggtggcttcaaggtatgtactagaactttgctgatgttgccttcttatgttctggtctttatgctctgttggaaaatcgggtttcttttgttgtagacctaaaggtagtcttaagtttgttttggttagatgtct

SEQ ID NO: 58058 - DNA, 263 bp, Setaria italica
  Peptide Sequence Number=SeqID_124032
aacagcggaaagaagtttactagacaagaaacctagaattacttaccgttagaacaagacaagcactggacgtggcggtcaccaaaatgattgatttcatcagcgggaagcgcatcactgatctctgagaactccaactgcttctccatgctgtcgtggtcggcagaaaaaactgaatatgctcatgaaatccaagatccccctcttgcttttgatacacaatactaggatacaatacaaatacaataggctgtatgcatgta

SEQ ID NO: 58059 - DNA, 141 bp, Setaria italica
  Peptide Sequence Number=SeqID_124033
catgtttagcataagatggcattgttcgatcattattgggaaccagagtgttatttacatcatccattgtgatctatgcacatacaaatggatggtccagacctactgtctaatagaggtaagtattgatcataaagtatt

SEQ ID NO: 58060 - DNA, 350 bp, Setaria italica
  Peptide Sequence Number=SeqID_124034
tcctagttattactacctttgtctgttgttgtaccctatcttagaaagcagatatcaagtcactaaagttttgtctcagatttatacattactgcacgtgccagatgtgctactgctgagtcagactggaagagcaactcttaccttgcttatgcttttaatttgacggttctggaaatgtgatcacccgagattttgagtcatataccaactcagtactgcaatttgcacatttcacattgtttgttgtaccgccactagagactgacagtatagtcccaaagaaggaaagattttcagtaccacaattcggacatggacccttcaggattagaaagtcctggactatg

SEQ ID NO: 58061 - DNA, 497 bp, Setaria italica
  Peptide Sequence Number=SeqID_124035
taacgtaattacgtactaactaagtacgtacttaagtacgttaattagttaagttggtaacttagtttaaattaagttcaactgtaccatcggcagctatacctaagcttttctatacacactctacagctctcatcgcagaccatgcatgacactctgatcctgctctggatgatcggattcttttaaccaactctactagtggttgcaggctttgcagtttcttgagtggactgcggacggccacctcgttcgaaagaatagacaatgctggagctctttgttcctagcaaccaaaaataaacttgtatcgtcagcaccatcacctttcaggctttgaacaagctgcacaatatatttcacatatgccacttgaccaaattgcttgtatcacttgatccatcatcgtcgatgcgggtaatctatctgaagttctctcttttgcaagcgattttcattccccttaataggctataatgcatcgcataaacatcatt

SEQ ID NO: 58062 - DNA, 171 bp, Setaria italica
  Peptide Sequence Number=SeqID_124036
agtcactgtaccatcggcagctatacctaagcttttctatacacactctacagctctcatcgcagaccatgcatgacaatccgatcatccagagcaggattgtgatgcatgtaacttagtaataattagtactttaaatcaaagttgagacttacgatcgcacagcgctag

SEQ ID NO: 58063 - DNA, 543 bp, Setaria italica
  Peptide Sequence Number=SeqID_124037
ttgttctttgggttaccgttctttcctttcttaggttcttccttcttccgggttgtcggtcggggttcttggtccctaccttctaccggtcccccggtttccgtccttccttcgggggaagacttctgagggccgcgacggcctcctctggtggcgcgacctcgcgcgctgccacgccggtgaggtctccgtcgccgtcgcccaggccaaccaggttctcgaggatcagtgccgcctcgagtccgccccgccctcggcaccgtcgtcggcgtcttcgacggccacggcggctacgacgccgcccgcttcgcctgcgaccacctcttccccaacctccgagaggcgtcctccggcccggggggcgtgaccgcgaacgccatcagggaggcgttcctggctacggaggaaggcttcctcgcgctcgtgtcgcgcctgtgggaggcccagcccggacatcgccacggccgggacgtgctgcctcgtcggtgtcgtgcacaacaggaccctgttcgtcgccaacctcggcgactcccgggctgttct

SEQ ID NO: 58064 - DNA, 316 bp, Setaria italica
  Peptide Sequence Number=SeqID_124038
taccttacgaccgaacctactaggaacaacgacaaacggacctacttactagcccgccgtcccctgccagttctagccaaacacagctagccgtccattgcacgtactacgcttgcatagtgtattaaccactactctagctagctagtctctctgtcttactgttactaccgttatgttctgccattaacggagctcgcagtcgcagctcgcgcgtgaccggggctctattaaccgaggtcccggccggcgagctgcatcttgcatagttgcatggacatggtgccaaggtcttgagcttaaactgattgtgagc

SEQ ID NO: 58065 - DNA, 303 bp, Setaria italica
  misc_feature (36)..(36): n is a, c, g, or t
  Peptide Sequence Number=SeqID_124039
gctgaggaagcatcttccttatcaacgttccagaanacctttcttgggcgcaatctcaaacagggcacaagcatatatttaacttggcttgaacctcaagaatgctggtgagttacagtcaattctgtgaatcttatgaattctccatgtccatgatgttaaatttctagaagtctaaaatataatatttcataaactatttagagctacaaggtcaagaggcaattatcccacgatgccacagtgaatacactgtgatcatacaagagttagcaattcttctttagggcttgatgtccttta

SEQ ID NO: 58066 - DNA, 246 bp, Setaria italica
  Peptide Sequence Number=SeqID_124040
gggtcgggaggtggggacccattagcagctggcgacaatcaaagttatcggttctgctcttaatatcatggccacaccatatatctgtagaaatatatttttaatttaatgtatgcgtgtattatattgtttacagttcacaatttgatttttagtcacttctaggttacagagataagttctttgtcaaagtatatgctgcagcattctatgtggattactcacttggcattgacactgcgcagt

SEQ ID NO: 58067 - DNA, 402 bp, Setaria italica
  Peptide Sequence Number=SeqID_124041
taccgacaccactgggaggacgtgtttgttggtggccttattggatctattatggcagtgctgtgttacttgcatttctttcctcctccgtatcatgatcaaggttggggaccatatgcatacttccaaatgttggaggaacttcaagctgcccattcaagcaatgcacaaaaccaacaatctgcagctacaggtgggcaacacattgccctatccaggcaggaacatgacaggaagtcaataaacgatttggaatctggaagtgtgtagcctgcctcctgcacttaaccgaagcagcagccatgttgtacagtaagcacaactaaaccttctatgcatgtagtagatgtattggaatctcgaactagggatcttagtttttcacctcatgcatgttaaggt

SEQ ID NO: 58068 - DNA, 532 bp, Setaria italica
  Peptide Sequence Number=SeqID_124042
cactcactcataccgccacgttccaacgctacacaagaaatactgaaagaacagcgggattggatgctacaaaggactactagtaccaccacgaccaattcctccggtggcacttctagatactaaggagatcctgctgcggcggggagtcgtgtggcccttcctgctgtcgaggcggcttctccgagctcgcatcctccttcggttcaatgacgaggggggcgtcaatggacgtggacgtcgacccgggcatgtcggccaggatctgcacgacctcacgcatcgtgggccgctcgacgctctgctcggcgacgcatagcatggcgacgtagaagacgtgggtcagttcgtacaggggcaccgtcgagaggcgcgggtcggcgatcttcatcacgccctctttgctcgagccggtcaccatccgcacccactgcaacaaatagtacgaacgaccgtacgaccaaaactactaccgaaccggacttaacgaaccggtagaatagaagactacttaagttaaagaacgaacgta

SEQ ID NO: 58069 - DNA, 392 bp, Setaria italica
  Peptide Sequence Number=SeqID_124043
aagtttagtacttttacttagggaaaaaagaaacaagaaaaaaaaaaactaccctaggacaatttaagaccgagtttgcttctgaacttcatgcatcatctgtctctttctggtgcatcctcaaatgttttagaaaaactcgttgacgtgggtcctatttcttttccaggtcattgagatacccaggggcagcaaggtgaagtacgaacttgacaagaaaactggactgataaaggtaaagtaatgtggtttgccgcacgcattattgtgaacctctatttcttctcagttttaatatatcctgtttctcatttgaatgtgcaggtggaccgtgtgctgtattcatcagttgtgtaccctcacaactatggattcattcctcgcacactttg

SEQ ID NO: 58070 - DNA, 382 bp, Setaria italica
  Peptide Sequence Number=SeqID_124044
aaaacagcctggaataaaccggctgtttcctacgtgccaaggccatcggccttatgcctatgattgatcagggagaggcagatgacaagatcattgctgtgtgcgccgatgatcctgaatacaagcattacaatgacatcggtgaggtgggagctccttgatgtcattgtaatgcttgtattcaggatcatcaaggagctcccacctcaccgattggctgaaatcaggcgcttctttgaggactacaagagaatgagaacaaggaggttgccgtgaatgactttctgcctgcaagcgctgcttatgaagccattcaacactctatggatctgtatgcgacctacatcgttgaggcctgaggaggtaggctgctgctgcttgg

SEQ ID NO: 58071 - DNA, 249 bp, Setaria italica
  Peptide Sequence Number=SeqID_124045
attgttattttgttgatgaaaaactaagatactgctaccttatgaaacacaaatattgttattttgttgatgacctgtataccgctagtaatggaccctcaatcaaatcccctggggaatcagtagtagttgaagctggtaacacaagagtggcaaagtattctttcctggcctcagtgcctatatacgttgtacttcattggtatcgtgatattcaatctcagccaatgaattatatcacaacaggaa

SEQ ID NO: 58072 - DNA, 240 bp, Setaria italica
  Peptide Sequence Number=SeqID_124046
cttcctcttagatcgaatgctttctttaactgggacctacagacaagaagaatgagaacaaggaggttgccgtgaatgactttctgcctgcaagcgctgcttatgaagccattcaacactctatggatctgtatgcgacctacatcgttgagggcctgaggaggtaggctgctgctgcttggtgcaccggtggcttgcttgaaggatgtctttcaccgggtgggagctggaggatgttga

SEQ ID NO: 58073 - DNA, 246 bp, Setaria italica
  Peptide Sequence Number=SeqID_124047
gtttctggaggccaccgtgcagcgtcccctcgcctccaatggcgttcaaggcgaaagggttcttcaagggcatcaaggtcatctcccggatgtttgcggcgaaggagcacgagatggagatcggttatccgacggacgtgaagcacgtcgcgcacatcggctgggatagcgcggcgggcaatgcatctccgagctggatgaacaacatcatggctgcccccgacatctcgtcgctgggcaacttcg

SEQ ID NO: 58074 - DNA, 455 bp, Setaria italica
  misc_feature (1)..(1): n is a, c, g, or t
  misc_feature (11)..(11): n is a, c, g, or t
  misc_feature (95)..(95): n is a, c, g, or t
  Peptide Sequence Number=SeqID_124048
natgaagaagnaactgatgattttgatgtccatgatgatgagtggagtgggtcagaccattctcgaggaacctattgaagaagtaaatgaaaggntaaaacgtcttgagttttagattgggggaggcattctagtctacttgtattcaaggagaaggcttcaagaatacatgaactcgaagcaacctcaattgagaataccaacctgctattgttgcaatctgaactagatcaactgtaccaggagaagatggacgcagagattcggtgcaccatccagacaagagcttatcaagcctcagtaacttttgcccgaggatcaaatggctctatacgaagcgcaaaagtctctatctgaagactacaagcagctacgcacttaaactccgacacaccgaaactagtagtctaacggttgtttagtaggtagtattggtctagtagtaagtcttacta

SEQ ID NO: 58075 - DNA, 241 bp, Setaria italica
  Peptide Sequence Number=SeqID_124049
tatacgaagcgcaaaagtactctatctgaagactacaagcagctcgcacttaaactccgacacaccgaaaacagagcaacggtgttagaggagatggcagagaagctacaggtgcagtgcaaagagctgtccaattgttctgaagtcctgcagctgcaatctacggccagtagggtttcgctgttttgtttcgttcagtttatactgctgtgtattgctataggaacatatcttatgcggc

SEQ ID NO: 58076 - DNA, 242 bp, Setaria italica
  Peptide Sequence Number=SeqID_124050
aaaagagtaaatagtccctgtgacaacttgtgcattttctcttgggttctcgcttaagatagaccttctaagtccagttttaattattgaggtggcacaaacatcatgtagcgcaaacattggtatctccatttccacttcttttaacatctccatcctccaaaactgcccttgcctttttaattgagctctgtttaacagcaacagaccttcctagtcctgtttggaaaattgggagctgg

SEQ ID NO: 58077 - DNA, 274 bp, Setaria italica
  Peptide Sequence Number=SeqID_124051
aattgagctcttacttactgtaactgacctccctgacccagtctgaaacaagggcaagtggccatcatccttgtaacatttttcttgcactgaagtattttcctttggtgtaacagttctgtcgttcataatcaaactgctactcactaatacagacgttggggtttcaaattggaaagatgtagcgcaaacattggtatctccatttccacttcttttaacatctccatcctccaaaactgcccttgtcctttttaattgagctcttgtttaa

SEQ ID NO: 58078 - DNA, 243 bp, Setaria italica
  misc_feature (179)..(179): n is a, c, g, or t
  misc_feature (190)..(190): n is a, c, g, or t
  Peptide Sequence Number=SeqID_124052
ttgtagatgacctcctcagtttccttgtccaggtcagggtgcgtgagagcgacgtagtcgttgcaggcgatgcagtttcccagggcggaaaggcgctcgtcgacgcacttgacgaccacctcatcaggcaggctgttcctcaggtgctggatctcttgatcggtggcggtatggggaanaagcagccctntcttgttaccgacgcagagcctgccgacgatcctggtgccggcgatggaggat

SEQ ID NO: 58079 - DNA, 252 bp, Setaria italica
  Peptide Sequence Number=SeqID_124053
tagggaaaagtttaccccaagtgaaacagagaggggcgttgccttgtccaggtcagggtgcgtgagagcgacgtagtcgttgcaggcgatgcagtttcccagggcggaaaggcgctcgtcgacgcacttgacgaccacctcatcaggcaggctgttcctcaggtgctggatctctgcgaacacgagaaaacagatgtcggcatgtcaacccatggtcccagtggatactggatagtggaagaggaagctgac

SEQ ID NO: 58080 - DNA, 346 bp, Setaria italica
  Peptide Sequence Number=SeqID_124054
agttagtacttaaaactttgtctcattatatcactgcttttgtaatgcatattttgaatgcttcagaaacaattacataacatgcatttgccatactgattgatgttctcaattctcatcccatgctctcatcaggttggtgatcttctaaacctcatgagctccttttctttgcaattcatatgctcagaactgagcatatttccagaaatatgaagaaagagaatttcttaactcttgttggatgtgaggtgttcgttgtagctataatatcagcagccacatacattttgaaatgcttcatctggaacgtgcaacactggaatttcaaatcatggccaccaac

SEQ ID NO: 58081 - DNA, 254 bp, Setaria italica
  Peptide Sequence Number=SeqID_124055
ttaactttaccttttaacttaaaattagtactaaggtactaaccttagtaagtacttagtttaacgaacagctccagctctttctattccgaaggctatatcaagtgcgggtcttcaaacttcacaaatagattattatgaaataaacgaggccttcgctgttgttgcattggctaatcagaggcttcttggtatcccttctgaaaagctaaacttaagtggtggtgctgtttcgctgggccatcctattggtt

SEQ ID NO: 58082 - DNA, 411 bp, Setaria italica
  Peptide Sequence Number=SeqID_124056
tgattctttaaaggcctaattagaaaacaaggaaaaacgtttgtgtgcagaatgtgaggtagcaaattattaactagccatatgttgcacccagataagtttgaagtttttgttcaaggaacaagtccaatttaccccactgaattatccatggagcctgtgcagtaaatatttcaagtcacattattagcacactcaactgaaggtttgagttcttttctttgtggtgccgtttaacttaaatgcaaatacataacctagcataaaagttcaagatgctgacctgcatacgtgtccttgctaactcaataggggaacaagttatacatgccagcgatcgtgcaatagagccagaaataagaggagcatacggtcttagttttgggcaattatgatccgagtattcttcaa

SEQ ID NO: 58083 - DNA, 253 bp, Setaria italica
  Peptide Sequence Number=SeqID_124057
gaaggggacatctcgtgctagttgtgctcctagaccagtccataggaggtggtatccccgaaagttctcagggctactgatgctttgtctcgatgagagcacaccaagcaaagtcttccacattccagggggtttccctccaacatttgattctttaaaggcctgcatacgtgtccttgctaactcaataggggaacaagttatacatgccagcgatcgtgcaatgagccagaaataagaggagcatacggtt

SEQ ID NO: 58084 - DNA, 469 bp, Setaria italica
  Peptide Sequence Number=SeqID_124058
ccagtaattcccaccaaaaaggcagtgctggtagtggatgagccaatcaggggcaacaaaagaactagcgaatcagtctctctctcaggaggttcaccattcagataagtcatagcagctccggttaaaccaatagaaattattgctccaaaaaggccaactccagcccacaaaagccatccattcttcagcttgaatggttctttaatatcataacgaaatacatcatctgggaatggtcgaaaaagtattggtgatgccaaatataacgccaagcacaactactgtcacgctactgcacagaacagtacaaaacgaaaatgttaatcttttggcaatttgtgttgctcatttattggtggaacgtaatcagcttataagcaaagggaattgaaaggtcttgtgcacataagaatagaaaatcatatcctacagttgcccaagaacaatattctgccttctcatctat

SEQ ID NO: 58085 - DNA, 235 bp, Setaria italica
  Peptide Sequence Number=SeqID_124059
caatagaaattattgctccaaaaaggccaactccagcccacaaaagccatccattcttcagcttgaatggttctttaatatcttaccccacagcctaccatgctgagcacaacagtttgccactcccatggcacatcccaccgctgaaggattcgccagttgtctgaactcttatccgaaggagggggcgtttcgttgttggcattatacgagaaacacgggaagcctccgcccc

SEQ ID NO: 58086 - DNA, 248 bp, Setaria italica
  Peptide Sequence Number=SeqID_124060
gtcatagcagctccggttaaaccaatagaaattattgctccaaaaaggccaactccagccacaaaagccatccattcttcagcttgaatggttctttaatatcataacgaaatacatcatctgggaatggtcgaaaagtattggtgatgccaaatataacgccaagcacaactactgtcacggctacttaccccacagcctaccatgctgagcacaacagtttgccactcccatggcacatcccaccg

SEQ ID NO: 58087 - DNA, 366 bp, Setaria italica
  Peptide Sequence Number=SeqID_124061
ttcccttagttcttattctaagtattctattctgtgttgagcctgcagagtctccagttgtttcaggtggcgaaccaggaaaacataaaatccagggaataggcccgggatttatacctgaagtactggacacctcagttatcgatgagtctgtcacagtgaccactgaggaggcaatgttgaccgcaaggagactggccaaggaagagggccttcttgtgggtatatcttctggagcaaacatggcagcatgcttgaaggtcgcgtcgagagaagaaaacaaggggaagatgattgcacatgttccaaggcggggcgagagatacatgaactccgactattgcagctgtgagagaggagtgtatt

SEQ ID NO: 58088 - DNA, 186 bp, Setaria italica
  Peptide Sequence Number=SeqID_124062
ccggcccggtgctcacgcgcccacacacggccgctggctggccgaacaccctggaggagcaggccgtggccttccagcgaccagaaggccggacgggcgccgccttggacgctgcaggggcacggacggccgggatctgagcagggacggcagggaggcggcggaccggtgggggatggacggggg

SEQ ID NO: 58089 - DNA, 362 bp, Setaria italica
  misc_feature (160)..(160): n is a, c, g, or t
  misc_feature (249)..(249): n is a, c, g, or t
  misc_feature (251)..(362): n is a, c, g, or t
  Peptide Sequence Number=SeqID_124063
actcagtgacgtatgttgaaagttagccaaatcgtatactgacgtgctcctccttgtgttatttttgtcttgtgcacttggtgaaaaatctcttctttcccaagcacatgataatataactggagttgaagtttgcatcagtatgtgatgataaaaaacngggattggtaacttactgaccagtatcacatcaatacatgtaaaatattcatcacataataaaacacaaataaaacacaattttaaatntnnnnnnnnnnnnnnnnnnnnnnnnnnnnnnnnnnnnnnnnnnnnnnnnnnnnnnnnnnnnnnnnnnnnnnnnnnnnnnnnnnnnnnnnnnnnnnnnnnnnnnnnnnnnnnnn

SEQ ID NO: 58090 - DNA, 341 bp, Setaria italica
  Peptide Sequence Number=SeqID_124064
cgtactcatgtcttccggggtgtagggcacgacaatatgcacctctatggtcgtgccctacacccctctgaagagtgtagggcacgaccatagaggtgcatattgtcgacatattatagccctaccagttgcaatcttgcttcaggaagttgctcaaaggaagctaataagttatccgtaacatctggatcaaaatagcagtacagctggatggagctgcctttggggtttgcagatcctacacaacgcgtactgtaaatccgcggcacacgcagggtagagtatattagccaacttactccactaccaaaagaaccacctctcccgctgggaagaggtgg

SEQ ID NO: 58091 - DNA, 203 bp, Setaria italica
  Peptide Sequence Number=SeqID_124065
gtccggataaaagaaccaagcaccccggaagacatgagtacggtacactcttcagaggggtgtagggcacgaccatagaggtgcatattgtcgacatattatagccctaccagttgcaatcttgcttcaggaagttgctcaaaggaagctaataagttatccgtaacatctggatcaaaatagcagtacagctggatggagct

SEQ ID NO: 58092 - DNA, 253 bp, Setaria italica
  misc_feature (44)..(44): n is a, c, g, or t
  Peptide Sequence Number=SeqID_124066
cgaccacaagtacctatcatcaactcgatgagacctctagttanagaaagattatgctcaatgcttttctactgactcatggcaagggtagaatggtgaagactgaagaagaactagccgccggccggtcgccggagcaggtggcggcgggtgctactcgtcggggaccttgtaggcgtcggcggtgatctcggtcagccacagccccgggaacagcgaatcgagctgccgctgcacgacgcgcggccgcttc

SEQ ID NO: 58093 - DNA, 194 bp, Setaria italica
  Peptide Sequence Number=SeqID_124067
ttgccgagaagaacctgaaataatcaacttagcacagagtgaattccatcaaactgtcaatcctccagttgaatcttgttagtgcattgtcagcatttaggtacctgcaggtgaggtaggtctctgaaggcaggtaaggatggaagcctgagcttgtccattcaccagcctccttggtcgtattcttgtaggta

SEQ ID NO: 58094 - DNA, 250 bp, Setaria italica
  Peptide Sequence Number=SeqID_124068
cctcctgaattgaactttttcaacagctccaggagaacgtcgaggaggttcttgcattgcaattgctgaatagtttgcaggccttccaccattatttcccctcttgtttccaaggcttgcatcactgttatgtctcaagtttccatcttcatccatttcatcaaagaactcagagagttgaatagaagttggctgggttgcaaagagaaggctccaggagcggtaccaggaagctgagaatgccaaaagg

SEQ ID NO: 58095 - DNA, 168 bp, Setaria italica
  Peptide Sequence Number=SeqID_124069
gccggttctggcctcctgaattgaactttttcaacagctccaggagaacgtcgaggaggttcttgcattgcaattgctgaatagtttgcaggccttccaccattatttcccctcttagtttaccaaaggacttagacaatacaactagttaatagtactacaaaagaa

SEQ ID NO: 58096 - DNA, 373 bp, Setaria italica
  Peptide Sequence Number=SeqID_124070
cggtgacgcggtcgtggctgctgctggcgtgggtgagcacggtggcgggcaacctgtcgctgctggggtcggcggcgaacctgatcgtgtgcgagcaggcgcgccgcgcgccgcgcaacgcccacgacctcaccttctggagccacgtcgtgttcggcgtcccctccacgctcgtcgtcaccgccatcggcatacccctcatcggcaagatctccgtctagctgctaattaatagcttcactgctactgtagttaattagcacgtacagaggatccatggacgcatgcagcttcaacaatgtcgtgccatggcgaccggtcaacgagcgagcaagcttaaggtctaaaaaattcttaagttccctttgttctt

SEQ ID NO: 58097 - DNA, 487 bp, Setaria italica
  Peptide Sequence Number=SeqID_124071
taacaaactgattgatgttatgttctatggggtgtatatggcaaaaaatcgaaaggaaaagatcatcatgcaaatgctacactgatatatctgactctgagaccgaggacgggtcctcttcaggttactagttctggaagtaggaatgctagtggttcttagtttgtgttgttgatgtgtgaccatctagctaaatatgttcggtctttgttttgtgctcatgagtggttgttactaagggggtgcttggatccctagccggaccttgctttgcctagataggcaagaaaacttgcatttggtttctgagcaagctcttcttgaggtctgcaatggcaagctttttgcttgcttatgagggagagggatttttggctagcctgggctggcaaggcgagccttgctcgcgctggcgaggcgaggctaggctggccaaggtaccaagcgcaccctaatactcgtatagttgactggtaacccaaggatg

SEQ ID NO: 58098 - DNA, 261 bp, Setaria italica
  Peptide Sequence Number=SeqID_124072
tgaaaacgaggagcaacacgggatcagtaattttgtattgtgctcaaaagaggcaataatgcttgaagacaagtcgatggtaagaaagaaatttacctgcggaaggactatggcgatgttgaggacaccaatggtgagaccttggcctccaccctcctcggaggcaacctcagacgcaacggcccacgggacactgaaaagcacctgcaagcacacaaaacgattcgaccagaactatagtaagcacgcagcacgaacgaa

SEQ ID NO: 58099 - DNA, 274 bp, Setaria italica
  Peptide Sequence Number=SeqID_124073
gcgccgttcttctcgtaggcttgcgtgatctcgacctcttagtacaactaaccgggttgaagtggttcctgagtccctggtgggcgacgccttcttgacctcgacgacgagcgcggggagccctccgttgcggcggccgaggcaatgtccctgggaagcggcgcacgctgcgcggactcagccaccctgtggagcggcgcccgggccttccgctgcgagacctcgacctccttatcccagacgacctgctcgaggacgtcccacgggacggcca

SEQ ID NO: 58100 - DNA, 168 bp, Setaria italica
  Peptide Sequence Number=SeqID_124074
cgccgttcttctcgtaggcttgcgcgatctcgaccgggttgaagtggtccctgaggagtcccctggtgggcgacgccttcttgacctcggcgacgagcgcggggagccctccgttgcggcggcgcgcggcgccgagggccgcggcgaagtccctgggcggtggcgcgc

SEQ ID NO: 58101 - DNA, 267 bp, Setaria italica
  Peptide Sequence Number=SeqID_124075
ccgaaagcgaagaggaagcaggggatcgaaaccctaggcgcggtcggcggcgcgccggagtccgtacaccgggagagtgataagcctcacgtccatgagcgagatccggtaagagggcaccctctacaccatcaacaccgtggaacccagctccagcatcgggctcagaaacggtaggatgcctgcgtccctcgccctccctctattctcttcctagatggctcggggtactctgttggggcagccggagaggcctgggacgatgcg

SEQ ID NO: 58102 - DNA, 241 bp, Setaria italica
  Peptide Sequence Number=SeqID_124076
gggaaaaaaaccaagcgaagaggaagcaggggatcgaaaccctaggcgcggtcggcggcgcgccggagtccgtacaccgggagagtgataagcctcacgtccatgagcgagatccggtaagagggcaccctctacaccatcaacaccgtggaacccagctccagcatcgggctcagaaacgttcgttcatttggaactgaagatcgtaagaaggatggccagcagattcctgccagcaaca

SEQ ID NO: 58103 - DNA, 478 bp, Setaria italica
  Peptide Sequence Number=SeqID_124077
tatattcatttagttaacaaaacaaaatgaggtaaatgatgcaatagaaaggagttgggcaatgaaaaatttcagccatggcaattgccctattaacatatttgtctggcagaagccttggatatccatgtcggaagcaaacagggagtattattcagtgcatcgtaagatgtctcttttgctttgccacagtcaacaacaaaaactacatcgttgatagtaatactagtttcagccaaattggtggcaagaactattttccttactccaggctcaggcttatcaaatattaatttctgctctgaactggccatagagccatgacaagcgagcagcaaaaactttgcttggatctccaagtaatggatttgcttgcagctgctcttttagtgcattaatgtcatcccacccagtcataaatacaagaacagcaccagatcgttccttttgacaaatatggcataagacattttctatt

SEQ ID NO: 58104 - DNA, 254 bp, Setaria italica
  Peptide Sequence Number=SeqID_124078
tcttggcgttctcaaccaaccaaattagaccaacctaccgaccgttacatggaggatgatgagagcatcgtctttgctttctttgatctttgctcctgtcggccgtaaacaaaccggccgctgcatgggtcctcactgaccagcaaacggatggctgatagcaattcttcactcgtttggatgtccatccttgggttttggagcttgcaatggattaaattctcgagctcattctttagactcaaataagttga

SEQ ID NO: 58105 - DNA, 389 bp, Setaria italica
  misc_feature (148)..(148): n is a, c, g, or t
  Peptide Sequence Number=SeqID_124079
cctgagcagcagcactccttgggcagcttcatcccctgcacaggacgtccctggacagccttgtagcatgccaggctgcagagtggaacccttgtcttggagtcacggtacttgtacgggtttgtgcaatttgggcctgcacacttcncccttggaggtggataactgacaggcttggagttaaatatgcttggaagccccatactctcagggaatgtgatgacagttccagttgggcccatgacagtctggatgcagtttttcctgtattcttccaatcttgcttgtttttcctggacaagagggaatgcaaaagatgaattcattgcagcaaataggcaaatgcagctactgaaatacttcaggcatttataccttctcctcccgtt

SEQ ID NO: 58106 - DNA, 261 bp, Setaria italica
  Peptide Sequence Number=SeqID_124080
cctgcatccgccgccttcagctgccccgggatccgacccctacctcccttccttgccgcagcgacggtcccgtcccccgacgacgacggcgaagtcgacgatgcggccgcggccctgcagccgccgcgccagatccatcgccgttcgtattgtcgcgccgccgcggagctaagatccaggctggacgctggagtgtggagatgagggatggcgctggagttttgggaggacgcgccgtcgcgccctgacgttggtaagagg

SEQ ID NO: 58107 - DNA, 235 bp, Setaria italica
  Peptide Sequence Number=SeqID_124081
acgaacaataaacaaataggggacctagacaagaactccttgaatttcgggtaatagaccgtgtctttacaataacaagaagcacattgttagagctagcgcccactgtgctcggttttggttgatgacttgatgtatgcttgaagaggtgttgcctgtaattttgatattagatcagtgtaggattacagcgtggagacacgggcttagattgatggatgtaaacacgcagggt

SEQ ID NO: 58108 - DNA, 319 bp, Setaria italica
  Peptide Sequence Number=SeqID_124082
atccatttgaagatcccgaggatccaaagaacttccgcaaaacgatcagcaggattcttggcgtgcaatactccatcccggattatgtgagagtgtcttcagactgcagacgccttttgtctcaaattttcgtctccgatccttcaaagaggatcacgatcccggagataaagcagcacccttggttcctgaagaacctgccgagggagatctcggagagggagaaggccaactacaaggacaaggaggccgtccgtagtccggtcgtctaggttccgtttggttacgttagtttattttctttattttgtttcgtttt

SEQ ID NO: 58109 - DNA, 145 bp, Setaria italica
  Peptide Sequence Number=SeqID_124083
aagttgtgtctgtacgacacgcacgcaaattctttgcttcagaaatgagccatgtgcagacgaatagatcttcatctagctgtactctgtagcatgctcatttctgaagcaaagaagttgtgtctgcaatgcacacacttgaact

SEQ ID NO: 58110 - DNA, 257 bp, Setaria italica
  Peptide Sequence Number=SeqID_124084
attgtgagacttgagccagttgctggaggcaggaaagaacctggaaggtagtagagctgtattctaatttttttgaatcctgtgggttcaagtgcccaaggagaaaaggagcagcagacttcctccaagaggtcttgtccaaaaaggaccaagaacaattttggagctttggagatgaaacatacaactttgttaccgtggatcaattttgtgagaggttcaaagcatgtcatgttggtcagaatcttgccgtggag

SEQ ID NO: 58111 - DNA, 247 bp, Setaria italica
  Peptide Sequence Number=SeqID_124085
cctgtgacgcaacttagctgcattagatgcacactaattcattggttttcagtatgtgtttcttttgttgaaatcatgcagttagatttgagtggggtacatctgtacatttaaatcaaataacgttattccaattgaaatggagttctattattgcctctgcagctaactatatctctttacaggttaaggattctgtgtatgctgacgagaatttctcagttagcgtcaacagatcggcttacga

SEQ ID NO: 58112 - DNA, 341 bp, Setaria italica
  misc_feature (21)..(21): n is a, c, g, or t
  misc_feature (53)..(53): n is a, c, g, or t
  Peptide Sequence Number=SeqID_124086
cgttgataggctattctcaancttggctttggtgaagtgatttaggtattccnggaaatctacgacgtgccacatcacaatcaattgatattacttcaccctatctcttccttgtctagagcatgggtggctggtgagatcctttgcacttggacatgaaagggggaagtgcactgaaaacattcttgccttctctggttcagtacatgaaagaggaatcacgtcttgaggttggcattgtgccgttgttgcttgacacgctgttaggtggcgcccttattgtctattgttagttagtttggtttccgtttgggttttactttgtttttaatttgttcttt

SEQ ID NO: 58113 - DNA, 145 bp, Setaria italica
  Peptide Sequence Number=SeqID_124087
gcacacaattcagacagtggggatcaatgcggtgtgtggagcgcaggcagtgagggttgatgtcgggctgtccagggggtgagggttgatgtcgggctgtccagggggtgtgggaatgggctgccggaagtgcttgacatctgca

SEQ ID NO: 58114 - DNA, 150 bp, Setaria italica
  Peptide Sequence Number=SeqID_124088
accgtgctctccctcatcatcctgctcctctccaacctcgcctccaacgtgccaactggtgaattaattaataagctccaactttttaattatattattacacactgtctgccatatcggaaattaaatgatgtctgtcgtttgtccaag

SEQ ID NO: 58115 - DNA, 375 bp, Setaria italica
  Peptide Sequence Number=SeqID_124089
tcggtaccctaaggtaccttgttggtcccggtcgttgttcctaacttacgttctttgtctaagttgtcttcttcacacacccacggcgatccggctctgctcatgtatttccttgattccggcggtgggtcgtacaccgaggtcatatcgagtgctcaggtcaagtggtttcagagccagtctcagttcttgaatccaaatggaaggatccctgagctcatctttttggcacataccgagcacagcgtatgttaaggtagctccagaggctaaaactgaaataagaaagccctgcgtcggctctatcaacaaggaggatgtagcgccacaagcagctgaatggggcatgatggatgctcttgccaagaggccatc

SEQ ID NO: 58116 - DNA, 337 bp, Setaria italica
  Peptide Sequence Number=SeqID_124090
tagtctattggtcgttctttctaggtattgtctagtcttgtcgagggactccgcggatcgacctgatgacaacagaaatcggcaacaacagactgtcctactcatcaaacggacccaaggacctgtggcccggcgtgtccaactacgtcttgcaagtgctctcacacacccacggcgatccggctctgctcatgtatttccttgattccggcggtgggtcgtacaccgaggtcatatcgagtgctcaggtcaagtggtttcagagccagtctcagttcttgaatccaaatggaaggatccctgagctcatcttttggcacataccgagcacagcgta

SEQ ID NO: 58117 - DNA, 403 bp, Setaria italica
  Peptide Sequence Number=SeqID_124091
ttggacggagccggccgcgcgcccgggccttataagctctctctccgccccctggctctcctcactttgactggaaagaaacacgggtcggatcgatcgagctacaggaaactgaacgctcgcactttgccttgccgaggagaaggaaggagcttattggatcgatcgaattcgtcgtcggcctcgatcgatcggcagcttgcattggtcgatcgatgggcgtcgcgttcgggtgcttcggactcggaggagggtgcgtgccgcgcgacggagatcacggccagcaagatacctcaagtttctagctacctgactgtatgcagtaggaactacgatggatgggtctgagtctagtagaggtcgcagcaagcaggaagttgaggaaaatgttaatacaaggagc

SEQ ID NO: 58118 - DNA, 259 bp, Setaria italica
  Peptide Sequence Number=SeqID_124092
ccgtcggcggcggcgactgacccccgtagcaaggcgccaccgccacgcttcgcccctgtcgcgccgcgcggccactttctgcggctgctctaccccaggcgaaacctcccatctcgtcacgatacctcaagtttctagctacctgactgtatgcagtaggaactacgatggatgggtctgagtctagtagaggtcgcagcaagcaggaagttgaggaaaatgttaatacaaggagcagttggaaggaggaacatgaaaa

SEQ ID NO: 58119 - DNA, 227 bp, Setaria italica
  Peptide Sequence Number=SeqID_124093
tcatgtccctcagcacctgctgccaggaatctcgggctgagatcctgttccaccagttttgcacattcttccttgagtcatacaggtaggcaaatctctcggatgtaatgacatggtgggtaccaggcagatgaacaaggtcggcaagagtgaacttgttcccagcaagtgggaaggcgatatggcagaacaatgcccggcttggagggtcgaaggcatgctcctca

SEQ ID NO: 58120 - DNA, 231 bp, Setaria italica
  Peptide Sequence Number=SeqID_124094
acatgccttttatcattttaatatattttctttaacaatggtttttataaaaaatccaggtattttccgagcaaatacaggcgggaaataaagcggctgaacggggagctggagcagctgctcaaggagtccatccagcgcagccgcgagatcgccgacgagggccggacgccgtcgtcggcgtgcggcatggggctcctcgggatgctgctggccgagatggagaagaag

SEQ ID NO: 58121 - DNA, 459 bp, Setaria italica
  misc_feature (459)..(459): n is a, c, g, or t
  Peptide Sequence Number=SeqID_124095
ttagtacggtccgttggtccttccttacttcgtcctttcttcttttcgtacgtccgtacgtcccccggtaagtctattaacttgttcttatttctttgcgcaagaagacgaagagcttatcttgaaggctactaaggaaaacttgctcaaacctgtgacaacagctttcgacaaaggtcatgatcaggagttcaagcaaccaagtggaacaggaatcgacatctctcagtttgaagaatctgagctaactaaggttggtgaaggtggtatattcccagttgcattcaaagtggatgtggctgtgtcaaacaaccaagaattagaagggtacatgaggatgaggcatcaaagtgtctggttaaatttgctatacttgcaaagaaagacaatgcagaatatggtgttcgtattgtgcagcagatgttgtgggtaaatgggtacgcgatatgtcttgcaggn

SEQ ID NO: 58122 - DNA, 153 bp, Setaria italica
  Peptide Sequence Number=SeqID_124096
caatgccacctattattcgtattgatttataattatctgtagaactttcatgccatctttaattacgagactgattcttgattattcatcctttgaacagcataactgtctatttctttgcgcaagaagacgaagagcttatcttgaaggcta

SEQ ID NO: 58123 - DNA, 342 bp, Setaria italica
  Peptide Sequence Number=SeqID_124097
acaaagaagtaaagaccaagacctaggaacggaatagttaatagaatcctcgccaaaagagttcaagccgcctccttccaagagcaaaaatgctcaaatgatcctatacatgtcctcaggcttttttgttgaaccatcagttggttcttcagctataattatatctgtgtcaatatttgcatggatgacgtgaccatccgtgctacgacgcactgttccttttatgcccatcaagcaatgctcctttgaatgctgcaacaatgtatgtgagtcatgccgcagacttggtgttgcattttttcttgttcgttttcacccaacaaacatcctcacacctacgaa

SEQ ID NO: 58124 - DNA, 405 bp, Setaria italica
  Peptide Sequence Number=SeqID_124098
ttactgttccatgtcatcactgcattgggtgtctcaagctttttgtagctcttacatggcaatgaattaactacagattcaggagcctgaacagagaccatggaaagtgaaagtgatgcaggttgacggtgaatttcatccaacacctgaaaagaattgcgcaggccatcttaacatactagagtggtaatgtgctgaaaatgcaatgatagcaatggagttcacagttcacacattgccaacaatctgctttgaatttaactaacccatgtacaactttacttttaagaacattctatatttgctgtacaacttcagacatgcctgaaagctgttagttagaatacaattgtaaatgagataacattgtaaacacaacagacaatgacaagactttggactaca

SEQ ID NO: 58125 - DNA, 169 bp, Setaria italica
  Peptide Sequence Number=SeqID_124099
gcaaatgtttaacacaggagataacaccacagctgactattacatcgctgctcaagctcatacgtttgacagacgcgcagcacactgaactggttacagttccgagtctagtgtcgtttacagtttccagtccagtgtgctgcgcgtctgtcaagctcatacgtttgac

SEQ ID NO: 58126 - DNA, 287 bp, Setaria italica
  Peptide Sequence Number=SeqID_124100
gaatagttcaacactttcacatattgctccccaagataaacctgtggtgttggagatggaggggcagcatccataggagaaagtgctgcagctttgttggccaatttgtacagtgctgctgaaccatcttgttgatgtttcgagctcatggaagtcagaagatcaagaagcaagtcgagaccattattatcaatgaaaattgtgctttgatcttcaggggcacaaaactgtgcagagacgtgttgctctggctctggcgcacctttgtgcccctgaagatcaaagca

SEQ ID NO: 58127 - DNA, 294 bp, Setaria italica
  Peptide Sequence Number=SeqID_124101
tccttaatttttgtttactagttgtcttgtcttgtaacctattctttgtttgtattgttttcgagtcttcatggaagtcagaagatcaagaagcaagtcgagaccattattatcaatgaaaattgtgctttgatcttcagggggcacaaaggtgcgccagagccagagcaacacgtctctgcacagttttctctcctactcgcatcatgtaaagcaagtgtttcagcactcgcccatttatcttctcctctaacctcttccaatgttttttgccacacagtcctttgttgcctg

SEQ ID NO: 58128 - DNA, 251 bp, Setaria italica
  Peptide Sequence Number=SeqID_124102
cagctgctctcttgatgacactgttaactaccctcgagtttgtagtatttttctgccttctcaagaggttcacaagcggaggtagggcaccagcatcaacaataagttgttgatgttcaggctttacagctaggagacccagagcgaaggcagcctcctcgtttttggcgagctcggcgaggacgtgggtggcgcgcttggcggcgacgcggtcggcgtggcgccatgaggaggcgcagcggaggaggacg

SEQ ID NO: 58129 - DNA, 150 bp, Setaria italica
  Peptide Sequence Number=SeqID_124103
gaaattgatttccattaattacttaatttacaagtacaaatacatctgggtacagaattacaagttataatctgaattaataaacaatttactacttactgatgaactaatcacactatcttattacatctcaaaattccacctttccag

SEQ ID NO: 58130 - DNA, 323 bp, Setaria italica
  Peptide Sequence Number=SeqID_124104
atgagatctcgcttccgaattgaagagtgaactcttgacatgttcaataatcttctctggagaaaaatagcaaacaaagaagttagcacaaatgaagattagaaagagccagtttttttaaggaaaaaaagacaaacataaagagaggttgaattcacctttatggggactgatttgaatcaatcgatccaaaaccctccagtggccacacccgacaaaagatcttccctgtaatgagaccataaggcacagctccaaaatgccttgaatctctagaagcataaacattatctccctgcacccaaacatgaccttgtggtacc

SEQ ID NO: 58131 - DNA, 238 bp, Setaria italica
  Peptide Sequence Number=SeqID_124105
aaacttaagaaagaactaattagaacttaacgcagactgtggagcgtgtgtgcagtgaaactgtttgtggatacatggcttgttcactgcacacacgctccacagtctgcgtaagtcaatagctcaaggaaatgcttcctcaggtgttcacctagcggatacagtgttcaagaatcttggtcgggtatcattcgtccgtacgacaataacaattatcgtgtttgtcgcagatgcaggt

SEQ ID NO: 58132 - DNA, 271 bp, Setaria italica
  Peptide Sequence Number=SeqID_124106
ggttgcggaagcaaagcggcaagcacttggaagattcaggatcatgctgacaaattctttcacagtaatttgttttactccaacatgattaaaggaacctcttatgagaacacatggagtactagttattattgtcaatttttgcaactactccgaaaatttcatccctacgagaaacagaagaaaaaaagagctgaaagggatggatcagtgaatcaaaccggggttcctgaccgtcgtcttcacggcataccctttctccaacagcatt

SEQ ID NO: 58133 - DNA, 313 bp, Setaria italica
  Peptide Sequence Number=SeqID_124107
atgagaaaatgatggagaagttaagcaaagtatctttatggcgtctggctgctcgaaccatcatatcagacaagggcctaattttccaaaagttcgggtcctgccttagaagggtacggacttcttccttttcaggatatggtatgccacagtaccgaggatcagcaagaaggctgacaaagaaatgtaatcatcagatgttctcttttccttcctgctctcctatcagggaataagcaatctgtgtatccatcacattatgcaatttgatgccaaactgaaaatacaaagcctcactgtctctttacaatca

SEQ ID NO: 58134 - DNA, 269 bp, Setaria italica
  Peptide Sequence Number=SeqID_124108
gctcgatcaagcaggggtggtatccatggcgtcgtcgatgtcgtcggtggtggggaaggcgacggcggtggagaggttggtgttcgcgttgaacgggcggcggtacgaggtggccgccgccgacgtggatccgtcgacgaggctgctggagttcatccgcacgaggacgccattcaagggcaccaagctcggctgcggcgaaggtggttgtggggcttgtgtcgtacttatagcaaagtataaccccaagacaaatgaagtgactgtaa

SEQ ID NO: 58135 - DNA, 318 bp, Setaria italica
  Peptide Sequence Number=SeqID_124109
gggttcagcggagacaccagagtggtagtgaacagaaggtggttcatggggatagtcaggaggaaagaaaataatcaagaaaaaaaagattatcatgataaggtgttccagctgccccaacaatgcaagccctcagaagatccatcctttcctcaaaaaactcttgcatgaataccatctggtaaatcattttgcaggatcgtccattcttgttggaccttcttcacccaacctcttgtaacattttcatggccactttccttcacaaagtggtgactgactgttcagatcatcactttgtgaaggaaagtggccatg

SEQ ID NO: 58136 - DNA, 200 bp, Setaria italica
  Peptide Sequence Number=SeqID_124110
gagggttggacaatcctcacacgttgaccgggatagtaaaaataaggtgcatcttcaaaaagaataggaggaatgggcttcagtgcctcagaatcccttaccagcatttcacacttcgccccatcatggatttgcatgacagcaggaaagcattctcattgtaagtgatggagttcttctctccatcagccttccccaaa

SEQ ID NO: 58137 - DNA, 233 bp, Setaria italica
  misc_feature (3)..(3): n is a, c, g, or t
  misc_feature (72)..(72): n is a, c, g, or t
  Peptide Sequence Number=SeqID_124111
tgnaccagcccaacatctacatgagagacaacaccatcatctctattggccctccatgatccacacaaccangttgctgactcgaaaatcgagggttggacaatcctcacacgttgaccgggatagtaaaaataaggtgcatcttcaaaaagaataggaggaatgggcttcttgatagttcactagaatcgatgcatgaggaacatgctaccggtgattcagtagacgtggct

SEQ ID NO: 58138 - DNA, 155 bp, Setaria italica
  Peptide Sequence Number=SeqID_124112
cgtaagcactcacagtctccactgtagggccacttcttccatagctgacagcgtcactgcctgcaggactaatccattttacatttactgtccgctcgagtgcatccaccctccctccctatataccacgcctcgccgcgcgcacctcctcctcc

SEQ ID NO: 58139 - DNA, 248 bp, Setaria italica
  misc_feature (188)..(188): n is a, c, g, or t
  Peptide Sequence Number=SeqID_124113
tagaaggaacacctcaaacagtttgaagcgacagtatgatgcatgtgaaacaagcaaacaaactcagaccctgatttgaagaaagaataccaaatatttaacattgccaaacttcatatcatctcaggatttgtgtttaatatcgtatccctcttctcagctacccaatgaatgatgcggctgaaacngtgaatgagattggtgccacagtccgacgggtcagtgggaggaacaactgggatcttgta

SEQ ID NO: 58140 - DNA, 450 bp, Setaria italica
  Peptide Sequence Number=SeqID_124114
aaaagggaaaataaaccgaacaaataaccctaacaataagaccgaccaataagaccaacaagccaccatggaggtgacgatcaggatgaggcttatggacagtcaagtggtgatggtcgtataaaaaaccgctccctaccactctcgacactgatagaaatgctgaaggaacaaactggaaaggaagacatcgatgtaggttcaatcaggatgacactgttcaacatctttggcgacgatgcaagcccaaagatcaagaagttcatgaaagtcatgctcggaaagttccatcagggccagtcaggtgagcatggtggtggtggtgtcatgggcatggtcggtgcccttgctcaggagttcctgaaggctaagcttgaaggcaatgaggaggaagctttcaagccagcgttagagcaagaggttcacagtgttgatgaggtgtatgctggg

SEQ ID NO: 58141 - DNA, 123 bp, Setaria italica
  Peptide Sequence Number=SeqID_124115
gaaataatctacgaccttgttgatccaaatgctaatctgatattccatacgatgcctgtagctctttcaattccaatatctagcagtggcgattgaatggcattaagagcagcatctcttgct

SEQ ID NO: 58142 - DNA, 399 bp, Setaria italica
  Peptide Sequence Number=SeqID_124116
gaataacatatttcctcttgtagctcgggaaagcatccgttcaaaagccagtgccttagactttaatattatcccactaacaaacctcaccccagaatttccagaagatccttgatgcactccctgttcgagcaaataggcatttccctcatccacttccctgtcatatatgttttcatctagctcccgctcagctgaagctgcatggttgtgagaagaagcaaggatgccacctgcctgcaagatgttgtttgagaaaatatggagaagaagagaaaacacactaattcaaatcaaagtcggtattttactggcaagtgacaataactatagaagacaattatgcttggcaagcaatattacagttcataatgctagaaaaggcaactgtcattaact

SEQ ID NO: 58143 - DNA, 225 bp, Setaria italica
  Peptide Sequence Number=SeqID_124117
tttttttttttttaattcacaaggacaactatttatttgaattgtaaaacaatacagtaaatatctgtcatgcctttcttccagcatcggcacaagaatggccaaaaaattgtcttttccatttataagtaggcgggggcaaatctacatttctatgttttttgttagcaactataatctgcatctctgttggaggaactgtacgatgaacctgccctctacaat

SEQ ID NO: 58144 - DNA, 215 bp, Setaria italica
  Peptide Sequence Number=SeqID_124118
ttttttttttttttgttctttcacttagccggtggaactgacttcacatctggtgcaaggatcatccatccgacatccgcaattctgcagttgtttgccagtctcacaaaaatcaaatggacataaaccatcttgagaagttggtggtctgagtctaatctatcccgcatcttcttccttttggtacccctcttactgagaatagtagatacaga

SEQ ID NO: 58145 - DNA, 320 bp, Setaria italica
  Peptide Sequence Number=SeqID_124119
tctaagtctacgtcagactactgtgaccaaccaaatacttaggacgacggccctcaatcgagatcaagctcacagtttcagtccccatgatgacggctaagatgaaggtgaagacaggaatggacggctgaatggcggcggcgtaggtggggttggtgtagctgaggccaagcaagaacagcagctggttggcaaagatgcctgtgagcccgaggacgaagaaggagaccaggagcctccaggtaataggtggccgcgccttggcgtgcgagccgcggtgttggagaaggcgaggggcgcgaggacggcgagggcgagga

SEQ ID NO: 58146 - DNA, 360 bp, Setaria italica
  Peptide Sequence Number=SeqID_124120
acagtgcaattctgcattttgcatatatgtcaagagtattgctcaaatgttaggtgtatgtagagataaacaggatcatcccttccacatcatcagagttttaagtctcacgaaaccagcaaactcaaacctaacctgttatatctctcttgtgactaatccaactgctccaggaagggcaggctacagttttacaagataaatctaacattcatcaagattgttctctgcaatattcactcttttttatgtatactttctgtataccaagaaataactaaagaaaacttaaaacttaaaaactaaaaaggtaaaaaaccccctaaaaacttaaaaaactaaaaaagaaaaaaagaaaaa

SEQ ID NO: 58147 - DNA, 284 bp, Setaria italica
  Peptide Sequence Number=SeqID_124121
aaaattaggactaagggaactagacgggtagaataccaattttacgacaagttacgacgtagttttctggtatatgtgtgtgggatagtgtaattgcaatgtggtatgcttgcgtggggcctgatccagctatattctgtgagttcctttgttaggagcttgtgacttgtgagcatgtatgcgcgacgcaacaaatctggaaagaaggacgcatctgtctagttatatgaaggctcctctaccgtatgccattgaagagaatcatggtggttgcttctttgacg

SEQ ID NO: 58148 - DNA, 184 bp, Setaria italica
  Peptide Sequence Number=SeqID_124122
aatgacagccatataccgcagcagtccagttggttgctggagctggcgataagatgaatctgcaatgcccattttacgagccgaaaacctcctcactcctcactcggccagctccgcccttcgccaaatctatccgatctgtgcactgtgcagcaatctctcttcagcgcacgaggagcttgtg

SEQ ID NO: 58149 - DNA, 342 bp, Setaria italica
  misc_feature (67)..(67): n is a, c, g, or t
  Peptide Sequence Number=SeqID_124123
ttcggcttatcgtcagtgtgttgaagaatgggtggatacgaggccaagagaatgctgcagcaacgcncttcagtttatccgtggtccatgattacaagaagaagatcatgaatgagccaggggccgtagaggagcttgcctctatgctgaccagagggacaccaagggggaagaaagatgcagtgatggcactcttcaacctctcaacacatccagaaagctcaggtcggatgcttgagtcatctgcagttgttgctttaatcgagtcactaagaaatgaacaaccgtagtacaagaaggaaagactagactaggacgactttaggactttagactagaata

SEQ ID NO: 58150 - DNA, 253 bp, Setaria italica
  Peptide Sequence Number=SeqID_124124
gtaaggtctaaagaagtcaatatcttgaagcaggaacaaggcagttgtgtgattggcaaggataatgaatggtgcaccagtttcaggatgtgttgttgcctccattaagcaggacatgtttattggttgatatatggttccatctgatgtaggagttcatatccttgtttgaaataacgaagatgcgcgtccattgtcccactaacagcctccaaaaattcaaacctcttcttagcctcgatatttgaaagcg

SEQ ID NO: 58151 - DNA, 233 bp, Setaria italica
  Peptide Sequence Number=SeqID_124125
tggtggtggacacacatgtcggcgtccgcgtcggggcgctgcgcaccggcatggtgccggtcaggctgctctgcgacggcggcgcgatggcgccgcgaggcgggtccggcggggacgtggtggggcccatgagcaagtgccaggtgtatctgttcagagtaagatggtgagttcattcactctgctctgatctgctccttttgcatctactacctgccgcgttggttgcattg

SEQ ID NO: 58152 - DNA, 192 bp, Setaria italica
  Peptide Sequence Number=SeqID_124126
tttagcttgaactgaaggcgcatccggggcacaagggctgctagctgcttagaggccatcgagcttataccataggcgcataagctgcggatgccgtaaattatccgcatgtttcgccgacaagatggcagtaattggtttctttaactctcatcactacattgtttttagaaagttcagagtcttcaggcc

SEQ ID NO: 58153 - DNA, 194 bp, Setaria italica
  Peptide Sequence Number=SeqID_124127
ctacatatactgcaattcaaatgccacggcaaactggacacatccagttgggattcttcttagcttctagcacattctcaccatacctgcattggttacaaaatgtcaatccaaaatagatgattaatcaagtgcatacacacagggagaaaagaaacatgagctcaatttagatacatgtagagtatttcaac

SEQ ID NO: 58154 - DNA, 245 bp, Setaria italica
  Peptide Sequence Number=SeqID_124128
gcgagagggggtggctgcgaggccgacgacgacgagacggggaggagggtgtgaggagatgcgagaggaggagcagggaagtgtctagaagcggatagggtgaggtagaaggtgcagctcgccaccaagttcggcatacgcctggacgccgacggctcacgggagatccgcggcgacccggcgtacgtgcgcgcgtcgtgcgagggcagcctgaagcgtctcggcgtcgactgcatcgacctcta

SEQ ID NO: 58155 - DNA, 235 bp, Setaria italica
  misc_feature (213)..(213): n is a, c, g, or t
  Peptide Sequence Number=SeqID_124129
cagcgactgagcaagcaagcgatcgaccagtcctgccaacggccgccattaccaagaacagtggagagcttgccccggccggccatggctgctgcaccggtgacggtggtccggcgcatgaagctggggtcgcaggggcttgaggtctcggcgcagggcctgggctgcatgggcatgtccgccttctacggcccgcccaagcccgagcccganatgatcgagctcatccatcacg

SEQ ID NO: 58156 - DNA, 443 bp, Setaria italica
  Peptide Sequence Number=SeqID_124130
ctaaaagttcttggtatagtcttgctgtttcaaattaaaaaaaatggtctaccacctttgcgtatctaaaattgctagagccaagcaacagaaaaaacaactccctcaagatcatctagctgaatacaatatgggggacattaacgcaaagactaaccagaacaaatgttgcaggatctcctgttagcattctgaagcttctcagtgaatgaaaaaccttggtttctttcagaatacatttttggtcacaaattgctatccagccaaatctccagccaggtacagcccatctctttgatatagctccaagagtgagtaatggaacagtctctccaaaaacacccattggcacaaaaggagtgctaccatagacaaggtgcccatagacctcatctgcaatgactaacataccgagcttgtttgctgtatctgcaatctaagtc

SEQ ID NO: 58157 - DNA, 248 bp, Setaria italica
  Peptide Sequence Number=SeqID_124131
ctgtacaacaatcaccttgtatttcaaatagaccaaagtaaacctcatagtaaacgtgctgcaatggtaaggactataatttgcgagcatacatccatatggagtccaaaatctcactggatgtggcagcccttggtttctcgagggaagaaggcgcaggtggctcctgcaaggaagagcaccaaatccatcacaaacacagcttctttctgatggcagctctctaacaagccaagggtaacgagagg

SEQ ID NO: 58158 - DNA, 228 bp, Setaria italica
  Peptide Sequence Number=SeqID_124132
gcagcacgtttactatgaggtttactttggtctatttgaaatacaaggactataatttgcgagcatacatccatatggagtccaaaatctcactggatgtggcagcccttggtctctcgagggaagaaggcgcaggtggctcctgcaaggaagagcaccaaatccatcacaaacacagcttctttctgatggcagctctctaacaagccaagggtaacgagaggtgaa

SEQ ID NO: 58159 - DNA, 190 bp, Setaria italica
  Peptide Sequence Number=SeqID_124133
ggcagccccctccggccaggacagcctccgattgctgccacgtgtcggtctccgaccggtactcgaagaggaatggcgtgttgttcaccagctcagcaaacagaaaccttgcaaggaaaagcaaccatttttgcactgacgtcagatcgagcacaccaatagcgacatcgatcgaattttactgtgggtt

SEQ ID NO: 58160 - DNA, 234 bp, Setaria italica
  Peptide Sequence Number=SeqID_124134
taaagtaaacgaaactaaagaaacttaagtaaccaaataaggtaggaaaccaacctaccaacaataactgagtgattgatttgttggcaacaagttcatcaatgctgccaatgttgacctggacaggatctctgagtaaatcccctgctatttttgtaacctccttgggccatgtggcagtatacatcagagtctgtctagcaggaggaatctcatccacaatcttccgtatct

SEQ ID NO: 58161 - DNA, 385 bp, Setaria italica
  Peptide Sequence Number=SeqID_124135
atgcacggccactgagctcacatcgagttttcggttcccgaacgtttccaactcattggtgatctttgagtacgtgaaaaagggggagccgtccgacaagtaaccgtataccttgccgatgccactgatggctggccaatctttgccaccgggaaccaagcttcgaagcagttcctctctgccaacgacggcaagtgtttctggagcggagccgtgctttcccagccaatctggaaggcttttcagttctccatcctcgatgcgtaggtgcttcacatgtcccagcccacttacatcttgcaatcgctatggatcgcctcgatgctgtcagcagagacgacgcgcatgcttgtgagcagcgtggagctaccttgtaggtctaagt

SEQ ID NO: 58162 - DNA, 401 bp, Setaria italica
  Peptide Sequence Number=SeqID_124136
aggactaatacggacccaaataacggtactacgacgaccaaccaagacatcggggcggcccgtaacctgataaatacatatatctggagtttttgtttcctgctaccgggggagctttggttatcgcgacatagggtgttgcgctatatattggggttgtgcagggtttttgtagcaatgtggtttgtgttctgctcatttggagcttgtgaactgatgaatggagctttggaatgctctgtgcttgtatttatttgtcttttggagactgactgtaagtcgtgttttgtgcgtaactgtacgagataagcatggtggcttgcgatatttcttaatttggatctgctttgcggatccggaataaggctgcattcttcagcagcgttgaactgttagaaaaa

SEQ ID NO: 58163 - DNA, 386 bp, Setaria italica
  Peptide Sequence Number=SeqID_124137
cggcagcagcagcggcggaagagatgtcgtcggggcggtacatggcctactcgccctcgccgtccaccaccccgcactccccgcgcatcgccggcctccgcgcgccatccgccgccgttgccgagcaggagaagtaccttgccgaactgctcgcggagaggcacaagctgggcccccttcatcccagtgatcccgcatagcgtacggctgctgaatcaagagttcaccagcttatagctggcttggaggttcccaaggcagctcctctggactgattgtcaagaaaacaatgaagtacaatttcgttggtcgcatccttggtcctagaggaaattccttgaagcgagtggaggcaaatacagactgccgcgtgctaataagaggca

SEQ ID NO: 58164 - DNA, 440 bp, Setaria italica
  Peptide Sequence Number=SeqID_124138
gctggctcatcttgtccccaaggtagcggagctcctcctcatagtcatcgtcaaactcatcatcctcgtcatcatacatgtcatcatcctcggagtaaagctcagggagctggtgcttgttgttgtgctggctcttgaacgccttgaggccctgcatgaggcttccaacccctccttgcttgccctggtccttctggccgccattgttgttcttgttgttgtggcagtccttccccggattggcaccttgcttctgctgctgttggtgctgctggtggttctgctggtgctgctgctgcttctgctggttgttgcccttgtggccctggttgccgcctacagaagttgtgaagccaaaattcagtgtattaggcctgaagttgaagtacagagcctacaatatagtttgactcagtcatagagacggtcacagaagccgt

SEQ ID NO: 58165 - DNA, 332 bp, Setaria italica
  Peptide Sequence Number=SeqID_124139
accatgattcattcttgatacgggcgaaaccataagagcagaaaataatgaaagaaagaaagaaagaaaggtagcaggactggatcaccattaccatgcttcatcaccaacctctagattctagcaacactcctacatgacaacacatcccttggtgttctcatcactgaacatggtctccacatccccattgctggccgggtaacccgcgctgccaggatggggatggtagtagtagttgtaagggttgtagtagccagtgtaggggctgaacagcaacatgatgatgatgcatcagccccagcagcagccgcagatgatgtaccactcct

SEQ ID NO: 58166 - DNA, 250 bp, Setaria italica
  Peptide Sequence Number=SeqID_124140
tgtaggtggcgagatgttaaactccgcgcttttgacaacgcaaagcacaggacatatgttgatcttaaggtactaactgtcaaatgcttgacttcaacttcagctgatgactgcaaatatcatagtactgtaatacttgtcaaaatctgatcctttccatattgtcctttcctgatttattgattgatcccaatgattttcctttttttgctgaaccttatattgctgcgaaaaggaggccatgcaacgg

SEQ ID NO: 58167 - DNA, 249 bp, Setaria italica
  Peptide Sequence Number=SeqID_124141
tatgcggctttcagcgcaatcgattcggacctcgctctgcttgcccttggttggcgagtttgacaacgatggcgtttcttgttcgttgaattgtgcagggcaagagatcggcccggaagaaggaggcccagagcccggaccagatgatgtgcgcgttcgaccttctcgcgacggtggccgggaagctgcttgatgagggcgagggctcgctcgggaacatgagcgccggtgccccggccttggctgcgt

SEQ ID NO: 58168 - DNA, 219 bp, Setaria italica
  Peptide Sequence Number=SeqID_124142
actttaaaacaaaggaacaaaagtaaggaaagaacgactaggtagacaacaacggacgaagacaatctcgcctcagcagcggcgtggcgagccggtgccgcaggagctgctggaccgggtcttggctgcccaggcctactggtcccagcagcaggccaagctccagcctaagacgcccccgctgactgaggctcgcttgcttacctaataactcatgat

SEQ ID NO: 58169 - DNA, 187 bp, Setaria italica
  misc_feature (3)..(3): n is a, c, g, or t
  Peptide Sequence Number=SeqID_124143
ttntttgttaattttgggttttgtttaatttttcttagggttcttaattcgtcagattcttggtcggctgaatccatggaagctggagccttcgctggagatgcagcggcgagcctgatgccggctgccacagcgggatttcataagaatgcacctgacatgtataatttgcttgatccaatggatg

SEQ ID NO: 58170 - DNA, 166 bp, Setaria italica
  Peptide Sequence Number=SeqID_124144
ctactacaacccttacaactactactaccatccccatcctggcagcgcggggctgatctggggagaggagtggtacatcatctgcggctgctgctggggctgatgcatcatcatcatgttgctgttcagacccctcaaattgttcatcatcgctgctgtggccgca

SEQ ID NO: 58171 - DNA, 268 bp, Setaria italica
  Peptide Sequence Number=SeqID_124145
accggtgacgtcgtcgcccggtcgctcctcgccgtatcaaaagcagcccacaaagatctccagaaaaagttcccgatcgtgaggacgatgacgacccagcaagagaaatcgaggaggcagaggaaggggaaccgaagccggagatggaggtcggccgctactgccgcgatcccgcccaagattccttggagtgctaaatgctgcaccgggtttgtcccaaatcatttaagagcttggcaggcgacaggcgtagcaacgggaatctact

SEQ ID NO: 58172 - DNA, 289 bp, Setaria italica
  Peptide Sequence Number=SeqID_124146
tacaagaagggggaaaaggaaaaggaaaagggaaaggaaaattaattgtccactccaactgccacatcaaacgtaccttagcttgccattcggttgactgcgcaccactaaatctgaaatcactaccagtactcacacatggtttgattgccgtatctgtaatgcgcacgttggacaaagttgctaatcttccaggttgtcctgttttatcattaggcgctgaagctccacattgttttctagtctaccttgtatgtagtcctatcatccaagctcctttcttgggtgt

SEQ ID NO: 58173 - DNA, 235 bp, Setaria italica
  Peptide Sequence Number=SeqID_124147
ggcggtggtgcggcggctgtctgctggtctgcggccgcttcttgttcttcttctgatgcactgtccgctagcttctccatcagagaggaattctccattctcagcttctgggagctttccgctaccttgctaatctcgcttcggagggatgcgttttctgcggtcagtagctctactttcctagccagttcctcagtctcagcctgcttcctcagccttgaacgtctagcagact

SEQ ID NO: 58174 - DNA, 193 bp, Setaria italica
  misc_feature (25)..(25): n is a, c, g, or t
  Peptide Sequence Number=SeqID_124148
cctatcccctgtgtgccttgcctanccccttttgcgtgtctcagctgaacaccgaagccgttgtccgcacggcggaggaggtcggcttcgaggccgtagtgagcgagctggacgtggccgacgacgacgtcgggcgggtggggcggctgatcaactcgttcgacgcgatggtgggcgtgcacggcgcggacct

SEQ ID NO: 58175 - DNA, 377 bp, Setaria italica
  Peptide Sequence Number=SeqID_124149
gagggccgggagggagtccggcgtggaggaggacgcgggcgtggaccgtcgtgggtggcgctccagttggagacggcgtggaggtcctcggggagcggcgcgtacttgaaagggacggccttcttgtggagcgcgtcggcgggtaaggggaaggagtagtaggtggcggcgacaagcatcttcattcattcattcagaaataatatatagggcacgtatacgtgacgtacacacgaatacatacatatatagcagacgcatccgtacgtcgtccatatatatgtgacgttgtatagatggatcacaaactgaaactgctactcatcgatcgctagcttattcaaccaaccaaccaaaccattgacgacgacggatca

SEQ ID NO: 58176 - DNA, 265 bp, Setaria italica
  Peptide Sequence Number=SeqID_124150
attgtgtaggacaaactagaatctaaattgacacaacagtttcaagagtacaattataattattaatgtcaattcaatttctaagcaagagaatatttatctggttctttggtaagagaatagcaagtaaagatgcatttgcatatagaacaacatggtagcctaaaaatttgggttatcaaaccacaacaagtgtgcgtacctatattttttcagtgactcccgatagaggttacgaacatgctgtaaagcttcatcctttcca

SEQ ID NO: 58177 - DNA, 344 bp, Setaria italica
  misc_feature (1)..(1): n is a, c, g, or t
  misc_feature (108)..(108): n is a, c, g, or t
  Peptide Sequence Number=SeqID_124151
nctttaggtaggtaagcagcacatattagacatgcaaagtttaaaaaaatctatggaacaagaacaaattaagtacccatgaaaacacatcttcttcagagcttgatncggggctcattggactcttgctgcgggcagtccaacgctgctcaattggtgcaggtgcgggtatatcttccttttcaatcaactgcagcaacttctctatataatccagatcctttgtacttggctttgctagggttcctgtggggaagcagttttcagaaacccactgctgcccaccacaatcaaagcccagtatttcatcgctccagcccatgcgatacccttcagactttttc

SEQ ID NO: 58178 - DNA, 231 bp, Setaria italica
  Peptide Sequence Number=SeqID_124152
ccttgatgaagagcaaaaagagcaaaactaccatgcctgagctgttgggtttttggagttttagtgctcttcatcaagggccaccaacagaacggcaagttatgtgtcttcgcgcttcagcatattttacttaacaggctccagcactgggaacagcttctccaactttgcatttgatagaaccttgttggggtccagctccatgcgtgccttgttatatgcatcgacagg

SEQ ID NO: 58179 - DNA, 388 bp, Setaria italica
  misc_feature (15)..(15): n is a, c, g, or t
  Peptide Sequence Number=SeqID_124153
tcagatcaagctgangggttcgagaacgggtcggccggcgagatctgcgacgacaactcgctcgacctgcacggctacggcggcggcggcagcggcaggccggagtcggcggcggccgcggctcggcatggaagggaggactggaccggcttcccaagcgagtccaacactgggagcatgcattctctcaaggagcagatgcagtccaagagccttgagatcctctcggacatgaactcctgcgtgtcggagacaacgtccagcaccagcgagctcaacctcgagttcaccctggggcggccgcagaaccggccaaactgaggtcgatcggaccacctcaccgcaagctctaactggagatcgccgccgtcgtcgtcatcgccgttcg

SEQ ID NO: 58180 - DNA, 182 bp, Setaria italica
  Peptide Sequence Number=SeqID_124154
gagagggtgggtttggagcagtttatcgaggtatattaccacatggacaagaagttgcagtaaaagtccgatcaagctcatcaacacagggaacacgtgagtttaacaatgaggtacagaccaattctgccatattagcattgtttttaccccaaaaaaaaaatcacaccagcataaaggaa

SEQ ID NO: 58181 - DNA, 270 bp, Setaria italica
  Peptide Sequence Number=SeqID_124155
actacaggatcgcctctatggtatcatgtttcataacactttatttacttttcacttgtaatacccttattataatcttcattttttggtttgaaggtgaggcatccaaaaggaaagttcttgattggcctaccagattatctgtttgtattggtgcagcaagagggctggtatatctgcacaattttgcagggcgttgtatcattacacagagatattaaatcaagcaaacatacttatggatcacagcatgtgtggcaaggtagccga

SEQ ID NO: 58182 - DNA, 481 bp, Setaria italica
  Peptide Sequence Number=SeqID_124156
cgcaaaactcacacacatgacagtttgaaccagatgcggtcctaaaatatagaagctagcaatttatacagcatttcttggatgcacatcacgagacccagtagtctctgaagaggagagaccataaaacaccaccaggagtccttcatttcttttcaacatttggcaagcagacagctgcgtccataccccccacagacaggtagctttgtggatccagactttgcaattcccatgcattggatatttgtggtatcacaggcaccttgtcccaacacctgagaactcgtagccccctgcattccaggattgcaataacaatactagaatacaattagacaatactagaaaatacaacaaggaagttaggtacaacctagggacgaccaaccaaagaaaagacttaccctaggtacaaacaactaagaacaaccaaaatacgaatagttacttagaactaggacctacttaggttaaagta

SEQ ID NO: 58183 - DNA, 222 bp, Setaria italica
  misc_feature (194)..(222): n is a, c, g, or t
  Peptide Sequence Number=SeqID_124157
aagctcgccaggatccgcagccaggaggacgagtaggctgggttactcgtcattacgactgttggctctagtctttccctgctgtaggaaactctgctttgtgtctgtgttactaccgaggttacctgttatgaccaaaccttttttagactaatacaaagtaaagaacggaactaactaaaataagtaagaannnnnnnnnnnnnnnnnnnnnnnnnnnnn

SEQ ID NO: 58184 - DNA, 350 bp, Setaria italica
  Peptide Sequence Number=SeqID_124158
cagtttgtcatcgccatacccctcctcagcttattcatctcatgtcaagtggcatgttaaaggcaagaaaaacaacacacacacagagggcatgagatcattacctagtaccctactgatccagagccagagccaggcacatgtgacaaatgcggcattatcatgcatggcttctgtttttggtgataagatcagcacaacaggtcatactgtgctgaaattgctcacaatgtctctacccggaagcgcaaggagattgtggagcgtgctgcgcagcttgacattgtggtcacaaacaaattaaccagagctgcaatctgcctaacatactactcatcctcctggctgcg

SEQ ID NO: 58185 - DNA, 388 bp, Setaria italica
  Peptide Sequence Number=SeqID_124159
gtcatcagaaccttattcccttgcttacagtttgcatcgcataccctcctcagcttattcatctcatgtcaagtggcatgttaaaggcaagaaaaacacacacacacagagggcatgagatcattacctagtaccctactgatccagagccagagccaggcacatgtgacaaatgcggcattatcatgcatggcttctgtttttggtgataagatcagcacaacaggtcatactgtgctgaaattgctcacaatgtctctacccggaagcgcaaggagattgtggagcgtgctgcgcagcttgacattgtggtcacaaacaaattaaccagagctgcaaatctgacctaaacaataactaactacaatacctacctaggactagacga

SEQ ID NO: 58186 - DNA, 266 bp, Setaria italica
  Peptide Sequence Number=SeqID_124160
ctgctgggcggatcgttgccgatggaagggcacaagaacgtgtccgggtttgagaaatcgaggtccccatcatccattgttgcgagttgcagtcaagtacaaacctagtggatactcgtcgccggcgctgagcgcgacgaagacctggggccgctcgcgtcgcccagtcgtcgccgccagaaaagaaaagccaggtataggggcgacgggccgacgagggcggcgggctagagacgacaaagagaggaggaagcgagagtttgttt

SEQ ID NO: 58187 - DNA, 275 bp, Setaria italica
  Peptide Sequence Number=SeqID_124161
ttcgtcctcctggcttcgtagtagggttaggttgtgaacttccgaggagatggcggtgccactgctgacgcagaagatcgtgaagaagcgggtcaagcagttcaagagaccccacctcgaccgctacaagtgcctcaagccaagctggcgcaggccaaagggtatcgactcccgtgtccgtaggaagttcaagggatgtaccttaatgcccaacattggttatggttccgacaagaagaccaggcactaccttcccaacaagttcaagaagtttg

SEQ ID NO: 58188 - DNA, 236 bp, Setaria italica
  Peptide Sequence Number=SeqID_124162
gtgcacaatgtctctgagctggagttgctcatgatgcacaacaaacttcttgaatttgttaggaggaagttcaagggatgcaccttgatgcccaacattggctacggctctgacaagtccaccaggcactacctcccaacaaattcaagaagtttgttggggaggtagtgcctggtggacttgtcagagccgtagccaatgttaggaggaagttcaagggatgcaccttgatgccc

SEQ ID NO: 58189 - DNA, 229 bp, Setaria italica
  Peptide Sequence Number=SeqID_124163
cctatcccctgtgtgccttgcctatccccttttgcgtgtctcagttcttggaggcgttgttctcagacggcgactctgcagtctcagcggcctccggcgaagctgcgacgatcttggtgtggacatggacgcaggtgtgggtgtgcgaatgatcatggactggtggattgcaggtgtgggtgtgagtgcaagcatggtgctctgtatccttcaagatgtcatcaaagta

SEQ ID NO: 58190 - DNA, 204 bp, Setaria italica
  Peptide Sequence Number=SeqID_124164
aaccaagctaccttggcgttcagaagaatcctccatcccttgctttggtgccactgaagtggaagatggcggcgagcgtggcgagctcactgctcctgagcacaaagtctcttccacttcagtggcaccaaaccaagctaccttggcgttcagaagaatcctccatcctctgatgttgatacgcagttgttggttgcagggcac

SEQ ID NO: 58191 - DNA, 234 bp, Setaria italica
  Peptide Sequence Number=SeqID_124165
tttgtggacacgttgtgtgcgatttcagcacagtatgtcctgttgtgcatcataagcagcgcaaggagattgtggagcgggctgctcagcttgacattgtcgtcaccaacaagcttgcccgtcttcgcagtcaggaggatgagtaaactgtttcgggtagtagtttggagtggctcggctgtaggagactttctgtgcatcatgaatcagttatcctttctgtttgcttcgttg

SEQ ID NO: 58192 - DNA, 187 bp, Setaria italica
  misc_feature (4)..(4): n is a, c, g, or t
  Peptide Sequence Number=SeqID_124166
tggngggtatggacgcagctgtctgcttgccaaatgttgaaaagaaatgaaggactcctggtggtgtttatggtctctcctcatcagagagcatctggaaactaagcaaacaagcgaggatgttctgtgagcttacagctaacgagcttgaatcatctcaggcaccatagaagcatcgtcggcgaca

SEQ ID NO: 58193 - DNA, 258 bp, Setaria italica
  Peptide Sequence Number=SeqID_124167
catgtaacagaacaaacattaatcaatctctaataaagagtagctagggagtcactatgccaaaaagtgatgaccgcaaagtgaaggattatacattgagattgtagacaggggacagaatattagaaactaaacaaagcatcctatagaagccctttaactatcggtcctgtaaatatctaggcattatgcttcctatcaaacaagaaaatggaatgaacatgctgaaggcacactcggagtagaaaattggaaaaa

SEQ ID NO: 58194 - DNA, 149 bp, Setaria italica
  Peptide Sequence Number=SeqID_124168
ctgaaggaatggagactaaggaatggggtggtattgatcgtgaaaccgatgagaggtgctgccatggaaagcgtccaaggcgccacttatgttgggcaaccaagatagtgttcttgccatcccaacataagtggcgccttggacgcttt

SEQ ID NO: 58195 - DNA, 233 bp, Setaria italica
  misc_feature (220)..(220): n is a, c, g, or t
  Peptide Sequence Number=SeqID_124169
aagacttacaattagaatggagaactgccccaagactgataactcaccctccatttcatcatgtgttactcgaggtttccagtaccgggggagtgaacgcggattgttaacatgctttccagatactgatttgaccactgcgaaaaatcttatggaggccaaagggataaagcagctgcctgtagttaagcgtggtgttggccatagaactgcaggaaancgcaagccgattg

SEQ ID NO: 58196 - DNA, 450 bp, Setaria italica
  Peptide Sequence Number=SeqID_124170
cattgactgtgatcaggctgctaaggccatttctctcgaagtcaatgtgagggatatacaaggggaaggattcccagaggagcatcgtgctgccactgatgctgtcttcctggacttgccccagccttggcttgcaataccttctgttggttcaatgctaaagcaagacggcattctgtgctccttttcaccttgcattgagcaagtacaacgtgcttgcgaagctatgagatcatgttttacagatattagaacctttgaaattcgcacatatgaagtaagagatggcgctctgaaaagtggtactgccgatgagtctaacatggggcctccgcagaaaagaaaaaggtccacagcatcaggagaaaatgcagaccacgcacagaagaacaactccattttggttaggccttgtagcactgctaaagggcacactggctacttgtcatc

SEQ ID NO: 58197 - DNA, 257 bp, Setaria italica
  Peptide Sequence Number=SeqID_124171
ttactttgttcgttatttcgttctttatttgtttaattgtctagtctaaggtagttgggtatcatatgatggtgacagtcttgagcagacaattgcccgttcaaggtgtcacaagggccgtctgttgtactattttccgagacagttaagcaaacagacagaagaagttgagtctgtttcatcatggtgtggatggcacaccgatcatggatctctaacagggctcacatgtggactgtttacaaaagattctgtgg

SEQ ID NO: 58198 - DNA, 179 bp, Setaria italica
  Peptide Sequence Number=SeqID_124172
ttgaaatagcatttaaagctcttggaaagactagaatagaataggaaagttaggtttagaatagttaggctcatcactgcgatcgctatgtaatgcagcaaggagtgggatcatatgatggtgacagtcttgagcagacaattgcccgttcaaggtgtcacaagggccgtctgttgtac

SEQ ID NO: 58199 - DNA, 452 bp, Setaria italica
  Peptide Sequence Number=SeqID_124173
taaacaaaaaggaaaaagaacaaaccaaacaacaacctagtttttactaacaattagactagaacgaaagcggaaagtcgatcactatggcctcacatgtaccttcatcaagaggccctgttcttttggcatctgggtcgcacgatgagattggtgattgggaattgtacttgagatctgaggacgatttggaaattcatagagctggattcaaatcaatgagcatgcataatctgagtgacctagtacaacaggccgttgctactaatgcaatgcaaactgggaaccttaacttgccagacatgactgaagattcatcaaatataatgacctatcaggtttccataaagactcctgctcaaatagacatagtattcttgtcaggtctgcctcaaagaatccaaagattgaagagcggattagcaacctaacaggtcccatgctgagcgccc

SEQ ID NO: 58200 - DNA, 255 bp, Setaria italica
  Peptide Sequence Number=SeqID_124174
taacttaagtaaattaaggggtaaacttaaacaagaaccaaaaatagtagtaataacttaaggaaattacgttacaaagaaactcctctgtctctaattgctggattgatgtggattggcttgaaaaaatggacaatattttcttcgtcatgtttgccaagattctgatgagctgagcacatatgggtggacagctcacaatggtagggattatggacatcaaatgctagttgatcatggcctactcttgactac

SEQ ID NO: 58201 - DNA, 242 bp, Setaria italica
  Peptide Sequence Number=SeqID_124175
tcgtgaaggggagtggatgcctagcatgaggggttcgtgctgtacctggtggacagcaagcttgtcttcgacaccatcgagcgggtcgtcgccgagtccaccgatgtcgcctatccgcgataaaattctggatggaagggagctggagttttgcaaatgggacactgatgctgaacttctgctgaaagatgctagggagaagcttaatgagcttagcaagcactggactcggaaggatagga

SEQ ID NO: 58202 - DNA, 378 bp, Setaria italica
  misc_feature (287)..(287): n is a, c, g, or t
  misc_feature (333)..(333): n is a, c, g, or t
  Peptide Sequence Number=SeqID_124176
ggtagtatgaaatgtgtctgactgcgactagcagccactgtacgtttgatacgaagcatctccctaaaagtgtcttcgttaccatgctggatctcaaagtcattccacttcttccaaaagtcagaattgtttggatcagcatagttggatgcgtgcacatagatagcacgcgagcggtcaatttctccaaggcttctttctagctcagcaaatttcatgcacattgtcagaacatctctgtctgggagcccagattcaattgcttgctgcaaacgtgacaacaaagntagcagagcaaagttgcatcaaaaaccaaagttagcatcaaaactntctgtaaaccagtgaaacatttgaaaatactgaagacacaaccat

SEQ ID NO: 58203 - DNA, 325 bp, Setaria italica
  Peptide Sequence Number=SeqID_124177
aatacgagcaagcaatttgaatctgggctcccagacagagatgttctgacaatgtgcatgaaatttgtcttgtccttggaacgccgaacagctcagcagcacgtgctatatagatttcatacatggccattttttcactgttaggaacagcccttacagcttcatcataaacattcatagcacgttttgcaagaccatagtcttcctccagtttggcccattgtaaatataggggcttcttttcatctggaggagcctgttggacagcttcatggaaaagctctcttgctcgttctaacttgcttctcttgtatctctgtacaaa

SEQ ID NO: 58204 - DNA, 409 bp, Setaria italica
  misc_feature (3)..(3): n is a, c, g, or t
  Peptide Sequence Number=SeqID_124178
ggngaaacctccacaggatgcacgaacgcgatccgacgagatcacgcacgcctgcacaattattacatgccgcccggggcacatccgcacagcggcacagggcagcagctgatgaattaattaagccaggggagcttcggcctacagcgcggtggcagcggcctcgacgtcgtccccggcagtagccgccgccgagcgcttctcgtggcacttgtcgacggtcttgtagaggcggtagggcggggcgtcggtggcgagccactgctcgacggtgaagagctgctgtgcgcatcccaggtgcggccccgtggacgtgacctcgacgtagttgcaagtaaccaagaccgtaggtagacgggaccggtagaccgtacggaaggtagaaggttacaataggacgactaaggta

SEQ ID NO: 58205 - DNA, 410 bp, Setaria italica
  Peptide Sequence Number=SeqID_124179
cataaagaaaggcaatacacaaatgaccttataaaattgataaaaattagctattaaactgcatgctccaaaacatgaaaattcaaatcgagattgatgatcgataaacatcaaacaatgaaccacatggaattgtctcatcagaaaagacagcagcaatatgtggtcaaagatatagcttaaacgtatcctcatcacatgacaataactcactttgtcaggccgagctggtggttgcctaaatggaactaccaagtccagcggtggaccaactggtttctcttttgtgttcagttcgcgattttcatcagattcatagtgcatatcttcatcagccactacatcatctggttgcatgtccttctcatactgcccttcatcctctataggcgatctatgggaatcttcat

SEQ ID NO: 58206 - DNA, 349 bp, Setaria italica
  Peptide Sequence Number=SeqID_124180
ttccttatttttactaaaccgttgtctatttgtcttttctattaagtattgttagttgccatccgggttcctaacggttctccaccgcacaatattgtcctctagccgtatccttttcttagttccagattcatctgtaacaaaaacatcttcttccacatatgtttttggatcaaagggtttcgggtcaatccccataatgtttgataccttgatcacattcattttgtcaggccgagctggtggttgcctaaatggaactaccaagtccagcggtggaccaactggtttctcttttgtgttcagttcgcgattttcatcagattcatagtgcatatcttaatcagcc

SEQ ID NO: 58207 - DNA, 237 bp, Setaria italica
  Peptide Sequence Number=SeqID_124181
cctatcccctgtgtgccttgcatatcccctgttgcgtgtctcagtttgcattaatgatacgcctctcagctagtgcttcagcttctaactcgtcctcaaaccgtctacgacctggcactcgccgagaaccatattctggctcatcatcctcatctaaagcatcttccaagaaccctggggaaagctgtcgccttggcctggcaggttgtgtgtacttgcggttcaccttttctcttt

SEQ ID NO: 58208 - DNA, 412 bp, Setaria italica
  Peptide Sequence Number=SeqID_124182
taacaacagttaacaacctcctgtttccaggcaacgattctccaacacaacacaaaaaagaaagataactgtagcaggtcatacaccaacgttttacaagttttcccctgttcatcatcagtcctagtcgctgtcgtcgaaaacgacggccttcctgcgatgctgaacagcctgctgcttcctgggtggagagtcgtcgtcgtcctcctcctcctcctcggagaccagctcctcgcgcctgtgcccaccgcctcctgattctctcttccgcttcggtgcctccatttcttcatccgacaaaggtgcttcttcagcatcttcctcgtattcatcctcatcaagctcatcttcccttccacgaattggtgaagtagactacaaatagttaccttacgtacctaattactaagta

SEQ ID NO: 58209 - DNA, 187 bp, Setaria italica
  Peptide Sequence Number=SeqID_124183
tgagtgctcaatgtcctcgccatcagtttcatattctgactcctccctctcactctccgagtattcatcaacttgacgtctcggtggacgagcaggagggtacgatgtattgcggggtacatttctgttcttggaagatgctttagatgaggatgatgagccagaatatggttctcggcgagtgcca

SEQ ID NO: 58210 - DNA, 414 bp, Setaria italica
  Peptide Sequence Number=SeqID_124184
agttatgaagcaattaaacagccataagatgacaacatagtattcctcaataaatatcacattatataaggcactcgaaaaaaaggatcgtgcttgtctgaaaaacactctcaagagggtaaacctttatggatctacttagcccagtattttcaggtctgtcaacttcataaattatagagccattcatgccacctgaaagatactgatatcaacatacacatcatattacatttacattttctattttcttttacatatattcaaccttgctcaggagctaatattttaatctcaacaattttatccatcatctttttactccaaaagaatttgatagggtgctatgtcagccttatatcagtaaagatatcaagaaagctaacctgatttctcactaacatcaaaaagtcc

SEQ ID NO: 58211 - DNA, 389 bp, Setaria italica
  Peptide Sequence Number=SeqID_124185
aaacaattctccaaagtctcagggaataaatagaaaaattgcccaaatatcaccaggtatgaggtgatgagctatactgatttgaattccaaaatgaagaactgaaatccataaaatatgcaccatataaggaaacaagaactcacgaaaaaccctttgtgctgaataatgtttttagggcagctgcatccaatgctcttcaggaagtttaccagcaggatcagcagtacttcaaaaagaaatatgctctttcagaaaactaaggagaaaacagaacagaaaagcaatctagaataactttttttcttaacaatgcaatttgcaaagaattgtttcaataaaaaatgattaatgatgttgcacctggaatctaatcgtcctagccttac

SEQ ID NO: 58212 - DNA, 465 bp, Setaria italica
  Peptide Sequence Number=SeqID_124186
ctatgaaactcgtatgttcaaacgagcctctgctgtatctgtctccacgtggaaatcctaattcagcagcattttacagacatcgaaatcctaattaagctgctctccacgtggctccactatctacaagcttgatgtatgtatccctgaagtcgtcgaaaaatctagcttggtcctctgcatagatcctgatccatcttaagcactcttcatcttcagtgagtgcccaatccgtgcgcagccccaccattgcttccatgccagctttacaaagacaacgcagtaagttttgataaccttaaacttcagatgaatttcaatggataagttgtctcatgaagatgtttgtggcttcttctcaaggagcactttgaaataggagttatcgaaaacgattggactcccgaatcctttgcctccaattgtgtgtgctccagataaagcaaccattttccttgagttcgt

SEQ ID NO: 58213 - DNA, 157 bp, Setaria italica
  Peptide Sequence Number=SeqID_124187
tccgttgctggggagaatacaggttggatgtacctacaagggtccccttttttttcataattaagctgctctccacgtggctccactatctacaagcttgatgtatgtatccctgaagtcgtcgaaaaatctagcttggtcctccacaaaaacgagg

SEQ ID NO: 58214 - DNA, 449 bp, Setaria italica
  Peptide Sequence Number=SeqID_124188
tctaccttcctacctattagtcctacctacctacctacggtttcccttgtctaggtcggtccttcttctatttagtcgtaagtttcacacggacactccgcccatcaagttcctgaccatccatgctactcacagcctccttggcctcatcactgttgctgaaattcacaaagccaaagcctcttgaccttccagtctccctgtctgtgatgatccttgcttcagtaacctctccaaaggtgctaaacgcttgcctcaaagtctgatcatcggtaccccaggaaagaccaccaacgaaaaagcttggtggacatcagccgagcagcattaaacaatgcaggagccgaactggcaggggcaccgcttgtcagagcgctgtgccttagaaggctgccgagcttgtgaggccgccattgaacactaaaacctgaagatgggatgggacgagg

SEQ ID NO: 58215 - DNA, 238 bp, Setaria italica
  Peptide Sequence Number=SeqID_124189
ttttctgatcctttgaatcttgtatatgtagattctcgccaagaagggagtaattgtattacctgatatctatgctaattctggtggtgtgatagttagctactttgagtgggttcaggtaattgcctgtacatacttcgccatatcattgcacatctgcttccttgttttaatctgacaccttccttgcactattttgatggtgcagaacattcagggtttcatgtgggatgaagag

SEQ ID NO: 58216 - DNA, 249 bp, Setaria italica
  misc_feature (31)..(31): n is a, c, g, or t
  Peptide Sequence Number=SeqID_124190
gagttggagcggttgactcgtgatttacacngaaaatccatgatcttatcggtactcatacggatgtcccagctcctgacatggggaccaatgcacagaccatggcatggatgttagatgagtactcgaagttccatggccactcccctgcagttgtcacagggaagccaatagtaagtgaataaatattagttttacagcaagtaacttcatggaaataaagtctttacacagtacggtaagaattca

SEQ ID NO: 58217 - DNA, 367 bp, Setaria italica
  Peptide Sequence Number=SeqID_124191
aaaggccaagtttataatttgaagctgctaaaccatccaaccttgatccagaggcagatgagattctcgccaagaagggagtaattgtattacctgatatctagtgctaatttctgggttgggtagttggtataggttaaaaaaaaagaaaaaaactaaaaaactttaaagaaaagtaagggttaacaagaaacaattacaagggtttacaatagtgggatgaagagaaagtgaacaatgaactagaaaagtatatgagcagtgcttttcaacacctcaaggccatgtgcaagtctttagattgcgaccttaggatgggggcattcaccttaggagttaatagggttgcccgcgccaccctcttgag

SEQ ID NO: 58218 - DNA, 491 bp, Setaria italica
  Peptide Sequence Number=SeqID_124192
gcagtttcctggggatgttcagagactgaatatcgccgtccaattctctgataagatcactcagagtctgtagtttcaggttagcagtgcgcgtcgtgctaacgtcgaccatcgcctcagttcgtttacctttccttctgattacttcccgtcctacgtctgaaagaacctcgtttcctttgtctaaccacttccctgtgttaacatggatagcactgactggagcatggaatccagttatcgccttggcagtttcaagtaagtagggatccttcagcaacatttccgtaagcaagagttggttctctgtgaatgaatcacatgaaacaacaatcaatcttgtgatttttcgaatctgtcaggttatcgggcttcatgatatgatcaaacctgcaataaaagaataaggttgtccaaatgctggttcaggcatgtagattgctctgaaattctttcaattactataaagtaaaacaactaggttctagtta

SEQ ID NO: 58219 - DNA, 280 bp, Setaria italica
  Peptide Sequence Number=SeqID_124193
aagtttgcaacacttcccagttagtcaagcctcacacagttagtcaagcctcacatgcacagcacccatggcgtaacgatacatcaataagctcccttgctacatcagtgatgatgccacccaatatgttcttctctaaatccttgacaacttcattcttctcgattggcaggtcccgcagacggttccaaccaaagtcccacactgagttagcatcagaatgtgtatgtttctaattgttctactttgttaggtagttacctatttttctaagttttct

SEQ ID NO: 58220 - DNA, 221 bp, Setaria italica
  Peptide Sequence Number=SeqID_124194
agaagggcccgtccttgtgtttgtctccgtccttctcgccctgctgtcccaaggagcgtggaccgtggtgggcgagaagggcccgtccttgtgtttgtctccgtccttctccatcgggcactcgccctggatgctcctgagcacctccaccaggagctacgaaccctgaaagccaaaggacaggtagtctggcatgcctcgcacactactcacactgagtc

SEQ ID NO: 58221 - DNA, 200 bp, Setaria italica
  Peptide Sequence Number=SeqID_124195
gagccgctgacttgaggagcttcgaggatgagttgatcacgttgttcttcctcctcttgcgcataatgaacagaaacgcgccagcaccaagcacggcaagaccagcagcagcagccgaggcacctgcaataactttgagaggagtcttttttgatccgagtgaagaagagtcagcaagtgtcttactgcagccgccgtcg

SEQ ID NO: 58222 - DNA, 129 bp, Setaria italica
  Peptide Sequence Number=SeqID_124196
cccacgagtcgtcgtaggcggccgggagcgggtgcatgttcatgaacctctccacgcggccgctcctgtactggcggaccatcgggaagaagtccgcctgcacctccgtgtccggtccgccgccgccgc

SEQ ID NO: 58223 - DNA, 244 bp, Setaria italica
  Peptide Sequence Number=SeqID_124197
tagactagaccaataggaaccggtaccaaagtacgtaacgacgggcgggcgcatgcagatcgagccctactacggcggaggcgcgcggccggacttccggtcctactcgtacagcgccggcgggggcggcggtatggggatgtcgtcgtactcgtaccagtacgagtacggcggcggcgcggcaggggcggcggcggacggggacctgaagcggagcaagtcgtcgaagcggcggtggctggcg

SEQ ID NO: 58224 - DNA, 353 bp, Setaria italica
  Peptide Sequence Number=SeqID_124198
ggtttacgctgttcacttcaaatcgtataagggtcacaaacagacgaatatcagcctccgtcagctggttgccacatatatacggttgcttgcctagaatctcctcgcatttgtccagagcctcatataatcttgtcacagcctcgtcatatggcccctgctgcttggcaaagccacacttatacacaccattgtttatcgcgtcgtataccagctctgagattatccggatgctcaacaccgagttcaacaacatcgccgggaacccagggctggacctctacccagttcacctccgggcatccatcaacgagatcaatgagctggtatacacaccattgtttatcgcgtcg

SEQ ID NO: 58225 - DNA, 299 bp, Setaria italica
  misc_feature (230)..(230): n is a, c, g, or t
  misc_feature (251)..(251): n is a, c, g, or t
  Peptide Sequence Number=SeqID_124199
ttttttaggtaaaaaacttttactaattacgtactaacgactaacctaatttagtaatttttaatttaaacaatgaggctaccagcattacaagttccgactcgctcaaacaagaaatcgaagcattccaaagggaaaaaaataaaaggagattattagcgatacttgcagcctctgacacagccaagcacaagatcctcaagcacaacacagcacaggatgataggacnctcaaagaataagcaccgaanagatccctcacgagctaaacctctccctgtcatgtggggcattgtagt

SEQ ID NO: 58226 - DNA, 309 bp, Setaria italica
  Peptide Sequence Number=SeqID_124200
tgacaccaaatattggagtcagtgcctgaatcttttgcacagaggtttcatccactaagatagaaggcactgacaccaaatattggagttgtctacagtgggatgggtccagatttccgtgttctggtgaggaaaagccgaaagcaagcacaacagtactatcggttgtacaaggaacatatacccgttacacagcttgtacgagagactgctgctgttatgcaggagttcacgcaatcaggtggtgtaagaccatttggagtatcgctgttgattgctggatatgatgacaatggcccgcagctgtat

SEQ ID NO: 58227 - DNA, 295 bp, Setaria italica
  Peptide Sequence Number=SeqID_124201
gcttgtgcagatcgagcacgcgctcacggctgtcggatccggccagacctcgctcgggatcaaagctgccaatggtgtagtcatcgccactgagaagaaattaccttctatcttagtggatgaaacctctgtgcaaagattctaggcactgacaccaaatattggacgttgtctacagtggggatgggtccagacctcgctcgggatcaaagctgccaatggtgtagtcatcgccactgagaagaaattaccttctatcttagtggatgaaacctcagtgcctgaatctttgcac

SEQ ID NO: 58228 - DNA, 275 bp, Setaria italica
  Peptide Sequence Number=SeqID_124202
actgtgtcaaacaacgaaagcatcacttataagcagccggcctgaagcttttcttttggttttatttgtcactcactgtaaactgatttgctccagtgtcttgtgatgcttacattggaaccctcgtggatgcatattgtagacaagaaagttaacgtcaggtgggttgatgttgtatttgacctactccctgcggcttattttattgttgtattgtctacggtttctttgtttgtttaccctttatttcgttatttgttctttagggggttttt

SEQ ID NO: 58229 - DNA, 117 bp, Setaria italica
  Peptide Sequence Number=SeqID_124203
taataattgtatcacttgtagtccgttccggaacagagatttttcgcaacgagccgcgtccgctgcgacatgctactggtactggaacatacaaatgcgtactgtactttgcgtctg

SEQ ID NO: 58230 - DNA, 462 bp, Setaria italica
  Peptide Sequence Number=SeqID_124204
actgcgggtatgcttcatgccatttcttcagtccaacaatgattttctagcggactgcttccgatcgccaactgaaattgtatacagtggtattcttatgcttctgatcttacctgaaaatttgactgcaactgttgctgacagggctgcccagctcggcatgaagctggaatggactgacgacggcgtcaaaacgataatgggcccgataccggcagtgaagtgggacgagagccggggcaggaagatctggttcaacagcatggtagccgcctacaccgggtggaaggacgcccggaacgaccccgtcaaggccgtgaccttcggcgacggctcgcccttgcccgccgacgtgatcgccgagtgcggcaagatcctggaggaggagtgcgtcgccgtcccgtggcagcacggcgacatcctcctcatcgacaactgggccgtgctgcactcccgccggtc

SEQ ID NO: 58231 - DNA, 233 bp, Setaria italica
  Peptide Sequence Number=SeqID_124205
ttaggagaaggatgggctgatatatacaagggtcttaggagagggtggatgatccatcttctccaatcggtcgtggatggcaatcaacatttctcaccaaagataaagctgtcgctgaagaaaggtagcatcattgcagattatcataattttgccatgagttcagagcatttgcattacataaattcccatctaacattgttgcataaatatatttgttctgaagaaatcat

SEQ ID NO: 58232 - DNA, 186 bp, Setaria italica
  Peptide Sequence Number=SeqID_124206
gtgccgacttaacaatgcaattaaaaccagtttggtattcttgtccataatggttggcaaagagtttatatgctgctctgattgctctgaaccaaccattatggacaagaataccaaactgggttactgcaaaagtggtgccgacttaacaacccagtgaaaagtttcttgtggttttaattgcat

SEQ ID NO: 58233 - DNA, 259 bp, Setaria italica
  Peptide Sequence Number=SeqID_124207
ttttacccattgtttggattcccatcctcacagtcatgcatctgcccctttgtaaaccttgaggtgtgtaaatagtcttcttcccagcctgcccttgggaagcatgccacgcactgcatgttcgatgattctctccggaatccttttctgaagttggtcgaaagtttcttctttcatccctccaggccgtccagagtgcctcctatagagcttctgcgaccgctttttaccagaaacagcaaccttctctgcattgacc

SEQ ID NO: 58234 - DNA, 253 bp, Setaria italica
  Peptide Sequence Number=SeqID_124208
tatttcttgtcattgagtagtcatgtattatggtatgcttttattcaacccaaatctctgctttccataatacatgactactcaatgacaagaaatatgacgaaatttcagcctttggtgtccaaattacaaaaagatttacactccctggggcagatgcatgactgtgaggatgggaatccaaacaatgggtaaaaccttcaggggaggaattcatcacctcatccatttcaatcgatagggattctctagt

SEQ ID NO: 58235 - DNA, 264 bp, Setaria italica
  Peptide Sequence Number=SeqID_124209
atatcgcgagcaccaaaggccactggaaggccacagaacagctataaacgaccactagacgaccacaggtcattagaaaaaacgtaccagctagaaatctttagaaacccaataaggcacagcctatttcaccactttttatacaaagtgggattcggtttccttatgctcttttttacaacatacctttttctaacgttccatgtcatatcctttctgtctactttttacttctcttgcatgttcacgttcaaattgattatc

SEQ ID NO: 58236 - DNA, 185 bp, Setaria italica
  Peptide Sequence Number=SeqID_124210
cttgatcagcatgtaactcaaccgccgaatagactgcatatgcaggtttcttatggcagaaaaggtctggttcaaccaagttagtactccctccattctcttataaatgacgttttagacaagtgttaccttcagcagcaagggggtataggtaaggactatgtatttcatcagtaacttgagca

SEQ ID NO: 58237 - DNA, 318 bp, Setaria italica
  Peptide Sequence Number=SeqID_124211
tagtttactaagtacgtaaggtaacctttttttttactaattcttatttgcttccgccgataatcttcaatgctgggtttcaagtaaagaagaaacaattcttccgcaactttatgacaattattttgtttggtgctgttgggactctgatttcctttgtaataatcactcttgttggcaaccatacgatggattgatgataattagtcctgaaaccccattcatttgtggaggtcatcttccttcaggaaactatcttcaagcatgatgtacacaaaccttgtagccctcgaactttgatgtcttgctcaggtttct

SEQ ID NO: 58238 - DNA, 244 bp, Setaria italica
  Peptide Sequence Number=SeqID_124212
tacttttgcaactttatcattcattgcagaaatttttctctttctctatgttgggatggatgcattggacattgaaaagtggaaattagctagtagcagtcctaaagaaccaattgctttaagtattagataaaaggctgacgcgggctctgctcgctgatccgatgattcatgataactcgacggatcgcacggccattgtgccggcgacgcatcattcaaatttctgccctatcaactttcg

SEQ ID NO: 58239 - DNA, 424 bp, Setaria italica
  Peptide Sequence Number=SeqID_124213
gccattacttgtatgattataagccaaactgaatacgtcaaacttttgtgtgatttggtatctgttgatgtactccggtggcatgtatccaggcgttcctatgattactttcgtggtacaggtttgtgttgaatcaaagagtcttgacaagccaaaatctcctattttttggcaccatattcttatccagcattatatttgcaggttttaagtctagatggtagatagggtctttggatccattatgaagataatgtaaaccctcacaaactcctctaattattttgtaacgtttgtgccaaccaagtccgcaggattcatcagaaagaagcttttcaagggttccaccctgcaagtattcaaaacagagagctcgttcttccactcactcatttgtaaattgcttatcatcatcaagtcctgg

SEQ ID NO: 58240 - DNA, 357 bp, Setaria italica
  misc_feature (79)..(79): n is a, c, g, or t
  Peptide Sequence Number=SeqID_124214
tcctgcgtaaacatattgtccatcgtactccacaacttttatgagctatttcatagcagtagccaactaagcggactanatttttgatgttggagtctcataaggttagtacactcatttgtaaattgcttatcatcatcaagtcctggatgcttattataaagcttcttcacagcaacctcttcccccattgtcgagtactcccttgtaaaccactccataacctccataaccaattatgcgatccttggaaaacttatttgtaatttgttctaacaaatggaatgtgaaatcccttggcatcacacttgtaggagtttgagaatatcatggagaacgatccacaacatacaagtg

SEQ ID NO: 58241 - DNA, 248 bp, Setaria italica
  Peptide Sequence Number=SeqID_124215
ggcagtgtatgagtggaaaatttgttaattggaggacaattatggcagggaatttagcttgatcatattccataaaacattggataaagaatgccacaatttgtagacaaagtcgtgttgcaggtgaaaatgaacaatcattgggaacagtgtgacaaaacctcgtctgcaagtgatcttttcacatcatcaatcttattcagttcatcaacaatctctgctatagtaggccttttcactcggtcgga

SEQ ID NO: 58242 - DNA, 227 bp, Setaria italica
  Peptide Sequence Number=SeqID_124216
ctgagataacaagccgacgacaggaggcgcaaatgaagctagaatagactcgaaagtcctgtccagagcataaatgctcgttctttgtttctcgggcacaatctctgcgaaaatcgggctgtgcaagaagcagagagtatttaacatcagatcgctctatgtttattggacgaaaatgaagtcagcaattgacacaataggaggcagatttttatggacacttgtta

SEQ ID NO: 58243 - DNA, 192 bp, Setaria italica
  Peptide Sequence Number=SeqID_124217
gatttctctgctgattcatctatcgtcgaagaattgattgagaagccgtccaggaagtcgctgtcggagtcaagctgcagctcaatcattttagctcccagtagcaaaaggtagtctccttcaatttagtaggaaaagttttagtttcgattctgtgtcactgtaaatagcacacaaacgcgcgagcaggga

SEQ ID NO: 58244 - DNA, 458 bp, Setaria italica
  Peptide Sequence Number=SeqID_124218
tgtaccggtcgtaaagttgtttggtttgtttgttagtattggtcgtcgtattggtaatttggtaaactacttgtccgtccggcaccacaggtggtgctgctcccatcggtaccaatggcctctgagggtgatgggaggaagcaaggaagcattggagtgtccttgtccagcagattggagacctcaagttcagcttccttgtattgatcagcttccttgaagcatgtatcagcttcatcctccaatttggctgtcaaagttgtctcagcaaccacctctggctctataacggataaaccaaaacaaggaagaacaagtcagttatcgctatggagctaattgaccaaatggccaaccaaattggagaaacagccaagatgcatgaattgctttcttagtagggacgtgagattgacctaaagagcaagaacttgccataatctcataagtccatgtat

SEQ ID NO: 58245 - DNA, 473 bp, Setaria italica
  Peptide Sequence Number=SeqID_124219
ggacacgagcgccgtcgcggcgggggacggcgacgacgagactctgttctggctctggaactgcgccatgttggcgaacgacgtcgactgctgcggctggagtgtgaacagattgacgtactcctccttggccgccgccggaggcggcgccatggcctccctcggccgcttcctccgattcccactcgctgcaaagaaaccgaaccgtcacaatccaggaaccgtagggccgcggtgttaatcaacatgggcgcagtggccggccggcacacacctccaccgctggcgaagtagactgccgccggcgagactccggcgagctgcggcggccggggcatgtccatctccttcctctccggctcgcctctgcgacaaagaccacggagcacaggaacccgtgagaccactccccaccaatcaaagctcccttgtacgggcgggaggaggagcgagacgacgcgccctggggcgga

SEQ ID NO: 58246 - DNA, 256 bp, Setaria italica
  Peptide Sequence Number=SeqID_124220
tagcaaactccaaaccttgtgtgtgcctgagaccatttgtgttttcctctgaagttggtaactgacctttggtatctgacgctttgttgtggcaggtctctcgacaagcacacatcaggtccaccggccacttgctcctacgacgtcctctgcttcggcaaggtgctgctggagctggtgaccggcaacttcggcatcagcgggtcgaacgacgccgcctcggaggaatggctggcgaacactcttaaaccaagaa

SEQ ID NO: 58247 - DNA, 215 bp, Setaria italica
  Peptide Sequence Number=SeqID_124221
ctggacttgtttgctcagggggatgaccgatccgttcccctgtgatgtcggcgaggttgtagccgttggtgaagcgcccggtccgccggaggacggtgcgcgggaggtcgacgccgttcgggggcacggccctgggcgccggcggcggcaggaagtcgttgttgccggcgtccaccagcgagtcgccgaacacgtacaccgccgggaccaccggg

SEQ ID NO: 58248 - DNA, 447 bp, Setaria italica
  misc_feature (332)..(332): n is a, c, g, or t
  Peptide Sequence Number=SeqID_124222
gctgcaagacacatgggttgcgaccagattccccaatgatacatgatagggtaattgtaatttacaagatcaaagctgtatgcataactgaaagtacattttcttattagccatagatggagctttggttaacatgatagagtttcagaaaattgcagaggtgataggcgattggtactttgaaagagatgctgccaaggagattgactgtgcctatccttgtgattcaacttgtcacaaccttataccatctgatcaggttggtttcttacgataaaagtgttttgaacaaaacaacaccactgttttagtagctcttcaagcaaaaaagnggaactgatacataatgcctcattgattataggaattgaggatgtattagaagtttgcagatgattatgctcacttctgatcatactaaacaacgttacaaagtaagtgcagttc

SEQ ID NO: 58249 - DNA, 311 bp, Setaria italica
  Peptide Sequence Number=SeqID_124223
ttagttatttgtaaggtcgtaacctagtaggtcagggatgttcataaactcttgctttgcacattgccagagtgagctgcaagacacatggtttgcaccagattccccaatgatacatgataggaggtgataggcgattggtactttgaaagagatgctgccaaggagattgactgtgcctatccttgtgattcaacttgtcacaaccttataccatctgatcaggaattgaggatgtattagaagtttgcagatgattatgctcacttctgatcaatactaaacaacgttacaaagataggaatctcagg

SEQ ID NO: 58250 - DNA, 244 bp, Setaria italica
  Peptide Sequence Number=SeqID_124224
taggagctaccacggtgaaatgcctgagtgatgcgggatttttccttgatctgaatgatatttctggcatcaacaatataaggcaattctttagcagcctagtctccgtgcagggagttcagaagaatttgaaacaaagattgccagaattcaacagactatccatacctgttgtttttttccgcaatatgcacttccatacattagaaccccatatttcatcttgaattcagcttatgacgtg

SEQ ID NO: 58251 - DNA, 376 bp, Setaria italica
  Peptide Sequence Number=SeqID_124225
gccaagccttgaacacgtcagtgcacggcggatgccaccgtcaaggaacacgggaacacgccctttgcttctcttacaacctgaattttccttgcctctgtgagttatcaccggactgtagatgtgctaggccgctgtgcagacgtgtctgtaggatgtggtttagcatacctcttctaggcagcagatggttgccggaagatagtcaagctgggcgtccccccgtggttggacatgataatacccgcaacaccgcattcgatagcaattcgagctgcgcatttgcaaatgtttcatgggattgtagcttgggtcgagtggcgtaacatttaaagaagtaactggaaccaaatacttaccatcttcagctgtttat

SEQ ID NO: 58252 - DNA, 495 bp, Setaria italica
  Peptide Sequence Number=SeqID_124226
tcccccgttctagggtctagttgttgtcccctaatttttctttcttctagtactaactattaacttgttaccctagttcaaggcgacgactgatgagaaaagttaagagtcagccaagttccagtggccttcgtatgtcacctttgaaggaactgatttctcacggtattgcagatctcatctgccacaccagcgttttcaagtaggaatttctcagcttccgccttgccaggcaggaacacgccgttgatccaatacccagacccatccttcacaacaactccgaccgaagaagccatctccagggtctcagattcatggcagatccccttcccaaatctgatgtcgatgccagcttccttcagactagctggagctaatttgtcttgatgatctgcactgataaagcaatgccagtagcctgcataagctggtcttcactatagcgcagttccccttcttgaaacgttccctctaattctgactgcagcatag

SEQ ID NO: 58253 - DNA, 242 bp, Setaria italica
  Peptide Sequence Number=SeqID_124227
cgttgcccactatgttaaaagaaaatacaagacatataaatagatgtcatacctgattcacaaaaataaataaagtgattcagagcgacacaaagtgtactgaattttcctaagcgcctgagtcatcaaacgggattgaatgtcttcagaattagtgtatatttcgccttctatttcacatttgggaataagtgctgccacctgtcacaagtccaataaaatcaaggtaaacataacatggt

SEQ ID NO: 58254 - DNA, 285 bp, Setaria italica
  Peptide Sequence Number=SeqID_124228
gcaacaagattcattttaaaatctcactcaatttactaatttacagtacatttctgcataactgtttctatttgaagtgcaatcaagataatagcacaatctaagcaacccacatatgggaaatcgcataagaattcataccttcttcctgcagaactcgaacagggggctgagataccgtgcacactgcttgaatgttgcaaccatcgacttccccttggctgtccgcttctccagctccgtcatatcatccagctcctggttccactcgttaagcagcttctt

SEQ ID NO: 58255 - DNA, 309 bp, Setaria italica
  Peptide Sequence Number=SeqID_124229
aaactaactccttccgaactggcgaagagtttgctcttgaattcatgcaaaacagggcaaacacaacgaagcctttggttccaatcatctctgatgacaggaccatcagcaccagcttcactccttggggggaagaagctaatatttctggagataaaccatcaaagaagctgttgacatttcctccattcagtgaaacaagcagtcaaggatcaaataagaggaaccaaggccaatagatggcaagctccggtatgttggtggtgagaagcatctgattcagattagccggggagtgtcatggcaagg

SEQ ID NO: 58256 - DNA, 265 bp, Setaria italica
  Peptide Sequence Number=SeqID_124230
attgtgagatacaagttattattttaaccctctaattgcatatctccagatcatatcgcccatggggaacaaaaccacaactagctgaataaggatgctatgtgattctgttcatgccagctaatattatggttagctattaaaaatggattgagaaataccacaaagatcaaacgctgacctgagaggtaatgtcaaagaacgctatacgctctccatgcagtctagaaacaattggagctggaggtcctgacgttgcactatc

SEQ ID NO: 58257 - DNA, 463 bp, Setaria italica
  Peptide Sequence Number=SeqID_124231
gccttggcacatatgatacctccaggagcaccaaaagcacttgcaggattgctactgttcctagtcttttttgagttgcaagcaatgataacatcttctgtgccgtctccacccatgacagaccaaccatcatcattgaaaccacttatagcatcgttaaagcctcgactaagcctctgactaaatgttcgtaggacagctggttgtctccccaacgcatatgcaacctctccactagtttcttgagcaatttgtctgatgtgccgtagtgctgcagttgtcatcttctgagcaactaccctagacgactcatagaggggccgaagaacttcaggacactccaagcatcaaggtccagatggtccactatacgcacaatcgagcccccaccctcacattggcggactaaatagccactaggaagcatctcagctcttacaattgtgtgctgtgcagtgctttg

SEQ ID NO: 58258 - DNA, 385 bp, Setaria italica
  Peptide Sequence Number=SeqID_124232
accaaggaagacaaccaaaaagacaacttagacaaggaattagactaactgttacctagtcttttttgagttgcaagcaatgataacatcttctgtgccgtctccacccatgacagaccaaccatcatcattgaaaccacttatagcatcgttaaagcctcgactaagcctctgactaaatgttcgtaggacagctggttgtctccccaagcatatgcaacctctccactagtttctgagcaattttgtctgatgtgccgtagtgctgcagttgtcatcttctgagcaactaccctagacgactcatagaggggccgaagaacttcaggaacactccaagcatcaaggtccagatggtccactatacgcacaatcgacgccccca

SEQ ID NO: 58259 - DNA, 321 bp, Setaria italica
  Peptide Sequence Number=SeqID_124233
gcccacattgctgttattcctaattttcttagttgaattgcaagcaacgacaacgtcttcaattccatctccacccattatagaccagccatcatcattgaaaccgctaatggcatcattaaagcccctgctcagcctttgactaaaggtccttaggactgcaggttgcctacccaaggcgtacactacttccccacttgtttcttgagcaatttgtctaaggtggcgcagtgcagtggccgaagcacttcaggaacacctccatgccttgagatctagatggtccactatatgcacgatcgaaccgccaccttcacatgg

SEQ ID NO: 58260 - DNA, 372 bp, Setaria italica
  Peptide Sequence Number=SeqID_124234
accaacttcaaggctagaggccaaatctaatgttctttccagagggtacaccatctgattttatgtccaacggtataacgcgaaagcctgaagatatcaagggagcatcatcagggaaaagctcatcgattggtgcaaagacaagctggaagcaagatcccattgatttctcctcaattccagtgcaaagctgaagcagatggatatctcttgataaagaacatcgtcatgtgtcagagcctgcccttcaagacgaacaacttctaagatctcctcattctccactgtgtgagcaagtggcatgatgatctgactcccagaaatctcatagaccgcaacccaggaagcgaacaagggctcgtttcagcgctg

SEQ ID NO: 58261 - DNA, 417 bp, Setaria italica
  Peptide Sequence Number=SeqID_124235
ttccttaggttagttcttaccttaaaagttcttacttttgttcttaggttattttgttcttacttgtttccttagttctttttttgtagtttgcaagcaatgataacatcttctgtgccgtctccacccatgacagaccaaccatcatcattgaaaccacttatagcatcgttaaagcctcgactaagcctctgactaaatgttcgtaggacagctggttgtctccccaacgcatatgcaacctctccactagtttcttgagcaatttgtctgatgtgccgtagtgctgcagttgtcatcttctgagcaactaccctagacgactcatagaggggccgaagaacttcaggaacactccaagcatcaaggtccagatggtccactatacgcacaatcgagcccccacctcacattggc

SEQ ID NO: 58262 - DNA, 324 bp, Setaria italica
  Peptide Sequence Number=SeqID_124236
cttagttgaattgcaagcaacgacaacgtcttcaattccatctccacccattatagaccagccatcatcattgaaaccgctaatggcatcattaaagcccctaatggaagcataagatggtttgatgtttttaactggacaacaagttgtacatgagagttgggatggaagttcaataaaaattacctgctcagcctttgactaaaggtccttaggactgcaggttgcctaccaaggcgtacactacttccccacttgtttcttgagcaatttgtctaaggtggcgcagtgccacagtagtcattttctgtgcaactactatag

SEQ ID NO: 58263 - DNA, 442 bp, Setaria italica
  Peptide Sequence Number=SeqID_124237
aatgattcccctgcttcatccgagtggctgaccagatccacccccaaatggtactggtagcttttgcaaatccagcgaacaagtgttgcagcttcagggaagccagaaattatcttctgcccagtgctcaagccagaccgcgagggagaaatagccatcgatactctttgcacagcagagacaatgcttcgaacatactgacgggccatagctgcaacgctatcttggagatgtatttcgtaggggaactgaaaggcaattgtcagcacagatcgtaggttgcagtcatccggagatccatcccctgaggcatgttgcgtggttgtaccaacttcaaggctagaggccaaatctaatgttcttccagagggtacaccatcctgtgtaagatactgatggttaaatgatacgcatgtggaaacaggagacagattaaactaac

SEQ ID NO: 58264 - DNA, 237 bp, Setaria italica
  Peptide Sequence Number=SeqID_124238
tttttttttgtagatcagactctgcataacttccagtttcgtcataaaataacactggattcaagacctagaactagtgcaaccaacataaggcttatcacggctgatgatttccctcgtcgagatcatacaaaaatggatctgctaatcagaccagctcggcatcacacaaaggaccagttcacgaaacagaactgagacacgcaaaggggataggcaaggcacacaggggatagg

SEQ ID NO: 58265 - DNA, 133 bp, Setaria italica
  Peptide Sequence Number=SeqID_124239
ccttgaagttgttacaattgtttccagctagaagtggggacaattgaacttgtctacatgcagatgtatgccccaactgcattcggaccaccccggaaccactcaatgatctctcacagaccacaaggctgcc

SEQ ID NO: 58266 - DNA, 249 bp, Setaria italica
  Peptide Sequence Number=SeqID_124240
cgcagccacgcagagtaggctatggattcatacacggtaacattcggggaatggatatcagtctgttcgcaatagccactgatccgggcaaaagtttcttgttttttggggtaaccggacagggtaacatctccttcaacagctccgctagttttccttcctgccaggacatccatcaaagtggtgaatgagtttttgaaggataatctcggcacgacatagcctaggaagtcatgccggatgccgaga

SEQ ID NO: 58267 - DNA, 392 bp, Setaria italica
  misc_feature (383)..(383): n is a, c, g, or t
  Peptide Sequence Number=SeqID_124241
aagatgaggtacaacaactccagcaagaggtcagtaagataaacaaaaattctgacacgatagaatcgttagcacgtgatactgagagaagggtggaaactctgagttcggaggtcaaaaagatagaggatataattgcggagcaatggatccaaattcgacaatttgaacaagcatttgtattaactaagatgatggcatcaaaagttcatgagagaagtaggccattgcagatggttttcaagtggcctggaaaagaacaattcttaaggtaccttaccttggcacctccaactgcaagcagcatggttctgaatgttgtacatgttgcaatatttagttgaagcttgctatatctaggtacaaatgggtactgcattaangatgcgccg

SEQ ID NO: 58268 - DNA, 264 bp, Setaria italica
  Peptide Sequence Number=SeqID_124242
caagctttcacataatctacagcctcaatttctaaatataaaaagaagcctagccctagagcgtggttccaaacaatgttgcctaccctagtgacaataccagtttggattggtctatacagagctctctcaaatgtggctaatgagggacttctgactgaaggatttttttggataccttctttggctggtcctacaacaattggtgctcgacaaaatggccagggaatatcctggctttttcctttcacggatggccatcca

SEQ ID NO: 58269 - DNA, 219 bp, Setaria italica
  Peptide Sequence Number=SeqID_124243
taccctagtgacaataccagtttggattggtctatacagagctctctcaaatgtggctaatgaggttgatatactgaaacttccatcatgtcgatgtcattcttcattttattgaaaaggaatatcctggctttttcctttcacggtaagctctgagcatgaataacttgatgttccatagcataggatttgttccctttttgtacacagcagcacagt

SEQ ID NO: 58270 - DNA, 520 bp, Setaria italica
  Peptide Sequence Number=SeqID_124244
tttgttatgcaattacacagcaagcaagcacatacatcctgacagatcccaaagtgtacgcagggagttatgtagcaggcacatacatccttcccttcagattatttggtagctaatgacataatgtagcaagcaagcacatgagtgcaaaaggtaggatacagttacactgatacttgccccggcagagaggtggatggtactcgccggcgattggggggttgaattcagatttcgagttcaggcatcggtgaggcgggcgacgatggggtacttggcctggaacttggtctcccagtcagcgaggacgccgagctccttctcggtgaggccggagaggtcgccggagacgtcggcctcgtccttggacatcttgccgagggcgcggctggcctcgcggccggcgaagatggcgtaggcgccgccgggcccgtagaagctacggccggaggtgacgtcgttagacctttgtccgtcggtattggtagtacgttagtattcggtctttggtacgggttct

SEQ ID NO: 58271 - DNA, 173 bp, Setaria italica
  Peptide Sequence Number=SeqID_124245
tgtatggctttgtaattgcactaaccccaatctttcattcagattatttgttatgcaattacacagcaagcaagcacatacatcctgacagatcccaaagtgtacgcagggatgtatgtgcttgcttgctgtgtaattacaaagccatacagctcaatagttgaactaacccc

SEQ ID NO: 58272 - DNA, 429 bp, Setaria italica
  Peptide Sequence Number=SeqID_124246
tctggtatagatattatttaggtaagggatttgattacagtgtcaattgattacaaactaccgcaaccaaatatatgtaatggaattcgtacctcaatgatcaaattacattacatttaagctaaccaaacatcaaattacgttacatttgagctaaccaaacatcacctaagagtagtcttgggtatggtagacttgatcacttgatagcataggtggaaacagcaccgccatcatactgcttgtggacgtgttgttgattgtgcaaatgcagaaaatgttggagaccttgtagcttatctccattcctttcgttcacagtaaaaaaaaaacagtgcttacggattcaaaagtccgagcacctcgagatcactagaatgtcattagtaaaaagttagttcttaaaggttattttattttttttaattt

SEQ ID NO: 58273 - DNA, 308 bp, Setaria italica
  Peptide Sequence Number=SeqID_124247
ttaagttttaaccttttagtttaagttacttttaatttctttccttaattttcctttttcgtttctactagttaaaaaaaaactagttgcttacggattcaaaagtccgagcacctcgagatcactagaatgtcatagaaaaagtagcaaaggattatttttttaatctcatttgctactaagttgtcgaaagataagtagttggacctttcatcacaggggaaaacatggcaatagcaatatgagtcaaaagtattgggctaaaaaaattcaaaaatccttgcttgccagtaaagtggacgatgtat

SEQ ID NO: 58274 - DNA, 287 bp, Setaria italica
  Peptide Sequence Number=SeqID_124248
aagatcctcacctacgagccctcctctttttgacatagcgatgcccgtcttgggtgagatttgcgaagacttgcctgtgccagcaacagggtcaagttctctgctctcattggtcttgaccctgttgctggcaccaggcaagtcttcgcaaatctcacccaagatcctcacctacgagccctcctcttttgacatagcgatgcccgtcttggtcatcggcactgggctgggagaggagaagaagaacatactatttcctccctgtggttaacatccttgggagcgca

SEQ ID NO: 58275 - DNA, 475 bp, Setaria italica
  Peptide Sequence Number=SeqID_124249
tctaaactaagtctaacttgtactactttgttttaacttctaattaagttcctttatttgtagttctaaactaagtctaacttgtactactttgttttaactcaataagtccttatgatttaaacaagtgtcagttgcttgtttgtttccatgtttccaaaaactaaatgtcacctgttgctgtatgtcctttcctaagtccaaatcataatgaactgaataaaaataatggacagagttacatccgtgcattctgcttaatgataatggcaagcccttaaccccaaatctattggggaaagctatactgggctatgcaaaaaaatgctcgggtgagcagtagacagccccaatctgttattctcctttttgttccaggagttgtgtttgttttgtactctgtactttggtttgttccccttttttaataaaacacgtgctatgcagttctaagacaaaaaaaaaaaaaaaacta

SEQ ID NO: 58276 - DNA, 164 bp, Setaria italica
  Peptide Sequence Number=SeqID_124250
aaaaaaggaaaaaacaaaaataactaacgaaacaatagactaagaatagaacgaatgctccaaagttcatgacctgcatgtgcaaagacggcaaaaactgcaaggacctgatgaggaggaccgttgctggcatcatggtagcgttcttgaaggctgtgcttaat

SEQ ID NO: 58277 - DNA, 299 bp, Setaria italica
  Peptide Sequence Number=SeqID_124251
taagttgtactagtatttggtcttcgtcttaaggggtcttacctattcctattccttgtccctaaaggtcgttcgtagccgaacctttccaagcttcgctttggccggccacagccgaggtggccacacagcgttctctcttgtcctggggcatggcaagaccaatctcaagttctctgctctcattggtcttgaccctgttgctggcacaggcaagtcttcgcaaatctcacccaagatcctcacctacgagccctcctctttttgacatagcgatgcccgtcttggtcatcggcact

SEQ ID NO: 58278 - DNA, 258 bp, Setaria italica
  Peptide Sequence Number=SeqID_124252
attctgcccaggattcctctactgctctactgcatgatcacagggctaaacatgccatttgcactaatcatgtcacctaaaagacttcccttcccctcacttttgacttttttaaaaagaacttctctgagcttctagtaacaccttgtgctaaacaaaaaaggttctgccaaagaaaaggacctcatcttttcttcacttcagtgagtgccctcctcacaacacgcgtcctcatcttgcttactagtcctcactcag

SEQ ID NO: 58279 - DNA, 172 bp, Setaria italica
  Peptide Sequence Number=SeqID_124253
cctgtttgcttggagcaactcctggagctccatgcctgtcagggcatcaggcctggtatgggcatgcttcttgaagaccgcctcaaacttttcaggaacgaaccttccgttggcatcacggagtggaaggtgctgtactacctgtgcaaagacgaagggtaggggttttcct

SEQ ID NO: 58280 - DNA, 183 bp, Setaria italica
  Peptide Sequence Number=SeqID_124254
tgggcactgctccaaactcttcatctagaaaccatttgatcggaaccctctcaactcaatatcacaaaccctgcagggcaatcaaattcccccaatctgataaaccccagcccggcagtctgcgcccagtcaggaaacgcggaggaggaacagatcaatcgagataatattgcatatcccagg

SEQ ID NO: 58281 - DNA, 319 bp, Setaria italica
  Peptide Sequence Number=SeqID_124255
tggaaaacgttcgcttgtcgacaagagatcatcatatgttgtgcaccaacttattactggctctcgaggtgccttttttggaacttctgcctggtgtccaacccattgccttctcatctcagcccatgctacagcagcatggtttataaatgatgtatctaacccgttgtccgttgacattttagaatcgttgattattgagttgggaatagacgagatattcccctcaagagaaactgatatgctgaacgttagttactaccaattagacttactaagaacccggttagtacctaattacgttactttacttagttta

SEQ ID NO: 58282 - DNA, 215 bp, Setaria italica
  Peptide Sequence Number=SeqID_124256
agtgttaactgaaatgactgatgaatattttgttgcaatgctatggcaaaattcctcaagcaccatcctcagatcttgtatttataccgctacaagcatacctgaaggttctcaaattcatcgagtgtgttcaatacggcaaaaggagcgtggctatgaaccaaaacgtagaatagggaaagaataacaaattaaaccaaataaacctaaagtaa

SEQ ID NO: 58283 - DNA, 195 bp, Setaria italica
  Peptide Sequence Number=SeqID_124257
aggcattgaagatattaagaaagctaaggttcgtactgtaattcctgctggcacttcgttccaggaggactgtgaattgcagctcggttagggtttagcttccccaaagaaacagcttattatgtgagaacacttgcctgctcagtggcaagacttgacaagggaagaatacttatggagatgaactatatgctt

SEQ ID NO: 58284 - DNA, 191 bp, Setaria italica
  Peptide Sequence Number=SeqID_124258
acataaaacaatagtgctggttcttggggacgaaaataggcaatccttgtgcctggatatctctaaatgcatctgctgctggccgatccacagtagttgcaacgttcacctttgattcagattctaatattgagacacttggaccctgagacacgcaacagtgggataggcaaggcacacgaggggatagg

SEQ ID NO: 58285 - DNA, 286 bp, Setaria italica
  Peptide Sequence Number=SeqID_124259
gttcctattattccttgtcgtccccttgtcgtaacttccttcgtaacttgtctttgtacgaactcctccatcatggcatcgtcgtccagtgacgggacaccgccggtggccgtctcgagcccacgcaccgcctcccgcgtctcgcgcgtaagcttctcgagcgcctccgacgcgcacgcgcccctcggcagcgggggaggcttcgccccgcgccgcttcggcgccttggggtccggcagccctagccccagccccagcaccggccccttggcacccgaccccgacg

SEQ ID NO: 58286 - DNA, 158 bp, Setaria italica
  Peptide Sequence Number=SeqID_124260
ctccgacatcgacatccagcggctggccatcgagaccggcgagcacttcaccatcgacgaggtcagggagatgatagaggccgccgacgagaacggtgagtctccagcctgcccatgcttgcctttgcctggtcggtgatggactgaaatgcatgttt

SEQ ID NO: 58287 - DNA, 133 bp, Setaria italica
  Peptide Sequence Number=SeqID_124261
ctagcaatagactaattctagccaaacggtcaccacagctagtgattctagatagaaacgtttctagcgattctagttttttgtactagctggtttacttaccacatactacacatactagagcataatcacg

SEQ ID NO: 58288 - DNA, 260 bp, Setaria italica
  Peptide Sequence Number=SeqID_124262
tagagaagcttattgggatatgttatggtggcagtggcagagaaaatggcctctattttaaggtccaatgggcaggatatggtcctgaagaagatacatgggagcccattgataacctcagtgactgcccactgaaaattaaagaatttgtacaagaagggtacaggagaaaaattttgccattgcctgtgagtatttatttggtcttgattttcctaatgtttagctccacacttatgtttggtgattacatctacatt

SEQ ID NO: 58289 - DNA, 458 bp, Setaria italica
  Peptide Sequence Number=SeqID_124263
cggcacagcattgtttggcaggaaattttggccctttgcacttgcttgtgatgattgtgtagttttggaactcaaaattcactgggcaatccttcctggcctgcaacaagctcctcccagtggatccggcgctcacctggaacacgccgtcggacaagaaagggccagcggcagaggcgacccctgccagggcggtcggtccgtagtaggaggaagaggagaaggcgcccgcacgccaccgccatcgcccacgcgtcctcccaccggaagcagaactcgctgccgccgccgccgaccgtgagactctaccagcggggctgccggagggtagtggcctcgagggaatggagctcgggagcttggcggagctaggccgacgtcgatgacggtgatagaggattagaggtggtaacgtcgggtattgtcttggtacgtcctttcgtctttgttggtcgttt

SEQ ID NO: 58290 - DNA, 247 bp, Setaria italica
  Peptide Sequence Number=SeqID_124264
ctacataaaaggaagaacgtggcaacggactcacgatgagcaccataaggcgccatgatcaaactcaagcctcatcagttgcaacaccctatctttgagggaaatgaaaggagttatcgttcagtggaacaacaacgctactaccacactcaagacagtaatccatgcaaacggtggacaacacgctcaaagcagcttgcttgcatggattactgtcttgagtgtggaacaacaacgctactaccac

SEQ ID NO: 58291 - DNA, 275 bp, Setaria italica
  Peptide Sequence Number=SeqID_124265
aataaaaagaaaaattaaaactcgagcaactgggtaatgattttgaatattttaaaaactcgcaacctaaaaactaatctatctacctaacataccacctgatcgagttcaagttcgtatccggtccattcagatcatcagatgtttcccttctttcattctctcaaggtaaagtaataaagttacattcctgttcttggcaaattcatggcaggtacgccgtcgcagtgaacgtgatcgtctgcgcctactcgatcgcgcaatccttcggcgag

SEQ ID NO: 58292 - DNA, 267 bp, Setaria italica
  Peptide Sequence Number=SeqID_124266
gagcactatatggggaataacggtgttagcactccttaggatcttcagcaaatctactttaccctcctccactacctgagaaggcaacaccgcgtcctccccaacgtcatcttgctccatggaaccactcgcactcacccagaggcgccgcctcatagcaacccctccagatccccgctctacgccatgaaacgcgggtcgccggaggaagcaccgagacgcggtccaccaccggctgccggcggcctgccaacgagtggacgccgg

SEQ ID NO: 58293 - DNA, 326 bp, Setaria italica
  Peptide Sequence Number=SeqID_124267
cgagggcctcctggtaggcgcccccgaggaacatgcccaggtagtagccgcgggtggcgtgggtggggagctcgtgcagcggcaggctgtgcctcccgccgatgaactcgcaaaccttgccgtcgctgtcgcaggtgaggtcggagaggacgccgtccacggccgggcgctcctgcaggcgctggatgggaatgatggggaactgctgcccgatggcccacatgtccggcagggaggtgaacactgataggttgatgtggtaggtgcgcggcgcctcgggtagtcgtccctattgtcctacgggtcgtacgtattcttcgtctagt

SEQ ID NO: 58294 - DNA, 240 bp, Setaria italica
  Peptide Sequence Number=SeqID_124268
caggaatctagaattactcatggattttattgaagcctttgtatcataaagagaaataagagacagatagcatatgcttacaggttgcgcaggtgtttgagagcagaaaaggataccggaatagatccagtgaaattattgtcttgcagatcactgcacgaacaggagtaagaacaaaaagccaacgcctagcaaagcatgaattctctatggaaatcagacagtttaacatacatttca

SEQ ID NO: 58295 - DNA, 406 bp, Setaria italica
  Peptide Sequence Number=SeqID_124269
aaacaaaacaaaagtttcaaaaaaaaagagaaacaaacaaaacaagagttccatgttcaactatcttcagttcaaacattgttcgttgtcagctaattctttcacagtctacagaaggtctctagtgcttgaagacgattaaaacagcagtgcagttatccttgcatcgcctctcacgaacagcctccttcacgaggcggcgtactgcaagtgaggctgaagaggtctccttcaactgattctgaacaaattcaacagcatcacttggtccaaataccttcttaaactggcgatcaccaaaagctcttgatacttcaatacgaccttgtaatcttccattagaaccaacagaacctccagccttctggattcgggagcgctcctgcggaaagatgggccttatgtt

SEQ ID NO: 58296 - DNA, 340 bp, Setaria italica
  Peptide Sequence Number=SeqID_124270
ttaggtaaaataactaggaagaaaatagaaaacgaactaaaatactaggaattttaggaattcgctgatactgaaatagaaagaaccttcaactgattctgaacaaattcaacagcatcacttggtaccaaatactccccataagccatcacaccctagaatgatgaaatgatctttcttggtaagttcaaaagagtggacgtctggggttgaaatcaatccaaccttcttaaactggcgatcaccaaaagctcttgatacttcaatacgaccttgtaatcttccattagaaccaacagaacctccagccttctggattcgggagcgctcctgcggaaag

SEQ ID NO: 58297 - DNA, 216 bp, Setaria italica
  Peptide Sequence Number=SeqID_124271
ttcgttgtcagctaattctttcacagtctacagaaggtctctagtgcttgaagacgattaaaacagcagtgcagttatccttgcatcgcctctcacgaacagcctccttcacgaggcggcgtactgcaagtgaggctgaagaggtctccagcatgtacacaggctacgtagactgggtaaacatcaaatcatcaaatgatctactaccagtgtctt

SEQ ID NO: 58298 - DNA, 443 bp, Setaria italica
  Peptide Sequence Number=SeqID_124272
tgttcaatcagcgcacaaggatgccaaattaccgttacaactcttaatcttggatagctgcttaacaacgtgcagaactctgatgtatgcacatgggcatgagtcatgggcatgagtcaatgggactctacaactggatagatctcaaggtgtgaaatagcagagttaaagcactagtatcaggttcatacttgcaaaggaatggaccacctcatctgggaggtcaatctatggtctgaaacatttcgatgatattagaaggtgttgcatcaacaattcgacattatagtcgtgtcgtccgatagcaatgcctgctcgaccgcaagagcaagcaagcaaacaagcgactggcactcacctgtgggggaggatctcgcggatctggttgatgtccatgacgctggggaagggagggaaccctgcaagcagacacagggaaaagc

SEQ ID NO: 58299 - DNA, 250 bp, Setaria italica
  Peptide Sequence Number=SeqID_124273
tgggccatagcctcaaccatgagaacaccaggcattatggggcgttcagggaaatgtcctggggaagaagttatcatttatggtaacattcttgatccccactgcatattctccagccttgtattcaattactctatcaaccaaaaggaatgggaacctaacacgcacatccacatgcattaggttatttagtattatttttaaaaaaaattacctaaacttaagttaatttgttctttagtttttcttt

SEQ ID NO: 58300 - DNA, 232 bp, Setaria italica
  Peptide Sequence Number=SeqID_124274
ggaaggaggaggtagcaccacgcgcttctaccgcggcaccaccaccactctcgccacaaaccccacttctgctgcgaatggggcacagaaaggggatagggaggctgctgttgatgctgagatagcgcgggttaacaagctaccagcccatagctcctatgctatacaccgcatgaaggtgctagggaggctgctgttgatgctgagatagcgcgggttaacaagctaccag

SEQ ID NO: 58301 - DNA, 365 bp, Setaria italica
  misc_feature (72)..(72): n is a, c, g, or t
  Peptide Sequence Number=SeqID_124275
gtttgaacttagaagatggccctgcaccctccgactcaacttcttcagatggtgatgcatctgaaaatccgntttcccaaaagctgagctctgatgagttgaagtctcttttggctgattcagaacgaagtaagcttttgaggaggctcagtgaagcaaatcaatataaccggttcctcaagagacagttgcaactaaaggatgatgcagtcgtaaagttcaaaagtgaacttgccgctttggaactagaactgcagggtctaggaagataaatggaaaatatattcaatctcaccttctctccagattagaagctgttcatggtaaggttatggaccagataaaggatgttgactctttaaagc

SEQ ID NO: 58302 - DNA, 217 bp, Setaria italica
  Peptide Sequence Number=SeqID_124276
aatgtttggggtctcctttacctgatcttaatttggtagagttgtacattcgcatcttgctgaactgcaatgaacctgatgagataattccatttgtgtttcccattaattttaacatgtcataatatttgttctcaagaaatgtgggaaaagagcacaacttcgtatgttcaagtaagttggggtctgaaaaccaatgggttactactcacactga

SEQ ID NO: 58303 - DNA, 507 bp, Setaria italica
  Peptide Sequence Number=SeqID_124277
acacattaaggcaacatgttgatgaaattttgtttcagaagtctgtccacaaagctgaagaatatttagtatacgtgcaatgaaagagaagaaagagcagcctttactatttgttgcagatctacctcatctgttattgcaaagcagtccattttctgacaagcttgggcgataatcagcaactcctctttgctgaagaccttccctgttggattatgtgggctgttcaagacaaccgcctttgttcgactcgtaaaagatttcaagaatttatcttcgttcagagtccaagaaggtggatccaatcgcacatacacagggacacctcgggccagttcaatgcacgtctcgtacgtttcgtaagcagggtcgaagagcaaaacctcatcccttgatcaattgctgcatggaaaggaaaggggaaatcgaatatccatcaacaagggctcagcaaggaaaaatctagctctgaaactaccaataataattcagtagctcgtacgaaag

SEQ ID NO: 58304 - DNA, 426 bp, Setaria italica
  Peptide Sequence Number=SeqID_124278
gatcctgttggtatctgatggattgatgcttactgtttgtttccaatatattgctagcttgatgttttgtttctgcatcaattcaggagaatgaactttcaaaaatctattgactcatgtaacatggaggctggtgtagtgaagacttgggtaaatttccttgaggatacatggcaacttcagtcgtcatacaatgaacagaaggaaaatacaaccaataatgagctggagagatgcacaagcaattttctgaagttgaccaaacatcacctttgtaattttaaggaccttctaagtccatcaattgagcggatccgcacatacgtcgacaatttggcagtcttaaattcaagggaggagtcaatagaacacggaagaaggaatagaatagaaaatttactagaaaaactagaagaactagaccaa

SEQ ID NO: 58305 - DNA, 238 bp, Setaria italica
  Peptide Sequence Number=SeqID_124279
cctatcccctgtgtgcctttcctatcccctgttgcgtgtctcagggttgggacttcgacgagcttgaagaagagctgcgagctgacatttctaaatcaagcaatccaaaataaccacgcgcaccctactttccacgtggtggcttgactgaacatttgtacatactttttaattcattgaatgtacataatgttgtttcattgtgtcttgtataatgatactccctgcatgggaggtg

SEQ ID NO: 58306 - DNA, 246 bp, Setaria italica
  Peptide Sequence Number=SeqID_124280
cacattactttatgaaatgaatggaaatataagttcgtagttgtgatctattggtttccaccattaccagcaaatcctatttttatttctaatgtgtttcatataggatttgactgctgaggtgtctgaattggagaagcaaagggacgaacttgaggctcagttgaagaaggtcaacatttcactgaatgctgctgttggccggctcaagcagacaagggaagagagggaccaattttatgaggc

SEQ ID NO: 58307 - DNA, 169 bp, Setaria italica
  misc_feature (3)..(3): n is a, c, g, or t
  Peptide Sequence Number=SeqID_124281
gangatagcaagggaagtagccaataccttcaatttctcaacctgcaaccatttcactgaatgctcgctgttggccggctcaagcagacaagggaagagagggaccaattttatgaggcaaacaaccagatgatctttagtttacaagcaaaggagaatgaactttcaa

SEQ ID NO: 58308 - DNA, 175 bp, Setaria italica
  Peptide Sequence Number=SeqID_124282
gtcattatcctatgccaacaaatggacatgctgaaactcctggagctgcgccaagtgctccagaaatgaatggtgagtcttgtccaaggtcaacacttcagtatcaactatcaaggtcaattggagcatggaaattaaaattaggcttctggtaataatttcagggaaaagtgag

SEQ ID NO: 58309 - DNA, 465 bp, Setaria italica
  Peptide Sequence Number=SeqID_124283
tgggaaggcttctcaagtgatgatggtgaatctggagatcctcatgaccgcttgctctttcagtatcttgagtttgattctccattctgtcgcgaaccattgactgataaggtctctagcctttcagctagatttcctggactgaaaagcttaaaaagtagtgatttatcattgagaagttggatatctgttgcttgttcttgaaaattttgcaggtatccaatttaccgtatccccactggcccaacattgaaagatctggatgcttgctttctgaccttccatcggctttcaactcgtgtaggagatcatgttggtgccatacaatatgcttggggtagctcaccaaatatatcgctccctgtttttggtatggcttcttataagttcagcaagtcagtatggtcttcgaatgatgaggattggcagctggcaagcggcttactgcaagctgctgccgattgg

SEQ ID NO: 58310 - DNA, 299 bp, Setaria italica
  Peptide Sequence Number=SeqID_124284
tcctggaacgtcattctgacaagggatagacaccgtttccctagtttatgagggaggagcttgcgatgctgttgcgttgttggcgctctttgtccctttctctgtattccattatttaggttactggctctcttcatctcaacgggccattcgcttatcctgcaggagcaatggctctgtcttcgccgatacggatttccctcattgtttcgttctttgggattctggcgttcgtgcttggcgtcatcgcggaaaacaaaaggtcaggcccggttcctgttatgaacgttgtatcaagg

SEQ ID NO: 58311 - DNA, 130 bp, Setaria italica
  Peptide Sequence Number=SeqID_124285
taaggctattacatttgtatatacgtgtgatgctggctgcgaagtcgtaaggctattacttattctgcattttcagtttattgttcacactgaaatctgctgagactaccaaggcacacagggggatagg

SEQ ID NO: 58312 - DNA, 253 bp, Setaria italica
  Peptide Sequence Number=SeqID_124286
gtaggtgaacatgaactgcaggtacgtctccacgaagtcgcgcttgtaccacctcagcctcatccagttcatgatcaccggaggggcgatgaggaagtagaagaaggcgaacaccgcgagcggcggcaggatcgccaggaggtcgatgtcctcctccccggtcaccgtcgccagcgccgccggcgcctcaacctacagcatatataaacttgcaatttcacgttcgattctacttccatccaaagcaagcccg

SEQ ID NO: 58313 - DNA, 253 bp, Setaria italica
  Peptide Sequence Number=SeqID_124287
catccctcgggaacttcctgaagttgacgaacggcgcccagaccatcagcgcggggaagaagaggtaggtggcagaggagcctgaacttggcggagcgctgtggcgacgacgcagcgagcgtcgtcgcctgccgtctgggtagctgcggagcggtcggcggcgaggaggaggccgaggagaggaggcgccatgaggcggtggtctccatgagcggcaacgggacgggaggctcgcttcgcgggcaaggccgtg

SEQ ID NO: 58314 - DNA, 237 bp, Setaria italica
  Peptide Sequence Number=SeqID_124288
taatcccatgctacccaattgcctcaaatctccagtggcttgcccaccacttcatccggtcctggtgctgctgatgcttgttcacgaaggaaggaagctcgatgaagtccctaatggctctactatgcaactcgatttatgtatgtgttggggagctgatgtgtgaaaaagagggtgctcacgtacaggataaggatgggagatatactgtaaataaattgctgcgcagtctggaag

SEQ ID NO: 58315 - DNA, 249 bp, Setaria italica
  misc_feature (232)..(232): n is a, c, g, or t
  Peptide Sequence Number=SeqID_124289
ctactacaaatattacaacattttacagccttatttcattaggtaaactgatgttcgcatgagttcctaaactctgggaaccgtgaagagcttgaagaattaaaacagggatgatgcctacctggtgctgctgatgcttgttcacgaaggaaggaagctcgatgaagtccctaatggctctactatgcaactcgatttatgtatgtgttggggagctgatgtgtgaaaaagngggtgctcacgtacagg

SEQ ID NO: 58316 - DNA, 163 bp, Setaria italica
  Peptide Sequence Number=SeqID_124290
gtcatctcgcatatgggaagtggacagaggtggctactaaccaacatcaagaaacaattgttagatcactacaggaccgcactacggaagttcatattgcctcctgaatgatcttcagaaggcatatggaatccgtagtgcggtcctgtagtcatctcgcata

SEQ ID NO: 58317 - DNA, 320 bp, Setaria italica
  Peptide Sequence Number=SeqID_124291
cagaagtgaagatcacaagcataacacgtaagagtgccttcttggacagacaggatattgttcaaggtcgaccattcttcaggcttggatgcagtattaagctcatatgaatccctcgactgtgttaggagctccgatcacaagcctgtgaaagcgcatctttgcctcagtgcgcagcgaggatgattagtttgtctagttgacatagcagaggtagcatttataaagattgacttcttctcataaggctgtagagatgtttaatgtgattgttaaacttaaaccttgtttgtattgtttattttccttttcgttccctt

SEQ ID NO: 58318 - DNA, 321 bp, Setaria italica
  misc_feature (244)..(244): n is a, c, g, or t
  Peptide Sequence Number=SeqID_124292
atggccgacacacacattctattaggtcagaaaagcatgcagtctcttcagatgcttcttttcggatcaaagagttcggagaagtacatcggagagatgaaggtggacaaacatgcagttggaggttttgggggtatgattgggagaaagaaaggagctgtggccatgtacatcaacttcagtgggatccggatggtttttgtggtctgccatcttgcaggatgacatagctgtcaattttaancaagcgccattacgaagtgacatggtattattaaagtgtagctcatgaacacaaggtgagaagaggaactcagaatt

SEQ ID NO: 58319 - DNA, 433 bp, Setaria italica
  misc_feature (53)..(53): n is a, c, g, or t
  Peptide Sequence Number=SeqID_124293
acggccagcaagtgaatagaggagatcacgagcaagtcctggcaatgctcgancacaatgtcttctgagctatccaatcgaaacacatgtgacatggaacaacagaggtaaattttcacgaaagtcttcatcatttttcataggcaatttcagccagaagaatcaaagctatgtcagcacgcgaaagcaagtgttggtgcccctgcaatgctgactggagctcattggcgttgatcccatgaactccactgcccccttgatgcaaaatatcatcggttgagtttggggtgtcaaagtagtagtcaccactatctctggaaacatgacggctcctcagattaccagcagagcttcgaacacccatcaatggccctgacattatttctatttaattgtcttggtaagttcttagttctttggtttccttttgttt

SEQ ID NO: 58320 - DNA, 364 bp, Setaria italica
  Peptide Sequence Number=SeqID_124294
gctcgagcacaatgtcttctgagctatccatcgaaacacatgtgacatggaacaacagaggtaaattttacacgaaagtcttcatcattttcataggcaattcagccagaagaatcaaagctatgtcagcacgcgaaagcaagtgttggtgcccctgcaatgctgactggagctcattggcgttgatcccatgaactccactgcccccttgatgcaaaatatcatcggttgagtttggggtgtcaaagtagtagtcaccactatctctcaggagccaatgggctgagtgggccagatacacttcggccagtaactgcagatgtccgtcagaaaatgtcagtggaaacctgagctggcggacatc

SEQ ID NO: 58321 - DNA, 195 bp, Setaria italica
  Peptide Sequence Number=SeqID_124295
gttcgaccaccagctgaccttggttcatgaagccaagagttatatgaggtatatacattaaaaatcattcgaaagagacgtattgggatctggtggcatacttatttaacatgagtcagataaagccataaaggtgaggaacagattgagggagaacatttcaaacaggtgagctgccacaatttgtacagacaa

SEQ ID NO: 58322 - DNA, 249 bp, Setaria italica
  Peptide Sequence Number=SeqID_124296
ctttgttgacttgaattgcattgatgacaacaaagatcacatccattgccaaccattagcttctaaagcaattgtcaatctttctgaattcttaaactatgatacaattccagtcattgaatggttatagccaaaaaccaccagttaccttaacaaattccaaaaatgccaccttgctttttacactcagcagatactttcaggcttagcttatttgcatgccaagaatacagtccatagggacatcaa

SEQ ID NO: 58323 - DNA, 403 bp, Setaria italica
  Peptide Sequence Number=SeqID_124297
agatttgtgtacaccactatttatgcatgaatccagtcagaaaaaaaaactatgcatgcacagacctgtcctctaattcttatctgcttgcagtgatatccatatacgaagcaatgtatcatgtccagtttctccatgtggaagcccccctgctaaagtcgaggtctccccaacacacaagtggcaggatgtcaccctctcctatttcgagccctagaactacttcaggcacttccacacccctatctggtggtaatggtgctattccttttaaccacctaaggtatgcaacctacagcagtgagggatttgggaccacatctagaggccgggaatgaatactactttacccaaaccggacaataaaagaatacctaataccttagggacaaattacaactca

SEQ ID NO: 58324 - DNA, 268 bp, Setaria italica
  Peptide Sequence Number=SeqID_124298
gctccctaaatcctttggaacatctggctgccatatcctgtagaccaaaacccaaggtggccatgcagacaaggaatacctccttaggtttggagggtcagactatttaccaacgaaggggtgtaaaattatcttcaaaacacaggtacaacatatcctacatcccgctgagaaagaagatacgcacatatcaattatgtatccaaacagtgtttcagtgagacagttatggggtaactaagaatcaaaacatcagatacccaactaa

SEQ ID NO: 58325 - DNA, 378 bp, Setaria italica
  misc_feature (22)..(22): n is a, c, g, or t
  misc_feature (147)..(147): n is a, c, g, or t
  misc_feature (218)..(218): n is a, c, g, or t
  Peptide Sequence Number=SeqID_124299
caagcagtgttaattcctttcngaaccatttgatgaaggctcaacacctgcaagctataggccaaaatggtacaccattttcattcaaacattatatgcgcaagtaaaataatattagttttcacagtcctgtgttactaaatgacngttttgtccttcagcattaaattgactttctatatcaagaagaatattctgtaaattgaccttttttttgntaaatttcacttattattacttctgatctgaaatctaaggccaataggtcatcaacatggtctccgagatcacaatttgagtagcatgcctataaaatatagtatattaagtagaagggttatacatcataaaagtatttttttcgtaatgaaaggttaa

SEQ ID NO: 58326 - DNA, 262 bp, Setaria italica
  Peptide Sequence Number=SeqID_124300
cgcaccacatcttgccacaatgttaattccccttcttgcaacatgctgctgatcttgttaaggattatttgaaattcatggatgatcatttgaaagaatctgctgatcttacatgtctcgcgtatagacaccgtacttactcaaagtatctttctgtaaaatcagattcggtgacgttacatctgaagcagaaggctgagtttcttgatgaagtggagtctattcttggaaatgtgagccatggaacaaagttggtagagct

SEQ ID NO: 58327 - DNA, 194 bp, Setaria italica
  Peptide Sequence Number=SeqID_124301
tcggtcactgtcgcaggacggacccccgtgggatccgcccagtggtgtcttccgcctagcatcggaagatcttccacaactctgtgccttcttgtcctttgtaactcaagtctattacccctcttgccagggaatgtttccatcgattccctcgatcgatgaaattgaccattatccccaggaggagccattaa

SEQ ID NO: 58328 - DNA, 199 bp, Setaria italica
  Peptide Sequence Number=SeqID_124302
cgcctgccaacatccagtgatcagcttcatcctgtgcaaggagaagcgcctgatccatcctgggcaaggcaccattaaaaactatatcattcctcatcttccaaaggatccaagcccctatcacaaccagcgagttaaatccccgcccagcttccttgttgaacatgccactcgcttgttgccaccagtcataaaaccc

SEQ ID NO: 58329 - DNA, 390 bp, Setaria italica
  Peptide Sequence Number=SeqID_124303
caaacatgtaaggttagctccaaaaaaagctgaacctcggagagggaaaatattacaaaactagcagaaaaacttctacaactacatggcacaaagtaacaaataccagtgcaatgaaagaacacatgacaaaatgtttgtctcatggccagtcccaatgtttcattgcggcgacgccgctaccaagggcaatggaatatgagaccaccttcaaatggagacattccagaaggaaaatctcaacatcaaaaggcttattttatgacgttagcttgagaatatgcaaacatgtgtggtttgctcacaagaaagctgaaggcatggacgccttccgtcaaactttaattgttgtcactgtctatgaaaatatgagagtctccaatgcattca

SEQ ID NO: 58330 - DNA, 257 bp, Setaria italica
  Peptide Sequence Number=SeqID_124304
catgtaaggtttgctccaaaaaaagctgaagaacctcggagcccttccgtcactaatggaaatattacaaactagcataaaacttctacaactacatggcacaaataacaaataccagtgcaatgaaagaacacatgaaaaatgtttgtctcatggccagtcccaatgtttcattgcggcgacgccgctaccaagggcaatggaatatgagaccgccttcaaatggagaaattccagaaggaaaatctcaacatcaa

SEQ ID NO: 58331 - DNA, 438 bp, Setaria italica
  Peptide Sequence Number=SeqID_124305
tgcccgtgcatcctcatcttgtactacaacagaatcaaccattccccttcagtgctaccattgagaacggaaggagtattcccagaactttgcattgagcataggtcactaagcggcacctgaacaatcctgaatggagagtttatcacaacatttttaggcatggtataacttgaactctatttggttgctgcccacttttataactttaactgcttcgttcatatatctattagcttcaaataagaatataataatatttctatcatggctctattgatcaataaacgacaagtgaatgcttatattaaatttgatggtaaaacattatcaaatccagtttgactggcaaatgtagtgtatattgtattattttaaaaatgacctaacaaggtttaaaacttagaaatgatttgagcttgaaatttcgtaatagac

SEQ ID NO: 58332 - DNA, 392 bp, Setaria italica
  misc_feature (30)..(30): n is a, c, g, or t
  Peptide Sequence Number=SeqID_124306
ttattggcttattgctcaaacaactaagcntaaatcaaacagtcgtacagcaaattccatcaaagatcttggtgatttcttgtccatgataactaggtaaagaatatgcattttgagaaaaggtatcaagtgcaacatttagcatctgaatatagttgatatagctggattgtattttaattcaacctatcagatttgatctcagataagtaaaagacaaacataatttacctcctaaacgttcagcaacagctccaacaattaaacctccaaccatatcaaccacaagcacatctgaatatgcaccaatgtttgccatagataataagagagatagtgtgtcaactcgcataaaccctattcgacctggacttttcttgaagtatgtcttc

SEQ ID NO: 58333 - DNA, 371 bp, Setaria italica
  Peptide Sequence Number=SeqID_124307
tcaccgcatatttcctgttcaagaaacttgtgttctatcagaaaaagacctacatgccactgtgtcaaagttattccttgacttcttgaggagcaagaataaccaggatgagcctataaagaaggggcatcgatgagacagagacgaaggcacagaagaacagtaatgaaggttcaaatcagcaggctttgatggacagggagcaatgcttcaaagtcgttgctgctgctgtcaaatccattgctgagaactcagtggttgatcttaaatctcctgaggttgccgtactcgttgagatgctcccgtttctgggtacccttggatcttcggtggctggggtgtccgttctcccagccgaactcatctccacc

SEQ ID NO: 58334 - DNA, 302 bp, Setaria italica
  Peptide Sequence Number=SeqID_124308
gacctacatgccactgtgtcaaagttattccttgacttcttgaggagcaagaataaccaggatgagcctataaaggtagaaattgcagcacttatctttgattaactattacatcaatgcttcaatggagttgaatttatacaattttccacttcaatgtattacgtagcacttgtgcagatatccttgctgttcaggtctcatacactgattcatgtattatttaaattgtctcctacatttgtatgcactaccaggctcacttgttttctaatctatttccatcacccttcattattatg

SEQ ID NO: 58335 - DNA, 321 bp, Setaria italica
  Peptide Sequence Number=SeqID_124309
tagttaattaccttagaacttacttagaaggaagacaagaataaccaggatgagcctataaagtttgcagttgcatataatagaaggggcatcgatgagacagagacgaaggcacagaagaacagtaatgaaggttcaaatcagcaggctttgatggacagggagcaatgcttcaaagtcgttgctgctgctgtcaaatccattgctgagaactcagtggttgatcttaaatctcctgaggttgccgtactcgttgagatgctcccgtttctgggtaccccttggatcttcggtggctggggtgtccgttctcccagccga

SEQ ID NO: 58336 - DNA, 247 bp, Setaria italica
  Peptide Sequence Number=SeqID_124310
gtgaattactgtgatgaattcggtggctgtacttccatgccttgtggggactgtcatgatggcttctctctgctcaggtgcaggagttgggagtgtggccattgcctgattggggacataaggtgggggttgtccccagaccccagtgagctccacaccggtccctgctgttctcccagtcaaaattctgtatcctatgatgctgagatcaaggtacttataccttgctgtttacccttttggtgct

SEQ ID NO: 58337 - DNA, 370 bp, Setaria italica
  misc_feature (356)..(356): n is a, c, g, or t
  Peptide Sequence Number=SeqID_124311
tagtacgtacttttacttacttagttaagtacgtttactattcccttcctagttgtccggtccccctatttagtcccgtttcttgggtcttaattggcttgttcgaaggcccacttattcgtctccttcggagctgatggcgtagatctgatccatctatcccatcacgatcaggcccccctgtggagaaaccttctatcagaatggaaaggtctgtccatgctcctctcagatgaggatctgcgtcgtttcctctcatagccatcacacagctgtccaatctgcccattttcacccattccattgaactgctcactttcatgctgggcccgaatatcaaaatcagctggagcatnttcataatcttcta

SEQ ID NO: 58338 - DNA, 440 bp, Setaria italica
  Peptide Sequence Number=SeqID_124312
ggagtgtgaaagaccaaacaaattggaacacatggattccaatctgaaaagcaataagacaagaggcctacaatatttgcagctgcaaaaaggagaggctaagatacatggaacaaagacaaaaactatgagacacgcctgacaactgcatttctgctgagtacaccttgtatgattggctaaagaatcattgcacgcacgttaaaaactggtgcaaatgtcaatctgtgggaaaaaaggcagaacattatatacgtcatgctttagcctgaaaatgagagaacctggaagtgccatggcggcaccactaatgatcctaacgaatatatatgcagatctgtagtgctatctccaatatgtttggttcctttcattcgaccaatagaataaggaaacaaaaagaaactaaacaaaataaagtaaaaccttttaaatttaaa

SEQ ID NO: 58339 - DNA, 179 bp, Setaria italica
  Peptide Sequence Number=SeqID_124313
cgacgccgaggaggggcgtccggatcacgacgcagtgcgttgaggaggagcacatgccggcgttcagggaggagatgaaggcaccacgggaatgactctgctcggagggcctagcaagcatcaatcctgcatgctagggagctgagacacgcaactaggcaaggcacacaggggatagg

SEQ ID NO: 58340 - DNA, 294 bp, Setaria italica
  Peptide Sequence Number=SeqID_124314
accttcctcggcctgcctgaagaacgatctcgccctcgtgatctggtcccgcatgaagcctttccatccgtcggtgacgcggccgttgaagatgtcggcttccgagagccccgccatctccagctcgtcctgtgggaggtagatccttcccctcctcgcactgtcaatggcacgtgacacacactgtaaatatgggacggagagcaagctgacatcggagatagatgacggcgagattgcaagcatctgatcgaggtgagcgacgtactcctcgccgacgtccctgaggatgtt

SEQ ID NO: 58341 - DNA, 470 bp, Setaria italica
  Peptide Sequence Number=SeqID_124315
attgtgctgttactgttgttaagagcgtgtatgtaagtgtactggaattagtacctttttgttagtttatttctttgtgattgatggttaaaagattagatttcttatcttgttaacttagctgaaatgatttactgttatgctcttttttacttctttgaacagtgcccttggccattggcaaaacaaagaagaggctcctagccagttgaaaatagttggtgttcaagcgtcagggggaattattgctggtgcagtgacctcttttgttacaactcccattgatacaatcaagaccaggctgcaggttatggataacgaaaacaagccaaaagctgggcaagttgttaaaaaattgattgcagaagattggattggtaaaggtttttgtttaccgtttagggttttttaggttttttttcctttttttaagatttttcaagctcattcagctttggggtacctcaatg

SEQ ID NO: 58342 - DNA, 385 bp, Setaria italica
  Peptide Sequence Number=SeqID_124316
tgacacaacttccacggcagctgatggctccataattgcagaatcaggtaggccactactagtatcactagtatgcaccacaaccccatcagtcgaatcaagtgtagagggtgagtcgttcagcgacagtgcctcgaactttgatgtatctggaattgtagggccaatctcattgctgctcacctcagtgacatcctcctcaaccagtaagttggttggtggccgtgctcgtcctggattacgtcgagatcgcctcgggtgatctgaatacatggaactctgccgaatacgcgtttgagctgcatgtttggtctccggcgagaaccagttccacggggaggaggtccctctcacgccgcatcttcatcgaccggtcggcgtagga

SEQ ID NO: 58343 - DNA, 159 bp, Setaria italica
  Peptide Sequence Number=SeqID_124317
cttggttttcagcgaggatgcctgcactgtgagcacccaaatgacccgaagattgtcgtcacgcaagcgaaattcaaccagtttggcatcttgatggcacctggcaagtttgaaagcgtcagtttcaggtgacagtgcttcgtatccgcagcttctctg

SEQ ID NO: 58344 - DNA, 164 bp, Setaria italica
  misc_feature (163)..(163): n is a, c, g, or t
  Peptide Sequence Number=SeqID_124318
ggtccgttttatgttgggggcgccgctcccctttcggcttgacaaggccgcggcgcatttatggcgaggtcgataggggtcccacgagatccccatcctgatcctccagtccgcgcccgaggcgaatatccgtcttgtggacccgagtgagtccgacccccgng

SEQ ID NO: 58345 - DNA, 389 bp, Setaria italica
  Peptide Sequence Number=SeqID_124319
ggagtgaacatgtcagctgttaatttttcctcaccgtagaaagtcgaggaaaacttattccaaatgggcaccctagcattacctttccatccatagaatccttggcaaacttagcttcatgatcatttgagaagtgaacaaatacaaagcctcttgaccttccggaatttttgtcatacattattcaaacttcggtgatggtgccgaatgaggagaaggcgtccgtgagggagcgctcgtccacggaccacgacaagccctgatgcgggagagcggagtggtaactgcgacgaagagcctggagactggagtagtggagttggatggcagcgatggcgcaccggggaggcggggagggccccctcgtctggtggtggggcagccgcggc

SEQ ID NO: 58346 - DNA, 352 bp, Setaria italica
  Peptide Sequence Number=SeqID_124320
caaactacttgagtactgcactagtaaacatcaccagaaagggatcctgctctggaaaccctagcaggatccctattgttctgtgctatagctgcagcaaactacttgagtactgcactagtaaacatcaccagaaaggttaccgccagacatggtcacacaagctggttaacagacaatattaacaatggcaaacttgactattactattattttattgccatcctgggagtactgaaccttttctacttccttacatgctctcactactatcaacatggagcgacatggccttatattgatagtagtgagagcatgtaaggaagtagaaaaggttcagtactcccaggat

SEQ ID NO: 58347 - DNA, 184 bp, Setaria italica
  Peptide Sequence Number=SeqID_124321
tctctacaacttctcggtactcttcttgtatggtttgccttagattctggaaatcgttcattctttctttcatcttcttcttcaatgtgatggtcattgacatccttgatcgatctacgctcgtgcccttcccacaccctggcttctttctgttctcaagattatttctgtccatttgttccaa

SEQ ID NO: 58348 - DNA, 187 bp, Setaria italica
  Peptide Sequence Number=SeqID_124322
ctctacaacttctcggtactcttcttgtatggtttgccttagattctggaaatcgttcattctttctttcatcttcttcttcaatgtgcaaaggtcttgagaaagtgataaatatatgtgatgattggagggttaaaaacagcaaacatggtcattgacatccttgatcgatctacgctcgtgcccc

SEQ ID NO: 58349 - DNA, 268 bp, Setaria italica
  misc_feature (254)..(254): n is a, c, g, or t
  Peptide Sequence Number=SeqID_124323
gttcgtcaacaaccaggtagcacctgatttttgtccctgattgggtgcgttggcgtcggcgatggaggagccgaatgtgggcggaggtgccgcggcggcggatccagctggtggcggcgccgcagtcggggctggcgcatcgccctggaggaagaccacgccgccgccggcggctggcgaggcggcggtcatgggggccagtcctggcccgcgctggaggaggcgaggcagaaggtcgccccggagtcccccgngaaggcaggggcgg

SEQ ID NO: 58350 - DNA, 410 bp, Setaria italica
  Peptide Sequence Number=SeqID_124324
tggttcgtagtacctattgttcggtcctaaggttcgtaggtagtattggtagtaagttttgtctgtgggtacaaacgggatgctgaatgagatgaggcagagggttgaagatatggtgctggagaccactcggcagaggcagcgcgctgctgaaaatgagcaggagcttagtcgggtgaagcaggacttcgagtcactgagaacttatgttagcactcttgttagcgtcagagaaactcttctctcatcagagaagcaattcgaaacaatggagaaactttttgacaggctagttgccaagactaatcagcttgagactgagaaagctcagaaagaagctgaagtccagaaagtgatggaggagaatgtgaggctacgcgctatgctggacaagaaggaggcgcagctcc

SEQ ID NO: 58351 - DNA, 262 bp, Setaria italica
  Peptide Sequence Number=SeqID_124325
tcaggggatgggttccgaggcaccggtgctccccccaagtacaggtttgtcacgggttcgccttgggattggactgaccatgagctggccatactgaaggaagggcttgcaaggtaaattcagcgcccttttgcatcctgaattgcttttgcctgtgctgtactggtgcaaattgttgcctatgctgatggaagggacttggttatgcagtttgatttcttttcgcacctttaatgtgttccaaggtagtggagcatctaaa

SEQ ID NO: 58352 - DNA, 381 bp, Setaria italica
  Peptide Sequence Number=SeqID_124326
tgtcttccctaatttcgtattgttattgttttgtaagtcgtaatttgttgttcgtaattactcttccttttgcttctgaaatatgtcgcaacaatgaaccagcaacaacagattcgctgattgatcttccaggggacagtacatttgttgaatcgctcatcataagagtaacaccttctttggatagctcctccaatgcttctcggtcaaatatctttccatccactggtgattcatcaattttccagtcacgagtatggaaaaattatgccatcaccacatcgaagcactaagccacagcagtcaggaactgaatgagttacacgaatgggttcaacttcaaaaggtccagcctgaaatctcttttatcttaagcttaag

SEQ ID NO: 58353 - DNA, 245 bp, Setaria italica
  Peptide Sequence Number=SeqID_124327
cttgattcacttgcaccgattcgataccaatctcccaaatttctatcactaagctaaaaccttatctattcatttggttgccatttccccttcacacgatagaatcctatctatgtctgagaaatacggccatgtctgcatgctgcattatccagctgtcctgtgaattgtccacttagtcacatggagaggatggtagcagaaatcttgaggaaaatggtaaggaagtacagtgggaagaggcc

SEQ ID NO: 58354 - DNA, 362 bp, Setaria italica
  Peptide Sequence Number=SeqID_124328
agacttgactggagcaggagctgactgggtggggtccttacccaatatgccgatcttgccaagattctgtttgttccctccgttaacgattcttgcaatttttacagcagtaggggatttgaatgactcccaaaaagtgctccagtgttttaggctgatgcaaatctgaagagaagaatgcttcaccattggagcttgtggttgcatcatcaggtgttgtgctcacagcctcaggaagggtctcttcagcctcaacgtctgggttatctggatgtgttttataactgccttcaagactcctagctggactcctgctcagtattggtcttagttagtcttgtattgtaaggttccttaaagtt

SEQ ID NO: 58355 - DNA, 433 bp, Setaria italica
  Peptide Sequence Number=SeqID_124329
aaacccaaaagaaaataagaaatttaaagaacttacaaaggtagttactagaagaaaacctagacaagtaggtgttctccgtagcaaccgcaatgacatcaggcctcttcccactgtacttccttaccattttcctcaagatttctgctaccatcctctccatgtgactaagtggacaattcacaggacagctggataatgcagcatgcgctgctttgtagagtgcgtccaataatcttccattatcaagccatagacatcttgttgtaattttaaatttccctttcaaacctgactgcgttgaagcatgttccttctgaggtcggatgatctccatactaacaaaaatatgccatcagatgcgattcttaatctctcatcaatgcagagatcagtggatgtaccaaaagccttatcaccatcgctatacatg

SEQ ID NO: 58356 - DNA, 263 bp, Setaria italica
  Peptide Sequence Number=SeqID_124330
ggcggtttaaaagtagccttgttactgacaaaaagcagttggtgaccgaagttatttttccaaaatgtcacttgacctccatatagatatacctcgacggagctgccccgggcctcgcggaggacgaacttgtcgaggcctgtggcgcggtccttcacgcgctccacggacgccgtcccggccattcgtcggtctccgacggcgaggaagcgccgggtcgaaccttcggctccgacgggcgacggcgaggagatgaagtggag

SEQ ID NO: 58357 - DNA, 166 bp, Setaria italica
  Peptide Sequence Number=SeqID_124331
catggtgggccagtcggccgatggccccatctacgtcgtgcagccgcaggacgggctggaccacatcgcccgcgacgtgttcgacgccttcgtcacctaccaggagatccgcaccttctggccgacgttaatcttgttggggtcggggatgctgttggcggtggcg

SEQ ID NO: 58358 - DNA, 463 bp, Setaria italica
  misc_feature (1)..(1): n is a, c, g, or t
  misc_feature (5)..(5): n is a, c, g, or t
  Peptide Sequence Number=SeqID_124332
ntctntgacacgtgtacatagggaaagaataggtagtaatacggtagacgaagactagaccaatggccacctgctttgcacacctgtctttcatagtctatgcactgtactgagacgagggttttaatctgcaagtggatggagacccagtagcatgacagctggtagcaggatgagttctgtctgctgactactctcaggagtggatttgtcgaagaaaggggtttctgtggttatgtgatgttggcgtctcaaattgagtcaaggattatatatgaacatgagtttgctgtatgacttcatgcatccatttgtgagtgcctgatctactaacctttgcagtagtgctctgtttcgctagtggagtcggggggccaacctggctgtccaaaaaatatgtctgaatttctgttcagctctagtatgcaatgcaaccagagaaagctcttattctgatcgagtg

SEQ ID NO: 58359 - DNA, 306 bp, Setaria italica
  Peptide Sequence Number=SeqID_124333
caaagtggtgcggggcttgtcgtcctttctccacagtatggagggatatggccgttctccatcgatcttgacaccatggattcggctcctgtgacacgtgacatggggaagatggtgtatcggtgcgagctgccatggccacctgctttgcacacctgtctttcatagtctatgcactgtactggtatacataaacacgcttctgtgatttcacagtttttgatttagcaaatgcagtaactgtgctttggggcttagaattgtgctgatgcatgtgcatgatcagttattcagtcggtttgatag

SEQ ID NO: 58360 - DNA, 325 bp, Setaria italica
  Peptide Sequence Number=SeqID_124334
agaaagccaaaacgaataatgatttaggacggagggagtagtaatgtaatacttataatattttggttaaaaagcttaactttactcctatggttccaatttgtcagaacacattggagtctcgtcattatatgcatgccagcaaaagaagatcaaacaggtcccatcatacttcatttggattctctgaagtttcatagtagcagattaaacaggtcccatcatacttcatttggattctctgaagtttcatagtagcagattaatttcaatgttactagtaaaatacaactggacaaagctttcaaggttgttacctgctaat

SEQ ID NO: 58361 - DNA, 252 bp, Setaria italica
  Peptide Sequence Number=SeqID_124335
tccttgcttttccttcgctttgtctcagaaccaccatctgagattaatttggttgatgctcttgcttctggtgtttccggctcttgctgttccaacttttcaactatgctctcaggagagtctggggtcactttagaatgttctttttcttgttttgattcttctaatatttccttcagatgaaacatgatgttaaggtcatttgggaagacaagaatgtcagattagattacataatgttggtgctagagc

SEQ ID NO: 58362 - DNA, 357 bp, Setaria italica
  Peptide Sequence Number=SeqID_124336
taaaacttaacaaaagggaacaaaacctttaagaaagtaacaaaatttagaagaattagggaaataccaaaaaaacgactagaaggaatttgggtgaaataagatttggttgaattgcatcaacggaactgacaagaacgcctgatccatattgaccagcactaaggacatgaagaccacaagagaattcacaaacttcactgcctgtctagactgtagccgagtaaacaaagcactccatatctcacttatgtaagggttcataatgtccaaaccaacattttccactagcgtgttcagcatgtagaatgcagaatcttcagttgactgcttcgtgagaggagactacgggatatt

SEQ ID NO: 58363 - DNA, 264 bp, Setaria italica
  Peptide Sequence Number=SeqID_124337
ttagtgttatctctagcaattctttttttgataatgagggtttagtagccctcgaaacagtatctgaacgataattctctgacttgactttttttataaacatatgaacttgccaggccttctaaagattccagtagcgtgacgccatttgagcagttagcacttcctgcaccgccatcatcaagtggttcgaaatctcatgtagaaccagctgttaaacctaatattgacctacttagtggagatgtatttttcaaaccagaa

SEQ ID NO: 58364 - DNA, 237 bp, Setaria italica
  Peptide Sequence Number=SeqID_124338
tgttccgccgcagcatcctgttccaccgcagcatccttctccatattctaatggcttaaattcgaatacattggcaccctatgatcaaggctccaacttaacctcagcaagttcatggaatgggcagtttgctcatggagcgataccaccacaacagtcaccaaattacgtctagtgtttcaaaggcattcgccttaggcgtccgggttggtaccctagtcttcgtactttggggta

SEQ ID NO: 58365 - DNA, 246 bp, Setaria italica
  Peptide Sequence Number=SeqID_124339
cctttgctgtgtcggcaatgtcgcctcctcatgaacttgcgttactgggatagaagcaatagttggttgaattactatgatgtagcgatgattggaatctttactttttcttcatctgcaggcctttgttgacagtggagcacagtcgactatcatatcaaaaagttgtgctgaacgttgcgggtatgattataaataaatcagttgattggaactcttctgacttaaatttgtaataataccatg

SEQ ID NO: 58366 - DNA, 167 bp, Setaria italica
  Peptide Sequence Number=SeqID_124340
caaaagtgattcaagagatggcttcccttttgtatctgtcaaatattcaaccctgggaaagggttgggcaaacagaaaggaaaggctgctcaaccctttcccagggttgaatatttgacagatacaaaagtgattcaagagatggcttcccttcggaaaactagact

SEQ ID NO: 58367 - DNA, 382 bp, Setaria italica
  Peptide Sequence Number=SeqID_124341
tcgcacaagtctcccaactcattaaatttggcctccaccttttgcttaatctcatctgcgctgggacgtccccatccagaagaatccctcgtagctcgccgctcgacaagccgttgcatgccgctcgccccggcggttctcacaagttgttgccccacacacccatgtacacaaaaaacgaggtgccggcgcgggagctccaccggccacgaggtggtccgccaacttgctcgatgccgctttgaagtggtcacaagctactcgcacgggaggctcttgccagtcgttgctggagctccaccaggcacgcgaattccactagccatgaggtggtcagtgagccatcaggcagtagcttgtcccaggtggagcatgtcctcga

SEQ ID NO: 58368 - DNA, 294 bp, Setaria italica
  Peptide Sequence Number=SeqID_124342
tccggaaacattgcaaatcagtgtcccttgaagttggatttcgcagttttccttcgccgattggatcaaaaagtgcggggaagagagtacccgcgttcgggacgtcggcggcaatcggaggcggcggcggcgctgcggcagggggagaggcgtcttcggagaggaggcgacgggggaggaggaaggggagggtggtggttggggagggtttacgagttggggatggaggacgatgtgggattggcgctggaggtgggcaaggaagcgcctcatcgcgccggcggccgggagggc

SEQ ID NO: 58369 - DNA, 262 bp, Setaria italica
  Peptide Sequence Number=SeqID_124343
tcccctgtgtgccttgcctatcccatgttgcgtgtctcagagaagcggatccgggcgggctgacggccgagcggccttccgggggccgaccggcgatccgcgccgccgaagctcaattggcagccgattacgggctccatggtaccatggtcgtcgtcgattcgtccgtgggtccgtggagttcttgcaagccgtgactttctcctcgccctcttcttctccttcctctcttggtttgcacggccatggcatggtacagagc

SEQ ID NO: 58370 - DNA, 467 bp, Setaria italica
  Peptide Sequence Number=SeqID_124344
atcttggtttaggctaagagaagagacattaacagagatgatgactgctgaagacaggaacataccgttggatggcccctgagctgtacagcacagttacgttgaggcatggagaaaagaagcattacaaccacaaagtggatgtttacagctttgcaattgtgttgtgggaactcctacacaatagactgccctttgagggaatgtctaatctgcaagctgcatacgctgctgctttcaagaacatcagaccaagtgcagataacttgcctcaggagttgtcagaaatactaacatcctgctggaaggaagacccaaacgacagaccaaactttacccagatagtgcaaatgctcctaacaattaacctaataccaaccctactacgaccaacaaagaaaaccttaaggaacccctaacccgaacaaacaaattaacaaagttaacaaagaaagaaaaacgaacaa

SEQ ID NO: 58371 - DNA, 372 bp, Setaria italica
  Peptide Sequence Number=SeqID_124345
aaagtacaattaccttaaatagaatactagcctgacacgtgtttattcagacaaagttgatcttgtgtccattgttttcccccttccctttttgcagaaaatttgttgctgactgcagaccagagaacagttaaacttgtcgatcttaggtttaggactaagagaagagacattaacagagatgatgactgctgagacaggaacataccgttggatggcccctgaggtttctattattcattcatatctgtcaaattcgggatcctttgttttctgtattatttttgttaatgtatcctggaatgtctcaacagctgtacagcacagttacgttgaggcatggagaaagagcattacaaccacaaagtggat

SEQ ID NO: 58372 - DNA, 260 bp, Setaria italica
  Peptide Sequence Number=SeqID_124346
ccactctctcgtggccgtgtttcctggcggcgacggctgggcgagacgcgccgcccaagtcttcgtcggtcccgttgccggcgacgagcacccaccagtggggtcgtgtgaccccacaggacccagatcagataattgccatcaaggatggaatctgggagttcgttctacgctggtgaaggtctctccatcgatcctaagtggcttattgacccaaagcttctctttgttgggccgcgcatcggtgagggcgcacacga

SEQ ID NO: 58373 - DNA, 163 bp, Setaria italica
  Peptide Sequence Number=SeqID_124347
tttcgacacttgatgcttcttcttgtatgcaggcagcataaatattcaacaaaagaatactacaacaatctaattcaactagcagccatttagaagctccacctgactgaatcatgtgttccttccgaccaaacttctgcgactgcctatgcacgagatgaag

SEQ ID NO: 58374 - DNA, 425 bp, Setaria italica
  Peptide Sequence Number=SeqID_124348
aggagatgggcagctatgtgttgtgtgcttaaggaagagaaggaaagcagcttttattccttgtgggcatcttgtttgctgttgcaaatgtgcattaagaatggaacgtgagactgaaccattgtgccctatgtgtcggcaagacatcagatacatgatgaggatttatgactcttgaggtcccttgctgataaaatctgacactagcagatccttttactagctctccctgcaaacatgaggagcacaactgcttatcctccatggcatttccccagtctagactactagctaactggctaccatggatttgtgaatatataatgtcttaacccttccaaatcatgctcttggtcgcttgggactctaagacttaagttagaaactacaaccaaagaaattaacaatagtacttttagttaaga

SEQ ID NO: 58375 - DNA, 274 bp, Setaria italica
  Peptide Sequence Number=SeqID_124349
tgctcggcctcggcacggcggccgtcgccgtcgcgtcgtgggtcaagtacctcgccgtctcggggcagctgcgccttgtcgcctccgcggcgacggcctccatcgccgacctccgctccctcctccctggagacggcggcgagccgcgggtcgcggcggtgcggggctacgtgcgccccaagccggggggcaacatcctccgcgtcccgtggtccggggagcacggcgtcgtcaccaagcacacccagatgtgcttgttcacggaatggagagg

SEQ ID NO: 58376 - DNA, 298 bp, Setaria italica
  Peptide Sequence Number=SeqID_124350
tgttgggagatgatgttctggagggacggcggcgggagcgggagcgggagcgggcgggactccctcagcggcgggccgccctgcggccaggtgcgcgtcctcgtcgtcggcgactcaggtgtgggcaaatcttcattggtgcatctcttattaaatggttctgcagttgctcgaccagcccaaacaattggatgtgcagttggtgttaaacatattacttacagcagcccaaacaattggatgtgcagttggtgttaaacatattacttacagcacatccaattgtttgggctggtcg

SEQ ID NO: 58377 - DNA, 257 bp, Setaria italica
  Peptide Sequence Number=SeqID_124351
caaatcttcattggtgcatctcttattaaatggttctgcagttgctcgaccagcccaaacaattggatgtgcagttggtgttaaagtaagtaatcctgtggctaacttagtttttttaaatttcaaatatattctcatataaactttaattcccataattacagcatattacttacagcagcccagggagttcatctaatagcatcaaggctgatgctgaaagaaacttctttgttgagctttgggatgtttcagga

SEQ ID NO: 58378 - DNA, 245 bp, Setaria italica
  Peptide Sequence Number=SeqID_124352
gtttccaggagagctcttacatggatcctaatcaaagtctttgtcttggagcactatttaacatagcagcaacaaaatggcctagacatgggcagaagattatgcatctttggcttttgtcgttccattgaaatgctaagtgatgtagtggaagatacagtattggagcatggtggtgagaacgaaaactaagagcgccacacacggattattgaccttagattgcttcagcgaaaaaagacagt

SEQ ID NO: 58379 - DNA, 227 bp, Setaria italica
  misc_feature (218)..(218): n is a, c, g, or t
  Peptide Sequence Number=SeqID_124353
gaagtggataggatatctggatatataaatgttagagatgtatggttagtaggtctcagctcaccttgtgcattggatgtaacattgagttagcccatgtttatcattagtttgtaaagggcgtcatttttggcaggttgtcaccgcagagaaggcgagcaatgacggcctccaggagaagctaacaatgtctgttgcagtaccattgctgtggggtnttcctccag

SEQ ID NO: 58380 - DNA, 234 bp, Setaria italica
  Peptide Sequence Number=SeqID_124354
catcatcatcatttagaactggaccattgtcgctgacagaatcaaatgccttttcttttcgatcatttagaactggaccattgttgctgacagaatcaaatgccttttcttttccatcattattttttccagcatgcattgttcctctcttcatttgcttacatacagaaagttgatctcaagaatgataaagtgcaagttagatggcttgatgtttctcctcttctcctcgag

SEQ ID NO: 58381 - DNA, 501 bp, Setaria italica
  Peptide Sequence Number=SeqID_124355
cctctttttggttctgctggatcctcgtcaacctcaacctcttttgtgaagcccttttcttgccacgtgtaaatgggaaggaacaaactgagagtagttctttacaagttttttgaatcctttcagggtgagcaaaacccttatcatcacgtttgaggtagagagtaaggcgagttcccctaggaatgagcttctctgggtccttttcctctctaacggtgtaagaactggaatctgcttctccttcccaaacatattgcttgtcagattttgggctctttgttgacacaacaacctattgcgtagaagagaaaataccaattaacttacaaattatagggtacaagggcagcaggaaaggaaagtcaaattaataagcaagagcacatgaccagaggaagttgactaataacaaattatacagataaatcatgataacagtataccttatccgcaacaagaaatgcagaatagaatccaacaccaaattgaccaatcaag

SEQ ID NO: 58382 - DNA, 295 bp, Setaria italica
  Peptide Sequence Number=SeqID_124356
gccataattctcccagaacctttcataatcatctctgttttcactgcaagaaatgccaagtatcatatcaaaggccttccgcacaagcctctttctcattatccgcacaattcgactttcttgaaggatctcacgagaaacattcaatggaaggtcatttgagtcaacaacaccctttacaaagctcaaatatcttgggaacaattctccgtcaaagtcatctgatatgaatacacgctttaactattaaagtccttgtatttattttctttggttctttccttgttctagttta

SEQ ID NO: 58383 - DNA, 270 bp, Setaria italica
  misc_feature (12)..(12): n is a, c, g, or t
  Peptide Sequence Number=SeqID_124357
ttctgaagaaanaatttaaattacaaagagataagtgtacaggacagaagtttaaaattaaacctatcgtggatcactattaatgtaccaataacatggtgattaatccggatggaaacaaaaagaaacaatcttgccacaataaggcaggttagccagtaggtaatgggagattgacaacacttctatgtgcatacctaaatccaaatcttccttgctaatgtccacgaatttcttatccttgtaggaagccagattctggatagccac

SEQ ID NO: 58384 - DNA, 306 bp, Setaria italica
  misc_feature (19)..(19): n is a, c, g, or t
  Peptide Sequence Number=SeqID_124358
tgcggtgggaacgagggcncgacgtgcggggcatcatgctctgggaacgcgctggcgaacggtgcctgtgactgtgaggaccatttgccggcgatggcagagctcatcatgtcgtagatcttcccgctgagctcggccggattgtcaggcgtgaaaccactagaaatcatagcagtttcaaagaggacatcgagaacctttagagcttcagggtcatcagggttgcttctgcatgcaacctgcatttgcaagttatcagaatggaacacccaataggtacttcaggtactaaaataacagatttat

SEQ ID NO: 58385 - DNA, 278 bp, Setaria italica
  Peptide Sequence Number=SeqID_124359
ttttgtttttctttttctttttgggtttttaacgtttttcgtttttctttttggttttcgttttaacggttttgtttcctttgtttgttacttgttgtaggtaccattgccggcgatggcagagctcatcatgtcgtagatcttcccgctgagctcggccggattgtcaggcgtgaaaccactagaaatcatagcagtttcaaagaggacatcgagaacctttagagcttcagggtcatcagggttgcttctgcatgcaacattcaagcccttaatta

SEQ ID NO: 58386 - DNA, 269 bp, Setaria italica
  Peptide Sequence Number=SeqID_124360
ttttttttttttaactaaaaaattgcgctgcattgtgtaactaaatagaagcgatgtaaaaataaaaggtccaaatgcaatcatatgaacaatgactttgacaagaaaaactcttcacatgtactgttatcatacgaaaactgtttgatggattgaaattacattgaaggtcttgaacacttttttatcaaaatctagcctccaagtatctctcattctacatgtattcaccgagacatgccccccaccttcaatggtcatgcaaattt

SEQ ID NO: 58387 - DNA, 148 bp, Setaria italica
  Peptide Sequence Number=SeqID_124361
catcgtgacaaatccaaaccgccggctccgattggtgtacttgtcatacataacctcggcccgctcgacggtgccgtgcgcggcgaacatgtcgcggagctcgtctgagacacgcaacaggagataggcaaggcacacaggggatagg

SEQ ID NO: 58388 - DNA, 312 bp, Setaria italica
  Peptide Sequence Number=SeqID_124362
attgctgaacgctgtgcccggtcttccacttcaatggctacttggacaagtccaccttccagttgtgtgatgcaagggggtacaggagcatcctacagttttcatgatcatgaagcagagaagagaaacaggctgaatctaccaaaaggacatttcagttgagggcggtatgtacatgtggatttgtctcagctgcaactgaactcagtgctccatcaacaacatatataaaaggggcgtgctccagatcctcttctgatcggtaactaaacaaaaaggtcacatccttactactagttcttcttatttgtt

SEQ ID NO: 58389 - DNA, 469 bp, Setaria italica
  Peptide Sequence Number=SeqID_124363
ccgccgtcgacgccggccgcgtcacggggggacatcgtgcgccgcttcaacgacctcgaggcctccgcgctcttccgctggctgctccaggttcagggggatttcaggggagcgcctcctcgccgacgacctcttcttcgcaaagctcgccatggagttgggctcgggggtcatcgccaagactgcggcagagtacgagaagaggagagagaattttcgtcaaagagatttgatattgtcatagctgatgtgatcatggcgatagtcgcggatttcatgcttgtctatcttcctgctccaactgtatctttgcagccgccacttgcaaggaatgctggagctattgccaactttttccataactgcccagataatgctttccaagtaaactaaccgtttcccttttcctagagttgaatagactgcctattttgttcccttgtattcgaaaatatgttatgctactgtt

SEQ ID NO: 58390 - DNA, 315 bp, Setaria italica
  Peptide Sequence Number=SeqID_124364
tcgttgtcgtccgtctttctaacgtaccttcgtaggtccttccgtcgtcttctttccgtcttggtcttgtcttcctagtttctaggggtatttcagggagcgcctcctcgccgacgacctcttcttcgcaaagctcgccatggagttgggcgtcggggtcatcgccaagactgcggcagagtacgagaagaggagagagaatttcgcaaagagattgatattgtcatagctgatgtgatcatggcgatagtcgcggatttcatgcttgtctatcttcctgctccaactgtatctttgcagccgccacttgcaagg

SEQ ID NO: 58391 - DNA, 227 bp, Setaria italica
  Peptide Sequence Number=SeqID_124365
ttaacttaagaactaccctacaaccaagacgagtgccctgactcgatcaatgcctctatcgtttgctttgggggtataaatgtgggaagcttctctcctctcttttgcttaagaagcttttcacctagcttttcatggccaccaatttgatcgacccactgcagtgcaagtgaaacagtgatatgttactttggctatgtcggaacaacattttcagaagccgcact

SEQ ID NO: 58392 - DNA, 358 bp, Setaria italica
  misc_feature (212)..(212): n is a, c, g, or t
  Peptide Sequence Number=SeqID_124366
tttaacctaagggggaaagcaatgcaaatcttcttccaaaacaaagccatttgttctgatagtgttcatgttcatagaaactattacttcttcctccggtgatagatcaagcctcagtggctggagaagaggctgtatgttcaaagttgttgattgcgaaaggccctcgaagttgtacttctcatcagcagcatgctgatctacaataaacngatcctggtccagctttccaatgataaaaccaagattaaattgcccaacaacctccatttgtccaaaatcatctttactgaaaagcctgtccaattcattggtagctgcagctaacgaattcgattttgcctcatcacctgagggt

SEQ ID NO: 58393 - DNA, 216 bp, Setaria italica
  Peptide Sequence Number=SeqID_124367
ctgatagtcaaggagactgttcgataatcagtagcatggagatcagctcctttacatcttgaacaccaaatgtaatatttttgctgaaaggcaccgctttcaaaagataatggttaccaggggaagcatgcaaatcttcttccaaaacaaagccatttgttctggaagaagatttgcatgcttcccctggtaaccaatatttttgctgaaaggcac

SEQ ID NO: 58394 - DNA, 405 bp, Setaria italica
  Peptide Sequence Number=SeqID_124368
agcgaatgttatgcacccacatttcaagattattttcaagggcttggagctcaccaagattcatgtggtttgtatcattctctccatgcatgtacctgcattgatgtgcacctttctaatcagtcccggactcgatacttgcttaccaagcactgtaaatctggcattttcctgtgatttgtggattcctggtagttcaacatggcccatcagttcatactagtaagttgttcgacctatatagcggtattgttttgtttgagttttacaaagaaaaaaagcaggaaggtaatggaagaaacaactttctagctagctataaagttacagctgctctcctgaatacattatatgaaaaatgccatgcaccatgtgttactcttgtaccatctttgtgctattacg

SEQ ID NO: 58395 - DNA, 211 bp, Setaria italica
  Peptide Sequence Number=SeqID_124369
ccttctgggagcgaatgttatgcacccacatttcaagattattttcaagggcttggagctcaccaagattcatgtgccatgctattaacattatggatgatgttgagagaaaacattaccattcaaatggattaggtactccatcaataaatataggcagttgactgggggcacacgtacgcctagaactcctcgaagtcatcaagaacct

SEQ ID NO: 58396 - DNA, 350 bp, Setaria italica
  Peptide Sequence Number=SeqID_124370
cctcgttcatcaagcttgaattctagaaaatgtgatatcagtgcagtccgtccttggattctagcataagccaatgaggccaccttctcactgttgaacttctcccatttcttcccattaaatgcctggtagaatgatataatgtgtgtaggtgatatcatgttaatgaacgcatatccaacattgcatttgttcttaaaatcaattggcaggtagaagaagtcataagttcctttgtggagttcatcaatcgcagccaaaagcatcttagatgtatatttgtttggaatgtttttaatcattcagttgttcgttccttagttattctattcgtcttatttttgttcgtt

SEQ ID NO: 58397 - DNA, 170 bp, Setaria italica
  Peptide Sequence Number=SeqID_124371
aaatcgtcttccacaggcatgtgaatgcatatgccattgattggaaatgcatcctgggtttcattcgtggtattagtaatagttttcacagctttcaagcgcatgcaattatctatctccttcaacaacagcgaggcgctgggtgctcacctgtatttccagacttccga

SEQ ID NO: 58398 - DNA, 129 bp, Setaria italica
  Peptide Sequence Number=SeqID_124372
cggatgtcgcccccaaacgcttaggcccgcccgcacccatgccacaccgcgacacaaaatccacctcattctttatacacagttttgggggtcgattaccttcactctagacagtcagattatgatcca

SEQ ID NO: 58399 - DNA, 253 bp, Setaria italica
  Peptide Sequence Number=SeqID_124373
atttgtgatatcatatacatcttgatttactgtaagtttgatatttattttgtttgtttaatgacaatcaggcagtttagggcccaacttacagtaattgttcatttgagatccattagagttcgctaagtgccaaaaattattattgcaatactctttattttctgaaagtttgacatgtttcattatctctgtaggtatatcttatatacagcttattctgcaactctggcattaacagattggagtagtt

SEQ ID NO: 58400 - DNA, 327 bp, Setaria italica
  misc_feature (19)..(19): n is a, c, g, or t
  misc_feature (70)..(70): n is a, c, g, or t
  misc_feature (117)..(117): n is a, c, g, or t
  Peptide Sequence Number=SeqID_124374
cagaattcattgaatggcnggaaagcatgaagaagctagtacctccactgcatgagagatcagcaaagcnccgtcagacagcaggtctagtagagtgcaatctgactcttcttgtgnaccggaattgaagataagttgcaggatggtgttcctgaggccattgagtccctccggcaggctggaatcaaggtgtgggttcttacaggcgataaacaagaaactgctatatcaattggtttgtcaatagtacggactagttagaactaccaaagaacaaataagaacaaatttaactaaaatttaaattaactaaattaaaaattaagt

SEQ ID NO: 58401 - DNA, 216 bp, Setaria italica
  Peptide Sequence Number=SeqID_124375
gattggagtagtgttttctattcccttatatacacctcagttccaactgtagtagttggcattctggacaaggacttgagtcataatacccttcatagttggagtaggtgttttctattcccttatatacacctcagttccaactgtagtaggttggcattctggacaaggacttgagtcataatacccttcatatagtctagggtaatatagaag

SEQ ID NO: 58402 - DNA, 236 bp, Setaria italica
  Peptide Sequence Number=SeqID_124376
actcaataccaattttccccaactacgggacaatatacaacatggctgcttcaaggacttactggcttagtgtttgtcttataatagtccttgggttacttcctcggttcctttgcaaagtaatatatcagaccttttggccatcagatattcaaataaccatgtgaaactgttgttagctgatgtcactttcaggccttgaacctaatggctgaggcagcttttttagaagctca

SEQ ID NO: 58403 - DNA, 290 bp, Setaria italica
  Peptide Sequence Number=SeqID_124377
ctcccttccccggcgagctatcaccgtcagccgccaccccagctccgccatggactcgctcctcgccagctacgcctcttccgacgacgaagccgacgaggccccacctgcccctgcccccgccgcggcccggggcggggaggccggcgccaagccccccaccgcctcctccggtggcggcggcggaatcttctcctcgctaccgcagcccaagtccgctgctctcttctcctccctcccgccgcccaaatcctgcccctgcccccagcgcggacccgggacggtgacgg

SEQ ID NO: 58404 - DNA, 455 bp, Setaria italica
  misc_feature (376)..(455): n is a, c, g, or t
  Peptide Sequence Number=SeqID_124378
gagaatatagagcaaccaagactgtctgtaagaaattttaataaccctaaacaaggtaggtacgtgctacctgctgtgatcccattggagaaatggagagagttagctagctcctccaacaagctaacccttttgaaggagatgaactaatcaagtgcacagctactactttttggtgctaataatctgttcatttgatgttagtgggttgcatactctagttctaattaaatcaatattcctacttttagcaaggagtaggattattagtacagcacggtagttggcaacaaattaaaacacacttttgtaaccacccctttgtgctgaaagagcaacatgaggccatgcttggttggtgtaattgtaaacggtnnnnnnnnnnnnnnnnnnnnnnnnnnnnnnnnnnnnnnnnnnnnnnnnnnnnnnnnnnnnnnnnnnnnnnnnnnnnnnnn

SEQ ID NO: 58405 - DNA, 342 bp, Setaria italica
  Peptide Sequence Number=SeqID_124379
aacgaaataacgaaataacgtactaacgtacgaaccaataggtaataacaaataaccctgtgctaggcgttgatttcttaatttcttttagccaccagcaatcaagcactcggttcttcttcctccgtagcttaattcgcatttacattgacctccagctccaagagaatatgagcaccaagctgctgtgattttatccctaacaggtggtacgtgctacctgctgtgatcccattggagaaatggagagagttagctagctcctccaacaagctaaccttttgaaggagatgaactaatcaagtgcacagctactactttttggtgctaataatctgttca

SEQ ID NO: 58406 - DNA, 228 bp, Setaria italica
  Peptide Sequence Number=SeqID_124380
tggctgaagaatactcctacatgggaaggatattatatatatacaaatcgaggacgacgacatggtgggtcgatggatcctctgtaatagttcgggatccgatcgatcgtctcgtcgaccatgctccaagagaatatgagcaccaagctgctgtgattttatccctaacaggtggtacgtgctacctgctgtgatcccattggagaaatggagagagttagctagctc

SEQ ID NO: 58407 - DNA, 525 bp, Setaria italica
  misc_feature (410)..(410): n is a, c, g, or t
  Peptide Sequence Number=SeqID_124381
ttaaaataaaccaaaacgaacaaaaaaactaagaacaaagtaataataaattaaacaaaaaactaaactgatgaaaacaaacaaaaagatgagaacaatgtgtctcctgacatattatgcactagaaacttagagaaccgttgtctatctgttagcttgccttttcatccttcctactcttttttcgacgatgctctgactgacactatcaacgtgtggttttactctttttcgaagctccggcactactatcaactggcgtcttccttttttccaataaaacattctttggtccataaaagcctgcaacatgtcttttgccttgctttttatctgcgtttgaatcttcagaacatgttgtttattgattgcaccttattggcccggacagcacctctattgtcgaaacngatcccaacaaaacaccatcaacggtaaagacaggggacccaaatgcagcacctaatggtagtagcacaattatgaacaaaatccacctctcctacaaaccggaccgatccagga

SEQ ID NO: 58408 - DNA, 199 bp, Setaria italica
  Peptide Sequence Number=SeqID_124382
aaatttctcttatttacaatatctcttggtttgtgtgtaggcaaaggacatgttgcaggcttttatctgcgtttgaatcttcagaacatgttgttttattgattgcaccttattggcccggacagcacctctattgtcgaaacagatcccaaccaaaacaccatcaacggtaaagacaggggacccaaatgcagcacct

SEQ ID NO: 58409 - DNA, 424 bp, Setaria italica
  Peptide Sequence Number=SeqID_124383
taatgttagtttttagttctatcttacatcgtttccatcaggaaaacgatgtaagatagaactaaaaactaacattactatgatctgcataatgttcaaaagttccatggaatctggggccagttacattaatcttttcaggtttatgataacattactactggtgttatatgccatggagagaagagtgtaatcaaggaaggtcacaaaagcttcccaagtggacacagttcatggtcttttgctggccttggcttccttgcatggtacctagctgggaaaatcactgcttttgatcgcaaaggacatgttgcaaagctatgcatagtgtttctgcctcttcttactgcttcacttgtggctgtttctcgagtggatgactactggcatcactggcaagatgttttgctggcgctattatagg

SEQ ID NO: 58410 - DNA, 324 bp, Setaria italica
  Peptide Sequence Number=SeqID_124384
tactaattaggtaagtaagtaagtaagttgttaattctaaggtaaggttctacaaaagcttcccaagtggacacagttcatggtcttttgctggccttggcttccttgcatggtacctagctgggaaaatcactgcttttgatcgcaaaggacatgttgcaaagctatgcatagtgtttctgcctcttcttactgcttcacttgtggctgtttctcgagtggatgactactggcatcactggcaagatgttttgctggcgctattataggccttacagttgcttcgttttgttatctgcaattttcccatatcctttgatgctg

SEQ ID NO: 58411 - DNA, 437 bp, Setaria italica
  Peptide Sequence Number=SeqID_124385
ttgttcgttctttcgttaaatttggttatttgttaagttaacccgtctaaactttttgtaagggtatagttgagcctctttctcttctctgttttgagtgccaaaaaattgagatgatgaaatcgccttcgcattagagaatttcttccttgcttcatcagtttcctgaatctgagtttttgaagcattgcttgatttcttttggaacccattacccatcccatactcctgaaagaagtctgatgtttttggtggtgctacatgaccagtcacatgagatcccccggattttgaatcagctgatggctcattctccatgtattcaaaacgtgaatgcaaggatggaccactttttgtagttgaagtagtcgtcaaggcaggcacaacaggttttggctattcaggtttctgctcatacaggctttcatttggctttg

SEQ ID NO: 58412 - DNA, 226 bp, Setaria italica
  Peptide Sequence Number=SeqID_124386
tttagttttaaattttaaagtttaaattttaccttttacttttaactttaatttcctttatttacttagggtcttgttgtctaggtaattgctttgaattgtcggagatgcaccgcaatcaaaacttgaagcggtattctgatgcagatatgaaaatgctacaagtcttggttcaatagaatgcttaaagcattctgtcgaggtcgctgatgaaattggaggccaa

SEQ ID NO: 58413 - DNA, 217 bp, Setaria italica
  Peptide Sequence Number=SeqID_124387
tggaggccgaggttgctgtccgcagaatggttgactattggacgtatgactcaaaaaaggaaacgggctatgtgggtctgaaaaaccaaggggctacctgttatatgaactctcttttacaaacactgtaccacataccgtacttcaggaaggctgtgtatcatatgccaaccactgaaaatgacatgccatcaggaagtattcccttggcgctgca

SEQ ID NO: 58414 - DNA, 365 bp, Setaria italica
  Peptide Sequence Number=SeqID_124388
ctcatcccctggtagcgcatcggagcccagctgctgttgtttgtttggtgtttttaagaaagtagccgacgagcttaagctcccgcccggttcggatgatgtgtatctgtatataactaaaattatcaggttgcacaaatgctgtgtttggttttgccacgcccttttgccttactgtggtcatcccggtgccattgatgagtagccagcttggctctttgtatacgatctgcttctggaacttgtgaagctcgctctcattctggttcatacagggtgtgctaaccccattgtgcatgcatggataatcttaaacggtggtgtacttcttgtatcgtatgattcattcttattagtagaataat

SEQ ID NO: 58415 - DNA, 326 bp, Setaria italica
  Peptide Sequence Number=SeqID_124389
tagttgtcctttgggtacgtagtcctaaggtactagtctagtcttgtacattcagggacttggaagcaggccttggtggcatgttttgaggagaaagagggcagaatagcccatgcatccccagatatgagcagagatgaacttccagtagagtttgtggatggccgagctggcatgcattcgagggagtcaagttgggttcgcagaggcacagacgaatttgaagcctccatggctgcctttggtttggaagctgacggtggcaacagcgttgcccggactggcacacattagcccaaaaaactgaaaaaaaaaactacggtagt

SEQ ID NO: 58416 - DNA, 322 bp, Setaria italica
  Peptide Sequence Number=SeqID_124390
tgggtctaagggttctactagttagtagtctaagggtttgtctaactaaacgtcgtcttctactagttcttagtaggttttctattgtagtcccctaactattggggtaagtccttatttggtagtattcttcgtaaattgggtcaggaagccagtgccttgggacgagccaaggcagcaggctggacatcagggacttggaagcaggccttggtggcatgtttgaggagaaagagggcagatagcccatgcatccccagatatgagcagagatgaacttccagtagagtttgtggatggccgagctggcatgcattcgagg

SEQ ID NO: 58417 - DNA, 200 bp, Setaria italica
  Peptide Sequence Number=SeqID_124391
tattctgaaacaaacttacctaagaagaataattactgacaactgctattcccccttccaagaacaaattttccgggcaagggtcacagtagagcaagggttgcaacaaaccgcgctcacagtctagaggtttcatgagccccaacatggggaagcctattggagatctcgaaatgggcaggaagccagtgccttgggac

SEQ ID NO: 58418 - DNA, 233 bp, Setaria italica
  Peptide Sequence Number=SeqID_124392
gaccaagtgggcgagcggcaagcgggagaagactaagttcgctgctgtggatgtagttacaagttgcatccttcaaatttatttgtattagaaaatcacagcaatggagaagtataacaacaacactcgatttgcacccttgagagatgctccatttgctgtccgtggtgctcttggtagctcaagctcaaatcttgagcaagccaggggatacacttcttcgcctctagcag

SEQ ID NO: 58419 - DNA, 233 bp, Setaria italica
  Peptide Sequence Number=SeqID_124393
gtgaacaacatccatgtactcatacattataatatagatatatatacaaactaataaaaaaaacaagtaataaatcgatgggttgcattggccattgccgaaactctggaggcaattcaccatacgtgagttcctttagttatgttgtatatatatctatattataaagtgtgaacaacatccatgtactcatacattcatgtgtattctacttgtaataaaattttaaacgt

SEQ ID NO: 58420 - DNA, 204 bp, Setaria italica
  Peptide Sequence Number=SeqID_124394
gggtacatgaccacagagagaaaacctggatacgtagcctgcacaattgctgctgccattgctgcagttgccatcctctttgggataactaaaggaactcacgtatggtgaattgcctccagagtttcggcaatggccaaatgcaacccatcgatttattacaagtagaatacacatgaatgtatgagtacatggatgttgttc

SEQ ID NO: 58421 - DNA, 233 bp, Setaria italica
  Peptide Sequence Number=SeqID_124395
cggagcgtgctggacccacacgtcaacaatccggatctgaagctaaggcgaacatgcctgtccatggaaccggtgccagcatcctctccatcgtgcgctgccatgggcaggctcgcgcgctgctacgcttttggtcaagaagctcgtgcgttcgccggaggcctccctcgcaaggacgaggcacgctcgagctcaacaagccagaggggacactgagagagatgcaggtcggg

SEQ ID NO: 58422 - DNA, 255 bp, Setaria italica
  Peptide Sequence Number=SeqID_124396
acagtggactggctccgccgccgtctgcacggctcccccgcctctgcaccaggccaagccgcccgcccgcccgcctggagctcccccatccgcagccgcccggatctttcccgctgcggccgctgcctggagaaaaatcggagaacaaatctacaagaggaatccacggagcaacccataaatcttcggaatcaaagaaaaaaggccacaacaccgacctggatctgaagctaaggcgaacatacctgtccatgg

SEQ ID NO: 58423 - DNA, 385 bp, Setaria italica
  Peptide Sequence Number=SeqID_124397
gaccagccatccaactgtctgctggtcacaaccaagattttacgaaatcgctttcacaagcccctgagcttcaatcttgcaaacctgtcgacaaaaaacacagatcagatcatatgttatttcactttaccaaaaccttttatcaaccgtcatgggacatacttattcgcaaatgttttttgaagtacacaaagcaacggaaactagcaaatcacaaatcaaacaggatattaacaaggcaggctttccttataatttttacgaataaaataagagcaaaaactggctggacaatatggctgttctgaaaataaccaaaggctctagatttactctaagaaatgtttgccatgtggttgatatggcaaattaacagcaacatatt

SEQ ID NO: 58424 - DNA, 251 bp, Setaria italica
  Peptide Sequence Number=SeqID_124398
ggtaaatattagagtacttaatcaacttcatattcgaaagtccctccttaatctgcattcaaccatgtagttttgtcatcagcaaaaaaatactgctgccaacagctactaattgaactctgaagtagacaaagatcattgagcttgcaagtaaaacaataatgagggacataatctgaagggagggatcatgatctagaagacataaattatcaccaaacattaaaaatgcacaataatcgaaagcgtgt

SEQ ID NO: 58425 - DNA, 293 bp, Setaria italica
  Peptide Sequence Number=SeqID_124399
taaaagaaactaaaggaaaaagaaacttttaaagaacaaattaacgaacaaggacaagtaggtacggacaacggccgggaataaggcggctgcggtgacagcggtgtcgcgcaggggcctgcacgggtagagcagctccgggtggaagaaccacttgaccggcatctccctctgggcggcggtggcggtggcagcagggcggggagcgagcacgtggagaagcctctcctcccgcttctccctgatcctctccagctccctgaaccgctgctgcagcagcgcgatggaggagg

SEQ ID NO: 58426 - DNA, 208 bp, Setaria italica
  Peptide Sequence Number=SeqID_124400
tgtcaacgtacccaacgctgtcgccgccgaagaagtccttccccttagaacactccctcaggcctccctccagagcgcccgccgcagagaaaatctgcatcatcgcctcgtctcgctcctcgtccgtcttggccctgaacacccgatcccacggtggtgctagcttgtcatcaatgtaggcgacccagaagcgagcaacggcgcgttc

SEQ ID NO: 58427 - DNA, 178 bp, Setaria italica
  Peptide Sequence Number=SeqID_124401
aatagaaactagaagtacttaattacttagaataggttaacaataatacaattttactaatagttagtaaggtggacaattgacatacctgcttgacattgtcataaacagttgaaggttcactgaaatcaaccaccacaccagttgctctggactgaaagtacagaccttgccgctg

SEQ ID NO: 58428 - DNA, 365 bp, Setaria italica
  misc_feature (228)..(228): n is a, c, g, or t
  misc_feature (244)..(244): n is a, c, g, or t
  Peptide Sequence Number=SeqID_124402
tcttttaatattagactgaatattgattcacctacaaagtgaaaaaaatagagctgagttaaatcacaaggagaattacatagtgaggattagttggtgaaatgtacaaaagaaatgacttaccagaaactcaatactgataaaagatgcaaactcaagacatagcatgtttgaaggtagtgatactggatttactgaatgcaagagagagcttaattgaaaaaaacngaaacacagttttccngcaagtgaaatatgtctcagatatcttgttcgaatttactatctcaaatcatttttgtcctcagcactataaagtagttaaattccctagttcatctgtattcacaaagaatgagtaccaa

SEQ ID NO: 58429 - DNA, 232 bp, Setaria italica
  Peptide Sequence Number=SeqID_124403
ctcaaagcaggacagcaattgaagcgttccaccatcggggcaaagaaaggggcgccttccactggtgcacgctgttgaagctggtgatgctgactggtcacaccagatgccagtgcagggcttatagttagtgtcttgagatgccgaaacatgatattccgtgcacttgaagccattcagctatgtttcctgaacaggggctggggctccttacgccggaggccgacgggag

SEQ ID NO: 58430 - DNA, 471 bp, Setaria italica
  Peptide Sequence Number=SeqID_124404
aggtaggaagttaagaagaagaacatctgtgcacctctgttgttgctgtcttgattcaaggcgtgctacttgacgctcctggaaaatggtaggaaggggaagcattacacttacacatagtagtatctcagggaactggggaagagaagagagaaaaagcagctgacgtacaaactgaaggttgagtgggttcttcctctcggatggtctcccaaagaggcgacgaggtctcctatttgcaacagcatcagcggttccagtaggcattccatgttcaggtggcatgtcgcatgaatcctgcaagagtggttgggcaaaagggcacatgagcacagaggcatacacggagagaacaatactcaaatagatagagaagtcaaaagtgtggtgtgccggggtcatgtatgtatgtatgcaagaatgaattttatccagacagaggtagactagtacggaggttgaggtgggagt

SEQ ID NO: 58431 - DNA, 221 bp, Setaria italica
  misc_feature (56)..(56): n is a, c, g, or t
  Peptide Sequence Number=SeqID_124405
cctatcccctcgtgtgccttgctaccccctcgttgcgtgtctcagcagcataacangtttcctgagctgaacctgtaaacacggaattttgagcactgtccaaataccttaagttactgctattacattgtccacgcagtcctggacacgaaattgccgatctagacggttctgggattcatgcgacatgccacctgaacatggaatgcctactggaaccg

SEQ ID NO: 58432 - DNA, 259 bp, Setaria italica
  Peptide Sequence Number=SeqID_124406
ggccggcggggtggggcggggaggtggcaggcggtgacggtgacgggcaaccaaacatgctaaagcattactagatgacgatgatgatgagctcaatgtttatttgggcagcgtcgagttggccaccaagacgcacttctccctgatggcgccgaagtaggagagaagccgggccctgtccggcaggcactccttcaccgcttcactggagctgtactccgccgcccaccggcgcagagccgggtattcctcctcatcg

SEQ ID NO: 58433 - DNA, 244 bp, Setaria italica
  Peptide Sequence Number=SeqID_124407
cgtgtaagcctttacatgatcgcaattctggccggtcctaatgatgtgcagtaggtggcgagtgcaacgacgacggtgaccggcgaccaaacatgctaaagcattactggatgatgatgatgatgagctcaatgtttatttgggcaccgtcgagttggccaccaagacgcacttctcccgatcgcgccgaagtaggagagaagccgggccatgtccggccggcaggcactccttcaccgcttca

SEQ ID NO: 58434 - DNA, 255 bp, Setaria italica
  Peptide Sequence Number=SeqID_124408
taccgtggtaagaggctgaatgggtacaggaactatgagagcctctccaggtcgcacgagttgttggattcggagtgcaaacaagtggataaaaagagcacattctatgatttctgtttcaacacaagacttgccaggacaatggtagttcattttcagatgttacgatatttttgaaggtttgactgctttccgtttcagtaggtgaagtttctgtttcctacttacactttctcttcattgtagagtgtacca

SEQ ID NO: 58435 - DNA, 225 bp, Setaria italica
  Peptide Sequence Number=SeqID_124409
caggttgtgtgataagcttagttagatatgctagctgaaggtgtagtatgtatctacaattaacactgctgtgatataggacagcactgcaacactatcctttcaccagggcccataagcaggtggacgagcatcctcagcggccggcgttgttgtcaggacatctgtggaatatggtatggtaggttgtttatgataagcgagcctctgctggataattcatgc

SEQ ID NO: 58436 - DNA, 316 bp, Setaria italica
  Peptide Sequence Number=SeqID_124410
ctgggcggccggatcggcgccgtccgggggcctccggttctcccccgacggccggttcctggcggcggccgaggccgccgacttcgtgcacgtgtacgacgccgcggccgggtacgccggggcggagcaggaggtggacctgttcggcgaggtggcgggcgccgcgttcagccccgacggcgaggccctgttcgtcagcgtcgccgaccggacatacggcggcgtgctcgagttccggcgccggtcggttcgttacgtacttaccttcgttactttcgttttcttttcttttctttgttaggtgcccagccggccg

SEQ ID NO: 58437 - DNA, 226 bp, Setaria italica
  Peptide Sequence Number=SeqID_124411
ttctgcacgaacctgaccggcaacaactactccatcacgaacgccgtggacatcttcgagtcgcccgagtaagcgagtcttgctatcggttcagattctgaatacaagccactagtaaggagtatgtgaaccgaagctttgaatcctttgatgcagtggcgccactcgggtgatggccgcgaacaacgactgcgtcgtcagaacgttcgacaccgcgagaataaac

SEQ ID NO: 58438 - DNA, 236 bp, Setaria italica
  Peptide Sequence Number=SeqID_124412
gtttcatcaggaacaaaagcagatggatatgatgagcatcctgagcagccggaacactaactacagggtgggaatatgtttcgtgccaattgaaatggtgtgcaaagcatggtattcgtttggagctattgtgtgtcatcattctgaagttgaggaacctcctgtgggctgcttcgaagcacgacgtgtacctggtgcagaactactctgtgatgcactggtctcccctgttccag

SEQ ID NO: 58439 - DNA, 347 bp, Setaria italica
  Peptide Sequence Number=SeqID_124413
cagtgcaatgggtcacaagggcttcacatacaatgttagtttgacagggcctctatttcatggtattaacgttggagctattgtgtgtcatcgattcgtgaaggtagtgctaacatgggacttcaacaacacaaagttcttatcggcctttgtgttacaaattatagatactacgatttacagattgtagacacagaatttggaacattgaatgttccatttcctcctgtatattgtccatgaaaatagaggccctgtcaaaactaacatgtatgtaaggctaacagtgcaatggggtcacaagggcttcacagttgaaaatctgaataagcatctggaattctctc

SEQ ID NO: 58440 - DNA, 236 bp, Setaria italica
  Peptide Sequence Number=SeqID_124414
cactcacaaattatttgatgcacgatcatttgttcttaaactttacacatagcatttgataggcttctcatactaacagacatggtgtgcaaacttatgcttcgtgttacagtttcgtgccaattgaaatggtgtgcaaagcatggtattcgtttggagctattgtgtgtcatcattctgaagttgaggaacctcctgtgggctgcttcgaagcacgacgtgtacctggtgcagaa

SEQ ID NO: 58441 - DNA, 251 bp, Setaria italica
  Peptide Sequence Number=SeqID_124415
ataatttgtaacacaaaggccgataagaactttgtgttacaaattatagatactacgatttacagattgtagacacagaatttggaacattgaatgttccatttcctcctgtatattgtccatgaaaatagaggccctgtcaaaactaacatgtatgtccttatgtgcgatcccactaatgcactggtaccaaccttacaattttacaagcacagaccgaacaagcagcacctagtattcttgcacgcata

SEQ ID NO: 58442 - DNA, 372 bp, Setaria italica
  misc_feature (317)..(317): n is a, c, g, or t
  Peptide Sequence Number=SeqID_124416
ttatttgttcgtttgttcttaagttaatttactttaggtttgtcttgtcttgttcggtctgtgcttgtaaaattgtaaggttggtaccagtgcattagtgggatcgcacataaggacatacaaagttgagcttattcttccatctgtgcatgcgggatgactgaatggatcaacgagtttcatgatacttttaccattaagaaaagacaagtgccacgtacctgaatcatgcatccgtcacatcttgtaaaaagattttgtatcctgttgcattctctgaaacatctgtgtcaagtgtaatgaccatggtccaaacntgtgcagttgaggaacctcctgtgggctgcttcgaagcacgacgtgtacctgggt

SEQ ID NO: 58443 - DNA, 310 bp, Setaria italica
  Peptide Sequence Number=SeqID_124417
gaggtatcataggttgggggttcagaataggatctcactagaacccctatggacactaattgctgtagatgaatcacttcagttttactaggtttgtaattcactacagctggacgcatggcttattcagttatgtttgatgtgattgttcacatgtgatatattttggctgctggtggcctctttttgtagatgcgtttcttccaaggtgatcattaaatcatttgtcttttgctgtttgtttgtaaaggagaaactggaaagtgtaggataatttccagccgagggctcttctgtcatacttgcatgc

SEQ ID NO: 58444 - DNA, 225 bp, Setaria italica
  Peptide Sequence Number=SeqID_124418
ctttcgtggaaataggcgttaggtgttagctggttcagcccttgatgtgattttgaaggttgctactgaatactgatgcttatggacgtttcaaaggcaattgagaattgagatctcttcagacttcttgttcatgcagttcagcacatgtgaagtggaacttgagaaactggaaagtgtaggataattccagccgagggctcttctgtcatacttgcatgcttt

SEQ ID NO: 58445 - DNA, 480 bp, Setaria italica
  Peptide Sequence Number=SeqID_124419
ctaccgtggacgatgatgctacactagaattcatgttatcttctgccttcaacgactcctttgtgttatttgaatctttgttcctcacaaaaggttgaaaaccagaaccgatcgatgcgtgcttaaaggcattattatttagtatcccctgtgactgagatccttcccctggctgaaacagagttggggcatgcgttgtgggaacaggaagggattttctgaggttgtgacacgacgacagcagcttcttgtaacacgacaacagcagcttcttgtggtatgacagcaacagcttcttgtggtacggcagcagcagcttcttcatcagcttctttcagctagtggaaccagtaataattttctggaacaacagcacccactggagggaagttactattgcccttctgttgggacaaatatctgaatatcattctccgttggattcttttcatgttctgacccagatcatttcctcctctt

SEQ ID NO: 58446 - DNA, 394 bp, Setaria italica
  Peptide Sequence Number=SeqID_124420
ctgagatccttcccctggctgaaacagagttggggcatgcgttgtgggaacaggaagggatttctgaggttgtgacacgacgacagcagcttcttgtaacacgacaacaagacaagacttacttgtggtatgacagcaatagcttcttgtggtacggcagcagcagcttcttcatcagcttctgctgggagttcgttaaggtcaaataacatccttccacgagaacccatgtcatgtgtaaatgcatatagcttgaacctttcagctagtggaaccagtaataattttctggaacaacagcacccactggagggaagttactattgcccttctgttgggacaaatatctgcaacacaaagaagctcaagatgtcagtaatacagaaagaatggg

SEQ ID NO: 58447 - DNA, 349 bp, Setaria italica
  Peptide Sequence Number=SeqID_124421
aagaaacaacgaagacaaaagacaagactcaatctgttgcagcgtttgatggggcacacacaagcatccgaggcttaggacaaagcttgaaggggggggggggggggggggggatgcgaaataggttctgatccatgctctgcaaaagttcatcaattgaccctgcagcaacagtctccgagctggtactagtgctaccactaacttgcttgtaactttcaggagcaagtttcttgagcaaagcagcatagtaatgctgatactgaacaagatggataacatttaacatcccccacacagtatgagttttccctgtcccaggaggaccttgtaccaatgtgaaaggcca

SEQ ID NO: 58448 - DNA, 351 bp, Setaria italica
  Peptide Sequence Number=SeqID_124422
tcgttgtttgaggaagcgcccgccggagcctctcgcccgtcgcatggcatggaggtggcgcgactcatgaagatatggctttctgcctttcgccagcctattctccctctcagccttggcgcgagcacggcggcgacggaggatgccttcgtactgcttcggattcacgtagatcggtgcatcagctggcgcattcaatggcaagagaagtctcccactagactgcattacggggaaagaaaaaaggtcaattagagaatcatgtgctatcaaaggaactcaactgatcgacatataaatccaaggagcatgattaacacatgatccatcgttgcatcagggaaaaaaagg

SEQ ID NO: 58449 - DNA, 261 bp, Setaria italica
  misc_feature (221)..(221): n is a, c, g, or t
  misc_feature (256)..(256): n is a, c, g, or t
  Peptide Sequence Number=SeqID_124423
gcggcggtggtggaggaggagaggtggtggggcgggcgaggtggaggcggaggtgggacgccatggcgcggggagtgcgcgtgcgggtggagtgctgggctggccgggtggtggagtgggcgggcggtggtgggagctgaaatggggcagcaggaactcgctgcgaagaaagtcgaggagcagaggcaactggcccagcttgagattgaagaaaaaacggntagattatgaaagaaaactaaaaacttgatcaacngcgag

SEQ ID NO: 58450 - DNA, 351 bp, Setaria italica
  misc_feature (6)..(6): n is a, c, g, or t
  misc_feature (40)..(40): n is a, c, g, or t
  Peptide Sequence Number=SeqID_124424
atgacntaaaccaacacatatttctagtacaactggcctnacttatatgtataacagaagtaatgcatggatatcagtggtgctcaagttgcattgttaagaaactagctcactgcataggcattacgcatgctaattactatgaaatttttgtccatacagcttacctcccaaaggtacattgtgtccacgaacgagaactccctacggaaaagaaccatcagcattcggaaggcaaataagtattcccctccatcaagatgttctaaatgttcatgtagctttggatcaacagatttcattatggttgacaaggttgtgagctgagctcgaactccaatggaagtagaa

SEQ ID NO: 58451 - DNA, 371 bp, Setaria italica
  Peptide Sequence Number=SeqID_124425
tggtcgtcggttgtctacgtattgtccgtactaagtagtctaggttgtcgtcgttacatgctctggtacgaatcgacgcagaggacggcctcgtcggggctcgtgtacacggtgtaggggtcgtgcgggcgctcgaggaagtggcggctccggtagaagctcgtgagcacggggcgcgccgggaggcccgccggcgtgcgggattccgccttgacgaagtagaggtacatgcacttccccttgtccaacccggggacggcctggctcataaccggcatgagcagggtgtacatcagcgagcgccggtccatctcgtcggcgatcgacggcatcagcttccgctcccctcccgacgtgcccggagctggtga

SEQ ID NO: 58452 - DNA, 422 bp, Setaria italica
  misc_feature (37)..(37): n is a, c, g, or t
  Peptide Sequence Number=SeqID_124426
attgaggccctgtaccagtgatctttgtcatcaatcncctttgcggaagcaactgcaatttgaatgttaccactctcaagagctaggttaaatctggtcttctcatccttcacaaaatgtagagcaacttctggaaaacctttctgctgcaaataagaaataacagcctgtccacatagctgggagttcttaatcatactcataacatggtcatagcgttttcggagaagagcgagcttgaaaatgtactctgatgcatcaacagcaatcagcttgttctttccatcacgatctaggcaaaaatattgttcccaacaacccttgttatgtaaataggaacatcaagcgtttttatagaatacccgactagtactaccaataatagaaagtaactagtactaccaattagggaaagaacaaga

SEQ ID NO: 58453 - DNA, 398 bp, Setaria italica
  misc_feature (66)..(66): n is a, c, g, or t
  Peptide Sequence Number=SeqID_124427
gagactccaaaagctgttggcaatgctcgctctgctgtatttgttgctcctacacctggcattccngtcagccaaatttggactcagagatcttctctggctggggagcatgcggctgcagggaactttgacacagctatgcggttgcttagccgtcagttgggtatcaagaacttcactcctctaaagccctgttcttgatttgcacatgggcagtcacacatacctacgtgcacttgctgctgctccagttatatcagttgctgttgagaaaggatggaatgagtctgcaagtcctaatgtgagaggccctcctgcacttgttttctagtctttcttcttacttaatttttggtttaaagtttaactttaagtttaacttttactttaaagtttaa

SEQ ID NO: 58454 - DNA, 251 bp, Setaria italica
  Peptide Sequence Number=SeqID_124428
gtacttattcctgttcatcaagttgaatcgccaataagattcaaagcaggaggataacaaaagtatcagcagcaaaatagctcaaaatcttaccattatcgatcatggtgcgtcgcttcagttccatgtcctcaggtaaatcagtttgatgcccttgcttcatatacagatcaacttgcaaggaattggcatcattatctttgccatttgtcttgtctgttcgcctggtggatgcccaagagaacccacca

SEQ ID NO: 58455 - DNA, 530 bp, Setaria italica
  Peptide Sequence Number=SeqID_124429
acttgcaagaaaggctccggtcttaaatgggagaaggtaatcgccatttgtagtagttccctcaggaaacagtaacatcattggggtatttttatcttgacaaacctcctggaccctttcagttacagcacctacatacattatagaaagctcagtagaacaacaaacaaaactacaaaacattacaagttgccatagcgagaaaaatttcctcaaaagagcaaagtcatgtatataatttaaagttcaaaattcgcacaaatttataaaatcctggagaacatcaactatgtgatgaatataatgcaatattcgaaggattagcaaaaggaacattcaatactaaaatgtatattttgaggatgctaacaacaagaatagtagcacaaatataaccagttgaagggctgtagtcaatatatacctgagacacctttggaatctgaagacttcgattctcgttgaacaaaaatgcatccaagacacttgcttatgagaccaactaggggcaacctggacactgactccta

SEQ ID NO: 58456 - DNA, 319 bp, Setaria italica
  Peptide Sequence Number=SeqID_124430
gtgtgcatcaacatccgactcgtgaagaatgcgagtgaagcttctgcaaagtggacatgttgcatgcatacgtagccatttggtaatacatgtccaatggaagtgatggttgcagggagagcagataactctgctccatcttcgtatgatgagatgcagatataagtgttcttcccagatatagatattctgatccaagcgagaacggagagaaagggacagatgagggagtgatgatccctatcctaaataatagtggaacatcgacaagtgagcgtattcttcttcgcgaggatgctgaatgttgtatctgcctctc

SEQ ID NO: 58457 - DNA, 289 bp, Setaria italica
  Peptide Sequence Number=SeqID_124431
aaggtaaaataaacaaataagtaaccaaataaggaaagtagaataggttagacaggggagagcagataactctgctccatcttcgtatgatgagaggcagatacaacattcagcatcctcgcgaagaagaatacgctcacttgtcgatgttccactattatttaggatagggatcatcactccctcatctgtccctttctctccgttctcgcttggatcagaatatctatatctgggaagaacacttatatctgcatctgatgcaccctcctacatatttagggggaaa

SEQ ID NO: 58458 - DNA, 188 bp, Setaria italica
  misc_feature (1)..(53): n is a, c, g, or t
  Peptide Sequence Number=SeqID_124432
nnnnnnnnnnnnnnnnnnnnnnnnnnnnnnnnnnnnnnnnnnnnnnnnnnnnnaagtttgtaaattgtgaatttattaccaaaccgtatgcaaaaagcagcacaactcaaaagatatttacaggtgatattagcaaagccatctgtaagttaggtttcattcatttacaggttgtcaccacatcctaa

SEQ ID NO: 58459 - DNA, 238 bp, Setaria italica
  Peptide Sequence Number=SeqID_124433
cctcgtgccgtcgagcggcagcggcgccttaaggatgacgacagaggcgatgaagtcgttgttcaccagtggcccggcgaacaccgtgggccgaagccgtagttgaacgtcatctggaacgggtcctggtcggtctcctccttggcgaactggaagaactccacggccatcctgtccttggcctgccggatcatgtccacgacctccatgatagacgagccaagcaccttctcggccg

SEQ ID NO: 58460 - DNA, 384 bp, Setaria italica
  Peptide Sequence Number=SeqID_124434
aaagcagagacaacaaggtggacctgaattagtccaggagataagaaagcaagcaaacgatgctcgtgattctaccatatcaatgccctacagaatacagagaattgaagattttgtaggacaactcgagtcaggtgatctgaaactcagggtcagagtactggagtctgaacgagctgctcggaaagctactgtgcttcagatggcgacgatgtatacagccttgggtggtactctcttgaacgttggggtcacattgaacggtcaagggaccaaataattgcaaacggttctttcattggtgcagatttcatcactagtaaaatcggcgccaagaagagagggaatcggagaagcacagttgggaatcggtcgaatggtgct

SEQ ID NO: 58461 - DNA, 259 bp, Setaria italica
  Peptide Sequence Number=SeqID_124435
ctgaactcttggagacacagcttggtcgggtccttggcgaagtaatggagaactacaatgaggtggaggttgtggcagtaagggatggctttgcgtacttggcaacaacagaaagtttaaatgattctgggactcctagttggttcttgtccctctgcttggaaacaatgatattggagaagctgtttcagaggacgtatgatagttcggtgcacccctatgttatgccatggccgcctttcttttagtttggttaact

SEQ ID NO: 58462 - DNA, 205 bp, Setaria italica
  Peptide Sequence Number=SeqID_124436
aaagaattttcaagagcgtccaatagcagcagcaagtcttggtcaggtacatcgtgcggtgctccataacggtgaaagagttgcagtgaaaggcagcaagatgtcctctcttgtcaagacacagaagcacacaaggttcaacgatgatccctttcaagaggaactgaaggttttgccttctgatgagggattcagctgggcgaaa

SEQ ID NO: 58463 - DNA, 275 bp, Setaria italica
  Peptide Sequence Number=SeqID_124437
cggctccgtcgtgtacgtggcgttcggcagcttcaccgtcttcgacccgtgccagttccaggagctcgcgctggggctggagctcaccggccggccgttcctctgggtggtgcgcccgaacttcacgaccggcgagctgagcaaggcgtggttcgacgagttcctggcccgcgtcgccggcaagggcatggtggtcagctggttgtccccctagtctagtctaggttccttggttcgttcttaccgttttagtttacggttttaggtttacttta

SEQ ID NO: 58464 - DNA, 166 bp, Setaria italica
  Peptide Sequence Number=SeqID_124438
ctcatggagctctcccaccgcctggtcgaccacggcttcgaggtcaccttcgtcaacaccgaagcgcatcacgcgctggtcgtcggcgcgctgcaggcggcgggcggcacgtcggcgctggccggcatacacctggcgtccatctccgacggggtggaagacgacg

SEQ ID NO: 58465 - DNA, 475 bp, Setaria italica
  Peptide Sequence Number=SeqID_124439
atactatgagacttggaaactttcatttgagtaaaatttttgtgatatgctttttttgctgacatggtcaatttagtatcctacccactgaccgtttcattcactggcagatgtagaagttcatcctgacataaagaagaatttctgggatctacagaattggccaaaatatgttcttgttagatatacatgggaagagcagtcagagatagatgttgctggagggttttacgtgttatttggatctgggcttgttctgtccttcatccttgcaatctatgtcctacagtcatctcaagaaaagttgacaaggtttgtgcgagaagcagttgcagatagtagcctgccagagggtggagttgcaaaggtcgagtgacctatccacaatgagatgtcatgttgtccactaatttctacactgataggaacaccaacaagagatgctcaacagtcagttttcttggatgtgtagctt

SEQ ID NO: 58466 - DNA, 371 bp, Setaria italica
  Peptide Sequence Number=SeqID_124440
aattaccttaggactttaatagttaataaaatcgacaaaacctccgaagttccaatgattgatttccatttggtgaggaatatactcgttgctggacttttgtttacacaatccttgtggaccgtttgccttcctgggtttaatagcatattcatgtggattttacagaagtactctggaaatgatctacttggggtaacagctaaagttgtggacatgcctcaccactatgtagaagttcatcctgacataaagaagaatttctgggatctacagaattggccaaaatatgttcttgttagatatacatgggaagagcagtcagagatagatgttgctggagggttttacgtgttatttggatctgggct

SEQ ID NO: 58467 - DNA, 272 bp, Setaria italica
  Peptide Sequence Number=SeqID_124441
ctgccagagggtggagttgcaaaggtcgagtgacctatccacaatgagatgtcaacttttcttgagatgactgtaggacatagattgcaaggatgaaggacagaacaagcccagatccaaataaatcgcaaaacctccgaagttccaatgattgatttccatttgaagtactctggaaatgatctacttggggtaacagctaaagttgtggacatgcctcaccactatgtagaagttcatcctgacataaagaacatatttggccaattctg

SEQ ID NO: 58468 - DNA, 278 bp, Setaria italica
  Peptide Sequence Number=SeqID_124442
ttaagtctagttatttgttttgtttaagttttgttgttattggttgttttgaacagtccacgaggccgaaaaggaaaggggagtgcagtgaaggaagaaaatacagagacacctaaaaggtaagtaattgatacaaagaaattgcgatgacttgtgcctgtagcttttctgaggctactgttttctgcatggtggcagcgatgctgtggatcctccaaagaaaaggggacgtcccaaaggtgtgcgatccaccaatggggcaccgaatgacaacagct

SEQ ID NO: 58469 - DNA, 356 bp, Setaria italica
  Peptide Sequence Number=SeqID_124443
tttggttactttcttattgtaattggttaattacggtcttgtcttgtcttattagcagtgatgcaactccagctgacacagattccattgctgcagaacccaaaagaagtcggcccttgattcagacaaaagtattaagcccaatccatcggataaatctgaagcaactgaacattctggttctgatactaaaaaagagatattgtagcatctggagaggaggggaccaacggagcagctgatgatacatcaaagcctgctgatattacacctgttaagccaagacgaggccgacctcctgggccaaagtcattggagaagaaggctgctggaaagaacaaaccttcaagattttc

SEQ ID NO: 58470 - DNA, 421 bp, Setaria italica
  misc_feature (290)..(290): n is a, c, g, or t
  Peptide Sequence Number=SeqID_124444
ttggttccttatttactttgttacccttaagttaattagttactaaggtacttagactagtaggacaatacaatagtaatctctgagatcacaagaatcacggcacctgatgctccatatgatgatgatgcaatgagggatgtattctctttgattgtggggtccttccagaatctcgatgacacagaaagccccttgtttggaaggagattgtcaattcttgatactgttgcaaaagtccggtcctgtgtggtgatgctagatcttgaatgtgatgatttgataaacgntatgttccatcacttcttgaggactgtttcttctgaacattcaaatgctgtcatctcctgcatggaaacaataatgagattggtaattgaggagagtgaggatgtccaaccacagattgcatcttgcttac

SEQ ID NO: 58471 - DNA, 212 bp, Setaria italica
  Peptide Sequence Number=SeqID_124445
cctatcccctgtgtgccttgcctatctcctgttgcgtgtctcagagcatcactgagactctcccaatcagaagagttcctaatggccttgaaagcctcatagataggcttgctctggcccagccttagttgaaacttgactttgtcaggctggacttcctcgacggcggcgcgtagatcggcggagtccttgacggccttgaggtggtcgac

SEQ ID NO: 58472 - DNA, 241 bp, Setaria italica
  Peptide Sequence Number=SeqID_124446
tcaacggttgccattttctgagccatgcttacctcagcatagttcttgtagccaagaattttagccttctcttgccttaacttcagaatttgagcgatgatattggtgttatcaagttcaccactagaggcacgggttagataagcacggtagacttcttcacgaaaatgctacagctgaaaatggaccttggatcatcacgttggatgcaccaagctatatcgctgttatgcaacatgac

SEQ ID NO: 58473 - DNA, 236 bp, Setaria italica
  Peptide Sequence Number=SeqID_124447
acgtggaggggcttggatgaatgttgtcttttctcgcagtcgtgtcctagctcgcaatgggttgcctgctaggctgcctgttgctcatatggtgttgcaatcagacgccaccagttggtgataagcccagtctcatgaccttccgtgaggtaagtaacatccgtgaaatgtgaatgaggatagctgttggaagtactgaagcagtacgctcctgattatgatagtaaagaagttgc

SEQ ID NO: 58474 - DNA, 261 bp, Setaria italica
  Peptide Sequence Number=SeqID_124448
gcgttgtttactatacaaaccaggtgaaacgtataaacgtttcagttagttttcttgatgcactctatttccgttttgtttaattcagttgtcctctgtttcaatcagttctctgatgtgccccgcggagctattggttccacatcccgaaccagcggcccagctgatgaggaccttcatgcctcctgccgctactggtgctgcggcgcgcacccacggcattcctaatttccaggtgaggccatgtattcaatttaggag

SEQ ID NO: 58475 - DNA, 393 bp, Setaria italica
  Peptide Sequence Number=SeqID_124449
taaggaaagccgactgattatagtaacatagattgaaaggagcaatacctagcagataatattcatgaaaaactagtaacaataaatattgaatgtttatagggaagggtgttgaaatggtaacacaaagtaagggtgatatttacaggacgctcgaaggctgcattatggatcatatagtcaatgcctgcattagaaaatagtgattctgctgcatgtacaacttgtttcagagattcttcaccagctgataaatccatgggtaacacttcaatcctgctatctggattcttgcctttgaaagtaaatcaaacttggttcagatcatgagatttccactttcccataaaagaaaagttttagctaacacaagaaatgtcctgcaaacttact

SEQ ID NO: 58476 - DNA, 227 bp, Setaria italica
  Peptide Sequence Number=SeqID_124450
cagaacactccgacatgggtgccgcgttcctggcgtcctggccgtgggacaacctcggcttctacaaggtacgcccccatgcccggccgcgaggtttttgtttcctcttcgatctccccgctcgggggtgcagcagtgcaacggcgtcgtgtgctgcccgaccccatgtgctgatcgagctgtgccgatcgatcggctcctctctcgcgcagtacgtgctgtacggg

SEQ ID NO: 58477 - DNA, 261 bp, Setaria italica
  misc_feature (203)..(203): n is a, c, g, or t
  misc_feature (252)..(252): n is a, c, g, or t
  Peptide Sequence Number=SeqID_124451
cccctcacctgaggccgccgcactcgccggtgcaggaaccttctcggcggtgagaatccccgatttggtcgcgaattcgatgagcgtctcgtgctccgcgaggacggatgtgaagaggaagtgagcggaggccagcgtcgcgtggccgcagagctcgacctggagcggcggcgcgaaggctcttctcaagattgaaaaaacgngtggctgtgcaacggtgaggtggatgggggtacctcggcggcgggggtnaaccatcgg

SEQ ID NO: 58478 - DNA, 257 bp, Setaria italica
  Peptide Sequence Number=SeqID_124452
cccgaaccgcggggcggcggcggcggcggagctggaatcccggaggaggaaggcggtctgggacaggttgaactcggtggcgacggcctgcatccaccgcgcgtcggcggcccgctcggcgtcgtcgaggacgcacaccgacgccgggttgcccttgaacggctccgccgtgaaggcgtccacctgcgacgaccacaccggcgacagcgtcacgcctcatgcgaaggcaaagcatcaatgcacaatgcttctgtgct

SEQ ID NO: 58479 - DNA, 254 bp, Setaria italica
  Peptide Sequence Number=SeqID_124453
tccttgttgtaattgtcgtccttttccctaggtctagtagtattgttcttaattacttcttaattctttggccccaagggttgatctccgctggaagcagacttcaaagcagcagcagcagaggctgggcatcctgagtgggaattgccagatgatgctggggagtacaatgacactcccgagaacacccagttcttgcagaaaatggaacataccagaccgagaaggaagttcttctcacatggtactccaac

SEQ ID NO: 58480 - DNA, 268 bp, Setaria italica
  Peptide Sequence Number=SeqID_124454
ccaagattggagccattcccttcaacaagaacacggacctacccgtttaaacatcctatggtacaatatacaggaaggagtacggggaacttttaaaatcaataaaagcatgaaataagcctattgtcgaacaattggctataaactaaataaactgctatgctcagcagactacaatcatgtattgcgccaaaattgtgctgtcaaacctgaggttggatgcttttctaataagctgtaatacccttggccctcccgtttcttacaa

SEQ ID NO: 58481 - DNA, 236 bp, Setaria italica
  Peptide Sequence Number=SeqID_124455
cgaaatgttgcgtgtgaaaatgcacttggtcggtatgatgcaacagcttacaacaccatcctcaggaatgcaaggccgcaaggcatcaacaagaatggccctcctgagcacaagctgtatgggttcacctacctccgagtatcagatgagctgctgcctgatgccgtgggctcggggtcgggaggaggacccggcgcgctgccgggaccgacgatttgacgagcagcacgcatccg

SEQ ID NO: 58482 - DNA, 132 bp, Setaria italica
  Peptide Sequence Number=SeqID_124456
attggctgggataagaagccaagagtaacatgctgtcttgcatgcttgtcagaactgcttatgtctgtatctgtaatttaccactcaatatacatgttcaggtcaaatcatacaccatgattaatttctatg

SEQ ID NO: 58483 - DNA, 310 bp, Setaria italica
  Peptide Sequence Number=SeqID_124457
caacttgacaggcgcatcatattcataaatcttttccatactcggaatcgaagatatggaacagagacagctgcaaagacaaagccagcaacaatgtaatatgatggtggcctgccctttacatgcgctgcaactagtcgcttgtgagttgctagccttatcttaaattcatgaacttttgaattgcgcagaactttaacaagagctttctctccagtatattctgagaaaccaaggtaactgaaagaccaaatagacgactacgaccaatagacctagaaaaggaaactagttaccaatacaattagga

SEQ ID NO: 58484 - DNA, 355 bp, Setaria italica
  Peptide Sequence Number=SeqID_124458
ttcgagaagctaaggttacatcaagattcatctttttgaactcatttcagcaagaaatgcccactgtactatgtaagcttaacctgtttggcacatttcttctgtacccggtcaagtgagtctgacgcgaatgaatacttgtgtggttgcagatcctgtcgtggccagcaaggtcattctcgaagaatctctcagagcgcgactggttgagaagctcagcgaagatctgggacatggtgaagaaatcccccgtcatcgcggattactgcaaggcgcttcagagctcaggattgtttaggaagtagccatagctgtctctagtccctcacttggaccgactcgaagtacttgtatt

SEQ ID NO: 58485 - DNA, 215 bp, Setaria italica
  Peptide Sequence Number=SeqID_124459
catgctagattgcgggaacaagacagagatcagaaatgtagtcttcactgcccgattggtcatcatttttgttttccttgtcttgggaagctgctgaggtcaacaaggatgaatgatttgtctatgtgggacctcatgcttacagttgatttactgaagcataacatacctgatccatccttgttgacctcagcagcttcccgcaatctagcatg

SEQ ID NO: 58486 - DNA, 251 bp, Setaria italica
  Peptide Sequence Number=SeqID_124460
gcgcggccggtgctcgcgcttgcccaggcgcagccagcggcgccggccgcgccagcccctccgcccggcgcaggcggtggtagtccggcgactccacctccgacttccactggcgcgagatgcggcggaccaccggcagctggtcgaagcccacccggacgaggcactccctcgccacctcctccggcaacccggggatcagctcacccattgcagataatgccttgatcagctgcgtctggccgtaagcg

SEQ ID NO: 58487 - DNA, 290 bp, Setaria italica
  Peptide Sequence Number=SeqID_124461
ttcttgcgcggccggacaagacgtccaaggtgcggcggttctggaactggtaccaccacaacatcgggcgcgcggcgatcctgctggccatcggcaacatcttcctgggcctctccatcgcgcaggagaccaacgcctacatcgtctcctacggcgtcttcgtcgccgtgtgggtggtcgccgtcgccgccttcgagatagaaagacgactagactaacgaccgaacgaacgaactaagaaataacccgtaacgaacgaacgaactaacgaactaaccaaaccccggaac

SEQ ID NO: 58488 - DNA, 231 bp, Setaria italica
  Peptide Sequence Number=SeqID_124462
cacttataagctttagttcacaatggcttttgcagcatctcaaaggcagcttcatactaactcgttcctgtttatgtactgtcattccttacaaagacatgctcaagacgaatcttctagtctgattaacattgttctgttacatgtagtgactgatgtacacggccgtactttcggtgtctggacacttctgacctgcacgttgtgcttcctttgtgcactcaatctgga

SEQ ID NO: 58489 - DNA, 237 bp, Setaria italica
  Peptide Sequence Number=SeqID_124463
tgtgccaacctctcattatcttcaccatacacatgaacaaggctccgatatagctcatgtttcgatgaaccctctgcatacttgaactgaggcactttcaagttggattgatgttgtacttgggatccttcttcagaacctcgatgattcccagaaccagctggtgcaagcagaccagcctttgcagaaccaactgagacacgcaaaaggggataggcaaggcacacaggggatagg

SEQ ID NO: 58490 - DNA, 201 bp, Setaria italica
  Peptide Sequence Number=SeqID_124464
gtgttaggggcttagggcaagaaggaaactcacaccaagacattccatcatttgataatatgctctaccatgaagtggcgtatgaccctttctggcctctgaaaagtatcttgtcctgaaagaaaataacgtcaactgtaaagaaaaattccaggtcaacattatttacagccattatgtaagatcaacagtcaccaacca

SEQ ID NO: 58491 - DNA, 440 bp, Setaria italica
  Peptide Sequence Number=SeqID_124465
aacttcccctccttaggatttaggtgtgccttgctgcagcccactagaagtcatttctgcctgttgaacaactacctacagtattgatctcagccattagctacgtttgagtaacacaaacgaaaacagagatgtacacatactctcgaaaatgaaattccatgttgcatgaatttaccggtgctatcgaaaaaaagttactcacgtcggtctccgtaaacctatccatactctccgctttaacaagcctatcgactatttgctttgcatctggtctcctccttgggtcatagtcagtgcattctgtccctatctcaaagcatactcttaactgttccaactgtgagcttgtctccaacctgtctctccaactttctattacctaaggaattgcagaagtgaataagggttttatgaaaatgagcaacatcttttagatg

SEQ ID NO: 58492 - DNA, 237 bp, Setaria italica
  Peptide Sequence Number=SeqID_124466
ttaggtagggactaacaaccaatttagggactgaatgcattctaccacttggtacttcaacgacttcaccgtgtgggctgtgttcctgcttctgctcctcagcagcacggatagcctcacggcttgccgcctcaacgacatcgacaactggaagagcatctgcatcaaacaactctttaagggattcttgctggtgtatatcatgctaaggtttggccatgacatggagaagagggg

SEQ ID NO: 58493 - DNA, 258 bp, Setaria italica
  Peptide Sequence Number=SeqID_124467
gttttgatagagagagaactgaggagcaccccagtgccacctcatcaaaacactgttgctcctatccgtggtcagtttcacaccagtactggatctgttgggcctttatgttcgcccccggctgtaaggttctcttcggtttcaaaccctgagcaatactccaatcccagcccttataattctcaagcaccaagttacttgtctaagtttctttctaacgcgcaatttattggtattcactaattattggtaggtctt

SEQ ID NO: 58494 - DNA, 120 bp, Setaria italica
  Peptide Sequence Number=SeqID_124468
aatcctggagaacctatggcagttgtggcaccctcacccactggtggctccaatactgccaaggcacgcatgagatggaactacctagaaacttacaatagaagaacgaactttaagtta

SEQ ID NO: 58495 - DNA, 404 bp, Setaria italica
  Peptide Sequence Number=SeqID_124469
tggggtgcttgtgattgtatcattaccaaggcagggcctgggtactatcgcagaggcgatgatccgtggtttaccaattattctaaatgattatattgctgggcaggtattttctttagcacccattgtagagtctgcttgatttgtttttcttttcacggtgctgatccatattgttgttaccatgtgccatttttgacattttgctgtcctcaaatataggctgtcagaacattgaattaaccccctgggccattgaccaatttctatgttacaaatcttagagaagtggttagttaaaagtcacttaaatagcatgatgccttactgctatagattcatgtaccatcgagcgcaagcttagctacaaatcatggccttgttcttttatggatacatatccg

SEQ ID NO: 58496 - DNA, 234 bp, Setaria italica
  Peptide Sequence Number=SeqID_124470
tgatggcaaaatgacgtgtctgtaggattcacaaatcctgcttgagaatgtagaccatggttacttcatgcaagttgtgttgtactgtagctacctcctcttctttttttaaaagtagggtagctatataattagaaattgccacttctttctgcagagaggttgcaaaaggcctaatgaagtaccaaccagatgtaattatcagtgtacatcctttaatgcaacatgtgcccc

SEQ ID NO: 58497 - DNA, 293 bp, Setaria italica
  Peptide Sequence Number=SeqID_124471
tctgtaagacgttggagcgaagttatttttgttaaaaccttttctttgttagttttctttcttcttctagtcttattcttttggaaggatatattcatcagtcttctcagggctccactcaaagtattgctcacatatctgttgcagttgtgaccgaagaaacggacgctggctgcatgccctctgcacagcttctgaatctggtgaatgacattttggctccagatatgcatttattatgtcacgaaactgaacaccagaatcttggcttatccaacctcacagatacttgc

SEQ ID NO: 58498 - DNA, 364 bp, Setaria italica
  Peptide Sequence Number=SeqID_124472
acatataaatttgtagctacaatcattgacttctacaccatacaaacaaatttgtcgcccagcctacaaacagaattgtgctaattcaaatatttcagggttgcaaatgacctttggagctaacaaatatcccaattgaagataagatttgtaggatattagaagtaagtacttaactaacatgttgcaagcaggacaaaaaattttacctcttctcttcgaggtgcttcctaaatgttttcaatgtcgccttgaactgagcaggcatacagattttgtttattaggccgcagaatttgatagagtagttcctgaagaagtctacttatgtcaggattctgtgacacccgtatgaaagcccggc

SEQ ID NO: 58499 - DNA, 424 bp, Setaria italica
  Peptide Sequence Number=SeqID_124473
aaagaatctgaaaagccgcacactttcacatccctagctataccagcaagcttaagtcctgaatgaattaatgtatcaaatggcaaaaatgaacacgagacacctgtaacacatgaatacagattgaggaccatgactgcaataacatcctgcaccctctactacaaaagtatcaaccaacccaagtacatgttctatccttccaagctaagacgaacagcaagcagacttcttcactgcggacacgtcgtccttgccgccgacattgatggtctggcccttgggaggcgccgcggggtcatcaccgatgtcaagggccttcttgcttaccacacggtagatctgcgtgagcacctcggtgaaaggcaatacctaccaacaattacaattagacctaccaagggactagaacgtactaccaata

SEQ ID NO: 58500 - DNA, 342 bp, Setaria italica
  Peptide Sequence Number=SeqID_124474
cctacaacatcacagagcacacacaaaacaagagcggagtcgcggagacggagaaggggcgtccgtacctctccctggccggcggtgtcccagatctgcgccttgacgagcttgccgtcgacctggacggtcttggtggcgaactcgacgccgatggtggacctggtctcgaggctgaactcgtccctggcgaaccgcgacagcaggttcgacttgcccacgccgctgtccccgatcagcaccaccttgaacagaatttgaagtgcagcttgccgctttcttattttgtgctcctgaatgcttcaacctggaatgagtacatagactggcattcgtcgcatc

SEQ ID NO: 58501 - DNA, 231 bp, Setaria italica
  Peptide Sequence Number=SeqID_124475
tgttggagtcagcatggtcgcgcagctccttgagccaccggctgatgttctcaaaggtggtgggcttgctcacatcatagacaaggacagcgccaagggctccacgatagtaggcgctcgtgattgcccggtaccgctcttgacctgccgtgtcccagatctgcgccttgatgatcttgccctcaacctgcactacaggcagggtagttaagctctgcactaggggcaaag

SEQ ID NO: 58502 - DNA, 260 bp, Setaria italica
  misc_feature (9)..(9): n is a, c, g, or t
  Peptide Sequence Number=SeqID_124476
gtttttttnttttttttttttaggttcaacacaagggagtcatattttcaattaccaatcatatgattgggtgagcatatggttccttttcatggtcataaatttaggatgaacaacaccctgacttcttcacagcagagacatcatccttgcctccaccaagaggacaaaccatcaatgttggaggcaaggatgatttgtcctcttggtggagctgcagggtcatcgccaatgtcgagggccttcttgctgaccacacg

SEQ ID NO: 58503 - DNA, 241 bp, Setaria italica
  Peptide Sequence Number=SeqID_124477
tccacctctccacgttctcaaaggtgacatgccgtgtgacatcatagacaactagtgcccctactgctccacggtagtatgcacttgtgatagcacggtatctacataggcaatggaaagttattgttagttgagtgcgggaaatgtttgaatggcaaaagccaaatgaataatgctagtcctaaatcaactacaggaatcaatgccacatatcaatctaactgttgtatattaaatttgc

SEQ ID NO: 58504 - DNA, 104 bp, Setaria italica
  Peptide Sequence Number=SeqID_124478
atttgattgatacggtagcatatataattataagtgacaggttatgactatatatgctaccgtatcaatcaaatgggctgatgaatacacacgacgacagcgat

SEQ ID NO: 58505 - DNA, 324 bp, Setaria italica
  misc_feature (9)..(9): n is a, c, g, or t
  misc_feature (246)..(246): n is a, c, g, or t
  Peptide Sequence Number=SeqID_124479
tgttccgtntttggtcctttgtagtagtattggtctacctagttgtctattagtaccttccttctaattggttcttctaggtccctaattatttgctatcatgcaaatctcgccgtcattaacaccgcattttttaagaggttccagagcttgtttcacagagcttgcagtggtgaactgatttccatcttttgcatattggaaagctttgtcaaatgactcaggaattttgatctttggatcctntgataagatagccatatgctcgtgaatttcttgcaacagttcagctgcttcacaattcattagcatcctagaatttgg

SEQ ID NO: 58506 - DNA, 267 bp, Setaria italica
  Peptide Sequence Number=SeqID_124480
gccaccagttcacccatcggggcacaaacagttttgtcaaagatcccatgttctcaagagtaagtgcttgacttctctagtgtcttgggagttcatttctgatttctgcctagttcgctttttctgctgtaagatgtctgattgctaatacctcgcacagaacgttattcataatatttcgtgcaaaatgcttatcttttaccttttttttgttcagttctgttttttaaatacaaaaacacttgacacattgctcagtaaaatata

SEQ ID NO: 58507 - DNA, 248 bp, Setaria italica
  Peptide Sequence Number=SeqID_124481
cctatcccctgtgtgccttgcctatctcctgttgcgtgtctcagtcccatgttctcaagagtaagtgcttgacttctctagtgtcttgggagttcatttctgatttctgcctagttcgctttttctgctgtaagatgtctgattgctaatacctcgcacagaacgttattcataatatttcgtgacaaaatgcttattctttttaccttttttttgttcagttcttgttttttaaataacaaaaacac

SEQ ID NO: 58508 - DNA, 221 bp, Setaria italica
  Peptide Sequence Number=SeqID_124482
acctcttcaacgagatgaactgtcaagtagatatggccctctctgtgaagaggtcatgcattgtttagaggttgagacaggaactcagtatgcaaataccttaagtggctatccagtggcaaacaggaagccacttaaggtatttgcatactgagtccctctctcacctctcacctgcttttctcctcccccttccaatcaacccaatctcatctccaccc

SEQ ID NO: 58509 - DNA, 376 bp, Setaria italica
  Peptide Sequence Number=SeqID_124483
tagagcttgtcttgctgaggtagcacgtagaaatcttattttaagctgtatactggattggctggaacatatgcggaaaagctggcaactgagtgtgaaactgagaaagcaagacgagaggatttctataggacatgggtcaagtcactaactattttcaggttagcaaaatcatcttgatgactcatcccctcctggaatgcaatgagctcattcatgatgtctctgatattcatctgagtagactttactctttgcatggaaacatggaccaaagtattcatttcattctttttgtccctgcatttctcaagtaattttgtaagcatgtgatcaaaatttcgtattcggggcaagttatccttttcatgtactt

SEQ ID NO: 58510 - DNA, 293 bp, Setaria italica
  Peptide Sequence Number=SeqID_124484
gctaaggagacagccaaagaacgcagtgactctgcaaagccagtcacgcctggtgcagtgacacaactgtttagtctttcaaacagaccatgtatcctcagagcagatgaccgcagagcatcatactcaacagcccttctgtcagctgaacatttgttggtacgggcctcttctcttgcctcatgtaagcagttttcaagatgcgctactaatttctattcttgtagtatttcttatttctttaaagtttaaagttttaaccccgggttttacgtttttagtttttactttta

SEQ ID NO: 58511 - DNA, 326 bp, Setaria italica
  Peptide Sequence Number=SeqID_124485
ccgggcgtgttcaagttctctcttcagggagttaacctcatctgccatagcactaagtctactttcagtttcacccaactgttttgacttttcatccagggcattttgcagctctgacacaaggagctccttattcctcaactctaaggcatgatgatcttctacaggaacatcagaagtatcagccatagtaagttgtgtcagcatttgcccttccttatcgatgcttacaatcttgtcttcattgtcacgcggcaattcttctgtttgttttgatggctgttcggatgttgaagaggcctcatccatggccacacttgattcat

SEQ ID NO: 58512 - DNA, 375 bp, Setaria italica
  Peptide Sequence Number=SeqID_124486
attctgcatggtgctgacaataatgcacttatcttgtggattcaggggaggtcacatccaatgcctatcatctagaatatgcagttcaaatagagtgtctctgtctgcaattctgcagttcctttaaatggtgttccttttaatatttgtgcttattttaacattattattatcttattgaatgcttcatttattacaatataaatgtttgttacaatctaaatagttctgccagaaatgtagattgcctgccaattttccatttttctcatatggtttttgtggctgatttttgttccattttgtggttgaacctgcagttgacaatttcaatggcaagtagaccagtttgcagttcgtctaactagtagtctt

SEQ ID NO: 58513 - DNA, 255 bp, Setaria italica
  misc_feature (5)..(5): n is a, c, g, or t
  Peptide Sequence Number=SeqID_124487
tcttnaacccggcctcgtccacctcggccagcgtgtggtacctggagtactggaacactggatcatcataaagagcacacgtgagcaaattaaatcgtgtcacgatcatcggggacgtcgcgttagcttctgcgttccgatcgaacggctacgaaggaagcaaaatctctgaactgcaccatctgcttggacgagacaggggatggtgccaatgtgcttcgtacctagaacgtcgccgacggagaaggttttgcc

SEQ ID NO: 58514 - DNA, 199 bp, Setaria italica
  Peptide Sequence Number=SeqID_124488
tcaaaacagtaaacggaactaaaaagaagtacgaataattaggctgggaaagaaggggggaaggtgatcaagattcaagaacaggggagaaacacagagcaagaagctaattcagctttcaactccccgtaaacaaatacgagctcctggtgttaactgagacacgcaacaggggaaggcaaggcacacaggggatagg

SEQ ID NO: 58515 - DNA, 330 bp, Setaria italica
  Peptide Sequence Number=SeqID_124489
aacaataattgtctggtggtatgtcttcaatatgtttgttgttggtgtgtgtgccgtaccataacatgctaggattacatgtacaaactctgaagactgatttcaataatggtgggtattctagtggtaaaatgtcataacctaaagcaccaagttctactaatggtgtaatgtcaattgattacagcagatgcccactgttctaaaattaggcccagtacagttagaatttgcaagtccctagaagtagccttgtctgattttctcttttcggagtatgcctatttttctgcatttatgaacacaaggctctacaccatccttgcaccg

SEQ ID NO: 58516 - DNA, 414 bp, Setaria italica
  Peptide Sequence Number=SeqID_124490
atgagcatagatgtgaggtcagttgtttttaatcttctatcagggaattatactgcttaattatttgtacttttccaaaaccaacatggttattacttactgtttctgatcacattattttagacagctgtctatactttgtatctcgaaagagcttgatattatatcatgttggcacttgacattacaccattagtagaacttggtgctttaggttatgacattttaccactagaatacccaccattattgaaatcagtcttcagagttttgtacatgtaatcctagcatgttatggtacggcacacacaccaacaacaaacatattgaagacataccaccagacaaggctacttctagggacttgcaaattcttaacttgttacttgggtccttaattttagtaacttagtt

SEQ ID NO: 58517 - DNA, 146 bp, Setaria italica
  Peptide Sequence Number=SeqID_124491
caatttataccatatgttgtgcccagtctttgctgcttttgtttgcttattgttttggtgtattggaaattttactgcaggaggcattgcttatggattggatcggctggtgatgctcttggctggtgagagctcaatccgggacg

SEQ ID NO: 58518 - DNA, 366 bp, Setaria italica
  Peptide Sequence Number=SeqID_124492
ctttcttttcaggtttcatacttgataccagcggaccaattccttcaagatccccattctccataactttgaggaaaggtaggcccttggctccagctttggaagcttcagtgtaaacagttcctttctttaggtcagtgtttgaaaacaccgtcgcaccaccaggaacacacagtgccttttattatacctccattttccaaggtatcagcaaaaaccttgaagctactgcccaaaaatgcaccgctaacatctttcagctcccaatcaaagcgaaggtcaggcctatctgtcccatagcgattcctattgcctctgcatatgttaaccttggaaatggatttggcagcttgatacctcctgcca

SEQ ID NO: 58519 - DNA, 219 bp, Setaria italica
  Peptide Sequence Number=SeqID_124493
tgatgagcagagatatgaggccataactttgaggaaaggtaggcccttggctccagctttggaagcttcagtgtaaacagttcctttctttaggtcagtgtttgaatggaacagtgatgagcagagatatgaggccctacatcatcctttcaccgcgccaaatcctaaagacatgaatgatctaccatcagctcgtgccccctccaatctccacaccgt

SEQ ID NO: 58520 - DNA, 242 bp, Setaria italica
  Peptide Sequence Number=SeqID_124494
cgcaaatcttcatcccggaagcaccttgcaatctgataatatttttcaaagccagaaaccatcaacatttgcttgaacaacaaaggatttttgagatcattggtatctcacctgaacaggcggaggagaaatttgggtaccttttagaatctttggacatgggtgctcccccacatggaggcattgcttatggattggatcggctggtgatgctcttggctggggaatgctatcaacgtacc

SEQ ID NO: 58521 - DNA, 350 bp, Setaria italica
  Peptide Sequence Number=SeqID_124495
caaattgtagagacagagagcatagattgtaaatggtttacctcaatctaatttcttccggaaacttctcttttacagtttcagcagttgtaactggaaatggcagtgaacaagttactgagttaagcactaaaacacgatctgcagcaaccttcaaagcaccaacacggcaatatagttagaatcatgctggtttctgggtgaacataaaagaagatagaaaagttgatgccaatcaaatcaacaaaaattatgaattatcccatacattttgcatgtccaaaacatacatcataaaggaaatggggtactttctttaaactagtaaatttatttaatttatttagttt

SEQ ID NO: 58522 - DNA, 254 bp, Setaria italica
  Peptide Sequence Number=SeqID_124496
gctagtaccaggaaaagggggcacacactcaggcagttcaatagagaagtgatttaccatatatatgatatatctgtgttactgaaatatatgcaaaagattgctagatttaatatgtagagatagttgaaaaatatacgaaacatctaatatttggtcctgttattaatagattggaggtggcagtttgagaatctacaaaagtatgtacaaacaaagaatttttgagatcattggtatctcacctgaacagg

SEQ ID NO: 58523 - DNA, 343 bp, Setaria italica
  Peptide Sequence Number=SeqID_124497
aaactggggagtttcttcagtgattggcatcttctccggctctccgtaggtagcacatgtgctggagtatatcagagttttcacactgtgtgttgccatagcttccagcaccactaaagtgtttgcagtgatgttgtggtagtacctcagaggttcaagtgtgctctcaccaacatacgcaacagcagcaaagtgcatgacagcatcaaatgcattctctgcaaatattctgttaactgctttcggatctcctagatcagcttgtatgaactgcaacgcatttttgtggaatatatgaatgaatgatcctcaaacctcaaagaaactagcatacaagagcctt

SEQ ID NO: 58524 - DNA, 325 bp, Setaria italica
  Peptide Sequence Number=SeqID_124498
taacggaaactaactaaccgtaaaggtaaagaacaacaatagtagactaggagtatatcagagttttcacactgtgtgttgccatagcttccagcaccactaaagtgtttgcagtgatgttgtggtagtacctcagaggttcaagtgtgctctcaccaacatacgcaacagcagcaaagtgcatgacagcatcaaatgcattctctgcaaatattctgttaactgctttcggatctcctagatcagcttgtatgaactgcaaccgcccaggctctgggaacaagttctggagaaccttgatcgccccgatatttcctctcgaaag

SEQ ID NO: 58525 - DNA, 207 bp, Setaria italica
  Peptide Sequence Number=SeqID_124499
agcttccagcaccactaaagtgtttgcagtgatgttgtggtagtacctcagaggttcaagtgtgctctcaccaacatacgcaacagcagcaaagtgcatgacagcatcaaatgcattctctgcaaatattctgttaacctgagatcatgtcaaggaatcaaatctatttatccttgtgccaggcactattttggatgcaaacaatat

SEQ ID NO: 58526 - DNA, 402 bp, Setaria italica
  Peptide Sequence Number=SeqID_124500
gcctgggatcatcatctcttgttaaaagataatgctgcatgtgcgcatgatgctgcaactcttggtcctatcacagaggccaaaaatgcaacctacacatcatttctgaaaagtaagacttgacactattggggatatgcaaaaagaacaaagcctgattttatttctcgttgttatgaagaaagtatataggagggcagaatggtggggattcctgagaactacttcaagaatttcatatatcaggatatgctgggttttgatcttactgtacagcagccaaaaatgttacctacactacagttctgaatcgaaagtgcatatctcccatgtagcaaaattaggattgcccccaaaatattctgttggtaaaaaaaatacagatgcatataaactttactc

SEQ ID NO: 58527 - DNA, 218 bp, Setaria italica
  Peptide Sequence Number=SeqID_124501
ttgtagacagtgaaagaatagcctttcgccccagatatggtgaagtttgcgccggcgtttgttgcctggcagcatcagggtgcgatgattcatttgaagcagcgggtcatggattcattgtgtgggtggttcgcttgtctaccgctgctcgctcactcttgttggactacaaaactgagacacgcaacatgggataggcaaggcacacaggggatagg

SEQ ID NO: 58528 - DNA, 325 bp, Setaria italica
  Peptide Sequence Number=SeqID_124502
ttttatttttctttttcttttttgttttttaaaaaagttttattttaatttgtctgcatgtgcgcatgatgctgcaactcttggtcctatcacagaggccaaaaatgcaaccaacgacatgacaggattagaagaattaatgaatggaagctcgtttccatgtcgaaaactttgaactggtatccctgaagtgctgccatttgaatctaaatgtggaaaaccattgctttgtgctctaaatggcatggatccattcgatacctcaacattctctagcaaaccatcttctactggaagccgaataaaatggtaaatacattgtgcc

SEQ ID NO: 58529 - DNA, 311 bp, Setaria italica
  Peptide Sequence Number=SeqID_124503
ccgcagatgctctctttcggtcctcgccttccactctcggcaatccagactcaaccatcgccacaggcatcaaacatcatgttcctgcatgttattggcgtatgcggttggcatgctggcctgaggcatggagcccggcacacccactggtctgggctcatgcttactggatttgacggcatggtgctactgcttccaggcattccagtagaacccaacatggctgacctcatccgggcacggtcagctgaatccgctgtctcacctctccacttgctcacattccttcaagagcaaagtctctacttccg

SEQ ID NO: 58530 - DNA, 238 bp, Setaria italica
  Peptide Sequence Number=SeqID_124504
ccagagttgaacatgatgtttgatgcctgtggcgatggttgagtctggattgccgagagtggaaggcgaggaccgaaagagagcatctgcggcctatgttgttgaccatagtctcgagaattcaccagaaaatggaattgccccaaaccctcagctgaaaccaaaggacggagagctgggcactttgaacgggactctgcatattgttgatgatttgagcagcctaagcattcggtga

SEQ ID NO: 58531 - DNA, 215 bp, Setaria italica
  Peptide Sequence Number=SeqID_124505
tcttctagttgttgtagttagttgtattgttattcttctttggtagtcctaaattaagtaagtattggaggtcaattaaattaattgaagattcgacaaatagtacatcttcaggaaataatgtgcttggtcctgtgaatgaatggcaaattcaagattgtgttgatgttcataaattgctggagacagtctttggcgaccaggacgttgcaaat

SEQ ID NO: 58532 - DNA, 361 bp, Setaria italica
  misc_feature (10)..(10): n is a, c, g, or t
  misc_feature (46)..(46): n is a, c, g, or t
  Peptide Sequence Number=SeqID_124506
cgaccagacntaaggttcttagctgataattgctcggtcgctgcangtttttatgagcttacatgactagcaagtttttgcaggcagttacatgggaagtctctcattgaagtaaacagaagtttccttgaaaaacacaacgcttcgttgacgcaccgagcagctgctgctgaaatgatgtatctcttggagccaaataagaagatggaggcaattaaattaattgaagattcgacaaatagtacatcttcaggaaataatgtgcttggtcctgtgaatgaatggcaaattcaagattgtgttgatgttcataaattgctggagacagtctttggcgaccaggacgttgcaaataggttgt

SEQ ID NO: 58533 - DNA, 344 bp, Setaria italica
  Peptide Sequence Number=SeqID_124507
catttgaagagtaaattattggttgggggcgtgaggtcttttcaatctggttattatcttggttccagcttgtacctttttgttgccattttgtagacagtgaaagaatagcctttcgccccagatatggtgaagtttgcgccggcgtttgttgcctggcagcatcagggtgcgatgattcatttgaagcagcgggtcatggattcattgtgtgggtggttcgcttgtctaccgctgctcgctcactctttgtttggtacttactaaaatttttggtctattaaagtctaggttgttattaatttgttttaaaccttttttcttaaatttttaacttaaaaaaa

SEQ ID NO: 58534 - DNA, 309 bp, Setaria italica
  Peptide Sequence Number=SeqID_124508
gtttagacttcattgctgctgctgacagaccacacatggcagcatgtttcacattttctggaggaaatggctggtgaagcaccattatggttgtgaaaataggatttgcaccattgcccctgccatcagcatgcatgccttctgaactgagcctgggatcatcatctcttgttaaaaaagataatgctgcatgtgcgcatgatgctgcaactcttggtccaacgacatgacaggattagaagaattaatgaatggaagctcgtttccatgtcgaaaactttgaactggtatccctgaagttgtcttgta

SEQ ID NO: 58535 - DNA, 149 bp, Setaria italica
  Peptide Sequence Number=SeqID_124509
tcaatcctcaaagcattctgtaacatttatagcttctctgtattctctggctgaccaggttgggcttgctgagaagactgccgtcttgtttacaaaagatggggatcaacacaataatcttcataccacatgcactgcatgtcatgaag

SEQ ID NO: 58536 - DNA, 138 bp, Setaria italica
  Peptide Sequence Number=SeqID_124510
tctgctcgctcactcttgttggatctgagagcatttacagatcactgcttttcatgaatcctgataactataaatacttcatagctgtgcaaaagtgccttgaccattatcagcatataggccaaggcacttttgcac

SEQ ID NO: 58537 - DNA, 430 bp, Setaria italica
  Peptide Sequence Number=SeqID_124511
ttaactgtatattacggttggcccgtccgcggtgaatgtgagcaaaagtcaaagaaggttggctaataaaggtggattctttgccggtcggggtagatttctcagagcacacgcagatgcaggattttttttcaagaagaaacgaggacgaaagcaaacaagaagattgagggatgttcatcccgtccggacctggggaagttggtgttgttgatcttcttctcgccgtacttcctccattggtgtccgtcgttgtgcggcgcgaaggtgtccaccttcctcatgcgcttctccttcctcgaattcatctgcgactgatgcgagctcggcgccggagacattgtttgtttccggtggaagaggaatcgagaaatgcgggagggcgggcggagaggacgcggccggccggggagggaggagcaggcaggcc

SEQ ID NO: 58538 - DNA, 241 bp, Setaria italica
  Peptide Sequence Number=SeqID_124512
gtagttgtagtagtggatctgccccgactgcacgcgtacgcacacgagtcagaacacgcgcacacgaacgggggtatcaagcatgggcgtatggcgacgactggccatgcatggatgagaaaccggcggggctgcacgttcggtatgcatgtacctggatgtcgaggcagcgttgccactcgggtggcagtggcgcagcgtcgaaattgagctcgatcccgtccacgacctcgccgcggct

SEQ ID NO: 58539 - DNA, 264 bp, Setaria italica
  Peptide Sequence Number=SeqID_124513
tgtctagttttgtcttcgtttttacgggttcctaaggggtaatttctaggtaccttggttggtaccttcgttggttaggtcgtattaagtttatggcgttcaaattgccaggcctgatcgcattgaatacccatgagggatgttgttagtttgatcgcattgaatacccatgagggatgttgttagtttgatcgtcgtttcagagatattaccccccatagtaataggatcgttagctggaaccgctgaaggcacaagctaacg

SEQ ID NO: 58540 - DNA, 262 bp, Setaria italica
  Peptide Sequence Number=SeqID_124514
tttcaccaattggtagcttggggccttgggcatttgattttgaccgaacgttgtctgccggacgtgtctatgattcaaaggagatgattgatgtgtcacaggtttagaaaaggaaaggagaaaaaacagaatgagtgaagagattgattattggaccgttgtttcctggcctactagcccacctccaaaaatgactccaccagcagccatcagggccctcggctgcaggcgcgccgaccacctcgcgcacacggccccatgt

SEQ ID NO: 58541 - DNA, 315 bp, Setaria italica
  Peptide Sequence Number=SeqID_124515
aagatataaaatgtcggtgctgtaagagaagtaaaagaagagacagggattgatgcagaatttgttgaagtgctagctttcaggcagagccacaaatccttttttgaaaaatcggaccattttttgtatgcctgctacgaccactttcatatgacattactaagcaagactcggaaatagaggcatgccaggtacttggaaccaaaattccaacattgaattgttaatggttatctcaacaaaaaacaaaacccccacctcttaaagggtttatttcagttcttctagcagcatttgaccaaatgctttgttcta

SEQ ID NO: 58542 - DNA, 375 bp, Setaria italica
  misc_feature (6)..(6): n is a, c, g, or t
  Peptide Sequence Number=SeqID_124516
tgttanagggtaatcgatgtcgatctgactgaagagcagctggaagaaagacggaggaaatggagcccaccgtcatacaaggccacccgtggagccctttggaagtacgtaaagctcgtggccccagcatcaagaggatgcgtcaccgatgagtagggcgtgttccgtggtgttgttaggttgtgcacatcatgtgttgccaagaaaaaactgattaatcttttctttgttttgcatccaggtgtgactgtgagatgctctgtaaacttagctcaacggttggatttgaaccgggtattcgcggaatgtagcttcatgttatccatttaaaaagacagttttgttaagtaaccggttaattagtttaccttttta

SEQ ID NO: 58543 - DNA, 406 bp, Setaria italica
  Peptide Sequence Number=SeqID_124517
gtcattctacaacaacagaaatgaatagaaaggcaatacaatcatattcttgtggtctactgaatagtaacaattaggaaagtaaaataacttagctagtattttacttgaatttagcattgtttgaagatgctatcgccatacttctattcatcataacatgtgtatgagttttcgccttgatgtacacaactgactaatgtggtctccgaagagggaatgactgtgaccgatgtatgttaaattattcccattatggctttgggcagtaccgtgattctttgccgtaactttttatgtttagctagtcttcttctttactactggacaggttttataccataatagaagtgggcgcacacatcttaattggcgtctctcacatcctctgcaagggatgattgat

SEQ ID NO: 58544 - DNA, 146 bp, Setaria italica
  Peptide Sequence Number=SeqID_124518
tggtgtaatggaattcagctgctcctttagtagtgcctgccattttcttcaggtcggcctgggaatgatctttctccaaaaaaagaagagcagaagtcgacgaaatttgcaagagatcacacatggacatgccttaaccaaaaaga

SEQ ID NO: 58545 - DNA, 389 bp, Setaria italica
  Peptide Sequence Number=SeqID_124519
gagtttgatccacttcctcctggtgcatttggtgcgcctattgttccagagcaaccgaagcagccctaccgatcttatgaacccaagatgttttctgggcgtgatcccaagcccatgaaggcatcagcatttttgcctactatgaccctttgcttccaaatacagttaatgggaaacggaagtccttggttgggtcttcttctcatcttggttcacaggcagtacatgaataccagtttcttccggagcagccaagtgatgtatatgagagggcaagccagtcgcgcttctatgatacttcaacagaggcatcaaattcgaggatagcttctctgtctaacgggaatacaacgaatttactaccaataggaagttagaagacaaggaca

SEQ ID NO: 58546 - DNA, 335 bp, Setaria italica
  misc_feature (291)..(291): n is a, c, g, or t
  Peptide Sequence Number=SeqID_124520
taaattaacttaaacttaaagttaaatttaacttaaatttagttaaggggggttactttttagtttacttaaaatttaatttaaattgtttagtccctagtcttcctattttctattgggtctaatttcggcattcctcaagttgctgggtttgaaacccccccttgcatcctctgaaagaatgggttatcatgatgaagatacctatcgtgtggatagaaagcgcaagcataatgaggaagctaagatcgcgaaggaagttgaggctcatgaaaaaacgatcagaaaggngcttgagaagcaagatctgctgaacagaaagagagaagaacaaa

SEQ ID NO: 58547 - DNA, 138 bp, Setaria italica
  Peptide Sequence Number=SeqID_124521
ttgtctttcatcataaagacattataaagaaggaaaggttcatgaccatgccaagaagagtacctggtggaaaaggatatcttcccctatcagcagcctcgtggtgcattggccccctaatagctctctcatcaaaat

SEQ ID NO: 58548 - DNA, 497 bp, Setaria italica
  Peptide Sequence Number=SeqID_124522
tgttgttgattttgattccaaagttgccagcattttaaaaacagaggaagtagttcgacctcccattaatgtctcacgtaagaaacaacctattttcctatcccttattgatgatatatgcacttttttttcaactgtttgccaaacataattcatcacctaaggagaatataatagcacaaggaaaataaaagatgacctgttcacagttccctaggttctcctttttgcctgtataacccttgagtagttccatttcttccttagttggacagaactttattaggtaatctacttgatcaccatcaactatggaatcatcaagagcaagcactgaacccattagatcaggcagtggcatcttaatgttcctcagcataatttcacaatttttttgagcgctgaaggtcaatcagaagaacttttttcttgtttttgttgcaacagaagggtgttgtcgttgtcgttttgcctccatattcggcatcattacagag

SEQ ID NO: 58549 - DNA, 257 bp, Setaria italica
  Peptide Sequence Number=SeqID_124523
tagagagtcagcacttttgcccgcggtgctgtaaagcaaagctaatgaccttccttcagcttgggcatcagcaaggaattccttcaatttctgaaataaaaagaagaaaatcttctgagggttgcaataaatatgctaacagtgtggcaatggtatcttcaccttttcggcattagtctaatgtgcccactagagatacaaatgaaagaacaaggacaggacccaagaaatagctagggataactgtctttggtgtg

SEQ ID NO: 58550 - DNA, 147 bp, Setaria italica
  Peptide Sequence Number=SeqID_124524
atcatcatcccccccaggaaaagagcatctgctggccaaagttataagccgaaaccctgatgatgatgagtcttccagcaattggatcttgtggtgctctacaaagttcaccaagttttcatgcttctgcaaagtgcccctcagcac

SEQ ID NO: 58551 - DNA, 243 bp, Setaria italica
  Peptide Sequence Number=SeqID_124525
ttggttgccatcatgcccttgcacatattaatttgtccataaacatgattacagttctgatcagttttttgatatgataattgactttaatcctctaaaggtttctcttcaagtagtccagcatttggacccaaagaaattagagggtcagcctcttggactccatggtgagcaccaatacacgaatgcaggtcttgctgttgccttggcgaatacgtggcttgagaagcaaggtcatttgga

SEQ ID NO: 58552 - DNA, 370 bp, Setaria italica
  Peptide Sequence Number=SeqID_124526
gaaggaatgctactgctccgttgttggaatcatgggagagtttgctcgacaatgtaggagggagtagggagatagttgtcgacgattacttgcggaagttgtcagcagatgtaatcgccagggtttgttttgggagtagtttcacaagaggagaagagatattttgcaagcttaggcagcttcaaaagcagtttctcagcaagatgccctggaagtacctacctaccagggctaaccgagaaataagaaagttggaggaggaagttcgcttactgatcctggatgtcataaaggaacacaataacagcgtggacaacgaccttcttcgcgtcattattgatggtgcacaaggtcggcaactgcaggggca

SEQ ID NO: 58553 - DNA, 117 bp, Setaria italica
  Peptide Sequence Number=SeqID_124527
agctccgcctgggcttcttcggccttagagacgaagccatcgaggcggccggccgggacgtcgaagtggacgtggccgttgctgaggatgctggccgcgtccacttcgacgtcccgg

SEQ ID NO: 58554 - DNA, 276 bp, Setaria italica
  Peptide Sequence Number=SeqID_124528
gcctccccacccactagtgcctttccagacaccagatcgtggccggtgatcttcccatacatattgcccactcctgttcattctgcagaggaaaggcaaatcaagcgcagtcccactatgacaagcatcaatgagtgcatgaagtttaactccatgaggaagtggtctaacaagtgctgcatttatctcatcgtcgacgatcattccttgtgtctcaaaatccagtggggatgaggttgatgggtttgaatgaaaacgacttacttagtaccctaa

SEQ ID NO: 58555 - DNA, 276 bp, Setaria italica
  Peptide Sequence Number=SeqID_124529
tgtaaaagtccttgtcctctggtgcctggaaactatagctagagtctggagatggactttacaaaggagcctcctgctcttccatcccagctccatctcggtgttcttaactcacagaactcggaagaaagctgcgcgcggccgcagcacatagtcctcaaccacctcttcatcgagaagggctggggcgcccaccactggtggcactcggtctaacccacaggtttgagtccaaatatgtaaccgtggtcctgtattaagcccatcgaacgatag

SEQ ID NO: 58556 - DNA, 209 bp, Setaria italica
  Peptide Sequence Number=SeqID_124530
cggacgcgggatcaccgccagggagccccggccgctcgctctcgccgcggatgttcgtgccccagacccctgtacctccactgcaaagagctgctgatgtaaccccagtattcaaccagatacctgatgaatgaacaagaagaagaatatgatggccccctccaaaggaattcctgctttaattgtgtggacccttggaggaagagtgt

SEQ ID NO: 58557 - DNA, 415 bp, Setaria italica
  Peptide Sequence Number=SeqID_124531
tgtcctacttggtattacctagtctactagtctaactactactattggtctaggttcccttctaacttaattagtacgtaggttacggttagttacctaaagattgttttggatgaaggaacattccatcgcttcatcaaattacttctggctttgattgtcaaaggctttgccttcttccacatagcatatggtcagcaggagacgacggtcaacaacccactacctccagctgaaccggaacccgtgtctgatgattatccagcagtagagactttcagtgtagaccacatcagtcctatcatagagcgccttcagaggctcgaagggaaggttgatgaacttggcagcaagcccccagagattcccctggagaaagaacgatctctgttggagtcatggatagaataaaatg

SEQ ID NO: 58558 - DNA, 238 bp, Setaria italica
  Peptide Sequence Number=SeqID_124532
tattgtatccgctccaaactctttcctccactggagcatctcagaccacatttggattggggaaagtggaaccaaacaaactgatgcacattactacggttgaccgctacatgaagtatcatgtgcaagaatttgagaaagccttcagggacaggtttcctgcgtgctctattgcagcgaaaaggcatattgattcgacaaccactatactagatgttgatggcgtgggtctcaagaa

SEQ ID NO: 58559 - DNA, 299 bp, Setaria italica
  Peptide Sequence Number=SeqID_124533
ataatgttggggaataaccagagttgggaccatcccaagcatcatggcaacaatttgatcttcgatattcctctgaactctttaggtttgccatggacaatgataaagatgcctgtgcatccccgttaaatggcccaatatctggttattccccaacatattcaactaaaacatcgattaggaaggaagcaaaaaagacgcctatctgatagatggaagatggctcaccaatatcagcacccgtcacaagatgctaattcattcagtacactaggggacatagacttgccctctctgac

SEQ ID NO: 58560 - DNA, 229 bp, Setaria italica
  Peptide Sequence Number=SeqID_124534
taatctggagtgacatggtacattattatctttcagttacagctcaataatctggagggaacatggtacatactacataatctcaatatgcgtcgtcctaaaactacatagggtacactatagataacagagagagaggcaggggggaggtcaggtcggtatatttgatgcaacaaacagcacaagaaaacgaagacatatgctaatgaaaatggctgaaggtaactgt

SEQ ID NO: 58561 - DNA, 258 bp, Setaria italica
  Peptide Sequence Number=SeqID_124535
taatcaggcacaagaaagtgaggcgagcaaatttgtactacctgaaacacaagcttccccgcttttcaactttcaagtaaaatcagatatgatgacagaacagcctctccctccattttgatttctcttagcaaacattttttcgcttcactgcccaatcagtgcatttcactgtaatccactggatatcaaatgtgtaatatatacagctttattagttgttatttttggtctttgtctagttgtacaaaaaaaaaa

SEQ ID NO: 58562 - DNA, 245 bp, Setaria italica
  Peptide Sequence Number=SeqID_124536
cagaacagcctctccctccattttgatttctcttagcaaacattttttcgcttcactgcccaatcagtgcatttcactgtaatccactggatatcaaatgtgtaatatatacagctttatagtgtattttggcttgcagtgcaatgattcttttgttctgggtatacaagattcatactttcttattatgaatttaatatcacccttttaaagaaaaaaaaaaaactaaaagagaactgccaagg

SEQ ID NO: 58563 - DNA, 345 bp, Setaria italica
  Peptide Sequence Number=SeqID_124537
tgcctgaaccgagttccctaagctcttcaaggtcttcattcttgatgatctgcaagtattcaaaatcagtgtccttaaaggaagcatccatgactggtccaacagctctagcctcttcagtcttctgttcctggtggtgaaatgctagaatcaacattggtgtggggagctactggaggcacttccatgtgaatatcattctgaggagccaaattcttcacattagttgtatcatgctctaagcgatcaaagggataagctccctcctcaatctttgccagatcttgggtctcatccttttgtggaaactcgttttgtgcaaggtttctgaagaatgaccaccgt

SEQ ID NO: 58564 - DNA, 252 bp, Setaria italica
  Peptide Sequence Number=SeqID_124538
aagatagatttgttttttcagtcccctcaaaagtagagtcagtattttctgcaatgttttcacttgcaacaccagactgtgattgacgaattagaaattcaggattaagtgaatcctcagatttagatagccggttcagaaagcctgcttgctcccttggaatcctctcagaatgaaagactcgcccagggtgaggaggcggattcttatagcaatggatgctgcattcggcctggagtatttgcactaacg

SEQ ID NO: 58565 - DNA, 285 bp, Setaria italica
  Peptide Sequence Number=SeqID_124539
aggaatagatgtctggccctcaatgtcataaatccatcattggtagctggattagcgtaattaccctgcaaattctgcatcccatggccatagtaggaatgcaaatttgcagtattatcaccggatacagcagatggtgttggtcttgagagcatctcttgaggcacaaagttgatgctactctacttgtctattgtctaagttttgtaacctatctctgcttgagtttaccggcctactatcactattgagattaatgaactgatcaaaatcattgatggacgc

SEQ ID NO: 58566 - DNA, 242 bp, Setaria italica
  Peptide Sequence Number=SeqID_124540
gtcacgatgctgtaggacacgtgcacgggcttgctctccctgagcgcgaactcctcgagcccgagttcctgccactgcgcaacctcgagctcgtgcccggaacccccggacgccggcgggctatcgcccgccgcgcacgtctccacggtcatcttcgccagtgaggatttcccacataacaataccaaaggaaaatacatcaaccttctctgacaccttattgctgcttccattgagtaatt

SEQ ID NO: 58567 - DNA, 242 bp, Setaria italica
  Peptide Sequence Number=SeqID_124541
tagtaggagggtgaggagggtgagcgacatgtgtgtcaggaaagagctgtggctgacagcttttttctagacggatgcttcgggccgcgcgcgcgagtgggatgcaggtggatcagtcagccggcgatcctcgccggctggctgaaccacctaggtgaggtgaacggtgcactggctcttccgcggcctgccccatttctcctgctcctccaatgttctatcatgaagtgggggacgtgcac

SEQ ID NO: 58568 - DNA, 265 bp, Setaria italica
  Peptide Sequence Number=SeqID_124542
ccgtagcagaggctcctcggcagcagagccgcctcccctccctcccgcctaagagcccggcgcagagcagaaccacggccgctaccaccgagacggcgtcgagcgcccacgagtgcgtgggcacggggcgcccgtcgaggctcgtcgcgacgtgggcggcggcggcgagcacggagagcagcaggaagagcgcccaccagagcctgagcggcgccgggaaccgctccccgcgccgcggcccgaggtcgaactggaggtacgcggc

SEQ ID NO: 58569 - DNA, 276 bp, Setaria italica
  Peptide Sequence Number=SeqID_124543
agaatgtatgtcagttatgtccaaatcatgcaccgaaacaaggaacggtgcgcatagcagctgtttgactcccatggctagatcacaatcaatgctatgcgcaccgttccttgtttcggtgcatgattgtacaagaatgtatgtcagttatgtcctgggtcgatctggtaggttctagggtatttttttttttggagatttgagttcttagcagtgcgcaaagaatccgactggcaatgctgacgcgttaattgaatgcatcattgagatttagtt

SEQ ID NO: 58570 - DNA, 299 bp, Setaria italica
  Peptide Sequence Number=SeqID_124544
ccgagttgcgcgagtcacttagacttgcggttgctgaaattctgttgcctgcgtacagatctttcataaagcgctttgggccactcattgagaacagcaaagcgcctggaaaatacgtcaagcacacgcccgagcaactggagctgctgcttggcaatttgtttgaggggaaacaagaacgtgcttgatagattctcgctgcctatcatacctcaaacaaagaaacgtagaataggacgttactaatagtaaaattaggaagacctacctagttaagacaatttagtaattagttagta

SEQ ID NO: 58571 - DNA, 268 bp, Setaria italica
  Peptide Sequence Number=SeqID_124545
aggtcctggccccggaggaagtggtagagcatggcgagcgagcgggccggcgcgaagagcggcacctggtggcccgcgccgcgcaccgtcaccagcgtgagaccctcttcgtactccaccgcccacccggccacctgctgccggtagtaccacgcccgccacccgccccactgcgccaccgcgtcggcggacgcgttcgccctcagcctctcccgcggccgcagccccatggcgtgtcgttccatttccttatcacctcactgcaggg

SEQ ID NO: 58572 - DNA, 425 bp, Setaria italica
  misc_feature (176)..(176): n is a, c, g, or t
  Peptide Sequence Number=SeqID_124546
gatcagcaaaaactcatctattaagatgtgagataaaacaggcacggtcgcacggatgcttgggggtaagtacagactgcagactgacattccaacaacggtcgagtgccgaagaagcgaacacactacagctaaactgcctcacttcagggacactagcaactaccaactccaanagggggacaactactactgctacatctagaaggacagacagcatccagaggctaaggagcagcgacagcagcaccgccgggttaggcagacgacgacgaagacttccctactgattgcaacgacttggtgggcgagagctccatgcatcactcgtcaccctcctcatcctcgtcgttcaacctcggaacttaggaacttagtacaagaagtacaaccaagaacgacggtaagggacctaccaagaacga

SEQ ID NO: 58573 - DNA, 416 bp, Setaria italica
  Peptide Sequence Number=SeqID_124547
acgacttcttcggcactcgaccgttgttggaatgtcagtctgcagtctgtacttacccccaagcatccagaggctaaggagcagcgacagcagcaccgccgggttaggcagacgacgacgaagacttccctactgattgcaacgacttggtgggcgagagctccatgcatcactcgtcaccctcctcatcctcgtcgttcacctcggacttggacttgtcagagtcaccagacgcggtagggcctccagacggcttgttgttgtaggcgtccatcttcttggtgtactcagccttgagcttctcggccttggtcacgaagggggccttctcagcctcggacagggacttccacttgtcaccaccagccttgccaatcacagagacttgcttcacattggggtgcttctccttgtag

SEQ ID NO: 58574 - DNA, 254 bp, Setaria italica
  Peptide Sequence Number=SeqID_124548
ttttttttttttaagttaagactgaattacttgatcagcaaaaactacatctattaagatgtgagataaaacaaggcacggtcgcacggatgcttgggggtaaggtacagactgcagactgacattccaacaacggtcgagtgccgaagaagcgaacacactacagctaaactgcctcacttcagggacactagcaactaccaactccaagaggggacaactactactgctacatctagaaggacagacagcat

SEQ ID NO: 58575 - DNA, 394 bp, Setaria italica
  misc_feature (165)..(165): n is a, c, g, or t
  Peptide Sequence Number=SeqID_124549
gggcgatggatgcccaagccagggacgacacggcgacgtaggtgctcggcggcttccacggctcgccgcggttgattgctctgctctgttcgaggatgtgctgcttcagggaccggatctcgtcggcgcggagcaggaaggttcttctgctctgcttcatgatcnccggtttggatgacgttgacctgagcaggggcagcgccggcgcgaccttgctcagtacggagcgggcaatctcggcggacttggggtgccagatgcccgcccggtcaaacgtcggctgcacgaagccaggcgcggcgagggagccgtggccctcccgcgacgccgccgaccacgccctcaggaactgccacaccgcgtggccgtccgccactgcgtgaccggaatacga

SEQ ID NO: 58576 - DNA, 233 bp, Setaria italica
  Peptide Sequence Number=SeqID_124550
gcggttgattgctctgctctgttcgaggatgtgctgcttcagggaccggatctcgtcggcgcggagcaggaaggttcttctgctctgcttcatgatctccggtttggatgacgttgacctgagctgttcgatcaaatcaattttttagagcagacgaaatggtgttcaagaattgcttgacgtgattcatcagaagaacgagaattaccaggggcagcgccggcgcgaccttg

SEQ ID NO: 58577 - DNA, 181 bp, Setaria italica
  misc_feature (1)..(1): n is a, c, g, or t
  Peptide Sequence Number=SeqID_124551
ncttccaatagttgctttgggatggtattgtctgaattcaaccactcgttgttaaaatctttccatgactcctctttttagagtgtgtatcttctcacgtgctacatgaaggagcacaatgtctcgattgaagtggcacgtgagaagatacacactctaaaagaggagtcatggaaagatt

SEQ ID NO: 58578 - DNA, 275 bp, Setaria italica
  Peptide Sequence Number=SeqID_124552
tttccgaacccgctcatcttgtacccaccaaatggcgcatcggggtcgaaggcaaagtagcagttgatccagatggcgcctgcacggatcgatcgcgacaccgtgtttgcgatgtcaatgttcttggtcacgatgccagcggccaggccataccgagtgttgttcgctttctgaatgacctcctcaatggtcttgaatttcattgtagtcgtcctattctaccggtccctaaagtattttctattcttgtgcgatcgccattgtcctattccttt

SEQ ID NO: 58579 - DNA, 300 bp, Setaria italica
  Peptide Sequence Number=SeqID_124553
cggggatgtcccggaccttgccgacgaggaagagcttgccggcgtccaccgtgtccagcatcgccagctcctccacgtgctgatcgatcaggtctgcgaacttgtgcaggatccgggacatccccggcgcggcgcacctgctgcgctactacgccggcgccgccgacaagatccacggcgagacgctcaagatggcgcagcggatgcacgggtacacgctcaaggagcccgtcggcgtcgtcggccacatcgtgccctggaactaccccgccctgagactccaaggcacacagggggata

SEQ ID NO: 58580 - DNA, 195 bp, Setaria italica
  Peptide Sequence Number=SeqID_124554
ttaccgagtctcgagtggaaaccacacttccattcaacgcgcagcccacgaaggcacctttgctacaactgtatgtgtaacaggcagcataaccaccatcaccagcacggaaatcagcctctgccgctcgtccaagatgaccagcagaggcactaataccagccccaattgacatatgtgcatttccttgaggag

SEQ ID NO: 58581 - DNA, 229 bp, Setaria italica
  Peptide Sequence Number=SeqID_124555
cttcaaccagctgccgccgcttcttcgcaagttcgcatccaaactcttatctcccacctgcacctcctttatcccatctgctcccgctcccaaatcgatcgtcttgcccgggtgagtgaggcgctgctggtatgcagcaggagctaggaggcaggcaaccaccggacgagcagagcagcgccacactgcgcgtcctgcccaatctctagcagcagcagggggattcgtg

SEQ ID NO: 58582 - DNA, 244 bp, Setaria italica
  misc_feature (222)..(222): n is a, c, g, or t
  Peptide Sequence Number=SeqID_124556
ggttggagtcgggagatttgagaggagagcgagcgctgccactgggagggagacgcggacggagacggacgggacggatgcttattcctgtgcgctgctcgctgccatggtgagtttttggtggagcgtgtgagcctcgcctccacatttttatttgctcgcccccgccatggataccagcaccaccgcagcgccgcgccactgctgtctcctagctttaancactacgcgcccacctctctct

SEQ ID NO: 58583 - DNA, 392 bp, Setaria italica
  Peptide Sequence Number=SeqID_124557
cccccaccaccagcctacctcacggacaaaaaagagagaagatctccgattagaagctaatccaagtagaaaagcgtcacgatcttccgaaggttcttggcctcctggcatgtctccatcagcagcttgctgtcatggaacgcgaagcagatcacctgttggatcttcgagatgatgtccatgttgcataacctgctagcctcaatcagtggcaaatggtcatactgtggtttctcaatcaagttttgtactttggacaacagttcttggctttcaggaggttgcttctttagactctgaggtaaaattacagtaagcaactctggcttttcagctcttaaagcgcccctgataacagctgcattagttccggaagccccagatgttgaata

SEQ ID NO: 58584 - DNA, 396 bp, Setaria italica
  Peptide Sequence Number=SeqID_124558
aaaccgttcagcttgcttttcccccaccaccagcctaacctcacggacaaaaaagagagaagatctccgattagaagctaatccaagtagaaaagcgtcacgatcttccgaaggttcttggcctcctggcatgtctccatcagcagcttgctgtcatggaacgcgaagcagatcacctgttggatcttcgagatgatgtccatgttgcataacctgctagcctcaatcagtggcaaatggtcatactgtggtttctcaatcaagttttgtactttggacaacagttcttggctttcaggaggttgtcttcttttagtacttcttgtaggttaaaatttacttagtttaagttcttaaactttactaggacttttacaagactacttaaaagaacta

SEQ ID NO: 58585 - DNA, 262 bp, Setaria italica
  Peptide Sequence Number=SeqID_124559
actttctgtcaatatgatgaaaataactgtgatgagcagtctatcaattcaaatccactaaatgccaatagtaaatatatagaacaaaaggtaatattggcacgcttaggaatctatactaacaggtctggaaataattttgactagaaaatgaccaggtcagaatagaaacaccaggaagacttactttggacaacagttcttggctttcaggaggctgcttctttagactttgaggtaaaattacagtaagcaactctgg

SEQ ID NO: 58586 - DNA, 237 bp, Setaria italica
  Peptide Sequence Number=SeqID_124560
gcttgtattctggttcagcaaccattgcagtacccttgacgagagtctctgtctgagtaggaatctttacaccatcatcatctggcccaaacataatagcatcatctcttccttgactcctcacatcaccttcgtgcccatctcttcgcatgtatccgcagagcaaccggttgagccgcgccactgccggcggcgtcggggtctgcttcttggctccctgagtccatcccaggacgg

SEQ ID NO: 58587 - DNA, 245 bp, Setaria italica
  Peptide Sequence Number=SeqID_124561
cacattagctgagttgatagattggcaaaataattctccgtgcggtcgcgagcggagcagcaggggaggcggcgtggaagcggaggaaccttcgcctctgcgggcggggggcgcagcggcggaggatgcggcggggacgacggcgacgaggccgtggtgggggcttcttcaccggcatctgatgaggcagtcccagttccagttgtcatgatagatcaagattcagaccgtgatgcaaccattgt

SEQ ID NO: 58588 - DNA, 277 bp, Setaria italica
  Peptide Sequence Number=SeqID_124562
agaactacaagctgtcacacaaaacaaagttccacatcatgcgattgtgggtgcttgccactttctgtttactgtgttttcgtatacggtatctagttgtctgtgtctatgtagtcggacgatggcatccactgttcatgcgcatacattcactttttgaatgcttcaatttgtttaagtgcacaatatcagcacatttatccttgtgcctgtatttagttttcatgtgatcagtttccttgactatactctttccctgtacactcatttgttgttg

SEQ ID NO: 58589 - DNA, 248 bp, Setaria italica
  Peptide Sequence Number=SeqID_124563
ggagtacatgtttttgtcgatttcttaaattagttgtatctgtcaattattttgtccctggtattcactgtttgcagatgaaggcactcaaggaccttggccttgatgtcacgaaaggaactgtggcaactgactcagctgccacacaaacaaagttccacatcatgcgatttgggcgcaaagttgaggaccctgacatgttagagaggatacggctaaccgtcatcaacaaccttctgaaatatcat

SEQ ID NO: 58590 - DNA, 481 bp, Setaria italica
  Peptide Sequence Number=SeqID_124564
atggtcttgattgtcggagaactttagccaaattaggaagtgataagacaggaagtttcctcaatttctcctccacattattattgttgaccatctcaatcaacagcagcgctgcatctatgatacatttttcacctatagtggatagattcagtaacttccatagaagttttgcgaggcaaaaacgagggactgcattcttgtctgaagaaagtactcctatctcatgaacaaatccaatgtagcctgaatccttgagctcttttatgcttgtgataagccatagaaccaaggagtatagccttttcacttcaaatggcgcaactttgtttgtgagttcttccttggcatcgatcatttcaattactgacttcagtacactaagcagcaatcttggttctttctctgaaagtttcattatgatagttttcatatcactgttcgatatttgagtgtcagatgagtgattaacagcaaaaca

SEQ ID NO: 58591 - DNA, 196 bp, Setaria italica
  Peptide Sequence Number=SeqID_124565
cttagatcaaatgcttcagtaaatttctcatctccagttgatttaatatctgcacaagtgaagcacggaaccataaacgtgtattagcttctcagatgtgtaaggaattatggccaattgttaattatatatatgaaattttcttcgaagtattcttggtacattatcaatgacaaataggaaaagaaaaggaaga

SEQ ID NO: 58592 - DNA, 473 bp, Setaria italica
  misc_feature (1)..(47): n is a, c, g, or t
  Peptide Sequence Number=SeqID_124566
nnnnnnnnnnnnnnnnnnnnnnnnnnnnnnnnnnnnnnnnnnnnnnngttaaattaccatattgaacagccaaacccagtatcgagctagccaacacctcttcatgacaacttcttcctatacatcaattatgtgcttaaaatcagcacttccacaagcatggacatctatgcttgatgacatctttggaataaaagaaaaatgataaggaaattgaccatttcttctttgcttaagaccatcctgcgtgtcattgtacgcaagtcttttgtttcggattccgcttctttgagtttcttcacagcagcagatgcctcttcttttgcagactgtagctgctgttgaagagcggtgagttcctcgcttttaccattcttggatataagagcttttcttatctcttgctcctttcttacaagcatctcctcccgccttttcataagctttacttccatagataacccatcaccaag

SEQ ID NO: 58593 - DNA, 360 bp, Setaria italica
  Peptide Sequence Number=SeqID_124567
agcgattgcagatgtggattgatcgacacagccaggaaccaacttcacatcttcctcttcctccttgcttagatcaaatgcttcagtaaatttctcatctccagttgatttaatatctggatctgctggaccgaccacattagaacgatgatgttgggcaagggcaaaaagtactgcatcctcaaccttcaggaaagctagttcttgtagtcctttgtcaacagaaagcatggttctacgttgccttccctgctgtaacagtcaaatcatgaacaagcttgtctgcatcttccagaccatcactccctgtttcagatccgttcttagccctctgtccagcagatgttacatactcaacgg

SEQ ID NO: 58594 - DNA, 169 bp, Setaria italica
  Peptide Sequence Number=SeqID_124568
ttaacaagtcacaagtggacagttccatttcagaaaatccagatgatccctgttaatgtaaatagataaacatgcaaataaacctgtacctcctttcttacaagcatctcctcccgccttttcataagctttacttccatagataacccatcaccaagattagcaacct

SEQ ID NO: 58595 - DNA, 341 bp, Setaria italica
  Peptide Sequence Number=SeqID_124569
aaaagaaatgcacatgcttgcatgtgaccctagtataattgcgatcatgaacaagcataaaatggcgagttggaatcatgaccgaaatggctcctgtcggatatgtaggcgtcagttgttgagtggtcatatgttgagtggtcgcaaaatctttgattcttatgaagatgaatttgttctggagccagggatagctgctgctggtcacagcttggaggagagtcaagttcgctggctagtgctcgtgcaatgtcagggctgctgcttatcaacgtttattgaatgcatctgcaaaggagtatcgtgtatcaagcactgaacttaaatatagtccagctgtt

SEQ ID NO: 58596 - DNA, 376 bp, Setaria italica
  misc_feature (171)..(171): n is a, c, g, or t
  Peptide Sequence Number=SeqID_124570
catcaggcaggccacagatatcactcaaacttcctcagggacaatatatcttctgtgatttcgtacacttcacttacctgggattgagctgaatcctccaccttcagaagctctgaaaaggatgcacatgcttgcatgtgaccctggtataattgcgatcatgaacaagcntaaatggcgagttggaatcatgaccgaaatggctcctgtcggatatgtaggcgtcagtccgaaatgcattttaggcttcaataagaacatgggagaggaaatatctcttcgcctacgaactgatgacttgaagggattcaggaagtatgaaagtatcaagaagactctacttcatgaacttgcacatatggtgcattctgagcac

SEQ ID NO: 58597 - DNA, 245 bp, Setaria italica
  Peptide Sequence Number=SeqID_124571
ccctttagttattcttaatactgccaaacatgcccctacagatttgatattgacatgaattggtgaaaacatacctcttcacagcattcctagcctggcctccattaacgactggaagggcagcagctgctgttggagtattggtcccaactatctctatcttcatgggcttcccatcaagttgcacgttgttatatttcttcacggctgctacagcatcagcacgccttgacaaaataacaaac

SEQ ID NO: 58598 - DNA, 517 bp, Setaria italica
  Peptide Sequence Number=SeqID_124572
cttcactccgcagcattagatacagaaactaaaggtaaccaagtaatttccatagcagtgtcagcatcacccacttaactctagttctaatgtaaacacataaaattcagtaaagcaagaccccacaaacataaggttttgttgtccccagaacatagtagcacaaacagaaggaatgaaaggactaatgtccttcatatttgacgtcgaataccaacttggtgaaggtatttagttggtctgcatcgcatcagcatgatacttctccaagtcagcatcaagttcttcagcagaccttggcttactacgctctttgccacgacgaccaccagatccaccaccacgccttccaccacccctttgatgaggtctacgctgcggcataccggttgggccacccctcggtgcactcttcacagcattcctaagcctggacctccaattaaacgaactaggaaagggacaagacaagactagactagttaggaagtaattaggtacccaaactaatactaca

SEQ ID NO: 58599 - DNA, 241 bp, Setaria italica
  Peptide Sequence Number=SeqID_124573
agccggtgatgcatataccttgatgtcctcgttacgagacgccaaaatccaggttggagatgtagagtttggtgcccgtctcgatagccgagaccctcccgccgctgcctcctccagcggcgaccccggggtacatgtcgtgctgccacgccgcgtcaggggccttcggcggctggtagggagcctgcctgttcccggccctcttgaaggggcgcctggtcgggccgaccccaccgctgac

SEQ ID NO: 58600 - DNA, 282 bp, Setaria italica
  Peptide Sequence Number=SeqID_124574
aatgcaaaaaattccagaaccacaaagcggcactgaagcggtaccagcatgaggacctccaagagagatgaaattcttgactggtggtccatcatcacaatactcaactactgctcgaccaatcaaattcccctgcaaggacacaaaaagaggtagggttttagtgtattagctacaccaactagagcaagaattaaagaaaaaagtaatgaaaattagcgaaaaaattaatccctcattcccggattccctccctctcaccggtgaggcggtaacaaaggg

SEQ ID NO: 58601 - DNA, 245 bp, Setaria italica
  Peptide Sequence Number=SeqID_124575
gtgagtggcctataaatgtgcttacttccagccccatacagtgtgcagtaccagtagactgatcaatacaataagcaagtcaaaaatacatccttaagtccaacaatagagtaacatgtcaaccaaacaacataaaaagagcattcctcattatcagagatatgcccaagaggcacataatactcacagttgggattttgaggtaaccgctaggtgcaagatgtgcctgaacatagtccgagtag

SEQ ID NO: 58602 - DNA, 260 bp, Setaria italica
  Peptide Sequence Number=SeqID_124576
gggtacttaaagggaaggaatggcctgaaactggaaacgagacagcagcacattagcatacctgagacagaccaactatgttgtagccgcttttcagttgttccatttccttgaccttgttgcagatgatatcagcctgctgttgaagcggcatgacccaagagtcccatgttccgctcccgatttctctggggggaaaagggagggcagtcagtcgtctcgttatagtatgctagacctattcggcgagagttttagcg

SEQ ID NO: 58603 - DNA, 342 bp, Setaria italica
  Peptide Sequence Number=SeqID_124577
catcgtcgccctccgtccagccccaactgcttccctcggtgctgtgccaagccgcacctagcaagtcagaaaacgctccgggtcttctctgatgatgacctgtccaccaggtaaggcacgatgtacttcttcatgtcacctttggagatacccaggtgcccccctgccacggagacaaattttactcgccctgcttcatccagtgtcttcaaaccaatccaatcttcctcatacagctttgtctgcacaaacagcctgccatcgtaagcatggacacgcctccaatctcatcaaatcacatgcatcacttctaccttctgaggtggtaaaattggatcaaag

SEQ ID NO: 58604 - DNA, 400 bp, Setaria italica
  Peptide Sequence Number=SeqID_124578
ttcttgtgctgctgcggctgcaccagaagaaattaactcacatggtggcagagcgatttcttgtgaaaccgacgatcatgattctagcctggaatcgttttgggcagatctattggagtcatctatgaagaatgatacttctgtccgtggtggatctttaacacccaatcaacagactaattatgggatgatggattctggaaataatatcttcaataccaatgccacaagtaatgtaagtgagctaagtttgccaccataatttacggtgtttggattgcagttgtacatgaatgaaaacttgcacggaattattgcttcttcacattgctaaatgtggcacgtaattctgcttcgttactttttcctgagttttttaagtgtagccacagtaatacag

SEQ ID NO: 58605 - DNA, 327 bp, Setaria italica
  Peptide Sequence Number=SeqID_124579
ccaatcatgtactcttcaaagacggaagctttgtgctgcttctagcactaaatttttgcttgtgtatgttgccttggtggccggtggacagacttgaactttgacaagctgatggcagaggcgggaacacgctggttccggcccaatgagatctacgcagtgctggccaaccatgcgaggttcaaggtccatgcacagcccatcgacaagccagcgagtatgtgttcttcattcaccatgaaaccctgaccttgctgcactctgcacctgtgatttgtttagtttctgtaactgaattcatgacaagtgtgaataagagggaacata

SEQ ID NO: 58606 - DNA, 472 bp, Setaria italica
  Peptide Sequence Number=SeqID_124580
tggcgggcggcgccggcgcgcgggacccgctcgtcgcctccgagatccacggcttcctcacctgcgcagacttgaactttgacaagctgatggcagaggcgggaacacgctggttccggcccaatgagatctacgcagtgctggccaaccatgcgaggttcaaggtccatgcacagcccatcgacaagccagcgagtggtactgttgttctatatgatcgtaaagttgtccgaaacttccgtaaagatggccataattggaagaaaaagaaggatggaaagactgtccaagaagcccatgaaaaattaaaggtagtttgtgcaaataactgaaattggttgcttccgtattgttaaatttattattctagtactcccaccgttattggtggtttgtcttattttgtagattggcaatgaagaaaaggttcatgtgtattatgctcgaggagaggatgatccaaatttctttc

SEQ ID NO: 58607 - DNA, 465 bp, Setaria italica
  Peptide Sequence Number=SeqID_124581
tgtcttaccctttaggttatttttggttatttctttacttaatttaggtttggttagtccttgttaattttggtattttatttggttaacgtcctattgacattgctattgccatttcctttgctactgttgacctttttccaggaatcaccagctaacattccaacttcaaatgttgtcttaggacctggatttttcatgatatcatcgaagcttttgtaaagatcattctgttcatcatccagcagtgcagtcccaagttgtatgtcatcttgctttgtagttggttcattgttgcccaagtgttgggcagggtcagaatcatactcactatcactactctcagtttcgtgtagtttttgcctcttatttacatcttcatgtgtatttttggctaggccccaaatgttcttttacctgtcaccttaattgtaatcttcattctgttcagtgttatcatcctcc

SEQ ID NO: 58608 - DNA, 198 bp, Setaria italica
  Peptide Sequence Number=SeqID_124582
ctttatgataggtgcttctgacttctggcacctgctcagtctcaacaacactaagctggggccagatctcagaagtattgtgcataatcatgtgctgctagttgcaatgaagcttttatttatgccttgtagcacgaggtttcttgttggtagtcggtaacttgttaaattaaccttactattacctactagttccta

SEQ ID NO: 58609 - DNA, 254 bp, Setaria italica
  Peptide Sequence Number=SeqID_124583
agacaacgaaaactaccctaccaaagtacaactacctaagaccaacttactacaagtacaactacgcttacgaagatccaccgtaccatggcgccgtcgtccaagctcgcagtggccctgctcctggcggtggccgtgctcgccgccgcctcgccggcggcgacggcgcagacgaaccacaaaaactgcgacaaggacaagaagatcacggtgcagaacctgtgcgcgcacgacgtggtgctgaccctggagcc

SEQ ID NO: 58610 - DNA, 395 bp, Setaria italica
  Peptide Sequence Number=SeqID_124584
ttaccttttagggggttaaagttactttaactttgttcttgtacgtcttgtaactttccttaagtagttgtctttcggagagaatcaaagcaatgagtcaagttttgtcaaaagcaagggatttattgtacgattgcaaggctattacccatcgtttaagagcgatgcttctgtcagctgatgaacaggtccggagcttaaaagaagcagagcaccttccttagccagttggcagctaagacaaatcccaaaatggcatccattgtctttccatgcgcttaacaatagactattaccttctctctccagagaaaaagaaaagttccctaacagcgagaacttggaaaatccagatctttatcattatgctctttctcagacaatgttttggcagc

SEQ ID NO: 58611 - DNA, 421 bp, Setaria italica
  Peptide Sequence Number=SeqID_124585
tgaatccacctggggatgcaacaatccatgttgaaaatgtcgatgacttcaaatggctaaattctcttactgtcctgttctgaagcagcttgagtctgcggctatgaaagagtactatttcaaggctgatcgtccgaaaacactctctgctggttcctctaatctgaagtatcgaaacccaaaatatctttccatgctcaaccatctaagattttacctccctcaagtctatcccaagttgaataaaatccttttcctagatgatgacatagttgtccagagggacctgactggactctgggaggtcgatcttaatggaaatgttaatggggcggtggaaacatgtggagagagctttcaccgtattttgtactaagttaccttctaactttcttctaaattccttaatttatttttcttt

SEQ ID NO: 58612 - DNA, 381 bp, Setaria italica
  Peptide Sequence Number=SeqID_124586
ttcgtattccttaattgtctttgtcggtttgggtctttattggtaattgaactattgttttgatcttggaagaatggaagaggaaagatattactggaatttaccacaaatggcagaacatgaacgaaaacaggctgctctggaaattggggacactgccaccaggtcttctaactttctacaagctgacacaccctctggacaaatcatggcatgtgcttggcctaggatacaacccaaccattgaacgctcagaatagacaatgccgcggtcatccactacaatgggaacatgaagccttggctggagattgcaatgacgaagtaccgaccttactggacaaagtacatcaattatgagcatccctatattcatggatg

SEQ ID NO: 58613 - DNA, 261 bp, Setaria italica
  Peptide Sequence Number=SeqID_124587
atttcatcttgttactgacaaactgaaatacatgtttgtcaggcttctgtgatggtaggtatccgactggagtaggaaacacaactttgaactgcaaaatttgtcctcaagtcaaatggacgaccttcatctcctgggaaggccagaagaaataacacgcaggaaattaagggatagaagaactggtgtgaggaagaaaatggaagtagtgcagcaggatgatgaagccctagtgaaacttgagaacacgggtatcgaacg

SEQ ID NO: 58614 - DNA, 235 bp, Setaria italica
  Peptide Sequence Number=SeqID_124588
ttattttgttaatcatcatcttgagaaaatacgtcaatactgagttcatggtctatatagtacatctgatcattgaactggtcgttgaacatcgcattagcaacggctgccacttctccacaatctccctgcactccctgacccagaggctgctgcaatggggcagcgcccccagccacagcttcaccctgttgaccgagattgggcatctggacgtcctgcccgtgcccgtgcc

SEQ ID NO: 58615 - DNA, 240 bp, Setaria italica
  Peptide Sequence Number=SeqID_124589
tcatccgacccagtacatataagtttaccttcaaatggaacagagcattcataggcacatctaaataggtgatcaaaccacaacttaatagataagcaaatgtacaacaatcaaggaaccgtgatggtaccatctggagtaaaatcaccacatgtcactgtgctactatgtccagcaaaggtattaagaaaggcattatggtcagcattccacatccatacattacagtcctccgatcct

SEQ ID NO: 58616 - DNA, 233 bp, Setaria italica
  Peptide Sequence Number=SeqID_124590
cgcaacagtgaagacttcatctttgtggccttgaaatatgtatgtagaatcatcaacgtcttctgaatcacctgaaaacgaaaagatcagttgaacaatcatggacaaggcatatttcagatgacttagaatgtacgtcacgaagtgagcaactggagcacatcatttagtgcggtttataaatgaaagtatcagaagggcaggatccaatcattcttcagagtgcagatgga

SEQ ID NO: 58617 - DNA, 228 bp, Setaria italica
  Peptide Sequence Number=SeqID_124591
caagttattatagatgaacaaagaatgtatttggagatgtcgaacacacgggcggagccatctgttgaggccgagaccaaggcgttgccatcggcggtggtggccagcgactgcaccacatctgcatggccgctgaactccctggcacagtccccagagaggctgtcccagatgcgcaccttgccatcgatgcatcctgacgcaacataccttgaccgaacccagcca

SEQ ID NO: 58618 - DNA, 177 bp, Setaria italica
  Peptide Sequence Number=SeqID_124592
taattaagtttaagaaaattaagaaaatacaaactaaaataatacataaatgttcttagagcacaagttattttcagagtacgtacctcttgtccaataagatctttttcactgaactaatcagttcaggctcttcccacatttcaatgttggtgtccttaggaggtacaaagccaa

SEQ ID NO: 58619 - DNA, 499 bp, Setaria italica
  misc_feature (479)..(479): n is a, c, g, or t
  Peptide Sequence Number=SeqID_124593
aacaaacggaacgaacaaataaggaaacgaaccaaaccccgaacgaacgaccttaacgaacaaaccaagtaacttacaaaggaacctacgtacgaccctccgcggcttcctcaactccgaccagacgctcttctccgacaacgccaggacccgccgcgtcgtcaagcgcttcagcaaggaccagaacgccttcttcagggccttcgccgaggggatgatcaagatgggcgagctgcagaaccccaggaaggggggagatacggcgtaactgccgcgtcgccaacaactcgccggcgacgacacccaaggaggtggcggcgtaccgcgtcatggacttctgatcgagctccggctggattactgtttcagaagagatcgtcgagctctgatatggtggtactaatatgttgacaaggttttttgatcgtgtgtaagtcctgcctgcacctacctatgattgtggtgcgcgagctttttgngctaacaaaaaaaaaaaaaa

SEQ ID NO: 58620 - DNA, 415 bp, Setaria italica
  Peptide Sequence Number=SeqID_124594
tacgtacctaaccccgtcgcgccttcgacaaaccagtacttcaaggacctcgtcgccctccgcggcttcctcaactccgaccagacgctcttctccgacaacgccaggacccgccgcgtcgtcaagcgcttcagcaaggaccagaacgccttcttcagggccttcgccgaggggatgatcaagatgggcgagctgcagaaccccaggaagggggagatacggcgtaactgccgcgtcgccaacaactcgccggcgacgacacccaaggaggtggcggcgtaccgcgtcatggacttctgatcgagctccggctggattactgtttcagaagagatcgtcgaggctctgatatggtggtactaaagtatggtttgacaaggttttttgatcgtgtgtaagtcctgcctgcacacct

SEQ ID NO: 58621 - DNA, 451 bp, Setaria italica
  Peptide Sequence Number=SeqID_124595
gtgatggaaagatagctcttgattcaggattatccacaggcggctttacagactgtttacttcagaatggagcatcacatgtttatggtgtagatgttggctacggacaggtttcattacttcgttgaacttatctagttcctaccaccttatctgtcaattgcaggtagttgctgctcactgcaacactgtctcattttgccctactccatttcaggtggccgaaaaaattcgtacacatgagcgtgtttcagtgattgaacgtacaaatttgagatatctttctcaattgccacaaccagttgacttggtgacactggacctatcatttatctcaattctattggtactatttagtgtgcactgtattatcattcatatttagtagccagaaggttattgacttggataatatttataacaaaatcgtatcatatagcacaattttttt

SEQ ID NO: 58622 - DNA, 358 bp, Setaria italica
  misc_feature (291)..(291): n is a, c, g, or t
  Peptide Sequence Number=SeqID_124596
taacaattaaggaaaaattagaaagtgcatttctcccatgcgaatacgtgatgtatctattcaaattggctctgtttttcatttctatctttaccatgcatgtttttgaagctataacaatcataatatttttttagcactcattatctgtacaacgtaggttatgcctgctgttatcaaagtaatgaagatggactctacattgataacacttatcaagcctcagtttgaagctcgtagatcacaggtaggaggtggtgggattgttcgagatcctcttgttcacaaagnggtactggatagaataatttcaggcgtggaagagtttgggttctgtaataaaggctggatcgaatct

SEQ ID NO: 58623 - DNA, 248 bp, Setaria italica
  Peptide Sequence Number=SeqID_124597
gcagttcattcttgacatggtgtgctgatttctgagcaagtgttgttcttgttttattttttttttgagtatttattaccatgtggagatttacacatcatgtatctcaatattcctttcctttttctttgcactgcagcctgttggggtagttggagctatcacaccatggaattttccattagcaatgataaccgaaaggttgggccagctttggcatgtggctgcactgttgttgtcaagccatc

SEQ ID NO: 58624 - DNA, 382 bp, Setaria italica
  Peptide Sequence Number=SeqID_124598
ccatgctagaagcaaaccgcaaactttctcaccttatgctgtaagcatatttccccccactttaatcagattttcttatgaaagtttgcttaactagaatatttatgatgacatgtttttatcatatacatggtcccactcctaggcagtcccttcgccaatatatcgtatgatgttccttcatagatcatcatactaagaactgagtgcctggttagacttgtgggcctgtcaacttgctgatgccaataatgccagttcatagttcagtcaataaatcagaatgctgatgtgtaacatacaaaaaatgtgcaaaaaatgcttgcagatgcaggccatgtattctgagacagctagtggggtggctagaggagtagagggt

SEQ ID NO: 58625 - DNA, 249 bp, Setaria italica
  Peptide Sequence Number=SeqID_124599
gacgaatgctagtgtgtacacgtacccatgccagcagcatcagaacctctcatgattctaagttttcgacaaatcgtagtgaacaagctgcaaaaagggccaaagataaatatatataccagtcatcagaaataactagtaaatgtatagctacttcagcaataaaaaggaaaggaagatgcaaacaattcatgtcaggtatcacaaacaacacaagatgaggaaaaaactaatgaactgcacataagg

SEQ ID NO: 58626 - DNA, 460 bp, Setaria italica
  Peptide Sequence Number=SeqID_124600
ctttttgtaccccctcctcaacagagtgacgatggtgcatctgaaggtgccgagcctgttgagaaaactgaagaggacggagtaagcagcgataggactgctgctgccatgaaagccattgcaggaataatttcatcgcagcagaacatgaatgtaccctgccataaggaacatgatggagataatgaagacagcgaaagtgaagataatgaagacagcgaagttcctgagcaatcagagtaatcttgggtacagatatgtaactgtaattgttgtacagataaacattgcgatccaacgaggtaggctagcaaactgctctacttgccctattacaagatttaggtacgataataaagttacaaaaaggagacgaatcgctaagcaaatcaccatctttgtagcagctgaaccaacatgaattcctttttctggtcactacagtgataatgaggttaag

SEQ ID NO: 58627 - DNA, 324 bp, Setaria italica
  misc_feature (65)..(65): n is a, c, g, or t
  Peptide Sequence Number=SeqID_124601
tatttgtaggtctagttttgtcttcgttttgtaagtaattgtacaaacaagctatatctgttggntttgttgggtaccccaatgttgggaagtcatcagttattaacacactacggtcgaagagtgtttgcaaggtcgcgcccattcctggagagacaaaagtgtggcagtacatcactctcactaaaaagatctttttgatcgattgtcctggcgttgtgtatcaaaataatgattcagaaactgatatagttttaaagggtgtggtacgagtgacaaatttggcggatgctgctgagccacattggtgaagttctgaggcgt

SEQ ID NO: 58628 - DNA, 327 bp, Setaria italica
  Peptide Sequence Number=SeqID_124602
agacaacaaacaaacaatctgaaagaaatcaataactttgtagagttcaccccagattcttcagatgttgttgtgcaggtgttggatgctagggatccaatgggcactcgatgctaccatctagagaaacatctaaaggagaattgcaaacacaaacacttagttttcttactaaacaagtgtgatctaatccctgcttgggctacaaaaggatggttaaggaccctgtcaaagaactatcccaccctagcattccatgctagcatcaacaagtcatttggcaaaggatctcttttgtcagtattgaggcagtttgctcgtttgaag

SEQ ID NO: 58629 - DNA, 208 bp, Setaria italica
  Peptide Sequence Number=SeqID_124603
ggggagggagggagggcggagcgcgtcgatgtttttcggtttcggcttggcgtcgttgaatgtggaagggaaagagggggagcgttctagttgttttcgaattgggaacaaactcaagttttccccaccccaatccattcctagatttaggccaaaagagaagtaaaactccttaattgttcaaattaggcttcttttcctttgtttt

SEQ ID NO: 58630 - DNA, 314 bp, Setaria italica
  Peptide Sequence Number=SeqID_124604
atcttcacattcaccataggctggtcttgtctgccattgtaagaggaccacgggggctggtcaattggccactgcgcctcagccaatgctgctgctgcagaagctgcaacagcagcaacagcagcttaaccagcagcaactacagcagcagcagcacctcaatcagcagcagcagcagttacaacagcaacaacaccttcaacagcagcagcaaattaaccaccaccagcagcagcttaaccagcaacagcagcttaatcagcagcaaatggccatgtcagcaaatcagaatgcacaactagcacagcagttca

SEQ ID NO: 58631 - DNA, 265 bp, Setaria italica
  Peptide Sequence Number=SeqID_124605
tcctcacctacaccggcgaacacaaccacgcggcgcccacccaccgcaactcgctcgccgggaccacccgccacaagttcccctcctcgagccgcaccgcagtccccaccaggccaccaccacaaggcaggagaaacacacgcacacagagcaagccgagaggaccggaggaatcgccatgggcgacatcacggacgccgccacacccgccgccgacgccccggccccgccgccggcgctgaccaaggacaacaacctcttcatg

SEQ ID NO: 58632 - DNA, 266 bp, Setaria italica
  Peptide Sequence Number=SeqID_124606
ttttgcgctgatttcgccggcacccgccaacacgacgcacggcacggcacccaccttgtaaaagcagcaggccccgttcacctccagccacaccaccaccgcgagccgcaccgcagtccccaccaggccaccaccacaaggcaggagaaacacacgcacacagagcaagccgagaggaccggaggaatcgccatgggcgacatcacggacgccgccacacccgccgccgacgccccggccccgccgccggcgctgaccaaggacaa

SEQ ID NO: 58633 - DNA, 345 bp, Setaria italica
  Peptide Sequence Number=SeqID_124607
ccaaggtgccatgtacagaaggccaaggattggttgcaataagcctctatgtagcaagccatgcccacacagttaacataggtcaacattaatttacctatacttgttatgagaacagagagccatctacaaagaggcttattgcaaccaatattccaaagcaagaagaaagataaaataataaagaagtgccatccatccctgacaaatcacatgaccttgtgttggcctttgcaagataagagaaatatgttgagaacttgagatcagtctgtcaattagaatacctgtgatgtgcacaggggcattgtgtgcacattcggatgcatatacatctgatttggt

SEQ ID NO: 58634 - DNA, 314 bp, Setaria italica
  Peptide Sequence Number=SeqID_124608
ttgatcaagaagggcgcatgaccaacttcttctatagggatggtaaatgtagaaatgattatggctgctttggagatgctattatatttgatacaacctaccgcactaataaatataacttgatatgtgccccatttgttggtgttgaccaccactggcagaatgttgttttggctgtgcattcttgttagatgagtctgtagcttcctatgtctggttatttaatcattcttggagtcaatgggagggaagtcaccaaaagcaatgttgtgtgttagggaaaacctgctcaactgcctgcataatggcttcat

SEQ ID NO: 58635 - DNA, 365 bp, Setaria italica
  Peptide Sequence Number=SeqID_124609
gaaggataaggcaggggtagggagtcatttcaatgctgacgagccatgtattgtgccaaggtaagcaaattggcatggatctcttccatgtggcaaatgtaaaactggcgatcgaagagttgccatccagatggcaaaaaattaaatatccaaaaaaacagaggtcagcatccgaatccatgctgggccggggagcacactacccatcctgccgccgcttgctttgacgcgcagcgattcggctgctcaggacaagctcaactcatgcaggaatggcgatctccgtcgccaggagcccaggtggttgtagtctagtagtctaggttgtccttggtttgttccttacttttgtttcctttactttt

SEQ ID NO: 58636 - DNA, 209 bp, Setaria italica
  Peptide Sequence Number=SeqID_124610
tccttgcctcagactaatattgagctgctgctgctctatgcacaagaggttgcacagcaacagccagaagagccacttccctcaagaccggcagaaagggccaatgaactgaccaatgtgaagaagcaccgccaggccttattatccttcagatgttcttggcaccaccaaaatttgaattggggctattgcagcatatgcaggcagat

SEQ ID NO: 58637 - DNA, 497 bp, Setaria italica
  Peptide Sequence Number=SeqID_124611
ttgtttcctttgtattcgtactagtaagtctaattcgtaagtaattccttaaattattattcctggttcactgtacccatggtcataatcgtacaggtttcatgattattcattaccttatgcgcacacatgtctcttgtgttgctgaggcaataaatatatttgctcaaaggcggccacctggcatatacaagagggactacattgaagcactgtattcattttaccacgaggtccctgaaaatatgatgataggatgccctccaacaccagaatggaagagacctgatgatcttgatttaaatggcgaagctaagcaggacgacgacgatgacaatggtgatattgaaccaccaaataatgaaaaccgaggagaaagtcatcactaatgacgatgtgttagggacgccgtgccgtatgaccaacaagaagctttgcgtgtcctgtgttatcggttgcttgaaatgcccttgtaagagggcacacacaattccagg

SEQ ID NO: 58638 - DNA, 362 bp, Setaria italica
  Peptide Sequence Number=SeqID_124612
aacggtaagaaccgaacctaagggaaagacgaataactacctacgaagcaactagttaacaaacaaagaaaagctggtcgcgataataaggtcttgtgattgatttgacaaataccactcggtattattcaccagcagaatggacgaagcaaggtactaagcatgtcaagattccatgcaagggaagagatgctgtacctgacaatgaatctgttaacgtgtttgtctatgaggcaatgatgttccttgatcgcagaagcaatcgaagaatcctaaatatatcctggttcactgtacccatggtcataatcgtacaggtttcatgattattcattaccttatgcgcacacatgtctcttgtg

SEQ ID NO: 58639 - DNA, 260 bp, Setaria italica
  Peptide Sequence Number=SeqID_124613
atgagagaggaaaaaagaaacttatggaccatgctcggatatcgtttccagaagaaatagatcctccctctgttgctgggaggattgttgagtgttcttggaataaggaagagcagtgttgggtctgcatgcgtattcgagcagataaatcgacaccaaatgacatcaacacataccgaaaaggtagaatagaaggaagacaattactaaaccgtaaattaaaactaaattaacttaactttaactaaaagtaaaagtaa

SEQ ID NO: 58640 - DNA, 222 bp, Setaria italica
  Peptide Sequence Number=SeqID_124614
cggctcccaaaccctaacccggcagatccctccctgacccagcaacccccgctgctccggtcgccgcccgccccgccgtgcccgccggcgcggtgtcaccggcccccgctccgccgccccacgacgggagaaaggcgcccggccagacctcggcgacctccgcccgccgcgcgaggtgcaagtccaagagaaccgatcacagaattatatgaagtagcggac

SEQ ID NO: 58641 - DNA, 152 bp, Setaria italica
  Peptide Sequence Number=SeqID_124615
caatttccaggttcacatccagtctctcttaacagcgaaaatctacagctacttagacaacgatactactatgctacatggaaagctgacggaacacgttatatgatggcctaatatttcagggctgggatgatccatatgtaactcgtact

SEQ ID NO: 58642 - DNA, 248 bp, Setaria italica
  Peptide Sequence Number=SeqID_124616
caacacgtacgtcgatcgatagataaatgtactgtgcccggaaagaggcattcgcgtatgcgtattgcctaccagtctacggagtactagtgtacggcaagagatgtgatcaagggcccaagagaagtagagatgccacaccggcggtgctctactgcaacttgagactcgaaatggaattagtttgcgctgttgccaacaaaaggacgcgttcaacgtcatgctggcgctggacgctttgccggctt

SEQ ID NO: 58643 - DNA, 402 bp, Setaria italica
  Peptide Sequence Number=SeqID_124617
taaagaaagaaataagaactaagaaaaggaacaaattacaacctaggaaaccaagtagacctttacaagacaatagagaaggatctgataactccaacttttaagctcaagagaccccagctactcaaatattacaaggtttgagggagtcatctaaatttgcacagaagctattgttgtggggatctcattaaagaatgcggcaatgttcatagatttattaatgcaaagaacaattttttttgcaggatcgtatcgatcagatgtacaatgatgctaagggaggggcgaactgtgtgacagtattaacaagtgcctatggccctgaacattgtgattctacagaagcatgtacattattaataatcacgtattttttgagttaaaaggcatgtgtgttct

SEQ ID NO: 58644 - DNA, 476 bp, Setaria italica
  Peptide Sequence Number=SeqID_124618
atggcgcgatgaagatcattgataggaagaagaacatcttcaagttgtcccagggagagtatgtagcagttgacgtcgtggaaagagcatacatgcagtcccctcttgtggcatcggtatgtcaattgataccaacaaaaaactaaatcaaattacttgaacacataattatgcttagatttaacttacataggggctggctcctctctgaactaggtttgggtctatgggaacagctttgagtcattccttgttgccgttgttgtccctgagaggcaagctctcgacgaatgggcagcagccaacaacaagactagtgactttgcagagctgtgtaatgatccaaaagcaaaggggtacattcaggatgagctcaacaaaaactggcaagaaactcggggtaagccaatactacatgatgtaccacataaaactataaaagtctatcaagcaatcatttcaaccatttctttcat

SEQ ID NO: 58645 - DNA, 190 bp, Setaria italica
  Peptide Sequence Number=SeqID_124619
gcctatggccctgaacattgtgattctacagaagcatgtacatattaatactgtcacacagttcgccccagctactcaaatattacaaggatcgtatcgatcagatgtacaatgatgctaaggaggggcgaactgtgtgacagtattaacaagtgcctatggccctgaacattgtgattattaatatgta

SEQ ID NO: 58646 - DNA, 407 bp, Setaria italica
  Peptide Sequence Number=SeqID_124620
cgatcgaagcacgactggagtccgtccctaagaaaaataagggaactaaatagaatagactactagtacaagaacacgccccggggtgagatctgcttgaggggtcataccttgttctccgggtactacaagcgccctagcctcactgaagaagtgttttcagatggctggttccatacaggtgatattggagagtggcaaccgaatggcgcgatgaagatcattgataggaagaagaacatcttcaagttgtcccagggagagtatgtagcagttgaggtcgtgaaagagcatacatgcagtcccctcttgtggcatcggtttgggtctatgggaacagctttgagtcattccttgttgccgttgttgtccctgagaggcaagctctcgacgaatgggcagcagcc

SEQ ID NO: 58647 - DNA, 317 bp, Setaria italica
  Peptide Sequence Number=SeqID_124621
taaataaagggaaaacaaagaactttaagaagtacaattaccttagttgccgttgttgtccctgagaggcaagctctcgacgaatgggcagcagccaacaacaagactagtgactttgcagagctgtgtaatgatccaaaagcaaaggggtacattcaggatgagctcaacaaaactggcaagaaactcgggttgagaggctttgagatgctgaaggcaattcacctggaaccagtgcctttcagcatagagaaggatctgataactccaacttttaagctcaagagaccccagctactcaaatattacaaggatcg

SEQ ID NO: 58648 - DNA, 317 bp, Setaria italica
  Peptide Sequence Number=SeqID_124622
gatatttttgtttcttcgggaagctcatcttttcgtttctcgggaagcaaaaatatcatcttttcgtttctcgggaagctcatatttgtacgatcatgtataccagtggaacaactggagatcccaaaggtgtgataatcacaaacagagctatcattgctggtgttatgactacagaacaccttctcaaagagacagataaagtgatcactgaagaagattcatatttttccaccttccattagcacatatatttgatcaagtaattgagaactactgtatctctaaaggcgcctccatcggattctggcaagggg

SEQ ID NO: 58649 - DNA, 227 bp, Setaria italica
  Peptide Sequence Number=SeqID_124623
aatgagtagggcacataggattggccaacaagagactgttaacatctaccgcttcgtcacgtgcaaaagcgtcgaagaggatatattggaacgcgcaaagaaaaagatggttgtcaatagtgcttagttgatgtattcttttagtaggatgattgaactgttctttttacctatttttcccctgttactaggttctgaataaccaagttgtattctaagtaaccttt

SEQ ID NO: 58650 - DNA, 496 bp, Setaria italica
  Peptide Sequence Number=SeqID_124624
tccaatgatgacaaatggaataggttgcaggaacctggtagttctgctggtattcttggctgggtccagttgaaatgagacggtatggtaatgaaaggccaaaacgtggtgttcatcctagtcattttcctgctgggcatggacctttgctgtagttgaaggaagtagtccatggaaacaaccttgtccatttaggcataactgttcccaaggattgtcagcttccgtgtagttagaaatggttgaactccatcggaattgaaatctttttgcacaacaaaaaggaataaggagccaaacctgacaggatcgcagttttgaattctgtgcctcaaaagttatgcctggactccagaggtgatgcgcggaactgtttacagttgtacacagaacatccttctcaactcttcctcttggtaggtcacaagccaccatgtatatttgttttggttgttttggtgagatggtgtcagaaggatgttctgtgtacaactgt

SEQ ID NO: 58651 - DNA, 400 bp, Setaria italica
  Peptide Sequence Number=SeqID_124625
ttgatagatactgtctaacttattgtgttgcttgcaggcatgaccatgaggttatggaattatgttgcaaccttttcaaatatgtccggggagcagttgcatgatctctatttgaaacttagtcaagatgtggaaggtggagttggcccatcccatggtggcaatttcacatcgaatcctccaagtaagggaggtacctcaaatcagcttcatccttcgagaaaccaaaggccaactaggtctctccagtacacttctgagtctttccataataatgagaactctggaagttccgaagcctggaagcggcggcggagggctgacccagataaccaatttgactacttctagttcttcttgtttatttcttaaccttttccttttcctttaattttgttta

SEQ ID NO: 58652 - DNA, 397 bp, Setaria italica
  Peptide Sequence Number=SeqID_124626
ggaggtcttggtattaatcttgcaacagcagatacagtgataattttttgactctagattggaatcctcaaaatgatctgcaggcaatgagtagggcacataggattggccaacaagagactgttaacatctaccgcttcgtcacgtgcaaaagcgtcgaagaggatatattggaacgcgcaaagaaaaagatggttcttgatcacttggttattcagaaactaaatgctgaaggcaggcttgagaagaaagaatccaaaaagggtggctccatgttcgacaagaatgaactttcagctatattgaggtttggggcagaggagttgttcaaagaagacaagacaagatgaaagaaaaccaaagaagaaaaccttagaaaagtttaggaacaattaga

SEQ ID NO: 58653 - DNA, 342 bp, Setaria italica
  Peptide Sequence Number=SeqID_124627
tttagacaacaaacaaaaaggaataaggaagaaccaaaacctaagaacaaggaatacgacaagttttagaattactgtgcctcaaaagttaatgcctggactccagaggtgatgcgcggaactgtttacagttgtacacagaacatccttctgacaccatctcaccaaaacaaccaaaacaaatatacatggtggcttgtgacctaccaagaggaagagttgagaaagttttgttggttcagttttgtcatctaatagaaatttgggttcatttagaaaagttaatctcaacaatgatctatagttcaatcttcatacatgtattatgtgttgcattgcaat

SEQ ID NO: 58654 - DNA, 212 bp, Setaria italica
  Peptide Sequence Number=SeqID_124628
ccagaactgttttcttattgtgctaacagcatatattggaaaaaagaatattattgaaagcatctgcacctcatattcttgataccttgcagatggttaagatgttggacatccttgcggaatacctctctcttcggggattccagtttcagaggcttgatggtagtacaagagcagaccttcgtcaccaagccatggaacatttcaatgct

SEQ ID NO: 58655 - DNA, 191 bp, Setaria italica
  Peptide Sequence Number=SeqID_124629
attgatttaattgtggatgatgttggtggcgtcctagcaaaggcaccgcatgaagcacaaatagagctgtttgatttgctgattgatggttgtcaggaagcagttaaagagaacacagatatcaagctgtgaagccctatgaattgctggctcgtgttgaagagcttcagttcttggcaaagcgaattgca

SEQ ID NO: 58656 - DNA, 309 bp, Setaria italica
  Peptide Sequence Number=SeqID_124630
gttttggtgttgcggtcgcggtgcggcagccaaccgtgagaatcccgcagaacgggccgcggcagccgcgcgttaccgcgccgcgatgcccttcccccactgcgacatgcctaggatcgcaccgcgcttagcccccgcgaaatatctccttgaaaaacgtgcagttgttgatgttgacaatggcaaattgttaaatgaagatagtgatatcagatcagttcttcagttttttaatggatgatgtgtctgaattcttgtcaacacatttttctagtacaaataggaagggacaagacaaagaaccgaaga

SEQ ID NO: 58657 - DNA, 388 bp, Setaria italica
  misc_feature (41)..(41): n is a, c, g, or t
  Peptide Sequence Number=SeqID_124631
cagctcctgcttcatagccttcagtgctaaattcagctgcntaaccttcctcaccgatcagatgagcacgtctcctatgttcttcgagttctgtctctttttctagaaccaagggtccttttctatctttgctcgctttcaattgttcaagccttaaaacttcagattcgacgtagctgaggtagtcaacagagagggtgttggggctcagttatttcatgttccgaagcagcaatattgcatgttacattctgaaacatctgctgctcttcaagtggtgtatcctattgtagtatttcctaaagtttctaagtctattgtcttagtattgtcctaaaattctttgtaagacttttttgttctattccttcttggtacttttcttatt

SEQ ID NO: 58658 - DNA, 219 bp, Setaria italica
  Peptide Sequence Number=SeqID_124632
gcgtttcttggtcgggggcaggaggatttgggaggaagacggaagggaggggaagattaaaagggtggaggagtcgatccggattcgccgcgaggcggagcctgttgagctcgtgcaagcggttaagaagctgcagaaggtttttgcgcgagaggagaagtggcggaaggagctgccactggtgctgaagcagaagatctcgtatgatattgtacgacg

SEQ ID NO: 58659 - DNA, 252 bp, Setaria italica
  Peptide Sequence Number=SeqID_124633
ctgactcacgaatataccagagaattgattttcgcgtgcctcctgagctaaggaatcttctaaggacaaaggattctggatctcaaaagtgggcagagatgtgcaagctcgaagttatgccatcacagagtttcatcttcctgcaattatttgaactgaaggatgactttattcaagaagaaattcgaaaaccttcttatcaatcaatttgttcacgttttacaggatggttttctaagcctatgatgaaaa

SEQ ID NO: 58660 - DNA, 436 bp, Setaria italica
  Peptide Sequence Number=SeqID_124634
ctaccaaggcaagtaccttggtagagtaataatttccaacttgttcttctcagcattaaaccttactcccttcgctatcatggaattgcatccaccacaccaaatgttgaaaggcatctcaaatcttataatcaggatgccctgatcgagctttctcgcccgctccctgagcgcatgctggccatgaaatttgttcaatccacccttcttcgggctccattctggcgggtagtagaagttatcagctctcgccgcagcgagtgacgacatgttgcctctcactggaggaaagggatgacgagatcggcagagacggcgactttctggtcgcggtggcggcgggaggcctgcgtggcggcggggaggaagaagacgcgtgcgggaggaagaagagagaaatttcagaatttgggaccgaagcctttcaagatatgcg

SEQ ID NO: 58661 - DNA, 224 bp, Setaria italica
  Peptide Sequence Number=SeqID_124635
ccccactgattatgacatattcagtattctttgggtctgtttgtatgacaatttcatgcttgcaacagggtgatttcatggtgaagctccatatctgacacataaccagttggtgaaacgatgtcagaacagcagaggggtaagtgatttagaagaacatgcaacagaaaactaggatttccctaaataacaccaaatatggaaagctctaggcattaagaatt

SEQ ID NO: 58662 - DNA, 286 bp, Setaria italica
  Peptide Sequence Number=SeqID_124636
tcggttcgagccggatcgcgttggtggatggtggtggagccgtggaggaccggtgccggtccaacaggtgtggccaggaccagctgttgggaggggcttcctgggcggcttctcgagcggcttcaggtgaaggccgtggatgagccggcggcgggaggccggggtccaggcgtagcggcgggggcgggccggcgggaccgcgggaggtgagggcgagaacctcgtccacctcgacctcaactccggctcccggggaggcgacgccaagcgcgaggagaagatggca

SEQ ID NO: 58663 - DNA, 504 bp, Setaria italica
  misc_feature (73)..(73): n is a, c, g, or t
  Peptide Sequence Number=SeqID_124637
agttggactaggacacaccgggacattgaagtaccatacgattcgttctttgttccaaactattcaaacgtcncggtaacattagtggctcatgtgcggagaaatttccacccctcgcgaaagcgatctcgaggacggcacgacaatgatggagaataatttaaaaatccgtcgccatcaccgaacaagaagtagtttctctcccttaattagaactcccgtacccttggaattatgtaatgtttttttttgtagcgtaaacaagagaaagtttcattcagcaacaattcgtcaaaaacaagaaaatttagcagacgtcggagacgatgaccaactaattggttgctgcgcaggacgaacgcaccttggcgaacccctcggcggtgccggtctgcgtgccgaagaagacggtgaccttcttcctgccgtcgtcggcgaaggcctcgtccgcggcgcccttggcgcccctggccttgacctgcgcggccttccgtcgtacggtct

SEQ ID NO: 58664 - DNA, 240 bp, Setaria italica
  Peptide Sequence Number=SeqID_124638
tcattttcatcacgaagtaaacgatccaactctggccagagagcttctttcctgaggacacaacagagttcaggaagggcactgtaaataacactgaagcaatcaagtgacaaattttcagcatgtgagagaaactaagaacacagaccatgcattgaagtcatcctcaatgcattgatcatcgtctccaagaccaaccggcacaaggcgttttccaccctgttcagttaggagctcgtc

SEQ ID NO: 58665 - DNA, 343 bp, Setaria italica
  Peptide Sequence Number=SeqID_124639
ttacataagtatgttgcttcaaaaattttgttacatttagttttgttctccaatttgcaaactaaaccaaaaaattgtatgcagatctgctcttaggctttgagattacaaatgcttgcaatattttgtccctttctgcagggatttgctttgagtactaatttcaacgtcagttatcatctttgataatgtaagttttggtggattttccagtccatggaacatgctagggcatgtggatagcgaaatctatggcaagccaacaagatgcatttctcgtcgtcaggtttaggagacattcatattttgagctattatttctttgtcttgagctatcagctat

SEQ ID NO: 58666 - DNA, 255 bp, Setaria italica
  Peptide Sequence Number=SeqID_124640
ctacgtacgtcgtcgtatcccgtgccgtagaggcatgccgcgccgaccggccggccgctctacttccacttcctgtacttgccgccgccgaacatgccgcccttgtgcttgccgccgtagccgccgaacatgccgcccttgtgcttgccgccgtagccgccgtggtgcccgccgccgtggccggtgtggtacgaccccatgtgcccgtattgcgcggagtgcgcggggtaggcggccggcgggtaggcgccgtgc

SEQ ID NO: 58667 - DNA, 341 bp, Setaria italica
  Peptide Sequence Number=SeqID_124641
ttctttgttaagttctttggttaagttctttgttagtcttacgttgtcctttagtaacccctttaggtctaagtattgtcttttgcatctgcgatctgaagcaggtaaactacagtctttgaggcaagagctggctgcaaaggttcagggtctattaaaagagcttgagcatcataaatctgaaagccagaagatacctgctatgatagccgagcgtgatgctctgcggcaagaactgattcaggctagggcagcacttgagtatgagaagaatgcaaagccagaactgacagcacaggtgcaagcaatggagaaggatcttgtagctatggctcaggagg

SEQ ID NO: 58668 - DNA, 467 bp, Setaria italica
  Peptide Sequence Number=SeqID_124642
taattaccccttactacttacctcttccccggagtgccgccgtgtccggaaacgcggggttggaaagggcggattcgtcctcccgcttcccgccctctgctcgtcgtggccgcgagcgcgactgctccgcgccgcccatcccatctccggacatccagccccagttgatattcggggtctcgaagctaatcgattcgatttgagaaccctggaaccaatctttcagtatcttgattggatcgatgatatcttttatcatgtcctaacacactggtaggttcatgttgaattccgcttggtagtagcccaatactcagccacaagtttagcaaaggctgattgcttgtcttccaacagtttggctggtgttcatattccagaagcttccctgcaaaattggaaaatcatcgtgtgtcgtccatatagaataagctttgcagtgtacttataattatatcatatgggac

SEQ ID NO: 58669 - DNA, 164 bp, Setaria italica
  Peptide Sequence Number=SeqID_124643
tcccatatctcttggtcggaatgcaggccaaggggatccaaattgttgcgcacagttcccctgaaaagtgttggttctgctggatcaacaagccggaataacgagctgataagtgttgatttcccacttcctgtcctccctacaacccaatcttgttccccgca

SEQ ID NO: 58670 - DNA, 373 bp, Setaria italica
  Peptide Sequence Number=SeqID_124644
ggcgcagtcaaggaggggaatatgaacagcaagtggccaatgaagaagcggagcaactccgcagtttccatgtgagtaacatctaaatgcagtagcatagaacagcacattgtggagctttagatgcttgatagtgcatacttctcagttttatcataagttacttcctctgataacaaatagaagcccattgcgcggtctccaatatggaaaagatatatatcatgaaaatatatctcatgatgactctagtaatgtcaatctatatgatttcttttagaaattgatggtcaaagccaaaaaggtttgtcttaggtgaatcttagatggacttatattgcccctggtaattattggttggtatttaggggta

SEQ ID NO: 58671 - DNA, 396 bp, Setaria italica
  Peptide Sequence Number=SeqID_124645
agcctttacagcagtcaagatggtggctcatctgattccctggttgtctgcatctcttgataattcaaggtgcttccatcagacaatgaaggtctaggtgatgagccttcttcagatccctcgcgcactggggatggcggtttgggtggtgggacgtagacaaccttcaacttcacctcatccaccacattacctgattgtttggtaaacatatccccagtgatgtcctttggtaatgtgtcttccgccacaatgacactttgcacgagaaacttgtccttgcattgcatgtccggcggtgcctccttttgtgcttagacaattagtacaacaaatagaacaatacgttaggtaggaaccgtaggtaaggaacaaactaaaaattaagtaacctaa

SEQ ID NO: 58672 - DNA, 323 bp, Setaria italica
  Peptide Sequence Number=SeqID_124646
tttttttttttaattttttttttaaaaaaacaccactactttttcgtgattatcacaccagaaggatttctcaacagctggctcaaaagatatcaatagttacccagttcattagttccacaagctgacataagagctaacacaagatcaagagacaggcttactgcctgggtgaggtagctaccacgcacgcagttactgatgacactggatcctgaatatgctatggagtagcgctgtagcagtgtagtacatgagaataaatgcattggaacaaaatacaatctcacggagggaaacgttctagcaggatgcagattaac

SEQ ID NO: 58673 - DNA, 374 bp, Setaria italica
  Peptide Sequence Number=SeqID_124647
gttgaattagctcgccaactgaaggagaccagtcttttaatgaaccaatctgtgcaggagactgagaagagagggttgtggagcatagcttggcaggcaccagtcatgctaatgcacgtgcagtggaagtgtattcattgacctccaagacaacatgtttccagtggcttctgctttttgtgatgacctgcatgtttttcatggtggttctgctcatacggattacatgagaccctgggactcacatacagcacatgatttttgcttcttgaaatggtgttccagtcttactaagaccatgaaagatgctgggcactttctctaacaaggttccaactgccacacaaatatatattgcacaatggttgctgacc

SEQ ID NO: 58674 - DNA, 233 bp, Setaria italica
  Peptide Sequence Number=SeqID_124648
gataatgttcctgtgcaagccaaatatatattggttaactgtcggctatgtttttccaggtatcccgcgatggggatcagcaggactcaagtgaatctgctaaggttgctcgactctgctccacggcaggagaaccaggctaagctcatccattatgtcaccacatcccgggaactgttagagcagctggcagcagaaactacatcagaagggatatcaagtgtttcaaaagt

SEQ ID NO: 58675 - DNA, 240 bp, Setaria italica
  misc_feature (14)..(14): n is a, c, g, or t
  Peptide Sequence Number=SeqID_124649
ttaagcctattccncttccagctcagctgttctctgcctgagccctgaacagtaatcgaaataatggagaggagaattttttagcatatatgtcttgaagctgcatacatacaaataaggtacaaggatgtagcaacaaaatagaatgtctaaaatctaatgagccgcatagatacagttacaacattctccaagacctttgttgtctcctgggctcttcttttcttttcaggctcgagc

SEQ ID NO: 58676 - DNA, 189 bp, Setaria italica
  Peptide Sequence Number=SeqID_124650
ctgcagtgcagcactgaagctgcagtctaggccagtgcccgcaaacaagattttttgaagcagaagaataaaaaagaaccagagtcatgtgttttcaagaaggagaaagaaacagagtcatggcatcggctgagttgggttcaaaaagttcagagagctactggtgttaaaccatgcttaaactgcatc

SEQ ID NO: 58677 - DNA, 399 bp, Setaria italica
  Peptide Sequence Number=SeqID_124651
gcaatcaggcagcccagaggaagaaacgacatgtcggcgtccagttcccacaagcgaagaagaatcgtccgtgcattggtcctggtgtggtcaccacaccgcctctgatgttggagttccggctccggctccggctctggctctggctctggcagaggcggtggcaccagagagccggttatggagatacggactccccgccgcatcagctcgacaaggagacgcgctgtgttgcgggcgtcgtcgagcccgcagtggaggcggccatcccactgcagacccgcctcccggacagcttcttgcaggttgcgccgcccagcgccaaacgcggtctcgaaggggatccggaggttaacccactggttgaaatacgatggcttggagatgttcttgaaattg

SEQ ID NO: 58678 - DNA, 270 bp, Setaria italica
  Peptide Sequence Number=SeqID_124652
ctgcatttataatcctatctgacatgaagaatgtggatggagaataacaagtgcaacctgaagctattttagagagaaaaatgaacagaaaggatcatgtttcatatacatgattattcaaatatatggacctgtatgctaaaaacttgaaatggatagccaactagcttaacatgtcttacccttgttattactcccccgaacaactaaaatttgttgctctcaaatattagttgttcgggggagtaataacatgtcttacccttgtta

SEQ ID NO: 58679 - DNA, 491 bp, Setaria italica
  Peptide Sequence Number=SeqID_124653
attttatatttgctctggaaatatttgactagttttgcaacatttggtagcgcaagcagtgcaacacagagagtaagtttcctggttgtggtactttttacaaggaaaagatctcaaactcttccgggcttatttctgccgatttctggagcgcactcctactgattgtagatctgcctgctgccactcaaaagcaccatggacatatttacaagaagtttttggcttctgagcatggactgctgcccttctaaatcttcagcaggccttccaactcgcgaagaacatcagcacgggtaattatacctattacttgttcatcctgatttacaattggtactctgtggatcttcttcttgagcatcagaaccgcagcatccatcactgttttatctgatgctagtgtgatggctggagaggtcattacttcttcaatctttgtttgtggcccatgggaagctttggcccggtcattcttgacgactacccca

SEQ ID NO: 58680 - DNA, 470 bp, Setaria italica
  Peptide Sequence Number=SeqID_124654
atgtgtgtgcttgcgcccaagttgtgtgagagagagtgagaaagaggggaagggagagctgaccccatgggaagctttggcccggtcattcttgacgactaaccccaaacaacaatactgaaggctgctgtctacgactggaagccctgacacggcctcaaagtggcattcgacctcctctagtgtctgctctgctgtggccactagcacaggtgttgacatggtctcactcaagagagccacgcgctgatctccttcttggacagcctcctgtgactcaaggtaggcacggagatcatcgtagctgagaaggaaggagttctcaggccactcgcctgagatgatcgcctcagggttctcgtcaagctcaagccggacgctggcgtcaacgaaagtcgacgctctgcactgaaaggttggtgatcgctttgcagcacttctcctagttcctgtgttgatctttgcccctc

SEQ ID NO: 58681 - DNA, 476 bp, Setaria italica
  Peptide Sequence Number=SeqID_124655
ctggaaatatttgactagtttgcaacatttggtagcgcaagcagtgcaacacagagtagtaagtttcctggtgtggtactttttacaaggaaaagatctcaaactcttccgggcttatttctgccgattctggagcgcactcctactgattgtagatctgcctgctgccactcaaaaagcaccatggacatatttacaagaagtttttggcttctgagcatggactgctgcccttctaaatcttcagcaggccttccaactcgcgaagaacatcagcacgggtaattatacctattacttgttcatcctgatttacaattggtactctgtggatcttcttcttgagcatcagaaccgcagcatccatcactgttttatctgatgctagtgtgatggctggagaggtcattacttcttcaatctttgtttgtggcccatgggaagctttggcccggtcattcttgacgactacccca

SEQ ID NO: 58682 - DNA, 356 bp, Setaria italica
  Peptide Sequence Number=SeqID_124656
tccttcttggacagcctcctgtgactcaaggtaggcacggagatcatcgtagctgagaaggaaggagttctcaggccactcgcctgagatgatcgcctcagggttctcgtcaagctcaagccggacgctggcgtcaacgaaagtcgacgctctgcactgaaaggttggtgatcgctttgcagcacttctcctagttcctgtgttgatctttgcccctcttggctaattggtagtcttaacttctttggttagggtttgttttgatgcaatgaccaataggaataggaaaggaaaaactaattaggacgaatacaactactttaggtagggtaggactacaactaggtttactagta

SEQ ID NO: 58683 - DNA, 332 bp, Setaria italica
  Peptide Sequence Number=SeqID_124657
taacttaagttactaaattaattttggtagcgcaagcagtgcaacacagagagtaagtttcctggtgtggtacttttacaaggaaaagatctcaaactcttccgggcttatttctgccgattctggagcgcactcctactgattgtagatctgcctgctgccactcaaagcaccatggacatatttacaagaagttttggcttctgagcatggactgctgcccttctaaatcttcagcaggccttccaactcgcgaagaacatcagcacgggtaattatacctattacttgttcatcctgatttacaattggtactctgtggattcttcttc

SEQ ID NO: 58684 - DNA, 289 bp, Setaria italica
  Peptide Sequence Number=SeqID_124658
tcaaactcttccgggcttatttctgccgattctggagcgcactcctactgattgtagatctgcctgctgccactcaaaagcaccatggacatatttacaagaagttttggcttctgagcatggactgctgcccttctaaatcttcagcaggccttccaactcgcgaagaacatcagcacaagtaataggtataattacccgtgctgatgttcttcgcgagttggaaggcctgctgaagaacatcagcacggtaattatacctattacttgtaaatcaaggatgaaacaa

SEQ ID NO: 58685 - DNA, 232 bp, Setaria italica
  misc_feature (226)..(226): n is a, c, g, or t
  Peptide Sequence Number=SeqID_124659
gcccatgggaagctttggcccggtcattcttgacgactaccccaacacatctgaggctgctgtctacgactggaagccctgacacggcctcaaagtggcattcgacctcctctagtgtctgctctgctgtggccactagcacaggtgttgacatggtctcactcaagagagccacgcgctgatctccttcttggacagcctcctgtgactcaaggtggcacggagntcatcg

SEQ ID NO: 58686 - DNA, 218 bp, Setaria italica
  Peptide Sequence Number=SeqID_124660
ggtcccatgggaagctttggcccggtcattcttgacgactaccccaacacatctgaggctgctgtctacgactggaagccctgacacggcctcaaagtggcattcgacctcctctagtgtctgctctgctgtggccactagcacaggtgttgacatggtctcactcaagagagccacgcgctgatctccttcttggacagcctcctgtgactcaaggt

SEQ ID NO: 58687 - DNA, 253 bp, Setaria italica
  Peptide Sequence Number=SeqID_124661
acatgtactcttagatctaacttaaagcatacgtggaaagaaaaaggtgatatgaaaacaacaattacccatcactgttttatctgatgctagtgtgatggctggagaggtcattacttcttcaatctttgtttgtggcccatgggaagctttggcccggtcattcttgacgactaccccaacacatctgaggctgctgtctacgactggaagccctgacacggcctcaaagtggcattcgacctcctctagt

SEQ ID NO: 58688 - DNA, 232 bp, Setaria italica
  Peptide Sequence Number=SeqID_124662
tactgattgtagatctgcctgctgccactcaaaagcaccatggacatatttacaagaagttttggcttctgagcatggactgctgcccttctaaatcttcagcaggccttccaactcgcgaagaacatcagcacgggtaattatacctattacttgttcatcctgatttacaattggtactctgtggatcttcttcttgagcatcagaaccgcagcatctgtagatgttaca

SEQ ID NO: 58689 - DNA, 234 bp, Setaria italica
  Peptide Sequence Number=SeqID_124663
ttgtagatctgcctgctgccactcaaaaagcaccatggacatatttacaagaagttttggcttctgagcatggactgctgcccttctaaatcttcagcaggccttccaactcgcgaaagaacatcagcacgggtaattatacctattacttgttcatcctgatttacaattggtactctgtggatcttcttcttgagcatcagaaccgcagcatccatcactgttttatctgat

SEQ ID NO: 58690 - DNA, 248 bp, Setaria italica
  Peptide Sequence Number=SeqID_124664
gtcttttgtcagcacttctcctagttcctgtgttgatctttgcccctctggcaatggagcaactctggagggtgttgatgcatgccatggatggaaggaaactattggcgatcactctttggtgggtggctcactggtttctgtatgttcttctgcagatccttgcaggggagggggggatttataaaacgacaagtcagggagctgaggtggataggaatgcatggaaggcctggccccaccatcca

SEQ ID NO: 58691 - DNA, 231 bp, Setaria italica
  Peptide Sequence Number=SeqID_124665
gctttgtcagcacttctcctagttcctgtgttgatctttgcccctcctggcaatggagcaactctggagggtgttgatgcatgccatggatggaaggaaactattggcgatcactctttggtgggtggctcactggtttctgtatgttcttctgcagatccttgcagggggagggggggatttataaaacgacaagtcagggagctgaggtggataggaatgcatggaagg

SEQ ID NO: 58692 - DNA, 135 bp, Setaria italica
  Peptide Sequence Number=SeqID_124666
gtcagcactctcctagttcctgtgttgatctttgcccctcctggcaatggagcaactctggagggtgttgatgcatgccatggatggaaggaaactattggcgatcactctttggtgggtggctcactggtttct

SEQ ID NO: 58693 - DNA, 242 bp, Setaria italica
  Peptide Sequence Number=SeqID_124667
ttttctgccgattctggagcgcactcctactgattgtagatctgcctgctgccactcaaaagcaccatggacatatttacaagaagtttttggtctttcttgtagcatggactgctgcccttctaaatcttcagcaggccttccaactcgcgaagaacatcagcacgggtaattatacctattacttgttcatcctgatttacaattggtactctgtggatcttcttcttgagcatcagaac

SEQ ID NO: 58694 - DNA, 285 bp, Setaria italica
  Peptide Sequence Number=SeqID_124668
cttgagcatcagaaccgcagcatctgtagatgttacacatgtactcttagatctacttaaagcatacgtggaagaaaaaggtgatatgaaaacaacaattacccatcactgttttatctgatgctagtgtgatggctggagaggtcattacttcttcaatctttgtttgtggctgttacaagcagcaatagatcagtagacggaatggattttctccttcgctcttgtatgaaactagcaacttgttatgtgtgtgcttgcgcccaagttgtgtgagagagagtg

SEQ ID NO: 58695 - DNA, 260 bp, Setaria italica
  Peptide Sequence Number=SeqID_124669
aatacctagaatttaacaaattaggtaactactgtggatcttcttcttgagcatcagaaccgcagcatctgtagatgttacacatgtactcttagatctaacttaaagcatacgtggaaagaaaaaggtgatatgaaaacaacaattacccatcactgttttatctgatgctagtgtgatggctgaagaggtcattacttcttcaatctttgtttgtggctgttacaagcagcaatgatcagtagacggaatggattttc

SEQ ID NO: 58696 - DNA, 227 bp, Setaria italica
  Peptide Sequence Number=SeqID_124670
tggtgtggtacttttacaaggaaaagatctcaaactcttccgggcttatttctgccgattctggagcgcactcctactgattgtagatctgcctgctgccactcaaaagcaccatggacatatttacaagaagttttggcttctgagcatggactgctgcccttctaaatcttcagcaggccttccaactcgcgaagaacatcagcacgggtaattatacatgcaga

SEQ ID NO: 58697 - DNA, 215 bp, Setaria italica
  Peptide Sequence Number=SeqID_124671
accaattgtaaatcaggatgaacaagtaataggtactctgtggatcttcttcttgagcatcagaaccgcagcatctgtagatgttacacatgtactcttagatctaacttaaagcatacgtggaaagaaaaggtgatatgaaaacaacaattacccatcactgttttatctgatgctagtgtgatggctggagaggtcattacttcttcaatctt

SEQ ID NO: 58698 - DNA, 227 bp, Setaria italica
  Peptide Sequence Number=SeqID_124672
tggatcttcttcttgagcatcagaaccgcagcatccatcactgttttatctgatgctagtgtgatggctggagaggtcattacttcttcaatctttgtttgtggctgttacaagcagcaatagatcagtagacggaatggattttctccttcgctcttgtatgaaactagcaacttgttatgtgtgtgcttgcgcccaagttgtgtgagagagagtgagaaagaggg

SEQ ID NO: 58699 - DNA, 171 bp, Setaria italica
  Peptide Sequence Number=SeqID_124673
atttacaagaagttttggcttctgagcatggactgctgcccttctaaatcttcagcaggccttccaactcgcgaagaacatcagcacgggtaattatacctattacttgttcatcctgatttacaattggtactctgtggatcttcttcttgagcatcagaaccgcagcaa

SEQ ID NO: 58700 - DNA, 180 bp, Setaria italica
  Peptide Sequence Number=SeqID_124674
ctggtgtggtactttactaaggaaaagatctcaaactcttccgggcttatttctgccgattctggagcgcactcctactgattgtagatctgcctgctgccactcaaaagcaccatggacatattttacaagaagttttggcttctgagcatggactgctgcccttctaaatcttcagca

SEQ ID NO: 58701 - DNA, 233 bp, Setaria italica
  Peptide Sequence Number=SeqID_124675
agtgtgatggctggagaggtcattacttcttcaatctttgtttgtggctgttacaagcagcaatagatcagtagacggaatggattttctccttcgctcttgtatgaaactagcaacttgttatgtgtgtgcttgcgcccaagttgtgtgagagagagtgagaaagaggggaagggagagctgaccccatgggaagctttggcccggtcattcttgacgactacccaacacat

SEQ ID NO: 58702 - DNA, 164 bp, Setaria italica
  Peptide Sequence Number=SeqID_124676
cagagagtaagtttcctggtgtggtacttttacaaggaaacttactctctgtgttgactagtttgcaacatttggtagcgcaagcagtgcaacacagagagtaagtttcctggtgtggtacttttacaaggaaaagatctcaaactcttccgggcttatttctg

SEQ ID NO: 58703 - DNA, 198 bp, Setaria italica
  misc_feature (1)..(48): n is a, c, g, or t
  Peptide Sequence Number=SeqID_124677
nnnnnnnnnnnnnnnnnnnnnnnnnnnnnnnnnnnnnnnnnnnnnnnnttttttttttttttttgcagtgcaacacagagagtaagtttcctggtgtggtacttttacaaggaaaagatctcaaactcttccgggcttatttctgccgattctggagcgcactcctactgattgtagatctgcctgctgccactcaaa

SEQ ID NO: 58704 - DNA, 461 bp, Setaria italica
  Peptide Sequence Number=SeqID_124678
catcaatttctgagttaaggtggttaagacaatgagtaagccaaaatgtagaacctactttatgctggtgaaaagctcatctttttctgtgaaccagtctgggatgtctcggacaatgcgtacatcatctttcaaatagtttataaaatgatcaacatcaaagatatcttcaaatttcgtttggtctttccatatctgatcctgcttcagaactggcaaaataagcgttgcactcattatcctagcaatagcaacagcattacatatagctatgcgttgctggtttagtcctccttcggcatgaataaaaatatacccagaggtttctttctcagatgggacatctgagggctcatcgctgcgtcgctctgcgcagggcttccaagatgcagtggcagcacgtggattctcccacagcgaagggggttccttcgtctcagggcaatgaagcgtgatcccct

SEQ ID NO: 58705 - DNA, 365 bp, Setaria italica
  Peptide Sequence Number=SeqID_124679
tactaaagaccttcaagaaaaccaattatatccagataccttcttgggttaaagttatccactccaaggtcttcatcccataaaaagatgaaatcatatatagccatgacatcaggatgaagaaaacgcttagcaaaccaccttcagcaggaatgtgagtttaattcttctgagaaggggggcatatatgatggaaggcaaactgctgcagcacgtactgaaaaaggctatcagaagtccagctaccgtactcatacataacagaacgatgaggtttcataccagttaccattttgtttggttgtgagcgagaatatgtatggccttatcgcctccactcaagatgatgccatccatctacattt

SEQ ID NO: 58706 - DNA, 226 bp, Setaria italica
  misc_feature (195)..(195): n is a, c, g, or t
  Peptide Sequence Number=SeqID_124680
agctgatctagggtttagcggagtgacctcgcggagggcgccctcgcgccgaagcgaggcgtggatcaatccagatatgcatttggggggcagcaagctcgaggcggcaactgcataacttgcaagaatttgtaagtgttcttgctgtattatgagaaataacatttatctttttgtatccagcaatgattaatnttgtctgtatccattgttttttgtggtcacc

SEQ ID NO: 58707 - DNA, 258 bp, Setaria italica
  Peptide Sequence Number=SeqID_124681
ccgcgtagggaatcgcccctccagccctgggtcagccatctttgggagcttccgtctgtcattgaaaagaggtcgtgcctgccaataaacaaagagttaactccaccatgacacaaggttttgctctgcggctggtctggtgctgtcaatggccttccggccagtaatcaactcaagcaagacaactccaaagctataaacatctgacttaactgtaagttgtcctgtcatagcatactctggtgcaacaaactaacc

SEQ ID NO: 58708 - DNA, 274 bp, Setaria italica
  Peptide Sequence Number=SeqID_124682
acctgcaagacaaatttttacaatcctagtgttccagtccaaggcctccttgccaggagggagatcatgcagatggtcttccaatgatccaagtggcatgtactcatacacgagaaggcgttgatctccatcggcacaataaccaaccaaattgacaaggttttgatgatgaagcaaactgagcatgagaacttccactagaaattctttgtttaccatttttagtgtaggtctgctaaatctaggtgatagatttgcttaattgtgctttggg

SEQ ID NO: 58709 - DNA, 194 bp, Setaria italica
  Peptide Sequence Number=SeqID_124683
cgcggccgcaagctggcggaaggtgaaggtctgcgcagagatgacattgccgttggcgtccttgagaaccgcgagctccttcttcgagccattgcccttggccttcgacttgttggaccctgtgggggacctctcggcgcgcggtggagccgccacggccgcctccgcgccgcccccgacagcagcagcagccg

SEQ ID NO: 58710 - DNA, 203 bp, Setaria italica
  Peptide Sequence Number=SeqID_124684
tgcttcaccaacttcagaagcatctttacaagatcccctcggacagtgcagcacaagcagccattattcaccattacaatgtcctcagcaacagaagagtggctagcaacaagcgagctatcaatatccacctcgccaaactacacaagaaaatcgaatatggctcattcatagtgtatcagggggcgtttggttccctttgc

SEQ ID NO: 58711 - DNA, 458 bp, Setaria italica
  Peptide Sequence Number=SeqID_124685
taagtaaattagtactaattaagttttaagtactaagtttgggtaggttttggtttttgttattccttagtctaaacttttgtttttattaggttatcaaggtcttcatcatggatccagctacttggagcacctcaacttcttgtctgctataagggctcaaggtgcctctggaccttccgtcaacttaagtgatggtctactatctgttgccatcggtgttgctggccaattatcaattgagcaaggccggtttgtgaccatggaagaggtcttaggttcttagcctgatgataattcaggtgaaacatagttggacatgccaatttattgtaaaaactttttccgtcaattcaagaatgctctgaaaattcccgtgcttaagcaatgttataattacaggcatttgaaaattgaaaagcaatgttgtaacggagttatattgtctacaagcgatg

SEQ ID NO: 58712 - DNA, 247 bp, Setaria italica
  Peptide Sequence Number=SeqID_124686
tggagttgtaacaataatggccgaagatgaacggatcaagtatcaaggtcttcatcatggatccagctacttggagcacctcaacttcttgtctgctataagggctcaaggtgcctctggaccttccgtcaacttaagtgatggtctactatctgttgccatcggtgttgctggccaattataaattggcatgtccaactatgtttcacctgaattatcatcaggctaagaacctaagacctcttcc

SEQ ID NO: 58713 - DNA, 240 bp, Setaria italica
  misc_feature (90)..(90): n is a, c, g, or t
  Peptide Sequence Number=SeqID_124687
ttgacggaaaaagtttttacaataaattggcatgtccaactatgtttcacctgaattatcatcaggctaagaacctaagacctcttccanggtcacaaaccggccttgctcaattgataattggccagcaacaccgatggcaacagatagtagaccatcacttaagttgacggaaggtccagaggcaccttgagcccttatagcagacaagaagttgaggtgctccaagtagctggatcc

SEQ ID NO: 58714 - DNA, 266 bp, Setaria italica
  Peptide Sequence Number=SeqID_124688
aagtaccgtacaaaggtagcgggtcaccggcctcgccgacccccaccaggagtccctccgcctcagcctccagctcgccaacgagctcggcctccccgctccacagctgatagatatcgttaagagtggtacactacggcaagtcagaatggtggccatacgtgaacaccgttttcctttccttgttaaggtaaacaactagaacaggttcaactgcaacagtgggggaacactggtagagaagtgctgccatctctttgatttga

SEQ ID NO: 58715 - DNA, 209 bp, Setaria italica
  Peptide Sequence Number=SeqID_124689
tcgtagtaagtccccttgttgtctacctaccgttgtcaggtacttgcaagaaggtaattgaagcggccaaaaatagaccagacataattgtgcaagttggattggagtacaggtatatgccacccgtggcaaagctgatagatatcgttaagagtggtacactagggcaagtcagaatggtggccatacgtgaacaccgttttccttcc

SEQ ID NO: 58716 - DNA, 190 bp, Setaria italica
  Peptide Sequence Number=SeqID_124690
ggtgcaaaagaagaggggtgaattggagtctagggttactaatataattcgtgaagtccgggaagcaggttagttagtaatggaatctgaaagattatcagatatgaagcggcatatataaaatgttttcagatttcaagcttctgcatctggtcatgaatattaaaagtcataaaaaattatgcaggcg

SEQ ID NO: 58717 - DNA, 255 bp, Setaria italica
  Peptide Sequence Number=SeqID_124691
attggatatggtgaaactggtactttgacagaagcggtcaggaggaaaccatttactgtggttttgctggatgagatagagaaagcccaccctgatattttcaacatccttctccaaatctttgaggatggacatttgacagactcacaggtaatgcatcagtgaaacctgctacatgcaacagctgactttaaacagtacaattactgaaaccaaatgtgattaattctgttcccttaaactgataatgtaaag

SEQ ID NO: 58718 - DNA, 204 bp, Setaria italica
  Peptide Sequence Number=SeqID_124692
tgagtcaagctcatatgtcgcaatgaaatccctagtaatggaagagctgaaggcatttttccgaccagagttgctcaacagaattgatgagatggtcgtgttccgtcctctagagaagactcaggtctgtttcttttacattttgcttctgaggtggttttactgagaattccgtaaacttttcttttcttattgtactattta

SEQ ID NO: 58719 - DNA, 244 bp, Setaria italica
  Peptide Sequence Number=SeqID_124693
cacccggaggctcatgagctctccggccatctcctcgtaggagagcaggccgtcgtggtcggcgtccagcgcggcgaaccggccgtccaccgacgagttgaaggcgctctcgtcctccacgaagctccggaccgtgctgccgtcaaggatctccacgctcatgtctgaactcttcctgtgttcttgctctttgggacgtgtgagtgtgagtgatgaactgatggtctgctctggtttggggctc

SEQ ID NO: 58720 - DNA, 211 bp, Setaria italica
  Peptide Sequence Number=SeqID_124694
ccggcatctccgcgtaggagagcaggccgtcgtggtcggcgtccagcgcggcgaaccggccgtccaccgacgagttgaaggcgcgctcgtcctccacgaagctccggaccgtgctcccgtccaggatctccacgctcatgtctgaactctctctgtgatctcgctcttgggacgtgttcgggtgagtggtgtttgctctggtttggctcga

SEQ ID NO: 58721 - DNA, 400 bp, Setaria italica
  misc_feature (39)..(39): n is a, c, g, or t
  Peptide Sequence Number=SeqID_124695
cgtgaagtttgaacagtcctggtgaatagaaataaaggnttaccctacgcactgagggaagattggccattggtcaatcagatagtaaggtaccaatcttcctttattcagcatgatagcaatatttcctatgttcgtgtcaacaacagtttctcttcttttttcctttatttttttaaaacaggaagcaggatatctttacattatatataaaaaagagtcaaacccagacagataataaattgacccccaaaaaagggaaacaccaaacagtttttcttttaagttgtttctagtatgattgctgctaatgcatgtgattctgaccattaaaggatgttcatttattgtgtcctcacctcatgatgcccttgaaagtgcatgacctagacttgaaaga

SEQ ID NO: 58722 - DNA, 432 bp, Setaria italica
  Peptide Sequence Number=SeqID_124696
caatggaacttgatgaagttgtctcagtgatcataagctgttatgaggttaatcaaaaccctctcaataaaaagaggttgtcagacttcaagatgatgatgatttggtcatcaatgggaacttggctgtggtaccagtgtctggacaaaacagtgccaaagtggcatctgatacaatgtctgtgtctgaaaaatccagcacattgggctagggtttgcttacgtaatatggctaatattgcaaaggaggcaacaacagtgcggcgtgttcttgatcctctcttccgcctttttgacaaccatgactattggtctcctgaaaatgggatcgctctatctgttctgcaagaaatgcagaaactgatggacaaatcaggtgcagcaatttccacccatggcaacatggccatttgttgttatctttcactataaa

SEQ ID NO: 58723 - DNA, 296 bp, Setaria italica
  Peptide Sequence Number=SeqID_124697
aacagtcctggtgaatagaaaataaaggtcttaccctacgcactgagggaagattggccattggtcaatcagatagtaaggttggtttggaagaatctgatctgacgtcgacaccaagtagatgagatgctcattgaggatgccatctgaaaacttttagcggttaaccacatattttacacaaatattctactattaaggtggtaccacattaatagtagaatattttacacaaatattctactattaaggtggtaccacattgatgatctacgtgttaacaacatggaatgaat

SEQ ID NO: 58724 - DNA, 296 bp, Setaria italica
  Peptide Sequence Number=SeqID_124698
tccttgtaaaaatgattatttgtttatcacattatggctgctgtattctttatcctgcatatgtacaagaggatgctgcagaatctacactaaatgctatgcagcttctaaatcatatttgtgatagagtcaacccttcaattgtttggcatgcatgcaggagtgctgctgcacaaccaagattgcttattccagtggtacttgtgatgatgtataacagatggaatgggatattagttccagactatggcttcatgcacctggagttgataccaatgcttgttggatttttacct

SEQ ID NO: 58725 - DNA, 265 bp, Setaria italica
  Peptide Sequence Number=SeqID_124699
atgcgtgatgtaacgacttacaactattagttgctatggtattattttgtttacttctttcataagtattggtattcgttcttttggcccaatttaggatgttatactaagggagtccaagtcaagagtgcagcaaggggaccctaaggaattggcagctagggccagagaggactacctaaagttgaaacaaagattgcagctgctcactttaggcattggtggtgttggtgtagtctctgcttatgtttcatactctcctgaa

SEQ ID NO: 58726 - DNA, 201 bp, Setaria italica
  Peptide Sequence Number=SeqID_124700
cctatcccctcgtgtgccttgctttcccctcgttgcgtgtctcagttgtggctagcaatggcatcagcaatgctcatcttttcagcgaaaatagctgatcttcaccagataattcctcttgtcaaagcagcagcaccagagaaaatggttgatcctcatctttgcgtgatggatgactgccatctcactgttcgcagactc

SEQ ID NO: 58727 - DNA, 237 bp, Setaria italica
  Peptide Sequence Number=SeqID_124701
attgggctagggtttgcttacgtaatatggctaatattgcaaaggaggcaacaacagtgcggcgtgttcttgatcctctcttccgcctttttgacaaccatgactattggtctcctgaaatgggatcgctctatctgttctgcaagaaatgcagaaactgatggacaaatcaggcatgcaaagttgaaggcatcggtgacaatagcaactgcaatcagcgacttaataaagcacttg

SEQ ID NO: 58728 - DNA, 226 bp, Setaria italica
  Peptide Sequence Number=SeqID_124702
gtcggtgtgcagctcctccttccacgccagcgccaagccttgctggaggaaggcagctctctggctggtctcctccctgcttctcatctccttcttcaccagctcccatgcatgtctcatccccatggttgagctgttaggcttcatggacgacccgagggacttgactagaaccatggtcgtacgccatctgcttcttgctcatccttgttcagcaggaagccga

SEQ ID NO: 58729 - DNA, 471 bp, Setaria italica
  misc_feature (85)..(85): n is a, c, g, or t
  Peptide Sequence Number=SeqID_124703
ctacttacgttgatcctgacgtctgaacctttttccagtgtcagagtgagcaatgagcttggtgccggcaacccaaaatctgcanatttttcagtgtgggtcgtgactgcggtctctacactaatcaccatcatccttagcattgtgatcctctgcctgcgcaactacgtcagctacttgttcacggagggtgaggtggtctcaaacgccgtggcagacctctgcccgctgcttgccatcacgatcatcctcaatggaatccagcctgttctgtcaggttagattttagatacttttttttgcaatgttatgaaattttaatttagttatcgcataatctaaacaaagaggcctctcgatttagattaaattgagagccctcctattttcgaagggaagaatatgtcggaaagaaataaagaccaaaataggggaaaacgaagaaggtaacaatcaaattgaagaagtaac

SEQ ID NO: 58730 - DNA, 426 bp, Setaria italica
  misc_feature (349)..(349): n is a, c, g, or t
  Peptide Sequence Number=SeqID_124704
gtgtggctacaagattcttttctatcatccaatcacttatggttccgacataaaacattggatggtgcaatttaccagattgggtacattgtgaatttgtcgtgaatttgtgattgaagaaccttaatttactcctttgcagtactgtagatgagttatcaatctatgcatacatgttacatattacctccgtcaacatgtacagttaactttattgttggtactgtgttttctgcttggataatcttttaggtagaagaagcacagaagaggttgaacaaatgggaggataagaagacggagccccttcttgcggggtcagcaatggcaattaactgaaacttcactntccatcatcaatcatgcacgatggaccctgcaaatcttcccggacgtgtttagtatttttttactagttatctagtg

SEQ ID NO: 58731 - DNA, 347 bp, Setaria italica
  Peptide Sequence Number=SeqID_124705
ctctgcctgcgcaactacgtcagctacttgttcacggagggtgaggtggtctcaaacgccgtggcagacctctgcccgctgcttgccatcacgatcatcctcaatggaatccagcctgttctgtcaggtgtcgctgttgggtgtggatggcaacaattcgtagcctacgtgaacatcggctgttactacgtagttggtgttccccttggcgcccttctcgggtttgtcttcaagcttggtgtaaagggtattggggtggtatgattggaggaactgtcatgcagacggccatttgttcaacctcttctgtgcttcttctacctctttgctccaatcagttctcaagg

SEQ ID NO: 58732 - DNA, 478 bp, Setaria italica
  Peptide Sequence Number=SeqID_124706
ggttatgataccaacagcctcttcatcttcactcaacgtgggcaaggggctacttacaatgtaatctgcagaacatctgattggtctttggaccatttcttaggcttgctccctctatttgacgtgttctgagtgttagggtagctcttccatcttcgcagtggtggtggaaggttcttcacgaccttttcgttattcttgtcgtcaatagcaatggacacctcaaaagttccaccatcattggctggctgttcagctggttcattgggaatgtttttccttatgaccactgccatgtggctgtggcctttctgaaattcatttaggatgtcgtagaggggcatatcttcgaaaacgccattctatagtgaagtccatcactggtagaaacaggtttggccgtggagtgtcatggacagtttgtcgaggaattttgcggtacagttacacttttgataggaacctcgtcatcagggtt

SEQ ID NO: 58733 - DNA, 469 bp, Setaria italica
  Peptide Sequence Number=SeqID_124707
tctgagctgagaggtcgatggtggtggaaggttcttcacgaccttttcgttattcttgtcgtcaatagcaatggacacctcttgttttgcacccgcaaaaggaaaacaaatgagaaagatatatattgagaaggtaatacatgccagatgcctagtaaaaacagcgttgcagctcaccaaaagttccaccatcattggctggctgttcagctggttcattgggaatgttttccttatgaccactgccatgtggctgtggcctttctgaaattcatttaggatgtcgtagaggggcatatcttcgaaaacgctggcattcatcaaggcacagatgtgttaactgaatatataaaagaaggtcgtgctatcgtaatatgttccagaaaatgacgacccaagcagaaggccaccaactttcaaatttctcaagaaataaactgttgcattcctatatttaaaattaaacctt

SEQ ID NO: 58734 - DNA, 241 bp, Setaria italica
  Peptide Sequence Number=SeqID_124708
tccatcactggtagaaacaggtttggccgtggagtgtcatggacagtttgtctttttatttccaggaaaacaaatgtataaggagatagagttatagtaaattacagaaataacctacaagcattgcacagaaagagcttttatatattaccgaggaattttgcggacagttacacttttgataggaacctcgtcatcagggttaaccgataataaattcttcaccaatatcaatccaata

SEQ ID NO: 58735 - DNA, 397 bp, Setaria italica
  misc_feature (270)..(270): n is a, c, g, or t
  Peptide Sequence Number=SeqID_124709
taggtacttaccaaccgaagttaacgtaggaaggtaggaaccgaccccgtggcgtacaaggaggtgctcaagacgtgggcgaaatgggtggaccggaacatcgaccccaacaagaccaccgtcttcttcatgggcatgtcaccaaaccacatcacgccggaggcgtggggcaaccagggcgggatcaagtgcgcgatggagacgctgccgatcacgaaccggagcacgtcgctggacgtgggcacggactggcgcctctacgcgggggcncaggaggtgctccccacgctgcgccgggtgcccgtccacttcgtcgacatcaccgcgctgtccgagctccgcaaggacgcgcacacctccgtgcacacgctccggcaggggaagctgctcaccccgg

SEQ ID NO: 58736 - DNA, 252 bp, Setaria italica
  Peptide Sequence Number=SeqID_124710
taaattagtaggagataacaacatctccaagattggttattccatctacctaacagaatccacaaacaaaactgaccacttttatatgggggaaataccataccgtattatggcttggaattagcatcaggttcagaggaagcaatagatgtggtgttagacttgcggaggtcgtctatgatgccacctagctcacgccgcgcggactcccttccaaacatgaagccataccagcaggagacagctgagaag

SEQ ID NO: 58737 - DNA, 251 bp, Setaria italica
  Peptide Sequence Number=SeqID_124711
atctgataggcgcatgattaatggatggcttgctggtgttgttgggtcctgctggaggctggagttatcgtactatggcttggaattagcatcgggttcagaggaagcggttgtggtggacttgcggaggtcgtctatgatgccaccaagctcacgccgcgcggactccttccaaacatcgaagccataccagcacgagacggcagagaagactcccgcggcagccaccgtctgcagcagcgtcagcttct

SEQ ID NO: 58738 - DNA, 205 bp, Setaria italica
  Peptide Sequence Number=SeqID_124712
agcttcttctgtcatcatcgctgagatttgggagaggtaggagcagtggcggacccagtgacagaccagtatgcctagcagtcgccgttaggggatttgccgattggggatgcctcctgtgccgctgtgacccgtggccgttccgccgtcacggactggcggcgtcgcccgtcccagcaggcaacgtcacggagtcgggcgcccc

SEQ ID NO: 58739 - DNA, 434 bp, Setaria italica
  Peptide Sequence Number=SeqID_124713
taaattaaagttaagggaacccttaaacaaaagaaaaccccaaaccaaaagaaaccaaagaacaaatttaagtaagaataagacaaaatacgaactaggtaatcttttgcatgtccacatcttctactatctgatcatatgctcgctgaagaaatgtggatggaattatgcagaaaggctttaaacctccacaggccaaaccagcggaaaaggtaacagcatgttgctcagcgatgcccaagtcaaaaaatctgtctgggaagctggactggaataagcggagtgatcgatccattcccatgccaccatgaactaccacaatgcacttgtcattctctgcttctgcggttaatgcttctacaaagcagtcattgtatgtcctagaaagtccagtttctaaaatttagaagatcatggcttgagtttgaaggccc

SEQ ID NO: 58740 - DNA, 361 bp, Setaria italica
  Peptide Sequence Number=SeqID_124714
taatatcaaacggtcctgaattagttgggccctcagaccccaccagaccagcatttgtgatagcaaatcgaactggtatcttttgcatgtccacatcttctactatctgatcatatgctcgctgaagaaatgtggatggaattatgcagaaaggctttaaacctccacaggccaaaccagcggaaaggtaacagcatgttgctcagcgatgcccaagtcaaaaaatctgtctgggaagctggactggaataagcggagtgatcgatccattcccatgccaccatgaactaccacaatgcacttgtcattctctgcttctgcggttaatgcttctacaaagcagtcattgttattgttcctt

SEQ ID NO: 58741 - DNA, 303 bp, Setaria italica
  Peptide Sequence Number=SeqID_124715
tccagaccccaccagaccagcatttgttgatagcaaatcgaactggtatcttttgcatgtccacatcttctactatctgatcatatgctcgctgaagaaatgtggatggaattatgcagaaaggctttaaacctccacaggccaaaccagcggaaaaggtaacagcatgttgctcagcgatgcccaagtcaaaaaatctgtctgggaagctggactggaataagcggagtgatcgatccattcccatgccaccgcagaagcagagaatgacaagtgcattgtggtagttcatggtggcatggg

SEQ ID NO: 58742 - DNA, 302 bp, Setaria italica
  Peptide Sequence Number=SeqID_124716
atcaagcatctctggaccacctcaccatagccaagaaaagctatctcttttccctcaacaagaatctctcctttaccaatctgaaaaagggcacagagaccaggtagaaaactgcacttttttttgaaaactaaaactacacttcttttaaaaaaatgttaatgataaaaggaacagttacgtacttttcagaaataagcaaatccttttttttgtcaaagcaatgattttttttaatatttaatgttaagaatacatactacctctgttcttaggacaagcaaattagttcagttttgagg

SEQ ID NO: 58743 - DNA, 234 bp, Setaria italica
  misc_feature (4)..(4): n is a, c, g, or t
  Peptide Sequence Number=SeqID_124717
ccancggaaaaggtaacagcatgttgctcagcgatgcccaagtcaaaaaatactgtctgggaagctggactggaataagcggagtgatcgatccattcccatgccaccatgaactaccacaatgcacttgtcattctctgcttctgcggttaatgcttctacaaagcagtcattgtatgtcctagaaagtccagtttctaaaaatttaagaagatcatggcttgagtttgaagg

SEQ ID NO: 58744 - DNA, 215 bp, Setaria italica
  Peptide Sequence Number=SeqID_124718
tctcggtgacgacctaggagggtcaatgcggttgcagctatgtggtgagcagttaggccagccaagtcgagttgctcagcaagtgaagcatgttcgatatacctgtctggtagcacaatgggtcgccactgaagtggatttccatatgttaaagtgccactagtcccaacaatggcacccctaggataccggatgcaaataggtctgtcctcaac

SEQ ID NO: 58745 - DNA, 311 bp, Setaria italica
  misc_feature (100)..(100): n is a, c, g, or t
  Peptide Sequence Number=SeqID_124719
taccgaaggcggagtcgaaggcgaaggcgaagacgatggcgatggaagcagccgcgaggaggaagaggaggattctatgatctccgatgccgcctctcgngcccctgcggacgcgctgttgcctatcagatacagggggttgaagaagctcaagaaggctttcaaggccctggatcatgatgattcactggaagatactgcaagttccccagtgaatagcccaaaggttagttaaagcttgcaaggtagtaatacccttcatttctgttgttaaaagctagactgcttattgtgtgatgttaatttggcta

SEQ ID NO: 58746 - DNA, 422 bp, Setaria italica
  Peptide Sequence Number=SeqID_124720
aaccaatcttgcttgcacaatggaaagagccacgggcttatctctccagcgaattaaattagccaaaggtgtgcgttcatgggcccatgctaaagtctcaattaattcctgccaatatccacgccaggaaattaagaacataaatccagtagcccaaacaagatgtccaaataagaacatccaagcccatactgataaactattcatcccaaaaggattatatccattgataagttgtgaagagtttaaccataggtaatctcttaaccatcccatcaaataagtggaggattcattaaattgtgaaacgttgccctgccataatgtgaatagtagtttaccaaatagaccaaataaaaaaagtaaacccaataccaaataggtaatttaaacaataccaagaaaaactagaccaaaataaa

SEQ ID NO: 58747 - DNA, 271 bp, Setaria italica
  misc_feature (19)..(19): n is a, c, g, or t
  Peptide Sequence Number=SeqID_124721
ccctgccataatgtgatgngtttccaatgccataaaagtaacccatccaatggtatttaacatccagaaaactgccaaataaaacgcgtcccaagcagaaatatcacaagtaccaccgcgccctgggccgtcgcaaggaaaactatatccgaaatcctttttatccggcattaatttggaaccgcgtgcatctaaagcaccctttactaaaatcaatgcaggtcgaagcatatggttgcccggatggttgaatgctgttaatgagaatagt

SEQ ID NO: 58748 - DNA, 396 bp, Setaria italica
  Peptide Sequence Number=SeqID_124722
aatacaagacaagaaagcagccaaaagtgacgcacttagagaatatgaaagcattaaggaaaacaacaagattgaaataaaaagatttgacaaggaaagacgccgcgatttcattgagatgctgaaaggttttgttgtaaatcaggtatgagtattacattgcacaaaaaagaccctatgaatattctcctgtacatttgctcacaaaagggaacaagacatatagctacatggtttagctgcataatcttttttctgttcaattgtctgaccttgtgaatattctctttgtacatttgcttgcaaaagggaacgagacatcttacatgagagtatagctacatggtttaactgttcaattgttttctgcaggtatcatattcagacaattttgct

SEQ ID NO: 58749 - DNA, 339 bp, Setaria italica
  Peptide Sequence Number=SeqID_124723
gtaaccattatgatgactttcagttctacttgtggatatggcatgctgttgaatctggtggtttcccataacagacttagcagcaacccatgctttagcctttgtagcccaatcttcctcattgccatgacctgggtatccatgattttgagcccatgaatgattggtccaagcctgccccggcggtggaggagggtagcttggcggcgggggctggccggcggcgtggtggagggagggccagggggttcccagggcggcggtggctgctgctgctgcatcggcatcgggcgggggaggctgttgatacccgtagtgctgctgtgcggaggcggagga

SEQ ID NO: 58750 - DNA, 245 bp, Setaria italica
  Peptide Sequence Number=SeqID_124724
gaaccaaaggtactgtgctggagacaccataggacctctatctgcaatataatcttcagctccattctgaaacttacacatccacatgtaatacatatagagcaagggcaataacatactgtacctaacaaatggtttgtttccctctgttgacctgtcattggaaatggcatatgatcgttacttgattgaggaactggtgggtgcaaaggttctgtaacttctgctggcagaccagctggttg

SEQ ID NO: 58751 - DNA, 319 bp, Setaria italica
  Peptide Sequence Number=SeqID_124725
agctacagtagatgtcattcactgtgtggagcccagttacaagataccgatcctcattaggtcctaggcatatgttcacaacgtggtcgaagaggtaggcgcggccagtgcggccgtagaagtccctggagatgatggcgtccttggaggcggcgtcgacgcggcagcgccggcacttgaacacgccctccccctcgagccgctccacgaacagcagccccatcccggaaacgcaccgccgccagccgccactgcccggccaatcgacggatcgaccaggcgatcggagccgacctccgccggcgccctctcaccctct

SEQ ID NO: 58752 - DNA, 252 bp, Setaria italica
  Peptide Sequence Number=SeqID_124726
aaaattaggccaagaagaagttggttaagaatctaaacaattagatataaaggaaatgtttaagcaagggtctactgttctgatggctcctattgtctgttcaaaaacatttcctgcttcattgtacttagcttgaccctggcttgatagtttcgatatagtccatgacattgctgctccagcaattactataggagggatacgaaggagggcaggttgtaagtgtctggatggcattcatgacaggtgcaa

SEQ ID NO: 58753 - DNA, 228 bp, Setaria italica
  Peptide Sequence Number=SeqID_124727
aactatactttcaaccgtgtgcactggtgtccaccgttcgcttgcaagttcatagccattgggatcttcaccaggtggatgaagaattgaaatgcacacacgtccatcaggataaactgataattcaaaataataagcattgtcagagctttggcatgattcatagacacaagaatatcagtcagctagcgacgagcttaccattaggatgccacatctcagaagtaa

SEQ ID NO: 58754 - DNA, 244 bp, Setaria italica
  Peptide Sequence Number=SeqID_124728
taattacaacgaatgaatcaagaggccgactctgaaaatcatttgtcccatcctgcaggaggtttattggcaaattcttgcttggacgtgacatcctctcctctgaattaagtagtgctcgtgttgaattaagccagtagagtacaagcaatggctttagtattagctgcatccatgtgcccactattataatgctcatcatcaaacagttagtagtaataatattgcttcatttttcctattc

SEQ ID NO: 58755 - DNA, 343 bp, Setaria italica
  Peptide Sequence Number=SeqID_124729
atttggtggtatcactgctatatatttggagaagcagtcaagtgcatccgatattgccttaaatattatccgtacagcagtaaagagggctgatgttctcccttctttggaacttgaatggcgacaaggagcagtgcccaaggttggtaaagtaatatgtatttacagatttgacataaggttgacatgcaataacccaactgtcttgattgatgcaagccaacatactctatcattatcgaatagctactctgctcacgaattaaggtcaccttggattgatgtgtaaatttgtccgccagtttcacacaaatttggtggtccatttacttcagaagagcca

SEQ ID NO: 58756 - DNA, 419 bp, Setaria italica
  Peptide Sequence Number=SeqID_124730
gccgaagtctgttgcgatctaccatcagcagctctcctattgtattgttcagtttgttgagaaggactacaaattagcagatactgtgattcgggggctgctcaaatactggccagtcacaaattgccagaaggaggtgttgtttctgggagagcttgaagaagtgcttgaggcgacacagcctgcagagttccagcgctgcatggtaccactgtttaagcagattggccggtgccttaacagttctcatttccaggttgctgagcgtacgtttgtagtgagaccatgaacagcttgattccagtggctctgtatattcctctcaagcgcttcaaatatgattggaaatataacaccacgattttgggctatcaagcttacaatgtgatcattgttccacaagaacaaagcacgctcag

SEQ ID NO: 58757 - DNA, 217 bp, Setaria italica
  Peptide Sequence Number=SeqID_124731
caaattgccagaaggaggtgttgtttctgggagagcttgaagaagtgcttgaggcgtacacagcctgcagagttccagcgctgcatggtaccactgtttaagcagattggccggtgccttaacagttctcatttccaggtactgctttagttgatttgctggcttctgtgtatgttttcatcagcatgcttgcatacatttacaagtttacttttta

SEQ ID NO: 58758 - DNA, 179 bp, Setaria italica
  Peptide Sequence Number=SeqID_124732
agaaggaggtgttgtttctgggagagcttgaagaagtgcttgaggcgacacagcctgcagagttccagcgctgcatggtaccactgtttaagcagattggccggtgccttaacagttctcatttcaagcttacaatgtgatcattgttccacaagaacaaagcacgctcagcaacctgg

SEQ ID NO: 58759 - DNA, 501 bp, Setaria italica
  Peptide Sequence Number=SeqID_124733
ggatggcgctcattagctgtatatggctccacgctgggctagtccacctggtagtcaacatgctaagcttggtattcatcggaatccgacttgagcaacaatttgggtttgttcgcattggggtcatctacttgatatctggtttttggcggcagtgtgctctctgcactcttcctacggagtaattacatctctgttggtgcctctggggctttgtttggcctccttggatctatgctttcggagcttattatgaactggacaatctattccaacaaggcagcggcaatcgtaactctacttttcataattgcaattaatttggccattgggatattaccccatgctgataattttgcccacattggtggatttgcttctggatttcttcttggatttgtgctgctcgcaagacctcaaatttaggttaggaataggaaacgacaaatagaagactaacctacaagaactaaatacaaagactaccaaaagttaacaaaa

SEQ ID NO: 58760 - DNA, 241 bp, Setaria italica
  Peptide Sequence Number=SeqID_124734
caaaggcaagtaaatgtgatatcagttgtgcctgatcaaaaatctatctcaacgcggcaaaattgccaaaagctctgccttgtgttgcatacagtagtataccaaaattgctagaatgataactagtatcataggccatacatttgaacctgtcaagacaaaagcatccatttttagaataagaattgcaaagaatggctgggtgaaataaatctaagaaccaaagatgcctcataccatt

SEQ ID NO: 58761 - DNA, 181 bp, Setaria italica
  Peptide Sequence Number=SeqID_124735
cacatccagcttgccaacatacacaacacactagcattattatcgccatacgtacagtagcaacacgcgcacaaaattgaagatggccaagccctggaactctggaagcagcaggccctgattctggtggcggcgctgctcctggggctctcgctgccagtgccagggcagcgcagccccg

SEQ ID NO: 58762 - DNA, 228 bp, Setaria italica
  misc_feature (189)..(189): n is a, c, g, or t
  Peptide Sequence Number=SeqID_124736
caccaaaataggaacataccctagatgctctagtagtcgaggatgatctagtggtagtgcgcttcggtaatatatttggggatggtgttttctcagcaacctccagtgcaggaacacgtggggtcccaggcggagttagaagcctaaggagtacagcacaaagtacattaagttagagtagaaaaaatntgatggccttgaattatgtgcggatgtggtcttggcagc

SEQ ID NO: 58763 - DNA, 255 bp, Setaria italica
  Peptide Sequence Number=SeqID_124737
tggcagaactgacttccctgaaaagcccttcctgagaacggttagtggcgacgggagctgccgggaggcggcggtgcggtagaggaggaggcggggcgccgcggcggcgcggaggaagcaacaggccatcggcggaggctacctcttccgcatctcccgcgaggaatggtggaggggagaagggctagggtttacggggtgggattgggatggaagatgaggatggagattgaggctggaggacgaggcgttcga

SEQ ID NO: 58764 - DNA, 257 bp, Setaria italica
  Peptide Sequence Number=SeqID_124738
tgtgagtggcagaactgactgccctgaaacgcccttcctgagaacggttagtggcgacgggagctgctgggaagcagcggtgcggtagaggtggaggcggggcgccgcggcggcgcggaggaagcaacaggccatcggcggaggctacctcttccgcatctcccgcgagggatggtggaggggtggtagtggcggggagaatggctaggggtttacggggtggggattgggatggaagatgaggatggagattgagg

SEQ ID NO: 58765 - DNA, 211 bp, Setaria italica
  Peptide Sequence Number=SeqID_124739
atgttccagatcagcccgctgctcaacctcggcctgcccaagctcgtcgaggactccctcctccactcgttccgcctcccgccggcgctggtcaagaaggactacgaccggctcgccgacttcttccgcgacgccgccaggggcgtcgtcgacgagggacgaagacgacctacggaacaaataaccccggaacggggaaagggaaaggaac

SEQ ID NO: 58766 - DNA, 499 bp, Setaria italica
  Peptide Sequence Number=SeqID_124740
ttaatatgtacaggttatgtttaaggcctaagatgacaactatgcacagcggcttagaaatgatgactagagacaaatagaaattagcagagttcctcataaagaggaaataagagtatctatacaatcttttaaaaaccagcttggattgttattcctctttctggttagatggttcaggattattatgcatgatgatttgctgaaagcgcattgtgctaaaaaatgttatttatgctttttttcttctaatttggtcttgaatgcagacagcaactagctgttaactgtagttttgttagctgtggtcacttaattttcttctctttgtgcaggttatagataaagttgcaccaacattgatagatttaacaaatatttcgacacttggtgattataaaaggcttggtgacacaattgtcacagtcctccaagaatgtatgcaacagagtgggaactcacgcagtacaattcgcactcagaccaaatcagaaattga

SEQ ID NO: 58767 - DNA, 251 bp, Setaria italica
  Peptide Sequence Number=SeqID_124741
ttgaacacaccattgtgatgtataacatcagcagcctccttgcccagtcgaaggcaacactgcgcgagctcaatcctatctgctggtgtaacctccagaacatgacgtcaggaaacgcccacgcttgaccagagcggcaccgtagcacagagcggctggtacctgatcattggggattgcagagacattagcagcgaggattttggtacgtacgtattgtattctttgtttcgttccttacgttcccttaa

SEQ ID NO: 58768 - DNA, 175 bp, Setaria italica
  Peptide Sequence Number=SeqID_124742
attaagttttacaactgtagttgcactgctggttccgtaacgaatatttagagaatgaaccatggacatctacaaggaagcagaaaagaagtctactgaatggtacagcccatgtcacatatcacagttactgaacaggcctgttccttctgtgggtttcatttttgtttataat

SEQ ID NO: 58769 - DNA, 262 bp, Setaria italica
  misc_feature (261)..(261): n is a, c, g, or t
  Peptide Sequence Number=SeqID_124743
ccgcgctgcagctcgtcaagggacccgtcggggtcgtctccgtctgcggccgcgcgcgacaggggaagagcttcatccttaaccaggttcgctcctggtctgttggttcctgccttcctggagcttactagtactagtgtcgacttggtcaagttagaatcggggccattgaggaggggggaaatagagattgcttctaggagatagtggacagctggtttaacgcgggttttggttccacttggagtttcgaagcaaacnt

SEQ ID NO: 58770 - DNA, 352 bp, Setaria italica
  Peptide Sequence Number=SeqID_124744
attttgtttttgtttatgttttcccctttcttttccatctccgtgctactcttttactattcctaaggcttggtaacgcgtcacattggctcgccttataattacctaagcgtttggaaggaggtggatcaccacccgtagccctagtgccttaagaaccacgatgtgcatttatttgcaatattctcataccattttttatccccaggcatctggtgcgacgcctccagaacgtcctgcggctggctcatccttgccaaacgttgatgtttctcatgcaggccctgttaatcccattggaggtaatgtgattccagttcaaaaacaagcttagcttggttgcttccaggtt

SEQ ID NO: 58771 - DNA, 133 bp, Setaria italica
  Peptide Sequence Number=SeqID_124745
atgtgtctttatcggaattcaattgcaatactgtctccttaaggatttggatctcattttcagccatatcagccccaagaactccaaatggctccaggaaaatctcagtgacatggacacaaaggttaaatca

SEQ ID NO: 58772 - DNA, 254 bp, Setaria italica
  misc_feature (66)..(66): n is a, c, g, or t
  Peptide Sequence Number=SeqID_124746
tagtaggttttcaacttcctcatctgatggcttttcacctgaagaactaaggtatgtctgacaaancttcgctgctcctcagtgtcaggatatttcgtaaaaatccaacacgtgtggtgttgcagtatggtaatccgcagccatctcacaaaagtgattagaaatgtcaaatgcaacagggttaaagctggcatattcatagtccttattcagctgaaattgcttggactcttcctcagaacacctgccacgag

SEQ ID NO: 58773 - DNA, 243 bp, Setaria italica
  Peptide Sequence Number=SeqID_124747
gggcagcaccgtgccaattctagttagatccctcgggcttcttgtttacatgtctagcgatggaagaataaattctgtaaaacgttaatggctcgaccgcactggatatgtgttgtgttttcggttgctcgggcgtgttaaagacggcatcatccgtagtttgagactctgttgctgttgaaacttatgtcgttgttgtgttgctctcttgtggtaaatcagtcttgttgcgttgtaaaaaaa

SEQ ID NO: 58774 - DNA, 253 bp, Setaria italica
  Peptide Sequence Number=SeqID_124748
ccccagtttggcagcaagttccttggaatacactggtgctctactgtactcgtgttcttaattggatgtgccttattgtagcattgtattactgttactgtcctgaaatattcctgaaacaggcactatctgggtcttctctacagagtggtggcgatcctaagaattttgcttcttggtcacagtggagatgacaagtaggctttctccaaacagaaatcgtgccgttctcagacagcttcgtccaattaag

SEQ ID NO: 58775 - DNA, 376 bp, Setaria italica
  misc_feature (316)..(316): n is a, c, g, or t
  Peptide Sequence Number=SeqID_124749
aggaatagttagaatagttaagaagaataggacaacaagatctgccacaccatgggatgccagcaaatcagtttacagacaaatcttaccactcttttgaaggtgctaagtatcacaatgagttttcaagaagctttccagcaccccttgagcataatgcttactctcctgctggcttagtcaatggtctggccacatctaattcaatgtttacacctgaaaattcacaacctggtggtaccatcaatgacattgtgccagacctcactggagattttatttacaaatttcaatatcttctgttcgctcaaggttnccagcaaggtatccagtacatcattattactatccaatgcctcctctaccacccccgcaa

SEQ ID NO: 58776 - DNA, 295 bp, Setaria italica
  Peptide Sequence Number=SeqID_124750
tgcctgttccatggcccctcataggaatatgatcatctgtttgataaactggcctccacacaacatagccaggtggataagggggactagggattgctccattcatgccagtgtatccatatgaattttttctgccaagaccatttgaagggcgcatgttctgatattgcaggggtgttggaggcattggatagtaataatgatgtactggattaccttgctggcaaccttgagcaaacagaagattattgaaatttgttaataaatctccagtgagatctggcacaatgtcatt

SEQ ID NO: 58777 - DNA, 293 bp, Setaria italica
  Peptide Sequence Number=SeqID_124751
gaagcattgactatcgtcatgcttttttgagtcaatttcttgggatatctgctttactttcacaaaaggagttgccccagcagatgaggatccagttgccgtcgaggagatccggcgcctcgacgggtgcgggcgtggggttgaccgcctcgagctgggtgactagctcgacgacctcccctctgacctccgtggacgcccggaacccgagctcggagccgtacaccgtgtccaccaggcaccgcttgaggtcctccctcctctccgcctgctcatccacctcctccgccgcc

SEQ ID NO: 58778 - DNA, 367 bp, Setaria italica
  Peptide Sequence Number=SeqID_124752
taacgttaacgaacaattaagaactaaggtaagaacgaagttaataagttaatacaatcaagcgttaatccgttatgatgtcattgtgttcctttctgagacacagtatcttatcaacattccatttggttaatcattatcttgattagttccaacatctcaagtaacagtctccaactccatggtttattgcctagaagaatggctgtcgtccggcaggaactaatatggtccatgcacaggtcgagagctaatgacatcatatcgccataaacatgatgtttataaaactgatatctttgctgaattagattacttaaccagttgctgctgtcttgcgggatttggcctggctacaacatgcaaa

SEQ ID NO: 58779 - DNA, 301 bp, Setaria italica
  Peptide Sequence Number=SeqID_124753
aaaaagaaaaaacctaaaagtaaagaaacaaataaggaaccaataattaagttcctgaccggacgacagccattcttctaggcaataaaccatggagttggagactgttacttgagatgttggaactaatcaagataatgaagaaccaatcctttccgttcgcattgctggtgcgagttatagttatcatcaagcgttaatccgttatgatgtcattgtgttcctttctgagacacagtatcttatcaacattccatttggttaatcaattgtacttgtactagatttttgtgtgctgaga

SEQ ID NO: 58780 - DNA, 169 bp, Setaria italica
  Peptide Sequence Number=SeqID_124754
cctgaagatatttattatttaactgcaatttatgtgcttgcagatacgaacttccagattcacatccactactacaacagctagatcttgaccaacgggagcctgatgatcctaccccgtacttattggccatatggacaccagatgaaataaatgaaataagcaaagg

SEQ ID NO: 58781 - DNA, 378 bp, Setaria italica
  misc_feature (21)..(21): n is a, c, g, or t
  misc_feature (35)..(35): n is a, c, g, or t
  Peptide Sequence Number=SeqID_124755
gtatcatatcgtgccaactcnctgagtaggaatanctaaaccgcagcttaagtgaggacgaccagacagatccagtataacctcaactgctgcttcatcgagtggtgcagtaaaatgcccaaatcggttaatcccctttcggtcaccaagtgattgaagtagtgccgttccaattgccaaagcaatgtcctcgtttgagtgatgatcatcaatgtgtgtgtcacctgttgccttaacgtacacatcaaagagtccatgtgatgccagttgatcgagcatgtgatccaagaacggtatccctgtgtcttactagttctagtctaactacctagttgtcctatcaaggttgattctttctactattgtctactatttgta

SEQ ID NO: 58782 - DNA, 395 bp, Setaria italica
  misc_feature (146)..(146): n is a, c, g, or t
  Peptide Sequence Number=SeqID_124756
gtactcggtagtggtacattcgatttttgataatcccattagcaaggattccatgcttgttgtcgaaggcaatgcagactcccaaatgtaagtagcataaccaagctgtatatagctgcctgctccgtttgtttcctctacccacnctttcgaacttgcaatgctatgatcttgcaaaacacctttggagctgccatttagagaagcaagaaagataacatcagggatgtaaatggttcagtacgaatacaaggacagagcatatgtttgttaacttttttgccccaggtatcctctaccaatgtcagataccaagcaacagtacaaagtcaaaccacatatgaagatgggcgtggttcaaaattgctacaatatcaacagatgggagcattctt

SEQ ID NO: 58783 - DNA, 337 bp, Setaria italica
  Peptide Sequence Number=SeqID_124757
tagtaccgtaccgtaagttagttactaagtcttctaagtcttagtagtaagtattgttttacggtctaaggtaggtaagtattccagaaggacaagggtgtagagccaactgagtttgaggacacagttgcccaggcattctttgacctcgagaatgggaatcaggagcttaagagtgacttgaaggacctttacatcaatggagcagtgcagatggacgtgcctggcaacaggaaggctgttatcatccatgtcccatacatgcttcaaaagtcttacaagaagattcatgtgaggcttattcggagcttgagaagaagttcagtggaaggatgtg

SEQ ID NO: 58784 - DNA, 258 bp, Setaria italica
  Peptide Sequence Number=SeqID_124758
tagaaggagagggagagagatgagaccagagagaggaggaggtgggggaggtgtggcggcggagctaatggcgggcggcggcggcggcggcgcgcggccgggcctgtggcggacgccgacgccgtacctcttcctggggcttcgccttcatgatgggcctcatcgcggtagcgctgctcgtgctcatctgcacgcgccgcaagtcctcgcggcggcgcgggtcgggcgagggcctcgggaaccaggccgcgtcgtcct

SEQ ID NO: 58785 - DNA, 238 bp, Setaria italica
  Peptide Sequence Number=SeqID_124759
catggaactcattacaaggtttccactagaccttccagctctccgcagctcggtgaaatcaatggaattcctcgcagctgcacgcctagtgtcatgaaataaagagatgtttgttattacaagcagcaacagaggaggtatagcagaccgcataatttcttcattggtgggcgagaaatggaatgcaggttacctagggataagtatgcttgccggagttgcagtaaagggctgcaag

SEQ ID NO: 58786 - DNA, 170 bp, Setaria italica
  Peptide Sequence Number=SeqID_124760
tgtcccgtaagtccggtttaacctttcgtccttccagtcgcgtcggtcagcagcaccaccgacgaccggatgcctccatggatgatcgggtgctctttgtactcgtgcagataggtgatagcatgagcaacgttgatggcgatgttgagccgctgcgtgagttctaaacc

SEQ ID NO: 58787 - DNA, 210 bp, Setaria italica
  Peptide Sequence Number=SeqID_124761
ttggttacacagaggacattgatgatgctattgagattatcatcatggaataacgaccgtatatccagcaacagactgggaagaggctccaccactgtatctgcagctggatatacggtcgttattccatgatgataatctccatggccactctatacaagaggtagatatggacacagaggacattgatggtactagttgtttcaatag

SEQ ID NO: 58788 - DNA, 236 bp, Setaria italica
  Peptide Sequence Number=SeqID_124762
acgaaaggaaattttaacaatttagtgattggtatgaagttatagtataacaatcatatagcaacttatatctcaatcattacttcataggtggtatttgcttttatcgttgtctttccaatattctggaggccacatataatggcctccaaatttcatagattagcattaagtttatcacattttatttttcctattgcaccatagttgctacatgtcaacagaccaaacgacgt

SEQ ID NO: 58789 - DNA, 447 bp, Setaria italica
  Peptide Sequence Number=SeqID_124763
ccatgggctcgaggccaaagtcagacaggtgcggctcgaagtcggcgtcgaataggatgttctgtggcttgacgtcgccgtgcacgacgccggactggtgcaggaacgcgaggccgcgggagaccccgagcgcaattaggtgcctcatcggccagttgaggatgtggccatcttggtgagatgcttcctggagcaatgtggcgaggttgccgttgggcatgtagtcatagaccagcagacgaacatccggcggcggcccggcgtagtagccacggagcacagtgaggttcctgtgcttcaccttgccaagagactctgcctcttttctgaatgagccctcttcaataatcacagcaccatcggcagaggtggacggaagccgcaaaatggccaagcaacggtagaccaatacaactagtaaacaaagaccttagaaacaacgaagaa

SEQ ID NO: 58790 - DNA, 441 bp, Setaria italica
  Peptide Sequence Number=SeqID_124764
gcattgaaaatcataccagcgttgcacaacatgagtaagttacaaactctgctcagatgctctggacactgaaaccgaatccctctactaaactgaccaggagaagtttactgtgaaaacttatctcttcaacgaagcacagcagcttatccaacaaaggggaaagctaagcacaaactaggacattcaagtgctacattacaactgtactatctgcgggaagtggcaaccaggtgctccttgatgctccgaatcatcttggatttcttatgtttgaagttcctagaaagagtgaaaagttaagttcatcaggaattctattcattgccttctttggcagttgctgtgtaaaagcttgcctatacctgtactgttggaccggtatacatgccagtgcgcatgtaaatattcactggagtgtttatggtctccagccatgca

SEQ ID NO: 58791 - DNA, 335 bp, Setaria italica
  misc_feature (171)..(171): n is a, c, g, or t
  Peptide Sequence Number=SeqID_124765
agaagaaaaggaatagtaagaagcctcaatcaaacacctgcaggaggaggattcccagtgtagctgaaccaaatcgtgttggaagttcacctttctcagcaagaagctgcaggcgacattcacaggcacttcacatcagtctcatgtgccaaaaagtaaaaaaaaaaaagntaacgattgtaaagcatgacaagttgcttgatcaatttgtgtaactgaaatgccactgtatgcatagttgttagtgtgcatgtcatgagctaagccattacccaaaatagactagctacaaatatgaaaagcatggagaaacttgatacattaaagaatgtttg

SEQ ID NO: 58792 - DNA, 446 bp, Setaria italica
  Peptide Sequence Number=SeqID_124766
gggctgggaggatgttgaggatggacattgttgctggaatgtagcatactacccatgcggggagttcagcttcaggaacaaacattgtcatgggaaggatgacacagaaaagggtgaacgaatagaagggtaggatgagcttccggaggaggaagaaaaggaatatgagattgaacttcttccagaatccaatctgcagtagaaagtaagcagcaacattaggcaagctatccaataatcccatgcatagactatgcaagcatcaacataaaaagcgaaaaatgtaaagaaaaaaggaataaaaaagacattcacaagtacactcataaaattgtggtagattaaaaacaactattcaaaatgaatcataaaagaaaatgcagagaaactactagcatatcaactatctgaaatatcagattctagttcaatgtttttcatttttt

SEQ ID NO: 58793 - DNA, 270 bp, Setaria italica
  Peptide Sequence Number=SeqID_124767
tcgtcgtcggtgaccgagtcgtccgtgacggagcagggcaacaccgggagctcgtctgggttccccaaggaggagagcttcacctcgtccccgccggacgccgaggagttccagttcgacgagagcttctggtcggagacgctgtcgatgccgctggagagcttcgacgtccccagcgacgctcttccctttacaaagagccgcttcgatgcttgaaagatttcttcagacaaaaaaagacccattgtactctttatttctgtcactcca

SEQ ID NO: 58794 - DNA, 315 bp, Setaria italica
  Peptide Sequence Number=SeqID_124768
tgtttctattaggttaacttccttaggtccgtattctagtaagtctagtctacttttttattcgttgtctagtcttccttgttggtctttcctattgtctattctagtaaccgtaagtactttaagtagttttgtgtattttatggatctccattcattaacacagtcgcagatggggatcacttcttaagaccgaagtatctgaatttatgccgtgacaaatggattaccaatcataaacccattacagatgaaagtaaatttatatccgacaaattgacgctgggaagcatgcaacttgctaatgcagctgag

SEQ ID NO: 58795 - DNA, 235 bp, Setaria italica
  Peptide Sequence Number=SeqID_124769
cttgtaagcttcataggattctggcaactcgcattgacactgaaagagaagtcacacaggtttatcatgcctttacacaaggtatatgctgcataagcaacagagaaaattgtgccaatacctcaacatcatttaggaagacaaacttccatcccttgagatgtgctcggacagctatgtccatatcctccactgttgtcctttccatccatcctccagaatcctcgagtgcctt

SEQ ID NO: 58796 - DNA, 248 bp, Setaria italica
  misc_feature (222)..(222): n is a, c, g, or t
  Peptide Sequence Number=SeqID_124770
gttgtaggatggacattgttgctggaatgtagcatactacccatgcggggagttcagcttcaggaacaaacattgtcatgggaaggatgacacagaaaagggtgaacgaatagaagggtaggatgagcttccggaggaggaagaaaaggaagctagtcaatttgaactgctaggatcaagttcataggtaactcctaggccgatcagaagcagcacttttancgtgcagctcctgtggcttccatgca

SEQ ID NO: 58797 - DNA, 270 bp, Setaria italica
  Peptide Sequence Number=SeqID_124771
caaactcaaagacacgtctcatgaggtatttcccaccaagggaaagtaacccaagtcctcccagtgcctttaagctttcagctagtaaaattggccaaacactttgctccacgatattctgactctctagcacagggagtatgaccaacagggggacaactgcaatctgccggcataacatttccaaaagctatcatggttatgtacaccgggaaggaaaaaactattgagtctgtaaacagactgcggcaagctttcactgcggttccg

SEQ ID NO: 58798 - DNA, 264 bp, Setaria italica
  Peptide Sequence Number=SeqID_124772
tctaggtaggtaggtatttccctagttgttagtcttgtaacctaaattcgttgtttggtaagttctacctttcttcagcaagaagctgaagaacaaaagcagatgaagatagtgagagtgcagctccaattactattgcttcgtcaatacttctgatgttcaccagatcaggccttgaattaaataggaactgcaagatttttgttcctatggcaccgttaggagggagctcgaacgccgtgaaagcgagggttgacagaagaa

SEQ ID NO: 58799 - DNA, 313 bp, Setaria italica
  misc_feature (248)..(248): n is a, c, g, or t
  Peptide Sequence Number=SeqID_124773
ttcccgttacctttagtaaagtctagtcttgtttgtccccgtcctaactaccttccgtctagccttcgcagcggcagaaggatgctgatggggcacggctggccacacctgaggcgcggcctgggccccttgggatgcggccgcaggtgacgtcctcacgggcctctgagccaccggcctcttctggtggcttgggagctggtggccgtgcttctgctgagaggccgcagaagcctgatctggggccncttccgatggtccggctcaggtatgattctgactgggctgatgacgagcgtgacacggggctcag

SEQ ID NO: 58800 - DNA, 285 bp, Setaria italica
  Peptide Sequence Number=SeqID_124774
tttttttttcttcttcactcggaccaatccacctagtcgacttcttgtattttttgttgagttgtgtatcgactccaataatactattgtcaagtacctttagggatgaggatctcggcaagatatgcagttcttgaagaatgaaaaaaaactgatctacttctttttggtattttagatacaaaaggtttatcgatcccaaggggtacagatccataatagacatatagagattattatacgccaagtaacatcaaaaagtaagggtttccgaagatggaatgt

SEQ ID NO: 58801 - DNA, 358 bp, Setaria italica
  Peptide Sequence Number=SeqID_124775
ctggcatgttgccccatgtgtcatgatccaaattttctttgatttctcaggagcactggacttcatctcccagttatcatcacctgcacttgattccattccagcacccttatcagcccaagtattaatttcagcctgttctccatttgtctgcttctcagtgccccaactggatcctgcatcagacttggtaattgatcttccaaatccctcgccagcatcccaagcattgtttgatggtgccatagccatgttatcccaggaaccagcatcagcatttgtcctcttccttttgtaagtgatggccggagcaggccagcacttacaaaaggaagaggacaaatgctgatgctggttc

SEQ ID NO: 58802 - DNA, 366 bp, Setaria italica
  Peptide Sequence Number=SeqID_124776
tctcagtgccccaacctccccaatcagtggaattgttctccactgttgcatgcgcatcccagcaagaattatcttggtccagtggtttggtagctgctgcagctccattactccaacctccccagtcaccagaatcattcccagcacttgcattttgttcccaactcgagttcattgttgtgtcattttcccatgagctgccattctggataccttgctcttcaacattatcctcaaaggtgggtttaccatgggtcccatccggttcaggagataagcatacatcatctactgcattctcttctacaaggttagttcgtacgttctattcctaagtaattgtcgttacccttgttcctttttctt

SEQ ID NO: 58803 - DNA, 348 bp, Setaria italica
  Peptide Sequence Number=SeqID_124777
tagtgtgccttgtcgaggtgaatgtggcctacaagagttggggcagcttcagatgtttcatctaaatttatttgcttctgatgctcaatgctgatatcagtagcgcaatccgctagtgtgactctcctaagacaactttgtactgtaagagcagccctttccttgcaaaacttcttgggacaagagcagtcattcagaaataggataactttccgatctttcatatcatttttgtagccaaccttcgtctgaagtatctcctgttagggtaaaataatacgatgaacttgttaagcagtaacaagtacaaggtccatcagttaaaatgcaaagaaatatttattaact

SEQ ID NO: 58804 - DNA, 318 bp, Setaria italica
  Peptide Sequence Number=SeqID_124778
tgttaactacttgttactaagacttcgttgttttatttcttcgggaaaaagaaaaaaaaagaacactcgtgttgtttgcttcattcccgcgtggggccttggactattttatgtacaagtaagacagctataccccagtaactgctatatttacatacaaaattacagcagccgtggcgtccgtacgtttgttcagtcatctgatgtccataagacaggacgtgcgcacagagagctccaaaatcttggcattcgcaaaggcaaccatttaacagatggcgaccagctagcgagattcctgacaccacacctctcata

SEQ ID NO: 58805 - DNA, 313 bp, Setaria italica
  Peptide Sequence Number=SeqID_124779
aacgaaagaaggaatagacaacccaatttagtaacttactagacagaagtgagggatgaaaataacagtttatgtcgccaatctccaaataaatcatgatgcagtgtctatccggtcgtgctttcttttgttaggcctggagaaaaagcagaactgagcccaagtcttctttgtcttcgtcggttgtgaccttgtggctctcttggcacatgttcagtcatgtattgaacagcagcctgagctccctttaaagctacatctcttggtggcacttgtagagggttctcttctgcgcggagaacacggagacgct

SEQ ID NO: 58806 - DNA, 406 bp, Setaria italica
  Peptide Sequence Number=SeqID_124780
agctgaagtagggatcttccgggggttattcgaagttgagttggcctggcggaaaggagagtgagcaggtttatgaaacctgaccattttggtttgacagaagacagctgcagcattgttgaagggaaagctctgggcatcacatcttgttgacccatactcacaatggtagcaatcgaagaggatgcacccatttgtacttctgcagaagtgagggatgaaaataacagtttatgtcgccaatctccaaataaatcatgatgcagtgtctatccggtcgtgctttcttttgttaggcctggagaaaaaagcagaactgagcccaaagtcttctttgtacttacgtacggttagtagaaccttagtaggaactaactaacttaaggaacaaaacaaataaagtaaa

SEQ ID NO: 58807 - DNA, 460 bp, Setaria italica
  Peptide Sequence Number=SeqID_124781
ggccgagctgttgaactctctagagaccacaaacccaactgcacagttgaaaggctcagaatcgaaaaccttggtggtactgtcttcgatggctacctcaatggtcagctggctgtagcaagggcgatcggtgattggcacatgaaaggctccaaaggctctatatgccctcttacaccagaacctgagttccgggaggtcagacttaccgaggaagacgagttcttgatagtaggctgtgatggcctttgggatgtgatgagcagccagtgtgctgtgtccatggtaaggaaagagctgatggcacacaatgatccacaacggtgctcgcatgagcttgtccaggaagcgctgaggcgggactgttgtgataacctaactgtagttgtcgtgtgcttactacaagacaagaacccaaccccctacaaaatacgaaggtaacccaaaagaaattaaccaa

SEQ ID NO: 58808 - DNA, 272 bp, Setaria italica
  Peptide Sequence Number=SeqID_124782
tggtcaataataaatgcctaggatcaaaaaggaaaaagctcctgattataaaattatttcctttctatttttgaccttttggtaccgcacactacagacgtaatttttcacaagagagaaataattgtccattgttcctttgcccatgtccaatgaagtttaactgagtctcacattgcagatgtttactgttttgtttgcggaaaatttaggtgtttgatggtcatggtggtacagatgctgcctgttttgttcggaagaatatactgaag

SEQ ID NO: 58809 - DNA, 268 bp, Setaria italica
  Peptide Sequence Number=SeqID_124783
gtgctctctctctcatcacgaacagagtaacggaggtgccggagccatgagcgggggagtggagccggagaccccgccgggtagcagcaggagcggggcaccacgccggtgggcgggaagccgccgcggcaccacctcacgtccatccgccactgcgccagcagcgcccgcatcgcctcggcctccgcggaattcgtaagcaagcttgctaccaccctagctttgtgtcccagaacaaaacggatttaacgttttcccttctgttgtt

SEQ ID NO: 58810 - DNA, 330 bp, Setaria italica
  misc_feature (273)..(273): n is a, c, g, or t
  Peptide Sequence Number=SeqID_124784
tcgcttaatgcccctgaatatgcagttttcccaaatggggggagtaacttcagtattttgagttaagctttgctgtgaaaattgcctatgttcctttggtacattaaacagcatgtctgtctgatcaccaaagttatggtaaacatgattctgaacttcagtttccatattcgacatcttatttccagataggcttaagctagacagggttgccgcaatgtcagcaccatcatgattaagtgaagcaactgctgtagcttcaaccttttttancagaactcccatacgaactccaactggggaagcaagggcttggagttcttcggatca

SEQ ID NO: 58811 - DNA, 258 bp, Setaria italica
  Peptide Sequence Number=SeqID_124785
ggcggtgcagggaccggcacgtcgctagcgcgccggggtcgacggccacgatgaggaggtggtccagcagccgcgccgtgccctcgccgagccggaagctctcgaggaagaggtccaggagggagcccggcgccgcgtacgcctggttgatggacgtcaagatcaccgtcttgtcctccatcgacgcgttcttcagcagctgggaaagctctgcattcgcctcgtctccggcaccgttgccccacacggccatctcgg

SEQ ID NO: 58812 - DNA, 145 bp, Setaria italica
  Peptide Sequence Number=SeqID_124786
ttcttttccgaattctttttttttcttggtaattataactgtgtgtaccttaatattttcagggtttccgcaaggttcatgctgacagatgggagtttgctcatgaagatttcctgcgagatagcaagcatctgttgaagaggat

SEQ ID NO: 58813 - DNA, 336 bp, Setaria italica
  Peptide Sequence Number=SeqID_124787
cactcatggcacagtgttatattgcattcaagtgtgatttcttctctttattcaacctcctttttctagctctgatgtaggtggaatatgctctgcagctagctacatctccagactcttgttttgttttgcctcttcctggttcaagacatatcatggcagcatcattcagtggaatttcataaaacaccttgtagttgttaatctttcaacttaacattcttttgcaggcattcccttcttttacgaactgacagcagcctcatacaattcaaccgccaactgaagaggtgcaattacgacttagaagcttggaggaatctggtggagcctact

SEQ ID NO: 58814 - DNA, 255 bp, Setaria italica
  misc_feature (34)..(34): n is a, c, g, or t
  Peptide Sequence Number=SeqID_124788
ttcggcctcatggcaaggtcaggaactgaagatntgggaggctttacagaagcacagcttcaagagcttagggaaataaagccgaagaaaggcagcgcctagcggaacgtgctggcctccctgctgcgcgtgcagaggaagatcgtgagaacgatcaacgagagcatggacgatctcaccagccagcgcaaaagcatctggtaggaagaccggtaggaataaccgaagggaaggaagtaaggaccggacgacaac

SEQ ID NO: 58815 - DNA, 440 bp, Setaria italica
  Peptide Sequence Number=SeqID_124789
aaaagacctacccaacaatacttacaagttacctagaaccttgccatgaggctttacagaagcacagcttcaagagcttagggaaataaagccgaagaaaggcagcgcccagcggaacgtgctggcctccctgctgcgcgtgcagaggaagatcgtgagaacgatcaacgagagcatggacgatctcaccagccagcgcaaaagcatctggtggagccggtggataccgagggaggagtaggccggcgcacctgtacattgtccacttcttcttctgtataaaacgtcgcccaatagcattggtaatggtatgattgatatactatactgcttacttcgtatacttgctggtgactggtgagtacaatttgcctggaagactgcagtaacacgatgtatagatgtaaataatttgcatatgcacttaagcatcgcaattt

SEQ ID NO: 58816 - DNA, 224 bp, Setaria italica
  Peptide Sequence Number=SeqID_124790
aagaaagacttaggaaggaaatactaggtaggaagaccaacgaagacaaccgctagagcttcggagggctttgatatcatggatttggacgatggtattggatgggaactcctcacgtcgatggtccgttacaaagcgcggcaaaggatcagtgctgaggctgcattggcgcacccatacttcaaccgtgaaggccttcttggcctctctgtcatgcaaaacgt

SEQ ID NO: 58817 - DNA, 274 bp, Setaria italica
  Peptide Sequence Number=SeqID_124791
gtggaatttcataaaacaccttgtaagttagttaaatactttacaaacttaaacaattcttttgcaggcattcccttctttacgaactgacagcagcctcatacaattcaaccgccaactgaagaggtgcaattacgacttagaagcttggaggaatctggtggagccacgagcaaccgctgagcttcggaggggctttgatatcatggatttggacgatggtattggatgggaactcctcacgtcgatggtccgttacaaagcgcggcaaagg

SEQ ID NO: 58818 - DNA, 248 bp, Setaria italica
  Peptide Sequence Number=SeqID_124792
ggcgaggatacactttatggatttcgcgagagcaaagtgaaaggtaagggggctgaagaatattggattatttggcgttttgaaggcgaggatacactttatgatctaatgcaaagcaaggaattcccttacaatgtggagacaaagattcttggtggtgtccagaacttgccaaagggaataggaagagagaataagatcataaagtgtatcctcgccgatcatcgcaaccgcgcccatccatccat

SEQ ID NO: 58819 - DNA, 228 bp, Setaria italica
  Peptide Sequence Number=SeqID_124793
tttccgctagtcaaacattttgccttgcgaatgctgtttgtgctaatgattccactagaaaggttgttgaagctttaccaatacttggcaggtatgctgcaccagagcaatacatcatgagcacacaaacgccatctgctccttctgttccagttgcaactactttgtctccagtcctatggcagctgaatcttcctgacagatttgacatatatagcttgggcctta

SEQ ID NO: 58820 - DNA, 235 bp, Setaria italica
  Peptide Sequence Number=SeqID_124794
ggaccggctctggtcattctccatcttcgccgtgcaccccgtggccgccacggggcgccgatcggcgacgacgctaccgctgccgcatcagagtcgcagttctattgctacggcacgcgcgaagcagaggcggcggcggcagctcaggtgctcgcgcctgagcagcctggccgcattcagaaggcggtggccgcgacggcgacgagcagcgccgcgccgccgagcgcgtctgtcg

SEQ ID NO: 58821 - DNA, 236 bp, Setaria italica
  Peptide Sequence Number=SeqID_124795
atgatcaggaccaatatcctgccatttcgagactggctcaggtacaatctccacaagatcacgcagctcaacagtctcattagcaattttctgtaagaaggtagacttccccacgctgatgtttccctcaacacaaaaggtgattctcttgttcttggtcgattgcatgtcaggcaccttactctcctctttcagttcccgaacaacattgtctttcacgaaggatgttatgctct

SEQ ID NO: 58822 - DNA, 205 bp, Setaria italica
  Peptide Sequence Number=SeqID_124796
aaaccaaagaagtcataaatagctcagctccattccattcaaccaattagcttcatgaacagcacgaacaaagaccattcgatcactgaagatgctccgttctaccaatctgagcggctttattcctccagaggactcctctttcagttcccgaacaacattgtctttcacgaaggatgttatgctctctgcatggctcttatga

SEQ ID NO: 58823 - DNA, 390 bp, Setaria italica
  Peptide Sequence Number=SeqID_124797
tgtttgttctattgtcttgcttagttggttatgatgttcaagccgccttgatttggagcgcttgtccaatatttgtgtatttgcttttcaaacccttctatgttgttgtatgctgatctcagtcttgtctgtcttgcttcaggatatgctctaagttctgtagaagggcgagtttctatggagttctttgatctatctgagtctgcgcaatctaaaaagtatgctttcaagtgtcaccggaaatctgaggctgggagggacactgtttatcctgttaatgcaattgccttccatccgatatatggaacatttgccactggaggttgtgatggatttgtgaatgtgtgggatggcattaacaagaaaagactatatcagtactcaaagtac

SEQ ID NO: 58824 - DNA, 304 bp, Setaria italica
  Peptide Sequence Number=SeqID_124798
tatttattagtttaggtcctattctaaacctagttctagtcgtattcttggcagctgatggccgtcatctacaactatgctgggcagctcctcagggccaaccgacctgctgttggcgaccgctggctcacccccactctccaggctttcatgccggactgggcggagcagcagaccctgcaaccgcaccaagtagctttgccccaccggctgtgacctcacatatctagtcgctgaagttgctgttgttacatcgctggcactggcagatggatggtctggctcgctggtcgaccggagattg

SEQ ID NO: 58825 - DNA, 213 bp, Setaria italica
  Peptide Sequence Number=SeqID_124799
taggacattcactgcagtccgttggaacagctttcagcctgaattttggaagttcttgaatcagtgcctcaactgcttctctctgcacaaaaagaaaaggacccctcaaaaattcaaaagtgcataatccatccaaaggaaaattcgattctaacttaatgctagcatacaaaatagcagatataagatgagttaattgatactatatgatgt

SEQ ID NO: 58826 - DNA, 366 bp, Setaria italica
  Peptide Sequence Number=SeqID_124800
aacccctcctctccgatcttcttccctcttcttccttcttgtctagttctttatttgtcccttcccttgttcttcgcattgaggggcaacaaagaatagcgagtgcttgtggcctgctgttgctgttgttgtatggtcgtcggtgggcacgatgaccatggagcacggcgaggattgctgcgtcagggtggcggtccacgtgcggccgctcatcggcgacgagaagctgcagggatgtaaggactgcgtcgccgtcgtgccgggcaagccgcaggtccagatcggcagccactccttcaccttcgaccatgtgtacggcagcaccggcacgccgtcggcggccatgttcgacgagtgcgtggcgcc

SEQ ID NO: 58827 - DNA, 456 bp, Setaria italica
  Peptide Sequence Number=SeqID_124801
cagaaactactacattatccttccatactactacaaatatattgtcaatactgattttttagtgacattgcaaattaacagtcatataatcagtgatttattctaacgtcagtttcattgatttaactgcaaaaaggacatacaaatgccttgcttgggttatactgacctgacttgaatctgtctttttctcctgcagcttgcataagtccagcagacattaatgctgaagagacattaaacactttgaaatatgctaacagggcacgtaatatccagaacaaaccaattgtgagttcattacttaatgtctcatcagaaacatatctgacatgttcttagattgtttgcttatccaggatgctaatttctcttcttagttgatatctgatgtgttgtttacgatgaattttcaggtcaacagaaatcctgttgcagatgaaatgaaaaggatgc

SEQ ID NO: 58828 - DNA, 243 bp, Setaria italica
  Peptide Sequence Number=SeqID_124802
cattcttcgacatagtgaatcgcggagaagggaaatggagaagcagctaaagcaaagagagcagacagctccaatggccactacacctccggtgtgatttctctcagcagcatacgtgaaagaaactctgcttataatttgcttcaaccaatgtcaacttggaatcactatttaggtgaaaaatcattgcccgttctaggaaacaacagatgggcacactaatataacactgactcaccttat

SEQ ID NO: 58829 - DNA, 276 bp, Setaria italica
  misc_feature (180)..(180): n is a, c, g, or t
  Peptide Sequence Number=SeqID_124803
taactaagactaggaatacgaactagaaagtagacaatagtacaagtaactcagaaggaaatgactgcatgccttgagcaaggttccctgagtcgcgcaactggaagtaccaacatgaacaaccagtcaagtcgttcccatgccatcttcacaatcacattggagcagatgcgcaaaacngatcccatcatgactgcagatggaatgcccattgaagaatgaatgaagactatctctgtgccaaacttcatttagtagatcttgctggatcagaac

SEQ ID NO: 58830 - DNA, 241 bp, Setaria italica
  misc_feature (212)..(212): n is a, c, g, or t
  Peptide Sequence Number=SeqID_124804
gttgccgttcctgcacagaagcagctcaagtactctgctggaattgtaaatagccccagcaaagggattgctgcattcaacaaagagcaacttaaggttctatccaatatctcattgcctgtgatcatcatcgctgtatcttatctatctaatatcttcactgacaattttgaatgcagatggttcctatagcacagttgtctgtggggaanaagtttcaatagcagggcaatcaggaaac

SEQ ID NO: 58831 - DNA, 262 bp, Setaria italica
  Peptide Sequence Number=SeqID_124805
agattgttggctgaagttgaaagcctaaatgctgatggtcagacccataaactgcgagatgcccaactgcagaaactaaaatcccttgaagcacagattctagatcttaagaaaaagcaggagaaccaagttcagcttttgaaggaaaagcaaaagagtgatgaagctgctaagaaactgcaagaagaaattcattttattaaggcacaaaaggttacaacttactaactactaaaattctaaactaggtaagttcttagtt

SEQ ID NO: 58832 - DNA, 238 bp, Setaria italica
  misc_feature (1)..(44): n is a, c, g, or t
  misc_feature (201)..(201): n is a, c, g, or t
  Peptide Sequence Number=SeqID_124806
nnnnnnnnnnnnnnnnnnnnnnnnnnnnnnnnnnnnnnnnnnnnaatttgttatttgttctgcttgagcacttgatagaaaattccttgatattctgttactatatttacttgtttcaatgaaccttatactctggtttcgccatgtaatagtcgttcccatgccatcttcacaatcacattggagcagatgcgcaaaacngatcccatcatgactgcagatggaatgcccattgaag

SEQ ID NO: 58833 - DNA, 182 bp, Setaria italica
  Peptide Sequence Number=SeqID_124807
ggcgccacgcactcgtcgaacatggccgccgacggcgtgccggtgctgccgtacacatggtcgaaggtgaaggagtggcgccgctggtggacggcctgttccagggctacaacgccaccgtgctcgcatacggccagacgtggggtcggggaagacctacaccagtggggactgcctgcgaa

SEQ ID NO: 58834 - DNA, 335 bp, Setaria italica
  Peptide Sequence Number=SeqID_124808
taggtacggtactaaaaatttttactttagtactttgcgttggaaggagggctggcttttctgttgctggcattgtgcaatgcatccggtgggagctgcctgttagccggccatgagtttctccttgtaattgaaggggcagagctggagcccaaggaatcagtggggtatctgccatcacttacagtctctgttcaattatataatccataatgttagtaaagaacatttgttgtctgatcacctctaatccagacaactaaatccaacaaatgtatgcagtgcatatctaaaataagttcaaaaaaccgaataatttcttcacaaaaaaaaat

SEQ ID NO: 58835 - DNA, 244 bp, Setaria italica
  Peptide Sequence Number=SeqID_124809
cagacttcctcatccacgtctgggatctccctccacgcctcgatcatccgattcatggactcacgcacaatctttaccttatcaaatctcttggcttcgaagacggtaatgcaggaggatttgtgggagataaggtcgtctccgtgttcgagggccaacaaggcgagcgcctcggcggcagccttcctcgcggcccagtcatcgccggtgagcgcgtcgcgaaggctgggcacagcggtggatg

SEQ ID NO: 58836 - DNA, 477 bp, Setaria italica
  Peptide Sequence Number=SeqID_124810
acgatttggtggggcgctgcttagtcaggtgaagtgccttgtgtgcaagggagagtcaaacaagacagacgagataatggatatcagtcttgatctacctgggagcagttctgttgctgatgcccttgctcgcttctttcagccggagatcttggagggtgcgaacaaatatagttgcgaaagatgcaaaaagctcacctcagcacgtaagcaaatgtttatactcaggtcacctaaggtgcttgtcatacaactcaagaggtttgaggggataaatggtggaaagataaacaggaatatagaattcaaggaggctcttgttctttctgacttcatgtataataaaaaccaggtaaaacatgaaattttgattgcttaatatttggattttgcttaggcatgcaaaatttgagaatgcagatgtatctgtgaaacttatttattcatccatagtaggttgctcattgagatgaaacc

SEQ ID NO: 58837 - DNA, 396 bp, Setaria italica
  Peptide Sequence Number=SeqID_124811
tagtaatttgtctattcaggtccacttatcaagccgattcactttaagaatagtgtgacagaaaaggttaagtcaaatggcaaagaaaacctcccttcaaaaatgaacccagaagttaatgagagtgctacactgtcagtatcaaatgggcgcatgactggaaaatttgtggaacccagtaaaaagagtgccgatggtactatttcttgtggaaagattgatgatcattcagaaagaaaattgcaggatgcaaatggaaatggccatccaattcattcccagtatcttggtgaggcaagtaatggcaaggatagagcacactcgaaacgccaacttgaagaagacaagtttaaggaagagcttgctgagtcagcttcttctgagcttcggctgtct

SEQ ID NO: 58838 - DNA, 375 bp, Setaria italica
  Peptide Sequence Number=SeqID_124812
tctaagtatttgtctattctaggttcctactttattctaagtccgtatttctacttttaagaattagttgtgacagaaaaggttaagtcaaatggcaaagaaaacctcccttcaaaaatgaacccagaagttaatgagagtgctacactgtcagtatcaaatgggcgcatgactggaaaatttgtggaacccagtaaaaagagtgccgatggtactatttcttgtggaaagattgatgatcattcagaaagaaaattgcaggatgcaaatggaaatggccatccaattcattcccagtatcttggtgaggcaagtaatggtaataccacatgtgctcaacagtattctgagaaatcatctggtgcccttgccctc

SEQ ID NO: 58839 - DNA, 377 bp, Setaria italica
  misc_feature (364)..(364): n is a, c, g, or t
  Peptide Sequence Number=SeqID_124813
aaccgaacgaccgaccctactactactacaatttgcacccgcctctgcttctccatctcgttcacgccggcggaggaccctctcccactcgtgctcatcgttcccctcgccgtcagttgctccaccaccgggctcctccgcagcttctggtggtacaccctagatctgttgtatttttttttcctgcgtggcgcggatctttggtgcgaagctgggatttatgcatctcgtttcctttgcttgttaattgttgtttgagctgcgacaccctcaaccaggccttctctggcatggtttgcgcaacctttgatgttcttgctgcttgtcctgctgcgttgcgttgttcaactgcctgaaattaacntgttgtacggctt

SEQ ID NO: 58840 - DNA, 240 bp, Setaria italica
  Peptide Sequence Number=SeqID_124814
cggtttcatttcatgcatggatgatgcgttttctgtttttttttattgcagttgctattgagttagcactgaataagacactaggtttacccgagcatcattgtgcagtttccaagatggctcgccgaggattgatggaacaggacttaagcaagcttgatgtgacaaagcttcacccattgtcacctgaagttatctcacgccaagcgaccattaacattggtactatcggccatgtgg

SEQ ID NO: 58841 - DNA, 195 bp, Setaria italica
  Peptide Sequence Number=SeqID_124815
acgctaatgcaaaaatctacaaatgtgaggacgacagatgtccgcgaccgatgtgctacaaggcctacggaagcggaaaagaagacagccctcactgtgatgtgcctgggtttgaaaacactaggatgaagctcctgagacatgtttcttttgttgattgcccggtatggtgaacccttaagctttttgctccta

SEQ ID NO: 58842 - DNA, 295 bp, Setaria italica
  Peptide Sequence Number=SeqID_124816
gcggagacggggcgctggccttgggggcgggcagcattcttcgtcggagcaggggccggggccatcttggcgggcgcgggcgcgggggtgggagccatggtcggggcagccttgggtagcaggttcgctggcgccgaggcgggggcgccgtcggggctaggcgacggcgccgtggcggcgaaggcgaccgctgccaggacggcgaagaggatggcagagagagcggagcgtgaggccgacattggtccgcccggactaaaaacgtttcggccccggggttccggccgttgggtta

SEQ ID NO: 58843 - DNA, 225 bp, Setaria italica
  Peptide Sequence Number=SeqID_124817
cggggcagccttgggtagcaggttcgctggcgccgaggcgggggcgccgtcggggctaggcgacggcgccgtggcggcgaaggcgaccgctgccaggacggcgaagaggatggcagagagagcggagcgtgaggccgacattgtcgccgcaaattgccggtcgctgtgacgggcggaggcggctggtggagttgtcgtcgctggtctgtctgtgccttgagcttg

SEQ ID NO: 58844 - DNA, 440 bp, Setaria italica
  misc_feature (104)..(104): n is a, c, g, or t
  Peptide Sequence Number=SeqID_124818
ccttcctagcggcgacggacagggcgagcgccgccgccctcgcccagttcttcgtcgggtgcttcgccggcgacgagcatccgacagtcctgcactgggtccgntcctgaactcaggtgggatccggagaaatctggggaatacttttcaggagcatgtgatcctgagcaacggtgggtacagtcagaaatgtcttccgttgggagcagcagtggcaccagggcgacgaatggtgccgctgccatcagtgctgccgcgacggcagcaggttcggccgacgccagattccactcccaactactacagcaggacaggacagagatcactgatcctttgaaatttcattgctgagctagtacccatacattttatttctgtttctagcaacagtatcgttgctttggtacttaattattgttgtctttccgttacttattaaa

SEQ ID NO: 58845 - DNA, 429 bp, Setaria italica
  Peptide Sequence Number=SeqID_124819
tttattattagttcttaacttttctttttcggttccttagttcttagttcttatttctttgttctttcttaatttcttactttggtacctaggtcttctagtcagacatttccacataacagcgggagagttagtgtctccagggagaagcaagatgctgatgaaattgaagcttacagagcctcatttgggtttagtgcagatgaaatcgtccaaactcagtcttatgtggagataccagatgcgcttgacgagtcattcagtatatcaccatttggaaacattgctcctgctactgagatctgcgcatttaatgatctgcctaatgaggctcagaaggtggataaatcatttgtctatgtgaaagatggcacaagtccaaagaatcagcaaaccagctctccattgattctccaaataagtgctgca

SEQ ID NO: 58846 - DNA, 276 bp, Setaria italica
  Peptide Sequence Number=SeqID_124820
tcttttacccttgtaaagtccctttgttagtctagtccttctattattcaccttgcttcagcaaccccgaggactggtctctcctcaccaatacctgagcaagaggttcctactgcccattggaagacctctaggtcagcctgtgacacaccatacttcagggcttcacccattcctgagcaagaagccactgcgcagtggaagacgtctagatcggcttgtgacacaccatatgccaggacctcaccagccaatattttcgggttggattcatct

SEQ ID NO: 58847 - DNA, 186 bp, Setaria italica
  Peptide Sequence Number=SeqID_124821
ttgaacatcaagagcaaaagaactgaatcaaaggatgaagagctgcatctgacaagcaaccattccagttcggttgtttacaattgctgttggagtcatgtgggtgatgggtgctgctgctcttcaaaagtatattggtagcttaggtggaattggggcatctggtgttggttctagctcatcgta

SEQ ID NO: 58848 - DNA, 282 bp, Setaria italica
  Peptide Sequence Number=SeqID_124822
gagacatgccccctcgcataggggtcgcgcttcctgtcccgcgccgaggaggtggacgaggagcggggaggcggtgacgattgcgaaacggaaggcgcgggtcttgcgggggcgcctggttcccgggtcttgttgggcgggcgcggggcgtcgtcgtcctcgacggcgtggtgttagttcttggctggcgtcttcgtcctcgcgcggcgcggggttcaggcggaggtgaggtcattggagttctctctccagtttcttcgatttgagttgcctctttggaga

SEQ ID NO: 58849 - DNA, 291 bp, Setaria italica
  Peptide Sequence Number=SeqID_124823
tctttagttcttctacagattcgtcaggatggggtgagctgctccattctgtttcactgtggtgagttgtggaattttcatcagattctttcctgatctccacaaacttttggatctctgcaatatagcagcaatttgttattggaaaaacactcagctggggcaaagaagattttcttaggaagaaaaaaaacaagcttttgtacgagaataaaaggaagatttaagcaggtcatcaaaaatatacttatggattataccgtggcgtgattactgctatggttagctagc

SEQ ID NO: 58850 - DNA, 244 bp, Setaria italica
  Peptide Sequence Number=SeqID_124824
ctggaacagtcgttgagacaacatcaagctcagctttgcagagggggcacagtgcatttatcttgagccacttgtcgacacagtccttgtggaagaagtgcccacatgggagcaaccgaagttcgtcattgtccacataccttgccaagcagatacagcaaacctgccgaacaaaaggcgcaattcagttttgcattatgcggaaggggagaaatagttgtgaagttaacattagtgcagaaaa

SEQ ID NO: 58851 - DNA, 287 bp, Setaria italica
  Peptide Sequence Number=SeqID_124825
ttgttcttattttttattttctttttgtttagtttccttacttttgtttcgttacttacttagtttcctttgttggtaagtaagtgcccacatgggagcaaccgaagttcgtcattgtccacataccttgccaagcagatacagcaaacagcatcttcggcagaaacaactcgttccttgtctgttccagcagccaagacgccacccccaccttcatttccctccccgttgcgaggcttcttcagtttaaacttgtatgtgcccaaggcattgatagcatctgaact

SEQ ID NO: 58852 - DNA, 240 bp, Setaria italica
  Peptide Sequence Number=SeqID_124826
ctgaatgtgaggaaggctatacacaacctgaaaacatgagtacaccatgaaacatctaaataagttgcaacgatacagcatcatggcgggctagtactgcacctgtacaagttaggcgcgtcatgggcagaagaatgtccaccaaatacccagacatttcccacaacaaaccacacagcgaagaaacagtccagagccatcttgaagtgatcagcgaaagcttgggcccttgtatttgca

SEQ ID NO: 58853 - DNA, 341 bp, Setaria italica
  Peptide Sequence Number=SeqID_124827
atttctgcaataactcaacgagatcatacacgctatttgtgtagagatccggatagatgttattcgaagcgtcctggcagttctggtaaggaagtacaaccagacaaaacaaggagggtcttgcaaccagtactctggccaaatagtatgtcggtgtccagtctatcacccaccatgcacatccttgatgtttccagactgaagctgcagcagttgaaacagcagggatttcatcactgtccccatcatcactttaataggcttcccttttttccccactcagagaaagaataaaaacatgctcttttgatggcaaattaaattggttattgttttcttct

SEQ ID NO: 58854 - DNA, 383 bp, Setaria italica
  misc_feature (285)..(285): n is a, c, g, or t
  Peptide Sequence Number=SeqID_124828
taatgaaaaaaagtaaaagtgttgattgatacaagacgtagcagagcaacaaagataagattatagacaccacggttagagcagtaactgcattttgtaataattgaagtactgatcaagtccaacaacaacagctccaacttttgtcatgttcaaagtagaagtctgcctccaactttatgttttttcttgccatcctccggaccaccaaaacattcaaaaccagctaacttgagctcttccaaaattccgtcttctccaacaacataaaccttcttttctggnggaaaattatttaactttaagaacatggctgccgcaaatgatgatgtaaaaatctcttcctcagtaacttcaagtcccagtgatctgaatttctttga

SEQ ID NO: 58855 - DNA, 411 bp, Setaria italica
  Peptide Sequence Number=SeqID_124829
gagatccggatagatgttattcgaagcgcctgcagttctggtaaggaagtacaaccagacaaacaaggaggtcttgcaaccagtactctggccaaatagtatgtcggtgtccagtctatcacccaccatgcacatccttgatgtttccagactgaagcttttcaaaaggaagtccatcaaaaaaggttgaaggttttccaacaacaatgggctctttctgtactgaacaacttactgcagcaaccatagttccagctcctggccattcttgggcagatgtcatatgtccagttggatcacgattggtcgcaatgaaaaggcagcctggattctcactgatacatattcttgcatacctacaagaacattactatgacttgatcatcgcaaaactcatgatataaaagataa

SEQ ID NO: 58856 - DNA, 471 bp, Setaria italica
  Peptide Sequence Number=SeqID_124830
aatatcattattcaaaccatggtaaatagctagtaaaatggatagtaatgtttcaatacaagtaaatgtttcaatacagtaaatagctactccagatagtaatgtttacttgataaatagcttcaacgcgggtgttgccgcccaggagcagaaaagaagcacacactgcactactccagatagtaatgtttcaatacaagtaaatagctagtaaaaatggatatacagtaaaagtgagttgcaaataatttcagcaaacctatcttcaatggatgaagaaatatgtttgtttaggataaaaacaactttaagcatgaggtgtttacagttgatttgagagaaatactaaaaaatgacaagctggaactaatataactgaaacctatgctatgtggaaaatccagttgtgtgaaaccattatatatttatgtatcatatatactgtaggaaatatcattgtaaaaaactaca

SEQ ID NO: 58857 - DNA, 231 bp, Setaria italica
  Peptide Sequence Number=SeqID_124831
gtctacttcttgtaaacttgtcgtttcaggtttgaaaaggaactctcgctctgaccatcgagtgcctcttgctcattgcagaactgtctgctataactgagatgaacttgttctttccagatatttgataaatagcttcaacgcgggtgttgccgcccaggagcagaaaagaagcacacactgcacatcacaataaacagtgccatagtctgtaacttgtggaacttttat

SEQ ID NO: 58858 - DNA, 294 bp, Setaria italica
  Peptide Sequence Number=SeqID_124832
aatccctgatcatggtcaccactgcatagcttgatacttcctttggaatattgttgtttgaatagtcctttttttggatgatgaagagctctaaattctaaaacagtaaaactgctcatttacaggctgtcttaggtggaacggtctcggtaccaaccctcactggaaatgttacagtcaaggttcgccaaggtacccaaccaggagagaaggtcgtccttcggggcaaaggaataaaagcgaaaaactcatcggtgtttgggaatcagtatgttcacttcaacaatcaaggaa

SEQ ID NO: 58859 - DNA, 420 bp, Setaria italica
  Peptide Sequence Number=SeqID_124833
agtacgacaactaagtcttttttcaccagtacattcatgtaaatttggttattcggtatttcaatgttagtttctgcagcaagttgaacatcataaaatctcgtttgtcatgagccttggtcattgccttgaaatgttatgcaacatgcctgtcgcaatacctatatatgtggtttatcacttgtgattatgttttcccttcttggtggcttaacttcttttgctttccaaaaaccgatttgtagaatttttgcaagacttgcaaaggagaacaggtagtgaaggggaaaatgtcagtcaagctagacataatggcaggaattgatgataatgacatcatgaaggtttttgggaagggtggtgcagatgttgagcgcaataagcctggtgacctttatgttactatcaaggtcagagaag

SEQ ID NO: 58860 - DNA, 162 bp, Setaria italica
  misc_feature (4)..(4): n is a, c, g, or t
  misc_feature (9)..(9): n is a, c, g, or t
  misc_feature (22)..(22): n is a, c, g, or t
  Peptide Sequence Number=SeqID_124834
aacnggtanatttcatgaaatntacctgttccattgcacagggaacaggtacattcaagagaaaaaattgtgaagaatttttgcaagacttgcaaaggagaacaggtagtgaaggggaaaatgtcagtcaagctagacatgatgtcattatcatcaattcct

SEQ ID NO: 58861 - DNA, 444 bp, Setaria italica
  Peptide Sequence Number=SeqID_124835
gatgatggcacatctgatgctgggacaaattggttaatgttttgagttgctatggagagatttcttcaggtatgtgtctcttaccctctgtgtttgagatgactaactgagctgagtgcccatgtctcgtagaggatatgaaataaccaacacaaagtgtgaactctaaagacaatactgtgagtcatcatgtatgcatgagtattcattccatgcttgcatatgaaattcaaatactgcatcatagtatcatactattgaatcagattatcagttagcacaaatattcgttatgcacaaagtgatatcccagcattatcttgtaaatcctgtgcaaacttgtagtacagagacaataaaatgcttcttggactcatttcatctgcatcttaaactgaagttcaattgtttcaccagttagaaaatatgttatatagtgcagct

SEQ ID NO: 58862 - DNA, 279 bp, Setaria italica
  Peptide Sequence Number=SeqID_124836
caggcgatgcgcgacgccatcgaggggatgaacggcaaggagctcgacggccgcagcatcaccgtcaacgaggcccagtcccgcggcggcccgcgctccgccgccgcacgctcgtctggttccgggccgacctcagactccacgaccacgagccgttccacgccgcggccggggcgtcgtcctccctcctccccgtcttcgtctttgacccgcgggacttcggcaagtcgccctcggggttcgaccgcaccggcccgtaccgcgccaacttcctgctcg

SEQ ID NO: 58863 - DNA, 275 bp, Setaria italica
  misc_feature (72)..(72): n is a, c, g, or t
  Peptide Sequence Number=SeqID_124837
tcgtacttcggcaagaagctggatccggagccgggccgttgccggcgtacagacggcaagaagtggcggtgntccaaggaggccgccccggactccaagtactgcgagcgccacatgcaccgcggccgcaaccgttcaagaaagcctgtggaaacgcagctcgtgcccccgtcccagccgccggccaccgcggccgcggccgtctccgccgcggcgccccttgccgtcaccaccaacggcagcggcttccagaaccactctctttacccggccat

SEQ ID NO: 58864 - DNA, 256 bp, Setaria italica
  Peptide Sequence Number=SeqID_124838
caatcgctgtacccggcggtcctcgccggaaacggcggccgtgcaggcggcggcggcggtggcggaggtggcctcgcgactggcacgttcggcctggggtccaccgctcagctgcacatggacagtgccgccgcttacgcgaccgctactggtggagggagcaaagatctcaggtgcgtttctgcaacctctgtcacatactcaaactgtttagtgccagtattagtttttagctcctgatcggtgtcagacggta

SEQ ID NO: 58865 - DNA, 241 bp, Setaria italica
  Peptide Sequence Number=SeqID_124839
caaacaaatatttgtgattagccttttattcaaccatactacaaacaaaacatatctcttaatctgctaaaaatggatccttgcagaagctaaaacacgaccaagcgaactgcttttgctcaggcaatcagaactgctgacactggagaagcaaaggatatgattttcgagccccagtgtttgcttcagaataactggctgcagcaatgcttaaccgcttccatgactcagctttcccttt

SEQ ID NO: 58866 - DNA, 483 bp, Setaria italica
  Peptide Sequence Number=SeqID_124840
tggtattgactttccttcaatgcggacgccggcgacaagaacgattacgactggcttctgacaccaccaggaactccacttttcccttctctagatgttgagtcgaaaaggtccccagcgagccaagttggaacgccaaagactcgtccaactgccttaaaatcaagggtgggttatctgaacataagctacaccttggttcttaggagtacaagattattgcattcaatacttctaagtagcacatgtaaattcagcgagatttcacctcttggtggataggaaatgatactttctagagagtaacgtcacaggatattttttaggtcatttcagattctgtatgacacgtaagctccccaaaaatgacacattgtctgctgggcctaccataacagtaacctcaaagataccattttatattttttagttaaaagttaaaaaaaaaaaaaaaaaaaaaaaacaaaaaaaaaaaaaaaaaaa

SEQ ID NO: 58867 - DNA, 251 bp, Setaria italica
  Peptide Sequence Number=SeqID_124841
ggtaaataagaatgctttgttatatgaaaactccaatatgttacactcattgcatgcataattctcatgtttggctttttctccgttagtacgcattatcagtgtcttgcatctcattcatgacatttcacgtaggcatcgctgctgacgatgtggtgtacaagatcgtggctgtggagcatccaaaggacccggcccatggtccggaagggccaaaggccttgaaagtaataacaccgtagttgaaacgg

SEQ ID NO: 58868 - DNA, 205 bp, Setaria italica
  Peptide Sequence Number=SeqID_124842
acccgttcgcgaatgcgccagcagcgtcatctcctattctacaccaagctgcacgtgcccacttggtgcttggcatcgctgctgacgatgtggtgtacaagatcgtggctgtggagcatccaaaggcccggccatggtccggaagggccaaaggccttgaagtatacaccgtagttgaaaggccagccccgtggcatgaccccta

SEQ ID NO: 58869 - DNA, 402 bp, Setaria italica
  Peptide Sequence Number=SeqID_124843
aagctttgagctggcatcatcatactccttgcgaacacgagaagcctctgataaatccacaggggtcttgaaaaagttgaatttttgaagaacattttgtacagtctgctgaattttgttcatccacgaggaatgttctgatgcagttaaatcttccggtcatcatcagatttataagattcaacatgctcatcatgatcatcaacatattcatcttctgattcatgatcgaactcttcatcgtcatatttatgcctgtcgtcctcaatttctgaatgataaccaacataattttcttcggcgggttctggtatttctgattcatcttcaagtgattcttctgctggttctggtatttcaggttcatcttcatgtcccttatcttctttactaacctcattt

SEQ ID NO: 58870 - DNA, 238 bp, Setaria italica
  Peptide Sequence Number=SeqID_124844
gttttgcagctccttcagtttctcctcaacgcaaaagtgcgggagttgacaatacagccacatactcgcatcggctaggctcatcaacatcattaagctcattgctcagcccacatcttaagtccttaacttttctaggtctttcggttcttgggtccgtttcctagtctattcggttccccgtttgaaaactgcataactcggtatgattctttctaaatttgtccctaacgtccct

SEQ ID NO: 58871 - DNA, 416 bp, Setaria italica
  Peptide Sequence Number=SeqID_124845
aataatcttaagcgggttacgtataatggatcgattgttattgcattgagcctctcggctggtacatattaagtacaagattgtggggcaagactcctccagatacatatggcagtctacaacacgtatatctacaactaccaaatatactctaacacttcgtttttgagattcttattgtatataaagttggcagcacgccatgttgatagtcctgttggaacaatatccatgaatttatcaccatttaatagcagatgcatgcaagtagagtgtcactccatcagctttcaaccactttagattcaagggagatctttctgtaaatcacactgtggactctacatgttgtggttattatttcactcatcacatttggtcagaactctaaagttcattatagtgcacgagcccat

SEQ ID NO: 58872 - DNA, 356 bp, Setaria italica
  misc_feature (20)..(20): n is a, c, g, or t
  Peptide Sequence Number=SeqID_124846
aattacacatatactagacngaaaaaaatcatagagctgaggaaggaaggatcagagccaacacaagaactcaccaacagtgaaggaactgaacatcttctccagtgctagggagagctcttttgtagttgttgtacatcttaaggtctaccttcctgaggtatggcgcaccatccatgctaaccttgacatagaggcaaccctggttcatcgccatggtgttctttctgtaactgcggattggtggccatcctaccacctgtgcctttgccgccggcgcctgcgccttcttcttgtcctcctcgtcgtccctccgccggcgccttgccccttgccgccgactcccgctgtacgat

SEQ ID NO: 58873 - DNA, 166 bp, Setaria italica
  Peptide Sequence Number=SeqID_124847
atccctggaggagaaggtgcagcggctgctcaagacatgggagatggagctcgtccacaaggtccgccccgaggaccagaagaccgtcaactccgaaaagtactccgccagcaacaacggtgagaatgtgagattcatgagatcgatcacgcttccattgccggct

SEQ ID NO: 58874 - DNA, 155 bp, Setaria italica
  Peptide Sequence Number=SeqID_124848
gagcataccagcttgacaaaacagtgatgcctcttctgtggaattcatagtttttgcttccttgtagagctggtaccagtgctccgccacctccgctcccagcacggcaccggtgatcgccccgaacccggtcgccagcaagacgccgtgcggcg

SEQ ID NO: 58875 - DNA, 248 bp, Setaria italica
  Peptide Sequence Number=SeqID_124849
caacggccgcaacgaggtgcagtcgctcggcctcaagttcgaccgcctcatggcgctccccgccgcctgcaagctcgccaacgccaacgtcacgctctgcatcaacctgctgaacctgaagcctggctcgccggactacgccctcttcgccaacgcctcccacagtgagtgctctcaactctgaacccatccgtctcgccacttggccagtctctaccactctgtgacaacaaatagaaataacgaac

SEQ ID NO: 58876 - DNA, 375 bp, Setaria italica
  Peptide Sequence Number=SeqID_124850
agtcgcactagtccgtctcgccacttggccagtctctaccactctgtgcacaatgatcgccgtcgctcttctcatgcagtcacgccatcagccggcggcactccggcgagcgacagcaccgccggcagcggcttcagcctccagaccgggatccgcggcagcatcgcggccgccgtagtctccgcggtgctctcatccgtgttctgatccctcggcctcgggcaagcaccggtttttagtttttaccatgtggattcgtcctcagtcatgcttctctagtccttgtctattttgtatccgttcccaccacataaaaatggagttgagctgaacctttttttcccttaaattctctcgctggatcctgttgcatga

SEQ ID NO: 58877 - DNA, 219 bp, Setaria italica
  Peptide Sequence Number=SeqID_124851
agtgcctctgctacatcatccagcaggtgcacaacggccgcaacgaggtgcagtcgctcggcctcaagttcgaccgcctcatggcgctccccgccgcctgcaagctcgccaacgccaacgtcacgctctgcatcagtgagtactagcactagtagcttctctcttgcctagactggatcggagtagtagctatcctttgcctgctgacctgagagcatg

SEQ ID NO: 58878 - DNA, 457 bp, Setaria italica
  Peptide Sequence Number=SeqID_124852
agcatcagccacatcacggacatctactatgtgccacagtttgttgttcatcacatcaggaccaccttttataacatagatgaggaatttgctgctggtattcaccacaggctgcaacagagggccaaaaaccaaaggcgggcaaagtgtaacaacattcagtccatttttatctgcatattccaaggctgcctgttcagccataatcttggcaacagagtaccagtccccattttccttgcagaactctttgtctgaccagcaactctcatccttgagtgtatcttgaggccaagtcgggttaaaaatccacagcagcattggaggacacgacaacaagtttctgatcctgagtcagaagtactcgaccctgactagtagaaaaggtaaccttaaaatagtaatttaaaaaggttaacttaagtaacttaacttaagttaacttaagttaacttaa

SEQ ID NO: 58879 - DNA, 373 bp, Setaria italica
  misc_feature (140)..(140): n is a, c, g, or t
  misc_feature (188)..(188): n is a, c, g, or t
  Peptide Sequence Number=SeqID_124853
agcgtctcctccacgtgtccttggttcccagcccaggtccatgagcttctggcatgttagcgatgctttctgatcgacatcaaggatgttatttacgcagttgtactgtgggtataacttcttcaacaaggccaccaaanccttggtgcgaatgtgattcggcgagcagatgtatctcccagatgacnctttcttctcgtacagcagaagcagagcatcagccacatcacggacatctactatgtgccacagtttgttgttcatcacatcaggaccaccttttataacatagatgaggaatttgactagactaggtaattacaaccaacaaggactagacaaacaagaagggaccaaaaaaccaaaggacgga

SEQ ID NO: 58880 - DNA, 332 bp, Setaria italica
  misc_feature (2)..(2): n is a, c, g, or t
  Peptide Sequence Number=SeqID_124854
cntttttagttttttttttttcttaaaaaaattttagtgacagagcagttgcagattaggcaaacttcaattcagaaccgaaaaaccttcatgttacttcagggagttcacataaaccaaacagagcctccctaatatttacatactaccatgtctaaccttttccactgctccaaacaaggcgcaagcagaaacgcggctgaactgaaactggaacgccatcgcaaatgttcaggcgaatgctgggggagggatcagaggccagctcggcggactccatcaccacgaatgtgtgcgggtgccccatctccgagttcagccagtaggaggcg

SEQ ID NO: 58881 - DNA, 355 bp, Setaria italica
  Peptide Sequence Number=SeqID_124855
cctaaaacaacgctcgacccaatcttattgggcagggaaaaaacagagaaaataatacccaaaactcgtgtcaaaaacgttccaagttaacaggcaacaacaccaagtgtcccaagagggccaccaggaagcgttcagcgggcaacagccttctgagcattgtgcgggaggatgttgtcggggaggatgagctcaggtgggatctcacggaccaccccaagcatcgagtcgtactcctcgtccttgtgcgcatacttcttcctcagcatcttctcgagctcaatctcgtcaaaagctcttggaagttctcaagactagacgtaggaacctagggactaaagttagaataataaga

SEQ ID NO: 58882 - DNA, 323 bp, Setaria italica
  Peptide Sequence Number=SeqID_124856
ccaaaccccagacctctccagaaggaatccttgtattctgcttaacaagagatcctgcgccaaccatgctgtgcttttcaaccaccactccatcaagcagagtggcacccataccaacaaaagcttcatcctcaatggtgcatgcatgtagaacagcactatgacctactgtgacgttgcttccaattatggttgggaggaccttcctgctgatgtcaacagcattcataatcggatctggaacaaatatacaagacaattcccttgtacatgtttcaagatctaacatcagcaggaaggtccttccaattatggttgggagg

SEQ ID NO: 58883 - DNA, 189 bp, Setaria italica
  Peptide Sequence Number=SeqID_124857
cctcccaaccataattggaaggaccttcctgctgatgttagatcttgaaacatgtacaagggaattgtcttgtatatttgttccagatccgattatgaatgctgttgacatcagcaggaaggtcctccaaccataattggaagcaacgtcacagtaggtcatagtgctgttctacatgcatgcaccatt

SEQ ID NO: 58884 - DNA, 238 bp, Setaria italica
  Peptide Sequence Number=SeqID_124858
tgtgtctccaagtgcagatgcgagaggaagaacgccggaggaccggtgtacaatgaggatggcactctggtgctgggaaggccggtggtgtacgaatgcggtgctctgtgtgggtgccccatgacctgcgtgaaccgggtgacacagcgagggatgaagcacccggctggaggtgttccgctcccctgagacaggcctgagacacgcaaggggataggcaaggcacacaggggatagg

SEQ ID NO: 58885 - DNA, 263 bp, Setaria italica
  Peptide Sequence Number=SeqID_124859
ctttggcaggatcttttggatttgtaaaagctcacagtgtgctctgccatgtgcaataaaacttcatttcagttccttctccgcgtgatgaacctgcgacggtacaatgggcgtgtcctcttcgttcccgcaccaggatacgaagaagtcggtgagcccgtggagcaaactgctaccagctgtaaacagaacggggttagcactggtagccaagaagacaaagcagatgacagaaatggtgaaacgagtggttatccgggccc

SEQ ID NO: 58886 - DNA, 354 bp, Setaria italica
  Peptide Sequence Number=SeqID_124860
gcaacaggtaccggaaatggaatggcacaatctctattgcatgctgctggcgaaccattctccataccaaatgccgtgtttgccataatcagaggccacaaacgtgcacttgatgttacttctgttgtgcagggaaagcaaggttctttagtgtcctgatgcttacatggggtctggtagctgatgttgatattgaatcagagaagtacaggtggatgggaagcgctcgccttgaattttatgtatgccttctaccctaaaagcttatattaagcgcttaattttgtttgcatccatatgtaacttgtaacgccctcctctcttttttttcgtaatggaactactttacaatta

SEQ ID NO: 58887 - DNA, 246 bp, Setaria italica
  Peptide Sequence Number=SeqID_124861
ttattgattgggttggtgatggcctcaaatctattgacaacaagacttactataactcttgtaatattgatggtgtaatatacaatcttcatgatcatatgttgattgcctctgaaggtggcaagttcggtccgtgtaagctgcaggcgaggttactaatttctttccttacagtcactgtgggaagagcatgactctggttctaggctggctatggttaatccctacatatttggctccgacata

SEQ ID NO: 58888 - DNA, 167 bp, Setaria italica
  Peptide Sequence Number=SeqID_124862
agtgaaggtgctctctttgatatggatcacttggtcctgggacatctgggtctgtcataaccaatgtaaagaaagaccgcaagtcacccccttgaacctctactcttggtttagacacaactgctgatgggtatatctcgtggccattgaagacaagtttgtttgag

SEQ ID NO: 58889 - DNA, 390 bp, Setaria italica
  Peptide Sequence Number=SeqID_124863
ctgcagcagcaatccgaagatgtctcatgggatactttgatttctcaggtaagtttatccccctctagttttcatcatgctatgtacaatactgtttcttcctataatgcactgttccaagcaggcctcgaaagaaaatgttaatttatctgcgagtgcatactgggtacctggccaagattctaataagtacctgaactatggagctggtataagtgaggtgcgacaaaatgttcttttaaaggccaatttacaacaatgcattttaatcatgtcttttaggtgatactttctgttcaaaatattctgaaaagtgcaggtggagattgatcttcttacaggagcaatttactttacgtaaggggcgatcttgtgtatgactggtggaag

SEQ ID NO: 58890 - DNA, 346 bp, Setaria italica
  Peptide Sequence Number=SeqID_124864
tttctttctttgttatttgttatttaatttatttctttgttactaattcttaattatttgatctcatgaatcataaagacctagaatacattaccagctgtttcttactgatatgctacatgcttgtgtaggttgcaacggcagcggcactttgtgcatacaagctacgacgtcctgtacggatgtaccttaatcgcaacaccgatatggttatgattggtggtcggcaccctgtgaaagctcgctattctgttggatttaaatctgatgggaaaattacggcattgcatctagatttattaattaatgctgggatatctgaagatgcaagccccagtataccacg

SEQ ID NO: 58891 - DNA, 468 bp, Setaria italica
  misc_feature (1)..(53): n is a, c, g, or t
  Peptide Sequence Number=SeqID_124865
nnnnnnnnnnnnnnnnnnnnnnnnnnnnnnnnnnnnnnnnnnnnnnnnnnnnncctttttttgttttttctttttacctttttaactttttgttttattttaagttcttaaagtagtaacacagtacagtgcagcgaaaagtgacaacggaatagatgcaagaactgccccaaatttcccaaacaatgagaagaaaatcatgaacaaggctgagatctttataactcgccggcttccaactcgcgtcaacggcaacaaacctgcattctcaactgaagctgctgtgcctgtcaatgtaccgcacatcccatccagtatgatggatatgccctcccagccaactccacgcgagaacactgaaggtgggcagaatgttgccccggcgaatcttgacacaacgattaaggtaccggtagactcaataagcgatgcaaaagagcagccagcatggcgaggcaatcctgccag

SEQ ID NO: 58892 - DNA, 203 bp, Setaria italica
  Peptide Sequence Number=SeqID_124866
agttctcttttgtttttttttttttttatttgcaaaatctcctagtctctctgaaattaaaattgttcatccaaaatgatttataagcagaatcaaaacattctagctcctcccatctgcttgataggggtattatcacattggttctagagggagagctccctttagaaccaatgtgatatcccatctgcttgataggggat

SEQ ID NO: 58893 - DNA, 183 bp, Setaria italica
  misc_feature (49)..(49): n is a, c, g, or t
  Peptide Sequence Number=SeqID_124867
acaatagtaaccgaacaacaatacccaataccaagtaatgaatggatangccctcccagccaactccacgcgagaacactgaaggtgggcagaatgttgccccggcgaatcttgacacaacgattaaggtaccggtagactcaataagcgatgcaaaagaagcagccagcatggcgaggcaat

SEQ ID NO: 58894 - DNA, 260 bp, Setaria italica
  Peptide Sequence Number=SeqID_124868
cgaagatgtcagcggaatgcctacgttttgtattcctgttcaagatggtggtgttggttttgactatcgccttcatatggctgtcccaggataaagtccgtgaataagatcgtttaccagcattaggtaaactaccgcatcaacatcagtggcaaatccaaaatattcaccatagttcccagtaaatgctacttgtaatccatggtgagtatacatcatggaggtcaccccatcgaaccgaaacccgtcgaacttatatt

SEQ ID NO: 58895 - DNA, 257 bp, Setaria italica
  Peptide Sequence Number=SeqID_124869
caatagctattttgactatcgtgtcggttgtttcaagcctgggaagtacaagattgtcttagattctgatgatggcctcttcggtggatttagtcggcttgatcatgacgctgagtacttcactgctgactggccgcatgacaacaggccttgttctttctcggtgtatgcacccagcagaacagccgtcgtgtacgcactcgcaagaaggaacgaaataagggtagacaaacgaacggttaattaaggaaaggaaa

SEQ ID NO: 58896 - DNA, 226 bp, Setaria italica
  Peptide Sequence Number=SeqID_124870
cctgaagcaaagtgacgagtattggaaaatgggtgatattgtgcacaccttaacaaatagaagatggctggaaaagtgtgtcacttatgctgaaagtcatgatcaagctctagttggtgacaagacaattgcattctggttgatggataaggatatgtatgatttcatggctctggacaggccttctaacgtccttcggtattcgtattcgttgggttatttagtt

SEQ ID NO: 58897 - DNA, 262 bp, Setaria italica
  misc_feature (215)..(215): n is a, c, g, or t
  misc_feature (229)..(262): n is a, c, g, or t
  Peptide Sequence Number=SeqID_124871
tctgaaaacgttccctgtagtttgtacataatggcttcagctggcatcgcatctcctgaatcaatatgttcaaagtacgtcgttatttgcacggtactgcttagttgtactaataaggcagtgaaagaagcctggtatttttgctacaaaatggttcttcatgctgtgcatcttcccgtgttggttggctgaaaggcgtgacagcaccgtttaanatattttggtgacnnnnnnnnnnnnnnnnnnnnnnnnnnnnnnnnnn

SEQ ID NO: 58898 - DNA, 260 bp, Setaria italica
  Peptide Sequence Number=SeqID_124872
aatggtgcattaaattccttactgttgtgacagccatacattccttactacggttcagtgaagcatcacaatacctggagcacctccgaagccttagctatacgatccttgttccacaacttcaacataacaacagtaaggtgaaatgttttgggtttgatgaatattgtcttgtcaatgccaaaatctacaggtgacaaataagaattaaatcaaagcctgaaggaataacttggaaatgcatagaacaacagaaatta

SEQ ID NO: 58899 - DNA, 249 bp, Setaria italica
  Peptide Sequence Number=SeqID_124873
tctaagtattccgggttggtattagtcctaattggtaagttgtattattgtaaattgggtagttagttcctagcattcgactttggacagcctcttcaagaacatttgcaatcatctgtgatgctttcctaatactttcagaacttgttccttcaaggacaacagaagtctcctcccttgatgatgggaagataattttcactccagtatcctcttcaatcttcttctgcatagacccaccctttcctt

SEQ ID NO: 58900 - DNA, 276 bp, Setaria italica
  Peptide Sequence Number=SeqID_124874
gaagtgtctcagatatcagtttgtttctatgctcttcattcatagtcttcatgtcaatctcatggcggaaacatcgcctaattgactgttgcattccttccgaactgtctgcagttgcaactagtataatctgaagagagcttacacattcaggctccacgaggtataagctcccatttacatatcttcctggcatcgagtccttagcaacccaacgttgtccaagtagtaactagacttaaataaacaagaattacaaatagttacgaacgacaa

SEQ ID NO: 58901 - DNA, 256 bp, Setaria italica
  Peptide Sequence Number=SeqID_124875
ggggagtctctagtgggacaaattcatcgatgggaaataaaatattactgttagtcatcatctagaaggcccttcaatcttctgcctcaacagctcgtagttctgaagctcctccagcgatagtgatggtgagatatctcccaacacctgtgcagtaacagtaacacttttttcccctaaacatgcaaccacataatattactgtgcttaatcaaaatggttcggagttttaccgtcataaaatcatcaatctcaa

SEQ ID NO: 58902 - DNA, 425 bp, Setaria italica
  Peptide Sequence Number=SeqID_124876
tattctattcccctagtctaagttctattggttagtacctaactaccttgtcccactacagaatggtccagcccctatgccaatggttgggatttgcaatgctgatgttgcagcagcagccactggagcaggcacacactccaatacaacggaaaagcaaccagcctcctgcaaagccagtgctgtctccacaacctttacagcactgtcaactgtcttcccttgaggcctaaatccaccgagcacactaatagcttgcggtgtgaggccaacatgccccatgacagcaatcccagcctccacaatagccttagcggcactgatcctcgatggtgcaccccttcgagcttgattgcatccattccaccttcttttagcagccttacagctgaatcaacagcctgcgcggccgaggactcgtagca

SEQ ID NO: 58903 - DNA, 456 bp, Setaria italica
  misc_feature (340)..(340): n is a, c, g, or t
  Peptide Sequence Number=SeqID_124877
caaactgccaaggtcaagcaaggtttgtttggagaaaccctcagttgagtgcataatggacacgctccaatgttcgcaaaacctggaaaaccgagacaggcgaacgtggccccttcccaggcaaagcatgtgaaaggatggcttgctgctgctcaccagtgagctccaagaatagcactagcatatcgccatcaagaatgggaggtactcctgatgggatactgcgctgaagaaattctgcatgatcatttcccaagactggtgcagtcaacgggtgcaccgcgagcctttcttggacatcttgcaacagctgatgttcctcactgcagcaccaatttangcatttcagaactcgtgtcataatcccttatagctgtagatgaaatgtgtatagttccttgtctacaaatgctgtgtcacaaaaacccagggacatagagtgcatgtggaataatt

SEQ ID NO: 58904 - DNA, 186 bp, Setaria italica
  misc_feature (178)..(178): n is a, c, g, or t
  Peptide Sequence Number=SeqID_124878
gatgcggcgtgggtgggggcggaggaagtcgcggagcgtgaggcccccgaagtagatggagtcgaggaagtcccgggccttccggtagatgcgcctgagcgccatggcttgcaagtggtgctccgggttttcgagcaccagcagctcatcgaatcctagctgctcgtcgggggggttntcgccgac

SEQ ID NO: 58905 - DNA, 189 bp, Setaria italica
  Peptide Sequence Number=SeqID_124879
aatttgcaagtacgagaaaatggttgatggccaataacccaaaataatggtttcctacttgcaaccaccagttgcccccctttcggatcctgcaggcaaaaaaattactggagagtcagacaggattatggcaaggggatatagttcaaaaggctaacatgagagatctagttgcatttgtggaaaaat

SEQ ID NO: 58906 - DNA, 250 bp, Setaria italica
  Peptide Sequence Number=SeqID_124880
aggaagaatctgataccttcagtgaaaatggacacaagagcttccttacaacggcggattatcttccaactggcaaaatcaatgcatacataatgcaaatgcaacatgctgcgacagaagtcctaaaaagagtaaatatatcttgtcctgtcctaatgatagttattaccggcatgttcgccacccaacaaattaaggaaaatgcatctaaatttttctagcaaaatgctagtagtgttgtacactatgt

SEQ ID NO: 58907 - DNA, 239 bp, Setaria italica
  Peptide Sequence Number=SeqID_124881
agcatgaggccataatcgtcacgtagaagcagtgccaagctccagtagcaagttacaggggtcacgcactcgttcagcaccggtcttagaatcttgccggtgggtacaaatttgcgatgaactcttccactataaaatatgagtttcatgttaagaagaagaaaatagaaaacctctattttttgagcttatcgtccatttaaagatataactgctgcaagcctgcaagtctatgctga

SEQ ID NO: 58908 - DNA, 420 bp, Setaria italica
  misc_feature (20)..(20): n is a, c, g, or t
  Peptide Sequence Number=SeqID_124882
ccaggcatgaaggttatacngaaaactcacttagactacactcgtacgatctttgcactgcataggtacgcaacaagaaacgcctcttagcaatgctccaggcaagtagtgccgccggcatacacatggtacagcaatttcacatgatggcacctaccgtttacatggtacagcaatttcacatgatggcaactaccgtttacatgcgtcactagaatttcattcagtgcccactgtaccagatcaagagctgagataatttcaggccacaaactgcaacaacagtcagcaatttcctcccatgtctccggtgcaggagggtgtgactctagtcagagtcattgccggaatccacaatacaaactaggttagactttactaacctaacgtaattaagtaactaagtacggtaattaccta

SEQ ID NO: 58909 - DNA, 358 bp, Setaria italica
  Peptide Sequence Number=SeqID_124883
gcaccatgccgttcaaattcgacgaactcaatctcctcatgcagaatgagtgtaggaggctttaggcagaaagaagaaacccttttcaagtggatacaacagtccatcttcagctttgagtgaagatttaactgcatatccatcttggcaacttctgaaagaacctggtcttgtgactttagcaccagatagcccacgaaggactttggtaaatacctcatgtattagacccttgtaagattcctcaagcctgtctttgtatttgtcagccagaacctctttactcaatgccagatccctttcaactactaacctaccgtactacaaaactagaaataaacaaataagtaagaaagaa

SEQ ID NO: 58910 - DNA, 257 bp, Setaria italica
  Peptide Sequence Number=SeqID_124884
gattgagtgtaggaggctttggcagaaagaagaaacccttttcaagtggatacaacagtccatcttcagctttgagtgaagatttaactgcatatccatcttggcaacttctgaaagaacctggtcttgtgactttagcaccagatagcccacgaaggactttggtaaatacctcatgtattagacccttgtaagttttcatgtgcctacttcaaatctcagtttggtcggggatgagaatcgccctccggctcata

SEQ ID NO: 58911 - DNA, 412 bp, Setaria italica
  Peptide Sequence Number=SeqID_124885
ctgatataggaatcaccttgcatatgatttttttacactgcagcaccactttacatcattatatgtaggtaacatccagatatgtactgcttctcctatgtataacaacccgactattttactgacgaaatttagcatgtcaatatctcttcagattggacatggaactgctgtcaggtgccgagcatgtttgtactcctctagtgtgtaggcctgaatgccatgcacaatggtggactgatcttggccaaggcaagcaaggattcaggtaaaatccaaagcccatcaccacatatcaaaccagatgcaactgctggcaaccaattaaatagaatagactttaacttactaatacgaatacaatagtagacctaaggttaagtaaaattaaacttaaattaacttaaagtaa

SEQ ID NO: 58912 - DNA, 379 bp, Setaria italica
  Peptide Sequence Number=SeqID_124886
tcttgtactatttcttttcttgtttcttactaaggtccttttgtattattcggtcggttccaattgacacagcccatggcagtgccaatagcctgagcaataatcattgatctaggtgatgttaatgtaagatgtccagtcttaaagtcatgcatcagatcagcggatattgacactaatgatttcaccaaaccacagcccactagaccggcaacaacaccagagtccttcccagcccaagctgcaagaatgaagagggcaacctttccataattgtaggccatgttgatatcagtaaggccagcaccataggcattgcagaacccaatgcaggagctaaataagtatgctatgataacatagtaccatttcatctcag

SEQ ID NO: 58913 - DNA, 232 bp, Setaria italica
  Peptide Sequence Number=SeqID_124887
tgccgagcatgtttgtactcctctagtgtgtaggcctgaatgccatgcacaatggtggactgatcttggccaaggcaagcaaggattcaggtaaaatccaaagcccatcaccacatatcaaaccagatgcaactgctggcatccaatctgatgagggatctcttgccaccaaagtatggcaaatgggttcctctacccatggcaatgggggttcccttcctagttggtgcga

SEQ ID NO: 58914 - DNA, 242 bp, Setaria italica
  Peptide Sequence Number=SeqID_124888
atcccctttcaaatcactgatcagtggccacattattccccatgacagaatcgcaccaagaaggagagacagattaacaaggtgggagcaaatcatccctgccccaacatatgtaaggctgaaatcgaagaaaaatctgagtaaaaccactggaagaagctccagaagaagctgattgcaaagtattttgtgaacccattcacttgctgcttcgctgttgcatctccatgagttgtgtggaa

SEQ ID NO: 58915 - DNA, 153 bp, Setaria italica
  Peptide Sequence Number=SeqID_124889
ggagcgctaggcggcggcggcggctcggatggggcggccggggtacgtgacggtgccgatactctccgtgctcgccgcaatcgcgaggaacaccgtggtgtagtagacgtacccgattgcggcgagcacggagagtatcggcaccgtcacgta

SEQ ID NO: 58916 - DNA, 242 bp, Setaria italica
  Peptide Sequence Number=SeqID_124890
aagatcaggaaatggcgagtgattgtcaggaacctgccattcaagattacagaaaaggagataatggatatgttcagttcagcagggtttgtctgggatgtgtctattcctcataagtctgatgaggggttatcaaaaggctttgcttttgtatcattcacacggaagcaggatgcagaaaatgtatggtcagtgccctattcagtaagagtacaaaatgcatttaaaatttctaatcatca

SEQ ID NO: 58917 - DNA, 199 bp, Setaria italica
  Peptide Sequence Number=SeqID_124891
aataacgcacgctcattgtcaggcagggcaccaggttgatggctgtggctgtggataggctttctcctgtggatattcttcagcagctgcttctgtcccttgacaaagtactcattcgcgaattcccagcgctgtaggtgttgagctggcggatgaagctggagaagttgctgtgcttgaagtaggtgggcagcatccg

SEQ ID NO: 58918 - DNA, 247 bp, Setaria italica
  Peptide Sequence Number=SeqID_124892
gctccaggtttgaggttggccatatgtgaagtggaaacatactcacatttagatacaatcctcaggctcagaggccctgttagaagctgaaatggataagcttccaagatattggtactggggaccggaggaagaatctgccatggcttatgaggcttccagtgttgaatggcagcttgggctccaaaaatcagaagtcgcaggaagcactgacaaaggacggtctaagcttagagcaggagcaaag

SEQ ID NO: 58919 - DNA, 366 bp, Setaria italica
  Peptide Sequence Number=SeqID_124893
ttcggtaaggtaacttaacttacttacttactagtcgtcgtccgtccgtctagtaggtagtcgtcctttcttcgccgccgcgggacggcttacggcgacatgttcaacgacgagaacgccaattcttgcagcgtgatgtgaaggcaggaaagaagaagcttgtagtttcactgctccgtaatcaagcacggctatgtgtaatatgtctttagacgttagaattagtagacgtaaccaatgtagtagcactgctcgggcttcatggcgctacaataagatgagcggagcttgaatgcttgacgcacgagagggagagcgtgaggggctgatggaacagctctggtgtgttgtgctacacatcagagc

SEQ ID NO: 58920 - DNA, 396 bp, Setaria italica
  Peptide Sequence Number=SeqID_124894
acaacttcacccaatgcaattagctcctcataagagtattcgtctgggtcaacgtcttcccatgcatccttaagtttgaacaaatgtcagatactagcttcgttcccaggaaatttttcaatgaacaaaccaagaaaataaatgatgtttccatatagaagaatttgcattgaatatgaaatttcggatggaagcagctatacgattattgtttgacagtcaactcaccaagcggaacatggaaattcaacctccaaatctaatttttctagccaattccactaacactccatttcttactaataagcaccactgtttggactataagctcaagaatctgaaataggagtacctactattaccatatcaatcctagagcaatgagaaatgtgtggt

SEQ ID NO: 58921 - DNA, 248 bp, Setaria italica
  Peptide Sequence Number=SeqID_124895
cacgtgcgcacctccttccgcagccgccccagaccggtggctcgccggagccggagccgcgcgctgagaccccgccacacccgcttcaccggcaccgccgcgcggcccaggcacgacatcgttcctctgctctgctcccctgacctccgatcctctgctcggccgacctcgccggagctagctgattatctctgctgaccactgggagagaagaggagaggacagaggagggagtcgttgaagctgtc

SEQ ID NO: 58922 - DNA, 378 bp, Setaria italica
  misc_feature (128)..(128): n is a, c, g, or t
  Peptide Sequence Number=SeqID_124896
agctctttgttgtatgccactcaaagattctgacctcataattgcattcgatacaagaatgacagtgtttggtgcaggggcattaacccagactcgaccattaagtccaacagcaatctcaaaagtanagttttttcccaagggcctccagaactggacatgttggcgaacttaacaacattcgtgacatgccagttgacgtgtcaaacgtatagccatctttcaactgaccaaattcagcagctttcccagtagcttcaaaataggaacaatattacacagtgaaactgtaaaaagaataatcagataaagtcaaggacaagggtccagactgagagagtatcaccccacaagcagaaaggctgtcacaaccaagga

SEQ ID NO: 58923 - DNA, 317 bp, Setaria italica
  Peptide Sequence Number=SeqID_124897
aattacaatgactcgtgattgtgcgggcatctcacaaaaaagaactaccagcatattatcagagtgcacattactatacttcgtacttgcacaactgatgagctcctttcgtgacctgccatacagcaagaaaaaatgggactacatcagttaacatggacataataaaagggcaaacaaataaaaataagttggatgacctgaagaactagcatgtgtatcctaattatcaacagaggcactccaaatataaaatgtcatcagaaattggagtgcctctgttgataattaggatgacctgaagaactagcatgtgt

SEQ ID NO: 58924 - DNA, 347 bp, Setaria italica
  Peptide Sequence Number=SeqID_124898
tgcacattactatactcgtacttgcacaactgatgagctcctttcgtgacctgcacattttagcccaccaaccattgccatatcgagctagtagtactgcagtagtaccagaatttagtaactaatttctcatgtaaaattctaagcatgaatctagatatatttgaaaaactacaccttttatcccaaaaaaaccattgccatctcaagctagaagtagtatctaccagaagttagtaactatctcatgttaaaacttgttcgagcttagcataaacactgcatcaaacaaccaagacatgcacacacttcagctaactaccttttcttttttctttttttaaaaa

SEQ ID NO: 58925 - DNA, 183 bp, Setaria italica
  Peptide Sequence Number=SeqID_124899
gcaggatctagcgcaaatgctgccatgccaggaaaaaagcctacatataattgagggtgaaaaacatgacatatcagcatttgcgctagatcctgcattttttatcatataagcatcactagttttgcctatctgttattttgcttttttgcggtactgagttggatagctagatgactagct

SEQ ID NO: 58926 - DNA, 265 bp, Setaria italica
  Peptide Sequence Number=SeqID_124900
gtcgggtccttcctttccctaaagttcctttgtcggtcttcgttgtaaggccaccttgtttgttcgagcaccaggccccaggccttgccgctcagcccataacgcacggcaaacttgatggggtccagcagcaggtacacggcgatgttgtacacccagatggcgcccgtccacccccacccgatgcccttgatgccggcaacctcccagctaaccatggcagcaagcacagaggcgatcagctgcgctacgacgaaggcgccca

SEQ ID NO: 58927 - DNA, 400 bp, Setaria italica
  Peptide Sequence Number=SeqID_124901
tttgaggggtatcctgctgaagcccagcatggtcacccctggagctgagcacaaggagaaggcttctccagaagccattgcgaagaacacgttaacaatgcttaggaggagagtgccacctgctgttcctggaatcatgtccgaggttgaggcaactctgaacctgaacgcgatgaaccagtccccgaacccatggcacgtgtctttctcctacgcccgggctctccagaactcggtgttgaagacgtggcagggcgccctgagaacgtggaggcggcacagaaggccctgctggcgcgcgcgaaggccaactcacaggcgcagctcggtcgctacaccggtgagggtgagagcgatgaggccaagaaaggcatgttccagaagggctacacctactaat

SEQ ID NO: 58928 - DNA, 116 bp, Setaria italica
  Peptide Sequence Number=SeqID_124902
ggtattgctcaggacaatgggttagtgcctattgtggagccagagatccttcttgatggagaccatgggattgagagaactcttgaggtagaagaatacctcagaccacactttct

SEQ ID NO: 58929 - DNA, 249 bp, Setaria italica
  Peptide Sequence Number=SeqID_124903
ctacccgcctctcaccccttctccatagccctagcgatccagcccctccattcatgcttccccgtgacctgcttgctagattggcgagtccgctgatcccatccgcccctcttccgctgcgcgggctgccattcttgatttggtttctccctctccgatggaggatggagtatctacttatactgtggatgaggcacttgtgttcatggggtttggaaaattccatgccttcgtgcttgcatactccgg

SEQ ID NO: 58930 - DNA, 510 bp, Setaria italica
  Peptide Sequence Number=SeqID_124904
gtgaatggctctgttattgaaactaaactttcaatttatggaaagttggacagaaagagcaaagattcgcaagagcttctaatgttagagctccttgggaatggaggcaaggttaatgttgttcaatcttctcgtggtcttagtgtgaaaacaaaattgcattcattgaaaataaaggacgagctacaaggtcgtctttcaatgtcttcaaaatatttagcatgctctgttattgatgaaagtgtggaagctacctgttctggtacacccgataaagagggtgacataagcaccttttctgtcgatgaagattctttcatggatgcattgacggattttacttcagaccaaaaactgtaatctgcaagacaatgaaaattcccaacttggtttctgatgcaaatgattatactgaaacaagttacaaaagatggtatatggtttgatgggatcagcagaaagtgaaaccttctagtaaaattattttatgaggcacaagacaataacgtg

SEQ ID NO: 58931 - DNA, 348 bp, Setaria italica
  Peptide Sequence Number=SeqID_124905
atgacaggtctcaaaactgcacaagcgagaagttctcgcgctgtgcaccggaagaaggtacactgtagatcctgaggcttcactgtgattgagatcaaaccatcagcaaggctttgcaataccctgtattcggcattggctgaaaatagagcaggatgcaacttgttttcggccagaagggccattttcagttcagcatcacgatgctctgatggcaggttcacaaacttctcttttccaatacttggcttgaacaagaaaatagaataaaagttaccaaaactaattagacaataataaagaatacaaaccaagaattacttacttaggttaagtactaaaacttaa

SEQ ID NO: 58932 - DNA, 237 bp, Setaria italica
  Peptide Sequence Number=SeqID_124906
catgacaggtctcaaaactgcacaagcgagaagttctcgcgctgtgcaccggaagaaggtacactgtagatcctgaggcttcacctgtattcggcattggctgaaaatagagcaggatgcaacttgttttcggccagaagggccattttcagttcagcatcacgatgctctgatggcaggttcacaaacttctcttttccaatcttggcttgacagaaatgataaagttccaaacta

SEQ ID NO: 58933 - DNA, 399 bp, Setaria italica
  misc_feature (1)..(57): n is a, c, g, or t
  Peptide Sequence Number=SeqID_124907
nnnnnnnnnnnnnnnnnnnnnnnnnnnnnnnnnnnnnnnnnnnnnnnnnnnnnnnnnatttaagggtttcaacctggcactcaaatcgaaagcttaactttacatagtcagcatgacattttgacatttaggaactaacactacgaattcagtaaaggttacaccagacaccacagtggttgcctgaatgaataacaagctacaggctaccacaaataatctgatctttgcatgacacaattcataatccataacattgaagaaatacataagctatgctgtccattctgtcaagaacaccatattgtaatgttaggcctatctgccacactgcaatcctagatctgcacgcaacagaacaaaattactaaattataataaaaacagacaaccatagta

SEQ ID NO: 58934 - DNA, 466 bp, Setaria italica
  Peptide Sequence Number=SeqID_124908
gtgaaggaaaccggccaaaatctcatattattcgtctcatggaaggatttgagactgttatattccgatcaaagtttgataaatggcccaagaaagctgatgcagttgtgtcagatgaaagcagaggaaaagtggcagctcttcttaagcgacaaggatttaattttaagagtccagtaaaagctgcacccgtaaagcaggagcctcaacctcagattgattgcactggcaatttacaggtttggcgtgttaatggtagtgaaaaaactttcctttcgttctctgagcaatgcaaattctacagtggagactgctatatctttcaatacacctaccctggagataatggagatgaatgtcttattggtacctggtttggtaagaagagtgtccaggtaactgttttatgcattttccatttgtttttgtgtctatttcattaagagagaaaacagtgtacaacggg

SEQ ID NO: 58935 - DNA, 437 bp, Setaria italica
  Peptide Sequence Number=SeqID_124909
tctccgactcaagtacgacaactaagtactagaaatagaacaatagacttactggaacgttgagatttatcaggtacactagaccttccgaggactgcttcgatcgctgcaatttcttcttcttttgagcgacctaaggcaactctaataccaaagtcaattaaagcgagccctgatgcaagcaagccccaaactgaagcaagcaaacctaacccagagacgaatgccaaggaaagtaaccctacaaaggatagtcaaattgcaactccagcagtacaagaagatgtaaaggagagtcaggcggagggtgaagaagggcttcctgtgtacccatacgaccgcctgaggacatcttccaccaatcctgctacagacattgatgtaaccaagcgggaggcatatttgtcttcgtcagagttcagagaaggtttggaatg

SEQ ID NO: 58936 - DNA, 273 bp, Setaria italica
  Peptide Sequence Number=SeqID_124910
tccttctttgagcaatctggaagctactaggggtcaagtctgagtactccagccagaagattgtgagagatcaagaaagtgaccctcatttgtttgcttgtacattttcaaagggtgtgcttaaggttagagaaagtgaccctcatttgtttgcttgtacattttcaaagggtgtgcttaaggttagagaaatattcaacttcactcaagatgatttgatgacggaggacatatttgttttggactgccaacccatatgaagacacatgaatg

SEQ ID NO: 58937 - DNA, 269 bp, Setaria italica
  Peptide Sequence Number=SeqID_124911
cggttccccaacggaaacatatgggaaatttttctacaggcgactcgtacataatactgaagttatttgattctttgaacagacaactgcccttaaaaatggttcctttcggcaagatatccattattggcttggtaaagataccagtcaggatgaagctggtacagctgcaatcaagactgtcgaactggatgctgctcttggcggacgtgctgtccaataccgtgaagtacagggaaatgagaccgagaaatttctttcattatttt

SEQ ID NO: 58938 - DNA, 241 bp, Setaria italica
  Peptide Sequence Number=SeqID_124912
ttttgtaggggttactttcctttggcattcgtctctgggttaggtttgcttgcttcagtttggggcttgcttgcatcagggctcgctttaattgactttggtattagagttgccttaggtcgctcaaaagaagaagaaattgcagcgatcgaagcagtcctcggaaggtctagtgtacctgataaatctcaacgttccagaagcatgtcattcagactagtgcgactagagtacggaagaa

SEQ ID NO: 58939 - DNA, 204 bp, Setaria italica
  Peptide Sequence Number=SeqID_124913
cgctggccctggttgttgtactgcgagccgtggcaggggcagatgaacttgttctcggcgctgttccaccggctccgcagtacaacaaccagggcacgggtcgtccgtggcccggcgcccctgtcgctggccctggtgcacgccgacgtcgacgacggcaaggtcctgaagtcggtctccacccacgggacgaagaggaccttg

SEQ ID NO: 58940 - DNA, 180 bp, Setaria italica
  Peptide Sequence Number=SeqID_124914
ataaattcacttactccatgcctccaaactgtttcatacagtgtgttgtgtacatatgtaatagtttggaggcatggagtaagtgaaacaagaacacctctgtttctcatctctgcatatacaacctttttgattgaagactctaaaatctgctggaatggaatgatgaccattttttgc

SEQ ID NO: 58941 - DNA, 303 bp, Setaria italica
  misc_feature (144)..(303): n is a, c, g, or t
  Peptide Sequence Number=SeqID_124915
gcagctgtgcaattgggtgtttgcttcttttgtacttagcttgatatgctgctgttccccatcctactacttactccatgcctccaaactattacatatgtacacaacacactgtatgaaacaagaacacctctgtttctaacnnnnnnnnnnnnnnnnnnnnnnnnnnnnnnnnnnnnnnnnnnnnnnnnnnnnnnnnnnnnnnnnnnnnnnnnnnnnnnnnnnnnnnnnnnnnnnnnnnnnnnnnnnnnnnnnnnnnnnnnnnnnnnnnnnnnnnnnnnnnnnnnnnnnnnnnnnnnnnnn

SEQ ID NO: 58942 - DNA, 448 bp, Setaria italica
  misc_feature (381)..(381): n is a, c, g, or t
  Peptide Sequence Number=SeqID_124916
ttttttacttttttaaactttttttctttttttcttttttatttttttgtttttaagtttatttgtgtatgcctcagagcaggagccgggttcttatttctgttgtctatctgtcagagttggagttggaatcggcttaatcgtctgtttatccatcagagctggagttggaggcggcttgatctgatgtttatccattggtgttggagttggaattggagttggtactggcttgttagcagaaaccatggaacatgggtctcttttcttaaataataactcggacatttgctgtataacagctgcaagtgtaattgatcatcagacatgatagaaaacttacggaactgacaaaaaaaaactgttcaacaaaaaaaaacngttcaacaaaaaataattttattgttgttataacctttgcaaactgctttggagcaacatcaaactc

SEQ ID NO: 58943 - DNA, 245 bp, Setaria italica
  Peptide Sequence Number=SeqID_124917
cggacatttgctgtataacagcttgcaactgctttggagcaacatcaaactcgttccaccacactttaccattctgggaaggaagtacgaagttgtgaaatttagctgcatggaagagcgatccagcagctatgaagtgtggtttgaactgcacaactaaagtagtcggaagcctgcacgtatgtgtagaaccagctcagaaaaacaagattgccgatttcaaaaggaaacaaattaacagatag

SEQ ID NO: 58944 - DNA, 468 bp, Setaria italica
  Peptide Sequence Number=SeqID_124918
ataaagatagtaagcttttattcttcaaaagaagttctctggtctaagcactaccagtgatgctgctccagtgattaatcattttttctaaatgtagtatttaccaccaccatcagttttgacttcaatacaatctctagtcgcatccgagagcttgcctttctaaatcccgaggtattgtaatcttttcacatagataacttcactgttttataccagttagggatttctgtagattattaacagccttaccttatttattggctagctgattcataatttgatccgagttctgtcgttataaggttttagagttcctttttaccgttacttgacccaggccaaacccagaccttgaacacatgcttgttagatgattgagtagattacctatttatattcaccattttcatgcataggagtgcatttcattcttttattttcaccattgttagaaaacgaaaagaa

SEQ ID NO: 58945 - DNA, 268 bp, Setaria italica
  misc_feature (241)..(241): n is a, c, g, or t
  Peptide Sequence Number=SeqID_124919
cacgacaggaaccgcgacgtgcgccactgccgccgtgcgagaacaattcggttggccactacgggatcggcggcggcggtcggccggccggaagtactcgtagagaaggtgaagaaggtggcaaggtgattctcccctaaaattgggcatcaccgtcctggttctcgaggaggaagatgacatcgcgtctgtaagcctcaaactctcgtggtctgctctcctggcttccatggcccccggngtcacctccggtgttactgccagcgag

SEQ ID NO: 58946 - DNA, 249 bp, Setaria italica
  misc_feature (182)..(182): n is a, c, g, or t
  Peptide Sequence Number=SeqID_124920
atgtggctcgcaataccttggacaacgactgaactattgttgttttcaccataggtcaccaccagcctgtggatgtcctccaggacgaagagaggtacctggttctcgaggaggaagatgacatcgcgtctgtaagcctcaaactctcgtggtctgctctcctggcttccatggcccccggngtcacctccggtgttactgccagcgagctcgaaacaggacagaacgaagtacccgtcagcagcagca

SEQ ID NO: 58947 - DNA, 316 bp, Setaria italica
  Peptide Sequence Number=SeqID_124921
gccaatgaatgcaagtcttccagcttcccagactacagcagcaactgttgttccttcaacacggacttcttacctggtagcttgcatggtgatgtccgtgttgaaggaacaacaccatgcaagctaccaggtaagaagtcttctcggcaaatgatcgcgagcgggcttctgctggttggaagcatcgtttgcctatctcgaggccgatccaaccttggtgctcagcttgcgatggccttgttcctaagaaggccttcaagcaagagagagaatcaggttcatcaacatcaagggggaaaacaaacgtagactagat

SEQ ID NO: 58948 - DNA, 254 bp, Setaria italica
  Peptide Sequence Number=SeqID_124922
tagaattgtacaattgacctcacagagtccccaaggagtggtgcaggagattcaattagttcatcaaaaatttcaaacgcgatggaagcaacatcttcctcaccattagcaagacattgccttgatacattcaaaatactgggaacaaagtcccgaaacatttttacaatgtcacctccatcattgacatattctatgaaagatccgacagccctgttgcacatagagaaaaaacaaagtagtttattcacaga

SEQ ID NO: 58949 - DNA, 197 bp, Setaria italica
  Peptide Sequence Number=SeqID_124923
cctatcccctgtgtgccttgcctaccccctgttgcgtgtctcagtggcggtcgcagtgatgcaacttccatgctacgtggtgttcaggctggtgatcaagctgaaacaccacctgctcgccaagtggtttccaggctcgttcgtaagactaagaggctactagggcacaagctctgccgtcttcgtcttcgtcttcg

SEQ ID NO: 58950 - DNA, 257 bp, Setaria italica
  misc_feature (199)..(199): n is a, c, g, or t
  Peptide Sequence Number=SeqID_124924
gttcgcggaacaggccaccggttctcccgttcgatcgaaagaagatacagagtggaggaggaaggaaagccttcgccccttcaccggagatgctgccgtcggcgactggggagtggttggattggatcgagctgcagctgctagatcggcagccttgttgaggtgagcgggcgtgtgggaggcaaatccggaaaaaggntgagctttggctccgcgagagttgatgagcatggaggcgacgtcgaggaggcgcggtg

SEQ ID NO: 58951 - DNA, 226 bp, Setaria italica
  Peptide Sequence Number=SeqID_124925
cccgcgactacccaggcagatgaaaagcaggagacacattttcataccatagttaactgcattacgcagtctctgaagacacaaatcattggaagatcctatgatgaagttgcaatatgtttctttaacactaaagagaagaagaatttgcaggatttggcaggtgtttatgtttacaatgttggagacagagatccacttgataggcccactgcaaaactgatta

SEQ ID NO: 58952 - DNA, 354 bp, Setaria italica
  Peptide Sequence Number=SeqID_124926
actaccaaggaacgaactaagaattagttacttaatagggaataagacaaagacgaaattaagtcacagggaacaaatgtttcgtctgtctaagggatctcggtatgcattacattttgccgagctctgggtaaaatggtttatgcattcatctattcgatttgataatcacttgttctggaagccgatcctactctcctggctatctaaagctcactgtcatcagatttgctggctggctcccccgttgacagcaacaagctccgtgtcaaatatgagagttgctccaccaggaatagttggcggtgatccttgaggcccatagccaagctttgaagggatcttcagcttccc

SEQ ID NO: 58953 - DNA, 282 bp, Setaria italica
  Peptide Sequence Number=SeqID_124927
ttaatcagctgatgttatctcaagagaatagattcgctttcaccatggaaggtggctgaagaagctaatgcatatcttgagaagaacaggcatgagtatgggttgaagaaacctatactgcatgttctcagtgaccgcatgaatgaagctgagttttccgagcattttcttacggaatatattgcagagaattcttgatttacagaatgaccaaaagccctccgatcccagggccgcttctatctgaaaaaagaggctcccagattgtgtcattcctaagtt

SEQ ID NO: 58954 - DNA, 431 bp, Setaria italica
  misc_feature (279)..(279): n is a, c, g, or t
  Peptide Sequence Number=SeqID_124928
aactgaaaagaaggaaaaatctgggacttctcaaagtagcaaaagaagcatatgtgaggaaacttgtgctgcttcaaccaatatggacattggggatgataactattccagtcaaacaagaagcacaccagctgaactatgtactagctcaaatgaagaagctaaaactgcacatgattgtgaaagttctctgcgtgatactgaatccaatctagagatttttcatgatgatcctaatcgttcagcttcctcagttcatcaaatagaaattgccaaagngggaaggataatgctaggaaatcagatttccacaaatgcagatcaatatgcttatggagatgacatgtctctgcagcattctgtcgataagtggtcacatgagcatcaaccaacttttgagcatcgatgtgatggtgctgttaccataaaca

SEQ ID NO: 58955 - DNA, 286 bp, Setaria italica
  Peptide Sequence Number=SeqID_124929
aaaataaacaaaagaaataaggaaagaaaagtaaggaacttaacctagaaagacaaacaaattaagttactacaagggactgatttcctgattgacgctgctgtatctgaagtagtaggttttgagctaactggagggtcgcctggtacttcttgcttttatctgcctcgtccggagcttgtgcagtaccaggagcaaaatgctgttgttgtccatgagatgatggctggagctggggcaaatttcccatctgattatttgctggaggtccagggtaaacttgcgg

SEQ ID NO: 58956 - DNA, 412 bp, Setaria italica
  Peptide Sequence Number=SeqID_124930
tggtaaggtagtagtagaactgtgtgttggtgtaggaattggaggaggtggtggtaggttcaaagcaacttcagggttgtaagcagtatgctgcgttgagtgctcctgagcacccaccatgctcccatagtttgtcaaatgagcagctgaaacttgcctgctgaactgctgtcctggctgctgaagattagcaatcagaggtgaagattgcacacttggcataagctttgctaaagtagccataatatcaggcttgactgaaggttgaacttgcgctgcagctgtttggtttgtaggaaagcctgcaagagctggctggactgcttggccttcatccacccgaggccttccagatagttgccccaaatgaatagacaattagaactacctacaacgacaaaagaatacccca

SEQ ID NO: 58957 - DNA, 214 bp, Setaria italica
  misc_feature (33)..(33): n is a, c, g, or t
  Peptide Sequence Number=SeqID_124931
gtaagcagtatgctgcgttgagtgctcctgagnacccaccatgctcccatagtttgtcaaatgagcagctgaaacttgcatgctgaactgctgtcctggctgctgaagattagcaatctgcccaaaggataaatttgaagttgtagattgattttcaggattccatactttagaaagcattgacagaccatgcatctgcgatggtctgtctgtg

SEQ ID NO: 58958 - DNA, 375 bp, Setaria italica
  Peptide Sequence Number=SeqID_124932
tttagttcttatttccgttcttatttagttgtcttttgtcctagtctattattccagttcccgttcctagctgaacaattaatgacatcaggtagaggtatgtcactgccctttgttataggcaaacaacgagcatggcaaacaggagatccacctttggaaatactgcctcgccagaaatgctcaaggtatgacgttcgatgcactgtgcctcggactcgaatagcaggacttgaactcccctcagcatgcacggagctgtcccgatggcggatcccagcagaataaagacttgtgctgcctgcccttacttcataagggtcagcaccagcatcgagcctcattcgtttgcttctcttggatcaaatgattcga

SEQ ID NO: 58959 - DNA, 285 bp, Setaria italica
  Peptide Sequence Number=SeqID_124933
tagttgtattactaaagtaagtcctattttcttattattggtaggtcctatttaccttcgtttttggtcttttgtctttctagtttggtgactgtataactgaagggtttgaaccacctactcttggcattctttttaaatgtgacacggttgtttctgagaggcctgtacagtttactagagtggcacaaattgatagaaaaggccttgatgaaatattcttctggtatccagtgccacctcctggttatgcttccctaggatgtattgtgacaaaaacagatg

SEQ ID NO: 58960 - DNA, 269 bp, Setaria italica
  Peptide Sequence Number=SeqID_124934
tggcgcagcgctgacaaaactgagccctccggccggtttccaattcacatggtgcagcggttggtgaaagaaagaaagaaagaaagaaagaagaggcggttaatctcatctcctggattgtgttttactttacccacccacctcttgtactcgacgtcgacggtgcggcgcttggcgaggcgcgcggccatgccgggtcgcgccatggcggcgaacggcggggctgctgaggacgaggtcggtgcggttggtcctggcgcggtccgtga

SEQ ID NO: 58961 - DNA, 240 bp, Setaria italica
  Peptide Sequence Number=SeqID_124935
ttgcggtatatgattttgccacctcgagatggaagcatatgttgtccatgtcaagtgttggcactcccagacatttgatcctcacagcttctgcacgtttccagtggttgtggatgtcatcgagcatattgtgcgttacaccacctttacccaaattgatctgccgtgagcagtcgctgtgccggtacctctcaaccagctccgcgacctcctcctccgacagcggttccccaagaacct

SEQ ID NO: 58962 - DNA, 244 bp, Setaria italica
  Peptide Sequence Number=SeqID_124936
gggttacaagtgagaaagcgtgcagatgcaaccattaggctgtcctcattggttttgaatcaccaggttgctttagtagttttaatggagcagctctatagggcgtggactataattaaaggacagaagtatcaccattaggctgttatcatcgtcatccaccgctgtttcagcatattaagatttggaaaatggaagaccgcacatgcataaatttgcagtgttgcatggacagcgtgacaag

SEQ ID NO: 58963 - DNA, 294 bp, Setaria italica
  Peptide Sequence Number=SeqID_124937
atctcaatcaagaaagtttacatcacacatgatggtatcaactgataatcttacagctggagctattgattgagatacatgattttcattttccttgacttgcgctctgtaaggatttcttttgggtttgtgcatcatcgcattgctttgagaaaagaattcatatatggtgacatccaaatacttatgttgggtcttcagaaatatacaccatgaatcatgatacttttaagaaaaagaaatatgcatcatgatggtcaacaatgtcacaaggaaatacagattattgaactg

SEQ ID NO: 58964 - DNA, 217 bp, Setaria italica
  Peptide Sequence Number=SeqID_124938
aggtgggtggagaggggtgaggcgctggccatcccctccagcttgaagctgtacaatgaggttcgcgagctggggttcaagaccttcctgctcacgggcagaagcgaggggcacctagacatcaccgcggagaacctcaagaagcctgatccacctcgaaatgaaatgatcaggtgacatagaatcatgaaaatgaaagtggggtgaagacgaatgg

SEQ ID NO: 58965 - DNA, 240 bp, Setaria italica
  Peptide Sequence Number=SeqID_124939
agactaaggagctctatgatctcagttatggacatgaaccacaaggtcctacaagatttggagtgtgcggacatctatatcgatgcagttctttccacgctttttctttgctttactttctggttttccatatctacttcttctcgtatacttatggcttctcatatctggcattctctgctacggccgcatttatgcagcatctgattctatatttttggaaccggtttgaggtgccag

SEQ ID NO: 58966 - DNA, 208 bp, Setaria italica
  misc_feature (9)..(9): n is a, c, g, or t
  Peptide Sequence Number=SeqID_124940
aaccaccangccgtttcatttactctgagagaaacgcaatcccgcatgcttaggttcacagtgcagcttcagcaccatgcacgccaccaactgcccacttttcagttgatattcgtgcatgtcatcgaatcattggtttttgtgccggtaatgggaaaattcttcggtgtttgaaatatttgaagtttgtgatgaaaatgtattcaac

SEQ ID NO: 58967 - DNA, 491 bp, Setaria italica
  misc_feature (259)..(259): n is a, c, g, or t
  Peptide Sequence Number=SeqID_124941
ttcggtttgttcttttctttgttatttggttacttaattaagtttctttcttctctatgttacaagaagaatagtaccgtagaatacaatagctacaaagattaacactgatccacctcgaaatgaaaatgatcatgtgacatagaatcatgaaaatgaaagtggggtgaagacgaatggtactcacggtgggtgcttggccagcggtaatctaattttgcgaagatgatatggagctggcacacccttcaaaaaaagntaatgacgaatactggtggcagtatatacagactggtgtcgctggagataccatgttagtattatctgtttatctgttttttattagtaggtaaggattctgaattgtatctattcatgatatatgtacattcccaaccgtctgaatgggatgcccattccagtcctgtacagaaatgtctgcaaattctttgtacttctatggcggtttctggaacatacagtgctactgt

SEQ ID NO: 58968 - DNA, 372 bp, Setaria italica
  Peptide Sequence Number=SeqID_124942
agacaggtgtccagattacatcttcaaccatctacacgtctaccttacacattgctagggtaaatgtgagggaccctggcactataaatgatggccttggtgctgttcgtgaagcagatgcccttttggttcaggatgagtctaccaggaaccagcaagagggccaacagaatggaattgctgagccagcagctaacaatgctctccaatatcaggagcaaaaccctcagcaagctggaaacacccctgcaggctctggttccctgaatccatttggctcccttttgttgttggtttgtttaggtaggtcggttgtctttcttgtattggtcttatttagtttttctttttcttttctttcttattgtttct

SEQ ID NO: 58969 - DNA, 224 bp, Setaria italica
  Peptide Sequence Number=SeqID_124943
gcgctggggggaggcagcgaggcgctgctgcggccatgacggacgcaagaaactccttgaggcatcggttgtagatgcagggcctctccaggtgcacgagatgccctgccttccttatgctctgcagcatcgtcttctcgcccagctgcctgcagggtgcaaatcaaaactcatcccagctgtcaagacatatgctgatttctggaagaacaataattcaggtt

SEQ ID NO: 58970 - DNA, 213 bp, Setaria italica
  Peptide Sequence Number=SeqID_124944
agttacttaggaacttgtcttctacgtagtcgtactattgggttacggttatttgacttttgaacgcctcttgctgcattatttcgcatctctgttcttctagcattcctagtttcttagttccttattttttgttaccttagccctcaggaataccttagttcttcctatctgaataaaccctagtaagtacctaattttagtaccaaaata

SEQ ID NO: 58971 - DNA, 434 bp, Setaria italica
  Peptide Sequence Number=SeqID_124945
atatctgaggttgtgatcagttgaaatgatttttgctttgttcagaacctaatgctattgtgcaatgttacagtcactattacctttgttcaatagccactgcctgtgttaatgaacatttccaacaaatgaacttcttgtaccttgcagatctcaccaactgaaatccgtggaacacttggctctgttaatcaactatttatctgcattggaattcttgcagctttgttagctggattgcctttggcaggaaatcctgcctggtggaggacaatgtttgggattgctgtagttccatccattttactggctgtaggaatggccttttcacctgaaagtcctcgttggctgttccagcaaggaaaggttatccaagcagaatcagctgtaaaaagactgtatggaaaagaaaaggttacggaagtttattgtta

SEQ ID NO: 58972 - DNA, 225 bp, Setaria italica
  Peptide Sequence Number=SeqID_124946
ccatatctgagatctcaccaactgaaatccgtggaacacttggctctgttaatcaactatttatctgcattggaattcttgcagctttgttagctggattgcctttggcaggaaatcctgcctggtttctgtttgcaaattctttgaccgtattatctactctgggcctcccaagatgtggcacaaaactcaagatttaattttctgacattaactgcagcaagg

SEQ ID NO: 58973 - DNA, 201 bp, Setaria italica
  misc_feature (108)..(108): n is a, c, g, or t
  Peptide Sequence Number=SeqID_124947
tttgcctccagaataagggccaaggctgtcgcattatctctaggcatgcactgggtgagtcataactgttcatatatgcacttatgaaaacccaataatgaaagatanccgtctataccaattgcattttgtttattattgctatatcttattttcttctgggaattgtcactctgtttacattacataaattttacccac

SEQ ID NO: 58974 - DNA, 174 bp, Setaria italica
  Peptide Sequence Number=SeqID_124948
cacttacatttatttgaatttctaaagtctatggaattcttttttaattagccaagatggtcaacaggctttgcctacctacataagtgaatcattaccctctgtttttctctgcaggtatccaacttctttatcggcctgtacttcttgagtgtcgtcaacaagtttggcatc

SEQ ID NO: 58975 - DNA, 390 bp, Setaria italica
  misc_feature (365)..(365): n is a, c, g, or t
  Peptide Sequence Number=SeqID_124949
attttagaccatggtctagcaaagtcaggaaacaaaattaaacttaacatgcaccatgatagtacacacataactcattcaatgtgttctattttgcctccactgaagattcacataggtagcgcacgcctatacctgaaatcctattaagtgctttgattttatctaaccatcctcctcaatctcagggaacagtaagggcaccaaatccacatggggattccatccgtgacagtgctaatatgtatgcaatcttgctcgccaacgagcttctgagcatagagttgcgctggcaagagcagcgtgatcctttggaactgatcctcgggggtgtgggtggagttgttgttgtacgctgcaaaccnttgcagccaagagtcccatgccagg

SEQ ID NO: 58976 - DNA, 235 bp, Setaria italica
  Peptide Sequence Number=SeqID_124950
ccacgaagggagaagcttgcagagatggcgtggagtttctcccaatttgcactgggaacagtaagggcaccaaatccacatggggattccatccgtgacagtgctaatatgtatgcaatcttgctcgccaacgagcttctgagcatagagttgcgctggcaagagcagcgtgatcctttggaactgatcctcggggtgtgggtggagttgttgttgtacgctgcaaaccattgca

SEQ ID NO: 58977 - DNA, 416 bp, Setaria italica
  Peptide Sequence Number=SeqID_124951
aaggtaaataagaaaataaaattaagacaacctacaaaaggaaataaagactttgcaaatattcaaacaatactaacaagactttaatactagaataattcttgcagtgaaaagtgatgatcatggatgtaggagccaaagcatgtccgtgtgtgccacgaagtgcttaccaacctccttcagcttccagggcttgaaggataaaaatgatacagatgatgataacaaggagagccccaccccatcccgcttacagaagctgctgcactctatcagcttcaatgacaggatgcagcagttgactggtggaagcccagcaaaaaaaaagtcaacagtcatccggctctcatacaagacaacagcatgcgatggctgtgaagacagcagcgaattgggtaagtccagtgtctgttcgg

SEQ ID NO: 58978 - DNA, 495 bp, Setaria italica
  Peptide Sequence Number=SeqID_124952
ttaaaccttaaacgttaaacgggtaaaagttaaacctaaaattaagtaaattaaggaccgggaatacctacgtacgtaggaagtaccaacggcgaccaggatccacagtagcgacgggatcctcggcgctcaggcgacgcggcggccgggatccacccagcctccatcgagcaccgccgtccagggaccaccggttcgctggaatcaggtgctgctagcattgacgaatcagtcgccatggtggagatcaaggttagatgacttagagttttgcacccatgatgtggctggcaggtggtgtcacctgcaggagttaggaacctgtttttttttaaaaacatttctgcttatcccaaggtatccttccaagcaacttcactgcaagggaaatcactgtatgtgctagttttaggccgcactaatgtagttcaattagatcttgtaaaatatattttctggttagattgacttttaatattggcaacaatggtagtg

SEQ ID NO: 58979 - DNA, 253 bp, Setaria italica
  Peptide Sequence Number=SeqID_124953
gtctcctgtgcccggatgagggcgacgagatccacggcagccccgggatcctcgtcggggagtccatgatggccgggatcctcgtcgtggagtccacggcgaccaggatccacagtagcgacgggatcctcggcgctcaggcgacgcggcggccgggatccacccagcctccatcgagcaccgccgtccagggaccaccggttcgctggaatcaggtgctgctagcattgacgaatcagtcgccatggtggag

SEQ ID NO: 58980 - DNA, 271 bp, Setaria italica
  misc_feature (223)..(223): n is a, c, g, or t
  Peptide Sequence Number=SeqID_124954
cctgaaagagttcatccattcagtaaaggcatatgcagaaatctctacgacttctgctgttccagccagaaaggatatattctggaagctttgcccccagctgaggatctggaagctagagctgctcgttacacatgccgagatgtcatttgctgccgttgctgctgatggctgtgccataggattctctgcccatcagcagcaacggcagcaaatgacatcncggcatgtgtaacaaagaactgaggaactggctagatgggcagagaat

SEQ ID NO: 58981 - DNA, 279 bp, Setaria italica
  Peptide Sequence Number=SeqID_124955
cgagagcatctaacggctgcaggtcactatttgtgcatagccatttgtacattttcactcagaaaatgtgtgctctgagcaactggatctcagggcacacattttctgagtgaaaatgtatgccctgagatccagttgctcagagttcatctgtaattctctatgccctttctttcacataggttttcaggacagatagaattggactgtacttgtgtcgagatgtacattcgaggtgtggtttgtagtttcagaatttagtctacaaatcctgagaac

SEQ ID NO: 58982 - DNA, 300 bp, Setaria italica
  misc_feature (74)..(74): n is a, c, g, or t
  Peptide Sequence Number=SeqID_124956
ctacttaaggggagtacctgaaagagttcatccattcagtaaaggcatatgcagaaatctctacgacttctgcngttcccaaggccagaaaggatatattctggaagcttgcccccagctgaggatctggaagctagagctgctcgttacacatgccgagatgtcatttgctgccgttgctgctgataggctgtgccataggattctctgcccatctagccagttcctcagttctttgttctaactagtttcgtcttaatttggttaagttcttaaattttttagtttgttacctttgtt

SEQ ID NO: 58983 - DNA, 336 bp, Setaria italica
  Peptide Sequence Number=SeqID_124957
gagttttatctaaaaaaaaagaactatggagtttggacggatccaactgttgttcttaaggttacggggatcaacatggataagcttgtgcaaatacactgaagtttgaaacagggttcataaaacataaacagggagtgaaaactcacctatgtttttgctaactgattcagcagctgctgacaacggctcacgatcttccaagaatgtttgcgctgaaggaagagaagaaaggctcattctggcagctcccttatcctgacgttcatctgtctctttaccatctgaaatacctgatgtcctcctagaaggtatggaaaaactgcgggctatagg

SEQ ID NO: 58984 - DNA, 263 bp, Setaria italica
  misc_feature (226)..(226): n is a, c, g, or t
  Peptide Sequence Number=SeqID_124958
acgacggccaccccaacccagcttgcatctccctttatcgtccattctttctccagtgccggatcttatagctcccctggattcctcggaggtcagtgttgtgtcgatgaacaaaggcggcgctttgtagatgctccccaccgagaaacagaacctcgacctgaacttgagatcaacctgcaaaggaagatgagtacagtgctcgtcaacacctatttttttttcncggaggacgttttctgcgcgtcatttcactaagcaga

SEQ ID NO: 58985 - DNA, 268 bp, Setaria italica
  Peptide Sequence Number=SeqID_124959
tttaactttaactttaaattaagtaatacaagaaaaatagaactttaaaaactttaccaacagtatatatgatgagtccatgaggacaggaaacccctaaacgtatgcaaatgaaatgtatatatcaatttgaggtctgtcgggcacacctttagtagcttgataaagataaaatgtagactcagcaaactcaggacgcaagggatagtacttctctgtaggatgcaacactccgtagtccaaaagataatctttcaggtaacacacc

SEQ ID NO: 58986 - DNA, 310 bp, Setaria italica
  misc_feature (79)..(79): n is a, c, g, or t
  Peptide Sequence Number=SeqID_124960
caaagcttcctaccatatcttcatactcacgtaatggcaaaacagtatatcctcctataagtaaaaaccagtccttccnccctttctgaagatgctaataaatcacgagccataagccgcagtagccagccatactgcaggttctcttcttgcatgttactgcttctgtaccacagtcatcatcagtcctgcatctgtggctagcgtacacatactaggtaacaataggacaacgacaactactacccaataggggaagaccaaataagacttttttacggaaaaactagtaactaactaagggacaaaa

SEQ ID NO: 58987 - DNA, 481 bp, Setaria italica
  Peptide Sequence Number=SeqID_124961
ctagtctcctttcagacaaatgtagttaccctttgcagtaaggttcctttttcggtttgatctgttgattgtacagacttttacacacaataaatgatgttattcaagtggccatctgatttcaaagcttgtcttattttgcactgattgtataggaacctatcatgcacacagcaatcttttttgaattctgagaaaagccaaagtttcgtaaatgaaccttaagattaatccatgcatatggcaatccagtaggagtctcaaatgctggtagaaaacgattgcctaaactttcagcaagatgtagtaattgatcctgatatggttcatctttgagctggctgctgtagtcttttgcaagaagatgagcagaaataagcccgccaagaagtcttatgttacactcaaaaagattaatccgaacatcaacatcaaatgtcaggttttctgaaagccagagaattcctctttcaaactctgt

SEQ ID NO: 58988 - DNA, 303 bp, Setaria italica
  Peptide Sequence Number=SeqID_124962
tgttcatgatattggtaagccaaaaaaagagcatccagaagtaaggtaataactcatccaatgcatggattttagcaaacctgaagaccaggccagaaggcctgaaggctagttagttgccaatgtgttgcttctcctgtcctcatatcagcctcgtgataccatggaccatgtcggaagtacttctgcacagcaagataagctgaatgaaacatatcccagtactcgtcgcttccgaaaagaatatatgctttaataagatactcgtaaaatgaatcaacacctgcaaatgttactaaaaat

SEQ ID NO: 58989 - DNA, 203 bp, Setaria italica
  misc_feature (6)..(6): n is a, c, g, or t
  Peptide Sequence Number=SeqID_124963
gagccntaagccgcagtagccagccatactgctaggttctcttcttgcatgttactgcttctgtaccacagtcatcatcagtcctgcatctgtggctagcgtacacatctggtacatggcacgcactctcccattggggagcctaattgtctttttttcggttaaaactttgtttcttttcttttgggttcttaaacttttta

SEQ ID NO: 58990 - DNA, 242 bp, Setaria italica
  Peptide Sequence Number=SeqID_124964
tgtcatactgacaataattcatactgacagagaaacagggagcaaagggatgaacagagtcgtgaccgcgatcttgtcctcccccatgatgctctccagcagcgcgtcctcgttgtcgacctcgaagtagatatctccgttctcgtcggtgaggtaggggaactccggcaggatgatccgctcgtggacgccgtcgccgacgagcgtggagatcatcaccgttgccttgttgttcacctcga

SEQ ID NO: 58991 - DNA, 188 bp, Setaria italica
  Peptide Sequence Number=SeqID_124965
aatcgccacaggctcgacataagtcttgatgtaattcgatgtgataatacatgagcttctgtttcctaggaatacacatcaagaagggcaatcgccacaggctcgacataagtcttgatgtaattcgatgtgataattgatttcctaccaaatgaattatcacatcgaattacatcaagacttatgtc

SEQ ID NO: 58992 - DNA, 381 bp, Setaria italica
  Peptide Sequence Number=SeqID_124966
atccgcatgaaccatactatagttatttagaaatactttcagttcatagattcaatagaaatggcaattaagggttccaatcaagatggcatgcattttctcacaactgaattgcaattggtctgctgaccctagctacagtggtagcatctagcaagcgtctacactgatcacggcttgccctgggccttcctggcgaggagatcgctgaaggccgggcggcagtaggcgtcgccggcgtggaagaacatgccggcgacgaccttgtacatagcctccgtcatgtggacgccgtcccaagttgaacgtaacctacgaccggactagacgacgacaaggaccgtagttagaaccgaccggacgaagaccgacaaggtagga

SEQ ID NO: 58993 - DNA, 287 bp, Setaria italica
  Peptide Sequence Number=SeqID_124967
cgactactacgccgcccacctcgccgtcatgcgcagctggtggagtgccgccaggaggcggcggttgtgcgcgtagctctgccggttgacggaggcgacgcagctgacgttgtcgcggtcgtcggcgacgcgctcttctgggtgggcgagatcggcgccaacgactacgcctacaccgtcatcgcccgcgacaccatcccgaccaagctcgtccgcaccatggccgtccagaggatcaccaccttcgtcgaggggttgctggagcgaggcgccaagtacgtgatggt

SEQ ID NO: 58994 - DNA, 282 bp, Setaria italica
  Peptide Sequence Number=SeqID_124968
actttcagttcatagattcaatagaaatggcaattaagggttccaatcaagatggcatgcattttctcacaactgaattgcaattggtctgctgaccctagctacagtggtagcatctagatttgttctcatctctattttctttctttttttttttgcttctgagcagagtcaaacctagctcatacgtctacaacagttggctatctcccacaatcagcatcacttggagatgcaatccaaaggcaatgggcattccaaaaatagaaacagatgattgaa

SEQ ID NO: 58995 - DNA, 192 bp, Setaria italica
  Peptide Sequence Number=SeqID_124969
cgggaggaaggaggggaggttgagcgcctcggcgaggaagtcgacgacgaggcggccgtcggagtagcggttggtggagcggtggaagaaggtggcgccgtagggcgggctggacacgtagccgaatgagtataggaccccgaccgtacggacgttaccggaagggtagtaacgacgttacggggaactaca

SEQ ID NO: 58996 - DNA, 210 bp, Setaria italica
  Peptide Sequence Number=SeqID_124970
accttgagcttcctccagaaaaaagagcagtcattgatgttgctctccggctgttgttgccccccatgtgaaaaatgcccctagaatccatgccaagatcccatcagatagcattaatagggaaacagtcataacttgcaaacttggactgtttcccttttattgccatctatgcaagttatgactgtttccctattaatgctatcttga

SEQ ID NO: 58997 - DNA, 246 bp, Setaria italica
  Peptide Sequence Number=SeqID_124971
tctatgattgaactaagccgtacacaagatgaggaagtgggtgatggcacaacctctgtgattgttctaggtatatctggtgagatgctccatgttgctcaagcatttattgacaagaactatcatcctactgttatttgccgaggtaagatccattagttctcagggcttctgtttactggagtaggacttctttttcgctcttgatttcttatctgttctaacacgtattgctccaaatttcag

SEQ ID NO: 58998 - DNA, 380 bp, Setaria italica
  Peptide Sequence Number=SeqID_124972
agctccattggtacaaaaattcactggccagtttggtgaccttattgcttttatggattttctgacattatgttgctttgctcaggaccttgctatcgatgctactacaacagcaggcgttgacctaggtcagggcatgcgtgaagttgatatcaagaagtatattaaagtagaaaaaggttcctggtggtcagttagaggattctagggtcctcaaaggagttatgatcaataaggatgttgtggctcctggtaaaatgagaaggaagatagttaacccacgtataatccttctggacagccctattgagtataagaagggagaaaatcagactaatgctgagttgatgaaggaagaagattggcaggttctgctggag

SEQ ID NO: 58999 - DNA, 283 bp, Setaria italica
  Peptide Sequence Number=SeqID_124973
cagttgaaaggtgttgaaaagtggccctatgaagctgctgctttggcatttgaagcaattccgagaacattggcccaaaattgtggtttgaatattattaggacaatgactcaactccaaggaaagcatgctaatggtgaaaatgcctgggttggccttgatggaagaagtggtgaaattgttgacatgaaagagcgaaagatctgggactcctacagtgtcaaagcaacaagaacgttacaaagaacaagactaatttagaaggactagacttagacaatta

SEQ ID NO: 59000 - DNA, 274 bp, Setaria italica
  misc_feature (4)..(4): n is a, c, g, or t
  Peptide Sequence Number=SeqID_124974
gttnagggagcaagcaaggatgtcttgaatgaagttgagaggaacctgcaggatgccatgtctgttgcgaggaacattttgaagaacccaaaactcctacctggaggtggtgctactgaattgactgtatcggcagcactgaagcaaaagagttcttcagttgaaggtgttgaaaagtggccctatgaagctgctagactttaggacaatttaagaaaagaaacaaaaaattaaaaccgaaaaaagaaaaaaacaaaaaattaaaaaggaaaaa

SEQ ID NO: 59001 - DNA, 218 bp, Setaria italica
  Peptide Sequence Number=SeqID_124975
acttcgaaaaactgacaacaacagaattgctaaggcttgtggagcagttatagtgaacaggcctgaggagcttcaagaatctgatgtgggcacaggagctggcctcttcgaggtcaagaagataggcgatgaattcttgccttcatcgttgattgtaaagatccaaaggcatcctgcaggttcctctcaacttcattcaagacatccttgcttgctcc

SEQ ID NO: 59002 - DNA, 436 bp, Setaria italica
  Peptide Sequence Number=SeqID_124976
caaaagtccggtgcggcggtgcccatctccatcagcgaacgcgaacctgtctgttgaggccaattctatatcgtcgaggcttttgcttcagtttctgacgttccgcccctaccagatcgacagatcgttacgtgtacgtcggaagcacctaccacgtttaagctccttttcttcggctgcagctcatgtgcgtggatcaaaggaaggagagggcagagttgctccaggaattgctcaagaacggcgctggcttcgatcccctcccggttcttacccaggaaacactgatcatctggggagacaaagaccgggtgttccccgtcgatcttggccaccggctgcactggcatctgggagagagatccaggctagagatcgtcaaggacgcagggcacgcgctgcagctggagggggccgagcatgtcaacaaattcat

SEQ ID NO: 59003 - DNA, 383 bp, Setaria italica
  misc_feature (155)..(155): n is a, c, g, or t
  Peptide Sequence Number=SeqID_124977
aagactgctgaacaggcaccagaaccccatcatttgtggaccagatgttagaagctgacaatggacttggtgaagtgatgaaaccacctgagaaatcattctgggctaaatattggatgtacattattcctcttggtctcattgtcatgaatgcngttacggcagcagcaaacataccggaggagcaagctgcaggccagggccaacctggagcacaacgagcacctgctgctgctgcaaggagaagatgattgttgtttctatgtgttttcggtgtcagatcaatggagaatgaacaggagacagctcgtacaatagcatggtgaccggatcccattcttgttacttgtagtaagttttccctatttagtctattagttggt

SEQ ID NO: 59004 - DNA, 370 bp, Setaria italica
  misc_feature (83)..(83): n is a, c, g, or t
  Peptide Sequence Number=SeqID_124978
agcaagctgcaggccagggccaacctggagcacaacgagcacctgctgctgctgcaaggagaagatgattgttgtttctatgngttttcggtgtcagatcaatggagaatgaacaggagacagctcgtacaatagcatggtgaccggatcccattctgtactgagaagtttcccattagcatagtggcctttgaagctgcagttgaacactcatttgttggtagcaactttaaccagtgcaacctgtatttgctgatgtaaagtgactttatttgtccattttgaatcctatgtgttgtttatagatcatccttattttgtaaccgaatacgaaagtaggtacaacttaagaaattaaagaaaccaaaaa

SEQ ID NO: 59005 - DNA, 268 bp, Setaria italica
  Peptide Sequence Number=SeqID_124979
acctcacagccgccgccttccagtccgacgagctcgtcctcaacgacgacgaggagttcgagggcgtcggcgcccgctcgtcctccccctcccagccggcggccccggcggtctcctcctcccgctgccgacgccgcgtccaacgccctgcagttcacgcttgagcacgacctcggcgttggcaaggggttcacccccgccggaaccttctccgctcggctcaagacctccgcccatggcacgcagactctcacaaagcttcgcttca

SEQ ID NO: 59006 - DNA, 196 bp, Setaria italica
  Peptide Sequence Number=SeqID_124980
ttcccattagcatagtggcctttgaagctgcagttgaacactcatttgttggtagcaactttaaccagtgcaacctgtatttgctgatgtaaagtgactttatttgtccattttgaatcctatgtgttgtttatagatcatccttattttgtctaatacgtgtacatatatttggtagctacaaaacatcttgcca

SEQ ID NO: 59007 - DNA, 406 bp, Setaria italica
  Peptide Sequence Number=SeqID_124981
gcgccgcgacatcgccgcgctcctccgcgacaagcaggaggacaccgcaagaatcagggttgaacatgtaattagagaacagaacttcatggcagccaatgagatcattgaactcttctgtgagttgattgttatgcgtctccccatcattgcaaagcaaaactctaggtagtcagatcatgaatatgacaatggggacactatgcaattgaaagatgctgcttcagctgctcgagcagctgcagagtctgctgagagagcagcatctgctgccaatgctccagctgattttgccaataagaacaaccacccatttgatgaagtcgaagattgcaaagattcagctcatgaatacactcatccccgcaagaggcagtcaatgagcaactcaagcagaccatccagg

SEQ ID NO: 59008 - DNA, 293 bp, Setaria italica
  Peptide Sequence Number=SeqID_124982
aagctagaagcaataatttcatctgccgattctagaaccttgcctctggaagctgagtcgaaagagcaagaattgaaaagttctaagagaaatcttgatgagttaacttcgttattgaaggctaatgttgatgccataaataacttcaccagaaagatggatgatctgaaaagaaaagggatgattcttgtaagtacttcgttgtaagtcttatttcttggtagtctagttactttgtttacttaagttattttggttttgtttcctttaaagttttacttttttggtttaac

SEQ ID NO: 59009 - DNA, 357 bp, Setaria italica
  Peptide Sequence Number=SeqID_124983
aaacaacacaataagttgtcgcattttaactgcaagagcaatatttcatgcttagttttcttgctgttaaaatggcagtgccatagaaatgttaaatgccctggatttcacttaacttcccatacatatagataagaaaattacagatttagttaccagacagcaacaaatggatgctgaacgtgatcatgccaagtcggagttggagcaaattaaggttgacatcaccagtgcaatgaagcaaaaggggtcacttgagaaagcccttggcaagaaggaaaaatcacttgaaaacatccgcaaccaaattgagcaaatccaatctagcattgcaatgaagaatgacgaaatggggac

SEQ ID NO: 59010 - DNA, 223 bp, Setaria italica
  Peptide Sequence Number=SeqID_124984
tggctgacacccagttcattgcaaccacattccgaccagagattgccaaagttgctgataagatatatggtgtgacacacaagaacagggtgagctacattaatgtggtgtcgaaggagcaggcgctggacttcattgagcatgatcagactcacaatgccagctgaggcttctacggactaaggtctagtattgttctttgttacgtttagttaaagggttt

SEQ ID NO: 59011 - DNA, 235 bp, Setaria italica
  Peptide Sequence Number=SeqID_124985
tcacaaatcgcgcatctaagaggcagttaaacaagttacccaatagctgactacatacatatacacaactacatcaaccatgggaccagaatacccatgataggacgagactgacgacagctactctaccctttctacgtcagcatctgccttgtccgtagaagcctcagctggcattgtgagtctgatcatgctcaatgaagtcctgctcttccctcccttcccttctcctccc

SEQ ID NO: 59012 - DNA, 170 bp, Setaria italica
  Peptide Sequence Number=SeqID_124986
acaattgtcagggggccagaagacagtggtggcgttgacactgatttttgctatacaacgatgtgatccagcaccattttatctgttcgatgagattgatgctgctctggatccacagtaccgaacagccgtcgggaatgtggttgcaatgaactgggtgtcagccacgt

SEQ ID NO: 59013 - DNA, 246 bp, Setaria italica
  Peptide Sequence Number=SeqID_124987
cagttcttccagagggtgaggagacaccggaaaagatcagttaccaagccgcctcaccagatgaggctgcacttgtggctgctgctaagaattttggtttcttcttttataggcgtacgccaacaacagttatggtacgtgaatcacatgttgaaaggatggggagtatacaggatgttccctatccttctcagcagacttcttccttttctggtcgaaccatgctatatacaagccggaaagtta

SEQ ID NO: 59014 - DNA, 252 bp, Setaria italica
  Peptide Sequence Number=SeqID_124988
tcctagtccttgtctatttgtaaacttcttcttcttgtctagtcttggtctattaaaaatttgggtgttaactggagataagatggaaacagcaattaacattgcatatgcatgcagcttggtaaacaatgataccaagcagttcaccattagttcagagacaaatgctattagggaggctgaagacaggggtgaccctgtggaaattgcgcgtgttatcaaagattcggtaaaaacgagtctgaaaagctt

SEQ ID NO: 59015 - DNA, 397 bp, Setaria italica
  Peptide Sequence Number=SeqID_124989
agtcagtgcaggtggaatgtccaaaggtagaaaatgtcatctagcagtgttcaggctcaaagtgaggaaacatgttcttatcgtgctctctgttcaggatggtgccgaacaagctggagtatcattaggcacagtgccttgtgcgcagcagatttccttccgcaaggtctctttttatactgggaggatgtctatataatgagcttcttttgtggatgcattaccgtgctgctcactcttgtgcaggagtcttgttcaaacagaaccaatggcccctggatgtgatcagtcgatgccaaactggtatttcatacacagttagttgtaacttgtaagtgcttgcaagagtgtcacataagcttggcttgaacttgacataccatttgatacatgctag

SEQ ID NO: 59016 - DNA, 165 bp, Setaria italica
  Peptide Sequence Number=SeqID_124990
aggatgtctatataatgagcttcttttgtggatgcattaccgtgctgctcactcttgtgcaggagtcttgttcaaacagaaccaatggcccctggatgtgagcagcacggtaatgccatccacaaagaagctcttttattactgggaggatgtctatataatgag

SEQ ID NO: 59017 - DNA, 359 bp, Setaria italica
  Peptide Sequence Number=SeqID_124991
cttttatacggatgaaatgctaacccagcaaggttttagaggtaggtttcacaataacttctccctagcaattactagggcctacagatgtatgcagggcaggatgcaaactctgttattacctgccgtgccagtttgcaacatttgcttcttccaacagccaatgagggctccttcacaccattagggacgatgtgtgatgaggacatgctgggcatcttttgctccaaggacaaaaatttcttctcccaagcttcatttaacccttgcagggcttgattaatcatctcttgcacctgttcttttgtgaaacaattaggactagttagtaccctagtttagactcaaacaaactgggg

SEQ ID NO: 59018 - DNA, 271 bp, Setaria italica
  Peptide Sequence Number=SeqID_124992
aatagactccgtcttaggtaatgaaagtcaggccaaaggacttccaaggcgacaccaccaagaaggacacgacgtcgaagacgccattgtcacccatccagcaagccggattaaggttttcacctagaagaccattgatattgcagagagcatcacagcaaacgcctcaacggagggatcgctcaggcggacgcaccgcaaacccaactcctcctactcctcgcggaggaggagaccgaggagagatccccctcccgaccccgcccttcca

SEQ ID NO: 59019 - DNA, 241 bp, Setaria italica
  Peptide Sequence Number=SeqID_124993
ctgtcggtttgttctagctgcttgccgttgaacgctcttctgcatctctgaatctctgaccgttttgtagcaatctgctgtggcatcccgtgatgtagtacaattggtagtagaattggagcattcatgtagagtgtggaaaataaagaaaaaaatgcggccgttttgcagtttgcacttgttcatgtgtggagttgcgcattgcaatttgcaaagcagtcgcggtttgtttctgacaaaa

SEQ ID NO: 59020 - DNA, 459 bp, Setaria italica
  Peptide Sequence Number=SeqID_124994
aagaataattgatcagctaccattggtttcaagagaaatcaacattgaatgtggtgacacagcaactgaagtaagaaatgacgtccaaggaatgagggatagcatgcaggagcagaaaccggaagaacggactgaaactggaagacagaatgtacttattttcttcataattttgatatctcagatttttcctatcaaatttcataccataactttcaacattcaacgatttcactttaccaatatattatgatttagtgccttagcttgctgccgcttgctaacatcttgtctttctgcctcatatgatcttgaattggtgcttcattctttgtattattttgtgtcacacccaaacttctcttttaggacacatcccagttggaaccagaactaaatgcagatgaacaggaggaaggagatagaaagaggatattagcactatataagacaaaaaag

SEQ ID NO: 59021 - DNA, 245 bp, Setaria italica
  Peptide Sequence Number=SeqID_124995
gggagaatacgaaatcaaatacaggaggaccagagggagaggattcgagctgctaaagatcttatggaagcaaagcgaactcttgaggaaaatcaaagaaagcgcatgatggaaagtcggatagcatgcaggagcagaaaccggaagaacggactgaaactggaagacagaatgacacatcccagttggaaccagaactaaatgcagatgaacaggaggaaggagatagaaagaggatattagca

SEQ ID NO: 59022 - DNA, 388 bp, Setaria italica
  Peptide Sequence Number=SeqID_124996
ctcatggcttatttatcatacatgatggcagagttgctagagctgagtggaattttgaccgtgttcttttgtggcattgtcatgtcccattatgcatggcacaatgtgacagcaagctcaagaatcacaacaaagtgagataacactatttcgaaatttatgatgctgggttccattatttgaggccaatgtttccagtttctaggaatgcttatgttgttatgaaatattcattggctgatggatggaaatgcaggcatatatttgcaacatcatcattcatcgcagagacattcatctttctttatgttggtatggatgcccttgacattgataagtggaagacatcgaaggcaaggtgagctacagagcatacaggtctctggtc

SEQ ID NO: 59023 - DNA, 249 bp, Setaria italica
  Peptide Sequence Number=SeqID_124997
ccaccgcggcgactccggcatgaagaagacggcggcggcgacgaacaccggcgggacgacgccgatgccgtacatgaggcgccatccgatgtgcaccggcaggccggagaaggcgtagttggacacgtagctaagcaaggtcccgacgttgatgaatatctgcacgaaatcatcgccaccaagatatttagaaggaagaaaagttatcgctgcttgcggcttggtcgccatcacaatatagtgcaaaaa

SEQ ID NO: 59024 - DNA, 222 bp, Setaria italica
  Peptide Sequence Number=SeqID_124998
ggcgagcacgaggacgcaccggcggcccagccggtcggcgacccacccggcgccgaggatggagacgagcatgaacacgttcatggagcccgcgagcacctcgatctgcgcgtcggtgaggcccacgtcctcccggatgaacagctgcgctccgctcatcagcgtgagatctacaagcacgtttacagagagcatcatatccatcgccgccatggatggtca

SEQ ID NO: 59025 - DNA, 241 bp, Setaria italica
  Peptide Sequence Number=SeqID_124999
atggagcccgcgagcacctcgatctgcgcgtccgagaggcccaggtcctcccggatgaacagctgcgcgccgctcatcagcgccaggttgtagcccatgaggatggtggtcatggaggccagcgtggcgcagccgaaggcgtacatgttacggcgcggcggctcgtcgccggccttcgtcgtcgttgtcggagaggggagcagcggcacggccgcggtatcgtcggcgtgcgccatggttt

SEQ ID NO: 59026 - DNA, 416 bp, Setaria italica
  Peptide Sequence Number=SeqID_125000
ctaatggagcattagcagactggaaatctgtattggcaaataaatcaactctggcaaagaagcagctccaacatttggcactgtacttgaagtagatgcagttgtgtcaacaaggtcatccattaaactttgcccaaagagatccacgtgattatagcttgcattagttgttcctgatgcattcaaagggacataagtaaaatgttcaacaagaatacgatggaaatgttcgactcaaataaatttgtagaaaattctttgtgtcgtatgtctctattctgataaccagaagcaatatgacgccagatatggaagatcctcgtgggttgaagtcgttgttatcttcattgtccactttctgtgaacttgtgcccccagatgtggatgaggatcgaagatttgatgatgatttcagg

SEQ ID NO: 59027 - DNA, 365 bp, Setaria italica
  Peptide Sequence Number=SeqID_125001
tttggtttgtactattggtagtcctagtaggtattagtattcttctttgtctaggtcctttttttattgtagtcttccaagcacctattgagattcctggagtgagcaattttgattttctgctcatggcagtcaatgctcgcagagaaaagagtggtctaccagcactaggaccccttgagttttattcggttgtatcgcccaaaattgatgccttgaatatggaccctaagtttcttgatcgaaatgtgaatgaaggttttagtggtggtgaaaggaagcgcaatgagatattgcaactttcagtcatcggagcagatttagctcttcttgatgagatagattccggattagatgttgatgca

SEQ ID NO: 59028 - DNA, 488 bp, Setaria italica
  Peptide Sequence Number=SeqID_125002
tccctttgttttgttattttctaaaacttgttcctagttcgtaagtactattaattcaaacttcataaccttcgcgggtaaacaagtcacgaaaaagtcgcttcacaaatgcatagtccggtcgctgatcaaatgtcaatgaatggcagtaatggaagtaagatgcaaattcgactggacaggatttgcataagacctcgataggagttgatatctttttctcacatatcttgtcatacttctgtgtctttgttgcagcttttagtccctgccacgggaggcttccacggataaaatacagaaggacataaccaagagattccaaatcatccctgcggctttgttcaatcccaaggtgggtgttgcaacttgcatagcgtgctgtgccagtcaagttcttatttctctgtaaggaatatggcgattcgtagtagaatcccggtatcttttggcaagccaaaatcaattatgtatacctgatttgcttt

SEQ ID NO: 59029 - DNA, 256 bp, Setaria italica
  Peptide Sequence Number=SeqID_125003
gcaattaagttgccaaagttgctattcgtcagagcaagctaatggcatttcctggtaacatttgtcagatattgcaccacactgtctctaacagacttcaccacaagcaacatcacagtatgtgctatcacacagcataaaacataaacttaccttccacggagaaaatacagaaggacataaccaagagattccaaatcatccctgcggcttttgtttcaatcccaaggtgggtgttagacaaactttagtacta

SEQ ID NO: 59030 - DNA, 459 bp, Setaria italica
  Peptide Sequence Number=SeqID_125004
cagttgtctatgaaattcctggagcgagaagagcttgctaactacaatttccaaaatgaatttatgaagccttttgttgttgtgatgaggaagagccgagctgttgagattagagaacttatcattaggtgtgtctctcaaatggtattagcccgtgttaatcatgtgaagtcagggtggaagagcatgtttatggtatgacacctctacttgcactcatgtaccttaccttttatctgaagaaagtctgggacattcttgtacttgttcctgaatattgatttctggttgcaggtctttgcgacagcttcatatgatgatcacaaaaacattgtactattagcctttgaaattatagaaaagattttgcgggagtactttccctacatcacagagactgagtcaacaactttcaatgactgtgtgaactgtctcatcgcatttactaacagtaaggta

SEQ ID NO: 59031 - DNA, 255 bp, Setaria italica
  Peptide Sequence Number=SeqID_125005
taaattgtctaggtacccgtcctatttgtttgtcgtcctttgtagtaacgtagttctattacctagtcttgttgtccttctacttattccttcctagaactattatttccttggacagcgcccctgaccatggaagcacagaggtggtggagagtcaccttgttggcttgtgcaaggaggttcttgaggtatacctgaccacagcgagacctgcccagctttcaagtggcaggcaaccgctcggccactggctta

SEQ ID NO: 59032 - DNA, 275 bp, Setaria italica
  Peptide Sequence Number=SeqID_125006
agaagagagcttgtttttggtatggttttagaacagagacaagggtactcggaggttccgcttcctgtttttacagttatgtaactaaatatttagaaacaaacaattccacgagcttctattgttacctccaagtcaaatgtttcagcagtgccaacaagtttgttcaaggccgcctctgaaatagcctgttcatcagggccttgctctagaaaagtttggccaagctcagaagtggattcagcaccgttgttatggttcccccttagaattct

SEQ ID NO: 59033 - DNA, 260 bp, Setaria italica
  Peptide Sequence Number=SeqID_125007
gtttgaccagtgaaaatattcacatatacttgaggagctctcttgtctgcaatattgtaggcactccaacagggatggagagtttttgtagcctcattagcatccattcccttctccaatttagacatccagaagagagcttgtttttggtatggttttagaacagagacaagggtactcggaggttccgcttcctccaagtcaaatgtttcagcagtgccaacaagttttgttcaaggccgcctctgaaatagcctgtt

SEQ ID NO: 59034 - DNA, 458 bp, Setaria italica
  Peptide Sequence Number=SeqID_125008
tagaatacaatacaactttagaattttagctaatccatatctgtaagattttctaggagccattttgagttcttcggggatatatgactatcccaccaccaagagtacttgcgcattggattggacggcgacatcgccatcgaagccagctaagcaaaccgaacaacactacctggcctcaaagtaaaccttctgcaacttcaaagcccctgcagtagatcccagcaactagaatgtaatctgctctaaaatctactacaaaccgactaccatggaggtcagaggaaggaagatcttggtcagctgcagcagccccaagaaagagatccagctgcagctgctcctcatcccacactagccctaggccgccatcatcactctcaccaccacattaacgccaccatcacgaacagaggaggagagggaggaagggagggttctcactcctgggctcagag

SEQ ID NO: 59035 - DNA, 269 bp, Setaria italica
  Peptide Sequence Number=SeqID_125009
ggtaaccgaacaaagtaaattaagggaaattaagacaaactaacgaacaatacttcctcaccagagactgcttggcctatgctaagataaagcctgcggtgaaccaaattgagacgcacccctacttccaacgtgattctcttgtcaagttctgccagaagcatgggatctgtgtcaccgcgcatacccccttgggtggttccactgccaacacagagtggttcgggtcagtctcatgcctcgacgaccctgtcatcaagagcttcggg

SEQ ID NO: 59036 - DNA, 348 bp, Setaria italica
  Peptide Sequence Number=SeqID_125010
gtttggaaaacccaaaccaaataatatttcagcagcccgcttttctgcagttgcggcatccattgcatctagacgctcatacacacgatccaaagcttcaccaccaccatcatcctgcgcagccaaaatttcagcttccttttccaactggactctttcttcatcacaactaacaacagcttgtagtgcagacatatctgaagcctcaatctcatggctgagatggtatatgtccatatgttcagggataggaagttctctgcagcctattgctgtgagaagagtagattttccacagccattcaagcctaagtctaacccgttattcgtccttccctattagtttgt

SEQ ID NO: 59037 - DNA, 411 bp, Setaria italica
  misc_feature (405)..(405): n is a, c, g, or t
  Peptide Sequence Number=SeqID_125011
ctgtaaagcggaacacaagtactttgtccctaacaaccttctcagtgagaccaccacgctccatctttgcaagagttttctctttgctctgtgcctgacgtgtcaagcttcgcagaaccatgaccaaagcgggcaatgtactccttcattgatgcaatctgttcctgctcccacttgtactgcttcatttgattctcttcaagctcagagcgggtttggacatattgatcataattaccagtgtataacttgagcttcttgttttgcatatggatgatgtttgtgcacactccatttagaaaatcttgagagtgtgatatgacaacaagtatacggtcaaaattctttagcaatactacttaccaaaccaagaacaacaatagacctacaaagaatacaaagaanaggtta

SEQ ID NO: 59038 - DNA, 330 bp, Setaria italica
  Peptide Sequence Number=SeqID_125012
cttggcaagggcactgttcatgaatccaacaatcctttagttttctttgcctgcatctgtttggaaaaccccaaaccaaataatatttcagcagcccgcttttctgcagttgcggcatccattgcatctagacgctcatacacacgatccaaagcttcaccaccaccatcatcctgcgcagccaaaatttcagcttcctttccaactggactctttcttcatcacaactaacaacagcttgtagtgcagacatatctgaagcctcaatctcatggctgagatggtatatgtccatatgttcagggataggaagttctctgcagcctattt

SEQ ID NO: 59039 - DNA, 250 bp, Setaria italica
  Peptide Sequence Number=SeqID_125013
atacgggctgcccgacgtcgcgcagttcgtcggccttctccttcatgcgaatgcagtaggcgtcaatggacaggtccccctggacaattgcaaaaccaacagaggcatatcttgtatattgaagaaccttctttcttcctgcttccccttctttccgctgaaggtcttgcaattttgggtaaagttgtgcaagcagttgaaacacaatctgtgcattaataaatggcacaatgccaagggagcatattcc

SEQ ID NO: 59040 - DNA, 246 bp, Setaria italica
  misc_feature (33)..(33): n is a, c, g, or t
  Peptide Sequence Number=SeqID_125014
gagattgtgcagagttagtgcaagaaatggttntggctaacatcccaccagatgcctcaacatttggaatgattttttctctactgcagaatggccatgtatcctcagaagaagtttttaagttagagtcagcatatagtgacggcaagagttctgccaagcaagcaattattgcattcttgttctccatagctggcatagacaatagactagactagacaactaagaagaatttaagtaagaaga

SEQ ID NO: 59041 - DNA, 344 bp, Setaria italica
  misc_feature (133)..(133): n is a, c, g, or t
  Peptide Sequence Number=SeqID_125015
atttaatcatcttctgtagcggtggttccagaattagaccctgcgaaatcagaaggagagttgctttccgcgctagttacatgctgaaggtttgggggtcaaatacacgattctttatgcttctcaaccatcnggtttactggagaacccttccagggagcctctaggtaggcatcttgcagagaagaccaatactactactaaagctggcctgagcaaatgtgatggagagtgcctagtcaaatcaactcttcttgaaggaacttttgtgggaaattaagttagtactttactttaattactaattactttagtaattaattactaaggtaacttactaatta

SEQ ID NO: 59042 - DNA, 440 bp, Setaria italica
  Peptide Sequence Number=SeqID_125016
aaaactagtaaattatccatatgtgaatctatatatggtgaagttattactgagacagacattgcttcagttgtcactgaccataaacttgtcttttttccttagctacaatcctcagacatatctaaagataagcaagttgatccagctttagcagatacattgaagatgatgagaaattggagaactcattgctatctggctttgctgagaattgtaacaatggttttgaaagaaaccatatcacctacacggacacgtgtactgtaggtggtcaagatcttgagaagtataccaacatggatgctatcaatgacttggtaaggtacaggaaaattagcacagacggtcagactgatttaatcatcttctgtagcggtggtttccagaatttgacccccaaatccttcagcatgtaaactagcgcggaaagcaactct

SEQ ID NO: 59043 - DNA, 274 bp, Setaria italica
  Peptide Sequence Number=SeqID_125017
cttcttatcattttgatatcaggactatgccaacaaaagttccttccagaagagttgatttgactaggcacttttgttggcatagtgcttcttatcattttgatatcaggactcatgtgtatgatgggaattgatactccctcgaggtttgaagctccccaggaatcttgatcacactttaatgcaggatatgggagcttagcttggcgaggcacaagaaggatgaaggaccgatgtttgttggtctgcactttggaacagaactaacaatatc

SEQ ID NO: 59044 - DNA, 386 bp, Setaria italica
  Peptide Sequence Number=SeqID_125018
tgggcgcccaagaactacgggttccgttccgatgatgctaagcaagtagtccactatcagacagtgtctccaaagagtttagctaagtccgttcttgaggaaggtggctggtcaaacttgatggaggatgctcagaagaatgttaatgtcgccattgtttttcttggctcagagctacaatcatcagacatatcgaaagataagcaagttgatccagctttagcagatacattgaagctctccttcacaagttcagagttttccatggcattcccttatgtttccactacagatgatgagaaattggagaattcattgctgtccggctttgctgagattgtaacggtggtttgaagaatcgtgtcacctacacagacacatgtact

SEQ ID NO: 59045 - DNA, 249 bp, Setaria italica
  Peptide Sequence Number=SeqID_125019
tggtacttctattgttgtctattgtattgggtaattcgtactacttccgtttgtagtattttgaagctccccaggaatcttgatctcactttgacgcaggatatgggagctcgatgaggcacaaggagtatgaacgaccaatgtttgctggtctgcacttgtggatattgttagtttcctcttttgaagtggccttgtgtaaatgagccaaatgttatttacaatgtgctcaaattttttggtgtaata

SEQ ID NO: 59046 - DNA, 185 bp, Setaria italica
  Peptide Sequence Number=SeqID_125020
aagacgaataaccgaattacagaatcgcaaagaaccaaacggacgaacctaagaaggaacaggaaccccaccgagccaggcagcacaaatccccaatctctgatccctgctcgcccaaagatggcggcggcatgggcggtgctggcggtgttgctcgtcgcagcgcaggtgtcctcggcggcgcc

SEQ ID NO: 59047 - DNA, 122 bp, Setaria italica
  Peptide Sequence Number=SeqID_125021
cgatacaagcctcacacatgtattgttgcaaatagctcagctagatcttccgtaggcatgacaagtacatgtgtgaggcttgtatcgtacccgacatagcattgcctccagtgttttctgtg

SEQ ID NO: 59048 - DNA, 257 bp, Setaria italica
  Peptide Sequence Number=SeqID_125022
ttttatatcttctgcaattttttcaccctttaacattcttcaataagatgctgagcattggaagacaaaggacaactttgctataaagctaacatgaatcaccccctttcccttggcaagcatttgcccttaccaagcatggtaatctattaggagaattacataggtgtcagcaagcataggacgggaatccgagcaccgagctacacggctttgttagttgtggaattctttgtgcttcttcattgccatgtggt

SEQ ID NO: 59049 - DNA, 381 bp, Setaria italica
  Peptide Sequence Number=SeqID_125023
tagtacaatacaacgtttagactaccgtaagaataggtagacaatgtttgagtggttctacagtgcaattgattatccatggtttgcaaagagtgaatttgttgagtatttgaatcatgtcaagctgggtcatgttccaagactgactcgtgttgagtggggtgtcatacggagttctcttggaaagccccgtcggttgtcaaaacagtttttgtgtgaggagagagagaagctttcccagtatcgtgattcagtcagacagcactatgctgaacttcgatctggcattagagaaggtctaccaacggatcttgcacgacctcttgcagttgggcagcgtgttatagcctgccatcctagaaccagggagcttcatgatgg

SEQ ID NO: 59050 - DNA, 214 bp, Setaria italica
  misc_feature (18)..(18): n is a, c, g, or t
  Peptide Sequence Number=SeqID_125024
ctaatctattaatgcttnccggatacaacatgattcttgttctggtatatctgtacattataggtttctgctgaagaagggaaggcgtcttctaataaagagacaactgcacgaggtgcaacgcctccgcaagctgacttgacctcaaaggtcaaaagccgccgaaaaggaggcattcaaaaatcactaactcaagaatgtaaacctactgaag

SEQ ID NO: 59051 - DNA, 445 bp, Setaria italica
  Peptide Sequence Number=SeqID_125025
tttacgttaatttagtttacttaacgtttagttcggatgagcagactgaggctgcaatattgcatggtgatgattatgctggatctctagaaaacagctctgcaaagttacaaagtgttgttaagggaatatcctttcgcattacggtgtttgaacaaattcctgggaccctcgtaattaaaggttcattattgaataaagcattatcaggtactcccatggtctctaggtgactattggcatatgtcatgatcttttgaattctgaaacacctttatctgattgctttaatatatgacatgtatctatgctctcggttttcttgtagtttcatgtgtaactattagacatatccaatccggctcaaatagcgctgtgcctccattttgattgtgagctgtttgtccttccatctactgtatagagcagtggaatcaaatgaaca

SEQ ID NO: 59052 - DNA, 267 bp, Setaria italica
  Peptide Sequence Number=SeqID_125026
atgtaggttcgtttctgtcattctgtgttgctgacttgcgtgcaaataataagtagcaaccatggatttcaactacgatcataagtgctcttggcacgttaggttgataggaaactctacatgattgcacagttgcactttgattcgatctttggaggcttcatgctgtcagatgtccttgaaaattcatgaacctgttagcaacaaggtaataatagaatactagtaagacgaacaaacttaccaatacttaggacaagtttacta

SEQ ID NO: 59053 - DNA, 252 bp, Setaria italica
  Peptide Sequence Number=SeqID_125027
gtcaacctcatcggctactgcgcgcgcggcgccgaggacaagctgctcgtctacgagtacgtgcccaacgagagcctcgacaagatcctcttcgcccccgcctccggccactgtgagtgctccccattccgctccgttgattgctccctgaatttgcttttctgatttcccaccattagttatctagtactaattcgcgcgatcgagcaagtgatctccgttttcgtacaatcagacgccgagataattaga

SEQ ID NO: 59054 - DNA, 235 bp, Setaria italica
  Peptide Sequence Number=SeqID_125028
acaaggacgacgtgtacgcgtgccacagcctgatgctgctaagctcgagctcgaactcgtcgtccttgtcgagcaggcaggatggagagaggctgctgatcttggactccagcgcctcctttgtcatggcgccatgggtcgccgccagaatggcggcgacggccaccgtggacggccggtagtcgagcacgctcgcagcttcggcggtggagaagatgagtgcggcggccttggg

SEQ ID NO: 59055 - DNA, 474 bp, Setaria italica
  Peptide Sequence Number=SeqID_125029
ggttgaacgtgtacggcaggagcttaaaaatgagcttaagcaggggtacaaagaaagcttgttgatatcagagaagaaattctccgcaagcgcagagctggtaaactccctggggataccgcatctatattgaaagcctggtggcaggctcattccaagtggccataccctactgtatgtgacaccatgttaataccatttccgagcttacatatgccactagtttctgttcatggtgaacagctctttcctaactgatacaggaagacgacaaggctcgactggtgcaggaaacaggattacagctgaagcagatcaacaactggttcattaaccagcgcaaacggaactggcacagcaacccaacatcctctggtgaaaaagaccaagaagaaaaggtgatgacgaccggccctgagcagtcttgacgaagctagacgtacactataccttattgccaagtacattctccct

SEQ ID NO: 59056 - DNA, 341 bp, Setaria italica
  Peptide Sequence Number=SeqID_125030
ttagtaattaattactaagtaagtaagtaaatttcttccgtctaagtcgtctagtagtcttggttaaacttccctgggataccgcatctatattgaaagcctggtggcaggctcattccaagtggccataccctactgaagacgacaaggctcgactggtgcaggaaacaggattacagctgaagcagatcaacaactggttcattaaccagcgcaaacggaactggcacagcaacccaacatcctctggtgaaaaagccaagaagaaaaggtgatgacgaccggcctgagcagtcttgacgaagctagacgtacactataccttattgccaagtacattc

SEQ ID NO: 59057 - DNA, 250 bp, Setaria italica
  Peptide Sequence Number=SeqID_125031
ccgtcgaccagctcccccgccatcgacgcgcagatcgccgcgcggcccccgccccctcgcggccgcagctggggccgcggccgcgggagggccatccggcggcgaggagctcgacctcttcatgacacattacgtgttgctcctttgctcgttcaaagaacaactccagcagcatgtacgtgttcatgcaatggaagcagtgatgggttgttgggagcttgaacaatctttacaaagcctcacaggggca

SEQ ID NO: 59058 - DNA, 257 bp, Setaria italica
  misc_feature (29)..(29): n is a, c, g, or t
  misc_feature (63)..(63): n is a, c, g, or t
  Peptide Sequence Number=SeqID_125032
tcaatcagcgtaagcggaactggcacagnaacccggcttcatcctcatccgacaaaagcaagngaaaaaggtacggcaacgagaaactacactaaacttcaccttgtactacaggtacctttctggttcctgtttcctgtatgcttattcttggaataaagaagcactgcaggtgatggcaacgcagagcaatcctggtagagcgcggttggagaagaattatatgtaaataacgcttctactgagaagaatggcac

SEQ ID NO: 59059 - DNA, 127 bp, Setaria italica
  Peptide Sequence Number=SeqID_125033
ccggcaggagctgaagcatgagcttaagcaggggtacagagaaaaacttgtggatattagggaggagataatgcgggaccaaatcccattccatctgacccctcatttccatcaaacatgttgctct

SEQ ID NO: 59060 - DNA, 342 bp, Setaria italica
  Peptide Sequence Number=SeqID_125034
atcctctggtgaaaagaccaagaagtaaaaggttattatagtgaaagcagcgttgctgttacttcataggcttgccaccttttatgcttattgctgctctgattttaacatgtgaaaatggaaacattgcaggtgatgacgaccggccctgagcagtcttgacgaagctagacgtacactataccttattgccaagtacattctccctcccactctgtagccaacaagtatggagaccgacctgttcggagggaactttatgaagtaatgaagatatgcgtcaccgggggaccttagcgggtcacctaatggcccttagttttgtacctacgttggttggta

SEQ ID NO: 59061 - DNA, 367 bp, Setaria italica
  Peptide Sequence Number=SeqID_125035
acttagtaggaagcagcttgaaagggttgatctgagcatgtcagattacagtattaaattggccttctggattaatgtgtacaattctcttatcatgcatgtaatgttgaatgatctatggtgattttgcttaagttttctcgtttaatgattttactgccttattaatctgtttgttattcacttgcaggcgtatctggcatacggaattccaaacagctcgctgaaaagatggcgctatttcacaaggctgcctacaatattggaggtcatgccgttaccgccaattccattgaacacgccttgctgtgcttcaaatctccacggattggtcgtgtatgtagatttgcagtttcatgctgaagtt

SEQ ID NO: 59062 - DNA, 321 bp, Setaria italica
  misc_feature (77)..(77): n is a, c, g, or t
  misc_feature (123)..(123): n is a, c, g, or t
  Peptide Sequence Number=SeqID_125036
ggaaaatagttcaatcaaacaacaaatgtactgtggaaatagcttccatatcagttgacaagaaccagatgccagangtttcttatgcgattactcactacaggttgcttgtggagcagcttnaaagggttgatctgagcatgtcagattacagtattaaattggccttctggattaatgtgtacaattctcttatcatgcatgcgtatctggcatacggaattccaaacagctcgctgaaaagaaataggcgactaatttacaacaaaggactagacctaacaaataattaggaaggtacaatagaccgttaaccgacca

SEQ ID NO: 59063 - DNA, 237 bp, Setaria italica
  Peptide Sequence Number=SeqID_125037
ctttatttcactgacatatacacacctgctaaactgagaatccaacgtatgtacctgcagtggttcgagtccattctctcgacggcgatgcggaagaaatgcgcggacgagaagcagctggtccagctcaagttcggcctgccggactgccagcctctggcccttttcgccctgtgcaccggcgcttcgtctgaccccatgctgcgggtgtacacggccaagaacgtgatggaggag

SEQ ID NO: 59064 - DNA, 185 bp, Setaria italica
  Peptide Sequence Number=SeqID_125038
atttgaacatggatgccttcaattatcaaaatgataacaaaactgattacatcgtacaaaacgacaagtacaaatatcaaaatgataacaaaactgattacatcgtacaaaacgacaagtacaaatatctatctgtcaccctcttctttcacggcgttcactattgtcatcgtaccgtgaacgct

SEQ ID NO: 59065 - DNA, 391 bp, Setaria italica
  Peptide Sequence Number=SeqID_125039
aatggcttgagacggatgcattatatactatgttggcactcagtcatctttgtgaaacctttgagatcagtgatgtggcaattaagctgtatctacaaaacactgtcagtcatctgtataaactggttcttgccaatctttggtattcttcttaggatcatcacagagagcaagatccttgtcaaactctttcattgtcttcacaaacgtcttggcaccttgcatgatcaacctttccaccatgaatagctgataattgttctcaattatcggagccaatatactgctgaagttagatgaatatgctagcttgtacctgtatgcacagcaaaccatcattagagatgcaaacagtgtagtatcttgtcccaagagagcccatgcaaatgct

SEQ ID NO: 59066 - DNA, 341 bp, Setaria italica
  Peptide Sequence Number=SeqID_125040
acagtgttttgtagatacagcttaattgccacatcactgatctcaaaacactgtcagtcatctgtataaactggttcttgccaatctttggtattcttcttaggatcatcacagagagcaagatccttgtcaaactctttcattgtcttcacaaacgtcttggcaccttgcatgatcaacctttccaccatgaatagctgataattgttctcaattatcggagccaatatactgctgaagttagatgaatatgctagcttgtacctgtatgcacagcaaaccatcattagagatgcaaacagtgtagtatcttgtcccaagagagcccatgcaaagtgctg

SEQ ID NO: 59067 - DNA, 387 bp, Setaria italica
  Peptide Sequence Number=SeqID_125041
ccatcggctggggctcctgcttcccaggcaccttctgcagttcatcacaaaagaaaaaaggtgtaagaaccaatgcatggcagtcgaagcggaacagacggcaagaactgctggatgaagagggaccgggtgctcaccttggtgtccatgtgttccagcttcctccatttcgcaaacatgttgccgtagaacttggcgtcccgcctgttgtactctctcatcttctccttcagggtcttgtacaccagcttcacgtccctattgtcagggtcaaattccagcgctttctttacatccagctctgccagctccaggtctacaagttcgatgtatgcttgcgcccttctgtacagggccttaacattggtgctctcaagttccagaacc

SEQ ID NO: 59068 - DNA, 417 bp, Setaria italica
  Peptide Sequence Number=SeqID_125042
tgtaatttggtattcttaaagttggttggtattattgttactaaggtaggtctttattgtaaagtctatttgtagtattccccaagttattgtttgtacaccgtttacttccttgagttacaagccaaagtttgatgctctggttgttgaactgaaggaggctgagaaagcgtctctgaaggagtcagaaaggatcgagaaggaaattgctgaactcagggaaatgaagaaaaagatcagcacaatgacagcggatgagtactttgagaagcaccctgaagtcaagcagaagtttgatgatgaaatccgtaacgattactggggatattgaagagcagaagagaacttttagctgccatttccatgtttgtgaagaaccaataatttttccgtgccctgatatgtataggggaaacc

SEQ ID NO: 59069 - DNA, 418 bp, Setaria italica
  Peptide Sequence Number=SeqID_125043
atatatcctttgtgagttgtggggtttatattatttaaacttcaattacatcaaagtaggcagcaagcttcctttctctcatgttggatgctcgacttattgctacattaccttgcaagttgctgggcgtataagacagccgagttatgcatcctcccctgaacttgaaatactgcatattccacaagtgttacttttatgccctagatcaatgtgttctctaagttgtgtatgttttctgttgttgcaggaaccccaaccgattgattgggagtactacagaaaaggaattggatctaaagtggtggatatgtacaaggaggcttatgaaagcattgagatccccaagtatgttgacaccgttactcctgagtacaagccaaagtttgatgctctggttgttgaactgaaggaggct

SEQ ID NO: 59070 - DNA, 261 bp, Setaria italica
  Peptide Sequence Number=SeqID_125044
atgcgaggagtcggggcggggcgggggaagagacgagcatcttcgccaggccgtcccagtcgatcgccttgccagccttcgccgcaccttcgaggacgtcaaccaccagctccagaccaagttctctcaggaaccccagccaattgactgggagtactacagaaaaggaatcggatcaaaagttgtcgatatgtacaaggaggcgtacgaaagcatagagatccccaagtatgttgacactgtcactccacagtacaagcc

SEQ ID NO: 59071 - DNA, 343 bp, Setaria italica
  Peptide Sequence Number=SeqID_125045
cctccttgtacatatccaccactttagatccaattccttttctgtagttctcccaggaacccaaccgattgattgggagtactacagaaaaggaattggatctaaagtggtggatatgtacaaggaggcttatgaaagcattgagatccccaagtatgttgacaccgttactcctgagtacaagccaaagtttgatgctctggttgttgaactgaaggaggctgagaaagcgtctctgaaggagtcagaaaggatcgagaaggaaattgctgaactcagggaaatgaagaaaaagatcagcacaatgacttcagggtgcttctcaaagtactcattccgctgt

SEQ ID NO: 59072 - DNA, 359 bp, Setaria italica
  Peptide Sequence Number=SeqID_125046
gtcaaccaccagctccagaccaagttctcccaggaaccccaaccgattgattgggagtactacagaaaaggaattggatctaaagtggtggatatgtacaaggaggcttatgaaagcattgagatccccaagtatgttgacaccgttactcctgagtacaagccaaagtttgatgctctggttgttgaactgaaggaggctgagaaagcgtctctgaaggagtcagaaaggatcgagaaggaaattgctgaactcagggaaatgaagaaaagatcagcacaatgacagcggatgagtactttgagaagcacccagtaatcgttacggatttcatcatcaaacttctgcttgacttcagg

SEQ ID NO: 59073 - DNA, 276 bp, Setaria italica
  Peptide Sequence Number=SeqID_125047
aatcgttacggatttcatcatcaaacttctgcttgacttcagggtgcttctcaaagtactcatccgctgtcattgtgctgatctttttcttcatttccctgagttcagcaatttccttctcgatcctttctgactccttcagagacgctttctcagcctccttcagttcaacaaccagagcatcaaactttggcttgtactcaggagtactacagaaaaggaattggatctaaagtggtggatatgtacaaggaggcttatgaaagcattgagatc

SEQ ID NO: 59074 - DNA, 377 bp, Setaria italica
  misc_feature (358)..(358): n is a, c, g, or t
  Peptide Sequence Number=SeqID_125048
gttttctgttgttgcaggaaccccaaccgattgattgggagtactacagaaaaggaattggatctaaagtggtggatatgtacaaggaggcttatgaaagtaagtatccttgtaatacagaactaatttcatttctagaaatcttaaaggagtgttttctgggtaacattgaagatgttctgaagtaactgccttgctctgttgatttttcaagcttctttctagttacggggcaagggtttatactcatggatatcccttacagacctttgaaacttcaaaacaatctggctgtttgtttatggtttcatttctttctgttaatcataacaattgttacaaactgtgtataaaattntaaagtatgcttagaagga

SEQ ID NO: 59075 - DNA, 358 bp, Setaria italica
  Peptide Sequence Number=SeqID_125049
gcttccaaaggctatcagtgcacgtgtgtatggcacatttttcttttgatgtataatgcgtttatggcatgcatattggtgattggtgaagccgtactgtactgttggcccaaactagtgcctattggctatgctatgagatctttttcttgcaaggctgcggatcggttcctgagctcctcccatccacaagatctctggccaactctatccaacccatacttgctgctccctgcccatgctcatcattattcctaatcaatctcgaccaccatcagttgtagccggccggcggccgcggcttctggtgctggatggtgagccgcgccgggagcggcctgcccgtgccggacccgcc

SEQ ID NO: 59076 - DNA, 307 bp, Setaria italica
  Peptide Sequence Number=SeqID_125050
gatcagaccaagatagttaatacgttgcagactctttatgtatttgcaattcatgattttccaaagaaaaagaagggcatggaacagctgaggcaagagaggctagcgccatcaagtccacaggaatccagtctcctctttgaggatgtcataaaatgcccaagcaatgatgatattagcttctataaacagcaactctctattcatgaatatgcctcgtgctccaacagttgagaagatgatggcattcagtgttttaaccccatactacaatgaggatgtgatgtacaacagggaccagcttcgt

SEQ ID NO: 59077 - DNA, 214 bp, Setaria italica
  misc_feature (38)..(38): n is a, c, g, or t
  misc_feature (40)..(44): n is a, c, g, or t
  misc_feature (46)..(46): n is a, c, g, or t
  Peptide Sequence Number=SeqID_125051
gtacggtacgtacgtcgtacgtagtagtagtagtatanannnnncncgactttgggcctcatatagaggccagaccttagcacggactgttaggggaatgatgtacttcatgagagcagcaccatcttcctgccctttaaacaattggcttacagtactggttcctctgtctaacctcctttgtggtcgccgctgcaaaccaccattcatggga

SEQ ID NO: 59078 - DNA, 324 bp, Setaria italica
  Peptide Sequence Number=SeqID_125052
catatctattgctctggtattcaagccatatctgaggaggtctgagatagtgtggaaaactgtggtgacaacacagccacaggtgcaataacaattactccgaacaatatatcgtacaaacgtgctacagtcaccacagttttccacactatatctgagcaatagatatgattccccagccagttggcagaaaagccaaaagactagtaaaagtatcaacaaactgaaactttgtgaattttaacagcacaacaatagcagccactgtaccaccaacaatgattgcctggacaagacgataccgtatgtgcttttttgctgaat

SEQ ID NO: 59079 - DNA, 384 bp, Setaria italica
  Peptide Sequence Number=SeqID_125053
atcttatgatcctgtctttgattttcaataaagcatagattaatcatgtctctaaaaaagttggttatcaaccatataattcaatcccagcaatcacagccttcaagagtcagacctagtactcctaaatgcattattatagccaatgttgtcaacagcaaagaaaatacaagttaactgcatccatagcatacctcaaaacgcatgtgccttttttccagtaatgatttgggaaatatgaagtcccctgctgaaggcttcattgaacaggatccttgtttgcatttcctgaagcccaggcaaccatgacaacacagccacaggtgcaataacaattactccgaacaatatatcgtacaaactgtggtgactgtagcacgtttg

SEQ ID NO: 59080 - DNA, 332 bp, Setaria italica
  Peptide Sequence Number=SeqID_125054
aaagtatcaacaaactgaaacttttactagtcttttggcttttctgccaactggctggggaatcatatctatggcttgaataccagagcaatagatatgattccccagccagttggcagaaaagccaaaagactagtaaaagtatcaacaaactgaaactttgtgaattttaacagcacaacaatagcagccactgtaccaccaacaatgattgcctggacaagacgataccgtatgtgctttttgctgaatatctgtctcgaaaataagccactgtcaccagagccacaaaagctaggagaatgcatgccacatacgtcactgagtcggag

SEQ ID NO: 59081 - DNA, 359 bp, Setaria italica
  Peptide Sequence Number=SeqID_125055
aagattagtgcatgattctgatttccggttttccttctaccaagctttaactctccaggcaacttaaccctgtaaatttcaacctcccgctgcagtagctgatcgtatttcacaagaacagagaagtactctgtttcaccaccattgttctgcctttcgtcaacataggcaacacgtaatgcttcataatttttcattagctccaatatttcaaaagcacgggggtcattcttagctttctgctgaccatatatctggcatgcaactacatatgtgtatttcatgaggacagtcccatactcacttcctcacgtgcattgagcagagcaagcagcagtgtgagctccttgtttaaagga

SEQ ID NO: 59082 - DNA, 302 bp, Setaria italica
  misc_feature (265)..(265): n is a, c, g, or t
  Peptide Sequence Number=SeqID_125056
aacggaaaataacgaaaaacccaaaaattaaacgaaaagaaccgaaccggaagaaagacttaccgtacgggacggacggacaatagaacaaagacggccccgcgacgacccctcctcctccttcgcctccgcgcccaagcgccagtacggcggaggggcggctatggcgcgcagcaggggtactcggaggaccggggcagcgcgcggcgggtggcggaccactacagcgcacggtccaaccagacgctcgaggagcgcgagaacngccccatcatccacctcaagaagctcaacaactggat

SEQ ID NO: 59083 - DNA, 192 bp, Setaria italica
  Peptide Sequence Number=SeqID_125057
gccgaaggctcgataaaggattgcatgactcgctacaacggtgatacagatcaacagcgaaggaagaagttcagttttccagcacgacttatttgcactgattgttatgaggctcgcctggatgaatatttatctgaggatgccccatttctgagacacgcaacaggggatacaaggcacacaggggatagg

SEQ ID NO: 59084 - DNA, 262 bp, Setaria italica
  Peptide Sequence Number=SeqID_125058
ctcttcttggattggcggctcggggcctcctcggtgattggtggcgggagaggggcaggaaagaggcaggaaagctcatggcgtccaactacgtggacaccgctgcggaggaaggcaggttccacggccactaccaccaccacagcaccacgcccaccggcgcggccgcggcgtcgccgaagcacatgcggaggagctggtcgtccgcctcctccgcccacggccacggccacgcgcccaagtgcgtctgcgccccggcaca

SEQ ID NO: 59085 - DNA, 486 bp, Setaria italica
  Peptide Sequence Number=SeqID_125059
taaaaagaaaacaaaataaagaaattaaaggtaacctaaactagaaacaaataataaggaataacaagcatcaaatcgctctttctaatatcattgatttctctgaggtctatcctaaactcctaactattgatgagaaaatttagaatgtgcatgattattatactactgagtgttctgcctatttacttaagagtacctcatgacattctggtgtacttttagcgttttaatcagtgggtgctgactcatggaaagcatttcatatattaggttccgattcatatcatggcctcagaatttagcatgtttggtacattttttaatgttctggatttttgcacctgccttccatcaattgttttggattttttcttcaaggacatgtcatgctgactactcccaactactgcaggtacagggctgtgacaagcgcatattacagaggggcactgggagctcttctagtctatgacatcaccaggc

SEQ ID NO: 59086 - DNA, 254 bp, Setaria italica
  Peptide Sequence Number=SeqID_125060
atcgactacgtgttcaaggtggtggtggtgggggactcggcggtggggaagacgcagctgctggcgcgcttcacgcgggacgagttcgcgctcgactccaagtccaccatcggggtggagttccagacgcgcaccctcacgctccaccgcaagcgcgtcaaggcgcagatctgggacaccgccggccaggagaggtacgttacgtctcgtctcgtacgccggccacatcacatgctgctccgatccgctccgtc

SEQ ID NO: 59087 - DNA, 229 bp, Setaria italica
  Peptide Sequence Number=SeqID_125061
ggaactacaacacttgctcttagggatttcctgcgaccggacctgggagcaagtgttgtagttccatgtgatgcttctgtatttggtgttatgtgtgctgaatatattcctgcaatattgtttttgttgtaaatccctgtcgaaatactcagatttgggctggttgaaacactgttgtattttatatttttgtcacaattgtgacatgagggtaagacattagcacatg

SEQ ID NO: 59088 - DNA, 416 bp, Setaria italica
  Peptide Sequence Number=SeqID_125062
cctctaccgcaggtaccatcaaaatttttgtaggatcaagtgagttatcccttgagcttatttctcaaaacactgtatgcttttctgcactaactcgagatgctcttattactctgtcctagggatgtagatttgcctgcttccttcatacagaagtacctcgtgcagaaacttaatctttcaagtgaagctgaggtggagatactgtgtggtggcaagcctgtgagcccaggaatgacactgcacgatctagcagattgctggctaaataaaggacaaaagggccgagtgcggtcatatgtgggcacacctgctgctggattcatagcgaaggtattctatggcagatcaggagcatccatacctgaaactgaaaataaccaaggttgatcgagggcttcctcttcgtttctgaa

SEQ ID NO: 59089 - DNA, 253 bp, Setaria italica
  Peptide Sequence Number=SeqID_125063
ggttgacatcaatcattgccacgtatgtcatattatatgaggttccaaccctttggcagaaaccatttttcactgggagtggatgcacctcggtaagttaaaggcttctttcaaaaagccaaattggataaatgatctccaaaagcaaccatcatttcttgatttggattcaattattttggcgctcaattgttcaaatgcagctagactgccagttactcaggaatgctcaaccagcagctctggggcttta

SEQ ID NO: 59090 - DNA, 174 bp, Setaria italica
  Peptide Sequence Number=SeqID_125064
cgtttgcacaatgaatcacagcacttagctacacattgttcctatccacctgtatgtaagcagcgttcaaaacaacagaactacatacatctgaaatgtgatcagtcagtcaggcgggcactcccttgaggtgttgagtccctcctatatttattaacttcttctttcattcat

SEQ ID NO: 59091 - DNA, 413 bp, Setaria italica
  misc_feature (24)..(24): n is a, c, g, or t
  Peptide Sequence Number=SeqID_125065
gcctgaccggtcggcgtcgtacanctggaagcagagccggagagcatcgtcgcctcgggagttcctgaggctggagagcccgcagaggatctccctcatgtccacggtgccgtcacggttgttgtcgaacaagtcgaacacgcgaggcgccagcggaaccagcgcgtccattttcatcgccttcaggacctgttcaaactcttccagcgtggcgttctctccatccgcacatctgcgccaggatcgctctattcgtgcaaaatgaacgcgcagattgtctagctcctctgagctaagatcatgggttcctaaaaggttcctcagccttttcgtcctcaatgccaccttgctgctaaggacgctggctattgcggctgcccgcagtttccttctagcattgaacctctgcagtt

SEQ ID NO: 59092 - DNA, 202 bp, Setaria italica
  Peptide Sequence Number=SeqID_125066
gttcagtgcctgaaaccactatcaagaaggggaatgactaccccgtgggacctgtagtccttggcttcttcatctttgttgtcttcctgtcagcaaggcgcccttgaggtagtcatgttctagccggccggtgcgggcggggtcgccggagcgggggcggcggtgacgatggcggtggcggttggggtgggggagcagcaac

SEQ ID NO: 59093 - DNA, 162 bp, Setaria italica
  Peptide Sequence Number=SeqID_125067
gaaatagtttgtctaattgttttgtatgttctatatgtaaattagctatcggattgactacgagttttcatatatgctgaatgctggcttttgtgtggacagactacctcaaggcgccttgctgacaggaagactgcaaagttccagaagaacatcaaccaa

SEQ ID NO: 59094 - DNA, 428 bp, Setaria italica
  misc_feature (341)..(341): n is a, c, g, or t
  misc_feature (374)..(374): n is a, c, g, or t
  Peptide Sequence Number=SeqID_125068
ctcattctcagttggtttgatgtagaatgagaagatattgagacaggtcctttttcttctggaaagaacttcctcaatatcttctcattctcagttggtttgatgtagaggaagttctttccagaagaaaaaggacctgtctcaaaaattgatcccattggcaactctccagttataatcaagaaggctcaacttgagaagattgctccaacctggatgaatgtttcattaaaaatgaaagaggatcaggagacagacaaagcgtttggatgggtcttggaaatgtatgcatatgccgttgctagtgcactgcatggtgtgcaccatagtctccgtaaagnttttatgattcagcctccttgggacctaaaacngacaacacattcatcatccattatacatatggatgtgattatacaatgaagggt

SEQ ID NO: 59095 - DNA, 251 bp, Setaria italica
  Peptide Sequence Number=SeqID_125069
cagccaccaccaccaactactctctgtctcgcaacatggtaccctgaattatctcttgctctcaatgcaacaaacagagatcctgctgctcagttcctagttactttcaaaacaaggatactatggggctacgatcctttgttgctggtggtaaactactgcagattaataggaagacggagtttgtatttgcaagccattctttcgatgtttgggaaagctggatgctggatggttctttgctggagggt

SEQ ID NO: 59096 - DNA, 237 bp, Setaria italica
  Peptide Sequence Number=SeqID_125070
cgagatgctgctatctgtgcacggttcacctcttggggtctacaaagaagaaaatttagcagctattcaggaatctggtaatggaaatgaagatgctccctgctaatgcactaaacaaaccagtaagaaagttgtgtgattattaattactgcagttgcacaactgtcaggaggttgatcattgtttacattgcaggatgctgccagccattgaggtcttggcaataactgtaggtg

SEQ ID NO: 59097 - DNA, 464 bp, Setaria italica
  misc_feature (441)..(441): n is a, c, g, or t
  Peptide Sequence Number=SeqID_125071
taagttaagtccaatggaggaaatagaatgaacattgccctcgatccctcttcaagtaacgcccagagtccagaattgcattgcagtgttttgctttcacagactgtcttcaatctcattacaagattctgttaggtaaactgtatgccgatgatattgaagacagtttacctaacagaatcttgtaatgagattgctgttgccgcggtctttggagcctaggagtgcattctggagactttttcagacaatccatcgacaacgccttccatttcctcagggatttcatcatcctctgggtgtgtcgttgtctcaaataaacacttggaggcactaatgcttgcactcttcaggtagctcctggagcttaagcttggggatttcacgccatcctggccaacatcttctgaccttggaggactcacagtagtgcgggcaacngaatctgcacttctctcctggtc

SEQ ID NO: 59098 - DNA, 248 bp, Setaria italica
  Peptide Sequence Number=SeqID_125072
aatatcatcggcatacagtttacctaacagaatcttgtaatgagattgctgttgccgcggtctttggagcctaggagtgcattctggagactttttcagacaatccatcgacaacgccttccatttcctcagggatttcatcatcctaacagagaaaccaaacatcagtggtggaggcactacctaatctctaaagtgaacaaaagaaaggtacaacttgcatgcaacaaatcaatcgaacatgttct

SEQ ID NO: 59099 - DNA, 171 bp, Setaria italica
  Peptide Sequence Number=SeqID_125073
tgaggtgactcaccatgcttcattgttcattctatttcctccatggactaactaatgttacatcgcagggatccatgcagggcccatgctggtacaaacaggatgaaaattgccctcgatccctcctcaaataaacacccagaggatgatgaaatccctgaggaaatggaa

SEQ ID NO: 59100 - DNA, 363 bp, Setaria italica
  Peptide Sequence Number=SeqID_125074
agaaggtaatgcgaaaatctagcatgttgttggcatttgtgttcaccttaacatttgcaaattttgagcagtttagtgccaaacattttatttattgaaacatgcattattaacttaaacaatgttggtgttcaatctattctgtcaaaggttttgattgttgatgatgggagcactgaccgaacctctaaagttggcttcaagttttgtaaaaggaacacaagattgacaatgttagagttcttctacttgggagaaatcatggaagggtgaagcagtccgaaaggggatgctccattctcgtggtgaactattactcatgcttgatgctgatgggcaacaaagtgactgatttggaaagct

SEQ ID NO: 59101 - DNA, 251 bp, Setaria italica
  Peptide Sequence Number=SeqID_125075
ggctcagaaagttaattccagccctggaacatctactggttcacctcagaaagtatcagatgttgaaattgctgtctttggctcacgtgctcatttggagaagcaggctcttgcaacaaggaagtggtatcgaaactttcttatgaaaggtttccacttggtagttttgttgactgctggtcctgggatcagagacacacaggtatgttttatttgcttaatatcctctaataaacgagtgcagttgattt

SEQ ID NO: 59102 - DNA, 142 bp, Setaria italica
  Peptide Sequence Number=SeqID_125076
tgctggagatagtgtgcgtgtcaccgctgacgaggagaaccggcgtaaagggcaccggatccatgtccgcgccgtacgctcaggaccacatcatcgcggagcggaagcggcgggagaagatcaaccaacgcttcatcgagct

SEQ ID NO: 59103 - DNA, 251 bp, Setaria italica
  Peptide Sequence Number=SeqID_125077
tgtcgaattatcaacttgtggggtaatatatgcacttatgactgactcactaggaaaagctgcagggatatgccagttcttgctcacgtttctatgcttactcataaatattttcttgatccgttcagtctcattagcagataaatcatcagaaccttgatcgcattcaggttccaggcctttcccctttccatctgaataatttccaccaggtttccttttcttcgacttactacttgtttccatatgca

SEQ ID NO: 59104 - DNA, 265 bp, Setaria italica
  Peptide Sequence Number=SeqID_125078
ggatggctggaacacacggcacactatgagacattgcatatagatgcactgaattgaatacacaacaaatggacattccctagtgttagttaaatatatacctaatatcaacaagatgaactataactgacgattctgatatctcctccaatgttgctctaaatgctgctacctggacaagtatcaagaaatgatatattaaaagttgacatcataaaggtagggcaaaatcatagtatctagcagttttaacttactttactaa

SEQ ID NO: 59105 - DNA, 195 bp, Setaria italica
  Peptide Sequence Number=SeqID_125079
cagcacagcagtcattgatgccaatggcactcacataattagtccattttgtacagcaagggcattcttttgcgaatctacaagatggactaattatgtgagtgccattggcatcaatgactgctgtgctggaggacatcgatcatacagcagccaccacctgctgccgtagaggtgtgagaagccttgcaagag

SEQ ID NO: 59106 - DNA, 281 bp, Setaria italica
  Peptide Sequence Number=SeqID_125080
gttcgaaaaaatctcggccatcctcatgtttggcgactccatcgtcgatcccggcaacaacaaccaccggctgacagaggcgagggccaacttccctccatacgggcaggacttccccggcggagttgccaccgggagattctccaatggtttggtcccaggggacctcttaggtatgttgtcacaagatatactgtttgtattttcattatggtataaaattgtcggcaggagttgctgcatggaagggattaaaatcacaaaactattaaaatgtataa

SEQ ID NO: 59107 - DNA, 267 bp, Setaria italica
  Peptide Sequence Number=SeqID_125081
acgtgttatttctcaagccgtcttctttacaatcatgggggcaaatgatattgtaaataactattttgcagttcctttgagacgtcatgactatgaccttccttcttatatggactttcttgtctcttcagcgatcaacttcacaacggtaattgttatgattgtaactgcacaaattctttgagactggatgatatgaaaacttttaatggcttatttttgttcccattcataaattttatttctacattcaacatctttttttca

SEQ ID NO: 59108 - DNA, 433 bp, Setaria italica
  Peptide Sequence Number=SeqID_125082
gcaccccgcacctgatgtgccagatttacacaaatgatactttataaaatgagtatattaaatattgctcttccaaaaacagattgctcaaatagagagtagaatggtatcagtgcatgcaaaaggaatagtatctgtggaacacacactgatacagtaaagtacattaccccagatctgctggaagtcggaacctgcctacccgaacacgcttcaacgcatagacctatcagcgagaaggattaagtatcagttacttcccaagggaaaaagcaatagaaaaaatgttgctcacagatttacattctatagtatccaggtacagtgccagccaaactatgtgaagaatgacagagcagtggcttatgtgcattggtgagtgtacagcaatatgtgcacccatcatgccatcatgtgttactcatatgtgcca

SEQ ID NO: 59109 - DNA, 148 bp, Setaria italica
  Peptide Sequence Number=SeqID_125083
taggagttggaaggttctgctgtcttaaaggatctggaggctggtcagcgaagcagttcataggttcttcaaggcaaaagtatggaacttgcctatcagcctccagatcctttaagactagcagaacctccatccttgaccaaacgct

SEQ ID NO: 59110 - DNA, 364 bp, Setaria italica
  Peptide Sequence Number=SeqID_125084
catgttgctgggactcctgaaaaagattcaacgtcgccggcctgagttgcgtcttatcatctcctctgcaacaattgaagcaagatcaatgtcaactttcttcaacattaggtcaatccctatcaagaagtttcatttcttcctggctgtatgttgttgttattttgcctataaccttgcaagtgaaatgaccacaattcctatccaaggcattgatattttgtaaggttttttttctcaataactgctgtcgcactaagctgcactaaattcttgggatccaggatacatcgcataaatgataaatctaaggcatactggtatcgctaggaatctcatgcaatgtggctctgttcactgtttg

SEQ ID NO: 59111 - DNA, 236 bp, Setaria italica
  Peptide Sequence Number=SeqID_125085
atcatctcctctgcaacaattgaagcaagatcaatgtcaactttcttcaacattaggcggaagaattccttgcttgggtcttctgatgatttgcccaacccagaacctgctatactttctgttgaaggtaaaggatacactgtggaaattcattatgttgaagaacctgtctcagactacttacaggctgccgtgaatactgtacttcttattcatgaaaaaggaaccaccagggg

SEQ ID NO: 59112 - DNA, 188 bp, Setaria italica
  Peptide Sequence Number=SeqID_125086
caagtagttgcctatctttttctgctggccaggtaaaagataagttcacttttggttcaatgctgccattggttaaacggacgatagtaacatttccccggccatctccaagggcaattatatcctccctgaataatctcagtccatcttacatcctctacgttagagagttcagcatgatgcagata

SEQ ID NO: 59113 - DNA, 265 bp, Setaria italica
  Peptide Sequence Number=SeqID_125087
ttttttttttttttttttggggttttggtaaggcatgaaaaaccaaaggggtgtcactgactgtcacccagataatctgtacagagtacatgatgcataagggtacctcaccggtagaataaatccccatcagaacagggggcaatcgtgaactcattattttctgtaagcatcagttacaggtatgagcagagtctataaacaactacagatcctagagcacattctcaaagctgttctattgttttctgacccaaaactggca

SEQ ID NO: 59114 - DNA, 286 bp, Setaria italica
  Peptide Sequence Number=SeqID_125088
caagtctacagcagaatctctgtgtcggcaaattggtgcttttgagcacttggatgactttgcggggtattcctatacagcatcagaatttgaaggattgcctcctctggaaaggacaaatgcattgcaaaggatggttctgttttcaaggtgatttaatatcattgccttgcagaaacaagccaagacttgacatacttttgaatggttaatgacaccattctcacttttctctttaaccgtgaactcaaaaaagcaaaatattcatccggacctgcaattgttg

SEQ ID NO: 59115 - DNA, 346 bp, Setaria italica
  Peptide Sequence Number=SeqID_125089
cctatggcttgttgggtcgattattctgacaatgcttcttcacgtagcagtcctgtacattgaaccactagcagctcttttctcggtgtctccattatcgtgggctgagtggaaagttgttctttatctatccttcccagtaattcttattgatgaggtattgaaattgttctcgagaagcccacgaggacgaaggttccctttaaggttgtggagacgtgagataattccagcgtcagtcattgtatgaatcagattgcccacaacaggatttgcagtgcttgttagtctacaaacattagccgaaatcaatcttgctaccagcagaagccaagattcccgctct

SEQ ID NO: 59116 - DNA, 151 bp, Setaria italica
  Peptide Sequence Number=SeqID_125090
cttcacgtagcagtcctgtacattgaaccactagcagctcttttctcggtgtctccattatcgtgggctgagtggaaagttgttctttatctatccttcccagttagtacttattctaccttggaaggatagataaagaacaactttccac

SEQ ID NO: 59117 - DNA, 452 bp, Setaria italica
  Peptide Sequence Number=SeqID_125091
gcatgaaaactatctagttgagtaggaaaatgtggctgcgtggtacagcagtatgtatatcttgttcagagagtagaaattgcaagatcctgtcgcctctattctcttctttgctatttcttctcgaaacctcacttaaccactacttcaaaccggtttatcacatgtacggcagcaggcttacattggcatatactcttatgcaggttctcaacggtcatccttacaacaggaagtgtgacgtttacagctttgggatctgcctgtgggagatatactgctgcgacatgccgtacccggatcttagcttctcagaagtcacttctgctgttgttcgccagaacctgaggcccgagataccgcgctgctgcccgagctcgctagcgaacgtgatgaagcggtgctgggacgcgaacccggacaagcggcccgagatggcggaggttgtgtcc

SEQ ID NO: 59118 - DNA, 262 bp, Setaria italica
  Peptide Sequence Number=SeqID_125092
aactgtacagtaataaaattgctactcagaagctactacagtccagggattaaacacttatttaatgtgttggcatttatttctttcatttgatgctttcacctatgtgccagcagtgcacttcggcatttgctcctcacggcctcatattgttagcattaacctgaaacggctcaagtattgattttagtagattcatggaactacaaccatattttttgcctttccaaatttactgttaagtacaaatataagaaatacg

SEQ ID NO: 59119 - DNA, 241 bp, Setaria italica
  Peptide Sequence Number=SeqID_125093
tactaaccaactactatttgtgttggttaacatgggatacaatatatcattactacacctaataaagatctcctcagcagttgtatcttccttggcttctacattctcaggtttttattctttcttgtgcgcagcatctcatttacttgcaccagtgaatagcacatcaaagttttgaagtttcggtttcattttcacttcgccatgtctcaattttatggcaaagtgcagctctgaacat

SEQ ID NO: 59120 - DNA, 191 bp, Setaria italica
  misc_feature (4)..(4): n is a, c, g, or t
  misc_feature (15)..(15): n is a, c, g, or t
  Peptide Sequence Number=SeqID_125094
aatntcgttggttgnggaggggcgccgctactaccactactatttgtgttggttaacatgggatacaatatatcattactacacctaataaagatctcctcagcagttgtatcttccttggcttctacattctcagggaataatgaatagagtctgagaggagtaagtacctggccgtcggacattgttat

SEQ ID NO: 59121 - DNA, 410 bp, Setaria italica
  Peptide Sequence Number=SeqID_125095
aaacctctgctcgttcctcgtcgccgccgggccatggccgcgcaccgggagctgctcctcctcctcctcgccgccgcggtcgtcgcggcggaggcggcggaggcggcagatatgggggtggtggtggatatggcggtggatacggtggcggcggtggtggttacggtggtggatatcctggagctgaatattatggtggaggtggggctggcactaggagctacatacaagagtgcttcaacaatattaccaagtgaacttccataaaagaattaccatggctcgcttgctttaggcacggcttcatgttctccctttgatgttaactttcatttggtacaatgttgtaatatcatgttatatggagccatgtataaaataaaatggaagacccactttattattttaaa

SEQ ID NO: 59122 - DNA, 412 bp, Setaria italica
  Peptide Sequence Number=SeqID_125096
aagtagactcattttgaagggcagagatggcttccaaatctctgcttctcattggcgttgtcctagcttccctcctcctcgtcaccaaggacgtggttgctgctagaaaccagttcgtcgaggcaaatgagtccgagggaaagaacacgaagcttactggtggtggtggatatggcggtggatacggtggcggcggtggtggttacggtggtggatatcctggagctgaatattatggtggaggtgggggctggcactaggagctacatacaagagtgcttcaacaatattaccaagtgaacttccataaaagaattaccatggctcgcttgctttaggcacggcttcatgttctcctttgattgttaactttctatttggtacaattgttagtaatatcatgttatatgga

SEQ ID NO: 59123 - DNA, 252 bp, Setaria italica
  Peptide Sequence Number=SeqID_125097
gctttgtaggggagggggcgggggagggggagcgagcgggcgacgaaggttcggggaaggcggcggcggcggaaatggattgggggtcacgcttattatggtggcggctatggtggtggatatggtggagggtacggtggcggctacggtggatatgtacctgggcgcggttggtatggcggtgggtatggttaccctgactttggtggtggatacggtggcggcggaggcggcggaggcggcagatatggg

SEQ ID NO: 59124 - DNA, 242 bp, Setaria italica
  Peptide Sequence Number=SeqID_125098
aaaatgctttcaacattggatgatccattcactcgtttcttggaacctgagaaattgaagagcttgcggtctggtacgcaaggcgcactaacgggtgtaggtctatcgattagttacccaatggcagttaatggatcacctacaggagttgctgtaatgacagccaccccaggtggtcctgcagaaaaggctggcattcttcctggagacatcattttggcaattgacaacagaagcactga

SEQ ID NO: 59125 - DNA, 394 bp, Setaria italica
  Peptide Sequence Number=SeqID_125099
ctgaaggtgagttgataagattcttaagttgttataagatggtacaacatagttatgccatactgctctcaatatggatccttcttcttcaatgtgattgacatggtggcagaggcgatggaaaaggtcgctggtgaggtcacccacacgttccccagcaatgaaaatctcaaggaggccacctcaaagattaagacggtcaatgatgcgaccgaggaagatgctgagaaagccgaggctccgatccaaaagtgtgagggtgctggtcctgctgatggagacattgacgatgggaagtggcagcacaggaggttacaggaggttgccgctaggtactagcagcatgctagcacggagctctgccagggagtaggctgatagttgagcgagagaa

SEQ ID NO: 59126 - DNA, 219 bp, Setaria italica
  Peptide Sequence Number=SeqID_125100
ttatattgacatcgtttcctttttcctttgagccgttgcattattgaccggttggatggatgatcaatcggcagtgtgagggtgctggtcctgctgatggagacattgacgatgggaagtggcagcacaggaggttacaggaggttgccgctaggtactagcagcatgctagcacggagctctgccagggaagtaggctgatagttgagcgagagaaag

SEQ ID NO: 59127 - DNA, 484 bp, Setaria italica
  Peptide Sequence Number=SeqID_125101
cgctcctcgcggcccgtcggtgctgccgttgccgtacacgttggtctgcagccgccactcgtgacgccgccggttgcccaggaactcgaagtcaagctcgtcgtggttcttctcgaacacgtcgccgttggacagctgcatagtatatattcatggatcatcacttggatcaagaattgagctcatatatgtttcatgatgatgacgaacaacagtttgatcaggtgcaagtgcaacgcaactacccatgaccgcagcaggtagaggagcaaaaggcaaaggcaaaggcatgtggacgttgcaacaaacaacctctgcacaaggcgaaaggcgaactgcatgcagacagattcatggaagtatgtactcgatgggatagatatgatcaatttggtttggttttcaagaacaaggagcaatctttttttggtttttggaaagaaaggaacagacttgctctgtttcctctaacttggttagtatt

SEQ ID NO: 59128 - DNA, 292 bp, Setaria italica
  Peptide Sequence Number=SeqID_125102
gggttcgtaagggtctattctaggttaccgtcttccttcgtcggtccccggttcggttgtcttgtccgttgccgtacacgttggtctgcagccgccactcgtgacgccgccggttgcccaggaactcgaagtcaagctcgtcgtggttcttctcgaacacgtcgccgttggacaggtagaaagcgacgacgacgccggccgtgtggtccttgggcaacctgatggcggcgctgaagaatccatggtggtagtagtgggaggagatgaagccggaacccgagtagcggttgag

SEQ ID NO: 59129 - DNA, 195 bp, Setaria italica
  Peptide Sequence Number=SeqID_125103
tcccctagctcaagacatgccaatatattggctcaagcagtagagattctaatgtcatccaataagaaaactatatatggttgtgactatgtgccagctccaagagagatactaagatcctgaacataaaatttgggtaaactaaaagtagtagcgatgctgtatgtattgaccaagaaaaggagatagtgacaa

SEQ ID NO: 59130 - DNA, 262 bp, Setaria italica
  misc_feature (256)..(256): n is a, c, g, or t
  Peptide Sequence Number=SeqID_125104
ctaaaatatcggagtataattaaagggcttttcggagagtgcaatagtgcttcaaactttgaataaaaatcacttctattatgttcccacacattcagttgtcaatctctgccattaatattaggctaggcaccgacacaaccaacttagagtgttcctcgtgatcgaaataatgaatataactttgcaaaatagagacttttctcaaggtgtcttgttccactgttgctagctccacttagtttatacaaaccgntatagc

SEQ ID NO: 59131 - DNA, 419 bp, Setaria italica
  Peptide Sequence Number=SeqID_125105
aagggaaataacaaagtaaacaaataacctaacaattagaaactaaacaagggtacaagttaacaaggaaaatttcggattgttacctatataggtgttatacaaagggcgtcggtcttgcaaattgcaatggtatgactccacagcggccaccacgttttcagctcaggagatgacaagcaacgcctcatctctaacttccgctgatggggtgatactgcgatagttgtagctttgccggaatcctcctcagtatgtacaggacaagtgatgaaggaagaatttcgacaagcaggtaatagaagaaattaaggacgggatgataaagaacgtcgaggtcagcttctttgttaaacgcagtgaaacacatcattatgcaccgtgccaagaaacaacagaaacatatactggcaactctg

SEQ ID NO: 59132 - DNA, 366 bp, Setaria italica
  Peptide Sequence Number=SeqID_125106
taaactgcatagcatggactggctcactagtgcaagcaaaaaatgaatgcacatcagcatttggattgaagtggatgctaaatcagggactcatggagcaccatgaagacattattgattatttaaacagaaaggggctatggtgatacttctcttcaggaggaatacattacggaggcttatctctgtgttggctaacaaccatgataggagaacaaagcagttgaatggcattcataaatcacacgtccactcaaaagaggaggctgagatactagcgagattcaagccaaagatggacgtgtcaactctaagcccaagcaagtttcttctattggaatgttcagcgtttctgatgcttgggat

SEQ ID NO: 59133 - DNA, 244 bp, Setaria italica
  Peptide Sequence Number=SeqID_125107
tcatcaggattagagaccactcctagatggatcgaatcagaatcatagaaagccacctcgcatgctttctcaggcatccgcgacatggccagggaatggtggactggtggagggagcaccgccggaccacgatcaggcgtccgcaccttagtcgtacttcgctccctcgccagcacctttaccacggaatggagggataccggcgccgcctccagagctcaagccatggtggagagaggagtcg

SEQ ID NO: 59134 - DNA, 133 bp, Setaria italica
  Peptide Sequence Number=SeqID_125108
ttgtcatcaggattagagaccactcctagatggatcgaatcagaatcatagaaagccacctcgcatgctggagaataaagtgttcttacatgcatgatcaccaaggaaaatcataaatttaactattttttgt

SEQ ID NO: 59135 - DNA, 377 bp, Setaria italica
  misc_feature (12)..(12): n is a, c, g, or t
  misc_feature (301)..(301): n is a, c, g, or t
  misc_feature (357)..(357): n is a, c, g, or t
  Peptide Sequence Number=SeqID_125109
gaaggaaggaanacttagaaatttacttaggaagaaagggaaggacaaatacccttaggaatttacaaaactacggaccaatagtaagcatcacttagtgtacagtccacttctgtgacagaccagatagctgatcaaaatgtgataagcgaggctaaaggtagttttgcatttgccacctcacctcatgggggattctgtcgaaagcagtggcaagccaggaattcattgtgccgtgaaggcaatacagctgataatcttatgcttttggatggagatacccagcaacacaggtgggganaaaattgtgaaacgtggaactaaagggctactgcaactcaagccgaagcagttccngcactgcgatggccagataa

SEQ ID NO: 59136 - DNA, 237 bp, Setaria italica
  Peptide Sequence Number=SeqID_125110
gtcgcgcggccatagagaaagctcaggaggagctgaggcaggaatacgatatccgtgaagagcgaaggagggagcttgaatttctggagaagggaggcaatcccttggatttcaaactcggccatgtagcatcacttagtgtacagtccacttctgtgacagaccagatagctgatcaaaatgtgataagcgaggctaaaggtagttttgcatttgccacctcacctcatggggatt

SEQ ID NO: 59137 - DNA, 116 bp, Setaria italica
  Peptide Sequence Number=SeqID_125111
gaacctaaagggaagctgctgctcatccatgggatgatcgatgaacttctcggtgtaaaggtatcataaccatcccatgcagtcactggagcaccagacaccgcacagcagaatgt

SEQ ID NO: 59138 - DNA, 328 bp, Setaria italica
  Peptide Sequence Number=SeqID_125112
cttcccattcttctgaacttctgaagtatcggcaatatcaacatgacatgtatgcactctgccactctgacactgtgtacatgttccactctgactgcaggtgcacggcacagaacaagacactaagcgcaaaacctgcatcagagtggaaccatgtacacagtgtcagatggcaatatcaacatgacatgtatgcactctgccactctgacactgtgtacatgttccactctgatgcaggtgcacggcacagaacaagacactgcgcaaaacctgccactccctggtcctgcaggctgcagatgacctgctactagtatgctgctcc

SEQ ID NO: 59139 - DNA, 127 bp, Setaria italica
  Peptide Sequence Number=SeqID_125113
cctcggcatggccaccaccatctctaacgggagaatcaaaggaagcgtaggagaaggacatgacggcagcgacgacggagagccacgccatgtcgtggaagtccggtatgaaggagaggaagagctg

SEQ ID NO: 59140 - DNA, 263 bp, Setaria italica
  Peptide Sequence Number=SeqID_125114
tactttagtactttagtgctttttaatgtttcttctctttgtccttggactcagagaagaaacataaaaagcacaaagacaaagaccgggataaagacaaggagcataagaagcataaacatcggcataaagatcggagtaaggacaaagataaagacaaggacaaggataagaaaaaggataaaagtgtgcatcatgattctgcaggcgatcattcaaagaacatcatgataagaagaggaagcatgagggaatgaggattc

SEQ ID NO: 59141 - DNA, 263 bp, Setaria italica
  Peptide Sequence Number=SeqID_125115
tatatgagggataagcctgcttttattcagccctttgatatggaaatactggggcaagcattccagcttcgagaaacagctccagtagatttgccctctgtaagatcctttctatcatcccagttcccatattatgttattggatttgctcattgtactgtttacaacatttatcatatcaacaggctgaaaagggtatacctactatttcgggtaaaccgaaaagtgagtccaaggacaaagagaagaaacataaaaagcac

SEQ ID NO: 59142 - DNA, 409 bp, Setaria italica
  Peptide Sequence Number=SeqID_125116
tttagaaaataatgtccggatagattagattaacagatttgaacaaataggaaaactcctaattatctgaaaaactagtctttcccactgctgaacacacaacaggaattaacacaaagatgcttggtataagtagcacaaactccagagctgaacacgcagtaggtgttatagtaaataagatgcttgaagaatatgtaagggttggatatattaacaagttaaatagtagaaaaaaggtttggctcaaattttcaagtgcaactcagaatgaccaggtccaatctcaaatttgtttaatgaaagtgcacacttcaaactaacaaggtttaatctgacaaccaattactaagacccaatttttaaactagggaaataaattagacttacaataagacttacttttaca

SEQ ID NO: 59143 - DNA, 505 bp, Setaria italica
  Peptide Sequence Number=SeqID_125117
actacaaaagaaccaagaacttactctgaaatattagaaactctccagagaatatcagaggaggtcggagatgagcagggtcctgctgccagcatttctgaagaagctcacaaagctttgcatgtgtatgttttggaattgtaggacgtaaacccttctgcaccaccccaacagctgcttgtagtggagtcaagtactcataaggaatcttccccgtgagtagttcccacaacaaaattccaaaactgaaaacatcagccttgtggtcatagggtttgtgctctatgacctctggggccatccaccggtaagtaccagtttctgcagtcataactccagattgagctttaacacgtgcaacaccaaaatcagcaactttaacagtcccattttcgtccatcagaagattggcagttttcaaatcacgatgaataatattattctggtgtaagtagctcatgccttttgacacatccattgcaactccaactaagcaggaagtttg

SEQ ID NO: 59144 - DNA, 476 bp, Setaria italica
  Peptide Sequence Number=SeqID_125118
gggtttagtgcaagcaccaataaattgcacaacattcttgtgacggaccttcctaaaatccaaaaacatactcagcaagaatacataaaaaaacagagtgccagggaggcactctatagggtgatttttatcataaagatgatgtaagttacataatgtatttgcagcttaaatctaggctcattctacgaagagatagccaatatgaagataaaggactgataacataagatgttggtatgtaaaatggcagcaaaaggatctcaacttaaaagatgactttcacagataagtgactgtaggatagtacacattatagaagaaataagaagtcatataaggtttaacatgacaggtgcaatctcagataccttaaaggtagattcaattagcatgccagaaataaaaatatcacaataagaacccatcctgtgatataaagtgaaacagagttgagtgtacagcaaaacccacct

SEQ ID NO: 59145 - DNA, 385 bp, Setaria italica
  Peptide Sequence Number=SeqID_125119
agttttacatcaatttcccattcactagaaccatctgttggtatctcaacacgatcagctgctggattctcagcaatctcttcaatcctgccaatttccttctgtactgcttctactaaatcctctgtttcctcatcgtgccaaccaacaacaacaaagacgtcgagtgagtaaccatcatttgttgaaaatgcatgtgcttcttgaatgtttagaccaagttcaccaagcagagatgtcagctcactgagaagctttggcttgtcaatggtagaaaaggtgatttcatgcatgggcctgtacagagatcgaccattatcagaggtgctgtcatgatcttggccttgagacttgctaacttcaagagcaagggcctcaaagaata

SEQ ID NO: 59146 - DNA, 244 bp, Setaria italica
  Peptide Sequence Number=SeqID_125120
cgacagcataaactcctggctcctgttcatacaagtaagatacaatgaagtcttcacaccgcacaaacctcctctgatattctctggagagtttctaatatttcagagaagtctggtctttgagcagggtcctgctgccagcatttctgaagaagctcacaaagctttgcatgtgtatgttttggaattgtaggacgtaaacccttctgcaccaccccaacagctgcttgtagtggagtcaagt

SEQ ID NO: 59147 - DNA, 207 bp, Setaria italica
  Peptide Sequence Number=SeqID_125121
atatattctgtgactatacatagattggggtttagtgcaagcaccaataaattgcacaacattcttgtgacggaccttcctcataatatatacttcctgctcaaatttgggaataaagtagcatcaggatcatatggtgatctttaccggggtacatattgcagccaagatgttgctattaaagtgctgaaacctgagagaataaat

SEQ ID NO: 59148 - DNA, 273 bp, Setaria italica
  Peptide Sequence Number=SeqID_125122
cgtaacgggcggggaggcggttgaagtggttccagagctcgtcgtcgaacccgggcgcccgggcctcgggcaggccagactcgtggaggcggcggagcacctccgtgtacacctcgagcttgtggcgctgctgctgctgctgcttccgcgcctgcgccgccacggtctcgatctcacccccagctcgcggattaggaaagcgtagaggggcgagagaaataaataaccgtgcctgattttttgaggaggaggagaaaggaaattggaaagtga

SEQ ID NO: 59149 - DNA, 114 bp, Setaria italica
  Peptide Sequence Number=SeqID_125123
ggcgcacattcttcaacccagccagtgcgaaagtgttttcaagaatacgggctttatctggagtgccaacaccaatagcaatgagttttactccagccaaatcaaatctctcct

SEQ ID NO: 59150 - DNA, 374 bp, Setaria italica
  Peptide Sequence Number=SeqID_125124
ctgcttctctctcaagctcctttgccgcttagcttctgcagcagcctcggcagccgctgctgcttcagccttcttgcgagcatcctctgcagctttagcctcagcttgcaaccgggctctctctgtaatagaaatgatgtcatacagctgctgccagcttaaaaggattctattgcatctcaccttctctttgtaacctctcaagctcctccctctcacgccgaagcttctcaggatccttttttgtaacctggtcaagtgccttttcgtgagccttgagaattgtatcagcaaagcggcttctcagaagggcagctcggatttgcttttcaggggagacctgcttctcagacacattttcccctaaaagttcc

SEQ ID NO: 59151 - DNA, 232 bp, Setaria italica
  Peptide Sequence Number=SeqID_125125
ttagtaccatatatctcatgcatgtagttacgccaaatcaatgtcgtaaggattacaaggatgaattataattatgttgaatgtgcttctattttgtaagattcatccctttttttgtttgctgagcttatcagtggtgaatcttgtgttgctgtgctaaatgcagatgctgatgcgagcaattatggaatcgctgaaggactatgaacagtcaagtacaaaaaatgcgcaa

SEQ ID NO: 59152 - DNA, 245 bp, Setaria italica
  Peptide Sequence Number=SeqID_125126
tggttccagaggaaggacttggaggtcaaaaatgatctgggcaagaaattgcagtgtagtcactatatgccggttgtgattcctgaaggaaaagctctcccctgtgtcatatactgtcatggtaacagggtctggactctctgaaggagaacatgtcaccttaggctggaatgagaaagaagatctgaaagctgttgttaactatttgcgtacagatgggaatgtatcttgcatagctttgtggg

SEQ ID NO: 59153 - DNA, 213 bp, Setaria italica
  Peptide Sequence Number=SeqID_125127
aagtaagaaataagttaaggtaaccctaacctacaatactaagacgtaatacaaacaagcaactcctcccaatggccgcaacggaaggctgctcactccaacctctgatgatggcgagtatgtggagtactcatttgatagcttatcagatatgccttacaccatggaagatgaagatagaatgctgatgcgagcaattatggaatcgctgaa

SEQ ID NO: 59154 - DNA, 250 bp, Setaria italica
  Peptide Sequence Number=SeqID_125128
atggtgattactttttgtaggtttggactccacaacatgaataatatcctcaacaatgtagaaatcaaagtctgcactggatactatctttccatcactgttgaggatattattcatgttgtggagtccaaacctacaaagagtcatggtgattactttttgagacaaattttgaagtttgaggaaatgatgggtgaattggagaaagtacagcttgactgagcctggtagtgatcatggaggaaaatag

SEQ ID NO: 59155 - DNA, 175 bp, Setaria italica
  Peptide Sequence Number=SeqID_125129
taaacttaaagttaaactaagtaagggaacaacaaacgaacaaggacaaattagaccaaacaatgcatacatctgctcatttttcttcagtatctgatcatactgaggggacttctggtggtactgcttgtacttgaggatatatagcagaattttgttgaattcacgtgtcgca

SEQ ID NO: 59156 - DNA, 244 bp, Setaria italica
  Peptide Sequence Number=SeqID_125130
tccccttccggtctacgtccgtcttcttccgtccggtcgtcgtaggtcccaggtactacctgcgtcctcggaaacgccgccgtccacttctcccactgccctaccacgccgtacgtcccgcccttccccagcgagcatgtgtcgttgccgtagaacctgacgtggatgcgctcgaacagccccgtccggagcgccgcccccaggcggcggttcggggaacccgcaccgcggcgtcgccgtcagg

SEQ ID NO: 59157 - DNA, 241 bp, Setaria italica
  Peptide Sequence Number=SeqID_125131
tagcctgaacatcagattgaactactgggcgtgtcgacagtagcttaccattcttgatcattgtttcagcaatctacaaaagtactacagatgaatattacatttttcacatgccttgtggtgatgtggtccaatctttgacaataattgatagaagctaagttagcaatggcacaggaaaaaacaatgctttactgaggcaaaaggacaggatgaattcgagacacaaattctgaggcaa

SEQ ID NO: 59158 - DNA, 411 bp, Setaria italica
  Peptide Sequence Number=SeqID_125132
aatggccggccaagattacagtggaatgtatgtgcattgttgactgtgggctctactgtggtgtcagcagcacttttgcgtgtcatgggaggtgatgtggccgagctgccactggttgctacaagtcgggatgtcaagggctgggctacttccaggccttgttctcatgtatagagagggtgctaatctcgctgaagatcaagcactttgtgcttccagctgcccatgaagctgaaggaatctggatgaacaaatttggcttctctcggaataccctacccaagaaggaagactaggaaagactacaatacttaaacggggtagacaacctagaactaataattaccaaggggaacaatacaataacctagtaaacaaaggactagttacctactagaccaatacaataca

SEQ ID NO: 59159 - DNA, 378 bp, Setaria italica
  Peptide Sequence Number=SeqID_125133
gcttctgttaaatttactgttatacttgactgacatgcttctgttttgtgctgcttagtgtgagaaagagtatcatgtaggatgtttgcagagtcaatggcaggtagaactaaaggaattgccagagggggagtggttctgttgcggtagttgctctgagacacgatcttcattggaaaagataatctctgatggagctcaacttttggcggagccagatattgaaatcataaggaagaaacatgagacaagagatttatgcatggacactagtacagatctcaaatggcaattactctgtggtaaaagagctactgaagatggaagaatattgctctcagctgcggtgccgattttcatcaatccttgatccaatca

SEQ ID NO: 59160 - DNA, 410 bp, Setaria italica
  Peptide Sequence Number=SeqID_125134
agaatagagcaagaccgacaaatggctacactgatcaatgttcaactgaacatggtagataagctacagtgaaatgattgttcctatgttgtctcctcaatgccaatccaaacatctaatgccactaccagatgtggcatccctatcagaaatttcagttccacggaattcacaaactatgttacaatggagaatggacagagcaaaagatcttactgtaaattcctttcaagttaggatgttgaccgcggacaagctcagtcaccacttctaagtgtggattcttttccttaaaggctggaagatgtgcctccatgaaggccctaatccccctgctgctccctccccaatcgcagtagttcaccacgagctctgcagctgccatacccctcctcagcgccatcctgccg

SEQ ID NO: 59161 - DNA, 419 bp, Setaria italica
  Peptide Sequence Number=SeqID_125135
aaagagggggaagatccagtggtcttcactggagacactttgttcattgctggttgtgggaggtttttttgagggtactgcagagcaaatgtatcagtcccttattgttacattgggctcgctgccaaagtcaactcaggtttactgtgggcatgagtacactgtgaagagcctaaaattcatgctgacactcgagccggagaatgagaagatgaaacagaaactggaatgggctgaaaagcagcgtgaagcaaatcagcctacagtcccttcaactataggagatgagtttgagatcaataccttcatgcgcgttgatctaccagaaattacaggtcctaagtttcggttgtcctaagttcttccggtttgtaagtcgtcttgtagtagtaggttcaggaagtatcaaggtattaact

SEQ ID NO: 59162 - DNA, 306 bp, Setaria italica
  Peptide Sequence Number=SeqID_125136
cagcctacagtcccttcaactataggagatgagtttgagatcaataccttcatgcgcgttgatctaccagaaatacaggccaagttcggtgccaagtctccggttgaagcgctgagagaggtcaggaagatcaaggataactggaaaggttgatacccatgcggccatgcggttgccaccactctgttggacggccagcctctcaaagtgagctaatgcagaaacctttgccctgtaggtgggaaacatgattattgtttttattaacacggagcttattacaagtcttctccatccccacgccat

SEQ ID NO: 59163 - DNA, 344 bp, Setaria italica
  Peptide Sequence Number=SeqID_125137
tagacgaacttaacagcatacattaatggccaatagaattgtgttgttcagtggttatcagattctccctacctactcacaagtcaacaatttagcatggtattttgttgtttggtcggtatggagtaattggaagagccatcctttgacatgctagcctaacacctcatacatttgcattacaggcaagaaacagcgaaaatgagctgtccgaggcatctattggttctgtggactatatttcttcactatacagatctaatggtgaatcggagcagataaaacaagcagtaaaaggttctgcatacgggcctgaatttgtccaagctgctctatctgttgaa

SEQ ID NO: 59164 - DNA, 374 bp, Setaria italica
  Peptide Sequence Number=SeqID_125138
cagctaaacaagccaaagttgcaaagatggctcgatgaatttggagagtactatagcagagttgtggtggccctttctttggctgttgcactgttgggtccgttactctttaagtggcccttttttggtaactcagtttgtaggggttcaatttaccgtggattaggacttatggtggctgcatctccctgtgcattggctgtagctccattggcatatgcaactgcaatcagttctcttgctagtaagggctgttttagatcactctgttggaaaggagcttccagctgttgctgtagaaagttttgaatgcttacctggtaggggagttgctgctactttgagtggtgtaaaggcaagaaacaacgaaaatt

SEQ ID NO: 59165 - DNA, 371 bp, Setaria italica
  Peptide Sequence Number=SeqID_125139
tcgtcttgtaagtagttatttttactaagttaagttctaattgttttgtattgttgtagggtaacttgaaggaaaatcaccctgaatttgccctgttgttagaaacaagtggtgaagaatctgtacagttttcaaatttaagttataccagagttcctgtgcatgatcttgaagtgggttctcatatcttggtcagagctggtgaggctgtgcctgttgatggagaagtctaccaaggttcatcaactgtcacaattgaacacctaactggtgaaacaaaacctcttgaaaggacagtgggagatgccataccaggcggtgccaggaacttggaaggaatgatgattgtaaaggtgaccaaatcatgggag

SEQ ID NO: 59166 - DNA, 311 bp, Setaria italica
  Peptide Sequence Number=SeqID_125140
ttgttatttgtttttgtcttgtcgtctttcctttcttgttctttgggtattttctttccttcttttggttgacggtacttcttcatgaaggaggaacccttctagtgtgcctcaactcaatacgagccctgaacactccgacatggtccttggtagacgacatccggcagctctttgatggactaaggaattatttctcatccaagttcaacaactcttcatcaaactatttcgcgaacactgttcccttgtagataccatgtacagcaacggttcttttcttaccttctgtgtggtctgttgtattagta

SEQ ID NO: 59167 - DNA, 204 bp, Setaria italica
  misc_feature (152)..(204): n is a, c, g, or t
  Peptide Sequence Number=SeqID_125141
gcaggataagtgagcaatttaaacttccgttcttgaatctatttccttgtagtctgaagcagatgtgtggaaattttgactgttttgctgcattgcagtgatgagtatgttgccgtattattgaagtataacagtacatgttttggttaggnnnnnnnnnnnnnnnnnnnnnnnnnnnnnnnnnnnnnnnnnnnnnnnnnnnnn

SEQ ID NO: 59168 - DNA, 417 bp, Setaria italica
  Peptide Sequence Number=SeqID_125142
accaataccttagttaatttcctatatgacagcacaaaagctcacacaaacttttcaagctaacacacaaagactcgggtttagactgttcacaaaaactattcattgtttgctaaatgtttagactgttagttgacatgttttcttcagataatagaatccatttcagaagatctagaaataacgcagtagcaatgggaaactataacaggttgactagatattgaaaaatattgtggtacccagtcaacaaggggcatagttcatttatctaacaattgttttgaacaaaagactagtggcttgcctgcgtagaagaaccctggaagatttttctccatcttctctatagcgtccaatactgaaccgtaatcacggccatacaaaggaaaagcatttctcaagtatatatgcttc

SEQ ID NO: 59169 - DNA, 110 bp, Setaria italica
  Peptide Sequence Number=SeqID_125143
gagaatgcttcacaaaagttggttgcccttctacacccaagaggttggagctccagcaagatctctattgtggcttcccccaacaaatgttgtatacagatattggtcat

SEQ ID NO: 59170 - DNA, 247 bp, Setaria italica
  Peptide Sequence Number=SeqID_125144
caaacttgtatatgcgcattatgtggaacgctgcccaaaccggaacctttttttgatccacttttagatgaacagcctacatccacaaggaagcgagctcctaaaactgttgaggcggttctttcacttgagcagaaaattatccgtactgcagctctatctgatgcttgtaaagtattttcttgtagtattccctattacttccttatttggttaagggttttctttattttcttttaaattttta

SEQ ID NO: 59171 - DNA, 202 bp, Setaria italica
  Peptide Sequence Number=SeqID_125145
cccatactccatggaagggtcatcaaatgcaagtgatgatcatcatcatgctgttgctggtggcaagcggaaacatgaagccctagaagtagatgaagaggaatcaataattgcagaaaatgaagtactttggagtatgggatctcagaaaatctttcagcatcagatagagctgcagtacggataattttctgctcaagtg

SEQ ID NO: 59172 - DNA, 321 bp, Setaria italica
  Peptide Sequence Number=SeqID_125146
gggaaattcatgggcaggactgtggcggggcctttcagcatgtcccgcaagaacgccagcagctctactgctcttcctttgtaaacgaatgatacatgaccttaacatacaatgtgcctctgtccttggtatccctatttttaagtggatctactgaatgcagcagcttcagagagatttcacgggcgacctcaggttcaagatcattcactgctagtttagccacacccagtctcttgtcttgttgaagtttgtcttcatcataaacctcaaaaatgacagattgggtttctttgtcttcgacaataagctcaaatgttt

SEQ ID NO: 59173 - DNA, 232 bp, Setaria italica
  Peptide Sequence Number=SeqID_125147
aagaatagctgcctggctctccagtgtcccgtgtccactctgatgcgcggtgcggcgctccacacccacccagcgatctccacagggcggccgcgcggcgtggatctccttcagtcgctcaaggatgaggtacctcaaaccgcagtgaatgtggtcttggaagagcttatccctagatcgtgaagcggcaatctgtcccgacgaaaaaaagagatcgacgctttaccaaaag

SEQ ID NO: 59174 - DNA, 290 bp, Setaria italica
  Peptide Sequence Number=SeqID_125148
gctgaggttgaagccgtcattgcaaggctgtgaaacgcttccagattcttgctattcccatcatcgatcagtaatagacagctttgtacgaagcatggacatgttgatgcgggccaatctgcctagtgtgttgccatggctgtcatcatcatactcttgtcaactccactggggcagtcgctgatagtctgattcactgcagccctgtcacactgtttgtttacaaagtaagacgttagaagaaacttactagtaactagaccaagaaaaagaaaagtaacgtttaagaa

SEQ ID NO: 59175 - DNA, 315 bp, Setaria italica
  misc_feature (41)..(41): n is a, c, g, or t
  Peptide Sequence Number=SeqID_125149
cgcaaaggcaattggatcaggctctgaaggagctgatagcnccttgcaggagcagtacaacaaggatctgaccctccaggaggcggagaccatagccctttctatcctgaagcaggttatggaagagaaggtgaccccaaacaatgttgatatcgccaaggtcgcccccaagtaccacctctacacccctgctgaggttgaagccgtcattgcaaggctgtgaaacgcttccagatttctttgtcttattccctattctattcgtattctagttaattagacagtctttgttacgaagtctattggtactattgt

SEQ ID NO: 59176 - DNA, 333 bp, Setaria italica
  Peptide Sequence Number=SeqID_125150
gttccaggtcgagtacgccatcgaggcaatcaagttgggatcgactgcgatcgggttgaagacaaaggatggtgttgtcctcgctgttgagaaacgtgtcacctcgccactgctggaacccagcagtgtggagaaaataatggaaattgatgagcacataggctgtgccatgagtggacttattgctgatgctagaacgctagtcgagcatgctcgtgttgagacccagaatcataggttctcatatggggagccaatgaccgtagaatcttctacaacaaagctaatactagtagaacttaggactactagacgactttaggttagaaagga

SEQ ID NO: 59177 - DNA, 307 bp, Setaria italica
  misc_feature (303)..(303): n is a, c, g, or t
  Peptide Sequence Number=SeqID_125151
taaattaatttaccctaatttagaccaaactaattttaacaatggcaacccagccccacagaaaactgcgtcacccatctacttttttgtttccattcaactagaacagatgtgcaaaagtagtcattttatggagtggggttctgatgtacttatctattggtgcagtcacgaccatttggagtgtctcttctaattgctggacatgatgagaatggaccgagcttgtaagtattgatccatttagctcactgaactgtgtttcttgacaactggccttagaatccatagttaaaaaaaacntctg

SEQ ID NO: 59178 - DNA, 313 bp, Setaria italica
  misc_feature (173)..(173): n is a, c, g, or t
  Peptide Sequence Number=SeqID_125152
ccaaaagcatccagagcatccccctccgtgtagtcggcctggaggaggtccaggtattggtcccacttgttcccaatcaccttgccgcaggtgaagcagcgcaaccgggaatgatcatcttcgccgccgccgccgccgccgccttcgccttcacgacaggatgtttctcacgnggacggagtacgaccgcggggtgaacaccttctcgccggaggggcggctgttccaggtcgagtacgccatcgaggcaatcaagttgggatcgactgcgatcgggttgaagacaaaggatggtgttgtcctcgctgttgag

SEQ ID NO: 59179 - DNA, 163 bp, Setaria italica
  Peptide Sequence Number=SeqID_125153
ttttgtttttgtttagtttaaacgttttgttttcttacctttcgttccttacttgtcttggaacccagcagtgtggagaaaataatggaaattgatgagcacataggctgtgccatgagtggacttattgctgatgctagaacgctagtcgagcatgctcgtg

SEQ ID NO: 59180 - DNA, 368 bp, Setaria italica
  Peptide Sequence Number=SeqID_125154
acctctgaacttcaaagtttcactattgaagggggtaccaaacccaaaggctattcattcttccaaagctgtaggagagccgccatttttcctgagatcctctgtcttttttgcgataaaggatgcaatcttagctgcaagggctgaggaggggcacatcggctggttcccactggacaaccctgcaactcctgaaagaataagaatggcgtgtgttgattccattacaaagaaatttgctagtgcatattaccggcccaaacttagcgtgtaaaggttgctgccaatgttgaaggaccagtatataaatatctatgtgaacccacaagccttttctgttcataataaaaacaaagtgtgttcagtac

SEQ ID NO: 59181 - DNA, 242 bp, Setaria italica
  Peptide Sequence Number=SeqID_125155
gaggaggtgctcaccgagacctcgtcgctcggggcgccgtcgccgtcgggctcctcgatcggggagaactcctcgtcggaggccggcggggaggacggggagggaggaggaggtcgagagcaagctcaaggagggtgacgcgctcggctgcttggacgcgctcgaggactccttgcccatcaagtgagttgataaagctttcatctttatcatcatcttggcttgtttatgcttattcttct

SEQ ID NO: 59182 - DNA, 354 bp, Setaria italica
  Peptide Sequence Number=SeqID_125156
agtttttttagtaatagtactacgtagaagtgtgacataacatgtgcattttttttgcaagtcaatgctgttccagctagaaaattggcaagacttccacatccttcttatcacatagaaaagaagagcctgctaagtaccaactggtgtgttgaataatatgtgcaattgtcctgttacacgcttacaccttggttgacatcaaaagttgccccggggtctcttgccaatgagaatcagtaacaaagacaaactgaaacgacaaggaaagagttagcagcagccttggagaaccccaacctacgccagttggttgatgaatgcttatgctccaatgatccatactcacattaa

SEQ ID NO: 59183 - DNA, 256 bp, Setaria italica
  misc_feature (103)..(103): n is a, c, g, or t
  Peptide Sequence Number=SeqID_125157
aacccttctcatatgaggtgcacctcagtaagactgcattgtgagggatatcaagacagatagggcaagtaacatcctccatccatctctgatcgaattttangtccagatcaaaggagctgggctttaccaccttcttcatcaacaaattcccagaacccatgctgaacttcctaggtagatgtttggagctaccgagttctcatggcagcctgcacagcatcaagcagcatgtcaatttatccttctgaactct

SEQ ID NO: 59184 - DNA, 227 bp, Setaria italica
  Peptide Sequence Number=SeqID_125158
ttttttttttttttgcaagacaagctgatcttcaacattgctactataaggtagggagctaaatatttacattcaagaacctacaacggtgacgaatcacgagacacgctgcaaatcaacagtaagaaaaaggcttactgctgtattttctgtacaggaaatttacccctgtaggaggtgctctggcagcccaaatttcctgtacagaaaatttgggctgccagagc

SEQ ID NO: 59185 - DNA, 370 bp, Setaria italica
  Peptide Sequence Number=SeqID_125159
aggatgagtgcagctatatgaatagtttagctgatttattttactttttgttggaaacatgatgcatttatcttattattgtagagagtattatttttctaattgctagatgccatatttcatccatcagatatgagtatttgtttaaactgaactgtaactgtgcccccttttttttgtttcaatagccacttcgcagcagaatgcacctcagcaactgtttgctggaactgcaaggaatctgggcacattgccactgagtgcaagaatgaggccctgtgccacacatgcaataaaacgggtcatttggcacgagattgccctacttcagggtctaacgttaagctatgcaacaattgttttaagccag

SEQ ID NO: 59186 - DNA, 277 bp, Setaria italica
  Peptide Sequence Number=SeqID_125160
tcctaagttaattaataccgttgttcgccgacggtggacacaaacagtatgcaacagaataaactatagcccctggtgcggtgtgcattgatacagtgatacataaacatgtcaacatccagatctagctagcaaaaaagtatagattttttcccctattctgaaagcatttacatctctcatgatctgagcaaaacagacgatggtgaacaagttacttcctggggctctagtactcaaactgcaaaacgctccatttacattgctagcacaaagc

SEQ ID NO: 59187 - DNA, 277 bp, Setaria italica
  misc_feature (11)..(11): n is a, c, g, or t
  Peptide Sequence Number=SeqID_125161
ttttgtaggcncctttttctttcccataaataaggccagtatcctgtggatcaggaatgggtttccgcttctcaacataacgataaggatccgaggcagcagccaaagcagctcgctcctcctgctccttctggagctgccgcggcgggcttgacccagaggtagtaggcgaggcccacaaacgaccgcgcgttccccaccacccggccaaacccgctcgccggcgccatctccctccccctccccctccgctccgcaagagccgcgaccgacctgc

SEQ ID NO: 59188 - DNA, 279 bp, Setaria italica
  Peptide Sequence Number=SeqID_125162
gagatccatatgaataatactcttttccttatgaagatgatgcaaaccctgacaaatccccttaataatttgaaaacgaatatgccattcaagtccccttaattcatctaaggacgcaatagaagaaataagattacaacctaactttttaaatctctaactcaaatctttaaagttgatcagtaacacgaatgtaatcaaaatctatttgccaagagagctggtatttttgttcttggcgtggttgagtttttgcaacaatatagtaaaagtcttttc

SEQ ID NO: 59189 - DNA, 252 bp, Setaria italica
  Peptide Sequence Number=SeqID_125163
tgatgtttccccagatcttgatatgccaaaatctgttatctttggcaccaaatcatcatttaatagtatgttggcaggcttgagatccatatgaataatactcttttccttatgaagatgatgcaaaccctgacaaatccccttaataatttgaaaacgaatatgccattcaagtccccttaattcatcggttacatggtcctcaagacttcccttgctgatatactcaaaacagagcagccctttcccgat

SEQ ID NO: 59190 - DNA, 267 bp, Setaria italica
  Peptide Sequence Number=SeqID_125164
tagttgtaaaagctgtgatgaaagttttggttcccaatacctccccatccaaaattataggttgtttctggaattttttatatatatttttcgctacaccatacaatcctagggtgagggaatgctatacgcttggtgggttcttctccaagtataatgaagaaggctatggacgcggctattccgaggcatattgtatatatatcagatgtgtcaccgtttgcatcgtatcaaaaatcgccatttctgaaattagccacccgcctg

SEQ ID NO: 59191 - DNA, 523 bp, Setaria italica
  misc_feature (14)..(14): n is a, c, g, or t
  Peptide Sequence Number=SeqID_125165
catcgacgacggcnggcagcagatcgcctccgaggacaagccgacccggcgtcaccgtccaggagggcgcgcagttcgcgagcaggctgacggggatcaaggagaaacaccaaggttccaggccaaatccaacgacgactccggcgacggcgagccggcggcggcgtcgggcgggctgaagcagctggtccgggaggccaaggaagccaacggcgtgaagcaggtgtacgtgtggcacgccatggcggggtactgggacggcgacgacgacgccgccggcggtgacggcagcgaaccggtgtacctggtggtgctgccgctgctggaggggcagttccgggcggcgctgcaggggaacgaccgcgacgagctgcagttctgcatcgagagcggcgacaaggcggtgcggacggaccagggcgcgcacgcggtgtacctccacgccggcgacgaccccttcgacaccgtcgccgccgccgtgaaggccgtggagaagcacctgaacacgttccaccaccgggag

SEQ ID NO: 59192 - DNA, 409 bp, Setaria italica
  Peptide Sequence Number=SeqID_125166
cctctgcctctccggttcaagctgtggtggatgacgcagcggatgggcacctccggccgggacgtcccgctcgagacccagttcatgctcgtcgaggtgccccccgcctccggcgacggcgacgacgacgccgccggcggtgacggcagcgaaccggtgtacctggtggtgctgccgctgctggaggggcagttccgggcggcgctgcaggggaacgaccgcgacgagctgcagttctgcatcgagagcggcgacaaggcggtgcggacggaccagggcgcgcacgcggtgtacctccacgccggcgacgaccccttcgacaccgtcgccgccgccgtgaaggccgtggagaagctaccttgtaactacgtttcctacctaccgggtagttaagttaagttaagttctt

SEQ ID NO: 59193 - DNA, 170 bp, Setaria italica
  Peptide Sequence Number=SeqID_125167
tggtctcgaactaaaagtggcttgcgattcctgacgctgtgctctcgcgtgtgtctgtctcacctgcagcgacaagccgggcaaccacaacttcgagctgctcaagaagctcgtgctccccgacggctccgtgctccgcgcccagctcccccggcccgccccaacccgac

SEQ ID NO: 59194 - DNA, 263 bp, Setaria italica
  Peptide Sequence Number=SeqID_125168
gtaactttctatgaattccaggtgaacaatgcacttatggatctaataaaggctaccaaatctgcgatgaaacctgaagagtggtcagcccagcctgagaatgtatcaggtacgcttaagaaggccaaacgtctccgatttatcttgaaggataattgtttgggagcacatatcttatgttgcatcttcatcagaaaccggggcacttgtttccggaagacccattaccgtcacgatgcgaacagatgaaggtgcaaacgtcg

SEQ ID NO: 59195 - DNA, 278 bp, Setaria italica
  Peptide Sequence Number=SeqID_125169
aactacaagtactaataactaatgactcagtctatactatccgtccttgcacttgatcgccaccttaaggcccttgaaagccgcctcagccttcatgttcttcctcgtacagtcggcacatttggccaggccgatgacaacagacgccacctcgccagaggcagcattagcgacggctatcgccatcagcacggcgcaaacgccgagaagtctttgtggtgtcgatcccatgctgcttgcagaacaagtcgagcttgccaccttgctacctgttacgt

SEQ ID NO: 59196 - DNA, 495 bp, Setaria italica
  misc_feature (73)..(73): n is a, c, g, or t
  Peptide Sequence Number=SeqID_125170
tttttttttttttttttttaaacttttttgttaaagtcacactcttgcattggtatagattccactcattacngaaaaacattacatatgccatgtctcccaattcttaataaattaagacacctttgtagatgaaattaaaaaagaaatccatgcatatgactccagtctcacacttgtttcttggtaaaaagaaaggtctcacaagtcacacttgtaatataaccattattctgctgcaaataatgagtagtgcagcaacgtcacgcaagattaccatatgcatgcagctcaggggcaaacataacggattcaatgcttggccggagggtggtagatcggagtcggtgacacagacggtgttgtgttagaggacggcgctcctcctgcttggtcttgtcggtctttgggtctacttagtctttaggtttgttggttggttcttacttagttttctttttctttttgttttggtttttaagttttttgtttttt

SEQ ID NO: 59197 - DNA, 250 bp, Setaria italica
  Peptide Sequence Number=SeqID_125171
ggcatcgccgcccatggccgcggaggcgccgatgagggtgatgagcgcgggcttggccttgaaggcattgctgcggagcaacttgaggaggcgcggttggagcttctggagataggaaacgaggtcggcggtgagggcggacgcctcgacggccgcggccgtggcgagcgcggccgccagctgcgcgcactggtcctgctcgtggaggagcgcgtccgtgaggggccggagcgcggtggacgcggagacc

SEQ ID NO: 59198 - DNA, 230 bp, Setaria italica
  Peptide Sequence Number=SeqID_125172
ttttgttttaccttacgtttgttctactactaactacctatttctttcctacttcttgtaaaagtctttccgtaaaatttactagtcgctaaatttccttttttttttccttcaaagaaaggttgccgtgtaaaagagaactgcagccgccaccttgaccataagaaactccagcagttcacgcttcaaacagaatgtctttgtcatgccaagcccatccttcacttttg

SEQ ID NO: 59199 - DNA, 434 bp, Setaria italica
  Peptide Sequence Number=SeqID_125173
ggttggtgtagttctgcgcaaggcagcgatgcgcagtgtagtccggtcaccggtgaagtggcagtggcgcttcccgccgctgctgcgcaacctagatcggtaggtgtgttggtgggggcggctggctgcggcgaacctcgtgagccgagccgggtccccccaccctgtttatatagcgcagcgcgacaggggcccactacccattgatagggtaagcgcccccgatcagggcgcagatcaaggtcctgattggcctttgggccaatcgggaaagagatcaatctaacaggaccggcaagagctgccggctccggtggctcaactacctcaagcctgacatcaagcgcggcaatctcacgccggaggagcagctcctaatccttgagctccattccaagtggggaaacaggtaacgggcggacggacaacgagat

SEQ ID NO: 59200 - DNA, 386 bp, Setaria italica
  Peptide Sequence Number=SeqID_125174
gaaattcgagaagtttggcatgtctccctcaaagggtgttctgttttacggccctcctggctgtggaaagactttgttggccaaggcgattgctaatgagtgccaggctaacttcatcagtgtgaagggacctgagctgcttaccatgtggtttggtgagagtgaggccaatgtccgagagatctttgacaaggctaggcagtctgctccttgtgtcctcttcttcgacgagcttgactccattgctactcagagaggaagcagtgttggtgatgctggaggtgctgctgatagagtgtagataagctgatccagacgccctggcctcagcaaagcagggtcaatgatgtctggtctgttggtggcaccgataatgaaaacagtct

SEQ ID NO: 59201 - DNA, 315 bp, Setaria italica
  Peptide Sequence Number=SeqID_125175
ttgttagttattttgttatttatttggttgtttccggtattgtaagtttgggtcgtcctttgtaggtttcttccggtatttctattacctaaaaactattgaagtctgtactagaagatgttgacttggagcacattgcaaaggatacccatggttatgttggtgctgatcttgctgccctttgtactgaggctgctcttcagtgcattcgtgagaagatggatattatagatcttgatgatgagaccatagatgctgagatactcaaactctatgtctgtctcaaatgatcatttcaagactgcacttgggacg

SEQ ID NO: 59202 - DNA, 212 bp, Setaria italica
  misc_feature (196)..(196): n is a, c, g, or t
  Peptide Sequence Number=SeqID_125176
cagacatcattgaccctgctttgctgaggccagggcgtctggttcaacactctatcagcagcacctccagcatcaccaacactgcttcctctctgagtagcaatggagtcaagctcgtcgaagaagaggacacaaggagcagactgcctagccttgcaaagatctctcggacattggcctcactctcaccaaaccncatggtaagcagctca

SEQ ID NO: 59203 - DNA, 454 bp, Setaria italica
  Peptide Sequence Number=SeqID_125177
gagcctggattgctcatcaggcagaggaatgtagataagctgatccagacgccctggcctcagcaaagcagggtcaatgatgtctggtctgttggtggcaccgataatgaaaacagtcttcttggcgttcatgccatccatctcagtcagcagctggttcaacactctatcagcagcacctccagcatcaccaacactgcttcctctctgagtagcaatggagtcaagctcgtcgaagaagaggacacaaggagcagactgcctagccttgtcaaagatctctcggacattggcctcactctcaccaaaccacatggtaagcagctcaggtcccttcacactgatgaagttagcctggcactcattagcaatcaccttggccaacaaagtctttccacagccaggaggccgtaaaacagaacaccctttgagggagacatgccaaacttctacg

SEQ ID NO: 59204 - DNA, 325 bp, Setaria italica
  Peptide Sequence Number=SeqID_125178
ttcttctttgggtattgtattatttggttgggtccttggtagtaattgttcaagagggagcttcaagagactgttcaatatccagtggagcatccagagaaattcgagaagtttggcatgtctccctcaaagggtgttctgttttacggccctcctggctgtggaaagactttgttggccaaggcgattgctaatgagtgccaggctaacttcatcagtgtgaagggacctgagctgcttaccatgtggtttggtgagagtgaggccaatgtccgagagatctttgacaaaggctaggcagtctgctccttgtgtcctcttcttc

SEQ ID NO: 59205 - DNA, 427 bp, Setaria italica
  Peptide Sequence Number=SeqID_125179
tacgcctctccatctcaatatccttctcgatgttctccctgatggcatacttgcacgcacgctggcagatctcagtgatatctgcgccgctgaatccctgggtgtatttggcaagggcgttcaagtcaacatccttagccacaggagacttcctgaggcaggctttgaagatctggagcctggattgctcatcaggcagaggaatgtagataagctgatccagacgccctggcctcagcaaagcagggtcaatgatgtctggtctgttggtggcaccgataatgaaaacagtcttcttggcgttcatgccatccatctcagtcagcagctggttcaacactctatcagcagcacctccagcatcaccaacactgcttcctctctgagtagcaatggagtcaagctcgtcgaagaagaggacacaagg

SEQ ID NO: 59206 - DNA, 442 bp, Setaria italica
  Peptide Sequence Number=SeqID_125180
ttagccacaggagacttcctgaggcaggctttgaagatctggagcctggattgctcatcaggcagaggaatgtagataagctgatccagacgccctggcctcagcaaagcagggtcaatgatgtctggtctgttggtggcaccgataatgaaaacagtcttcttggcgttcatgccatccatctcagtcagcagctggttcaacactctatcagcagcacctccagcatcaccaacactgcttcctctctgagtagcaatggagtcaagctcgtcgaagaagaggacacaaggagcagactgcctagccttgtcaaagatctctcggacattggcctcactctcaccaaaccacatggtaagcagctcaggtcccttcacactgatgaagttagcctggcactcattagcaatcgccttggccaacaaagtcttccacagcc

SEQ ID NO: 59207 - DNA, 425 bp, Setaria italica
  Peptide Sequence Number=SeqID_125181
gagacttcctgaggcaggctttgaagatctggagcctggattgctcatcaggcagaggaatgtagataagctgatccagacgccctggcctcagcaaagcagggtcaatgatgtctggtctgttggtggcaccgataatgaaaacagtcttcttggcgttcatgccatccatctcagtcagcagctggttcaacactctatcagcagcacctccagcatcaccaacactgcttcctctctgagtagcaatggagtcaagctcgtcgaagaagaggacacaaggagcagactgcctagccttgtcaaagatctctcggacattggcctcactctcaccaaaccacatggtaagcagctcaggtcccttcacactgatgaagttagcctggcactcattagcaatcgccttggccaacaaagtcttt

SEQ ID NO: 59208 - DNA, 432 bp, Setaria italica
  Peptide Sequence Number=SeqID_125182
tacgcctctccatctcaatatccttctcgatgttctccctgatggcatacttgcacgcacgctggcagatctcagtgatatctgcgccgctgaatccctgggtgtatttggcaagggcgttcaagtcaacatccttagccacaggagacttcctgaggcaggctttgaagatctggagcctggattgctcatcaggcagaggaatgtagataagctgatccagacgccctggcctcagcaaagcagggtcaatgatgtctggtctgttggtggcaccgataatgaaaacagtcttcttggcgttcatgccatccatctcagtcagcagctggttcaacactctatcagcagcacctccagcatcaccaacactgcttcctctctgagtagcaatggagtcaagctcgtcgaagaagaggacacaaggagcag

SEQ ID NO: 59209 - DNA, 419 bp, Setaria italica
  Peptide Sequence Number=SeqID_125183
gagacttcctgaggcaggctttgaagatctggagcctggattgctcatcaggcagaggaatgtagataagctgatccagacgccctggcctcagcaaagcagggtcaatgatgtctggtctgttggtggcaccgataatgaaaacagtcttcttggcgttcatgccatccatctcagtcagcagctggttcaacactctatcagcagcacctccagcatcaccaacactgcttcctctctgagtagcaatggagtcaagctcgtcgaagaagaggacacaaggagcagactgcctagccttgtcaaagatctctcggacattggcctcactctcaccaaaccacatggtaagcagctcaggtcccttcacactgatgaagttagcctggcactcattagcaatcgccttggccaacaaa

SEQ ID NO: 59210 - DNA, 445 bp, Setaria italica
  misc_feature (398)..(398): n is a, c, g, or t
  Peptide Sequence Number=SeqID_125184
cctgggtgtatttggcaagggcgttcaagtcaacatccttagccacaggagacttcctgaggcaggctttgaagatctggagcctggattgctcatcaggcagaggaatgtagataagctgatccagacgccctggcctcagcaaagcagggtcaatgatgtctggtctgttggtggcaccgataatgaaaacagtcttcttggcgttcatgccatccatctcagtcagcagctggttcaacactctatcagcagcacctccagcatcaccaacactgcttcctctctgagtagcaatggatcaagctcgtcgaagaagaggacacaaggagcagactgcctagccttgtcaaagatctctcggacattggcctcactctcaccaaccacatggtaancagctcaggtcccttcacactgatgaagttgcctggcactcattacg

SEQ ID NO: 59211 - DNA, 369 bp, Setaria italica
  misc_feature (1)..(1): n is a, c, g, or t
  Peptide Sequence Number=SeqID_125185
ntcccgtgccttgcatacgatgagtttagcataccatataagcatatatataagttatgtcacagcataactgctagttaactgtatagatcatcatcgtcagctgcagctgcaggggctgcgaagggtcggccgccgctgccgtcggttggtcgggaaccggaactcgctgccgaacccgcgagactgctggagggtctgggcgaaggcttggtacttgcggatgtcggcgtcgctcacgctccggcgcgcatacttcatcgactcctcgaagtgaacagccctgatctcagcaatttcatccacctcgtcttcctccatggcctcggggtcgtccttcctacgcctctccatctcaatatccttctc

SEQ ID NO: 59212 - DNA, 415 bp, Setaria italica
  misc_feature (387)..(387): n is a, c, g, or t
  Peptide Sequence Number=SeqID_125186
cagatctcagtgatatctgcgccgctgaatccctgggtgtatttggcaagggcgttcaagtcaacatccttagccacaggagacttcctgaggcaggctttgaagatctggagcctggattgctcatcaggcagaggaatgtagataagctgatccagacgccctggcctcagcaaagcagggtcaatgatgtctggtctgttggtggcaccgataatgaaaacagtcttcttggcgttcatgccatccatctcagtcagcagctggttcaacactctatcagcagcacctccagcatcaccaacactgcttcctctctgagtagcaatggagtcaagctcgtcgaagaagaggacacaaggagcagactgcctagccttgcaaagntctctcggacattggcctcactctcacc

SEQ ID NO: 59213 - DNA, 405 bp, Setaria italica
  Peptide Sequence Number=SeqID_125187
acaggagacttcctgaggcaggctttgaagatctggagcctggattgctcatcaggcagaggaatgtagataagctgatccagacgccctggcctcagcaaagcagggtcaatgatgtctggtctgttggtggcaccgataatgaaaacagtcttcttggcgttcatgccatccatctcagtcagcagctggttcaacactctatcagcagcacctccagcatcaccaacactgcttcctctctgagtagcaatggagtcaagctcgtcgaaagaagaggacacaaggagcagactgcctagccttgtcaaaagatctctcggacattggcctcactctcaccaaaccacatggtaagcagctcaggtcccttcacactgatgaagttagcctggcactcattag

SEQ ID NO: 59214 - DNA, 402 bp, Setaria italica
  misc_feature (304)..(304): n is a, c, g, or t
  Peptide Sequence Number=SeqID_125188
tcctagaggcaggctttgaagatctggagcctggattgctcatcaggcagaggaatgtagataagctgatccagacgccctggcctcagcaaagcagggtcaatgatgtctggtctgttggtggcaccgataatgaaaacagtcttcttggcgttcatgccatccatctcagtcagcagctggttcaacactctatcagcagcacctccagcatcaccaacactgcttcctctctgagtagcaatggagtcaagctcgtcgaagaagaggacacaaggagcagactgcctagccttgtcaaagntctctcggacattggcctcactctcaccaaaccacatggtaagcagctcaggtcccttcacactgatgaagttagcctggcactcattagcaatcgcc

SEQ ID NO: 59215 - DNA, 395 bp, Setaria italica
  Peptide Sequence Number=SeqID_125189
tcctgaggcaggctttgaagatctggagcctggattgctcatcaggcagaggaatgtagataagctgatccagacgccctggcctcagcaaagcagggtcaatgatgtctggtctgttggtggcaccgataatgaaaacagtcttcttggcgttcatgccatccatctcagtcagcagctggttcaacactctatcagcagcacctccagcatcaccaacactgcttcctctctgagtagcaatggagtcaagctcgtcgaagaagaggacacaaggagcagactgcctagccttgtcaaagatctctcggacattggcctcactctcaccaaaccacatggtaagcagctcagtcccttcacactgatgaagttagcctggcactcattagcaa

SEQ ID NO: 59216 - DNA, 446 bp, Setaria italica
  Peptide Sequence Number=SeqID_125190
ttgtttctttgggttcgttaaggttcttttggttactttgcggatgtcggcgtcgctcacgctccggcgcgcatacttcatcgactcctcgaagtgaacagccctgatctcagcaatttcatccacctcgtcttcctccatggcctcggggtcgtccttcctacgcctctccatctcaatatccttctcgatgttctccctgatggcatacttgcacgcacgctggcagatctcagtgatatctgcgccgctgaatccctgggtgtatttggcaagggcgttcaagtcaacatccttagccacaggagacttcctgaggcaggctttgaagatctggagcctggattgctcatcaggcagaggaatgtagataagctgatccagacgccctggcctcagcaaagcagggtcaatgatgtctggtctggttggtggcaccgataatg

SEQ ID NO: 59217 - DNA, 469 bp, Setaria italica
  Peptide Sequence Number=SeqID_125191
tcggggaaccggaactcgctgccgaacccgcgagactgctggagggtctgggcgaaggcttggtacttgcggatgtcggcgtcgctcacgctccggcgcgcatacttcatcgactcctcgaagtgaacagccctgatctcagcaatttcatccacctcgtcttcctccatggcctcggggtcgtccttcctacgcctctccatctcaatatccttctcgatgttctccctgatggcatacttgcacgcacgctggcagatctcagtgatatctgcgccgctgaatccctgggtgtatttggcaagggcgttcaagtcaacatccttagccacaggagacttcctgaggcaggctttgaagatctggagcctggattgctcatcaggcagaggaatgtagataagctgatccagacgccctggcctcagcaaagcagggtcaatgatgtctggtctgttggtggcaccgg

SEQ ID NO: 59218 - DNA, 356 bp, Setaria italica
  Peptide Sequence Number=SeqID_125192
agtctctagttttttttttttttaggtttattctagcaaatacatacttaaaagtaagtacatcctctcccgtgccttgcatacgatgagtttagcataccatataagcatatatataagttatgtcacagcataactgctagttaactgtatagatcatcatcgtcagctgcagctgcaggggctgcgaaggggtcggccgccgctgccgtcggttggtcggggaaccggaactcgctgccgaacccgcgagactgctggagggtctgggcgaaggcttggtacttgcggatgtcggcgtcgctcacgctccggcgcgcatacttcatcgactcctcgaagtgaactagtccctt

SEQ ID NO: 59219 - DNA, 354 bp, Setaria italica
  Peptide Sequence Number=SeqID_125193
aggtatctagcaaaatacattacttaaaagtaagtacatcctctcccgtgccttgcatacgatgagtttagcataccatataagcatatatataagttatgtcacagcataactgctagttaactgtatagatcatcatcgtcagctgcagctgcaggggctgcgaaggggtcggccgccgctgccgtcggttggtcggggaaccggaactcgctgccgaacccgcgagactgctggagggtctgggcgaaggcttggtacttgcggatgtcggcgtcgctcacgctccggcgcgcatacttcatcgactcctcgaagtgaacagcccttgtattcttctagtctaattttcta

SEQ ID NO: 59220 - DNA, 451 bp, Setaria italica
  Peptide Sequence Number=SeqID_125194
gggaaccggaactcgctgccgaacccgcgagactgctggagggtctgggcgaaggcttggtacttgcggatgtcggcgtcgctcacgctccggcgcgcatacttcatcgactcctcgaagtgaacagccctgatctcagcaatttcatccacctcgtcttcctccatggcctcggggtcgtccttcctacgcctctccatctcaatatccttctcgatgttctccctgatggcatacttgcacgcacgctggcagatctcagtgatatctgcgccgctgaatccctgggtgtatttggcaagggcgttcaagtcaacatccttagccacaggagacttcctgaggcaggctttgaagatctggagcctggattgctcatcaggcagaggaatgtagataagctgatccagacgcctggcctcagcaaagcagggtcaatgatgtctggtct

SEQ ID NO: 59221 - DNA, 430 bp, Setaria italica
  Peptide Sequence Number=SeqID_125195
gcgagactgctgagggtctgggcaaggcttggtacttgcggatgtcggcgtcgctcacgctccggcgcgcatacttcatcgactcctcgaagtgaacagccctgatctcagcaatttcatccacctcgtcttcctccatggcctcggggtcgtccttcctacgcctctccatctcaatatccttctcgatgttctccctgatggcatacttgcacgcacgctggcagatctcagtgatatctgcgccgctgaatccctgggtgtatttggcaagggcgttcaagtcaacatccttagccacaggagacttcctgaggcaggctttgaagatctggagcctggattgctcatcaggcagaggaatgtagataagctgatccagacgccctggcctcagcaaagcagggtcaatgatgtctggtctgttggt

SEQ ID NO: 59222 - DNA, 449 bp, Setaria italica
  Peptide Sequence Number=SeqID_125196
aaagttaaagtaacaatcctctcccgtgccttgcatacgatgagtttagcataccatataagcatatatataagttatgtcacagcataactgctagttaactgtatagatcatcatcgtcagctgcagctgcaggggctgcgaaggggtcggccgccgctgccgtcggttggtcggggaaccggaactcgctgccgaacccgcgagactgctggagggtctgggcgaaggcttggtacttgcggatgtcggcgtcgctcacgctccggcgcgcatacttcatcgactcctcgaagtgaacagccctgatctcagcaatttcatccacctcgtcttcctccatggcctcggggtcgtccttcctacgcctctccatctcaatatccttctccgatgttcctccctgatggcatacttgcacgcacgctggcagatctcagtgatatctg

SEQ ID NO: 59223 - DNA, 324 bp, Setaria italica
  Peptide Sequence Number=SeqID_125197
aggtactagttaggtaggacaccgaataatgaaaacagtcttcttggcgttcatgccatccatctcagtcagcagctggttcaacactctatcagcagcacctccagcatcaccaacactgcttcctctctgagtagcaatggagtcaagctcgtcgaagaagaggacacaaggagcagactgcctagccttgtcaaagatctctcggacattggcctcactctcaccaaaccacatggtaagcagctcaggtcccttcacactgatgaagttagcctggcactcattagcaatcgccttggccaacaagtctttccacagcca

SEQ ID NO: 59224 - DNA, 407 bp, Setaria italica
  Peptide Sequence Number=SeqID_125198
tccttgggtgtatttggcaagggcgttcaagtcaacatccttagccacaggagacttcctgaggcaggctttgaagatctggagcctggattgctcatcaggcagaggaatgtagataagctgatccagacgccctggcctcagcaaagcagggtcaatgatgtctggtctgttggtggcaccgataatgaaaacagtcttcttggcgttcatgccatccatctcagtcagcagctggttcaacactctatcagcagcacctccagcatcaccaacactgcttcctctctgagtagcaatggagtcaagctcgtcgaagaagaggacacaaggagcagactgcctagccttgtcaaagatctctcggacattggcctcactctcaccaaaccacatggtaagcagct

SEQ ID NO: 59225 - DNA, 377 bp, Setaria italica
  misc_feature (327)..(327): n is a, c, g, or t
  Peptide Sequence Number=SeqID_125199
tctaagggtcgtttctaagttcaacattcctttagccacaggagactttccttgaggcaggctttgaagatctggagcctggattgctcatcaggcagaggaatgtagataagctgatccagacgccctggcctcagcaaagcagggtcaatgatgtctggtctgttggtggcaccgataatgaaaacagtcttcttggcgttcatgccatccatctcagtcagcagctggttcaacactctatcagcagcacctccagcatcaccaacactgcttcctctctgagtagcaatggagtcaagctcgtcgaagaagaggacacaaggngcagactgcctagccttgcaaagatctctcggacattggcctcactctca

SEQ ID NO: 59226 - DNA, 365 bp, Setaria italica
  misc_feature (179)..(179): n is a, c, g, or t
  Peptide Sequence Number=SeqID_125200
caagggcgttcaagtcaacatccttagccacaggagacttcctgaggcaggctttgaagatctggagcctggattgctcatcaggcagaggaatgtagataagctgatccagacgccctggcctcagcaaagcagggtcaatgatgtctggtctgttggtggcaccgataatgaaaacngtcttcttggcgttcatgccatccatctcagtcagcagctggttcaacactctatcagcagcactccagcatcaccaacactgcttcctctctgagtagcaatggagtcaagctcgtcgaagaagaggacacaaggagcagactgcctagccttgtcaaagatctctcggacattggcctcactct

SEQ ID NO: 59227 - DNA, 383 bp, Setaria italica
  Peptide Sequence Number=SeqID_125201
cagatctcagtgatatctgcgccgctgaatccctgggtgtatttggcaagggcgttcaagtcaacatccttagccacaggagacttcctgaggcaggctttgaagatctggagcctggattgctcatcaggcagaggaatgtagataagctgatccagacgccctggcctcagcaaagcagggtcaatgatgtctggtctgttggtggcaccgataatgaaaacagtcttcttggcgttcatgccatccatctcagtcagcagctggttcaacactctatcagcagcacctccagcatcaccaacactgcttcctctctgagtagcaatggagtcaagctcgtcgaagaagaggacacaaggagcagactgcctagccttgtc

SEQ ID NO: 59228 - DNA, 378 bp, Setaria italica
  Peptide Sequence Number=SeqID_125202
agaagacctaggattgctcatcaggcagaggaatgtagataagctgatccagacgccctggcctcagcaaagcagggtcaatgatgtctggtctgttggtggcaccgataatgaaaacagtcttcttggcgttcatgccatccatctcagtcagcagctggttcaacactctatcagcagcacctccagcatcaccaacactgcttcctctctgagtagcaatggagtcaagctcgtcgaagaagaggacacaaggagcagactgcctagccttgtcaaagatctctcggacattggccttcactctcaccaaaccacatggtaagcagctcaggtcccttcacactgatgaagttagcctggcactcattagcaatc

SEQ ID NO: 59229 - DNA, 397 bp, Setaria italica
  Peptide Sequence Number=SeqID_125203
tcagtgatatctgcgccgctgaatccctgggtgtatttggcaagggcgttcaagtcacatccttagccacaggagacttcctgaggcaggctttgaagatctggagcctggattgctcatcaggcagaggaatgtagataagctgatccagacgccctggcctcagcaaagcagggtcaatgatgtctggtctgttggtggcaccgataatgaaaacagtctcttggcgttcatgccatccatctcagtcagcagctggttcaacactctatcagcagcacctccagcatcaccaacactgcttcctctctgagtagcaatggagtcaagctcgtcgaagaagaggacacaaggagcagactgcctagccttgtcaaagatctctcggacattggcc

SEQ ID NO: 59230 - DNA, 292 bp, Setaria italica
  Peptide Sequence Number=SeqID_125204
gtctggtctgttggtggcaccgataatgaaaacagtcttcttggcgttcatgccatccatctcagtcagcagctggttcaacactctatcagcagcacctccagcatcaccaacactgcttcctctctgagtagcaatggagtcaagctcgtcgaagaagaggacacaaggagcagactgcctagccttgtcaaagatctctcggacattggcctcactctcaccaaaccacatggtaagcagctcaggtcccttcacactgatgaagttagcctggcactcattagcaatc

SEQ ID NO: 59231 - DNA, 385 bp, Setaria italica
  Peptide Sequence Number=SeqID_125205
ggtcgtccttcctacgcctctccatctcaatatccttctcgatgttctccctgatggcatacttgcacgcacgctggcagatctcagtgatatctgcgccgctgaatccctgggtgtatttggcaagggcgttcaagtcaacatccttagccacaggagacttcctgaggcaggctttgaagatctggagcctggattgctcatcaggcagaggaatgtagataagctgatccagacgccctggcctcagcaaagcagggtcaatgatgtctggtctgttggtggcaccgataatgaaaacagtcttcttggcgttcatgccatccatctcagtcagcagctggttcaacactctatcagcagcacctccagcatcaccaacact

SEQ ID NO: 59232 - DNA, 289 bp, Setaria italica
  Peptide Sequence Number=SeqID_125206
cagggtcaatgatgtctggtctgttggtggcaccgataatgaaacagtcttcttggcgttcatgccatccatctcagtcagcagctggttcaacactctatcagcagcacctccagcatcaccaacactgcttcctctctgagtagcaatggagtcaagctcgtcgaagaagaggacacaaggagcagactgcctagccttgtcaaagatctctcggacattggcctcactctcaccaaaccacatggtaagcagctcaggtcccttcacactgatgaagttagcctgg

SEQ ID NO: 59233 - DNA, 388 bp, Setaria italica
  Peptide Sequence Number=SeqID_125207
atgttctccctgatggcatacttgcacgcacgctggcagatctcagtgatatctgcgccgctgaatccctgggtgtatttggcaagggcgttcaagtcaacatccttagccacaggagacttcctgaggcaggctttgaagatctggagcctggattgctcatcaggcagaggaatgtagataagctgatccagacgccctggcctcagcaaagcagggtcaatgatgtctggtctgttggtggcaccgataatgaaaacagtcttcttggcgttcatgccatccatctcagtcagcagctggttcaacactctatcagcagcacctccagcatcaccaacactgcttcctctctgagtagcaatggagtcaagctcgtcgaagaaga

SEQ ID NO: 59234 - DNA, 382 bp, Setaria italica
  Peptide Sequence Number=SeqID_125208
agacaataataataataaagttatgtcacagcataactgctaagttaaactgtatagatcatcatcgtcagctgcagctgcaggggctgcgaaggggtcggccgccgctgccgtcggttggtcggggaaccggaactcgctgccgaacccgcgagactgctggagggtctgggcgaaggcttggtacttgcggatgtcggcgtcgctcacgctccggcgcgcatacttcatcgactcctcgaagtgaacagcccctgatctcagcaattttcatccacctcgtcttcctccatggcctcgggtcgtccttcctacgcctctccatctcaatatccttctcgattgtttctccctgatggcatacttgcacgcacgctggcag

SEQ ID NO: 59235 - DNA, 403 bp, Setaria italica
  Peptide Sequence Number=SeqID_125209
tccatggcctcggggtcgtccttcctacgcctctccatctcaatatccttctcgatgttctccctgatggcatacttgcacgcacgctggcagatctcagtgatatctgcgccgctgaatccctgggtgtatttggcaagggcgttcaagtcaacatccttagccacaggagacttcctgaggcaggctttgaagatctggagcctggattgctcatcaggcagaggaatgtagataagctgatccagacgccctggcctcagcaaagcagggtcaatgatgtctggtctgttggtggcaccgataatgaaaacagtcttcttggcgttcatgccatccatctcagtacagcagctggttcaacactctatcagcagcacctccagcatcaccaacactgctt

SEQ ID NO: 59236 - DNA, 335 bp, Setaria italica
  misc_feature (173)..(173): n is a, c, g, or t
  misc_feature (254)..(254): n is a, c, g, or t
  Peptide Sequence Number=SeqID_125210
cgttcaagtcaacatccttagccacaggagacttcctgaggcaggctttgaagatctggagcctggattgctcatcaggcagaggaatgtagataagctgatccagacgccctggcctcagcaaagcagggtcaatgatgtctggtctgttggtggcaccgataatgaaaacngtcttcttggcgttcatgccatccatctcagtcagcagctggttcaacactctatcagcagcacctccagcatcaccaacnctgcttcctctctgagtagcaatggagtcaagctcgtcgaagaagaggacacaaggagcagactgcctagccttgtcaaag

SEQ ID NO: 59237 - DNA, 315 bp, Setaria italica
  Peptide Sequence Number=SeqID_125211
tactaattactaaggtactaagtaaggtaaattgttaagtattaagcttgatccagacgccctggcctcagcaaagcagggtcaatgatgtctggtctgttggtggcaccgataatgaaaacagtcttcttggcgttcatgccatccatctcagtcagcagctggttcaacactctatcagcagcacctccagcatcaccaacactgccttcctctctgagtagcaatggagtcaagctcgtcgaagaagaggacacaaggagcagactgcctagccttgtcaaagatctctcggacattggcctcactctcacc

SEQ ID NO: 59238 - DNA, 368 bp, Setaria italica
  Peptide Sequence Number=SeqID_125212
tgccttgcatacgatgagtttagcataccatataagcatatatataagttatgtcacagcataactgctagttaactgtatagatcatcatcgtcagctgcagctgcaggggctgcgaagggtcggccgccgctgccgtcggttggtcggggaaccggaactcgctgccgaacccgcgagactgctggagggtctgggcgaaggcttggtacttgcggatgtcggcgtcgctcacgctccggcgcgcatacttcatcgactcctcgaagtgaacagccctgatctcagcaatttcatccacctcgtcttcctccatggcctcggggtcgtccttcctacgcctctccatctcaatatccttctcgatt

SEQ ID NO: 59239 - DNA, 297 bp, Setaria italica
  Peptide Sequence Number=SeqID_125213
cggccgccgctgccgtcggttggtcggggaaccggaactcgctgccgaacccgcgagactgctggagggtctgggcgaaggcttggtacttgcggatgtcggcgtcgctcacgctccggcgcgcatacttcatcgactcctcgaagtgaacagccctgatctcagcaatttcatccacctcgtcttcctccatggcctcggggtcgtccttcctacgcctctccatctcaatatccttctcgatgttctccctgatggcatacttgcacgcacgctggcagatctcagtgatatctg

SEQ ID NO: 59240 - DNA, 400 bp, Setaria italica
  Peptide Sequence Number=SeqID_125214
gatcatcatcgtcagctgcagctgcaggggctgcgaaggggtcggccgccgctgccgtcggttggtcggggaaccggaactcgctgccgaacccgcgagactgctggagggtctgggcgaaggcttggtacttgcggatgtcggcgtcgctcacgctccggcgcgcatacttcatcgactcctcgaagtgaacagccctgatctcagcaatttcatccacctcgtcttcctccatggcctcgggggtcgtccttcctacgcctctccatctcaatatccttctcgatgttctccctgatggcatacttgcacgcacgctggcagatctcagtgatatctgcgccgctgaatccctgggtgtatttggcaagggcgttcaagtcaacatccttagccacag

SEQ ID NO: 59241 - DNA, 388 bp, Setaria italica
  Peptide Sequence Number=SeqID_125215
aacaattaacttaaaaagtaagtacatcctctcccgtgccttgcatacgatgagtttagcataccatataagcatatatataagttatgtcacagcataactgctagttaactgtatagatcatcatcgtcagctgcagctgcaggggctgcgaaggggtcggccgccgctgccgtcggttggtcggggaaccggaactcgctgccgaacccgcgagactgctggagggtctgggcgaaggcttggtacttgcggatgtcggcgtcgctcacgctccggcgcgcatacttcatcgactcctcgaagtgaacagccctgatctcagcaatttcatccacctcgtcttcctccatggcctcggggtcgtccttcctacgcctctccatct

SEQ ID NO: 59242 - DNA, 311 bp, Setaria italica
  Peptide Sequence Number=SeqID_125216
caagggcgttcaagtcaacatccttagccacaggagacttcctgaggcaggctttgaagatctggagcctggattgctcatcaggcagaggaatgtagataagctgatccagacgccctggcctcagcaaagcagggtcaatgatgtctggtctgttggtggcaccgataatgaaaacagtcttcttggcgttcatgccatccatctcagtcagcagctggttcaacactctatcagcagcacctccagcatcaccaacactgctttcctctctgagtagcaatggatcaagctcgtcgaaagaagaggac

SEQ ID NO: 59243 - DNA, 386 bp, Setaria italica
  Peptide Sequence Number=SeqID_125217
tcggcgtcgctcacgctccggcgcgcatacttcatcgactcctcgaagtgaacagccctgatctcagcaatttcatccacctcgtcttcctccatggcctcggggtcgtccttcctacgcctctccatctcaatatccttctcgatgttctccctgatggcatacttgcacgcacgctggcagatctcagtgatatctgcgccgctgaatccctgggtgtatttggcaagggcgttcaagtcaacatccttagccacaggagacttcctgaggcaggctttgaagatctggagcctggattgctcatcaggcagaggaatgtagataagctgatccagacgccctggcctcagcaaagcagggtcaatgatgtctggtctgttggt

SEQ ID NO: 59244 - DNA, 223 bp, Setaria italica
  Peptide Sequence Number=SeqID_125218
gtggcaccgataatgaaaacagtcttcttggcgttcatgccatccatctcagtcagcagctggttcaacactctatcagcagcacctccagcatcaccaacactgcttcctctctgagtagcaatggagtcaagctcgtcgaagaagaggacacaaggagcagactgcctagccttgtcaaagatctctcggacattggcctcactctcaccaaaccacatgg

SEQ ID NO: 59245 - DNA, 366 bp, Setaria italica
  Peptide Sequence Number=SeqID_125219
aaggcttggtacttgcggatgtcggcgtcgctcacgctccggcgcgcatacttcatcgactcctcgaagtgaacagccctgatctcagcaatttcatccacctcgtcttcctccatggcctcgggggtcgtccttcctacgcctctccatctcaatatccttctcgatgttctccctgatggcatacttgcacgcacgctggcagatctcagtgatatctgcgccgctgaatccctgggtgtatttggcaagggcgttcaagtcaacatccttagccacaggagacttcctgaggcaggctttgaagatctggagcctggattgctcatcaggcagaggaatgtagataagctgatccagaccgcc

SEQ ID NO: 59246 - DNA, 369 bp, Setaria italica
  Peptide Sequence Number=SeqID_125220
tacttgcggatgtcggcgtcgctcacgctccggcgcgcatacttcatcgactcctcgaagtgaacagccctgatctcagcaatttcatccacctcgtcttcctccatggcctcggggtcgtccttcctacgcctctccatctcaatatccttctcgatgttctccctgatggcatacttgcacgcacgctggcagatctcagtgatatctgcgccgctgaatccctgggtgtatttggcaagggcgttcaagtcaacatccttagccacaggagacttcctgaggcaggctttgaagatctggagcctggattgctcatcaggcagaggaatgtagataagctgatccagacgccctggcctcagcaaa

SEQ ID NO: 59247 - DNA, 360 bp, Setaria italica
  Peptide Sequence Number=SeqID_125221
taactaaccaatactacaaataataccttctcgatgttctccctgatggcatacttgcacgcacgctggcagatctcagtgatatctgcgccgctgaatccctgggtgtatttggcaagggcgttcaagtcaacatccttagccacaggagacttcctgaggcaggctttgaagatctggagcctggattgctcatcaggcagaggaatgtagataagctgatccagacgccctggcctcagcaaagcaggtcaatgatgtctggtctgttggtggcaccgataatgaaaacagtcttcttggcgttcatgccatccatctcagtcagcagctggttcaacgactctatcagcagcacct

SEQ ID NO: 59248 - DNA, 268 bp, Setaria italica
  Peptide Sequence Number=SeqID_125222
gataagctgatccagacgccctggcctcagcaaagcaggtcaatgatgtctggtctgttggtggcaccgataatgaaacagtcttcttggcgttcatgccatccatctcagtcagcagctggttcaacactctatcagcagcacctccagcatcaccaacactgcttcctctctgagtagcaatggagtcaagctcgtcgaagaagaggacacaaggagcagactgcctagccttgtcaaagatctctcggacattggccttactaaa

SEQ ID NO: 59249 - DNA, 306 bp, Setaria italica
  Peptide Sequence Number=SeqID_125223
aagttatgtcacagcataactgctagttaactgtatagatcatcatcgtcagctgcagctgcaggggctgcgaagggtcggccgccgctgccgtcggttggtcggggaaccggaactcgctgccgaaccgcgagactgctggagggtctgggcgaaggcttggtacttgcggatgtcggcgtcgctcacgctccggcgcgcatacttcatcgactcctcgaagtgaacagccctgatctcagcaatttcatccacctcgtcttcctccatggcctcgggtcgtccttcctacgcctctccatctca

SEQ ID NO: 59250 - DNA, 237 bp, Setaria italica
  misc_feature (8)..(8): n is a, c, g, or t
  Peptide Sequence Number=SeqID_125224
tttttttntttttttttttttttttttgttacacagcacggcaccaggcaagcattcaaatagacgacacgatttaggtatctagcaaaatacattacttaaaaagtaagtacatcctctcccgtgccttgcatacgatgagtttagcataccatataagcatatatataagttatgtcacagcataactgctagttaactgtatagatcatcatcgtcagctgcagctgcaggggc

SEQ ID NO: 59251 - DNA, 294 bp, Setaria italica
  Peptide Sequence Number=SeqID_125225
agacaaaaataacaattacttaaaaagtaagtacatcctctcccgtgccttgcatacgatgagtttagcataccatataagcatatatataagttatgtcacagcataactgctagttaactgtatagatcatcatcgtcagctgcagctgcaggggctgcgaaggggtcggccgccgctgccgtcggttggtcggggaaccggactcgctgccgaacccgcgagactgctggagggtctgggcgaaggcttggtacttgcggatgtcggcgtcgctcacgctccggcgcgcat

SEQ ID NO: 59252 - DNA, 200 bp, Setaria italica
  Peptide Sequence Number=SeqID_125226
tgccgtgctgtgtcattcaaatagacgacacgatttaggtatctagcaaatacattacttaaaagtaagtacatcctctcccgtgccttgcatacgatgagtttagcataccatataagcatatatataagttatgtcacagcataactgctagttaactgtatagatcatcatcgtcagctgcagctgcaggggctgcg

SEQ ID NO: 59253 - DNA, 253 bp, Setaria italica
  Peptide Sequence Number=SeqID_125227
ttttttttagtacgacacgattaggtatctagcaaaataacattacttaaaaagtaagtacatcctctcccgtgccttgcatacgatgagtttagcataccatataagcatatatataagttatgtcacagcataactgctagttaactgtatagatcatcatcgtcagctgcagctgcaggggctgcgaagggtcggccgccgctgccgtcggttggtcggggaaccggaactcgctgccgaacccgcgaga

SEQ ID NO: 59254 - DNA, 283 bp, Setaria italica
  misc_feature (28)..(29): n is a, c, g, or t
  misc_feature (33)..(33): n is a, c, g, or t
  Peptide Sequence Number=SeqID_125228
tatatatatatatatatatatatatatnntcanagcataactgctagttaactgtatagatcatcatcgtcagctgcagctgcaggggctgcgaagggtcggccgccgctgccgtcggttggtcggggaaccggaactcgctgccgaacccgcgagactgctggagggtctgggcgaaggcttggtacttgcggatgtcggcgtcgctcacgctccggcgcgcatacttcatcgactcctcgaagtgaacagccctgatctcagcaatttcatccacctcgtc

SEQ ID NO: 59255 - DNA, 241 bp, Setaria italica
  Peptide Sequence Number=SeqID_125229
caaaatacattacttaaaaagtaagtacatcctctcccgtgccttgcatacgatgagtttagcataccatataagcatatatataagttatgtcacagcataactgctagttaactgtatagatcatcatcgtcagctgcagctgcaggggctgcgaaggggtcggccgccgctgccgtcggttggtcggggaaccggaactcgctgccgaacccgcgagactgctgggagggtctgggcg

SEQ ID NO: 59256 - DNA, 292 bp, Setaria italica
  misc_feature (203)..(203): n is a, c, g, or t
  misc_feature (284)..(284): n is a, c, g, or t
  Peptide Sequence Number=SeqID_125230
tacgctgaatcctggtgtatttggcaagggcgttcaagtcaacatccttagccacaggagacttcctgaggcaggctttgaagatctggagcctggattgctcatcaggcagaggaatgtagataagctgatacagacgccctggcctcagcaaagcagggtcaatgatgtctggtctgttggtggcaccgataatgaaaacngtcttcttggcgttcatgccatccatctcagtcagcagctggttcaaacactctatcagcagcactccagcatcaccaacnctgcttcc

SEQ ID NO: 59257 - DNA, 281 bp, Setaria italica
  misc_feature (254)..(254): n is a, c, g, or t
  Peptide Sequence Number=SeqID_125231
taggacaattaacttgcacgcacgctggcagatctcagtgatatctgcgccgctgaatccctgggtgtatttggcaagggcgttcaagtcaacatccttagccacaggagacttcctgaggcaggctttgaagatctggagcctggattgctcatcaggcagaggaatgtagataagctgatccagacgccctggcctcagcaaagcagggtcaatgatgtctggtctgttggtggcaccgataatgaaaaacngtcttcttggcgttcatgccatccatc

SEQ ID NO: 59258 - DNA, 299 bp, Setaria italica
  Peptide Sequence Number=SeqID_125232
tcagctgcagctgcaggggctgcgaaggggtcggccgccgctgccgtcgggttggtcggggaaccggaactcgctgccgaaccgcgagactgctggagggtctgggcgaaggcttggacttgcggatgtcggcgtcgctcacgctccggcgcgcatacttcgatcggactcctcgaagtgaacagccctgatctcagcaatttcatccacctcgtcttcctccatggcctcggggtcgtccttcctacgcctctccatctcaatatccttctcgatgttctgccagcgtgcgtgcaagt

SEQ ID NO: 59259 - DNA, 247 bp, Setaria italica
  Peptide Sequence Number=SeqID_125233
ggaaccggaactcgctgccgaacccgcgagactgctggagggtctgggcgaaggcttggtacttgcggatgtcggcgtcgctcacgctccggcgcgcatacttcatcgactcctcgaagtgaacagccctgatctcagcaatttcatccacctcgtcttcctccatggcctcggggtcgtccttcctacgcctctccatctcaatatccttctcgatgttctccctgatggcatacttgcacgcacg

SEQ ID NO: 59260 - DNA, 233 bp, Setaria italica
  Peptide Sequence Number=SeqID_125234
cgcgagactgctggagggtcgtgggcgaaggcttggtacttgcggatgtcggcgtcgctcacgctccggcgcgcatacttcatcgactcctcgaagtgaacagccctgatctcagcaatttcatccacctcgtcttcctccatggcctcggggtcgtccttcctacgcctctccatctcaatatccttctcgatgttctccctgatggcatacttgcacgcacgctggcagat

SEQ ID NO: 59261 - DNA, 253 bp, Setaria italica
  Peptide Sequence Number=SeqID_125235
gcataactgctagttaacctgtatagatcatcatcgtcagctgcagctgcaggggctgcgaaggggtcggccgccgctgccgtcggttggtcggggaaccggaactcgctgccgaacccgcgagactgctggagggtctgggcgaaggcttggtacttgcggatgtcggcgtcgctcacgctccggcgcgcatacttcatcgactcctcgaagtgaacagccctgatctcagcaatttcatccacctcgtaca

SEQ ID NO: 59262 - DNA, 281 bp, Setaria italica
  misc_feature (218)..(218): n is a, c, g, or t
  Peptide Sequence Number=SeqID_125236
tgtcgtccgtcttgtaattcccttgggttgttattttggcaagggcgttcaagtcaacatccttagccacaggagacttcctgaggcaggctttgaagatctggagcctggattgctcatcaggcagaggaatgtagataagctgatccagacgccctggcctcagcaaagcagggtcaatgatgtctggtctgttggtggcaccgataatgaaaacngtcttcttggcgttcatgccatccatctcagtcagcagctggttcaacactctatcagcagca

SEQ ID NO: 59263 - DNA, 257 bp, Setaria italica
  Peptide Sequence Number=SeqID_125237
agtttagcataccatataagcatatatataagttatgtcacagcataactgctagttaactgtatagatcatcatcgtcagctgcagctgcaggggctgcgaaggggtcggccgccgctgccgtcggttggtcggggaaccggaactcgctgccgaacccgcgagactgctggagggtctgggcgaaggcttggtacttgcggatgtcggcgtcgcttctacgtcttccggtcgtcgtctattactttctattcgta

SEQ ID NO: 59264 - DNA, 209 bp, Setaria italica
  Peptide Sequence Number=SeqID_125238
cccgtgccttgcatacgatgagtttagcataccatataagcatatatataagttatgtcacagcataactgctagttaactgtatagatcatcatcgtcagctgcagctgcaggggctgcgaaggggtcggccgccgctgccgtcggttggtcggggaaccggaactcgctgccgaacccgcgagactgctggagggtctgggcgaagg

SEQ ID NO: 59265 - DNA, 186 bp, Setaria italica
  Peptide Sequence Number=SeqID_125239
atcctctcccgtgccttgcatacgatgagtttagcataccatataagcatatatataagttatgtcacagcataactgctagttaactgtatagatcatcatcgtcagctgcagctgcaggggctgcgaaggggtcggccgccgctgccgtcggttggtcggggaaccggaactcgctgccgaacc

SEQ ID NO: 59266 - DNA, 190 bp, Setaria italica
  Peptide Sequence Number=SeqID_125240
ttaaaaagtaagtacatcctctcccgtgccttgcatacgatgagtttagcataccatataagcatatatataagttatgtcacagcataactgctagttaactgtatagatcatcatcgtcagctgcagctgcaggggctgcgaaggggtcggccgccgctgccgtcggttggtcggggaaccggaactc

SEQ ID NO: 59267 - DNA, 227 bp, Setaria italica
  Peptide Sequence Number=SeqID_125241
cccgtgccttgcatacgatgagtttagcataccatataagcatatatataagttatgtcacagcataactgctagttaactgtatagatcatcatcgtcagctgcagctgcaggggctgcgaaggggtcggccgccgctgccgtcggttggtcggggaaccggaactcgctgccgaacccgcgagactgctggagggtatgggcgaaggcttggtacttgcggatgt

SEQ ID NO: 59268 - DNA, 240 bp, Setaria italica
  Peptide Sequence Number=SeqID_125242
tatagatcatcatcgtcagctgcagctgcaggggctgcgaaggggtcggccgccgctgccgtcggttggtcggggaaccggaactcgctgccgaacccgcgagactgctggagggtctgggcgaaggcttggtacttgcggatgtcggcgtcgctcacgctccggcgcgcatacttcatcgactcctcgaagtgaacagccctgatctcagcaatttcatccacctcgtcttcctccatg

SEQ ID NO: 59269 - DNA, 251 bp, Setaria italica
  Peptide Sequence Number=SeqID_125243
ggggtaaccgggaactcgctgccgaacccgcgagactgctggagggtctgggcgaaggcttggtacttgcggatgtcggcgtcgctcacgctccggcgcgcatacttcatcgactcctcgaagtgaacagccctgatctcagcaatttcatccacctcgtcttcctccatggcctcggggtcgtccttcctacgcctctccatctcaatatccttctcgatgttctccctgatggcatacttgcacgcacg

SEQ ID NO: 59270 - DNA, 306 bp, Setaria italica
  Peptide Sequence Number=SeqID_125244
cacgctccggcgcgcatacttcatcgactcctcgaagtgaacagccctgatctcagcaatttcatccacctcgtcttcctccatggcctcggggtcgtccttcctacgcctctccatctcaatatccttctcgatgttctccctgatggcatacttgcacgcacgctggcagatctcagtgatatctgcgccgctgaatccctgggtgtatttggcaagggcgttcaagtcaacatccttagccacaggagacttcctgaggcaggctttgaagatcgtggagcctggattgctcatcaggcagag

SEQ ID NO: 59271 - DNA, 214 bp, Setaria italica
  Peptide Sequence Number=SeqID_125245
ccgccgctgccgtcggttggtcggggaaccggaactcgctgccgaacccgcgagactgctggagggtctgggcgaaggcttggtacttgcggatgtcggcgtcgctcacgctccggcgcgcatacttcatcgactcctcgaagtgaacagccctgatctcagcaatttcatccacctcgtcttcctccatggcctcggggtcgtccttcctacg

SEQ ID NO: 59272 - DNA, 196 bp, Setaria italica
  Peptide Sequence Number=SeqID_125246
cggggaaccggaactcgctgccgaacccgcgagactgctggagggtctgggcgaaggcttggtacttgcggatgtcggcgtcgctcacgctccggcgcgcatacttcatcgactcctcgaagtgaacagccctgatctcagcaatttcatccacctcgtcttcctccatggcctcggggtcgtccttcctacgcct

SEQ ID NO: 59273 - DNA, 249 bp, Setaria italica
  Peptide Sequence Number=SeqID_125247
tggtcggggaccggaactcgctgcgaacccgcgagactgctggagggtctgggcgaaggcttggacttgcggatgtcggcgtcgctcacgctccggcgcgcatacttcatcgactcctcgaagtgaacagccctgatctcagcaatttcatccacctcgtcttcctccatggcctcggggtcgtccttcctacgcctctccatctcaatatcctttcttcgtattgttctgccagcgtgcgtgcaaagt

SEQ ID NO: 59274 - DNA, 233 bp, Setaria italica
  Peptide Sequence Number=SeqID_125248
ggcgtcgctcacgctccggcgcgcatacttcatcgactcctcgaagtgaacagccctgatctcagcaatttcatccacctcgtcttcctccatggcctcggggtcgtccttcctacgcctctccatctcaatatccttctcgatgttctccctgatggcatacttgcacgcacgctggcagatctcagtgatatctgcgccgctgaatccctgggtgtatttggcaagggtcg

SEQ ID NO: 59275 - DNA, 196 bp, Setaria italica
  Peptide Sequence Number=SeqID_125249
agggtctgggcgaaggcttggtacttgcggatgtcggcgtcgctcacgctccggcgcgcatacttcatcgactcctcgaagtgaacagccctgatctcagcaatttcatccacctcgtcttcctccatggcctcggggtcgtccttcctacgcctctccatctcaatatccttctcgatgttcctccctgatggca

SEQ ID NO: 59276 - DNA, 231 bp, Setaria italica
  Peptide Sequence Number=SeqID_125250
cgctcacgctccggcgcgcatacttcatcgactcctcgaagtgaacagccctgatctcagcaatttcatccacctcgtcttcctccatggcctcggggtcgtccttcctacgcctctccatctcaatatccttctcgatgttctccctgatggcatacttgcacgcacgctggcagatctcagtgatatctgcgccgctgaatccctgggtgtatttggcaaggggcgtta

SEQ ID NO: 59277 - DNA, 236 bp, Setaria italica
  Peptide Sequence Number=SeqID_125251
ggtcgttcgtctcacgctccggcgcgcatacttcatcgactcctcgaagtgaacagccctgatctcagcaatttcatccacctcgtcttcctccatggcctcggggtcgtccttcctacgcctctccatctcaatatccttctcgatgttctccctgatggcatacttgcacgcacgctggcagatctcagtgatatctgcgccgctgaatccctgggtgtatttggcaagggtcg

SEQ ID NO: 59278 - DNA, 262 bp, Setaria italica
  misc_feature (214)..(214): n is a, c, g, or t
  Peptide Sequence Number=SeqID_125252
tacgactagaataccctagggtagtaatttaggacaaagggcgttcaagtcaacatccttagccacaggagacttcctgaggcaggctttgaagatctggagcctggattgctcatcaggcagaggaatgtagataagctgatacagacgccctggcctcagcaaagcagggtcaatgatgtctggtctgttggtggcaccgataatgaaaacngtcttcttggcgttcatgccatccatctcagtcagcagctggttcaac

SEQ ID NO: 59279 - DNA, 222 bp, Setaria italica
  misc_feature (220)..(220): n is a, c, g, or t
  Peptide Sequence Number=SeqID_125253
tggtggcaccgataatgaaaacagtcttcttggcgttcatgccatccatctcagtcagcagctggttcaacactctatcagcagcacctccagcatcaccaacactgcttcctctctgagtagcaatggagtcaagctcgtcgaagaagaggacacaaggagcagactgcctagccttgtcaaagatctctcggacattggcctcactctcaccaaaccnca

SEQ ID NO: 59280 - DNA, 213 bp, Setaria italica
  Peptide Sequence Number=SeqID_125254
ctggcctcagcaaagcagggtcaatgatgtctggtctgttggtggcaccgataatgaaaacagtcttcttggcgttcatgccatccatctcagtcagcagctggttcaacactctatcagcagcacctccagcatcaccaacactgcttcctctctgagtagcaatggagtcaagctcgtcgaagaagaggacacaaggagcagactgcctag

SEQ ID NO: 59281 - DNA, 167 bp, Setaria italica
  Peptide Sequence Number=SeqID_125255
atctcagtcagcagctggttcaacactctatcagcagcacctccagcatcaccaacactgcttcctctctgagtagcaatggagtcaagtcttcgttcgtaagaagaggacacaaggagcagactgcctagccttgtcaaagatctctcggacattggcctcactct

SEQ ID NO: 59282 - DNA, 210 bp, Setaria italica
  Peptide Sequence Number=SeqID_125256
ctggagcctggattgctcatcaggcagaggaatgtagataagctgatccagacgccctggcctcagcaaagcagggtcaatgatgtctggtctgttggtggcaccgataatgaaaacagtcttcttggcgttcatgccatccatctcagtcagcagctggttcaacactctatcagcagcacctccagcatcaccaacactgcttcctct

SEQ ID NO: 59283 - DNA, 259 bp, Setaria italica
  Peptide Sequence Number=SeqID_125257
ttacttaccaatctacaataatccttctcgatgttctccctgatggcatacttgcacgcacgctggcagatctcagtgatatctgcgccgctgaatccctgggtgtatttggcaagggcgttcaagtcaacatccttagccacaggagacttcctgaggcaggctttgaagatctggagcctggattgctcatcaggcagaggaatgtagataagctgatccagacgccctggcctcagcaaagcagggtcaatgatgt

SEQ ID NO: 59284 - DNA, 231 bp, Setaria italica
  Peptide Sequence Number=SeqID_125258
attgagatggagaggcgtaggaaggacgaccccgaggcatagcacgcacgctggcagatatcactgagatctgcgccgctgaatccctgggtgtatttggcaagggcgttcaagtcaacatccttagccacaggagacttcctgaggcaggctttgaagatctggagcctggattgctcatcaggcagaggaatgtagataagctgatccagacgccctggcctcagcaaa

SEQ ID NO: 59285 - DNA, 174 bp, Setaria italica
  Peptide Sequence Number=SeqID_125259
gaacagccctgatctcagcaatttcatccacctcgtcttcctccatggcctcggggtcgtccttcctacgcctctccatctcaatatccttctcgatgttctccctgatggcatacttgcacgcacgctggaagatctcagtgatatctgcgccgctgaactcccgtgggtgta

SEQ ID NO: 59286 - DNA, 108 bp, Setaria italica
  Peptide Sequence Number=SeqID_125260
ggttcgtcgcatacttcatcgactactcgaagtgaacagccctgatctcagcaatttcatccacctcgtcttcctcccatggcctcgggtcgtccttcctacgcctct

SEQ ID NO: 59287 - DNA, 212 bp, Setaria italica
  Peptide Sequence Number=SeqID_125261
tccttctcgatgttctccctgatggcatacttgcacgcacgctggcagatctcagtgatatctgcgccgctgaatccctgggtgtatttggcaagggcgttcaagtcaacatccttagccacaggagacttcctgaggcaggctttgaagatctggagcctggattgctcatcaggcagaggaatgtagataagctgatccagacgccctgg

SEQ ID NO: 59288 - DNA, 289 bp, Setaria italica
  Peptide Sequence Number=SeqID_125262
gcacgctggcagatctcagtgatatctgcgccgctgaatccctgggtgtatttggcaagggcgttcaagtcaacatccttagccacaggagacttcctgaggcaggctttgaagatctggagcctggattgctcatcaggcagaggaatgtagataagctgatccagacgccctggcctcagcaaagcagggtcaatgatgtctggtctgttggtggcaccgataatgaaaacagtcttcttggcgttcatgccatccatctcagtcagcagctggttcaacactctat

SEQ ID NO: 59289 - DNA, 214 bp, Setaria italica
  Peptide Sequence Number=SeqID_125263
cttcctgaggcaggctttgaagatctggagcctggattgctcatcaggcagaggaatgtagataagctgatccagacgccctggcctcagcaaagcagggtcaatgatgtctggtctgttggtggcaccgataatgaaaacagtcttcttggcgttcatgccatccatctcagtcagcagctggttcaacactctatcagcagcacctccagca

SEQ ID NO: 59290 - DNA, 212 bp, Setaria italica
  Peptide Sequence Number=SeqID_125264
tgaggcaggctttgaagatctggagcctggattgctcatcaggcagaggaatgtagataagctgatccagacgccctggcctcagcaaagcagggtcaatgatgtctggtctgttggtggcaccgataatgaaaacagtcttcttggcgttcatgccatccatctcagtcagcagctggttcaacactctatcagcagcacctccagcatca

SEQ ID NO: 59291 - DNA, 205 bp, Setaria italica
  misc_feature (194)..(194): n is a, c, g, or t
  Peptide Sequence Number=SeqID_125265
gcctggattgctcatcaggcagaggaatgtagataagctgatccagacgccctggcctcagcaaagcagggtcaatgatgtctggtctgttggtggcaccgataatgaaaacagtcttcttggcgttcatgccatccatctcagtcagcagctggttcaacactctatcagcagcacctccagcatcaccaacnctgcttcctct

SEQ ID NO: 59292 - DNA, 220 bp, Setaria italica
  Peptide Sequence Number=SeqID_125266
ggcatacttgcacgcacgctggcagatctcagtgatatctgcgccgctgaatccctgggtgtatttggcaagggcgttcaagtcaacatccttagccacaggagacttcctgaggcaggctttgaagatctggagcctggattgctcatcaggcagaggaatgtagataagctgatccagacgccctggcctcagcaaagcagggtcaatgatgtctggt

SEQ ID NO: 59293 - DNA, 206 bp, Setaria italica
  Peptide Sequence Number=SeqID_125267
ctcgatgttctccctgatggcatacttgcacgcacgctggcagatctcagtgatatctgcgccgctgaatccctgggtgtatttggcaagggcgttcaagtcaacatccttagccacaggagacttcctgaggcaggctttgaagatctggagcctggattgctcatcaggcagaggaatgtagataagctgatccagacgcctgg

SEQ ID NO: 59294 - DNA, 228 bp, Setaria italica
  Peptide Sequence Number=SeqID_125268
atctgcgccgctgaatccctgggtgtatttggcaagggcgttcaagtcaacatccttagccacaggagacttcctgaggcaggctttgaagatctggagcctggattgctcatcaggcagaggaatgtagataagctgatccagacgccctggcctcagcaaagcagggtcaatgatgtctggtctgttggtggcaccgataatgaaaacagtcttcttggcgttcat

SEQ ID NO: 59295 - DNA, 223 bp, Setaria italica
  Peptide Sequence Number=SeqID_125269
atccctgggtgtatttggcaagggcgttcaagtcaacatccttagccacaggagacttcctgaggcaggctttgaagatctggagcctggattgctcatcaggcagaggaatgtagataagctgatccagacgccctggcctcagcaaagcagggtcaatgatgtctggtctgttggtggcaccgataatgaaaacagtcttcttggcgttcatgccatccat

SEQ ID NO: 59296 - DNA, 218 bp, Setaria italica
  Peptide Sequence Number=SeqID_125270
ctccctgatggcatacttgcacgcacgctggcagatctcagtgatatctgcgccgctgaatccctgggtgtatttggcaagggcgttcaagtcaacatccttagccacaggagacttcctgaggcaggctttgaagatctggagcctggattgctcatcaggcagaggaatgtagataagctgatccagacgccctggcctcagcaaagcagggtcaa

SEQ ID NO: 59297 - DNA, 228 bp, Setaria italica
  Peptide Sequence Number=SeqID_125271
ctcagtgatatctgcgccgctgaatccctgggtgtatttggcaagggcgttcaagtcaacatccttagccacaggagacttcctgaggcaggctttgaagatctggagcctggattgctcatcaggcagaggaatgtagataagctgatccagacgccctggcctcagcaaagcagggtcaatgatgtctggtctgttggtggcaccgataatgaaaacagtcttctt

SEQ ID NO: 59298 - DNA, 192 bp, Setaria italica
  misc_feature (119)..(119): n is a, c, g, or t
  Peptide Sequence Number=SeqID_125272
tctggagcctggattgctcatcaggcagaggaatgtagataagctgatccagacgccctggcctcagcaaagcagggtcaatgatgtctggtctgttggtggcaccgataatgaaaacngtcttcttggcgttcatgccatccatctcagtcagcagctggttcaacactctatcagcagcacctccagcat

SEQ ID NO: 59299 - DNA, 162 bp, Setaria italica
  misc_feature (2)..(2): n is a, c, g, or t
  misc_feature (6)..(6): n is a, c, g, or t
  Peptide Sequence Number=SeqID_125273
tntagntaagctgatccagacgccctggcctcagcaaagcaggtcaatgatgtctggtctgttggtggcaccgataatgaaaacagtcttcttggcgttcatgccatccatctcagtcagcagctggttcaacactctatcagcagcacctccagcatcacc

SEQ ID NO: 59300 - DNA, 195 bp, Setaria italica
  Peptide Sequence Number=SeqID_125274
atctgcgccgctgaatccctgggtgtatttggcaagggcggttcaagtcaacatccttagccacaggagacttcctgaggcaggctttgaagatctggagcctggattgctcatcaggcagaggaatgtagataagctgatccagacgccctggcctcagcaaagcagggtcaatgatgtctggtctgttggtgg

SEQ ID NO: 59301 - DNA, 215 bp, Setaria italica
  misc_feature (47)..(47): n is a, c, g, or t
  Peptide Sequence Number=SeqID_125275
ctgatggcatacttgcacgcacgctggcagatctcagtgatatctgngccgctgaatccctgggtgtatttggtcaagggcgttcaagtcaacatccttagccacaggagacttcctgaggcaggctttgaagatctggagcctggattgctcatcaggcagaggaatgtagataagctgatccagacgccctggcctcagcaaagcagggtcaa

SEQ ID NO: 59302 - DNA, 149 bp, Setaria italica
  Peptide Sequence Number=SeqID_125276
tatccttctcgatggttctccctgatggcatacttgcacgcacgctggcagatctcagtgatatctgcgccgctgaatccctgggtgtatttggcaagggcgttcaagtcaacatccttagccacaggagacttcctgaggcaggcttt

SEQ ID NO: 59303 - DNA, 137 bp, Setaria italica
  Peptide Sequence Number=SeqID_125277
ttgttattctagtcggtcgcagatctcagtgatatctgcgccgctgaatccctgggtgtatttggcaagggcgttcaagtcaacatccttagccacaggagacttcctgaggcaggctttgaagatctggagcctgg

SEQ ID NO: 59304 - DNA, 178 bp, Setaria italica
  Peptide Sequence Number=SeqID_125278
ctcgatgttctccctgatggcatacttgcacgcacgctggcagatctcagtgatatctgcgccgctgaatccctgggtgtatttggcaagggcgttcaagtcaacatccttagccacaggagacttcctgaggcaggtctttgaagatctggagcctggattgctcatcaggcagagg

SEQ ID NO: 59305 - DNA, 177 bp, Setaria italica
  Peptide Sequence Number=SeqID_125279
ctggagcctgattgctcatcaggcagaggaatgtagataagctgatccagagccctggcctcagcaaagcagggtcaatgatgtctggtctgttggtggcaccgataatgaaacagtcttcttggcgttcatgccatccatctcagtcagcagctggttcaacactctatcagcagc

SEQ ID NO: 59306 - DNA, 179 bp, Setaria italica
  Peptide Sequence Number=SeqID_125280
ccttagccacaggagacttcctgaggcaggctttgaagatctggagcctggattgctcatcaggcagaggaatgtagataagctgatccagacgccctggcctcagcaaagcagggtcaatgatgtctggtctgttggtaggacaaccgaataaatagaaaaacaagtaacttaactaa

SEQ ID NO: 59307 - DNA, 122 bp, Setaria italica
  Peptide Sequence Number=SeqID_125281
cagaggaatgtagataagctgatccagacgccctggcctcagcaaagcagggtcaatgatgtctggtctgttggtggcaccgataatgaaaacagtcttcttggcgttcatgccatccatct

SEQ ID NO: 59308 - DNA, 147 bp, Setaria italica
  Peptide Sequence Number=SeqID_125282
ccttagccacaggagacttcctgaggcaggctttgaagatctggagcctggattgctcatcaggcagaggaatgtagataagctgatccagacgccctggcctcagcaaagcagggtcaatgatgtctggtctgttggtggcaacca

SEQ ID NO: 59309 - DNA, 168 bp, Setaria italica
  Peptide Sequence Number=SeqID_125283
gcgttcaagtacaacaatccttagccacagagacttcctgaggcaggctttgaagatctggagcctggattgctcatcaggcagaggaatgtagataagctgatccagacgccctggcctcagcaaagcagggtcaatgatgtctggtctgttggtggcaccgataat

SEQ ID NO: 59310 - DNA, 112 bp, Setaria italica
  Peptide Sequence Number=SeqID_125284
tctaggagcctggattgctcatcaggcagaggaatgtagataagctgatccagacgccctggcctcagcaaagcagggtcaatgatgtctggtctgttggtggcaccgataa

SEQ ID NO: 59311 - DNA, 357 bp, Setaria italica
  misc_feature (302)..(302): n is a, c, g, or t
  Peptide Sequence Number=SeqID_125285
aaacgaacgaaaactaaaaccaaagaaccaaaccgaatacgacccgacgacaaggaacttggagagcaagcaaggcaagcgcgcggccatggactccttctcgtcgccctcgctgtcgtcgtcaggttccagcccccaacccggaggccgtcatggaacagatcaaggcgcagctcgcccaggcttacgcgcaggagtttctcgagaccgtggggaacaagtgctttgaaaagtgcgtgaccaagccaggatcaagcttgagtggaagcgagagcagctgcatatcacgttgtgttgaccgntacattgaggccaccggtattgtcagccggccttgttcagctcccaagctaggaa

SEQ ID NO: 59312 - DNA, 399 bp, Setaria italica
  Peptide Sequence Number=SeqID_125286
tctaaagtagtaaactattattgtctattttgtattttctagttaaaattgttctagttaaatttaaatgcaggcttttacagagatttaaacatcaccctgaaccttacttgtacactgactgatgaaacccaaggaaaaaggataatctacagctgtccttgcttcccatcatctatcatcctaaaccctttcctttctgctaattgctttgcttcttccacagtatttttgcacttctttatcctgctgcttccagagggggaaaataaaccatacaaatatacagattgattctcaaggacaagcaaaaatctcttcttctgacttcttatttattttccagaggctctcctttatttacatcaaaggcaatggttagttgacagaataacacct

SEQ ID NO: 59313 - DNA, 377 bp, Setaria italica
  Peptide Sequence Number=SeqID_125287
gcaccacatagtttccaaactggtctttcatcattgcctgtaatggcacattttcatcagttgtgccaagcatttcattgatcagaatctggcgttgctcaggattaccaaaagtaagacacttctcaacgacattggaagcaaacttctgctggctcatcctcactatttgaccagcgagctgtgtaattatagtagaacgctcttctggtttcccatgctgcagaacatgctggattacataattgccatactggtcctctgttaaagtaaccacagattgcattatctcttccatcatgccactttgtgtgctttcatcattacagttgcttcctaagtacccttcttgtaattaactacggtctaacctatta

SEQ ID NO: 59314 - DNA, 263 bp, Setaria italica
  Peptide Sequence Number=SeqID_125288
gcctggggaagggatctctggaaaaatcaggttcttctcttcaatagaagcggtttcaagtttctgctgtataaagcgactcccatactgatccgaactgaaaggcgagagagattaagagagacaaccatattagcttcataaaaaacacagcaacttggatctgttagaatttcaaggatattacctgaattcgaccacatggcctacaatatctagcagctcaaaagatctggttttgttggttttgaactcctccagcg

SEQ ID NO: 59315 - DNA, 115 bp, Setaria italica
  Peptide Sequence Number=SeqID_125289
cagttgcaggttcaccaggccggcacattgcggtactattccccactgcaagatgccaagatcctattgtccatatacgtgcaggcctgatgtactcgcagggtcagcttggctg

SEQ ID NO: 59316 - DNA, 221 bp, Setaria italica
  Peptide Sequence Number=SeqID_125290
cgagctgttggtagaacaaggtgggtggcgatgcgaaccctaaaggctgctatatcccatccaattggttcacctcagctggtggattactgcctcaagacccttgctgcaagaacagttgatggattgacagttgcagtgagatgcaacgatgagacaaacacactagagtacaggcttacagatgaaactgtcttgctgcccaatgtatccatcgccaa

SEQ ID NO: 59317 - DNA, 248 bp, Setaria italica
  Peptide Sequence Number=SeqID_125291
cagatgatcaatgaaggggtgactcctaatatcgttgtttttacctccctagtttatggactgtgcaccgttgataaatggcgaaaggctgaggagttacttgatgttatggtctcggctggtttggaacctgatgttgttgcctataatactttgcttcacggctactgtagagctggcaggatatacgatgcatttagacttttccgacaaatgttgagcaatgcagttatgcctggagttgccta

SEQ ID NO: 59318 - DNA, 372 bp, Setaria italica
  Peptide Sequence Number=SeqID_125292
catgtccagaattatgtcagacctgcattgatctgatcctgcaagactgattgatacagagtaacagatcggtcaagctcttcccttttaagctaaataccaattttggttgtaaggcgtgatcgctcacaattgttgtgcttttatctgcttgacctgaagttgcacattcattagagttttcaagttgccagagaaaaagatggtctgccaaccagacactttaggctacacatgctcaccagaagatgaagttccttcctttgggcatggttctacagctggattttgatttccgcaagtcatcaggccctctgatggaggagatgattgtggtgtggaatctcgttcctgagagtcatcactagcata

SEQ ID NO: 59319 - DNA, 336 bp, Setaria italica
  Peptide Sequence Number=SeqID_125293
caggagatcactgatctcgcagacttgtcgacgccccttccagagtggttcagcgagaaagatctcgctgtctatgcgtccctctatgagaagtctggtttccggtatccactgaagatgccgtacaggtcactccataagaggcacacgattgaagacccgaaattccaagtcccggtgtttgttgtcatgggggagaaagattacgtctacaagctccctggcttcgcgtccgttttgaaagacggcatcatggggcactgtgctagtaggtggccagcagaacatctacctacgcagccactggaacaggatggtcctccaagaagccaacga

SEQ ID NO: 59320 - DNA, 259 bp, Setaria italica
  Peptide Sequence Number=SeqID_125294
gagataggctcagcggtcaagggcgaggccatggacatggagcagcagatcgagcacagccacctccccatccgaggcctcaacctccacgtcgcccaggccggcaaaggtgacaagggggcggtggtgttcctgcacggcttcccggagatatggtactcgtggcgccaccagatgctggccgtggccgccgccgggtaccgcgccgtcgcgccggactggcgcggttacggctctccgaccagccaccggaggagga

SEQ ID NO: 59321 - DNA, 256 bp, Setaria italica
  misc_feature (12)..(12): n is a, c, g, or t
  misc_feature (22)..(22): n is a, c, g, or t
  Peptide Sequence Number=SeqID_125295
tttttttttttntttttttttntttttttttttgttatagatagaatcgggttgtacatttataaacagaatatatctttgcttaaaaaaaaaggatactcacagcaatgcagacgtcacaactgacgaattcctttattgaaaatttatataaaaaaaggggcactgtgctagtaggtggccagcagaacatctacctacgcagccactggaacaggatggtcctccaagaagccaacgagtagctcattcacct

SEQ ID NO: 59322 - DNA, 254 bp, Setaria italica
  Peptide Sequence Number=SeqID_125296
acttgtcgacgccccttccagagtggttcagcgagaaagatctcgctgtctatgcgtccctctatgagaagtctggtttccggtatccactgaagatgccgtacaggtaaacatggcttgagtttgtacgctgccattttcttccctacttcataggtgtcttacacaactaggggtatctgtctgtgtctgctgtacttgataggtcactccataagaggcacacgattgaagacccgaaattccaagtcccg

SEQ ID NO: 59323 - DNA, 364 bp, Setaria italica
  Peptide Sequence Number=SeqID_125297
acgaaagtaggttcaccgaggaggacctcgatgcctacgccaagctgtacgagaagtccggcttccgctaccctcttcagatgccatacaggtaacagtaacactgcaagcactgaagtcctctttccagcaaaatggaaagatactgaactgcaagagtgcaagtagtagcacatgtagtcatcagtcatgcaacccaggtcagtgttcattgctttgcttccatggtggagcagggctatacacaagataccgaaccggctggacgccaagttccaggtgccggtgttcatggtgatgggggagaaggctactgcttcaaggttccccgggggttcgaggaccgcgctgcgtggcggcatca

SEQ ID NO: 59324 - DNA, 473 bp, Setaria italica
  Peptide Sequence Number=SeqID_125298
tgtccctttcttcttctttccttccttcttccccttcccttttcccgttcgttttgcttgctccggcgaacttcgtgcttggcggccagttccgcgtgatgagcatccagatccgtgcggtggttcaccagattcctgtggggagccgccggatctgcaccccgtaggcgtgttcccggcgtcctgtcacggcagcgcctgcatgaagccatcattttacatctaagtggatacagataagatcttagacgtgatgagaaaaatagaccgaggatccgatgaatttgccacattggttggggcccattcgtcgtcgaccatgttgagaaactcgaaaaccagattttctccgcgctagcttcatccaaagcccgttccaaccgaatgagcaaaaatgaccactccctcagtttgttgaagtgatgcatcgtatggaaactaacatcggagaggaacgcaaacgacagtgtgag

SEQ ID NO: 59325 - DNA, 246 bp, Setaria italica
  Peptide Sequence Number=SeqID_125299
tccagatccgtgcggtggttcaccagattcctgtggggagccgccggatctgcaccccgtcggcgtgttcccggcgtcctgtcacggcagcgcctgtggagcttcaccatggtcacaccttcaggctttagctagagtgccctgatcccatcgactctaagcggagaagttttttggcggtcagcattcaggaacttgagcgagatgacgacggcatcaccaaatagagctggcgtcaaattttct

SEQ ID NO: 59326 - DNA, 233 bp, Setaria italica
  Peptide Sequence Number=SeqID_125300
tctctttctctgtcctgatcgatcgatcaattgatttgcccgagcgctgcagtgcagtgagaggaattttacgtgtgtgtatgtcatggtgcagtggcgatgatggggcttggtgtggcgacgagcggcgcgttgaacaacctggtggtgtacctgatcaaggagtacaacgtgccgagcgtcgacgcggcccagatctccaacatcgtcgccggctgcctcagcttggcccc

SEQ ID NO: 59327 - DNA, 244 bp, Setaria italica
  Peptide Sequence Number=SeqID_125301
accattcctccagattttgagcaaattgttgcagaagcggtggcaatatagatggcagtggcggcggcggtggtgggaatggacctggcgtttgtggttgcgtgcctccaagagaagtaggcactcctccaacctgctgttgcacctgtggcgcttgcccaaaaaagggaggagcacccatatcactggcctgtgttagttttactacaaatacctaaggacctactttacaaatactaggaaa

SEQ ID NO: 59328 - DNA, 262 bp, Setaria italica
  Peptide Sequence Number=SeqID_125302
tgatgtggaaaaaacatcatcctatgataggaaactgaccacctcacacggtgattatgggtggacaggctctgatgtccacccaacaaatgatgcaataatctgtaacccagttgaggggacagaacaaataaagaagaatggcgacgtttcttactccaatgatgtaaagcttcagttgaatgtaagtaccgaaaataataatggcttgcaaagtgatgatggcaactttaataaacaaagtttctgtaaggaggatagg

SEQ ID NO: 59329 - DNA, 390 bp, Setaria italica
  misc_feature (33)..(33): n is a, c, g, or t
  Peptide Sequence Number=SeqID_125303
tgttggggaacctgcacctgtcaatccttgcancttttcgcagacatagacataatgggagtcaggatcctctggaacaaatccatcagggagcctacccctctccgtcagtggaacaggatccagtacttgcctccttatctttccagtgaacccaggtcttgcaaaataaagacacctcctggtctaagaagcctgtccacttccgaaaccatctgagctgcactgagaggagcatccacaccacacatcaatgagtccagggtacctttatcaattgcacaatcaaacgattcatcaggaaacatactcatatctctgacatccatgcgcaaggtaatttagacaagacttagacggaaattagtttagaaaattaatttacttaca

SEQ ID NO: 59330 - DNA, 225 bp, Setaria italica
  Peptide Sequence Number=SeqID_125304
atggatcaccatatgttatcaaaataaagacacctcctggtctaagaagcctgcaagcaaagtacaactgataaggctgaaggaatgttgaaattaacgagatatcttggtgcagatgagactgcagagtgatacttcagaggagcagcaagacactaaaaaacctgtccacttccgaaaccatctgagctgcactgagaggagcatccacaccacacatcaatg

SEQ ID NO: 59331 - DNA, 223 bp, Setaria italica
  Peptide Sequence Number=SeqID_125305
tctgcaggtcataaggatatcaattgaaggcagatagcatcttcaaccaacagggaaaatgataatcatgcaaggatacattgcagctgcggaatgttgaaatatttcttcctcatcatctcaatcacaaccgaagaaatgtcaatgttcacgatctccaaataaccatcactgaccatgtcctctgacataagtgcggagccgcatccaatcatgagtacgg

SEQ ID NO: 59332 - DNA, 382 bp, Setaria italica
  Peptide Sequence Number=SeqID_125306
cttgactttaatacttcatgatgtgctttttcctctttttcagacacgaatgcaaagcaagataatagcaagcgtggagatccaaatgatccacgcgtaagattgaagcgtgactgtgttggtttactcgcagctttcaagcttagtgatccttatgatcacattttaatcgtggcaaatacacatatttattggcaagtgaaacaatcagaatttcttactatctttggaagatgctttcatatttcactgtatctttttgttctgtttgatcttatctagctatctgtattggttgacagctgtttccagcaaacgtataaatttctggttgatgaataattctgtagggacccagaatggattgatgtgaagttggctc

SEQ ID NO: 59333 - DNA, 460 bp, Setaria italica
  Peptide Sequence Number=SeqID_125307
gtgttcaatattcaatattcaagaatattcaaagaacatacactgagcatattcaaagagacatacctaatttttcgctttagccaacattaatcgaacatttaaaaattcttggttgtaatgaatatcttcctgtgtgtatcagactcaaagacattcaaagcatataacttctacttgtcggttaattcgaccatagaaaccacttgatcaacacacttctcaactgaaaattctttctcactcctttttctttcttcaaaagcttgcaaagttttgttggtttggctctttttgtactccacatatccctcaagagcagagccaatgtgactttgcttacgctttctcccacttccgccttcttcctatcgaaactcattgcgttcactatgtgcactagaagtctcttggccatcgaaactcgaagcaaatggattcgtacccaagttgacttgct

SEQ ID NO: 59334 - DNA, 253 bp, Setaria italica
  Peptide Sequence Number=SeqID_125308
gaggaacatccaggcggagatgctattctaaataatgctggtggtgattcttttagcactaggagactcgtctttgtgatcccaaggtcccaaaagtaaaggtaaatcaaagggacctgattcaggagctggagtgacatctaagagctatacaaaggaagaaatctctaaacataacacaaggaaggattgttggataatcatcaaggacaaggtttatgatgtcactccttatgtggaggaacatccaggc

SEQ ID NO: 59335 - DNA, 184 bp, Setaria italica
  Peptide Sequence Number=SeqID_125309
ttatcatctcacttgtcattcttttagcactaggagctctctttgtgatcccaaggtcccaaaataaaggtacaagctgcagcgtttattgtttgagattgtagtaacttgacctagttgcatctgaaccacttttgtattgcaggtaaatcaaagggacctgattcaggagctggagtgacat

SEQ ID NO: 59336 - DNA, 263 bp, Setaria italica
  misc_feature (148)..(263): n is a, c, g, or t
  Peptide Sequence Number=SeqID_125310
ggcacttctctcttctagtctcttctgcatagtagcagcggtagcgttgttctggtgtgaaatgtgtgtgctgatgaactcacttgtatatgatggtacatatgtgttggactgctggttgttaaatccagagtaattttgctgactnnnnnnnnnnnnnnnnnnnnnnnnnnnnnnnnnnnnnnnnnnnnnnnnnnnnnnnnnnnnnnnnnnnnnnnnnnnnnnnnnnnnnnnnnnnnnnnnnnnnnnnnnnnnnnnnnnnn

SEQ ID NO: 59337 - DNA, 268 bp, Setaria italica
  Peptide Sequence Number=SeqID_125311
tgggacggaccacacaaagacacgcgtgcatgcagggaagcaaagcacggctagcgctagctatatacgtagcagtagaggattattctggatggtggcgtggccggccgagacgacgacggaccgtagtctacctaccggttcgttccggttcgttcgttcgtcgtctcggcgttcagggagtggacggacaacctagggacggaaaggggttaggggaatactacgaaagaccggggttacggacaacccaaggtagtacgtacga

SEQ ID NO: 59338 - DNA, 254 bp, Setaria italica
  Peptide Sequence Number=SeqID_125312
acttagcaccggtttcacggtggcggtaaaagttctagacatgcagcacgagcaggccgttagaagctttgatgctgagtgtagcacacttcgcatggctcagcataggaacttgataaagatattgaatgaggtttctccatacatggagagaatcgtaaacggggtatgccacaaagcccaatattcccaaccaaagattgcaacgagatgttagagaaaataccaccctgtggtaccttgccttgtagtaa

SEQ ID NO: 59339 - DNA, 292 bp, Setaria italica
  Peptide Sequence Number=SeqID_125313
taactgcctcttcagcatcaccacaggcaaggaacattttggattaagaaaatatgcttctgccggtggtactcttatgacaatgtttatagtatgctgctgtatggtgcgtctatgattggaagcaagcttgagaccgattcaataactaccatgcccccatatgtctgctgtgctgtaatgtgcgtgctgcttggtatatatatggtgtgctttatattgcaactcttggtctggaagcacaccatatatataccaagcagcacgcacattacagcacagcagacatatg

SEQ ID NO: 59340 - DNA, 221 bp, Setaria italica
  Peptide Sequence Number=SeqID_125314
cttatgttgagagcagcccggacacatcaatggacagccttctgcaaaatgatgctccacaggacggggctagcactggggatctctggagcctcgatgagatgctcatggcagctggtgctttttgagaggcccatggttattgccaaaatgtaaggcatccttactgcctacttttggttttcctacatacttcttgttactaattggtacttattctt

SEQ ID NO: 59341 - DNA, 217 bp, Setaria italica
  Peptide Sequence Number=SeqID_125315
aactaaagaaacaaagggaaaaggaaaaactaaggaacaaaataactaacaagacttaacaacttacaagtactttagactacccaaataaatagctgtgccagcatatgccgatcctgcgtgcctgcaaggtgaagtgtcaaagagaatgaggaacacctatggtttagctgtgcctcagggaaatggcgcacccaatctcgcacaagacatgtcc

SEQ ID NO: 59342 - DNA, 391 bp, Setaria italica
  Peptide Sequence Number=SeqID_125316
aatcatatactgaaagcaagatagcattaacaactggcggtcttatggaatcaccatccagtgattctaagaagttttctgctcggccacctaatcactctggaaagatcaagctccaacttttcccgatagatgagaacattcaaaagatcatgcagcaagaaaaacacaaccccttatctggaattgattttggcttcctcgaaaagaagatatcctcagttgtacagcatctgaacacaaagtggggtaattctcagtgtgcaaaaggcgagctcatgctcttccctaatggtactagagtggatatcatagctagcagtgcaaaatggacgctaaggattcttgcacagctgctgatgtgcatgttgcagttggcagcccttcaaca

SEQ ID NO: 59343 - DNA, 411 bp, Setaria italica
  Peptide Sequence Number=SeqID_125317
ggtagcttgtcgatcaacaagatcggagccactatgcatatcatctggaacgataagtgcgtgttgcctaagaattgcaggaagtttgtggagtgtgtgagtttctgtactgaatgatttatttgttctatgacagggtccttgaatgttattgatggatgatcatagatggatgaaaagcttcctcgatgatcttgcagataagcaagattgcgtgacaaagcgccaactacagcgacgacacccacttgcttgaatatctgctgaagctgagaataaggatggtttgcccgagtagagacgtaataatccgtgaacttatagccaaagcgcttatcaaacttcttgagtattttccggatgccagttgcattcatatcaagaaacctaaggagcttcacaagatcatat

SEQ ID NO: 59344 - DNA, 401 bp, Setaria italica
  Peptide Sequence Number=SeqID_125318
ttcatcaacaagatcggagccactatgcatatcatctggaacgataagtgcgtgttgccctagaattgcaggaagtttgtggagtgtgtgagtttctgtactgaatgatttattgttctatgacagggtccttgaatgttattgatggatgatcatagatggatgaaaagcttcctcgatgatcttgcagataagcaagattgcgtgacaaagcgccaactacagcgacgacacccacttgcttgaatatctgctgaagctgagaataaggatggtttgcccgagtagagacgtaataatccgtgaacttatagccaaagcgcttatcaaacttcttgagtattttccggatgccagttgcattcatatcaagaaacctaaggagcttcacaagatcatat

SEQ ID NO: 59345 - DNA, 342 bp, Setaria italica
  Peptide Sequence Number=SeqID_125319
tgtattggtattgaaaagtctttccttcgattgatcttgcagataagcaagattgcgtgacaaagcgccaactacagcgacgacaccctgcattcataaactgcatcataagagaaaagtgatcctttttcagataaaaaggagaggcgtgagaatttaccacttgcttgaatatctgctgaagctgagaataaggatggtttgcccgagtagagacgtaataatccgtgaacttatagccaaagcgcttatcaaacttcttgagtattttccggatgccagttgcattcatatcaagaaacctaaggagcttcacaagatcatatccaacctccctgtaag

SEQ ID NO: 59346 - DNA, 244 bp, Setaria italica
  Peptide Sequence Number=SeqID_125320
tccaacctgaaaataatagtttgtataagttgttgtgcgaactcttgctgtgagcaacctagaaatgacatgaagccgtgaccctcctctcaccttactgtcttgcattgcattcgtggttggtttccatatacatgcatatatggtctctcttgttattctatctgtctgcagaggagaggggacagacatgaccggcggcggcaacggaggtggtggtggcggcggcgcgtgcgccgtttga

SEQ ID NO: 59347 - DNA, 367 bp, Setaria italica
  Peptide Sequence Number=SeqID_125321
aaaagaaaacttaaagaacaaataaaccaagaatactacctagaaaggttagctctgaattgcattgacaacgttagggatactgacgggaccttgcgtgctgtcaagtccaagattgcaaacctagtagcaaacaacatgagccggaattggccacaggatttgtatcagaaggttgcacagtgcatataatgtggtttgtgtttcagaggtggcccagaatatggactaatcttcatcagaagttttcggaactgtttggtgtttggctgcttgagtacacaaggtctgtagaaccgtggaagtattatccttgcacgcactggatctcatgtttgtcggcccatcttgtgtgcaatgagcgacg

SEQ ID NO: 59348 - DNA, 404 bp, Setaria italica
  Peptide Sequence Number=SeqID_125322
taaaaaggaaaaactaaaaactaaaaataaaagaaaaacaaaaaaagaaacggtaaaagaaaaaattaacaaataaaaaagggtaaggaagaattttagaccaataggacaacttacgaagaataaataaaacaaagtgcctgtccgatgctgtctgtgccatggcacgcaatatgttagatggtgagagtcgcgctacagccctaatccattctggcaatgagattatggagacagccagatattcttctgaaaccagcgttcaagacaaggatcttatttccgagcaacaaactgtactgagacagcttgaagctattctccatatttataggctagctcgagctggacagactgtagatgctttgagggaaaccatcaggctcccattccttcatttcgga

SEQ ID NO: 59349 - DNA, 230 bp, Setaria italica
  Peptide Sequence Number=SeqID_125323
aaacaggtatgatcttgtaatcgctaaatccagcttcaaagataatattcttccactcttgctcgaggcgctctccaccaagctcaaggccaagaccatccgcgccgaggcgccgtctcagtcgctttccgccaccaggttgctagcgcgcgaggggatcaatgctgagcagctcgccagggatctcaagtcattcgaactcaagacaacctttgaggatgtttttccat

SEQ ID NO: 59350 - DNA, 485 bp, Setaria italica
  Peptide Sequence Number=SeqID_125324
taagtaggaagaattagtaggtacgacaagttagttagtaatttcaaacaagaaggttttcttcttggtgctggaagtccttctggttctgatgttcacgtctcatcaagtggcattgttcagggtcatgcgtactcaattttgcaggtaagagaagttgacggccacaagctcatccaaattagaaatccatgggcaaatgaagttgaatggaatggaccgtggtcagactcttcgccagagtggacagaacgaatgaagcataagctcatgcatgttccacaggcgaagaatgggggtattctggatgtcttggcaagattttcagattcactttcggtcaatatatgtttgtcgtgtttatccacctgaaatgcgctattctgtccatgggcaatggcgtggctatagtgcaggtggttgccaagattttgactcctggcatcaaaatcctcagtatcgacttagagtaacaggacgtgacg

SEQ ID NO: 59351 - DNA, 484 bp, Setaria italica
  misc_feature (466)..(466): n is a, c, g, or t
  Peptide Sequence Number=SeqID_125325
tctgacgggaggggctggtgaagagattgatatgcgaagtccccaagcgcagattgatcttgctagttgaagattgtggtcgcagttgttgtatttcaaacaagaaggttttcttcttggtgctggaagtccttctggttctgatgttcacgtctcatcaagtggcattgttcagggtcatgcgtactcaatttttgcaggtaagagaagttgacggccacaagctcatccaaattagaaatccatgggcaaatgaagttgaatggaatggaccgtggtcagactcttcgccagagtggacagaacgaatgaagcataagctcatgcatgttccacaggcgaagaatggggtattctggatgtcttggcaagattttcagattcactttcggtcaataataatgtttagtacgtagtttaataccaacctagaaaatagacgactaattactagtaccaatagganaatagatagataataaga

SEQ ID NO: 59352 - DNA, 159 bp, Setaria italica
  Peptide Sequence Number=SeqID_125326
accacttgagtactgccggtacatgatgctgtagctattgacattgactccttcgctaggagaccaagaaaaccaaggtttgagacacaagacgaaggagtcaatgtcaaagaaagcaaccccaatggatggccagctttttctgattaagcaccagct

SEQ ID NO: 59353 - DNA, 399 bp, Setaria italica
  Peptide Sequence Number=SeqID_125327
gaggcattagaaggtgggcttgttcaagatgctctagtggatctgacgggaggggctggtgaagagattgatatgcgaagtccccaagcgcagattgatcttgctagtggaagattgtggtcgcagttgttgtatttcaaacaagaaggttttcttcttggtgctggaagtccttctggttctgatgttcacgtctcatcaagtggcattgttcagggtcatgcgtactcaattttgcaggtaagagaagttgacggccacaagcacatccagaataccccattcttcgcctgtggaacatgcatgagcttatgcttcattcgttctgtccactctggcgaagagtctgaccacggtccattccattcaacttcatttgcccatggatttctaatttgg

SEQ ID NO: 59354 - DNA, 220 bp, Setaria italica
  misc_feature (14)..(14): n is a, c, g, or t
  misc_feature (19)..(19): n is a, c, g, or t
  Peptide Sequence Number=SeqID_125328
ttttttaatttttnttttntttttattttttgttttcttttattttgtttttccttacttaggttcgttaagttaatttggggttatttcttggtattgttctttggtctaagtattttcagattcactttcggtcaatatatgtttgtcgtgttatccacctgaaatgcgctattctgtccatgggcaatggcgtggctatagtgcaggtggttgccaa

SEQ ID NO: 59355 - DNA, 339 bp, Setaria italica
  Peptide Sequence Number=SeqID_125329
catgaacatcattagattttttattcaatcgggtgagcacaattatgtaaaatttagcatctaatagcatgtaccgttaatctgttatagaactataagttgctaaaaagaactttcatgttgtctagactgggatacttaattcacatatttcaaaatataaacacctttgcgtagtaaaatatagtactgtaccttggaagatattcagatacaattgataagttcggagggcgtgtaacagctcccataaagagaacaatatttggatggcgcagccgacgcataattcgtaccttgtcaaaataaaagtaaaacaaaaaataaaaaacaaaaaaa

SEQ ID NO: 59356 - DNA, 251 bp, Setaria italica
  Peptide Sequence Number=SeqID_125330
tttgcagacttctgtagagacacaaacgtcaagaacaaaaactacgcacagcggaaagtggaaggccccctcaaggagtagaattcactgagatttcttgatgaacaggggggctctgtgtctcttggtgagaaggggtcactagcctttgaacagtcttcagagcacttgttaactgtgaaaatgaagggcgcagatttggatctctggcaataagaaaaccacattagtgcacatattgattgccatgg

SEQ ID NO: 59357 - DNA, 244 bp, Setaria italica
  Peptide Sequence Number=SeqID_125331
ggcgcagccgacgcataattcgtacttcactcctaaactcatccagagcatcaccatagaaatcttgatccaagaatttttttacagctacttctgttccattccagtcagcacggtagacctctccatacgaacctattggaaggaagcaattcaatcaatcattttctcacagagaacacaaagatgcaagttcatgcaaccagctcactcctactcaacgaatgaaaagcatagaacccaa

SEQ ID NO: 59358 - DNA, 221 bp, Setaria italica
  Peptide Sequence Number=SeqID_125332
ggaatcagaaacattgaacaacatgcctcagataatgtgaacaaaattctgatgttattaaaggatgactcgtccgtgacgtcatagacaagtaaaatgcccatcgctcccctgtaataggcagttgtaatagtgcggaaacgttcttgccccgcagtatcccagatctgcaacttaatccgtttgccatccaactcgacagtccttatcttgaagtcaat

SEQ ID NO: 59359 - DNA, 435 bp, Setaria italica
  Peptide Sequence Number=SeqID_125333
ttgcactgatgttcagctgcgagaaaagtccatggcccttgtgcagtccctatcctccaaaaatccagcaaacatccggaggctcatgtagatcaccaaagctacccaaattccagtaaaaccgctataacttgctagagtgagtatgcaaatgatactgacaataccaacaaggacctaaggatgcagaattcagtaaaatttattaggagaaaaagtttttaaaaaattacaggacaactagaagaatagaagtttgtcaacttgccattgagtaggcagcatatccaaaatctgacgctccataattgataccatcaaaaacaaaagccaaagcgttgattggttgagtaagacagacaaacggtattcctatgtagatatgatgcagtacaccctgatcacgtgtaaataacccagatcctatacgcaaac

SEQ ID NO: 59360 - DNA, 252 bp, Setaria italica
  Peptide Sequence Number=SeqID_125334
ggggtaaagtctactattcatcaggtgatggtgaccaagaaagtggaagctctgataaagttcctagtagatcaactggacatgatgcatccgaacatattaaccttgctttaagcatagaaggacatccagatgaatgacacctgtgcacgaaatctacaaatacaaagtaagggaggtaagattgttgttttaaaatagaatagtatgccatcaagagaatgaagaaataacgtgatcaagatttgattg

SEQ ID NO: 59361 - DNA, 487 bp, Setaria italica
  Peptide Sequence Number=SeqID_125335
taggtattaccttctattcctaggttcgttttctaaggtactaagtcttaggtagtagtaagtagtagtagtttatttgtaagtatgcaagactgggcgccggtgttcatctcgctggtgctcttcatcctgctgtcgccggggctgctgttccagatccccggcaagtgccggatcatcgagttcggcaacttccacaccagcgcgctctccatcctcgtccacgcaatcctctacttcgccctcatcgccatcttcctcatcgccatcggcgtgcgcatgtacctgggctcctagatttagctagccgcctgttgttcatagatcatccgatggctgcctgccgatgtctgtccatcagctagcagctcgttcgcattctctatcactagcccatctctaatcaagggttcttttcctattatacatgtattaaataacaatgtatgtagcatccgtgtttatttatttcttcttctaataatac

SEQ ID NO: 59362 - DNA, 239 bp, Setaria italica
  Peptide Sequence Number=SeqID_125336
aatcttaacggtcggtatcagagtagcagggaatgtagtacatctgatgctgagacaaactgcagactttcatcacgactgaagcaacgtagtgaacatgaccagtttaaggtagaacaggacaactcctttgaacaattggattctgggaaagcttgcacctcaaattctgatcaattggatcaagatttgtcactccggagcatcacatttagatctgcacttatgtctcgaagtag

SEQ ID NO: 59363 - DNA, 228 bp, Setaria italica
  Peptide Sequence Number=SeqID_125337
gatgatacatatacatacatgctaatatatagaactcgtttagaggtcagataagtgcaggatatatgcaaggctagcacttctgaaatactgtagaaatcacaagggtggcaatggcttgcatatagagtactagagcaaacaactatcaactgcttgccaagttctcaccattcaagtggtctgtttatacctttttgtatcatcttctatggttatgtgctttct

SEQ ID NO: 59364 - DNA, 213 bp, Setaria italica
  Peptide Sequence Number=SeqID_125338
caaggctagcacttctgaaatactgtagaaatcacaagggtggcaatggcttgcatatagagtactagagcaaacaactatcaactgatcatatggcctctcctgatgtatgatcaccagataatggacgatgactgctttctccttcaatcagtgcaggatggatatatatgtagcgagcttagctgtgcacaccaataaaatatcatgcaa

SEQ ID NO: 59365 - DNA, 425 bp, Setaria italica
  Peptide Sequence Number=SeqID_125339
aataattgaaatagagaaaatgatcgctgaggcatacaaagccatcgacaagacagtgcaagttggtgcatgcacaggaacactgggaaccatcgcaagtccagattagcaaggaggaagaaggccatcgagatactccgtggctggtatgttccaaatgctgaacctgttgctgcaacctaggattcttgaaaaatcatcatcaaggatttgcggcagcttttcatcaaagctcaccaattttgggcaacgtatgttgttcacggatctcaactgcttgccaagttctcaccattcaagtggtctgtttatacctttttgtatcatcttctatggttatgtgctttctctgtactagaagccgtgactagagtggccaagttactacccctagtttactaagacgaactagaagtacggaagaa

SEQ ID NO: 59366 - DNA, 415 bp, Setaria italica
  Peptide Sequence Number=SeqID_125340
gaaattgaagtatacaaggacagaaaaccatcaaggagttaaaagtttacttcttttttatgaagattctaccgaggtgcaaaaatttgaatctagcctctgaaatcagatgaataattacaggcatcgccagcagtagaggatgacacggaagcatctgtggacaccttggaagcatcgatatcggcatgttcatcggttttgcctgattgaccttccacctccagagcagtaccttggtcattgtcatttccccccttacttttattttttctattgctggcttgtctcttttcagtggttttctttgattttccctttgctttttcctttaccaacctccttttactgcagctgacatttgaaccatccttgacatcagcttccttagtttacattttctttaatttctagt

SEQ ID NO: 59367 - DNA, 235 bp, Setaria italica
  Peptide Sequence Number=SeqID_125341
ctggtgtagtacattgggaagactgctcatgaactctctcatgtctacaataacctgcatctccttctctggtgtcttttaccacctgcctttcttgtaattgaattctggctcaaaagaggatctggctcatttgcaagagttggtccaatacaacggccatccttatgggggccttttgatatgcattcttgcagctgaaagcatgtgcgctcatctttacatgttaccaaaa

SEQ ID NO: 59368 - DNA, 392 bp, Setaria italica
  Peptide Sequence Number=SeqID_125342
agtgctgtgcattccgtccaacttgactgagagtgaaagttgtcgcggtaatcccaccaactatgattgctgaagccacaggaagatactgcagtacattttccaacaattacaaaaagtaagaacaagagcaaagttttttaactatgttttccccgcctaggagcatgctgtttaaccatataagggtagcaattcccaccaatgaaataaaaaggcccactaccaaggcaggcaaaatattagttaattaccgaagcagattcaaatccaccagtctgaaaaggagaagtgctgcccttggctgaccgtataataaccactaataagatctagagcatcctgaagacattaaaagaggcacaacatatgcataaattagttgaacaaaa

SEQ ID NO: 59369 - DNA, 417 bp, Setaria italica
  Peptide Sequence Number=SeqID_125343
cgtgaagctgtatctgaatcaatacatcttgcaatacatccttaagcatggacaagggaaatgatgacaagaaatcgtgatacgctgtgtgaagtttagttacgctccaaccactggagagcaacaaaaaggcatacaagaaacacaactaagaggactggtcactgataggactagacaaatatttgggcgcaatataaaaaatggctagtaatgctgccagttacctgtcgcactccatcatgaaaattattcaaataatatcgcgaaagggcgctcatgccatctttaattagtccaggtaatgtctgccttccatatctcactagatcccctttcaaagcataagaacccgcatactccaggcttagctcatcaccgtgctcaacccataattttttgaatatatcattattg

SEQ ID NO: 59370 - DNA, 203 bp, Setaria italica
  Peptide Sequence Number=SeqID_125344
atgcactgttatttaaaaaaaaagtaagcttgagctgcagaaagtggtttgtgtggtcatcacaccttggtgaccgctgaagttgccatctgcaggagtcttccatgcattatctggtctggtttctccctccttacaatgttctgcttgagctcctggagacccctgaagttcctggagatggcggcgttcctgaactgcac

SEQ ID NO: 59371 - DNA, 437 bp, Setaria italica
  Peptide Sequence Number=SeqID_125345
gtgctgcgtgtgtgtgtggatatatcatatatgcccgtatacgatactgtagagtttcatttcgtttatttctaaaaaaaagagtttcatttcgttgctcaatccataccaatccaaaaaatctggtttgttgcgcttggattattattggtggattcccccctaatttcttgctctgtctccttcctcacaccgtttctctgcatgcagggctgcttgcaggctttggcaggtcgcattcgcctactcccactgactttaccctcttggccttggcgctgccgttcctgtcaggagacgagaaacctcagcgccagccagccagccacccatcaaatgttcctcagccataccatttcggtcgtataaatccaacaaagaaaacaaccaaacaaaagacccgaaaaccttttaagaacttaacttaagtaacctaa

SEQ ID NO: 59372 - DNA, 213 bp, Setaria italica
  Peptide Sequence Number=SeqID_125346
ctcgttctcgtcccctcctcttctcctctcctgcaactgcaagggcgagcggccgcggcgcgtgcaagactcccgacccgagggctgcttgcaggctttggcaggtcgcattcgcctactcccactgactttaccctcttggccttggcgctgccgttcctgtcaggagacgagaaacctcagcgccagccagccagccacccatcaaatgtt

SEQ ID NO: 59373 - DNA, 394 bp, Setaria italica
  misc_feature (369)..(369): n is a, c, g, or t
  Peptide Sequence Number=SeqID_125347
aattttttaatttaatttacatttcagacagaatagtgagcatgccaattgtacattccgcatagaagcaaacctagaagattattacgttttgagtaatggttaagctagataggtaaataccgttttcgaaatctcactgcccaggtccatagtacgcagacacagaggaatgatttcagtactgagcagatacgcaatgacttcatgatcatcaacctttacaagagcaccgatcacacccaagctggtaagcctcaagtattcatattgtcttgttctgtaggtagtgttcaagaaaggataaaggtacactggaatctccgcagttatgaatggtatcctagtgtcagggtgtgacgcaacacnctgaagagtgcaatgcattgcagac

SEQ ID NO: 59374 - DNA, 237 bp, Setaria italica
  Peptide Sequence Number=SeqID_125348
tggaactaagtgctgaactcttgcagaattcatacaatcaacttaacaatgacagaggactgctaataaagctgaactcttgatgcagagcataaatgctgaccgtgtatgcttaatttgcttccttcttctcctgatttcaactcgcctctgagcctgagtttccgaaggctattaacttcacttgtttaagctcctccaccacctctgccatggttggtctctcctccacatctt

SEQ ID NO: 59375 - DNA, 239 bp, Setaria italica
  Peptide Sequence Number=SeqID_125349
gtagttcctctggctcgacgcgctgctgccgcccgagccggagctcgcgcgcaggtcatccgagaaggcgtcgccgtcgctgaggccggagtccctgtcttcgtcctcgtaggcgtcgccgatgcggccgccgcacttgcggcagagcaggcgacgaaccgacctacctagaaagaaggaccccaacgacgacggactaggaagacggaaagtaagggacaatagacaaggaaacgaaa

SEQ ID NO: 59376 - DNA, 262 bp, Setaria italica
  Peptide Sequence Number=SeqID_125350
tacataatgtttatggaagatctttttttttggtttccctaacaatagaatacaggaaaattccatcaatttttgtcatcatttgtctggttttttttattgtcacaggtaaatgctcagcatgggtcaagaacagctgaagaagtacaatctttcagtgacattaatacttggaaggcattcaaagaaccaattcctcaagatgtgagtaaagctatgtacactggaaaccaactctttgaccatctatcaaccactaaag

SEQ ID NO: 59377 - DNA, 185 bp, Setaria italica
  Peptide Sequence Number=SeqID_125351
agagaactgcatactgcagtaaaacagtccatcagaaccattactattcgggacatactccaatttttctttaggtcaagaacaagaggtaaaaattacacaaaaggaaaattcaatgctttatttcaatagattccaccaagataaggacataatgtatgatgcactccaggcacatatttttg

SEQ ID NO: 59378 - DNA, 376 bp, Setaria italica
  Peptide Sequence Number=SeqID_125352
caagctaacacgacgagtcttttattattaccgatcgccgcaaggtcaagccagcggcgccatcgccgcccaagctagagctaggggcggcggcatgcatggtctcatctggccgagacagatcagaggcggtcgaagacgatgccgccgtgcgccgcgaagaagggcgcgaagacgagggactccacggccatgagcttgatcaggatgttgagggacgggccggaggtgtccttgagcgggtccccgatggtgtccccgatcaccgccgccttgtgcgcctccgaccccttgggccccagcgacctcgcctcctccgacacgccggacctacgaatagtaacttacttaggacgttagtacccaacgacgacca

SEQ ID NO: 59379 - DNA, 464 bp, Setaria italica
  Peptide Sequence Number=SeqID_125353
agacagatcagaggcggtcgaagacgatgccgccgtgcgccgcgaagaagggcgcgaagacgagggactccacggccatgagcttgatcaggatgttgagggacgggccggaggtgtccttgagcgggtccccgatggtgtcccccgatcaccgccgccttgtgcgcctccgaccccttgggccccagcgacctcgcctcctccgacacgccggcctcgatgtacttcttggcgttgtcccacgcgccgccgctgttggaggcggagatggccacctggacgccggagacgagcgcgccggcgaggagccccgccagcgtctccacgccgaacagcgtcccgaccacgagcgggctgagcatgacgagcgcgcccggcgccatcatcttgcggaagcgaaggacaatacggtaggaagaatacctagaacaacaaggtaggacgtaagtaccggacgaacgaca

SEQ ID NO: 59380 - DNA, 338 bp, Setaria italica
  Peptide Sequence Number=SeqID_125354
agggactccacggccatgagcttgatcaggatgttgagggacgggccggaggtgccttgagcgggtccccgatggtgtcccccgatcaccgccgccttgtgcgcctccgaccccttgggccccagcgacctcgcctcctccgacacgccggcctcgatgtacttcttggcgttgtcccacgcgccgccgctgttggaggcggagatggccacctggacgccggagacgagcgcgccggcgaggagccccgccagcgtctccacgccgtaactagtcgttcccgtacctacgttagttcgggtttcttttgtttagtttctttatttttgtttactttt

SEQ ID NO: 59381 - DNA, 436 bp, Setaria italica
  Peptide Sequence Number=SeqID_125355
tatggtggttggatggaaaaaaatggcttttcagatgtatacatcatggacacaatgtcactggagtggacagaattagcagttaccggatccgtgccgcctccaagatgtgggcattctgcaaccatgattgagaagagactgcttatatttggaggcagaggtggagcagggctgataatggggtgatttatggggcttttaaaagggtgttactgaagaagacaatgagacaccaggttggacacaattgaagcttccagggcaatctccctcaccacgatgcggccattcagtaacatctggtggaccttatgtatgtaatttgatttcatcatacattcatacttcctttctgagttttccgtctttctgggtgcattagtatggcatacatggaaggttggcctgtgaatgtccgtgctggatattaatt

SEQ ID NO: 59382 - DNA, 346 bp, Setaria italica
  Peptide Sequence Number=SeqID_125356
agcagggctgataatgggtgatttatgggctttaaagggtgttactgaagaagacaatgagacaccaggttggacacaattgaagcttccagggcaatctccctcaccacgatgcggccattcagtaacatctggtggaccttatctcttgctatttggaggacatggaactggcggttggctaagtagatatgatgtgtactacaatgaatgcattattttagacagggtctctgttcaatggaagcgcctaccaacaagcaatgaaccgcctcctcctcgggcttatcactccatgacttccatagggtctcaatttctttatttggtggctttgatggaaaga

SEQ ID NO: 59383 - DNA, 241 bp, Setaria italica
  Peptide Sequence Number=SeqID_125357
aggccgtacttggtgtcggacggtaggcggtcgtcgccgaggtaggacgccggcaccgttggcccgatcgtcttggcgcgccacgccgacgccatgtactccgcctccacactacatcactgaaagatgcatccgaagacgatgggtgtgtttggaatttggaagcatctacgacggcagtgtatatgatgtatggcagcaatagggacgaacaagcatgcatgcagctatctcacctcgg

SEQ ID NO: 59384 - DNA, 325 bp, Setaria italica
  Peptide Sequence Number=SeqID_125358
ggttcctaggaaatttacaagcaaggctgaaggaaaatggggtatgaagattttgtccattttatactgtctgaagaggacaaatcaacagggccaagccaggaatattgttctttttgaggaacaactccatcgcatgggaatgcatggctcaggaaccggttctatttggaggacatcttgtgtcagctcatcgacatgattggacctgagaatgagagctatttgacattgaaaagacttccgaaaggtgcaaaattgtctggggcatttcttcaacattctctttaaatctgaacaaaatttatggcttttgaagctaggg

SEQ ID NO: 59385 - DNA, 283 bp, Setaria italica
  Peptide Sequence Number=SeqID_125359
tttattgtagtagtctactattctaaaattcttagttgtactaaattaaggtagaagagcatgggtcaatcgccgtatgttagatcgtgaatagttggcaccacaatttttattatctagggtttttattaggtatctatcaaagattcaaagtattctttcgttgttaaataaggtcaccaagaagaccattttacttgtgtactctgtatctttttgtttagtttgtagtcacatgaacaatgagctgtaatactatgatacagggattatcattattttt

SEQ ID NO: 59386 - DNA, 166 bp, Setaria italica
  Peptide Sequence Number=SeqID_125360
agaacatagtggtaacacaaataatgttacagagaaggaaaaggaataaatttggatgttaactaacaggaccgcataccgtatccaaggaatgcaagaactggtaacagcacagctatgcaaatcaatataacagacatgatatggagaacttttcttatcctta

SEQ ID NO: 59387 - DNA, 372 bp, Setaria italica
  misc_feature (278)..(278): n is a, c, g, or t
  Peptide Sequence Number=SeqID_125361
taagggtaaagtacttagtaattactaagtaaaggttgttacttaggtaagtcttgggtttccgttgtacaagaacaaagccagggaagctgatcagaaggtgtctggagctaggaccggaaacaaacaaaaggagacttccatcgccacaatggtggcaaccatgccaaggaccccttcaagagaggtgcttgaccttgtgtccttcacggctcgttccgagtgataccttctgccctgccagcagcttgactgagtgagaaagcctggcgatttancagtgtactcctgggaattgtttgcccataaactaggagctgcaggaattcctgatcctctggatatgtacgaccagcacgctgctccggaaca

SEQ ID NO: 59388 - DNA, 296 bp, Setaria italica
  Peptide Sequence Number=SeqID_125362
agggaagctgatcagaaggtgtctggagctgggttccgtgacaagaacaaagccagggaagctgatcagaaggtgtctggagctggccggaacaacaaaggagacttccatcgccacaatggtggcaaccatgccaaggaccccttcaagagaggtgcttgaccttgtgtccttcacggctcgttccgagtgataccttctgccctgccagcagcttgactgagtgagaaagcctggcgatttatcagtgtactcctgggaattgttgcccataaactaggagctgcaggaattcc

SEQ ID NO: 59389 - DNA, 453 bp, Setaria italica
  Peptide Sequence Number=SeqID_125363
tagaatacaatagaccaacaacaaatagacgaaaggtacccaagcaaagcctgttcagtacctcctagttcattctatccttttccgttggagaaccaagcggcagtacccactatggtttctgtgtgagactatgcgaccggaccttgaactgctgccttcgcttggtttatgaataaagcaccggatgatgcatcaatccagcagaccaagcagcaatttagcagtcattggcctggcaccctggcttgccatggaaatggcagccatgtgagtaggcgactgttttgcctgtatgaggaagcttctatctgccgctcacagaagaaaaagaagcttccgtctgagaagccgtttccttttgttcaacttctattctatgggtattcttaatatgccccaggaaaccctgaaatcctaacatctgtaatggctgtcaatagagttacatag

SEQ ID NO: 59390 - DNA, 326 bp, Setaria italica
  Peptide Sequence Number=SeqID_125364
ttggtaattacgtcttccttagtattaacattgaacatgcttttactctctttttttaagacctgaatgattctcttattataggtttgtcttgactgtatctgactgtctcacactattttgtggtacaagatataccatattacaatgatccatgcttggtcacttgcaggatgaaatagaaatacagaacagtgagaactaccggttccaacaggcaaaattgagtataatacatgatctacttgggaaagtccatgcaaccgtggttagcactgagaaaggacaagtttacagagcattgcttgatgagttgaatgcagaag

SEQ ID NO: 59391 - DNA, 457 bp, Setaria italica
  misc_feature (238)..(238): n is a, c, g, or t
  Peptide Sequence Number=SeqID_125365
tttgctagacatctcagacgttgaacagccggaggggcatcaaacgacagccgatttgcaaaaggcgatatccttatgagcctttcttcaatcaacttagggagaacagcatcttcatagaactggataggagaccaagcctttatcttgaaattaaatgcattactcaaattgtgaccaaaccgctccattatgaactcaggcaccttgttaaccacccggacatcattttttaaangttggataaagtgatcttcatcataaatatcaccaaacttgctaggatccatccagatgctgtgatagtggaagtttgggattacaagagttgcattcagaaaaccggcaacagcaactgcattgcaaatcgatgttcgttgttgattcaaaccaccatttgcctcaacataaatgtagccatttgattcaggcaaaccatcggtattattgcttatgc

SEQ ID NO: 59392 - DNA, 260 bp, Setaria italica
  Peptide Sequence Number=SeqID_125366
atctattgttagctgctttggaacattggtctacataaggacatcaaataagcatgcacaaaaaaaatcataatgacttgccaaaattccttcttcaatatggcccctcctttttgcttctgcgattttcatagttcataacatttttagttaattttctcgcttacttaaggcatccttgggaggaaagtgatggggaatctatggatactagcagcgaaggtagcagtgaaactgatgtcgaccggttaagaggttct

SEQ ID NO: 59393 - DNA, 204 bp, Setaria italica
  Peptide Sequence Number=SeqID_125367
tatagatatcctgtattcctttttgtttgatctttgctttgaatgccactttcaggtgtcaattcttgcaagtaaatttcctgatttgaagacattcagaagttgtgatctgctgccaaccagctggatatctgttgcatggtatgtctgtaacaatccagattctcttatctttttcactgatgtccttatgtcttttgtaaa

SEQ ID NO: 59394 - DNA, 212 bp, Setaria italica
  Peptide Sequence Number=SeqID_125368
tcatagctctacgatgcttgtcttcatcaggtcattgaataactagatgctttttgcagatactgatcgtgctgcaccagcatgccctagttttggtgggcttaaccactgtgtgaatgcagctggtaagctaacattgccagtctttgggctggcatcatacaaactgcggagctctatctggtcatcgaataggcctgaggagcagcatc

SEQ ID NO: 59395 - DNA, 389 bp, Setaria italica
  Peptide Sequence Number=SeqID_125369
agactaggaaaaagaagacggttaagaccaaaagacaaataaaatacgaagtccaagaagctaacagtcccaaaagtaggcccagcaagcatgcggcctaaaccaagagatccttctgcacctagatcttcagtggcaacaggtgtgcgaagaagtaccaccactcaagcaactcccccagcaagagctagcagcacttcaaaacgagtaccataggtcaagagtgaagacactgatgattcggacaaaccacttttcagttatatttgttttgtatagttcttttggaaaggattttcttcctggcatgatatattgttggttatagtgaatttgtgaatttttgtatctcagatggataggtcgctgttgttttttcatctttgtag

SEQ ID NO: 59396 - DNA, 250 bp, Setaria italica
  Peptide Sequence Number=SeqID_125370
attatcactcccggaattcaagtcccatattctgtgtgtggtttaatttttctaagtgcacgttgtctcatatgcacatgctactttgctattactacgtcttattttgtatgattcccagtggcaacaggtgtgcgaagaagtaccaccactcaagtcaactcccccagcaagagctagcagcacttcaaaacgagtaccataggtcaagagtgaagacactgatgattcggacaaaccgacttttcag

SEQ ID NO: 59397 - DNA, 358 bp, Setaria italica
  Peptide Sequence Number=SeqID_125371
ggctcatctccaagaattgtaacaaaaacataatctggagtttatgcacatgccataggtatgcacacaaaagcatgctgtaaaaaatgaatgaaatctcacctggaagcatttatggacccatgtagcagctgattctttgtgacagccattgggtaggccattaatagggccattggaattcttttgcaatgagagattttgaagggactctcttgcagcattatgttccttctctagaatgtcaacgagctcattcagtaaaaaattcaaaaactcgtgagcatcctgtaaattacagcagtgttgagttcattctatacaaaaagataaaggttacacaacagctattttaaaa

SEQ ID NO: 59398 - DNA, 147 bp, Setaria italica
  Peptide Sequence Number=SeqID_125372
gggagtgttgggagttggtccagtcacatcacttcaaataatccgactggaccgctgaactggttatgatctagtcggattatttgaagtgatgtgacttgtccaagggatgttgggattggtccagtaaagttgttattgtcaaat

SEQ ID NO: 59399 - DNA, 398 bp, Setaria italica
  misc_feature (277)..(277): n is a, c, g, or t
  Peptide Sequence Number=SeqID_125373
gttgatctgcggcagtcagcactttgtgacactcattcgcaaatacataaagttttccaaggatgggaggcatattctgagtcgtgactacatgactctgaagctttgggatgttaagatgaattctggtccagttgcaacattccaggttcatgagtatctaaggcctaagttatgtgatttgtatgaaaatgactcaattttcgacaaatttgaatgttgtcaaagtggtgatggattacaagtagcaactggttcctacagcaacattttccgngtgtttggtgttggtactggtagcaatgaggcatcaacacttgaagcaactcgaaaccctacaaggaggcagctccagaatcccacaaggctgccagatccctaaagtactctgacaaggg

SEQ ID NO: 59400 - DNA, 164 bp, Setaria italica
  Peptide Sequence Number=SeqID_125374
gatctttatattaacacctccttttcatggtttgttacatttgcccaatctatactgcaaaacaggttacaagccaagaaacaagtcttgctgcaagttgccgaagagtatatgctcatgcacatgactaccatataaactccatatcaaataacagtgacggc

SEQ ID NO: 59401 - DNA, 364 bp, Setaria italica
  misc_feature (45)..(45): n is a, c, g, or t
  Peptide Sequence Number=SeqID_125375
tatgatcgtcgagcttgtgttggtggacgtgaatttagactctcnctttttgtcagattcttcaacataccgacaggtcaaaccagttgatagagatattatatcaaatgcattcatgttgatgggcttctttgcttcttgttgcttgctctccgtatttgcgatggtactcacagaatcaaaatctgcattcatgtccaaaggaggggcatcctttgtttgtaagttatacctgagtagttttgcatttagtcccttcctaaaccatggattctccattgatttttttcctatttgtagtattccttcgttacttggggtttaggtattctaagtaatttcttttgttcttaaaagttccttt

SEQ ID NO: 59402 - DNA, 253 bp, Setaria italica
  Peptide Sequence Number=SeqID_125376
cttcttatacatatccatcaagtttttatcatggaacgggagatacccagcaagtagcacaaaagaggatgaccccacagaccagatgtcagccttttgcaccgtcataacctttttctattgataacttctggtgcgacataagcagggtgtgccacaggttgtgtgcaacaggccgtctttgtctttttgtctattttctagtctaagttgttcttacttttagttaccgtttaaattttctttttgtttt

SEQ ID NO: 59403 - DNA, 123 bp, Setaria italica
  Peptide Sequence Number=SeqID_125377
gaatgttggaaactgcctcgatcaacgttcatgtagttttgttttaccctttcgtcatttatttttgacgaaatgagaacgacaattgtttagctttgaaatacagaagcttatattggtaat

SEQ ID NO: 59404 - DNA, 104 bp, Setaria italica
  Peptide Sequence Number=SeqID_125378
cgtgcccgtaacacaaagacctctgaaagtgtcgcgatcaaggtagactttggcaaaggttccttgtccaagcattttcccatctcatacttctgcatcaaaac

SEQ ID NO: 59405 - DNA, 245 bp, Setaria italica
  Peptide Sequence Number=SeqID_125379
cgtcccaactccggtgggtgctggtagacggccggcgacgaggctatccttcgtcttcttcagcgagcaaggtgaatccagccgtggtgcgggcactgtcagttgccaaggagtttccattggcccctggactggagcagcaatgaagatgtgagtggtcgtctctcaatttccttaaggattcatggggcagcctgtcatgagctccaattgtgccactcaatgatgcaaacggaacgaccctg

SEQ ID NO: 59406 - DNA, 183 bp, Setaria italica
  Peptide Sequence Number=SeqID_125380
attcagatggcaatatctcaaagagcgatatccggcagctttacatggtgtggaaaccactctgccaaggctgccatgggaacaccaaggactcccccaattgtttctgtgggttgatccccaccgccaatggggtccggaaaactggtccctggatggattaggacctaggccacgaacaat

SEQ ID NO: 59407 - DNA, 320 bp, Setaria italica
  Peptide Sequence Number=SeqID_125381
tctgttgagattgaagatgactttgctactcttgctgacaagagtatttttcccggggatgtctttgggtcagagactctgaaatctatgagaaccgtgacatagcagatgagatttcagatcagaaggctgatatgctacaggctgaggaaggctttcgaggaactctgttgacatcaagtgtttcagctcagctttgtcaggatatagcatttagtgaatgagttcccacatcagatgtatagctgcataatacttactagaattaaaaatagaatacaaagaactttaagaaacttaaagggaaaagaaaaaataaa

SEQ ID NO: 59408 - DNA, 233 bp, Setaria italica
  Peptide Sequence Number=SeqID_125382
tgaataatcacttgtacagtgggaatagagactgacagtacacgaaacttctattgacaatggtccaattcaatgcgagcatggaaaggttccagcatctaaagtcacatcaatgaagcgactatcatctgtagcttggcagaaactattttcaaaatatggagggggaccgacattgagcaatgatgactattgcatggagtgtcttaaagatggggcaaaaaatgcagtat

SEQ ID NO: 59409 - DNA, 189 bp, Setaria italica
  Peptide Sequence Number=SeqID_125383
atccagcgtctcctcgaggagctggatctgctcgcggacgcgggagacgagtggggagtcgaagcggaggatctctggcaccgccttctcgttgcgccaggctcgcttgagcagctccacgtccgtggtcgccgcctcggccgcggaacgaccaaccgacggaatttagtacaagggtagtaccctaca

SEQ ID NO: 59410 - DNA, 193 bp, Setaria italica
  Peptide Sequence Number=SeqID_125384
ttgttattgtttctttcggttacaagtccatcaagggcctggtcgagggtggccaagtccacaacctcctctccaatgtcatctagctggaaggctccaacgtcgctcttagtcttgcagaagacaaaggtgtcaagctgaggctctggcaccatgtcatcctcagtgctcgataaggactgtctggtaaccg

SEQ ID NO: 59411 - DNA, 354 bp, Setaria italica
  misc_feature (29)..(29): n is a, c, g, or t
  misc_feature (61)..(61): n is a, c, g, or t
  Peptide Sequence Number=SeqID_125385
ttacatatggagcctaagccacatgctgnacttagaccggtattttaccaattcaggttanctttgtggcgatacagagcaaatatcattccccccttgattccatccgttccaagaattcagaagaatcttggaccaaaagctcttttacaggtactgatttgtgattgacatcagataagatcgatttggccaccctcgaccaggcccttgatggacttgtaccgaagaacatacaagtcgttggcaaccaagtccacaacctcctctccaatgtcatctagctggaaggctcctaacgttcgtcttctttagttcttttgttcttagttaagttacttaaaggttttgttt

SEQ ID NO: 59412 - DNA, 322 bp, Setaria italica
  Peptide Sequence Number=SeqID_125386
taccctaaggggtttttacctaaattactagtttttgtacttactattgtattgttattcgtccttttattggttactgatgtgatgtttcagaaactctgagaacagttgtgcaagagtgtagtctcttgccgatgtctcaacttccacgccagtgggtactgggactccaaaatctattggccggtgagctggagtcatgtccttttggtccaagggatatagacgagcaaacttgtaactttccgcagccacataaacaggtttgttcatactatgagccacaagagctatctgataagtgcccatcatgttgattatt

SEQ ID NO: 59413 - DNA, 204 bp, Setaria italica
  Peptide Sequence Number=SeqID_125387
ccccaatgtgcctgttttcccccattagctgcgattgccgctcgtgttgctgttcaccgctccaacctcaaatcaaccgttgcggccacaaaaaatgggggaaaaatctaacccacgatacgcttgaaccgaagaagaggcatattgcggatctgacgcaaagcggtagctgcgacgaggcggcggcggcggcggcggcgcgtg

SEQ ID NO: 59414 - DNA, 236 bp, Setaria italica
  Peptide Sequence Number=SeqID_125388
aggccgccgacatgtggaacgggatgtgccgggcgacgaggctcagcaaggtgccacgcctcgacgccgccatacgggaggtgaacgcgcaccggagccggcgggcggcggcgcgcgcgcagaagctgctcaagaggtacgtgttcaggtcgtggaggatcctgacgctgctcgtcgccgtcgtgctgctgctcatgacggcgatgcagacgttctgctccgtctacccgtgcaag

SEQ ID NO: 59415 - DNA, 215 bp, Setaria italica
  Peptide Sequence Number=SeqID_125389
gctttcctgtctcagctatttcagatatagatctcaaaaccaagaagaagatcaaggccgccggcggagccgtcgtgctcaccgcctaggtttcagtccttgtctgcctcttggttttgagatctatatctgaactagtagtgctttcctgtctcagctatttgtgttaagaagacttgctagcttttaaattgctgtcccaccaggcaggagcc

SEQ ID NO: 59416 - DNA, 182 bp, Setaria italica
  Peptide Sequence Number=SeqID_125390
gcagacaaggactgaaacctaggcggtgagcacgacggctccgcctcttggttttgagatctatatctgaactagtagtgctttcctgtctcagctatttgtgttaagaagacttgctagcttttaaattgctgtgacagggaaagcactactagttcagatataggtttcagtccttgtct

SEQ ID NO: 59417 - DNA, 218 bp, Setaria italica
  Peptide Sequence Number=SeqID_125391
atagttagcacatgggtgagcctgctttctacgcttattgatgccattttccactagggattcctagtaaggaaatgcatgattatgttattgggatagcaactgggtccttctgttacaggccatggtggcaaacatcatttggcaaattataaaatcaaatataagaaattacgagggaatatctgattttattacagcaaaaggaagaacctgtc

SEQ ID NO: 59418 - DNA, 164 bp, Setaria italica
  Peptide Sequence Number=SeqID_125392
gaaggcaactgctggttgtccacagcctttggtgagtaaactccagtgttgattggagaaagcagtgcttgctgctgctgctggaactgattcaggacagcagccaaatgttccaacattacaccttcctggcagcagccttcagtcgagcaggctccgaacat

SEQ ID NO: 59419 - DNA, 256 bp, Setaria italica
  Peptide Sequence Number=SeqID_125393
ctctttccacgatgttgaagcaacagtgtttggtcctcgaatggaagatatacatcagcatattctcttgatatgtcctgattgcagtgggaaagggttgtaagtttattaatgcaaacagagaatagttaaagctactaatactttcatcaagatttgtttagagctaccaatactctcatcaagatcttaaatttcctcttgattttctgattttatttaatttcacattgactaggccaagaaaaggtgagga

SEQ ID NO: 59420 - DNA, 194 bp, Setaria italica
  Peptide Sequence Number=SeqID_125394
catatcaagagaatatgctgatgtatatcttccattcgaggaccaaacactgttgcttcaacatcgtggaaagagttgggaagtggggtgtcgcattaatattctcttgatatgtcctgattgcagtgggaaagggttgtaagtttattaatgccaaacagagaatagttaaagctacaaatcttgatgaaagt

SEQ ID NO: 59421 - DNA, 414 bp, Setaria italica
  Peptide Sequence Number=SeqID_125395
tcctcaatggatccctttccgtaggaggatcatgcttctgccctggcaagtcatacactttcctctctctcttcgctttctcaccctttacaacgatcatccttgccccttctttgacacccgctcttttctttcttttcttgtcctccttcaagtcaacaaactaataagcagatgaacaacaacacagtataaaccaaggagatagcataccttgagatcttccaaatcttcatcttttagtttcttgaccttggatgccttggcattactgtttttcttctgcgaagttggcatgaaatcatcatcgtcagactcgacttcttgtttcttaactttagaggccttttgtgcttgctattcatggtgcctttctgcttctcgtttccttcttagctcgggaatgcgagatcg

SEQ ID NO: 59422 - DNA, 246 bp, Setaria italica
  Peptide Sequence Number=SeqID_125396
gcgaggaggacaagatcttcgacatcgagctcgccaagaagatgaaagagtaagcagctccccggctttgctctacccatcgaaattctactatttatcctcgtatcagaaatccacaaggcccgggcggcccggcgctaacctcgagcgaccaaacgaaatcgcaggcagctcggcgacaactgcttcctgcacggcatccgcaaggccggccacctgctccacgtcgagcggccgtgcgcctac

SEQ ID NO: 59423 - DNA, 335 bp, Setaria italica
  misc_feature (144)..(144): n is a, c, g, or t
  Peptide Sequence Number=SeqID_125397
cccttttccaaagtttgaaagaacctcagaacccatgaatgttgtccattgacttcacaattatttccagaacattcataaatcatccttatcaagaacttcagtatgcatacccatctctgaatattcgttgaactcagtacntttttaaattcgtcaggagcaggcttcctgataagccatccaatgtctgtaaggaatccagacattgcagccatttgaagtttccgacgctcacaaggatcacaaggaagacaaccgggtaaactactaccaaaataaagactaactagtacaagaaagaaaccaagaaaagaagacaatacctagtaata

SEQ ID NO: 59424 - DNA, 118 bp, Setaria italica
  Peptide Sequence Number=SeqID_125398
agacggcaccaagatatttgagtggttggctagcatgcctgttgaacacgaggatgagtaggcactcttggtgtcatgtattggagaattggtggtaagttttgcattttcctgcttt

SEQ ID NO: 59425 - DNA, 415 bp, Setaria italica
  Peptide Sequence Number=SeqID_125399
agtaaactagtacaaccaatagaatacaaggtagaactctattgcagcaagagggagcaggcacctctagtcgatcttaacagatgagaagaggtagtggacgaagtagaatgagagcaggaagccaatggcaccggtggagagcatgattgcaagagccatgatcaaggagtagccaaggtagagtgttgcagagactggtccactcaggctcctgaggtcgaataccaagtagttgatagagtagaggaaaacgtagaatgcaacagaaccagaagcaaagaaggccttccaccaccatttccagtcctccacgcaaaggtgcatgtaggttaggacaagagaaacctcaccacagaactatgaccagcaggaagaggacaatgaacaggaagccaaagacatagtagaatct

SEQ ID NO: 59426 - DNA, 235 bp, Setaria italica
  Peptide Sequence Number=SeqID_125400
ctaagagctcatttagagcctcagtgtggaacttgttgtcacaaaggtacagcgacacattaataggcttgaagggctcaaaatcaatagtaactttctttggcacactaagtggcaatacccgtgaagtgcttcacaaattctctgttgatctcccaaagaagcatggtagaggaggacagtctgctttgcgttttgctcggcttcggatggaagaacggcacaactatgtccg

SEQ ID NO: 59427 - DNA, 228 bp, Setaria italica
  misc_feature (212)..(212): n is a, c, g, or t
  Peptide Sequence Number=SeqID_125401
agctgagccaatctgacatgtttgatcagcgacttcaagcgaagatacttaatgtggttgatgtttcttatggtggtgaaaatggtttcaaccaagctattgagttgtcagctgagatcttagcaaatgtgaagttcattcaagagagtgagttgaccttggctgagatcgcctcgtccgggggagtaggtgtgcatgaaggtgccaggganataggaaggcgtggac

SEQ ID NO: 59428 - DNA, 277 bp, Setaria italica
  Peptide Sequence Number=SeqID_125402
gattagcaatcagccaacctcacgcctgtgctggcccatgcccatcaagctctggatagctgcttttcaagtgttgctacacctacgcaggaacacttgaaaagcagctatccagagcttgatgggcatgggccagcagcctcctcttctagaggagcttaagaacagaatgatgagtcacaatcatggcagtaatgtgtcaagaagataccgaacttaatcaccatcatggcagtgatgtgtcatgaataattaaagagacacttcaagtattcat

SEQ ID NO: 59429 - DNA, 201 bp, Setaria italica
  Peptide Sequence Number=SeqID_125403
agctcggggttgctacacctacgcaggaacacttgaaaagcagctatccagagcttgatgggcatgggccagcagcctcctcttctagaggagcttaagaacagaatgatgtgtcatgaatacttgaagtgtctctttaatttcgggtcaaccgtcatggtagtactgtgtcaagaagttatcgcactttaaggcttagcg

SEQ ID NO: 59430 - DNA, 440 bp, Setaria italica
  Peptide Sequence Number=SeqID_125404
ggagaacaagctggaccaactacaatttgctcggcagaaattgacatattgctatctgtctgctgctgctaccatattcccttctgaattgtctgatgctcgcatttcatgggccaaaaatggtgttctcacgactgtggttgatgacttctttgatgttgggggatcaaaagaagaattagaaaacctgatagcattagttgagaagtactatccttcaacttgatgtctttgtttactctttattaagtaatgctgatcttttattcatgactaattgatctcccatgtttggctaatggttttccatagatggcatgagcaccatgcagataagttctactcagagcaagtaaagatagtgttttctgctatttatgtcaacaacaaccagcttggagcaaaggcttcagcagcacaaggccgcgacgttacaaaca

SEQ ID NO: 59431 - DNA, 399 bp, Setaria italica
  Peptide Sequence Number=SeqID_125405
caagagtacgataaattatttaggctaatgagcacttgtggccggctccttaatgacatccaaggttttgagagggaaggcagcgaagggaagctgaatagcgtttcactacttgttcacagtggcagttctgtgtccatagaagcggctaagaaggtgatacagaagtccatagacacgtctagaagatacatgtacaacaaggtagcagccggaaaaacctacgttgctcatcgctacaccagccaaattataatgtatggtactagctgttggcctgctgctgcctctgattcatatgaacttgatatatagaatgcaggaggtcctcatttttctgataaaatgttcaaggatgaatcacccatttggattttgagtggctcattgatgactgcg

SEQ ID NO: 59432 - DNA, 174 bp, Setaria italica
  Peptide Sequence Number=SeqID_125406
cagacaattcagaagggaatatggtagcagcagcagacagatagcaatatgtcaatttggctggtgtagcgatgagcaacgtaggtttttccggctgctaccttgttgtacatgtatcttgtgcatggatcatggtcttatgaagacctgtgattctttgatagtgagagttcg

SEQ ID NO: 59433 - DNA, 167 bp, Setaria italica
  Peptide Sequence Number=SeqID_125407
cctggaggaccaggtgcgcccggcgttcgtgccggacgatgtgatcggcggccccgcggcggtggacgccaacaaggccgccggcgcgccggacgccgccgcgaatggtgcgggctcggtgctggaccagaaggtgtggttccgcccctggggggcggcttctcgac

SEQ ID NO: 59434 - DNA, 338 bp, Setaria italica
  Peptide Sequence Number=SeqID_125408
ggaggaggatgagaaactcatgaatcacataacaaagcatggccatggctgctggagttctgttcccaaactcgcagggctccaaaggtgcggaaagagttgcaggctgaggtggataaactatttgaggccagacctcaagagaggggcattctctcaagaggaagaagacctcatcattgagctgcatgctgtccttggcaacagccctttcctttttctatgagaaggtggtctcaaattgcagcacagctgcctggaaggactgacaacgagatcaagaacctatggaactcatgcatcaagaagaaactgaggcagaaaggcattgatcccaa

SEQ ID NO: 59435 - DNA, 240 bp, Setaria italica
  Peptide Sequence Number=SeqID_125409
agcgccctctgcacgtccgggtcgttgaggtaggcctccacgtaataatccgtgcacggatcaaagctctcgatctgcagccagccacattatatgtgtactccatcacgtaagatccaagccacacgtcattattaattagtactactagctagctcaattaatcaaccatgattagctcagcacatcgtaatcataccgacggggtgatcggcggcgtgacgagtccggcggactcgc

SEQ ID NO: 59436 - DNA, 237 bp, Setaria italica
  Peptide Sequence Number=SeqID_125410
cctccatttagcagcgactgggagctggagctggttgacagagtatctgctggaagtgaccggcactctcccatcggtgtcaccactgtagacccagactctgatgtcgttcttcaggagctcctgtatgataggcaggaccgttgtggcgctgtcagtccaccgtctcaagacgtcactagaaaaagagcaatattaatttttaaaaatatatataaacgccacgagttgaagaat

SEQ ID NO: 59437 - DNA, 247 bp, Setaria italica
  Peptide Sequence Number=SeqID_125411
ccgcgttcccaatctttcaccatcacacgcacatccatcagtaactattcatcgtcccacccgacccgacacgacacgccaatcaattggtggttggtgtcgatgcacggtaatatatctgacgcgcttcgcactgcataccatgatgcctttgaggttgatgggcgaggaggccttgccggcggtggcggcgtggcggaggatggcgtgggcgagctgggggacgtagtggccggcgtagctctcg

SEQ ID NO: 59438 - DNA, 234 bp, Setaria italica
  Peptide Sequence Number=SeqID_125412
gtcctaggtcttgtaggtcttgtccctttctccttgcccttgtactgcacgacgtagccacccacctctccagaaccctgagtgctgctgaaccatggcctccatttagcagcgactgggagctggagctggttgacagagtatctgctggaagtgaccggcactctcccatcggtgtcaccacttgttagtaccctaagtaacttaacttaagtaaattaagttaacgtttaa

SEQ ID NO: 59439 - DNA, 208 bp, Setaria italica
  Peptide Sequence Number=SeqID_125413
attggcaatggttgcagaagatcggcagataaatgatgtcttggaggagctctttgccgaacaggtatacttcccaaagttgatggttgcatggtcaatcactttttactgacctagacatttacctctagaaaaaatatgattccacaatctgcattcaattataatattagatattcttagcaaattcgactccctagcatatatg

SEQ ID NO: 59440 - DNA, 228 bp, Setaria italica
  Peptide Sequence Number=SeqID_125414
gtgactctgtacttggactccaactagtaatgcctgtagttagagtccaagtacagagtcaccttcttcaccgacgtgaacgaagtttgcagcctccagtctttctgcttcctgttcaatggccttcctttccccgcttccgctctgttctccttgacatctgccagcttccagatgcagtgctcagcctgagtgtcaaccaactcgagcaagaagatgccatccttc

SEQ ID NO: 59441 - DNA, 449 bp, Setaria italica
  Peptide Sequence Number=SeqID_125415
ttttacataatttaattgatgaggaaggcaataaagcatcaaagcaaaggccaggtttcaagagtgccatgctagatctcaggccatctgctgatggtcagacaaacagggttactttcagtgttaataaggagataattcatcagatttttgtggaaaagcctgctgtccatcgggcattttttggattttgttccggaaaagatgtcagaagatcatttttggtcaaaataccgtgaagctgagtatctactcagacaaaaaatactgcattggcagcagctcaagctgctgaagatgagataaaacaagtggatccaacgttagacatggaagcagatgcaggagattattacattcatcttctggaccacaggattctccgtgatggaagtatacagacagttgatcctgatagtgaatttgtcatgagaacgttgtctcaggat

SEQ ID NO: 59442 - DNA, 192 bp, Setaria italica
  Peptide Sequence Number=SeqID_125416
gctaagggacctgctctaggctgtcagtgaacggtggcatttgtgttattcccgagcactacagctttctgttacaatactatgcacatctttgttgatgaactgaataatgatttcagtttgtatgaggagctagccagctcggcaataaaatcctttacaattcgaacccaaaaaaaaaaaaaaaaaaaa

SEQ ID NO: 59443 - DNA, 451 bp, Setaria italica
  Peptide Sequence Number=SeqID_125417
taccatccacaggcacagctgttttaactaccggtggatatcttccgcacctgctacatttttcttttccactatgtgatatatccggcctggtgcataaagcctccttggatcctttagcattgcgtcttcaggtatacatgtatccctcaaacatctcaaacataggaggcacggcaagttgcaacgcagtcatgatgttcattagacataacaatgatatgatttatcatcaaacagaaatacaggggccgttcggttgttttgctgctttgcctggccttgccttgccaggcgagcgaattcttgccggcgcaagcgagctggattggctctcccgcatcggcaaggtgaaaccttgccagcacagaccctgagataagctagctgttcttccaaacgcacagccctcatccctatccttgcttagcaaggctaaatagtacccggc

SEQ ID NO: 59444 - DNA, 331 bp, Setaria italica
  Peptide Sequence Number=SeqID_125418
gctggggctgctcgtcgccgccgtcatcgcgctggtgttcatgctcctctgcacgcagcccaagaggccgaaggacgactagacgtacaaccaatctaacccctgctgctgagaggaggtttccaaggttccatggcggagcagaggccgaagcagagcagagcaggccaggcgtccaccggttcctgattcttcacttgtcgaataattttctctaccctacctaattgtgatgttcgcctaccgtaagtcatgattgtaatcagtatatattttagcaacctgagttgattgatgttatagctttggagagaatggtagacgttatctg

SEQ ID NO: 59445 - DNA, 216 bp, Setaria italica
  Peptide Sequence Number=SeqID_125419
tgaagtggagcaggcagcaatctggaagttcctctggtggtctggcatcttggcagttcatgtttttgtttgaccagaacagaaacatgaactgccaagatgccagaccaccagaggaacaatcctagttggactgacgagccgccggaaatcaaggtgactgtaccagaaggctccctttgcaacctcaatctaagattcaaggcaggattacca

SEQ ID NO: 59446 - DNA, 150 bp, Setaria italica
  Peptide Sequence Number=SeqID_125420
atgttaatccaaaaacagagttgctcttcatgttccatctttgtagggtcaatctgatagtatccagcattttagaggcatactcaaatttgtcttcatctatatgtatccttggaaaaattatcatcccagtgtattgtccattactcc

SEQ ID NO: 59447 - DNA, 236 bp, Setaria italica
  Peptide Sequence Number=SeqID_125421
accacgtctgcacggcgaacgccacgcccgacgccaccaggcccgcgtagaggacggtgaggagctcgggcaggccgaagaggcaggtgtaggaggtgacggagaggcgcgccgggtagcgcttcagcacgggcgcctgcagcaccagccacccggaccacgacacgcagtggcccatcaggtacaagcaccccagcatccagctcttgccgccgccgccgctcgccggcgcagca

SEQ ID NO: 59448 - DNA, 446 bp, Setaria italica
  misc_feature (204)..(204): n is a, c, g, or t
  Peptide Sequence Number=SeqID_125422
cacacatgctttcctccagggaacacactgctgaactgcatagctgaagcacactttcacagttcctagtgtcgtaagaagggaggatcatcaatgtagtcacggaataaagcacatgatgaagggcagttgtcaaatgatgcctccacctcgaagattttgaaagcgaaggatgaaagtacacatcatcagccaagaaagccntaaaaaagactttctgccttcttttcagggcataggcatgtgaatcacaagatctcagccccagttgggctgggatcctgtcttcatcctctgaactcaaatcctagcaaagtagaataagagaactccgcaaatgaaaatgatactccagctcttgaaagacctaaattactccacaagcaagtgatgaaaagtaacaacaatgaaatcctaaggttgaatagacacagcctcaaaattag

SEQ ID NO: 59449 - DNA, 256 bp, Setaria italica
  Peptide Sequence Number=SeqID_125423
ttgttcactgtgtacaataaaaacacaaggtcagaactggattgggacaagataaacaactgactttcttgcctagttcctgataatctcccacatgaagaagaaaaggaaccacactttctttcacagttcctagtgtcgtaagaagggaggatcatcaatgtagtcacggaataaagcacatgatgaagggcagttgtcaaatgatgcctccacctcgaagattttgaaagcgaaggatgaaagtacacatcat

SEQ ID NO: 59450 - DNA, 503 bp, Setaria italica
  Peptide Sequence Number=SeqID_125424
tttaccaataaactgttgtacaccatatactttactaaactaactttgggaattaaacgtgttgtcagagtgtaagactggattttaagaaatgttgtacagaaatccatgttgttgttttagattactatgggaaagtgctcggtttatatagttgacacacctttttttcagtctgttattcatgaattttacttcatgtattggctcgctgtccataggtagtgacattctgggagggggagatagtagatgctaaaaattacacgttttttcaccggcaagtgggaagcatcaccagaggatgatataaggcactggtccaagttctcatcatttacgcctcttctgagtcagattgagacagatggtggcaagtcgttagaccttagcaactatcctcatatatttatgaggtggaaagagcaatactttgtcaatgttggagttgactgtgggttaaccatcgctggtttctactacgtttgctttcttgtagtgat

SEQ ID NO: 59451 - DNA, 468 bp, Setaria italica
  Peptide Sequence Number=SeqID_125425
tgggaatgaaaggcaggactgtttttggatgtgcactgtcagatagctgcagtgctgcttatcctccagtttctgtttgatattccgggatgtaggttatgtttttcttttacagtccattgtgcgaatggcatttgtgttgttgcataccgctcaagtactgcttatgagcttgcttgaactttatcctggagcctcaagagttgccattgatcaaatctacttgtatctttctttcagtgttttgctggaactcagaatgtttcgagtctgcagaaggatgaagcatggaaagttaatgtgcgcatccatggttgtgatcttgaacagggttatttatgtggaacgatggaagcgcttaatgttccattggcagatacgcctgtagtgacattctgggaggggagatagtagatgctaaaaattacacgtttttcaccggcaagtgggaagcatcaccagaggatg

SEQ ID NO: 59452 - DNA, 209 bp, Setaria italica
  Peptide Sequence Number=SeqID_125426
gtcgaccaccctcaccggcatctcggtagcatcaccagaggatgatataaggcactggtccaagttctcatcatttacgcctcttctgagtcagattgagacagatggtggcaagtcgttagaccttagcaactatcctcatatatttatgaggtggaaagagcaatactttgtcaatgttggagttgactgtgggttaaccatcgctg

SEQ ID NO: 59453 - DNA, 122 bp, Setaria italica
  Peptide Sequence Number=SeqID_125427
agggttatttatgtggaacgatggaagcgcttaatgttccattggcagatacgcctgtgagtaactcatttgttcttctccttcggcactgaaatataatcctatgcattctagacaaagat

SEQ ID NO: 59454 - DNA, 150 bp, Setaria italica
  Peptide Sequence Number=SeqID_125428
tgattcagttgattttaccctgaatttgctgttaatttctgttcggcagcttaaaaattgacgcttttgactttgtcttccaggggtgaaggatgcggtgctcgacggcaatgccaaggacgaggtgaaggtcaggggcacgatggacat

SEQ ID NO: 59455 - DNA, 389 bp, Setaria italica
  misc_feature (35)..(35): n is a, c, g, or t
  Peptide Sequence Number=SeqID_125429
atgttaaagtgtaccatcaatccatcatccaaacnttaaaaaaaaacattcatgatatcgttgaaccacttcgtttctatgaagagtatgtatattgaataaattaaatccacgtatgcgcgtgttgcctcgtgtgcacttcaacatcttattgcttgtaactcctaccggcttcatggttgaagcaccataatttctgtaggaatttcggaggaaatatgaaggaataatctccaaacctcatcttcatgtgaccagttttcactcttgattctcatagcatcatcaactcccagggcagaaggtgacgtcgtagctggtggcgccggagcaggtgaaggtacagctacgcctacgacgacgccagcagcaccttcacctgctccggc

SEQ ID NO: 59456 - DNA, 419 bp, Setaria italica
  Peptide Sequence Number=SeqID_125430
actattttttttgttctttgtatatgtctagctattcgacaaatttgaatatattgtcttcctcaaatttttgaatagatacgttgatgaatctttacggatcggaagagatgacaaggaaacatctttgtgctagagagagcagacccatcagaagtttgacaagaccttttttttgaactttctgacaaggagcgtggcactccgagaagattattgcctgcatatcctacggctcacatggttattaccagctcgatcggtgcagctcagaggctgcacaacgttctttccgaattttgatgagaacacaacagtatatccgttctctggaaaaacaattacgcgaagctgggcattttctacatagggaattgagaattggtgaaccttataggaggcagacagtacagctgttg

SEQ ID NO: 59457 - DNA, 470 bp, Setaria italica
  Peptide Sequence Number=SeqID_125431
tctgaatcgagtgttacctagagattctaattgcagacaagtaagttttgattttgctatcacttgaaataaatggagatttagcgtcacttctctacaccaaaggaaaaggcggtaaatgtgataaagttcagcgcgagagcattgaagatattgtcggggaagttcactattgaagcttcatacagtgtcactagcaaaacagtaaggcttctttctgcttttaattattcctgatcttggttagaaattgtttcatggtctgattgctgctgatcctgatcgctgcaagcctggaacttcctcacaaattgtagcttcttgtttcagagagttgatatcaagcttgagagttcaactatcaccccagaacaggtaaaactgtgctgtccagagcatgaatcttaccatggaactgcgtattataaatccaatccttgccttgattgtttgccacatttatatacgca

SEQ ID NO: 59458 - DNA, 180 bp, Setaria italica
  Peptide Sequence Number=SeqID_125432
gaaaatgaaggaggaataaaatgtgtcaagaatctgacacttcacacagcatctgttctgtccattagtgccggtgaccactggctaggaattggtgctgctgataattctagccggtgaccactggcactaatggacagaacagcatctgttctgtccattagtgccggtgaccactgg

SEQ ID NO: 59459 - DNA, 277 bp, Setaria italica
  Peptide Sequence Number=SeqID_125433
cgcctcgacgcaggcgcaggcccacgcggtgctcgtcttccggttcgagctcgccagcggcggcgaggagcgcgacgccgatttggggaaggatccctccccggacaaggccgtgaggaggagcaccggcgtctggggaggctacctcgcgcggtgggggcaacgggactggagcgagacgggcagcaacggggagcggaggaaggggcgagcgcggaggttcgccaaggagagctcgtcgtcgtcggcgtccgtggcgtcctcgacggcgtcgtgg

SEQ ID NO: 59460 - DNA, 257 bp, Setaria italica
  Peptide Sequence Number=SeqID_125434
cactgatgatcaggatactcgcagtgcgatagtcaccggtggtggctggactcctagcttccttggatgctatgatcaggatactcgcagtgcgatagtcaccggtggtggctggactcctagcttccttggatgctatgatcttggcgaacaaactggcccttgactcgtggacgctgctccgcgagtaatttcctgctctggtaccggaccttcttctcaaagcacctatcctttctctttagccggaatttgtt

SEQ ID NO: 59461 - DNA, 501 bp, Setaria italica
  Peptide Sequence Number=SeqID_125435
actagttagattagtcaataatgtggactagctcaatatctctggaagctttctcagaattattatcattcaaacatttccttttctttggtgataaatcatcttctcttgtcggaatcaagttattatccttagctgttcgaattttggtctgtccatttaactcagcattcttgtggctaggaatagagaaatgcctttcagttggttgcttatactccaaaacattgttagtttgcttactttcagcctccagctctgaccttgtgcaagaactctgcgtgagaggtatcaaattcagtctacgaaggacagagtaaaaaaagatatctaaatctggtaaacagaaagacaacccctgctactaactaccaggaatttaaggactatgcggcgtgacgtctcgaaaaatgttgcaaaattgatgtaatggcacatcaacagtctaatacttaaaaggtcaacacaactatgcgtgtgtaccagatctgatcctgcagg

SEQ ID NO: 59462 - DNA, 388 bp, Setaria italica
  Peptide Sequence Number=SeqID_125436
acatatgcagaacctaacagatacacacactgatttctccaaagatggagcgacacatatgagctatctgaggccctcgtatggtaatctcgttgaactagaaacagagcagatgagatgagatcacttgataggacggcagccttgcctagaaatagtagttactctccatggttagctggaatggtgcttgcggtatcattgcagtgccactgaaattcagaattccattctgctcatttatcctttcttgaagtatgtcattggcagcctgcaatataccttccttgttcctgagcatttcaatctccctagacatgatctgcatcttctgggagcgaatgttatgcacccacatttcaagtattattttcaagggcttggagct

SEQ ID NO: 59463 - DNA, 389 bp, Setaria italica
  Peptide Sequence Number=SeqID_125437
ggtacctccttcacatacttggcagacccagcatacacatatataacccagagttttcatgcacaagttcaagcaaatcgccatgctgcggactcgagaattccttttgaatattgctatgatctgagctctggtgaagcaaggattctaactcctgatataatcctgagaacagcaagtggaagtctgtttcctgttattgatccagggcaagtaatctctattcaggaacatgagtacatttattgcctcgcaattgtcaagagcatgaagctacaaataattaattagggacaaaaacttacaatagaactaggtacttacgtagtaggtagtttagaaccgaagaaaaggaaaaaattacttaggaataggaaagaaaattacaa

SEQ ID NO: 59464 - DNA, 205 bp, Setaria italica
  Peptide Sequence Number=SeqID_125438
attgggcaaaacttcatgactggtcttcgtgtggtgtttgaccgagaaaggaaaattcttggatggaagaaattcaattgttatgatactgatagttcaaaccctctctccatcaactcacggaattcgtcaggtttctcaccttccacgcctgagaattactctcctcaggaaacaaggaatccagctggtgtttcccagttga

SEQ ID NO: 59465 - DNA, 228 bp, Setaria italica
  Peptide Sequence Number=SeqID_125439
acggcccataaacatcagaattcttcctctcagcaagaacacacaaaagaaacttaggtgctccaggaagctttgttttcacttgttcaaacatgtcctcaacccttcttacagcaggtgcccgcctcatagaaggattctcttcaaatgcatgaagggaatcaaagtagaaccaccttttaatgcatttgaagagaatccttctatgaggcgggcacctgctgtaag

SEQ ID NO: 59466 - DNA, 397 bp, Setaria italica
  Peptide Sequence Number=SeqID_125440
ttcaatgctccaagttgaatccatcccctgcaatgcctcttatatccaaggtcccaactatgattttgggaatggatgtgtcccatggttctcctggacaatctggtgtacctttcaattgcagctgttgtcagctctcgtgaatggcctcttatatcaaaatatagagcttcggtgcgctcacaatcacctaaaatggaaatgattgactccttgtttaagccaaggggaactgatgatgatggcctgattcgggagtgtctgattgacttctacaccagttctgggaagagaaagccagatcaaatcatcatcttcagggatggtgttagtgaagaagtacaagtttaaatacaaggtagactagaaacaattagaagttaggaatacaagaata

SEQ ID NO: 59467 - DNA, 278 bp, Setaria italica
  misc_feature (244)..(244): n is a, c, g, or t
  Peptide Sequence Number=SeqID_125441
tctattttgttcaaacactgcttgctctaatgagcctcttattgttgacaaatgggcagtggtcaacttttctgcgcgctgtaatgtcagggaccttgtccgagatcttatcaagtgtggaggcatgaagggaatcaaagtagaaccaccttttaatgcatttgaagagaatccttctatgaggcgggcacctgctgtaagaagggttgaggacatgtttgaacaagtgaaaacaaagcttccnggagcacctaagtttcttttgtgtgttcttgctg

SEQ ID NO: 59468 - DNA, 197 bp, Setaria italica
  Peptide Sequence Number=SeqID_125442
atgttcttctgctgagctgcagagcacttcgcgtgtgctgtggtctgctactggtgtatgcttggcggtttggaacctcagtctgttgtggcggtcagcactcgccattcatcatgggtttgcttttggtggatgtttactagaaaccttaggtaagttaaatacaatagaccggacaattaggtaagaacaataca

SEQ ID NO: 59469 - DNA, 425 bp, Setaria italica
  Peptide Sequence Number=SeqID_125443
gaatggtatgtgcttaatgtacctctgaagagtgcattcaccaaatgttgaagtagctttgaatcaattgctgtagttatctgtctttccaaatcaacatcaagaccatttttgacatcgacatccataggcatctcgtcatcgtcatctgccctttcagtaggtgatgtgactgctggtaacgtgtccaacaacgatgtagaaacagcgatgatgtcagctgcctggtttggaaagagtatacatggaacatatttataaaccaaaacattacagatgtggacaacaaaccagcacccatgcgtttaccatcacaagaataagtagttttttctattaggagccattaagaagggaggaaagtagaccctgctaattgtcttaaaaactaagtttaatttaaactttcttaaatttaaccttaa

SEQ ID NO: 59470 - DNA, 242 bp, Setaria italica
  Peptide Sequence Number=SeqID_125444
atggtgaggaagaggctggaattaataaatgacactcgaatctacatacatcaagaagattgaagtatcattgggaaaccacaaccatttcatatgttaaaccatgaggaaagataagagagtatcatcataccggtcctttgagatcttcttcagaaagcaaacttagctgatcaaaagcatcttccaaaagtcgatttcttcttattttgaaccgatgtctagtaaatgcagaatgttga

SEQ ID NO: 59471 - DNA, 223 bp, Setaria italica
  Peptide Sequence Number=SeqID_125445
cattaagcaaatgttgaagtagctttgaatcaattgctgtagttatctgtctttccaaatcaacatcaagaccatttttgtacatcgacatccataggcatctcgtcatcgtcatctgccctttcagtaggtgatgtgactgctggtaacgtgtccaacaacgatgtagatttggaaagacagatcctacagcatccacctcagcatctgatggtccagaaag

SEQ ID NO: 59472 - DNA, 237 bp, Setaria italica
  Peptide Sequence Number=SeqID_125446
gttattgtaaataatgaatatggtgaacagtcagaagaagaacttctccccggtggaagggacatgcgtgttactaatgataatgttattacttttatccatcttgttgccaatcatcggttaaactaccagatccgtgcgcaaagtacacacttcttgcgaggttttcaacagctttctaaagagccagatatgagaacctgaatttcatgttcattgaacatatcgatccagtct

SEQ ID NO: 59473 - DNA, 245 bp, Setaria italica
  Peptide Sequence Number=SeqID_125447
ttttttttacggtttctttggtttattttctttttctttatttagttatttgttccgttttttgtttgtcttggtaaaattaggtattcccttgcccagttgactttacgaaccgacaggcatactttatccctacacaaaccgcaggagcacttgtactgtaccactgccacttgttacaaaccagcatgatggatgggagtttctgtataaatacatatgtacatgttcatggctgatcaaac

SEQ ID NO: 59474 - DNA, 241 bp, Setaria italica
  Peptide Sequence Number=SeqID_125448
gaacaccagctctatgaatgcaaaattttggttcgaggtactggaatccaaggagtgggccacgagaacatccggtcacaaacctgtgcatttattggcatcaaccatcaacatttttaaggatggcactgattttaaataaatatttcattagtatacttccacaagtcaactttcaacagctcatggcatgcaagtcatagtgaatgtctacagcgttcaaagagatgtctacagaaaa

SEQ ID NO: 59475 - DNA, 353 bp, Setaria italica
  misc_feature (53)..(53): n is a, c, g, or t
  Peptide Sequence Number=SeqID_125449
gctttaaaaataggagatgccgatataattctggatccaatgaaggaagatcntttaaaaaattgtacttttgtttcaacttgctcaagaagaacgttgcaaattggtctaaattcttaacttaagtttatttgccctcatacattgccttcccaaggagacttccaagaaaatggaaatattgcaggtgtagttcatgaaccaatcctgatgcagggtttgggtacagaagatgatcagcggtctccttgaagagaccgtattgtacatcaaaaagcaagactacgaagtagaataattttaccaataaaaatacttttaagtaaaaaaatttaacctaaaccgtaacctaa

SEQ ID NO: 59476 - DNA, 240 bp, Setaria italica
  Peptide Sequence Number=SeqID_125450
aattcagaacagggcgcttcaaaacaaaaaggatggatggcatctcttacctcttcctctaatcttttacccttggtcactcggtagggcgcctttccccgtggccttgcatgacacaagggcacaccaagcatgtcgatcagcctggctgctcagcagatcgagctgcagcatgcaacgctccaccacggctgcggcgccaggtcgaggctccaccacggcagccatgggtggttagac

SEQ ID NO: 59477 - DNA, 242 bp, Setaria italica
  Peptide Sequence Number=SeqID_125451
ttgctagcggcatagctcaacatgctgaggaaaggaaagttgaaattgagaaagagaaattggagaaggcaaacacacagtgattgattcaaagatgatatatggttacgttggattgctttgccattttgctggtttagcattggtggtcagtcaattttctatgatttgccagtcgcagcaacctctcgacatttgtctgctttccagagaactgcgaggcttcggttccagccttccag

SEQ ID NO: 59478 - DNA, 234 bp, Setaria italica
  Peptide Sequence Number=SeqID_125452
ttggttttgtttattgtcttactaactaagtttaaaaagtagttggttgtcccgttgttctaattttctaagtagagagcatgataagaagtttgctgcttgggcctgacttctcttattgggcttccagctgataagattccaccagaagctttagatcggattttcaaagcaacacttgagttgcttgttgcttacaaagaccaagttgcagaaataagaagcaaatgagga

SEQ ID NO: 59479 - DNA, 421 bp, Setaria italica
  Peptide Sequence Number=SeqID_125453
ttttttgtttttttcgtttttaaaccgttttttcctttttaaggttttttttgtttttcttttaagtttttattttcttttgttatttccttgtcctaggtttcctagtaaccttattgcagactttagatttccgctatcaagcgcttgctagcggcatagctcaacatgctgaggaaaggaaagttgaaattgagaaagagaaattggagaaggcaaacacacagtgattgattcaaagatgatatatggttacgttggattgctttgccattttgctggtttagcattggtggtcagtcaattttctatgatttgccagtcgcaggtaattgagttttgcagccttagccaacctttcaaggcaggacaattttaggcttgcaaaattctatccttgcgagagaagtcgatgataggg

SEQ ID NO: 59480 - DNA, 285 bp, Setaria italica
  Peptide Sequence Number=SeqID_125454
cctatcccctcgtgtgcctttgcctatcccctcgttacgtgtctcagggtggtgggggttggcattctccggtcaagttttagaaccgttgggtgtagattgtatatggtttcggtttttttaggtcatggcattgcggttccgtggtggggctgtggtatatgttttcttttcctttttgcaagaggacattatatttgttttttgttcatttatttggaaagggacaaaaaaaattggttcattctgcggagtaacctgatccgtaaataaaaaaaaaaaaaa

SEQ ID NO: 59481 - DNA, 280 bp, Setaria italica
  Peptide Sequence Number=SeqID_125455
gaagggaaaagtgctttgctattgcttgaactcagaacgatcgcagtccatagtgttacaaagaacagtatgtatcagatgatgcagcctcagattgatatacttcttttttgagataatttttcctctcatgtgcttcaatgacaatgaccaaaagttatgggacgaagatcctcatgaatatgttcgcaagggctatgatattattgaagatttatacagtccccgaacagccgctatggattttgtgagtgaattggttagaaagcgagggaaaaac

SEQ ID NO: 59482 - DNA, 262 bp, Setaria italica
  Peptide Sequence Number=SeqID_125456
agacgatcgaggccgtcgtcgagacaccgtaccaatggaaggcgcggcggggaggacggcggcggcggcggcagtgtgcgtgaccggcgcggggggcttcgtggcctcgtggctcgtcgagcgcctcctcgccgccggccggtacacggtccacggcaccgtccgcgatccgggtaatcagcttccttgtccctgacaccaacctccggcgaaaccatcgtttgccttctcaacttgttcttggagatcgaactctccagcg

SEQ ID NO: 59483 - DNA, 203 bp, Setaria italica
  Peptide Sequence Number=SeqID_125457
tttcggtttaggtttaccttactttaatttgttaagtttgtttgttaagtcttcttgggtacagcgaagcatggagaaattgtttctgctacagggaacaatgtcacttccaatgtaaccagcaacatctcaaggcctgttccgccaaggccatggcagcagcaaggctatggaaattcttatgggggttatggctctaatat

SEQ ID NO: 59484 - DNA, 141 bp, Setaria italica
  Peptide Sequence Number=SeqID_125458
ccaaagaagggtggtgttaagggcagtggagctccgccattggagggaacaagccagcagtttgttgaggcaccgaaagctaccaacagctcatgggacagcgtctagctgcacaccaatggggcccttacttccccttgc

SEQ ID NO: 59485 - DNA, 205 bp, Setaria italica
  Peptide Sequence Number=SeqID_125459
gttctgtgtagttgcttttgtttttatttggcatggcctggtgaccgagaccgaaacgggtgaaacccgcatatttcatgaaaacatggctggaatgacctacaaataaatgttgagcgcgtgaggccttacaatactatctggtccgatcaaattaagttcagcttggtttcatttttatttctgatcatcatctgtatctatt

SEQ ID NO: 59486 - DNA, 106 bp, Setaria italica
  Peptide Sequence Number=SeqID_125460
cagctggtcgtagctggggacgatacagcagatgatgatcaggccatgctgccctcccaccatagaccctacaatacttgccatgagcaggccttccgttgcctca

SEQ ID NO: 59487 - DNA, 243 bp, Setaria italica
  Peptide Sequence Number=SeqID_125461
ttttttttagttctaattgtccagacccattgatctactatataataacatttgccaataacacagatgagagacatgaaggaagcactccccgagatggaaaaaatcagggtaattcaagaacaactcagtggatttcttctggacgaggtagtaaatctagcgggggattccataacgatggatcaaatcagcaaagacatctccactccgtgccatcttcttagagatccactctggaac

SEQ ID NO: 59488 - DNA, 351 bp, Setaria italica
  Peptide Sequence Number=SeqID_125462
tcgccgcgacgtctggcagcacctgaaaactggatctagcatgacggatactgcgatgggagggattgctcagatatcaaaggtcatatctgagggtggctacgacaagatattccagcagacttttgagtgcttgcctgatgagaagctcaagaaggcgtatgtgtgctacctatcgacatctcatgggccgatcatgggcgtcctgtatctctcgactgtcaagattgcatttggtagtgacagccccgtgaaaataatgtgaactagaaggaacaaacaaaaagtagaagtacaataccttttaacaaaggttagttttaaccccttaccccaacttagaagaataca

SEQ ID NO: 59489 - DNA, 252 bp, Setaria italica
  Peptide Sequence Number=SeqID_125463
tgattattattgttacctccacagtcacaagcttgtctctaacatgggatattggtttctgctgttatatggaaaaagttcaagaaagaccaggaccaactcttagatagcatacctgggacaccaaagcgtttctcctttaatgagttgaaggttgctactagccagttctcagtgaagcttggctgtgatggattgtgccaatagtcttgacctctgctaagaactcttccattccttgctcgacaccct

SEQ ID NO: 59490 - DNA, 228 bp, Setaria italica
  Peptide Sequence Number=SeqID_125464
acagtcacaagcttgtctctaacatggatattggtttcttgctgttatatggaaaaagttcaagaaagaccaggaccaactcttagatagcatacctgggacaccaaagcgtttctcctttaatgagttgaaggttgctactagccagttctcagtgaagcttggctgtggtggatttggatctgtcttccaaggcaggataggcaacgaaactattgctgttaaacg

SEQ ID NO: 59491 - DNA, 333 bp, Setaria italica
  misc_feature (281)..(333): n is a, c, g, or t
  Peptide Sequence Number=SeqID_125465
agaatctggtgctaccatttgatagtccagcaatgtgcacaagaagcaaaaaatgggaagatccggctagtcctgcaatgagcacaaaaagtaaaagaaggcttagcttatgatttgcatatgcctttcttttgaatcaaatgtggtgtatgtgaacctattgtaatgttggcttgattgtgtgtatctgtgaacttgattgattgtaaggtatgcatataaaccttcctgttgctcatgtgaacctaattaactgtttgaaattatcaccttttgtgacnnnnnnnnnnnnnnnnnnnnnnnnnnnnnnnnnnnnnnnnnnnnnnnnnnnnn

SEQ ID NO: 59492 - DNA, 498 bp, Setaria italica
  Peptide Sequence Number=SeqID_125466
actagagtttagaagaaatgggataacgaggtcatcaattcattggtccattgtcagaaatgtcaatgacatttcataccattcacacatcatggttctcgcggttccttattctgcaggaataccataaccttgaaacctcaggaaggatgatgcacccatttgctgttgttttaaaattctactgctattgttctgtcctcttcatttgctcttttgggtatcaactcttccttcatcgatatgttctacacatggggaatttgatagattgaatggaacagtactatatacattgaagccagcaaagaatggaaatggagaaatcagttctgaagggaagacacccattgctctacaaaatttttgttatcagaaacgccgccattggcgacgccaccagagccagggaacctgccgtcaggacgagcaggcctctcaatgcggccgcggcggtagcacggcaccaggacggcaaagctgccctcggaatccccg

SEQ ID NO: 59493 - DNA, 256 bp, Setaria italica
  Peptide Sequence Number=SeqID_125467
ggattccacgtatcttctgtatataaatatacagaagaatcacaaattcacaatcataccaatgacgtaaatgccgtgatagttatacatgtagttctagagtttagaagaaaatgggataacgaggtcatcaattcattggtccattgtcagaaatgtcaatgacatttcataccattcacacatcaaggttatggtatgaaatgtcattgacatttctgaaaatgggataacgaggtcatcaattcattggtcc

SEQ ID NO: 59494 - DNA, 254 bp, Setaria italica
  Peptide Sequence Number=SeqID_125468
taaaaccaagcacaacccatcttagcttgttatattacagttgaaatttatgtgtttatagcaatgctttttattggcatcagttcgtttattcaggttgaaagaatagttcctggatcattgccatcatccatcaaagaacctgtcgtgctagttgtaaataaagctgatggagatgaagaggtcaaagctgctgggaataacatagtgggtgttattcttctacaagaattacctcacctatcacatcttgg

SEQ ID NO: 59495 - DNA, 320 bp, Setaria italica
  Peptide Sequence Number=SeqID_125469
agaaagacaataagaaggactacaataaaggaaaatacgaaaaggttagacttgccatcatcaacaccaacaagcccttcaagtttcttcaaagcagactctgctttttcaaccagaccagcatttgcataaatagaagcgagtgtgctatatgcagaccacccaagagccacatccttctctaaccattttctttccagaagttcttcgatagcatctatcttgtttgatgatgcatagctggtcatcagaatgcagcatgtgaggttatccggtttaacattcttcaccttcatctccttaaagagactgtcaacctt

SEQ ID NO: 59496 - DNA, 248 bp, Setaria italica
  Peptide Sequence Number=SeqID_125470
ccctgcggcggagatcatcgtgcaggaggaggtcagcaaggccgtgtctgggaaccccggcgtcgccgccagcctcgtccgcctccacttccacgactgcttcgtcagggtacgtatacgtcagtgcctccgatctctcgtttcattgatggcactggcagctgctccgattggcacaatcgcactagcagtagttgcctgattagaagaatacgggtaggacttacgaagtagaataccaaatagac

SEQ ID NO: 59497 - DNA, 245 bp, Setaria italica
  Peptide Sequence Number=SeqID_125471
tctccgtcaactcctcggcggccgccgctgccgctgccgcgtccgcatccggtgtccagtcactctacctcctggtcttgctcggtgtatgtttggagccttgtttggatcgtgaaaaaggcacaaaattatggggcatgaccatatgtctcgcataaagatgcatatggcagaaggttctcttgttgacaggaaccgttgccagcaacctggttgcaacgaggttgttgatggaaggtaatgta

SEQ ID NO: 59498 - DNA, 468 bp, Setaria italica
  Peptide Sequence Number=SeqID_125472
acgaccaatcgcctccgctcttcttcttcttcttcttgcgagagaagcaaagccccgcgccgccacagccgacgagggtagatcgtcggagggagtgggaggaggatgtctgagggcggggaggaggcgcgccgccgcgccgcggtcgccgagtaccgcaagaagctcctcagctgccgggagctcgaggcgcgggccaaaaacagggagggagaaccaaaaaaattcaaagaaaaacttggaaaaaactgaagaggatctcaaagcattgcaaagcgtgggccaaattattggtgaggtgcttctacctttggacaaggaacgatttattgtgaaggctagcagcggaccgcggtatgttgttgcctgccgaagtaaagttgacaaagaaaagttgattgctggtacaagagttgttcttgacatgacaacacttaccatcatgcgcactttgccacgtgaggttga

SEQ ID NO: 59499 - DNA, 212 bp, Setaria italica
  Peptide Sequence Number=SeqID_125473
aaaaaaggttaaaagtttaaaacaaaaagtaaagaaactaaataacaattagaacaaagtaataattaggtagaaagtgcacgcttaattcgtgaaatgttcaactatgcacaggagcatcagccatgcatcattttcatggatgaaatcgatgccattggtggccgaagatttagcgagggcacaagtgctgatcgtgagattcaaaggac

SEQ ID NO: 59500 - DNA, 444 bp, Setaria italica
  misc_feature (415)..(415): n is a, c, g, or t
  Peptide Sequence Number=SeqID_125474
taactagtcctatttattgtcgtctttattctattttaggttgtattcgtaattttacccttgctgagctaccaataaaatatgctgggtactccacctgcttccggaaagaagctggttcacatggaagggacacagctggcatcttcagagtccaccaatttgaaaaaatcgagcaattctgtattacgagcccaaatggcaacgattcttgggacatacatgaagagatgatgaagaattcagaagatttctatcaggagattggcctaccatatcaggttgtctccattgtctctggtgcacttaatgatgctgcagctaaaaaaatatgatttagaagcatggttccctgcatcaaaaaccttcagagaattagtgtcatgttctaattgcactgactttcaagcaaggngacttggaattggttacgcaaaaaagatg

SEQ ID NO: 59501 - DNA, 211 bp, Setaria italica
  Peptide Sequence Number=SeqID_125475
acggcaaggagctcgacggccgcagcatcaccgtcaacgaggcccagtcccgccgccgcccaccgtcgcaggagacgatgctcgacatcaatctcttccgcaccgacaagggcggaaacccggacctcatccgcgagtcccagcgcaggcgctccgctgcagtcgagctcgtcgacgaggtcatcgccctcgacaaagcatggcgcgaaag

SEQ ID NO: 59502 - DNA, 416 bp, Setaria italica
  Peptide Sequence Number=SeqID_125476
ttgggtttgtattccctaagtcttcctatttctttgtaccttattactaaattgcatggccacttcaacaagaccagccttgcaaaagaagcaaagcgcagcattcatggtggatctgccaggagcaatgccctcctccatcatttccacgagcaagtcatacacttcgccaagtctgttacagcgaagcaagcgataaacaagcttgtcataccgctgcccatcagggatatacccttcagtttccttcttatcagcaatgaacttcaacgtagtatcaagccttccagcctcaatgaggccatggatccacgcaccatacacatcacaggatgcaaacttatcaacgatctggctgcctcagcaaaacgtcgacggcggcagaactcagtgatgatggagccagcagcggggcc

SEQ ID NO: 59503 - DNA, 244 bp, Setaria italica
  Peptide Sequence Number=SeqID_125477
gctggttgttgcaagcatattgccactgggtgagaaataagctgactgaatggctctgctgtactcccaaactttcaagcaccccggacctttatttttcatacttctcatatcccaaatgcgaactgtgcgatccgttgagcttgtggcaaacagatatgggttctccggacgaaaatctattgaattgattctattgtcatgtaaattccatgtagttgacaccttacctgccctttcatcg

SEQ ID NO: 59504 - DNA, 312 bp, Setaria italica
  misc_feature (9)..(9): n is a, c, g, or t
  misc_feature (34)..(34): n is a, c, g, or t
  Peptide Sequence Number=SeqID_125478
gaattctcncccttctctgtttcagagacggacngaaaaatggcaagtgaatgagcttgccaattcctatctttgcatttattcagcctttctatgtcagctgcagcctttattcacaatcgatggggagtcgaattggagcaaaaaagaatccgagacctcatttcacctatggcagaaagtccagataagcttgctgaagatacatcttcatgacagaaaggggactagagctctccacgctggcttcctatctacgctttgtctattgtcctagtcttagttctttgttcggttatttgttttggggtt

SEQ ID NO: 59505 - DNA, 220 bp, Setaria italica
  misc_feature (218)..(218): n is a, c, g, or t
  Peptide Sequence Number=SeqID_125479
atcgcggtcgcggggtggttgtagcggcagcgctccccgtatccgcaggagcccgtgcggatgtagtaggcgcagtccacctcgcccggccgctccggcagcttcgcgtccccgtccccgtccccgccgccgagccccagcctccgcatcgactctgcgaaaagcatccacggcaacaaccaccgtcatcacgaagcaatacagcaaccgaatcgganat

SEQ ID NO: 59506 - DNA, 238 bp, Setaria italica
  Peptide Sequence Number=SeqID_125480
tagtaagttaaacccttgtctaaattctaagtagtaagtcttttagtttgtaactattgtggaaccaagaactgaaaaaacaggcaacatatgacgtccatttcaaccttgtgtctcacattatctcaacactgttaccatatcgcattatagaaaattcaatgtcatgcaggactctgcgtgccttagatcacttgcaaccacagtgaaagtactaggagctttaacttaaaattga

SEQ ID NO: 59507 - DNA, 214 bp, Setaria italica
  Peptide Sequence Number=SeqID_125481
cctatcccctgtgtgccttgcctatcccctttgcgtgtctcagtcctgcacggagccgatgctggcggcgacggagatgaggaggcagacgaagctcatggcctgcagcatccaccaccggggctcgccgcgccggatcttgagcctcgccacgtgcatgctgacggggaagtagacggagagcggccagaagcccagcgcgccgatgaggccc

SEQ ID NO: 59508 - DNA, 246 bp, Setaria italica
  Peptide Sequence Number=SeqID_125482
tggccgaactggagatctggcgaggcctcgtttggggcgacggcgtcgcctcccgaccgcccaagtgagtcagaatggttagagttaatcattgcttctgttccatgttggagctcgagctgcacgaggatggctgaatccacgtctggggaggccggatccacttgtcttgcatacggatccgtgtcattcggcgtgcgattccggcagtgggggcctccattggccgcttgcagatgcaagagg

SEQ ID NO: 59509 - DNA, 369 bp, Setaria italica
  Peptide Sequence Number=SeqID_125483
tatttgtttcctaactagtattggttactttctaactaacttggttaacgtcttgcatttcaagataaggggtttgatccgacaggatgggaattggcccttgttactgctccaagcaacacaacttcatctgcttctagcagtcaactgggtggtggattcgacaagctcatcttggacagcctttatgatgatggggcttacaggcagagacaacagcaacagctctatggttcagcagtgcctaacccattcatgacaaatgatccttttgcgatgtccaaccaagttgctcccccacatcagttcaaatggctgccatgtctcagcagcatcagcagatcccaaggtgatgcaaccaaatccctt

SEQ ID NO: 59510 - DNA, 383 bp, Setaria italica
  Peptide Sequence Number=SeqID_125484
caaccgcagatgggcatgggccctgcaacaaacaacccttttctggatgctggctttgggccattcccagtggcgaacaacgggcatcagcaacataacccattcggcggcactcaacttctgtaggctacttagttacatgaggaaatttgtgccccagcaaatgcgatttttgtgtgattatatcatgcattatgcttggccattcttgtatgcgacccctgtattatgcgttggctttcaccacacggggctgccgagttacccgacccttgttgtaaagaaattagtgacctgtgtaacaccaagtattattgttctaattaaactagttaggtactattggtcttattaatttattaactaaaactaaaagtagtcgt

SEQ ID NO: 59511 - DNA, 278 bp, Setaria italica
  Peptide Sequence Number=SeqID_125485
ggacgtacgaacaagcggccgcgcaggaatggcgtcgatgcagagctggcgcaaggcctacggcgccatcaaggactccaccaccgtcagcctcgccaatctcaactcggacttcaaggtggcccttgatccgttgtcttctcccccgatttccccgggatttttttcgacctaagtttgggcagttcatccaaaccctagtttctccgtctgctaagcgagcccgtggtgttttggggtgcgggagcagcctcggatctgtgggttttgattggtgt

SEQ ID NO: 59512 - DNA, 408 bp, Setaria italica
  Peptide Sequence Number=SeqID_125486
tcgtacgtaactaagtcggtccgtcgtctaggtaattggtcgttcgattgcagagctggcgcaaggcctacggcgccatcaaggactccaccaccgtcagcctcgccaatctcaactcggacttcaaggatctggatgtggcgatcgtgaaggcgactaaccacgtggagtgcccgcccaaggagcgccacctgcgcaaagttgtcgcggcgacgtccatcgccaggccacgggcggatgttgcctactgcatccatgctcttgctcgccgtcttgccaagacccgcaactggattgttgcactgaaaacacttgtagtgatccatagacttcttcgtgagggtgatcctacatttcgagaagagcttcttaactttacacaaaggggacgaaattctacaactttcc

SEQ ID NO: 59513 - DNA, 249 bp, Setaria italica
  Peptide Sequence Number=SeqID_125487
tgggaattggcccttgtttaactgtcttaaccaaaagaacaaaacaaacaaaacttacatctgcttctagcagtcaactgggtggtggattcgacaagctcatcttggacagcctttatgatgatggggcttacaggcagagacaacagcaacagctctatggttcagcagtgcctaacccattcatgacaaatgatccttttgcgatgtccaaccaagttgctcccccaccatcagttcaaatggctg

SEQ ID NO: 59514 - DNA, 168 bp, Setaria italica
  Peptide Sequence Number=SeqID_125488
tctagcagtcaactgggtggtggattcgacaagctcatcttggacagcctttatgatgatggggcttacaggcagagacaacagcaacagctctatggttcagcagtgcctaacccattcatgacaaaggctgtccaagatgagcttgtcgaatccaccacccagttg

SEQ ID NO: 59515 - DNA, 411 bp, Setaria italica
  Peptide Sequence Number=SeqID_125489
cagacaagctgtagtactaacaaatagggctctggtataacaaatgcttgaaacaagacgttttgagctccaaaaggctgaagccaaggttgtcatattgggcgacaagattaatgcacatttaagccttcttcaaaagatatacttaactctggatcgctactctcctacattgcagcatcatcctggtctgctagatgctttcctgaagacatgcaagcttgttgcagatttgagaagtaaacacaatgaaggtgacgcgacataaatgagggcagcttggtgagatctcccttggtgactaatgttttgtgttccatcaggaacatattgtttgagagggaaattggcaatagtaattagaacgaagtagaacgaaccaactaaggtacaacccgaactaggttaaca

SEQ ID NO: 59516 - DNA, 247 bp, Setaria italica
  Peptide Sequence Number=SeqID_125490
agagcttttggtttctgtgttgaccttgttttgtcgggaaattgcagcatttggactggaatctggagcagaaactttaccatttgcctctgaagttgctggggcaccatttgcaggctttgttgtttgctcctgttcagaagacatattagttgccttcctgaatcccatgatcaacttcccttctggatctattcggctgactgagacacgcaacagaggataggcaaggcacacaggggatagg

SEQ ID NO: 59517 - DNA, 192 bp, Setaria italica
  Peptide Sequence Number=SeqID_125491
tttttcttgcaatgaggacgaagccatttgcgcttgctgctgagcaggtgcaattctgatgtggtctttcggtccattctgtagaagcatctggcaacgccactttccgggaagacaaagaatcattttctccaccatggtgactaggatcatgaagattattggatgcggtccatctctgtgatagaggtt

SEQ ID NO: 59518 - DNA, 172 bp, Setaria italica
  Peptide Sequence Number=SeqID_125492
agcaatacttcggtagcgaagcaatggaatacatgaataactccccgtttacactgccgaaacgacgcgctgatcttgcaatacatacatcatacagggtatgcaaggccccacgcaacacctacggattattccttgtaccttattggttattacttacgttatttaactt

SEQ ID NO: 59519 - DNA, 473 bp, Setaria italica
  misc_feature (453)..(453): n is a, c, g, or t
  misc_feature (464)..(464): n is a, c, g, or t
  misc_feature (472)..(472): n is a, c, g, or t
  Peptide Sequence Number=SeqID_125493
tttagggaagcacaagatttcaaaacatggacccaggtatagggagcgttctcctggcaaaaaggctagaaggtttttcacttctgatgttcttttgctagcaatatactgaacaaactttccattccggagattcgtgacacaagactagagtctagagaatctggaggcgataaactacgaatccttgatgagtccactaagaagtcatcaagcaaagatatctgggggggaagcacaactagtactactgaaaatgtgggaagagacagtaataacgtaacttcaacaaagaatttcatggagcacactctttcttgttggagtcccttggagagagatctatacttaaagggcatagagatatttggaaagaatagttgtctcatagcgaagaaacctaactaatactaggacctacaaagaacctagacaataggaatagacaataanaatataataanaatagtana

SEQ ID NO: 59520 - DNA, 424 bp, Setaria italica
  Peptide Sequence Number=SeqID_125494
gtggccaactacatgtataacaatggtgcaacgatggcaaagagaccaagtaaatccaccttgggtgactttgcagaaactgaacaagactacatggagcaagacatggctgccagaacaagaatctatcgtcggaggggccgaaatagaaagctgaaatatacttggaagtctgcagggcatccaactgttagaaaaagaattggtgatgggaagcaatggtacacacaatataacccatgtgggtgccagcaaatgtgtggcaaagattgcccttgtgtggaaaatggaacttgctgtgagaagtactgtgggtgttcaaagagctgcaaaaacaagtttagatctctctccaagggactccaacaagaaagagttgtgcttcctattgtaaatttctttttgtttgttaaagtttaacgta

SEQ ID NO: 59521 - DNA, 279 bp, Setaria italica
  Peptide Sequence Number=SeqID_125495
aacagcaaaggattttgttaggaagatctgatattgcaggttggggtgcattcattaaggtcagataactgaaagaaccttttagtgtgatacgtactatcttattccagctagtttattcttttttccccttgcaatatgcagaatcctgtaagtaaaaatgattatcttggagaatatactggtgaattgatctctcacaaggaagctgacaagcgtggcaaaatatatgaccgggcaaactcgtcatttctgtttgatttaaatgaccagttttga

SEQ ID NO: 59522 - DNA, 270 bp, Setaria italica
  Peptide Sequence Number=SeqID_125496
accaacttcagcttcactagctccaccaatcttgaggacagcaacacctccagatagctttgataaacgctcttgggccttctcttttttcaaacattgcagtgcttgtctcaaaagattctctaagctgttggcacctctcctctatctgcttttttgtcacctccaccatctaggatgatatggctgtgatgactggaggagaggttgttagtgaggaacgaggtcttgatcttggcaaaatccaacaacaaaattgtactttggtaa

SEQ ID NO: 59523 - DNA, 394 bp, Setaria italica
  Peptide Sequence Number=SeqID_125497
ctctccttccagtactagaaattctatcaagaatcgcaggcctcttctcattgtggctgaggatgtagaaggagaagctctgtctatgcttgtactgaacaagcatcgcgctggactcaaggtatgtgctgtcaaagctcctggattggtgataacagaaggcacaatctggatgatatggctgtgatgactggaggagaggttgttagtgaggaacgaggtcttgatcttggcaaaatccaacaacaaatgcttggaactgccaaaaaggttactgtatctctcgatgacactatcatcctagatggtggaggttgtactaaaaagtctagtattagttaggttagttaggtttgttccttaacttagttctttagtagtaattctttttgta

SEQ ID NO: 59524 - DNA, 450 bp, Setaria italica
  Peptide Sequence Number=SeqID_125498
gtttgaagaattcaattcatatgtcaatttcttgttaaaatgtacgtgtataaaattgtgatgcacgaccatacgtgtgctcctcagtcggagtaatgtaaatattaacaagaaattgacatatgaattgaattcttcaaacccttgcctgcaatggctttataatagctcaaacagggacttgctccagtcagggtccttgaggttctgcggaaagcagttgagcacatagctcaagataggcttcgacaatgtctctttccttcactccttaggccacaaaacctgaagaagatgatgacccgtatatctcgttcgcctgaaccacagggacgtacacaacgtccgtcaatgagctgtggctgcgaccgtagaagatgtacacgaacaccccatcaccagccacaccccactcgcatccatgtgccgccaccaaggttgatcaacaag

SEQ ID NO: 59525 - DNA, 217 bp, Setaria italica
  Peptide Sequence Number=SeqID_125499
gagataggggtatctgggtccatagcaaagtatggtaccagaccaacaataacaactgaaaccagcatgtacaaggaacattgcccagtgcattccatgtctctcgaaggctgatgagataggggtatctgggtccatagcaaagtatggtaccagaccaacaataacaactgaaaccagcatgtacaaggaacagcaaatcgacaatgctgttccg

SEQ ID NO: 59526 - DNA, 213 bp, Setaria italica
  Peptide Sequence Number=SeqID_125500
attctttactaatgcctacacaggcacatgcatacattactatgatctctgccatgttctccccattctctggggcgaaggttcattcactaaattaacctcagatgaagtacatatataagcccgaataacatgttttagtgatttgtaaatccataccattccagccagttgagagacatccatgaagaaagcgagagaagctgcgcagat

SEQ ID NO: 59527 - DNA, 205 bp, Setaria italica
  Peptide Sequence Number=SeqID_125501
attctgataaacacatacttgttgatcaaccttggtggcggcacatggatgcgagtgggggtgtggctggtgatgggggtgttcgtgtacatcttctacggtcgcagccacagctcattgacggacgttgtgtacgtccctgaggttctgcggaaagcagttgagcacatagctcaagataggcttcgacaatgtctctttcctt

SEQ ID NO: 59528 - DNA, 180 bp, Setaria italica
  Peptide Sequence Number=SeqID_125502
agtgaccaccagtcacattccatcccatatcctttcttcaaaagtacctcaggtgcatttggggaggtgagactttgtagagaaaaagctacatccaatgtgtatgcaatgaaaaagctaaagaagtctgaaatgttacgaagaggccaggttgagcatgtgagagctgaaagaaacctc

SEQ ID NO: 59529 - DNA, 151 bp, Setaria italica
  misc_feature (138)..(138): n is a, c, g, or t
  Peptide Sequence Number=SeqID_125503
aaagaagtctgaaatgttacgaagaggtgcatttggggaggtgagactttgtagagaaaagctacatccaatgtgtatgcaatgaaaaagctaaagaagtctgaaatgttacgaagaggccaggttgagcatgtgagngctgaaagaacct

SEQ ID NO: 59530 - DNA, 236 bp, Setaria italica
  Peptide Sequence Number=SeqID_125504
actaaaaattctaattggtagttcttctccatctcctctggtacatgcttatatatcgttatgtattcacaccaatttagcaattaaccaggcaagcaacaagaactcacacctagaactgaccatcgccgctgaaccccgacgacatcttgctctctcctcccttgtcggttggttgggtttggtttgtcttcggttctcggggtggccgcgtcgctggggtgggttgagaaggc

SEQ ID NO: 59531 - DNA, 185 bp, Setaria italica
  misc_feature (22)..(22): n is a, c, g, or t
  Peptide Sequence Number=SeqID_125505
aagcaaatctatccccttctcnctttcctattatttacatctgatgaccaaatggaggcctgctcatcatctgttggtaaactggtggggctggctctgccttcggttctactggcatcagatgtaaataataggaaagagagaaggggatagatttgttgcagcgtcactatcatgtatacaag

SEQ ID NO: 59532 - DNA, 217 bp, Setaria italica
  Peptide Sequence Number=SeqID_125506
agggtattaatgcataacattcccgtccatccatcgctcaagttgctgagtaaaaacgagaccatgccggtatgcaagatcttggcctcaaagccagttgagtcggaaacgatgcaagatttgaagagttgataacatcatgcgtgctgctgaaattattgggggtattggtgaacgattcgttacgccctcaaatccccgcatggtgtgatcctga

SEQ ID NO: 59533 - DNA, 222 bp, Setaria italica
  Peptide Sequence Number=SeqID_125507
tctcctatccatcaactgactgatcacactgcccagcgaggatagagttaagtagttagcattatcctggctgatcgtgtttgtgaagttgatgaaatgttgaagagatttataagtgaaggttttgtaccaagcacaatgacatacaatagtatcatcaatggattcgtgaaagctggtatgatgggctcagcatttgctatgtatcagcagatgtgtgaa

SEQ ID NO: 59534 - DNA, 438 bp, Setaria italica
  Peptide Sequence Number=SeqID_125508
ccggctacacgaaacacatggcacggttagaagcccaagcagcggagcgggtgatcgaagcgtgcgtcaggacagagtcgggtcaggaaatgcgtcttcacctcttccttgctggcgtgcgtgtggaggcagaactaccctcatgaccggcggttccccaccatcatcgacgagaactgctggagcgacgagagcttctgccgcgacaacaagctgtggtttgcacttggcaagacggcagcggagaaggcagcgtggagggcagcccggggacgagacctgaagctcgtcaccatctgcccagcgctcgtcaccggcccgggattccgccgccgcaactccaccgcgttccattcgtcgttattcttctaaaggtcgtcttcgttgtccttatttgttctttgtttccgtttacggtttccttttgttttcttttta

SEQ ID NO: 59535 - DNA, 315 bp, Setaria italica
  misc_feature (310)..(310): n is a, c, g, or t
  Peptide Sequence Number=SeqID_125509
gttcacagcaagctcttcagatatctgcacttcaggaacattgcgctagcgctttgttgatgtccgcacgcaacgctagcgcaatgttcacagcaagctcttgtcttgcttcgggagcttgctctaggccatgacctgatgaagttcctaggcgtgatcgtcgccctctggattgtctcggaaattggagagctctgcgatctcctgagactgatgtacattgtggtcttgatcctgcacacggtgccgatactgtaccacaagtaccaggaccaggtggacgatttcgctgccaaggcacacgcggganacgtc

SEQ ID NO: 59536 - DNA, 445 bp, Setaria italica
  Peptide Sequence Number=SeqID_125510
acctggatgttaatagtgtagctgcagaacattcaagaggcaatggacctgttgctgatggagttggttcctcaaaacaaaccctggcaagtgttcttttgtctagttgaacatccaatctaccaactaatcaagagttccaggggacttgctcagcgtacttacagattctgtactgaaagtccctaagcacagctgccgtttctcctctgtatatagtgctgtcttgtacactagtcactaaccaaagcgtttctctggttattattgtttgcagcctaatgatgcaagtccaatggccgtagacgaaccaggtgctcagaaagttgaaacagagagctcaaacaaattgcaggaccaaccaacgatgcaacagaagccataatcgggcaccttaacttagtacctgatgcaattgcatctgtagcctgtagattcttttttc

SEQ ID NO: 59537 - DNA, 321 bp, Setaria italica
  Peptide Sequence Number=SeqID_125511
tgtttttagttttacgttttaacctttagttttgttctttctagtaaagttgaaacagagagctcaaacaaattgcaggaccaaccaacgatgcaacagaagccataatcgggcaccttaacttagtacctgatgcaattgcatctgtagcctgtagattcttttttcatgttcgttgaccgtagacaagccgtgacagttgaaaagctttagcagggagctgaaacaatgcaattggaacagattatgcatctgaacccatgacattttgattattacatttgagtttctaacatctgcaaatggtagttttgttcgtac

SEQ ID NO: 59538 - DNA, 280 bp, Setaria italica
  Peptide Sequence Number=SeqID_125512
tagaagaagaagtcgctccttccatgctgtcgatgtagtcctgtttcgtgtaagatccagataggaagaagttcttaacaggcgtcttctggtcaggtctgaatgggtcatttccaggagcctcacgatacaaagattgtccaattttcaccacactggaccatgtgacttccaatccccgggcagatgggaacaattcaacaacctgcaggtaatcatatgtgttggtattgaggttagcttgggagaatataaatatataatacaatcacaagaaatc

SEQ ID NO: 59539 - DNA, 493 bp, Setaria italica
  Peptide Sequence Number=SeqID_125513
aggaccaacttaaagtaacaacaatacaaggacgaaaccctttaagacaatagacgtaaacaaaagaatgcctctgtttttgtggcaaacagggtgaaaattgtaagcatgcatcgtgcactaatattatcacagtcgatgaaacccagagcataagcaacaggatcccacattcttgtgatgctctcccgagtaccacctttggacatgaaccagtcactgaaactaacatcgtccaagtcccgcacttgctgcaatgcaccatccggatcaaccagagcccgaacaactgggcttagggcaagagcaactgcatttcttgctttatcatacaccttgagttggttagttctgaggaacgcttgaataccatgtaatgggctcccaccggaaaccgaaatcaagttcaccaattgtgccccctttgttacaaaagtatgtgtgtgctccttcaccagcagattattatcagcgccaaccttcttcatgaggc

SEQ ID NO: 59540 - DNA, 283 bp, Setaria italica
  Peptide Sequence Number=SeqID_125514
ccgcatctgcagtgtacaggaggttatccaaaccgaccgccttttccagttgtcttgatttctccaaatcttgaagttcagtaacccatccattgtaccgaagctgaacagtgacaacaggaacaccatctaacttgtagatattgtcgaacattccccataaccccccattcatggccattaccacgatgtgtcaccccaccacacccgccccctccgctgctgcccccctagccctgcgcggtggtgctttgcccttcccccctgccaaccccccaccccc

SEQ ID NO: 59541 - DNA, 410 bp, Setaria italica
  Peptide Sequence Number=SeqID_125515
taagttaacccaaaggttaagaaaactttaagggaaacaattaacaaagttacaaaggaagaataataaacttgccccaatcatcaaatgctaatacaaaagatcaccctactaagcaaaaaggcctgtgcatggctgtgcaagctttcatcccctatgaatctgcaggctacgtgaatattttgtcaagttacgaagatggaagcactctttggtggatgtacgaaagcctgggttacctttatcttcagtgaagtatcattcagaatcaggtttcatgttgaccgctctcagtttcactttagctgtttaactcctatttttcttttctcgaacacgcaggagaactgcgtatcattatattaagaagaaaatgagtggtttagaaacccatacatccgcccccccca

SEQ ID NO: 59542 - DNA, 242 bp, Setaria italica
  Peptide Sequence Number=SeqID_125516
tggagaatcctaagacgctggatgaaaagggcaaactggtgagcttatctctaacactctgaccataattcattctctctctttcactctttgtcaagtcagcaagtgaactatgaactatcaatctgacttgactgctttgtttgttctgatccaggtgagcaatgtcgccgttggcgtcacctcgtggaaaagatgaccaagctaaaacttctccgcggcaccagcatcccgaggatcta

SEQ ID NO: 59543 - DNA, 269 bp, Setaria italica
  Peptide Sequence Number=SeqID_125517
atgccgtgcctgaacgtgtcgacgaacgtcaacctggagggtgtggacacctccgccatcctcgccgaagcctccaaggtcgtcgccgacatcatcggcaagccagaggccgtaagcctcgcctctccctttccctttccctttccccccatcttctttctccccccacgcgattcattgcctgtgtaggacgtctctcctcttgcatctatttggttggtggagattatgcttccattttgtaattggctcctgcaacctgttagggt

SEQ ID NO: 59544 - DNA, 474 bp, Setaria italica
  Peptide Sequence Number=SeqID_125518
acggctgaaccctggtgtcaacaagaagctgagtgctggcgttgcttctattctggaatcaaagctgtccattcccaagtcccgctttacctcaagttccatgattcaaaggctcatcctgcacaagaacatgctcaatgtttgcatgctttgcatcaagaatagatcatggctcagactttggttggaatggctccaccttctagatttgaggtccatgggtgtggctccagtgaaggaaaatcgtgttccctaatgtcttgtccattgcataatggcctaataaggacactgttgtaagatattagttaatttgtgctgaactgaagtgaaaactgtcatgtgggactggggcacagacttgttcaatgcaacatagcatattcgtgctgtgctgtgttggcttgcacaaatttggttatcttggttggtcctttggtttggtatggtaagcttgaaatgattgtgtcaaaa

SEQ ID NO: 59545 - DNA, 348 bp, Setaria italica
  Peptide Sequence Number=SeqID_125519
taacaggcttggtcatttattaatgcagctatatattttataccctttgctgtatgtatgccacttctgttaataccgaagttactttctagttttgacttgtgataatggtgttgagtttcgaactcctgctgggtccctgcctaatcattagtgaatgtaaagggtagtgtattgatacttgttactgcaatggcacttatttaatgcagagaaagcagtgtttatgtttttaatatcttttctattttattcccaatttataatgacaactatatctaagtattacctgtactaattataccttgcaccaatcgatcaattaatatgcaagtttaactgaaaaaa

SEQ ID NO: 59546 - DNA, 179 bp, Setaria italica
  Peptide Sequence Number=SeqID_125520
taagtaaatttggtctatttctaccctttcttgtattgttttcgtaaccttagttctagttaaagtctattttgtcttgtagtattgtatttttcaagcatggttttgttcattgtgatccccatgctgccaatatgatggtccgacccatgccacaagacagcagaaaattttttggt

SEQ ID NO: 59547 - DNA, 283 bp, Setaria italica
  Peptide Sequence Number=SeqID_125521
cacgctggccgccggcgtgctggcgctcgggcccgtcgacggcgccatggcggccaagtccggcggcagggtcggcgggcaggcgttccggtcagcgccacggtcgtccggccctcggataaacaactccaggacgaacatctacgtcaacccgcccagcggcggctacggcagcccgttcttcggcggctacgggtggtcgccgttcaccttcttcgcgcccggcccgagcgtcgccgtcggtgtcggcggcggcttcgacacgctcgtcctcttcttggtg

SEQ ID NO: 59548 - DNA, 413 bp, Setaria italica
  Peptide Sequence Number=SeqID_125522
taatcatgcaagtcctggaaccagtagagcattatccagtacagacaccagcaagcataaccacatgattaaggtccactgataatgtgatgacaatcatgaaacacacatcattcgtcaatagaatgaacagaaaataggcatcatgaaatggtaaagtagatatcagtgcttctagagtcaataactccagataatggtacatgttagatatgttactattattcataatatcaatgcataaccaaaactatgtatagcaaaaccagcacagagcaacacatcaaccaagcattcatttatccacacagaagaatattcacagcctaccattaaatgctcaaaaacttactcaacagtcattagtaacttagtacttcttagttacttaaatcaaaggaaacaagaataaa

SEQ ID NO: 59549 - DNA, 244 bp, Setaria italica
  misc_feature (236)..(236): n is a, c, g, or t
  Peptide Sequence Number=SeqID_125523
ataactccagataatggtacatgttagatatgttactattattcataatatcaatgcataaccaaaactatgtatagacaaaaccagcacagagcaacacatcaaccaagcattcatttatccacacagaagaatattcacagcctaccattaaatgctcaaaaaaacttactcaacagtcatagaactagactcagacttaatcaaggaaacagataaaaaagaaaataaaaagntaccaaag

SEQ ID NO: 59550 - DNA, 219 bp, Setaria italica
  Peptide Sequence Number=SeqID_125524
cggggaggaaacaagaaatatgcttcagttttggcccctggtcaacttgatggtttgaagtactatttcttctttattcttttctcattggtaccagattctttcattctgtgattatgcaagtaatatacgtactaacaactaattatatttgtaatctttattatcatttctatttgaagtgggatatgccattttctaatgtggcaccattacatt

SEQ ID NO: 59551 - DNA, 253 bp, Setaria italica
  Peptide Sequence Number=SeqID_125525
gtcttctttatgtctggttccaacttccaaatcaagaaatagagaactgaatttatttttttctagctcgtacactatgtcaatcgtgactcgttgggcttggcaaatgacttccattcactagggtttgtccctgagggaacggatttacatgctgttgcagatgcattgcggttttcttttggtgatgccaggaggcaatcaaatgattttcagggcttaatgaatcatctgtatgatgtcatgtacgtag

SEQ ID NO: 59552 - DNA, 471 bp, Setaria italica
  Peptide Sequence Number=SeqID_125526
gttggatactgtgctgagtatgaacagaggttacttgtctataaccacttcagtagaaaaacactacatgatgtactgcatgaaagggaagatcaagatgatgcattatcctggaatgctcgcctccaggttgctcttcatgcagcaaaagccttagagtaagctgtatcaacttaaatattatattcatgaccttatgtgtgtttaacttcgcttgtcaatagacggccagtaaaaacttcatatttactaattacacttttcttgcaggtatctccatgacacctgttgtaaccttcctagttagtgcaccagaattttgaaccagccaacgtgctccttgacaatagatgctcagtacgtgtcgctgaatgtggactggcagaattgatgttgtcaggttctgttatacagctctcaggtcgcatgcgggctctactcaattatgaagcacctgaaatccacgaatct

SEQ ID NO: 59553 - DNA, 419 bp, Setaria italica
  misc_feature (388)..(388): n is a, c, g, or t
  Peptide Sequence Number=SeqID_125527
ttatttgttccctttttatttctttgttacttacttttcttacttaatttatttggttgttgtctcctttgccaatgtgttaagccgcgtgcaccagtcaaagtgtgaggaggagaagtttaagtgcatgctgaaagttgctggtggatttgggaaagcaccagaaagtgtcaccaaggagttctttgggttacctgctgataagtagttagaaatcgatatctcaggacttagctagtgataggttgccagggttgaactttgcctgcggtgttgcacttgtatgggttgtatacatcctacccagtaccaaggggtcgccctcttagggttaccccatcagtctggttttgaagaaacctttaagcgctgtggatgcgcagattangtgtgcacaactgcacatgttgtgccgtagg

SEQ ID NO: 59554 - DNA, 350 bp, Setaria italica
  Peptide Sequence Number=SeqID_125528
cagagttcaggccaaatttgaatcaatagaagcagttggagaagggctggacaacactgccttggttatacagtgttgcaggagagctagagctcatagtagcatgttgagtagccacagctgaataaggttgagggggtggcatcggccgagcagacagaccagagctgaaggtctccagagggatcctatttactggaaatgtgttccataaaagcttggcatctgcattgggtaaatcatttgttgatgaaccaccagcacccgtaagcatatattgagtttgaccctgaaggcctgatttagttaacaggcagtcatcttcctatggttctagagatcgaccaact

SEQ ID NO: 59555 - DNA, 168 bp, Setaria italica
  Peptide Sequence Number=SeqID_125529
accgtaagcatatattgagtttgaccctgaaggcctgtgaaagcactaggcatactagcgtcaaacgattgtgtaggataaccagaagcattagatgttggtcgatctccagagggatcctatttactggaaatgtgttccataaaagcttggcatctgctatttggt

SEQ ID NO: 59556 - DNA, 404 bp, Setaria italica
  Peptide Sequence Number=SeqID_125530
acaaaccagaggttgaaagaaacttaacagtgcaagttaaaccatttctaagggtttaaaatttaaccagtccgaggcaaagaattaacatttaggtcttatcatgtggtatcatggagactcataagataccctagttcttcggagcttcctcctcggtgggtccctgctagctttctgaaaaaacagtaacaaggatcccctgggatcaacaaatgttagtccttcggaaaaccctttttagtaaaagaagcacttcaacatttctcggactcttgacaatcttcagatgaattccacaaattccacctcaggagctttgacgtccgcaaccaaagcatcctcccgattctgacaatgtttcgttagcataaaattgtggaaataccaagcaaattgaagtt

SEQ ID NO: 59557 - DNA, 390 bp, Setaria italica
  Peptide Sequence Number=SeqID_125531
ggggtgctctcctgcaggatgtaaattgatccggatcaccagcattatacgactgtccaggtcgtactaacaacctctcgattagtaaagtcaatgattaggaatacaactacccggacccagggatgcacccccacatgggaccccacgtctggcctgatctccatgtgagtttcaggctacacccctgccaatctccagcacgtcaagcgcgggtacgaagcattcctggtcatagaatttactaatctactgggctttactggtcccatacccagtaagtgatcagatggttatcacttgatcagcggttaagacacgaatcgggccttaaccagattaatctagcagacagaactacatctctagcttctgtccgttttcatattt

SEQ ID NO: 59558 - DNA, 359 bp, Setaria italica
  Peptide Sequence Number=SeqID_125532
gacttgggttatctactaaaggtttgaacaaatggcaaacatgtccttaaaacaaggtatgatcatgcacaagaataggtttcaagcaactcctagacttagtgcatacatatagcaaataactgactataggacacatgaaatattgacttccaaataataggtgtaatgcaccggggcttgccttgttcgcttaaaaagttagcactgtccgaagggttggccttgcaggggaccaattcaaagatttcctcaaacttcgaaaatccttctgaatattccgagtaatctccttttggtgcttcggggtctatagcacaacatatgcaggggttaggaatgcaaattttttgaataaa

SEQ ID NO: 59559 - DNA, 275 bp, Setaria italica
  misc_feature (258)..(258): n is a, c, g, or t
  Peptide Sequence Number=SeqID_125533
gaaggagcacggcggtgctagggaggagggcggcaggccatgccccaaggtcagggacctcgcccgtggggtcactgacgggggatgggtggcgcactagaagctccgctgggcggcggcaaacgccgtcgacaagcccgggatatagcgcggaaactcgatgcaaacggaaaacggacaagagcatcacggttaggagctcacctaagttccatttgagctattggttggggacgaggagggccggagcatggggcnccatgtgaggtcgacgg

SEQ ID NO: 59560 - DNA, 259 bp, Setaria italica
  Peptide Sequence Number=SeqID_125534
gggcggcggagaggctcccgtggagggcgtcgtccggtgagggagggagcccgggaagtagcaaaatggaatcgagacatcgaggaggcaccgtggctgcaaggaatcggccggagatgcaccaaccgcggcaaatttcgccagcaaagtttggggaaaagtggagctcggtgttctgttaacggagattgggggggagagttgggggctttatatataggaggaggatggtgaggataaggacggacggagtgactca

SEQ ID NO: 59561 - DNA, 253 bp, Setaria italica
  Peptide Sequence Number=SeqID_125535
tcgactgtccccatcaatcccctgacccgtgtcgggcccacttctcttggtgcaatgttccacatacccggcctctgctgttctgtgaccacacttgccaccacatgcggccgcaggggaaaactccgttccagagacagttgatcgaaccgctcacatccaggttcaatcaggtactaggcttccccatcccatactaggtatgagattagtactttcaaacacttgatcatgaacatcatcactttccgac

SEQ ID NO: 59562 - DNA, 264 bp, Setaria italica
  misc_feature (1)..(27): n is a, c, g, or t
  Peptide Sequence Number=SeqID_125536
nnnnnnnnnnnnnnnnnnnnnnnnnnngtagactacaacaagtccaccgagttaacaacttaaccatttaatttggttatgaaataaacatcagagctttacaaggtttccagaaagtcaacagaaggtaaaaccactagcggaagcaaaacgtcggggtcggacgtccctagtgaggccaaccgggacatcactgatccctctcctcgccgtctgaggagggatcccactagaccgtccaacccggagggagctggggcggcc

SEQ ID NO: 59563 - DNA, 270 bp, Setaria italica
  Peptide Sequence Number=SeqID_125537
gggcagcgcacagggctccgcacggcggtggcgaacgctgttgacaagcccgggaatgatcgcggaaactcgatgcaaacggaaaacggacaagagcatcatggttaggagctcacctaagttccatttgagctgttggtcagggacgaggagggctggagcatgggacaccatgtgaggtcgacggtggcggtggaaaagtttttgaacttgggggaaacttcgattcccgtcgattcggtgggcgattgagggagaggaggggctgat

SEQ ID NO: 59564 - DNA, 251 bp, Setaria italica
  Peptide Sequence Number=SeqID_125538
tcttcggcttgctcgggctcggctccgacgggcgacagatcggctacggctccttcttctggcgccgggtgaagctcgtaagtcccgtctgcgaggttcagctttagatcttgccgcgcgggcccggcaccggcggctgctgcggccccttcttgatcggcaggaggtccggcgacgccgacgcgctgacgtaggccagcagggatccgccgcccagcagcaggaacttgagcagcaggcccctcttggtg

SEQ ID NO: 59565 - DNA, 277 bp, Setaria italica
  Peptide Sequence Number=SeqID_125539
cttgtacccacatgaggcctcatgggaactcggttccaaagagagcggggtaaagggtccatgtcggttcaatcaggtactaggcttttccatcccatactaggtatgagattagtactttcaaacaattgaccattgttctaacacacctcgacctaagcagttttccactagataggcggggcaatccaacatccaccaaaaagaacatatagcccagccccgctcgtcaatccttaaggttgcaacataagaaatcaagcttctacctatacgc

SEQ ID NO: 59566 - DNA, 241 bp, Setaria italica
  Peptide Sequence Number=SeqID_125540
agggaactctgttccaaagacagtggaacgatccgctcacgtcctggttcaatcaggtactaggcttccctatcccatactaggtatgtgattagtactttcaaacacgtgatcacgaacactatcatatctcgaccttagtttaatttcatgtagacaggacggggcaaaccaccgagtaccgaacataacgccccggccccgtcatcgtccttatagttgcaacattaagtaaagcaat

SEQ ID NO: 59567 - DNA, 161 bp, Setaria italica
  Peptide Sequence Number=SeqID_125541
aaaaatacatatattttgtttcatgcatgttgtcgcaccccaactatctatatacgaactttggttgataacaaagccgacaggctgtacgaggcacgcagcaccaattttaattgtatatgccggagtacaatatcaacatcgataaaaagaggcagcga

SEQ ID NO: 59568 - DNA, 161 bp, Setaria italica
  Peptide Sequence Number=SeqID_125542
gactgcacctgtcaccacatgcggccgcaagggaactctgttccaaagatagtggaatgatccgctcacgttccggttcaatcaggtactaggcttcccatcccatactaggtatgagattagtactttcaacacttgatcatgaacactatcacatctcg

SEQ ID NO: 59569 - DNA, 261 bp, Setaria italica
  Peptide Sequence Number=SeqID_125543
ggttaacggttctgcctctgccccgtgtttgcatatttctcctgtacttccgtgcaaaggcagtggcggttgcttttgctgtggaacgcttcttaccaattgcctcggactgtcttcgaaatgtttcctcaatggtttcttgaatctttttaatgaaaaaaacaacagggcattgatgttgatggtcaaatataagattataaagaaaatgaattttgcataagcatataaagtgctggtacttcaaaagcataggagcac

SEQ ID NO: 59570 - DNA, 460 bp, Setaria italica
  Peptide Sequence Number=SeqID_125544
tgatgcaggtagtacagtacagtgaagcatttaactttttgccacccttacggatagcactagcaccgaccaacggacttagctgagtcacatggcattttgccttccatcctctgaggatgacaaaaggtcaattatgcttggtatggtgagggtagatccctagcatatccatggcattcttgtttgtgcaccatccagctagggttttgcctttctcttgatagtgtgcgatgacgtctgtcggtaacacagctctttcgcaccccatacgctgagatgtcccacatatcccgccaagtggaggtcaaactttggtgcttctttcgaaagccacatccggaggtatgtcccttataagccctctggtgtttgcctccggtggctccgcctatcttggcatgtgcatctgttgtcgacggctccgcctatcttggggtcttctggccccttgtctttt

SEQ ID NO: 59571 - DNA, 515 bp, Setaria italica
  misc_feature (496)..(496): n is a, c, g, or t
  Peptide Sequence Number=SeqID_125545
gaaatttcgaagctaattttgttcttttcatgctgataacttaaaacatgtttatggggaaagttttctatactttcacttgccctgaaatttgttcttttcatgctggtaatttagaagcatgttttatagggaaagttggttatactttcgcttgccctgaaattgctatatgaactctacttggactcttatagatgaattttaaaaccatcattatccatccatgacaaagagcatgcatacttttagcaaccaataaatatttatgctgcaggaaaagcaacatggagttattggcatgaatatttttatatatgactttgtacctttaacaaactcaacagaggatataactgcaactgaaagagcaaaaggccttctacactggatggttcttggatccgctttatcatggagactatccagatataatgaagaagattgctggttccaagctgccaaaattctctaacagccaatctgaacaattaancaattctgttgacttttcg

SEQ ID NO: 59572 - DNA, 254 bp, Setaria italica
  Peptide Sequence Number=SeqID_125546
gggcgtgtcggccggtcgctgtccaacgtcgtgagctcacgaccgtccctgctctcgtccagctgatgcccgcaaagcgccggcggctcgacccagagtccccgccgccgcgtgctgtgggaaagcaagtgggctgtgaatcggccattactctggagatggtgatgtagcagctaatggttaccacaagtacaaggaggatgtaaaactaatgaaggaaactggattggatgcttataggttctctatcttcg

SEQ ID NO: 59573 - DNA, 413 bp, Setaria italica
  Peptide Sequence Number=SeqID_125547
aattagcccatagcaaaactagctgcattaagctaacactatattcataatgtaaaatcacagaccaaagaacctaaaacacccccgggaaagattacagaaacgctgctagtctatttttctcaaccagaacgtctattttacaaagcaagccaagagacaaacatcaggcctggatttcaactgttcagggctcgctgggagggcccggagggggcaagtgagcccctccctgcgtgagcacaacgtcgtgcaggtcgctgttgccccgctccggctcggacttgacggccttcgctgggaaccctccttgccgcgcgtggtgggcgcagtccggcagcacaaagcccgtcgcctgcggcaccggccgggcgtggaccgggatggcgtgcgccagcagtggccgctgcttg

SEQ ID NO: 59574 - DNA, 263 bp, Setaria italica
  Peptide Sequence Number=SeqID_125548
gtgcatcggggacgggtggaaggcgtgggcttttgtctggtacgtgaagttggtgagtgcgaggaggccgccggggaggatggtggcgaggccgtccagcgtgaggttagcgccggcgaagccgtgataggcgaattcccggccatcgtccaacgacgaggccacttcaccttgacggctcagcagtatgaacagaaggagggccagcccatcctggcagtcgagctcgacaccatcctgaccccggagttccgcgacatcaa

SEQ ID NO: 59575 - DNA, 273 bp, Setaria italica
  Peptide Sequence Number=SeqID_125549
atcggggacggggtggaaggcgtgggcttttgtctggtacgtgaagttggtgagtgcgaggaggccgccggggaggatggtggcgaggccgtccagcgtgaggttagcgccggcgaagccgtgataggcgaattcccggccatcgtccaacgacgaggccacttcaccttgacggctcagcagtatgaacagaaggagggccagcatacaaaatagtagtttcttggacgcttaatttgccttgttggcctaaagaagcttcggacgacgaaa

SEQ ID NO: 59576 - DNA, 227 bp, Setaria italica
  Peptide Sequence Number=SeqID_125550
gcctagaatacttatggccatggcacgagatgggctgttgccatccttcttctctgatgttaacaagcaaacacaagtacctgtcaagagcacaattgtgactggcatctgtgcagctgctctggcttttgcaatggatgtttcacagttggcaggaatgaactatacatgcatgtaagcattacaaatgctgtaaggtggagtgaaataataaaaatggtatttta

SEQ ID NO: 59577 - DNA, 346 bp, Setaria italica
  Peptide Sequence Number=SeqID_125551
ttatacctggaaatcgagaattagcaattctgtgaatggaatttatgagcgcagacttgccaacattagggacaccaacaaccataataagaagtgtaggctctttcaagattgcttcctttagtttcagttcagcaagcccaagaagctagtaaatacaataaactgatcattaatggacttaaactatactccctccgtcccaaattataggtcgttttggctttttagattcatagatagtgttatgcacttagatatgccctatgtctagatgcataataatatctatgcatctagaaaagccaaaacgacctataatttaggatggagggagtactttaga

SEQ ID NO: 59578 - DNA, 302 bp, Setaria italica
  Peptide Sequence Number=SeqID_125552
ttatttacttaacttaggtttaattttctttttcttagttaagttaatttaagtttgttagttcttagttaaattactaggtctactacttgagatggcgatcccagcaacaaaattttggtatagacgattgttatccctactggggataaatgcccccttcaagacatttgtgatctcaaacacacggtatgacagaagaagatagattgcagttgtaagcatgaagttaagcataggataatctggtatgaaacaaagaagccattttggctgtccatttggcatgctagacctaagcc

SEQ ID NO: 59579 - DNA, 480 bp, Setaria italica
  Peptide Sequence Number=SeqID_125553
agattcttccagcttctccatccatctttcaacattagggtggaagtaagcataaatcattccaataatccatatatatcgatcaaggccagatcggaaatgccactcatgtagaaggggtaggtgtgccttagcaggtgatggatctttatagcctagtaggaatgtaaagggggcccacaatagttcaaataccccaggaatttcccatatcaaaattacagacaagaagcagcaagcaatcttaatagccatgactgatggtatctcgttgtatttgttaaacagaccaagtgctccgtaaaccataagagtaaatagtgtgtgcattggacagatatagtagagcatgagatcattgtcaaggacaatgcaacagaatgccacaaagaaatttagctccacatcatctgagcaaatcttgcaatactaaaaatctttcttgatatagtaatatgagaagttcccaaatccagtcat

SEQ ID NO: 59580 - DNA, 345 bp, Setaria italica
  Peptide Sequence Number=SeqID_125554
ggggaaaaagcaatatatctagaacacctcagactcagatcatacctaagccaaatgtggatctgagaaatataagtctccagtgtaatcttgccaagccatgcgaaaagagccaaagaggcactcctcaactgctgggtgcaattgcgcaggcagatataagcactgtcagaaacaaaagttctccgtcaactgcaatggagcaaattgatgccacatgccagtatgccacattgattaaataaatgtcaacattttcttatacgtacgttatagggatccatgacgtgtagggatggtacttgttgtatgtaactttgtctagcttgtatatatattcatacc

SEQ ID NO: 59581 - DNA, 286 bp, Setaria italica
  misc_feature (11)..(11): n is a, c, g, or t
  misc_feature (280)..(280): n is a, c, g, or t
  Peptide Sequence Number=SeqID_125555
tggtctatttntttcttggttttattttttattattttgtcgtaccggtactaaactattattttcctagtaaagtctaagtaagagctacaaccgtgatctgttcctgtttctgtacattcttcttatcatagcatcagcgcttacctcacttaagaagcaccatgaaaaaatcagcatttaccggaaagtccatactctatcttaatcggcaccaaactgaggaatggaaagggtggatgcaggtcttattcctgatgtaccactattttgctgcctnagaaat

SEQ ID NO: 59582 - DNA, 427 bp, Setaria italica
  misc_feature (299)..(299): n is a, c, g, or t
  Peptide Sequence Number=SeqID_125556
tgtcttctccatccatctttcaacattagggtggaagtaagcataaatcattccaataatccatatatatcgatcaaggccagatcggaaatgccactcatgtagaaggggtaggtgtgccttagcaggtgatggatctttatagcctagtaggaatgtaaagggggcccacaatagttcaaataccccaggaatttcccatatcaaaattacagacaagaagcagcaagcaatcttaatagccatgactgatggtatctcgttgtatttgttaaacagaccaagtgctccgtaaaccntaagagtaaatagtgtgtgcattggacagatatagtagagcattgagatcattgtcaaggcaatgcaacagaatgccacaaagaaatttagcctccacatcatctgagcaaatcttgcaatactaaaa

SEQ ID NO: 59583 - DNA, 475 bp, Setaria italica
  Peptide Sequence Number=SeqID_125557
gagcagcagcttcaggtattccgactattctcctgatgcaaacgggaaacgtggccagagctaaaacatcctatcaatcaaacatcttgcagaagcgacctttctaccaagattgcttcatttggtatatcttcatccctgtaaatgcagtaccctatacaacaggaatcttcagaagaataagtgagcagaaatacaggcacactgagatggcgatcccagcaacaaaattttggtatagacgattgttatccctactggggataaatgcccccttcaagacatttgtgatctcaaacacacggtatgacagaagaagatagattgcagttgtaagcatgaagttaagcataggataatctggtatgaaaacaaagaagccattttggctgtccatttggcatgctagacctaagccaaatgtggatctgagaaatataagtctccagtgtaatcttgccaagccatgcgaaaa

SEQ ID NO: 59584 - DNA, 438 bp, Setaria italica
  Peptide Sequence Number=SeqID_125558
atggtacaattgtacaggataactctttacaaggcttgtattgtatcaacatacgctagtagttgctacaacttccaaagaatgcacgggtttgcctaattgtgtacaatgtttttcaacgaacaaaaagatcaaaatttggacttctatatctgcagcctctggcagttcaatgtcccagttgttcggacgagcagcagcttcaggtattccgactattctcctgatgcaaacgggaaacgtggccagagctaaaacatcctatcaatcaaacatcttgcagaagcgacctttctaccaagattgcttcatttggtatatcttcatccctgtaaatgcagtaccctatcggagttacacttcaaaaaattgcttggtattgggactgacagaatatagagcttcaagtatagtgagttctagatgttacctatacaa

SEQ ID NO: 59585 - DNA, 389 bp, Setaria italica
  Peptide Sequence Number=SeqID_125559
tccgactcagtgtgagtagtcattagggtggaagtaagcataaatcattccaataatccatatatatcgatcaaggccagatcggaaatgccactcatgtagaaggggtaggtgtgccttagcaggtgatggatctttatagcctagtaggaatgtaaagggggcccacaatagttcaaataccccaggaatttcccatatcaaaattacagacaagaagcagcaagcaatcttaatagccatgactgatggtatctcgttgtatttgttaaacagaccaagtgctccgtaaaccataagagtaaatagtgtgtgcattggacagatatagtagagcatgagatcattgtcaaggacaatgcaacagaatgccacaaagaaattagcct

SEQ ID NO: 59586 - DNA, 471 bp, Setaria italica
  Peptide Sequence Number=SeqID_125560
gtatatatattcataccacaggtaaccagccatcactgaagagtcacgatggttcccttgattgataatctaaccttagtctcagattcttccagcttctccatccatctttcaacattaggtggaagtaagcataaatcattccaataatccatatatatcgatcaaggccagatcggaaatgccactcatgtagaaggggtaggtgtgccttagcaggtgatggatctttatagcctagtaggaatgtaaagggggcccacaatagttcaaataccccaggaatttcccatatcaaaattacagacaagaagcagcaagcaatcttaatagccatgactgatggtatctcgttgtatttgttaaacagaccaagtgctccgtaaaccataagagtaaatagtgtgtgcattggacagatatagtagagcatgagatcattgtcaaggacaatgcaacagaatgccacaa

SEQ ID NO: 59587 - DNA, 474 bp, Setaria italica
  Peptide Sequence Number=SeqID_125561
ctgcagtatagatcgtgaaatgaggatcctttttttatgagtgttgaatgaaatggctttgaagttggtaaacttacaagaagatagattgcagttgtaagcatgaagttaagcataggataatctggtatgaaacaaagaagccattttggctgtccatttggcatgctagacctgcaaaagaagcttggttagagtgtgacccaaaaaaagcaaaagacctgctatattaaagaaaaatcaattcgaccacttttgatttgttctaatcttaaccttatattatatccaacatgctataggaatatatgttcctccctctgttcttgaatatatgttgtttacgacaagcaaattagttcaagcgaacagaaagtaatttgcttgtgctaaacgtcatatatttacgaacagaggtagtacttgttacagcactagcgaacaggaagtaccttcagtaattagggaaaaagc

SEQ ID NO: 59588 - DNA, 395 bp, Setaria italica
  Peptide Sequence Number=SeqID_125562
gaggaaagccccgtctatggtacaattgtacaggataactcttacaaggcttgtattgtatcaacatacgctagtagttgctacaacttccaaagaatgcacgggtttgcctaattgtgtacaatgttttcaacgaacaaaaagatcaaaatttggacttctatatctgcagcctctggcagttcaatgtcccagttgttcggacgagcagcagcttcaggtattccgactattctcctgatgcaaacgggaaacgtggccagagctaaaacatcctatcaatcaaacatcttgcagaagcgaacctttctaccaagattgcttcatttggtatatcttcatccctgtaaatgcagtaccctatcggagttacacttcaaaaattgcttggtatt

SEQ ID NO: 59589 - DNA, 454 bp, Setaria italica
  Peptide Sequence Number=SeqID_125563
acttgttgtatgtaactttgtctagcttgtatatatattcataccacaggtaaccagccatcactgaaagagtcacgatggttccctttgattgataatctaaccttagtctcagattcttccagcttctccatccatctttcaacattagggtggaagtaagcataaatcattccaataatccatatatatcgatcaaggccagatcggaaatgccactcatgtagaaggggtaggtgtgccttagcaggtgatggatctttatagcctagtaggaatgtaaagggggcccacaatagttcaaataccccaggaatttcccatatcaaaattacagacaagaagcagcaagcaatcttaatagccatgactgatggtatctcgttgtatttgttaaacggaccaagtgctccgtaaaaccaataaagaagtaaaataagtgtgtgcaattgga

SEQ ID NO: 59590 - DNA, 463 bp, Setaria italica
  Peptide Sequence Number=SeqID_125564
cttcatccctgtaaatgcagtaccctatacaacaggaatcttcaagaagaataagtgagcagaaatacaggcacactgagatggcgatcccagcaacaaattttggtatagacgattgttatccctactggggataaatgcccccttcaagacatttgtgatctcaaacacacggtatgacagaagaagatagattgcagttgtaagcatgaagttaagcataggataatctggtatgaaacaaagaagccattttggctgtccatttggcatgctagacctaagccaaatgtggatctgagaaatataagtctccagtgtaatcttgccaagccatgcgaaaagagccaaagaggcactcctcaactgctgggtgcaattgcgcaggcagatataagcagttatagggatccatgacgtgtagggatggtacttgttgtatgtaactttgtctagcttgtat

SEQ ID NO: 59591 - DNA, 470 bp, Setaria italica
  Peptide Sequence Number=SeqID_125565
aaacaaagaagccattttggctgtccatttggcatgctagacctaagccaaatgtggatctgagaaatataagtctccagtgtaatcttgccaagccatgcgaaaagagccaaagaggcactcctcaactgctgggtgcaattgcgcaggcagatataagcagttatagggatccatgacgtgtagggatggtacttgttgtatgtaactttgtctagcttgtatatatattcataccacaggtaaccagccatcactgaaagagtcacgatggttcccttgattgataatctaaccttagtctcagattcttccagcttctccatccatctttcaacattagggtgaagtaagcataaatcattccaataatccatatatatcgatcaaggccagatcggaaatgccactcatgtagaaggggtaggtgtgccttagcaggtgatggatctttatagcctagtaggaat

SEQ ID NO: 59592 - DNA, 473 bp, Setaria italica
  Peptide Sequence Number=SeqID_125566
aagccatgcgaaaagagccaaagaggcactcctcaactgctgggtgcaattgcgcaggcagatataagcagttatagggatccatgacgtgtagggatggtacttgttgtatgtaactttgtctagcttgtatatatattcataccacaggtaaccagccatcactgaaagagtcacgatggttcccttgattgataatctaaccttagtctcagattcttccagcttctccatccatctttcaacattagggtggaagtaagcataaatcattccaataatccatatatatcgatcaaggccagatcggaaatgccactcatgtagaaggggtagtgtgccttagcaggtgatggatctttatagcctagtaggaatgtaaaggggccacaatagttcaaataccccaggaattcccatatcaaaattacagacaagaagacagacaagcaatcttaatagccatgactgat

SEQ ID NO: 59593 - DNA, 174 bp, Setaria italica
  Peptide Sequence Number=SeqID_125567
tggatgactggatttgggaacttctcatattactatatcaagacatagcaagcaatgaacacacgaattgcattgtatatttctgaggcaccaaactgaggaatggaaagggtggatgcaggtcttattcctgatgtaccactattttgctgcctcagaaatatacaatgcaat

SEQ ID NO: 59594 - DNA, 440 bp, Setaria italica
  Peptide Sequence Number=SeqID_125568
ccctatacaacaggaatcttcagaagaataagtgagcagaaatacaggcacactgagatggcgatcccagcaacaaaattttggtatagacgattgttatccctactggggataaatgccccttcaagacatttgtgatctcaaacacacggtatgacagaagaagatagattgcagttgtaagcatgaagttaagcataggataatctggtatgaaacaaagaagccattttggctgtccatttggcatgctagacctaagccaaatgtggatctgagaaatataagtctccagtgtaatcttgccaagccatgcgaaaagagccaaagaggcactcctcaactgctgggtgcaattgcgcaggcagatataagcagttatagggatccatgacgtgtagggatggtacttgttgtatgtaactttgtctagcttgtat

SEQ ID NO: 59595 - DNA, 440 bp, Setaria italica
  Peptide Sequence Number=SeqID_125569
gtgtagggatggtacttgttgtatgtaactttgtctagcttgtatatatattcataccacaggtaaccagccatcactgaaagagtcacgatggttcccttgattgataatctaaccttagtctcagattcttccagcttctccatccatctttcaacatcagggtggaagtaagcataaatcattccaataatccatatatatcgatcaaggccagatcggaaatgccactcatgtagaaggggtaggtgtgccttagcaggtgatggatctttatagcctagtaggaatgtaaaggggggcccacgaatagttcaaataccccaggaatttcccatatcaaaattacagacaagaagcagcaagcaatcttaatagccatgactgatggtatctcgttgtatttgttaaacagaccaagtgctcagatgatgtggagg

SEQ ID NO: 59596 - DNA, 196 bp, Setaria italica
  Peptide Sequence Number=SeqID_125570
agctacaaccgtgatctgttcctgtttctgtacattcttcttatcatagcatcagcgcttacctcacttaagaagcaccatgaaaaatcagcatttaccggaaagtccatactctatcttaatcggcaccaaactgatcctgatgtaccactattttgctgcctcagaaatatacaatgcaattcgtgtgttcatt

SEQ ID NO: 59597 - DNA, 455 bp, Setaria italica
  Peptide Sequence Number=SeqID_125571
tatagacgattgttatccctactggggataaatgcccccttcaagacatttgtgatctcaaacacacggtatgacagaagaagatagattgcagttgtaagcatgaagttaagcataggataatctggtatgaaacaaagaagccattttggctgtccatttggcatgctagacctaagccaaatgtggatctgagaaatataagtctccagtgtaatcttgccaagccatgcgaaaagagccaaagaggcactcctcaactgctgggtgcaattgcgcaggcagatataagcagttatagggatccatgacgtgtagggatggtacttgttgtatgtaactttgtctagcttgtatatatattcataccacaggtaaccagccatcactgaaagagtcacgatggttcccttgattgataatctaaccttagtctcagattcttccagcttctc

SEQ ID NO: 59598 - DNA, 436 bp, Setaria italica
  Peptide Sequence Number=SeqID_125572
ccccttcaagacatttgtgatctcaaacacacggtatgacagaagaagatagattgcagttgtaagcatgaagttaagcataggataatctggtatgaaacaaagaagccatttttggctgtccatttggcatgctagacctaagccaaatgtggatctgagaaatataagtctccagtgtaatcttgccaagccatgcgaaaagagccaaagaggcactcctcaactgctgggtgcaattgcgcaggcagatataagcagttatagggatccatgacgtgtagggatggtacttgttgtatgtaactttgtctagcttgtatatatattcataccacaggtaaccagccatcactgaaagagtcacgatggttcccttgattgaataaatctaaaccttaagtactacaagaattaacttaaccaaagaacttaa

SEQ ID NO: 59599 - DNA, 470 bp, Setaria italica
  Peptide Sequence Number=SeqID_125573
aagtgaagcagaaatacaggcacactgagatggcgatcccagcaacaaaattttggtatagacgattgttatccctactggggataaatgcccccttcaagacatttgtgatctcaaacacacggtatgacagaagaagatagattgcagttgtaagcatgaagttaagcataggataatctggtatgaaacaaagaagccattttggctgtccatttggcatgctagacctaagccaaatgtggatctgagaaatataagtctccagtgtaatcttgccaagccatgcgaaaagagccaaagaggcactcctcaactgctgggtgcaattgcgcaggcagatataagcagttatagggatccatgacgtgtagggatggtacttgttgtatgtaactttgtctagcttgtatatatattcataccacaggtaaccagccatcactgaaagagtcacgatggttcccttg

SEQ ID NO: 59600 - DNA, 396 bp, Setaria italica
  Peptide Sequence Number=SeqID_125574
agatggcgatcccagcaacaaaattttggtatagacgattgttatccctactggggataaatgcccccttcaagacatttgtgatctcaaacacacggtatgacagaagaagatagattgcagttgtaagcatgaagttaagcataggataatctggtatgaaacaaagaagccattttggctgtccatttggcatgctagacctaagccaaatgtggatctgagaaatataagtctccagtgtaatcttgccaagccatgcgaaaagagccaaagaggcactcctcaactgctgggtgcaattgcgcaggcagatataagcagttatagggatccatgacgtgtagggatggtacttgttgtatgtaactttgtctagcttgtatatatattcat

SEQ ID NO: 59601 - DNA, 342 bp, Setaria italica
  misc_feature (341)..(341): n is a, c, g, or t
  Peptide Sequence Number=SeqID_125575
ggagttaacacttcaaaattgcttggtattgggactgacagaatatagagcttcaagtatagtgagttctagatgttacctatacaacaggaatcttcagaagaataagtgagcagaaatacaggcacactgagatggcgatcccagcaacaaaattttggtatagacgattgttatccctactggggataaatgcccccttcaagacatttgtgatctcaaacacacggtatgacagaagaagatagattgcagttgtttcataccagattatcctatgcttaacttcatgcttacaactgcaatctatcttcttctgtcataccgtgtgatctcaaacnc

SEQ ID NO: 59602 - DNA, 249 bp, Setaria italica
  Peptide Sequence Number=SeqID_125576
tgtctaaacgggaaacgttggccagagctaaaacatcctatcaatcaaacatcttgcagaagcgacctttctaccaagattgcttcatttggtatatcttcatccctgtaaatgcagtaccctatacaacaggaatcttcagaagaataagtgagcagaaatacaggcacactgagatggcgatcccagcaacaaaattttggtatagacgattgttatccctactggggataaatgcccccttcaaga

SEQ ID NO: 59603 - DNA, 199 bp, Setaria italica
  Peptide Sequence Number=SeqID_125577
agcttcaggtattccgactattctcctgatgcaaacgggaaacgtggccagagctaaaacatcctatcaatcaaacatcttgcagaagcgacctttctaccaagattgcttcatttggtatatcttcatccctgtaaatgcagtaccctatacaacaggaatcttcagaagaataagtgagcagaaatacaggcacact

SEQ ID NO: 59604 - DNA, 377 bp, Setaria italica
  Peptide Sequence Number=SeqID_125578
tagagatggcgatcccagcaacaaaattttggtatagacgattgttatccctactggggataaatgcccccttcaagacatttgtgatctcaaacacacggtatgacagaagaagatagattgcagttgtaagcatgaagttaagcataggataatctggtatgaaacaaagaagccattttggctgtccatttggcatgctagacctaagccaaatgtggatctgagaaatataagtctccagtgtaatcttgccaagccatgcgaaaagagccaaagaggcactcctcaactgctgggtgcaattgcgcaggcagatataagcagttatagggatccatgacgtgtagggatggtacttgttgtatgtaactttg

SEQ ID NO: 59605 - DNA, 433 bp, Setaria italica
  Peptide Sequence Number=SeqID_125579
taataccctaactaggggaataaaatagcccccttcaagacatttgtgatctcaaacacacggtatgacagaagaagatagattgcagttgtaagcatgaagttaagcataggataatctggtatgaaacaaagaagccattttggctgtccatttggcatgctagacctaagccaaatgtggatctgagaaatataagtctccagtgtaatcttgccaagccatgcgaaaagagccaaagaggcactcctcaactgctgggtgcaattgcgcaggcagatataagcagttatagggatccatgacgtgtagggatggtacttgttgtatgtaactttgtctagcttgtatatatattcataccacaggtaaccagccatcactgaaagagtcacgatggttcccttgattgataatctaaccttagtctcag

SEQ ID NO: 59606 - DNA, 366 bp, Setaria italica
  Peptide Sequence Number=SeqID_125580
tacaggcacactgagatggcgatcccagcaacaaaattttggtatagacgattgttatccctactggggataaatgcccccttcaagacatttgtgatctcaaacacacggtatgacagaagaagatagattgcagttgtaagcatgaagttaagcataggataatctggtatgaaacaaagaagccattttggctgtccatttggcatgctagacctaagccaaatgtggatctgagaaatataagtctccagtgtaatcttgccaagccatgcgaaaagagccaaagaggcactcctcaactgctgggtgcaattgcgcaggcagatataagcagttatagggatccatgacgtgtagggatgg

SEQ ID NO: 59607 - DNA, 408 bp, Setaria italica
  Peptide Sequence Number=SeqID_125581
tcttgcagaagcgacctttctaccaagattgcttcatttggtatatcttcatccctatacaacaggaatcttcagaagaataagtgagcagaaatacaggcacactgagatggcgatcccagcaacaaaattttggtatagacgattgttatccctactggggataaatgcccccttcaagacatttgtgatctcaaacacacggtatgacagaagaagatagattgcagttgtaagcatgaagttaagcataggataatctggtatgaaacaaagaagcctcttttggctctttttcgcatggcttggcaagattacactggagacttatatttctcagatccacatttggcttaggtctagcatgccaaaataggaacaagaccaaaaaataaggaactttaacaa

SEQ ID NO: 59608 - DNA, 413 bp, Setaria italica
  Peptide Sequence Number=SeqID_125582
aagacatttgtgatctcaaacacacggtatgacagaagaagatagattgcagttgtaagcatgaagttaagcataggataatctggtatgaaacaaagaagccattttggctgtccatttggcatgctagacctaagccaaatgtggatctgagaaatataagtctccagtgtaatcttgccaagccatgcgaaaagagccaaagaggcactcctcaactgctgggtgcaattgcgcaggcagatataagcagttatagggatccatgacgtgtagggatggtacttgttgtatgtaactttgtctagcttgtatatatattcataccacaggtaaccagccatcactgaaagagtcacgatggttcccttgattgataatctaaccttagtctcagattcttccagcttctc

SEQ ID NO: 59609 - DNA, 407 bp, Setaria italica
  Peptide Sequence Number=SeqID_125583
gcccccttcaagacatttgtgatctcaaacacacggtatgacagaagaagatagattgcagttgtaagcatgaagttaagcataggataatctggtatgaaacaaagaagccattttggctgtccatttggcatgctagacctaagccaaatgtggatctgagaaatataagtctccagtgtaatcttgccaagccatgcgaaaagagccaaagaggcactcctcaactgctgggtgcaattgcgcaggcagatataagcagttatagggatccatgacgtgtagggatggtacttgttgtatgtaactttgtctagcttgtatatatattcataccacaggtaaccagccatcactgaaagagtcacgatggttcccttgattgataatctaaccttagtctcaga

SEQ ID NO: 59610 - DNA, 419 bp, Setaria italica
  Peptide Sequence Number=SeqID_125584
taattaaagttctccagtgtaatcttgccaagccatgcgaaaagagccaaagaggcactcctcaactgctgggtgcaattgcgcaggcagatataagcagttatagggatccatgacgtgtagggatggtacttgttgtatgtaactttgtctagcttgtatatatattcataccacaggtaaccagccatcactgaaagagtcacgatggttcccttgattgataatctaaccttagtctcagattcttccagcttctccatccatctttcaacattagggtggaagtaagcataaatcattccaataatccatatatatcgatcaaggccagatcggaaatgccactcatgtagaaggggtaggtgtgccttagcagtgatggatctttatagcctagtaggaatgtaaaggggccc

SEQ ID NO: 59611 - DNA, 364 bp, Setaria italica
  Peptide Sequence Number=SeqID_125585
aatcccagcaacaaaattttggtatagacgattgttatccctactggggataaatgcccccttcaagacatttgtgatctcaaacacacggtatgacagaagaagatagattgcagttgtaagcatgaagttaagcataggataatctggtatgaaacaaagaagccattttggctgtccatttggcatgctagacctaagccaaatgtggatctgagaaatataagtctccagtgtaatcttgccaagccatgcgaaaagagccaaagaggcactcctcaactgctgggtgcaattgcgcaggcagatataagcagttatagggatccatgacgtgtagggatgggtacttgttgtatgtaac

SEQ ID NO: 59612 - DNA, 400 bp, Setaria italica
  Peptide Sequence Number=SeqID_125586
taaacaaagaagccattttggctgtccatttggcatgctagacctaagccaaatgtggatctgagaaatataagtctccagtgtaatcttgccaagccatgcgaaaagagccaaagaggcactcctcaactgctgggtgcaattgcgcaggcagatataagcagttatagggatccatgacgtgtagggatggtacttgttgtatgtaactttgtctagcttgtatatatattcataccacaggtaaccagccatcactgaaagagtcacgatggttcccttgattgataatctaaccttagtctcagattcttccagcttctccatccatctttcaacattagggtggaagtaagcataaatcattccaataatccatatatatcgatcaaggccagat

SEQ ID NO: 59613 - DNA, 436 bp, Setaria italica
  Peptide Sequence Number=SeqID_125587
atgtcttgaagggggcatttatccccagtagggataacaatcgtctataccaaagaagccattttggctgtccatttggcatgctagacctaagccaaatgtggatctgagaaatataagtctccagtgtaatcttgccaagccatgcgaaaagagccaaagaggcactcctcaactgctgggtgcaattgcgcaggcagatataagcagttatagggatccatgacgtgtagggatggtacttgttgtatgtaactttgtctagcttgtatatatattcataccacaggtaaccagccatcactgaaagagtcacgatggttcccttgattgataatctaaccttagtctcagattcttccagcttctccatccatcttcaacattaggtggaagtaagcataaatcattccaataatccatatatatatatcaa

SEQ ID NO: 59614 - DNA, 356 bp, Setaria italica
  misc_feature (21)..(21): n is a, c, g, or t
  Peptide Sequence Number=SeqID_125588
tgcccccttcaagacatttgngatctcaaacacacggtatgacagaagaagatagattgcagttgtaagcatgaagttaagcataggataatctggtatgaaacaaagaagccattttggctgtccatttggcatgctagacctaagccaaatgtggatctgagaaatataagtctccagtgtaatcttgccaagccatgcgaaaagagccaaagaggcactcctcaactgctgggtgcaattgcgcaggcagatataagcagttatagggatccatgacgtgtagggatggtacttgttgtatgtaactttgtctagcttgtatatatattcataccacaggtaaaaaccaaaaa

SEQ ID NO: 59615 - DNA, 383 bp, Setaria italica
  Peptide Sequence Number=SeqID_125589
caaacacacggtatgacagaagaagatagattgcagttgtaagcatgaagttaagcataggataatctggtatgaaacaaagaagccatttttggctgtccattttggcatgctagacctaagccaaatgtggatctgagaaatataagtctccagtgtaatcttggccaagccatgcgaaaagagccaaagaggcactcctcaactgctgggtgcaattgcgcaggcagatataagcagttatagggatccatgacgtgtagggatggtacttgttgtatgtaactttgtctagcttgtatatatattcataccacaggtaaccagccatcactgaaagagtcacgattggttcccttgattgataatctaaccttagtctc

SEQ ID NO: 59616 - DNA, 352 bp, Setaria italica
  Peptide Sequence Number=SeqID_125590
tgttaaagcaatgaagttaagcataggataatctggtatgaaacaaagaagccattttggctgtccatttggcatgctagacctaagccaaatgtggatctgagaaatataagtctccagtgtaatcttgccaagccatgcgaaaagagccaaagaggcactcctcaactgctgggtgcaattgcgcaggcagatataagcagttatagggatccatgacgtgtagggatggtacttgttgtatgtaactttgtctagcttgtatatatattcataccacaggtaaccagccatcactgaaagagtcacgatggttcccttgattgataatctaaccttgtctcagattctt

SEQ ID NO: 59617 - DNA, 384 bp, Setaria italica
  Peptide Sequence Number=SeqID_125591
acgattgttactccctactggggataaatgcccccttcaagacatttgtgatcctcaaacacacggtatgacagaagaagatagattgcagttgtaagcatgaagttaagcataggataatctggtatgaaacaaagaagccattttggctgtccatttggcatgctagacctaagccaaatgtggatctgagaaatataagtctccagtgtaatcttgccaagccatgcgaaaagagccaaagaggcactcctcaactgctgggtgcaattgcgcaggcagatataagcagttatagggatccatgacgtgtagggatggtacttgttgtatgtaactttgtctagcttgtatatatattcataccacaaggtaaaaccaaaa

SEQ ID NO: 59618 - DNA, 307 bp, Setaria italica
  Peptide Sequence Number=SeqID_125592
acctaactaggggaataaaatagacccccttcaaagacatttgtgatctcaaacacacggtatgacagaagaagatagattgcagttgtaagcatgaagttaagcataggataatctggtatgaaacaaagaagccattttggctgtccatttggcatgctagacctaagccaaatgtggatctgagaaatataagtctccagtgtaatcttgccaagccatgcgaaaagagccaaagaggcactcctcaactgctgggtgcaattgcgcaggcagatataagcagttatagggatccatgacgtgt

SEQ ID NO: 59619 - DNA, 339 bp, Setaria italica
  Peptide Sequence Number=SeqID_125593
tagaattgcagttgtaagcatgaagttaagcataggataatctggtatgaacaaagaagccattttggctgtccatttggcatgctagacctaagccaaatgtggatctgagaaatataagtctccagtgtaatcttgccaagccatgcgaaaagagccaaagaggcactcctcaactgctgggtgcaattgcgcaggcagatataagcagttatagggatccatgacgtgtagggatggtacttgttgtatgtaactttgtctagcttgtatatatattcataccacaggtaccagccatcactgaaagagtcacgatggttcccttgattgataatc

SEQ ID NO: 59620 - DNA, 346 bp, Setaria italica
  Peptide Sequence Number=SeqID_125594
agacaaggacaagaataataaagacaagttaatagggatccatgacgtgtagggatggtacttgttgtatgtaactttgtatagcttgtatatatattcataccacaggtaaccagccatcactgaaagagtcacgatggttcccttgattgataatctaaccttagtctcagattcttccagcttctccatccatctttcaacattagggtggaagtaagcataaatcattccaataatccatatatatcgatcaaggccagatcggaaatgccactcatgtagaaggggtaggtgtgccttagcaggtgatggatctttatagcctagtaggatgtaaaggggg

SEQ ID NO: 59621 - DNA, 244 bp, Setaria italica
  Peptide Sequence Number=SeqID_125595
agcaacaaaattttggtatagacgattgttatccctactggggataaatgcccccttccaagacatttgtgatctcaaacacacggtatgacagaagaagatagattgcagttgtaagcatgaagttaagcataggataatctggtatgaaacaaagaagccattttggctgtccatttggcatgctagacctaagccaaatgtggatctgagaaatataagtctccagtgtaatcttgccaag

SEQ ID NO: 59622 - DNA, 332 bp, Setaria italica
  Peptide Sequence Number=SeqID_125596
cacggtatgacagaagaagatagattgcagttgtaagcatgaagttaagcataggataatctggtatgaaacaaagaagccattttggctgtccatttggcatgctagacctaagccaaatgtggatctgagaaatataagtctccagtgtaatcttgccaagccatgcgaaaagagccaaagaggcacttccttcaacttgctgggtgcaatttgcgcaggcagatataagcagttatagggatccatgacgtgtagggatggtacttgttgtatgtaactttgtctagcttgtatatatattcataccacaggtaaccagccattcactt

SEQ ID NO: 59623 - DNA, 314 bp, Setaria italica
  Peptide Sequence Number=SeqID_125597
taatctggtatgaaacaaagaagccattttggctgtccatttggcatgctagacctaagccaaatgtggatctgagaaatataagtctccagtgtaatcttgccaagccatgcgaaaagagccaaagaggcactcctcaactgctgggtgcaattgcgcaggcagatataagcagttatagggatccatgacgtgtagggatggtacttgttgtatgtaactttgtctagcttgtatatatattcataccacaggtaaccagccatcactgaaagagtcacgatggttcccttgattgataatctaaccttagt

SEQ ID NO: 59624 - DNA, 348 bp, Setaria italica
  misc_feature (125)..(125): n is a, c, g, or t
  Peptide Sequence Number=SeqID_125598
catgctagacctaagccaaatgtggatctgagaaatataagtctccagtgtaatcttgccaagccatgcgaaaagagccaaagaggcactcctcaaactgctgggtgcaattgcgcaggcagatntaagcagttatagggatccatgacgtgtagggatggtacttgttgtatgtaactttgtctagcttgtatatatattcataccacaggtaaccagccatcactgaaagagtcacgatggttcccttgattgataatctaaccttagtctcagattcttccagcttctccatccatctttcaacattagggtggaagtaagcataaatcattccaataatccata

SEQ ID NO: 59625 - DNA, 315 bp, Setaria italica
  Peptide Sequence Number=SeqID_125599
ataatctggtatgaaacaaagaagccattttggctgtccatttggcatgctagacctaagccaaatgtggatctgagaaatataagtctccagtgtaatcttgccaagccatgcgaaaagagccaaagaggcactcctcaactgctgggtgcaattgcgcaggcagatataagcagttatagggatccatgacgtgtagggatggtacttgttgtatgtaactttgtctagcttgtatatatattcataccacaggtaaccagccatcactgaaagagtcacgatggttcccttgattgataatctaaccttagt

SEQ ID NO: 59626 - DNA, 329 bp, Setaria italica
  Peptide Sequence Number=SeqID_125600
cacacggtatgacagaagaagatagattgcagttgtaagcatgaagttaagcataggataatctggtatgaaacaaagaagccattttggctgtccatttggcatgctagacctaagccaaatgtggatctgagaaatataagtctccagtgtaatcttgccaagccatgcgaaaagagccaaagaggcactcctcaactgctgggtgcaattgcgcaggcagatataagcagttatagggatccatagaacgtagtaagggaataggtaacttagttagtaatagtaaactttagtactaagacttagtaataataataattacaata

SEQ ID NO: 59627 - DNA, 236 bp, Setaria italica
  Peptide Sequence Number=SeqID_125601
ctggtatgaaacaaagaagccattttggctgtccatttggcatgctagacctaagccaaatgtggatctgagaaatataagtctccagtgtaatcttgccaagccatgcgaaaagagccaaagaggcactcctcaactgctgggtgcaattgcgcaggcagatataagcagttatagggatccatgacgtgtagggatggtacttgttgtatgtaactttgtctagcttgtatata

SEQ ID NO: 59628 - DNA, 256 bp, Setaria italica
  Peptide Sequence Number=SeqID_125602
taccatatatatcgatcaaggccagatcggaaatgccactcatgtagaaggggtaggtgtgccttagcaggtgatggatctttatagcctagtaggaatgtaaagggggcccacaatagttcaaataccccaggaatttcccatatcaaaattacagacaagaagcagcaagcaatcttaatagccatgactgatggtatctcgttgtatttgttaaacagaccaagtgctccgtaaaccataagagtaaatagtg

SEQ ID NO: 59629 - DNA, 254 bp, Setaria italica
  Peptide Sequence Number=SeqID_125603
aacattagggtggaagtaagcataaatcattccaataatccatatatatcgatcaaggccagatcggaaatgccactcatgtagaaggggtaggtgtgccttagcaggtgatggatctttatagcctagtaggaatgtaaagggggcccacaatagttcaaataccccaggaatttcccatatcaaaattacagacaagaagcagcaagcaatcttaatagccatgactgatggtatctcgttgtatttgtaaa

SEQ ID NO: 59630 - DNA, 258 bp, Setaria italica
  Peptide Sequence Number=SeqID_125604
tattcataccacaggtaaccagccatcactgaaagagtcacgatggttcccttgattgataatctaaccttagtctcagattcttccagcttctccatccatctttcaacattagggtggaagtaagcataaatcattccaataatccatatatatcgatcaaggccagttgaaatcaccatccacaaagttccggaacttgtctaccaaagccaatttgatttcggtttataacaatggacgaattcttttctgctt

SEQ ID NO: 59631 - DNA, 281 bp, Setaria italica
  Peptide Sequence Number=SeqID_125605
agaagttacaacgtaataggttaccccttgattgataatctaaccttagtctcagattcttccagcttctccatccatctttcaacattagggtggaagtaagcataaatcattccaataatccatatatatcgatcaaggccagatcggaaatgccactcatgtagaaggggtaggtgtgccttagcaggtgatggatctttatagcctagtaggaatgtaaagggggcccacaatagttcaaataccccaggaatttcccatatcaaaattacagacaa

SEQ ID NO: 59632 - DNA, 256 bp, Setaria italica
  Peptide Sequence Number=SeqID_125606
taaccttagtctcagattcttccagcttctccatccatctttcaacattagggtggaagtaagcataaatcattccaataatccatatatatcgatcaaggccagatcggaaatgccactcatgtagaaggggtaggtgtgccttagcaggtgatggatctttatagcctagtaggaatgtaaagggggcccacaatagttcaaataccccaggaatttcccatatcaaaattacagacaagaagcagcaagctaa

SEQ ID NO: 59633 - DNA, 255 bp, Setaria italica
  Peptide Sequence Number=SeqID_125607
ctacataggtggaagtaagcataaatcattccaataatccatatatatcgatcaaggccagatcggaaatgccactcatgtagaaggggtaggtgtgccttagcaggtgatggatctttatagcctagtaggaatgtaaagggggcccacaatagttcaaataccccaggaatttcccatatcaaaattacagacaagaagcagcaagcaatcttaatagccatgactgatggtatctcgttgtatttgttaaac

SEQ ID NO: 59634 - DNA, 256 bp, Setaria italica
  Peptide Sequence Number=SeqID_125608
tactaaccttagtctcagattcttccagcttctccatccatctttcaacattagggtggaagtaagcataaatcattccaataatccatatatatcgatcaaggccagatcggaaatgccactcatgtagaaggggtaggtgtgccttagcaggtgatggatctttatagcctagtaggaatgtaaagggggcccacaatagttcaaataccccaggaatttcccatatcaaaattacagacactgagacacgcaa

SEQ ID NO: 59635 - DNA, 251 bp, Setaria italica
  Peptide Sequence Number=SeqID_125609
cagcttctccatccatctttcaacattagggtggaagtaagcataaatcattccaataatccatatatatcgatcaaggccagatcggaaatgccactcatgtagaaggggtaggtgtgccttagcaggtgatggatctttatagcctagtaggaatgtaaagggggcccacaatagttcaaataccccaggaatttcccatatcactgagacacgcaacaggggaaaggcaaggcacacgaggggatagg

SEQ ID NO: 59636 - DNA, 232 bp, Setaria italica
  Peptide Sequence Number=SeqID_125610
caggtaaccagccatcactgaaagagtcacgatggttcccttgattgataatctaaccttagtctcagattcttccagcttctccatccatctttcaacattagggtggaagtaagcataaatcattccaataatccatatatatcgatcaaggccagatcggaaatgccactcatgtagaaggggtaggtgtgccttagcaggtgatggatctttatagcctagtaggaat

SEQ ID NO: 59637 - DNA, 252 bp, Setaria italica
  Peptide Sequence Number=SeqID_125611
tgaaagagtcacgatggttcccttgattgataatctaaccttagtctcagattcttccagcttctccatccatctttcaacattagggtggaagtaagcataaatcattccaataatccatatatatcgatcaaggccagatcggaaatgccactcatgtagaaggggtaggtgtgccttagcaggtgatggatctttatagcctagtaggaatgtaaagggggcccacaatagttcaaataaccccaagaa

SEQ ID NO: 59638 - DNA, 242 bp, Setaria italica
  Peptide Sequence Number=SeqID_125612
tatatattcataccacaggtaaccagccatcactgaaagagtcacgatggttcccttgattgataatctaaccttagtctcagattcttccagcttctccatccatctttcaacattagggtggaagtaagcataaatcattccaataatccatatatatcgatcaaggccagatcggaaatgccactcatgtagaaggggtaggtgtgccttagcaggtgatggatctttatagcctagta

SEQ ID NO: 59639 - DNA, 244 bp, Setaria italica
  Peptide Sequence Number=SeqID_125613
gggatccatgacgtgtagggatggtacttgttgtatgtaactttgtctagcttgtatatatattcataccacaggtaaccagccatcactgaaagagtcacgatggttcccttgattgataatctaaccttagtctcagattcttccagcttctccatccatctttcaacattagggtggaagtaagcataaatcattccaataatccatatatatcgatcaaggccagatcggaaatgccact

SEQ ID NO: 59640 - DNA, 231 bp, Setaria italica
  Peptide Sequence Number=SeqID_125614
aacattagggtggaagtaagcataaatcattccaataatccatatatatcgatcaaggccagatcggaaatgccactcatgtagaaggggtaggtgtgccttagcaggtgatggatctttatagcctagtaggaatgtaaagggggcccacaatagttcaaataccccaggaatttcccatatcaaaattacagacaagaagcagcaagcaatcttaatagccatgactga

SEQ ID NO: 59641 - DNA, 238 bp, Setaria italica
  Peptide Sequence Number=SeqID_125615
atataagtctccagtgtaatcttgccaagccatgcgaaaagagccaaagaggcactcctcaactgctgggtgcaattgcgcaggcagatataagcagttatagggatccatgacgtgtagggatggtacttgttgtatgtaactttgtctagcttgtatatatattcataccacaggtaaccagccatcactgaaagagtcacgatggttcccttgattgataatctaaccttagtct

SEQ ID NO: 59642 - DNA, 151 bp, Setaria italica
  Peptide Sequence Number=SeqID_125616
ccttagtctcagattcttccagcttctccatccatctttcaacattagggtggaagtaagcataaatcattccaataatccatatatatcgatcaaggccagatcggaaatgccactcatgtagaaggggtaggtgtgccttagcaggtga

SEQ ID NO: 59643 - DNA, 229 bp, Setaria italica
  Peptide Sequence Number=SeqID_125617
atatatcgatcaaggccagatcggaaatgccactcatgtagaaggggtaggtgtgccttagcaggtgatggatctttatagcctagtaggaatgtaaagggggcccacaatagttcaaataccccaggaatttcccatatcaaaattacagacaagaagcagcaagcaatcttaatagccatgactgatggtatctcgttgtatttgttaaacagaccaagtgctccgt

SEQ ID NO: 59644 - DNA, 179 bp, Setaria italica
  Peptide Sequence Number=SeqID_125618
tgtaagaaaggggtaggtgtgccttagcaggtgatggatctttatagcctagtaggaatgtaaagggggcccacaatagttcaaataccccaggaatttcccatatcaaaattacagacaagaagcagcaagcaatcttaatagccatgactgatggtatctcgttgtatttgttaaac

SEQ ID NO: 59645 - DNA, 191 bp, Setaria italica
  Peptide Sequence Number=SeqID_125619
ggtgtgccttagcaggtgatggatctttatagcctagtaggaatgtaaagggggcccacaatagttcaaataccccaggaatttcccatatcaaaattacagacaagaagcagcaagcaatcttaatagccatgactgatggtatctcgttgtatttgtttaaacagaccaagttgtcttccgttaaacct

SEQ ID NO: 59646 - DNA, 145 bp, Setaria italica
  Peptide Sequence Number=SeqID_125620
ggtgtgccttagcaggtgatggatctttatagcctagtaggaatgtaaagggggcccacaatagttcaaataccccaggaatttcccatatcaaaattacagacaagaagcagcaagcaaatacttaataagaccaatagaacta

SEQ ID NO: 59647 - DNA, 229 bp, Setaria italica
  Peptide Sequence Number=SeqID_125621
cacacggtatgacagaagaagatagattgcagttgtaagcatgaagttaagcataggataatctggtatgaaacaaagaagccattttggctgtccatttggcatgctagacctaagccaaatgtggatctgagaaatataagtctccagtgtaatcttgccaagccatgcgaaaagagccaaagaggcactcctcaactgctgggtgcaattgcgcaggcagatataa

SEQ ID NO: 59648 - DNA, 238 bp, Setaria italica
  Peptide Sequence Number=SeqID_125622
tggtatgaaacaaagaagccattttggctgtccatttggcatgctagacctaagccaaatgtggatctgagaaatataagtctccagtgtaatcttgccaagccatgcgaaaagagccaaagaggcactcctcaactgctgggtgcaattgcgcaggcagatataagcagttatagggatccatgacgtgtagggatggtacttgttgtatgtaactttgtctagcttgtatatatta

SEQ ID NO: 59649 - DNA, 226 bp, Setaria italica
  Peptide Sequence Number=SeqID_125623
gatagattgcagttgtaagcatgaagttaagcataggataatctggtatgaaacaaagaagccattttggctgtccatttggcatgctagacctaagccaaatgtggatctgagaaatataagtctccagtgtaatcttgccaagccatgcgaaaagagccaaagaggcactcctcaactgctgggtgcaattgcgcaggcagatataagcagttatagggatcca

SEQ ID NO: 59650 - DNA, 235 bp, Setaria italica
  Peptide Sequence Number=SeqID_125624
aagcatgaagttaagcataggataatctggtatgaaacaaagaagccattttggctgtccatttggcatgctagacctaagccaaatgtggatctgagaaatataagtctccagtgtaatcttgccaagccatgcgaaaagagccaaagaggcactcctcaactgctggggtgcaattgcgcaggcagatataagcagttatagggatccatgacgtgtagggatggtacttgtt

SEQ ID NO: 59651 - DNA, 191 bp, Setaria italica
  Peptide Sequence Number=SeqID_125625
cctatcccctgtgtgctttcctatcccctgttgcgtgtctcagtgtaagcatgaagttaagcataggataatctggtatgaaacaaagaagccattttggctgtccatttggcatgctagacctaagccaaatgtggatctgagaaatataagtctccagtgtaatcttgccaagccatgcgaaaagagcc

SEQ ID NO: 59652 - DNA, 175 bp, Setaria italica
  Peptide Sequence Number=SeqID_125626
agttgtaagcatgaagttaagcataggataatctggtatgaaacaaagaagccattttggctgtccatttggcatgctagacctaagccaaatgtggatctgagaaatataagtctccagtgtaatcttgccaagccatgcgaaaagagccaaagaggcactcctcaactgctgg

SEQ ID NO: 59653 - DNA, 196 bp, Setaria italica
  misc_feature (188)..(188): n is a, c, g, or t
  Peptide Sequence Number=SeqID_125627
gatctcaaacacacggtatgacagaagaagatagattgcagttgtaagcatgaagttaagcataggataatctggtatgaaacaaagaagccattttggctgtccatttggcatgctagacctaagccaaatgtggatctgagaaatataagtctccagtgtaatcttgccaagccatgacgaaaagngccaaaga

SEQ ID NO: 59654 - DNA, 218 bp, Setaria italica
  Peptide Sequence Number=SeqID_125628
tttggcatgctagacctaagccaaatgtggatctgagaaatataagtctccagtgtaatcttgccaagccatgcgaaaagagccaaagaggcactcctcaactgctgggtgcaattgcgcaggcagatataagcagttatagggatccatgacgtgtagggatggtacttgttgtatgtaactttgtctagcttgtatatatattcataccacaggta

SEQ ID NO: 59655 - DNA, 133 bp, Setaria italica
  Peptide Sequence Number=SeqID_125629
ttaagcataggataatctggtatgaaacaaagaagccattttggctgtccatttggcatgctagacctaagccaaatgtggatctgagaaatataagtctccagtgtaatcttgccaagccatgcgaaaagag

SEQ ID NO: 59656 - DNA, 190 bp, Setaria italica
  Peptide Sequence Number=SeqID_125630
tttggtcatgctagacctaagccaaatgtggatctgagaaatataagtctccagtgtaatcttgccaagccatgcgaaaagagccaaagaggcactcctcaactgctgggtgcaattgcgcaggcagatataagcagttgtagggatccatgacgtgtagggatggtacttgttgtatgtaactttgtct

SEQ ID NO: 59657 - DNA, 211 bp, Setaria italica
  Peptide Sequence Number=SeqID_125631
ccaaatgtggatctgagaaatataagtctccagttgtaatcttgccaagccatgcgaaaagagccaaagaggcactcctcaactgctgggtgcaattgcgcaggcagatataagcagttatagggatccatgacgtgtagggatggtaacttgttgtatgtaactttgtctagcttgtatatatattcataccacaggtaaaaaccaaaaa

SEQ ID NO: 59658 - DNA, 190 bp, Setaria italica
  Peptide Sequence Number=SeqID_125632
tataagtctccagtgttaatcttgccaagccatgcgaaagagccaaagaggcactcctcaactgctgggtgcaattgcgcaggcagatataagcagttatagggatccatgacgtgtagggatggtacttgttgtatgtaacttttgtctagcttgtatatatattcataccacaggtaaaccaaaaaaa

SEQ ID NO: 59659 - DNA, 109 bp, Setaria italica
  Peptide Sequence Number=SeqID_125633
ctcctcaactgctgggtgcaattgcgcaggcagatataagcagttatagggatccatgacgtgtagggatggtacttgttgtatgcaattgcgcaggcagattattaag

SEQ ID NO: 59660 - DNA, 107 bp, Setaria italica
  Peptide Sequence Number=SeqID_125634
aatacaggcacactgagatggcgatcccagcaacaaaattttggtatagacgattgttatccctactggggataaatgcccccttcaagacatttgtgatctcaaac

SEQ ID NO: 59661 - DNA, 117 bp, Setaria italica
  Peptide Sequence Number=SeqID_125635
agactagggtagcaaattgacgacaaggcagatataagcagttatagggatccatgacgtgtagggatggtacttgttgtatgtaactttgtctagcttgtatatatattcatacca

SEQ ID NO: 59662 - DNA, 128 bp, Setaria italica
  Peptide Sequence Number=SeqID_125636
tgcaattgcgcaggcagatataagcagttatagggatccatgacgtgtagggataggtacttagttgtatgtaacttttgtcttagcttgtatatatattcatacctactaggttaacctaaaaaaaa

SEQ ID NO: 59663 - DNA, 240 bp, Setaria italica
  Peptide Sequence Number=SeqID_125637
acacaaattagatcctcccacctgcctgagcaacagcagctgcatgattacctgcaacacgctcaccaaacactgggggaggcagtttctggcggaaacccagcatctaacatgtacaaggggatgtctgaattcccaaaagatagtgtgtgaaaatctcttgatgaggtggtgccgccagagggccacgctgaaccagttccctccctagactgagctggcctgacgagcagtggatag

SEQ ID NO: 59664 - DNA, 382 bp, Setaria italica
  Peptide Sequence Number=SeqID_125638
ggtagagataccctcgtctgggcttacacatctcagcggcacacatctgctgctggattagcccttctttgtatgtaacacaagctacaagcttacagaagaagcacaatatgattacatcacctcgaaacttagaggtattgttcataaactgcctagtgattcagatcaagagcttcctcttgtgcttacagtagaagaaggttttgttcatgtaatgtagattaaggtaggggtagagaagaggcaagcacacccgcagaatcatctatatgttgctccgccaaacagctttggattatagtggctggagttcttgctcaggagccactgaatcaacaggtctgtaggcagtttgaccaccaaatttctttctccaaac

SEQ ID NO: 59665 - DNA, 245 bp, Setaria italica
  Peptide Sequence Number=SeqID_125639
cgcaacagcaatggtagcatctactcttgaacctattagaactatttgagcatcatcttttctttttcaccgattaatttgttttattgatccatgccaggttatcatctctcggttaactcagcaccatgttcagttgcctgaaaatcttggcagttatcagttgctggagtggaatgtgcaacctttatccagaaggtcatggtttcaagaacatgtagtctctatactgcttgggattttgc

SEQ ID NO: 59666 - DNA, 247 bp, Setaria italica
  Peptide Sequence Number=SeqID_125640
ccatctggcagagcattgcatgttcttcatcccttaccttgcatataggaagagtgtaattgacagttccagccttggagacctctggacactctctgttgtcattcttgttaacattcacctggcaatggatgtcatcagatggaactggatcacacatgtggcgatatggggtagcattgttgcgacatggatttgcgtcatgatcatagactccataccgatcattgccttggttttcttgggt

SEQ ID NO: 59667 - DNA, 245 bp, Setaria italica
  Peptide Sequence Number=SeqID_125641
ttggccctataaagaacaagccctttttgcttgatgacgggcgcttactatgtgggtcatctgttgaaagctggaactcttggggtgcatggcttgaggtatgcatttgatcttattttcaacaggtcacagatgatgctggctggacatggaggaaatatggtcctatatttgtcgaaagtgagaaacttggggtgattcaacctgtcccctaccagaccaccaatgggactatacgtatgctg

SEQ ID NO: 59668 - DNA, 371 bp, Setaria italica
  Peptide Sequence Number=SeqID_125642
aagaaatacactatgaatttggccgcaaggaaggaaaggatagctcatgattggaacggaaatgtgagggaaacttgagctatcatttcccaatagcaatataaaagcaaatcaatccttgaacaaagaaacatgatgccacgcagattatcatccaagcaggaagctacagaaaccataccagagtttcatagaacaaagttgctgcagttctcctctttgccccctttcaaggacttgattaagacttaaagtattagttcctccttactcttctgatccaggatagcttatggaggcaatttgctattttcctagttcgagttgaattcagcaaacctgcaaacaacagtgtgcatataaaaaagcct

SEQ ID NO: 59669 - DNA, 213 bp, Setaria italica
  Peptide Sequence Number=SeqID_125643
tgcctacagttgcttctaagctgttcgcatgattctgggatcacggagtttgaatacccttcaataagcgaacagcttagaagcaactgtaggcagacgccagtttgctatgatggcagcacttcttcagcaatgcgtgtgcaggcaccaagacataagtcgagcaccagccaatttctaagtccttttctgaagttggcttcattttagtgt

SEQ ID NO: 59670 - DNA, 442 bp, Setaria italica
  misc_feature (15)..(15): n is a, c, g, or t
  Peptide Sequence Number=SeqID_125644
actttcctgcaggcncaaagagctgtgcgccacccttgtccgcaaacgaattgagatagaagattgcattctggaatgcttttgtattgagagtcacacccatcccccaacggcgccaaattcagttattgtgacactgtgaggtcgatatacatttggcgacatttctttgcagtaaatgccagatacagtggaccattgagtctcaaccacagttgtgaaaaaccagaaggacttgaaataactagcagaaactccaaacaaaaaataaaatcagtagccatcatgcatatcctgctaataattagcaccgccattaaataaaacagataacacaccgccattaactaaaaccgataacatgaagaaattttcatctgtgaacacacataatagtacaaatttgacctagtaatttattgtctagtttgtaaaactaaaa

SEQ ID NO: 59671 - DNA, 394 bp, Setaria italica
  Peptide Sequence Number=SeqID_125645
ccatggatgtagagattgcacactgagggaaacattggacaggcaaatgctgctgaagttatacccccctgaattccctccaatatgccagcaacaccaatgttgataccaacaacatccttaattgtaatattgcttatcatggggagagcattcctgtcatatttgtcatcaggatgttcaccataatttccagtgatcctgatggccattgaaacgttctccatgctcacatctgctatgtacacattcttcacgtagcctccacgccctggggctgtcttgattctgatcccgtgcaaggagttgacgatgcggaggccctctgcccgaacttctgattattgtcctaccttgtactattcttctactttccaaaggcaatcccttgcac

SEQ ID NO: 59672 - DNA, 245 bp, Setaria italica
  misc_feature (26)..(26): n is a, c, g, or t
  Peptide Sequence Number=SeqID_125646
atccccgcggcggcgcgagagcggcncgaactcctccgccgaggggttcagcttcgagagcaggtcctccagcttcctcatgtcactctcgtactccctcacctcctccttcccggcctccccgtcgccacggcaaccatctccgctccgccgagccgggccgaatcgaggccgatcgccgccgctggccggaagaattcgcgaggaagccgaatcgagaatcttccttattattattggaacag

SEQ ID NO: 59673 - DNA, 183 bp, Setaria italica
  Peptide Sequence Number=SeqID_125647
cgccgcctcagccgcggccgcctccctctccgccgccggcacggcgtccgcgccgcggatcgggccctccgccgccacggcaaccatctccgctccgccgagccgggccgaatcgaggccgatcgccgccgctggccggaagaattcgcgaggaagccgaatcgagaatcttccttattatta

SEQ ID NO: 59674 - DNA, 246 bp, Setaria italica
  Peptide Sequence Number=SeqID_125648
caagagcgttcttcccaagattccgctctaacctctcggattattcgtgtaacatctctgctggcggattcgtgcgcagaagaaagagttggagaggggagggcaggccgggatggaggaggggggaggcgcggcggcggaggaggccagggccgtggaggagttccggcaggcgttggccgcgcgcgatctgctgccgcccaagtttgatgacgaatacactatgaggagatttctaaaggcaag

SEQ ID NO: 59675 - DNA, 439 bp, Setaria italica
  Peptide Sequence Number=SeqID_125649
taaaaattgttctaattaattctaaattgtttattcctagtattttcctaaattttctaattcgtctatgacattaccatactgtgccatgtcatacaaaagaaagctggtatatggaatacccaacactaccagaaaaatgaaagtaatgaacaataaagaaaaaatgcataacctaagaaaattaggtacctgaataaatgtgtggttcctgcagtcatcaacctcaaggatggatgccatgttgccacaccggtaacagtaattaggtgcactgaatatggtcaccaccttttgttcatgtgcccagttataaccctccataaccaactgatgagcccgggcaacaagtttaagattgttggtgtgattaaactgttccgatatgtcctggaaaatggaagccatccaattgagagaactgataacagggtctacc

SEQ ID NO: 59676 - DNA, 262 bp, Setaria italica
  Peptide Sequence Number=SeqID_125650
tggcctaaagctgagcacacataccaatgctgtcaatggaaaatagtcaaaaagatcagtgaagatcttccagacatttgcactgccatatctatcaaaaataggacaacagggtcaaacaaaaagaatcaaactagtgaagaacaacaaatggaagaaccgagttaatgaactttcaagtttatccagattgcaaatagccaataataattccatctaggctacagcatgatatattagagtaccgcaatggtaactggag

SEQ ID NO: 59677 - DNA, 201 bp, Setaria italica
  Peptide Sequence Number=SeqID_125651
ttatcttgggctatccggctatgggcagcaatgctggtggtgccaacggcgccttccaccagcagttctgtcattctatggttaacgtgctgaagttccgtggcttccctactctgccactatcgaggacatcaaattcttcctggagaacgagctgacagaggagactacggttcgatcgatgggaagactatcagtaaa

SEQ ID NO: 59678 - DNA, 464 bp, Setaria italica
  Peptide Sequence Number=SeqID_125652
ggcctggggagcacgtgaccatcctcacctactcacgtatgagataccacgtgatgcaggccgcaaagacactagtgaacaaagggtacgatccagaggtcattgacatcaggtcgctgaagccgtttgatctgcacacgattggcaactccatcaagaaaacccaccgtgtgctgatagtggaggagttcatgcgcacgggagggattggcgccagcctgagatcagccatcattgacaacttctgggactaccttgatgcccccatcatgtgcttgtcatcacaggatgtgccgacgccatatgcttcaaccctggaggatgcgaccgtcgtgcagcctgcccagatcgtggccgcggttgagcaaatctgccaataggaagatgacgactgtgttggaaaatcatcgggttattatatcgttgctgccataaaagttttctgtttttgccttgtagctagg

SEQ ID NO: 59679 - DNA, 235 bp, Setaria italica
  Peptide Sequence Number=SeqID_125653
cagaaatcaaacacaaactgattatgttgactttttcttatgtttagccatgagttgctgatgtttgaggcccttcgtgaagccttgatagaagagatgaatttggatccaacagtgtgtgtcatgggtgaagatgttggtcactatggaggttcatataaggtgaccaagggcttggctgagatgtttggagatcttcgggttcttgatacacccattgctgctccaactccca

SEQ ID NO: 59680 - DNA, 206 bp, Setaria italica
  Peptide Sequence Number=SeqID_125654
ccaatgttaggtttgagaacaaggaccagcacagggcattgaattttgcaaaatatgcaccactgggaaatagaacatatgtaaacaccgtgttctatttgttttgctatgtagcgacacttgattgtggcgtagacatatgttctatttgttttgctatgtagcgacacttgattgtggcgtagacatatgcaccactgggaaat

SEQ ID NO: 59681 - DNA, 435 bp, Setaria italica
  Peptide Sequence Number=SeqID_125655
aaagaaataagtttaagaaaggaacccttaacgtaagaaagaaccttagaataagaagaagaatgaatttggatccaacagtgtgtgtcatgggtgaagatgttggtcactatggaggttcatataaggtgaccaagggcttggctgagatgtttggagatcttcgggttcttgatacacctattgctgagaactctttcactggcatggggagttggagcagcaatgaaagggctcaggccagttgttgaaggcatgaacatgggtttccttctccttgcctacaatcagatctcgaacaactgtggaatgcttcactacacttcaggtggtcagttcaagatcccggttgtgatccgaggccctggtggtgttggtcgtcagctcggtgctgagcacgtcacagcgtcttgagtcatacttccagtcaattcc

SEQ ID NO: 59682 - DNA, 178 bp, Setaria italica
  Peptide Sequence Number=SeqID_125656
gccagtacgagtccgagaagggctccgcgacggcgaggacgccggaggccgacgcggcggagctcggtctccatctccgccgcctgcgggtgcaggccgagcagtggcggaaggccgcggagacggccatggcgctgctgacggtgggcaagggcgggaacggcaaggtcgtggagcg

SEQ ID NO: 59683 - DNA, 253 bp, Setaria italica
  misc_feature (31)..(31): n is a, c, g, or t
  Peptide Sequence Number=SeqID_125657
cagctacagcagataatttctaccactttcntaactattgagtgacttgaggatcttacaatccagcaactagctacttaaaacaaattgagaatcttctttaaggaccttgcactctactaactcctggtgtagcatttgggcctctttaactcgacctgatttggcaactcttgtcactatagataagtaaaatgctttcctgatatagtgacatacaacacacttctgaatgccatctctaaaaggggga

SEQ ID NO: 59684 - DNA, 375 bp, Setaria italica
  Peptide Sequence Number=SeqID_125658
taattagctccaatggctagcactagtgcgaatctggtatagattggtatgcactgggctaatgtattcatatacaaagttccgctcacacatttggtttagttctaaaccacggcaacgtattttcaattgttaatgactgcttaattctgcatgctctgattatgcatctctgctgatgtgttgtggggaatatgggtaacacgtaacaacttggtgtttcgtgaaaaatgctggcagtggcaggacatgaaactggtgttaaggaggatctggaggtgtttcatgacatggaaactgatgtgcaaagaaagtttcggagagggtttcgaccaaagtggtgtaactacctggaggaggtgattgactcttcct

SEQ ID NO: 59685 - DNA, 303 bp, Setaria italica
  Peptide Sequence Number=SeqID_125659
gtgctccagccaccagtagtttttcctgctcttagtgcttatcccgcctgtgcttggtgaccagctgaatctcttggcgcatccttcacggttgaatcgtctctttgcggctctgattggtatgcaaggtgtcttctccaaagtcttgtatatggttcaccactcgatttgttatcagtaccagaagctttatactagaaatacatgcttctctcaaactattggccagccagtaaaagaaataaacgcctacaatttacatggatgctcatatgcgtgtcttttgtcagcaagacaagacaa

SEQ ID NO: 59686 - DNA, 224 bp, Setaria italica
  Peptide Sequence Number=SeqID_125660
agagctggatcaaggtcctcctttctatttgttgctgcaataaccaccacccgttttgattcaatcatctgttttggcttaccggatcagcaaactcgtatggaaatagctgcccagtatgccaagcacttaagaaatctgaattggttcaattttcgtggccactgaagggatgtcaggaagagatatcagggatgcttgccagcaagctgaaagcactgggc

SEQ ID NO: 59687 - DNA, 172 bp, Setaria italica
  misc_feature (17)..(17): n is a, c, g, or t
  Peptide Sequence Number=SeqID_125661
gagcagatccgcctgcnggaaagctctggctgatgatttggatatcagccgctcttctggaaccactgcactcgctgcattagtatttgggaggcaactgttggttgcaaatgctggagactcccgagacatctccatggctatgcctttccggcataggactgctcggcag

SEQ ID NO: 59688 - DNA, 155 bp, Setaria italica
  Peptide Sequence Number=SeqID_125662
cagctccttggcctcaccagctgctcctgctgctgcgcgcccagctccgacacgaagcagacgacaataacggtcagcttgtcatggaggcgaagcggctagagacagctgaacaatctgaccgttattgtcgtctgcttcgtgtcggagctggg

SEQ ID NO: 59689 - DNA, 282 bp, Setaria italica
  misc_feature (6)..(6): n is a, c, g, or t
  Peptide Sequence Number=SeqID_125663
agcaanctttttaaggccttctgtataatccaacagatccctgcactaacactctaacagtaccctactcgctctgctatgtacactcacatttagagtgttagtgctaggccttctgtataatccaacagatccctgcactaacactctaacagtaccctactcgctctgctatgtacactcacatttagaatgatgcatatgtctggttctagtttgcttgccctcactgtctattttgacagagaagtaaagggctccactcgctcaccaaccatgatt

SEQ ID NO: 59690 - DNA, 396 bp, Setaria italica
  Peptide Sequence Number=SeqID_125664
caaaacatttttatttgttttgtttcaaaatgtcacgtttttaatgactggaggtagttgtatcaattaagaaagcataccacattctcatagcttccctcaaaatggaacagcactacacccattcccctccttttattaacttcagccacacaagaacatatggtaattccacaggctgttaaagccgatgtaacttctgccatcatcccttttcggtcaacacaggctatgcaaagccattggatagagctgccttctgtattatgccaaccagaaattttaccagatttccagtgatccaaaccaaggaaaaaacgtaccttagacaaggtaggaaattagaccaaagggaacgaacaaattaaaattaacaaacttaagaaaagtaactaa

SEQ ID NO: 59691 - DNA, 176 bp, Setaria italica
  Peptide Sequence Number=SeqID_125665
cttcagccacacaagaacatatggtaattccacaggctgttaaagccgatgtaacttctgccatcatccctgtgaatgtcaccaaattaatccacgagattttacaaacattaccaatcaaagatcaataagaatatagcaaacatgaggaatgatttgtagctgctactagcttt

SEQ ID NO: 59692 - DNA, 421 bp, Setaria italica
  Peptide Sequence Number=SeqID_125666
ggttcatataacatttcattttcaaaggaaggtatcctctcagcgattgatgatggcaagtctgagggaggatcatctggacgacattgggtcctagatccaatcgatggtactaaaggtttcttaaggggtgaccaatatgcaattgcactggccctgcttgatgaaggtaaaattgttttgggtgtattggcttgtccaaatcttcctttgtcatcaataagcaaccccaatggtagctcttcgggcaatcaagttggtgcccttttttctgctacaattggttgtggagctaggacaccaagtttctctgcaatagagctagtcaaatcatgcatggagtgtgcactttcataggattcgaagaatgaggcattgactggattgtcaatagagcaaacaccaatcttttgtggcggag

SEQ ID NO: 59693 - DNA, 347 bp, Setaria italica
  Peptide Sequence Number=SeqID_125667
tttagttactaaattaagtagtctaaactacctaattcttttgttggtcggtagtaacctattctagagactctacttcagctccacaaccaattgtagcagaaaaaagggcaccaacttgattgcccgaagagctaccattggggttgcttattgatgacaaaggaagatttggacaagccaatacacccaaaacaattttaccttcatcaagcagggccagtgcaattgcatattggtcaccccttaagaaacctttagtaccatcgattggatctaggacccaatgtcgtccagatgatcctccctcagacttgccatcatcaatcgctgagaggataccttcc

SEQ ID NO: 59694 - DNA, 231 bp, Setaria italica
  Peptide Sequence Number=SeqID_125668
cttccctcttgtagcagttatagtgatcaacaaaaaatgctagttgcaatactgtttcatattcatactgccatacatgcgcccagccttttgttgatcactataactgctacaagagggaagcagcctggttcttctccttaatagcatcttggacggccttcaggagtgatggcatcaactgcttgtttgttgcgatgatgcctgtgtcaagatcaagaaatctccctt

SEQ ID NO: 59695 - DNA, 197 bp, Setaria italica
  Peptide Sequence Number=SeqID_125669
taaatgttgagcataacagtctgcagcattcaacaaagaaaataaataacacatgagaaggagtgcagtgcttacatgctcctcagcataggtatatctgacttgaaggtttccagactctgaaagggtccagacctttacagtcctatccagggagcaagataataacttgtcttcccaacatagaacagatgtta

SEQ ID NO: 59696 - DNA, 419 bp, Setaria italica
  misc_feature (400)..(400): n is a, c, g, or t
  Peptide Sequence Number=SeqID_125670
tccacaattccttactaaaataccaaaacaccccatccatgtctgtaggttcaaaccatacaactaggattggatttattgcgccaaattaaatatccccagtcttctgtagaacagaaccctaagctatctcacttatttcctagaactaaaaatcccaaagcttttaggtgagtcggtattaccaggcttactagcagtaccagcaccatctgtctttctcatatcagatgaggcaggttttggagtactactaaagattccaaaactcttgcttgtttgattaggatcgctgcttaaaccaccaccacctgcaggttgccttttggttgttgttagttacgaatagacaaaaatagaacctactacctagtacgtttacttaggaatacctataganaatacaacttagttagaaa

SEQ ID NO: 59697 - DNA, 211 bp, Setaria italica
  Peptide Sequence Number=SeqID_125671
ttcgtccggcagctcaaggagctcgtcagggcagcctgactctagctcgtatgtgcaaaaatagtttgcatcctctgttgcacggagtacggttacctgaatgtatgctgtgtaattcgcttcttatgtttccttttcctgctttgcgctttctattgataaacttgtgtcactatcgtactgtcttcctcagtaaccttaaaaaaaaaaa

SEQ ID NO: 59698 - DNA, 470 bp, Setaria italica
  Peptide Sequence Number=SeqID_125672
cttgctttccatgtccactccaagcaccgccgcttcagcatccgttggtccaccttgaccgtgaagtaagtatgcgagcagcatcatcgcttgcaggccgacgacaggttggcatacgaggaggttcctgaaggattggcgatacacgcctctttggcctgggaagagattagtgcgtgggttgttgacctcaattccttgaaacttgtaatcttgtactgctgactccaaacaccactggtagtagccggcctgatccacagggagcgacttgccaggtccacgcatttgagatggccatcaaggaaagcaatgtcacgataaaggcgggcatcactcttgagcttggcggttcttctcagttcatcaggcagtgagacatacccaagcacgggatggtttcgctttgcgacttagaacgtagacaagacttacgtagttaccaagaccgaaagacaacaatacaacaa

SEQ ID NO: 59699 - DNA, 406 bp, Setaria italica
  Peptide Sequence Number=SeqID_125673
gtttctttcagatatgtgggttttgtgcagtttctgatgtgcaggtcatgcatggtggtgcgaatctttcctcctctcttcttgcaacacaactagctttcttgacaccgaattgaatacatgtggttctagaccaacagcatttaacaaagtttagacacccattttttctccagagtctaagcttatcttactgggcaacaaaaggtctcccttacatccatcattgttactactagatgagtccaaatagttatgggggcagagaacaacacttgctcatgatgacccatccttataggaactaagtaccaagaagaccaattagacaatactaccaatacttactaagacgtaactaagtaatttactaacttaattactaattagtaattagtacttacta

SEQ ID NO: 59700 - DNA, 402 bp, Setaria italica
  misc_feature (38)..(38): n is a, c, g, or t
  Peptide Sequence Number=SeqID_125674
gctttccatgtccactccaagcaccgccgcttcagcanccgtttggtccaccttgaccgtgaagtaaagtatgcgagcagcatcatcgtcttgcaggccgacgacaggttggcatacgaggaggttcctgaaggattggcgatacacgcctctttggcctgggaagagattagtgcgtgggttgttgacctcaatttccttgaaacttgtaatcttgtactgctgactccaaacaccactggtagtagccggcctgatccacagggagcgacttgccaggtccacgcatttgagatggccatcaaggaaagcaatgtcacgtattaaaggtcgggtctattctacttcttttgttagttcttttggtttcggtttttctttttctttctttagtttttcttt

SEQ ID NO: 59701 - DNA, 197 bp, Setaria italica
  Peptide Sequence Number=SeqID_125675
gcgtggcacttggattccatctccttcttgatcttctcgatcaggtcgaagccgcgcagcgtccggctcgcctccgcgtacttctcgctcttcttcggctcgtcgatcaggacggacgcgtcgacgccctgcgccggcgagcaagcgcgaatcagcatgcatggatggcattgcaagatgatcaagaacagatggaa

SEQ ID NO: 59702 - DNA, 408 bp, Setaria italica
  Peptide Sequence Number=SeqID_125676
gctgccgcatgaacttcacctcctgggtgatgagatatttcgatctctataatagggggccagtatagaagtgatgcaatgacccaccagtgggaagataacctgggcgcaaatgctcatgttcattaagaaataacccagatttcatctgggccttcaattcactcagtttgtcttgtaccacatcaatgggaaagttcaacgagaaattaaataatccatcaggcttctgaggaacaaaagcagtctgtggaggtataattgttatgccgccaggaaacctcaagatctcaaaagaagaagaattcccaaacagagatggtgtcaaatggagtatagactgatgtataaccaaggacaccaaagatgaccgcagtatgcttaacttgagactagtgcgactgagtc

SEQ ID NO: 59703 - DNA, 287 bp, Setaria italica
  Peptide Sequence Number=SeqID_125677
ttgggttcttaaaacttaggttctttgtaaggtctattctaagtcttcctagccagcatcacgtttacatcacatcatgtaaaatctggctgagacatgctctcagttcagtaaggagaaaaacaaaaggtgcttccttttgcgaaccaacgtccaaaatataataaaaaagaaaataaaaagaaaaggacagatccagtgaggactcgattgaccaggcacggggaattgcaaacctacataacttagtaacttgctacggcggtacggccaacccctactcacct

SEQ ID NO: 59704 - DNA, 460 bp, Setaria italica
  Peptide Sequence Number=SeqID_125678
gggcggcgaggaaccgcggaggcgtttcttggtcgggggcaggaggatttgggaggaagacggaagggagggaagacggaagggaggaaggaggaggagaacgacgacagcgtctcgtcctcaatcagatcaagcatggcgtcaaggcccttgtccttcagcccggccttaaccgcacgcaggatatgctccggcggcgacccgaagtagtcgatgtaggccatgaggtccgccaccgagagcgttgcgatggccgcggcagccgtctcatcgcatgcggcgagaagggccggggagatctcgccgacgaggtggccgtcctcagtgaccacggcgaccgcggtctccgtggcgacggcgtggcggatgaggggcgcggcggacagggccgactcgccggggcgcaccgagacggaagtccgggtggcgcacgaggcccgagggaggacacggagcgcgc

SEQ ID NO: 59705 - DNA, 257 bp, Setaria italica
  Peptide Sequence Number=SeqID_125679
tgcagctgctcccggaacaccctcagcacgtccgcgaacgtgactatcccggcaaggcggcagtcgtcctcctcctcgagcacccacacgtagctcacccggtgggctagcgcctgcaccatgacggccaccagcgagctcgcggggctgcacaccacagcctcctcgtcctccgatgaggagaccggccggccgctgctgaaggcgacccgtacttacaagggaagactaacgggacgaccggtacggaccgaaga

SEQ ID NO: 59706 - DNA, 229 bp, Setaria italica
  Peptide Sequence Number=SeqID_125680
cctaagctactatcaggcccattgtcaccgcaattataattccagaagctgtttgaagcagcgtattgccattgcaagggcaattatcaagaatcctgctatacttttgcttgacgaagccacgagtgcacttgattcagaatcagagaagttggtgcagcatgcgcttgatcaagcatctatgggacggacaactctggtagtagctcataagctttcaaccgtgaag

SEQ ID NO: 59707 - DNA, 348 bp, Setaria italica
  Peptide Sequence Number=SeqID_125681
ctgttttatgccctcttgactcttgcaacgccttgatgtggcagatttggagggatgatgagatcagtcaaattgtgcaatattgactgtttcactgcagcttctgggagctgaaagtaagggaaggttagtacctggtagtcatctgtatgtattacattttgtatacttttattcacttggtgtctttagcgtgactggaaaaggcatattggtttgaatgagggtttgtattctttttttgttttccctgaattgtttcttgaaaggtttttggaagccattcacttcctaactgatggtgaaaaagttcgaagtaaaagccctaaggtcctattggggggtctt

SEQ ID NO: 59708 - DNA, 483 bp, Setaria italica
  Peptide Sequence Number=SeqID_125682
atttagcatcccgttatctcatttgcgagcagttgtactacatagccaatatcattctggtttaagagtgatgtatcctgtgaaacatacatactggtttgacatatataaggtcattactttacttttaagtccttctaattttgattatatacctgatctaatcactactaatttatttacagaacattgacaaaattcctctggtcaaatgtcccgtcttagtaatccatggtacagctgatgaggttgttgactgttctcatgggaggacactgtgggagctatctaaagtgaagtatgagcctctgtgggtcaaagggggaaaccattgtaatttggagctatatccagaatacattaaacacctgaaaaagtttgtcacagcgatagagaaatcaccaccagtgaaagatgaatctctggagagttcaggtccctcagatcctagtgaaacaggatccgaaggcacggagagctcaa

SEQ ID NO: 59709 - DNA, 493 bp, Setaria italica
  Peptide Sequence Number=SeqID_125683
aaccttatgcgaagatgaatgagaacctgcccgtcttacccccaacatacaagcgacctgcacgctgctgcagctctcggcggtgggcgtggtgtacctgcagccgaccaacgaggtcctggagggcctcttctcggacgccaagcagggccagtacgcgccgcggaacgtggtgccgcggctcgtctcccgcacggcggccgtcgcggtggccaccaccgtcgccgccatggttcccttcttcggggacatgaactcgctcatcggggccttcgggttcctgccgctcgacttcgccgtgccggcggtgttctacaacgtcacgttcaagccgtccaagaggggactcgtgttctggctcaacacggtcatcgccgtcgtgttctcggcgctcgccgtgatcgcgtccgtcgcggcggtgcggcagatcgcgctggacgccaagacttacaagctcttcgctaacgtgtgaggagcgccgatcaacgcagaa

SEQ ID NO: 59710 - DNA, 350 bp, Setaria italica
  Peptide Sequence Number=SeqID_125684
cgtgctgccaggaaggaaacgccaattggaacacccatcacactgtgtcatcatggaaccaccacctggtctccttcggtgacctcccgttgcggcagttcctgacatagcgatcattatcggctgggcgttgctgcaatcagtatgtgtattagtcagataacaaggtcaactaattcaagaagaatatgtagaaaaaacatgtaacctttgccggtgagcttgacaacatagacaagatgctgatacagacagaactgaccgtcatcgctggggaccatgagtcatacaatatatctggagacaagtgaaggaacagtaagccgataattcatctggaattgtaacac

SEQ ID NO: 59711 - DNA, 116 bp, Setaria italica
  misc_feature (2)..(2): n is a, c, g, or t
  Peptide Sequence Number=SeqID_125685
anacatagacaagatgctgatacagacagaactgaccgtcatcgctggggaccatgagtcatacaatatatcggcttactgttccttcacttgtctccagatatattgtatgacta

SEQ ID NO: 59712 - DNA, 224 bp, Setaria italica
  Peptide Sequence Number=SeqID_125686
tttcaactcccgccgaatgcataggtattcaccaaggagagccataattgccaaaccagcgatattgacaacccaccatgtaactgaagcctgcgacggcggcgaggaggaacgaggcgatggcgcaccacccggtcggggtgcgcggagtgagggtggcgaagtcgaagaagtagaggagggtgagccgcgggacgcgggtgccgacgaggagcgacatggag

SEQ ID NO: 59713 - DNA, 368 bp, Setaria italica
  Peptide Sequence Number=SeqID_125687
ttcttaaaatttctttcctttaggtaacttggtactaattgatgaactggaagattttgccgacaccacgcctctcacccagcatcagtggcttgtcagcgttctctttggcctccttgggatgcccattgctgctgccatcaaactgattcccatagaaccgcgtgaagaagcgtaataatacaggttcaccatttcccaaatatggttagatgatccgcactcccagtgatatattcttcctggagctgatgcatgagaatagaagcactgacccaaggttgacagcaaaattgcaaaagaaacatttggattggggtgcaaacagataactgtgttcccttggtttttctccaccaggatgagga

SEQ ID NO: 59714 - DNA, 303 bp, Setaria italica
  Peptide Sequence Number=SeqID_125688
caaagggcgccaagggtgtccatgatcatgttgacccaaagaagctgaacagctgtcagtggtgcatttcctgtaaagcaagctgaggagaagttaaccaatagtgccacaacattgacggtcagttgaaactgcacaaacttttgaatattgatgtaaacagagcgtccccacttggcaacagttacgattgtagagaagttgtcatccagaattataacatcagcactctcttttgcaacctgaaaaggcttatattaggtccacctggatgaaacggataagaccagcaggatattatat

SEQ ID NO: 59715 - DNA, 240 bp, Setaria italica
  misc_feature (60)..(60): n is a, c, g, or t
  Peptide Sequence Number=SeqID_125689
cctagatgataaaagacttgcaagtcaaagataaacattagataaatggtaaacctgaanctttggaatcaactcaaggagtctttaggatttttctctctgaactcagcaccttcaatggcaagaccatcctcagtaagtataccgcattcacgagcaattgcatgagaatagaagcactgacccaaggttgacagcaaattgcaaagaaacatttggattgggaacacagtatctgtt

SEQ ID NO: 59716 - DNA, 251 bp, Setaria italica
  Peptide Sequence Number=SeqID_125690
atgatatttattgttgtgttactgttcaagtagcgcaaaacacattatgtttgatttggatggcaggtgccacaacattttttgaccaaacccatactgtggagaaagacgcagtctgtgttgctcggttgcggaaatgtggagtcatctttatcggcaaagcaaacatgcatgagctaggtcttggggtaactggaaacaatccaaattatggaactagtctaagaaatccacattcggttgatagatat

SEQ ID NO: 59717 - DNA, 238 bp, Setaria italica
  Peptide Sequence Number=SeqID_125691
aacttaattggtttgccagcgctaactgtgcctgtaagtatcatccaactatccatgtaccatgagtgagtacatattgcgtcttcttgttacctgttgtggtctatactggaggctgatcataattaccactcggcatatataatgaactcttctggactattgagctgcctagcatagttggatataccattggcattgtttctgatagacaagttgagaacttgtgtaaagaaaa

SEQ ID NO: 59718 - DNA, 384 bp, Setaria italica
  Peptide Sequence Number=SeqID_125692
aagaatagggggtacttacgtcgccattaaggatgacattgactgtttcccgtatccaacaaagggtgccacaacattttttgaccaaacccatactgtggagaaagacgcagtctgtgttgctcggttgcggaaatgtggagtcatctttatcggcaaaagcaaacatgcatgagctaggtcttggggtaactggaaacaatccaaattatgggtatgatcaatagttggacagctgctcattatgttaaagtgtctacagcttatgtggttgtttttctatttgaagccaaatgctatatggctgttttgtcaagtcacacatggatacaacaatgttcttccttgttctaggcattcagagcacaagagaaatgtcagata

SEQ ID NO: 59719 - DNA, 343 bp, Setaria italica
  Peptide Sequence Number=SeqID_125693
atagtagtataggtcaggaacagatgatttgcagtttagactcaattgcaaatcatctgttcctgacctatactactatacattgaggatggggggctcctgacacttgtgttttgttgtaacttcttgtttcggtctcctatattgtgctaagtgtgcacttaatgtaccttttcatgggggcgtatataggaggaggataatgcactatcacatggaagctttcaagaaggttgatgtcattgcaactcctacaactggcattactgcaccaaaaaataccaccaagtgctctgaagtcaggagagtctgattatgttgtgtcagcttacctgatgcgatt

SEQ ID NO: 59720 - DNA, 343 bp, Setaria italica
  Peptide Sequence Number=SeqID_125694
attctgggactgttgcagttgcttctcctcttgcatcatcagtagaggatgttatgctagtgtatctgcaatagcaggatcaagacccatggataagcttacacttagaccatcaccactgtgtgtcccaaatttgctttctcctgacaacagcaatatcatgggatcagttaaaataggaaaatatacagagtggtttcatgatgtttctgatcgtgagatatcgagtacatgtgaggatgcactcaaccttctttgtagcacttttggatgtcaagtaagcccatttgtatctcaacaacttagatgataacaatgcactatttagcatttctactccccg

SEQ ID NO: 59721 - DNA, 442 bp, Setaria italica
  Peptide Sequence Number=SeqID_125695
tgagggaataaattaggttgaataatgccgtctaacaccttgaagagctaggcggccgattgaccccacctatacggctccccgcttcagttcatttcaaggccgaagtagcagttccaagcaaatccactccaagtcggagacgggccctagggcatcatttacaaggtgtactgaaagtcaaccacgtggggctgccatttgctgcttcttgatccggtccccagccttaaccatgctgatatcgtgaggggttataaatatccactgagaaccctgtgcaatagcaaaaatctactagggtgtctaagcttattttgcggctcaccgcatccatgaatacatcaaaactcatccatggccctaaaaaggtgattctgtcatttccatgaagagctaaggtgaagcaaaagcgttgaaaaaagaatcgttctccacctag

SEQ ID NO: 59722 - DNA, 489 bp, Setaria italica
  Peptide Sequence Number=SeqID_125696
aatatgaattttttaagtatgactgtatacatatcatggtgttccacgtcatatcgtagagcacctcgacaacctcgtcaaagcggccgctctgaaccagaaggctgacggtgttccacgtgacgaggccgccgcccgacgcatcggcagcgctaaagagccgttgcgcgtcgtcaactaggccgagacaccgcaggagcgggtgccaccgcgaccgccgccgcactgcgaagtgcagtagaggagctgctcgccatggccgtcagcagctcgccgccgcaaacctgcctcgtggctaccagcaccaccatgcaaaggatggaccaggccacacatcgctctgctcggtgagctcctgcagttggtagtactccgggtcgatgtacccgacggtaccggcggtggcggagaaataggtgagccgccgtgccgccgctggcgagggagaggtcgaagtcggagaccttgactgtccaagttcaattagta

SEQ ID NO: 59723 - DNA, 257 bp, Setaria italica
  Peptide Sequence Number=SeqID_125697
gcacgccgcgggcgaccatgtcgtagagcacctcgacggcctcgtcaaagcggccgctctgaaccagaaggctgaccatggtgttccacgtgacgaggccgccgcccggcgcgtcggcggcgccgacggagccgaagagccgctgcgcgtcgtcgaccaggccgaggcgcgcgtacatggagagcagcgcgttgaacgcgaaccgttcgtcgccgtccaggaagccgttcttgagagcgaacgcgtgcgcctcgcgg

SEQ ID NO: 59724 - DNA, 383 bp, Setaria italica
  Peptide Sequence Number=SeqID_125698
aggtacaatgatgaacacatccagattagtatgccatataaaagagcaatggctagaacataacattgtagctgacttaataccaaccaaactaaacagaatgaaagtgacccttctgaatgaaacgaaatcattacataataccaatagtccaaaatctgatattttaacacaaaaacagtagttcacttaccgaatatgttgattcccagttgagcatagattggagagaagaatccatcaacaaaatgaatgaaccaccaggtgatgtagaatgtaattgcgatgggaaagagaattacacatccagtcatgaacttctttgaagcccaactgcggacaaccttatggaatgcctgcatttcaggggaaaacaaaggaga

SEQ ID NO: 59725 - DNA, 154 bp, Setaria italica
  Peptide Sequence Number=SeqID_125699
tgtctaggggtctaaattagggtagtactaaacttcttgtctaagtcttcctaatgacacttccatggacatggtttcagatagcgctgggaatgaattctaccagtgatttgtggtgagatgtgtctgcaatcaggaagcatcgaataccagt

SEQ ID NO: 59726 - DNA, 187 bp, Setaria italica
  Peptide Sequence Number=SeqID_125700
ataacagcaggggagtcagcaagccctggagcgcacaacagggagaccaactcagcaggctccaacgacaccgcaatggacatggtttcagatagtgcagcaaatgagtactactgagatgatggatgcaccagcagcactgtatcaggatctttaaattgtatcgttccatgcatcaagtgtcccc

SEQ ID NO: 59727 - DNA, 124 bp, Setaria italica
  Peptide Sequence Number=SeqID_125701
atgatcgatcataggaagaatgcatgcatgccagtttaattatctgctgatgatcgaattcatccatcagccagagcaaagaatgaacaccaaggatctggaaggattgggaaagggtgttcat

SEQ ID NO: 59728 - DNA, 492 bp, Setaria italica
  Peptide Sequence Number=SeqID_125702
taattaaggttaagaaatacaacaagacaaaagaaacaattagtacttagttaggaaattaaaaggaaaccctttagtgaacaggaatatagatactgatgttattgttgctgaagtccgtgagactagcagaaaacctgatgagatgtatgccatgctagaacggataagcccaaggacaaggaagctggaactgtttgcgagaatgcataatacacaagctggatggctatctctgggtaaccagttaaatggagtaaggcttgtggatgaagggttgagagcaaggtacaaggctgcttaccctgatgtggatgtccagccgccatcacctcccaggacaagcgtgccagccgatgttgagcaaagtagttcacagaaggctgcgccgccagatggtggtgagaggcctgcctgatgctagcaaccttacttccaagttgcctggctgtacttcgtatagttttatctctgttaccgttacattttgtt

SEQ ID NO: 59729 - DNA, 433 bp, Setaria italica
  Peptide Sequence Number=SeqID_125703
aagtccgtgagactagcagaaaacctgatgagatgtatgccatgctagaacggataagcccaaggacaaggaagctggaactgtttgcgagaatgcataatacacaagctgggtgcgctattcgctgcctctcttcttcagcaagtttttggttgcgagatgcttactgtttgcttcccgcacctttttcttttgcacagatggctatctctgggtaaccagttaaatggagtaaggcttgtggatgaagggttgagagcaaggtacaaggctgcttaccctgatgtggatgtccagccgccatcacctcccaggacaagcgtgccagccgatgttgagcaaagtagttcacagaaggctgcgccgccagatggtggtgagaggcctgcctgatgctagcaaccttacttccaagtgcctggctgtacttcgt

SEQ ID NO: 59730 - DNA, 376 bp, Setaria italica
  misc_feature (157)..(157): n is a, c, g, or t
  misc_feature (212)..(212): n is a, c, g, or t
  Peptide Sequence Number=SeqID_125704
tcttggttctacttggtagtttctacgtaagtaagtctactaagtaagtattgacctttcacaatgctttccgagaatttgggcaggtcagaaacctgcatttgaacttggatcgtcgtactggatttgtcaaggggtatgctttgattgaatatgngaactttgaagaagctcaggctgcaataaaagaactggatggaactgagctttangcccaaataataagtgttgattgggcatttagcagtggtcctgctaagcgcagaaacactcaaaagagaccaccaccaagatatcgttcaaggtcccccaggaggacacactgatctgtccccagcatgccatgaaattgctaggactaatggagtagtgcaag

SEQ ID NO: 59731 - DNA, 163 bp, Setaria italica
  Peptide Sequence Number=SeqID_125705
agtgaaagatgagccaaccttcagctataggtagattatgtagggagagagaggctttaccagtcgcacagaagagccaaccttcagctataggtagattatgtagggagagagaggctttaccactcgatactagaaattcattctgggaattaagttatgt

SEQ ID NO: 59732 - DNA, 242 bp, Setaria italica
  misc_feature (17)..(17): n is a, c, g, or t
  misc_feature (205)..(205): n is a, c, g, or t
  misc_feature (214)..(214): n is a, c, g, or t
  Peptide Sequence Number=SeqID_125706
tttttttttttttttgngaattgcaattaaacaaaaggaagcttggtagcaaaccgaactgtttaccatcaaatatcattcatatatatagatggcatttaccacagtaccattacatcaaatccatgccttacacaatatagaaagttcaaggcatactatatgataggccacagttagcaaaagaaatatgactgacaaaagngaccgttanaactatcaggtgtaacaaacatggccta

SEQ ID NO: 59733 - DNA, 224 bp, Setaria italica
  Peptide Sequence Number=SeqID_125707
tacctgattttgagtagaccttgatgaaatagtgagtcgtgaaagaaaaaaactgtctttaacaatactatttgaaagacgatcctcgttatccttcactctcctcaaaaagtattgcactactcccatgctagtcagtctagccggaaccgacgatgatattgttgatggggatgaagatgagcttgacgaagaagccgacgaagcccatgacgacgaacccg

SEQ ID NO: 59734 - DNA, 193 bp, Setaria italica
  misc_feature (17)..(17): n is a, c, g, or t
  misc_feature (30)..(30): n is a, c, g, or t
  Peptide Sequence Number=SeqID_125708
ctgcgcgctgcttggcntaaacattgcagnaccctggtaagcagacccataatccaaccgcctcagagctgtcgctgctctagctggatcattgaagacagctatggcattcttgtcattcagccagactaattcacagctgctcatccttactttgatcctctggttgacatggatccaaggctggttcgtt

SEQ ID NO: 59735 - DNA, 378 bp, Setaria italica
  Peptide Sequence Number=SeqID_125709
aaatatcatctcttatagtttaccagcttttagtatttgtttagtaattagtattgatacatttttaattttattacaaaaacagtagaataaccaatatggatctatgatatcacggcacatagaaggtagatcagttttactatttgtgtttgcgatttatattattggtcctcgtatcatgtgaatctcaaggcgtgactggtcccaactttggatttacaagtactcatagttactggtgtttattcaacgacacgccatatccaatatactgattcttctcttttttctgccatgcagttactgccctcaacacgctgtttaccagcatgtcttcaccgggacagctgcagggctggaaggcgagcggcggtg

SEQ ID NO: 59736 - DNA, 243 bp, Setaria italica
  Peptide Sequence Number=SeqID_125710
tgaaagaacaccaacagttattttctagttcaaaacaaccaataatatagttgctcttaaatggatcaaatccacatatcacggacaaattcttcatgttgcttcaaaatgaaacatctgcaggcttcagatcagggttctggatatggtgcccctgaggtggacatgactggccagtataccctcaaaagtgatgtctacagctttggagttgtcatgctggagctcttgacaggccgaaag

SEQ ID NO: 59737 - DNA, 183 bp, Setaria italica
  Peptide Sequence Number=SeqID_125711
aagccagatgagatccgctgggatgatatatctgatgaagctgtgactggaaaaatttaccgagctgattactttgacaagagtgggcggagtatccttgtcatgagacctggatgccaggtttgataatgctcctctcctgttttccacttatcgaatccgtacctgtagtttatatcatat

SEQ ID NO: 59738 - DNA, 365 bp, Setaria italica
  Peptide Sequence Number=SeqID_125712
aggaaagcgaggcaatcgcagagccgtcagaagacaatgctgctattgggaagccattggaggaagataaggcaaatgatgagccatcagacgacagtgtagctcttgggaagctacaggaggaaggggttgacagtgtcaaaccatcagaggaggacgtggctcctgagaaatcagctgctgacaagccatccgaagaagtggtcgacgagaagccgtcccacgacgatgctattgtcgagccgtcatctcaggacgacacggccactgagaagccatcagctacaactgaacaactgcaagaaaactagacaatagaagaacaagacaagttaagaccggttaacaagttaagttaagacaaa

SEQ ID NO: 59739 - DNA, 177 bp, Setaria italica
  Peptide Sequence Number=SeqID_125713
cctccaattgtttctcaagagaagcattgtcttctgatggctctgcatctgccttgtcttcctccgatgacttctcggaagccactggaggtgggagagacaagtgttgagccatcagaaaacaatgcttctcccgggaagccatcggaggaaaatgaggagagtgccaagccatcg

SEQ ID NO: 59740 - DNA, 326 bp, Setaria italica
  Peptide Sequence Number=SeqID_125714
tggttggcaaactaatgaagccctgaactccaccgacgatgaacaaggaaaaggaaatgtaatacactacctgctcgattatttgtggagttttctattattatcttttgatgacaatgttaatttattgctgattccagatgactgttggtaaactgatggaagcttatgaaacttgcattgctaaactgcggaagtctcaatctaaccgtcgtaaaatatccctaaagaaagttgaggaagcaaacttttcaaaagaggcacggaagctggtaccagaggacaaattgtgaagcaaattatctctttgaacagccttgacatgg

SEQ ID NO: 59741 - DNA, 287 bp, Setaria italica
  Peptide Sequence Number=SeqID_125715
tattgttaggacttcacagaggatcatgaagaatctgcgaggttgtttgctcatatggtaggagcacaggtgctttcacaatctgggacattgaactttgatctgaaggaagatctacccagtgaaaatggtggctggtgtagctgaagtggcaaaactgttgttttgtgcatgatttgcttcacattaataacatgaggcaggaaagtgacatgcctggaaaaaagctctcacccatccatggtggagccagaggatgaagaaacaaacaaacatctagaatagca

SEQ ID NO: 59742 - DNA, 392 bp, Setaria italica
  Peptide Sequence Number=SeqID_125716
ggtgctgagtaggtctcaatgcagcacgtgacaaatatcaagtcataattatccagctatcgcatttgctagcccttgtcagggtaaacaaatgtgataacacacttgacacttggctcgctgtgatagggaaaagcaacaaacaatcctagaaaacagacataccaggcttcaccggggtattctcaaatcccgagtatagtagaatttcctcttctgtacgttgtggaacatggttagcaaggtctgttccgggaaaacttggctttagactgagagttaaatcaaggaaacagtcatcaggttctgtgctgaaatcccacaggttcagttccaaccttggatgtgctttaggttcatttgcttttgtatgggaagcatcatgaacaggt

SEQ ID NO: 59743 - DNA, 397 bp, Setaria italica
  Peptide Sequence Number=SeqID_125717
tagaacctagaccggaataaggacgactaagacgaaatggtaggtaggttactaccaatcaggctcggctgtaaggacagcccgaatggggtaccagaaaagcctggcaatgaggcccggctgtcgaccatgtatgcctgttgccaggatggcatggctggaacatcaccaatgggacgatctgatggcaccagtggccaaaagccaggcttcaccggggtattctcaaatcccgagtatagtagaatttcctcttctgtacgttgtggaacatggttagcaaggtctgttccgggaaaacttggcttagactgagagttaaatcaaggaaacagtcatcaggttctgtgctgaaatcccacaggttcagttccaaccttggatgtgctttaggttc

SEQ ID NO: 59744 - DNA, 200 bp, Setaria italica
  Peptide Sequence Number=SeqID_125718
cggttgcatcagaagaaggaagttccactcgagggtatcgcagcatgaatgattaagcatcattatgtgcacaaccatcatgcttaatgcagctgcagcaagcttcagcggcacatcgtcatcattgatatttgttggctgagaccatcagcgagcgtagaccccgatcccagcccggacggaggatctccactgcccgc

SEQ ID NO: 59745 - DNA, 469 bp, Setaria italica
  misc_feature (443)..(443): n is a, c, g, or t
  Peptide Sequence Number=SeqID_125719
ggccggactgggaaaccacctttgcttgctagtgaactgtatgtaaggcttgaaaatggtgtggctaacctctgtggtataaaattccaagacaatgttccaagcaggaagttcaggttgggagtcatggaagctgatgataggatatcggaaacaatactggaaggaatatctgaaccttttaccataaagtcaggtcgcggtttctgtaagtttacgcaattccatcctaatactaaaatttagatgctcatgcatgtttctcttcatgtaaacatttctcatcctgtatgtattctcttaaacagacagatgagtctagcaaataattaaaaatgaagaattgaatgcaaagactatcttattatcatcctccactattacttttatttattttcttttgatgtgattattctacacagcacctgtgctttcaaaaaggntaggtaaataaatctagttactcaaa

SEQ ID NO: 59746 - DNA, 258 bp, Setaria italica
  Peptide Sequence Number=SeqID_125720
actgtatgtaaggcttgaaaatggtgtggctaacctctgtggtataaaattccaagacaatgttccaagcaggaagttcaggttgggagtcatggaagctgatgataggatatcggaaacaatactggaaggaatatctgaaccttttaccataaagtcaggtcgcggtttctcatataggaaggatcctcatccgtctctaagtgacccaatatataagctgcaacaaaattcaaggaaaatggcgacaggcacagg

SEQ ID NO: 59747 - DNA, 358 bp, Setaria italica
  Peptide Sequence Number=SeqID_125721
aaattaactttcaccttctgtcacctttagaagataatatgttttacatacttacaggtatgtactttgtaggtgtacagaaacttccttctagctaacgagtatcaatcgtcaaagttgtgtgaagctcgcttttctgagtgtgaagataagatggatcaccttcaagtcttgaaacttccttcgatggcaaaattcaatgcaggctttactcactgcaatcgaagttttgtaagggaatgcgttggacctgcaaaagaaagctatgaacgtagaatgtcaaagatgcttgtcaagtctcgtgctcttttcatcaaagagtacaataacaagcttttcaattggttggtgaccttct

SEQ ID NO: 59748 - DNA, 429 bp, Setaria italica
  Peptide Sequence Number=SeqID_125722
ggagacaacagtactgtcagtatgctccatgatggttcaaggaatcacttgcaagtcatagaaaaaagcagcatcaagtcctaactgctataaaacgcatgcaggcaacaacacaggagaaattgatgctgtatcaagagtcaagagcccaatgtataatgatggataaacataagcagtacaaggtggtaacagcacttccaatgaacaagaaggaaagacttgaataccacttgcactctgttatcaaaagggaatcaaaactaagttgcatgcagcttggatatggcagacctgtacacctccgggaaggcagaaagagagggtatccttgtacttgagtggaagaggcttctcgggagggtatgcaaaaagaacctgtggttccaaatttgatattgcatgaacttggtggtggctattgctaaa

SEQ ID NO: 59749 - DNA, 505 bp, Setaria italica
  Peptide Sequence Number=SeqID_125723
agcacgccaatttgatcccaaagaagatacagctgagtcaagaaaagaaaagagcatctggcattgaaagtgcttaaatatcacttgtttctgtgtcgctacttctgataaaatcaacaaaggaggcaaaactagcatgacttttgcttctatgcaaaccagacacagaaattatattgaaggcaaaggaaagaatgcaatttaataccttcataaacggcctatcgcggctcgggaaagaaccaataaagctctctcttaaaagtaaggaaaccttgtcattgttagactgcacattggtaattgtatgagatctcaaattcgagcacagtgtatcaaggtagtctctaagcactgccaaaaacctttggccgcttccacctgcatgcttaaaagattagatacatatacaaagaaaaaacaggtgagtagatacactttaaagctttcactgaatataaaacccctgaatgctttaccagccaaaaaatgtcagaaacttgca

SEQ ID NO: 59750 - DNA, 280 bp, Setaria italica
  Peptide Sequence Number=SeqID_125724
ctgcggtagttgtgggactgaagaagacttgatctgattcctgttggcatcaatgactacagcatttgctagcctgttgagcacatcagatgccttgttctgtacaccaactatgtagggaactggtgcgtccagaaaatccatcatgtcaatcggcaaaaccggtatgagcagactctgccactgatacgggcgtattaaaggtatgatggacaaaactgaagccgaataagacaattacccaaggttaagaaacaagaacaaataaacaaatactaga

SEQ ID NO: 59751 - DNA, 194 bp, Setaria italica
  Peptide Sequence Number=SeqID_125725
ttgagctcagcgcctaaaggcttggcaatatgaggcagactttcaagtctgtaacagacacttagtccttttgataaaaggagagaactaggtctgtatgtactgagaacaattgtgtgtccaacaaaaagcttcataaacggcctatcgcggctacgggaaaagaaccaataaagctctctacttaaaagtaa

SEQ ID NO: 59752 - DNA, 418 bp, Setaria italica
  Peptide Sequence Number=SeqID_125726
aacaaaagaaaaaaacgtaagaaaaataaacaaaccaaaagtacaatagaaatagaagactacaaaaaggacgttgccgcatagggatgtggagtacaagctcttaacatttgagactgcacggaccagctgcgatcactccacatcaaaacatttcttgcttttctgcaaagcagtcgcctggcaaaacatcttgcgccgataattacaggatgaagcgcgctacttgccgtagctctccctgtaatcacgacaatccgaggaagctgtccaccttggcattggttgctctcgacaaaaacttcatgcaaatcgggggcttcaccttggccagagccaggatagactgcggcagtgtccagatcccgtctccgcagatcagccccgacgcgaccgcggggccgaacgcgtccgcctt

SEQ ID NO: 59753 - DNA, 254 bp, Setaria italica
  Peptide Sequence Number=SeqID_125727
cggtgcccggacaccgtctcctgcgccgacgtgctggcactcatggccagggacgccgtgtggctggtgagcactcgccacactgttccaagcttacaatgcgtgtattcttctccaagtagaaattctcaacacaagttcgctgattctttcacgtaccacgcgcagagcaagggcccattctgggcggtgcccctcggccggcgcgacggcagggtgtccatctccaacgagaccgaccagcttccgcctcc

SEQ ID NO: 59754 - DNA, 434 bp, Setaria italica
  Peptide Sequence Number=SeqID_125728
ctcatttgtgaggacaaaatgttggacaggcaaaagaatggaacttacagctgttgtaaagttgttagctttccaatgctgggtgacaaggttcctgttaacccagatgaggacaaacttctgcagactcagaaacgagaaactaagcaaatagtcatgtagacaaagtatatggtattacaaacttaggatagttaaactagataagagtgaagcataagaatattccatccaaatgaaaaacattccttctttatgaacagttgggaacttgggatcaattacttcacccatagttagctaatagaataagaaaattccttatattcgaaaaccatattgtgaatttggttaaaccttagctgccttggtcagtaatggaattcaaacttcaatataaacttactatttttagttaacttttagtttgttcc

SEQ ID NO: 59755 - DNA, 150 bp, Setaria italica
  Peptide Sequence Number=SeqID_125729
cctatcccctgtgtgccttgcctatctcctgttgcgtgtctcagttgaagatttatgaaagagcttgggatactcccacttaaatgattttggcttagatccataatttcgagtttaggaaggcggccaagagtgtccggtatcgagcca

SEQ ID NO: 59756 - DNA, 270 bp, Setaria italica
  Peptide Sequence Number=SeqID_125730
aaggtctagagttttcaagcttgataggtttccaaactcctgaggaatcactccagttatgctgttgccatgcaatatcagctcttgtaaagttgttatctttgcaatgctgggtgacagggttcctgttaacccagatgaggacaaacttctgcagacttagaaatgagaaactaagcaaatagtcatgtagacaaagtacatggtattacaaatttagaatagtgaaaccagataagagtgaagcaataaaaactattctatccaaat

SEQ ID NO: 59757 - DNA, 158 bp, Setaria italica
  Peptide Sequence Number=SeqID_125731
ccgtttaagagatataaaactgaatgaaccagcattagattggtctacaagaaagggtaaactaagagcctctctgttggtgtcgtacagaaccctatcaaccttagtatgtttttattggacagcgatgcttattaattcaacttctctgaggaaag

SEQ ID NO: 59758 - DNA, 211 bp, Setaria italica
  Peptide Sequence Number=SeqID_125732
taggaaaactttgaagcagtggtaggagattttggcctagcgaagatgatggatgatcttgggattgcagtgctcgtgaaggtactccaaaccacgtgcagcaccaagagctatttgcattcttgtagaccaatctaatgctggttcattcagttttatatctcttaaacgggaagcaacactcagattctccatgaaagggtaaactaag

SEQ ID NO: 59759 - DNA, 385 bp, Setaria italica
  Peptide Sequence Number=SeqID_125733
caatacttacagaacacttaagtatgaccaacaagaaaatacaaacaattaagaactggactgagtgcaggatgcatacacacttttggtgaagtacagagatgaaccatttgccaaaatgtgtattcaatatccatttgttgccacttgacgatgcggcggaggtaggggccgaagagcggcggggcggagcgggcggcccccgccccttggacgcggtcgtcggcagcatcttcgccgcctccttggctactcgtcctcttcctcctactcagctctgctctcgggatctgctgcctcttctgctccggttgattgctggagctccggcgcctggtccgatctggtgacggtggctgcctcacagccacggcgggtacgcgag

SEQ ID NO: 59760 - DNA, 215 bp, Setaria italica
  Peptide Sequence Number=SeqID_125734
ccttaaccaaagtacaaagcttaagaaagtaatcttgtcggattgaaccctattagtatcataagtggagacaggatgatgacaagaccaatcgggtacaggaagaatgttgttctgtccagaaatggaagaacatcatatccatataggatgacaaatgcaggaaagaacgagttacagtgaacatcaaatgcatagagccactccacacgttg

SEQ ID NO: 59761 - DNA, 194 bp, Setaria italica
  misc_feature (23)..(23): n is a, c, g, or t
  Peptide Sequence Number=SeqID_125735
gccaccacaaagagtagattcgntaaaagagctggaaagaagccatgcgcgaccaatagaggtgacagaaaatattgaagcacatataggatgacaaatgcaggaaagaacgagttacagtgaacatcaaatgcatagagcctgacaaaaaaaaaaattgtgtgcactattaatgttattgaccgccaccttaa

SEQ ID NO: 59762 - DNA, 247 bp, Setaria italica
  misc_feature (8)..(8): n is a, c, g, or t
  Peptide Sequence Number=SeqID_125736
aagacaanagggacgatggagttcattgacagcatggcaaatgacatgagcaacagctgaggattgtggacctaatacagcgactacatctttagccagaagctgcaatgctggacaagaaaaaaaatttgttaagctctccgagcttccaaagtgtaaaattacattatcacttcaatctaataagaatagacaaagttctccattgtctacgtatgtataaaagacaggcaagttcaaaccaaag

SEQ ID NO: 59763 - DNA, 408 bp, Setaria italica
  Peptide Sequence Number=SeqID_125737
aaatagttgtatgtgtagcaatgctttgttcaaaaacatttcagacatcactagtccccaaggcatgcttcccaagatgcacttagctctaacaaccctcatcatttttcacctcattgttagtgcttgaaaattaagatactaatgaagggcattcttggtcatatttactaaagaaaatgattgcctagttaagtgtgttcagctgacagccagttattaaaaaacaaagggtgtacctgatttacttgatttctgattgctccaatcaacatgtcttggcatccaactgcatggacattcttcaaatttgggcactgaagaaccagacgttctggatgtagatttgtgcaagagttgagattgagatcattaaattctggacaatttacatacagagcatcaatc

SEQ ID NO: 59764 - DNA, 374 bp, Setaria italica
  Peptide Sequence Number=SeqID_125738
cacaacaaaacaggagaaataactcaaaagtgtagatatggttagggtgtacaagtggtgctacataacctgcctatccaggatgtagggtgttgagcttgatgccatgtgaagtttcctggaactgaaccaatgaggtctatcaatgtgtttttctatggggagcagaatggctgcttccagtgtgttgaaagaattaagttacaacatcagtacagactacatgggacaccacagttacattgtacagaaaccaaagccaaaataatggtttctaagttatgaactggagtctagcatggagtgagcagcactggagctgaaggtgtaccaggctttgctataggcattccataacttagaaaccattattt

SEQ ID NO: 59765 - DNA, 286 bp, Setaria italica
  Peptide Sequence Number=SeqID_125739
ctgctcactccatgctagactccagttcatataatttgcttcgtttaggttttgttggcttgcaggttatcagtgtctgatttacttgatttctgattgctccaatcaacatgtcttggcatccaactgcatggacattcttcaaatttgggcactgaagaaccagacgttctggatgtagatttgtgcaagagttgagattgagatcattcaattctggacaatttacatacagagcatcaatcgctgaacaacccaacagacttgtagttttctttctaaattt

SEQ ID NO: 59766 - DNA, 427 bp, Setaria italica
  misc_feature (79)..(79): n is a, c, g, or t
  Peptide Sequence Number=SeqID_125740
gcatagcgttaaaagaaataacatcagcagtaggactggagataattttacacacacatcaatgttcagatgcacaaanagggtaacagggaagcaacaagagcaatgacctggcacgacgatcgccacgctgactctgcagcacctcaccacctcttcaaagcgggtccatttggattggcaccaagctggccctgcaggtcttccatgaaagtgtgcttataagtttttgctgtccagcataaattccttgaggctccggagcaatggtagcccggaaaacatccctgtgttggtttcttcaagcttgccacgaaaatccagccgctcaagctgaagcattgccccttcttcaaactccaccgatttcaggccatctatgtcatttagactaaaccaaaaaagaaaaaacaaaaaaactaaaaaa

SEQ ID NO: 59767 - DNA, 432 bp, Setaria italica
  Peptide Sequence Number=SeqID_125741
tcagagatcagcagcaacttgctgctatgagtccaggggttacgtcatcgagacagtctgccccaggttcggctacagagttgatggcaaactttcttcaatctccaccaagcacaaccccagttccaatggcagcccagcaagcatcgggcctgattccaggtttgcaccacatgcctggtggtccaccaaatggcgcagcaggaattcggcaatctggaggtcacctagcagttatgaatcaggctgctcctgagcccagtccagaggcgatgctgctcttccaaaggcggtggaggacccacccccatagcaccaccaagctcagttcaccgaacagtggcatcggcatcaaacccacatccaggttctttgtacggtactaagtacggtacgtttacctttacttaaacgttaaaccggtttaattta

SEQ ID NO: 59768 - DNA, 336 bp, Setaria italica
  Peptide Sequence Number=SeqID_125742
taattggttaaagttaaggttagttattttgttctttctttttggtttcccttgtaaggtccttggcagagtggaggagcaaccttcacccatggatctatgaggcttaagcttcgagatactggaagcttggtttcctctaaaattgagttttgccttaagagttatctgttggctctggctatggagtcatggctactagcgccttgtggtatgtaacagctaaatgtgcctgaacttatgaggcattcgtgtttttgccttttgcgccgggtttaatgtactgtgcttgcaaaccaactgaggtgatctgaaataaaatgtgtgacccagtaa

SEQ ID NO: 59769 - DNA, 243 bp, Setaria italica
  Peptide Sequence Number=SeqID_125743
gaaggacgttgtgttgactggacgcaggatcattggggccaccaggccttgggaggctgcccctggcaccatccgtggtgactatgccaacttccacggcatagtcaccacggatggtgccgtggaagttggcaggaatgtcatccatggaagtgactccgtggagaatggaaagaaggagattgctctttggttccctgaaggcctggcagagtggaggagcaaccttcacccatggatcta

SEQ ID NO: 59770 - DNA, 241 bp, Setaria italica
  Peptide Sequence Number=SeqID_125744
ctgcccttgcactttgttcagaagcatttgaaaagatttctgcaccagtatttatgcaataatgaatgattgaaattcaagcaaatcagaaagagagcagcaagtcttatatgactatgatctttacagcgtagttccttgcgaaaaagataaggttctccaatgatatgagtccaccacccctgcatagacacagtcagtattagatgactttaactacaaaatcgaccatattctggta

SEQ ID NO: 59771 - DNA, 233 bp, Setaria italica
  Peptide Sequence Number=SeqID_125745
aacggctgcacaaattggacatcatgaagaccaggatggaaatcaatttatgtgttaagaggattcgtgaatggaatattacttgactgaagatccaacatctggatcagcatgaatgaagtattgataccggcaacagcaaaagggtactcccaatctgatctctgcccttgcactttgttcagaagcatttgaaaagatttctgcaccagtatttatgcaataatgaatga

SEQ ID NO: 59772 - DNA, 421 bp, Setaria italica
  Peptide Sequence Number=SeqID_125746
ccaaatgttcagacctggtaggatagctgaagtacacatccttcagttcaacatcacccttgatgtcctccaatataatacctgtggtgtcatatatatcgatatctggtttccgttcaattgtcttgaacattctatatgctgctccttgaccttctgcaaaaagctgtcactgatggtgttgcctgacccaaggacattgcacccatcatgacagccattatgacagaaataatcatgccaccattgtatcctcgctcaactatcaatctagatccataccaaactgccaatccataactgcaaaataagactgtcattattgaacccaatccaagtccttgtacagcaccttcttgtagagcagattcatatgcttttcttatgaacttgttatatgttgttatagactgcttctcgc

SEQ ID NO: 59773 - DNA, 343 bp, Setaria italica
  Peptide Sequence Number=SeqID_125747
gcaagagctttggacacgtgcagcgtgactgtccttgcaagcgtgttttggtggtcaaagaagatggtagtgagaaacaaccagaagaagagattggtgcaaaggatgcagatcattatgagagcctcattgtgcagcttgtacttagcgcacaaatagagaaggcggagcaaaatcagcaccatacactgttccaaacaaagtgtgtcattaaagagcgttcgtgccgtttgataattgatggaggtagctgcaacaacttggctagcagcgatatggtggagaagcttgcacttacaaccaaaccgcaaccacatccatatcatattcgatggctcaacaa

SEQ ID NO: 59774 - DNA, 274 bp, Setaria italica
  Peptide Sequence Number=SeqID_125748
cggcgcttccggcgttggatcggccgcagcagaaccactcccacccgcccatcgcggactcgctccttgcttcccctcctctcccagtccaccccctccgctccccttcttattttttcggcaggtcaaaccggcggcggctgggtcggcatccacgagctccggtccagcgcgacgggctgctccattggctggcgcggggtcgatggcgacgcccgggtcaggctcggcggtggggctctcctggaaataatcggcgccgcctactgctcag

SEQ ID NO: 59775 - DNA, 456 bp, Setaria italica
  Peptide Sequence Number=SeqID_125749
aatggtggtacagcttgaggatacagtgcgcttgtcaggttagatacattgcactgtttatctagctcaacacagtgtgtgactgccaaattgagccttgtattgtactgctactatattttatatttggcaagagccacaaatgtagtttggaatcaaaaaaaaaatgtcctatcatagcacagcaatctttcatcaaatacatctttaaggtacagataaaggtagctgggataaataatgaaggccacaaagactagcccctctcgtcgccttcccagttgttcttctctttaggtcctgtaggaccttcctccttgtacaattccgccggaaggctgttaaatattgcttccgctgtgaaccggaggaagaacggtaggaagctaagaaccgtgtctatctctgaacgcgagttgtatgtgatggtcggtccccattccctcatgtactgca

SEQ ID NO: 59776 - DNA, 250 bp, Setaria italica
  Peptide Sequence Number=SeqID_125750
gggggtctgagaagcttggtgttggagtaagaaacgatgtggcccgaagtgactcactctgagggtgaaatgctcccagtctccaatatgcctaccaactttctgtagagcaaagcttgcaattccaaccttgatcgttgcgggcccgttgaatgggcagaatacccacattgcaatgtcagtgaaggtccctccatgagctggcttcacatgaacatatagctcagcactcttcagattgccaactttg

SEQ ID NO: 59777 - DNA, 360 bp, Setaria italica
  Peptide Sequence Number=SeqID_125751
gctgggataaataatgaaggccacaaagactagcccctctacctttatctgtaccttaaagatgtatttgatgaaagattgctgtcctatcatagcacagcaatctttcatcaaatacatctttaaggtacagataaaggtgtatttgatgaaagattgctgtgctatgataggacattttagtttgacatatttttaggccaatggtggtacagcttgaggatacagtgcgcttgtcaggttagatacattgcactgtttatctagctcaacacagtaagtagtgactgccaaattgagccttgtattgtactgctactatattttatatttggcaagagccacaaatgtagtttggaa

SEQ ID NO: 59778 - DNA, 176 bp, Setaria italica
  Peptide Sequence Number=SeqID_125752
cttaaagatgtatttgatgaaagattgctgtgctatgatagcacagcaatctttcatcaaatacatctttaaggtacagataaaggtagctgggataaataatgaaggccacaaagactagcccctctcgtcgccttcccagttgttcttctctttaggtcctgtaggaccttcct

SEQ ID NO: 59779 - DNA, 170 bp, Setaria italica
  Peptide Sequence Number=SeqID_125753
gtattggatgactttctcagtttcatcattatgtttatgggaagcacatcttacattaagaatccttacctaagagcaaagatggttgaagttttgaattgctggtattgtcctactaaagtaagttggtctttgttagttttctttacttagttcctttcgtttcttta

SEQ ID NO: 59780 - DNA, 220 bp, Setaria italica
  Peptide Sequence Number=SeqID_125754
caagatcttgcttcaccagctgatagtgatggccatgggacgcatacagcatccattgctgctggtaatcacggaattcctgttgttgtggctgggcatcaatttggaaatgcaagtggcatggctcctcgtgcacagtaagatcattgctctctgctttattaaggtagatatgataaatttccccaaactaatataataaattgtttcatcagcattg

SEQ ID NO: 59781 - DNA, 285 bp, Setaria italica
  Peptide Sequence Number=SeqID_125755
attggatctaccatcagagacaagattataccacatgctgtctcatggttcactggggaggctgctcaagatgatgactttgaaggccttatagatggtgatgaggatgatgatgaagacgacgaggacgatgaagatgaagaggatgaggaaagtgaagatgattatgatgccaagaagacccagggagctgctggaggggaagggcaacagggtgaacgacccgcggagtgcaagctagtctagttgtaggttgtaacgtaccttgttggtagtttgttctta

SEQ ID NO: 59782 - DNA, 332 bp, Setaria italica
  Peptide Sequence Number=SeqID_125756
agaagattgtgagagcttcttcaacttcttcagtccacctcaagtacctgatgatgatgaggaaattgatgaggatacagctgaacagttgcagaaccaaatggagcaagattatgatattggatctaccatcagagacaagattataccacatgctgtctcatggttcactggggaggctgctcaagatgatgactttgaaggccttatagatggtgatgaggatgatgatgaagacgacgaggacgatgaagatgaagaggaatgaaggaaaagtagaaagaatagaattaatagaatagaccaaagaaagaacccaagggaagactaga

SEQ ID NO: 59783 - DNA, 198 bp, Setaria italica
  misc_feature (171)..(171): n is a, c, g, or t
  Peptide Sequence Number=SeqID_125757
gttggttgtttctcttgccctgaccgggtgcagtgcagttgcttgattgcttttgcttggagggaaacgaggatggatggatgaagaggatgaggaaagtgaagatgattatgatgccaagaagacccagggagctgctggaggggaagggcagcagggtgaacgacccgnggagtgcaagcagcagtgaggtgaacg

SEQ ID NO: 59784 - DNA, 321 bp, Setaria italica
  misc_feature (76)..(76): n is a, c, g, or t
  Peptide Sequence Number=SeqID_125758
ccgctcgtcctgtattggtaccatgcaaacaagtggaaaatgaacttgctggaaagaattctgtaaatgagtttcngaaagattctgaatcttcaaatgaaactaaggattcatcagtgatagttgataaaccaaacactgctcttgtggacatagcagtcaaggattctccaggtcaaatgtagttttttttatacattttttaaattgaaatcaacattacctccggtttgaactttgaaagagatttcaactaatgtagcctcatttcttttcctttttttggttgctatagaggaaaggcaactgcttaatgttcaa

SEQ ID NO: 59785 - DNA, 412 bp, Setaria italica
  misc_feature (70)..(70): n is a, c, g, or t
  Peptide Sequence Number=SeqID_125759
ttcatcaggtatgctttgctggattcggtgtcctgctgagtttcagatcattgacttgaaatatcaaacngttttgtaacagggacaagtttagaaactttttcaaccctgtttatacatgattgccaggaaactgcatttcccgtctgattttacaatctcacaaccacattaatggttgtaatttttttccttttgtagtgatagttgataaaccaaacactgctcttgtggacatagcagtcaaggattctccagaggaaaggcaactgcttaatgttcaagtaactgatgtggttaaggaatcttctggccaaactcggaatgttgatgtaagaatgactgatgagatcaagataacatcaggtacaatataatcttatactcctcattcacatttttttactgaaag

SEQ ID NO: 59786 - DNA, 254 bp, Setaria italica
  Peptide Sequence Number=SeqID_125760
ttcatgcttcagggaactttttttttccttgttcagcctaatgttcaattaattttctgttctgttatcttgcaggtatggtagcagcactaaccaatgagagtgcaacgagcaaatctgtttactttgcactttgcacgtctgagatgatctacatcacacaccttctggaagaagaacctgaaaaacttgctggaccgttattagcggacacctatgtcacattgttgaaaggtcgtaatgcatggtatggg

SEQ ID NO: 59787 - DNA, 312 bp, Setaria italica
  Peptide Sequence Number=SeqID_125761
aataggactagacaaaaacaaggtagaattttggtttctacttcctgcaagaaaccagaaccattctagcctttttccattcacttgaccaccaatgaatcccacttcccccaggcatccacacacacagtcactcaggtcattgttattatttcagttttgataagtagtaatatatagtatatccttttgttctgtgtgatctacagcgtcgcctatgaaccttggagcatgcaacccagtattgaagtgttacgcgagaagaagctacctaagttggatgagcaccttcatttccctctgctaccaccc

SEQ ID NO: 59788 - DNA, 283 bp, Setaria italica
  Peptide Sequence Number=SeqID_125762
agatgatgaaggagacagaggcagtcaaagataacagtgtcacagccaccgatggtatatgcactgcgtcaatccttaagaatagcagccaccgtgatggtgctatatataagggaaattgggaagaatgttatcttattgatattgctgaccgtaaagagagcaagggatccaaatatctttcctgttcttattcattattcttaggacatttgcaaactatgtcatcaattgtattattgttattgggttttgttattattgggtcgtttggttatttact

SEQ ID NO: 59789 - DNA, 500 bp, Setaria italica
  Peptide Sequence Number=SeqID_125763
gcttcctaccgaaatatatttttcctaataacgcttgggataaatctttcgatctggattatgaccaaaaataaatattattcggagaatgcttataagctccaaacgaagcccaacgccgcatgcccccgcgcctacgctcgcccgatacacgctcacacacacaaaaaaacgagcttgatatatgttgggtactttttagaatgataattggaaactagatttgcaaatcaatttcaattttggtattatttcggtaacccatttaatcctgttcttttttcgagaggaggctccaaccccatttccattcatcaacggaaataccagtagttcgacacagaagacacaaggataccggtatttcttctcttgattttttgaaagaggaagccaggaaggaaaggatcggaaactaaaactaggggatgtttggcaggcatgtagatcctatttgtctccataaattagagaatggctgcaaaacagcgtcgcctatg

SEQ ID NO: 59790 - DNA, 420 bp, Setaria italica
  misc_feature (13)..(13): n is a, c, g, or t
  misc_feature (247)..(247): n is a, c, g, or t
  Peptide Sequence Number=SeqID_125764
tttattttatttnttagtaattaatttctattgggtaggtcttagggtaaccggtaacctaattgtcttcaactttcttgagttatgggataataagaagttgctacctcctgttttgcttcaatcaatactagagcatgtcataatgccaaagctctcagctgctgtggattcatgggaccctcgcagggagagtgtgccgatccatgtctgggtacacccatggttgccaatgctaagggaaggntagagaccttgtgccattctattcgatacaagttgagcactgtcctccatgtgtggcaagcacatgatgcttccgcgtacgctgtgttgtctccgtggaaggatgtgtttgatttcggccagctggagacctgattgtgcggtatatcattcctaaactgagattggcactgc

SEQ ID NO: 59791 - DNA, 175 bp, Setaria italica
  Peptide Sequence Number=SeqID_125765
tctccatctttgatgtgttcccatggttccctctggataactggtgaatctgcatcccaggttgatgtggcttctccaagtcggaaaacaccgctataaccaatcgactattttggttgcttttcctacacaaacaatcaacaatccagttgccatggggtccagagttaccagc

SEQ ID NO: 59792 - DNA, 371 bp, Setaria italica
  Peptide Sequence Number=SeqID_125766
ctttgacttagcccgtcaagtctggatcagtggatgcggccgcgccaaatgatgcaactcctgcagtccaagagtaagtgctggaccactaccaatccagatttgggccgtgcgttttttcccttttgcgttgttgtaatttcagttatcgtctctaaatagaacacaccattaatgtgggttgtttggatgttcggtcttgagcccgtttccgatgcttactagaaatgattcaattaatgtcgttgtcacaatagattgactaatcagagctgttacaaatatgatttcatcaaaggctaaggctgggcgttttccttcttttgctgaaattcttgatgctgggtatcaggtcacatgagaacaccgcc

SEQ ID NO: 59793 - DNA, 326 bp, Setaria italica
  Peptide Sequence Number=SeqID_125767
cgccgccgctcggcccccgcgccgggaacgaggcactctgcgagaggaccccgggcttcttccccttggccgcggccgcagcggcggtggctaccacgcccaagcaagccaaggctgccgtggccaacggatcagaggcggcgtcaggacgggcagcggagaagaaggcgaattcggcacgaacgcctgttgtcgctcgccgggcgatgcccgtcaagtctggatcagtggatgcggccgcgccaaatgatgcaactcctgcagtccaagagtcacatgagaacaccgccaaaccattgaaacaagtgcagccagaaaaaacaaga

SEQ ID NO: 59794 - DNA, 265 bp, Setaria italica
  Peptide Sequence Number=SeqID_125768
cctatcccctgtgtgccttgcctatcccccgttgcgtgtctcagaaattctgccagggtaaatgaagttgcggaaaacaacaaacctcgggctcctgctagaaaacctgtccagagatcagtcacaaaaactacatcccaagtgtctgggactgcaaaggctgaaccaagacctatggttacaaaaccaaaaacctcaaactcgaaatctaaggtttcaagggcaaaggctgcgcaagtgcaagacaacccagttgaagtccccc

SEQ ID NO: 59795 - DNA, 316 bp, Setaria italica
  Peptide Sequence Number=SeqID_125769
atctaaggagagtcaagaagctgagattttttcctgcaaatttgtttgttcaagctcctttgcaggaaaaatctaaggagagtcaagaagctgagatcaaactgctgaggaagagcctgacatttaaagcgacacctatgccaagcttttacaaggagcagccacctaaagttgagctgaaaaagattcccccaacacgtgcgaggtcaccaaagcttgggcggcacaagccaaccaattctgctactgctgcttctgcagatggttctgtatcatgtgagagtccacggagcactgcaacttcattaccctggca

SEQ ID NO: 59796 - DNA, 310 bp, Setaria italica
  Peptide Sequence Number=SeqID_125770
ccttcagaacttttgttaagcgtgaaatagcatcaaaatccaagatcatctcactggccatctcttggtttacaaatgtatgggaaattccactgtttccactagctgtatcaccttgaatattcctctcagcactcattgcattctcacgagcatagctctccggcgcagcaaccatactaatccccatgtcaaacattcgcgaaagtacagatattatcttctcaagttgttttactggggttattgttggtattcctttctacttgttattttacgtagtctagtttctaagttcctacctttctta

SEQ ID NO: 59797 - DNA, 156 bp, Setaria italica
  Peptide Sequence Number=SeqID_125771
gcttgattccatcattgcataatcagagaacaattagtataatacttttgtatcagtgtagatatcaagtgaaactttttctagtaccttgtaaactttgccaaaacctcccttgccaagcatatttgaatcagagaaattgtccgttgccacaac

SEQ ID NO: 59798 - DNA, 433 bp, Setaria italica
  Peptide Sequence Number=SeqID_125772
actaccggtagtactaggaaggtagttacctagactagacaagaaagactagggaaagactaaactttacaatggtgggtggtctagaggaagcatatttagcagccaagccccttcttctctcaatggggaaaagggcaatctactgcggtggggctggaaatggctcggctgcaaagatctgtaacaacatggcaatggcgatcagcatgctcggggtctcggaggcctttgctcttggtcagaatcttggcatcaaagcaagtactcttacagacattttcaattgctcaagtgctcgctgctggagtaggctaaagatttggatttggccatggcctctgcatctggagtcggcttcaaatgtcccttgggctctgaggcacttgaatttccgaaagctcagcaaggatggctgcgaactcaaggactt

SEQ ID NO: 59799 - DNA, 386 bp, Setaria italica
  Peptide Sequence Number=SeqID_125773
aaaataaaggctacgctgaaaaccctatgattctggatgctccggtgtctggaggtgttcctgctgcagaagctgggaagctaactttcatggtgggtggtctagaggaagcatatttagcagccaagccccttcttctctcaatggggaaaagggcaatctactgcggtggggctggaaatggctcggctgcaaagatctgtaacaacatggcaatggcgatcagcatgctcggggtctcggaggcctttgctcttggtcagaatcttggcatcaaagcaagtactcttacagacattttcaattgctcaagtgctcgctgctggagtaggctaaagatttggatttggccatggcctctgcatctggagtcggcttcaaatgtc

SEQ ID NO: 59800 - DNA, 186 bp, Setaria italica
  Peptide Sequence Number=SeqID_125774
cgggcgtagtagtggagagagagagagagagagaagggaaggggggggttcgggatggagagtcggttccaaggtgcagagatggggtcggagctgcctccggggcttctcttctcatgcaattccgtcccagctagagaatagaagcctcgtagtcgcagactcgcagtcgccattcgtcgccgt

SEQ ID NO: 59801 - DNA, 269 bp, Setaria italica
  Peptide Sequence Number=SeqID_125775
tttttttttcttactgctaaattttaagggatcatccaacatgtaaacaaatccaacacaagaattaataaggacgcctaaggcacgccgctagcacacaaactttaactacacacactcctctctcggacaaaggtgttacaaaaccgtagggtaggtacaactagtgtcgcgcagctacagcgaatgcagttagactctcctgcctgattatagcccaattaaactgcctgatatagcccaattaaacctagtgcgagatctgcagg

SEQ ID NO: 59802 - DNA, 403 bp, Setaria italica
  Peptide Sequence Number=SeqID_125776
ccaactgctgaacaagcccatgcactgaacaggaatataagcattgagcctaataaaccaccaacaaaaatctctgggactgctatgtcaacctctttgaatggcaattgagcaaaagaagctacttcatccatatacgcactgaacaggaggaaggaagccagtgccgccgatccaatggcaaatccctttgtagtagcttttgttgtgttgttgcccacagcatctaggacgtctgtgatttccctcacgctttcaggctgttggctcatctcaacaataccaccagcattgtcagctataggaccaaacatgtccattagtgagtaacattacccttgtcttgttgtcttaagtctatttccctatttgtttgttctttacggttctttgtttcccttaa

SEQ ID NO: 59803 - DNA, 268 bp, Setaria italica
  Peptide Sequence Number=SeqID_125777
gtaatctccatcacgacatgtgtattatttatccaacgtatgcaccacccgtacaatgtcaccgcgaaatatcaccgctgattcttcttttctttgggtacaacatttagtgatggtaaatgagtcgggtaaatacatctccgagagtaagcttgatgattagtttggttgatcacaagaatatcgggggccattaccaatgtgattgtggcgagcatcttgataagaacatgaagcgaaggccccgctgtgtccttgaattgggtca

SEQ ID NO: 59804 - DNA, 246 bp, Setaria italica
  Peptide Sequence Number=SeqID_125778
gaacataattgagctatccctttccgcaaaaagaaaaataattgagctatcttcaataaaaatatatgaaaatgagaaggtaaccaatgtttattagagaacatcagtaccaagtcagcaatgacagcaggattgcgaggatcatcttctggtattccctgctcaacttttccaaccagatcagccccaacatcggcagctttagtgtatattccacctaccctaacttgtagtctaaaaggtcta

SEQ ID NO: 59805 - DNA, 336 bp, Setaria italica
  Peptide Sequence Number=SeqID_125779
aagaagctacttcatccatatatgcactgaacaggaggaaggaagccagagctgctgacccaatggcaaatccctttgtagtagctttcgttgtgttgcccacagcatctagaacatctgtgatttccctcacgctttcaggctgttggctcatctcaacaataccaccagcattgtcggctataggaccaaacatgtccatagtgagaacataccctgctgtgctaagcatccccattgttgctacagctgtcccaaaaagaccaccagttgggtcaccagactcgtccaccaagcctgaggttccagcaataatattagttccatgtcctgtag

SEQ ID NO: 59806 - DNA, 240 bp, Setaria italica
  misc_feature (5)..(5): n is a, c, g, or t
  Peptide Sequence Number=SeqID_125780
ttgtntcctgacctcattacaattcctgttgtcagttttttgccaactgctgaacaagcccatgcactgaacaggaatataagcattgagcctaataaaccaccacaaaaatctctgggactgctatgtcaacctctttgaatggcaattgagcaaaagaagctacttcatccatatacgcactggcttccttcctcctgttcagtgcgtaataataggaatagaaagtaagacttacta

SEQ ID NO: 59807 - DNA, 484 bp, Setaria italica
  Peptide Sequence Number=SeqID_125781
atagtgatagaatagccttttgcataattgacatgggatcttcggataggggagatgagtccagaatcacgtgtcctctgattgagagaattccaacagatgaaaccaccaaaatcaaaatgaatggacaacaagaggaaacagaataaagccagagggatcctcaattttgcagcgctgtgccattgttcctccaagtatcattgcactgataatttcagctgctatgctctcaaaaagatcagcgcctcgcgcagcacaatctccaacattgtcaccaaccaagtcagcaatgacagcaggaattagacgaaggaatacaatacttactaggtaattaccctagactacaaacttttaccaaacgaagaatacaagactaccaaacaatacaagacaagactttaggtagtaataattaccaaccaacccaaactagaagacaaaaaagggacaaacaaaaagaaggacaaccaaataccaa

SEQ ID NO: 59808 - DNA, 298 bp, Setaria italica
  Peptide Sequence Number=SeqID_125782
cggggtggtagtgcgaaagagataaatgacaaggatgacaaagcccagaatacatgccattttagaaatagttccatattgtgtcctaaaaaaatccttcagcgccatctcttatggcatcagatatctcagacatttctggaggtccttcatccttagcaagaacccactttgtgaggtagagagagaagaataaactgagagtacatatacagaacacaaagaccaaaattggcgatgtactggctcgtgtttataatctgtgtaataactttagaaaattaccaaaacaaaaaga

SEQ ID NO: 59809 - DNA, 273 bp, Setaria italica
  Peptide Sequence Number=SeqID_125783
ttccatcatgatggaatacgagtttgccctccttgtaactggaaaaggaaactccccaccctggggtaggtcgctccctgatccctggcgctttcacggcctggaggagtacgggtgcggcagcggctttgctgtggtcgggcgagcctggaggggggagtcagcctaccctggcggaggggcgtcgcccgagggtggaggagaggcgcgcggtcggcggctccctgcagcagtcccgcggtagcggcgtgcttcggcggcgctagtttccag

SEQ ID NO: 59810 - DNA, 262 bp, Setaria italica
  Peptide Sequence Number=SeqID_125784
tatggaccgattttctgtaaggtgtaatccctgaactcgaccgtacaaaaacctggagaatttgttgtaacatttccctgagcttatcattctggtttcagccatggtttcaattgtggtgaggcagtaaattttgctatgggtgaatggtttcctctgggagcagttgctagtcaacgttatgcacttctgaagaggataccagtattaccatatgaggagcttctttgtaaaagaaacagcacttgttgctgatgagttt

SEQ ID NO: 59811 - DNA, 225 bp, Setaria italica
  misc_feature (218)..(218): n is a, c, g, or t
  Peptide Sequence Number=SeqID_125785
caggtgcgcgcagacgtcggcgaggaggttgcgttcccggagcgtcgcgcagtggacgaggcccttgatcgtctccgcgacgtcggaggccgccgccgcagcttcctcgtcctcctcgtcgtcggaattgtcgcctccgtggaagcagttgcagtaccgcccgcgtggcctggcttctcggcgcccgcgccgacgccgtcctcaagagcttcgaaccntcgccgt

SEQ ID NO: 59812 - DNA, 353 bp, Setaria italica
  Peptide Sequence Number=SeqID_125786
aggcgggtttcaccagcctggcgcacacctcccaggatatcgagaaaaccatcgaggctgctgagaaggttctgaaacggatatagggttcagccacgcgctaggttccagcggattcgctacttcatcgtgatgtactttgagtttcacgcccctgagttttgtattgtgcagcagtagcagcagtgtaccgtcttatgtagctcctctccctagccaagacacaatcatagtatgatgaagaacatggcactagccggcaatggtatgaagaagttaatcctcgctgttctcttactgtgtctagttatagggcagatacaagtggaagctaagagtcttgtcttgtccct

SEQ ID NO: 59813 - DNA, 282 bp, Setaria italica
  Peptide Sequence Number=SeqID_125787
ccggtgccaaaacagggcacgaaatgtgtggaggacacatcagaggaatgtttggtgtattcttcactggcggaccagttcacaactttgcggacgccaagaagagtgacaccgagaagttcgggaggttccaccgataaccttacccatggttgtcacgtcaggggtgatcccaaagtactcttgagccccaccataagccaaacggaaaccggtcatcacttcatcaaagaccaggagtactttgagaccaccaccgataaccttacccatggttgtcac

SEQ ID NO: 59814 - DNA, 195 bp, Setaria italica
  Peptide Sequence Number=SeqID_125788
tagttcttaggttccttaatttgtttaaccttaaggttacttaaggttaacttcttctagttggtaaaccctactttgtcctatgactgctggaattcacacgctcaagcgtctgatggagcccggcacttacgaatacttggacaagatcactggtgacctcgtccgtgggatactggatgccggtgccaaaac

SEQ ID NO: 59815 - DNA, 255 bp, Setaria italica
  Peptide Sequence Number=SeqID_125789
ggtttccacgtcggtgatggggtggtcctcaaacctccggcgtagcagcttgtagagtgcgaaggagaggcatagccttttaatacttggatcttgttggagtaggtcgcccatgtcctgtgtccaaatatcgccaaccgtgacgacgacgttatccttcagctccagatgatagccctccatggggctaaccttcatctccaagtcctcctctcccataacagcgtacttgcacttgttcaatagctctgctcc

SEQ ID NO: 59816 - DNA, 240 bp, Setaria italica
  Peptide Sequence Number=SeqID_125790
taaaaggctatgcctctccttcgcactctacaagctgctacgccggaggtttgaggagtaggtcgcccatgtcctgtgtccaaatatcgccaaccgtgacgacgacgttatccttcagctccagatgatagccctccatggggctaaccttcatctccaagtcctcctctcccataacagcgtacttgcacttgttcaatagctctgctccatcgtctccaacttcttgcagctgatggt

SEQ ID NO: 59817 - DNA, 393 bp, Setaria italica
  Peptide Sequence Number=SeqID_125791
ccggtgcgcgggttccccggcagctgctggttgaggccatcgagtgcttagcggatgaggggtttttgggatgcgctccgccgcctcaagctcgaggtgctcggcattgacgacttcctaatcccaatcaccggttattatgctccatgccagtttcaccaagcaagcttgttcaacctacgttcagaatcattggtgccaccttcacacaatccagttggcgacaggaacagttgcccaatcctagggacccttataaacactaataacatgaggggattccaagacctagatagggaacttcttctgaaaacagaagcgaagaagatctttgcattgacatttgttgttcttggttaaagttagtaagtaggtattccttgttcttacttt

SEQ ID NO: 59818 - DNA, 216 bp, Setaria italica
  Peptide Sequence Number=SeqID_125792
tcataacaaagcataaacagacgcatcagctgttttttgttgtgtgtgtgaaggaagacgcgtcagctgcttattcaggatcagctaacttgcaacatttcctcagcaagaatcaaatcatgatcgatcgattggtgctcaccgaagacgaagcccatgaggtccctgtaccggatgaacctctggccgtcgacgaaatggaggccggcgaaggag

SEQ ID NO: 59819 - DNA, 254 bp, Setaria italica
  Peptide Sequence Number=SeqID_125793
gctccatctcccaccactcttccccttcgatctgcaacaccaccaaattcaccagccattatacattctgttgcaattcagacaaattcagccatcatatactacagcaacgatccagggttttactactaccttgaggatgaccatgctggggaacatgaaggtgagcgggacgagggagaaggagccgacgaggttgacgaagtcccccatgaacgggaacagcgcggtgacgaagacgttgaagccgaaga

SEQ ID NO: 59820 - DNA, 229 bp, Setaria italica
  Peptide Sequence Number=SeqID_125794
aaaaaaacctttttatcatgaccaccagtagcaagcagtttgccatcagatgagaagtggcaacaaacaactttggttgaacttgcacgtgcttttgcaacctcagaaaaaccaaatcctttactagcatccatgcagcgccccaagttgtctctaggatccatgtacaatacctagtagaataagaaaaggaattacaaacaattaatacaataccaaaggaagacca

SEQ ID NO: 59821 - DNA, 220 bp, Setaria italica
  Peptide Sequence Number=SeqID_125795
tagtaattacggtacgttaattaaagaagagtgcgcgtgtcttctgctgttcaattgttcatctctttatccctcttcttctactccgatcggcgtataagaagagggataaagagatgaacaattgaacagcagaagacacgcgcacttctttttttttattctactagttttgtgtgagatgtcgagttgtgctgactgtgcaccggcgactcagctc

SEQ ID NO: 59822 - DNA, 253 bp, Setaria italica
  Peptide Sequence Number=SeqID_125796
aaaaagaaaaaaaccgaaaaataaagtaaaaacaaaaattaactaactaagaaggacaataggttagaataatcagccagtagtggttccaagtttatatccaactgtgcaattacatcgactcctggatgatgtgtgcctggtttatccgatgttgcccttttgtgtagacatggagagtttcgctgtcacctgcctgcttccgctggattgcatggtcagaactccatacttctactggtgtaggcattgc

SEQ ID NO: 59823 - DNA, 225 bp, Setaria italica
  Peptide Sequence Number=SeqID_125797
cggtactggaataaggcagccattaggacgatgtactcgtcatcactgtcataatcagcttgattgcctgactgcactatgatagctacagtgaggcaatcaagctgattatgacagtgatgacgagtacatcgtcccaaggtctggaataaggcagccattagtgaaccaacagcaaggtgctgctgatcctagggtgcccaatcttgactaccgcccaatccg

SEQ ID NO: 59824 - DNA, 449 bp, Setaria italica
  Peptide Sequence Number=SeqID_125798
ctgaagccaaatctgcaaacaacccagaaattgcacgagtagacagtgtaaaatatagatgtctttatacagtcaagcttgtctccgactcgaatggtctgcctcatactatagcaaccgattgctcagtgtcaattttcagcaattgccaatccaccataatgtaagatagcaatccttcttgaccccttcaaacttgttatagccactacattgcggaggccacagtttagtacacccagaagactgaaagtactagagttccatagacgaattgttccgtcgattgatcctgtcacgagtactggaagttcaggatgggaaaataccacactaacatcagctaaatgctctttcagcgttgaaacaacaacttacaatagttttaggacaaatacccaaataaataacgtaagggaacttaacctaacctaaattaaggaaactaa

SEQ ID NO: 59825 - DNA, 400 bp, Setaria italica
  Peptide Sequence Number=SeqID_125799
tgtccatctccatcgcttcaaaaaacaaactatcttctctgcttggactcgagaattattgacagacagcatctgacaaatcatgaaacctgcatcacaaaacagaagatcaacatatggactgctagttaaaatttgtatgactgagaactcaaacggacctacatagttgttcatccaaaaaattattgaagatgaataggtggcaccctggtcagtagaggtcctgtcagactataaacataccataatttgggttttattgctaatcttgtttactttacagaccgcacgccaacagttctgactttaaacttatattgcggcaactcgtcttcttcgtcatcatcctcatcttcactcgaatcatcttcaactacttgttccctatttttgtagt

SEQ ID NO: 59826 - DNA, 269 bp, Setaria italica
  Peptide Sequence Number=SeqID_125800
ccaggttttctttcgagaatatgtccatttgaaggtttgttctcaagaaccagtttagtttcaggttggtcagacttagtgatagaagtctcaatcttctgatctccttttggaagaagttcatccttttcttcttcaagatacagggactcctcttcacactcaggaattggggcaagtgacttcaaaacaatacagcagatggccaataaaataggtcagttaagtaaacaagtcatttaaacagcttgaactgatttatgagctaa

SEQ ID NO: 59827 - DNA, 210 bp, Setaria italica
  Peptide Sequence Number=SeqID_125801
gccatcctgtccatctccatcgcttcaaaaaacaaactatcttctctgcttggactcgagaattattgacagacagcatctgacaaatcatgaaacatagttgttcatccaaaaattaattagaaagaatgaaataaggtaggacaaccctaggtacaagtaagaaggtacctagtacaagaactaataaaacaataaccaataaattta

SEQ ID NO: 59828 - DNA, 342 bp, Setaria italica
  Peptide Sequence Number=SeqID_125802
attacctcgccgaactgttcaaaaagctttctcaagtactcctcgtttacgtttgctggcagattcccaacaaaagcagtcgtaatctgggagtaaacagaacagaaatcacaatcaatgttcaaacagaagatagctatatttgtaccatggaaaaaaaatgtttcccttctacattaccttggccatttcatcagcatccacatgagactccttatcagcccaatttatagcaggatgcaaaacatcgccaagcataaaatctgttctggaaccgatacggattactcgtgccgccgcctgtgattgatagtttgaggtggaatgaaatcaaaggagctg

SEQ ID NO: 59829 - DNA, 420 bp, Setaria italica
  Peptide Sequence Number=SeqID_125803
tttcttatttcttatttatttgtttctttctttgggttagttcttaaatttttgtacgtaaaacccttcctagttctattccggtactacttggtaagtttttattggttgaacctgggatgcagaaccacctgaatcttttagggtggccttatactgggaccttaaatgtggatcagttggctggtaaccaatcaaatgacacttttcttccagaaatcaacaataatttgtctaagttttgtttctagccgtaaaaaataatggagtcctctcaaaatcttgtttgtcgtgtgctggctcaataaaatttgcctcaagtacaccgactacacttctccctctgctagatccttcctgaaggaccttccagaagggcattataagacgatttttgtggtagacattcatcccaaaaat

SEQ ID NO: 59830 - DNA, 434 bp, Setaria italica
  Peptide Sequence Number=SeqID_125804
tgaccggaatagtaacttgggtggttacaagggtaattccttttactgagtagttgatataccacagtgatgattaaatataggaccaattgcctacttcttacaagattgaggtacaaaaggaaagctctgaaccaaatagcataaaacacttaccagaaatcaacaataatttgtctaagttttgtttctagccgtaaaaataatggagtcctctcaaaatcttgtttgtcgtgtgctggctcaataaaatttgcctcaagtacacctgaattgtgacatttgtcatcatagagagaaataacatgattaacaataactgcagtactgaacatgttaaactcaccgactacacttctccctctgctagatccttcctgaaggaccttccagaagggctgtaaagggggaatgttaaaagaaacttagttcta

SEQ ID NO: 59831 - DNA, 253 bp, Setaria italica
  Peptide Sequence Number=SeqID_125805
ctgtggaagcaggacgccgagtgcctggcgtggctggacacgcaggagccgcgctccgtcgtgtacgtcaacttcggcagccacacggtgatgacgccggagcagctggccgagttcgcgtggggcctcgcggcgagcgaccacccgttcctctggtccatcagggacgacctcgtccgcagcgccggcctgccaccggcgtttcgtggccgagaccgcggggcgttgccgcgtggcggcgtggtgccccgca

SEQ ID NO: 59832 - DNA, 222 bp, Setaria italica
  Peptide Sequence Number=SeqID_125806
cacgatgctgatgagcttcgcgctgggcgtggcgcgggagctcgggatcccgaccctggcgttctggactggaagcgccgccgcgctgatgacccacatgaggctccgggagctcgaggaacgaggatacgtgccactcaagggtaagcaacgcatcacccaaaaatctttcacactttcacgaacatggtaacatgaacatactcgatccatcaatcccgg

SEQ ID NO: 59833 - DNA, 112 bp, Setaria italica
  Peptide Sequence Number=SeqID_125807
aagcaatccctcagttctcaacaagctttgatcggagggattgcttatggcggctatgctcgcaagatcattggaagaactgtgctggtattttgcgtagagttcttccaat

SEQ ID NO: 59834 - DNA, 394 bp, Setaria italica
  Peptide Sequence Number=SeqID_125808
actgcgcttctcgcaattgtgattcttgttctgtcaaatgtggcctcaaatgttccaacaggtactactcttgacacgctgcttggctttattactgactagctcagaatcatagtagtggtagtggatccagatttggtcatatgatgcagggaacttgcagtactagtttggtgaaaatcttaattactactccatccgtcccaaataactattcatttggcttttctaaaatatagcttttgctacgtatctagacataatatatatctaggtgcatagtaaaagttacgtatctagaaaatccaaaaacgaatagtaatttgggatggagggagtacaacattatattcacgtttagctcatgtcttcagaatcaactgacagtaacctg

SEQ ID NO: 59835 - DNA, 292 bp, Setaria italica
  Peptide Sequence Number=SeqID_125809
gggggggtgggggtgaagaggggcttggagggggggagggagtgggagagggagatgggcttggaggagcggcggcggagggagaaggagagggaggggaggcgggagcggggaacggcgctggagccgaggtggtggcaggtgagcggcgaggccgcggtggaggacgccatggcggcggcggcggcgggggaagtggtggtggaaatgcatttacctgaagcccaggctggagaagatagcaggggaatatccaggagtcaggttttactttgttgatgtcaaccaagtt

SEQ ID NO: 59836 - DNA, 259 bp, Setaria italica
  Peptide Sequence Number=SeqID_125810
cttggtatggctcaccagcataatcaatgacaagcataatcttgttctttcttgtttcttgaccttctaaattcccctgaaaaagttaaggctttattaagatagaaactgctactattactctgatcttcatcaaatggagaattcactatattctgggattgatttaaaatgcttcttggtgaaggtggatggttcagagagattagaagaaggtgacctagcatcccaaataagccaattccttgagggatacaga

SEQ ID NO: 59837 - DNA, 286 bp, Setaria italica
  Peptide Sequence Number=SeqID_125811
tacttctaaactaaaagtttacttttaattcgtctagttgttcttgtacttctaagtcttttccttattcttccttggttttggggtgaatgagtcgctgattgctgaatatggaaagaaatacaagaaaagagcttggtttgctgttgcaaaagatttctccgaggacatcatggtaacctatgagtttgataaggtcccggcactagttgcaatccatccacagtataaggaacaaagttttattctatggcccatttgaaggaatttcttggaagattttgta

SEQ ID NO: 59838 - DNA, 249 bp, Setaria italica
  Peptide Sequence Number=SeqID_125812
gttcaatttattgtgcattcagtaaacactgtatattgcataaatttattcattacattgggctagtctgtctgacatcattatgtaattcctgctaattttctgttctgtctccgtatgacatcatgattttgttcctgctaattttctgatttcctttagttttcatctgtgcgagctgcaatgtacatttgtggtttccatcagttaattctatcgtttaaccacaacctaccatggagggtccaa

SEQ ID NO: 59839 - DNA, 221 bp, Setaria italica
  Peptide Sequence Number=SeqID_125813
cagcatatccctttgttcaatttattgtgcattcagtaaacactgtatattgcataaatttattcattacattgggctagtctgtctgacatcattatgtaattcctgctaattttctgttctgtctccgtaatgaacaatcaatgaattttagttacctgactaaattttactagaatttacctttaagttttacaatactagtagacgaagactagaca

SEQ ID NO: 59840 - DNA, 218 bp, Setaria italica
  Peptide Sequence Number=SeqID_125814
atcgtgtattgcaacgggtgggatccagctcatggtgcatgtattggaggcagtaagcaacacccatgatgactctcatcctcgcagcccagtccagatcctcaaattctttgaggtgaagatgctgtgagagactgccatgtggagaaaactcaaacaccatcattctcatgaaaggttcattttctaggcaatagccaaaggagattggtaaagtt

SEQ ID NO: 59841 - DNA, 375 bp, Setaria italica
  Peptide Sequence Number=SeqID_125815
taccaaatagtaaaaagaaaggtacttagaaagtaccaactttgttgacaaatacaacgaaatatacgatatagcttttacgagtgatgccgagagcccgagacacaagaaagctagtggttgatggttcagactcattttgcatttcaattcttggagacaagaaatgctcaagcattcagttttcatcaagatcggataatggctgaccttagagaaatgtttatatcccttacaattcttttttacacatctggcgacatgggaatgaaagagaattctggcaagagcgaactactgacaagatagtttgacaagttgtaaaaaaaaattattgtgtccgtccctgtaaattactattatgcacaagttcag

SEQ ID NO: 59842 - DNA, 282 bp, Setaria italica
  Peptide Sequence Number=SeqID_125816
tggagttggaaaactagcattggacgttccattgcacgtgcattaaaccggaagttctacagattctctgttggaggcttggctgatgtagcagaaatcaaggtgtgctacagcatatattcatgtcaagtcttttaactggtcatgattgcaacacgagtgaaattctcaaaccacattagggtcatcggcggacgtatgttggagcaatgccagggaagatggtgcaatgtttgaaatcagtcgggacagcaaatcctctagttctgatagatgaaattg

SEQ ID NO: 59843 - DNA, 204 bp, Setaria italica
  Peptide Sequence Number=SeqID_125817
gtggctacattggttggcaatgatgatgcggagagtgagaaccctatgaagaccactacattcactggtgcaatgtcatcctcagccacagcagcacttgcgacatcagcagtgaatggtgtggctacattggttggcaatgatgatgcggagagtgagaaccctatgaagaccactacattggccgagcaagttgatgagtat

SEQ ID NO: 59844 - DNA, 429 bp, Setaria italica
  Peptide Sequence Number=SeqID_125818
accaattacaaccaattagacaagactacgacttaactacttcttgagggccttgttgaagttggtgacgaatcgatcaagctcccactgtgtctcgacatccatctcatcaatatccagctcgatctcatccccaagcatctcttgattgctgttcctcttgcgcacaatctgcagcacattatgcatcttctcttcgggcaagctctcgagccccagcctcagcaagttcttctcctccaggctcatctccctcttgttaggctccctcgccttcggcttccgcatcttcacgttcccagtcctcggcttcaccttcgcctcaacagtcggtggaggtggcaattcggctggcactggctttggcggctcaaggcgcttgcactcttcctcgaaccaatcgaccgccgctttgtacatcttctcgaa

SEQ ID NO: 59845 - DNA, 331 bp, Setaria italica
  Peptide Sequence Number=SeqID_125819
ccatcttgatcaggccacggcagcaacccactgagctccgaaggatccacgtgacgctggaaccagtttggaacagcaacatcactggggggctggagaaacgctttgttccacttccaggcgcagttcaggctcagcttcctttgattgctcctggacagctgaaggttctgatgataacatggagttccctatgccaaatccttcccaatcaacctgcttcagttcttgcaatcgctgcccaattctttgtgttgctttgtcatacaggatccctctagaggtatgttgagtgtcatcgctgttgtcaatgatcagatcatcgaaattg

SEQ ID NO: 59846 - DNA, 284 bp, Setaria italica
  Peptide Sequence Number=SeqID_125820
gctttccaacaggcattatatcctgcatcccagtatggacaaagggtattacaactggaaggctgtcagtgtccatcaccaacctggtaaaacaagagcaaattgaattgagtaaaactcaacatcgatcaaaaggaaccttattggaaaaatttgtatgcaaaagtagaatgcaggttttccaacgaaaacagaaacaaatcaacggtggctcggtattctttagaaaaaggcagtattgaaagaaccagttttctaaccttccaacacctctcttggcagga

SEQ ID NO: 59847 - DNA, 250 bp, Setaria italica
  Peptide Sequence Number=SeqID_125821
tatccatcccttttggtagattccatcaccgcgagaaacaggtaacaccttaacagacaaaggggtcatccattgctgccacatgattgctgaccgttagaagaggcttgcctttaggtctctcttgtaatgcctgatgaagcttctcggcaccataaatctggacagagttaaggccatgcataaaaacatagcaggcgttgccaataagaggaacagccaatgcttgaagtgaacggaaaataacaga

SEQ ID NO: 59848 - DNA, 260 bp, Setaria italica
  Peptide Sequence Number=SeqID_125822
cgtagggtcagttaagttcaagcaaggagctttgactatttcaagatttttctctaaaatatcatccaacatatttcttacctgaaatgtacagtctgaaggctgtaagattaaaatgtaaaatagaaatatagcatcattgcttgacttgaaagaaggaaactatgcggatagaagcacaggtggatgaaggacacgactataaagctaggcgtgaagaagctggtaaactcattgaacggaaatggttgtgctatagg

SEQ ID NO: 59849 - DNA, 254 bp, Setaria italica
  Peptide Sequence Number=SeqID_125823
agaatttactccagtctagaagatggtagcatcaattcctccacggaacaagctcaacaaagggaacgctggattcacgaatcaatcaggcccccggtcaccaaaattcgtacacgatgcctctgactcacgataaaggaaggaaaaggagcaaacagagtaccttgatctggtacagcttaagtttaggagcctgtggcttcccctcatgcggctgctccagctccgcgtcgctgtccgcctcgccgctgccg

SEQ ID NO: 59850 - DNA, 401 bp, Setaria italica
  Peptide Sequence Number=SeqID_125824
gatgacagcattatatccgtcaaccgtcgtgctgttgccgtcgtcgacacgagtgctgctgccgctgtctccatgagtacgtatggaaaatgaagaaaacctacaatacagaaacgacacttcaattaatcattcatcatcaagaattacttctaattgctatgggatttagacataagacgtaatacagcttaataaaagaattcagagtttgtaaagaaattcaaggacataacaaccattagtttcgttcaaggacacaacaaccatcagtttcgttcaagaacataaggaaaagaaagaaatcaaatttttcttggagcctgtagtttggaagttgcactatctagagttgactgtctaaacggaattggcaattggcctattttcgtccttactta

SEQ ID NO: 59851 - DNA, 338 bp, Setaria italica
  Peptide Sequence Number=SeqID_125825
tgggttcttgttaaattctaagttgtaggtctattgtctattgtcttgttgcttccttgtcggcatctttgcctttgcaaggagtgcgaaagcaagctgagcttctgccccttgtgccagtcctcgaagatacttggcatggagatatacatgtagagtagaatttatgtaccgcatgagtatcttatgaggtatcttgcgagatactgtgttaatatgtcaatctattccaaactctagaacctgtgtatcactatgatttgtcactggatcgaaaagactgccgtttatggtagatttgccgctgcaaatttctatcagaagttcatgcttgattt

SEQ ID NO: 59852 - DNA, 358 bp, Setaria italica
  Peptide Sequence Number=SeqID_125826
tacttagtaggacgaataagacgaaggtaagaatagaacaacggacaatcctgttgcaacggtggtgccgtcaatttgcaactgatgccgaaggagaacaggcaaccgaaggatttgacggcctgcagggtctgtaaatcaagtgaggcatgcatgctgttgctgccttgtcggcatctttgcctttgcaaggagtgcgaaagcaagctgagcttctgccccttgtgccagtcctcgaagatacttggcatggagatatacatgtagagtagaatttatgtaccgcatgagtatcttatgaggtatcttgcgagatactgtgttaatatgtcaatctattccaaactctagaacctgt

SEQ ID NO: 59853 - DNA, 195 bp, Setaria italica
  Peptide Sequence Number=SeqID_125827
gatatggaccggtttattaaagctcagagtgaacggctgaggcaatctatattggagaaagttcaggcaaagcaatttgaggcactggcctctgttgaggacaagatactacgaaaaatacgggataaagaggcggaagtggagaccactgccaactgcttaatctggtcctcaagttcagagttccttttgtta

SEQ ID NO: 59854 - DNA, 245 bp, Setaria italica
  Peptide Sequence Number=SeqID_125828
gacggcttctcctgctcctctcgaattcggctcaccgagaatgatggatgatgatggtacagggagctgaaggcggcgaactcgtggaacagcgaggagaaagtgcggaggagaggaacatgaattgaagcaactcggtcaatggggaagcaggactccaggccatcctgaaagctttcttactgctggagttgaagttaccactggcccacttggtcagggaatcgccaatgcagttgggctgg

SEQ ID NO: 59855 - DNA, 239 bp, Setaria italica
  misc_feature (61)..(61): n is a, c, g, or t
  Peptide Sequence Number=SeqID_125829
agttaacagaaaatcaaaagcatattgcataatgttacttgacagaaaacagaaggcacanaccgctggaccatgacaactgagaaaatctccagcatgatctgctttcaagtgagataatgcagacttgagtgccttccttacaaggtgtctatcttgttgagatccctggcattcttgcatagcagtggctagagcaagtcaaggacaaccagggaaaatcccaaccttccatatat

SEQ ID NO: 59856 - DNA, 453 bp, Setaria italica
  Peptide Sequence Number=SeqID_125830
ctgtaaactccctaaactacatcccaaatctctacaaacctgtgacgaacagattcaacgcttaattacagaaagccaagtgtgtcctagtcacaatgaagtagagatcagtgaggagctgaatttgcctgtgcatgacaaatctgaggaagcaatggcaagtcaatcatgggaacaaactggtaactttgaatgtaccactaaggaaatctttaaggattcctctgcgcgtacaagtcataacgttcctcagcatcacactacccctaccgatattgatatcgcagctggacccgctgacagagcagcagctgctggggatctacaaccagaagcagtcgtcggagcaggcggaggaggcactcgcacagggcctgcacgagctgcgtcagtcccacgccgacatcatcgacgcagctcccaactacatgagcctcatggctatcacactgt

SEQ ID NO: 59857 - DNA, 466 bp, Setaria italica
  Peptide Sequence Number=SeqID_125831
gattcccaccagttccaaacttacacttgatttgacacaaaatagttagacgtcaattgtcagtacaattaatttatcgcagacccagaagatagccgaagcacctcagctcaccctaccctgtttacaaagacgtgagcaccggtgcattcagcaactgcacatgacgagctcctcgagctccgctaccctcggcataacatgtccatggcgacccatcagcaatacaagtcaacagcatgtcgtggctgaccatatctttgcccaccggttggtatgaacaaatggggattcggctaggatgattgatacacatcgctattacccttacaaaatacaagaattagcagcaggtcatgagtgtgtgctgccatcacctcggccctgacagctcgaccgcgttggtaggtttgttcggttcgtagttcgtagtaattccttactttctttgtttaagttttcgttt

SEQ ID NO: 59858 - DNA, 303 bp, Setaria italica
  Peptide Sequence Number=SeqID_125832
agtaactaacttactaaccttactagccactcctcccatctctcagcgaggccgtcgccttcgagcatcctcaccacctccgacatcttgggacgttccatggggggagctctgtgtgcagaggagggcaacctggatgagggattccacctcaacatcaatgtagttgtgctgtagatcttcatcaaccagactctccagtctcttctccttgagccaaccccttgacccaatcaagcagcatgacatcatcatcattggcaaggcgagcaagatcaaaggcacgctgtccagtaataagct

SEQ ID NO: 59859 - DNA, 290 bp, Setaria italica
  Peptide Sequence Number=SeqID_125833
ggaggaggtggagaaaagggaggagcaccgggacaaggttttgtggtgccaggaccacataagttagggttgtttgcaaaactgaaaaagaaaaggtccaagtgtgaataggagaagcatcaaggcttaaaaagatgaaattgtcaaataaatacttagatctacctaataggtgtgaataatgaaaaggaaccagttgatggaacttctccagacaaattattatttgacagatccctgtaattcaagagcaacaattaggttaattgtgcgtttactaattagaacca

SEQ ID NO: 59860 - DNA, 256 bp, Setaria italica
  Peptide Sequence Number=SeqID_125834
cactcctccccatctctcagcgaggccgtcgccttcgagcatccctcaccacctccgacatcttgggacgttccatgggggagctctgtgtgcagaggagggcaacctggatgagggattccacctcaacatcaatgtagttgtgctgtagatcttcatcaaccagactctccagtctcttctccttgagcaaccccttgacccaatcaagcagcagagactggagagtctggatgagggattccacctcaacatc

SEQ ID NO: 59861 - DNA, 202 bp, Setaria italica
  Peptide Sequence Number=SeqID_125835
caactcgtagttctcgtagtgaaaactttttaagctggccaagatgcacctctggatcttctttgccaggtacatcggagaaatgcttttgtagtttcctgcgtggccaacatgcaaaacaaaattctccagtactggagtaattacttcctgctgattgaagcttttgaggctggcgagctcctccagtgtgatagccatg

SEQ ID NO: 59862 - DNA, 222 bp, Setaria italica
  misc_feature (28)..(28): n is a, c, g, or t
  misc_feature (55)..(55): n is a, c, g, or t
  Peptide Sequence Number=SeqID_125836
taaagtagtggtgaacttggaagcaagntccccagtggtgggaagttcaccgagnttcccagtgcgggaagccgtcagggagtatcagccactgttgctggcgcacaaaactcacctattgatgtggaagccattgaagatgaagtgcaggcaatatcgccatcacgagtaccccctccagtatgattctcttgaattgaaagaactactacacttttcaat

SEQ ID NO: 59863 - DNA, 244 bp, Setaria italica
  Peptide Sequence Number=SeqID_125837
gagctgcgcatggttgccgtgtgcttttttaagggagaccaactgataagcccgggcccagcaccagggtgcggacgttattggcttactgccgacctgcatcttcggttctggacttctggctctcgagagtaaaaaactgataaaataaggtgatggactgatggaagaagctgcttttactgtctgcttatctccaatcttcagtccatgcaggcctggttgcagtgcagatcgtgctttg

SEQ ID NO: 59864 - DNA, 371 bp, Setaria italica
  Peptide Sequence Number=SeqID_125838
catctgatctcactgtgacatcatccgatctatatgatttgttattaacagaagtatggcagattctgaacttgctccaggtccagatgcataataaggagtccacatagaagatacagaagtaatccttcttgcagcaagtatgtcatgtgcacatacaaccaaatctttcttcacttttttctctcttcacaatcctctcacaaaggaagcgtaatagttccaattcaacctgccaagattgagaaaaacaaaaaaggcatataaacctagagtttgttgaccatcttcagacagaaaaatgttcatatggttccataggctacatcactgaacaagtaaagtctaaagttaaaattttcttaagttta

SEQ ID NO: 59865 - DNA, 405 bp, Setaria italica
  Peptide Sequence Number=SeqID_125839
cagaatccgaagggcaatttacctaggacaaaagttcacacttccatgggcctgtaggatacttcatagtctggtagcaatctaagtggacagcagcctgctgatcatgaagagttaaataagttgatggagtgcaatttggagacgaaagacagtaaatgcaaagcaccttgcagctggagcagacaaaaatcgattcaatacagtatcacagcgcatgcatatatcacagggaagagcacttttcttggagaattttgcaagatcaaaaatgccaaagttggtatcttctgagactttgctattagtagaaaatgataaatcctttgcttgcggcgatgaagacgattggctaattcttgaggatccagcactggctcttggcatgttctcttgtctagcaga

SEQ ID NO: 59866 - DNA, 271 bp, Setaria italica
  Peptide Sequence Number=SeqID_125840
tgtctcctttctgagttcccgcgtttcttagcttccctcagatcacgaagaaactggttcacaatgatatgatcccattttcttttactgacagaatctaactcgtacgaaatattctggacaaccttgagtatcaaatcttctgcaagatataaggacgactgaaatatcaattcagaaagctgaagaaatataaactcaactaaacagttcattttgcactctgaagcccaattattaagatggtactgcgggggaaaccaaaaaaagg

SEQ ID NO: 59867 - DNA, 442 bp, Setaria italica
  misc_feature (360)..(360): n is a, c, g, or t
  Peptide Sequence Number=SeqID_125841
aatagaataaatacaattttcttgtatagtttgctccaaattattaccccacaaatcttgcacccttttctctatgaatggatgaatatagcagcggtaaccatccatgttccgcaaatgccggccagaaaccttatttacatgaggatcaggacagctgcaaaagccattttgaactaaatcacccttattagcattgtccttttcggggcaaggatcaatcgacaaggtcccatcctcctgtcttgattgaagttcagaaacggttgagttcttactttcactcccaagcaatgttccttaagagcagcttccagggattctgaatgaagacctggttctgattctaagtcaccaacnctatcctttccttggtcaactagctttgtaagacctctggaaatatctccagaattgctcataagattcccatctgcagtgg

SEQ ID NO: 59868 - DNA, 238 bp, Setaria italica
  Peptide Sequence Number=SeqID_125842
ttgataaacacattacagtaattctggtgatgttatttgcgatagagcaacccttctttattcatttttctttcaatttattttctgcaggacaacttggataattgatggccaaagatttgccaccaaaataaaaaatgcttctgggccttcagatcccagtaaacagaaatggatgagtaacccaagtaaagagtgcccgaagtgcagccatgtcattgataacagcgatgttgtt

SEQ ID NO: 59869 - DNA, 366 bp, Setaria italica
  Peptide Sequence Number=SeqID_125843
ggatcgacaagttaagactctggcttaaagagcaaacttacgccgataattcactgttgttgatagaaagttcttcatgggagaagcttagttctgatcagttgcccgatgatgatgttccatttggatagctgcacaaagggcggtgtctcgttacgaagggattcttatcacctgttggtcctcgtggcagattgttaaggagattgcttacatggaccggattaataccttctctgcctgaagcaaacgaataaaaagtagaatagaatagaaactaaacaatacttagaaaggaacaatagtagaaggaccaaaatttaactaaccaaaggaaattaaacccttaagaacaaaaataaataa

SEQ ID NO: 59870 - DNA, 252 bp, Setaria italica
  Peptide Sequence Number=SeqID_125844
cggatgaaaatgatcaaagtgaaaagaaggataaatctgagatgctgccgctacaactaaaaatttatgagaagattcctatcccagatctgccagtggtttttccccacaagaagttgtccttccgcatcctagatacagtaaggttggacattgctactgtaataggtctgttggcttacgttgtcaactacaaatttgagagtttagcatcatctccgctataagcagactcgggatagataccagctt

SEQ ID NO: 59871 - DNA, 249 bp, Setaria italica
  Peptide Sequence Number=SeqID_125845
tttaagttttaacttaagttaaggttacttaatttaacgtattattccttgtaggtagtccggttgggtattagtcttgttggtaacacaggacagagcaaggtgacatggtatgatgaagttatctgtgtgctgtgtagcctgatggagtggagcagggatggatcacagtggagtccaactccaacattacagtacactgctggaactgcgtggttgacatggcggcaacctcttgtattgtatcct

SEQ ID NO: 59872 - DNA, 205 bp, Setaria italica
  Peptide Sequence Number=SeqID_125846
gaccaagtctgagcttattgccaagcacagacttggtcttcagttcttcctccattgtagtaatctccttccgaagcacatcttctgctgttggttggtcctcgcgctgcaggctaatgaagtaagactggagcttcttggcagcctccatgaagctccagtcttacttcattagcctgcagcgcgaggaccaaccaacagcaga

SEQ ID NO: 59873 - DNA, 266 bp, Setaria italica
  Peptide Sequence Number=SeqID_125847
ccctgtctcccgtgagggcactcccatccctaaccccagctcctcccaccctcccttgttctaacgatttagcggatctacgaatcagggtttgcaagcggcggatgagcacgcaggcgcagcccaggttcgctcccctccccacggagcaatctgaatcccaagccgatgccggggctgcagggtatcagttccggctggtctcctacaacatcttggcccaggtttatgttaagagtgcgtttttcccgcattcgccatcagcg

SEQ ID NO: 59874 - DNA, 253 bp, Setaria italica
  Peptide Sequence Number=SeqID_125848
tgaatcccaagccgatgccggggctgcagggtatcagttccggctggtctcctacaacatcttggcccaggtacggccgccgtgtttgctttctgaagttgcttagcttttgggcatagatggatgctggtgcattgccgaccgcgactaataatttgctccaccctgcaggtttatgttaagagtgcgtttttcccgcattcgccatcagcgtgcctcaagtggaaatctcgatccaaagctgttctaacag

SEQ ID NO: 59875 - DNA, 398 bp, Setaria italica
  Peptide Sequence Number=SeqID_125849
gtttctagcattgtaagtggttttcaaatattgtttttggatattgagatcacttgcaatgctggaaatatgtacggatattgtcacactttcaatagtatttatatatattcttttggatatgttttgcagttgacacatgcacttacatccattcggcatgttaataaaacagatgttgtcacactcggttcatcttttggggtaagttggacaaagaatcactttgacatggaatccttgcaacttcatatacagtatagttgcttgacaatgcattctgttttggtactttaatatagcagtagcattcacacaataaatcgagcaacaaagcatgcatgatataaaatgtatttgttactttcagtcactctcacaagttatgaatgcttcta

SEQ ID NO: 59876 - DNA, 227 bp, Setaria italica
  Peptide Sequence Number=SeqID_125850
cagcttcatgcctgaccattggatgctcacagacatccttcaggaccatggaaagtgcatctgaagcggctttattttgcagctgacctaacacataagctacctgcaaaataataccgagaaaggcactatgttggataaaaccaaatgcattgaaatgccaagataaaaattacttaattcttgcgacagatatgatattatgaccttggtgaatcaggcaatgt

SEQ ID NO: 59877 - DNA, 242 bp, Setaria italica
  Peptide Sequence Number=SeqID_125851
atttttctttccttcctccaaccacgagagcaccggcggcagcggattcctcccgaccgagaagaggaagaagaagatgggcgggttcgatctgcaggtgaaggagcggaccaaggagctgaagcacctcaaggccgcggcgatgaggggcatcaaggcggccggcgagtcgtgcaagaaggcgtggagcaaagtcagctgagacacgcaacagggggtaggcaaggcacacaggggatagg

SEQ ID NO: 59878 - DNA, 307 bp, Setaria italica
  Peptide Sequence Number=SeqID_125852
tttacttttacgttttaccttttcgtttcttttgttttccgtttactttcgttctttgttccgttattcttcttgtcgtttggtcgttccctttgtcctttgcgtctccatctcatcccatgactcaccaccgtcatcttcatctgagccgccatcatcatcaccagaattaaccactgattcgctgtcgctgccctcattatctgattcagacccagtctccatatcagaaggctcatactggtcatcttctgtcctccgaactctctgaatcagagtcgctggcatctggattcaagaattccca

SEQ ID NO: 59879 - DNA, 109 bp, Setaria italica
  Peptide Sequence Number=SeqID_125853
aatttatatgagaggatttatgcttgcggctcacttggtgtttgcaagcataaatcctctcatataaattaaaattcacagcagcaaatccaagtatagtgaacagaag

SEQ ID NO: 59880 - DNA, 419 bp, Setaria italica
  Peptide Sequence Number=SeqID_125854
aaagcctgtcttgttcttatacttttctaatttatcctggaaatgctctcaacgcacccaatgctatactcagatactgcttgatgcattgttaataatgccatatgttgacaaaagaataaaacctggagattaaatgctacctactcagtttgaatcagtaaccataagtccagcattacagcatcataacagaataccaatatgttcgattgcaacctttagacttatttggctggacctattgcgttttattgagctctgctctcttgtagtgaaaacctaacccttttataacgttctaatatgtgattttctgttatccaggccggttatgatggaagtgttctgaagttgcgtattcccttccctaggcaggcgcaagacaggaagtgagtctgcacttctttgtacttctc

SEQ ID NO: 59881 - DNA, 176 bp, Setaria italica
  Peptide Sequence Number=SeqID_125855
agtttaaagacaagttacaattacaaaagaatactctccggaaatcctaaatgctcacttcttgttgccaaagaccctgaggacagaacagatactgtaatcactgtatatggtgatgctgtccctgtaatccctccctcctgcgcttgcccactctctatatcatgccttttccc

SEQ ID NO: 59882 - DNA, 407 bp, Setaria italica
  misc_feature (313)..(313): n is a, c, g, or t
  Peptide Sequence Number=SeqID_125856
ttaattttacttttaatttttagttaaaggttttcttgtattgaacaaaagattcagtgagaagtgcttacctacgaagacatcctaatgccttttgggtatgctttcttaattttgttaccattccaacttccaaagaccaaacctactttaatggagtactgatttatgatatatattttttggccaaattaaggttgattttggtgacttcagtttcctgcgcattaaaccgaagctgtgcgctatgtatctggtgttgcaactgctctccttggctctggagaattcagtgctgctgagtacagggaancaaaagttgacccaatatctcaattctcgactcctattacaagccacatgaataaggatcatgctgatgatacaaagctcattgtgcaacactc

SEQ ID NO: 59883 - DNA, 253 bp, Setaria italica
  Peptide Sequence Number=SeqID_125857
ttagcaactaaccttgccttatactttggaggctcacttggagataaaccctcctttcgtttgaagatccatttgcagcggatggccttcttattcttaggcaaagcctctttataggttgctggctcatgaacattctccacctgttcagcacaactcaaagcatggtaagacaaattacattcttcaatgagacgggtaggaggagcaactgtccttttggacttgcggtgagcaatgggtagatcctcct

SEQ ID NO: 59884 - DNA, 373 bp, Setaria italica
  Peptide Sequence Number=SeqID_125858
tgtcttgtctattcggtctaagtaccgttgtcccttggttactacgttgtcacgttgatctcgttcagcggcgcgtcgagcctcaccggggcgccgctcttggacaccaccaccttcgtcgtgtcgaacaggttgtaccaggtgcccggcgggaacatggcgctcaccaaggtggcgccctcctcgagcaccggggacaccatgacgctcgagccgagcaggaactgcgtgctcagcccgtagcacggcgtgaagtccgggaaggagaagaacactggccgtgccaccggggcaccggtcaggtgcgcttggtagttgagcgtgtacaggtacgggagcagcttgtaccgcatgccgagcgcgttccgcgcgg

SEQ ID NO: 59885 - DNA, 313 bp, Setaria italica
  misc_feature (298)..(298): n is a, c, g, or t
  Peptide Sequence Number=SeqID_125859
tagggaaaggactacgaattaacttacaaagcaacctgaggaatgcaaagttctgtttggctcctcgtggcgaatcgtcatggacacttcgattctatgagtccttttttgtgatgaagctgagcttcctttccagaatgtgatcgactacagagaaatctcgattaagtggccgtcgtctaggattgggcctgaactacttgagtaccttgaatcaataccagatgaaagggtagaggaaatgattggtcatgggcgtgacatgagatgcttgtgggtgtatgcagcggattcgganccttgctctgccatg

SEQ ID NO: 59886 - DNA, 205 bp, Setaria italica
  misc_feature (32)..(32): n is a, c, g, or t
  Peptide Sequence Number=SeqID_125860
tttaaacctgcctcctttgcagcagctttggnggcacgctgagcttcctggatagcacgtctctctgctttagagagacgtgctatccaggaagctcagcgtgccgccaaagctgctgcaaaggaggcaggtttaaaaatcaacagccaaggagtcagatgtgaacaccaaaaatatcaaagcaacctaaggcaggaaaggcatc

SEQ ID NO: 59887 - DNA, 368 bp, Setaria italica
  Peptide Sequence Number=SeqID_125861
ttttcaatttgcaacgggaaattgaaaccataagtcatcgggtttgattttttgtagacctctccattccttatcacaaggaagccagaatctccaatattcgatgcatgaagggacctgtccatcaaagtgagcaactaaaacagtggaagaaccaggggaccgtgcttcatctgcagcctttgcaagaacttcctcagttctcatccctggagctccttgagtctctattacaatctttttgcaaccatccataagttctctcgcataaagtccagcattgatcccttcaaatgaaccaactagaaccaaactaccaatactagaccaacgtaccgtaaacctaagtaccgttactaacttaagta

SEQ ID NO: 59888 - DNA, 278 bp, Setaria italica
  Peptide Sequence Number=SeqID_125862
tcgaatttgaccccgtcaactccgctgcaacggcgcctttgtcttcgaaacccggaacacccggcgcctcctctgcacagcctgcacccagagcagaccaagccaaatcgaatcatgaaacgaagaagtaaacaaaagttagcagcaaaaatcatcagcgagcagtcaaacagacggcggttgctattccgttcaaccgccacggcaggcggggattattggtcttccgtttaccgaccacggcacgggttgggcgttccattcaccaccaaccgcgc

SEQ ID NO: 59889 - DNA, 170 bp, Setaria italica
  Peptide Sequence Number=SeqID_125863
ttctttcttattgtagggtcttgtttctatttaggtttcttgtttctgttagcattaaagaaaatgctcatttggttttgcgcaatgagtactgaccgtgggcttgagatcggcttgtaatgatttggcgacaatgccagctacttcttcctcgtagacattgtcgaaga

SEQ ID NO: 59890 - DNA, 198 bp, Setaria italica
  Peptide Sequence Number=SeqID_125864
attcttcaccttatctttttctagcattctgattccgctgatcatctattccctgaagcgcagatccctgtgtgggagttgatctatatccccacagctatcattctccttaattcagttgggactccgagggccaatgaatggattgtcacacagaagctggggaatttgcagaagctaaagtccattgccagtgtt

SEQ ID NO: 59891 - DNA, 189 bp, Setaria italica
  Peptide Sequence Number=SeqID_125865
gctcgatcattctattccctgaagcgcagatccctgtgtgggagttgatctatatcccccacagctatcattctccttaattcagttggactccgaggttagatcagtttttcttcactgagtttcatagcgtagtactacctccagtcaaatttgcttgacgtttcagccatgaaaacacaagttgaa

SEQ ID NO: 59892 - DNA, 411 bp, Setaria italica
  Peptide Sequence Number=SeqID_125866
ggtagtccgtagcagctccagaattgccaataggaaaaacaatgctgaaaatcaaagatggaagaagaggataatggtccagctagccatccaaaggcaaaaggttgaagaggatagtaatgatcctgctatctgttcaagtgctagatcgctaaggcagaacataaatgtgaagaaacaaacaagaaaagtagagcagaaaagcgaaaggctccaagctcagctgctctgaaggatgaagagcaaatatcggatgtcaagggattttctgtcacgaaacagcagctgtcttcacataagcagaagaacaaagtagaagaaacgcagcaaatgaagaaaactagagaaaggaaaggagcgccttcaatgtcgcatgcatactcttctccatgctttggagaacttggaggc

SEQ ID NO: 59893 - DNA, 256 bp, Setaria italica
  Peptide Sequence Number=SeqID_125867
agcagcgcagaaggttggcgatgctcagaagggtcaccttcggtcccaggctgagcccagggcacatccgctggccggccggacccgaacggcagcaactcaaagtcttgccccttcacgtcgacctcgctcccgatgaactgtgccgggcagaactcctcgggcgcgtcccacagcgcaggatcacggccaatagaccacacattgacgaacacgttggtgccggcggggatgtcgtagccgtccacggaggtgt

SEQ ID NO: 59894 - DNA, 419 bp, Setaria italica
  Peptide Sequence Number=SeqID_125868
gaaattctgaggcaacagacactgccgtgacatgtccatgccacgattcaccttgcccttcaaccttacccatgactgcaaaagagaagtctagcttacttcccttaaataaactaaacaaaggtgaaccaggaagaaatggaacaagcagaacatttcattcaacgctggagaaggggataaagtttttaacattgatgtgttcaagattaaaactaacattaatctagggtaatggtgactcatccggaaatccttttcatatcttcacctgctacttcgtaaacccctcttatatgaagcaatattgcaaatcccactatcctcacgtgcatttgcactgctggacaatgcctacttggactacaaagtcatcgattccaccatactctccgcatgtccacatatgactaattgtg

SEQ ID NO: 59895 - DNA, 351 bp, Setaria italica
  misc_feature (31)..(31): n is a, c, g, or t
  Peptide Sequence Number=SeqID_125869
cgatggcacgacaaccatgtcgactcatganaggaaagccagcatcaaagaattctatgctgtgatatttccttctttgctgcaactgcaaagggggatcactgatgtggaggacaagaagcagaaggctgtgtgcatggagaggtacagaaagaaagatgaggacgaacgaagcagcttatctgatattgatgttgagagggaagaagagtgtgggatctgcatggagatgaacagcaaagttgtgttgcccaactgcacccacgtcttggtcctcaacatagatccacaggtcaccaggacaggtcttcttcaggtgacctgtggatctatgttgaggaccaagacgtg

SEQ ID NO: 59896 - DNA, 236 bp, Setaria italica
  Peptide Sequence Number=SeqID_125870
acctatggagcagttgaccctaacagtgggacagcttcacttcttgacattgctcggcgtcttggaataatgctgcagtcaggatggaaaccacggaggtccatcatcctttgtagctgggatgctgaagaatttgggatggtaagtagacatggaagaaagatgataatatgttactgtataaacgtgagatatatatctataagtggacctagatatgctcttaacattagata

SEQ ID NO: 59897 - DNA, 342 bp, Setaria italica
  Peptide Sequence Number=SeqID_125871
ctcctgtactctgtagcacctttctgtagctgctcagccatctggtttgaatgcaggatcccttgcaatttgatctgccatctccttgatagatggatcatttagcaaactttgcatagaagcaaaatcgaaaggattcgaaaagcctgctggaggaagcccttgatgttcgttggatgacccttctggttttggacttttcttctcatcagcagatccaggcggatccccactcgacgccatcccggtagagcggaagggacgaagggaagacctaagtagactaagacaagaagaaggaaaataccgaaggaacgtaactaaggaacaaaccggaacgaa

SEQ ID NO: 59898 - DNA, 414 bp, Setaria italica
  Peptide Sequence Number=SeqID_125872
gatctggcagattgttaggaagaacaactccttcctggtgaagcagttcggcaacggccatgccaaggtgcagttcaccaaggagcctaacaacctctacaacgtgcactcgtacaagtactccggcttggcgaacaagaagaccgtgacaatccagcctgcagctggaaaggagtctgctgtggtcctctcgacgaccaagaccaagaagcagaacacacctgccaagctcaaccacaagtctgtgatgcgcaaggagttccgcaagatggccaaggctgtgaagaaccaggttagcgacaactactacaggcctgacctaaccaagccggctctcgctaggctgagctccgtgtaccgcagcctccaggttagaccaaagtaactaaggaacgtaaacaaaagaaaaagaaa

SEQ ID NO: 59899 - DNA, 350 bp, Setaria italica
  Peptide Sequence Number=SeqID_125873
ttgagacttgaagtgagacttgttagaactagagctaccttgttaaagctgctgctgtgtgtcgttccataatcacaagcttagtgcttagtctgcctgttcttcttcttgacgccagacttggcaacctggaggctgcggtacacggagctcagcctagcgagagccggcttggttaggtcaggcctgtagtagttgtcgctaacctggttcttcacagccaagaccaagaagcagaacacacctgccaagctcaaccacaagtctgtgatgcgcaaggagttccgcaagatggccaaggctgtgaagaacaggttagcgacaactactacaggcctgacctaaccaag

SEQ ID NO: 59900 - DNA, 296 bp, Setaria italica
  Peptide Sequence Number=SeqID_125874
accgtgacaatccagcctgcagctggaaaggagtctgctgtggtcctctcgacgaccaacgaccaagaagcagaacacacctgccaagctcaaccacaagtctgtgatgcgcaaggagttccgcaagatggccaaggctgtgaagaaccaggttagcgacaactactacaggcctgacctaaccaagccggctctcgctaggctgagctctagttctaacaagtctcacttcaagtctcaaaactgtcggaacaaagataataagctgggactatttgagcacctaactaggtact

SEQ ID NO: 59901 - DNA, 246 bp, Setaria italica
  Peptide Sequence Number=SeqID_125875
aggagagttcggcaacggccatgccaaggtgcagttcaccaaggagcctaacaacctctacaacgtgcactcgtacaagtactccggcttggcgaacaagaagaccgtgacaatccagcctgcagctggaaaggagtctgctgtggtcctctcgacgaccaagaccaagaagcagaacacacctgccaagctcaaccacaagttcttgttgattgtcgtctaaggtagtttccgcaagattggcca

SEQ ID NO: 59902 - DNA, 207 bp, Setaria italica
  Peptide Sequence Number=SeqID_125876
ttggtgctcaatagtcccagcttattatctttgttccgacagttttgagacttgaagtgagacttgttagaactagagctaccttgttaaagctgctgctgtgtgtcgttccataatcacaaattgcttgcacttgatgattgcaactttatttgcatacttgctagacgacaatagaattaactaccgtttacaaaaaaaaaaaaa

SEQ ID NO: 59903 - DNA, 133 bp, Setaria italica
  Peptide Sequence Number=SeqID_125877
cggcaacggccatgccaaggtgcagttcaccttggcatggccgttgccgaacaacctctacaacgtgcactcgtacaagtactccggcttggcgaacaagaagaccgtgacaatccagctgcaggctggattg

SEQ ID NO: 59904 - DNA, 200 bp, Setaria italica
  Peptide Sequence Number=SeqID_125878
tggtgaaggaggtgaatcaaaagaaaatgatattaatgaaggctggatcatggcaacagagttggtgacagtctcacggttgagtaacatccgaaaataagctgtctcatctggactattattgaaaacctggacaaattgtgaacgccgcaggttactgagacacgcaacaggggaaggcaaggcacacaggggatagg

SEQ ID NO: 59905 - DNA, 333 bp, Setaria italica
  Peptide Sequence Number=SeqID_125879
ttgtcatgccatggaagatgacaacactaaagtatgcatcaagtagcagtatccggtctgctgctatcgatgccacatcaaggaatactggtgaaggaggtgaatcaaaagaaaaatgatattaatgaaggctggatcatggcaacagagttggtgacagtctcacggttgagtaacatccgaaaataagctgtctcatctggactattattgaaaacctggacaaattgtgaacgccgcaggttaaacataaactgagggaacaatgacccctcttcatttagcctacattcaaatttctcattgttcccgcaggttaaacataaactgagg

SEQ ID NO: 59906 - DNA, 214 bp, Setaria italica
  Peptide Sequence Number=SeqID_125880
tggccactgatcgggctgcaactcgtccagcaactgctgagcgtgcactcgcactccgacactgggagcaggaacctgttcaccccggccgtcgtggcgggatgcatcccgttcacctgcggcccacctggctgctgcggcatcttggatcagctggggctggccggcgccggccgcccgggcttccccaagatgccgcagcagccaggtgggc

SEQ ID NO: 59907 - DNA, 139 bp, Setaria italica
  Peptide Sequence Number=SeqID_125881
tggtgggatgcgcctgcgctctccgcgtgcgtgcggtggcgtgggctcggtttcgtcgttcgcctgttcgctcctcggtattagtggaaccatccacccatttcctgcatatcgtagtaactcttatcctcatttggcc

SEQ ID NO: 59908 - DNA, 418 bp, Setaria italica
  Peptide Sequence Number=SeqID_125882
caaatatggtggagaaataagttgcccgcactgtcttcatgaacgttatgttaaacaggaacacacaaaaaaaatgttctctacaagatacagtacttggatgtccattgaagtatactgaagttcttatgtgcaaagaaccacaatgaagccacaaacgatgaaaaaccaagaattttcgaagtacgtgcaaatcatgagatgaagataacaacaaacgagaatgaaccatgaaacatgtagaaataacaaacctgcgagccgtgttggtcgcaaacaactagtcttggaactggaaatcgaccttttattatcatctgcgcctcctcatggggtgcttgtaacagttgtgcgaattgctcatgctcaggttgttctggtaacccatgttctccactgagcaattgtcatgccatgg

SEQ ID NO: 59909 - DNA, 445 bp, Setaria italica
  Peptide Sequence Number=SeqID_125883
tgtctaaagtctagtctaagttgttttcctaagtcgtttctattctagttagttaagtaggttgtcctattggtcggtactattcgtcgtttgtcttggttggtcggtaggtagtttcgagaagagggtgaagcggggagcccccggcgccagcggcgaggcggacggtagcggcgagaggaggaacttcggggccgtggccaaggtgtggagctcgtgggtggagtccgcctcggccgccgcgtccggggtgagtgtcaacgtcgccgtgcagctcagggagctggagcccaagaccgggctcggcctggccgccgtcgccggcctcttctccgcttaattgtagtctctactctctttttgattcggcggaagagtagtgttatgaatgcctcttccccccggagtgatcaatcaaaatggatcatatgccggtgtaacctgt

SEQ ID NO: 59910 - DNA, 435 bp, Setaria italica
  Peptide Sequence Number=SeqID_125884
tttctttaagttttgttttttcctttaagttcgtttttcttatttctagttagttaagaggtgccatggcggacatcgcgttgctggtggcggaggagttcgagaagagggtgaagcggggagccccccggcgccagcggcgaggcggacggtagcggcgagaggaggaacttcggggccgtggccaaggtgtggagctcgtgggtggagtccgcctcggccgccgcgtccggggtgagggtcaacgtcgccgtgcagctcagggagctggagcccaagaccgggctcggcctggccgccgtcgacggcctcttctccgcttaattagtagtctctactctcttttgattcggcggaagagtagtgttatgaatgcctcttcccccggagtgatcaatcaaaatggatcatatgccggtgtaacctgtacattca

SEQ ID NO: 59911 - DNA, 384 bp, Setaria italica
  Peptide Sequence Number=SeqID_125885
agaagttggaggttggtcaatctggggcaatcaagcttcagaacctccagtgagctacagttgctgaaacacaagtaaatattgtaaggcaaattcactattaccaggggttatggtgtccccatcaccacaggtataataatccagcatgttgcggtgtttcaaaaaaattagaaaaagtaagcatgtacatcatacacataaacttaagtaaacctaaaaataattcaatttaaaattcatctatgatatcaagattcaaaaacagtgcccgtggcacatgatgaacaatgattgattggctgcctgtctattttgatccttgagacgtgcccgtggcacatctaaaacgaatttgaaattgcttttttgctggtttttaaa

SEQ ID NO: 59912 - DNA, 316 bp, Setaria italica
  Peptide Sequence Number=SeqID_125886
agtcaaccggcatatcaacagaactgcaatcattgcacaccaattcttgcaagtttgtacatccgttcaagttcacattaaccagatttgtacagcatgcaagaagatcttctatcgcagtctgcccaatggatgagtaggacagatctagctcaacaagcaatggaagagcaccgtctctgtaaagggcatctaacgatgagtcaccgaggtacttgcaggctgaaagttttaacaccttcaactgaggacaattgtcttctttgcattgtcttcataagctgaccttgcttgacctgtcttacacattcctgat

SEQ ID NO: 59913 - DNA, 159 bp, Setaria italica
  Peptide Sequence Number=SeqID_125887
acaaaatcttaagaatataagtcttgtgcacttacgcaagtttgctgatttggcaaatccagtgacacagatgtcaacaggctgcagttatcaagttgtagcgcctcaagcagacggctataagctattgcagccatggaagcagatgtaattccttcg

SEQ ID NO: 59914 - DNA, 248 bp, Setaria italica
  Peptide Sequence Number=SeqID_125888
agaacaagccacaataaaagataaatacaatgctcttcaacttaggtgaacttcattgctagtccatcttccataatgaaaaagaagcaggtcgcaacttgaactttaatgttaaatacataaagtgcagggatgacattggaaggcaatgctaatttctcttgaaagcaagaattgacttactcgcagacaagcaaggtataagaatatgcttgaaaacactagtaaaatggtactaaaagtatgtc

SEQ ID NO: 59915 - DNA, 251 bp, Setaria italica
  Peptide Sequence Number=SeqID_125889
gcattgtatttatcttttattgtggcttgttcttcattgctagtccatcttccataaatgaaaaagaagcaggtcgcaacttgaactttaatgttaaatacataaagtgcagggatgacattggaaggcaatgctaatttctcttgaaagcaagaattgacttactcgcagacaagcaaggtttaagcttgggggattgttgacgatcgttattgacatacttttagtaccattttactagtgttttcaag

SEQ ID NO: 59916 - DNA, 357 bp, Setaria italica
  Peptide Sequence Number=SeqID_125890
cattggcatccagtgtagcttgaggcagcttctggaatatggttactttcatgctgatcctcatcctggtaatatattggcaacacccgagggggaaggcttgcttttcttgatttttggcatgatgagtgaaacaccagaggatgcaagggtagccattataggacatgttgtccacttggtcaatagggactatgaagctatggctcgtgattattatgcgctagatttcttggaacctgatgtcgatgtttccccaattgtgcctgctctcaaagaatttctttgatgatgcgctgaaacgacaaacaagtagaagtagaagactagaaaacttacaaaagaacgaataagtta

SEQ ID NO: 59917 - DNA, 462 bp, Setaria italica
  Peptide Sequence Number=SeqID_125891
ccatttgatgcgtagactcatgcaaattacaatgaaaaatcaaatttgtcacagaaacattcacagtgaaaccagtctaatgcatcaggaactagatggagagccttttcaagagatactctgctacaagaaacattctattaaggaacacaataaaggagcttgggtgtcaaaatgatccatgggacatttttctgcagcaatcaagaacatacacacagcatcccacgattagggacatgatgcacgcggttcaggagaaatatgtgcggatatcaagaggccaccacggtgatcctgaatacattgcaaaaggatcgtcgataccaatacttaaataggacaagtactaactacgggtaatagttacaatacggaaggactaccaaggactactaccaacaaagaagtaccgacaaggtaccaaaataccttaaccctacaaaacttacttagaataga

SEQ ID NO: 59918 - DNA, 351 bp, Setaria italica
  Peptide Sequence Number=SeqID_125892
aaagggtaagaaattaaacaaaagaaagttaactaagaaagacaagaacaatacctactactagctggatccttctgtatgcaagaggagataaatgagcagaattctggagagaactgatctgcaggtgcagaaggtggtggctgatcaacaattgcttcaagaagttcatagaagcttatccaaccttctccttctgaaggtatataggggaaccggccaatggcacactcaagtatcaccagtcccaaactccatatgtcgctcttgtagtcgtaagagcttccactaatcctctcaggtgccatatagttgtaggttccaacaaatgtatcccgctgacccattgaa

SEQ ID NO: 59919 - DNA, 331 bp, Setaria italica
  Peptide Sequence Number=SeqID_125893
tttaagtttcttaattctaattgtcttgattatttattggtaggggtaagtaagtattcttgttgtcgtaggtaactaaaaggggtaaagttttcttccgttgttctaaagtattttggtctaattggttcttaattcttgaagggcaagctacctgctggttcggattagaccattgccaaagtttctccgtgtcaaagatttggcaatggtctaatctgaagggcaagctacctgctggttcggatgaatgttcggatgccgggagccttccatggatgaagagaggaggtgccgcggatacatcaaacatatgactctgtactagtgt

SEQ ID NO: 59920 - DNA, 224 bp, Setaria italica
  Peptide Sequence Number=SeqID_125894
aaggacatgtcgacgatgccggagccgccgcacgtcctggccgtggacgatagcatcgtcgaccgtgcggtcatctccaggctcctccgcagctccaaataccgagttacgacggtggacagtggcaagagagcgttggaggttctgagcctggatcgcagtgtgcacatgatcatcacggattgccggagatgagcggctacgcctgctgaagcgtgtgaagg

SEQ ID NO: 59921 - DNA, 491 bp, Setaria italica
  Peptide Sequence Number=SeqID_125895
ttctattggatggctggattgagaatctagtacagctaaatgttctccctgatattctctgcagcatacatctctttggtgctgactatggagttttcgatgtttctcggtggtcaatttcagttggctcaacagttgatgttgaactggtggtccaaggtcaaagcttctgatttagttagaagaaagcgtcttttgaagagtcaacagttagctatacaatgttttgaattagttttgttcattttaggaaaatcgagtttctcgtgacccacttattttcaatgctatggggactttactaaaattagacagttttatttggccataccaaatatttctggaataacatttgctgtagacatgatagatctttaagaatctgatttcctgttttgtgtgatgtaatgaagctaagatgaatgtgcgtgatgcttatggcatttcgttgtctatttttttacctaaaaacaaaaaaaaaaaaaaaaaac

SEQ ID NO: 59922 - DNA, 363 bp, Setaria italica
  Peptide Sequence Number=SeqID_125896
aagaatactagaaatttagtcattgtattgtgacaatttatgttctatagtattgcacaacaatatttagattctaaaaattcgatggaccaccatttaagttccatactggtaaaagcacaataaatagtatgttatctttactcgctctcctgcaaccaccagaaactcatcatacttgcatgttttgttcaacctagattgattcagccataaaagagggtgttaacattctgaagatggtggccaccaagggtttgacagaggctgcaagattgtcaaatgcagatcagaagtataagcatctgagatcacatgatcttcaagactgaaaatgatgagactctgcttatctggggaatt

SEQ ID NO: 59923 - DNA, 294 bp, Setaria italica
  Peptide Sequence Number=SeqID_125897
tcgtcaacgcagagatggatctacgagctccagtgatctccctgccgtccacaattcccaggcataatgctccgtagcgccatgtaaaggacgttgacaagaaggtttgaagctcctctttcccatgatcatctcaataagaatgacaccgaaactatatatgtcagacttagttgaggccctacccaccaacaagtactcaggagccacataaccaagtgtgccctcaatcacctcttcattcaaagcactgcccagtaatctggctatgccaaaatctgtaatcttaggatt

SEQ ID NO: 59924 - DNA, 248 bp, Setaria italica
  Peptide Sequence Number=SeqID_125898
ggcgccggagcctgccatgggtggatcgagtcgaggactcgaggtgtggcctgggaaggcgaggaggttgaattggaggtgctcgaggtggccgggcagggccactgcttccacctcgttgacttcgcgtgcgccgacgccgtcaagcaggacgacgccattgccagatttgttaacctgtaaaatcctcacgtgtgctatacattgcatttgcgcacaatgtttgtgtatcctctatgatttgcagg

SEQ ID NO: 59925 - DNA, 477 bp, Setaria italica
  Peptide Sequence Number=SeqID_125899
caaatctgcaccggccttgcgtcgtcgttgcacagtgcagaatttactctgctgccagctgcgtccctgcttcttcctcttcgtctccgtctctggcggcgatatgcgcgcggaggtgctggtgctcgccgtgctcgtcgcggccgcggccttcctgtctctcgactcgctcagcgacgtcaggcggctcgagatagggaacggcgacgacgtcgagctggtcccgctactcgacggcgccgcggggcccgagagcatcgccttcgacgagagcggcggcgggccgtacacgagcgtgtcggacgggcgggtcctcaggtggctgccggaggagcggcggtgggtggagcactcctgctcggcgccggagctgtaagtatcgccgatgcccgtccgtcatgcatgctagctctctctgttcatctggtacacggtagctcttgtaacgctgaaactacgtgatctcgacatcctcgt

SEQ ID NO: 59926 - DNA, 448 bp, Setaria italica
  Peptide Sequence Number=SeqID_125900
ttctgggttggtctccatgccaagagagggaagatcgccgagtggtcgatttcttacccttggctaaggagattgatactcaagttgccgatgcgccatgtccagcgtgcctcatggctcttgaatcggcttggccgtcaggttatagcgctgaggttgagcgaggatgggaaaacaatagaggtggttagtgttcacggtgccgtacaaaaggctttcaagtcggtcagcgaggtggaagaaaggaatgggagcttatggataggctctgttacgtcaccttttctcggagtatataagttgtagaagcttatgatacgattgaatatgcatcggatatatgattattcacatgtatatgctactgtttgtccaccattataaacaatgcgcatgcattgatcaggctcaggtttggtactttttaaacaaaaaaaaaaaaaaaaaa

SEQ ID NO: 59927 - DNA, 407 bp, Setaria italica
  misc_feature (386)..(407): n is a, c, g, or t
  Peptide Sequence Number=SeqID_125901
tagtacgaatttacttaacccttaggactaaaggaagaattagaataactacaaagttagccgatgcgccatgtccagcgtgcctcatggctcttgaatctgcttggccgtcaggttatagcgctgaggttgagcgaggatgggaaaacaatagaggtggttagtgttcacggtgccgtacaaaaggctttcaagtcggtcagcgaggtggaagaaaggaatgggagcttatggataggctctgttacgtcaccttttctcggagtatataagttgtagaagcttatgatacgattgaatatgcatcggatatatgattattcacatgtatatgctactgtttgtcccaccattataaacaatgcgcatgcattgatcaggctacnnnnnnnnnnnnnnnnnnnnnn

SEQ ID NO: 59928 - DNA, 357 bp, Setaria italica
  Peptide Sequence Number=SeqID_125902
caaaaaataactagacaaaccggacctagacgtacgttagacaacaagtagacaagaaaatttaactactagctgcctccctgcttcttcttcgtctctgtctctcgcgatgcgcgcggaggtggtggtgctcgccgtgctcgtcgccgcggcggccttcctgtcgctcgactcgctcagcgacgtcaggcggctcgagataggggacggcgacgtcgagctggtcccgctcgatggcgccgcggggcccgagagcatcgtcgtcgacgagagaggcggcgggccgtacacgagcgtgtcggacgggcgggttctcaggtggttggcggaggagcggcggtgggtggaacactcctg

SEQ ID NO: 59929 - DNA, 333 bp, Setaria italica
  Peptide Sequence Number=SeqID_125903
acttcaccgagaccagtacaaggtttcagagaaggtgaatgcatcatcttcgaactttaattatgtgcttactttccttttcacatcagtttgatgatctgaggtgtccattgaccacggttactaagattcatctgcagggagtttctgaacattgttatatcaggtgacaatactggtagattgttaaaatatgacccaaagagcaatcaagtggaagtcttggttgatggtctatctttcgccaatggcttggcaatgagcacggatggcacatacttgctcctagcagaaaccacaaccggcaagattcttaaggttacttggattcaa

SEQ ID NO: 59930 - DNA, 321 bp, Setaria italica
  misc_feature (251)..(321): n is a, c, g, or t
  Peptide Sequence Number=SeqID_125904
tacggttgtcttatttctaaaaggtttttctaagttctagttctagtcgtaggttggaagaaaggaatggaagcttatggattggctctgtcatgtcaccttttcttggagtatatagattgtagaagcatttggattgtatgattgaatatgcaacgtgtatatgcgtatatggtagtcgtttaatagaataacattatacacgtgtatatgcatatttttcccaccatataatcaaatttatttgaacnnnnnnnnnnnnnnnnnnnnnnnnnnnnnnnnnnnnnnnnnnnnnnnnnnnnnnnnnnnnnnnnnnnnnnn

SEQ ID NO: 59931 - DNA, 231 bp, Setaria italica
  misc_feature (214)..(214): n is a, c, g, or t
  Peptide Sequence Number=SeqID_125905
tccttaaaacaaatctgcaccggccctgcgtcgttgcacagtgcagaatttactctgctgcctccctgcttcttcttcgtctctgtctctcgcgatgcgcgcggaggtggtggtgctcgccgtgctcgtcgccgcggcggccttcctgtcgctcgactcgctcagcgacgtcaggcggctcgagataggggacgcgacgtcgagctggtcccgntcgatggcgccgcgggg

SEQ ID NO: 59932 - DNA, 274 bp, Setaria italica
  Peptide Sequence Number=SeqID_125906
ccgccggagttgagccggatgaagtacttctgcgcgtggctcgctacctgcgtcggcgtccgggtcgtcacgtacttgcgcgagatgttcctccagtcccctctcccgtacttcttgagccccatcaagaacaacttgtgctcctcctccgtccaggggatgcccttcttccgctcctggtcggggccgcgcgcgcgcttgaggcagtagccgcgtctgaacccgccgtcgccgccgtcccaatcctccagggtgaacccggacgacggcggcg

SEQ ID NO: 59933 - DNA, 395 bp, Setaria italica
  Peptide Sequence Number=SeqID_125907
tatcaacggtcttcttcatcatgtgcagtgccagtcgtgcagcctttctttccttctcgcgcttcatcctcatttcttcctctagctttagttgtgcagcagcttcagcagcctttacctgtgcctcaattcttgctttctcttctagctgacttttttccagtctctccttttctaactgcaactttgcaaggtctacttccttcccatgatccagaagtgcattttgttgtgccttcacaattgttccagcaaaacgactcttgagcattgctatacgaagggctttacttggtgacaaaggttcaaggtgtaaataactttccacctcttgcttcctctgaacaaggggaggaaagttatttacaccccttgcttcctctgaacaaggggtg

SEQ ID NO: 59934 - DNA, 284 bp, Setaria italica
  misc_feature (246)..(246): n is a, c, g, or t
  Peptide Sequence Number=SeqID_125908
ttttttttttttgaactgacaccaattttgctccgcttataagaaataagttaagaacaaataggaaggacggaatagattacatagcacacacataatcttacaatcccaggttaacagtctggataaaggtatgctattgacagcagctgatctctccttcctcgacatcggcattcagggaggttgacaaactgtcctccagttcttgttcaacctcttcctcaagatctttctttatgaacnggccaagtgcctccagtgggctccctaagccctgtggc

SEQ ID NO: 59935 - DNA, 370 bp, Setaria italica
  misc_feature (347)..(370): n is a, c, g, or t
  Peptide Sequence Number=SeqID_125909
aaataacttacaaacaaattgtaggtttgtaagtattgtagttttgaaggagacgaagaagatgatgaagatttggatggtgaggatgtcgaggatgacgatgaggagaactgaaccctcagtgtcggatctggatggattctggaacagcatgtcagctgttggtgggggactgtggctctgaagggcggaattatgtgacccttttgcgagattttttttggtgcttgacttagttgggactcaccgtagggaactgtttaatgccttatgaagtcaaccaacttgaaaggagacctctatatcataatctggtatatctatgatgacggcaatttgaaaccttnnnnnnnnnnnnnnnnnnnnnnnn

SEQ ID NO: 59936 - DNA, 288 bp, Setaria italica
  Peptide Sequence Number=SeqID_125910
ttagttattatttagtttaaatttcgtttatttcgtttaatttccgttagttcttagttagtttattagtccgtattcctctgtcaagtcaatcaagatcaaggagcgaacggattggtgggcacctccgattcagccttggaagattgatcatcacctccttcgatgtttgaggccacgcttgacttcttgatctcctctaatcgcataacaacatgcgccattgatggccggctctgggacttgtgctacgcagtctatagcaagctgcaggagctgagccatcgg

SEQ ID NO: 59937 - DNA, 316 bp, Setaria italica
  Peptide Sequence Number=SeqID_125911
tattgtcgtcaacggcgctacagccgcgccgctcgtcatctcaggaggtttccgaccgccggccactgcggcaggcgtggaagaagggggtggcatctccagagaccgtgtctttgtgcccccagacttgcgacagaggcagacgaagaggaagaggagaagcgcggctcccaaggcggagcctacggcgattccggcaatggcgccgccagatagcttcttgctcttatgaccacttcgtcccccatttccaccgttgcttgccgtccgtttacttggtcgtccgtccgtccgtcttgttagttactttgttctt

SEQ ID NO: 59938 - DNA, 223 bp, Setaria italica
  Peptide Sequence Number=SeqID_125912
ccgttaaattcaataggctaaaagatgaaaaaaacagtcgactcagttgaagataggattcatcaaatgcatgaatcgatcgaatccgagctagagttatagccgattcctctgtcaagtcaatcaaagatcaaggtgcccaccaatccgttcgctccttgatcttgattgacttgacagaggaatccgagctagagttatagccgactactcacactgagtc

SEQ ID NO: 59939 - DNA, 376 bp, Setaria italica
  Peptide Sequence Number=SeqID_125913
cctccttggttcaatgtaaagaggaaaacaggagggtaaattttgaatcaactattatcatcatcgcattgtcaacgaatgaaacaaatagcttaacctttgaatcaactattatcatcatcgcattgtcaacgaatgaaacaaatagcttaacctttggatgtgggaccagcccggaacaaaaggaatccaatactgtacagtgtacacttgactgcaatcatcttggaggtggtcttaagaatggagtcggcacggatgagtatgacgatgatgcaagtggaactgttgagaattcagagtctggacgaccaaaaacgatgtggccttgtggttgtggaagggccaggtgcgaggtttgaggggtgctgtgatg

SEQ ID NO: 59940 - DNA, 254 bp, Setaria italica
  Peptide Sequence Number=SeqID_125914
taactctgtgtagcagtgttgtatcgatatgaatatgagggaaaaaaagttctggttctatctccatccattgtcaagggtgggagaccgtccatttacatattagcttctttacatgaaccaaggaggaaaacaggagggtaaattttgaatcaactattatcatcatcgcattgtcaacgaatgaaacaaatagcttaacctttggatgtgggaccagccccggaacaaaaaggaatccaatactgtacagt

SEQ ID NO: 59941 - DNA, 225 bp, Setaria italica
  Peptide Sequence Number=SeqID_125915
caatggatggagatagaaccagaactgttgattataccatgtaccaaggaggaaaacaggagggtaaattttgaatcaactattatcatcatcgcattgtcaacgaatgaaacaaatagcttaacctttggatgtgggaccagccccggaacaaaaaggaatccaatactgtacagtgtacacttgactgcaatcatcttggaggtggtcttaagaatggagtcg

SEQ ID NO: 59942 - DNA, 269 bp, Setaria italica
  Peptide Sequence Number=SeqID_125916
gcttctttttccttggtagcctaaataagtcctagcaatttgtgtgatatagttttgcttttctggagttagtcctcatgcggttgtaatttttcctgtattcatcactgctatctggttttgtgacttgtgttacaagttgaatcaggaaaacagtgctttgagtgctgtgattccaacccttttagttatgtggtagctggacatgtatttaggttttccttagtacttggttactcccataagaggagccacatgatcctaataca

SEQ ID NO: 59943 - DNA, 252 bp, Setaria italica
  Peptide Sequence Number=SeqID_125917
tgtttcaatgtcgacaggagttcaatacaacgtgaagtctgtcacaggggcagctaaccgtaaatgatagagtggccaacagcgaaagtaaatatttttcttcagtcgcaaactacataccccaaaatacaaggtgacaagcaagaacgtccactgcgtgtagtataggaagatactccatccatcagtgactatgtcgatcaaaagaagcgaagccagaatgaagaaggccacaacgcgaaatgccagcag

SEQ ID NO: 59944 - DNA, 277 bp, Setaria italica
  Peptide Sequence Number=SeqID_125918
gcatctggaaatgcacatagccgtagtcaagactccagaatagctatgtattgcaacacgagattcctccaggatctgcaaacctccgctcccctcttttccccaacggaatagctactgtaactgtaaaccgtcgtcacacccctgacgcggatggtttttggcatttgtcgtattaacctactaggttcctattgttgtcttttggttcgttatttctttgttctttcccttttactttgttcttatttttgttacttttgttcttttggtacga

SEQ ID NO: 59945 - DNA, 260 bp, Setaria italica
  Peptide Sequence Number=SeqID_125919
aagcagcgattcttgtgcctccgtaatacaagtttgtcatgaacacatcaggataaacgccttccccaaaaacatttctgcataggtccaaatggtacctcgtatcgatccttgcagaacgaacgctatccgttttgggtgcgatttgaaaaaaggcaacctcactgcaaacttggaaccaccagagcctagaacctaaaagaaattgtaatgtgaacaagtacttgcaggcttgcagctatgtagattcgaacaacaaa

SEQ ID NO: 59946 - DNA, 165 bp, Setaria italica
  Peptide Sequence Number=SeqID_125920
gcatatggacgatattcggatgcatcttatgacgtagaagctgcgcatctggaaatgcacatagccgtagtcaagactccagaatagctatgtattgcaacacgagatgcgcagcttctacgtcataagatgaatcttgtaatagtctgtcctgccttcttatct

SEQ ID NO: 59947 - DNA, 357 bp, Setaria italica
  Peptide Sequence Number=SeqID_125921
aacttgaaatcatgaactacaaatatttgattcaacaccttcaaggatgggaactcaccaccgagatcccccaaatctgcatgcaacccccatctgaaatcccatccgaaatcgaagaagcgaaagcgaggcacccacctgatggatgggcgggaacatggagcaggtgcagacagggcactcaagcagctcgagcacgctagtcgccgacggccccccaaccgctcctaccgcgtcccgtcttttgttttcgttcctgtcccgacccctgcattcacctcgcgaaacgcgcggccgcccccggcggagggcaggtgggcggagtggagcgggaggccaagggcgctcggagacggg

SEQ ID NO: 59948 - DNA, 262 bp, Setaria italica
  Peptide Sequence Number=SeqID_125922
caacacctccaaggatgggaactcaccaccgagatccccaaatctgcacgcaaccccatctgaaatcccatctgaaatcgaagaagcggaagcgaggcacccacctgatggatgggtcgggtaactattggtagtctaggttgcagacagggcactcaatcagctcgagcacgctagtcgctgacggccccccgaccgctcctaccgcgcccgctgcgcctgtcccgaccccttgtctatttctaccttcgtcgtaaaacgt

SEQ ID NO: 59949 - DNA, 423 bp, Setaria italica
  misc_feature (24)..(24): n is a, c, g, or t
  Peptide Sequence Number=SeqID_125923
aactagcacggtgactgctagggngttgaggaagagcataggatgttgatagtccgtggtgtgggaagctatcaagtacagaacgacaggaaccgctgtcaaaaacttttctgttgcgggtaagctgtttgccattgtccatttgttcccaccaagtcaatgtgttatacatcccttggtcatcagcaaatggagtccccttcttccagtggaaaaagtggtacgtgatctgaaagaaatatttgatgaggcaagcaacagaaatggaaagcgattttggctgaagtctggaagaaaaatgccataccgtaatcttacactgctaataagaaaatagaagtgttaattctactgtaatctcacactgctaagagaatcaaatgtgattctacttgttaaacctttaactaacttagtacttaa

SEQ ID NO: 59950 - DNA, 358 bp, Setaria italica
  Peptide Sequence Number=SeqID_125924
cctcttgacaaagagcagacctgtacatgtatcaattgccaaattcttgctagagaacgtataacaacattacgagtctacagaaccttttgttcactagttgcagaaagcatcatcgttccagccttcttagcatttctctgtacaatgattacatgtcatctacgaacagctctcaaacactgctaccggtactctggtgattcaattcagaactaggctcaacacctcctgtaatccaaatgaaacgcgacatgtataggtagtactaactagtagaagaatagactagactaccttaaagaactaagaaccggaacaaattaagaaataaacccaaaaaaataaccgaaaacaa

SEQ ID NO: 59951 - DNA, 353 bp, Setaria italica
  Peptide Sequence Number=SeqID_125925
gcaagcatgcatgctggtgcatggtaaattaggccattcctaactttcatggttttgctctgtatatagacgaaaggaggtgagttacaagatgaatcaaaagttccagggtaatatgcagaagtatttggttgacgggtacgattttctcaactactcttttctttgtttgaaatcacatgggtgatcctatatcaaacttggagctgctatgatggtgtcatcaatacagcagctccaagtttgatataggatcacccatggagctgctatgatggtgtcatcaatacagcattactgcatgttctctccatatgtatatatacgctccaagttaagatttaagagtagtg

SEQ ID NO: 59952 - DNA, 406 bp, Setaria italica
  Peptide Sequence Number=SeqID_125926
gatgaatcaaaagttccagggtaatatgcagaagtatttggttgacggaagctgaggcttcaggctttgtggtcaggtggcgcatctcgtgaacgtcccgtcgtccccaaggctttgttacctgttggccacggagggtgtaccgagttctccacaccgattttcatgcgggacaaaaatgaaatcagagtgtactttttatttggcacactaataatttccaatattttgaagcgtcgtcggataggaatcctattcagacagatccgaatcccataacaaaaatctttcaagtttgacgttccaagccagataaaaacattggcggtgatcgggcgtggctctcgacggcggcggcggcggtccccttagggcagaactcggtttctgaagtttcactgacgac

SEQ ID NO: 59953 - DNA, 473 bp, Setaria italica
  Peptide Sequence Number=SeqID_125927
tggtaactaagttttctagtcttccttcctattgtattgtaagtactattttcagcgcggccttctgagttcaagggatggtgaagctccaaagttgactgagaatggcttccaatttcttcttatggaaacaaatgcacaactttggtacataatgagagaatacatttcctctgcagaggaacgtggagtggaccctacggagctgatatcatttctcttggaacttagttttcataaaattgggagcggcttatagtttgaacactctgactgatgttgaacgaattgccatcagggatcttgccgagttgggattagtcaaactgcagcagggtcgaaaggatagctggttcattcctacccaattagctacaaatctctcagcaagcttgtcagattcatcgtccagcaaagaggctttgttgtttggagacaaacttagaatgtatgcatactctacctccaaattg

SEQ ID NO: 59954 - DNA, 250 bp, Setaria italica
  Peptide Sequence Number=SeqID_125928
ctgtttttccccttcgatcatcttgatgatgatgacgagtactgaatttcagggtcgaaaggatagctggttcattcctacccaattagctacaaatctctcagcaagcttgtcagattcatcgtccagcaaagagggctttgttgttttggagacaaactttagaatgtatgcatactctacctccaaattgcactgtgaaattctgcgccttttttcaaggtacatgagggtggagtatcaacttcca

SEQ ID NO: 59955 - DNA, 223 bp, Setaria italica
  Peptide Sequence Number=SeqID_125929
tagaagaagaaataacaatttacctactgcagaggaacgtggagtggaccctacggagctgatatcatttctcttggaacttagttttcataaattgggagcgggatcttgccgagttgggattagtcaaactgcagcagggtcgaaaggatagctggttcattcctacccaattagctacaaatctctcagcaagcttgtcagattcatcgtccagcaaaga

SEQ ID NO: 59956 - DNA, 158 bp, Setaria italica
  Peptide Sequence Number=SeqID_125930
tccgcatgtgcactgatcccagtcctccacaatttgaactgaaagctatctgataacctattttggagcaaagaaggatttagaacccacccctccgttctccaaaggtgcaccgaagatgccgcaggttatggtggtggcgcggaacttcatggata

SEQ ID NO: 59957 - DNA, 346 bp, Setaria italica
  Peptide Sequence Number=SeqID_125931
gtataactccgaatgcaagctcgatttgctattattcatggcccagcccgtttctgggataaagagatactttgagaaatcatgaaggtttgtatcatcatgcataacatgattattgaagatgggcgaaatgacgatgaagatttcgactacgacggtgttggccaagttgtgatacctacgccacatgaagtgcgtaaccgtactcaagaactacatgatttcatccaagttcatcataatataagagacttgcaaggccattctccacttcaagaagatctaatcggtaccacaggtgctcgattagatcttcttgaagtggagaattggtccttgtctaagt

SEQ ID NO: 59958 - DNA, 347 bp, Setaria italica
  Peptide Sequence Number=SeqID_125932
agccaccaatcgcaccgcttggcccttgcggatccgccaggcttggattgatttcttcttttgcttggacggagtatccagttatttgatgataatggaaccaaagcattcagctgaaatgtccaagcatctggagaagcaaaatcaagcactaatgggaacataccgagcaatgtcccacgagttgtataaacttcaggtgtgccctaggctctagatagtatgaacttttatataaagattgtcctctagaagatgatgtgtaggtagtcatttgttcccatcatttaataaaggtagaggaagaaacaatcatgcgcgaactgtatgagcttatgtctgcagaa

SEQ ID NO: 59959 - DNA, 363 bp, Setaria italica
  Peptide Sequence Number=SeqID_125933
ggacgggcagcggccgccaccaggctaactacctagtgtggggaggaccggcggtgggggatttctcgggggcggagtggccgggaggacctgattggggggcttccgggggcgatctctgagcgcagatttggtgcctgcgatctgccatggattcggtttaggtttggggagatcggccgggttctcgccgcgagattcgatttttgcgcctgttttattcgcgagatcaatcgtaaaagaagaggagcaaataaagcagcaagaggaagaatttcgggggtgagcaagggagaaggcataatgctggaagggaagtcctacctcgtgtcgcgctccgtgccgagctcctgcgaggcggag

SEQ ID NO: 59960 - DNA, 251 bp, Setaria italica
  Peptide Sequence Number=SeqID_125934
cctatccccctgtgtgccttggcagtctcaccccttgctcaccccgaaattcttcctcttgctgcagatttggtgcctgcgatctgccatggattcggtttagatcaatcgtaaaagaagaggagcaaataaagcagcaagaggaagaatttcgggggtgagcaagggagaaggcataatgctggaagggaagtcctacctcgtgtcgcgctccgtgccgagctcctgcgaggcggagacggagtgggcaa

SEQ ID NO: 59961 - DNA, 435 bp, Setaria italica
  Peptide Sequence Number=SeqID_125935
tcaaacttgagcggtgccttgtgtgaacttgggatcctcgcatctgtactttccatcagggccaataccaaaacctttagggtcggcaaacacgttttccaacaattggctccgtggagggtgcgggcttgcgtcggcaaactcaacagcctcctcaacaacattgtcaatgttcttctcaatgctcttcagctcaggttcagttgcgaggttctgctcaatgatgtacttcttcaaggccgtaatcggatcccttgcagcatagtgggttttctcatctgtgcacagagaatgtgatggagtcagtttaacaattgctcaaaccagactgctgttaaagacagaagaaacccacgaaagcttaaacattgaagagccagtaactcaagaatggttctgtaacacatgtgatggagaaatgaaagacaacacatg

SEQ ID NO: 59962 - DNA, 312 bp, Setaria italica
  Peptide Sequence Number=SeqID_125936
ggcactggaaccaagctgttcaaagcctcactctaaatgttcgaaagatgataggtaatatgaccctactattttgtttgatcaaactctcgatatggtcattgttccacaaaaataacgctcgctcagcaacctgaaagtgtgagctattcaggcaccgtgcaatctggcggaaaagagggaccatgcatttctggaactctgcaggttgtgtagcttccaatatctcctccaactctcccagaaacatcacctccttggagctgtttgtgatgggccaatatttcaataggcctctgataactgtatctg

SEQ ID NO: 59963 - DNA, 397 bp, Setaria italica
  Peptide Sequence Number=SeqID_125937
ccaattttcgtctccgaaatcagatacccatgagaagattgcaggaccagcagatgatacaaatcgtaaccaacttcagacaaggcaaataaatgatacagcaatcaactgcagatctcagcatgccaaaagaagccaggactcaggaccaagaaaatgatgctactgtgcctaaacccatctggcttctcagatcttttgtcaatttgcccaccttaatatacctcgtatatacaactcaatcctgtacaacgtttcatgaacaccacatgaatgatttgactcgctacacggctgacgattgacggggcaagggtcgagagaacgaagacaactagacaagttaccaacttagttagactttacgactagaatagactaaattacttacttacta

SEQ ID NO: 59964 - DNA, 240 bp, Setaria italica
  Peptide Sequence Number=SeqID_125938
aaactgctgatgatacattgaaatgccctttggcttgtgaagtggaattaaagctcgaacaaggaacaatttgtgctcttccttaagtggcaatgcaaacccattgatgatacttcccaaaatctccagctctgggctcagttatgggagtggcatgcatgtcggcaatgcaaactcgagggtgaacatgaatggtgattcagcctcatctgcctttgtgtccttaccaagctttaagga

SEQ ID NO: 59965 - DNA, 299 bp, Setaria italica
  Peptide Sequence Number=SeqID_125939
tattgtatttgtattcttgtttggttctagttcttgtattgggtattgtaatttgttattgtaggttctttaaattgtcacagacacaaaggtttgatgaaacagactcgaatccagtgattataggcactctgcacgtaccatatgcttcatctctcattggacaagttagctaccacaagaacggtgcgagtggatggttgttggagcgactgaaaggccatcaagtgtggatatcagttggttccgctatatgcgatctatctacgaataaaagttcgaggaacaactagcatgtg

SEQ ID NO: 59966 - DNA, 352 bp, Setaria italica
  Peptide Sequence Number=SeqID_125940
gattcaacaggtatctgaggtaaatacccataaactgtaaaccactcaatccagcctgcaatctctgctccagataaccatttccagttatgttgatattcttcaatccattcatcaagagcattttcttgttcactgagcaatttcgaataatcagggctattgaaatgtggaaccattgaggcagatacccgcaggtcagaggcaacatctgggcaagctgaaattgtgttctgaggaccaacatgctgtgtaccattgctcatgcagcctgttgaggtgcctgcttccagctggacaagcaatggtacacagcctgttgaggtgcctgcttccagctggaccaacatgc

SEQ ID NO: 59967 - DNA, 142 bp, Setaria italica
  Peptide Sequence Number=SeqID_125941
gattatgtatcaaatttgtaatgttaccaccagattcaacaggtatctgaggtaaatacccataaactgttgaatctggtggtaacattacaaatttgatacataatcatatgaaataaatgtagaggggatggtctctcca

SEQ ID NO: 59968 - DNA, 228 bp, Setaria italica
  Peptide Sequence Number=SeqID_125942
gaagcgctggtggcctgctggcttcaccgtggatcctccgcaccaccattgcctcccagcctgcagacgtgtcctaaggttggatctgagtatctgacatcagagatacgaatacgatgcaagtgctctgatagctcaactgcatgctcgattgtttgactgacaactgtagccatttggttgttctgatgctctaataggtaggttcctgcttcgattatttttgtt

SEQ ID NO: 59969 - DNA, 237 bp, Setaria italica
  Peptide Sequence Number=SeqID_125943
cggccgacgagcatggtgctgcggagaaggtttgcaccgtggaagcgctggtggcctgctggcttcaccgtggatcctccgcaccaccattgcctcccagcctgcaggtggaacaagatgccaagtttgattcctgagcagcgccatgtattcctcctccatggctttcttccacttggaatcaccgagagcttcttcaagtgtttgaggttctcctgtagcacaaaaatagccata

SEQ ID NO: 59970 - DNA, 401 bp, Setaria italica
  Peptide Sequence Number=SeqID_125944
tactgacctgctaccgtaacttggaggcggatacgcttccgtcttcaaatgggatgatgtagatatattggcaggggcagttgggttgatgaaatcatctgatactttttctgacttgtaggagtccccactaaggtagtcaatattgcttgcctctgtgtaaacaggcctcttagatgccggaggtggaggaaggagcgggcttgggtatggcctttcattcctcggagcagaaggctggttgctctgtgccactgtgccatcccttgcagacctaagaagcatttactgtacatcagctcatgaatatagaactcaagattcttctctgatatgctttagtaacagaaacatcaaatgaagccaaaagaacactattttttactcgtaacacgcatgag

SEQ ID NO: 59971 - DNA, 471 bp, Setaria italica
  misc_feature (427)..(427): n is a, c, g, or t
  Peptide Sequence Number=SeqID_125945
attagtagcattagagtgaggcagcagcttggtatccaagaaatattgtacaaaatgacgaccacacaaaacggagctgctgcactccaagcagtcatggaatggggtccctctgcgcgccgggtggagcagcaggcattgggaagttgtaggaacaataaccaccgaattgaggggcctccacatatggacatgccttcgtatgaattagatcattgcgcctccagcacccctgagaaacgccatcttagttgctttaacatactgactctgcctttccctttttcgtcgctggcactcaccacaccagctaggaaaatccttctggtatttcttcatctccctgaacacagagctccggcaccacaaaagcagattgattctgagtccagatgatgtagctcgagcaccatgcctatgtcgaccncgatggagtacagcctgtccaggaatatgagtgtaatcatacta

SEQ ID NO: 59972 - DNA, 474 bp, Setaria italica
  Peptide Sequence Number=SeqID_125946
attagtagcattagagtgaggcagcagcttggtatccaagaaatattgtacaaaatgacgacccacacaaaacggagctgctgcactccaagcagtcatggaatggggtccctctgcgcgccgggtggagcagcaggcattgggaagttgtaggaacaataaccaccgaattgaggggcctccacatatggacatgccttcgtatgaattagatcattgcgcctccagcacccctgagaaacgccatcttagttgctttaacatactgactctgcctttcccttttttcgcgctggcactcaccacaccagctaggaaaatccttctggtatttcttcatctccctgaacacagagctccggcaccacaaaagcagattgattctgagtccagatgatgtagctcgagcaccatgcctatgtcgaccacgatggagtacagcctgtccaggaatatgagtgtaatcatactacg

SEQ ID NO: 59973 - DNA, 340 bp, Setaria italica
  Peptide Sequence Number=SeqID_125947
aacgtaagcaagtattcagaatatgattttacagacattattaagcattgtctgcacaacaaggagaatataacaaaaaaggtgcaacttatataggaacacagataccattaaagaaagatgaacaacactagtatagtagtataaataagaactcaaagaatacgaaaggaacctaatcagaaaggtcagagatcagaaaacaaattggcaaacaaataaaagaatacctcagggcaggtacagaagggcagattgaagagaagcttcaatggcagcatcttcatagctttgacctgggggtggatatagatgtggttgtctcaatggctgagtttga

SEQ ID NO: 59974 - DNA, 416 bp, Setaria italica
  Peptide Sequence Number=SeqID_125948
agatgatgtagctcgagcaccatgcctatgtcgaccacgatggagtacagcctgtccaggaatatgagtgtaatcatacatttcctcatgttgtgtctctgaattcacatgattctcacaacgaatgcctcggaagtataattcaccaccagagaattgtttgccaaggcaaacatttaatgtaacttcagaatcatcaacatgaaaaccgagttcaacatccctgtctttcccatattcaacaacaaaagcatgatgtgagtccaatgttcctccaccaacttcagcataaaaaactctagaaattggagctatgaactgttccatgaactggttcagcatagcttccagaccaaaatcatcaaggacagcaccatgcaatgaaatttaagattatgaggccaaatacaatgaac

SEQ ID NO: 59975 - DNA, 404 bp, Setaria italica
  Peptide Sequence Number=SeqID_125949
ggacagcaccatacttgttcattgtatttggcctcataatcttaaatttcattgcatggacccatttttcaaagttctctacctcttccaataacatctcacagaaagctggctgcaacatagcaaacgaataaactccaggaattggctcagtcataatacttctaaagctttcttctgaattgctactaactgcttcaaggaatgttggtaaaaagaatgctgaaggatgcatattgtataattcttcatgaagaggcttgtaaaggtggagtatcctctgtctgtattctttgtgtctttgcaccttgttgcgctcgccctggggccagtagcgcgcaagaatgtcccgcatgaagtgtagcttgacgccacggtcggcgtcgaggaggctcggtgggaag

SEQ ID NO: 59976 - DNA, 226 bp, Setaria italica
  Peptide Sequence Number=SeqID_125950
caccatgcctatgtgaccacgatggagtacagcctcatgttgtgtctctgaattcacatgattctcacaacgaatgcctcggaagtataattcaccaccagagaattgtttgccaaggcaaacatttaatgtaacttcagaatcatcaacatgaaaaccgagttcaacatccctgtctttcccatattcaacaacaaaagcatgatgtgagtccaatgttcctcca

SEQ ID NO: 59977 - DNA, 404 bp, Setaria italica
  misc_feature (69)..(69): n is a, c, g, or t
  Peptide Sequence Number=SeqID_125951
tcataatcttaaatttcattgcatggaccatttttcaaagttctctacctcttccaataacatctcacngaaagctggcttgtaaaggtggagtatcctctgtctgtattctttgtgtctttgcaccttgttgcgctcgccctggggccagtagcgcgcaagaatgtcccgcatgaagtgtagcttgacgccacggtcggcgtcgaggaggctcggtgggagatgccgctcgagtgcgctgtagacggccggcgcgtactcgccgcgcacatcgctgtagtcctgcggcttgtgctccgcgttggggttcagccgtagccgccggtccgcgtatggcgccgtcgccgccgcaggccggccggccggccgcgacacttgcaacggtgccacgccgttcccattcc

SEQ ID NO: 59978 - DNA, 416 bp, Setaria italica
  Peptide Sequence Number=SeqID_125952
aaaagcatgatgtgagtccaactgttcctccaccaacttcagcataaaaaactactagaaattggagctatgaactgttccatgaactggttcagcatagcttccagaccaaaatcatcaaggacagcaccatacttgttcattgtatttggcctcataatcttaaatttcattgcatggacccatttttcaaagttctctacctcttccaataacatctcacagaaagctggctgcaacatagcaaacgaataaactccaggaattggctcagtcataatacttctaaagctttcttctgaattgctactaactgcttcaaggaatgttggtaaaaaagaatgctgaaggatgcatattgtataattcttcatgaaagaaggcttgtaaaaggtaggaagtaatacctactagta

SEQ ID NO: 59979 - DNA, 380 bp, Setaria italica
  Peptide Sequence Number=SeqID_125953
tgtaacttcagaatcatcaacatgaaaaccgagttcaacatcccctgtctttccccatattcaacacaaaagcatgatgtgagtccaatgtcctccaccaacttcagcataaaaaactctagaaattggagctatgaactgttccatgaactggttcagcatagcttccagaccaaaatcatcaaggacagcaccatacttgttcattgtatttggcctcataatcttaaatttcattgcatggacccattttcaaagttctctacctcttccaataacatctcacagaaagctggctgcaacatagcaaacgaataaactccaggaattggctcagtcataatacttctaaagctttcttctgaattgctactaacttg

SEQ ID NO: 59980 - DNA, 373 bp, Setaria italica
  Peptide Sequence Number=SeqID_125954
atgccgctcgagtgcgctgtagacggccggcgcgtactcgccgcgcacatcgctgtagtcctgcggcttgtgctccgcgttggggttcagccgtagccgccggtccgcgtatggcgccgtcgccgccgcaggccggccggccggccgcgacacttgcaacggtgccacgccgttcccattccccatcgccacctggacctcgtcccgtcgctccgccgggccttccagagccatgggcactgtgggcgatctcacagcatcgagccgtttagggctagggtttggtagaacaatttgagggcagcgttagggtttcgggacgagtggttattgtcgttccacggccccctaagagcagggtggcaaattgtac

SEQ ID NO: 59981 - DNA, 183 bp, Setaria italica
  Peptide Sequence Number=SeqID_125955
cgagattgatatgatcggcactgcccaacaaggtcaatgatgacctcctccctcacaccctcaggatgtctgtggtcaagagcatttaacatctcatctagcacatttaccatacccctctcgcccctctccctctcaaccgacggcccactcgcttctgtgagctacctaccttgagatcca

SEQ ID NO: 59982 - DNA, 271 bp, Setaria italica
  misc_feature (8)..(8): n is a, c, g, or t
  Peptide Sequence Number=SeqID_125956
ccgctgtntggggtcactgagtacttgatatgcctcccccaactcctggaacctcgccgccgcgagcggatcattggggttcttgtccggatggacctgcctcgccttgatgtagtacgccttcttgatttccgcctcggtcgccgccggggtcactcccagcacgtcgtagtaccccgtctcccattccatttaccatacccctctcgcccctctccctctcaaccgacggcccactcgcttctgtgagctacctaccttgagatccagc

SEQ ID NO: 59983 - DNA, 350 bp, Setaria italica
  Peptide Sequence Number=SeqID_125957
agctaggaaaatccttctggtatttcttcatctccctgaacacagagctccggcaccacaaaagcagattgattctgagtccagatgatgtagctcgagcaccatgcctatgtcgaccacgatggagtacagcctgtccaggaatatgagtgtaatcatacatttcctcatgttgtgtctctgaattcacatgattctcacaacgaatgcctcggaagtataattcaccaccagagaattgtttgccaaggcaaacatttaatgtaacttcagaatcatcaacatgaaaaccgagttcaacatccctgtctttcccatattcaacaacaaaagcatgatgtgagtccaat

SEQ ID NO: 59984 - DNA, 339 bp, Setaria italica
  Peptide Sequence Number=SeqID_125958
agcagattgattctgagtccagatgatgtagctcgagcaccatgcctatgtcgaccacgatggagtacagcctgtccaggaatatgagtgtaatcatacatttcctcatgttgtgtctctgaattcacatgattctcacaacgaatgcctcggaagtataattcaccaccagagaattgtttgccaaggcaaacatttaatgtaacttcagaatcatcaacatgaaaaccgagttcaacatccctgtctttcccatattcaacaacaaaagcatgatgtgagtccaatgttcctccaccaacttcagcataaaaaactctagaaattggagctatgaac

SEQ ID NO: 59985 - DNA, 365 bp, Setaria italica
  misc_feature (22)..(22): n is a, c, g, or t
  misc_feature (65)..(65): n is a, c, g, or t
  Peptide Sequence Number=SeqID_125959
gtttagtatgatcaaatttgtntaaatacatgccttcgtatgaattagatcattgcgcctccagnaccccctcgagaaaacgcccatcttagttgctttaacatactgactctgcttcccttttttcgcgctggcactcaccacaccagctaggaaaatccttctggtatttcttcatctccctgaacacagagctccggcaccacaaaagcagattgattctgagtccagatgatgtagctcgagcaccatgcctatgtcgaccacgatggagtacagcctgtccaggaatatgagtgtaatcatacatttcctcatgttgtgtctctgaattcacatgattctcacaacgaatgcctcggaag

SEQ ID NO: 59986 - DNA, 245 bp, Setaria italica
  misc_feature (165)..(165): n is a, c, g, or t
  Peptide Sequence Number=SeqID_125960
agactccatatcttttcactccttatgtatgcatcgagcatccaaagcatgcaaactcataattctgtgatccatataattgaaatgaaaactataggaacaaatatttgggtatgcctttgccaattacaggatctgaacgcaaccttagacgcttccaaaacntgcaaacccataattctgtgatccatataattgaaatgaaaactataggaacaatatctggtatgcctttgccaattacg

SEQ ID NO: 59987 - DNA, 400 bp, Setaria italica
  Peptide Sequence Number=SeqID_125961
ttagtttagtttactttactttagttaaattttctactattgtatttcttctactaacgtaattgtccttcggtaagttattaatttcaccaccagagaattgtttgccaaggcaaacatttaatgtaacttcagaatcatcaacatgaaaaccgagttcaacatccctgtctttcccatattcaacaacaaaagcatgatgtgagtccaatgttcctccaccaacttcagcataaaaaaactctagaaattggagctatgaactgttccatgaactggttcagcatagcttccagaccaaaaatcatcaaggacagcaccatacttgttcattgtatttggcctcataatcttaaatttcattgcatggacccattttttcaaaagttctctacctctt

SEQ ID NO: 59988 - DNA, 366 bp, Setaria italica
  Peptide Sequence Number=SeqID_125962
gtcgaccacgatggagtacagcctgtccaggaatatgagtgtaatcatacatttcctcatgttgtgtctctgaattcacatgattctcacaacgaatgcctcggaagtataattcaccaccagagaattgtttgccaaggcaaacatttaagtgtaacttcagaatcatcaacatgaaaaccgagttcaacatccctgtctttcccatattcaacaacaaaagcatgatgtgagtccaatgttcctccaccaacttcagcataaaaaactctagaaattggagctatgaactgttccatgaactggttcagcatagcttccagaccaaaatcatcaaggacagcaccatacttgttcattgtattt

SEQ ID NO: 59989 - DNA, 339 bp, Setaria italica
  Peptide Sequence Number=SeqID_125963
ccacgatggagtacagacctgtccaggaataatgagtgtaatcatacattcctcatgttgtgtctctgaattcacatgattctcacaacgaatgcctcggaagtataattcaccaccagagaattgtttgccaaggcaaacatttaatgtaacttcagaatcatcaacatgaaaaccgagttcaacatccctgtctttcccatattcaacaacaaaagcatgatgtgagtccaatgttcctccaccaacttcagcataaaaaactctagaaattggagctatgaactgttaccaatagaaactaggttcaagacaataagacttaccaagaaccaaaaa

SEQ ID NO: 59990 - DNA, 326 bp, Setaria italica
  Peptide Sequence Number=SeqID_125964
agcacccctgagaaacgccatcttagttgctttaacatactgactctgcctttcccttttttcgcgctggcactcaccacaccagctaggaaaatccttctggtatttcttcatctccctgaacacagagctccggcaccacaaaagcagattgattctgagtccagatgatgtagctcgagcaccatgcctatgtcgaccacgatggagtacagcctgtccaggaatatgagtgtaatcatacatttcctcatgttgtgtctctgaattcacatgattctcacacgaatgcctcggaagtataattcaccaccagagaattgttt

SEQ ID NO: 59991 - DNA, 277 bp, Setaria italica
  Peptide Sequence Number=SeqID_125965
taattaacaaaatttgtaataaaatacatgccttcgtatgaattagatcattgcgcctccagcacccctgagaaacgccatcttagttgctttaacatactgactctgcctttcccttttttcgcgctggcactcaccacaccagctaggaaaatccttctggtatttcttcatctccctgaacacagagctccggcaccacaaaagcagattgattctgagtccagatgatgtagctcgagcaccatgcctatgtcgaccacgatggagtacagcc

SEQ ID NO: 59992 - DNA, 219 bp, Setaria italica
  Peptide Sequence Number=SeqID_125966
catcggaagcaggccttgtggtagacgcggttgtcggcggtgagcttgtcgacgaggtacaccgtcttgtcgcaggcggtgcacttggtggtcgtcccctggaacgaggtcgccattgccgtcttcccctctcctcctcccatttcaaaacctcctcctcctccaccattcccgcagaggccctgcttgtcaccttcccaatcctccctcccctccccc

SEQ ID NO: 59993 - DNA, 219 bp, Setaria italica
  Peptide Sequence Number=SeqID_125967
gcgctggcactcaccacaccagctaggaaaatccttctggtatttcttcatctccctgaacacagagctccggcaccacaaaagcagattgattctgagtccagatgatgtagctcgagcaccatgcctatgtcgaccacgatggagtacagcctgtccaggaatatgagtgtaatcatacatttcctcatgttgtgtctctgaattcacatgattctc

SEQ ID NO: 59994 - DNA, 273 bp, Setaria italica
  Peptide Sequence Number=SeqID_125968
cttagttgctttaacatactgactctgccttcccttttttcgcgctggcactcaccacaccagctaggaaaatccttctggtatttcttcatctccctgaacacagagctccggcaccacaaaagcagattgattctgagtccagatgatgtagctcgagcaccatgcctatgtcgaccacgatggagtacagcctgtccaggaatatgagtgtaatcatacatttcctcatgttgtgtctctgtaatttctactattgtatttcttctacta

SEQ ID NO: 59995 - DNA, 233 bp, Setaria italica
  misc_feature (18)..(18): n is a, c, g, or t
  Peptide Sequence Number=SeqID_125969
agtatgatcaaatttgtntaaatacatgccttcgtatgaattagatcattgcgcctccagcacccctgagaaacgccatcttagttgctttaacatactgactctgccttcccttttttcgcgctggcactcaccacaccagctaggaaaatccttctggtatttcttcatctccctgaacacagagctccggcaccacaaaagcagattgattctgagtccagatgaatgta

SEQ ID NO: 59996 - DNA, 194 bp, Setaria italica
  Peptide Sequence Number=SeqID_125970
tcggaagcaggccttgtggtagacgcggttgtcggcggtgagcttgtcgacgaggtacaccgtcttgtcgcaggcggtgcacttggtggtcgtcccctggaacgaggtcgccatttaccatacccctctcgcccctctccctctcaaccgacggcccactcgcttctgtgagctacctaccttgagatccagcc

SEQ ID NO: 59997 - DNA, 249 bp, Setaria italica
  Peptide Sequence Number=SeqID_125971
ctgttgtgtctctgaattcacatgattctcacaacgaatgcctcggaagtataattcaccaccagagaattgtttgccaaggcaaacatttaatgtaacttcagaatcatcaacatgaaaaccgagttcaacatccctgtctttcccatattcaacaacaaaagcatgatgtgagtccaatgttcctccaccaacttcagcataaaaaactctagaaattggagctatgaactgttccatgaactggtt

SEQ ID NO: 59998 - DNA, 251 bp, Setaria italica
  Peptide Sequence Number=SeqID_125972
ggccagtagcgcgcaagaatgtcccgcatgaagtgtagcttgacgccacggtcggcgtcgaggaggctcggtgggagatgccgctcgagtgcgctgtagacggccggcgcgtactcgccgcgcacatcgctgtagtcctgcggcttgtgctccgcgttggggttcagccgtagccgccggtccgcgtatggcgccgtcgccgccgcaggccggccggccggccgcgacacttgcaacggtgccacgccgtt

SEQ ID NO: 59999 - DNA, 254 bp, Setaria italica
  Peptide Sequence Number=SeqID_125973
agatgccgctcgagtgcgctgtagacggccggcgcgtactcgccgcgcacatcgctgtagtcctgcggcttgtgctccgcgttggggttcagccgtagccgccggtccgcgtatggcgccgtcgccgccgcaggccggccggccggccgcgacacttgcaacggtgccacgccgttcccattccccatcgccacctggacctcgtcccgtcgctccgccgggccttccagagccatgggcactgtgggcgatct

SEQ ID NO: 60000 - DNA, 258 bp, Setaria italica
  Peptide Sequence Number=SeqID_125974
ccgagtagcgcgcaaaaatgtcccgcatgaagtgtagcttgacgccacggtcggcgtcgaggaggctcggtgggagatgccgctcgagtgcgctgtagacggccggcgcgtactcgccgcgcacatcgctgtagtcctgcggcttgtgctccgcgttggggttcagccgtagccgccggtccgcgtatggcgccgtcgccgccgcaggccggccggccggccgcgacacttgcaacggtgccacgccgttcccattcc

SEQ ID NO: 60001 - DNA, 250 bp, Setaria italica
  Peptide Sequence Number=SeqID_125975
taactatttaatgtaacttcagaatcatcaacatgaaaaccgagttcaacatccctgtctttcccatattcaacaacaaaagcatgatgtgagtccaatgttcctccaccaacttcagcataaaaaactctagaaattggagctatgaactgttccatgaactggttcagcatagcttccagaccaaaatcatcaaggacagcaccatacttgttcattgtatttggcctcataatcttaaatttcattg

SEQ ID NO: 60002 - DNA, 240 bp, Setaria italica
  Peptide Sequence Number=SeqID_125976
ttcacatgattctcacaacgaatgcctcggaagtataattcaccaccagagaattgtttgccaaggcaaacatttaatgtaacttcagaatcatcaacatgaaaaccgagttcaacatccctgtctttcccatattcaacaacaaaagcatgatgtgagtccaatgttcctccaccaacttcagcataaaaaactctagaaattggagctatgaactgttccatgaactggttcagcata

SEQ ID NO: 60003 - DNA, 173 bp, Setaria italica
  Peptide Sequence Number=SeqID_125977
cagcctgtccaggaatatgagtgtaatcatacatttcctcatgttgtgtctctgaattcacatgattctcacaacgaatgcctcggaagtataattcaccaccagagaattgtttgccaaggcaaacatttaatgtaacttcagaatcatcaacatgaaaaccgagttcaaca

SEQ ID NO: 60004 - DNA, 151 bp, Setaria italica
  Peptide Sequence Number=SeqID_125978
tttgtgtctttgcaccttgttgcgctcgccctggggccagtagcgcgcaagaatgtcccgcatgaagtgtagcttgacgccacggtcggcgtcgaggaggctcggtgggagatgccgctcgagtgcgctgtagacggccggcgcgtactcg

SEQ ID NO: 60005 - DNA, 185 bp, Setaria italica
  misc_feature (22)..(22): n is a, c, g, or t
  Peptide Sequence Number=SeqID_125979
atgttggtaaaagaaatagctnaaggatgcatattgtataattcttcatgaagaggcttgtaaaggtggagtatcctctgtctgtattctttgtgtctttgcaccttgttgcgctcgccctggggccagtagcgcgcaagaatgtcccgcatgaagtgtagcttgacgccacggtcggcgtcgag

SEQ ID NO: 60006 - DNA, 412 bp, Setaria italica
  misc_feature (101)..(101): n is a, c, g, or t
  Peptide Sequence Number=SeqID_125980
accccctctgtgcaaatgacaagtgaactcaagtgctcttcatttacatgtactggcaaggaaggcatctgacccatggtaccccgtgtctccctcattcngtaacatggacaaattacttcacttggaacatggaaaattcagttccactatttagcagctcaattgccaaccgtgtgtttggttactggtccactatttagcagctcaattgctaaccgtgtgtttggttattgggtcggagtgggttggaacgggttcgacccacttcgacccgtgtttggttggagagggtgggggttgggtcggacctaatagagaaatattcctcgtagatgcgggtcgagtgcgtcccttgaaaacgagaggacgcacttgacccgcatggacggcgtgcgcgtccgtccagcct

SEQ ID NO: 60007 - DNA, 437 bp, Setaria italica
  misc_feature (379)..(379): n is a, c, g, or t
  Peptide Sequence Number=SeqID_125981
ttcaaacaacgaagctgggttcactccaacccacaaaaggggctggctccaacccgacccacgtcgtcccaaaaccaaaacgcatgctaagacagctcccatgcaaggttccactttcatattaattacatagagaacccaaaggaataaatgaaaaacaagcaatagcaatatcatacctttctgaaattgctcttatattgttattcatgcgtagaataggtccatattctcctccgtctacaagaaatttgaatcacggaaaaggttataatgactcaagcttctttttcttatgagtgtcggactacgactcaaacttccatgcatagctttgaactactatgtctaggtctatgtgcttttttaaaaaaaaaancaatctatgtgctttgcaaccacttttcatctccatgtttcatctgttgaccgacaga

SEQ ID NO: 60008 - DNA, 199 bp, Setaria italica
  Peptide Sequence Number=SeqID_125982
tccatattctcctccgtcttgaaggttttgatatttgcagctatctggctgagtaactgattattttcctccagaagatgctgaattgcactatctaaaacaggggctgcttttgctaagaaagtctccaacagctctccagcctccctgcaccctgcgctgcctccatgtcgcccagcgccacctccaccgcggcggc

SEQ ID NO: 60009 - DNA, 245 bp, Setaria italica
  Peptide Sequence Number=SeqID_125983
tcccaacaacagaataggcctgcagttacttattatatatgccgcaacttgctcggtgtagcctacatatcacctcattctgcaatctgcatgcggagatgtggtgtttttcatgccatttatacagaaaatcaccagggcgccatttcttccccgccccaccaacactcccaagccaccaccagccatcccatctccactcgtccacagccaaaatccgcctacccaatccccatccatccagc

SEQ ID NO: 60010 - DNA, 365 bp, Setaria italica
  Peptide Sequence Number=SeqID_125984
tgagagccatgtttgccatagtgatgactattctcagcagtaatgacaactgagcatcaactttgcaaaaccgctgtgaagattctgatgtgaaatgacgaatcctgaaaacacacacataaaactttgacaaataggttgtaacatcacttagacatgatctaagaatccctcgactttgaagctggttcaaaaaatacttttcatgatcaacactaattagtgcatcaagaacatagaaggaaattgctttgccagcttcactcccatggatggcatccttagtaaccaaatcgacaatagcttgagcttccttccttatgatggaaaagttgccacgtgctaattcattgtgctccttgaga

SEQ ID NO: 60011 - DNA, 209 bp, Setaria italica
  Peptide Sequence Number=SeqID_125985
taaaggttacctgattcaaaagttacgtggctcaacaggtaggttgtatagacacacagaaacacatccccagacaagagtttcattgattgcctagtttcccggcgtttctggagatacattcggcacttaaccgggccctgttatttcaaactggcatcgagccaatgctaacaagtttgtagacaggaccagcgcaaaccaatcac

SEQ ID NO: 60012 - DNA, 434 bp, Setaria italica
  Peptide Sequence Number=SeqID_125986
attatcatgctgaaatttctcccatgagttattggggaaaatgccatgtgtcacatatgcactgacctttgctgctccatgagctgccagtactttctggcactcaatcagagtaccaccagactgcaccaagtcatcgactataacaacatgacggccactaggatctccctcttttatccgtacaattctctgatccccttctctaactttgttacatacaaccatgggaaaatgttgaagttgcttatagaagcgcttccatgcaccatcatctggaaatgctatggttatgttatgggaatccggcagctcctgaagcctactttttagcaaggggataccactctcaaaacatggtaagactgagtctccaaagtagaatctctcctgatgtattaagcacaaggttattttcacactgatattgaatt

SEQ ID NO: 60013 - DNA, 241 bp, Setaria italica
  Peptide Sequence Number=SeqID_125987
gtttgtcagattctcagattctgttgccaatatatggtactaatttatattgtcctgcttcgtaaggattcgaaggggctgagccagagctggcagcaattgttactttggcttcatcagttgactacacaacatccaattcctcactcaagatgctattgcctcttgtaagttgaccatcaagcagttttgacatatttttttgcatatgcgtaaactaatcttcattgtattctctaag

SEQ ID NO: 60014 - DNA, 331 bp, Setaria italica
  Peptide Sequence Number=SeqID_125988
attaagtgaagacaaggtcaagcaatgtgtagatcccaggttgaagggagaatatcctccaaagggagttgctaagctcgctgcagtggcagctctatgcgtgcaatacgaagcagagttcaggcccaacatgagcattgttgtgaaggcgctttctcctctccttcaacaaagacctgcaccgaccgcctcagagccagccccggaacctgccagctgagaccagtcgcatgcgatcggacctctcggcaggggcaacttcatgtatgctttatccaattgggaacgctacaaaacgaacatccaaaaacaacaactcaaattaacaaca

SEQ ID NO: 60015 - DNA, 304 bp, Setaria italica
  misc_feature (1)..(1): n is a, c, g, or t
  misc_feature (5)..(5): n is a, c, g, or t
  misc_feature (13)..(13): n is a, c, g, or t
  misc_feature (23)..(23): n is a, c, g, or t
  misc_feature (34)..(34): n is a, c, g, or t
  misc_feature (46)..(46): n is a, c, g, or t
  Peptide Sequence Number=SeqID_125989
ntttntttttttntttttttttnttttttttttntttttttttttnttttttttttttttttttttttttttggtagcaatgatatcatgcagcagacggaaaatcattctattcttccaaacatggcgagtcccttaaacctacagagtttggttaaaaaagggttaaaagtttaaaactttttcgtttaccctactacatacatgaagttgcccctgccgttcgtggccgcctaggtaggttcgctgcttttatattggcgccgtacaatggtatgtagtaagggaaaagaaaacttcgacc

SEQ ID NO: 60016 - DNA, 240 bp, Setaria italica
  Peptide Sequence Number=SeqID_125990
gcctggcggcggcgggaggagccggtatgcttgccgcctccgtgcccctcgctcgtgctcacaatctacagcgtcgtcaccgtgctccgcatccccagctcctccctcgtcgtcaccaccgccgattcagagcgcgtggagcggcgggaggacttggaggcgctcaagacccatctgccgtcgaaccagaatagcctcgaggcccgcgaggagacgcggtccgtcgcctccctcccctgc

SEQ ID NO: 60017 - DNA, 277 bp, Setaria italica
  Peptide Sequence Number=SeqID_125991
ctctaatggacagctttccaagatgcactattttggtggtggttgatcatccattaaaataacgaatcacacgctgcggcgcgccgaatctgaagacaagcaggagcgggcgggtgggtggatgggacagatttgggcgggggagcggcaagagctacggtggcctgggagacagattaggggatcaggaaaccccggatctggtgaggggcggcggcggcggcgaagggattagggtttcggccggcggccgttggcggcggcgagagccggggcc

SEQ ID NO: 60018 - DNA, 251 bp, Setaria italica
  Peptide Sequence Number=SeqID_125992
ccctcttccaatcacgtaaatcttcctgccgatagccacgagctggcatgggggccttgtaaccttgtccgagagcctgccaagcatgacccactccttggtgtccttctgccacatcatcagcgtcgtaccgagcttctgctccagtttgtaatgtatgccatgtttgtagaggtaactgagatcaaaaatcaaaaaccgaaccgaacatcacaacgaccatgatagggtcgtagtcgtacgccgtaggt

SEQ ID NO: 60019 - DNA, 471 bp, Setaria italica
  Peptide Sequence Number=SeqID_125993
cgggtcatcttcggccaggatctgaagagatgatacagacgcaagtgttgtgatataagactggtaggagcgcatggtggcagcagtctccaagcctcggcaaagcacaaaagcaggacgtctttcgtatgtatctgttgatggccgaagtgatcgtagcttgttcacagtatctaacacgatctccatctcattttcaatttgatcatttgtccattcatgtactgctgcggggtattctgatatcataatggaatcttttgtacaggcttctttaggttgaggaagacgctgccaaagttcctcagttatgtaaggcatgaatggatggagcaggcgcaaacccgtgtccaagcatacccataatgtatctctagaagcacctctgaggctacgtcctaactaataataattcatggtggcagtaccagcttgcgatgtatatattgaagcaataaaaccttatttacg

SEQ ID NO: 60020 - DNA, 212 bp, Setaria italica
  Peptide Sequence Number=SeqID_125994
gcttgttcatggcaaaacgaatggcattccacagcttattgcaccactgtcgatacccatgcactcttttgatatccaggtttatcttgtcagactgagaagtgtaagaaatcagggcaaagcgaagggcatctgtaccacactctggaatgccattagggaaatcctttcctgagacacgcaagggataggcaaggcacacaggggatagg

SEQ ID NO: 60021 - DNA, 205 bp, Setaria italica
  Peptide Sequence Number=SeqID_125995
caataacagcagttcgagcagcaaaacgtggcatcccttcgaattgcgagcctcccatttcatttatttttccatcatcttgacagcgccagtaccaaaactaggatccactaactcagcatcgcaaatttattttgagttttcggccattgaaagggtgtaaagcatattttccatgtaagtgcttatatctttcatcctgcgg

SEQ ID NO: 60022 - DNA, 328 bp, Setaria italica
  Peptide Sequence Number=SeqID_125996
taggtattactacgtctttcttcctagtccgtacgtctagtctatttgtcttgtctattcctagtcttcccattggtaaatttgtggccgctagaacaaaaacaagctcatctgtcttagtcaacccgtccatctgtattaacagctcagttttcaatcgtcggctagcttcatgttcactacgagcttcaccacgttgactaattatagcatcaatctcatcaaggaaaatggtagatggtgcatgatgccttgcaagctcaaataagactttcactagtttctccgagtcaccacgccacttgctcacaattgatgaggcagaaat

SEQ ID NO: 60023 - DNA, 292 bp, Setaria italica
  Peptide Sequence Number=SeqID_125997
agtctccttcagccatggacatgactgccataatcttggttgaacttctcatatctatgtgcatgaagatgagcagacggccttgtattcctcaaagcaagttcaatatcttctgtcgttactggaccaacttcaggcaactcatcttcaggaacctcttgattgcgttcgagaactgtcattaaccgtcttaggggctgcattgctgcctccttgcaataacaaaggacgaaataatacaagaagaccaagaaataataccttacaagttttactaccaacaaagaaacaa

SEQ ID NO: 60024 - DNA, 426 bp, Setaria italica
  Peptide Sequence Number=SeqID_125998
attcattcttccttggtcgtgctacttgcaagtgacttaaaaacattgtctgtcatttttactttagaagtcagtacttcacatcaagcttgtgaagatgcataattgcatccatgttcgcaagtccaggctttttccatttttgtagtacagtgaacggtactcgcagttgttaaagtgttcattgagcatatgccatggaattttcagatcaggggtttgcaaactcacccatttcggccaatgcccgcgttggagcaattcctgcccggcgtgccactcccggactgcgccgaccctgagccgaggaaatccgagggcgatctcttcctgtgccggttagcaaggaacctgccgccgttccgggaggaggtggcctcgtcactccggccgccgtggcgcgctggcgacgagtactggcacaag

SEQ ID NO: 60025 - DNA, 331 bp, Setaria italica
  Peptide Sequence Number=SeqID_125999
caccctcatgttttcaggtcccattcttgtgatgatggttattctccctgccctgttttcaggattcaagatatcaatcaaccgcacaagttctgctgggtccatcttgtcactgaccttgataccaagagggttggcaatgccccgaagaaactccacatgggcaccatcaagttgacgagtacgctctccaacccataggaagtggacgtcgcatgagtgccttcttcttccttacgagcaggcgcttactcgtgaagactccaccacaggcctctattatgactgctctgcccacttcctatgggttgacgagtacgctctccaacca

SEQ ID NO: 60026 - DNA, 352 bp, Setaria italica
  Peptide Sequence Number=SeqID_126000
gtttgaatgctgcaatttgaaaaagcaaaaaaattcaaagcattatctgaaatacatttcaccccaacttctgatgaaatacaggtcagtgacaagatggacccagcagaacttgtgcggttgattgatatcttgaatcctgaaaacagggcagggagaataaccatcatcacaagaatgggacctgaaaacatgagggtgaaacttcctcacctgatacgtgctgtccgtggggctggccagatagtaacatgggtcactgacccaattgtctattgggtaactacctattgtaaggtcccctttgttggtactttcttaaaacccgttctttccttttcgttacttagaa

SEQ ID NO: 60027 - DNA, 299 bp, Setaria italica
  Peptide Sequence Number=SeqID_126001
aaactttccttctacctgatacgtgctgtccgtggggctggccagatagtaacatgggtcactgacccaatgcatgggaacaccatgaaggccccttgtggactcaaaacccgctccttcgacagaattttggctgaggtgcgtgcattctttgatgttcacgaacaagaagggagctatccaggaggcgtgcatctggagatgaccggacagaatgtgacagagtgcattggtggaatcaacggaacaagtagaacaatttagaatagaatactagaacctacaacgactaaccaaca

SEQ ID NO: 60028 - DNA, 193 bp, Setaria italica
  Peptide Sequence Number=SeqID_126002
ttggttccttagtttttgttcttaaagtcctaagtattctagtattggttatttgtaggtaacgggtattggagttgaagctgccaagctatagaggggacaatataaatggggacacattcgatgagaagtcaagattgccagatccacaccgcctgataagggcgtactcacaatctgctgctacactgaa

SEQ ID NO: 60029 - DNA, 251 bp, Setaria italica
  Peptide Sequence Number=SeqID_126003
caagaggagcaggatgactctggttgctatctccatctggggaggctgccaggtttgcagaatctacttgcaaccccgtatcagttatatagactgttttagtagtctcttcccgaggatacaagtagtggaagctatgatgattttgtctatcaagttcatcttaaggtatacgatatagtaattggagatataacaatcaggtataaccgaactttttacactgtctttcacaggaaccaccattgcta

SEQ ID NO: 60030 - DNA, 357 bp, Setaria italica
  Peptide Sequence Number=SeqID_126004
ggcctttctcggagaacggcccccttcaggccgagtgggcaggtgctggttaagaacgagtacagctggaacaaaggtgtgtctgtgtcactgtgtgttgtgtgcgaggcaatgagtgcatcctcactagctttttttactgcaacttttcatgctgctaattccaattcttggctgccccaagaaagttgctctgttttgcttgtggtggtgtaatgctgtttggtgttcttgttgggatttctttttgttttttgcagaggccaatgtgatttacctggagacgccggctggtgtaggctactcctactctgctgatgctgcctactaccagggttgtggatgacaagatgacag

SEQ ID NO: 60031 - DNA, 222 bp, Setaria italica
  misc_feature (156)..(156): n is a, c, g, or t
  Peptide Sequence Number=SeqID_126005
cccttggttgcaccaggggacggctagctgctttcaagaatcccaggatggcaaaacaatgcctggatgcaagcaaatttacaggcaggcacaatacatatgctacagatggtatacattctaccgccgtggctccacagtcccttggttgcaccnggtacatttttccaggggaccatggcacatcttcgaagttgatgtaaccacctcaaaaaaaaaaaa

SEQ ID NO: 60032 - DNA, 219 bp, Setaria italica
  Peptide Sequence Number=SeqID_126006
catacgacatgagcacaagcaacacaataccaaccggctactcttccatccgatcttcagtctgctgctgaacaactttgaccttgaccttgacctttgttttctcgagattgccctgctgccatgtagtcgacgaaagatgttaacatttgtggaccgaatatcaacaagttttgcgtgtggtggcagatacttgtactggagtggagtgaattcatc

SEQ ID NO: 60033 - DNA, 208 bp, Setaria italica
  Peptide Sequence Number=SeqID_126007
tagctcgacaagtgggctgcaatgttttggcctttgatcgcccaggatggggattgacatctcgacctcgcagaaaggactgggaagacaagaaattaccaaatccatatgagttagagtctcaggtgatccttctcatctaatcaaaatattatgtttccctcttttttctgagagaagaacccttaatgcaagtctagtaactgca

SEQ ID NO: 60034 - DNA, 345 bp, Setaria italica
  Peptide Sequence Number=SeqID_126008
gaaatgatgatgaagatgatgaggtgatgatgacaacgaccccaaccaatatcccaataccatcggcatcgagcggatcctatcttatctcgcgtttgacatcgagtcggcgtcgtccactggacccaagtgctccaggcaacagcgcagccggaatcgccgcaccgccgcgaatgagagaagcttgcctcgccggcaagcaatgcaaccacgcagcgcgtctcaggtcgccgtctggacgcagatcgcgatgatgtcggcgaagcgggagagggattttgcagggtacagcccgtccatggcaggatccaccatcttggcaagcaggtcgatgtcatggagctg

SEQ ID NO: 60035 - DNA, 279 bp, Setaria italica
  Peptide Sequence Number=SeqID_126009
gtaccaatttcctgaaataatgagttgtggctgagattgctgcatgcagtggttctcttgcagttagattgtgtcagctaaaaaaaatcattatagaacgagttacatctttgtaacgtgaagcaacttacaggtactcaagtgaaaccatggtggatatggagtacggaagattaccagaaaggttattttttcgccaaattcagattaggttaaggttttgtattggtctaacttggttaaggtaatttgttaatttcttatgcaagaagttgttac

SEQ ID NO: 60036 - DNA, 335 bp, Setaria italica
  Peptide Sequence Number=SeqID_126010
ttgtagtctttacctagtattggtttcttagtccgtccttccttgttacctacgtcttttccgttgttggcccaagcttctcgaccatgtagctccatccatcatctggtctgcgtctgctgtacttgtggcacttaacctccccggccaccttcttcttgttgaactccaagcgttgaacgaattcttcatgcaacatctgatcttccttcattgaaatttcatacagaacctcatcaggatctcgtgttgtgccatcccagccctcaggcatcactttgaaatcaggtttatatggaagggttgcaacatgaaattccctgtcatgggaattg

SEQ ID NO: 60037 - DNA, 381 bp, Setaria italica
  Peptide Sequence Number=SeqID_126011
ggatttgccagccctgcaatagatgagatcatgaagatgattgcatccagggcagctgttgggtagaaagttgctgatgggcaaagaactgcatcttttacttcttctcagatggccactttgagcaatgtctctggctcagtcatgtctacggcagcaacaaccagaagtactgtaactgacctcggggttgtaggcagaggtgtcaaacgagctagcagcctagcgtcaaggtgataacagctgaacctgctcaagaagcctgcagtggattcagcaccttgaatgtcctggagttgtgaccccacaagaaacagttcatcctcaacgttttcttcgccctccatatctcagttctgcacacatgccgttgtctaaaaa

SEQ ID NO: 60038 - DNA, 249 bp, Setaria italica
  Peptide Sequence Number=SeqID_126012
tctctatcaaatctgtttgaactttacctgttgcagttgcctgtaatggaatgcaggcaagttcacacaaaattaacttttttctaaacttgattgttatttgtatttgtgttactcactgttagagcaatcataggaacactaggaaattggatctttaaaatgccaagattcttgtagtctggacgaaaatcgtggccccattggctacagcagtgtgcctcctgcatgacaaccatcacatgcaaa

SEQ ID NO: 60039 - DNA, 353 bp, Setaria italica
  Peptide Sequence Number=SeqID_126013
ctgaaacaaacaaagtaaatagaaattaacatgggaatatgaacagaaaataaatgaagaacttcaaattatgatcattaattgtaatttcgagactgatgcagagtcatcatacgggtggcacctatctccttgagctcgatactagaagcacaattgtcacacattccattgcagtcctgcagagcctctccaaaatgtcgaaagatggcaccgcgtcgacaactcctcttagactgacagtatcgtacaatatcatatagattttgaaggccacaattttcgtagaagaccattgaactctgttcatcgaaaacatggcacatatagtgatgataacaagaacttctact

SEQ ID NO: 60040 - DNA, 328 bp, Setaria italica
  Peptide Sequence Number=SeqID_126014
tgccgtacttctccgtcttcaccttccctactgacctgctctagctgcttggggttatcagacagaatgtgcaccatgttacattacattacttcattcacttgcaattgcaaacacaaggagataagtatcaaacacctcacctccgcctctgtggttggtttctggcagctcaggagcgaaatctgctcagaggagagaactgcatggggaaaaatgcttatgcccccgttactggacgatgatgacagctccctgcgcagttcatcaagtttagcttccagatcactcatccggctgcgctttgcacctctggatgatctaccac

SEQ ID NO: 60041 - DNA, 442 bp, Setaria italica
  Peptide Sequence Number=SeqID_126015
gtagggaaaagttaactctagttgaggagctggatgaacaaagacgagagggcgtacaaggataagagcggaggacatccctgagaaatcactcaggcacatgaaaaggaatctgattatactcttttgcaggaccagataacggagaaaagaatggagtgtgaaattgcatatgaaagtagaatatccttggaagaagcctatacacttggtggagcggatacctgtggggttgctgtgaatgttagtgattcaacgcagaacaaagaaacttgcaccactgaggaggcaatggaggacaagcaacaccatgaagttgaacatgtgaatgaggagaggattttggaagacacaactatgatagatagtagtgaattgaaatctgatgtaactcatgtggaggttgacatggctgggtcaaaggagggaacactgaaccagc

SEQ ID NO: 60042 - DNA, 158 bp, Setaria italica
  Peptide Sequence Number=SeqID_126016
ttagtttgttaattttgttaaatttctttgttatttgtttaacttcttattgttggtaggtttgtactatggctgggtcaaaggagggaacactgaaccagcatgcaactgatgtggaggttggcatggctgggtcaaaaggagggaacactggaacc

SEQ ID NO: 60043 - DNA, 260 bp, Setaria italica
  Peptide Sequence Number=SeqID_126017
acgcatctttattctttgcccttgtgaatggctgtttggctttctgaactgtttatcttaattcctccctgttttggtaagttcgttatttatctcctttttgtatagcagggaaaaaatcacatggacaaggccattcagatgcgtgagggccttgaaaatgaggtactccatcttcttaaagatcttgtgctgtattagtttgatctggccaccatcaaaccactttgtactactaccctatcatatcagagggtgat

SEQ ID NO: 60044 - DNA, 194 bp, Setaria italica
  Peptide Sequence Number=SeqID_126018
ttagaagacttactagttcagccgtcttgactctgtcattgtagccttgaaaatgaggttaaccagatgaaagataaaattgcagcaaaagaacagcacattgcagacttgcagaagaaagctcagaaattagaggatgaattggttgctgcacggaagtctcttcggaacgacaattagctgttacagacttg

SEQ ID NO: 60045 - DNA, 314 bp, Setaria italica
  Peptide Sequence Number=SeqID_126019
aagtccagatggctggtggagcattgttctcttgtataaaattgtaagaaaagcaacacacaaaaggcaaagccccggattagatgcggcacgtcagttgcgatgaaactactgcggaaacactccaaaagcatcaaactcaggtcaccagcaacaattgaactctgccatgccttcagtccagccaacaatggttctctgcctcaagggcagaagggcgtgccctccttctccctgttgggtacgggtattgtacgtaagttgtcctttgttatttccggttccgttacctttgttcttcggtcgttaggtta

SEQ ID NO: 60046 - DNA, 241 bp, Setaria italica
  Peptide Sequence Number=SeqID_126020
gaaacaactccaaaagcatcaaactcaggtcaccagcaacaattgaactctgccatgcctttcagtccagccaacaatggttctctgccctgaattttccatccaggtatgcaagttaacattattcatcttagcatactattgctctctaataaagtatctttgtgattgacaaaaaagtatgaaactttgacaagagtgtcctaaccctggccagctctcaggcactcactcgagacca

SEQ ID NO: 60047 - DNA, 480 bp, Setaria italica
  Peptide Sequence Number=SeqID_126021
gaggcgagtaagaccgattccgtccgtgcccagattgaaaccatgcgccgggagatccagaagggcagagctgcggttgatttcgaaaagaaggcacattctgataacctcgaacaaagtaaagcaatggagaaaaatatgatcgctgtggctagtgagattgagaggcttcgaggagagcttttaaatgctgaaaaagggaccacggctgtcaactcagcagcagctgttcctaactctgggtatcctgcagcttatggcaattccgaggcaacatatcccggaatgtacggaaatcctgatccaacatatgctgcacactcttatcccgatgcttatagcactaatcaggtttgttacttgctttataattgttctcttatttgctttagttttaacttcaacatttctttgcctggattaataattgtagcctgttgaatcacaccaatgaaaatatgattccagaattgatttctg

SEQ ID NO: 60048 - DNA, 279 bp, Setaria italica
  Peptide Sequence Number=SeqID_126022
tccaatcggactctcccaagtccagatccgagcccacgagacaaccgcatcaccgacacatgacacacgtgcacccgccaagacaccgggagcgcgagggacggagcaaaaggggggcaaaaatcggaaacggggggcggccacgaaccagtgcgcgcaggtggagacggcggggacagccgaggcgggatcggagtcggcgccggccgctgccatgtcgcccccttaacctccggctcccgatcggatcggcgacggggggcggtctcctcagccgcg

SEQ ID NO: 60049 - DNA, 234 bp, Setaria italica
  Peptide Sequence Number=SeqID_126023
tccagttcaggatgagcagtatcgttatggctctgaagatctgtattttcagcaccttcagtatcaatggtgttgttggaacttgaagctggtcctctcttgaaacacttgtcaccaattgttgagcattctccgacggttaaaaataaattagatgagaggctacatccagaccctgccaagcagtttggggaagatgctgatgcaactgctgggaaggctaagaacaaaaca

SEQ ID NO: 60050 - DNA, 253 bp, Setaria italica
  Peptide Sequence Number=SeqID_126024
ggtgacaagtgtttcaagagaggagaagcttgtcctcgtttcacaggttcttcatagcttaaccttactggttcatgtgtgacaacttcactagaccttgaactggaggctacatccagaccctgccaagcagtttggggaagatgctgatgcaactgctgggaaggctaagaacaaaacaccaccaagttttattagatgcacaagtattcctgctcggaggcaaggggcagcgagtccaagccgtcaacac

SEQ ID NO: 60051 - DNA, 415 bp, Setaria italica
  Peptide Sequence Number=SeqID_126025
gttgcaatctgctctgcctcaagagagcaggtctctgtcgccacattctcaggtagagcctccttgcaggcgcgacatcgcagccacaggtacgaaaaaccagcaaaagctgccttgctagcaaactgcgcacggtatattaggcttatctcccacaatccactgcccatgttaagtgccaacgcatcggcattatacccttctaggtctgattctgagaccatcacaaatgcgctgtcatcaaaggcaacaaggttgcgagttgcaaggaacaagggtggcttgatgataggattgtcgaggcaagtagacctcccagttttcttcactctaagttggtagaattcttgcacggcctagataagaaacaacacagaattagtggtggcattcactggtacatcactagcagagc

SEQ ID NO: 60052 - DNA, 358 bp, Setaria italica
  Peptide Sequence Number=SeqID_126026
aaaacatacaaagcccttttgcccactatatttccaagaaacaactaaaagattacctaaaattagcatacaatatgtcttagtgggataagtcatactaaaaatgagttcaacagatacctgacaggttctccttttcaaaatttggattaataacagccttttcttctatgttaacaatattcataaaaaaatactatggacaaaattgtgtatgcaagcatgagaaaaaaattgtgaaacttacttgccactgtgcagaagctaataacaccctaggccgacgcaagcggacatgttcataagcttcagcaggagtcatatttttatattgcacctagagggcataatcagttaa

SEQ ID NO: 60053 - DNA, 405 bp, Setaria italica
  Peptide Sequence Number=SeqID_126027
tgagaaagagaatgttgcagttctcactaaaagaaacaacgtttcaaggtgtatggtcagtagcaacagatattggtaaacgggaaactaattctttttaatcctgaactttttgtttctctgacccatcgatcctttatattccgttgtgaaatctggaggccatagttgcagctcaggcattaccatactttgtgtagtctctctcaccaagtacggaactgagaggttaagaagattttctatgcttcttctgtgcaacattccttgaccttggtgaagaaaacacgcccacaatataagttcccgtgggagaacactttcacatcaataacttccttcaaccccttgaattcacaatatctgtggaggcaagaattcaaaagacactggcaatttgcaaga

SEQ ID NO: 60054 - DNA, 442 bp, Setaria italica
  Peptide Sequence Number=SeqID_126028
cggttgccaatgtcggctgcgtacctgctggcacagtacaccccgacggccatcactgccattccgtagatgtttgtggtgaccaggcgaacggggttgagattactgcagcgagaggtccaccaataatggagatggcctgcccgctctgcccaacaacaccccgctccgccacaaggaggccagtcttgcagtatattgcaaagtcttcgcagttgctcttgaacagattgtagcacctgaaaccgttgctcagcaagtacttggcacggcggatcaccgcctcatcagggtcagagggagcaagcgtgcacgtccctctaccgttttgagtatgcggtcaacccagctctcttccttgccaaagcgcgaggagggacgtgcacgctttggcaaggaagagagcacgtccttccttgccaaaagcgcgaaggaagggaca

SEQ ID NO: 60055 - DNA, 349 bp, Setaria italica
  Peptide Sequence Number=SeqID_126029
ttggtccagaggctggcttaacaagggactcgattcgggctcagtttcagttcgataaccgaactgtgtatttagtggacactgcaggttggatggaaagatcagggaaggagaaagggccagcgtctttgagtgttgtgcagtcgagaaagaaccttatgagagctcacattgttgctcttgtgctggatgctgaaaaggtactactttcattttgatatgcagagccaacgagcggtaaagttctgacttagcatacttccttgtatgtgattaagcggaagcatctccactttctacttatctagtgccagctgcatatcatcaatcatgtggcgtggtagtgaag

SEQ ID NO: 60056 - DNA, 254 bp, Setaria italica
  Peptide Sequence Number=SeqID_126030
cctcaagccgccgccaccgccggagccgcaccaatctagagcgccaaccatggcattcggagctctcgtcgcgtcaaggatggccaggtccagctgcaccctcgcctctaccggtacccaggtccctatccaattttatttgttcaagagtgaaggctcaacagcaagcgacaactataatatatggtaatatagtgattctgactataatggaagacaactatccacttaaagtggctggaacggcggcaaac

SEQ ID NO: 60057 - DNA, 348 bp, Setaria italica
  Peptide Sequence Number=SeqID_126031
ctgatcttgcttgatgatggaggatgcagattaactggatcccccgcagagacggagggcactgccccgcggaggtcatgggcaacctctctgggggcacgctaggaggccatcgagggggcgcggtggatgcgcgccgtgaaggatggccagcggaggtcatgggcaacctctctgggggcacgctaggaggccatcgagggggcgcggtggatgcgcgccgtgaaggatggccagcggcgcacatgaggtagggggaacgagcggaagcagaaggttcggcctaggatctgaaaccctagactcctaatcccatgtagaagaagaataagaaattagggaaaacaa

SEQ ID NO: 60058 - DNA, 253 bp, Setaria italica
  Peptide Sequence Number=SeqID_126032
agcggaaggaggacaacacccgggtgagtttttgcacgatctgatcttgcttgatgatggaggatgcagattaactggatcccccgcagagacggagggcactgcccccgcggaggtcatgggcaacctctctgggggcacgctaggaggccatcgagggggcgcggtggatgcgcgccgtgaaggatggccagcggcgcacatgaggtagggggaacgagcggaagcagaaggttcggcctaggatctgaaa

SEQ ID NO: 60059 - DNA, 331 bp, Setaria italica
  Peptide Sequence Number=SeqID_126033
tgaccttgcgcgaagccacgggcgcgagctcgtccagtattttctgctccacgcgtgggttcttgcagaggaggtagaagaaccacgcagcgccgcgcccgtcgtgtcgcggccggcgagcaggaggttcaccgtcgtgtcgcgtaggaacacgtcatcgttgtggctggagtccttctcgtggcagatgaaggacgacagcaagtcggccgattcggtgatgccttgttcgatcttgtcggcccggcgtttcgacgaacggtggacggacgaacgaaagacaagtacgaatacgtacctaccgaagacggacggaccaattttaacttaa

SEQ ID NO: 60060 - DNA, 400 bp, Setaria italica
  Peptide Sequence Number=SeqID_126034
tccaaagatctgagctttgtgggttatacatacaaaaattttgatgccgtgaaagcaataaaaatttcagatctgcaaaggaattcatctctaacaaggccctccattggttcaatattcggtaacatactttttgccagtgacatgtaacctttattgtgatcactccactgtctactcttatcttactgggatattaccaatctcaggtccaccaggcatggattctccaatggaaccaaacggcagggacacacatatgcacaccgtttcatctggtgatccaatgattccctaaccgtcagtgttgtttggcctctgcaaagttccaaactaaatcagcacacgaaacgcctggatgatgtggttccatctggacaacctgctcatttttagtcca

SEQ ID NO: 60061 - DNA, 307 bp, Setaria italica
  Peptide Sequence Number=SeqID_126035
tacatccacagagatatttaagcctgataacctgcttctagataagaatggtcacatgaagttgtcagattttgggctgtgcaagccaatcgactgttctaagctctcaaccttgaatgaagatgaacccatgggcgatgataacctaagggaatcaatggatgttgacagttctctgtctgacacagcaaatggtagaagatggagaagtcaacacgagcaacttcagacaactaggacaagaatagaaacaaggaagaaaaattaggacaattactacaaactagttagggaacaaccggaacta

SEQ ID NO: 60062 - DNA, 214 bp, Setaria italica
  Peptide Sequence Number=SeqID_126036
aaaggaaataagatggtgttcttgcggcaggaattacatggctgagctgttgttgttcgtgatggtgtttgatatgtatcaggaattacatggctgagctgttgttgttcgtgatggtgtttgatatgtatcaggaatttttcccatttctgaaagtaggaattctcgtagcagagctgttgtagctatttataagaaaacatctttttacagc

SEQ ID NO: 60063 - DNA, 257 bp, Setaria italica
  Peptide Sequence Number=SeqID_126037
acagcagtcactgtgcagccctctaggttcaagtgggtgagcttcgacaagcctacaggaaagaaatggtaaaaatataacttatgaagcttttgatcggttaaagatacacagttatatggaccgacttccagataaaacacttaaatatgcacttgcagaaacagttaaacacatgttatcaatatacagtacaaaggtaaataaggcttggaacatacatcggtacatgcactcaacagcaaaaatgatccacc

SEQ ID NO: 60064 - DNA, 354 bp, Setaria italica
  Peptide Sequence Number=SeqID_126038
cagtactgctggacggtaaggtccacggttgctgcagcatcatggatgccggtgaggcaaatctgcccatggcaagcgcctgttgcatcatgcagtactgcatgcatgggttcacggcgtacggctgttgcatcagagtctccctcatccaccaattggcttctcttcctagagcagacgccacccatgattgaggcacaaaatcgaaccaaatccagtcacttctcttggtatcaacaattttggttctataagaaactggtagctgcaccgccactatcttatcacccaattatggtatattcaaagccagcctccgtcacctcccactccattctaaccggagactatctt

SEQ ID NO: 60065 - DNA, 358 bp, Setaria italica
  Peptide Sequence Number=SeqID_126039
aaactaattaacaattacggtaacatgcactcaacagcaaaaatgatccacctccaagttaataaagaaatttgagatcctgtttacctctaagataagatacacccagatctgtgatcctacaacatgacaattgaaggtccttcaaattggtaagatctgttaaatatttgatatctgaatccgcaatataattgcaatacctcaaattcagtgactccagctttgtcagatctgaaaagaagaagacaattgaactgacatttcaagccaacaactcagaaagtagtggaagttcatgaggaccagaggagaccttttagatgaataggccaccatgaatctttaggcaaccttc

SEQ ID NO: 60066 - DNA, 394 bp, Setaria italica
  Peptide Sequence Number=SeqID_126040
tgcacgcacggtgcaaagcaagtacccagttctacagcgtcccgaaaaagacgagcacggagcacgctgacaccgagcactagatttgccacacactaacagtattattaacttatgcctgccttcacctcaggctcttccaagactatacctatctacagaacagcctgctacagcctggtgattatttacagcaggcatcggatggcaactggcaagctactcaggccgcatgctgatcagattaggcagcgtcgtggcccggagcttcttcatctcatttgccgtgaccctggtggaatccagggatagcgagcgcaggttcttgctattgttcctttctaggttgttttgtagttaccggttcgttttggttacttacccgggttagttt

SEQ ID NO: 60067 - DNA, 273 bp, Setaria italica
  Peptide Sequence Number=SeqID_126041
ctaaaataccaatactgacaccaaaataatgagctgctcaatctctggtttgttcagttcaacagtcttgtagcattcataggcaggataggcgtagccaaaggccaacctacaggacattggcatatcaaacaccagaagataaatgaaatgttagtgctatatttattccgatcaccatagaaaaaaatggctgttgtttttcaccaaattttttaatatttcagtaaaaaaatatttattccaccttttcccatttattccacaataaaa

SEQ ID NO: 60068 - DNA, 239 bp, Setaria italica
  Peptide Sequence Number=SeqID_126042
tccgtcgaggtaacctggtgaggtgactggtctgcgacgacatatttcaaaacatcaaagaaagtattctgtctacagaagcagccttctggaaataaaggacaccgtatcggtggtggctcgagctctcaactcaagcagattgcgattgatttcattctcatgctgagaaatatatgacctaaagaaagtcccataaatgtccgtagttccctgcaatgaaagagcatatatcaatc

SEQ ID NO: 60069 - DNA, 257 bp, Setaria italica
  Peptide Sequence Number=SeqID_126043
ttggaaacaaggtatctgattctgtatgaactggcacaagcttcctccaaaggaaaggtcttgcatattttctttgcaagagcgaaatactggactcaggagttctaacgaatacccgtctgccgactgtatcctggtttgcttgccatttgtagatgcccacccttacctattctttttcttgacagacactgccattgttggagtgacagaaatcaatagcaattcaggaaattattctacggagcaaataattt

SEQ ID NO: 60070 - DNA, 241 bp, Setaria italica
  Peptide Sequence Number=SeqID_126044
ctagaaagaagccactgattgtcattggaataatgagtagctttggccggaaaaactaccgtgatgctgtcaggaaatcatggcttccgacaggttcaatgctgaggaaactagaagaagaaaaaggcattgtagtacgtttcatagttggaagaagtgcaaatcgaggagatacttttgatagggagattctcgattacagatgaaagatcatcacatcatggtgttgaagatgcatatt

SEQ ID NO: 60071 - DNA, 208 bp, Setaria italica
  Peptide Sequence Number=SeqID_126045
aatgtttttagattacttctgttgatgaatagaaaataatgtttgttttaatactactgtttggtcgactattctctcttacctattatatttaattttaattctctgcacaggttcaatgctgaggaaactagaagaagaaaaaggcattgtagtacgtttcatagttggaagaagtgcaaatcgaggagatacttttgatagggag

SEQ ID NO: 60072 - DNA, 248 bp, Setaria italica
  Peptide Sequence Number=SeqID_126046
tctacagatcatacagcaggtttgacttcatcttggacatcgatttctctttggaaagaccatgtttcatggatgctaggaagggggggacctgaaatttcatatagcatgttaaattagcaccacagggaaatagaataaactctagattctaccgatatgggtatttgagataaaatcttatttgaaaatcgatgccaaccagttatttatgctatgctagttggtagatcttgtttacaaagggt

SEQ ID NO: 60073 - DNA, 363 bp, Setaria italica
  misc_feature (12)..(12): n is a, c, g, or t
  misc_feature (30)..(30): n is a, c, g, or t
  Peptide Sequence Number=SeqID_126047
cagcaaggtacnaaattcactttaagatgngatcaacagaggcagaagtactccgatgatgcagtgtacattgttgccagtaagagagaaatttaacgaaggatctcaattagttctgaagaaaattagtgccgtctacagatcatacagcaggtttgacttcatcttggacatcgatttctctttggaaagaccatgtttcatggatgctaggaaggggggacctggtcaaatattggtacacgtttgccattgagcttatcaacaatatccactatggaaggcctcttgttccgatcagcttccacacacactagatccaaatggcctgcagcaagtaaaaacatgcatttgttaatttgt

SEQ ID NO: 60074 - DNA, 141 bp, Setaria italica
  Peptide Sequence Number=SeqID_126048
gagagaagaacagttcagtttctgacgacaaatctgcaagaataagcatgcctaaactatatatgtccgacatggtggagatttcacctctgtatagatattccggagctatgtacccattatgtcccttgacattgactg

SEQ ID NO: 60075 - DNA, 286 bp, Setaria italica
  Peptide Sequence Number=SeqID_126049
aggacgcggacggcttccttgttctcctcgtagatggcagacatcagagcggctgttggtggagggtgttctgatgtctgccatctacgaggagaacaaggacgcggacggcttcctctacatgacctacagcggcgagaacaccttcgggctgttctaagcacctggaattgcctcatcgtgactgcctcctgtaaataggcatatctcaagaacctgtccgtgtacataatctggtccgcctttgtcgtatgcagctcgtaagctgcgttccactgaactgttg

SEQ ID NO: 60076 - DNA, 241 bp, Setaria italica
  Peptide Sequence Number=SeqID_126050
gaataactaaattctcattgtacatttgccatttgtcacagagaggaggcaggctgaggccaaccgcatcagggagaagtaccctgatagaatccctgtcattgttgagaaggccgagagaagcgacatcccagacattgacaagaaaaagtacctcgttcctgctgacctcacagttggacagtttgtctatgtcgtacggaagcggatcaagctcagcgctgagaaggcgatcttcatt

SEQ ID NO: 60077 - DNA, 432 bp, Setaria italica
  Peptide Sequence Number=SeqID_126051
taaccttagtagacaatacaatgtagttcaggcaaagcgtgttgcttaccaatgctgaacccttgggagccaatcttcagtaaccaaagacggaggcatatcagcaacttcacaaaatacagcagctattattatccctgaaaaatgtacaatttgccactatggtcagaaatatgcaggccaagaacatttatgtaattgctaggtgctaatatggttatcaaatgataatctgaggtataaaaattgcttgcatttatgaacatgtcagaatcaatattgaggttactcaggtgatggaatgtcattttatatgtcagaaaaattatatgccaatgttgctccttggcacactcttggctgactactcagttacacaagttttgatgactcccacgtctcattttaagctaaaaattcattggaaaaaat

SEQ ID NO: 60078 - DNA, 500 bp, Setaria italica
  Peptide Sequence Number=SeqID_126052
tcccgaggtaagcttgaacaaatgaattcataactttgttcccttccttcgtaatgcgacaaccatgccaagtaagatgcaccaaagtacattgatgcaaaaggattgtagagatcatccacagagatcactgtatacgccctgtaaccacaatccctgtgcattcaaagggaagtacagataaatttgcatggaaactgtgcgtttatataatacccagagcagtgacaattatgcttccgataccctaaaacaaccaactattcctagtccttagttatttttcagtcaatccactgataatactattatctgacttctaaaaattatggatataattcttgtatagatattatactgatcactgtgtacatacttgtggaactgtatagggcaggactgaagttcaactgcctatgacattgcaacactgtgaagctgcattcttggcaaaagaacaaggactaggtaaaacaaaaggagtttccagttcgttggga

SEQ ID NO: 60079 - DNA, 489 bp, Setaria italica
  Peptide Sequence Number=SeqID_126053
aggggaaagttagaatttagtagaagaaagaccttactttttagaccaacccttaatatgctactaactacaaattcttcagttctttgtttgtcatcacaagagaagagccatttggcataagcagcaccaaagtagacatttacaagaggccagtagagcaaattggtatcatcttcaatatcatatttcttgtaacccaattcccttccaagccattgagcaacttcaggtgctacctgcattatgccaaccttggtctcttttgtcttgcgatcataggtatctacaaagagtctccttccacttgcaatttccgcaagtgcgcctatcatatacgggtctagttgtgatttgaaatgtctatgaacaatgattgaagccaccgccatcatttcagtttgtgtgagatatgcctcaccatcagggtcccgtgagagatgaactttctgtccctgctcttctccagcatcagtccactctttactt

SEQ ID NO: 60080 - DNA, 326 bp, Setaria italica
  Peptide Sequence Number=SeqID_126054
aacttgggcacaacatgggtaaccaagcaccaaatcagaggatggacaggccaggaatcagcaagttaggcgcttatcagacctcaaaagcagcactgccaccattgcaaaagttggtaccaatagtgttagttgcgtgtccaatttcattttatgcgaatgatatgaacattcatcgtgtacttcttgttttccagtagctcgaagaggcagagatctcccagctgcaaattgttgtcacgagcaaactgtttccatcctttcgaaagcctttggttccggaattgcttttgtgaatattaatgcgacaccccacttcccaactc

SEQ ID NO: 60081 - DNA, 266 bp, Setaria italica
  Peptide Sequence Number=SeqID_126055
ttcggtcgttctaaccccttgtccgtccggtagtctagtctagggtcttttggtctattggtattattgccttccttgctcgacaaggcgtgcgcgtacacgacgttcgcgacgacggtggcggcggcgcaggcgtgcgtgatcgcgctggacggcgcgcacgcgctgcagtggaccaagctctgcaacatctacacgcgcttctgcgagcagatcgccggcagcctcgtgctcgggatcctcgccgccgccggcaccgccgtcct

SEQ ID NO: 60082 - DNA, 252 bp, Setaria italica
  Peptide Sequence Number=SeqID_126056
ggcgtactacaagaagcgattgctgagaaccacggttctccggtgaaccggcctcccatactttgttgcagatttcatgggtgatggaggagagacgacagtggctatctttgcttttctatcgtgtgcttacctctctgcgaggttccaactgtttgcttagctaagtcttcgatgtgtttcctcaagaataaacaattggcgtccgatgctgccggtatctgccaaattgtttattcttgaggaaacaca

SEQ ID NO: 60083 - DNA, 260 bp, Setaria italica
  Peptide Sequence Number=SeqID_126057
agaaaacccgagtgaactaaagcaaataaaacaaaagatgaagccagtgccattgaaatgctacataaaaccgagggatttcagtaagtacaggacattctttgaaccctccaaacatcgatgaaatacaatgaaaggctgaaagtgtcctctcattacccctttatgtttttcagttgccttgataaagctgcagtagacactggaaagactggtgcctggtctctctgcagcattactcaggtggaggagaccaagat

SEQ ID NO: 60084 - DNA, 174 bp, Setaria italica
  Peptide Sequence Number=SeqID_126058
cctgggaatgctgatatggattgccgggttcccgttctacaggaaccagctgccaacaggcagccccatcacaagaactaattagacaaggttactacgttaagtactaagtactaatttacctaagtaaaacgtaaaaagtttaaagtttaacctaagtaaaacccgtaagta

SEQ ID NO: 60085 - DNA, 151 bp, Setaria italica
  Peptide Sequence Number=SeqID_126059
gtcacggccttcttctcgtcctcttagcctgagaggccttccactacgacaaactgcaggtttgggtcggactgcaggttccatcctcccgttccgatccgcacaagcctccagcagcggaaatatggcagaagcagttctccttgctgtc

SEQ ID NO: 60086 - DNA, 246 bp, Setaria italica
  Peptide Sequence Number=SeqID_126060
gctgaactgcagcgtcggaggctccaccgtgacgcgcacgccagccgggctggtcacgctggccgtgtacgtggccatggcgttgctcccgacgttgcgcacgacgcggcgctgcgtgaccttgccatcgccggagctgaacaccaccgagaacgccgggtagttgtggtcgcccacagagcccgagcgcttcgagcagtcggtcaccgagccgtctctcgtcaaaacggcgatctgcttggcggt

SEQ ID NO: 60087 - DNA, 452 bp, Setaria italica
  Peptide Sequence Number=SeqID_126061
taaaattaattaacgtaacgtacggtacccttagtaatttaattaactaattagttaacctaattacttagtaatttaattgaattatactcacgagaaatttggacacgtggaaagattaaagctatgcatgaaacactacccgactccatgtataagcttgctcagcagtacattcagactgtgacgttgggtttgatagagcgaggatgataggtctctcattaatcgaagacatagcctcaatcacctcttttgtgaaacttttgtcccacaccagctgatcctattagtgcagttggtctgatggccttgacagcgcctaggagatctttaacaggttcgtgctcatgtgcatatcgtttcttaaacggctgaagagtctcattacgtgaggtcacaatcaatccctttgaatcaacaagccagatctttttgcgtgcctcttctac

SEQ ID NO: 60088 - DNA, 259 bp, Setaria italica
  misc_feature (9)..(9): n is a, c, g, or t
  Peptide Sequence Number=SeqID_126062
acctggtgntccgggagcagctgctgccgttcgcgtcgacggcggaggcgcggcgactcctcgccgccctccaggccgccaacagcgagaggtacccgcgctactgggacgagctggtgggcacggccgacggcagcggggtcccgctcctccatgtacgtaaaatgacgcccttgcccttgctgtcttcattattgctgcctccggcgttgactgtttcttccttccgagcaggtcatcctggtcaacttcaggaagg

SEQ ID NO: 60089 - DNA, 254 bp, Setaria italica
  Peptide Sequence Number=SeqID_126063
aacgacgaaatcgtcgccggcgccattgcccggaacttcgtgtcacgggacctgctagaggcgaagaacctcgacgatgcgatgcacaggatctgctcaccgagcgtctcagtcggccatagctacaacctgatgaacgtcagaggccggaggatcgtcaacgtcgagaccgcctccaggaacaggtccgccgtcctcgaggccggcgccgcgcccttcttccacgcgaacatgtaccggcatctccaagtgaa

SEQ ID NO: 60090 - DNA, 349 bp, Setaria italica
  Peptide Sequence Number=SeqID_126064
catagcagttctcagaactggaattttcatgtcttctctaaattgagaagtaatggtgtcataacaccatggtcaaaagaatgtctctgcagctaggcaagtccgcagctatatttccaagacaccatatagcctgatgcctgatgttcgcatttggtgactccaagagttccaccaaccttggaacagcaccacattctgcaaccagcagtgtataatcagatgcagctatgttggtaagcacccaggccgcctccagctggagctgaggaagcccaatagtacttagaaaagaaaactacaagacaaatactagggacaaggaacatccgctctaatagaattttta

SEQ ID NO: 60091 - DNA, 464 bp, Setaria italica
  Peptide Sequence Number=SeqID_126065
ctgttgcttgcaaatgcttcaatgcttacattgcaaaatgaggttttctttgttcagtttttgaagctctgttgctctattctcaggtacctgaagtacttgaccaagaagtacctgaagaagcacaacgtgcgtgactggctccgggtcatcgcgtcgaacaaagaccgcagtgtctatgagctccggtacttcaacatcgctgagaatgagggtgaggaggaggattaggcgcactaccttatctatgtcttgtgaacttatggacagtgttggaacagtcttgctgtagcctttgaagggatgagttttgatgttaaattgctcttctgatctgttttaagcgtggtggaacttccaatgtgatgcttagataatcgagtccaagaattgttggttcttgcttgtctctataacatatcatcagtgttttatcgttcagttgttgacatgattgtcagctt

SEQ ID NO: 60092 - DNA, 175 bp, Setaria italica
  Peptide Sequence Number=SeqID_126066
acctatcttcccatgttatgctgtggtgaattttggatggttaatttgaagaatccttacatttgatcgcctcagcataacatgggaagataggtgcaaatgactaccgtgtatgagctccggtacttcaacattgccgagaatgagggcgaggaggaagatataagtggaatgc

SEQ ID NO: 60093 - DNA, 246 bp, Setaria italica
  Peptide Sequence Number=SeqID_126067
cacctcacgacccacccgagcaccagccgagcggaggagagatggcgcgcggcgtggtggcggcgaagggcggcgcggccgcgggaagaagaaggggtcggtcaccttcacgatcgactgcaccaagcccgtggaggacaagatcatggagatcgcctcgctcgagaagttcctgcaggagcgcatcaaggtcgccggcggcaactgagacacgcaaggggataggcaaggcacacaggggatagg

SEQ ID NO: 60094 - DNA, 400 bp, Setaria italica
  Peptide Sequence Number=SeqID_126068
gcgccaccaatttactatgatagaatcgataatgatctggttaatgtgtgcagcaatacaagggatgaccagaaatgcggattcccccagggctcctccaagctgactggccaccaaaatgacagctcgtgcgtactcttttttagcaaagactggctcccctttctgttcaagacgtgacaagatctgcaacatcgcggcattgaaagccaacagagcgaaatgtagaagcctgtgacaagaaatgtgctcctgttagatgttgaggtatagctgaagtgacagcaaaagtaagcagcagtttatattggaggtaagaaaaagaggctatgcagtaccatcgacaagcaaagaaaaaggtaaaataaaaaaaacttacaagttaaaaaaccaactagaa

SEQ ID NO: 60095 - DNA, 222 bp, Setaria italica
  Peptide Sequence Number=SeqID_126069
gcagcacctgaatcaaccaatgcatatatcaacattttttttttctgtaagttcaaagttactattactacaagcagtgttttacctatttgtacaggacagagcagctcaataagataatcaaatgtacttgccaaatatttaagaatttgatacatactaggctgagaagaacagcacttgcaacagaaaagccttgtttatttctatcaacaaaatcag

SEQ ID NO: 60096 - DNA, 242 bp, Setaria italica
  Peptide Sequence Number=SeqID_126070
accagaaatgcggattcccccagggctcctccaagctgatcaaccacagcaatcaacactggcagtgttttctgactggccaccaaaatgacagctcgtgcgtactcttttttagcaaagactggctcccctttctgttaaagacgtgacaagatctgcaacatcgcggcattgaaagccaacagagcgaaatgtagaagcctgtgacaagaaatgtgctcctgttagatgttgaggtatag

SEQ ID NO: 60097 - DNA, 459 bp, Setaria italica
  Peptide Sequence Number=SeqID_126071
gccggcaagcaatgtcatcactccagaggtaccttgccgtggctgatcttcttcttgcttcacggcgggcgaggagcggcggccgggaaggtgccggcaatcatcgtcttcggcgactcgtccgttgatacgggcaacacaacttcatcccgaccatcgcgcggagcaacttctggccttacggtcgcgactacgccaacggcctccccacgggccgcttttccaacggccgcctcgccaccgacttcatctccgaggccttcggactgccgccctcaatccccgcctacctcgacacaaactgctccatcgaccagctcgccaccggcgtctccttcgcctccgccgccacgggcctcgacaatgccaccgccggcgtcctgtcggtgatcacgctggacgtagtctagtcttggtcctttacttttcttaaggttagtttacttacggttaccgttt

SEQ ID NO: 60098 - DNA, 492 bp, Setaria italica
  Peptide Sequence Number=SeqID_126072
tgtaccctccttgctcgcacgctctcgctctgccgaccttatcttgagcactgctaaaggtgctgaatttgtggtgttcagaccctcagagattgctgccagtgttgctcttgctgcgattggggaatgcagaagttctgtaattgaaagagctgctactagttgcaagtatttggacaaggaacgagttttaagatgccatgaaatgattaaagagaagattactatgggaagcattatcctaaaatctgctggatcatcaatttcctctgtgccacaaagccccattggtgtattagatgctgcagcctgtctgagtcaacaaagacgaatgatagctaactagttaggaatactacctagacaaacaatagttaaccaataagttacttaccaacaaagacaaagaaggaagaaaggaattaactaagaaagaactagactactagaattagacttacaaggtagtagactacctacaaccaactacta

SEQ ID NO: 60099 - DNA, 321 bp, Setaria italica
  Peptide Sequence Number=SeqID_126073
gtggtgctaagcaccttaaagtggaggatgcacgctgttactgcttgctcctttattgaatactttcttcacaaattgagtgatcttggtgtaccctccttgctcgcacgctctcgctctgccgaccttatcttgagcactgctaaaggtgctgaatttgtggtgttcagaccctcagagattgctgccagtgttgctcttgctgcgaattaggggaaatagacaagaaagttactagtaaattagaaaagaagactagactaactaagttagacaaagtaatttaggaacaaaggaaacgaagttttaaagaatagacca

SEQ ID NO: 60100 - DNA, 387 bp, Setaria italica
  Peptide Sequence Number=SeqID_126074
aaagaagctgctactagttgcaagtaatttggtacaaggtaataatttcacagctctgtgttccaactgaaccatttagcacttatcattggatggtaacctctgagtgcaacacttactcaaattgtttccaatttagtctaaacaccattaatgtgttttaggaacgagttttaagatgccatgaaatgattaaagagaagattactatgggaagcattatcctaaaatctgctggatcatcaatttcctctgtgccacaaagccccattggtgtattagatgctgcagcctgtctgagtcaacaaagcgatgatgctactgttggatctcctgcaacatgttaccatagttcttccacaagcaagaggagaaggattactagaa

SEQ ID NO: 60101 - DNA, 114 bp, Setaria italica
  Peptide Sequence Number=SeqID_126075
caggtgtgctcctcacctgaagcaatcagagcagtcttctagtaatccttctacctcttgcttcaggtgtgctcctcaccactctaggagtttttggtggttcaatcatcttaa

SEQ ID NO: 60102 - DNA, 435 bp, Setaria italica
  Peptide Sequence Number=SeqID_126076
agacagcaccaggctgaacttgctcgtcaaaagaatgaagagactgctagaggcttgctgggggtggttctggttctggtgaaggacgtggtcctgcaagggcttcaaatgagcttgttgcatacaagaatgttaatgatgttccatttgtgagagagttggtgatacaagtggatcagaagaatgaagctgtcctcttacctatttatggcagcatggtacctttccatgtttctactgtgaagagtgtgacaagccaccaggacaaccgtacctgcactatccgcatcttcttcaatgtgcctggcatgccgttctcaaatgatagcaagctgaattctcaaggtgccattcttactttgtaaagtaaatttactattttcgtcttctaaaagtaccctacggtctattagtctagttgaagttgttcagcag

SEQ ID NO: 60103 - DNA, 516 bp, Setaria italica
  Peptide Sequence Number=SeqID_126077
tatttaaggtgggcaatggctgaaccaacttctaaacaaaatcttcacttgttatcttctttgtataacttattcagctttgggaatatggcaacataattatagtacttatctagacatgcattgccacataaagtttaaaatatgggctacaattatttatcaatggcaattttagttaaataagtgtgcatatgccgaaatgggtatgctttccttatttttcttctaattgccaccaacaaaatgtcttatacagctgttcatgggttaggttaacctggctaacctcataaaaccaaaaccgaacgaacggcctatatagttagaacatgaagctcatcttatcgaaggaagagaggctgggatttgtatttgggtatgaactgacatacccatcatctgaggagtcaggcggaacttaagaaaccctctgataccatatggagcattggaggagatataaatggggcatcagctgcattgtggcattggcgacagctccttctggggtat

SEQ ID NO: 60104 - DNA, 457 bp, Setaria italica
  Peptide Sequence Number=SeqID_126078
acaacatacagtgacggtgaagacgatgagcttggcgaccttgacgcacctggaaatgaatgtggacagcttggatgaccatgttgaaatagatttgaacgatgatgaaggcattgagtattcgatgaataagatgtccataacgccacaccgctctttctaccacccaatggctatgagcagtgattctgggcttagcatgcctgcgaggatcaggccttcagtgagccctccatcatagggccatcacaagatcgtttcattgttactggctcttgactgaaaacaatgctacgaagtcgcatgtgccgaggggcaagcagatacggatcaaatgggaagaacatgtcaagcctatttggtcctccaaaagccttcgataaatcagattcaactatatcttcaagtggcaaatccacagatgcattgaacaacctggcagccctagactgtctca

SEQ ID NO: 60105 - DNA, 123 bp, Setaria italica
  Peptide Sequence Number=SeqID_126079
atctgctaagagaatctgacaggtatggatcaaatgggaagaacatgtcaagcctatttgatccatatctgctaagagaatctgacaggtatatccgtccaaattttgagttctggtccttgg

SEQ ID NO: 60106 - DNA, 137 bp, Setaria italica
  Peptide Sequence Number=SeqID_126080
tttttgttttatgaatcgagagttaaaaggaactccaatgacaacagttatattttaagtgcagaatgtctgcagtttcatatgttggaagctatctgtcccgggcaaggttcatttctgcagatacagttgttgct

SEQ ID NO: 60107 - DNA, 436 bp, Setaria italica
  Peptide Sequence Number=SeqID_126081
gcggtcgtccagtcttgatgcaggccgcagtcagcagccacagaagtactggccatgaccctccgttgtgataactccatctagtatttttcggatcacaacctgtcacaattcgccattcatggttctcaatggctggataacatatcttcagaggcatttcaccaataagctcttccccaacgctcctcaataagatccattatagccacagattgctcaggtgttgcaagagaagaaagtatggcaatcatgtttccaagtgcaaaccaacggaagtccatccttgcaggactaacattaccaacgaaaaaccaccttgacaaggcatgaaatcaaagagccaatccggaaataagaatccggaaataaacaattaaaatttagttagaacaagactagtagtagacgaaataattacttactagtacttaga

SEQ ID NO: 60108 - DNA, 250 bp, Setaria italica
  Peptide Sequence Number=SeqID_126082
acgaagcaccttttgaccttacaaaactgcaaggaattcaaagagagtaatccaagtaaagtgaagctcactaacctggccatgaccctccgttgtgataactccatctagtatttttcggatcacaacctgtcacaattcgccattcatggttctcaatggctggataacatatcttcagaggcatttcaccaataagctcttcccaacgctcctcaataagatccattatagccacagattgtcttca

SEQ ID NO: 60109 - DNA, 270 bp, Setaria italica
  Peptide Sequence Number=SeqID_126083
tcagcatgtagggtcgtcgacaaccccttccttttgtcgtcatgcatcaccttgaagctcgccggcatggccccctcccccgagcttgaaccggtcgactttcttctcccacgccctcggtcatagttaaggacttcctcggacgcgtggtcgactgcagcgacggtaccgagtggctggccgcggaagaagacgagcgagcggcggagcgcctcccatgcgtcgccaacgatggggtgtggctcgaaggagtggagcgcggaggacggg

SEQ ID NO: 60110 - DNA, 177 bp, Setaria italica
  Peptide Sequence Number=SeqID_126084
aaaacttttcgtcaccatctcaatttgtccacgatgcggaccgcttcaaaacaggcttcagcatcgccttatcctcctccagggagatcatgccaagatgtgaagggtcctccagcatcatctttgcgactaaaataacccaagacgaataggaaccaaagtactaggaaatttaca

SEQ ID NO: 60111 - DNA, 332 bp, Setaria italica
  Peptide Sequence Number=SeqID_126085
cgcgctttccctacggagcagatgcgggagctcgcgctcgggctggagctcagcgggcagcgcttcctgtgggttgtgcggagccccagcgacgagggcgccgtcaacgacaactactacgacgccgagagcaagaaggaccccttcgcgtacctccccgaaggcttcgtggagcggacgaaggaagtgggcctcgtggtgccctcgtgggccccgcagataaaggtgctggcccaccgcgccacgggcgggttcctgacgcactgcgggtggaaactcggtgctggaagaagcctacgtaccaacggacgtagacccaataggtaggacga

SEQ ID NO: 60112 - DNA, 313 bp, Setaria italica
  Peptide Sequence Number=SeqID_126086
tgtacgccgtagagcaagaaggacccctttcgcgtacctccccgaaggcttcgtggagcggacgaaggaagtgggcctcgtggtgccctcgtgggccccgcagataaaggtgctggcccaccgcgccacgggcgggttcctgacgcactgcgggtggaactcggtgctggagagcctcgtccacggcgtgcccatggtggcgtggccgctctacgccgagcagaggcagaacgcggtgatgctctcggcggagggggtcggcgccgccatcgagacgctcatgtcggaggagtgcgcgcgcagcgtcccggcg

SEQ ID NO: 60113 - DNA, 510 bp, Setaria italica
  Peptide Sequence Number=SeqID_126087
tgtaaggttccttgtcggttattgtttggtagttcgttggtacgttggttgtaacaaggagggccaagtggagctgcagaggtacaagagggaccacccgttcgcgcagctctccggctccgacaacatcatcgccttcaccacgtcgaggtacaaggagcagccgctgatcgtgcgggggccaggcgcgggtgcggaggtgacagccggaggcgtcttctgcgacatcctgcggctggcctcttacctgggcgccccgtcgtagggtagggtagccgagccctgtgacgaatctcctcagaggcagacggacaccattgtcctgcatgatgtctccgttgctcccgtatggacgagctgtgggtagtgtattgttctgagtgccagcaaataaggtccctcttgttagggaagggctttggtgtcaggcgtggttgtttcatcgaatccagagttcatattaaactgataatgaagtgccaactcaataatgcaacaacgtttgcttgt

SEQ ID NO: 60114 - DNA, 347 bp, Setaria italica
  Peptide Sequence Number=SeqID_126088
tgttcattatttttggcgacaaaatagtagttagacaataccccgacaaccaattatacctgtgatgaaagacaacatccccattgttattaggaacatgttcaatatctctgcccctggaaccatgatttgcaggcagcctgccaatgataatggtgatttagatgcttgtgtcaaatcatttgctactattgataatttggcccttgtcaatgttgaaggaactggaatggctggtgttccaggtacatcaagtgccatatttagtgctgtaaaagatgttggagctaatgttatcatgatatctcaggctagcagtgagcactctgtatgctttgctgttccag

SEQ ID NO: 60115 - DNA, 252 bp, Setaria italica
  Peptide Sequence Number=SeqID_126089
atctatctgggactgatgttgccagaaaggtcattatcctggctagggaatcgggtttgaggcttgaactttctgatattcctgttaagagccttgtgccagaggcacttgcgtcatgctcatcggcagatgaattcatgcaaaagctaccatccttcgatgaggactgggcccggcaacgcagtgacgctagaaggactagacaaggacgaaagtacctagacggtaatagttaggaagtacgtaaggaac

SEQ ID NO: 60116 - DNA, 193 bp, Setaria italica
  Peptide Sequence Number=SeqID_126090
ggccatcctcaggccaacagcagcaagaatgctacaaccattaatgttcgagcaatagctcaaggctgcagtgaatacaatattactgttgtattaaagcaagaagattgtgtaagggctctgagagctgctcactcaaggttcttcctctccaaaaccacacttgctgttgggatccttcagctggttaagg

SEQ ID NO: 60117 - DNA, 120 bp, Setaria italica
  Peptide Sequence Number=SeqID_126091
attggaataactggctcaagtacaatgcttttgagtgacacgggaatagacttaacccagtggaaagagcttctccttcctttcgtagaagctctttccactgggttaagtctattcccg

SEQ ID NO: 60118 - DNA, 209 bp, Setaria italica
  Peptide Sequence Number=SeqID_126092
aaggtgattaactgccgtatgttgtttgggaattggtcacatgattattcttttgcaagttgggataaagagcatccaagcgtattactcattgcaaagttattttttatttcacattgggagtatttcaaaagtaaatacttcacacgataatgtttaatgcttatagacgaaatttgttttgctcgtcgcacgggcacgattagagg

SEQ ID NO: 60119 - DNA, 388 bp, Setaria italica
  Peptide Sequence Number=SeqID_126093
atttcgatgtctttattgatgtataatgcatagtgcaattatctagtcatttgtgattcatagacctccaaaatgggcaccgtaaaattgttctatctagttgtccctcttgttttgaattatggtaaaaataaagtgttgtgggctccaaaaatagaagcctgacaaactcatcatttatgacaaaaaaatgtagtttcaagttgcttgctaacattattgagataatagaaagtatttgttaatgtattttaacctgcattggttcctaacagcattgacttgtactacttgtccaggttggtgatggaataaatgatgcgccgtctttggcagctgcagatgttggaatagctatgcgaactcattcaaagagaatgctgcctct

SEQ ID NO: 60120 - DNA, 492 bp, Setaria italica
  Peptide Sequence Number=SeqID_126094
cttcgtctcgctgctgcagtggagaaaacagcattgcacccaattgcaaatgctataatgaacaaggctgaactgctcaagttggatattccaatcacaagtggtcagcttacagagcctggatttggctgtttggcagaagtagatgggtgtttggttgcagtaggcactttggattgggtacacaaccgttttgaaactaaagcatcaccaactgaactgagagatcttagaaaccatctggagtttatgttgtctagtgaagcatcatcatcaaatcaatcgaagtcaattgcttatgttggtcgtgaaggagaaggaattataggtgctattgctatatcagatattttgcgagaagatgcaaaattaaccgtggacaggtgctttcttttcattttaactgtgtttccatggtatacagatatatttctcttatctaataaggaattaaattaaccttaactaaagtaaaggttaaagtaaactaaa

SEQ ID NO: 60121 - DNA, 386 bp, Setaria italica
  Peptide Sequence Number=SeqID_126095
actagtttagaaaggaatagggaccgactaaaagatcagagcaacatgtactggaccgtcatcaacaattgctaagatagtccgcatggttgtgaaacacaccctttgtcctttgctgttggcagtaaaacgaatgggggaaaggatgtttgactgtatatgttttatcctcgaacaggttgaggatgcccaagcacgtgaagctcctgttcaaagactcgcagattccattgcaggaccatttgtgtatactgttatgacattggctgcggcaaccttttcctctggtattacattggcacacacttatttccggaggttcttctgaatgatattgctggcccgatgggattcattacttttgagtataaagcttgctgttgacg

SEQ ID NO: 60122 - DNA, 218 bp, Setaria italica
  Peptide Sequence Number=SeqID_126096
gcagattccattgcaggaccatttgtgtatactgttatgacattggctgcggcaaccttttccttctggtgtgctcttatttttattttcttctattcaatgaaatatacatgaaaaccttgttgtgactagtaaatattgcttttctaaccctctccctcccttaggtattacattggcacacacttatttccggaggttcttctgaatgatattgc

SEQ ID NO: 60123 - DNA, 155 bp, Setaria italica
  Peptide Sequence Number=SeqID_126097
cctgaaactagtcgaactaaactagtagcaagcaattcttgccagttgtagcatgttggtgcgtgtacagtttatatagccaactagagtagcaactatactagtcgcccagaaggcctataaggttatggcaaaggcaatggctaaccttatag

SEQ ID NO: 60124 - DNA, 418 bp, Setaria italica
  Peptide Sequence Number=SeqID_126098
cactctggtgtcgttggcgccttcaactgccaaggtgctggctggtgccgggtagggaagaagaaccttgtccatgatgagcagcctggaacagtcaccggtgtcatccgggcacgggatgtggattaccttgcaaaggttgctgatcaaagctggaacggtgacgtgatcgtgtattcgcatataggaggggaggtggtgtacctgccgaagaacgcctccttgcccgtgacactgagatcacgcgagtacgaggtgttcaccgtcgtcccagtgaaacacctgccgaacagcgcgtcctttgcgccgatcggtctgatcagcatgttcaactccggtggcgcggtgagggaaggtgaagaataacggtagaagaaacgactagaacgtaagaagactacaaaagtagacggggaca

SEQ ID NO: 60125 - DNA, 281 bp, Setaria italica
  Peptide Sequence Number=SeqID_126099
cgagaaacgttcagagagtatccatcagaaatataagaaagtgtagccgtcgtaaattaaacaaaaaaggtaaaaggttaaaagaaaatttaaactaaacctaaaacgaaacgaaataagacttagtaggtctggtcacctttgagcttggcctccccgagcaagaactgtacctgtggactgtttcggtagagtgttgagatcgatgtaacgagaaacgttcagagagtatccatcagaaatataagaaaaaaagcttacagtgtttaaaaaaaaaaaaa

SEQ ID NO: 60126 - DNA, 219 bp, Setaria italica
  Peptide Sequence Number=SeqID_126100
aatttgttgtcttattcagtttacaaatgaaggttcatatttctgacacataatgtcaaacaatccaggtatgtatatgtgtggcatgcgattactggatactggggtggagtcaggccaggtgctgttggaatggagcactatgaatcgaagatgcagcatcctgtttcatcaccaggagttcagaaaaacgagcactgtgatgctttgaacagcata

SEQ ID NO: 60127 - DNA, 262 bp, Setaria italica
  Peptide Sequence Number=SeqID_126101
tccaaatgacaaatctcacaccgtttccccaaacaatactaaatcctaccacattataagtgcactgaaacatatcttttctttattttcagctttggaaaaggtggagtttctcctaagtttgtcataattgatgatggatggcaatcagtcagtatggatcctgtgggaattgcgtgcttagctgataactcagccaactttgcaaacaggttgactcatattaaggagaaccacaagtttcagaaaatgggagggaggg

SEQ ID NO: 60128 - DNA, 270 bp, Setaria italica
  Peptide Sequence Number=SeqID_126102
aatcctttgaaggcacacatcttgtttttgtcggtgctggatcggatccgtttgaagtgatcacaagttcagtaaaagctgttgagaggcacttgcagactttttctcacagggaaaagaaaaagatgccggacattctaaactggtttggctggtgcacatgggatgcattttacaccaacgttaccgctgaaggagtggaggagggattacagaggtccttccaaatgacaaatctcacaccgtttccccaaacaatactaaatccta

SEQ ID NO: 60129 - DNA, 255 bp, Setaria italica
  misc_feature (246)..(246): n is a, c, g, or t
  Peptide Sequence Number=SeqID_126103
gatgaatgagcgtgaagcccgctaacttcatggtacgaacatgtgttgatgcttacacaagtggactactgcagggtatgacttgattcagtacttgcagcaggggtattgagaaatagtttgtttctcgttttgtagatggtatatgttcgtgtacatcaattgtatgtagcaactaatttttttcttatgtagaattagaattttttaagttagtaatacaattagtaataggtaaaggaatanaaggaaata

SEQ ID NO: 60130 - DNA, 165 bp, Setaria italica
  Peptide Sequence Number=SeqID_126104
aagtgccggtagcagcaggatggtgagaaaaatgagctggagacttcatgttctgttacacaggcattggagtttcttactcctccttataaaggacatccgcgtgttatggcatatgtcctcgtgtcttggagacttacccacctgagactgttaccttttcta

SEQ ID NO: 60131 - DNA, 485 bp, Setaria italica
  Peptide Sequence Number=SeqID_126105
gttaaactaagaacaaattaagaaaaaattttagacaatagactagacaatacaattacaatttagatatttggaagaactggcaaacatctctttcttactgattatgatgatggaaagcctccattgctgcaacgcatggtggacaattggggtgacctgcagttcatgtctgctttgcaagcatttagacgacgagttgcatactccaatgcttgttatgatcatattgttgggtggaggacatcatccatcagacaagattcggaattacccaagtgggttgattcaacaaacaagatctacccacatattgtatatgaggagctatccaaagcagaagctcctaatcaatgtgtggacacggacaactgcacactagaagaacgtcttttaagaggacttaagcgtgtgtcatgggaaaaggtggatgttagcttccacaacagcaaagtaagatctgcagcacatagtgtgattcaggt

SEQ ID NO: 60132 - DNA, 377 bp, Setaria italica
  Peptide Sequence Number=SeqID_126106
agagaggaaaatatacattttggtatatgacccaatggatcataaaatgcaacctgtatcatggtcaacattatttagttcctacatcatgcattattccttactgcagaattgtcacatgatgggttgacttctattgcaatttacagaacgtcttttaagaggacttaagcgtgtgtcatgggaaaaggtggatgttagcttccacaacagcaaagtaagatctgcagcacatagtgtgattcaggtgaaggatcctgtgatgcattgcgaaggtgccgatgtcatacagcatatgattgaccattttactctctagtaacccgggtctctggaaaacggacgtaaaaccaggatacatttgctaactgctgagt

SEQ ID NO: 60133 - DNA, 465 bp, Setaria italica
  Peptide Sequence Number=SeqID_126107
cttactgattatgatgatggaaagcctccattgctgcaacgcatggtggacaattggggtgacctgcagttcatgtatgcttaccttccgcaactgcttttatgtgcttggattatgaatattttttagcttaccaatttgttggtgtaggtctgctttgcaagcatttagacgacgagttgcatactccaatgcttgttatgatcatattgttgggtggaggacatcatccatcagacaagattcggaattacccaagtgggttgattcaacaaacaagatctacccacatattgtatatgaggagctatccaaagcagaagctcctaatcaatgtgtggacacggacaactgcacactagaagaacgtcttttaagaggacttaagcgtgtgtcatgggaaaaggtggatgttagcttccacaacagcaaagtaagatctgcagcacatagtgtgattcaggt

SEQ ID NO: 60134 - DNA, 310 bp, Setaria italica
  Peptide Sequence Number=SeqID_126108
ttgcatgctgcatcattcatttgatatttggaagaactggcaaacatctctttcttactgattatgatgatggaaagcctccattgctgcaacgcatggtggacaattggggtgacctgcagttcatgtatgcttaccttccgcaactgcttttatgtgcttggattatgaatatttttagcttaccaatttgttggtgtaggtctgctttgcaagcatttagacgacgagttgcatactccaatgcttgttatgatcgtatccttacttcacacctaaaattagcatgtagtattgtagtgataagcat

SEQ ID NO: 60135 - DNA, 431 bp, Setaria italica
  Peptide Sequence Number=SeqID_126109
caacctgtatcatggtcaacattatttagttcctacatcatgcattattccttactgcagaattgtcacatgatgggttgacttctattgcaatttacagaacgtcttttaagaggacttaagcgtgtgtcatgggaaaaggtggatgttagcttccacaacagcaaagtaagatctgcagcacatagtgtgattcaggtactgtctttagatacccgtcacgttcttccctgtcagcaatttagcaacgaaagttatgttgaagctgaagcctgccttggaatgaaatcttaacaggtgaaggatcctgtgatgcattgcgaaggtgccgatgtcatacagcatatgattgaccattttactctctagtaaacccgggtctctggaaaacaagaacgtaaaaccaaggaataacaatttagactaaacta

SEQ ID NO: 60136 - DNA, 243 bp, Setaria italica
  Peptide Sequence Number=SeqID_126110
caagcgcaacgcccgcgactcccacgtcccagtaagtagctctgcactgcggcctctcacctatccagctcgatcatgtttgtggcgcgcagtagtgggataacgatgcttagtttcagatatgaatttgcttctttatttgctgcaaggaaacgagctggtaggaatattcgttcgatcactagacactagtgggtagtttttcgtgagatggtccctagcatagcaacaactacgagtaga

SEQ ID NO: 60137 - DNA, 147 bp, Setaria italica
  Peptide Sequence Number=SeqID_126111
gccacctcacaactgctctactcgtagttgttgctatgctagggaccatctcacgaaaaactaccccactagtgtctagtgggataacgatgcttagtttcagatatgaatttgcttctttatttgctgcaaggaaacgagctggta

SEQ ID NO: 60138 - DNA, 296 bp, Setaria italica
  Peptide Sequence Number=SeqID_126112
agttcaagccaaagaagatatacacttgttattgagatcaatatagccacgcacaaacacacgaccaatcgatatgattaacaaagtaatgctataacattacatatcctattcaggtgtcaactgtatatacaattgccctgaagtgaaagcagcaaaaggacctcaaaggaagcaatcacaacctcttcatccatttccgttcaaaactggccactctgtccaggaactactgtcgcgcttaattcttggttggtcccgtaactattgtataaatcttgtgtctttgtgtccct

SEQ ID NO: 60139 - DNA, 267 bp, Setaria italica
  Peptide Sequence Number=SeqID_126113
cagagggagattatcactgacagtagtcccaatcgacgagcccaggtgagattcagcagcggaaacggatgacgatgcaagagatatcatccttgctcttccttgcgagtgcttccgtagtcagccgcttcgctgctgcctgggggtccttgatggacttcacgagatcaacggcctcctggttcgtcatacttgccagtgatggactatggaaggtaatagaaagaaaccaaggaaggaccgtttagaattacttacgttagtaaa

SEQ ID NO: 60140 - DNA, 114 bp, Setaria italica
  Peptide Sequence Number=SeqID_126114
cttcacacacaacagcccgagagtcgcctacatttgctatccacatgtccttgccatcaacaacttggaccaggtggttccacagcagttactgctattgttgttgatggcaag

SEQ ID NO: 60141 - DNA, 236 bp, Setaria italica
  Peptide Sequence Number=SeqID_126115
tcgagccgagggataacgtcggtcgtgccaatttctctcggcaatgagacaagctggtttgtgaatgttctgcagctactaaactcctcaggctacgatcaacgcaagatcacggcgaggtcgctcttcttcgtcggtgagatcggagtcaacgactacttcctcgccctcatgagcaagtccgccgatgtcgcggagagcctcgtgccacacatcatcggcaccatccgctcagc

SEQ ID NO: 60142 - DNA, 358 bp, Setaria italica
  Peptide Sequence Number=SeqID_126116
attcatacattaattatgaggtctatcatgaacaaaaatacatcagaagataacaaaactgtgaccttttattcgtggtacaacatagaagacttgaccgccacgttgcagctcaaacttgatagttgagagggccctttctttactaaatgctgacacatatgtctttactgctactctttcaggaggtggtgtagacattaaacttgcatcccggaaaccagtcaaagccagatacagggtacgtgggatgggtgttgcagagagtgtaagaacatcaatagaagacttgtatgatgcaatcttctcctttttgctggacaccaaatttttgttcttcatccaccactagaagacc

SEQ ID NO: 60143 - DNA, 206 bp, Setaria italica
  Peptide Sequence Number=SeqID_126117
gtttgcttgccgggatgaatcagagcaagcaacattcttcaaatggcattgtagctcctcattcatcgctacttttactctgctgtctgctcctcagctacctcagaatgcctgctgggtgactgctctgctaataatgcctcaaaagaagctgggctgcaacttttcaggcacttttcataatgcaggactgtcaatagtactta

SEQ ID NO: 60144 - DNA, 323 bp, Setaria italica
  misc_feature (122)..(122): n is a, c, g, or t
  Peptide Sequence Number=SeqID_126118
gtcagatcgcccactgtctgagtactgcacccgaatggtccttccatcaagcacctcaccgttcatcttctgcactgctgcagcagcttcgtcttctgaagaaaaatgtaacgaaaccaaancctttcgacttccccgttgtcggatggcatatcaccttcactgcaataacatcaccatgttgagagaaagcatccttgagagctgtttcatttgtatcgtaagaaagacctgcacgccgatgaataacttgggcgtgcgtgcacattgaacattgtcggtcgtttccgtatttgtaactagtctttcccgtaacggtagtt

SEQ ID NO: 60145 - DNA, 151 bp, Setaria italica
  Peptide Sequence Number=SeqID_126119
tcatcttctgcactgctgcagcagcttcgtcttctgaagaaaatgtaacgaaaccaaatcctttcgacttccccgttgtcggatggcatatcaccttcactgcggtgcatattcaaagaaataagaggatgatttgcgttgtccgacacaa

SEQ ID NO: 60146 - DNA, 236 bp, Setaria italica
  Peptide Sequence Number=SeqID_126120
cgaagggagaggtcgaagtccgagagcatgatgtgcccgtcctcccgaacaaggacattttcaggcttgagatcacggtatatgatcccgagcatgtgcaggtattctagtgccaggaggacttctgctacgtagaatctgcaatgtgagaacattttatttgtgaagcacctatttagatagtggaacaaggcagcaacctataaactttattcagtcatgatgacttcaaacta

SEQ ID NO: 60147 - DNA, 348 bp, Setaria italica
  Peptide Sequence Number=SeqID_126121
ttagtaagtaaaaaaatttacttaccgtacgggggtaaaaagttacgtacgttagtccgttctcgcccacagtccatcggtagcaatggcacaggagagctggaaacaagagtccgaggagactggagtccatgcacctgaggccccaattctgtgcataaacaactgtggtttctttggcagcagcatgacgaacaatatgtgctcgaagtgttacagggacttcatcaagttgatggaagcccctgtggtggagaagaaggtgatcacggcagcatcttcttccgcggtgccactggagacagcaaagcatgatgatgcccatgctgctgctgtgactgaagctgg

SEQ ID NO: 60148 - DNA, 229 bp, Setaria italica
  Peptide Sequence Number=SeqID_126122
aaagacttaaagacaaggtacaaatagaccaaataagccaatgtaactgactcactgtttatcttgtatatagtatgccttactttgcttctaataattctttcatctccaggtccttggtgagaaggcattcgagaaatttggaaagtggttcatctcacttcatttttcagatcaattggcaggatcctacaagaaggtcctcacattcaagtttgtactgccggat

SEQ ID NO: 60149 - DNA, 394 bp, Setaria italica
  Peptide Sequence Number=SeqID_126123
atcggctacttcgccgccaccgcctccccaggtgcgacctccttccccgccatgtacgccgtcgcgccacccaatgccaacgccaacgggaacggctccgccccctcgcccgcggtgtcaaacgcgacggcctacgcccctgccccgcaggttgcgtatgacagcaatggccgcgccatctactacaccagcatgctgccccagtatccttctgctgtcaatggcatgtcggcggcgggtgcagtgctcggcacagagcccgcgaagccggtggcagtgaagccgaccgtctcctgatcaccaccaccacagcttacctctacctttattcgtcctaattggtattctaaaggtagtttttccttaattttttcttttcttatttccgttcctt

SEQ ID NO: 60150 - DNA, 291 bp, Setaria italica
  misc_feature (30)..(30): n is a, c, g, or t
  misc_feature (49)..(49): n is a, c, g, or t
  Peptide Sequence Number=SeqID_126124
ccaagctactccaaacccacccttgtcagntaaaacctcaacagcagancctttttcaatgccattccagataatgctaattggtgctgtatcatttcggttaccatccagtggcacagcggtgggaacatcttcaacccccatgtcctgagtgtatttcttccagctgcaattctttgccacttgaagatggctccaaattcagttgtgcttgatcaattaattttaaggttttaccgtaacctaacgtacttttacttagtacctaaggttttaactttaaaaatttaa

SEQ ID NO: 60151 - DNA, 435 bp, Setaria italica
  Peptide Sequence Number=SeqID_126125
gatcctttttcaatgccattccagataatgctaattggtgctgtatcatttcggttaccatccagtggcacagcggtgggaacatcttcaaccccatgtcctacattagcaaaacaaaaggtaaacgagctggaagtgaacaatgcgttcttggcatgccaaaagtaagttgtaacttttcctgagtgtatttcttccagctgcaattctttgccacttgaagatggctccaaattcagttgtgcttgatcatatttaggtttccgaccacgctttctgccaggtttacttaaattagcaggtgcatatacctccaaggtttctgttactggattaacattactgcttccagttttattcctcactctctcggacttccagtagccatccgggccagcttccaagagctcccttagagtaaaaaggtagtggttc

SEQ ID NO: 60152 - DNA, 260 bp, Setaria italica
  Peptide Sequence Number=SeqID_126126
aagttaaataaatacgaagactaaaaggaaatatgttcctactgtgggtaacgggtacattctgcttggaagtaggaacggtagatgcagcttgcatctcagaaacagaaggaacttcagttctaaggcccgtgcccagcacagaattatttgtttctgaaaggacttctactttttgcgggaagtacaacaagcacttccaacactgagaagcccactatagaaaaaaatattctgtgctgggcacgggccttagaact

SEQ ID NO: 60153 - DNA, 346 bp, Setaria italica
  Peptide Sequence Number=SeqID_126127
tcttacgttcggttctttggtctaatttgttggtctattagtaattgtttcgcaagcctgctagatgcattgccctcggaaatcttgtcagattggcctgcatcataatgtttgcttacttccataaacttcttcttctttccatgctttggaacaccatagacgaccttcgatccttctttctgtaatccaggccgtttgaatgcaagagcatcagatttattctcagctacactcttcccaatgttgaaaaccatgtccctctgagacaaaggcaatggcttagctcctccggctttttgcattggtattcttgtccttcgaaggaccccctgcttcgccacaa

SEQ ID NO: 60154 - DNA, 220 bp, Setaria italica
  Peptide Sequence Number=SeqID_126128
gggtcctttctttcttcctttagtccgtccgtcctttctttcgtcctttggcgggcttggcggcctccgcctcctcggcggcaggggcctcggactccacctcggtctcggggacctcggtcgcggcagcagcagcctcctcagccgacatcgccgctaaactaaccctcgggaactgcgctcgcgctagtgcgtttgcttgctgtgtcggcggcggcgg

SEQ ID NO: 60155 - DNA, 360 bp, Setaria italica
  Peptide Sequence Number=SeqID_126129
aggatttctaattccagactcctcgtttgcaaatcatcttggactcccatcaatggtcttggcaatcatacggagaatcactaacgcaataaacaaaatgagaaaccatcggattgcacagtgaacaacctacagcatggaggaccataaaatcattacatgggtatagcaatcacgaaacacacatactaaaccagcgacagaaggtgtacctgctgcggaagtacgggtgtaaactgaggactgtcctgattagaccgcctatagcagcacaaggccaagctccgagggcttgatgccattgcgaatacggtagttgtagaggtaatagtggagctgccatctccaggaccaaacttg

SEQ ID NO: 60156 - DNA, 160 bp, Setaria italica
  Peptide Sequence Number=SeqID_126130
ccttgtggagagccctgagacgcatgaggtagctgtccacctcatgcgtctcagggctctccacaaggtagctgtccaccacatcctcctggggcagcagccagtgctccacatccacctcatcaaaatccggtgccaccacaaacttcgcaaggtaggc

SEQ ID NO: 60157 - DNA, 404 bp, Setaria italica
  Peptide Sequence Number=SeqID_126131
tcgagcagtgcatggagcgggacatgttcatggacccggaggaggcgcacgattgggggctcatcgacgaggtcatcgagcaccgccctgtctcgcttgtgtctgatgctgttggcggtgatccgccgaacctcggtggaggcggaaatggggagaataagggagcggaggagccatcatcggcgtgatggattgtcacaaggaatatctgagcacccaactagatgttcaattcgattgatgatttatgcctagagttccagatggatgatgtgtgcttgattctggtcttgtgagctggagattttaatgggagttttcagcggtcaatataacataaaagctgaatcctgaccactgataggaagcatagtacattttaaatctgccatttctgattctgt

SEQ ID NO: 60158 - DNA, 153 bp, Setaria italica
  Peptide Sequence Number=SeqID_126132
cttaggtctctgctgccaactcgcgtactcccgcagcagccgcttagcgcttgagcacaacaggcgcaggaatctggtgttagggagtacgcgagttggcagcagagacctaagctgttcactacctggaagcccatccttcaaacggctgaa

SEQ ID NO: 60159 - DNA, 393 bp, Setaria italica
  Peptide Sequence Number=SeqID_126133
tgtaaagtaaattcgtagttattgtattcgttacttggttcgaattaattcaaaggacaggatgtatctcttcccaagagcaaatatgaagaggatatcttcattaataatcacacgactgtgtggggttcatggtggaaagaccatcaatggggctacaagtgctgcaagcagactatcaaaaatgttactgcacagggttggctggaattgaggctgcggaggcatcagcagacctgatgaaggccaatatggcccgtaaggaggctgcagaagatgaacctgtacaacaagaagagaagcgactagccacttgggaactgatgtgcctcaggatcttgttcttgataagaagctgcttgaggagtctctaaagaaggagaatgcaaggag

SEQ ID NO: 60160 - DNA, 392 bp, Setaria italica
  Peptide Sequence Number=SeqID_126134
ttcctgggaagcttttgataaggggcaggatatccatatgcaagcagctccatctcaagcagaactactgtacaagagtttcaagatcaaaaaagaaatgttgaagtctgaacacaaggataaaattatggagaagtatgggaatgctgcatcagaagatacaatgcctcgggagttgcttcttggacaaagtgagaaagaaatcgagtatgatcgtactggtcgaataatcaaaggacaggatgtatctcttcccaagagcaaatatgaagaggatatcttcattaataatcacacgactgtgtggggttcatggtggaaaagaccaatcaaataggggactaacaaagtagactagacaaagacaagaactaatacaaaaaataagttaa

SEQ ID NO: 60161 - DNA, 298 bp, Setaria italica
  Peptide Sequence Number=SeqID_126135
tttaactttaatagaaagactaagaagaaggaaggactaaggaaaaaagtaatctgaaagagcagcagctcaagaaacttgaggagaaggatagtgagaaggatggtgagaatgcgggaagtgaagatgatgaagaagatggcctcaggatagatgaggccaaagttgatgagagtgcccaaatggattttgctaaggtagagaagcgtgtgcgcacaactggtggtggaagcaccggtactgttaggaacttgcgtatcagagaagacacagcaaaatatcttctgaatctcgatgt

SEQ ID NO: 60162 - DNA, 210 bp, Setaria italica
  Peptide Sequence Number=SeqID_126136
gctgcgtgttgaaaatgtataatgttataattttcggatatcagaatcattgtttcagtaatgcccggtatctgtgatgagtgatgtgaagtcatggcatgcctgtttgtgagctactgaaagtttggaataaggaatatacgagctccagctgaaaagatgtgcatagcacgagtacgtgtaaacaaaaaaaaaaaaaaaaacaaaaaa

SEQ ID NO: 60163 - DNA, 409 bp, Setaria italica
  Peptide Sequence Number=SeqID_126137
tgttgttgtctttggacgaatttgttagcttgagaagttggcaaaaggaacatccaggctgcaaagtttatggccagactgcaagcacaaatcatcatagtgagttaatggatcttggcatcatcccctcactgaagggctccactatttctcagaaggttccacatgttattttctgtgctcctccatctggttctgatgattaccctggggatgtcagagtggcagcgtcaaattggagtggtgaaggatctttcctgtttacatcaagtactgctctgtatgactgcagtgacaacatgatgtgcaatgaggattgtccatcagtgccaattggcaggagccctcgtacagatgtacttctaaaagtggaaaatgttgttcttgaggcaggaggctgtgttctcag

SEQ ID NO: 60164 - DNA, 256 bp, Setaria italica
  Peptide Sequence Number=SeqID_126138
cttggatacgtaggctcccacccgatctcagcttcactgagaccaaggaattcagtgaagcttggatacgtaggctcccacccgatctcagctaactgctgagaccaaggaattcagtgaagcttggatacgtaggctcccacccgatctcagcccgagtttttgagttctccatcctcttccccaatggaccgtcagtgccagtgaagccttcaaacttcgtgtcaaatttccacttctgttaacagcatccatt

SEQ ID NO: 60165 - DNA, 259 bp, Setaria italica
  Peptide Sequence Number=SeqID_126139
caaaggtttttttcctttttaattaggttaaccaaagagacactgcacagcaaaactggctttacagaatgatgaaactgatgtcgaaaaggtctgcagtgacctggaaagaggcttattgtcgcagcccaaaaatattcggctccgcagttgctttttcatgattgcaattgcaagggaagcagcatcctcataatgaatctggttgataatatgatctggtcgtgtgtccaaagttcctttcctcaaccaaaaaaca

SEQ ID NO: 60166 - DNA, 304 bp, Setaria italica
  Peptide Sequence Number=SeqID_126140
ctgcttgctaaacccccaatttaccagaagatgaaaaaaagaaaaggggaatcaaaatctcccccaacaactaaggcaccaacgaacaaacctaactgagcagcagaggctagagaggagggggcaccaaccggggagcaagccgttcactgactagtgggacccccacaggccccaggacctccagttcagcacgccgccccaaccgcgccgccgcttctcctcctcgccggcgggaggggtagggggtcgacggcgacctccttgctcttgcccttcccccttccccttgctggccttctcc

SEQ ID NO: 60167 - DNA, 385 bp, Setaria italica
  Peptide Sequence Number=SeqID_126141
tattccttgtccggtaattcttctattcgtactattctagacttcaggggattgccggggactgacggggggctccctggtctcgcttctcaggcactgtgggcaatcactggagatcctcgacctctcccgctgtcctagcattgctgttggcaatgtcgaactctttgctcagcgcgccactcgattgaatcatatgatcatcgaggagagcgtgatatcagaggaattgaaggcaatcgctcagaagaaaggactgaagattggctcattattgccatgcgaaggaccattctgaagtcaggtaatccccttcagaatgcaactgatgaatacttgatttcagtgtactcttacttgaattattggaataggtgctgctgct

SEQ ID NO: 60168 - DNA, 417 bp, Setaria italica
  Peptide Sequence Number=SeqID_126142
cttgtcgggcattgcaagtggcgcttcaaagatgatttctctgggatcagatactccaactgacctgtctcctcatttttgtggaaaaggtcatggtcatctgtgaagtacttctgtgtctcctgtcccaacgcaagcatttccgtatcaattggaccaattgtcccgatcatgcgagcaagaatgattggtactgactcattaggaaagagcacttcacccgtgtacagttcagccaagatgcagccaagggaccaaacgtcaattttctgatcatatggcaaacccaggatgacctcaggagatcggtacgagcgtgattgaatgtataagtttaagttgtctgacaaaaagcagctgcttccaagatcaataaccttgatttcacatctgctgtagctcttcagaaggatattc

SEQ ID NO: 60169 - DNA, 172 bp, Setaria italica
  Peptide Sequence Number=SeqID_126143
ccgatgaccagaaacatcaatggtgtcaagaaatgagatccttctgcaatctcacaatgccattgaagaaggatctcatttcccgatgaccagaaacatcaatggtgtcaagaaacattccagcatcagccaggcatgcgagaggtgcaagacctaggcaagcttcttccag

SEQ ID NO: 60170 - DNA, 369 bp, Setaria italica
  Peptide Sequence Number=SeqID_126144
caaaaagcgtggttcgttctacattttgaccatagaccttgggggtcagcagctttgggggccacactttgttgaagctgccacacatcataggcggtgttcaaaataaaagttggagtctgaatgtttggcaccacgttctgcgggaaaaaagcactgtaggaaccactagttagaaaaagtaaattttcacatgttttaatctttgatggatattcattgatgtttgcattaccgaggttttgtccatgcgagaggtgcaagacctaggcaagcttcttccagaaccctgcaatctcacaatgccattgaagaaggatctcatttcccgatgaccagaaacatcaatgcttgtctaaattggtttgt

SEQ ID NO: 60171 - DNA, 330 bp, Setaria italica
  misc_feature (197)..(197): n is a, c, g, or t
  Peptide Sequence Number=SeqID_126145
ccttcccaaagctcaggcttgtaatggagacatcatcaagagcaatgctgaagtttctggccctctcggtcagtatcttcctaatctccctactaacagtttctctctgtgtgatcaactggctagcattgtattgagctacaacagctttcagtgtttcatgaatgatagaaggcagaactctctcgttgaagttntcccccaaagtcctgtagatatggggtagcctctctggcataggccttgtgaggacacgaagaaccaaattttttactaacccaattacttagtaaagtaattacccttagtactttacctaagttaaagtta

SEQ ID NO: 60172 - DNA, 314 bp, Setaria italica
  Peptide Sequence Number=SeqID_126146
taaaggtaagtacgtaattttagttttactttaatttagtaactttccttctaagtaactagtttctaaaagtattgttgatttccagtgcatttggtgcgcacgttcactgagtaccaccgtatcagataggggtaactaaagatgctacgttcaaaacccgccggttccacccaatgtctggtacaaggacatccacacactcagaacaaggggatgcatcatttctctgctgcttcgacacgttcagctgctggagttgagcagcaggtcattggagtccaggaagaccttgttggctgaggctgcgatcg

SEQ ID NO: 60173 - DNA, 229 bp, Setaria italica
  Peptide Sequence Number=SeqID_126147
cactctgaaaagagcccatggtttaactagttcttacgaaaagctgaagaggtagttaattctggatgcatacctctatttgttattgtgacattgctggttaatagggtatacattggaactcaattagctatttgttctctgccacaattctgttgtgaaactgaattcactttacacatgtaaatatgaaacaactctcactcgaatacactgtcagtagaaaatt

SEQ ID NO: 60174 - DNA, 263 bp, Setaria italica
  Peptide Sequence Number=SeqID_126148
gtgggcgacaccgcgacagaattctcctcgtcctcttcgcgcgcgcctcaagactgacgtcttcttggatctcctgcccggctgccccccgccaccgcagccccgctgggtacctcgaccaaaccccgccacgcgcggcagacgaccgaagaatcgcataaattatcaatgctataaaaagagaagaagttgaagcagctccagttaggatgaatagtcccctaaagttggcaaaggtgaggctgcttgaacctgtgacagga

SEQ ID NO: 60175 - DNA, 162 bp, Setaria italica
  Peptide Sequence Number=SeqID_126149
ttttcctacttgcttgttatcattttgcatgagttttgttgacctatgctgcttcttgtaggcataaattatcaatgctataaaaagagaagaagttgaagcagctccagttaggatgaatagtcccctaaagttggcaaaggtgaggctgcttggtgacat

SEQ ID NO: 60176 - DNA, 255 bp, Setaria italica
  Peptide Sequence Number=SeqID_126150
gtcaaatatggaaagagagacaatggatgtcagctcagaaaactacataagtcacctgtctgatgattgcttgctttctatatttaacaagcttgaaagtgagttggacaggaatgcttttggtttaacttgcaggaattggttgaaggttcgaaacattggtcggaaatcattaacattccattgctcttttaaccctacaatagataaggagcatgccaggtgcatcccaaacatattggcccgctcaccttg

SEQ ID NO: 60177 - DNA, 414 bp, Setaria italica
  Peptide Sequence Number=SeqID_126151
tgttgttgttgttgtgttacttcatgccttcacaagtgaattcttgcatgcttgaagaacaggtagaagaggacggccgatgacacgaagagggttaacagtaccagccagatttgccacactgcagcagccaggagagtgaaaatgaggcccagtagagcaaggactgcttacagagacacagacgcgtacctttccattcaggagggacgtcaagttttgttatctctgctccccattgatgtgaggtggagattacaaccctttcagtagggcaaaattcaattgaagaaattggagagccaagatgaacctccttgctccagtgagcaacttccatcttctgtacttccacgacacaaaagttgccgtcacaggttcctagtgcaagatacttcccatccaagctaacgg

SEQ ID NO: 60178 - DNA, 246 bp, Setaria italica
  Peptide Sequence Number=SeqID_126152
gtgtgtgtgtacttcatgccttcacaagtgaattcttgcatgcttgaagaacaggtagaagaggacggccgatgacacgaagagggttaacagtaccagccagatttgccacactttccattcaggagggacgtcaagttttgttatctctgctccccattgatgtgaggtggagattacaaccctttcagtagggcaaaattcaattgaagaaattggagagccaagatgaaccttcttgctcca

SEQ ID NO: 60179 - DNA, 281 bp, Setaria italica
  Peptide Sequence Number=SeqID_126153
agactagaacctactatccttgttgatggaagaaaggttcctacttaaccaaaaaaaaaacttgtattcccatgagtaactatcaaactgctcatggtatgtacgttgctcggattgcttaagtttaagacgtgcgcatgcgttcgtgtgtgttgtatgtcgatcagcagctactagtactaagagctgacctctatccttgttgatggaactgggcgtcacgactatgttgacattatcgtgagtgatgctttgatgtataaaactgttcaagttgtagt

SEQ ID NO: 60180 - DNA, 207 bp, Setaria italica
  Peptide Sequence Number=SeqID_126154
tggaactgggcgtcacgactatgttgacattatcgtgagtgatgctttgatgtataaacaaggatagaggtcagctcttagtactagtagctgctgatcgacatacaacacacacgaacgcatgcgcacgcaaacaagcaatccgagcaacgtacataccatgagcagtttgatagttactcatgggaatactaagttttttttttg

SEQ ID NO: 60181 - DNA, 272 bp, Setaria italica
  Peptide Sequence Number=SeqID_126155
tctggaatggttttaacagtcttcaggaaatctgaaagggagccaccgtccatgtattccaaaacaatagaaatggcaccattgaaataaaaacactgatagaacacaacaatatattggtactgtgttgacaagtttattttcaactccttggcaatctgtctgcgtatactatcctcaatatttagttgaataacctgcaaatacaatggtagactgatggagataaagaccctttacaaaattacaacagtttgtagacgattacaacg

SEQ ID NO: 60182 - DNA, 374 bp, Setaria italica
  Peptide Sequence Number=SeqID_126156
taaagaaacgaactaacctaacgaacctaactaaggaacaaagactacgaagaaagaatacgtacggacgtagcccacctccaagcgcacctttgagcaggcgcagtcgctcggcatcccgctctccacgctcgacgaccacccgctcatcgacctcgccatcgacggcgccgacgaggttgacccagaccttaaccttgtgaaagggcggggtggtgcgcttctccgtgagaagatggttgaggctgcatcagacaagtttatgttgttgttgacgagacaaaactagttgattggattaggaggaagtggtctagccatgccagtggaagttgtgcagttctgctggaagtataacctagtaaggttgcagg

SEQ ID NO: 60183 - DNA, 249 bp, Setaria italica
  misc_feature (8)..(8): n is a, c, g, or t
  misc_feature (14)..(14): n is a, c, g, or t
  misc_feature (53)..(53): n is a, c, g, or t
  Peptide Sequence Number=SeqID_126157
tttcccancggcgntccgccgaaggatatcaggtccgacaggctcctcgccgngccggcattgttttaggaggaagtggtctagccatgccagtggaagttgtgcagttctgctggaagtataacctagtaaggttgcaggaactgtttaaggaggaaggagtcgaggcaaagctaagattggaaggtgacaaaccttatgttactgacaactcaaactacattgtcgacttatacttcaagacaccaa

SEQ ID NO: 60184 - DNA, 252 bp, Setaria italica
  Peptide Sequence Number=SeqID_126158
ccggatccaggcggtccttgtagttggtggtgaagacgatgatgcgctcctcgccgcacgtcgaccagagcccgtcgatgaagttcagcagcccggacagagtgatacccttcgccggctggtgcgtgttcatcggcccgctgtcgtccgacgaatccgacgtgtagccggggtccagttccgcgaccagctccggcgccttggcgcctttcctcgacgcggcggcgtcgaagcagcagtcgatgtcctcga

SEQ ID NO: 60185 - DNA, 391 bp, Setaria italica
  Peptide Sequence Number=SeqID_126159
cccttcatcggtggtgccatcttctgaatgatgtaatgaggttgtactccaataatcaatttagacatgccaattgtcatgaataatcattaataataaacaaagatgatttattggcatccaaaaaatactgacacagtacctcttgaaggaaaggtggtttaattaaggagacctggatggatgaggatccaagagaagcaattttgaaatatgctgatgctgcagagaaagatccaaaagtttattgcgccagcttattctcaaacccagccaaaacctgtgtttgcagagtctgattcagacaatgaagggaaactaaccctgtgtcttagttaacctaaagactaagacaataacaacaatagtaattactaattttactagaaca

SEQ ID NO: 60186 - DNA, 258 bp, Setaria italica
  Peptide Sequence Number=SeqID_126160
ccgggttgggcctggagacggaggagaaggagatgaggagcgtctgcgcgtggccgcacgggcgcgcgtcggcgccgggggaggcggcgatgagggacaccgcggcgacggcggcgatgaggaggagcttgccgtcggcggccatggcggcgatgacgcggcggaattgggggggaatcggagggggttcgatacagctctggactataaaaactggatggggtagcagaccagatatccatgttgagaaaacacata

SEQ ID NO: 60187 - DNA, 257 bp, Setaria italica
  Peptide Sequence Number=SeqID_126161
cattcatgttgtggcattatatggcccctgcagcgcattttgctcatgctctacccatgcactcttaatcatagtcttgtctgtatttgggaattgggaagcgttaccccaatccccaacgtaactgttgtgtggaatgcagccaacgtttagccagtttccactttgtagcatgatgtattggttatctttttttcttttaacagaaaacagtatttctttcccattagcatttatctggtttttttttgccagtg

SEQ ID NO: 60188 - DNA, 249 bp, Setaria italica
  Peptide Sequence Number=SeqID_126162
gcatcgccggcggccggccatctcctgcggtgatcgtctagtcgattcagtcttccattccagtcggagggacggcctccaggtcttgcgaagcggctctgcacgatgggaagtcagagtgtcatattactcaagatttttacttgtgcttttagtggcaacctcaaggaatatggtagtagcactggtcgaggtggaatatgtagaactattccagactttgacagagactatatgagttattttcag

SEQ ID NO: 60189 - DNA, 450 bp, Setaria italica
  Peptide Sequence Number=SeqID_126163
ttagcttgcttgagtgtacctgtgacttaagagattttgtgctttctgagttttatgttatttgcagtacggggccttccaaaatccaaccaggattttatccccacatatggtgatttttccaagcatcctttagtccaaggctctattcgcctaagcttgtcgcgatttcaagtggaccttgaattgtgcctcatctgacaaatagactggccgaagtaaagctgactggatgttagttcattggaagacttggtttcactacaacatcaagatgtcggtctgttatttccatgtatgatttctattactgtttattggttttataatgatcctttatgtgttttttaagaacagaaagccgcatatatttttactctaatttaagtttcaagtttcaactttgcctctcaaacatttagataaatggaggggcatatgccgctcttg

SEQ ID NO: 60190 - DNA, 260 bp, Setaria italica
  Peptide Sequence Number=SeqID_126164
tggctttggattgggctcggtggattggtggtggtggaggaagtgaagagggcttggtgttagttcattggaagacttggtttcactacaacatcaagatgtcggtctgttatttccatatgggaagtcagagtgtcatattactcaagatttttacttgtgcttttagtggcaacctcaaggaatatggtagtagcactggtcgaggtggaatatgtagaactattccagactttgacagagactatatgagttatttt

SEQ ID NO: 60191 - DNA, 242 bp, Setaria italica
  misc_feature (203)..(203): n is a, c, g, or t
  Peptide Sequence Number=SeqID_126165
taaatttagggttagaaggaatggagacagtttgtattacctaaagaactaagggttaaactaagtaaccaaccgaaataggaccttagtgacttatttttgatgacaaccaatgcaaccaactattggcggatcatgtagcgctaagtagttgcagtctgtacattgtccctgatcctggaaggctagtcagcactgaaccngttccaaggaataatccaactcaatctgttgtgagaacc

SEQ ID NO: 60192 - DNA, 243 bp, Setaria italica
  Peptide Sequence Number=SeqID_126166
gtattggggagaatggtcgtagcctttattcatgtatatattgaaatagaatgattgtaggtctgcaacttggtaactggttgataagatgaataatctactgttgctcttgttcttcagattcttgttgttctatttctcacatctggccgtgatcctggaattattcctcgaaatgctcatcccccagagcctgaagacattggtgaatcctccaacttaccagattggccaggtggtcag

SEQ ID NO: 60193 - DNA, 350 bp, Setaria italica
  misc_feature (7)..(7): n is a, c, g, or t
  Peptide Sequence Number=SeqID_126167
cataganccctagagacgaccacgccagcgaaggagtaaggaccatgcttgcatttctaattggattgccacaatatcctctaaacctcaagaagagcatgcagatcgatggacgatgctcttacctggaagtgcttggccctcgcgtacggcccgtcgccggccggaatcttgtgcgcgacgtgcggcgccgcggtcgtcgtcgtcgacgggctcgccggcagagccatggcgaccagctgatgctgatgatccatgcctcgatctgcctcctcctcctccagaggtagctgcacgcagtagctagctaatgattggctcaggctttccctacccttcttcgttcttta

SEQ ID NO: 60194 - DNA, 244 bp, Setaria italica
  Peptide Sequence Number=SeqID_126168
aagttctccagctgggatataaacccctcattaggagcaggaacggagaatggaatctttgcagagctaaatataggtgtagaagcatgtatgtcaataatgcaatgttaagaaccccctgactgcatgttatgttatctagatatgaatgctttggcaaaagacttcaccgctttgtgctgtaaacagcaagtgacattggtcattcatcgattgggttccgttggattagaatatgtttaca

SEQ ID NO: 60195 - DNA, 242 bp, Setaria italica
  Peptide Sequence Number=SeqID_126169
ttgctttgctgggcggtcaaggagtgtgacaattgttgttgcatatctcatgaagaagcatcaaatgagcctcgaaagtgccttgtcactagttagaagcaaacggcctcaagtggctcctaatgaggggtttatatcccagctggagaacttcgacaaatccctgcaaggtcaaattgactgtcacgctttgcaccttcgcaagtcgatttggagcctgcactggagttaagcggatctcc

SEQ ID NO: 60196 - DNA, 242 bp, Setaria italica
  Peptide Sequence Number=SeqID_126170
atgcatgtaaatataatatgactgtaacatacaatcttgtaacattaagattctgacctgcaattcccttttccgatcgatcaccaagtctgtatttggtccatacaaccgaacagtcacagaaaactcattgtcagtgtcttctttgacagacaccttcagcactgtaggtaagaacgaataagcatcatggacgacgtattggaagtaattattgctgtacacatgaataattgttcata

SEQ ID NO: 60197 - DNA, 257 bp, Setaria italica
  Peptide Sequence Number=SeqID_126171
agaagatgattttaagaagaataaagtggactaggcacaaaatatcacatggtacattgtcaacttcaagttcaaggtaccttaagttcttgaacttcatcttgtatttctgtaaatgagattgtctcatatctcttctgcttctcgttatccttaaacttcaatgctgaagcttttttcaaaaacttgaatatgtcatcccacagttgcggttctttaggccctggaatgtctacttgatggaatctgtggagctc

SEQ ID NO: 60198 - DNA, 163 bp, Setaria italica
  Peptide Sequence Number=SeqID_126172
gttgatgatattgcaactgttttaactcctgaccattatgaaaaatgctccaatgcattgccaacttcttcttttgttgggatacgtttctgctttcgccaggtataagcgaaaaaataaagttacaaagacaattttagaacttagaagtaacaactagaca

SEQ ID NO: 60199 - DNA, 379 bp, Setaria italica
  Peptide Sequence Number=SeqID_126173
aaattttatggaactctgtttacatgctgttcatggtattttgaaattttacctgttttggtatggtaggttatgtaccttatggtaggttatgtaccttctcatactgagtttgatacaacttttacttcgatgctactatggtgctggtaaaagatctgcagagaaatgctaagatgataacctgacatgtcttgttttggtcatcttcaaaacattcttcagaaaaaggttggtttaggatcactgaagtaattgtacctttcattttctgtttggcagcatccaaagaaagctgataaaggagacactgaatcaagttcaaagaaagccgtttcaggacagaagattgctgacaagttctaaattggtaagttgt

SEQ ID NO: 60200 - DNA, 382 bp, Setaria italica
  Peptide Sequence Number=SeqID_126174
tctaaattgttgtaaagtccttgggtaagtcttgtagggtattgttctattgttcttgtcttggatttggttctgtgcgcttcaactgaagatcataccgctgtggagcctttgattcctccagaaggagccaagattggagagcgcatttcatttgctgggttcgatggaaagcctgaagatgttctaaaatccaaagaaaaagcagctggacaagattaccccgcatcttcgtaccgacgagaatggaattgcaacattcaaagggataccctttactacatcagctggtccatgcagatcttctattcgcaacggcaacgttaagtgaggagcttgttaggaacgctgattgcatacattgatgttatagaacagatgt

SEQ ID NO: 60201 - DNA, 239 bp, Setaria italica
  Peptide Sequence Number=SeqID_126175
caaagcatacaattgaaaaggaggtacatggaggaaaaaaaaagaatgtttcgaagaacaatatgctctgatttgcccaaaactccctatatagtacacagagccaatcttttcagcccgaaatcctctaagtcgacttgatcatacagttatcctgcaggaaatgggaaacatatctgattactttgcattggagcattaactaagctgcaataacgtggcattgactctagatctta

SEQ ID NO: 60202 - DNA, 429 bp, Setaria italica
  Peptide Sequence Number=SeqID_126176
gcccacaccccgccacctccgccgagcctgccgccgccgccagtccatccctctaaccccgccggccatggacgccctcccccagcaaccccgaaccggaacctcgaaccctaatctggctgtcttctccgattcccgcgagccagtcatggagccgagtacttttttgctgctttatctgctctggtgaagaagaaacaaaggggctctctgtttaactctaaatcgagaggctttctctgtttagtttttgcgttactagtatggtatatttcaaatataaaagctaccgtttgcccctgttttggagttctattgggtggtgcagccgtgcaggattaaatgaactggaaaaaataattggaataaaaagagatcaaagtatcactcccttatcctattccaccgactaaccctacgtgttgagtg

SEQ ID NO: 60203 - DNA, 229 bp, Setaria italica
  Peptide Sequence Number=SeqID_126177
ctaatcaacctgatcgatccttccatataaattagatgctatcaaggttaatcgtctgcctgactgctactactccaatgcaaaagaggactggcacgtgctgtcatcactcatcagctggaaggagtttcacagcccgtgtcattgtcatggataatggggagaaattgcttcttgacgtgaagacaatggccagtcacagacatcaattacactccacaagtaatta

SEQ ID NO: 60204 - DNA, 423 bp, Setaria italica
  Peptide Sequence Number=SeqID_126178
ttcttttaaattgttaaatttttctttctttagtcttgttttgttgttctattagtatttgtttacttcttgtcttgttggtaagttatcgttactgttcatcactttgccttggttttgttaatgctgcgttctggtcccttgttttttttttcctaatttatggttttggtattttacaggtgtttttttcttaatggttggcgatagcaaccttttttaccttccaaaataatgttcataagatgttagcaacttagcaaggtgctccactaacatatttgtgagagcccgtcccccgctagttacttttgcttgcagtaacagttaggtctgaaacaagtcaacgatggacattcagttgcatgactgcatacgctgttatcatcttccatgtcctccggagatttaggggtgtttccc

SEQ ID NO: 60205 - DNA, 298 bp, Setaria italica
  Peptide Sequence Number=SeqID_126179
ctcccatcatagatccaccagaatatggaggtggcccggccatttgcatcggcccataggggctacctccatattctggtggatctatgatgggagcaggtggaatgtatggaatgcccatggacagatatggcttaattcctgctagtcctggtgcaatgggtacaagggctggctcatattctgatgaaggttcccagaagaagcctgcaggagctggccgtgataatgattgggagtgtccaaattgccataacatcaactttgcctttcgcacagtctgtaatatgagaaagtg

SEQ ID NO: 60206 - DNA, 451 bp, Setaria italica
  Peptide Sequence Number=SeqID_126180
ggtaaaggttaactcataaatcttatgtacattacttctacatctgatgatctgaaaaaacaaaacagagagaacactgcctgtaagattcggtaaaatgattattcggtactatttttgagagtcttctcaggcactacttattcggtaaaatgattatcaagtcctttcgaaactgcagaggttgcataagaatggggccaggaagttctggatacatgggacgggcgcgctgggttgcatgcctcagaagcttgctatgccgagggatgatgacagtggtctagatgagcatggatgcatcgcaagcatcaacaatgtttgcaagaagttcaattctttgctgagtgaagccttggacgagctgcgcttgacccttaaaaagtcggcaatcgtcttcgtggatatgtttgctatcaagtatgatcttgttgtcaaccacaaaaaatac

SEQ ID NO: 60207 - DNA, 466 bp, Setaria italica
  Peptide Sequence Number=SeqID_126181
actactaccgaacggaccgacgtacaatacctacgaacttacaatctgtgaaagcctgggcacgcaccatctcagcccgttcatgaagccgctgggctccgacttcaccaacggcgtcaacttcgccatcgcagggtccacggccatgccgggggtcaccacattctcgctggacgtgcaggtggaccagttcatcttcttcaaggagagatgcctcgacttgattgagagaggtgagagtgccccggttgatgagctgggtttccaaactgctctatacaccatggacattgggcacaatgatatcaatggcattctccacatgccctatgatgaaatgcttgccaatcttccccctgtaattgttgaatcaagaaagccattgagaggttgcataagaatggggccaggaagttctggatacatgggacgggcgcgctgggttgcatgcctcagaagcttgcta

SEQ ID NO: 60208 - DNA, 275 bp, Setaria italica
  Peptide Sequence Number=SeqID_126182
aaagtaagaaccccggttaagaatagaagactgggtttaccaaaactagactactaataacaaccatggacattgggcacaatgatatcaatggcattctccacatgccctatgatgaaatgcttgccaatcttccccctgtaattgttgaaatcaagaaagccattgagaggttgcataagaatggggccaggaagttctggatacatgggacgggcgcgctgggttgcatgcctcagaagcttgctatgccgagggatgatgacagtggtcta

SEQ ID NO: 60209 - DNA, 451 bp, Setaria italica
  Peptide Sequence Number=SeqID_126183
aaacatatatgatggaatattctggtcctcctaccagcttcattaattgcgatcaatgatgttgccgcatatttcttggattcttctttggaaaaacacccttgattaagctctctccgaagaaaacatgggaaggctttatagcttgctaatttcatgggccatttccagtggttgacatgccctagaaaggacttgtcaactggatggcttcattgtgacccaggtcccatgtttacaccagaaatttataatttacgaggatggatgccacaatgctttccctggagagaagttgcaattatgcctgttcaatggcatgccttagctcttggcttgtttgcttcaataatagcaccatttggagggttttttttgcaagtggcttcaagagggcattcaaatttaaggattttggcgacagcatacctggccatggtgggtttacaga

SEQ ID NO: 60210 - DNA, 253 bp, Setaria italica
  Peptide Sequence Number=SeqID_126184
ctaagctggtgagcgggctcatcaagtaccagatgtttatatgctacttcctctacatagcaggtagctgtgaccatcttttgcgtgtgttcccaaataagggtcatgccaattacaacataggggtgactttaatgttttagtgcttatttggataggcaggccttagacgtgatgtgttcaggctgtcaagaaaatttggtccatttgcttttaggtggatgtgtctaggactctaggactataggcagac

SEQ ID NO: 60211 - DNA, 469 bp, Setaria italica
  Peptide Sequence Number=SeqID_126185
tattgtggattcagttatggggtggtagattgtgggtttatcctaagaaaattggtagcaacagtcggcttgtgctcctttcttcaaaagggtcagagacaattttgaaataattaaggaggatgacgagaagctgcaagctttgaaggctgaactgggtgagaaggcacacgagtgttgttgtgagggctctccgtgagattaacgaatacaatcccagcggtaggtaccccttgcccgagctgtggaacttcaaggacgacaggaaggcaccaatgggcgaggtagcagcgtacatagtgaagcagtggaagacgaacaagaggaagaacacctacacctgatgactgagacctggattggccttgctagaccatgtggagccattagtgtcttcatgtccctgacctcttagctgaaacattctgtgatgtacttaatttgttccgtctttttgggacgattagct

SEQ ID NO: 60212 - DNA, 213 bp, Setaria italica
  Peptide Sequence Number=SeqID_126186
aggaaaacaacaaggtatctcagtcacaatatttaacttcctacaaatcatgagctagcaattgtatgagtaaaccacacccatagtagtcctcaccaggttgcgttgccatgttccatatttccctaaccgatgtaatctcctgctcctgtggagcatggataacaatgaccacagaccctgctatgcacatcacgcagccgagcaccccga

SEQ ID NO: 60213 - DNA, 110 bp, Setaria italica
  Peptide Sequence Number=SeqID_126187
ctaacaattatgctgagtgctccaagtggagtaaccaggaccgcgggggcaaaggcatatgccatgttccatatttccctaaccgatgtaatctcctgctcctgtggagc

SEQ ID NO: 60214 - DNA, 223 bp, Setaria italica
  Peptide Sequence Number=SeqID_126188
gcgtaccaaaaataccaatctaatatcctttacagcacccctacacttaccacacctcatatacagttttgtatacccccctttccccacaactacttcacttacctcaccagtaagtatatacgtatacttagactcttgcttgtttgaaaccttgtaccatgaatggaacggaaactagtagaaccaatacgtaataacccgacggacggacgaccggacc

SEQ ID NO: 60215 - DNA, 169 bp, Setaria italica
  Peptide Sequence Number=SeqID_126189
cccagccgcggtcacgcgacaaaatcgtgcagcagctgcgacgagccgaaccgctgcctgtcctcggaggcgttcatgaactcgaagtcgccggcgcgtgccggccgaacaaccgggcctcctgtacggcaacgccggcgacttcgagttcatgaaccgctgcctgtcc

SEQ ID NO: 60216 - DNA, 443 bp, Setaria italica
  Peptide Sequence Number=SeqID_126190
accatcaaggtcaatactgtaaacccaacttagctagcttgagagagacagacatatttaaggctaatttcttgtgtccatgtgtcttggcattatcaaatgtactgttcctgacaaggttagtcctttcactgtaggcaaattaacaatagcactgtacattgtctgagagaggtacatgtcaatgaatggcacaataaagccaacctccaattgttttagcactggttcgtctaggaatacacataattgaagtgcgatggaagcatcaagtttaatcagtgtggaggaaacattatgcctgtcaggcagcaataccttcacctgaaacccagtaaggccaacttcaaagtggttataaagctcatccaactggattacctaagttagtctattattctattctagtaaaaattaacttaggtaagtactttttgatattg

SEQ ID NO: 60217 - DNA, 257 bp, Setaria italica
  Peptide Sequence Number=SeqID_126191
tctgagcttgttttgtcaagttcagattggatgttggcaacttttgtcttctggtccttcaactaaatgtaatcttttagtgcccgcatggaaccgaggttcctccggcattgtgatttgcgatgcagtttgggaagttttatgatattgtaaatttaggatcgagacatttggtcacctgagatgtgactgtatgtatatatatatatatgtacttgttgatgtacgaattgggattcgggagtggaataactacg

SEQ ID NO: 60218 - DNA, 273 bp, Setaria italica
  misc_feature (27)..(27): n is a, c, g, or t
  misc_feature (35)..(35): n is a, c, g, or t
  Peptide Sequence Number=SeqID_126192
ttcaaacttttggtgtttgcacaacangttttccncttaatcttggattggcaagcactacagaaggtgccagcatccaacatgtcagagtgagcattattgtggacgcatggaaacgagcttgcatgttaggcgtttaccgacatcatgtgcagcctggcgagcacaggaagcgacctttgacatgcacccgctatactggtcgctctgggtggtgggtgattttaggtagttagaaactagaaattaaggtaactaaaagtaacctaagaa

SEQ ID NO: 60219 - DNA, 466 bp, Setaria italica
  Peptide Sequence Number=SeqID_126193
ggagaagtgaatttgtttaaaatctgcgagatgacttttaccgaggcatgatgctgtcggggagcagaagcatcccagcagaaggatgcatagatgttggactgatcaatgaggcccttctcattattagctgcttctatcgcggttctacagagtcctgtgtatgttccattaaaactgcaattttcctggactgctttgtgagtttctttggagatcatagcatgtgtccagtagtaatcgatggtcgctcttgtgttcgtgtcatcattgaggtacgcatttccaatctgtttccaacaagtgattgagtatatagtctgactctatccatggaagcatttacttagtactaacttattttttgtttgaaacttacagcaattcctttgagattgattcatagtgatgttcatgtattttgttatttgacagaatagtgttggcaagctgtggtatgtagtgg

SEQ ID NO: 60220 - DNA, 432 bp, Setaria italica
  Peptide Sequence Number=SeqID_126194
ccgggaaacctactacaaagccaagttgatgaggaaagtatatgcatctgctgtggtgctcctgtcaccagtgttattgtaatctgatgttctgttcgaatatgagaaaccaacaccagcagggctctcaaggaagagcatgtttgccactgtcatccaggaatgatctgtcagcacagaggtattaagagtgttaactgccatatgtaaccttgtgggaatcagcctaccattgttccaggcatatttgtttctggataatgtcttgttatctctgttgacgaagaatggtccaatttcaagcatagcacctcccagagaagaacaaccaggccctgaaattttaaggtaattctttctgtaatttcaaaaagaatatcatatggttggaattgttgtccatgtgtatttttttttctaggtaatatatgt

SEQ ID NO: 60221 - DNA, 327 bp, Setaria italica
  Peptide Sequence Number=SeqID_126195
ctcaaaaatgccaatggaaattttgcactgcctctgggctacgacctggtttggagaaactgtgctgaggattacaagagtcctgtatcaatatggcttccaaggccacctggcggctacgtagctcttgggtgcgttgctgtgtccgcttttgaggagccccctcttgactgttcttttgagacacgaagtgccatgaactgcagtgagctgctctgaacttggtagatgtagcatccccatgggtaggcatctgctgatgcccatatgatttgctcctcatactcggcagcctctgcgagtctctcatccacgcagaaagcacag

SEQ ID NO: 60222 - DNA, 254 bp, Setaria italica
  Peptide Sequence Number=SeqID_126196
ggccgcaaggactgcgtcgcctcctgctcgagagcggagctgccgtgacgctgcagaacctggacgggaagacgcccatcgacgtggccaagctcaacaaccaggaggacgtcctcaagctgctcgagaagcacgcctttgtataggcgccgccgccaagctgctcatcaccttgcttcatgccttgctttgctcctgtagtcttgctctgctgtgccctgcatgcagactctcaatacatacaccgaactgaa

SEQ ID NO: 60223 - DNA, 357 bp, Setaria italica
  Peptide Sequence Number=SeqID_126197
taaagtaaacaaataagtaaccaatagtagaagaaccgtgccgtttttagtctcggatcccttgcgtgaaaaaagtgctagcttttcgtggttcgattttggtaacccaaaattttcatgccatttcatttcacttatttggaaatcgatacggtttggatgtagtatttgatatttcttgttggaattaaatgaacgaatggatggaccgagcaggacccgagcatcaaggagatggcggagcagatcgccaaggacccggcgttcacgcagatggcggagcagctgcagaagacggtggtgtcaccgcggcaggcgccggcggcgagcaggcggtgccccaggcggcggcggcgc

SEQ ID NO: 60224 - DNA, 394 bp, Setaria italica
  Peptide Sequence Number=SeqID_126198
ccggcaaccccttcgacttctccaccatgatgaacctccttaatgacccgagcatcaaggagatggcggagcagatcgccaaggacccggcgttcacgcagatggcggagcagctgcagaagacggtggtgtcaccgcggcaggcgccggcggcgaagcaggcggtgccccaggcggcggcggcgctggacccgcagaagtacgtggcgacgatgcagcagctgatgcagaacccgcagttcgtggcgatggcggagcggctgggcagcgcgctgatgcaggacccggccatggcgacgatgctgggcgggctcaccaacccggcgcacaaggagcagtcttcgtaggtctcgcatcgtcgtcgtctattgtaaggtaggtacccctacgtcgt

SEQ ID NO: 60225 - DNA, 230 bp, Setaria italica
  Peptide Sequence Number=SeqID_126199
ggaggagtggggagaggaaggaggagtggagcgtggtgagcggcgaggaggaagaggtggccatggctgcgcctgcgctggctgccgcagaagtacgtggcgacgatgcagcagctgatgcagaacccgcagttcgtggcgatggcggagcggctgggcagcgcgctgatgcaggacccggccatggcgacgatgctgggcgggctcaccaacccggcgcaccaagggag

SEQ ID NO: 60226 - DNA, 340 bp, Setaria italica
  Peptide Sequence Number=SeqID_126200
gcagaaacaatattcagagtttcagacaagcaaccaaaatgcatatatccatagtcctgtatccatgtagttcagtgcactctaatttgagtcagtttgaagcttagtagttgcaatgatgctaagatatgctatgattttttcattaacaagatgcaaatcaatattgtaaaaaaattgaataaatttgagggctgtctttataaaacctaaataacttacttcattttgattccgttactggtgcaatgaatgtcggtgctaccagtgcaatgcttgttttctgccttcagatgcgttatttcctgtgaagccatgttgactagttgcggagatacac

SEQ ID NO: 60227 - DNA, 175 bp, Setaria italica
  misc_feature (171)..(171): n is a, c, g, or t
  Peptide Sequence Number=SeqID_126201
caccttggtgttacaagaaaattgcatccgaaggatcatactgtagtataaactgcgtggacacgccagatctttgaaatttacttgactgctgaagtacttcattttgattccgttactggtgcaatgaatggtcggtgctaccagtgcaatgcttgttttctcgccttnagat

SEQ ID NO: 60228 - DNA, 411 bp, Setaria italica
  Peptide Sequence Number=SeqID_126202
cctgagtatcagacgcagagcagttgatgttcatgtcccttctctcttgtgctgtgaaatggaacacaaaccactggcaaccagcattagtgtactgttaataagatagaagggacatgaacatcaactgctctgcgtctgatactcaggtgcgtagaaactgaagatactatacaaaggttccttcaattgagtgacatccaaaataggataccagagaacggctccatcaatggaatgacatcaataaataggacccagacaggtactaggaaaactacagcaactgaaggaagctcgtggtcaggacgatcacttcaggcggtgaagctggttcgcacattggttcaccaagatgatgctgaccgtgcaatcttttgctgtagttttcctaggacccagacaggtact

SEQ ID NO: 60229 - DNA, 231 bp, Setaria italica
  Peptide Sequence Number=SeqID_126203
catcaaagcaacttgaatctgcatgcatacggaacaggacagcagctctgcagtagcactttctgttgattaattgtgcagcttgtaaggctgtaagcgtgtaagctatgccaatatctatatgaaagtactcagtattagctaatactccctccgttccaaattataggttgttttgacttttatagatacatagatattattatgcatctagacatagggtatatctaa

SEQ ID NO: 60230 - DNA, 226 bp, Setaria italica
  Peptide Sequence Number=SeqID_126204
ctccgtttccggaagcttcctcctcccgtgcgccatggccggcggcaaccttttcgggcgggcgctgagctacgtcgtcaacgagttcctcgtcgagggcctcgccaacaaccgtgcattccagaggttcgctgtgaagaccaacagaactcttgagagcctatcgtctaaaggtaatgttctcaaccagtccagacttaatcctccccttttttttctcactcga

SEQ ID NO: 60231 - DNA, 237 bp, Setaria italica
  Peptide Sequence Number=SeqID_126205
atttcgtgctatcatttgtctagtttttagttgctatgtctgaccagagatctctgtttgcagcacttcaggcggtgaagctggttcgcacattggttcaccaagatgatgctgaccgtgcaatctttgctgtagttttcctagtacctgtctgggtcctatttattgatgtcattccattgatggagccgttctctggtatcctattttggatgtcactcaattgaagaccttgta

SEQ ID NO: 60232 - DNA, 238 bp, Setaria italica
  Peptide Sequence Number=SeqID_126206
tcaatggaatgacatcaataaataggacccagacagctacgtcgtcaacgagttcctcgtcgagggcctcgccaacaatcagacgtcatattttgcagccgtgcattccagaggttcgctgtgaagaccaacagaactcttgagagcctatcgtctaaagctaaggaagtgagggaggagctatcggagcaactgaaggaagctcgtggtcaggacgatcacttcaggcggtgaagct

SEQ ID NO: 60233 - DNA, 334 bp, Setaria italica
  misc_feature (227)..(227): n is a, c, g, or t
  Peptide Sequence Number=SeqID_126207
tccctggaacaatggcacttcagatgcacgatcttgccgcaggaggcgtttggcgtagtatgcatctgggggagtgccagcagcttgggcagccccaattgccttctggggtaaatgaaggcgtgggaacagatacattgcaccctcagctttgttgcatgtgataccttctaaactattgaatgcttcttccaaagcctttgcacgccgagccaatgatgaaaggntgccatccctctctaccatgaaggattcaaaggattcatccccagtccttgttatgaacccaccaaagactggggatgaatcctttgaatccctctctaccatgaag

SEQ ID NO: 60234 - DNA, 365 bp, Setaria italica
  Peptide Sequence Number=SeqID_126208
ccccagtctttgtgggttcataacaaggctagggatgaatcctttgaatccttcatggtagagagggattcaaaggattcatccccagtctttggtgggttcataacaaggctagcaagaatttggcctgagacattggagcatagatttactgatgccaccttgtaaatctgttcccgcacttcaggactgaacccagttatctccatgtaaccacctcgttttccacattctccatagtagcctttagaaaccgactggaatgatgctaaaggaagatcatcatcagtgtatcccaatgatcgtgcaattttttgaatgagtggaattgcttgtcttcaacatatatattttcttggtaaacc

SEQ ID NO: 60235 - DNA, 120 bp, Setaria italica
  Peptide Sequence Number=SeqID_126209
acttcctgaaaatctgaaggagcggattatgcgccatgaacaatataggtggcaagaaacaagaagatttgtaagtaggccctcttcatcaacacctcttgtttcttgccacctatattg

SEQ ID NO: 60236 - DNA, 492 bp, Setaria italica
  Peptide Sequence Number=SeqID_126210
gtctagtactgtgaagatatactgccccaagtgtgaagacatctactacccacggtccaagtaccaaggcacatggatggtgcatactttgggacgacattcccccatctgttcctgatgacgtacgagcacctcaagccccagaagccctcacagcgctatgttcctcgcgtcttcggcttcaagctccacaagccatgaaaccttgtgtatcaggctattaaagctccacaaagacgcagcatgacgccgggggggaggcgggagttttgcaaggtctagagacccttgaagacatatataagagcaccattggcagatcagcggatcggtaaatactatcttgctgcctcactcttgtacctaggctggcacgcctatccaacatttgaatgtagctctaaggacatccaatgttgttgtaacctaactgctagttgttttttttttagtcgtcccataatcataggaggtcttggtttactaatcaaa

SEQ ID NO: 60237 - DNA, 479 bp, Setaria italica
  Peptide Sequence Number=SeqID_126211
tggttagaatcagtcttgtctagtagtattgtttgttattgggcttgattcatgcacgatacattctgaccagcaaaggactggctgcaatgctggagaaatataagaactatgactttgggcggtgcccacgtgtttactgctgtggtcagccatgcctaccggttggacaatcagatatccatcggtctagtactgtgaagatatactgccccaagtgtgaagacatctactacccacggtccaagtaccaaggcaacattgatggtgcatactttgggacgacattcccccatctgttcttgatgacgtacgagcacctcaagccccagaagcccctcacagcgctatgttcctcgcgtcttcggcttcaagctccacaagccatgaaaccttgtgtatcaggctattaaagctccacaagacgcagcatgacgccgggggagcgggagttttgcaaggtctagagacccttgaag

SEQ ID NO: 60238 - DNA, 455 bp, Setaria italica
  Peptide Sequence Number=SeqID_126212
gtttagtacattggggtctgctaactcgcttctgtgctattgtggctccaaagttgcagaatattgccattttgttatattctgctattttcttaaccttgttcagacattgatggtgcatactttgggacgacattcccccatctgttcctgatgacgtacgagcacctcaagccccagaagccctcacagcgctatgttcctcgcgtcttcggcttcaagctccacaagccatgaaaccttgtgtatcaggctattaaagctccacaaagacgcagcatgacggccggggggaggcgggtagttttgcaaggtctagagacccttgaagacatatataagagcaccattggcagatcagcggatcggtaaatctatcttgctgcctcactcttgtacctaggctggcacgcctatccaacatttgaatgtagctctaaggacatccaatgttg

SEQ ID NO: 60239 - DNA, 372 bp, Setaria italica
  Peptide Sequence Number=SeqID_126213
ttgtatgggctgattcatgcacgatacaattactagaaccaagacaaaaggaactggctgcaatgctggagaaatataagaactatgactttgggcggtgcccacgtgtttactgctgtggtcagccatgcctaccggttggacaatcagatatccatcggtctagtactgtgaagatatactgccccaagtgtgaagacatctactacccacggtccaagtaccaagacattgatggtgcatactttgggacgacattcccccatctgttcctgatgacgtacgagcacctcaagccccagaagccctcacagcgctatgttcctcgcgtcttcggcttcaagctccacaagccatgaaaccttgtgtatc

SEQ ID NO: 60240 - DNA, 322 bp, Setaria italica
  misc_feature (304)..(304): n is a, c, g, or t
  Peptide Sequence Number=SeqID_126214
ttaagttaaactttaattagaactttgggcggtgcccacgtgtttactgctgtggtcagccatgcctaccggttggacaatcagatatccatcggtctagtactgtgaagatatactgccccaagtgtgaagacatctactacccacggtccaagtaccaaggcaacatggatggtgcatactttgggacgacattcccccatctgttcctgatgacgtacgagcacctcaagccccagaagccctcacagcgctatgttcctcgcgtcttcggcttcaagctccacaagccatgaaaccttgngtatcaggctataaagct

SEQ ID NO: 60241 - DNA, 459 bp, Setaria italica
  Peptide Sequence Number=SeqID_126215
tctactacccacggtccaagtaccaaggcagtatccgtaaccattctcttattagactatcttattaatgcgtgtgtttgttgccctccaaaaaatgtgtgtcaaactccaacctcttcgtgagaacccaaaccaaaggccattttgtactaaatctgacactaagaatgggctgcaaatgttcccatatgcaccaacgcccattcacccacagctctatgtccaaaacaccattaaaacagtaaaaactgtccacaccgtcatcagcaatcgctatgttttttcaactctgatagatcaaaaattgtttagtacattggggtctgctaactcgcttctgtgctattgtggctccaaaagttgcagaatattgccattttgttatattctgctattttcttaaccttgttcagacattgatggtgcatactttgggacgacattcccccatctgttcct

SEQ ID NO: 60242 - DNA, 382 bp, Setaria italica
  Peptide Sequence Number=SeqID_126216
tagtaattactaaaattgtttagtacattggggtctgctaactcgcttctgtgctattgtggctccaaagttgcagaatattgccattttgttatattctgctattttcttaaccttgttcagacattgatggtgcatactttgggacgacattcccccatctgttcctgatgacgtacgagcacctcaagccccagaagccctcacagcgctatgttcctcgcgtcttcggcttcaagctccacaagccatgaaaccttgtgtatcaggctattaaagctccacaaagacgcagcatgacgccgggggaggcgggagttttgcaaggtctagagacccttgaagacatatataagagcaccattggcagatcagcggatcg

SEQ ID NO: 60243 - DNA, 347 bp, Setaria italica
  Peptide Sequence Number=SeqID_126217
tggttggacaaatcagatatccatcggtctagtactgtgaagatatactgccccaagtgtgaagacatctactacccacggtccaagtaccaaggcaacatggatggtgcatactttgggacgacattcccccatctgttcctgatgacgtacgagcacctcaagccccagaagccctcacagcgctatgttcctcgcgtctttcggcttcaagctccacaagccatgaaaccttgtgtatcaggctattaaagctccacaaagacgcagcatgacgccggggggagcgggagttttgcaaggtctagagacccttgaagcatatataagagcaccattggcagatc

SEQ ID NO: 60244 - DNA, 296 bp, Setaria italica
  misc_feature (296)..(296): n is a, c, g, or t
  Peptide Sequence Number=SeqID_126218
actgccccaagtgtgaagacatctactacccacggtccaagtaccaaggcacatggatggtgcatactttgggacgacattcccccatctgttcctgatgacgtacgagcacctcaagccccagaagccctcacagcgctatgttcctcgcgtcttcggcttcaagctccacaagccatgaaaccttgtgtatcaggctattaaagctccacaaagcgcagcatgacgccggggggaggcgggagttttgcaaggtctagagacccttgaagacatatataagagcaccattggcn

SEQ ID NO: 60245 - DNA, 442 bp, Setaria italica
  misc_feature (217)..(217): n is a, c, g, or t
  Peptide Sequence Number=SeqID_126219
cagcagccaagttccttattattgattatgctctcgatctcattttagacatcgagtcatctcatggtgatatgttcactgaggacaaaaatgagctggtagaatcagctgcagagatgttgtatgggctgattcatgcacgatacattctgaccagcaaaggactggctgcaatgctggagaaatataagaactatgactttggcggtgcccacgngtttactgctgtggtcagccatgcctaccggttggacaatcagatatccatcggtctagtactgtgaagatatactgccccaagtgtgaagacatctactacccacggtccaagtaccaaggcagtatcctaaccattctcttattagactatcttattaatgcgtgtgtttgttgccctccaaaaaaatgtgtgtcaaactccaacctcttcgtgagaacccaa

SEQ ID NO: 60246 - DNA, 404 bp, Setaria italica
  Peptide Sequence Number=SeqID_126220
tagttagtttagttagaccctaccaaaaaaatgtgtgtcaaactccaacctcttcgtgagaacccaaaccaaaggccattttgtactaaatctgacactaagaatgggctgcaaatgttcccatatgcaccaacgcccattcacccacagctctatgtccaaacaccattaaacagtaaaactgtccacaccgtcatcagcaatcgctatgttttttcaactctgatagatcaaaattgtttagtacattggggtctgctaactcgcttctgtgctattgtggctccaaagttgcagaatattgccattttgttatattctgctatttttcttaacctttgttcagacattgatggtgcatactttgggacgacattcccccatctgttcctgatgacgtacga

SEQ ID NO: 60247 - DNA, 321 bp, Setaria italica
  Peptide Sequence Number=SeqID_126221
tgtaattcaaaattgtttagtacattggggtctgctaactcgcttctgtgctattgtggctccaaagttgcagaatattgccattttgttatattctgctattttcttaaccttgttcagacattgatggtgcatactttgggacgacattcccccatctgttcctgatgacgtacgagcacctcaagccccagaagccctcacagcgctatgttcctcgcgtcttcggcttcaagctccacaagccatgaaaccttgtgtatcaggctattaaagctccacaaagacgcagcatgacggccggggggaggcgggagtttt

SEQ ID NO: 60248 - DNA, 419 bp, Setaria italica
  Peptide Sequence Number=SeqID_126222
accaagacaaaggactggctgcaaatagactaggaagaaaataataaagaaactaatagaactttagggacggtagcccaacgtgtttactgctgtggtcagccatgcctaccggttggacaatcagatatccatcggtctagtactgtgaagatatactgccccaagtgtgaagacatctactacccacggtccaagtaccaaggcagtatcctaaccattctcttattagactatcttattaatgcgtgtgtttgttgccctccaaaaaaatgtgtgtcaaactccaacctcttcgtgagaacccaaaccaaaggccattttgtactaaatctgacactaagaatgggctgcaaatgttcccatatgcaccaacgcccattacaccacagctctatgtccaaacaccattaaacagt

SEQ ID NO: 60249 - DNA, 435 bp, Setaria italica
  Peptide Sequence Number=SeqID_126223
agaatcagctgcagagatgttgtatgggctgattcatgcacgatacattctgaccagcaaggactggctgcaatgctggagaaatataagaactatgactttggcggtgccacgtgtttactgctgtggtcagccatgcctaccggttggacaatcagatatccatcggtctagtactgtgaagatatactgccccaagtgtgaagacatctactacccacggtccaagtaccaaggcagtatcctaaccattctcttattagactatcttattaatgcgtgtgtttgttgccctccaaaaaaatgtgtgtcaaactccaacctcttcgtgagaacccaaaccaaaggccattttgtactaaatctgacactaagaatgggctgcaaatgttcccatatgcaccaacgcccattcacccacagctctatgtccaa

SEQ ID NO: 60250 - DNA, 381 bp, Setaria italica
  Peptide Sequence Number=SeqID_126224
ttaatttaggtttagttaatttaatttagttttctaacttgtaggtaactaaaattgtagtcttggttagtaattcagcttgcagagatgttgtatgggctgattcatgcacgatacattctgaccagcaaaggactggctgcaatgctggagaaatataagaactatgactttgggcggtgcccacgtgtttactgctgtggtcagccatgcctaccggttggacaatcagatatccatcggtctagtactgtgaagatatactgccccaagtgtgaagacatctactacccacggtccaagtaccaaggcaacattgatggtgcatactttgggacgacattccccccatctgttcctgatgacgtacgagcacctcaa

SEQ ID NO: 60251 - DNA, 376 bp, Setaria italica
  Peptide Sequence Number=SeqID_126225
tttaagaacaatacgaagtacaatctcatggtgatatgttcactgaggaacaaaatgagctggtagaatcagctgcagagatgttgtatgggctgattcatgcacgatacattctgaccagcaaaggactggctgcaatgctggagaaatataagaactatgactttgggcggtgcccacgtgtttactgctgtggtcagccaaatgcctaccggttggacaatcagatatccatcggtctagtactgtgaagatatactgccccaagtgtgaagacatctactacccacggtccaagtaccaaggcagtatcctaaccattctcttattagactatcttattaatgcgtgtgtttgttgccctccaaaaaaatgt

SEQ ID NO: 60252 - DNA, 285 bp, Setaria italica
  Peptide Sequence Number=SeqID_126226
tttcttttgtttatttagtttgttaagttctattctagtattgtttagttggtcttcttgtaattggagaagacacctcatggatttcatggtattgcaatttaagagggaacgaattcttctgcgaggttgacgacgactacatacaagacgacttcaacctttgcggcctcagcagccaagttccttattatgattatgctctcgatctcattttagacatcgagtcatctcatggtgatatgttcactgaggaacaaaatgagctggtagaatcagctgcag

SEQ ID NO: 60253 - DNA, 265 bp, Setaria italica
  Peptide Sequence Number=SeqID_126227
gaagatatactgccccaagtgtgaagacatctactacccacggtccaagtaccaaggcagtatcctaaccattctcttattagactatcttattaatgcgtgtgtttgttgccctccaaaaaaatgtgtgtcaaactccaacctcttcgtgagaacccaaaccaaaggccattttgtactaaatctgacactaagaatgggctgcaaatgttcccatatgcaccaacgcccattcacccacagctctatgtccaaacaccattaa

SEQ ID NO: 60254 - DNA, 404 bp, Setaria italica
  Peptide Sequence Number=SeqID_126228
ttaagaacaatacgaagtacaatactacaataggtagaataatgttcactgaggaacaaaatgagctggtagaatcagctgcagagatgttgtatgggctgattcatgcacgatacattctgaccagcaaaggactggctgcaatgctggagaaatataagaactatgactttgggcggtgcccacgtgtttactgctgtggtcagccatgcctaccggttggacaatcagatatccatcggtctagtactgtgaagatatactgccccaagtgtgaagacatctactacccacggtccaagtaccaaggcagtatcctaaccattctcttattagactatcttattaatgcgtgtgtttgttgccctccaaaaaatgtgtgtcaaactccaacctcttcgtga

SEQ ID NO: 60255 - DNA, 288 bp, Setaria italica
  Peptide Sequence Number=SeqID_126229
ggtggagggggtggccggggcctgcatcgcgggatctcctgtggcgatcgcgaggggaggggagggggggagggagaggagagctcgctctgggagttgcttagtggggagggagagggagaagggagagatgtataagcaggggggagcggggttggaccggaagcggatcagcgacgcgctcgacaagcacctcgagaaggcggtcgcgtcgccgtccacgtcgagggggtcgcgggcggcggcggcgggcgggaccaccaccgcctcgtcgtgccgtcctccgcg

SEQ ID NO: 60256 - DNA, 211 bp, Setaria italica
  Peptide Sequence Number=SeqID_126230
ctgatagatcaaaattgtttagtacattggggtctgctaactcgcttctgtgctattgtggctccaaagttgcagaatattgccattttgttatattctgctattttcttaaccttgttcagacattgatggtgcatactttgggacgacattcccccatctgttcctgatgacgtacgagcacctcaagccccagaagccctcacagcgc

SEQ ID NO: 60257 - DNA, 244 bp, Setaria italica
  misc_feature (10)..(10): n is a, c, g, or t
  Peptide Sequence Number=SeqID_126231
caatcgctangttttttctaactctgatagatcaaaattgtttagtacattggggtctgctaactcgcttctgtgctattgtggctccaaagttgcagaatattgccattttgttatattctgctattttcttaaccttgttcagacattgatggtgcatactttgggacgacattcccccatctgttcctgatgacgtacgagcacctcaagccccagaagccctcacagcgctatgttcctc

SEQ ID NO: 60258 - DNA, 241 bp, Setaria italica
  misc_feature (1)..(1): n is a, c, g, or t
  Peptide Sequence Number=SeqID_126232
ngttttttctaactctgatagatcaaaattgtttagtacattggggtctgctaactcgcttctgtgctattgtggctccaaagttgcagaatattgccattttgttatattctgctattttcttaaccttgttcagacattgatggtgcatactttgggacgacattcccccatctgttcctgatgacgtacgagcacctcaagccccaagaaagaccctacaacaagacgactaatagtt

SEQ ID NO: 60259 - DNA, 283 bp, Setaria italica
  Peptide Sequence Number=SeqID_126233
tggtcagccatgcctaccggttggacaatcagatatccatcggtctagtactgtgaagatatactgccccaagtgtgaagacatctactacccacggtccaagtaccaaggcagtatcctaaccattctcttattagactatcttattaatgcgtgtgtttgttgccctccaaaaaaaatgtgtgtcaaactccaacctcttcgtgagaacccaaaccaaaggccattttgtactaaatctgacactaagaatgggctgcaaatgttccatatgcacctaact

SEQ ID NO: 60260 - DNA, 258 bp, Setaria italica
  misc_feature (54)..(54): n is a, c, g, or t
  Peptide Sequence Number=SeqID_126234
ctggctgcaatgctggagaaatataagaactatgactttgggcggtgcccacgngtttactgctgtggtcagccatgcctaccggttggacaatcagatatccatcggtctagtactgtgaagatatactgccccaagtgtgaagacatctactacccacggtccaagtaccaaggcagtatcctaaccattctctttatttagtacttattctttatttaattgcgtgttgtttttttggtagggtctaactaaact

SEQ ID NO: 60261 - DNA, 261 bp, Setaria italica
  Peptide Sequence Number=SeqID_126235
agaaatataagaactatgactttgggcggtgcccacgtgtttactgctgtggtcagccatgcctaccggttggacaatcagatatccatcggtctagtactgtgaagatatactgccccaagtgtgaagacatctactacccacggtccaagtaccaaggcagtatcctaaccattctcttattagactatcttattaatgcgtgtgtttgttgccctccaaaaaatgtgtgtcaaactccaacctcttcgtgagaaccca

SEQ ID NO: 60262 - DNA, 249 bp, Setaria italica
  Peptide Sequence Number=SeqID_126236
ttttcttttgttttcgtttaggtttttgtttacgttacgttactttacttattactaagtacgtacttcaacctttgcggcctcagcagccaagttccttattatgattatgctctcgatctcattttagacatcgagtcatctcatggtgatatgttcactgaggaacaaaatgagctggtagaatcagctgcagagatgttgtatgggctgattcatgcacgatacattctgaccagcaaaggctgg

SEQ ID NO: 60263 - DNA, 297 bp, Setaria italica
  misc_feature (259)..(297): n is a, c, g, or t
  Peptide Sequence Number=SeqID_126237
tccaacatttgaatgtagctctaaggacatccaatgttgttgtaacctaactgcagttgttctttgattagtaaaccaagacctcctatgattatgggcgctatttggggcctcgcgctggaaatcgttatctagttcaagctactattacctgtttggttctcataagatagtctgagttggtattttacgaacttcacctgagttgtgaagggtgcaccattttcttttgctggtctcttattcgttggctaaaccnnnnnnnnnnnnnnnnnnnnnnnnnnnnnnnnnnnnnnn

SEQ ID NO: 60264 - DNA, 227 bp, Setaria italica
  Peptide Sequence Number=SeqID_126238
tattggttgatatgttcactgaggaacaaaatgagctggtagaatcagctgcagagatgttgtatgggctgattcatgcacgatacattctgaccagcaaaggactggctgcaatgctggagaaatataagaactatgactttgggcggtgcccacgtgtttactgctgtggtcagccatgcctaccggttggacaatcagatatccatcggtctagtactgtgaag

SEQ ID NO: 60265 - DNA, 211 bp, Setaria italica
  Peptide Sequence Number=SeqID_126239
gacattcccccatctgttcctgatgacgtacgagcacctcaagccccagaagccctcacagcgctatgttcctcgcgtcttcggcttcaagctccacaagccatgaaaccttgtgtatcaggctattaagctccacaaagacgcagcatgacggccggggggaggcgggtagttttgcaaggtctagacgacccttgaagacatatataag

SEQ ID NO: 60266 - DNA, 218 bp, Setaria italica
  misc_feature (213)..(213): n is a, c, g, or t
  Peptide Sequence Number=SeqID_126240
gacattccccccatctgttcctgatgacgtacgagcacctcaagccccagaagccctcacagcgctatgttcctcgcgtcttcggcttcaagctccacaagccatgaaaccttgtgtatcaggctattaaagctccacaaagacgcagcatgacggccggggggaggcgggtagttttgcaaggtctagagacccttgaagacatatataagngcacc

SEQ ID NO: 60267 - DNA, 231 bp, Setaria italica
  Peptide Sequence Number=SeqID_126241
gttagtggctctgatggagaagacacctcatggatttcatggtattgcaatttaagagggaacgaattcttctgcgaggttgacgacgactacatacaagacgacttcaacctttgcggcctcagcagccaagttccttattatgattatgctctcgatctcattttagacatcgagtacaatctcatggtgatatgttcactgaggaacaaaatgagctggtagaatcag

SEQ ID NO: 60268 - DNA, 136 bp, Setaria italica
  Peptide Sequence Number=SeqID_126242
gaacccaaaaccaaaggccattttgtactaaatctgacactaagaatgggctgcaaatgttcccatatgcaccaacgccattcacccacagctctatgtccaaacaccattaaacagtaaaactgtccacaccgtc

SEQ ID NO: 60269 - DNA, 135 bp, Setaria italica
  Peptide Sequence Number=SeqID_126243
gaagacatctactacccacggtccaagtaccaaggcaacattgatggtgcatactttgggacgacattcccccatctgttcctgatgacgtacgaggaacatagcgctgtgagggcttctggggcttgaggtgct

SEQ ID NO: 60270 - DNA, 189 bp, Setaria italica
  Peptide Sequence Number=SeqID_126244
ctacccacggtccaagtaccaagggtagtagatgtcttcacacttggggcagtatatcttcacagtactagaccgatggatatctgcccaagtgtgaagacatctactacccacggtccaagtaccaaggcaacattgatggtgcatactttgggacgacattcccccatctggggcttgaggtgctcg

SEQ ID NO: 60271 - DNA, 181 bp, Setaria italica
  Peptide Sequence Number=SeqID_126245
tatgttcactgaggaacaaaatgagctggtagaatcagctgcagagatgttgtatgggctgattcatgcacgatacattctgaccagcaaaggactggctgcaatgctggagaaatataagaactatgactttgggcggtgcccacgtgtttactgctgtggtcagccatgcctaccggtt

SEQ ID NO: 60272 - DNA, 169 bp, Setaria italica
  Peptide Sequence Number=SeqID_126246
gattatgctctcgatctcattttagacatcgagtcatctcatgttatgtatttgtgcaggtgatatgttcactgaggaacaaaatgagctggtagaatcagctgcagagatgttgtatgggctgattcatgcacgatacattctgaccagcaaaggactggctgcaatg

SEQ ID NO: 60273 - DNA, 140 bp, Setaria italica
  Peptide Sequence Number=SeqID_126247
caaaatagagctggtagaatcagctgcagagatgttgtatgggctgattcatgcacgatacattctgaccagcaaaggactggctgcaatgctggagaaatataagaactatgactttgggcagtgcccacgtgtttact

SEQ ID NO: 60274 - DNA, 217 bp, Setaria italica
  misc_feature (179)..(179): n is a, c, g, or t
  Peptide Sequence Number=SeqID_126248
gcctgctcgtacgacgcctgccgccccatgctcgaccggcacacaccgccggggaggtacgcaaagccctgcccaggagaacagacgcagccacattttcagactcaatgtctttcatcatgcatgctgggaagggtacaaccctggtcgatcaatacctgctgcatgatcttgggganctccgagaacagtaacttccgcccctcgtcgtcaacgg

SEQ ID NO: 60275 - DNA, 215 bp, Setaria italica
  Peptide Sequence Number=SeqID_126249
tgtgcaatttgcctaatgtgtcgcaatgccgcagctgtcatcttctgtgccagtatcttaggagattcatagagtggtcgaagaacctcaggcacactcttagcattcagatcaacatgatccacaatgtaaatcatggagcctcccccgtcacatggtcgaagcagatcaaggtctggttccagaaccgcagatgccgggagaagcagcgcaag

SEQ ID NO: 60276 - DNA, 224 bp, Setaria italica
  Peptide Sequence Number=SeqID_126250
aatcgttccaccattacccgtagggataacatggaggatttcaacatgccgacaatcgcgataccacgatgcgcgatccttaaggatctcagcaacctttgtgggctcaaggctcacaaggccacaagctcgtgctgctacgccactgcagttgtgcgaaacagcgatgattccaacggactgagacacacaacaggggaaaggcaaggcacacaggggatagg

SEQ ID NO: 60277 - DNA, 187 bp, Setaria italica
  Peptide Sequence Number=SeqID_126251
aaggtgaacacaggagcagccttcagggaacagcacatgatagagtcggagtgttgccagagcgctttcaaggaagcatctgtgcactgggtgtcagcgcgaagtagttcagctccagtgtgaaacctgaaagttttaacgtgggccagagattactacattgcacaattgaacggagtaacatgaa

SEQ ID NO: 60278 - DNA, 168 bp, Setaria italica
  Peptide Sequence Number=SeqID_126252
gggttttgctgttgatactgctgaccacttgtcaccacagactcacagcttgtatctgtggtggctacagaaggactgtggagttgattcttcatatacccgttgtcatagacgagccgggacacctagacttactagacaagaccggtacaattactaacctaacaa

SEQ ID NO: 60279 - DNA, 471 bp, Setaria italica
  Peptide Sequence Number=SeqID_126253
aacacgaatgctagagttacagtagcctagcccacaagggcacaaccgcactactacaacaagtttacaccatttacatgtcacagccattgcaactatctccgcaacagctttgctaaccgctcgccggccacgcccctttaggacgacgggctcgcttgttgctgctgttgccgccgccaccgccgccagtgcaggacgggcacttgtactgcttgatgtgctccgctttggctgccgtgatcttgacgcacttgccatggaaccacttctcgcagatgtcgcagcagatccagaactcgtcggggccatagctctccccgcacgcgccgcagagtgtctccccgtgctcgccttcgctagcaccgctgccgccatcgtcttcctcctcggcagctgggccttcctctgcaggggcagggtcttctgccttcacctggggctgtggtggctttggctgcttcaccttag

SEQ ID NO: 60280 - DNA, 256 bp, Setaria italica
  Peptide Sequence Number=SeqID_126254
gtgagggcttcgagccagatttgctactcttattgctgtttttaggagttttttcttttgggttctttcttggcagttcctgtaacaacctcatatacggtgggaaggttattgatcatggtgaagagccgtttcctgcaagccaatcatcagaaggtaactctatcagcgagaggtaagacagtgcacatcaaagtaatcatgtaatgaatacggcaagttactgtcaaacataacagaacactccagtatagct

SEQ ID NO: 60281 - DNA, 253 bp, Setaria italica
  Peptide Sequence Number=SeqID_126255
ccttttcattcatcccatcacgtgcaaaattaaattcccagagctggctctgggagttcaggaggaacttcctctgcaggcaagttgacttcccatgtctcattgggaagtccatataaacataggttctccttctccttgtttccatgtaggcatggacaaagcatgatataacagagttaaatcctgggagcgatggagttcaaaaggtgtgtgcaatacactcatccccaatctggaaatacccagaaag

SEQ ID NO: 60282 - DNA, 256 bp, Setaria italica
  Peptide Sequence Number=SeqID_126256
caaaatttagttcgtggcctttaaactatagtttgctttctctttgtacggaaagaaacaaattatcaacaggctagactgtcttacattgatgtattatactgaaaatgcaacaaccaaaagcgaagcagaaaaataccactaagtttggctggagaatgccaaggtgcttagcacccgcactgatccagagttcagctccaaagggaaagctgttgctactatgaagatatgacatatagcctgttgataattt

SEQ ID NO: 60283 - DNA, 430 bp, Setaria italica
  Peptide Sequence Number=SeqID_126257
ccgtcagttcatccaaagcttgaggacccgatccttcccaccagacgccaccttttcaccgtcagggctccaatccacggcgtacacctcatccgcgtggcctggtaggtcttgtttcaacttgtgcgttcgaatatccccaaaaccttttaggggtggaatccttgcttccacttagcagaagcctactgtcagcagaccagctgatctggtagacatctgcaacatgccctctgaaagctgcaacaaactttcccgtgataccgttccacaacttgacggatttatcaaaggaggcacttgccaaccattgcccatcaggggaaaagtacacatggttcacgagcttctgatgaaccaagtacaatgacgaagactttaaggttagtttaactaaatacgttaggttacccaaaagaaaacaatacga

SEQ ID NO: 60284 - DNA, 276 bp, Setaria italica
  Peptide Sequence Number=SeqID_126258
acttagcaataccgtaccttgaaatacctcttctcatggcatctcttaccattgtgtgtgcacatttgtctagccctaagatgtttataggcaggccaaatgagaaaaatgcatgcttttcagtgttgaatgaaataagaacaaagaaatttacagagattattatgattacaattaccttcatgatgtactctgtgtggatactcctgtctaagcttttcgtagacattgcctacaacataagtgttgcttccaggtttgttagctgtgctaggt

SEQ ID NO: 60285 - DNA, 120 bp, Setaria italica
  Peptide Sequence Number=SeqID_126259
taatctcttttctcaccacctgaaatacctcttctcatggcatctcctaccattgtgtgtgcacatttgtctagccctaagatcttcatgatgtactctacgtggatactcctgtctaag

SEQ ID NO: 60286 - DNA, 378 bp, Setaria italica
  Peptide Sequence Number=SeqID_126260
ttgcagcattgctacttcgaagatgtctcatgagattggtgcagtaggcaatcaggtatcacgtgatcaaggagagaaaagtgtgacaaccaccacataccatcacaacagcatgtccgatcagatctgcatgcaaaacaagtacccaccatgcctttccatgtcggtacaccatcgaacacagtttcaacagcaatataacctgaagtgaaacatacgtacgtcactcgtcctggacagtagaagtaggttctgttgtccagcaatccttcatcaaaatgaaaagaaccaggtgcttttcagtttattttgaacccatttgctggaaatacattgcaactagctaacaggttctgatcagcattatatcgtacccgc

SEQ ID NO: 60287 - DNA, 460 bp, Setaria italica
  Peptide Sequence Number=SeqID_126261
atctatgactatagccaaatgtaaattggcttactcttccgttcttctgcagctacatacccgaatacacaaggaactgattctgataatgatccaaacaatactactgtatttgttggtggtcttgacccgagtgtgactgatgaggttctgaggcaaaccttcagtccatatggagagcttctctatgtcaaaatacctgtaggaaagcgatgcggatttgtgcaatattctaacagctgaggaggccataagggtgctaaatggaacccagttaggaggccagagcgtaaggctctctggggtcgtagccctgcaaacaaacagcctcagcaagagcagaaccaatggagcagcggctactatggttatccccaaggttatgatccatatggttatgctcggcctcctcaagatcctgccatgtatgcgtatacagcatatccagggtatggaaatt

SEQ ID NO: 60288 - DNA, 409 bp, Setaria italica
  misc_feature (32)..(32): n is a, c, g, or t
  misc_feature (35)..(35): n is a, c, g, or t
  misc_feature (347)..(347): n is a, c, g, or t
  Peptide Sequence Number=SeqID_126262
aaaataaaggaaaaccaaataagaagaacaanaanataaggactactacgtaggggtacgtaagaccctagacaaacaaacagcctcagcaagagcagaaccaatggagcagcggctactatggttatccccaaggttatgatccatatggttatgctcggcctcctcaagatcctgccatgtatgcgtatacagcatatccagggtatggaaattaccagcagcaaccaccacagcagcccccaccacaacagtaagaataatggttcgagaggatcatcattggcaagctggcagcggagtagttggggcaggcaacttagggtgcattggcatgagaattttgngactgttgcttgtgttatattgctccaacgtccttgtacacgtagcctgtgttgtacgtgag

SEQ ID NO: 60289 - DNA, 332 bp, Setaria italica
  Peptide Sequence Number=SeqID_126263
gaattagctcatggtggaagaggcccatcttttatcgatcaagcagccataatagtgttggacgccgcggtgcaactaggcgatctgattaccgcgttatggttactggactaccttcttcagcatcatggcaagatctcaaggtttggtgaagatgtaagttcatgaacttagtttgcctcgtaatcctaaattttactttcatgttcaggatcatatgcggcgagctggtgatgtctgtttctccgatgtttatcgtgaggctggagctactattggaatagctgattataccaactatgaagatatgaaacatgcgataaggaaacttg

SEQ ID NO: 60290 - DNA, 311 bp, Setaria italica
  Peptide Sequence Number=SeqID_126264
tagttagaagggagtaatgatgcgaggcgcagccgctctcgctccagaggcagaagccatagccgctctaagtcaagaagcagaagccgcggacgctcttactcgagaagcagaagccacagttatagcaggagcaggagcccaagatcgagatctgcttctcagtcacgatcacctgttaaagcaagattggggccatgcgatgatctggggattgcgttgctaggatattggaatattgagaacatgaggatggtttggaacgttggatagttcagctggattgtagtcaacttgtcatacagtgcatc

SEQ ID NO: 60291 - DNA, 277 bp, Setaria italica
  Peptide Sequence Number=SeqID_126265
ccgatctcgaacacctgctccttgggggacgtccacgtgatcacgtagaactcctccacctgcgccttccggagcagcccgcccgtgctgccgccgaagatcggggacggggtgttgggtcaagctgcgggggcacgaaccccttgggcgcctcctgggtcgccgccccgtccatcgctgctagctcgccggccctggggccgccgcgggaggggaggagagaatccgcgccgccgaggggtagtgcgcgtgggatctcgcgaccgcgcgacgcgag

SEQ ID NO: 60292 - DNA, 280 bp, Setaria italica
  Peptide Sequence Number=SeqID_126266
acctcgatggggctgacgttcttgccgatgctgcggaagttctgccccacgccctgcctgccggcgttgaccttctccgggtagacgccgtccttggggtggaggtactggacctcgccgttggggaagacgcggtagaactggtagttgatcttgtacttggagcgcagcctggtgccgagcgccaggcactgctccttgcgcgccagcttcaggaggttgggcccctcccgcatgataggacggaacgaaccgaacccgtaaacggaaacaaaataaa

SEQ ID NO: 60293 - DNA, 268 bp, Setaria italica
  Peptide Sequence Number=SeqID_126267
cctggtgccgagcgccaggcactgctccttgcgcgccagcttcaggaggttgggcccctcccgcatgatggcggcgccgcccgtcggcatctcgaacacctgctccttgggggacgtccacgtgatcacgtagaactcctccacctgcgccttccggagcagcccgcccgtgctgccgccgaagatcggggacggggttcgtgcccccgcagcttgaccccttgggcgcctcctgggtcgccgccaaggggttcgtgcccccgcggcg

SEQ ID NO: 60294 - DNA, 275 bp, Setaria italica
  Peptide Sequence Number=SeqID_126268
aggttgggcccctccccgccatgatggcggcgccgcccgtcggcatctcgaacacctgctccttgggggacggtccacgtgatcacgtagaactcctccacctgcgccttccggagcagcccgcccgtgctgccgccgaagatcggggacggggtgttggggtcaagctgcgggggcacgaaccccttgggcgcctcctcagcctccgccgccgtgcagccgcgccaccaccaccctctgcgctcgcctcctcgtcgcacctcccgccgcttaag

SEQ ID NO: 60295 - DNA, 179 bp, Setaria italica
  Peptide Sequence Number=SeqID_126269
atcttgtacttggagcgcagcctggtgccgagcgccaggcactgctccttgcgcgccagcttcaggaggttgggcccctcccgcatgatggcggcgccgcccgtcggcatctcgaacacctgctccgtggaggagttctacgtgatcacgtggacgtcccccaaggagcaggtgttcga

SEQ ID NO: 60296 - DNA, 401 bp, Setaria italica
  misc_feature (1)..(1): n is a, c, g, or t
  Peptide Sequence Number=SeqID_126270
ncgttaagccactctggttgcacggaattcagcctctctagactccccagaattaagatcaatagcaactgctgaggggttaaatttatattccttaagaagaggtcggagatagaaacttccaggaataagttgtcaaagatgaaagttccgccagaaccactaattgagttatttctgtatccttcctcgccactcaaagataataatactgatggtaacagctccaaattttcaccataaatctgcactgatatctgaccaagcttctgacaagcaaaggtgtacaggccagtttgcttgagatgataaccatcctttgaaagacttacaaactttaataattactaatagtacaattagtaacaaagggaacctagacaaaagaaatagaataccaa

SEQ ID NO: 60297 - DNA, 267 bp, Setaria italica
  Peptide Sequence Number=SeqID_126271
ttcaaggcattttgatcccagcaccaaacatccttaaccgagccctcagatgaagaatgcctcacctctatacgatattttcccggaaatacttttgtgaacacaaaattgacattatcttgctccaaagtggttgtcttcttttcctgctcaacacccccagctaatctaacaagtgagaccagaacattttggttgcattcctctttgcacaagactttaccatgaaacaattagaacttagtagaactagaagaaaaatagacc

SEQ ID NO: 60298 - DNA, 177 bp, Setaria italica
  Peptide Sequence Number=SeqID_126272
ctccccagaattaagatcaatagcaactgctgaggggttaaatttatattccttaagaagaggtcggagatagaaacttccaggaaataagttgtcaaagatgaagttccgccagtaacctacttaatttgtagtttattttcttgttattcctttccttcgtcctacttctaagta

SEQ ID NO: 60299 - DNA, 158 bp, Setaria italica
  Peptide Sequence Number=SeqID_126273
tgcaggcgccagataatgccctcaatttcctttgtaataggagaaacgagaccactaggattaaatctaatttgccgtttacactctttttcttattatgttcttccgtggctcctttttgatcggtgcagcccctgaacctagggaggtaattccta

SEQ ID NO: 60300 - DNA, 454 bp, Setaria italica
  Peptide Sequence Number=SeqID_126274
agccaaaagaaaacaggaaaacacatatcagcagcaaagattttctgaaaaggaaaaatgcaataccacgttcatcaagtcgatgctcaccctccagcttccaactagtgctacttttgcgtctacattatgcacgaatgctaagttagatgaaggaaatcgatcttcccataaaacagattcacttacagtacagatatttaatttgcagggcttcgtgccctgatgtattcagcttaccagaaggtactgcccaaaaacctgcaagcccccggaaatggtcgatacggaactcatcatacaaatcaagggctcgtttaatcctctttatccaccatgaaaagccatctgcttccatagctctccagtcatacaatggactgttccatagctgaccagtttcactaaatgcatcaggtgggacaccactaacaaagtgggaagccattcttgt

SEQ ID NO: 60301 - DNA, 420 bp, Setaria italica
  Peptide Sequence Number=SeqID_126275
ccagtcactacacagaacattcgtctcagccgggttttcaaaaatgtccactcttatattcagatctcgaccatacgttctagcacagtgatgtttcctccacaaatgtttgatttcatgaatagtgaacgactggttggtataagaaatgtactcccaaaaaggatacaatcccctggtttgcccgatgattaaagaccggtttaacatgacactcaaggctcctgctgttaagatcttgtacatttcattgccaaatccagcttcagatgctttgcccaacacaaagccttgtttgcagaattcatgggcaggaagcattctcactctttctgctccttggagctcgaagtgttgccggaatacaatactacgacggaacccgacaaggactaggacctagactaccggacgaagaca

SEQ ID NO: 60302 - DNA, 381 bp, Setaria italica
  misc_feature (91)..(91): n is a, c, g, or t
  Peptide Sequence Number=SeqID_126276
tgcctgacagcctttgtcacaaacctccgcgtatcaggctcgctgtaaagtgaaatacacttgtggagagcgtcttcaatagatctataancttgcacctgaaatggaacgaaaattggtcaagttgcaagcttcaatgaggatttaagttccaaagaattttgccccatgcctttcaaacacaattattttgtctaattaatttgaaaatttattgttacaacaatagttaaatcaagttacaaaacatgtatagtagtgtgccagacctttccaaacttattttttaaaatggattcgcagtgtggtattattgtagtaactaattaattaaatttaagttaaagttttttaagttttaagtttaacttttaagtttaa

SEQ ID NO: 60303 - DNA, 321 bp, Setaria italica
  Peptide Sequence Number=SeqID_126277
gaaaatgtacatgccattgggttctaacaagttgatgaagtccgaggaagccctttcatgccagctttcaatgtgatttcctaatgttcgcctgtaaaatggctttcctacatatcatacttattacttcctattactctcacctcccaactcttctattattttttcgcgcctcaccaagcaaatcctgcaactccgtcgtctgctgtgtgaaatctactgtttcgatgagtaccctcaggcacctcaagtagtcctgcctgacagcctttgtcaggcaggactacttgaggtgcctgagggttacttctaattacgtaa

SEQ ID NO: 60304 - DNA, 241 bp, Setaria italica
  Peptide Sequence Number=SeqID_126278
ccctttttgccctaatctcttccaaactcttgaattgttgttcttccttcatctctacagctattgacgacatcctaggtggcattgccgaccatggggcactccattgggcgttgctccatgaaggaatccttcccacatgcgatgttctttgatgctccaagtctttcaacggtgtgtcttgcgtatcgcgctcaccgctgaggacacatgttgcggattcaatgcgcagcacgtaatc

SEQ ID NO: 60305 - DNA, 255 bp, Setaria italica
  Peptide Sequence Number=SeqID_126279
ttgcgtgtctcagcttgcttagcggtcaagtaagtctctctatataaagagaggagataaaaaattaggggaatgaagtatgaattatcaggagagatcctcatctacctccgggccttgagattgggtgcagccgccgacggtgtgcccgatctcaaatgtccggttcagcgtccgttacccctcacaatccccatattcccccagctctgcacggctccccgatcagaggccatgacatcctcaaacattaaa

SEQ ID NO: 60306 - DNA, 473 bp, Setaria italica
  Peptide Sequence Number=SeqID_126280
ttcggttcttaggtttggttccctttcttccttggtaggtcttctttctaccgttgttcgttacagcgactggctcaccggccggaactccagccccaggtcccggagcttctggttcgagaacctgtacggctgcttccgcggattctcctcgtcagagcacctggtggggacggggtactcggggaagagcttggcgaggatgcggacgacgtcctcgcggtggaggacacgctcggcgcagaggtggcggccggaggcggcggggctctcgaagacggcgaggtgcgcggcggcgacgtcgcggacgtcgacgtaggcctgcacagcgttggcgaaggtgcgggcggagccgtcgaggtacttgaggatgtgcgcgatgctggcgttcaccgtcggctgcagcagcgggcccaccaccagcaccgggttcaccaccaccaggtccacgccgcgctgacgcgccgcgtccc

SEQ ID NO: 60307 - DNA, 258 bp, Setaria italica
  Peptide Sequence Number=SeqID_126281
cagcagcttcaccagccacgacgcgatgtacccggccgcgccggtgacgcacacggtctgccgttccccgccggcggaaccaccgccgcggcggcggtcagttcctcaatcctcccctgctagctactcctcgatttcgtcacgaaaggtatagctattgctcgcggtggagtagcagtagtgccgaagcagggaatacagctaggcgttggtgagttagttttaggtttcccctttgcgcgggcgagcgcgatcgag

SEQ ID NO: 60308 - DNA, 420 bp, Setaria italica
  Peptide Sequence Number=SeqID_126282
atctagaactaaaaataagtcttgtattcactattcagatttagttaaacagttagcgatgttcgttttgatttctagtaggtaacacatgatgttctacctactttcataatcttttactgatttttctgtacaatggttaatttggtgaagttgttcatctggtttccaggtcatcctctcgtctgctccatgatacatgacatcatagaatgggcagttggactccaggcactgaagcacatcgctgtttttagcttcatctgtctttattgtaattgtatagtagatgcataagacagactggatcgatgaaagccagttgcccttaggcgccaagaaacccgggattaccacggaagtgcttctcgtgtttcattagaatgtactgtaattgcactacctcatggtttgagaacc

SEQ ID NO: 60309 - DNA, 243 bp, Setaria italica
  Peptide Sequence Number=SeqID_126283
gaagtgacgacgcggctgcactgggaaccaccaggtttctcgctgtccgcgtgaatggcatggagacaatgtcaccaaggtggaccaaggagccctgcccatcatactcactgtgacgatacttagttattagcaagccagccgggcagatagagatagacccttcaactgtgaatgaattattttgagatgattgaagttgcctggggcaagtccacaggattttaagtacatcttcaatct

SEQ ID NO: 60310 - DNA, 335 bp, Setaria italica
  Peptide Sequence Number=SeqID_126284
atgtgcctgacactggattactctgtgatctctttggtctgatccttccaatgaagcacaaggctgggccatgaacgatcgaggtgtttcatatacatttgggcctgataaagttgctgaattccttgagaagcatgatttggacctcatctgcagagctcatcaggttgttgaagatggatatgagtttttcgctaaccgccagcttgtaacaatattctcggcccctaactactgtggagaattcgataatgctggtgccatgatgagtgtagatgagacattgaatgttagacttacctttacctaagtaattaactttaaagtaccttagt

SEQ ID NO: 60311 - DNA, 285 bp, Setaria italica
  Peptide Sequence Number=SeqID_126285
atctgagtatgaatgagcctcaaacatctttaagaaagcttcataaaaattgttgatcttgcgtattttcttttgatcaggtgatgtccatggccagttttctgatctactgaggctatttgattacggtggctatccgcctcagtccaactaccttttcttgggtgattatgtggatcgtggaaagcaaagcctggaaacaatatgtcttcttttggcttacaaggtcaagtacccagacgaactttttccttctaaagggggcaaccatgaatgtgcatcagt

SEQ ID NO: 60312 - DNA, 176 bp, Setaria italica
  Peptide Sequence Number=SeqID_126286
cgctaaccgccagcttgtaacaatattctcggcccctaactactgtggagaattcgataatgctggtgccatgatgagtgtagatgagacattgatgtgctccttccagatacttaagcctgcgaggaagatcctgcccctgttcatcacagcttgctcaccatcgggccattgtc

SEQ ID NO: 60313 - DNA, 311 bp, Setaria italica
  Peptide Sequence Number=SeqID_126287
gatgaagaactacggcgtcaagacagacgccgaggtgctcgacatgatcgacacggcggcgcgacagaagcagctcaaggtggtggccaagctgtactggggcgacgccagggagaagctctgcgatggcgtcgaggagctcaagatcgactcccttgtcatgggtagccgcggcctcggcccgatccagaggatcctcctgggaagtgtgaccgacacatgtagcgcttagtccacacaaactgcatgctagcatcctccatatcgctggtaggctggcctgctccttactttcccttgacgactgtcac

SEQ ID NO: 60314 - DNA, 382 bp, Setaria italica
  Peptide Sequence Number=SeqID_126288
ggtgatgaagaactacggcgtcaagacagacgccgaggtgctcgacatgatcgacacggcggcgcgacagaagcagctcaaggtggtggccaagctgtactggggcgacgccagggagaagctctgcgatggcgtcgaggagctcaagatcgactcccttgtcatgggtagccgcggcctcggcccgatccagaggatcctcctgggaagtgtgaccaactacgtgctgtcgaacgcatcgtgccctgtgacagtcgtcaagggaaagtaaggagcaggccagcctaccagcgatataggaaggaatgctagcatgcagtttgtgtggactaagcgctacacaaactgcatgctagcatcctccatatcgcttagtccacac

SEQ ID NO: 60315 - DNA, 168 bp, Setaria italica
  Peptide Sequence Number=SeqID_126289
gaagaactacggcgtcaagacagacgccgaggtgctcgacatgatcgacacggcggcgcgacagaagcagctcaaggtggtggccaagctgtactggggcgacgccatcgcagagcttctccctggcgtcgccccagtacagcttggccaccaccttgagctgcttct

SEQ ID NO: 60316 - DNA, 279 bp, Setaria italica
  Peptide Sequence Number=SeqID_126290
ttaaaagtaaaaagtaaacggggtaaactaaaaggtaactaaaactaagtaaaggttaaggtacggtttaaaggtaagtaattaaggttaggtaggttagtgaagactctcagcccaaaaaggggcagggagagaagactggaacagaagagagcgcatggtgtcgttcgtggtacgaatcatgcgttcagccttaccgttctgggaggaggtatagggacacgacatgcgtaagtgcacgccgtgagagaggaagaaggcacgtgaggtggtgttatc

SEQ ID NO: 60317 - DNA, 189 bp, Setaria italica
  Peptide Sequence Number=SeqID_126291
cttccacctccgaccctcgatctctcctccctgtttcccactgacccggtggaccagccaccgctaccattctgtcctgcaggtactgctccaccgtggttctcctcgggctcgacgtccaccggtactgtccctgaccctgcgcccagcacgggttcgacggtgccggcctctggtgctgcttcttcc

SEQ ID NO: 60318 - DNA, 252 bp, Setaria italica
  Peptide Sequence Number=SeqID_126292
ggtccggttgggtaaggaaggagaaggagtgcgtggattgtgggaggaggtggaatgggtgtgcggagggaacctcactgcaccagttggttctgtgttacagatactgcttttcaatgtgaggtatttgaggatgcggtcatagtcgattggcgccaatgcttatcagagccagatggatcttaccaccactttgagtgggctattgggacagatgaaggagaatctgatatctttggctttgaagattgg

SEQ ID NO: 60319 - DNA, 249 bp, Setaria italica
  Peptide Sequence Number=SeqID_126293
taataaatgcacgtctgcctgagactgcataataaggtggattgtgttgcacacatacaatgaaattgtggacttctcatgtaatttcatacttccagactctaagtcaagtagcctaaggcattctgaagaacacaaataataagagggctgaaagctggagtgccttcaaactggcctgatttaagaagaataaagtttagacgtagtagtagactacttaggtaatttagtaacaaagttagttaa

SEQ ID NO: 60320 - DNA, 464 bp, Setaria italica
  misc_feature (1)..(56): n is a, c, g, or t
  Peptide Sequence Number=SeqID_126294
nnnnnnnnnnnnnnnnnnnnnnnnnnnnnnnnnnnnnnnnnnnnnnnnnnnnnnnncttacaaatccagtgtccagcacagaattcttcaaaaaactgaaggcgaaattgccctcaagtcctcaatagtcaatacaggtggcggaattggcctcgatacagggtacagacatacaacatacagtgaaacctcaacctatgctatacacgtctttggccggatacatgaggagaatttgtaataaataaataaatattgttggggatgatttgatgctggtattcatgtaggtcagttcctcttcaaagcctgattgccactggaggctcaactgtcaactggagctaatcacatgcgacgaacgtgcctgatgggcgtactctacagccccatgcccaatgtagtgttttgaattttacaacaatagaaataaactactttaggaataaaaagttagactagaa

SEQ ID NO: 60321 - DNA, 266 bp, Setaria italica
  Peptide Sequence Number=SeqID_126295
gacatatccacacgcaaaggctaaatttccaaaggtttgtcctttgtatttctactcttgacaattgaaataatctgcaaagcatactagatcagttaggtgagtaaataaatacgacgcagaatttcattattatgtaagaaaaagggcaaaccataggattatgaagtctacttgtagctgataagaccatgaaatcctaatgagtagttgaagatgttcaagcctttaagttctaatgacaactaaatgggaagtacactcaa

SEQ ID NO: 60322 - DNA, 238 bp, Setaria italica
  Peptide Sequence Number=SeqID_126296
gctccacctgtcccacgttgcccgtggccatccagcacgctgacggatgcccatttgtgagtctcttcagcttgaggagaattccaatgactcatatggaataccttttgctatatggttgtggcctctcgcagcaccgccaagatccaatcccctctgtcggaaacccaatccaatcttcacggagccatcaccccggaactagtcacagccatcaccatccagcaagcagtccgaa

SEQ ID NO: 60323 - DNA, 204 bp, Setaria italica
  Peptide Sequence Number=SeqID_126297
cttaatgcagtaagcgattagctcattgctgagagaaccttctacgctgaagcttattttggaatttggatacagacattgaatagtactacaaatgatttgtatctcatcaaacaaatacaattttctctagtatttgtaaaatatggaaattgcagacttcaagaaatgcaagagacattacaaggtacatacattcttctc

SEQ ID NO: 60324 - DNA, 208 bp, Setaria italica
  Peptide Sequence Number=SeqID_126298
tctaagcaaatcagaacatactgttctttgcagttcagaaagcatgtttatgttgtattcatcaatgtcagttttcagaactctgatactatatcgtgcggttcacaggaaaagctccgaaagacaggaccaagaggcctcgtccgaagcttagcacgtccctctttggtcagccttctgaatctatcgcagacgttgagaccaaaag

SEQ ID NO: 60325 - DNA, 246 bp, Setaria italica
  Peptide Sequence Number=SeqID_126299
tcctcgtccgaagcttagcacgtccctctttggtcagccttctgaatctatcgcatttgtcctatggagagaagatgagtcccagatttggtggaactcgttaggggtgggagtcagctcctgcactagttttcttgaaaggaccaggcacaaagcctgttgtacaccatggaacttttagcaagtcagagttcacagagatgatggaggagcacaagcaccatgaactgcgacagctaagaagtg

SEQ ID NO: 60326 - DNA, 265 bp, Setaria italica
  Peptide Sequence Number=SeqID_126300
ccggtgcttcactcgcaacaccttcttcttcgcccctcttcttcctcttcctcgacatcgtatgccaggagctcagcttgatctgtggggacgatgccggaggggtgcttggacagatccaccggctggctgccctcgagccccggctccgccatccgaatcgcgcgcaagggacgccgcggaacccgcgccgatccggggccaaatccggggccgaaatgggcgggaaggagcgcgcagatcgcggcttcgaggcggggtttcg

SEQ ID NO: 60327 - DNA, 166 bp, Setaria italica
  Peptide Sequence Number=SeqID_126301
ctttgctctttttagtatccatcaagtgtttgagcatcaatgacaacaaagtccaccttcccagcagaaaattggtagtttcttgatccaaattctttttcataccgactctgttcattcaggctgaatatatgcttaaatcgaaataatgattccctgagacacg

SEQ ID NO: 60328 - DNA, 279 bp, Setaria italica
  Peptide Sequence Number=SeqID_126302
tgtctttcccatgcaggccccaagtacaaactgggtgcgtgtaatggaatatcttgatcatgatggcttcaatatacctgatgaagcagccttttatctattgatgtctatatatgcgcgtgcctgcaaggtatgcatataaacatttctattttggaaaatcaactatttgactgataaattgattggattttgtacaggatccctttccgcttcatgctgtttgtgggtcattgtggaagaatgcagcaggccagatatctttttaaagcaatgcgg

SEQ ID NO: 60329 - DNA, 497 bp, Setaria italica
  Peptide Sequence Number=SeqID_126303
caaagggtgatgtggagactttaaaaatattgcaccaaggaagtgatcgagcgctgcaaaggagagagacaagcgtatgcatcacagggcatatttttcgatcacaagatcctgcacatttcagaagctgatgtattggaaacaaaatcagttagagaaaaggacgggtctcgttgccgaatttccctgaatgtcaccgcagctgtggtttcttcaagcaaagattcgttcaaatcttgaattttctgaactactggattgtcacttgtctcccatctttctcggacatcctcagctacctcttgtcccttggttacaacaggcttggtatattcatccactctcttatagactggatgacctcggatcttatccttaaatgcttcccatttttcaccctagcaccgacttctttgttggcgtaataactaaatcggttcttgtactcttttctactttagctagaagcatgtctagcttgatgtttcttctttctg

SEQ ID NO: 60330 - DNA, 336 bp, Setaria italica
  Peptide Sequence Number=SeqID_126304
taaggtattactaagtagtccttctaacttttagtcttaagtctagggtattattgtaaattcattcaaggaagagtttaagctctacctctagcagaaagaagaaacatcaagctagacatgcttctgctaaagtagaaaagagtacaagaaccgatttagttattacgccaacaaagaagtcggtgctgggtgaaaaatgggaagcattttaaggataagatccgaggtcatccagtctataagagagtggatgaatataccaagcctgttgtaaccaagggacaagaggtagctgaggatgtccgagaaagatgggagacaagtgacaatcca

SEQ ID NO: 60331 - DNA, 230 bp, Setaria italica
  Peptide Sequence Number=SeqID_126305
tggaggagtacggcgggaaggtggcgagggccatcgccacgggcgccgagcacctggccaaggggatactctggtgcggggaggtgacggtggacaggctccgttggggaaatgaggtcctcaggaagaggatgcagcctggcgacgccaacgccgaggtcagccccgagatgctcaggcggatcaaaaggtaatgcctgtccctgttgtttccatatcaaatgtccttc

SEQ ID NO: 60332 - DNA, 246 bp, Setaria italica
  Peptide Sequence Number=SeqID_126306
gttgtacagggaagatctgtgacgccgtagaagtgtctgggaagaatgttctgtccacatcatcaactgtgacgaccgggctcgtatctcacaagtactgtgctattctctaccgcaaattcatttcctacaatcaagaatagcaagcacttccaaccttatcgactctgaatctgtgttgtgcaggtacggtgacaaagctgccgctgcaaccaacgaagggctggacgccgccggccacgccag

SEQ ID NO: 60333 - DNA, 244 bp, Setaria italica
  Peptide Sequence Number=SeqID_126307
cgaggagggaggagatgaggtggagggatgtggtctgggcgtgggcgcggcggccgggagaacctcgagttcaacttccgctggacccgccgcagcctcgccgtcgtcgggctgttcggcctcgccgtccccatcctcgtctacaagggcatcgtccgcgaattccatatgcaggacgaggacgctggccggccgtaccgctgagacacgcaacaggggaaaggcaaggcacacaggggatagg

SEQ ID NO: 60334 - DNA, 281 bp, Setaria italica
  Peptide Sequence Number=SeqID_126308
gccatcttctttggaagtagcagcatcaagctccttgactgcttttgactcacttcctgacaagcgagcagcacgcgatataaaatatggaggaagctcgccaagtgcagtcccaatgccccaaagaactgcttccagctgtatctgaggtagcaagtcgaagagcttgatgctgctacttccaaagaagatggccgagtagcatccactcttaatcgaaccaagctttggcttctttctcacgctcaacatctgaacttcttctctatcttgttaccagc

SEQ ID NO: 60335 - DNA, 453 bp, Setaria italica
  misc_feature (431)..(453): n is a, c, g, or t
  Peptide Sequence Number=SeqID_126309
aagtaaactaagggaaccgaaagaaagtaacaaacaaaggtagaatcgccgccgcggccgagcagggctacaccggggccaagtacctcccggccatccccaccgagcgcatcgccaaggtgttcgcgtcgtcgccggaggccgaggcccagtagtgtgtttatgccgttagcgcattaccatcaccctgatgatgggttaagctctggattgccctcgaactgaaacttgaataagaaagtgagaacccgggggcttaagtttggtggtaatgttgtactagatatggtggtgggacgttgtcacggaccatgatgatgtagtccactagcgctctgctttgtgtggtgctctgctttctctgcctttgtataaaagtcggtcgatgtcgcaatctttggctaatccgatgcgattaggttatctaactnnnnnnnnnnnnnnnnnnnnnnn

SEQ ID NO: 60336 - DNA, 410 bp, Setaria italica
  Peptide Sequence Number=SeqID_126310
catctgcaaacacaggcacaactctttgtgctaatgttttcccttgccccagaggcaataacggctttgtgcacctttgaaccataaaagcctttgcctccaaatgccggaaggagagaaggatggatatttaatatggaccttggatattcctggatcaattcagctggtataagcttcaagtaaccagcaagaagaacaaagtctacaccgtatcccctcagcgtatccagcagttcagcgaccgaaatcccctcgggcgcagacttggacttggggaacacaacgacaggaatgccattgctcctggcgtgctctgcacctccgcagcctggcttgtcggtgacaagcgcgacgacatccccgtgcaccgtcccgcccagcgcagcctcgtttgtattcgtcccggt

SEQ ID NO: 60337 - DNA, 252 bp, Setaria italica
  Peptide Sequence Number=SeqID_126311
cctatcccctgtgtgccttgcctacccctgttgcgtgtctcagcggctttgtgcacctttgaaccataaaagcctttgcctccaaatgccggaaggagagaaggatggatatttaatatggaccttggatattcctggatcaattcagctggtataagcttaaagtaaccagcaagaagaacaaagtctacaccgtatcccctcagcgtatccagcagttcagcgaccgaaatcccctcgggcgcagacttg

SEQ ID NO: 60338 - DNA, 473 bp, Setaria italica
  Peptide Sequence Number=SeqID_126312
cagaatttgaaaaagatgaagcgcaacagcaaaattggaaaagaaattgtttctgccatcaagaagggtggcccaagcccttcatccaacacagctttagcagcaatattggagaaagctagggaacttgatatccccaaagaaattttggagcgtaacatcaaaagggcatcagaaaaggaccaagatacttacacagaaaaggtttatgaggtatgatcgtggaggtccttactgacaaaattacaagatcggttgctgacattagaaatgtggtaaaagactgtggagcaaaattggctgatcctgggtctgttacctttagattcagacaagctcgagtggtgaatataaaagttactgatgctggtaaggaccaactgctctccattgcgttagatgctggtgctgacgatgtccttgaaccaatttgatgatgatgatgactctagaagaagaaatagaaaggttct

SEQ ID NO: 60339 - DNA, 222 bp, Setaria italica
  Peptide Sequence Number=SeqID_126313
gttgtcaggcgacaacggatgcgctgccgaatgttcagctccatcacaacaacagggaggccagcacgacggagcacgcggcggctgtccagcgtgagcagggagaagggcacgctgtcgacgacggtgtccgcgacgcgggacctggccttgccggtgtcgagggagacgtcgttcgcccttggtcgtacctacggttgtacgtccgttcctttgtccgta

SEQ ID NO: 60340 - DNA, 250 bp, Setaria italica
  Peptide Sequence Number=SeqID_126314
gggggagggaaagggggaaggcaggcggaaagggggaggcagcggcagcagcagtcgaaggggggaggaaatgttttttgtggggggggagggaagagcagatcgagtttataagagagaaggtaaccgaggagggtaaacgtgaggatcttgaagaaaggaaaagctccagaacaggtggtccttgacgaggcagcctttctaatggatttagcatgtgtggatggtaactgggatgatgtggtggatc

SEQ ID NO: 60341 - DNA, 277 bp, Setaria italica
  Peptide Sequence Number=SeqID_126315
ccggtcagcagggcagccttcgcgtccgtgctgctggggcgccgcgccgtcggggcgtcgctggtagccgcccgctgcgcctcctcggccgcctcccccgccgccgcagttactgcctacggtgaaaaagaattagtttactacctaggaagcgaagagagggttgattccggtcgttgttccattatcggaaagtccagcaggtaacttgacatccctacttagatggccaactgctccaactgggatggaaatgcctgtggtggaagttggtaag

SEQ ID NO: 60342 - DNA, 249 bp, Setaria italica
  Peptide Sequence Number=SeqID_126316
cggtacatctgaagccaaagattcagctcgtgtggctttgaagtcaccatggtggacactaggctgcagttatgaactttttgatgagacaggaggctgctgaattagctgggtgggaggatgagcagatcgagtttataagagagaaggtaaccgaggagggtaaacgtgaggatctgaagaaaggaaaagctccagaacaggtggtccttgacgaggcagcctttctaatggatttagcatgtgtgg

SEQ ID NO: 60343 - DNA, 231 bp, Setaria italica
  Peptide Sequence Number=SeqID_126317
tccgatgtaaaacaagtgtgccggcaatgacagtttctctgtactctgtaagcccttcaggaacgagatctgatatgagcttagcaaaaccaacatcaccaattttgcttacataattcttgttcagctcgtgtggctttgaagtcaccatggtggacactaggctgcagttatgaagaggctgctgaattagctgggtgggaggatgagcagatcgagtttataagagag

SEQ ID NO: 60344 - DNA, 202 bp, Setaria italica
  Peptide Sequence Number=SeqID_126318
accgccaaagcaatcacttccatcagcctcgcttgcagcaagagcgtgatcaagtgattgctttggcggtagtaccttgactggaattggatcaagcatgaagaaaaattcgcagaacaggcgagagctgctaaagctgaagaagcagagagatcagtcttcagctttatcaacagccatctagtgaaccttcaggcatatc

SEQ ID NO: 60345 - DNA, 405 bp, Setaria italica
  misc_feature (1)..(1): n is a, c, g, or t
  misc_feature (5)..(5): n is a, c, g, or t
  Peptide Sequence Number=SeqID_126319
ngggnggggggggggacgggctgacatcatttcacaacatagcaacaatatcagacactaagtcaaccaaattagggttcctgatcattcctgaggtttgttgtccaatacacattgcttggcagaataagcaaaccattctaaaatagcatgcattaacaatctaacatgcaacaagccaatgaagccaggcaatctgagaacttttgttgccaacaaatagcagaaggatctgtgtttccagaatggaatttctattcttgatagtatacttacaagttacaacagccatcatcccaagcatatcaaactcatagttttttatctgaaaaagccatatgggattgccatttgaaatccaatctattgggacagtggatgattggaattatattttaatttttt

SEQ ID NO: 60346 - DNA, 188 bp, Setaria italica
  Peptide Sequence Number=SeqID_126320
agatcacagaccgggaatccttggtttcagaactttctgtgatagcaggacatcagcaactgaaggcacaccagcacccaaaagagcgcaatcagcagatagaagaagaccgtcaacaccttcaactcctacctctagggtgtcaacaccctcaacacctacgccaaggtccattacaccagttcgtg

SEQ ID NO: 60347 - DNA, 440 bp, Setaria italica
  Peptide Sequence Number=SeqID_126321
ccttacgtgcttaactgcctagtacaggctacagctcagtagctcactcgtgcaaatggcgcacaagctcccgtccactctcatcgccgccttcgccgtcctcctggccctcgcggcgccgctggtcgtcgtcgccggggaccccgacatgctccaggacatctgcgtcgccgactaccattccctcaagggccagggcggagaacgtgacggcgcacgacttctcctccggcctgctggcgaagcccggcaacaccaccgacaacgcggcggggtcggcggtgacggcggcgaacgtggagatggtcccggggctcaacaccctgggcgtgtccatggcgcgcatcgacttcgcgccgtggggcgtcaacccgccgcacacccacccgcgcgccaccgagatcatcttcgtgctccgcggctccctccacgtcggcttc

SEQ ID NO: 60348 - DNA, 260 bp, Setaria italica
  Peptide Sequence Number=SeqID_126322
tagtactaatatatgcaccggtcgtttagagaggtcaagcaatgtcatcccgtcaaaaatactcaacagttttatctggtgatttggtagctatcttcggttttggtgcaacataaggtgcttctacaggaggttgtgttctattttctctcttcactcgcttctcctttttaggagctttcagccctacaacgtcctcctttttccgactccatgctaacatataaactcctgcatgaaaattcctagcagcatgattg

SEQ ID NO: 60349 - DNA, 323 bp, Setaria italica
  misc_feature (123)..(123): n is a, c, g, or t
  Peptide Sequence Number=SeqID_126323
tgtcaatacatttagtacaggactaatctcaattctaatttggtgccctcatgttggaactcttcaggcttaatgtatggtacggtgaagatattccagttggtggaatcatttcgtacctcngtttagactattacatgattcacatcatgttatacaggaacaatccatcgtttggctctcagacgggctgagatgtattctggagggttagctatgttttctgtaaggtagagtatcttgacacaaaataaggatacttcaaatacttggtaatgtatcatctgaaatacagcacggtcacttctcacaacttctaaact

SEQ ID NO: 60350 - DNA, 355 bp, Setaria italica
  Peptide Sequence Number=SeqID_126324
aggaaagtgctgcaagagtttgaggactggattggaaatcacagcctgtggaaaacggagcaaggaggatcactcaacagtgcagcatttgttacttgtggaaattgggatttgaagacgaagatccctgagcagtgcaaggtttcaaaaataaagctaccaacttattttatggaatggattaatttgaaggatatctacctcaacttctatagcagaaggagtaactcttacgaaaaaataattggtgcatgtatatgataacatcaataccgaggtcccatgtatatgctaacatggagtatataatgacatgattaattagataataagtggagttctattttccttggtc

SEQ ID NO: 60351 - DNA, 270 bp, Setaria italica
  Peptide Sequence Number=SeqID_126325
ttgttgtaacgtaactatactatttggtaattttgggtattggtcgtcttggtcttagggtttccgtccgttctttccgtctagtcccgtccttccttccccttccttcccttgtcttcctaattccttcctccgccctttctcctcctcggcctctcccctccgcagttcccgccggagaagctctcccattgcggccgccttctcccacgctgtgagggaggggcaggtgatggaggcgcccattcccatctccaggcggccctggaa

SEQ ID NO: 60352 - DNA, 213 bp, Setaria italica
  Peptide Sequence Number=SeqID_126326
gttttctgcagctcttccttcctagcttgggccatctcgaggcgcttctgcagctgcagcctgtaggaccggatcctcctctcctcgtagccggacagcacccttctctctcctccaaacttcctcccccttcctcgccgcctttgccctcccatccctcttccggttccgccatggcccagcccgccttcctctcctcgctccgctcccgca

SEQ ID NO: 60353 - DNA, 176 bp, Setaria italica
  Peptide Sequence Number=SeqID_126327
ttgaacttaagaaattaagtaaagtaaaattaggaaccttaacaagacttacctaaaagaaagaaacttcaagttttgattcaagcagcatgacttgatggcttcttgtggcagtgattctactaattattcaatcatgtaccataaattacatgacctgcatttgcaagaagatg

SEQ ID NO: 60354 - DNA, 398 bp, Setaria italica
  misc_feature (394)..(394): n is a, c, g, or t
  Peptide Sequence Number=SeqID_126328
gtcttcctattcttgttctaattggttgtaaaaacgtaattcgtccttaggagcgtggaagatgctggtgatgccgtggggcaggatgaggaagatggtggtagcatggcggcggatgctttgctaactctggtgaactcggagggccaagcggctgggagtcagaataatgctgaacatgccgtttccaaaataactgaccaccatcgtgtccttagtgccatgattgaaattgttgatcctgaattcaaaaaaacaaatgtctagaagtggcggtggaaatgatgaaccaatgtctgatgccgagacggatgaaggcagcgaggaagttgatacagatgatgacagcgaggagcctatggttgaggattctggttgggtaaggttaaaaggngtcg

SEQ ID NO: 60355 - DNA, 383 bp, Setaria italica
  Peptide Sequence Number=SeqID_126329
agacggagggcaggtgatgaaggaaaaacaaaaataaaggaaaaccggaactaacaacggaccttactacaaaggggatgaccacatgggccaggtgggtcgactccaacgtcgacacctccaaaacaaaggtctatttccagggcatctccccgacccactacaacggagccgagtggggcgagggctcaaggaactgcgcgcagcagacgcagccgatcgcggggtccgcgtacccggcgggtcccgtcccggcgcaggccgcagtgagggccgcgctcagcggcatgtccaagccggtgtacctgctcgacgtgacgctgctgtcgcagctcaggcgggactgccacccgtccgcctacagcggcggacacccggggcaa

SEQ ID NO: 60356 - DNA, 328 bp, Setaria italica
  Peptide Sequence Number=SeqID_126330
tctcccttccactaaggttgggacaatagaagttacccttctactacaattactttttgactcattgtctgcctcacagtgtaaacaagtttccaacttcccacctaaagacatatcttctatctttaggagaatgctaaaatatcaaggatacaagcaactgagcacagctctggtttagttggaaatgaatcacggtcttgcaatgacacttcaacatcgccctgtgcttcctctgggcaagggagaggaaagttatttacatgatgaacctttgtcaccaagcagagcccttcgtgcagcaatgctcaggagtcgttttgcgggg

SEQ ID NO: 60357 - DNA, 337 bp, Setaria italica
  Peptide Sequence Number=SeqID_126331
aacggggaactaaattaagtagaaaggactacaaacaagaaaggcaacttctggatcatgggaagaatatagactctgtgaaattgcaactggaaaaaagagaggctggaaaaaaaggcagcaagaagagaaagcaaggattgaggcccaggtgaaggctgctgaagctgctgcacaacgaaagcttgaggaagaaattaggatgaagagagagcaggaaagggaggcagcacgcctggcactacgcatgatgaagaagaccgttgacatcgacaacagtgacttcctaaaggagctggagaacttcagcaaaacgtgccagtcaaactccccctgg

SEQ ID NO: 60358 - DNA, 342 bp, Setaria italica
  misc_feature (334)..(334): n is a, c, g, or t
  Peptide Sequence Number=SeqID_126332
agtaagacttagactacaagaattacaacttagacaaaagaaagaacaactgaacagatgcgatatcttccaaagtgaaaattaaattttctgtgcgcagctctgagcagacctcttccaaagatatacctgttcaagcacctggtagcaaagagggatccttgaatcactctctcccaactggctacagagaggcatctttaaatcgttctctcccttccactaaggagaatgctaaaatatcaaggatacaagcaactgagcacagctctggtttagtggaaatgaatcacggtcttgcaatgacacttcaacatccgccctgtgctttccnctgggcaa

SEQ ID NO: 60359 - DNA, 247 bp, Setaria italica
  Peptide Sequence Number=SeqID_126333
cgaatatacctgttcaagcacctggtagcaaagagggatccttgaatcactctctcccaactggctacagagaggcatctttaaatcgttctctcccttccactaaggaaatgaatcacggtcttgcaatgacacttcaacatcgccctgtgcttcctctgggcaaggagaggaaagttatttacatgatgaacctttgtcaccaagcagagcccttcgtgcagcaatgctcaggagtcgttttgcg

SEQ ID NO: 60360 - DNA, 420 bp, Setaria italica
  misc_feature (295)..(295): n is a, c, g, or t
  Peptide Sequence Number=SeqID_126334
taaaactaaaagaagacaataatagacgaagaataacaatacaattaaagtttagaagaaaactagaaaccaaaggcctccaaccgttccgcttcgaatgccctgtttcatggaagcttcacatttttgagtgtatgatgtaattactctcttctctgcacagaaagatgctacggtacgaatacttccaattgcctcagttacgacttgacttgcatcttcactcaccaccttagcatcttcactgaaccctttcaagaatttcacttgaatataattttgtgagccgactacnggaatcacacatatgacgatcagtgtgagtttccagtcagaagcaaatgctatggaaaaacccgctattactgttactatgcactgcactagtatggccaagttatctccacgaggcgtcggatg

SEQ ID NO: 60361 - DNA, 321 bp, Setaria italica
  Peptide Sequence Number=SeqID_126335
cagcactaccgtcggcgagatatgaactcatgagcattggctgccttggcggcagcaataatctcctcctcatttacttctccttgttttccgtatgctatgttggcgtgaattgtgtcgttgaaaagcacaggttcttggctcaccaatcccatttggtctcttaaccaactcagtttagttttttgagctctgctccatctagtgagattgtgccagaatctggatcgtagaatcgctccaagcaaaagacaaattaattagttagaacttaaccaactaaccaactactactaccaaacaaagtagacaaacaagtag

SEQ ID NO: 60362 - DNA, 238 bp, Setaria italica
  Peptide Sequence Number=SeqID_126336
tatgcatctctgacggagaaccccttgatgatgggcaactggaagccttgctcgagatatgagttcacatagggtacaaacaagtttttcagtaaaattcgcagcacagtcactgacatgcaggcaactggaactatcttgccaaaatccaaaacattaactgtgacatctaagtcaactgtggcatcaattctgcccacactaatcctcacagagggaggtgaagttgcagaaatta

SEQ ID NO: 60363 - DNA, 144 bp, Setaria italica
  Peptide Sequence Number=SeqID_126337
aaggcgacatcgcagctaacaatcatttttgtagtaagaagtgaggatatatgcatctctgacggagaaccccttgatgatgggcaactggaagcctgaactagaacagtgtggagtttgccaactttgctccaacttcaatgt

SEQ ID NO: 60364 - DNA, 163 bp, Setaria italica
  Peptide Sequence Number=SeqID_126338
ttttttttttttctaaaattgtaactacttaattttcctaattggtaaattttctagtaattagtcgttcgtcttgacagcataaagcacacagcacgcatagcatagggaacgacatcaggttctcaagtagggagcaggaagacgcaatacccacccttta

SEQ ID NO: 60365 - DNA, 253 bp, Setaria italica
  Peptide Sequence Number=SeqID_126339
gattgggtttggttagaactatagcctttttggaggcaaaattgagtcttggcctcttgtttggcttggaggaggccgaggaagttgccgccaatggagccgccaagtgggttctgggcctccctcttgagcttcctcaagttcctgccctactcttgcggtctcctcatcctgggcttcatcaaaggtgccatgctgctctgctgtcttgcctcatttttggtgcacttccttttgttctcactctctctga

SEQ ID NO: 60366 - DNA, 300 bp, Setaria italica
  Peptide Sequence Number=SeqID_126340
agaccaaggtaaggaaggttaggtagttacaactagacactggcaatgatggggatgtacttgcttgcataagttgggtcaagtagactcaagctgcggccactccagccttttgttggactagatgccaccaatgcgacaagtacagctactactgcaaaacaaacagctctgcaggaaggatcttgcaatcagcatttggagatttatagcagattcacttagaaaaatttagtcagataatattctgatgactagatgtttgtggttacaaggtccaaagataagctagatggctaa

SEQ ID NO: 60367 - DNA, 460 bp, Setaria italica
  Peptide Sequence Number=SeqID_126341
gaatacaccacctcctatgcgaaccatccaaagaaacttattgatatcatcactagggtagccaacaagccctccgaagacaacaagcacatatttgacatctaaagaattgaagatttcccaagctgctttttccggggatgacattgctgtaccaactgttgctatgtgagtgttgttccaggtattattgtctacaatcacagttctgttggccattgcagttgtttggtaaccatagtcccaccaggaagcaacctagagtaaaacatcttactgcaagtataaaaaaccagtccaagaaacaatagaagccaaggggtgagcataccttgtcgtcaacatctgtgttatggctcagccatgcataagcttcacggaaatcatcaaaaacaatgcaactccatcacgtgaacgagatgtcagcacgattgaaggtgcggagtacgcttcagctgct

SEQ ID NO: 60368 - DNA, 205 bp, Setaria italica
  Peptide Sequence Number=SeqID_126342
agggtagccaacaagccctccgaagacaacaagcacatatttgacatctaaagaattgaagatttcccaagctgctttttccggggatgacattgctgtaccaactgttgctatgtgagtgttgttccaggtattattgtctacaatcacagttctgttgctgagacacgcaacagggggtaggcaaggcacacagggggatagg

SEQ ID NO: 60369 - DNA, 235 bp, Setaria italica
  Peptide Sequence Number=SeqID_126343
tctgtatatcatttgcatacaagtcagagaattgaattatgttaaaagaaagcaaaatggaaaacacatctcaaggaccattacctttacatacagataaaatgtaaatatcaaggcaaatattgccacagcttcattatcatagctgcctgcaacagatcttgagatatatgaggggaccattgccaaaatggctgctgccattaatccagctcctgtgccctttgcttccttt

SEQ ID NO: 60370 - DNA, 329 bp, Setaria italica
  misc_feature (323)..(323): n is a, c, g, or t
  Peptide Sequence Number=SeqID_126344
ccagaaaatacactgcagtgactaagtacaagaccatgaaggagcttgcgtcagacaaaggcaagaagcatgaaataatcccagcaggaatcaggaaggccaacacattgatgtccataaaataagagggccaggtaggaggttggtgttcactgacactggcaatgatggggatgtacttgcttgcataagttgggtcaagtagactcaagctgcggaccaactaccaagaccttttagttaggaactaagaatagaaccaaaccaaaataagaacgaaacaaaagtaaacaaagaactaaactaaactaagaaacaaaaanaaaaca

SEQ ID NO: 60371 - DNA, 148 bp, Setaria italica
  Peptide Sequence Number=SeqID_126345
tagcaaagcttgtacatggaggcaattcagcatagtaggagtggcttgagcatcaacacggtactggccatccctaaggataatctcattatcatagctgcctgcaacagatcttgagatatatgaggggacctgtgaatacctcctc

SEQ ID NO: 60372 - DNA, 153 bp, Setaria italica
  Peptide Sequence Number=SeqID_126346
ttattgatatcatcactagggtagccaacaagccctccgaagacaacaagcacatatttgacatctaaagaattgaagatttcccaagctgctttttccggggatgacattgctgtaccaacttgtcgtcaacatctgtgttatggctcagcc

SEQ ID NO: 60373 - DNA, 422 bp, Setaria italica
  Peptide Sequence Number=SeqID_126347
ccggctctcccctcattctccaccgctgccgccgtgccgcctcatctcgatctccgactcctcgccggcggcggtgccgcgctgggatccctgtacggcggaagcgtcggcggtggcggtgccagcgattgaatccaataaggtgcttccacaaaagcaactgcgtgccatgtgtggggagcacagttgaagcaacaaatcaaccactgacagagagtgactaaatgaagctaatgtaccaagtattttttcaacaaaagaactcttaactagaactgtgctttccagaagtccaatttgccaagcgaagttggaccttaagccccttgtaagctagtgaagtctatctagcaataaattcaaggaaaacactccacgagagcactaatggcgaatgaatcatggaagattcctaatgttag

SEQ ID NO: 60374 - DNA, 258 bp, Setaria italica
  misc_feature (28)..(28): n is a, c, g, or t
  Peptide Sequence Number=SeqID_126348
gttctgaaattccaacattgcattcaanatttttggatttgcttgcttccactatttaaaaggaatgcgcagctcactcgtaccacatgctggtactgtcgtaatgctcatagctgagtacttcaaaaaagcaaaacttgcctgcattaagaagaaaactctacaccattgtgcagttattgctgagttccatgggtgtcggtatggctgtgcaattatttcaggtggtcgtcagcaattattttttgtctgatctgg

SEQ ID NO: 60375 - DNA, 247 bp, Setaria italica
  Peptide Sequence Number=SeqID_126349
ctcaaatatgcatagttcgtgagagtagacataggaaggctatactggccacttcactgttgacttgtccagcacctacttagaacacctcacaaagctaatgcgattcaggttccatcttctccacctgctctaagggcaaacgacaatctcagcatgatgcactcaaagtttatctgctgcaagctctacatttctgaaagcctcaacgctatggctattgatgcaattgaacttgtcgtcttgt

SEQ ID NO: 60376 - DNA, 223 bp, Setaria italica
  Peptide Sequence Number=SeqID_126350
ttcagccataaacctcgaattgcactcaggagcgcatcctaggatgggtgtcaatgatgatctgtccttccaccccttgggtcaagccacaatggaggatgcagcttccttggctaagcaggtggcttctgacataggcaatggttttcaaggtatgttaaatgtgataggcaacaataaaaatcagccacacaaatatcttgacccttctgcccaattttgt

SEQ ID NO: 60377 - DNA, 243 bp, Setaria italica
  Peptide Sequence Number=SeqID_126351
ctgaaagcacaccaggcagctggtcatgttattaaatcaacctcgcaggttgatgctttgcccataacactgccaccagggaaatgactcgaggataacgacgagcttccaagaactaataatgtccgcagccttcccaacctgtatttgctcttcagctgtggtaaataatcagttgagacagataggtgacgaactgttggtggaatcacaacagggatgtcctcattaattttcatgcaa

SEQ ID NO: 60378 - DNA, 345 bp, Setaria italica
  Peptide Sequence Number=SeqID_126352
ggaagggataacagaggttgagtcacagggaactgctaatgaccctgacattgagcttagcagcatgcaaagacctgttgatctttacaagatgaaattcttaataatcaaccagtggatccactgaagacaagtgaaggcgccaacatggcactcaatcggcttgttgctgaggatttcctagaatcattgggtaaagaactgggattagaggttccaccggaaagacctaatgttttatctagaccagaaacacttgcagctgctggtgcaagtggctcacctcagtatgaaagaataacaactgctctcgcagaagtaaaggagagtcagagctcttttggc

SEQ ID NO: 60379 - DNA, 313 bp, Setaria italica
  Peptide Sequence Number=SeqID_126353
aaaggatcatgaagattattcatgaatatatgactatacaaatgagggatgacacagggaagagctatggttttgcaaaccatggaagtttgttgaacactgggggagatcggaaaaaaaagctcacattgaatgtccatattactacgcaccacagaaatatcaagctttattgtttatgccagtttttgcacctttccagctcggtgaccaccctatcagatgttcagactcacagatgacacaagcatgtattgagctttcctttgaagatcatcccagaatttagaatagtaccaatagtaaaatagta

SEQ ID NO: 60380 - DNA, 216 bp, Setaria italica
  Peptide Sequence Number=SeqID_126354
tcagctgaaacaaataagaactgcacttgcaattgcgtctttgttaaaacggacactggcttgatagaatgtggtttggacatcctggagttatggaaggaacaatgaccagacaaccttttctctgcccaatggatcatgtgtttgaggtgcatgttatgctaaaggacttccccaaggaagagtttggcccgcacattgatttcagagagtact

SEQ ID NO: 60381 - DNA, 425 bp, Setaria italica
  misc_feature (425)..(425): n is a, c, g, or t
  Peptide Sequence Number=SeqID_126355
ttaatactgactgttgttctgtagtttgctttaagagttattggtgaagatactggttttgtttccggaatgtgacaattagtttggttaatagacctgttttcacccttgaattttaaggttaagaaggacttcagcagtgatgttggttctgcaatggaggcaatccattccttgtctgcttcagaatcaagatatgcaacagctgatctcacacagctcttcaagatagcttgccaggaagggaaaatggcagaatcgcaaggccggcttctcagggtggtactcatctactgccgttcctctactaagcctcaccatcagtggcctgtaaaaaccaaacaatttcaccctggacataatctatctccatgacaagccaactgctgataactgtccacagaaagtatatgatgccttggttn

SEQ ID NO: 60382 - DNA, 293 bp, Setaria italica
  Peptide Sequence Number=SeqID_126356
acattttggtcaacgagtctgctttgcagttcaattttcatgtacaaaacattcgcgagcaataacccagccatatctggagttctactccaccgaaaactagggcttacccattagaatccccaagggaggttggggaaaacaccgatctcgcacaggaacttgatcctcttttcctcctcagtccgtttcgctgcttcttttcgattattggagctgtattggaggggatctagagggggaagggagcagtagagaggaggaggtgtgctgggggaagagattgttacgta

SEQ ID NO: 60383 - DNA, 338 bp, Setaria italica
  Peptide Sequence Number=SeqID_126357
aactggtgaggtggggtaatttggactcgggcggtggatagatcatagatcacacggaatgtttctcgtgaaagtctgttgaaggaaacagcttcactcatggtgtcgtgcatctaactttgttgctgctgcttttcaggacgaactagaacgattccatttgattatattgcttttcaccagttcggcccattaaggacagccaacaatgagatagacatcaaagcactcccccaacccctagaccaggctattccttgtctttttacaggtaatatctgatcagcaaacgtgcaataacatcagtttgtttggtcctttgtaaaccttctagtcta

SEQ ID NO: 60384 - DNA, 188 bp, Setaria italica
  Peptide Sequence Number=SeqID_126358
aaggaagaaggcgagttcctgcagaagctcaagcggctggacgcgtaccccaaggtgaacgaggacttctacaagcggacgctctccggcggcgttgtcacgctcgtcgccgccgtcgtcatgctgctgctcttcatctcgtagcctttctcctcttgatgtgtccaccactaacttagtctctgttg

SEQ ID NO: 60385 - DNA, 151 bp, Setaria italica
  Peptide Sequence Number=SeqID_126359
cgcgtaccccaaggtgaacgaggacttctacaagcggacgctctccggcggcgttgtcacgctcgtcgccgccgtcgtcatgctgctgctcttcatctccgagaccagatcatatttttatccaccactaacttagtctctgttgctgaat

SEQ ID NO: 60386 - DNA, 253 bp, Setaria italica
  Peptide Sequence Number=SeqID_126360
caaaaccccaaacctggtgtattggacgaacatttccatctctaaagtgctccgtcactgagaactagttagtggtggacacatcaagaggagaaaggctacgagtaaaactttgatgttacttttccgagtatcccttgcactctcctcagcgttgatacgacagatattagtggagagcagcatcatgacattaggcatgacattgaagaaaagaagattagattcacaggtaatgttatgaagcaaaagg

SEQ ID NO: 60387 - DNA, 241 bp, Setaria italica
  Peptide Sequence Number=SeqID_126361
atgagctataaataaattcatataggcgcctgcttgcctgcttcttctggtggtgctcgtggaacgcgaagccggcagcgcccagcgccgccaccgccgccgcctcctccttcacccggtgcccgtgcgcgttctcggggtccttcttcgccttgtgcttctcgtgaatggcgtaggcgccggcggcgatggcgccgagcccgccgagctgctccaggtgcttgtggtgcttctctcctct

SEQ ID NO: 60388 - DNA, 499 bp, Setaria italica
  Peptide Sequence Number=SeqID_126362
atcagaaacgtttagaatctgatccatgccagatttttagttgcaacacctggtagactgctggatcacattgaaaacaaatcatcattctctgtccgcttgatgggattgaaattgcttgtgttggatgaagctgatcatttgctagatttgggtttccgtaaagatatagaaaagattgctgatagcttgccacgtcaaaggcaaacattgctcttttcagctactattccaaaagaggttcgaagggtttcacagctagtattaaagagggaccacgtttttgtggatacagtgggcctgggagctgttgaaaccccaactaaggtttcctactttctcttcaatatacgcctctctttaccatcctgataaaatatttaatatttaatatacgcctctctttaccaatattacacttatttggttcttaacctattttgtaattatttattactactatttttctttacctttttagggtaaactattgtagtct

SEQ ID NO: 60389 - DNA, 417 bp, Setaria italica
  Peptide Sequence Number=SeqID_126363
aactaagcttaggttcagcagtcgtgtcttgtggtaccacatgagctgcatttcatatggttcatcacctacttcgagagcatattgatcgtgaagttgattacaaggttattgttttctgcacaacagccatggtgactgaatttatgtatatcatgcttcgtgatttgaagttaaatgtcagatgtttctactcgttgggtgaattatccagatgtcacccttgtgattcaggttggtgctcctcctgatagagagcattatatccatcgacttggaaggactggaagggaaggtaaatctggtgaaggaattattttgcttgcgccatgggaagagtatttcatgaatgagataggtgatcttccaattgagaagtatccagcaccagacattgatcaggagatgaaacagaag

SEQ ID NO: 60390 - DNA, 304 bp, Setaria italica
  Peptide Sequence Number=SeqID_126364
gtcgggatagaagtagatcgcccagtcgaatccccccacggagaaggactcggaggcgatgtacttccccacgccgatacccttggagagggagtagccgtcgatcttgaagtggtgcgacccgttcaccgtcttggtcaccgacgtggacgccgtctcggaggggccgaggaaggggaggcggagggttccgccccgagcggcagcgattcggcacggatcggacggatcggggcggggcgcgccggattccgacgcggcggcgtggggattcggggtgcgggggagatcgatttgggggtaa

SEQ ID NO: 60391 - DNA, 272 bp, Setaria italica
  Peptide Sequence Number=SeqID_126365
ctagaaaattgaaaccctatttgaagccttaacaaattataatcaaacttatgtgctcatgaaaactgtgatgcatgcagcatgcctgacatatcgctgcattcatcagcaccaaactaagaaattggatgtaacatgcggcaaaggtgcctaatcctgaaaacagtgtaatatataaccagttgttgatgcatcataggccttcttcctaattcttcctaattattagtttgttttatttgttcctttaatttatttttcctttaagttta

SEQ ID NO: 60392 - DNA, 269 bp, Setaria italica
  Peptide Sequence Number=SeqID_126366
aaagaaaaacaaaaggaaactaacctacttactaagtactacaatctgggcagccattagattcttggtttcacgcgtcttccattggcatcgccaccatcaaggacttcagttgaatacaagcagggagtgacagcgtgctctcctaccttggccacatactcgagaagctcggtcagaagagatgggcagctttgctgcaaataatcaaaacccatcggtttgcatgacagctttcaaattctcaggcagagccacgaatttcaagc

SEQ ID NO: 60393 - DNA, 211 bp, Setaria italica
  misc_feature (200)..(200): n is a, c, g, or t
  Peptide Sequence Number=SeqID_126367
ctgccaggcagcgcatcgccgccgactcgccgagcacgacacccgcctggatcctcccgccccgtgcgccccaccggccgccactcgcctctcgggagcatggaggattccaacttgagaggtttggtgggtgaggaaattgtcatggagacaggcaaggctgcaggcattggtttagctgctggcagtgtgtggggtcncacttattttc

SEQ ID NO: 60394 - DNA, 208 bp, Setaria italica
  Peptide Sequence Number=SeqID_126368
tgtaataccacaaccatcatcttccacttttacataacatgctctgatgtttattgcaatgtcaatcttgctcgcattcgcatcaatgctgttatatatcaactcctcaacaacccttggcaggtcagacagaacaatgcttgaacgcagggagctatggacactcttcggcaagcgctttatggtctgcatttactcatactgggaa

SEQ ID NO: 60395 - DNA, 187 bp, Setaria italica
  Peptide Sequence Number=SeqID_126369
gtgctgtggggcaccagcgcatgcggcttcgtctgcacgctccggctacgccagctccggcagcggggatacacgccgctcaaaggtccgtgtacatgtgacacggtgatcgatcgatcggtcgccgtcgagtccatcctgcttgatgattgcttgcatgatcgatgcatgcacatgaatgcctttc

SEQ ID NO: 60396 - DNA, 248 bp, Setaria italica
  Peptide Sequence Number=SeqID_126370
aactgtttttgttcacgtatggttccactgcgcgtgcagtgctggagcagcggctggtgctgtacatatccactgatacttcattcccattaactacaatttcttcttggaggagggttaaggtgggaaacgggaatgcttgcgaccgaaggctttgcctcgaacctcttccttttacctctgcgtggtggttgctcagacgacgtgcatgcgggattcttatatgtaatagccaataagcgtacgtg

SEQ ID NO: 60397 - DNA, 406 bp, Setaria italica
  Peptide Sequence Number=SeqID_126371
ttgtccagctgttcttcaagttctcacagttctgcacttcatcccctgtcagaacttggcatttattggtgccctgcttttcttcctgggaatgaagaactctattccaagaaggcgctccaaaggaaggacagcaaaaaccaagacaaattaaagtcggcaattgtaggatgggaggctattaagctccttatgtttgcatactatacagaagtagatgccccacttttgttcttggtgcgccaattgagttgtgaattgggggggacttacagaacttagcatgtaggatatttaagttgtcttgcacaattctattttgtatgtcgccatgtgttttttatgtcatgatacattttgctacaagaactgctttggcagtgaaaaatcgaagttacatagtgtc

SEQ ID NO: 60398 - DNA, 359 bp, Setaria italica
  misc_feature (333)..(333): n is a, c, g, or t
  Peptide Sequence Number=SeqID_126372
aaccaattaatacaagtacaatcagatttatgtatggcgtagtaactagggtggaattgtttttattctgatggtagaatgattatgtgtgtattctttcacttgtgtagttctatagctgttttagaattcctgactcatttagtatgatgcaaaattttgatgttgttcatctatgcagtttatttacttggcatttataacccctattgtgtacgacttctacaattatgaaatggagtcagcacaatttgtccagctgttcttcaagttctcacaggtttgtggcctgctaccgtgctgcttaacttacaaaagattaatttcaaactnttcccacagtagttgttaattgtaac

SEQ ID NO: 60399 - DNA, 255 bp, Setaria italica
  Peptide Sequence Number=SeqID_126373
gtcggctcccaagaatgaaaccagcaagaactcgacctctctcgtcttaccttgcaacctgcatcacgcaacttgcacctcgcggccgctcgctcgcagatcgacgacggcaggcggaggaagggagaggccggattcaagcggcgattcagccgcgccgcagcgagatcggtgcgcgtccgcgagccgcggaaacggagggagggaggtggcaacaaaactgaggaggagcaggtcgtcctaagacacgcaacg

SEQ ID NO: 60400 - DNA, 208 bp, Setaria italica
  Peptide Sequence Number=SeqID_126374
tagagccactcaggtactaccacaacataacatcaaatacactgacagtgcttgaagcaatggcggcacataatgtaaatactctgatttactcgagtacttgtgcaacatatggtgaacctgatacgatgcctattgtagaaacaactcctcagtatcttaagatcatgacagccatgtttgatttctttgactttgtgaaatctaa

SEQ ID NO: 60401 - DNA, 423 bp, Setaria italica
  Peptide Sequence Number=SeqID_126375
ttagttactaattactaattacgtaattacttagttttcttgtctagttttttgagctaagctgcactcttctacttgatccaaatgcccatggggtgaagtgcccaaatcaggttgcttcaacaatgactcggagaggggttcgcttctaggtgggtgttctatcacagaagtgagactatgccttgcgacagaactgttagagtacaagggggcacatttgttgagatgatcaacaagctccttattgcttggggaatactcatacagcacgcggtctacttctggggctgaccgccaactaaaagaatgctcatttttgcagtaccactaatatttcaaccttgttgcatggcttcctttttgttcccaccaaaagcaataagagcaatcttgtccctgtggtagaaaggaaccatgctg

SEQ ID NO: 60402 - DNA, 365 bp, Setaria italica
  Peptide Sequence Number=SeqID_126376
tctttgcttgccaatgctgccacaagctggtcttcaagcatggcgtttcttcgtatcaaatccgctatctttgtgttgtatagatgactctggctcacgtctgaagagcatctagcgatccttcttacatttgatcccccagtcaccatagttcctacctgtgccatgtcattctgaataccagctccagtccttgtgctccgatgccctttcggctgtaagacaatctatcatgcaacgaaccacataatatgtttgtcaagtgactagtgggtgcagtacttacagtgctttcttgacaggaagaagagtcatcaccatcatcatatctgtcatcatcgatctgtttctgtctagtttttgag

SEQ ID NO: 60403 - DNA, 227 bp, Setaria italica
  Peptide Sequence Number=SeqID_126377
aatgcataccaaaaatactagaggacaagtagaaatataactgataatgttatacaggtaaattttcttcttgaaggaatgaccatatcagtaacttcggttttgagaaccgcacaacagcagtgatttacaagaactataccagacaatgacctttacaggctggcaacttcgcagaatgtccgtttggtgatgggcggactttaggtggtgcaggatcccagata

SEQ ID NO: 60404 - DNA, 245 bp, Setaria italica
  Peptide Sequence Number=SeqID_126378
tccttgcaatctctgtctaactggagtgaactttgctgagttgttcattttgcagggtgaccaagtagatgaattccagccactctgtgaagtacagagtgacaaagcaactattgagataacaagtcgtttcaagggaaaagtacatcagattcactttggccctggtgacatagtgaagataatatatttccatccgctgataagtcacttgaagaagagcctgcagttccttcaagtgaagg

SEQ ID NO: 60405 - DNA, 241 bp, Setaria italica
  Peptide Sequence Number=SeqID_126379
gcggcggcggaggcggcggagctggtggaggtgccactggcgcagactggggaagggcatcgccgagtgcgagctgctgcgctggttcgtgaacgagggtgaccaagtagatgaattccagccactctgtgaagtacagagtgacaaagcaactattgagataacaagtcgtttcaagggaaaagtacatcagattcactttggccctggtgacatagtgaagataatatatttccatccg

SEQ ID NO: 60406 - DNA, 237 bp, Setaria italica
  Peptide Sequence Number=SeqID_126380
caacaggctaagcgctgcagatattgaagatggcaccataacacttagcaacataggcgccattggtggcaagttcggctctccacttctgaacctgcctgaagttgccatcattgccctcgggcgcattcagaagcttcctcgctttgatgatgacgaaaacgtttacccttcatccataatcaatgtatgcttgttgcaatacgtgtttcaccaaacctctaagcctgcattatt

SEQ ID NO: 60407 - DNA, 199 bp, Setaria italica
  Peptide Sequence Number=SeqID_126381
cgcatcaggtatcttactggatcatcggcatatgcagcaagagcagctctggctcctccacgaggcccttccactcattaccagaagataagttgaaatggaggcattccggcatcgcaacttcacaccgaaagactattgcgaattgcgagtcacttgcgttgtatacaaattaataatcagcgcagcttctcccctg

SEQ ID NO: 60408 - DNA, 452 bp, Setaria italica
  Peptide Sequence Number=SeqID_126382
caccatcccgaagcagttcaatgtcgagctgatcaacagcgcccgcgacaagaagcgtgtcctctcttccaaagcgtcgggcgagccgccgcttcttctcgcggcctcggtgcactgcgcgatgagggaggccatcagggccaccaggaaggagttctcggtctgcaccgggcctgagaactccgccgtcacgttccagatggacgtgccggcgacgatgcccgttgtcaaagagctctacggcctcgacgtcgtcgagcgatacctccagagcctgtcggccggcccatccaccgcataaccatagatccagcagactgcaagcgccttgcccgtgcaggaggttgataatcggtgtaaaataaaataaaataatggcatgtttcgctatgtgttgctctaatgtacagatgacagagaaatgccaagcagagagctgtgatcttgtgaat

SEQ ID NO: 60409 - DNA, 443 bp, Setaria italica
  Peptide Sequence Number=SeqID_126383
atttcactcagatcgaaggctcagtttgtccaaggagtggctcttcacgaacgaagactacgctacgaactctgacggcctggtcatccatgacagcacatggacgtacagatcccacggtggacaccattcccaagcagttcaacgttgagatgttcaacagcgcccgggacaagaagcgcgtcctgtcttcaaaaggtgaggcttttcccactgtttaatcacctcccaacattcttgataagaaccctgacataccgtggacttctttgtagcgtcgggcgagccgccgctggttctcgcggcctcggtgcactgcgcgatgagggaggcaatcagggcccgccaggaaggagttctcggtctgcacaggccccgcaaactccgcaaccaccttccagatggacgtcccggcgacgatgcccgtcgtcaaggagctctgc

SEQ ID NO: 60410 - DNA, 284 bp, Setaria italica
  Peptide Sequence Number=SeqID_126384
atatgaggttaatcttcgaccgactccaggcaaggtgtctatcatgaatgatggttccattgcagttgaggttggaggagttgagatagggcaagggctgtggactaaagtgaagcagatgacagcgtacgggttgggacagttgtgtcaggacggtggcgaatgcctccttgacaaggtacgggttatccaggccgacacattgagcatgatccagggagggttctacttggttgggtagtctacctactttcttgttaaacttaagttcttttgttttgtta

SEQ ID NO: 60411 - DNA, 414 bp, Setaria italica
  Peptide Sequence Number=SeqID_126385
agttaacaacgtagaccaaggtgaacatgagcgcgccgccgatcacgaagagcagcttccggccgtagcggtccatggcgaagcccgacgcgaggatgccgccgatgttcatgtgccaggtgacgatggcgagcatcatcggctctcacctcggcaacgggagcaagatgcccaagggttacgcggtggcggtgctgatcgcgacgttcgtgttctcggcgagcttcagctggtcgtgggcgcgctgtactggacggtccccggcgagatttacccggtggaggtgcggtcggcggggcagggcgcggcggtggcgctcaacctggggctcaacttcctgcaggcgcagttcttcctggcgatgctgtgctgcttcaggtacggcgcgttcctcttctacgcgtcgtggctggt

SEQ ID NO: 60412 - DNA, 238 bp, Setaria italica
  Peptide Sequence Number=SeqID_126386
ctcgcgacaaagtagctgctgatcacctcttatcctgtcaaacatacattggtatcgataaatagatcatggttcaggaagaaagttttcttctgaaacttgcagagaactgaatgcgctgaaagcaaatttggcactaggatggagcagcacatacgtgtccaagataagacgctcatatgcttctgggatttttacatcttggtaccgcatcccgtaggatagatccagttcgctt

SEQ ID NO: 60413 - DNA, 232 bp, Setaria italica
  Peptide Sequence Number=SeqID_126387
gctttcctagaatttagagctttaccagccttgagaatgaatggaactccctcccgtcttcacatgctggttggacaagagttattgttgaaaagccctttggaaaggatttggactctgcagaggaactgagtgccgaacttggaaagctgtttgaagaagaacaactctacagaattgaccactatttaggaaaagagctggttcaaaacttgctcgtgcttcgttttgc

SEQ ID NO: 60414 - DNA, 178 bp, Setaria italica
  Peptide Sequence Number=SeqID_126388
actagactagaatacaacctacttaatacgtagtaccaaagaataaagaacgactacaataatgcttctgggatttttacatcttggtaccgcatcccgtaggatagatccagttcgctttgttcagttgccatttccagtccaggtttcttgactgttaacttcatatacatggctt

SEQ ID NO: 60415 - DNA, 240 bp, Setaria italica
  Peptide Sequence Number=SeqID_126389
ggcaacacatctaaacatcgataatgacccagtgtggattaggaaaaggacaagaagatgacacaagaatctgcacacataaattgtgcatgttagaacatggcctaagggaacttatatttgacctttttcttcgaatatgtaggagaactgcatgtcattgcattaagataggagaaatgccaaatagccatacaatacacacacacccagacttgcccgtagggttttttaagttac

SEQ ID NO: 60416 - DNA, 242 bp, Setaria italica
  Peptide Sequence Number=SeqID_126390
ctggttgaagaagtgagactagtatggtagactctgagatatgagccatctgttggaggcaagaaacaatttggaaggttgtggagctatccaacccagttgatatttcatccatgaagagcgctttcgatggtcctactatcatttctcctgattgaagacaagttttcagacaggaaacaaagcatccacaattgaatgaagtaaatttagctacctatatagaccaattgagcctggga

SEQ ID NO: 60417 - DNA, 416 bp, Setaria italica
  Peptide Sequence Number=SeqID_126391
cagtaattacggtttttgtcattgatggtttgattgcgtacattcctaatgccaatttatcatttgctttttttctctcaagagtctctcaactctgcatacctttgttaaccatcaacccatcattgaactctgaacttggtgttgccatctgaccttttgccgtggcattatctgacaccaacaggctactcccctgatcgctgggttgtcagtggctgctgctgcaatgagtggaagatacatgattagaacatggcaagccttccgaacccgggcagcaatgccgcgagtgcgccggttctatcctggtggatttcagggggaaatgaacaggagagaggccgcgttgatccttggcgtaagggaacgtgctacaattggtactaagtattctaaggtaggtcttctactaa

SEQ ID NO: 60418 - DNA, 229 bp, Setaria italica
  Peptide Sequence Number=SeqID_126392
ccatatgattagaactggcgctattatgctgtagtgcaagattggcttcttgcactttacttagcagaacattttgtggatgttccataattccaagactagagctagttgatggacggaatctatttggtgccacaaggtgaaatatctcgtgctgaggctatgaacattgttgatgcaaacaagcaatacattggtcctaggagtggtgatgctgtcagaggtctaa

SEQ ID NO: 60419 - DNA, 259 bp, Setaria italica
  Peptide Sequence Number=SeqID_126393
aagaaccagtagaagagcgccctcccgttgcgctcgttcacggtgacgtacccggcgaactgcgacaccggcgggttcgccggctgcccggggaggagccgcacccggtcgccctcctgctcgctgtaacccactgcctctgcgttgcagcacaaggtctggaagaagaggaggagaatggcaacggtgagctgctgtctcttggacgaggacgaccggggatgaagacgacgcgctgccattgtgccatgcgagttag

SEQ ID NO: 60420 - DNA, 255 bp, Setaria italica
  Peptide Sequence Number=SeqID_126394
ttcttctccggcgacgtctgggcctcaaagaaccagtagaagagcgccctcccgttgcgctcgttcacggtgacgtacccggcgaactgcgacaccggcgggctcgccggctgcccggggaggaaccgcacccggtcgccctcctgctcgcctctagtagctgcgagcaccgccaccggcagcaatgagagagcaactaggatggtgaggagaggacgccggcgttggttcgccgcaggggaagagtccatggag

SEQ ID NO: 60421 - DNA, 344 bp, Setaria italica
  Peptide Sequence Number=SeqID_126395
taaaaaaccaaaaaaagaaaaaaataaaagaaaataacaaatagtaaatacttaggaagagttcgaagagagagttccagaagatctatgtccttacctcctggtgattatttcgtgtcctaatgactacacagtggaaggcactgttctgataccctgtcggacagcaaatcgagggaagtttccactgaatggtacctacttccaagcaaatgaggtttttgcagatcactcatctagtcgtcacccaataactatacctagggaatgcattgggatgctggatagagcatagtatacttcggttcatctatacactcaatcgcaagaggtcaaacaaggca

SEQ ID NO: 60422 - DNA, 242 bp, Setaria italica
  misc_feature (82)..(82): n is a, c, g, or t
  Peptide Sequence Number=SeqID_126396
cagcagcgtcggcgagatggacggctgttgtgcaggcgggaggcaccggtcgccgtgccggcacgcgccgatcttgaagtanaaggggcagttcacgcggtccttctccgtgccaaagatggaagccaggtgctcagccatggccgcctgattcctcctttacctgctcgattcgattcgtcgcctagaaatttcggagagcagcgccgccgtggtcggaggggaagcagagtacggacgcg

SEQ ID NO: 60423 - DNA, 250 bp, Setaria italica
  Peptide Sequence Number=SeqID_126397
ccaaggatagcaaattgccactcgaagatgtcttcctcgaggggcagggccatgaagtcgggggaggggttggactgcatctccttaacctcctgcaggatccgcttcaccgccgggttgctccgattgtacttcgccgtggcaatttgctatccttggccctcgagacagcgagtttgagggtggaatctaccacggcaggatccagctgccttctgactatccattcaagccaccttccttcatgctg

SEQ ID NO: 60424 - DNA, 244 bp, Setaria italica
  Peptide Sequence Number=SeqID_126398
gttttctctgtggctcgcttcaggcagatgagggttggtaacctcagctactgggggttcagcagtgttttctgcaacacccgactcagattgaggctcagtaaggtcactcgagactgacacagacccaccttcatccgccttgtctgcatgctcaccaaaagagtcagctgacaaggtaaattaggttaagaactacgtacgtttaggacccaattacggtaagaagacttaggggtaaaca

SEQ ID NO: 60425 - DNA, 239 bp, Setaria italica
  Peptide Sequence Number=SeqID_126399
attactttggcacgccgagcttccaaagcttttgtagcaatatcagatgacgtgattcctccctttgcgatgatgtaatgaggtttactgatgtcgctaaggctgaggaatttattgatgagacaagcattgatgctctagcagtttgcattggaaatgttcatggaaaatatccatcgagtggaccaaatctcaggcttgacttgctaaaggacctccgtggagaaccaagctaactc

SEQ ID NO: 60426 - DNA, 457 bp, Setaria italica
  Peptide Sequence Number=SeqID_126400
tgaggaaaatccggaacggtgaaagtctctatatagggaacatgaattatcaccacaagccattacgcaatgggaaatgggctgttacttacgaggtaaaacttgatatctgattccacaatgtttatgttctcatatgcctttcattgattgaaaagatgtcttgttcactacattgctgtagtgaacagtttgatactgggtatttggtctgtctgggtattgaacaacattagcaattaaatttatgttcctagtagggtctaaattgttcatgaaaccttgaaagcatgtataaagttgattcatggtaccttgatgtcaaatttacccaatcttttgtcctgtttaaagaaatctatgaaggattcatttactgtaaaacatatgaaataactgaattggttgtcgtcttactattgttagtttgttaatttaattttagttactttactta

SEQ ID NO: 60427 - DNA, 449 bp, Setaria italica
  Peptide Sequence Number=SeqID_126401
tatgaagctatttgcttctgagtggaatgttgtctggttcaaggtcttgcctgttgattttgaggattgaattctcttgtgagtttttcattcctcggatctgcgggatctcggaccaggcttcattcccctcagagatagcttcaaatgatatcgatctagcgccggggctattctaaatctgttctttattcttttgattttgatatatttgtgaggattttttgcatgagattcctggttgttcttggtgtggagcacagtactctctcctgactcctggatcttatctcgaactccactgtgccttctttgtctgttcgtttgttgcggatcgaggagaagcaagattggtgtaatgatggcctgctttgactcctctttcctctgcgctattcttgtcttaggtttgttctttgaaaagttttacaatacaattaaccttttaa

SEQ ID NO: 60428 - DNA, 365 bp, Setaria italica
  Peptide Sequence Number=SeqID_126402
ctagacattgaattcatctgcatcatttcctgcaaacaactcctggtcgtcaggccggcacacagtctcatcgggctccctggtgttgtttgcaggaaatgatgcagatgaattcaatgcagttctaaaacagcacataatcccaaaagtattgattaccacatgccgcttcaattcagggaggggacctgcctttattgaggagttgatgcaagtgataccgaattctcattatgttaaaaaggggaacatatgaactcaagaaaattgtggaatatgcacagaatagggacttcacctcacttattgttgtccacacaaatcgaagagaacctgatgcctactatcatggggttacctgatgg

SEQ ID NO: 60429 - DNA, 253 bp, Setaria italica
  Peptide Sequence Number=SeqID_126403
accagctacagctgccggattggtctccaaataacttcaccaagactgcaggatcctgtaccttcggaaggtcagtgagccctccctccctcagtacgtagcatttttcactctgttttctttgtagccatagtgcgcttgggaacctaatagagctgtcgactggctatgtgcttgcaaacaatggaaaaattagcttcaagtttatgtggaagcttaactgatgcttctctgctcgaacattaaaattctt

SEQ ID NO: 60430 - DNA, 404 bp, Setaria italica
  Peptide Sequence Number=SeqID_126404
tggctccgtcctaccactaaaacaagcatcagtagcagatgctcatcgattagtacattccaagtgagattaattcggctcagtttcgttaaacactgtaaaaaggtaaatttgagctactacagttctactggtatgatagtatcatgtgattgatttctaattcttcctgtggttgcttgcttggttgggatacttacagaaggagtcggagtcgtcaaattattcaggaggacgcatgcgtgaactctgagcagaatattaatgcttacatttgtacgaatgcgcagatggagatcaacaaagcgataatggaagagaacgaggcgtctgatgaagaggaagacgacgacagagagtatgatgaagaggatgatgaggcgggagaggatgacgagcaagcc

SEQ ID NO: 60431 - DNA, 373 bp, Setaria italica
  misc_feature (211)..(211): n is a, c, g, or t
  misc_feature (345)..(373): n is a, c, g, or t
  Peptide Sequence Number=SeqID_126405
gtggcggcgtggggttcggggaatgtggattcgacgggttacgaggcgatgtcggtggcggtggccaaggcggtggctctggatatggctccggttctggctatggctccggtggtggacactactaaactcagtttcagagccgactacagagtatatagttacaaatgtgtcatcggtgatgtgagtttgtctcgctgtttaaaaaacngcttatttgagtgtgtgtgtgtaacactaaaagcatgcttgacactatacatgtaatgctgtacctagcttgccgctttattatgtactttgcaaggcctaaggaataaaataaaaggatctgttggcttaggnnnnnnnnnnnnnnnnnnnnnnnnnnnnn

SEQ ID NO: 60432 - DNA, 260 bp, Setaria italica
  Peptide Sequence Number=SeqID_126406
caccgctgctggaccccgcaagctgggctatggtcccggaggaggtggtggtggcggtggtagtggcggaggtggtggctatgggggatcaggctatgggtccgggtccgggtacggtgagggcggtggcagtggaggtgctgccggtgggtatgggcatggtggtggcagcggaggcggcggtggtgagggcagtggtgctggtggctcgtgggtatgggtctggccaaggttctggctacggggctggaagtggtggt

SEQ ID NO: 60433 - DNA, 267 bp, Setaria italica
  Peptide Sequence Number=SeqID_126407
atcacatgtttgttgactttaataatgtgattcaggatgagaaggagttcttgaatcacatgtttgttgacttaataatgtgattcagaactccttctcatcctgaataacagtgttcactgccacattctccgtcaagtgcagacggtggtgtcagacacttcatgtttgttgacttaataatgtgattcaagaactccttctcatcctgaataacagtgttcactgccaccttatttcccattcaaattctgcccacatgttccg

SEQ ID NO: 60434 - DNA, 370 bp, Setaria italica
  Peptide Sequence Number=SeqID_126408
tttcctaaaaaataaggatgatacaaccgtgacacgctggccagttaactgcctcccttctgcttgagggtgatcttgtcccctaagctgagcgcaattccttgggtcttgctccttattctgatgtaaccactgagcttgcaatctagttgcttctcaatgctgatgttcaccaaagcatcctcgccaaaacacactctttgcataaagattagcagcgaggaaaccacattctccgtcaagtgcagacggtggtgtcagacacttcatgtttgttgaacttaaataaatagtgaattacaaagaaactaccttactacaatacctagaaataaacaagtagttacaactagaccaaccttaatttaca

SEQ ID NO: 60435 - DNA, 227 bp, Setaria italica
  Peptide Sequence Number=SeqID_126409
tgcccctcctgctcttcaggtggtagaaatcaataagatcatctggctgggcatgagagatctgtgcctttgccttcatctcctctgtctccctgaactgcttctcagcgagcattttggcaaagctctgtctgcatgactgcaaccaaatcttcctgacataatcaccacccacctaccactagctaccagcatggcctccctctcctctgccgccgtgaccgccc

SEQ ID NO: 60436 - DNA, 262 bp, Setaria italica
  misc_feature (31)..(31): n is a, c, g, or t
  Peptide Sequence Number=SeqID_126410
gttgatgaaaccttgatattggcacggatcngtttgctagactcaggagccaaggtgtagttctgagggcggtcaacaagtttaaggtctcccattgtagccaattccaagcacaagttctgaagtgtctcctttgtgcggttaatgacagtaacatcaagtacgatgtcataatggtgaaccgttacgaatgcttcagcataaacaggatcactgaacccaagtcaaattagaaagaaatagacggttagaagacttagta

SEQ ID NO: 60437 - DNA, 205 bp, Setaria italica
  Peptide Sequence Number=SeqID_126411
ggcccactccagcgtcgtcgccgacgtctcgctgccggcgccgaagatgtcaaagatgacggctttgagcacgtccatgtcgagcgggatttggaggctgccgtccctctgtatcttgagcagcacgtcgaggaggtcctcggcctcgccggcgccgccggcgctgtccatcatctccaggtgctcgctgatgatgccgtcgagg

SEQ ID NO: 60438 - DNA, 352 bp, Setaria italica
  misc_feature (121)..(121): n is a, c, g, or t
  Peptide Sequence Number=SeqID_126412
tgcggcctcatctgcaactgccatctttggaagctctgtgaacctgcaacctatatcttgctcgatgacccttacagctctagtttgctcatatgtgtatatcaaaattgcactgcctttnttccctgctcgtgcagttctcccagatctgtgaacaaataactctgaggtattttggaatctcataatgtaccacctgaatagatagggggggataacagttcttagtcaaaaactcgaaactatgcaaataaaacgagtcagttcctgggcattgaacaggtatgtgtgctaaaacaatactgacaacaataaataataacctacaaggttaacttaactaagaatacaa

SEQ ID NO: 60439 - DNA, 451 bp, Setaria italica
  Peptide Sequence Number=SeqID_126413
tctagtttgctcatatgtgtatatcaaaattgcactgccttcttccctgctcgtgcagttctcccagatctgtgaacaaataaactctgaggtatttggaatctcataatgtaccactagatcaacattgggtatgtctaatccacgagctgcaacatcagttgccacaaggatattgaagcgaccatcacgaaatcctgagagtgtcctctctctttgattctgtgaaatatccccatgtagcgcctgacatggataactccttcccataacatatgccaatctatctgcttctcgtttagtttgagtaaacacaatgcattttccaccattagcatgctctttaatcaacggaccaagaattgatggcttcccaaagttgtcagaaggacaaataggaagtaacaagaagaagaattaccttaccggtaaatttttaggtactagaaga

SEQ ID NO: 60440 - DNA, 166 bp, Setaria italica
  Peptide Sequence Number=SeqID_126414
aaaatataacacgaatggcatctcccaactcctagattttgatgtcgtttcctccatgagaagcagaagtttgcagcaccaatagctttaaccagttcatatggaggaaacgacatcaaaatataacacgaatggcatctcccaactcctagatttgatattcttc

SEQ ID NO: 60441 - DNA, 209 bp, Setaria italica
  Peptide Sequence Number=SeqID_126415
atagaagaggagagaggcaacacaagcggacacataaccaccatcgtgatccctgtgcttacttttatcatgacagctgcgatcacgttcacgcccacgatttccttccctgtccctcccttggttcttgtccagtgtcctatcgtgaatctagagagggacagggaaggaaatcgtgggcgtgaacgtgatccctgtgcttactttta

SEQ ID NO: 60442 - DNA, 405 bp, Setaria italica
  Peptide Sequence Number=SeqID_126416
actttatttcctttagttaagttccctggtaaggggatgggcaatttactaaatactataccagtttctcctccacattgcagtaatttgttcaacctttgtgatcaagacaaacaaatagcaacagcagttacaggaaataactaataaaagcaattgagtgatgagcaggtattccttacacacagaaaaaaaagagaatatcaaaaatctaggagttgggagatgccattcgtgttatattttgatgtcgtttcctccatgagaagcagaagtttgcagcaccaatagctttaacagttcatatgaattaactataaaacattgtactcaccatcagacctacgcatgaattaacaccctgcctgcagataagctgctttaagaaataaatatgatatatgc

SEQ ID NO: 60443 - DNA, 256 bp, Setaria italica
  misc_feature (32)..(32): n is a, c, g, or t
  Peptide Sequence Number=SeqID_126417
tagcttaacaaaattaatgccttcgtaaaacncttttgtgtatttgtgcaattcaagatagatatccatttgttgctccatggcactactaaccaagatcatccaccttcgtcattctgcaggtaggttcattccagggtgctacacactggcagtctcggaggaacttccggaagagtaccaggggatttgccaggacaacaacgtgcagtatgtgccgcccaagcgtgtctaaggggctcagtgtgttcacggc

SEQ ID NO: 60444 - DNA, 399 bp, Setaria italica
  Peptide Sequence Number=SeqID_126418
aaggaaatacagatacgaaacagagtccctgaaaacgtccaacactcaaatcactgaacagccgcggcccggcagctgggcggtggccgagtgcgggtggtcactcgacggggatcatgacctcgttggtgcgcagcggtgggagcgtgaagggcgggttgtaccgcgccagcacgaaggggcccttgacggtgtacccatccttctccagcgcggccctgagcccctccgccttctcccgcaccgtcttctccgcagccaccccgctgaacctcgccaccccgtacttcctctccggcacctcgcggatcaccacccgctcgtccgtcggccgcggcgctattccttccgtcctttggtcgttactttggtacggtctagtctaggtaacttgtctaa

SEQ ID NO: 60445 - DNA, 457 bp, Setaria italica
  Peptide Sequence Number=SeqID_126419
tacacttcagagaagaacttctcccaaatataccgatcttcctatgtcatctgagagaccaaatgctgatgcaagtgtgaatgatgaatctaccctaaatcctattgcagaaccaagtggaacagtattcacggatgaatctcagtttgagaacagatcagaaaatggaatgaatggattgtccaaatcatcaatcttttccagccgtcaatactctgagaaatcgtctccgccacttgagtatatgaaaatatcttttcaccccatgagtgcatttgagatgtcaaaactgaacctagatttctgtgatggcaatcttcatgagaactctgatgatatgatgttaccaacatttcagttgctgtcagagtcttccattccacagccaggcagtggttctgagtctgaagatgactacttttggagtcatacagttattcttcatacgatgatctaa

SEQ ID NO: 60446 - DNA, 265 bp, Setaria italica
  Peptide Sequence Number=SeqID_126420
aatgggattctaatgtgcctagtccattctgatccccaatatctgcaagtgaaatagttgacttcacaccagacaagttcatttgctcaaatcccgcgtagctagataaaggtactgtcgaggatcctatctgattagaatcgccatacaattcatgttcctccagtccaactccgtcttcttgatcccacacctcagaatttgaatattaaacgttggactttagtattctattcgttattgtaagtaattaacttgttattgt

SEQ ID NO: 60447 - DNA, 410 bp, Setaria italica
  misc_feature (400)..(400): n is a, c, g, or t
  Peptide Sequence Number=SeqID_126421
tacacttcagagaagaacttctcccaaatataccgatcttcctatgtcatctgagagaccaaatgctgatgcaagtgtgaatgatgaatctaccctaaatcctattgcagaaccaagtggaacagtattcacggatgaatctcagtttgagaacagatcagaaaatggaatgaatggattgtccaaatcatcaatcttttccagccgtcaatactctgagaaatcgtctccgccacttgagtatatgaaaatatcttttcaccccatgagtgcatttgagatgtcaaaactgaacctagatttctgtgatggcaatcttcatgagaactctgatgatatgatgttaccaacatttcagttgctgtcagagtcttccattccacagccaggcagtggttcngagtctgaag

SEQ ID NO: 60448 - DNA, 404 bp, Setaria italica
  Peptide Sequence Number=SeqID_126422
actacatggatgcacttaacacactggagtctgagacagaaactgaagctgaatctcaaactaaaatcaagtgatgccattaccttcctttaatgctgaagcacctcaagtggggcaactgatgacattgtttcacagcatcctgattcctctgttgccgattttactgacacatgtcaagattctaatatttcttgcacttctgaaagagcagttgatttcccccacttgtcaaatgcagattctcctgagatttcgcagctagagttttcagaatatacatctgtaactacgtataaagagtcatctgttgtcactaaaatccatgagagtagcatggaggtgcttgtggagatccttatgaaatttcagagccggaactgcaagtccatacagccatacct

SEQ ID NO: 60449 - DNA, 366 bp, Setaria italica
  Peptide Sequence Number=SeqID_126423
gagacagaaactgaagctgaatctcaactaaaaatcaagtgatgccattacctccttaatgctgaaggcacctcaagtgggggcaactgatgacattgtttcacagcatcctgattcctctgttgccgattttactgacacatgtcaagattctaatatttcttgcacttctgaaagagcagttgatttcccccacttgtcaaatgcagattctcctgagatttcgcagctagagttttcagaatatacatctgtaactacgtataaagagtcatctgttgtcactaaaatccatgagagtagcatggagggtgcttgtggagatccttatgaaatttcagagccggaactgcaagtccatacagc

SEQ ID NO: 60450 - DNA, 505 bp, Setaria italica
  Peptide Sequence Number=SeqID_126424
catggagtgagctcgtaatgaaccatcagagaataggtctgcaactcaagatgtcctacaaatacctctactacatctactggtgcaagtgaagtgtctaattcacagggtgagcctcttaaggaaccattggagaacagatttgcaacccaaggtattcctacaaatacatctactgcatctactgtagtaccgtctgttaaactctggacaaatgccgggctctttggacttgaaccatctaaacctccagtatttggtgcccaagatactccaagggaggatactccacctggtttttgaggtacctcaaccaagccattcaactgaattcacagaactacattgttcaaagcctattgaatcagcagttgtagatgttccgaatggaaacacatcaattaccagcagcttcgtgggaaagcttgttggcatccgtcctggttctacaaacctcaacggcacaggggcaaatcaatcaagacggaccaagaaataacctaga

SEQ ID NO: 60451 - DNA, 461 bp, Setaria italica
  Peptide Sequence Number=SeqID_126425
cgtgggaaagcttgttggcatccgtcctggttctacaaacctcaacggcacaggggcaaatcaatcagcggccagaatacctgaccaagttcatagtcgaactgatgggccctcagatttttcctcctcatccttcgagcataatagtatgattggcaagcagacttcaataagtgagcttctagaatctgaagaaagtgctgaaaattgcactgaaatgtactcaaccaacatgagaaatgacatgcatatggtgtctgcatcaagcttttcaagtattgcacaaagatttcttgctaatacacttcagagaagaacttctcccaaatataccgatcttcctatgtcatctgagagaccaaatgctgatgcaagtgtgaatgatgaatctaccctaaatcctattgcagaaccaagtggaacagtattcacggatgaatctcagtttgagaacagatcag

SEQ ID NO: 60452 - DNA, 473 bp, Setaria italica
  Peptide Sequence Number=SeqID_126426
tagaaaagtaaggtactcaaggaattaatcccggagagaagcatgaggaactaggtgattgtggtgtgtctgaagtgtctcagtcatggagtgagcctcgtaatgaaccatcagagaataggtctgcaactcaagatgttcctacaaatacctctactacatctactggtgcaagtgaagtgtctaattcacagggtgagcctcttaaggaaccattggagaacagatttgcaacccaaggtattcctacaaatacatctactgcatctactgtagtaccgtctgttaaactctggacaaatgccgggctctttggacttgaaccatctaaacctccagtatttggtgcccaagatactccaagggaggatactccacctggttttgtaggtacctcaaccaagccattcaactgaattcacagaactacattgttcaaagcctattgaatcagcagttgtagatgttccgaa

SEQ ID NO: 60453 - DNA, 399 bp, Setaria italica
  Peptide Sequence Number=SeqID_126427
accatttccaacgtggtgattgatgaggaagctttcgagatggcacctgctgctaaaagctcacctggtgatattgccaatgaatcatgggttgtttctgaaagtaggtctcaggattatcccggagagaagcatgaggaactaggtgattgtggtgtgtctgaagtgtctcagtcatggagtgagcctcgtaatgaaccatcagagaataggtctgcaactcaagatgttcctacaaatacctctactacatctactggtgcaagtgaagtgtctaattcacagggtgagcctcttaaggaaccattggagaacagatttgcaacccaaggtattcctacaaatacatctactgcatctactgtagtaccgtctgttaaactctggacaaatgccggg

SEQ ID NO: 60454 - DNA, 460 bp, Setaria italica
  Peptide Sequence Number=SeqID_126428
taccaaacgtggtgattgatgaggaagctttcgagatggcacctgctgctaaaagctcacctggtgatattgccaatgaatcatgggttgtttctgaaagtaggtctcaggattatcccggagagaagcatgaggaactaggtgattgtggtgtgtctgaagtgtctcagtcatggagtgagcctcgtaatgaaccatcagagaataggtctgcaactcaagatgttcctacaaatacctctactacatctactggtgcaagtgaagtgtctaaattcacagggtgagcctcttaaggaaccattggagaacagatttgcaacccaaggtattcctacaaatacatctactgcatctactgtagtaccgtctgttaaaactctggacaaaatgccgggctctttggacttgaaccatctaaacctccagtatttggtgcccaagatactccaagggagat

SEQ ID NO: 60455 - DNA, 383 bp, Setaria italica
  Peptide Sequence Number=SeqID_126429
tgacttcaataagtgagcttctagaatctgaagaaagtgctgaaaattgcactgaaatgtactcaaccaacatgagaaatgacatgcatatggtgtctgcatcaagcttttcaagtattgcacaaagatttcttgctaatacacttcagagaagaacttctcccaaatataccgatcttcctatgtcatctgagagaccaaatgctgatgcaagtgtgaatgatgaatctaccctaaatcctattgcagaaccaagtggaacagtattcacggatgaatctcagtttgagaacagatcagaaaatggaatgaatggattgtccaaatcatcaatcttttccagccgtcaatactctgagaatcgtctccgccacttgagtata

SEQ ID NO: 60456 - DNA, 447 bp, Setaria italica
  Peptide Sequence Number=SeqID_126430
ggttttgaggtacctcaaccaagccattcaactgaattcacagaactacattgttcaaagcctattgaatcagcagttgtagatgttccgaatggaaacacatcaattaccagcagcttcgtgggaaagcttgttggcatccgtcctggttctacaaacctcaacggcacaggggcaaatcaatcagcggccagaatacctgaccaagttcatagtcgaactgatgggccctcagatttttcctcctcatccttcgagcataatagtatgattggcaagcagacttcaataagtgagcttctagaatctgaagaaagtgctgaaaattgcactgaaatgtactcaaccaacatgagaaatgacatgcatatggtgtctgcatcaagcttttcaagtattgcacaaagatttcttgctaatacacttcagagaagaacttctcccaaa

SEQ ID NO: 60457 - DNA, 435 bp, Setaria italica
  Peptide Sequence Number=SeqID_126431
tcctcatccttcgagcataatagtatgattggcaagcagacttcaataagtgagcttctagaatctgaagaaagtgctgaaaattgcactgaaatgtactcaaccaacatgagaaatgacatgcatatggtgtctgcatcaagcttttcaagtattgcacaaagatttcttgctaatacacttcagagaagaacttctcccaaatataccgatcttcctatgtcatctgagagaccaaatgctgatgcaagtgtgaatgatgaatctaccctaaatcctattgcagaaccaagtggaacagtattcacggatgaatctcagtttgagaacagatcagaaaatggaatgaatggattgtccaaatcatcaatcttttccagccgtcaatactctgagaaatcgtctccgccacttgagtatatgaaaatatctttt

SEQ ID NO: 60458 - DNA, 431 bp, Setaria italica
  Peptide Sequence Number=SeqID_126432
atctactgtagtaccgtctgttaaactctggacaaatgccgggctctttggacttgaaccatctaaacctccagtatttggtgcccaagatactccaagggaggatactccacctggttttgaggtacctcaaccaagccattcaactgaattcacagaactacattgttcaaagcctattgaatcagcagttgtagatgttccgaatggaaacacatcaattaccagcagcttcgtgggaaagcttgttggcatccgtcctggttctacaaacctcaacggcacaggggcaaatcaatcagcggccagaatacctgaccaagttcatagtcgaactgatgggccctcagatttttcctcctcatccttcgagcataatagtatgattggcaagcagacttcaataagtgagcttctagaatctgaagaaa

SEQ ID NO: 60459 - DNA, 184 bp, Setaria italica
  Peptide Sequence Number=SeqID_126433
agaaaatagtacaagaatacaatttctaacatgatgtaaatctttctttattacttattttcatcagttgttctcactatcgtaaataaataataaagaaagatttacatcatgtagaaatgatctgacatttccacagccatagagacctaaggtagaatacgctaatatgaactaaaaagtc

SEQ ID NO: 60460 - DNA, 440 bp, Setaria italica
  Peptide Sequence Number=SeqID_126434
ggggcaaatcaatcagcggccagaatacctgaccaagttcatagtcgaactgatgggccctcagatttttcctcctcatccttcgagcataatagtatgattggcaagcagacttcaataagtgagcttctagaatctgaagaaagtgctgaaaattgcactgaaatgtactcaaccaacatgagaaatgacatgcatatggtgtctgcatcaagcttttcaagtattgcacaaagatttcttgctaatacacttcagagaagaacttctacccaaatataccgatcttcctatgtcatctgagagaccaaatgctgatgcaagtgtgaatgatgaatctaccctaaatcctattgcagaaccaagtggaacagtattcacggatgaatctcagtttgagaacagatcagaaaatggaatgaatggattgtccaaatcat

SEQ ID NO: 60461 - DNA, 352 bp, Setaria italica
  Peptide Sequence Number=SeqID_126435
ccaacatgagaaatgacatgcatatggtgtctgcatcaagctttttcaagtattgcacaaagattttcttgctaatacacttcagagaagaacttctcccaaatataccgatcttcctatgtcatctgagagaccaaatgctgatgcaagtgtgaatgatgaatctaccctaaatcctattgcagaaccaagtggaacagtattcacggatgaatctcagtttgagaacagatcagaaaatggaatgaatggattgtccaaatcatcaatcttttccagccgtcaatactctgagaaatcgtctccgccacttgagtatatgaaatatcttttcaccccattgtagttgtct

SEQ ID NO: 60462 - DNA, 443 bp, Setaria italica
  Peptide Sequence Number=SeqID_126436
aattcacagaactacattgttcaaagcctattgaatcagcagttgtagatgttccgaatggaaacacatcaattaccagcagcttcgtgggaaagcttgttggcatccgtcctggttctacaaacctcaacggcacaggggcaaatcaatcagcggccagaatacctgaccaagttcatagtcgaactgatgggccctcagatttttcctcctcatccttcgagcataatagtatgattggcaagcagacttcaataagtgagcttctagaatctgaagaaaagtgctgaaaattgcactgaaatgtactcaaccaacatgagaaatgacatgcatatggtgtctgcatcaagcttttcaagtattgcacaaagatttcttgctaatacacttcagagaagaacttctcccaaatataccgatcttccttattgtctattctt

SEQ ID NO: 60463 - DNA, 457 bp, Setaria italica
  Peptide Sequence Number=SeqID_126437
aactcaagatgttcctacaatacctctactacatctactggtgcaagtgaagtgtctaattcacagggtgagcctcttaaggaaccattggagaacagatttgcaacccaaggtattcctacaaatacatctactgcatctactgtagtaccgtctgttaaaactctggaccaaaatgccgggctctttggacttgaaccatctaaacctccagtatttggtgcccaagatactccaagggaggatactccacctggttttgaggtacctcaaccaagccattcaactgaattcacagaactacattgttcaaagcctattgaatcagcagttgtagatgttccgaatggaaacacatcaattaccagcagcttcgtgggaaagcttgttggcatccgtcctggttctacaaacctcaacggcacaggggcaaatcaatcagcggccagaatacctg

SEQ ID NO: 60464 - DNA, 465 bp, Setaria italica
  Peptide Sequence Number=SeqID_126438
tcaacgtggtgattgatgaggaagctttcgagatggcacctgctgctaaaagctcacctggtgatattgccaatgaatcatgggttgtttctgaaagtaggtctcaggattatcccggagagaagcatgaggaactaggtgattgtggtgtgtctgaagtgtctcagtcatggagtgagcctcgtaatgaaccatcagagaataggtctgcaactcaagatgttcctacaaatacctctactacatctactggtgcaagtgaagtgtctaattcacagggtgagcctcttaaggaaccattggagaacagatttgcaacccaaggtattcctacaaatacatctactgcatctactgtagtaccgtctgttaaactctggcaaatgccgggctctttggacttgaaccatctaaacctccagtatttggtgcccaagatactccaagggaggatactccacctgg

SEQ ID NO: 60465 - DNA, 395 bp, Setaria italica
  Peptide Sequence Number=SeqID_126439
cttactgaaagagcagttgattttcccccacttgtcaaatgcagattctcctgagatttcgcagctagagttttcagaatatacatctgtaactacgtataaagagtcatctgttgtcactaaaatccatgagagtagcatggagggtgcttgtggagatccttatgaaatttcagagccggaactgcaagtccatacagccatacctcccaatggaagatcccctgttcacaatcaaatacctgagagtaaggcagaagatggtcttggagacactcctgagattccagaaccagaggtcacctatatggttattccgtccaatgaagagtctgctgttgccaaccaaaaccttgaaagcaacgttagtaaaattacttggttgtattttactt

SEQ ID NO: 60466 - DNA, 396 bp, Setaria italica
  misc_feature (366)..(366): n is a, c, g, or t
  Peptide Sequence Number=SeqID_126440
ccccccaacttgtcaaatgcagattctcctgagatttcgcagctagagttttcagaatatacatctgtaactacgtataaagagtcatctgttgtcactaaaatccatgagagtagcatggagggtgcttgtggagatccttatgaaatttcagagccggaactgcaagtccatacagccatacctcccaatggaagatcccctgttcacaatcaaatacctgagagtaaggcagaagatggtcttggagacactcctgagattccagaaccagaggtcacctatatggttattccgtccaatgaagagtctgctgttgccaaccaaaaccttgaaagcaacgtagaaaatactggtgattttacngatgatgccactgatgatgttgtatccgga

SEQ ID NO: 60467 - DNA, 416 bp, Setaria italica
  Peptide Sequence Number=SeqID_126441
atctgtaactacgtataaagagtcatctgttgtcactaaaatccatgagagtagcatggagggtgcttgtggagatccttatgaaatttcagagccggaactgcaagtccatacagccatacctcccaatggaagatcccctgttcacaatcaaatacctgagagtaaggcagaagatggtcttggagacactcctgagattccagaaccagaggtcacctatatggttattccgtccaatgaagagtctgctgttgccaaccaaaaccttgaaagcaacgtagaaaatactggtgattttactgatgatgccactgatgatgttgtatccggacctaccatttccaacgtggtgattgatgaggaagctttcgagatggcacctgctgctaaaagctcacctggtgatattgcca

SEQ ID NO: 60468 - DNA, 402 bp, Setaria italica
  Peptide Sequence Number=SeqID_126442
ccatgagagtagcatggagggtgcttgtggagatccttatgaaatttcagagccggaactgcaagtccatacagccatacctcccaatggaagatcccctgttcacaatcaaatacctgagagtaaggcagaagatggtcttggagacactcctgagattccagaaccagaggtcacctatatggttattccgtccaatgaagagtctgctgttgccaaccaaaaccttgaaagcaacgtagaaaatactggtgattttactgatgatgccactgatgatgttgtatccggacctaccatttccaacgtggtgattgatgaggaagctttcgagatggcacctgctgctaaaagctcacctggtgatattgccaattgaaattacaattagggtttagttta

SEQ ID NO: 60469 - DNA, 403 bp, Setaria italica
  Peptide Sequence Number=SeqID_126443
attttactgatgatgcactgatgatgttgtatccggacctaccatttccaacgtggtgattgatgaggaagctttcgagatggcacctgctgctaaaagctcacctggtgatattgccaatgaatcatgggttgtttctgaaagtaggtctcaggattatcccggagagaagcatgaggaactaggtgattgtggtgtgtctgaagtgtctcagtcatggagtgagcctcgtaatgaaccatcagagaataggtctgcaactcaagatgttcctacaaatacctctactacatctactggtgcaagtgaagtgtctaattcacagggtgagcctcttaaggaaccattggagaacagatttgcaacccaaggtattcctacaaatacatctactgcatctact

SEQ ID NO: 60470 - DNA, 369 bp, Setaria italica
  Peptide Sequence Number=SeqID_126444
catgagagtagcatggagggtgcttgtggagatccttatgaaatttcagagccggaactgcaagtccatacagccatacctcccaatggaagatcccctgttcacaatcaaatacctgagagtaaggcagaagatggtcttggagacactcctgagattccagaaccagaggtcacctatatggttattccgtccaatgaagagtctgctgttgccaaccaaaaccttgaaagcaacgtagaaaatactggtgattttactgatgatgccactgatgatgttgtatccggacctaccatttccaacgtggtgattgatgaggaagctttcgagatggcacctgctgctaaaagctcacctggtgatatt

SEQ ID NO: 60471 - DNA, 360 bp, Setaria italica
  Peptide Sequence Number=SeqID_126445
aacccccaacttaagtaacaaaatagacaagaattctcctgagatttcgcagctagagttttcagaatatacatctgtaactacgtataaagagtcatctgttgtcactaaaatccatgagagtagcatggagggtgcttgtggagatccttatgaaatttcagagccggaactgcaagtccatacagccatacctcccaatggaagatcccctgttcacaatcaaatacctgagagtaaggcagaagatggtcttggagacactcctgagattccagaaccagaggtcacctatatggttattccgtccaatgaagagtctgctgttgccaaccaaaccttgaaagcaacgtagaaaat

SEQ ID NO: 60472 - DNA, 342 bp, Setaria italica
  Peptide Sequence Number=SeqID_126446
gttgccgattttactgacactatgtcaagattctaatatttcttgcacttctgaaagagcagttgatttcccccacttgtcaaatgcagattctcctgagatttcgcagctagagttttcagaatatacatctgtaactacgtataaagagtcatctgttgtcactaaaatccatgagagtagcatggagggtgcttgtggagatccttatgaaatttcagagccggaactgcaagtccatacagccatacctcccaatggaagatcccctgttcacaatcaaatacctgagagtaaggcagaagatggtctttggagactacttccttgtagtatttccta

SEQ ID NO: 60473 - DNA, 270 bp, Setaria italica
  misc_feature (233)..(233): n is a, c, g, or t
  Peptide Sequence Number=SeqID_126447
tggagatccttatgaaatttcagagccggaactgcaagtccatacagccatacctcccaatggaagatcccctgttcacaatcaaatacctgagagtaaggcagaagatggtcttggagacactcctgagattccagaaccagaggtcacctatatggttattccgtccaatgagagtctgctgttgccaaccaaaccttgaaagcaacgtagaaaatactggtgattttacngatgatgccactgatgatgttgtatccggacctacca

SEQ ID NO: 60474 - DNA, 396 bp, Setaria italica
  Peptide Sequence Number=SeqID_126448
ttactaaacctaaagtcctaatttctaaacttgaatttcacagaactacattgttcaaagcctattgaatcagcagttgtagatgttccgaatggaaacacatcaattaccagcagcttcgtgggaaagcttgttggcatccgtcctggttctacaaacctcaacggcacaggggcaaatcaatcagcggccagaatacctgaccaagttcatagtcgaactgatgggccctcagatttttcctcctcatccttcgagcataatagtatgattggcaagcagacttcaataagtgagcttctagaatctgaagaaagtgctgaaaattgcactgaaatgtactcaaccaacatgagaaatgacatgcatatggtgtctgcatcaagcttttcaagt

SEQ ID NO: 60475 - DNA, 388 bp, Setaria italica
  Peptide Sequence Number=SeqID_126449
ttctagaatactgaagaaagtagctgaaaattagcactgaaatgtaactcaaccaacatgagaaatgacatgcatatggtgtctgcatcaagcttttcaagtattgcacaaagatttcttgctaatacacttcagagaagaacttctcccaaatataccgatcttcctatgtcatctgagagaccaaatgctgatgcaagtgtgaatgatgaatctaccctaaatcctattgcagaaccaagtggaacagtattcacggatgaatctcagtttgagaacagatcagaaaatggaatgaatggattgtccaaatcatcaatcttttccagccgtcaatactctgagaaatcgtctccgccacttgagtatatgaaaatatcttttcacc

SEQ ID NO: 60476 - DNA, 349 bp, Setaria italica
  Peptide Sequence Number=SeqID_126450
aaatgtactcaaccaacatgagaaatgacatgcatatggtgtctgcatcaagcttttcaagtattgcacaaagatttcttgctaatacacttcagagaagaacttctcccaaatataccgatcttcctatgtcatctgagagaccaaatgctgatgcaagtgtgaatgatgaatctacccctaaatcctattgcagaaccaagtggaacagtattcacggatgaatctcagtttgagaacagatcagaaaatggaatgaatggattgtccaaatcatcaatcttttccagccgtcaatactctgagaaatcgtctccgccacttgagtatatgaaaatatcttttcacc

SEQ ID NO: 60477 - DNA, 435 bp, Setaria italica
  Peptide Sequence Number=SeqID_126451
cctccagtatttggtgcccaagatactccaagggaggatactccacctggttttgaggtacctcaaccaagccattcaactgaattcacagaactacattgttcaaagcctattgaatcagcagttgtagatgttccgaatggaaacacatcaattaccagcagcttcgtgggaaagcttgttggcatccgtcctggttctacaaacctcaacggcacaggggcaaatcaatcagcggccagaatacctgaccaagttcatagtcgaactgatgggccctcagatttttcctcctcatccttcgagcataatagtatgattggcaagcagacttcaataagtgagcttctagaatctgaagaaagtgctgaaaattgcactgaaatgtactcaaccaacatgagaaatgacatgcatatggtgtctgcatcaagc

SEQ ID NO: 60478 - DNA, 379 bp, Setaria italica
  Peptide Sequence Number=SeqID_126452
ggaaacacatcaattaccagcagcttcgtgggaaagcttgttggcatccgtcctggttctacaaacctcaacggcacagggcaaatcaatcagcggccagaatacctgaccaagttcatagtcgaactgatgggccctcagatttttcctcctcatccttcgagcataatagtatgattggcaagcagacttcaataagtgagcttctagaatcttgaagaaagtgctgaaaattgcactgaaatgtactcaaccaacatgagaaatgacatgcatatggtgtctgcatcaagcttttcaagtattgcacaaagatttcttgctaatacacttcagagaagaactttctcccaaattattaccgtattctttccttatt

SEQ ID NO: 60479 - DNA, 417 bp, Setaria italica
  Peptide Sequence Number=SeqID_126453
tgctgctaaaaagctcacctggtgatattgccaatgaatcatgggttgtttctgaaagtaggtctcaggattatcccggagagaagcatgaggaactaggtgattgtggtgtgtctgaagtgtctcagtcatggagtgagcctcgtaatgaaccatcagagaataggtctgcaactcaagatgttcctacaaatacctctactacatctactggtgcaagtgaagtgtctaattcacagggtgagcctcttaaggaaccattggagaacagatttgcaacccaaggtattcctacaaatacatctactgcatctactgtagtaccgtctgttaaactctggacaaatgccggctctttggacttgaaccatctaaacctccagtatttggtgcccaagatactccaagggaggatac

SEQ ID NO: 60480 - DNA, 384 bp, Setaria italica
  Peptide Sequence Number=SeqID_126454
tgattgatgaggaagctttcgagatggcacctgctgctaaaagctcacctggtgatattgccaatgaatcatgggttgtttctgaaagtaggtctcaggattatcccggagagaagcatgaggaactaggtgattgtggtgtgtctgaagtgtctcagtcatggagtgagcctcgtaatgaaccatcagagaataggtctgcaactcaagatgttcctaacaaatacctctactacatctactggtgcaagtgaagtgtctaattcacagggtgagcctcttaaggaaccattggagaacagatttgcaacccaaggtattcctacaaatacatctactgcatctactgtagtaccgtctgttaaactctggacaaatgccggg

SEQ ID NO: 60481 - DNA, 388 bp, Setaria italica
  Peptide Sequence Number=SeqID_126455
accatttccaacgtggtgattgatgaggaagctttcgagatggcacctgctgctaaagctcacctggtgatattgccaatgaatcatgggttgtttctgaaagtaggtctcaggattatcccggagagaagcatgaggaactaggtgattgtggtgtgtctgaagtgtctcagtcatggagtgagcctcgtaatgaaccatcagagaataggtctgcaactcaagatgttcctacaaatacctctactacatctactggtgcaagtgaagtgtctaattcacagggtgagcctcttaaggaaccattggagaacagatttgcaacccaaggtattcctacaaatacatctactgcatctactgtagtaccgtctgttaaaactctgga

SEQ ID NO: 60482 - DNA, 430 bp, Setaria italica
  Peptide Sequence Number=SeqID_126456
gagaagcatgaggaactaggtgattgtggtgtgtctgaagtgtctcagtcatggagtgagcctcgtaatgaaccatcagagaataggtctgcaactcaagatgttcctacaaatacctctactacatctactggtgcaagtgaagtgtctaattcacagggtgagcctcttaaggaaccattggagaacagatttgcaacccaaggtattcctacaaatacatctactgcatctactgtagtaccgtctgttaaactctggacaaatgccgggctctttggacttgaaccatctaaacctccagtatttggtgcccaagatactccaagggaggatactccacctggttttgaggtacctcaaccaagccattcaactgaattcacagaactacattgttcaaagcctattgaatcagcagttgtagatg

SEQ ID NO: 60483 - DNA, 413 bp, Setaria italica
  Peptide Sequence Number=SeqID_126457
ctactccaagggaggatactccacctggttttgaggtacctcaaccaagccattcaactgaattcacagaactacattgttcaaagcctattgaatcagcagttgtagatgttccgaatggaaacacatcaattaccagcagcttcgtgggaaagcttgttggcatccgtcctggttctacaaacctcaacggcacaggggcaaatcaatcagcggccagaatacctgaccaagttcatagtcgaactgatgggccctcagatttttcctcctcatccttcgagcataatagtatgattggcaagcagacttcaataagtgagcttctagaatctgaagaaagtgctgaaaattgcactgaaatgtactcaaccaacatgagaaatgacatgcatatggtgtctgcatcaagc

SEQ ID NO: 60484 - DNA, 417 bp, Setaria italica
  Peptide Sequence Number=SeqID_126458
aagttcatagtcgaactgatgggccctcagatttttcctcctcatccttcgagcataatagtatgattggcaagcagacttcaataagtgagcttctagaatctgaagaaagtgctgaaaattgcactgaaatgtactcaaccaacatgagaaatgacatgcatatggtgtctgcatcaagcttttcaagtattgcacaaagatttcttgctaatacacttcagagaagaacttctcccaaatataccgatcttcctatgtcatctgagagaccaaatgctgatgcaagtgtgaattgattgaatctaccctaaatcctattgcagaaccaagtggaacagtattcacggatgaatactacaagtttgaagaaacaagaatacaagaaaataggaatagaataggaattagtaccaa

SEQ ID NO: 60485 - DNA, 401 bp, Setaria italica
  Peptide Sequence Number=SeqID_126459
gtctaattcacagggtgagcctcttaaggaaccattggagaacagatttgcaacccaaggtattcctacaaatacatctactgcatctactgtagtaccgtctgttaaactctggacaaatgccgggctctttggacttgaaccatctaaacctccagtatttggtgcccaagatactccaagggaggatactccacctggttttgaggtacctcaaccaagccattcaactgaattcacagaactacattgttcaaagcctattgaatcagcagttgtagatgttccgaatggaaacacatcaattaccagcagcttcgtgggaaagcttgttggcatccgtcctggttctacaaacctcaacggcacaggggcaaatcaatcagcggccagaatacctg

SEQ ID NO: 60486 - DNA, 344 bp, Setaria italica
  Peptide Sequence Number=SeqID_126460
atggaaacacatcaattaccagcagcttcgtgggaaagcttgttggcatccgtcctggttctacaaacctcaacggcacaggggcaaatcaatcagcggccagaatacctgaccaagttcatagtcgaactgatgggccctcagatttttcctcctcatccttcgagcataatagtatgattggcaagcagacttcaataagtgagcttctagaatctgaagaaagtgctgaaaattgcactgaaatgtactcaaccaacatgagaaatgacatgcatatggtgtctgcatcaagcttttcaagtattgcacaaagatttcttgctaatacacttcagaagaaa

SEQ ID NO: 60487 - DNA, 391 bp, Setaria italica
  Peptide Sequence Number=SeqID_126461
acctggttttgaggtacctcaaccaagccattcaactgaattcacagaactacattgttcaaagcctattgaatcagcagttgtagatgttccgaatggaaacacatcaattaccagcagcttcgtgggaaagcttgttggcatccgtcctggttctacaaacctcaacggcacaggggcaaatcaatcagcggccagaatacctgaccaagttcatagtcgaactgatgggccctcagatttttcctcctcatccttcgagcataatagtatgattggcaagcagacttcaataagtgagcttctagaatctgaagaaagtgctgaaaattgcactgaaatgtactcaaccaacatgagaaatgacatgcatatggtgtctgcatcaagc

SEQ ID NO: 60488 - DNA, 376 bp, Setaria italica
  Peptide Sequence Number=SeqID_126462
gcttcgtgggaaagcttgttggcatccgtcctggttctacaaacctcaacggcacaggggcaaatcaatcagcggccagaatacctgaccaagttcatagtcgaactgatgggccctcagatttttcctcctcatccttcgagcataatagtatgattggcaagcagacttcaataagtgagcttctagaatctgaagaaagtgctgaaaattgcactgaaatgtactcaaccaacatgagaaatgacatgcatatggtgtctgcatcaagcttttcaagtattgcacaaagatttcttgctaatacacttcagagaagaacttctcccaaatataccgattcttcctatgtcatctgagagaccaaatgctgatg

SEQ ID NO: 60489 - DNA, 407 bp, Setaria italica
  Peptide Sequence Number=SeqID_126463
gcctattgaatcagcagttgtagatgttccgaatggaaacacatcaattaccagcagcttcgtgggaaagcttgttggcatccgtcctggtctacaaacctcaacggcacaggggcaaatcaatcagcggccagaatacctgaccaagttcatagtcgaactgatgggcccctcagatttttccctcctcatccttcgagcataatagtatgattggcaagcagacttcaataagtgagcttctagaatctgaagaaagtgctgaaaattgcactgaaatgtactcaaccaacatgagaaatgacatgcatatggtgtctgcatcaagcttttcaagtattgcacaaagatttcttgctaatacacttcagagaagaacttctcccaaatataccgatcttcctatt

SEQ ID NO: 60490 - DNA, 294 bp, Setaria italica
  Peptide Sequence Number=SeqID_126464
cagttttgacatctcaaatgcactcatggggtgaaaagatattttcatatactcaagtggcggagacgatttctcagagtattgacggctggaaaagattgatgatttggacaatccattcattccattttctgatctgttctcaaactgagattcatccgtgaatactgttccacttggttctgcaataggatttagggtagattcatcattcacacttgcatcagcatttggtctctcagatgacattaggtaagtattcggttattattttgggtagtaagtttctttctt

SEQ ID NO: 60491 - DNA, 309 bp, Setaria italica
  misc_feature (277)..(277): n is a, c, g, or t
  Peptide Sequence Number=SeqID_126465
tttcagagaagaacttctcccaaatataccgatcttcctatgtcatctgagagaccaaatgctgatgcaagtgtgaatgatgaatctaccctaaatcctattgcagaaccaagtggaacagtattcacggatgaatctcagtttgagaacagatcagaaaatggaatgaatggattgtccaaatcatcaatcttttccagccgtcaatactctgagaaatcgtctccgccacttgagtatatgaaaatatcttttcaccccatgagtgcatttgagntgtcaaaactgaacctagtatttctgtgatgg

SEQ ID NO: 60492 - DNA, 285 bp, Setaria italica
  Peptide Sequence Number=SeqID_126466
tagactaaatacacttcagagaagaacttctcccaaatataccgatcttcctatgtcatctgagagaccaaatgctgatgcaagtgtgaatgatgaatctaccctaaatcctattgcagaaccaagtggaaacaagtaattcacggatgaatctcagtttgagaacagatcagaaaatggaatgaatggattgtccaaatcatcaatcttttccagccgtcaatactctgagaaatcgtctccgccacttgagtatatgaaaatatcttttcaccccatgagtgc

SEQ ID NO: 60493 - DNA, 333 bp, Setaria italica
  Peptide Sequence Number=SeqID_126467
gttcaaagcctattgaatcagcagttgtagatgttccgaatggaaacacatcaattaccagcagcttcgtgggaaagctgttggcatccgtcctggttctacaaacctcaacggcacaggggcaaatcaatcagcggccagaatacctgaccaagttcatagtcgaactgatgggccctcagattttcctcctcatccttcgagcataatagtatgattggcaagcagacttcaataagtgagcttctagaatctgaagaaagtgctgaaaattgcactgaaatgtactcaaccaacatgagaaatgacatgcatatggtgtctgcatcaagc

SEQ ID NO: 60494 - DNA, 399 bp, Setaria italica
  Peptide Sequence Number=SeqID_126468
cggacctaccatttccaacgtggtgattgatgaggaagctttcgagatggcacctgctgctaaaagctcacctggtgatattgccaatgaatcatgggttgtttctgaaagtaggtctcaggattatcccggagagaagcatgaggaactaggtgattgtggtgtgtctgaagtgtctcagtcatggagtgagcctcgtaatgaaccatcagagaataggtctgcaactcaagatgttcctacaaatacctctactacatctactggtgcaagtgaagtgtctaattcacagggtgagcctcttaaggaaccattggagaacagatttgcaacccaaggtattcctacaaatacatctactgcatctactgtagtaccgtctgttaaactctggacaaa

SEQ ID NO: 60495 - DNA, 305 bp, Setaria italica
  Peptide Sequence Number=SeqID_126469
tgattgtggtgtgtctgaagtgtctcagtcatggagtgagcctcgtaatgaaccatcagagaataggtctgcaactcaagatgttcctacaaatacctctactacatctactggtgcaagtgaagtgtctaattcacagggtgagcctcttaaggaaccattggagaacagatttgcaacccaaggtattcctacaaatacatctactgcatctactgtagtaccgtctgttaaactctggacaaatgccgggctctttggacttgaaccatctaaacctccagtatttggtgcccaagatacct

SEQ ID NO: 60496 - DNA, 380 bp, Setaria italica
  Peptide Sequence Number=SeqID_126470
tgaaagtaggtctcaggattatcccggagagaagcagtgaggaactaggtgattgtggtgtgtctgaagtgtctcagtcatggagtgagcctcgtaatgaaccatcagagaataggtctgcaactcaagatgttcctacaaatacctctactacatctactggtgcaagtgaagtgtctaattcacagggtgagcctcttaaggaaccattggagaacagatttgcaacccaaggtattcctacaaatacatctactgcatctactgtagtaccgtctgttaaactctggacaaatgccgggctctttggacttgaaccatctaaacctccagtatttggtgcccaagatactccaagggaggatactccacctggtttt

SEQ ID NO: 60497 - DNA, 347 bp, Setaria italica
  misc_feature (228)..(228): n is a, c, g, or t
  Peptide Sequence Number=SeqID_126471
tagactagactaaaaagactacaacctaggtagaataattagaccaatgaatcatgggttgttctgaaagtaggtctcaggattatcccggagagaagcatgaggaactaggtgattgtggtgtgtctgaagtgtctcagtcatggagtgagcctcgtaatgaaccatcagagaataggtctgcaactcaagatgttcctacaaatacctctactacatctactggtncaagtgaagtgtctaattcacagggtgagcctcttaaggaaccattggagaacagatttgcaacccaaggtattcctacaaatacatctactgcatctactgtagtaccgtctgttaaa

SEQ ID NO: 60498 - DNA, 161 bp, Setaria italica
  Peptide Sequence Number=SeqID_126472
agagatggaagtgctgcttcaatgttctgtactcgaccaacatgagaaatgacatgcatatggtgtctgcatcaagcttttcaagtattgcacaaagatttcttgctaatacacttcagagaagaacttcccaactaataccgactacttccttactagtc

SEQ ID NO: 60499 - DNA, 181 bp, Setaria italica
  Peptide Sequence Number=SeqID_126473
cacttcagagaagaacttctcccaaatataccgatcttcctatgtcatctgagagaccaaatgctgatgcaagtgtgaatgatgaatctaccctaaatcctattgcagaaccaagtggaacagtattcacggatgaatctcagagtattgacggctggaaaagattgatgatttggacaat

SEQ ID NO: 60500 - DNA, 159 bp, Setaria italica
  Peptide Sequence Number=SeqID_126474
tgaccattttcatgaggaacagtggaaggttttgtatctaaagcttggtctactgaactcagccgtgtctttgaactaaaaatcaagtgatgccattaccttcctttaatgctgaagcacctcaagtgggggcaacagaggaatcaggatgctgtgaaa

SEQ ID NO: 60501 - DNA, 304 bp, Setaria italica
  misc_feature (192)..(192): n is a, c, g, or t
  Peptide Sequence Number=SeqID_126475
gttcaaagcctattgaatcagcagttgtagatgttccgaatggaaacacatcaattaccagcagcttcgtgggaaagcttgttggcatccgtcctggttctacaaacctcaacggcacaggggcaaatcaatcagcggccagaatacctgaccaagttcatagtcgaactgatgggccctcagatttttccncctcatccttcgagcataatagtatgattggcaagcagacttcaataagtgaagcttctagaatctgaagaaagtgctgaaaattgcactgaaatgtactcaaccaacatga

SEQ ID NO: 60502 - DNA, 365 bp, Setaria italica
  Peptide Sequence Number=SeqID_126476
ttgttagttaagttctattgtaggtaacttaggttgtattgtggtgtgtctgaagtgtctcagtcatggagtgagcctcgtaatgaaccatcagagaataggtctagacaaactcaagatgttcctacaaatacctctactacatctactggtgcaagtgaagtgtctaattcacagggtgagcctcttaaggaaccattggagaacagatttgcaacccaaggtattcctacaaatacatctactgcatctactgtagtaccgtctgttaaactctggacaaatgccgggctctttggacttgaaccatctaaacctccagtatttggtgcccaagatactccaagggaggatactccacctgg

SEQ ID NO: 60503 - DNA, 244 bp, Setaria italica
  Peptide Sequence Number=SeqID_126477
ctgaaagtaggtctcaggattatcccggagagaagcatgaggaactaggtgattgtggtgtgtctgaagtgtctcagtcatggagtgagcctcgtaatgaaccatcagagaataggtctgcaactcaagatgttcctacaaatacctctactacatctactggtgcaagtgaagtgtctaattcacagggtgagcctcttaaggaaccattggagaacagatttgcaacccaaggtattcctaa

SEQ ID NO: 60504 - DNA, 234 bp, Setaria italica
  Peptide Sequence Number=SeqID_126478
atttgtaggaataccttgggttgcaaatacatctactgcatctactgtagtaccgtctgttaaactctggacaaatgccgggctctttggacttgaaccatctaaacctccagtatttggtgcccaagatactccaagggaggatactccacctggtgttgaggtacctcaaccaagccattcaactgaattcacagaactacattgttcaaagcctattgaatcagcagttgt

SEQ ID NO: 60505 - DNA, 351 bp, Setaria italica
  Peptide Sequence Number=SeqID_126479
aaggaaccattggagaacagatttgcaaccaaggtattcctacaaatacatctactgcatctactgtagtaccgtctgttaaactctggacaaatgccgggctctttggacttgaaccatctaaacctccagtatttggtgcccaagatactccaagggaggatactccacctggttttgaggtacctcaaccaagccattcaactgaattcacagaactacattgttcaaagcctattgaatcagcagttgtagatgttccgaatggaaacacatcaattaccagcagcttcgtgggaaagcttgttggcatccgtcctggttctacaaacctcaacggcacaggggcaa

SEQ ID NO: 60506 - DNA, 264 bp, Setaria italica
  Peptide Sequence Number=SeqID_126480
gacaaatgccgggctctttggacttgaaccatctaaacctccagtatttggtgcccaagatactccaagggaggatactccacctggttttgaggtacctcaaccaagccattcaactgaattcacagaactacattgttcaaagcctattgaatcagcagttgtagatgttccgaatggaaacacatcaattaccagcagcttcgtgggaaagcttgttggcatccgtcctggttctacaaacctcaacggatgccaacaagt

SEQ ID NO: 60507 - DNA, 248 bp, Setaria italica
  Peptide Sequence Number=SeqID_126481
ccattcaactgaattcacagaactacattgttcaaagcctattgaatcagcagttgtagatgttccgaatggaaacacatcaattaccagcagcttcgtgggaaagcttgttggcatccgtcctggttctacaaacctcaacggcacaggggcaaatcaatcagcggccagaatacctgaccaagttcatagtcgaactgatgggccctcagatttttcctcctcatccttcgagcataatagtatga

SEQ ID NO: 60508 - DNA, 269 bp, Setaria italica
  Peptide Sequence Number=SeqID_126482
taccgtctgttaaactctggacaaatgccgggctctttggacttgaaccatctaaacctccagtatttggtgcccaagatactccaagggaggatactccacctggttttgaggtacctcaaccaagccattcaactgaattcacagaactacattgttcaaagcctattgaatcagcagttgtagatgttccgaatggaaacacatcaattaccagcagcttcgtgggaaagcttgttggcatccgtcctggttctacaaacctcaac

SEQ ID NO: 60509 - DNA, 265 bp, Setaria italica
  Peptide Sequence Number=SeqID_126483
tgttaaactctggcaaatgccgggctctttggacttgaaccatctaaacctccagtatttggtgcccaagatactccaagggaggatactccacctggttttgaggtacctcaaccaagccattcaactgaattcacagaactacattgttcaaagcctattgaatcagcagttgtagatgttccgaatggaaacacatcaattaccagcagcttcgtgggaaagcttgttggcatccgtcctggttctacaaacctcaacgcac

SEQ ID NO: 60510 - DNA, 224 bp, Setaria italica
  Peptide Sequence Number=SeqID_126484
caaatcaatcagcggccagaatacctgaccaagttcatagtcgaactgatgggccctcagatttttcctcctcatccttcgagcataatagtatgattggcaagcagacttcaataagtgagcttctagaatctgaagaaagtgctgaaaattgcactgaaatgtactcaaccaacatgagaaatgacatgcatatggtgtctgcatcaagcttttcaagtatt

SEQ ID NO: 60511 - DNA, 231 bp, Setaria italica
  Peptide Sequence Number=SeqID_126485
aaaccaacatgagaaaatgacatgcatatggtgtctgcatcaagctttttcaagtattgcacaaagatttcttgctaatacactttcagagaagaacttctcccaaaatataccgatcttcctatgtcatctgagagaccaaaatgctgatgcaagtgtgaatgatgaatctaccctaaatcctattgcagatccaagtggaacagtattcacggatgaatctctagtttg

SEQ ID NO: 60512 - DNA, 213 bp, Setaria italica
  Peptide Sequence Number=SeqID_126486
ttgtcaaatagcagattctcctgagatttcgcagctagagttttctagaatatacatctgtaactacgtataaagagtcatctgttgtcactaaaatccatgagagtagcatggagggtgcttgtggagatccttatgaaatttcagagccggaactgcaagtccatacagccatacctcccaatggaagatcccctgttcacaatcaaatac

SEQ ID NO: 60513 - DNA, 230 bp, Setaria italica
  Peptide Sequence Number=SeqID_126487
aactgatgacattgtttcacagcatcctgattcctcttgttgccgtatttactgacacatgtcaagattctaatatttcttgcacttctgaaagagcagttgatttcccccacttgtcaaatgcagattctcctgagatttcgcagctagagttttcagaatatacatctgtaactacgtataaagagtcatctgttgtcactaaaatccatgagagtagcatggagggt

SEQ ID NO: 60514 - DNA, 280 bp, Setaria italica
  Peptide Sequence Number=SeqID_126488
aatgctgaagcacctcaagtggggcaactgatgacattgtttcacagcatcctgattcctctgttgccgattttactgacacatgtcaagattctaatattcttgcacttctgaaagagcagttgattccccacttgtcaaatgcagattctcctgagatttcgcagctagagtttcagaatatacatctgtaactacgtataaagagtcatctgttgtcactaaaatccatgagagtagcatggagggtgcttgtggagatccttatgaatttctagta

SEQ ID NO: 60515 - DNA, 195 bp, Setaria italica
  Peptide Sequence Number=SeqID_126489
caagattctaatatttcttgcacttctgaaagagcagttgatttccccccacttgtcaaatgcagattctcctgagatttcgcagctagagttttcagaatatacatctgtaactacgtataaagaagtcatctgttgttcactaaaataccatgagagtagcatggagggtggcttgtggagatccttatgaaa

SEQ ID NO: 60516 - DNA, 280 bp, Setaria italica
  Peptide Sequence Number=SeqID_126490
ttaaagaaaagaaaattaaccaaagaaaaccaaagaaggtacaacctaataatggttattaccgtccaatgaagagtctgctgttgccaaccaaaaccttgaaagcaacgtagaaaatactggtgattttactgatgatgccactgatgatgttgtatccggacctaccatttccaacgtggtgattgatgaggaagctttcgagatggcacctgctgctaaaagctcacctggtgatattgccaatgaatcatgggttgttctgaaagtaggtctcagg

SEQ ID NO: 60517 - DNA, 243 bp, Setaria italica
  Peptide Sequence Number=SeqID_126491
aaaccttgaaagcaacgtagaaaataactggtgattttactgatgatgccactgatgatgttgtatccggacctaccatttccaacgtggtgattgatgaggaagctttcgagatggcacctgctgctaaaagctcacctggtgatattgccaatgaatcatgggttgtttctgaaagtaggtctcaggattatcccggagagaagcatgaggaactaggtgattgtggtgtgtctgaagtgt

SEQ ID NO: 60518 - DNA, 180 bp, Setaria italica
  misc_feature (94)..(94): n is a, c, g, or t
  Peptide Sequence Number=SeqID_126492
aatacctgagagtaaaggcagaaagatggtcttggagacactcctgagattccagaaccagaggtcacctatatggttattccgtccaatgaanagtctgctgttgccaaccaaaaccttgaaagcaacgtagaaaatactggtgattttactgatgatgccactgatgatgttgtatcc

SEQ ID NO: 60519 - DNA, 203 bp, Setaria italica
  Peptide Sequence Number=SeqID_126493
atccgagagaagcatgaggaactaggtgattgtggtgtgtctgaagtgtctcagtcatggagtgagcctcgtaatgaaccatcagagaataggtctgcaactcaagatgttcctacaaatacctctactacatctactggtgcaagtgaagtgtctaattcacagggtgagcctcttaaggaaccattggagaacagatttgc

SEQ ID NO: 60520 - DNA, 233 bp, Setaria italica
  Peptide Sequence Number=SeqID_126494
tgctgctaaaagctcacctggtgatattgccaatgaatcatgggttgtttctgaaagtaggtctcaggattatcccggagagaagcatgaggaactaggtgattgtggtgtgtctgaagtgtctcagtcatggagtgagcctcgtaatgaaccatcagagaataggtctgcaactcaagatgttcctacaaatacctctactacatctactggtgcaagtgaagtgtctaatt

SEQ ID NO: 60521 - DNA, 168 bp, Setaria italica
  Peptide Sequence Number=SeqID_126495
tgatgttgtatccggacctaccatttccaacgtggtgattgatgaggaagctttcgagatggcacctgctgctaaaagctcacctggtgatattgccaattgaatcatgggttgtttctgaaagtaggtctcaggattatcccggagagaagcatgaggaactaggtg

SEQ ID NO: 60522 - DNA, 210 bp, Setaria italica
  Peptide Sequence Number=SeqID_126496
ctgctgttgccaaccaaaaccttgaaagcaacgtagaaaatactggtgattttactgatgatgccactgatgatgttgtatccggacctaccatttccaacgtggtgattgatgaggaagctttcgagatggcacctgctgctaaaagctcacctggtgatattgccaatgaatcattgggtttgtttctgaaagtaggtctcaggatta

SEQ ID NO: 60523 - DNA, 145 bp, Setaria italica
  Peptide Sequence Number=SeqID_126497
tgccattaccttcctttaatgctgaagcacctcaagtgggggcaactgatgacattgtttcacagcatcctgattcctctgttgccgattttactgacacatgtcaagattctaatatttcttgcacttctgaaagagcagttga

SEQ ID NO: 60524 - DNA, 190 bp, Setaria italica
  Peptide Sequence Number=SeqID_126498
aaaaagtagactgaaaaattgcactgaaatgtactcaaccaacatgagaaatgacatgcatatggtgtctgcatcaagcttttcaagtattgcacaaagatttcttgctaatacacttcagagaagaacttctcccaaatataccgatcttcctatgtcatctgagagaccaaatgctgatgcaagtgtg

SEQ ID NO: 60525 - DNA, 205 bp, Setaria italica
  Peptide Sequence Number=SeqID_126499
aagcagacttcaataagtgagcttctagaatctgaagaaagtgctgaaaattagcactgaaatgtactcaaccaacatgagaaatgacatgcatatggtgtctgcatcaagcttttcaagtattgcacaaagatttcttgctaatacacttcagagaagaacttctcccaaatataccgatcttcctatgtcatctagaagaaga

SEQ ID NO: 60526 - DNA, 102 bp, Setaria italica
  Peptide Sequence Number=SeqID_126500
taccgaggaggatactccacctggtgttgaggtacctcaaccaagccattcaactgaattcacagaactacattgttcaaagcctattgaatcagcagttgt

SEQ ID NO: 60527 - DNA, 274 bp, Setaria italica
  Peptide Sequence Number=SeqID_126501
cgcatccaactaaacaaaccatgtaaacaacaaaactctggactggtctccaggttgggtacaaaactgccattcaaaatgctggctttttctgtccaattaaaggcttgggccaaaatgtcagcaatagcaacaattacttttggaagtccaccacattttgaaataagttgctgtaacactgagtccttctcaatacctgctacaggaaaatatggactttttgcctataaatcaagaaagcaattacattagcttcgaatattcgaagttg

SEQ ID NO: 60528 - DNA, 142 bp, Setaria italica
  Peptide Sequence Number=SeqID_126502
caactccttcaggtcacaggtagaggcctggttggccatgatctcaaccatcttccggcggatctgactcatggtacatatttcagaggaactatcacgatgtcatgaacaggcaagcccaggcaagtagatagttcctctg

SEQ ID NO: 60529 - DNA, 423 bp, Setaria italica
  Peptide Sequence Number=SeqID_126503
agagtgtgaggactactgattgcacaatctacaattataatagttcaaaattgatggcattgaaatcaattttctgaatttgtacttatttgggtggagacaataaatctgccagttgtatcggaaaacaatcatgcatagccaagtagatatggagaaacagagatttaaagtgaagggccagatatcaccagacacctcagtacgtgttccacttctgggcacccttggtgatggatgggattcatgcctgccccgatgcctgtgctcatctggagatgctgatcgaccacgcctagatgaccttcctgatcctccattgctctcctcccaatctgacagtttatctctggttgaatcccttttgtcactacggtccaccctttgctcccttgaagaagcagctttccagtcattcgtcgt

SEQ ID NO: 60530 - DNA, 358 bp, Setaria italica
  Peptide Sequence Number=SeqID_126504
tctaaaagtcctattccttttgtagtttgttcttggaaagcttgctgaggagaccaacagagttgccaaagcatcaggatctccactcctggatgcttcacctcctctagagttgatatcctcagtacgtgttccacttctgggcacccttggtgatggatgggattcatgcctgccccgatgcctgtgctcatctggagatgctgatcgaccacgcctagatgaccttcctgatcctccattgctctcctcccaatctgacagtttctctctggttgaatcccttttgtcactacggtccaccctttgctcccttgaagaagcagctttccagtcatcgcgatcaagccttccacct

SEQ ID NO: 60531 - DNA, 396 bp, Setaria italica
  Peptide Sequence Number=SeqID_126505
tacaaagtagacaaaaacctttagaccaatagacttaccttagactaggaatccagcaccaggaacctggccttccatagtcacttcctatcgaacgtaatacagtggtagctagtgaagttccccacacatataagtggaaaatagatccaaattcttcaacatcagttttgtgtttgacaactgtgcgatgcagagtgaaagctatggtggttgtccatagaaaagaagccacgcagaagaaatgagcactgtagtcatgtgcaaagcagtaaaatgcattcgatgggtcccccagtatagtgaataagctgcaaaaacatatccgagacggcgaggtagaagacgagcttgaaggagaacttgcggagctcgcggaagaggaggtagcagagc

SEQ ID NO: 60532 - DNA, 381 bp, Setaria italica
  Peptide Sequence Number=SeqID_126506
ttcttcaacatcagttttgtgtttgacaactgtgcgatgcagagtgaaagctatggtggttgtccatagaaaagaagccacgcagaagaaatgagcactgtagtcatgtgcaaagcagtaaaatgcattcgatgggtccctgtaacataaaaaataaacatagttactgaaatattttaccacaagcacataacgaatctaagcagttgatacaaatagaattggaaaatgaatactctgatttttttgtcttaaataagacaattaattttttgaatattggcattaatatttcttagtatgcagaatgcaaagttgcaaggtcaagttacacaatttacgatttgaataatgagctgatttgcgtatgtttgttctggc

SEQ ID NO: 60533 - DNA, 180 bp, Setaria italica
  Peptide Sequence Number=SeqID_126507
ccaatcatccatactgttgaatatgtacggataagcattgatctatacttgttctgatcattgacgagcaacggctgtccattagctctattccctttcgcgttcgcctgctcgcttgcctgtgccggccctcggttgcccacctcgacgtccaaaccctaaccctagttcggttctctc

SEQ ID NO: 60534 - DNA, 205 bp, Setaria italica
  Peptide Sequence Number=SeqID_126508
catccatactgttgaatatgtacggataagcattgatctatacttgttctgatcattgacgagcaacggctgtccattagctctattcccatctgcagtagcctaaagaaacaatcatgatcagttacaacaaagagcacccaaacagtctgcggatctaaattagctaatacttacattgcagcatggtgctaatttagatccg

SEQ ID NO: 60535 - DNA, 272 bp, Setaria italica
  Peptide Sequence Number=SeqID_126509
agctcattctgtagcactagattcgtgtatagcagcactgcccaaatgcatggtgatataggggaatccttgttcaaaccattgtacagaatggtagaaaggagaatgaactgaaggcttaaatacacaacatatcatgcttctcgtaagcgcattaacgctcaactttgcatcagttgcctctcatggaagatctccccaagctgctggtacaagtatttttgctcctcataggttaggtttcttataatctgatccaagattatctcgac

SEQ ID NO: 60536 - DNA, 245 bp, Setaria italica
  Peptide Sequence Number=SeqID_126510
gtagcctcacttggttgtctccgacgtctaacacgccctgtgtgagaagcagaaacatcgctagagctggtgtccctttgcatcactgatactccaaagtcaaatctggtgcgtgtcgccggcccgctgacgctgccttctgcagttatccatacacttagtgctaattctacccccatatcatcgtttctgcacctcttatattgtgagaaggggacctcgaaaattgtattcttgcttatcta

SEQ ID NO: 60537 - DNA, 250 bp, Setaria italica
  Peptide Sequence Number=SeqID_126511
ttgacgagcaacggctgtccattagctctattcccatctgcagtagcctcacttggttgtctccgacgtctaacacgccctgtgtgagaagcagaaacatcgctagagctggtgtccctttgcatcactgatactccaaagtcaaatctggtgcgtgtcgccggcccgctgggggaattccttgctttaattccgattggctggcgtgcctttaaaccgctcgctctccggcttgaggagaaacaaagct

SEQ ID NO: 60538 - DNA, 317 bp, Setaria italica
  misc_feature (1)..(40): n is a, c, g, or t
  Peptide Sequence Number=SeqID_126512
nnnnnnnnnnnnnnnnnnnnnnnnnnnnnnnnnnnnnnnncacacgattgattaccatttcattcataaataaatagaacacataaaattaagcaagaagcagtacagacttcattattcagaagaacagaggtatagcatagcaattacggccagcagtagtagtaaaaagcaggcagttaaccacgataaaagcactccactccactcgacggcgccacctcacttaccgctgacggcggcggcggccttcgtttgtccccccgtttggtcttgtccgtcggtcgggttgtccttcctttgtccctacgggtctt

SEQ ID NO: 60539 - DNA, 241 bp, Setaria italica
  Peptide Sequence Number=SeqID_126513
acagactagcagagtgccttgtggaaaggaaattaatcagtatgtgagatcaactagtctgtcagtcccatcagaaccaaggccacacgcgctgtagctgttgtggcactgccaaaaatatgtgaagaaaaatttgtcagcagcattgccgtacgatttcctcaccttcacgtttacaccgtcaacctcatgtgcaataagagtagagaaggtacatcatgtgaacagagactttaaattc

SEQ ID NO: 60540 - DNA, 255 bp, Setaria italica
  misc_feature (1)..(26): n is a, c, g, or t
  Peptide Sequence Number=SeqID_126514
nnnnnnnnnnnnnnnnnnnnnnnnnnagtaatagaagaagtaataacttactttttattttctctagcatctttccattgtggcaatctgtaactgagattttgtcccctcttactgaattggcagggcaattgacaaaatgtatcccgagaataaaaaaaaaaattgtagtcgatgaatgcaacaagcccacaactacactgaggttcttaacaattgagccatatacgtcatctataacacaacaacaaaatg

SEQ ID NO: 60541 - DNA, 241 bp, Setaria italica
  Peptide Sequence Number=SeqID_126515
caatttcactttcaagataggaatagtttcacatttccataaacggtcaagattgtaccttttcctgacccatgttgggatcactggtgatgtgagacagaagaactctatcagaatacatggatctcaagccaccagcccgtgctgcacccatgtctgcaccaatcggtgccattgaagtacccttgccttcattgtcataccatgatttaagattgtgcacttcaggaaggtctggtaa

SEQ ID NO: 60542 - DNA, 234 bp, Setaria italica
  Peptide Sequence Number=SeqID_126516
tgaagttggagagtatgctagatctttgaggtctacattctcttcttttgaggcactccctattccaacaattgctgtcattgaaggagctgctttaggtggtgggctagaacttgctctttcatgtgatctccgcatatgtggggaaaatgcagaacttggactgccagaaacaggccttgccattatacctggaatgtgattgctgaggaagatttggtcaccatttacaca

SEQ ID NO: 60543 - DNA, 151 bp, Setaria italica
  Peptide Sequence Number=SeqID_126517
aaacgtaagaacaaggggaaaatagaacaagaaacttaaggaactagaccagaaacaggccttgccattatacctgggtacgtgattatgtagcctacatagtgcattactttctaaaacaaatggtttaagaacctatcatgatgttctg

SEQ ID NO: 60544 - DNA, 243 bp, Setaria italica
  Peptide Sequence Number=SeqID_126518
tgcttcgatgtgtattgaagtgaaatttctacgaatcaatctgttctcttgaaaaatttggaatggcagaatttggtatctcaaatgttatgctgagccatgaagatataattaatttagggcgtgtcaagttgaaaaacaaacagcaagtcagacatttgtttccacttctgcatgtcagttggattctgtattgcatgctagtacagtcagtttacacgccgctccaatcaatgtacggac

SEQ ID NO: 60545 - DNA, 343 bp, Setaria italica
  misc_feature (3)..(3): n is a, c, g, or t
  misc_feature (10)..(10): n is a, c, g, or t
  misc_feature (307)..(307): n is a, c, g, or t
  Peptide Sequence Number=SeqID_126519
ttnttaattntttattttagtttattttcttttattttgttttttcctttactttattttctttgttaagttccttatttttaggttctttactttgttcttattaaggtcttgtaaggtaacttctattactattttaaaccaaggttctccattgccattcccagacaatgctacatacatagaaatctttctacagtgatccaaactgtctgatgtcattattaatttgtgaaacaggaaattcccctctaagctaaacatttgcacccttgaaaatgaagaacctaacaggaaattccccctntaaggtaaacagttacatgaccaggcgcgccaggaa

SEQ ID NO: 60546 - DNA, 302 bp, Setaria italica
  Peptide Sequence Number=SeqID_126520
agagtgaggatgcagagatcacgggttaccaaggtagtcaaatagctgacctgaactcccacagattcacaaagacagatgagacctttgaaggcccagacacaaaagataagtcagtttaggtataccagtctgacatcaacgagagcttcctgtcttgatacagccacagctttaagcctgccatttgaacaatagctgcatggaacttaaggaaatatcttattcccccttggaacatgtttactcacaattattcacaagtagaaaaactaggttttttacttagacaagacaaaaga

SEQ ID NO: 60547 - DNA, 443 bp, Setaria italica
  Peptide Sequence Number=SeqID_126521
tggcctctaaggcaccttcgtcggcgtctatgatgggcacggtggcccggagacggcacgttacatcaatgatcatctcttcaaccacctgaggagtaaggcctctacttctgctgaagttcatgctttagatcaaataacgatcaagctatgctatctgttttacgatcgatatatccaattttttgatatgcaagtgtgtattagctgatgccgattgctctcaagtaaagatatttgccatttcaatgggtctgtattgtatgcgtgagttgcatagaatgatgttcaatgtagagttatacggaaaagcgcgtgcaaatttaaatgcagtcatctttagacaaagagccaatgttaccctaaattcgatcttgatataattggaatagaatggaagcacatcattccatggaatagtgtgataactataaaacggctag

SEQ ID NO: 60548 - DNA, 266 bp, Setaria italica
  Peptide Sequence Number=SeqID_126522
ggtttgcagtgaactctatatgttgcaaaccttggggattcccgtgctgttcttgggagactcgtcaagggaactggagaggtttttggcaatgcagctctcagcagaacacaatgcatccttcgaggaggttagacgggagctgcaggcctcacatcctgatgacccccatattgtagtcctaaagacaacaaatagacttaggacgtaagtaagaaaagggtaaataacaaattaacaaagaaataaaacaaaaggtaacaaaa

SEQ ID NO: 60549 - DNA, 254 bp, Setaria italica
  Peptide Sequence Number=SeqID_126523
gaaagaaagcagcagttgtgatcagctgtagtgtattttgtcgtatgcgttcttgtaaaccttttttagattctcaacctggtgacaaagcgtactgatagcaaggtataagattagattattcttagctttttttttctcttttttcttaccctttagattcactcatgggatatcaggtggctgtacattctctggatcaacttgtgataatagttcattcgccctttttgttgtctagttaaaaaaaaaaa

SEQ ID NO: 60550 - DNA, 240 bp, Setaria italica
  Peptide Sequence Number=SeqID_126524
aggccagatagattcacaccacggaacctgactctctgagcctggatgcattttatcacgtccttccgtgtcaattcagcctctgaactgtcgactttcttccaaccgagcctctcatttatgtaatcagctaggcctctgcctcgcgcagcagctgttggtactcggactcagacagcacgggaatggcaccgtccctgagccagttgagtacgtgccggaaatgcttaccgtccctgt

SEQ ID NO: 60551 - DNA, 295 bp, Setaria italica
  Peptide Sequence Number=SeqID_126525
tagaaatacgttcaagctacggtgcacctcctcatggtggtttcggggttggcctggagagagtggtgatgctgttctgcgccctaaacaacatcaggaagacttcgatgttcccacgtgacccgcagaggaggtgcaccgtagctgaacgattcaatatacgccgagatggtgctcacatcaatgccgcactctgtagcgcgcttggccaacagctcaggtgtgtgtatcctttgtgctccagaaattatttcctcgcctcgaatgaactgagctccaaggcacacaggggata

SEQ ID NO: 60552 - DNA, 312 bp, Setaria italica
  Peptide Sequence Number=SeqID_126526
ttagggtcgtctagtaactagtctattctacctacttcttcttcctaggtcctaaccccgtaaacctacctattgtaggtaggttgtctaccgttagtctgaacgattcaatatacgccgagatggtgctcacatcaatgccgcactctgtagcgcgcttggccaacagctcaggtgtgtgtatcctttgtgctccagaaattatttcctcgcctcgaatgaacacatcgaaagaattggtgtaagctgggttgtcataacaaggcatagtggtagaacggacgcacagccaaaggataacgatacagaatg

SEQ ID NO: 60553 - DNA, 247 bp, Setaria italica
  Peptide Sequence Number=SeqID_126527
gcgggtgtccgaagatcaatagctctgtagttcaagcgggtatcttgaccaacacgaacaagcttctctccagccttcaatcacaggaaccatcacaaaatcatagagtcgtaccaaaaacagagcacaaaatcgtgcacttcctcaaaacagaattcagataatctgcataatatgcatgagtcgtacctgttcagccttctcaaactccgcctcactccgagccgcatcttcaaggttaattggg

SEQ ID NO: 60554 - DNA, 254 bp, Setaria italica
  Peptide Sequence Number=SeqID_126528
gcagaggttcaaatggatactgcctatttattgtctcaagttccttcttgcagttttcagtcaagtgcttaaatattgacacgaataagccatctataatatcacaaacctcaaaaatagtgctccttaatctccatttcagcatcaagaccaacaaactcacagagatgtctgtgtgtgtttgaattttctgctctaaaacaacaaggaaccaaacctacaaaataacaacgttacaataacccaaccaacaa

SEQ ID NO: 60555 - DNA, 202 bp, Setaria italica
  Peptide Sequence Number=SeqID_126529
cctatcccctgtgtgccttgcctatccccttttgcgtgtctcagagacgacgttgcattgctagctaatatggttgaagatctgagcatggagactggcgatgagaaggaagatgatgagatggaaatggatgatgcagacatggtgggaggtggtgctgcaagctttaaagaaaagatcatgggtatattgcaacagggtg

SEQ ID NO: 60556 - DNA, 231 bp, Setaria italica
  Peptide Sequence Number=SeqID_126530
cctatcccctgtgtgccttgcctatcctctgttgcgtgtctcagtctctccgtgaacgtgcagctcttgtctcgagtgtcacatcttctgagggttccaaggaacaacttcaggcctccacccaaggttgattcatcagttgtgcgtatcgagcccacgaagcccctcccttctgtcagcttcaaggagtgggatgggcttgtgaggatttgtttcaacaggaagaacaag

SEQ ID NO: 60557 - DNA, 244 bp, Setaria italica
  Peptide Sequence Number=SeqID_126531
cagaaactccagagcaaaggcaaaggaaaagtataagctgtgagcgaactttcacagcaacaagtgattcttctttgcttttcgacaaattagctaacctcgctgaaaacttaacggatgatttgcaaaaggagggtttgaaggggaagacactaacactcaaactaaagactgcagattttgaggttcgaacaagagcagtaactacacgaggatacatcaactccaaggaagacatcctgat

SEQ ID NO: 60558 - DNA, 355 bp, Setaria italica
  Peptide Sequence Number=SeqID_126532
ggcggacctcccttggggacggcccccccgagcgcatcccttggcagctcacatgcgcggcccccccgagcgcatcccttggcagctcacatgcgcggccccccgccagcgtcgtgcagctccgccgcgccgtcccatcttgctccacccgctcaaccgctcaagctcctccccgtgcctacttgcttccgctcgctcgcacgacgcacacgcaagacggaggagcgatggcatccatctgggtcggaacggtccgctcgttttggagaaatcgtttcgacccgcatctacaaggaatattccctattggagccactccaacccacatgcactctcaaccaaacatgggtccaag

SEQ ID NO: 60559 - DNA, 206 bp, Setaria italica
  Peptide Sequence Number=SeqID_126533
ggggctgtagttgtagatcaggttatcaagcaccttgtccgcaggaggtctgttgggagacttgcgagcttggctcaggatgccactgtgtgcaagtgattggatatttatttgcttgtacggttgagacgtagaccttgccattttcatcaggcgatgtagtcaagattctgaagaaacttgataattcaccattctctcggaaa

SEQ ID NO: 60560 - DNA, 415 bp, Setaria italica
  Peptide Sequence Number=SeqID_126534
agttgaggtgctgccaccatggttccatgtgcccaccgggcggttggagcatttggtggagagtgcggttactaagcaagtagcatcgtgtatatatcacaatttgccggatgagatcactatgcttgaagatcataagtgccatgaacagcacatcccctccgagtgtgcacagatattatgtggtcataataatgaagtttggtttgtaaggttctctaataatggagactacctggcatcatcttcaagtgattgcaccgccataatttggaagattattgctgacccctcgtactgtatctaagctagaggaaaaatggagatgaaggcatgtaaatttaaatactcatttatcaggaaacatgactaggtggaaaaggatgatacgttagaccaagaagcactgcctaca

SEQ ID NO: 60561 - DNA, 257 bp, Setaria italica
  Peptide Sequence Number=SeqID_126535
ctcctacctgaccaacgtctccatcctggcgatctatgtgaggctctcacctgcttgtaagaatacctggagagggttcgcaaaggaggcgtttcgcgatgtaatttgtcatgcaccatctggaattgaactcgatcccacgtgctcacagcttggagtggtggtcttttgagctcctggttcttctttctggacttctcccaaatcctaagctcgaaacatcagtactgtccatttgcctaaacttagggtcttta

SEQ ID NO: 60562 - DNA, 404 bp, Setaria italica
  Peptide Sequence Number=SeqID_126536
aacaatttttcaacacaaaccatatactcttttcgggaattgcaatagtacatatgaattctcatcaatcaaggccgacggctgggaagggacagaagggggggggggaggcccccctatgccaggggtatttcaattatgtacacaagggtccgattccactatgggcatcctgatgtatttgataggcttttccatctaacaaggggtggcgtcagtaaggcatcaaagagtatcaacttaagtgaagatattttgcaggctataactcaactcttcgtggtggcaatgtaacacaccatgaatatgtccaagttggtaaaggaagagatgtcggactaaatcagatctctaagtttgaggctaaagtgcaaatggaaaatggtgagcagactcttagtcgt

SEQ ID NO: 60563 - DNA, 406 bp, Setaria italica
  Peptide Sequence Number=SeqID_126537
tttggtcaatcttatcgctcaaccattgcctatatttttattacatcctctatgtggttcctagtgttgacatggctatttgcaccctccttttcaaccctcgggatttgagtgggcaaaaatcgttgatgactggtctgattggaataagtggatcagcaatcgtggtgggattggtgtgtctccagacaagagctgggaatcttggtgggaggtggagcaggagcatttgaagtattcgggaacaataggacttttagttgagataattttggccgtgcggtttttcatataccagtatggccttgtttaccacttacgtataacacgcgacaaaagtatcttggtatatttgatttctattggtcttcgttaatttgttggttggttttctttgttctttgtt

SEQ ID NO: 60564 - DNA, 384 bp, Setaria italica
  Peptide Sequence Number=SeqID_126538
ctaagttcgcggagaattattagacttttattctcgcagccactttgtttaaagggattgagctgatgattctgctcatcatattaccaattgttttggtcaatcttatcgctcaaccattgcctatattttttatttacatcctctatgtggttcctagtgttgacatggctatttgcacccttccttttcaacccctcgggatttgagtgggcaaaaatcgttgatgactggtctgattggaataagtggatcatcaatcgtggtgggattggtgtgtctccagacaagagctgggaatcttggagggagagggagagagcggggtggaacacgcgcggcacgagcgcacaccgcatatccctcgcgcgcggcacgacaccg

SEQ ID NO: 60565 - DNA, 401 bp, Setaria italica
  misc_feature (97)..(97): n is a, c, g, or t
  Peptide Sequence Number=SeqID_126539
gcctatatttttattacatcctctatgtggttcctagtgttgacatggctatttgcaccctcctttcaacccctcgggatttgagtgggcaaaaaancgttgatgactggtctgattggaataaagtggatcagcaatcgtggtggggattggtgtggtctcccagacaagagctgggaatcttggtgggaggtggagcaggagcatttgaagtattcgggaacaataaggaacttttaagtttgtaaggaataaattttaggaccgtagacggtttttacaataataaccaagtaataggaccttagtttaaccaacttaacgtaataaacaacgacgaacaaaaagtaatacttaggtaataaatttaagaaatttaacaaataaggaactaactaaaa

SEQ ID NO: 60566 - DNA, 307 bp, Setaria italica
  misc_feature (272)..(272): n is a, c, g, or t
  Peptide Sequence Number=SeqID_126540
tactaagtttttaattagttaatttttacttagttaattgggtcgccttttattctttgcttcttcagttggacttgaagaggggctatcacatggaagattcattcataatcatcctcttcaagttgctcttgcctcacaatctcttgttcagctttggttttctgatggctcttcccatgatgatggaaattggtctcgaaagaggatttggggaaggcactaagtgaatttgtcatgatgaatttgcaattggctactgtgtttttacnttttcccttggcactaaaactcactactatgggag

SEQ ID NO: 60567 - DNA, 354 bp, Setaria italica
  Peptide Sequence Number=SeqID_126541
attttgattgtcttgatagtatttcttcatatggccttgcgagatatatttgtgtgctttctggcattcttgcccactggatgggggatcctattgattgcacaagcttgcaagcctcttgctcgacgggtaggattatggggatctgttcgtgccctagcacgggcctatgagataattatgggggtgcttctctttacgccaattactattttggcatggtttccctttgtatcggagttccagacgcggatgctatttaatcaagcatcagcagaaggaactagacaaaatttaccaagaaattacttaggtaggaacaaaaaaaggaaacggtacaatactacgtaaaca

SEQ ID NO: 60568 - DNA, 453 bp, Setaria italica
  Peptide Sequence Number=SeqID_126542
gtgagttgtcttattgtttttattttctaagcttttagtctatattatcttcatggtatgctcatatttttgtcgggttagcaaaatttaatgtaatgagctgttcagagcacaagaaaaggcaaacagaaaggaaaggtcaactttgtcgagctacgttcattttggcacatattcagaagtttttatagactctggagcttctttattttagctcttcaggttatgataatcctcgcttggaatggaggctcactagccaatatttttgattatacggttttcaagaagattttgagtatctttatcacttctgctatactaaatctcggacaagctacacttgatattatctttaattggaaggccaggagaacaatggaatttgcagttaagctgagatatgttctaaagttcacaatggcagccttgtgggtggtactactgccagtt

SEQ ID NO: 60569 - DNA, 419 bp, Setaria italica
  misc_feature (165)..(165): n is a, c, g, or t
  Peptide Sequence Number=SeqID_126543
tacatatatcaccatatggcatttgaaatgtatggcatgttagctggaatgtgagtgctttgacgggtgaatatgtgaagccagcctatggtggtgagaaagaagcctttctgaggaaagttgttacaccaatttaccataccatagcaaaggaagctgaaaggngcaaaagagagaaaggaatcattctgagtggagaaactatgacgatcttaatgaatacttctggtctgccgactgctttcggctgggttggcctatgcgagctgatgctgacttctttttatcaacctttcaaattttacctgattgaaagaatgaagtgattgcttatgtttttatttcaagcttttagcatatatcttcatggtatgctcatatttttgcggttagcaaaatttatgtaatgagctgttcag

SEQ ID NO: 60570 - DNA, 254 bp, Setaria italica
  misc_feature (213)..(213): n is a, c, g, or t
  misc_feature (242)..(242): n is a, c, g, or t
  Peptide Sequence Number=SeqID_126544
ttagttaaaattcttaaaatttcttaatttgttctttatttaattttttctacccgttggttgtaaggtctttactagtacctattagtattattgaaccaggataactatatggaagaagctcttaaaatgagaaacctactccaagagttccttaaagagcatggagtgcggcgtccatctatacttggagttagagagcatatttttacnggcagtgtatcttcgcttgcatggtttangtcaaatcagga

SEQ ID NO: 60571 - DNA, 242 bp, Setaria italica
  Peptide Sequence Number=SeqID_126545
caattacgagccatgaaatcaaatataccacgcgacaaaagtatcttggtatatttgatttcataacaagcagaaccaccacaattacgagccatgaaatcaaatttttgatatttgtttctttcatagctattttgattgtcttgatagtatttcttcatatggccttgcgagatatatttgtgtgctttctggcattcttgcccactggatgggggatcctattgattgcacaagcttga

SEQ ID NO: 60572 - DNA, 190 bp, Setaria italica
  Peptide Sequence Number=SeqID_126546
aacaaaaaaaggaaacggtaacaaatactacgtaaacaaaagaattagatttaagccttcttgcatcttgttgcctgtctttcaacatgcacaggctgtaaatatttgtcagtgtatagtgtatttttgtcattacaatatcagatcaaggtttcatataatatctccttccttcctccccaccccccaa

SEQ ID NO: 60573 - DNA, 220 bp, Setaria italica
  Peptide Sequence Number=SeqID_126547
ccgtgggaaggcggagattcagtgcagatttccagctattcttccgtctgatcaagtttttgatatttgtttctttcatagctattttgattgtcttgatagtatttcttcatatggccttgcgagatatatttgtgtgctttctggcattcttgcccactggatgggggatcctattggtgtgcctcttgctgttctctggttcatttgtctttaatta

SEQ ID NO: 60574 - DNA, 221 bp, Setaria italica
  misc_feature (207)..(207): n is a, c, g, or t
  Peptide Sequence Number=SeqID_126548
gtctgatctaagtttttgatatttgtttctttcatagctattttgattgtcttgatagtatttcttcatatggccttgcgagatatatttgtgtgctttctggcattcttgcccactggatgggggatcctattgattgcacacaaatatatctcgcaaggccatatgaagaaatactatcaagaaacaaaaaaaaaaaaaaaaaanaaaaaaaaaaaaaa

SEQ ID NO: 60575 - DNA, 127 bp, Setaria italica
  Peptide Sequence Number=SeqID_126549
ggtatatgatgagcagaatcatcagctcaatccctttcacgctaagttcgcggagaattatagactttattctcgcagccactttgttaaagggattgagctgatgattctgctcatcatataccaa

SEQ ID NO: 60576 - DNA, 246 bp, Setaria italica
  Peptide Sequence Number=SeqID_126550
aaatttgtgattccatacttgataacataattgcaaactatgcccccaaagccacagtatatagcaaagagttcaaaataactcacaaatctcctgtcaagggagggcagtacgctgatgccatcaagtggttgtcttgggctgttgtgctcattgagaaatcagggaaagatgctgacattgttgaggtgttgtcttcaagggcttcctcatataaggaggttggtgagtacaagaaggccattg

SEQ ID NO: 60577 - DNA, 181 bp, Setaria italica
  misc_feature (178)..(178): n is a, c, g, or t
  Peptide Sequence Number=SeqID_126551
ggtggtggtggcaggccatccagctctgtggttgcaccaccactgtcaccaccaccatctggattgacagtatcggctaccaagtccaaggggatggatagctacaagggagggcagtacgctgatgccatcaagtggttgtcttgggctgttgtgctcattgagaaatcagggaaanatg

SEQ ID NO: 60578 - DNA, 289 bp, Setaria italica
  Peptide Sequence Number=SeqID_126552
tctattgtggattaactgcacagcaatgaagaagggaagacacgttgcaagtgggtctccatgggatggcatccctggtctattgcgcagaatgacgacagatgatgcactcttctttgttaacaagcgcggcaggctgctacagttcatggttgctttgcggaaattcaagtggaaggactgccacagccctcctgacaccaagattgcattcatagtggaccaggaggtcttcagaagaaacatcatcttcgtgggacggccatgcgaccatcgcccctgtccctgg

SEQ ID NO: 60579 - DNA, 209 bp, Setaria italica
  Peptide Sequence Number=SeqID_126553
taaaattttctgtagaaaagtcccccttgcctaatgtccgtttacgaatgtgcaggttgctttgcggaaattcaagtggaaggactgccacagccctcctgacaccaagattgcattcatagtggaccaggaggtcttcagaagaaacatcatcttcgtggtaggccgcaacggtcgcctttgccgtacactcatactaactgtgtccc

SEQ ID NO: 60580 - DNA, 401 bp, Setaria italica
  Peptide Sequence Number=SeqID_126554
attacggaccatgcccaggttgatacatttgtatatttctattactgtgaatgtgaagtgtgaagcaatctaggtgttaggccctccatatgttaggttatccagtactgcatttgttataccgatatacataatgcatgaaatctgttgcctggacctgagttcaaataaatcgatcatgttcagcatacagtatcagggtttgcatcgcttaacatttgtttctttcttttggcttccaggatcatttgggtgatgttgtgtatgtggagctgccagaagttggcatcagtgtatcccagggaaagaactttggtgctgttgagagtgtgaaggcaaccagtgatatcaactcaccagtatctggagaggtcgttgaagtgaatgagaaactaagtgag

SEQ ID NO: 60581 - DNA, 430 bp, Setaria italica
  Peptide Sequence Number=SeqID_126555
tacgaaagcacgaacgagcccggcgacagagcggaaagcggcgccgagcaaccaatcccgcgccgccgcctacctcaggatctccaccttccccagggccttctccaccgtgatgaaggatctgaagtatgctcatactcatgaatgggtgaaggttgagggtgattcagcaactgtggggattacggaccatgcccaggatcatttgggtgatgttgtgtatgtggagctgccagaagttggcatcagtgtatcccagggaaagaactttggtgctgttgagagtgtgaaggcaaccagtgatatcaactcaccagtatctggagaggtcgttgaagtgaatgagaaactaagtgaggaacctggattggtgaaatagacaaagcccatatgacaagggatggattatcaaggtcaagctcagcgattc

SEQ ID NO: 60582 - DNA, 416 bp, Setaria italica
  Peptide Sequence Number=SeqID_126556
atatatagattcaaaagtacaggggtcagtcagcatctcacgctctgtatctttctcattcctttttagttgatgaaggatctgaagtatgctgatactcatgaatgggtgaaggttgagggtgattcagcaactgtggggattacgaaccatgccaggatcatttgggtgatgttgtgtatgtggagctgccagaagttgacatcagtgtatcccagggaaagaactttggtgctgttgagagtgtgaaggcaaccagtgatatcaactcaccagtatctggagaggtcgttgaagtgaatgagaaactaagtgaggaacctggattggtgaatgcaagcccatatgacaagggatggattattaaggtcaagctcagcgattcaggtgagctcaattcactgatggatgtcctc

SEQ ID NO: 60583 - DNA, 244 bp, Setaria italica
  Peptide Sequence Number=SeqID_126557
ttttaagttttaagtaaacaaacaaatactaggaattagactacctggtactcgtgtgctgtatcttggtgctgcttctggcacaactgtgtcccatgtgtctgatattgttggacctgatgggttggtctatgctgttgagttctctcacaggagtggtagggatcttgtcaatatggcaaagaagagaaccaatgtgatccccattattgaggatgctaggcacccagcgaggtaccgcatg

SEQ ID NO: 60584 - DNA, 236 bp, Setaria italica
  Peptide Sequence Number=SeqID_126558
tccaccatgcctgctgaggctgtgtttgctgctgaagtggagaagctgaaggctgaccagttcaagccatcggagcaggtgaccctggagccctttgagcgcgaccacgcctgcgtcgttggtggctacaggatacccaagaaaacaacatcaacaaagccacgactatctcttgattcgactaaattgctgcaaacacagcacaaagtttcaatatagctgctcaaacccacact

SEQ ID NO: 60585 - DNA, 227 bp, Setaria italica
  Peptide Sequence Number=SeqID_126559
cacacgccggttccagatatctacagatcgagccgctttgccgctgaggccagatgaggaggacgatggtggcaccagtgaggtgaaacggattcttgcctcatttcctcccaatcgcttgtgacttatctgcttgcaaataaccatcatttaaccttcagagaataggagagatcatacgccgcttcgaggagatctctcgagatcgagctgctctgcagcttgga

SEQ ID NO: 60586 - DNA, 168 bp, Setaria italica
  Peptide Sequence Number=SeqID_126560
agcgagagaattaggaagatcacacgccggttccagatatctacagatcgagccgctttgccgctgaggccagatgaggaggacgatggtggcaccagtgagagaataggagagatcatacgccgcttcgaggagatctctcgagatcgagctgctctgcagcttgga

SEQ ID NO: 60587 - DNA, 224 bp, Setaria italica
  Peptide Sequence Number=SeqID_126561
cccagcagagctcatttttccttgaacgtagaagctgagcaaggttgaagaagcaggttagggctctcaaggagtttccatggagcaagggggcaagccggtgcttgggtgggcagcgagagacgcctccggccacctctccccgtacaggttctcaagaagggtgcagagagacggcgacgtgacgatcaaggtgctcttctgtgggatctgccacacggacc

SEQ ID NO: 60588 - DNA, 223 bp, Setaria italica
  Peptide Sequence Number=SeqID_126562
agcagagcctcatttttcctgaacgtagaagctgagccaaggttgaagaacgcaggttagggctctcaaggagtttccatggagcaagggggcaagccggtgcttgggtgggcagcgagagacgcctccggccaccgtctccccgtacagagagacggcgacgtgacgatcaaggtgctcttctgtgggatctgccacacggacctccacgtcatcaaggaac

SEQ ID NO: 60589 - DNA, 489 bp, Setaria italica
  Peptide Sequence Number=SeqID_126563
aaagacaagaagaagaagaagaaactagattttgggggaggccaaagctgggggttggattagcgagagtcctcggagtcggttcgcggcggggggcggcggatggcggctgcggcggcggagaggcagctggtggttgctgtcgaggggacggcggcgctggggccctactggtccaccattgtgggggactacgtcgagaagatcgtgcggagcttttgtgcaaacgaagtgccagggcagaagcttgcaggggcaccacctgagcttgcattagttgttttccatacccatggaccttacagcgctttttggtgttcagtcgaagtggatggacaaaagatatcgattctttcctatcatggttatctggaataccattcagtggaggaggatttagcgaagcttctacttgtgaaggtctcgccgaagcactaatgatacttcaaggaactcctaatacaacccagagtcatccaaaccatgaag

SEQ ID NO: 60590 - DNA, 467 bp, Setaria italica
  Peptide Sequence Number=SeqID_126564
taactaagtactaatttgttccgggtctttattgtctaaaggttattgaatacttgccttgaccagagtacatgaacatacactagctgtttgtcataaatgaacatacactagctgtttggcatacatgaacataaactagatgtttggcattagtttagttgaatacataatttaactgatatcaaatttgctatttaaattcagctgtacttgtgccatccaggatcactattttgatgtgataaccaatgttgtcggtctggtggctgctgttcttggggacaaattcgtatggtggatcgaccccgcgggggctgtactgcttgctgtatataccattgtgaactggtccaaaaccgtgttagaaaatgcagttaccctagtgggccgatgtgcccccccagagatgctgcagatgctgacctacctcgccatgaagcatgacacacgagtcaagcgggttg

SEQ ID NO: 60591 - DNA, 244 bp, Setaria italica
  Peptide Sequence Number=SeqID_126565
tcaatggcagatctccatctctaagacttaattcctctatcaagaaatgtttaacttttactatctgtcaaacaaatgcaatgtagaaatgtctgtacaaatgagtaatgactaaaatgagtttttcgtcaatatattaggtttccaggtcttggtcaaagctattgagcaattggtggagaataaacctggcgcgaagatgacatcagagcagctaatatggttgtactccatcatgctttca

SEQ ID NO: 60592 - DNA, 213 bp, Setaria italica
  Peptide Sequence Number=SeqID_126566
agcgctgacatgtccagcttcatggccatggcgtcgccggcggtgtgcgctgcggcgacgacggcgatggcatgtacttctccgcggaggcccccgacgtgccgtccatggtgctccccacctgcgccgacttcgacgggttccaggcggcgaccaaggatatggtgaagaataagaaggggacgaccacgctcgccttcatcttcgacaagg

SEQ ID NO: 60593 - DNA, 176 bp, Setaria italica
  Peptide Sequence Number=SeqID_126567
ataatttgacggggcttcttacttccctttcttcttcgcagatcccggccggagtccagcgccccacccggcaccaaggcttgccgtgaaaagctccggagagacaggctcaacgaaaggtgcgtttcaaagttcagacttttggctaatacgagcctagtggtctacagatgctt

SEQ ID NO: 60594 - DNA, 207 bp, Setaria italica
  misc_feature (182)..(182): n is a, c, g, or t
  Peptide Sequence Number=SeqID_126568
tccatcaagagcctcaaggattaactgacaaagcccttgcatatcattcctgtgaactttggagtactatgtgttagtgacttagttcagagattttattgttcaatgtgtgactgcaggctgagaagtctgagctgcgtgacgagaagacgaggctgaaggccgagagggagaggctggancagatgctcaagggtgtcagcgccg

SEQ ID NO: 60595 - DNA, 170 bp, Setaria italica
  Peptide Sequence Number=SeqID_126569
cgcctcgtggcacaccctccacaacatcatctgcggcagcgccggcaagatcgacaagtgcctggaggtggtccgggaccttggccttcaccgcgtagctgcactgcacggggaggagctcgtcgtccctgccgtggtagatggtgacgtcgcaggtgagctggtcccgg

SEQ ID NO: 60596 - DNA, 304 bp, Setaria italica
  misc_feature (173)..(173): n is a, c, g, or t
  misc_feature (264)..(264): n is a, c, g, or t
  Peptide Sequence Number=SeqID_126570
agatcacccgagaccgtttgctaattgaaatgctgagatcgactcggaagagctcaaattcaacatggaaggttcttatcatggacaaacttacagtcaagataatgtcattttcatgcaagatggcagatatcacagaagaaagggtttcatgtaagtaggtttatcaaatntgttttattgtgttatattatcttgtataaaagctccagcttttctactgactaagcatttgttgtatccatttctttctctctctccctntcaatattttgcatctcgacatgtaaataatctgtagtac

SEQ ID NO: 60597 - DNA, 268 bp, Setaria italica
  Peptide Sequence Number=SeqID_126571
cttgctatctgacttttcttccacactttcagatgaacctggaatactttgctattgatagtcaggtacctttgcatgtgtgaaccctttttgacttgtttctgatgaacttattagattcgtactctaaacagaaacctaattcatctcctttttattaaattcattttgaagttttaataattaaatgttgcttatagggctttgtaactgaccatgacaaggccctagcagagttgtttactgaggatgcggaatgctcacacaa

SEQ ID NO: 60598 - DNA, 231 bp, Setaria italica
  Peptide Sequence Number=SeqID_126572
ccgcgccagaggagtacggcgggatggggctggggtacatgtaccactgcatcgccatggaggagatcagcagggcctccggctccgtcggcctctcctacggcgcgcattccaatctctgcatcaaccagctggtacggtgatcggtccacagtaataatactctgctttggttatgacacatgctgccatcacagcatatacgaaagcgatttgcaaatgtgcgtggtt

SEQ ID NO: 60599 - DNA, 331 bp, Setaria italica
  Peptide Sequence Number=SeqID_126573
ctagttctcttttaggttttttttttttttgttttttttttgctcaacgagatgttttattccataattatgttgtgcctgctaacttaatgagtccttagaaatacagtgttggaactacttcaataatttacactgttgcagcatcaagagaaaaatgaaagaacttgaaacctaagaccacaaactcaggaccctggtataaggttcatcatcagctgctaccacagtatctcctatttgcggtctctctcacagcgaaactctcaagctgatgtaggaaactacaaccgactaggacaataggaacttagacttacaacctagacta

SEQ ID NO: 60600 - DNA, 468 bp, Setaria italica
  Peptide Sequence Number=SeqID_126574
ctgccacaaaccagcaccggagtagacgattggggtggtgtgcgggcctcctcaacaatcttcatgatatcttcgacagtttgatcagagaaggtgggggcactgttgtccttcttgtagtactttgcttgcacagcttctgtaagctctctgggcaagttcttcaggaaccagggtgattcctaatctccctaatcgtaattctctggaaacaaaaaagagatgaaatggcattaacctagtggtaaacccatagtaaaatggctcgcgctttgcagggttcactgcccaacagtacctttgcaggattcgcaacgaagatcctagagaggagctgtctgcaatcttgggatatgtggacatactctggtatttggtattgaattgacactattctcccaatcgtctttctgaaattcttgggatcatcggggtcctcaaaagggtatgcaccgaccagcatcacgt

SEQ ID NO: 60601 - DNA, 201 bp, Setaria italica
  Peptide Sequence Number=SeqID_126575
agctccttggtctccttgttccgcatgagccgcgccaccccgaagttgccggagccgatgtccttgagcagctcgtacctctccatcgaatccccgccgcgcgagggcccgaggatccgatcggattgcaggctggcgcgtggggaattcgcccccctgggggttttggcgttggagaggaggagagggggagagagcgcg

SEQ ID NO: 60602 - DNA, 359 bp, Setaria italica
  Peptide Sequence Number=SeqID_126576
gatgatcctcaactggaagcaagatggaatgatacctgaacatttctgttcctccatctcatacgcttcttttctttcagtgacgcagcagttgcactttgatcttgcgtcaagagggcttctgtttgaatcaatgaaatggattgagtacatcagccgtgctccaattcctgaaaacataacaaactgaggatattttcagaaagcatgaagctgttagcttttgcactagttttattgggatgcctacaatcttctgctgctgcagagttccaaggtaaggccttaaatgaataagatattctttattagctagcattagataagatgatagtatatttaaaattgaaaatgttgac

SEQ ID NO: 60603 - DNA, 439 bp, Setaria italica
  Peptide Sequence Number=SeqID_126577
tatttcggcagccgttgattacaagtggacggcttggatcaatctgagctgtctgtttgcacgatccaatgaactggccgggagtacctccacttcagagagagctgtgatatatttgacccattcaattctttgtgcaccactagctaaacacttgttcctcagctcctctccgtgctgctgagaataagcctgctctcctctcctcttcaatctcagccttcaccccgggagacagctcaaagaaagaaagttctcagaagcttggagcacaacttgcctgatacttcttccttccccttttctaggtaagttcttgccggccttccttgcatgctcacatacagaactgcctgtttgacttcattgtcgtcgtcatcttcttggagcacctgtttgcttgactggattgcttcctctccattagagtggtttgccg

SEQ ID NO: 60604 - DNA, 322 bp, Setaria italica
  Peptide Sequence Number=SeqID_126578
taccaaaactagaagactaagttacttactcactgtagacataattcaataatcttaattttattttgaagtagattcttggcatgttcaggtatcattccatcttgcttccagttgaggatcatccttagaatccttctctgagcatttctgttcctccatctcatacgcttcttttctttcagtgacgcagcagttgcactttgatcttgcgtcaagagggcttctgtttgaatcaatgaaatggattgagtacatcagccgtgctccaattcctagaacagtcataggagttcaaaccactaaggcagccaccctgaac

SEQ ID NO: 60605 - DNA, 210 bp, Setaria italica
  Peptide Sequence Number=SeqID_126579
ctgaccgtgagattgtcaacttagcttgctgcagctgttatttacctactggaagtagaaatgttgtcctaagttatgctgtaaataaaatgacgctgtatatataggtatggtcgtattgggtagatgatgagtagttgttgcaagaacactgtactcgggcaaacggaagtaatgttctgcgtattactaaacttcttgtaaccctaa

SEQ ID NO: 60606 - DNA, 208 bp, Setaria italica
  Peptide Sequence Number=SeqID_126580
aagaataatctgtacatgggtagagacagagagttttgacatgatgagaacaggcacagattattcttttctttctccccctccacgaaccaattcttctttgtttctctatggacttacatcaaaagaaaaaaaaacaaagaagcatcacaggaacaagaacaccatcatcccgttccatgcaattcagctgatcgactgctcaaat

SEQ ID NO: 60607 - DNA, 456 bp, Setaria italica
  Peptide Sequence Number=SeqID_126581
gcttttgggctgaggtgaatgtctcatttggggttttggagctgaaggcagaacatggcttccttgccattggccaccgccgaagcatgtgatgctaatgctggtttaattctgaatggcgatctttatgccctccaaccaatcttccgtatctacggaaggcggcagatttttgctggccctgttgtgacactgaagatcttcgaggacaatgttctgctgcgtgagtttctcgaggagaaaggtcacggaagggtcctggtggtcgatgctggtgggagcatgcggtgtgctgttttgggtggcaacctcgcccagctagcacagaacaatgggtgggctggcattgtgatcaatggctgcatcagggatgtcgatgagatcaatggctgtgatgttggtgtccgggctctaaactcgcacccaatgaagtcaaacaagaaaggtgtgggtgag

SEQ ID NO: 60608 - DNA, 236 bp, Setaria italica
  Peptide Sequence Number=SeqID_126582
gtttgaaggggatgtgcgcaccattgtccagaagcttgaaaatctcatcgctgtactcctcaatcttgtcctggacgtacatcttgccaccgctcctgttcgtctgctccctgctgagggctttgtcatacctgaaattgtctggatactgcttaagatagcttgtgtgtccgccgtgcagtttattatgatcctgacaatttcaggtatgacaaagccctcagcagggagcagta

SEQ ID NO: 60609 - DNA, 251 bp, Setaria italica
  Peptide Sequence Number=SeqID_126583
ccgttcagatgaggggccctcggcactgcactgcagatcctccatcgcgcagacgacagtcttcatctggctcggaagcgacgggcagccggcggtgaacttggtgttcttcgaggagaagaaattcaccgtcaggttcaagctgaaacatagaaacatcgcacttcacatcaacaccatccaataaagaataaaggaagtggcttttcttacctttcccatgaggggaggttcagcatggtgtaggcgag

SEQ ID NO: 60610 - DNA, 282 bp, Setaria italica
  Peptide Sequence Number=SeqID_126584
ggatttgatttcttatagttcctgccagaaaagtaccccggacccagacgaactcttgggaaaatccgtccaagcaagctagggttacttacaaacaaaagaagaaacaagaactatggttctctcccgctcggccgctccacgccggtctcttccagtgcgaaggggccgagaagcgcgacgcctcccaaagtcccagcgaggaggacttcggcggaaagaggcgtgcctcttccgccaccggcacccgcggcggcgatgatgtaagcgcagcagattgcg

SEQ ID NO: 60611 - DNA, 490 bp, Setaria italica
  Peptide Sequence Number=SeqID_126585
gtaaatacctacatctttgcgaatctgagtttaacttagcgtcaccaagtagttatatgagactagctagtaacatgaaacttcattgctactgcagtaccagtggatcactgccatactgttccacataattaacaccggttattcatttgctattgaaacttttgatcctcttgcatgcatgtatatgacccacgatatatcatatttcctggatttaagtacggttatcttatttattggatttgttgaaagagtgatatccactagttttgcataacatttgttgtgtactcgtatcagttgaagctagcacacatttttatggcacctaatgtagaacaacaatagccaagttttaacattagaaatccaccatagctgtggtagtatttataatctctctggtacgattcattatcaggaatatcacttgatcaaccccttgtaacctcttgcggcactggtgtgacagcatgtgtattagcct

SEQ ID NO: 60612 - DNA, 218 bp, Setaria italica
  Peptide Sequence Number=SeqID_126586
tttagtattttggtcatgtcatcatcatcccattgtggaactgcaagaagaaaaatagataagatacattgttgatggtaggataagggaagcaaagaaaagatatgcatgcacatttctgtgaggctgcacatgcatttcgtcagggaagagttgcacactaacctcttaaacccctcgtgaggagattaaaatgccaggagcctttctcatctgta

SEQ ID NO: 60613 - DNA, 497 bp, Setaria italica
  Peptide Sequence Number=SeqID_126587
ttctttaatttggttctttatttctttctttgttagttcctttatttcttagttttgttttggttttctttgtttctttttcttagtttgttccttgtagtctagttctttgtattcttttgtattcagcagaaacccccaatgcatctgccattcctgactccagcaattcctctctcgccccttgctgtgcgttaccactggtaatcctcttcaacgctcccttgaggttattaagatctgacttgtactccctgatctttgctaggagcccagctctaacgcttggttggaggctccttgcttcaagatccatcttccttatcagtgcctcggcgccatcgatgccagatttgatctccgccgccttctgcttcagcttctctccttggagggctgcggcagcggtgcatttgcgagtgagggaggcggaggcctcgcagtactggcgctcgtagccctcgagacctcgctcatggcgtcccgatctcgatccg

SEQ ID NO: 60614 - DNA, 188 bp, Setaria italica
  Peptide Sequence Number=SeqID_126588
taacctgtgtgtatttcttttgtgttacctcaacattggcaccccatacaagcacacaacacacaaatatggtctgaacaaaagaaataggaaatacaaaagaaatacacacaggttacaaaatgcagatagaataaaagaaattcaacaagactagaccgtacctaccgtacctaggttagacggta

SEQ ID NO: 60615 - DNA, 473 bp, Setaria italica
  Peptide Sequence Number=SeqID_126589
ccgacgcggatggcagcgtcatcggatgagggtcctggtggtgcctatggctgggctccgaggtcgtacacgcgggaggatgtggtggagctccagtgccatggcaacgacctctgcttgcgccgcgtgctcagggcttgcctggaagctggcgccaggcttgctgatcctggcgagttcactcttcgtgcctttctgaatgggagattggacttggcccaagcagagaacgtgtcaaggctcatttcagcaaaatcaacagctgcggcagactcagctttagctggcatccaggtaatcagttcatgggcttacattgatgacaaccatctccgtttacgtatacattgacataggcgtttcaaattaggacttttgagcttaaacttggaaccccagaagcttaagccgttccagagtggctgcagctgaaacagattcatattaggataaggaagaagtccagataacac

SEQ ID NO: 60616 - DNA, 248 bp, Setaria italica
  Peptide Sequence Number=SeqID_126590
atggtgctatatgcttggcacgaagtttcaagataatcaatgaatcttttgacgtcacttgacctgggttttaatgagattagagatgacggagcgtttgcattggcgcaagcactcaaggctaatgaagatctggcagtcacatcattaaatcttggaaacaacttcttcacaaaatttggacaggttagtttagtttgttttcatctatcaatgattatctgtgaaagcatacttaatttaatttc

SEQ ID NO: 60617 - DNA, 329 bp, Setaria italica
  Peptide Sequence Number=SeqID_126591
accaacaacatttccatgaatctgaaccagaaatagacaaaagggcacaccagagtacggaacttgttccaagaagctcgacagtgtgcacctagtattgtatttattgatgaaatcgatgctattggtcgcgcaagaggacgtggaggtttttcgggtcgaaatgatgaacgtgagagtactttgaaccagctgcttgtagagatggatggatttggaacaacttctggtgttgttgttctcgctggtacaaatagacctgatatcctggataaaggcattatttaaagggcccaggaaggtttgatcgccagataacaattgacaag

SEQ ID NO: 60618 - DNA, 243 bp, Setaria italica
  Peptide Sequence Number=SeqID_126592
cggattcctctcaccggatggatctgcggtctcagagggaaagaggcggcgaggacgtggaggtttttcggggtcaaatgatgaacgtgagagtactttgaaccagctgcttgtagagatggatggatttggaacaacttctggtgttgttgttctcgctggtacaaatagacctgatatcctggataaggcattattaaggccaggaaggtttagatcgccagataacaattgacaagccag

SEQ ID NO: 60619 - DNA, 127 bp, Setaria italica
  Peptide Sequence Number=SeqID_126593
aagaagaattacgagaactactaccccgaaggggtaagaaggaggtgcccaaaggtgacgggagtaacaagtccgaatcgaagcagtctcctggaaattccatcctccctcgtctgttgattcctgc

SEQ ID NO: 60620 - DNA, 487 bp, Setaria italica
  Peptide Sequence Number=SeqID_126594
agagttaccagttggtatcacctttaattaattcaatacatagacagacaaggcagttagggtaggtgatacaccaacaaggagataaattattgttattattattatttgccaaattcagatgcaccaaataaatgtttatttcccaatagcagtgcgaaaacacaagacattcgcagcttcgacatgttccgtaacaaaaataatacacttcgagttcaagtggaaccaaccttggtttgtgttggtgaagaagttagagccgcttcctccgtagctttactgggcctgattttcacctttggcaacatcagtagcttctttgctcaacgaagctttgtcaacattttctttgcattttttgagctaacatactgttcttttttgtcagtgtaacaatctgtaccgcacagaaatcagggaggggttaaaaaactgcctaagatatttacaccgattctcatgctagaattattcgtcctaacta

SEQ ID NO: 60621 - DNA, 260 bp, Setaria italica
  Peptide Sequence Number=SeqID_126595
tttcagactcaagttcttctcgagtatcaaagaaagtctcaggctcatcagtaactgctgatatctttagttgggttgtgtgaggtacagtatccctcttcccatccaaccagtctaaatggttaaagatatctagcaccttagcaaactcttcaaccccaagtccttgtttctcttgatgaataacaggctctgttgtgacatgtgaagtaactcaaaccgaaaatctttagggaattggtcttttgcattccataaca

SEQ ID NO: 60622 - DNA, 216 bp, Setaria italica
  misc_feature (129)..(129): n is a, c, g, or t
  misc_feature (182)..(182): n is a, c, g, or t
  misc_feature (197)..(197): n is a, c, g, or t
  misc_feature (204)..(204): n is a, c, g, or t
  Peptide Sequence Number=SeqID_126596
cccaaggcttctgttgcagggaacctggtgatgcatcaagagccaacatgggtgctagatgatcatattgcttcctctagccccagcaactctgcaaatgagaggcaatgcattcacatccaaaacctntggaagagtcagcatctcacgaagatgatcagccaagtccattgtcagtttgngaatcttcctgggcncagaagntggctgttcagg

SEQ ID NO: 60623 - DNA, 499 bp, Setaria italica
  Peptide Sequence Number=SeqID_126597
agacaagacctagaaacaaaagcttcctccaccgctgccttcccttcctccggcgcgcctgctgccatggggaagaggtggctccccctcgaggccaacccggacgtcatgaatcagttcatgtggggactgggggtccctgaggacgtggggttctgcgacgtgtacggcctcgacgacgagattctcgccatggtgccccagcccgtgctcgccgtcatcttgctctatcccccaggaccggatcaaaggaatcccaggcttcgattacctcaccggtggaaaccaaggtgagtctgaattgtatgaatgtatggttgttcagatagttggtttctatcgaagatgcccaagcctttatgatacaaagcagtttattcggtggaattagagtttgcttgactgcttctcactgtagatgcagggaaagtggacaaaatgatatttcaaacttgtatgttgattttcttgtgtgattgtaggtgaacatcaatcagaa

SEQ ID NO: 60624 - DNA, 467 bp, Setaria italica
  Peptide Sequence Number=SeqID_126598
aactttaaatttagacaatgaagccatagaaccaaaagttgtgcaccgtgatattaaatcgagcaatatcttaattgatgaagaattcaatggcaagctttctgattttggactggctaagctcttgggcgcagggaagagccatatcacaactcgagttatgggaaccttcgggtatgttctttgcttgctctttcatttttctagtgctttgcttcactaatgggaatgtgtggcattcgcttactgtaggacactttacatgttgggagctttgtttttcatgaaagaacaattagctttgtggaagtttacatgaaaacaaccattcgtatgctattttactaccgtttcaggtatgtggcccctgatatgccaacactggtctgctaaatgagaagagcgatgtctactagttttggggtgctactactggaagcagtgacgtgggagggatccgagttgac

SEQ ID NO: 60625 - DNA, 162 bp, Setaria italica
  Peptide Sequence Number=SeqID_126599
cgaccattctctagatatggttttccctttcatcaaatggatgccaaatttcaagcccattccatggaccttactggcgatttgactaaaccctctgtcaatcctagatgatggaaacctttgaaggtccggaaatggtcgaccccattcatcaatgttatc

SEQ ID NO: 60626 - DNA, 260 bp, Setaria italica
  Peptide Sequence Number=SeqID_126600
ctccatcatgcggatggtgcgccaccccaaccgtggtgggcatccgggaggtgctcgccagccgctcccgcgtcttcgtcgtcatggagtacgcccgcggcggggagctcttcgccaaggtcgcccgcggccgcctcaccgaggaccacgcgcgccgctacttccagcagcttgtcgccgccgtcggcttctgccaccgccgtggcgtcgcgcaccgggacctcaagcccgagaacctgctcctcgacgaggagggccgg

SEQ ID NO: 60627 - DNA, 427 bp, Setaria italica
  Peptide Sequence Number=SeqID_126601
tgttccaaagagtgactgttaccgaaacattttgcagaaggaacatacttaggagtcctgagatgaggagttctcttcccttgccatccacttcgtttccttcagtttctgatgtatggtttctttattttaattgctgagctaacagcactgttctttcattctatgaccaatttttagaaaggggattagtgactatcactaatgcttttttaccattctctgctagaagaaatataagtgtttgtgtaccactttttcacttttcttttgttttcgaaatttgaagtatcactcccttgttgagcttattaaatatatgctgtgtatggtacaatcaatttagcttgaagaaatggtttcttccatgtttgcggatgtgtggaagaaagaattaagtaattaaccattactatctgcttctctc

SEQ ID NO: 60628 - DNA, 306 bp, Setaria italica
  Peptide Sequence Number=SeqID_126602
tcattggcgtattaagacctatcttgctataagtcacatggatgctggaaaaattggggtatttaacataatccataactcttgtctgttcaaccttttttccatcttattaaaactctatcttgcccatgcttccttatttttctttggcagattattgttgcagacatgaggaaagtgttggcgaaaaatccacatatagaacaacagaagctgcatagaagagtattttttgagaaaattgatccaaaaaccaagcacttatgatatacatatcctgttttgttaagcatcacgtttcgagga

SEQ ID NO: 60629 - DNA, 195 bp, Setaria italica
  Peptide Sequence Number=SeqID_126603
cctcatctcaggactcctaagtatgttccttctgcaaaatgtttcggtaacagtcactctttggaacagctgggatcataatgtgttgcgaagtaactacaggcccatgctttacacacctcacagatatagatcttcaggctttagatcttttgccttgccagttccttttcagaaaattcctcttgtcaagag

SEQ ID NO: 60630 - DNA, 245 bp, Setaria italica
  Peptide Sequence Number=SeqID_126604
cactgattttgccccattattgtaggctttacagagtaactcttgttttcattgcagaggcaagactgctggggtcataatgtgttgcgaagtaactacaggcccatgctttacacacctcacagatatagatcttcaggctttagatcttttgccttgccagttccttttcagaaaattcctcttgtcaagagcgcatcattagcactgactaggtcatgtgataagttactttcaaatcctgc

SEQ ID NO: 60631 - DNA, 460 bp, Setaria italica
  Peptide Sequence Number=SeqID_126605
tggactacatcgacgtcaaggattccgccgatggctggaatgcaatcagagacatggttgtccgtggtgctccagcaatagccatagcagcagcattagcgttagctgtggaagtttctggttttagattttcactggtacgcctgcaggagcagcttcttttgtttccaagaaactggaataccttgtatccagccgcccaactgctgtgaacctatctgatgctgctacaaagcttcagactttggtgtcaaagacagctgaaactgcgaaagatgccaaggctatatttcaggtctacattgaggctgcagaaaccatgcttattgatgatgtggccgataataaagctattggctcacatggagctgaatttcttcaaaagcagcttggaaattcaaaaaacaatctactagttactaaacccaattagtaaataacgggacaagtacttagacta

SEQ ID NO: 60632 - DNA, 238 bp, Setaria italica
  Peptide Sequence Number=SeqID_126606
ttataccagccattgcacagtcaatcaatctttgaaacatttctgtaggtacaaatagatattggccaacactcaaaagtatctttgatcagcgagcatgggatacgcgcaccatggagtcaatatgccgatcttgcaaatttgctgtaaggacatgcggaagggccatgggaacgacgattggtgcaatgcttgaagaaatccaaactctttaccaacaacacaagcagtcttgctt

SEQ ID NO: 60633 - DNA, 380 bp, Setaria italica
  misc_feature (312)..(312): n is a, c, g, or t
  misc_feature (361)..(361): n is a, c, g, or t
  Peptide Sequence Number=SeqID_126607
ttcgaacgtccagtttcactagcacgatcacgaagatggctcagcctctgtttctcattttccaaccaatctttaaatcgcagagattggaatattttagctttctcatagatgtcccccacttttaaccgggtggttagaccaaacttcatactctgacgtaagcgcttgcattcctcctacacaagggcatgcaaatctacagtttagagagaagaaagaacaagaaactattctactgcaacattaataatgaagaatcagaaatattgcattttaatagctagataaattgcgatggacaaaaaaagntagtccagcatgtatataatagatgaagtaatagattcactatggggtnattctaattgtcagctaac

SEQ ID NO: 60634 - DNA, 185 bp, Setaria italica
  Peptide Sequence Number=SeqID_126608
tcaattcctttcgacgtccagtttcactagcacgatcacgaagatggctcagcctctgtttctcattttccaaccaatctttaaatcgcagagattggaatattttagctttctcatagatgtccccctctgtgaaatcctgattagagatcgtatccattgtgataacctcctttttatccaaa

SEQ ID NO: 60635 - DNA, 136 bp, Setaria italica
  Peptide Sequence Number=SeqID_126609
ccctgaggttgccagcctgaagcttttgtgctcccatctagagatggacctgaggcagcacttggttttggttttacctcttctggtactccaggacctgtggtggcacttgaatttccactagtgcgactgagta

SEQ ID NO: 60636 - DNA, 248 bp, Setaria italica
  Peptide Sequence Number=SeqID_126610
tgtagcatgtttgttcatcagtaaaaaagggcaattgttgttcaaaagaagacagcattttccttatgcatgctatactgaaactctgttatgaacttttgggattaaggttgctgagtgctgcactgaactctttcttcatcgttttcaggactgtgggatgctttttggatgaatataggagtatttatcattcagtgcaagaatcggacaaagacgcctcccatccgttgattattccagcgtag

SEQ ID NO: 60637 - DNA, 392 bp, Setaria italica
  Peptide Sequence Number=SeqID_126611
tggcacgcatgatatggaccatagaaagcttggttcaaaccagatggtgctcgatatgttgattactgatctggttcttggacaagcgcttgctccttatttaacttacttgatattctttgttgttaaagtaacgggagaacttaagtctgagtgtacacagaagcattaactccattaaaatagactgcatccaataaaagtaaactgcaggcatagacctccagtcctctagaaaatagagcattcaacggctcatagtcaacagctttccagcaaccaaaggattttgctccttcttcaataactttttaacagtcttccacttgaatggcttgatgttcacttgatcaagtgacaacacaggtccagccgaatcagatgtaataagc

SEQ ID NO: 60638 - DNA, 497 bp, Setaria italica
  misc_feature (137)..(137): n is a, c, g, or t
  Peptide Sequence Number=SeqID_126612
atgttgattactgatctggttcttggacaagcgctttgctccttatttaacttactttgatattctttgttgttaaagttctaaaagttagaccattttttcatcttatcatatgttgattgattatttatggcttnttaaaaaattctctctttcagagtattttgagcctttcatacgttcgaagtatatgatggtgaggtatttttgtgcgtcgaggatgacaaggatgattcatcagaggaaagctctgatgattcaagtgatgatgactgaattcatgtttagaagtgtttctcttaagtcattgatatagccatgtttagaagtgttttcttagagtcatcagttattttgatgtaaaatattactccgtgcattgcatggagcctcccctctatcgtggtttttgttaatggaagtttacatgaataaaattatgtatataaaaaatatagagcaaaggggtataatattaatatcaccatacagactcc

SEQ ID NO: 60639 - DNA, 237 bp, Setaria italica
  Peptide Sequence Number=SeqID_126613
acacatttcgcaaaagacaacataaatataaaagaatacaatttacatgaaaaagcataccaacagctttccagcaaccaaaggattttgctccttcttcaataactttttaacagtcttccacttgaatggcttgatgttcacttgatcaagtgacaacacaggtccagccgaatcagatgtaataagcttatcgaaatattcaccaatttgagtccttttctcaacaaaatcctt

SEQ ID NO: 60640 - DNA, 186 bp, Setaria italica
  Peptide Sequence Number=SeqID_126614
ggaaagatccagaatggtgccatcagcaccagaggaaaccagactgaatttagttgattattgtgcactttcttctcaccgatctctgttgcatccttaatgaatatgttgtcacttcctgtattcagtatttcagtctaaagaagaagagagttaaacaagcgcacatacaaggatgcaacagag

SEQ ID NO: 60641 - DNA, 450 bp, Setaria italica
  Peptide Sequence Number=SeqID_126615
taactgatttcacttgggcggattctactgctggacactcatgcccttgtggctgtgcggttatggaagggctatcgtgatgcttcatgtctatttgtggagatgcttctaaataaagacaaggcttcatcaagttcaatgcatacagaatatacaaagagtgactactgtttgtgcctagcaatccatgccccacggaaaggcataatagaggtttggaagatgcggactgggtcacgcctcctaactatcccatgccccaaagggagcagaatcttgcaaccctcagcgaggctctcatcaacatactcgtataccccactggaggtttacttgttcaacaaatatttctgtacaacacttgcagtaacaatttaataccacaaaagaacagacaatagtcatccaacgtgactattcaaaactgacaactgtccagagtctccattg

SEQ ID NO: 60642 - DNA, 359 bp, Setaria italica
  Peptide Sequence Number=SeqID_126616
ccctttggggcatgggatagttaggaggcgtgacccagtccgcatcttccaaacctctattatgcctttccgtggggcatggattgctaggcacaaacagtagtcactctttgtatattctgtatgcattgaacttgatgaagccttgtctttatttagaagcatctccacaaatagacatgaagcatcacgatagccctataaaattattacattggaaatgataaaagatataaaaaatgacaatccaaaaagcattctgatttcatgattttgcaaaaagagctactcagctgcattgccaatgttcttaagtgccaatgacctgtgctgggctcttggttgttgtaagctaattt

SEQ ID NO: 60643 - DNA, 332 bp, Setaria italica
  Peptide Sequence Number=SeqID_126617
ctttgttgcatctgtattatcattggttagagaaggatcaggcaaaggtgcatctgaacaagttgtcacctcaggggccggcatcaccaaatttgtcaaatggaaagacaacattaggagattcgaagaacttggtaccatcccctacatccacatgtcatgtgggtttagaagatggacagtccattaccaaggaacttctgcttcaaatgatgtagatttgtccgctaatggcatactccgatcaaactctatcaatgcaaagagtggttctgggcaagatgcaccttggatgctactccagcggccatgtctgtagagcctaataacct

SEQ ID NO: 60644 - DNA, 303 bp, Setaria italica
  Peptide Sequence Number=SeqID_126618
taccaacgacaatagtaagtacaactaatactagaagactaagaaatagacacaatcttcatcctgcttctcctcttcttgttttcctttatctttcttcacttgtgcatccttccctttcttacttgggctcctgtgaaactccttaagcttcttgatctgcctctccacaacttccctggagtctggttttgcagatatcaaaattactgcatcttccccagttacgtcatcatcatctgaatcaccttgatcatctccttctacatcaccatggcccaccttcctcatcagcagaatcta

SEQ ID NO: 60645 - DNA, 191 bp, Setaria italica
  misc_feature (176)..(176): n is a, c, g, or t
  misc_feature (185)..(185): n is a, c, g, or t
  Peptide Sequence Number=SeqID_126619
ttgctgtcccaactgttgctatgtgtgtgttattccatgtattattgtctacaataacggttctgttggccattgcagttgtctgataaccatagtcccaccaagatgcaaccttatcatctacgtctgtgttatggcgcagccatccataagcttcacggaaatcatcaaaaacntgcaacccntcatgt

SEQ ID NO: 60646 - DNA, 414 bp, Setaria italica
  Peptide Sequence Number=SeqID_126620
agtagaccgaagtaaagactaaaagaagttaagccaacaaaataatattgaggatgaatggaagagaatcatcaacggtgtagaggtctgatgataatctgtgtcatgaagaatcatcaaggccaaggggcatttcaacctttcagagcttactagaaagtagaggcaatcatcagataactaaggtaccaacctgtttagaatccgaccactgggattttggtcaaagaaacaaaccggtgcactgataatattttcaagaagagatgcatggatatggattgctgcacggaggccaccaaatgcaaaagaaacgcccttccaacgtgaaaagagaatttattatgccaaacacagcaaggataatcagataaaaactcgtagttgttggtgcctgtgctggtatcaacccag

SEQ ID NO: 60647 - DNA, 233 bp, Setaria italica
  Peptide Sequence Number=SeqID_126621
tacacccagtatctgcctcgcttcctgctcggtcattgatttgctggctctacgaatattatttattgcctcatgtgccacgccagttttatttgcattatcaagtgctttacgatatgcctgaagcatagctcttcctagaattgtagagcccatgacaatcaggtttgcaataagcgaggcagatactgggtgtatcaaataagttgtcataccgctgtacaatctcttcc

SEQ ID NO: 60648 - DNA, 268 bp, Setaria italica
  Peptide Sequence Number=SeqID_126622
cttatcagactattcttcaatgaaggatcttttttccttttttcttaacagatgatgaagattgtccaggataaatctaaaattaattgaacaggataaaattgtgagtaatcctaacacaggggtgctgtttgtcagtaacttaggagttcataataggcgcttttacaaagagctgaatttgtgttggaagtaaataaaccgtaccgttttgaaaaggaatttgtcgtgcgacgtcttgtcatcccaaagcaacactacaacgcgg

SEQ ID NO: 60649 - DNA, 272 bp, Setaria italica
  misc_feature (250)..(250): n is a, c, g, or t
  Peptide Sequence Number=SeqID_126623
ttttgtgctggcataacgaggaaccaatatacagtgtactcctgaatgactgaaaaattttctagtttcctcgtcatgtgtatgcatgacaccatccgttttgaaaaggaatttgtcgtgcgacgtcttgtcatcccaaagcaacactacaacgcggactccctcacgaaccttccccttgaggaggtccccgagcgttgccggcgttccaccgggcaatggcttggtaggctccctcacaagcttgacngggtggtaaatggaccagccga

SEQ ID NO: 60650 - DNA, 237 bp, Setaria italica
  misc_feature (5)..(5): n is a, c, g, or t
  Peptide Sequence Number=SeqID_126624
atacngaactgatttctctggtagaggagagctatcagcaagacagatgcacctggctaagtttcttaggagccttcagaagttagcagatgaggtaatcagcttttactttgatcactgatggcaattgaaaatattagttctattgaatttcatacatttggtcttgcaaatattactacaactgaagttttatggaaaatttaatttgtctaaacctaaaaattattggtaatt

SEQ ID NO: 60651 - DNA, 427 bp, Setaria italica
  Peptide Sequence Number=SeqID_126625
gcatacaatatcctggaatacgtactatcatcttaaatcgatgccgactacttccagaagataattctaagcaattacactgaaccaaagatcttttcctcaacaagataactgaaacctaggagttaatgtgagccaggcgtcaggcacacatcatgacgcccatcgaactaccatcagcaaagtaaaattagactgccattgcccctaatgacataatttacaagcgtttctacatgtaaagccaaataggtcatgcaacaccaacaagtgtatcaaggcctagtgttcatgcttgacacgcccttttagtatccctccattggcaacaggggcttgggtgccatcagtttcttctttgccagataaccccatagctttcagtacaaaggaatcatcctgcaactcaaatggagtgctattgaag

SEQ ID NO: 60652 - DNA, 380 bp, Setaria italica
  Peptide Sequence Number=SeqID_126626
ccagaagacgacggtgtagctgagctcctgccctctgaagccgaagccgccccacgaagtcgagcagttctcttcctccttgctcgaagcttatgagagtgtatggtgcgctgatgtggtctcttggaaaagtgctaaatactcctgaggttgtgcgtgtgtacaatggctggatgtagggtgtcaacgaaatacgatacaactttctggctggttttgcggcggggctgtaaaatttaatttggaacttgaagggtacaaacaagggttatactagcagtgaacagcccatatgtggttgggggcaaccattacggcgtcgtcgtctccatcaaggttcagtacaacttagacggtaagacaacaatagtagtaaacaa

SEQ ID NO: 60653 - DNA, 314 bp, Setaria italica
  Peptide Sequence Number=SeqID_126627
atggtcgaactaaatggttaatttgttaactcggtggacttgttgtattctctggaaccgctcaccttcgtgtgggtctgctaattggtcctgttcaagtggttaaatcggatgaaatccgacagcacttcgtgtttactcggtttaggcatgagcgtcgcgtatcatgcggcctaatcatgtttaaccaagtaaatccgaagtggatccaccacagctggtaccagagccggtttagcaagacagagaacacaacaggtcctaacacacttctttaaagataaagttgcaagaaactctttgaaatatctcgt

SEQ ID NO: 60654 - DNA, 455 bp, Setaria italica
  Peptide Sequence Number=SeqID_126628
atccgacggcacttcgtgtttactcggtttaggcatgagtgtcgcgtattatgcggctaaatcatgtttaaccaagtagatccgaagtggatccaccacacaaagcctactactgacaaatccgtagttgtcatggtaaatactagcatgaatattgtattttctttcaggatggatgtcgtacctgacaaatgatcgaaactgtagcacgtgtattagcagagttttccttatgttggctaaccattattgttgatctttattatttattagattttaagaacagctaatgtcccaagggttagccattatcatgtacctgtgattgttgaaataaacttttaatattgaaaaaagcttatgagagtgtatggtgcgctgatgtggtctcttggaaaaagtgctaaaatactcctgaggttgtgcgtgtgtacaatggctggatgtagggtgtc

SEQ ID NO: 60655 - DNA, 404 bp, Setaria italica
  Peptide Sequence Number=SeqID_126629
gcgcctcgccgacggctctacgagctgcacccggtgccagaagacgacggtgtagctgagctcctgccctctgaagccgaagccgcccagaagtcgagcagttctcttcctccttgctcgaagcttatgagagtgtatggtgcgctgatgtggtctcttggaaaagtgctaaatactcctgaggttgtgcgtgtgtacaatggctggatgtagggtgtcaacgaaatacgatacaactttctggctggttttgcggcggggctgtaaaatttaatttggaacttgaagggtacaaacaagggttatactagcagtgaacagcccatatgtggttgggggcaaccattacggcgtcgtcgtctccatcaaggttcagtcacttgcggtagcacatgttgttaaca

SEQ ID NO: 60656 - DNA, 468 bp, Setaria italica
  Peptide Sequence Number=SeqID_126630
cggtttaggcatgagtgtcgcgtattatgcggctaaatcatgtttaaccaagtagatccgaagtggatccaccacacaaagcctactactgacaaatccgtagttgtcatggtaaatactagcatgaatattgtattttctttcaggatggatgtcgtacctgacaaatgatcgaaactgtagcacgtgtattagcagagttttccttatgttggctaaccattattgttgatctttattatttattagattttaagaacagctaatgtcccaagggttagccattatcatgtacctgtgattgttgaaataaacttttaatattgaaaaaggtaggattactgttgtgctgttttgtttacccttctttaaaacttccttgaaaccatactccgctttgtttctttgttgaaaataaaatctcatatgatgaataatgtttcctactattcatgctacagctttatt

SEQ ID NO: 60657 - DNA, 414 bp, Setaria italica
  Peptide Sequence Number=SeqID_126631
tgtctttgtctaaaagtattctttaacttcctattctattgtctattgtaagtagtctagtttattctttacctttcaggatcctcagaggaagacctactgtaccatagcgaagctcctgtgggttcctttgaaacaggctctggaagcgtgcttctaaggcatccaaactcaaaatcacccgacgaagaatcagaagcaagctccattcctgcagatgataaatcgcatattacaagtgaatcctattcagggtctgcctcagttgtcgttcacagtggaaacaaggcaacagtcaacttaaaggctgtaactgcgaggccccctgcatattgaagataatgctagaaggtttatgattggatgaccgcgcagagatagatttccgctctcatcaagtgacatggcaatgca

SEQ ID NO: 60658 - DNA, 292 bp, Setaria italica
  Peptide Sequence Number=SeqID_126632
caagcctgcagcagcagcagcaccaccaccaccagatctgaggacaaattgttggtgtggtgcagatgccaacctcgaccgtacggccatcgggaggcatggcgcccttcacccggagaagatgccctcaacctcgctggcccaaggtactcccctttggcgaaatgggccacctgataagccggtgctctgcaatgcatgtggctcgagatggagaacgaagggttcattggcaaactacaccccaatgcatcgcaaggatgactatttgtattgtattgttatttgttaa

SEQ ID NO: 60659 - DNA, 271 bp, Setaria italica
  Peptide Sequence Number=SeqID_126633
taactagtagtaattgggtcctatttttcttggttctagtagtttttctaaaagtattgggggtattgtcttgtattccaagcagtcgatctagttctggatctgcaatatcatactctgagagttgtgttccatatggcgctgttgatgcaagtgaaatgagtggttcagctcaatcacatgcttgggaatccctagtgccatcaagaaaaaggagctgtgcgacttgctgaagccttcacctgtagaaaagctcgtgaaagatcttaac

SEQ ID NO: 60660 - DNA, 481 bp, Setaria italica
  Peptide Sequence Number=SeqID_126634
tactaaaaacttaactaaggttaaatttttagtacctaaaattaactaattgtttaagtcaatcatgttgggtttcaactctagcctaccccaacttgatcgggcctaaaagactctgttgttgttgatgttagcatctctaaacaagttcgagcctctttcttctatgttaagctcattagttctttgcccttcaggaggcatgtcacagtcgtatatagtcgtaacttcttttaaaaattgagaacagtctaggcatccaacattctattggtatagcaatattttttggttaagttgcatgacatgtttaatacaagtcaactatgggaaccttccctggtagaagtgtcactttaattttgcatgtaaaaacgcatgattatggaggttgagacagaagagttctggtaaaatggtaccaagctaactacaaggcaactgaagtgtcctgtagtgctctcttgaaattaatcacatg

SEQ ID NO: 60661 - DNA, 335 bp, Setaria italica
  Peptide Sequence Number=SeqID_126635
ctcttccagacttggatgagtggtctgcctcagttcctagcgagctaagcacgaaagtgaaacaatgggtgccttgcgagcttgcgtgatgccgggcattttcttttgttctagttgcacctaatttgcttcagcaacttgtccatgacctctgtggctctctccatgctcctttaatttctggtgtatttatggcgtcatctgcatctgaagcaaatgctgaatccagatgctctatggggataccagtggaacagctgtccagtagcattcactgacaatgactgtccgttagcatcaacactgatggctacataaaagttaaaaaaaaaaaa

SEQ ID NO: 60662 - DNA, 253 bp, Setaria italica
  Peptide Sequence Number=SeqID_126636
cgggttcgcggaggccgacaaagtaccaggtaagcgaagcatctctgctcctcaagcttgcgttctgccttcgttgttaggtggtcatgatcgatcgcgtcgaacgcgcaggctttcgtggccttcgacgggcggcgctgcgtgtaccggcgcacgccggcgcttttctgcggcgtcgtcgcggcgctgctcgcgctggcggggctggccctcgccaccgccgccagcggctgcttcggccgcaacgcgccgg

SEQ ID NO: 60663 - DNA, 393 bp, Setaria italica
  misc_feature (344)..(344): n is a, c, g, or t
  Peptide Sequence Number=SeqID_126637
tctactaagttaccggtttcttacttggtaacgttttacctacctacttcgtattcggtttactaccatcatcatactggcatcatcaacatcttcaagggcatgtcgatcctgagcgtggaccagaaatggaagacggcctacatcatcgcgatctgcatcctgggcgccatcgccctgattctggaagtcgttacatggggcatcgtcttgaagcggaggaaagaggacaacaagacctacaatggcaacgggaacggccacttgccgctatctatgtaatagagctccatagtcagggtcctttggcctctatttatcttcagtgtttgtgttggtgtgcngatgtagggggggataggtcctgtgatcttagtatctctctttttttga

SEQ ID NO: 60664 - DNA, 258 bp, Setaria italica
  Peptide Sequence Number=SeqID_126638
caagggaatcacctattcagttcacaggaacattgggatcacagtattttctcttggtactctgcaggtacatacaccatgttcttctcacgatgctcatttacctgctgaaatccgaatcccctgctaatagtttttatgcgcgtttgtttttcccattcagatctttgcgctcttcttgaggccgaagaaggatcacaagtaccggttctactggaacgtttaccaccactcgatcggttacaccatcatcatacg

SEQ ID NO: 60665 - DNA, 207 bp, Setaria italica
  Peptide Sequence Number=SeqID_126639
agctgatatttactgatgttacatagatcaagttcacactggaattcttaccttgaagaagttgacttctggagtgtccactaaacttattacaggaaaagtgttagttgcacttggaggctcatgcctgcggttggtgcccagagatagcagtgtgttcacatgctcatcaagagcatcccctaaaaagaatgcaacatgcaccaa

SEQ ID NO: 60666 - DNA, 241 bp, Setaria italica
  Peptide Sequence Number=SeqID_126640
acgaacggaagtaatccggtgcagtcattctggtacaagttctgcaggtagggcacttcttctgagcctgaatggcagccttgatgcacttctggcagaaaatgtgaccgcagacggtggatgccgcttccgcagctcattcatgcatatcgggcaggtgaactttggttccttcgggacctccttcacctgcccgatatgcatgaatgagctgacggaagcggcatccaccgtctgcggt

SEQ ID NO: 60667 - DNA, 111 bp, Setaria italica
  Peptide Sequence Number=SeqID_126641
caactatgcatgccaatgtgtggctcattagtagccggtgggatactactggaagcctggttgagttgtacagtcatactgcctgtctcacacaatgaggcttccagcagt

SEQ ID NO: 60668 - DNA, 146 bp, Setaria italica
  Peptide Sequence Number=SeqID_126642
caaggtccggtggttacagagccatatcagggttcgtgttgttagcgaaaagttgagcaagaggctgtaaccaccggaccttgctacgagaatcagtgccgttacttgtgccttcacacatctctctcgggagctcctactcctca

SEQ ID NO: 60669 - DNA, 202 bp, Setaria italica
  Peptide Sequence Number=SeqID_126643
gacatcctacttaaatttgcagaggagccatcttctgcaaatctaggaaacataattaagtttggacaacttaccaatgctgatgcttttctccaataaacactggtattgatgttgttgatttctgcttatcctcatggtcaagcaattgtattgtactattggtaagtattgtttgtaactggtaggtaggttaagtaaa

SEQ ID NO: 60670 - DNA, 254 bp, Setaria italica
  Peptide Sequence Number=SeqID_126644
tacaagtgacacacagacatcagtcaagacccaaagatacgaatccgatagtaatcagtgttctacttctgtatctcgagatgtggatgaaggtgtcaagagaattgccaatgccgtcaaatggtttctgacaagatttaatatcaagttaaagaatgtatatgttgtatttgatcctcaaaccagtttggatagtaggctcccagaaactaatcgatctctggttttccgaattaaagagctagaatttggaa

SEQ ID NO: 60671 - DNA, 130 bp, Setaria italica
  Peptide Sequence Number=SeqID_126645
taatatcaagttaaagaatgtatatgttgtatttgatcctcaaaccagtttggatagtaggctcccagaaactaatcgatctctgggagcctactatccaaactggtttgaggatcaaatacaagattta

SEQ ID NO: 60672 - DNA, 220 bp, Setaria italica
  Peptide Sequence Number=SeqID_126646
agaccacagtagagcatgttgtctggagccaccatctcagtgacattatagcctccatttggatccaccaccctgatgtaagtctcctgacccagataccatgtgtccagattttctgtgcgtcttggacaatgagaattgtgtagtagtagtagcaatatccaactctccacagatcaattaaaacatctcaggcaacacagcactccttgcttgcggg

SEQ ID NO: 60673 - DNA, 249 bp, Setaria italica
  Peptide Sequence Number=SeqID_126647
tagttagtaactaaagttagtacttgtaaactaaaagttctaaagggtaaaaaattaaaggtaaagttggctgtggactctgaggaatctatttctgacttatctgtcagcttggagttgttgaataagaatgaaggagtaaccgcaccatcatctaagaacgaaacaacacctcttcacgaggcagctaaatctggcaatgcccagctgactttggattacttgagcagggtttggatccttgcatca

SEQ ID NO: 60674 - DNA, 203 bp, Setaria italica
  Peptide Sequence Number=SeqID_126648
agttaaaacaaaaataaacttttttaaagtaaaacaaaggaaaggaatagaagaatagaataaaatagggtgaagcggttgacatgtgaacctcgtgatgcatcacatttgaggattgttctactaacaagtggtgggcatttttgctggatgtgtttttgacggaaattccatcgtagctcataaaaacattttcataggta

SEQ ID NO: 60675 - DNA, 227 bp, Setaria italica
  misc_feature (220)..(220): n is a, c, g, or t
  Peptide Sequence Number=SeqID_126649
gaccacaaaggttccattataattatccgatcgtgttatatagtttggtagggttgtaactgattgtgtgcactgttgcgagggagcaaaatttcttttcatttcctgtttagcttggtctggtctttgttgtgattagtactgacatctgcacctgcaacttctttgaaagcgtcaaataggaacgtctttgttttcaattctgaattatagtagacanaggagag

SEQ ID NO: 60676 - DNA, 470 bp, Setaria italica
  Peptide Sequence Number=SeqID_126650
atacacgatattagttgaccactcgtatcacaataaactcaaccaaatgttcagaatttgtgcaagtaaacatcgcaacaaaccaccaaaaagaccaaaatggtaagacaagtctctgatgcttggagactagtggagataagcagcatggtgcatgttacttcctagtcgaggtactaccggtagctaaattagtctcacgcggcagcttcaaccttctgggccttattagaattcttctcagcattcagggttttcttaccttcgtctttccctatttgtaacttgtctttcctcctctgtagttctttccggcccttcctttgtagcttctattgtccttgtaattttcttgaatgccacgaattttgctccaataatccttctctgcttcaccagtcacagcctccaaagtaatgatgtggtcttttattatcaagccaccttcatccttctctgcttcaccagtt

SEQ ID NO: 60677 - DNA, 376 bp, Setaria italica
  Peptide Sequence Number=SeqID_126651
agaagactatcggcttcatttgtggagcatatatgaatttgaataactggtatacttgcaacttatattataggctacaggaaagcgaaaagagacccaaactatttcatttaaaggtaataaaataaaactaccactgatgttataaaaacaaaagcaaaatcctgaaagttgtggattattattacccgaacatttccaaatttcttgagtgcttcttttagatcctccctcgagattgggttcttcacattgccagaaacactattgccatccctgctacaaatagaattcaactatctccacgcttttcgcagtcttccaaggcatcaccagtgcacttctcagattctgtagcttccttaatgtttacctc

SEQ ID NO: 60678 - DNA, 238 bp, Setaria italica
  Peptide Sequence Number=SeqID_126652
cagaaccaaatgaaccttcaaccaacatagagtctatggcttcgaatgcctcatccaaagtcattgcgacaaccacaccctttccagcagccagtccatcagctttaacaacaataggagctccttggctgttgggatattgtacttatcacacaacttcttcatgaagtccttggatccttctagcgctgcagcctctgaagaagggccaaaggttggtatcccaactttaacaagg

SEQ ID NO: 60679 - DNA, 263 bp, Setaria italica
  Peptide Sequence Number=SeqID_126653
gctccgccggcggaggagccgccgagaacgacggccacagctggaggaagtacggccagaaggagattcttggagccaagaacccaaggttcgttcctgttctttcccttatctttttcatagcccaatctgcacgtgtgttgctttttggggttcggatattgtagctgtcctgtcctttctgaaagttgtagcctttgttctcttcctggaatgattgcctccacttgctggatagcatcgtatggctaggacacagtatg

SEQ ID NO: 60680 - DNA, 193 bp, Setaria italica
  Peptide Sequence Number=SeqID_126654
aagaccaccaagaagaggaagacgacggagaaggttaagaatcaggtgagggtgagctccgccgctggtggcgacatcccggccgacgacggccacagctggaggaagtacggccagaaggagattcttggagccaaatacccgaggagctactaccgctgcacgcaccgccactctcagggatgcgcggcga

SEQ ID NO: 60681 - DNA, 335 bp, Setaria italica
  Peptide Sequence Number=SeqID_126655
cacaaatatcaattctcgcaggcaagatccaggtatggtatcaattgcaactgctcacttcattaccaagtctccctgctcatataatcaactaatttctagaacacttgagtcacgtcaagtcatgctcaagcaggcaactcgagcttcacattgttcttccaacttaagaaatagtagtaaaagaaatctgcatacagagctgtttgcaccaaacccgcaagccaagctgaaagagatagaccattagtggacaacagttctgaaaaaaatatgtagaaataaaacactataccatagaaaagtgaccacttacggatccatctgctgtggtg

SEQ ID NO: 60682 - DNA, 293 bp, Setaria italica
  Peptide Sequence Number=SeqID_126656
gtgtgagactaccaacgatctgggccggaccttagacctatgctttggcatgggacagatgaggggattttttttaacccctagcctgaaatttgctcccacggggagtcgaacccaggacctgaggagtgctactagagccacctaaccaactcagctagaggcctgttcgctttggtcgtgtaccacatacctatttaaaaaaaaaacttgaccatgagaggagacacccctgggctttgttctaagaaggtgccgtgcttcgaacccaggtcgggatgggagtttcaacg

SEQ ID NO: 60683 - DNA, 168 bp, Setaria italica
  Peptide Sequence Number=SeqID_126657
caattcattcctctgatcgccaaaaagagataatagtctcattcctagagggtaaagcccacagctgtggttctgagataatgggagttgtatcatcttgtgttccatacaacgaatgaactaatagttaccaataactaaacttagacaattaataaacaataagaa

SEQ ID NO: 60684 - DNA, 226 bp, Setaria italica
  Peptide Sequence Number=SeqID_126658
ctaacatgctgatcaccctcaagaggatgaagagaagccagatgcatacattgatgcagtgaaggtgtcgttcatgctcacggtgtttgtcttcatcgtggtggccattgctcgtatcaagtgagcacaacaatccgtcgactttacatttctctgttttgttgtctcttgactgcacacgggagcaactctagtagtcagttaaatcaagattggtgatggcagc

SEQ ID NO: 60685 - DNA, 262 bp, Setaria italica
  Peptide Sequence Number=SeqID_126659
ttgttcccctccctcaggatgactgcatccttcttagaatccgatccaccctgatccgacgcgggtaacgcggcgatccgacaagccgtccttgcgcgcgccgcccttcttggccgccccctcgccagccgacccgaagcacggcaggcagcccatccaagagccgcccttgggaaggggataatagccaagaaaacaggcagcggaggccgacccaccagatggaacggggattcctctccgatctgggggtggtgcccct

SEQ ID NO: 60686 - DNA, 379 bp, Setaria italica
  misc_feature (41)..(41): n is a, c, g, or t
  Peptide Sequence Number=SeqID_126660
tttgagttgcttatttggagttgcttatttttagttcagcngtttggatacctttgcttataagcattgaatgaggtggatattatcatgtttgcccctaatcattgagagagagggaggacaaccaggcattcaatgagggcaagaggtgtaaagtgcatcttttagtcccccataagcaaccataagcaacccaagagttgcttatttgcttataataagcaaccccataagcaagagtgattggtttcataagcaacttatttgcttattttaagttgcttatgcataagcatgtgaaaccaaacaggccctatgtgaggtcgttactcttggtgtaccgcatcggttgtttggccagctaccatgcatgtgctcc

SEQ ID NO: 60687 - DNA, 270 bp, Setaria italica
  misc_feature (78)..(78): n is a, c, g, or t
  Peptide Sequence Number=SeqID_126661
cgggggtcgttagcggcggcacggtggtgagctgggtgctccggggcggtgctgtggtcgacggcgttcgtgctggtncgggacggagatggtggccagcctgctcatcacggagatctcgagcccgctgcttcacctccgggagatgctcaaggagtttggcgtccgggataccgacctcaacctcctcgtcgacgtgctcttcgccgtcaccttctccgccgcccggatgggcgtcggcccctacctcacttacgtcaccgtcaccgc

SEQ ID NO: 60688 - DNA, 419 bp, Setaria italica
  Peptide Sequence Number=SeqID_126662
aacaaacctaagaaaccaatacttacaacctcttctatcagaaatcaccaattgcccatatctcaaaagtatgttttcctgtctcaagtatcaggtccattctcattttttgctggtatggttcatggaactttgctgattgtgcaggtgaaagcgccccttcttatgcttcttggaggagctgatcttcgagtaccagcttctaatggcctacagtatgcaagggccctgagagaaaggggtggcggggtcaaaattatgatgttcccagaggacatacacgaaatcatcatacctcggtccgatttttgaaaacttcctcaacattggagtatggttcaagaaacatatggaataaataagtgcaaacgcagtggtcccaagcagagtctggcgatccatgaggttgaagaacaagg

SEQ ID NO: 60689 - DNA, 409 bp, Setaria italica
  Peptide Sequence Number=SeqID_126663
acttgaaataatggaacatagtagaacaaattccacatacataccccacatctcaattgattcaagacgttgaagttctcaaagatgcctggtttcagtacagtattaggcttcacacatctaatgtagtgaggttctgttgtactcagtgtttccatgagggattgcagttgttgctgcatatatcatggctaaaagggttactggccattcaaaagccaaacatagagatctcgttccaatatgacacaccttaaagcgagtaccgattgaagagaatttggactgtttagaagtctcctcaggtaatggaggaaagagatttgcaacaaaatggcaccttgaagaatttagtagagcttgatgttcagctaccacatagtctttgttcttatctaggaactgatct

SEQ ID NO: 60690 - DNA, 472 bp, Setaria italica
  Peptide Sequence Number=SeqID_126664
tctaaattcttccttgttcttccttacctagtactttttaattctagggtctattcatgattttcttgctgccgatccgtcagtgatttttgtttgcttagattctttacaggaggaacagccacctgctcattggctattttaacttcttcaagctggtgtctgttatcaatttccttgtgaacgaggttctccattacggatgtttgattcatttcaggagtgactatggcctgaacagcaagcacagaattactgcggagcaactggatctctgactccaaaatggcaatcttgctttccagtctttctatctgttttgattttatcctcatctgctgatgcaacaaccaaagattgttgtcgtagaacttggtttcagattccatactggataacttgtttcaagcctttcaatcatctcttgaagttgattaaccttggattctcgttctagtgtctcctgtgacaa

SEQ ID NO: 60691 - DNA, 367 bp, Setaria italica
  Peptide Sequence Number=SeqID_126665
ggtaaaacttatagcacatacatttggctattttaacttcttcaagctggtgtctgtttatcaatttccttgtgaacgaggttctgacagaaaattcagtgcaattcttttagttatcaaatggagtgactatggcctgaacagcaagcacagaattactgcggagcaactggatctctgactccaaaatggcaatcttgctttccagtctaaacagacaatttctttacttgtgagcctttatcataggatatgaacacagtccagaaagaaagaaaatgcgaatgcgagattgcaactttccaattcttggcccttggcttcttcaaggtgaattaccctcaaacgcttctcaacatctaaccgc

SEQ ID NO: 60692 - DNA, 251 bp, Setaria italica
  Peptide Sequence Number=SeqID_126666
ccccatataagtattctccaaatcacctttcttaatttcttttcgattgcaagaattcaaaaaaatggaagattgcatctgtgataagcactgaagaatcaacgaagctctcttttgctgcttataagcaacataagctttgtgttggcgccatcgagtctctccagaacttctgagatttaattgaggcttttcgtaatttgatgaattcctttcgcataagatgtgtctttatacgcctctggattagt

SEQ ID NO: 60693 - DNA, 248 bp, Setaria italica
  Peptide Sequence Number=SeqID_126667
attacaggttattgtgcaccctgctttcgtgccctcgcttcttagagttagcatgtgggttaagttgttgcacttcttttggttgttggagtaaccttaggttgctgcggttgccggcttcttgaagcagccttgactgaccgcacaacgttgggatctgctggaaccgcagtcatgtttgattttctctcgggatcacgtacactgagacacgcaacaggagataggcaaggcacacaggggatagg

SEQ ID NO: 60694 - DNA, 212 bp, Setaria italica
  misc_feature (21)..(21): n is a, c, g, or t
  misc_feature (61)..(61): n is a, c, g, or t
  Peptide Sequence Number=SeqID_126668
taatgcatgccatattacccnttaaaagcatgacgttatttgaaaccacagtgcataaccncaaaaaagccatcttacagcaacatagaagcttgaaacaataataaaacaacagcaagaaacatagaatgtcacctgcaaagcataagtaatttcatttgcgacatttttgtccttcacatgctttccaagggataagcttctcattggtt

SEQ ID NO: 60695 - DNA, 492 bp, Setaria italica
  Peptide Sequence Number=SeqID_126669
caactaagatcatacaaacagaacactgcctaatgatcactcatgtcgccgtcttccttcgtccatgcatcgtgtgttgagactttctgcgatcaggggccaaggatgatgccacattttgcccagattatgatgtcactgcgaagcaggtggtgcactggcatattggtgatgctagtcatggcagaagttatctgaacacctcctgctcttagcacttggaagatgcttgagggtttcctccactttgctcacgggatgcgacctgttgcggggataataggttggtgcaccaaacccagaggcttgttcatgttgttagcgttctctgctgctccgccatcacaattcggttccaacaagcgcacaagcgatagaaagatttccattctggttaacgtcccggtttgcctacaaacaagtaaaatacgtagacccaagaattttaacttttaacgacaatttaccaattaacaacccctacaaagaata

SEQ ID NO: 60696 - DNA, 241 bp, Setaria italica
  Peptide Sequence Number=SeqID_126670
atcaaaccaaaagctaggtaatgatattagttgtaagtttttttatgtatttctaaactgagtaatgcccttccctagaaaacataatgaaaacctctagattcttaactgagacatgagtgtccactttgagataactgtcctcaaacaaaaggcatggatgtttctgttgaagtcgcaatcgcaacagtcagtaaattgtagtaactgtagtttgacaatgactatttttactttaaaa

SEQ ID NO: 60697 - DNA, 230 bp, Setaria italica
  Peptide Sequence Number=SeqID_126671
cttgtggcttcatgatgcgatgtgccgcttgtaccgtctgctaggatgttaactaagctttttagaatcatgtctacttttgttcttatcactgtactgctatgtacttgatgctagctatcataagttatggtctatgacttatgatagcaagcatcacagacatccccacagcatcaaccaaagccagaggatttccttctcccccaacaaatccctaaacccctcct

SEQ ID NO: 60698 - DNA, 197 bp, Setaria italica
  Peptide Sequence Number=SeqID_126672
ctttgcattggaagcgagatcagttaacctgatttgtcatcccttgtggcttcatgatgcgatgtgccgcttgtaccgtctgctaggatgttaactaagctttttagaatcatgtctacttttgttcttatcactgtactgctatgtacttgatgactaagactaatacaataaagttaataggtactaaaaaaaaa

SEQ ID NO: 60699 - DNA, 192 bp, Setaria italica
  Peptide Sequence Number=SeqID_126673
catcattatcctgtgaacttccagagtgcagtgcagtcatcactgattcagaggattgcccgtcttcagcaataacattttcagtttcagcaaccgcttgcttgccagctgggggtatctgtgatacttgattcctcaaattagacaataattactacctactagaccaagactagtagaaactacttacca

SEQ ID NO: 60700 - DNA, 393 bp, Setaria italica
  misc_feature (158)..(158): n is a, c, g, or t
  Peptide Sequence Number=SeqID_126674
gaagtccggcacatggctgatgctgactggttgttccttgctgaagtttgtaatatccgttcagtggaacagaacttaagtggtccaaaagcttcgattagcaaaattgaaatggataatgccccacagcactacagatacttgcaacggtcggcacntaaagctcttcagatccttagatctattccagctgctgcaaggcgtacacttcctgtactaaccaatgcacaaggtgacatagtgtgtatacctgtaagtactgcactcagaattgccagactgtccttggagttgttttatacccagtaattcagtgccttttactttaagagaaggcttctccagtatcctatctgctatcacatttagttattttttattttttaatttatt

SEQ ID NO: 60701 - DNA, 388 bp, Setaria italica
  misc_feature (1)..(1): n is a, c, g, or t
  Peptide Sequence Number=SeqID_126675
ntaaaccactgggagttgactttggaatgagcataagaaccatgcatggttgtcatctcatgtaattgttgtatctgcaatgtttctggtgataccagctgtaaaattgatgaaataatttcagcataattttttgctaatgtgagacgtgacaagttcatttcttgttgcagacttctattgcaagacgaagtgacatggtgatgttgtccagtgccaacgctattggttctctcagttttaaagagatgattacagttcacaatgccactggtcttggattgcgtggtgaaccgtccaaaatttacagctggtttccaggatatgcatggacgatcgccctgtgtgctgcctgtgagtccaacataggctggctgttcagagccga

SEQ ID NO: 60702 - DNA, 276 bp, Setaria italica
  Peptide Sequence Number=SeqID_126676
ggtatgttaaaaaacctgacttcttgctaacaacaggtccaaatggtgaagtatttgaccccaacggcgagtttgccagtgaagaaaactctcaaggtaaaagtatacatgggcgatgggtggcgcatggatttcagtaaaactcatttcgacgccttctcgcctccggatttctataccagggtaaagatttctatactcattttggcgcatggaagttgtagctaagaaggcccaatatagtatatatggtctctgaaataaacaggtagggat

SEQ ID NO: 60703 - DNA, 289 bp, Setaria italica
  Peptide Sequence Number=SeqID_126677
taaacccccacaagaatataaggagtttctacaaagttaaggataatcagatgtttaaagtccattaaagaatatgccttttgtgcatccaattatccccttgttattactcttgaggatcacctcacagcggacctccaagccaaagtagctgagatgctcactgaaacatttggagatcttcttttcatccctagttcagacccaatgaaagagtttccttctccagaagctctgatgaagaggataatcatctcaactaactccttatattcttgtgggggtttag

SEQ ID NO: 60704 - DNA, 245 bp, Setaria italica
  Peptide Sequence Number=SeqID_126678
cgatatgtggccaaatgcttcaaagaacaatgttgatattcttcatggagggacattgactgcccctgtagaaatgatcagatgtttaaagtccattaaagaatatgccttttgtgcatccaattatccccttgttattactcttgaggatcacctcacagcggacctccaagccaaagtagctgagacccaatgaaagagtttccttctccagaagctctgatgaagaggataatcatctcaac

SEQ ID NO: 60705 - DNA, 472 bp, Setaria italica
  Peptide Sequence Number=SeqID_126679
tataacatgcagtggccagaaacatatgacattgttgcacgactcctgcaacaatttgctctcgagacattattcagcaggcaacttttctttgaggtacttgagaattgctttcgttcctcgctccaacagagttcgtcttatgcttcttagcggattcccgtcaagtttcaacacttgaaggttaggctcaagcaatcccagctctgctgggagcgctgttatattgttgtctgacaggtcaagctcaatcagagcagtgaaattctttataccctctggtacagttgtgaggttattctgactcaggtcaagaatccggagctgttttaagcccaacaaaccattaggaaattcatggagtttcattcgtcttaggtagagctcctgcagctgtggcgacgcagaaactctgccaaggaattattgtccagctttaaggaagacagactggtaagggaagatatcactt

SEQ ID NO: 60706 - DNA, 367 bp, Setaria italica
  Peptide Sequence Number=SeqID_126680
tggccagaaacatatgacattgttgcacgactcctgcaacaatttgctctcgagacattattcagcaagcaacttttctttgaggtacttgagaattgctttcgttcctcgctccaacagagttcgtcttatgcttcttagcggattcccgtcaagtttcaacacttgaaggttaggctcaagcaatcccagctctgctgggagcgctgttatattgttgtctgacaggtcaagctcaatcagagcagtgaaattctttataccctctggtacagttgtgaggttattctgactcaggtcaagaattccggagtcttgtttttaagtccctaactaaacctatttaggtaatttctattggtaagta

SEQ ID NO: 60707 - DNA, 186 bp, Setaria italica
  Peptide Sequence Number=SeqID_126681
atttccagtaagcagaagccttctgagggtagtcattttacctagttcagctggtagaccagataatgagttattcgatagatcaaggaaagatagtttgaggttgcatgctccaacagggtactcctttagctgagctctatatgggaaataacttgttgtcttcaataccagctgatattggca

SEQ ID NO: 60708 - DNA, 228 bp, Setaria italica
  Peptide Sequence Number=SeqID_126682
ggtagaccagataatgagttattcgatagatcaaggaaagatagtttgaggttgcatgctccaacagggtactcctttagctgattagaatggagatcaagtattcctaattttgatagtgtgccaatatcagctggtattggagcactttcaaaacttattcgcctggacatgcatcagaataaaataacatcaattcctccttccataaagggttgctcttcttta

SEQ ID NO: 60709 - DNA, 423 bp, Setaria italica
  Peptide Sequence Number=SeqID_126683
ctcccaattaatcctcctctggaaagcaagccaagttcaagccagtccatgcattttccagaatccacagtatttgaagaaccagaacaatttgaagacccatgctatgatccagatgcaatcgcattacttgggcctgtttcagagtctctagataacttccctctggacatgaattgtgggttcatctcgagtaatgtcaccaaggaatcacatgggaagccttcaccaattgagtctcctctgtcacgatctcgtatggttgatgaaaagcccatcaagcaaccgcactcatcaaccacaaaaggacctggtggtttcattttgcctgaggctagcagcgaacaaggcacatgggcaaatgtggagcacaccattggttcaggaactttaggtctgcaaggtcctcagagtcagtggctt

SEQ ID NO: 60710 - DNA, 248 bp, Setaria italica
  Peptide Sequence Number=SeqID_126684
tctttgtgtttctttttaaatactataatgcagtacagagcatggccattggtccagtcaatggctgctaggatggatcaccggccaatggaggtttctccttcatccgactttgtccagataccagctgatgcagctgatgtttgggaagttgatcccaggcttctcaaattcgaacgaaaattagcgtctggatcatttggtgatctgtatgttcaagaagtaaattgtagtaactcttatttata

SEQ ID NO: 60711 - DNA, 241 bp, Setaria italica
  Peptide Sequence Number=SeqID_126685
aggaagagagaggacaagggttcaagcaagagcaattcagattgtgaagacatcgatagaagattgggccgcgaaggcgataggaagcgagacattgacagaaagagtgacttggcaagcgtgagggttataaacctcattactttgaagctaacaaccatagtaataagacaggagttatgactgcagaaacaggaacctacagatggatggcccctgaggtcattgagcacttgccgta

SEQ ID NO: 60712 - DNA, 262 bp, Setaria italica
  misc_feature (188)..(188): n is a, c, g, or t
  Peptide Sequence Number=SeqID_126686
ggggaggtgaggagtggctgtttccgtgtgtggggagagggggagagagggggagggaggaaggagagagaggagtggagtgggggagtggtttgaggacatcgatagaagattgggccgcgaaggcgataggaagcgagactttgacagaaagagtgacttggacaagcgtgagggttataaacctnatttactttgaagctaacaaccatagtaataagacagtggagagcaagaaccaagttactttggccgttatgac

SEQ ID NO: 60713 - DNA, 231 bp, Setaria italica
  misc_feature (175)..(175): n is a, c, g, or t
  Peptide Sequence Number=SeqID_126687
aaggagctcaggaagcaaaccatatgccgtcgccgccttgtgcacatgttggtgctggaggcttattttcattgaaagaccacactgactgtacatcaggacttgttgatgaaaataagcctccagcaccaacatgtcctgatgtacagtcagtgtggtctttcaatgaaaaagngacagcatagaaggaactttgatcatatagagggaaccgaaatgtcgagccaagac

SEQ ID NO: 60714 - DNA, 169 bp, Setaria italica
  Peptide Sequence Number=SeqID_126688
cgacaaagtacaaatcaatttaaccatagtgcaaatcttttcaatggtggaacaaatagctccctgagtactggtttgaatgacagtgatccatggctgcagaaagcagtactcagggagctatttgttcgacaaagtacaaatcaatactcagggagctatttgttcc

SEQ ID NO: 60715 - DNA, 335 bp, Setaria italica
  misc_feature (34)..(34): n is a, c, g, or t
  Peptide Sequence Number=SeqID_126689
agcatctctctcaatcaccttcactgcagcttgntaaaccgcactcatctgatttgcctggtttcactgcttctatagcagcttcatgagctttcagaagggtctcatatgctttactctgcgtagggatagcatctatcagatatgtccgggcaacatttgaacaatagcttgaatatttggacccaagtgcacagatgataacacttgctgaatcataatagagatagtcatcattgctagaggcgccaggcttgagatcgtacttccccccactctgaaagaactggcggaataagacaaaataatacaaacaattaataacaaagaaacaa

SEQ ID NO: 60716 - DNA, 460 bp, Setaria italica
  Peptide Sequence Number=SeqID_126690
cattttcagaactgtcaaagaaaagattgttcgtacaggagctgcagtaggtcaaaaatggtgtctcaccattataaaacttgtgtcgatgagcagtgtcctgtatgcagcgttgtaaggaagttttttgcgccaatcaactgaacaggcagctaagcaaaaagctcttgagtctagaaaacttgctcaacaaaatgtgacccaaagaatcatgaatggggtagaaggtgatagaatggatgttgacccagtgtcagctgaagtatttgatgatcaaccatctgtaccaaaacgtttgaaaatgcagcctccatcacccagtgctccagcgaatgatatctctctaacctccaatcctcatgtaaacccaggctttgtactgcaggaaacacagcctgagtctttgtagtctactagttaactagtagtctaactattattccgtaaacgggttaaggta

SEQ ID NO: 60717 - DNA, 250 bp, Setaria italica
  misc_feature (219)..(219): n is a, c, g, or t
  Peptide Sequence Number=SeqID_126691
ggtgggtgcgaggtgaggatgctgctgaagcctgggaaagaaagatgaatgctgatggtgaggaggtgaaatgtgggctacgcaagcctttaccacagagtgctgttcttggggcaaaagacctgccaagaactgttcttagtgatcatatagaagatcggctctttaaacggcttaagcaggagaaacaggaccgtgcagctgctgccgggaaaaatnttgatgagattcctggagcggaaggtcttgg

SEQ ID NO: 60718 - DNA, 246 bp, Setaria italica
  misc_feature (245)..(245): n is a, c, g, or t
  Peptide Sequence Number=SeqID_126692
ttttactttttaaattttgtttttgtttaccccattcatgattctttgggtagaaggtgatagaatggatgttgacccagtgtcagctgaagtatttgatgatcaaccatctgtaccaaaacgtttgaaaatgcagcctccatcacccagtgctccagcgaatgatatctctctaacctccaatcctcatgtaaacccaggctttgtactgcaggaaacacagcctgagcttgagcacagtaacng

SEQ ID NO: 60719 - DNA, 223 bp, Setaria italica
  Peptide Sequence Number=SeqID_126693
cctttgcaagaaaaatgtggtacatgcttcaactccatgcccgagcttgcaaagatgcagattgcaatgtgccgcggtgcagggatctcaaggagcaccttagaaggttgcaacagcagtctgattccaggaggagggctgctgtaaatgaaatgatgaggcaaagaagacggacggaaagtacgaccgacaaaatagaagtaagtaacgaacgttaacttaa

SEQ ID NO: 60720 - DNA, 215 bp, Setaria italica
  Peptide Sequence Number=SeqID_126694
taaggtaactaagaacaaggaacgtaatacttacaaactacgactaattactcagttgttagcccagtggtgtctctctgcagcaatgccagctgagctgacaatgttgtggcttctgtttgcagggtttgcaccttgcgctcgagttcagctatatagcgcatcttcctttccttcgatcttgcagcagattgtctattagcccaatccttttg

SEQ ID NO: 60721 - DNA, 331 bp, Setaria italica
  Peptide Sequence Number=SeqID_126695
gcgtgtcttgcctggagcgctttcagccggagtactgcgggttcttgctcgccgagcaggtgcagttggcgcggctctcgttcagcaccttgacctgcttctggagatccttgatgtagtcgacggccaaatccagcatgtctgaggtgttggtttgctgcaggtaggagacgcaacgcaagtacacgggtcaattcttggggtggtcctcgacatggcatggcggatttgtttgcgaaccatacagagactgatctactgcctattcctactggggagatgagatgagacgagccagaattggtgcagaggcaggggatggctacaggat

SEQ ID NO: 60722 - DNA, 202 bp, Setaria italica
  Peptide Sequence Number=SeqID_126696
accgtgctgggcgccgatctgtacctcagcagcccggacgaggccatcggcggctgcaccgggaggttcaggtccttggacaccggcgagccgtacatcagctcgcccccgggactgttcagatcctgcacaagaacaaaaaaggcaatttcttggcctattcttgtttctaacgtaacttaaacttttacggttcttagtt

SEQ ID NO: 60723 - DNA, 339 bp, Setaria italica
  Peptide Sequence Number=SeqID_126697
acttcaatcgtacgagaacggctactttaaggttcaccaaaatccgaaacatgaatgtttctttctagccacattccatcccacaaattttgacatacccttttcgctaatcctgatagtgttatttttcttctaattacttgagtgttttgttttcctcttttcaaaatcagatttggaagaatgatgtccttgtcaaatcagaaaagcttcaaaatggtgctgtttatgcagttaaattaagtggcaaatggttctatactggtggatgggataaagtcataaatattcaggtatgtttacttgctttattgatatacatggtcttccaagaaaaaa

SEQ ID NO: 60724 - DNA, 381 bp, Setaria italica
  Peptide Sequence Number=SeqID_126698
gttcttcttggtaacttggtttaccttttactacttggttggcagagacaaatctgtcaaggcctggtcactggaggtcataaatcaaccgtatcttgccttgcagtggccagtggtattctttacagtggaagttgggatggtaccattaggtcatggtggctcactgatcatacaccattgtctgtactggaagatgatacagcaggaagcatggctcctgtgttgtcaatttcaacagaagccaattttgtcgcttcatcgtacgagaacggctactttaagatttggaagaatgatgtccttgtcaaatcagaaaagcttcaaaatggtgctgtttatgcagttaaattaagtggcaaatggttctatactggtgga

SEQ ID NO: 60725 - DNA, 232 bp, Setaria italica
  Peptide Sequence Number=SeqID_126699
gttctgtctcacttgacgcctcgcagtcactcggagtcgctgtccatgctctccatccctttcagccctcttcgcttctgcaatccaaacacagggagattgattttcagttagatcatgccgtgcttatgcaggaacatcaaccggtaggtttcgtaagcgagagcgtgctcaggtcatgcgcatgtgcgcacctacgctcgtacagtattctaacacacccaagcgcgac

SEQ ID NO: 60726 - DNA, 242 bp, Setaria italica
  Peptide Sequence Number=SeqID_126700
cctttctgaatacctagttaacgccattgagatgatcatgttaaacttggaaatgcacattgaggtttttttattgagggtgtacatggagcatctgattcattgaacctaccggtggcttttatcagtgttatttttgcttcctattgtgggcaatgcagctgaacatgctagtgcaataatgtttgccatgaaagataagcttgacataacgctaggtgttgcaattggctcatcaacac

SEQ ID NO: 60727 - DNA, 393 bp, Setaria italica
  misc_feature (371)..(371): n is a, c, g, or t
  Peptide Sequence Number=SeqID_126701
ccaactgagaaggagcagattgatgttcaaggggacatatcatatgatattgtggagttcattacagatacatggcctgatgtacctgagtcagccattttcttcattgaagatggaaggaaggttcctgctgcttgatgtcatatggtttacggaggcacagaccaatggatttacaaatattatacagagataaggacaagagcatggccgttaaggcatgactagaacgtaaaataaagaaagtaaccaaatactacttagtactagaagtcatcgtctgttgtttcagtttctaggctaagttcactagtgtatttgttatcaccagcatctgcttccatgtatcaaatcaaatatatataatttcngtaattttaccctaaaaaaaaa

SEQ ID NO: 60728 - DNA, 235 bp, Setaria italica
  Peptide Sequence Number=SeqID_126702
cggaggcctgagccgcacggcggcacacggaaccctaaacccgccccactcgcgcggggttgccccggcgtatgcgcggcggcggctcataggcctcggccgccggcgatcgccgggatttgtggggccagcgcggcggctgctacgagcggcggagacggcgccgttggggaacggtgggagatggcggcctgagacacgcaacggggataggcaaggcacacgaggggatagg

SEQ ID NO: 60729 - DNA, 350 bp, Setaria italica
  Peptide Sequence Number=SeqID_126703
ttgtcttgtttggttgttctattctaagtagtcgttggtagtaagtaaggtacccctaccggttgtcctaaggtttacctaaggtcttgtcttgtccaagaagaaatgaggggtttgagggtggtcatcttctgcttttcatctatcttagtagtgttagtgctgttaagttttgttaggccattgttcttacagggccttgcagttgctcacaactgtaatttcgccctgtccggtgtcgcttaaacgctactgttattttggttgtggtggaacatgggtattttttgcggctgattcatatcacctattagctgtgtagttccggaatgtgacaatgcgagtccctt

SEQ ID NO: 60730 - DNA, 286 bp, Setaria italica
  Peptide Sequence Number=SeqID_126704
tttcaaaaggcatactacaacagtagtaagttataaaactaaaaatctgtacactaagggtgtaaagtatataccttagaagtaaggcggcacattgggatacataggaggagccctgccacctggcccaggtgacatcccaccttgagggtcctggccacggaaaccagaccctggaagggggtagttccctccttcaccaaaggcacctgcaggcagcccacctcctccctgttgcatgcggtacatggaacctccacccattccaaggccgccataagccccc

SEQ ID NO: 60731 - DNA, 271 bp, Setaria italica
  Peptide Sequence Number=SeqID_126705
aacttacacttatctatgtaaaattgaaaaactgcaaagcagtcataaggaaatacatgtgaagcattatcaagaaacactaaactagcttcatttatccaacatcgaaaattggcagtgcaaactcattccagaatccagatcagaagtagccactagccagaatatgcaagacatccatgtgaattcagcacaaccattgacaaaatacaattaatagactacccaaacaagttagtacaacaacaaccttaagaaagtaaaggacgga

SEQ ID NO: 60732 - DNA, 235 bp, Setaria italica
  Peptide Sequence Number=SeqID_126706
ccaggggacaatactgaaaccccgcttcggatgctcagaaacggtaccatagctcaaaatatggattatagtttcgtgatcagtctttctcttcaggatccttagctgtagtataggtggactccatcatacatgatttggtcttgaccttggtcgagcttctgaagttctcatgtatatggttcgttatgcatgagaacttcagaagctcgaccaaggtcaagaccaaatcatg

SEQ ID NO: 60733 - DNA, 375 bp, Setaria italica
  Peptide Sequence Number=SeqID_126707
tgccaccctaagtgattaataggaacctatttctgacaaattggttaaggattaacagcattgctctggcatattctattaacatctacgcagttgaattttctatcaagtgtaaatcatgtttgaagaagagttataaagaagtaagaaaagagttattgggcgtagtaaacactcacttataagcgtgtgacagtgtagagcgttcaacagcaagctctgcattgctctgctcagcaagaatgatgaccgtcttgaaaatccttccataaagcagcctccattcaagtgccgtgcgatccacaggcccactaacatgcatgatcatcacaacattccaaagttctttctccacttaataagattccaatctca

SEQ ID NO: 60734 - DNA, 314 bp, Setaria italica
  Peptide Sequence Number=SeqID_126708
tctaaggtattaaacgttgtctactttctaacttactagtatttgttattcctttattacctaactcctattcagaagagggtctcctttggacatcagccgaatcacctttatgaaatcaatctcattcataactttcacagggaaaacagcaggtgcttgagctgtataaatagttgagaatgttgcattggctggcaactgggtcttgaacactgttccagccagagcatcagagtcaaaattttgaggcgagtccatcgccaagaagaacatcgggactgcaatcttgtgatgcaaatccaaactgccaa

SEQ ID NO: 60735 - DNA, 287 bp, Setaria italica
  Peptide Sequence Number=SeqID_126709
gcagctggccaggttgaagctcttctgcgtgaactcgtagctggggctgtccttctttcagcaggacagctggaccgagctgatcctcagtaaccttgtcactaatgatacaccaatattctgtagctgttcatttctctgctgctgtatattggtgtatcattagtgacaaggttactgatgatacaccaatatacagcagcagagaaatgaacagctacagaatgaacagaataaatgaaattacaacagtaatggagaaacccccagaaaacacaaaactatgc

SEQ ID NO: 60736 - DNA, 182 bp, Setaria italica
  Peptide Sequence Number=SeqID_126710
tgccgattaaacaatttgttcaacatcttctacatgattggtcacatatattgtgcctaattctgattctttttgcagtgttctgcccttataccggttgttctgactctgttatccactcaaaagagcaccccgatatttctgaagagattgtgctactcaaaatgggcactggagggctt

SEQ ID NO: 60737 - DNA, 117 bp, Setaria italica
  Peptide Sequence Number=SeqID_126711
attttgattctgtttatgtatggtctgttcttcaggactgtggcatttggggccatgattttattgaagaagagataaccatagtctagttatagcattgtttcatacaaatgaatg

SEQ ID NO: 60738 - DNA, 168 bp, Setaria italica
  Peptide Sequence Number=SeqID_126712
atctgaggtcctggactccggaaaagccatcagggcataactaacttctgtgttttttcgttttcttgcaagacagtagtctggtacgaacgtggtctgatttcttgagtcacaatcattcatctgacgtcctggagctccggaaaagccatcagggcattaacttca

SEQ ID NO: 60739 - DNA, 439 bp, Setaria italica
  Peptide Sequence Number=SeqID_126713
aaaaggatgtggaattaccggatagtttatggagcatcttgaaagggatcttcatccaacactcaaatgacctattcatatttgcagcacaggagcataaaaactggagtttcagaaccatgtcaattcatccattttgggaaaaggttgtttgtttgggatcttagactgcagtcacaacctgcaaaaaattaatctgtgttattattatcaaagctattcaattttggtctttggtagatggtcatattatgtttgaagtcagtttttgagctactttctttacagcggagagcttaaatatttttttggcttcctgagtgttgtcaaaatattaactatgtttcttacgttgacttgtggcacagctattaagtatcaattattagaaagaaaggatactcccaactaagagtcttagcaaaaaatataatacgct

SEQ ID NO: 60740 - DNA, 395 bp, Setaria italica
  Peptide Sequence Number=SeqID_126714
ctttgtggacaccaagaggctcaccttgtatctccacaactctgtcatcatttaacgcaacaggaggcacattctcaacaatacggacaacagactttgaagaatcttgtatggatttaatagttgctccctgctttccaataaggctgccagcttgcgaagctggaaccagaagccgtgttggtccaatattaccagcacttctttgaggctgaccagattcaccatctgaactatcagttattcttttatgaactctaagtaaaccatccatagctggagatactggtgcatctggttcatcctttgctgaaaccattaccggatagtttatggagcatcttgaaagggatcttcattccaacactcaaatgacctattcatatttgcagcac

SEQ ID NO: 60741 - DNA, 234 bp, Setaria italica
  Peptide Sequence Number=SeqID_126715
caacaatctggggaagtggggaatggttgatgtttctctcagctcaaagcatggcagtgctggaacctcgagaagcaaaagcccggccacacccagcacgagccccccagctcctatcgcgccaatagactctccaaagagcagcgatgcgaggatagctaccgtcaacggctgcgagtcaatgatgacactcccgagcccagccgacgtcttctgcaacccctcgcgaggaag

SEQ ID NO: 60742 - DNA, 324 bp, Setaria italica
  Peptide Sequence Number=SeqID_126716
acgactagactaaggtaacaaaccgtaggtacgtaccgacgaccaagacgacctaacgaccgaatgaagctcgtcaagacagcgaaaacgatcgcgtcgcctgggcgcggcatcctggccatggacgagtcgaacgcgacgtgcgggaagcggctggcgtccatcgggctggagaacacggaggccaaccggcaggcgtacaggacgctgctggtcaccgcgccggggctgggcaactacatctccggcgccacttccttttcgaggagacgctctaccagtccgccgtcgacggccgccggatcgtcgacatcctcaactgca

SEQ ID NO: 60743 - DNA, 260 bp, Setaria italica
  Peptide Sequence Number=SeqID_126717
ctggccatggacgagtcgaacgcgacgtgcgggaagcggctggcgtccatcgggctggagaacacggaggccaaccggcaggcgtacaggacgctgctggtcaccgcgccggagatgtagttgcccagccccggcgccatccttttcgaggagacgctctaccagtccgccgtcgacggccgccggatcgtcgacatcctcaccgagcagggcatcgtgcccgggatcaaggtcgacaagggcctcgtcccgctcgccgg

SEQ ID NO: 60744 - DNA, 177 bp, Setaria italica
  Peptide Sequence Number=SeqID_126718
gcgaaaacgaatcgcgtcgcctgggcgcggcatcctggccatggacgagtcgaacgcgacgtgcgggaagcggctggcgtccatcgggctggagaacacggaggccaaccggcaggcgtacaggacgctgctggttggcctccgtgttctccagctgagacacgcaacgaggagagg

SEQ ID NO: 60745 - DNA, 255 bp, Setaria italica
  Peptide Sequence Number=SeqID_126719
gagctcttggaagctgttcatgacaacaccggtggattttatctcctcctcgtagatgttcttacggatttgctccagaccacaaacatataggcttccagggcatctttcctttgtcagttgaagcggtgtagggaatcctgggaagttaatgagctcattctcatcttcaacgtgttccagtaagttgtcacggacaatgatgtacctgacaagggatgcgaagccgcagaagccgttaaaatggtgagcctt

SEQ ID NO: 60746 - DNA, 480 bp, Setaria italica
  Peptide Sequence Number=SeqID_126720
aggaggaatacatcatccgccagaaggagctgcaggaccgcgtggccagggcggcagggcaggactccaaggaggagctcatgcgggtgcgcaaggagatcgtcgacttccacggcgagatggtgctgctcgagaactacagcgccctcaactacactggtgagtcctccgccgcacgcacccatcccgccgcgtcgcgttaggtgttgctttcgtgtcgtcctgatgcacaattgattgaatttccaatgatctgttgtctctgttgttgtttatctcttcttggaaagtttcttgtctgtgtattttgggtggtagtaaggagtagtaagtagcctgatgaagcaatttagctctgaattggggaggaaggaagcctagattcgtgaagctagctagctactagttcttgtcaacatgggtcagttaaagtagtattgtactttgtttgtttttgtctttgttctagttcttaagggt

SEQ ID NO: 60747 - DNA, 159 bp, Setaria italica
  Peptide Sequence Number=SeqID_126721
caactctttcttcgtcgagaaggaggaggaatacatcatcctgcagctccttctggcggatgatgtattcctcctccttctcgacgaaggagctgcaggaccgcgtggccagggcggcagggcaggactccaaggaggagctcatgcgggtgcgcaagg

SEQ ID NO: 60748 - DNA, 402 bp, Setaria italica
  Peptide Sequence Number=SeqID_126722
atctgttcataaacaaagattctgacataaatgttttacaaatattcggaggcaaattccattaacattgaacaataagtgaaactcagcagaaacataaaaattcttagaactttgatatgtccagggccatgctctatatttgtccagttagtacatgtatagctcaatgcatttaggtttgcttcccccatacaattctaaagagcattagtttacttcagatcagtgatggatatttaccttgttgtgtgcagcatctgttggtacatctacattcaagaatgaccctttaggtatttttagaatgatcctttaggatatattccattctcgatctcagtcaagatagtatttatgagcagcatagacacctctgcagacaccttgaggtcattaaca

SEQ ID NO: 60749 - DNA, 201 bp, Setaria italica
  Peptide Sequence Number=SeqID_126723
caattgcccgcaatgtcacgaataaatccacattgatttcaggcatgacacgcaagctttgaagtagggtatggcatctggttctgtgcgggaaagagcacccagaggagtaacggtaatatatccatttgctagggacatgtggtccatgtcctctccttccacaccatcagagatgacctattatttaagagagtgctt

SEQ ID NO: 60750 - DNA, 211 bp, Setaria italica
  Peptide Sequence Number=SeqID_126724
agaggactcagtgatctcatttcaccatcttggctaagcctgtttaatgcaaatgaatttaatcagttactttcaggcgggctgcaggattttgatgttgatgatctgcggaacaacactaagtatactggtggttatacggtgtcaagtcgaactgttaaaactacttactagggaaggtacaatacaaaaggaattagtaaagacctaa

SEQ ID NO: 60751 - DNA, 181 bp, Setaria italica
  Peptide Sequence Number=SeqID_126725
tgcaagcatcacaaatccaaaagggaggagcagaaagaggaatagttcctttgggggcagcatttcctttatcagtagctgcatccaccacattttgaccagtcactgtatttggtttatttactttaggaacacgagacttgatccttggttgtgtatcatcatgcgtattgctattgag

SEQ ID NO: 60752 - DNA, 338 bp, Setaria italica
  misc_feature (203)..(203): n is a, c, g, or t
  Peptide Sequence Number=SeqID_126726
actgatggaacatctagtgaggaggaagatgttactgaaaaccacttggctttggtgaacaaagatgtgaagcaccaaactatggctgacctattccaagaagttttcgatccatcaaacctggaggttgccatgcttccaatgagatccactggggctggttatcatggaaggatgcaacagattatgcagatggaaaaagntaggcatgcagagttcgtgagacagtttaatatagagcaagggtttatttaggtgattcaaagggattactgttcagattatgtcaaggttcgttggaaggaaagctaacagtctgccactgcttgtccaggaaa

SEQ ID NO: 60753 - DNA, 251 bp, Setaria italica
  Peptide Sequence Number=SeqID_126727
gtgaatccaatccctgttccttctcctggacagcttcaagcaactgacatttgtcaagaacctgtatcagagtagcaactaaccactttagtgatccttttgaagtttgatgaagatgtacagatgtcatcagaagatgtacacatgccataaattattttattcactccattttgataatatttttgaaatttcgaggattgttgaccattatctcacagtaactgaactaaattgtctaggacaacaaa

SEQ ID NO: 60754 - DNA, 376 bp, Setaria italica
  Peptide Sequence Number=SeqID_126728
tcccatatttcttcatccgtgaatttcccaatagggtcaagattgtaccttatggtgccctgaaaaagtgtcagatcttgtggaatgatacctaaacgtgatcgcaggtcatataagcctattgtggtgatgtctatggagtctaccgatattttcccttcagctggctcaacaagacgaaacaatgcaccaattaaagttgtcttgccacttcctgtccggccaacaataccaattttatctccaccttcgaaggtgcaagtgattccatgtagcacaaagggagcatcttgcctatacctaatctgtttaataaaaaccagtcacacaatttcgttagaattcataatttccattcaagtgatacatgtaaaaa

SEQ ID NO: 60755 - DNA, 125 bp, Setaria italica
  Peptide Sequence Number=SeqID_126729
tattattattttccctccagctggctcgactagacgaaacaatgcaccaattaaagttgtcttgccacttgcacattcgaaggtgggggataagattggcatagttggtcgaacaggaagtggca

SEQ ID NO: 60756 - DNA, 215 bp, Setaria italica
  Peptide Sequence Number=SeqID_126730
ccagaggaaggcagccatggccgctgtcagcacgagtactgctactactactaacgcgtggccagctgtaggcaagatgagagaaaacttgtaggtaccggtgcgcggggtgtggccatcgtcgtcgagctcgggggcagcggcgagctccagggagtggctgccgtcgtgagccattgacctgctagcggtgttcagagctgcagtgtttgact

SEQ ID NO: 60757 - DNA, 507 bp, Setaria italica
  misc_feature (2)..(2): n is a, c, g, or t
  Peptide Sequence Number=SeqID_126731
tnttatcttaccttagttctttgttcgttctttgttctttccgttaacttagttcttagttctattgttagtaagttgtcttcgttcgttgttgtcgttcgcaggggcgccgtgcccttcgttgtggtagcagttggccctcttgatcgccctgagacaagtcgcggtagtgatggtgtaagcaattgcagtcccgtacaggttcaagtactggagcaagccacagagccaggtgcgcttctcccctaggtgcgtcctgacggcatccatgtaggtgtagttcctctgccttttctccaagtcaggggatctgtagcagtgggacagcaggaaggccgagatgtaggtgacgaaggcgaagcagaccatggcgacggggccgccggacccatcccagctgcgcgacgctccacgagagcgcgagcacgccgcacccgatcacggcggtgatgatgtgcgcgaagcacgtccatagattcccggtgcgcggggtgtggccatcgtcgt

SEQ ID NO: 60758 - DNA, 256 bp, Setaria italica
  Peptide Sequence Number=SeqID_126732
tagaagccgaagccggtgaggaggttgcccggagcggcgttgccgaaggcggcgtacccgaagcaaccgacgccgaggtagaagaaggtggtcgccaggaccgcgatgacgttgcccttctgcatcgtctcgctctcaggtggcggtgatttcagagtgtcctgtgtggatggagtttcaccaaaaagatgtttcgtcgctttcagtgaaatggataaaggcagctcgatccgtgtacctgctagaaaacaaagaa

SEQ ID NO: 60759 - DNA, 248 bp, Setaria italica
  Peptide Sequence Number=SeqID_126733
cctaatactcctggagtattaggttcattcgtgctgattcccaggtttccttttcgctaactcaaaatgcaggcttcagacggttgtggaagtagcgcttgcaaagcttacctggacagctatgtacaggaagcagcacaagaaggacccttctgtgcagcaccacccttggattgtgtcttctgagatttcgccacctcagccttcttggccttcttctcatccttggtcttcttaatgcgctcctt

SEQ ID NO: 60760 - DNA, 402 bp, Setaria italica
  misc_feature (34)..(34): n is a, c, g, or t
  Peptide Sequence Number=SeqID_126734
cctgaggtccgtgatgctggctagggaggcggcncttcgtgagatcaaggagcgcatcaagaagaccaaggacgagaagaaggcgaagaaggcagaggtagccaagtcccagaaggcgcagaacaagggcgcagtccagaagggttccaagggccccaagctgggcggtggtggcggcaagcgctgaagagctcaaaagggtgtcgtcgtactactgtcctgtttcgccatagcctcttttgtaaaacctcggttaaattagcaagacttggtttgtttcagtgctgttgacctagaaggaatagttagaaaataaccaatagaacgaacgaaacgaaataatagggtttttaattactaggaagaaaatagtttagaccggtacgtaatagacaaaaaaaa

SEQ ID NO: 60761 - DNA, 306 bp, Setaria italica
  Peptide Sequence Number=SeqID_126735
atgctgctagagaggctgctcacttctcttcttttggataacttccaaagtggcaccaccaagaagccatactcacgctcaattgttggtgccactttggaagttatccaaaagaagagaagtgagaagcctgaagttcgtgatgctgctagagaggctgctctgcgtgagatcaaggagcgcattaagaagaccaaggatgagaagaaggccaagaaggctgaggtggcgaaatctcagaagacacaatccaagggtggtgctgcacagaagggtcctaaaggcccgaagatcgggcggtggcgg

SEQ ID NO: 60762 - DNA, 197 bp, Setaria italica
  Peptide Sequence Number=SeqID_126736
tcaaactagcctaccctccgatactaatctttagaccttggtcaagttagtctcgtttcagttgttgtcacctttccaatgagattggcgtgtcctgaatgttttggattgtttcgggagttgattttactatttagtctactttattcttttgtttaatttatttgtttctagtctaagtttttgttctaaaaaaa

SEQ ID NO: 60763 - DNA, 416 bp, Setaria italica
  Peptide Sequence Number=SeqID_126737
agattttgattctgccggttccatatttgatattgctgcataaattatgcaagtttgttgtccatggcttcaatcttgcattgttggcatttcatatgttgtagtgtagcctcttttcttccaacctgcagaatactagcgtagcctgcagcctactaaacatttgagccttgaagcttatgattggaacataagagctgcctgccaatatatgccttcttttatatgctgttggaaattacttgagttccaacaaaactgaagaaaggcttctgtcctgcttgtcaacaaaactgaaggagctatttcatgttgtggcccaggaaagacaatactaatacttaataggtactagtaactttacaatagacttagttaaattaagtaaaacggaattaaagtttaagtttagttaa

SEQ ID NO: 60764 - DNA, 410 bp, Setaria italica
  Peptide Sequence Number=SeqID_126738
gcctatggtgcggagacaaagaggagttcgtggtggcacagctcaatctttgcgtacccaccattggccgcagccgcatcaaggccttcgctgacatctgcttgctgcgctcctccgatcagcttggcggcaattgggagtccatgcgtgtgcgccaacccccacggcctgatccggaagtacgggctcatgtgctgcaggcagtgcttccgcagcaacgccaaggacatcggcttcatcaagtaccgctgaaaacttgaggaggtccaaagcatcacgagaatgggagcacggatgaggagcatcttctttgatccgtcttttgcttagtactatcataatcataccatgtactgaattatttgggtttaaaatggaccaagtcgttgtattctagctggcagtctacc

SEQ ID NO: 60765 - DNA, 308 bp, Setaria italica
  Peptide Sequence Number=SeqID_126739
cccttacgcttgtggagtagttaatgtcgatggttgctaatggatgccgtggtgtggttttttgattgcagccgcgtgtgcgccaacccccacggcctgatccggaagtacgggctcatgtgctgcaggcaatgcttccgcagcaacgccaaggacatcggcttcatcaaggtatgcgacagaagctttcgggcccctgcttcctctaacctataacctagccctttgtttggtagtggtttgcatggttgagtattttgtaagcgtatggttcatcctgttctgctatgatttatcccgttcatgct

SEQ ID NO: 60766 - DNA, 270 bp, Setaria italica
  Peptide Sequence Number=SeqID_126740
gagtcacaagccaagtcagagaaggttagggtttaccggtcgagacttcctcctccccgccgccgccgccgccgccgccatgggacactccaacgtctggaactcgcaccccaagaactacggccccggatccagggtttgccgcgtgtgcgccaacccccacggcctgatccggaagtacgggctcatgtgctgcaggcagtgcttccgcagcaacgccaaggacatcggcttcatcaaggtatgcgacagaagctttcgggcccctgt

SEQ ID NO: 60767 - DNA, 196 bp, Setaria italica
  Peptide Sequence Number=SeqID_126741
gttcagacaaggaatgatgtgctagtaaactacctgttaaagtttttgatgggtgctatgtgcctgttgaactaattataattaaatgattgaagtattttggcatgcgttgtatggtgtgtatcctgcttttgttgatgccctcttgagttattgtattcccacatacaagtcatcattcattagtaccaagctc

SEQ ID NO: 60768 - DNA, 193 bp, Setaria italica
  Peptide Sequence Number=SeqID_126742
acaacccggccaagaacactcacacagctagctcactaacacaggcacacaaactccaccatcaccaccacaaacaccaccatcatcaccccgaggccttctaaacctttagttcagaacttcttcatcttcagagccaacgagaacaacccttcctcatcctctcttagattgcctccccccttgtaccgag

SEQ ID NO: 60769 - DNA, 256 bp, Setaria italica
  Peptide Sequence Number=SeqID_126743
ccgtatctgcaatttagagtgtaggtactctattgtagaattaagcccatgtttcccatatttgtacggtgcacactggcacaaaacatttcttgttcaatgagttggtggttatagacattctagtttggttaaggcagactgttgtggtgatgttttttttattttgagactcacaatgtgccgctcttattatgcagtaccgctgaaaacttgaggaggtccaaagcatcacgagaatgggagcacggatgag

SEQ ID NO: 60770 - DNA, 293 bp, Setaria italica
  Peptide Sequence Number=SeqID_126744
aaaggggaaaactaaacccttaaaaagaacaaataacgtaaggaacgaacccaaccgaccaatactacgaccctaggttacgacgtcgccaccaggacgtctgaaatggttacggtgcagaacttcttcatcttcaccgccgacgagggtccttcctcatccctcaaagcgctccccctttgtaccgagcccgagtttgactatacccgccatagtgtccgggtacctcgttttcgtcgtcttacctagaataggtaactccccgcctgctgaatgtcagaaacttgggcttc

SEQ ID NO: 60771 - DNA, 209 bp, Setaria italica
  Peptide Sequence Number=SeqID_126745
ctaaccctcatgggctgatcaggaagtatgggctgatgtgctgcaggcagtgcttccgcagcaacgccaaggacattggcttcatcaaggtatactatatgagcttcaaactgcactgctgatgatgcttaccagagtatcgtgcattggatgcataggctgcatgtactggaacatctgctgtgatattgtttttagttcgctgatag

SEQ ID NO: 60772 - DNA, 237 bp, Setaria italica
  Peptide Sequence Number=SeqID_126746
cgtcgctccacacatcgtccaggaggatcaataatcccacggcaaaggttgcggcgcaggtgctgcccatgagaactccatctgctggtgtgagatggaccatgtgaggcgaggtggacggcgataattgaatccagtaattcagatgttttgtcagaactaaattaagtctggcttgcgttttttggagaacttagccatgtccgtcatgtttgaaccatgagttacctgcatatg

SEQ ID NO: 60773 - DNA, 413 bp, Setaria italica
  Peptide Sequence Number=SeqID_126747
cgtctacgcaatggaggtgcataaacagttattgggaggacccattcaacccttttctcttttctcaacaaggagtgggtgctcgtacctagctgggtctgttccttcaggagttgtgaagaactcgaatcggagagaccactgtacagtgacctttgaggtagaaaatgacataggaccatcaatgggaatggaaaagagaaagcttgtctggtgaagatcagcaacaacctcatgatgttcactatgcagctgcccatggagtacaaaaagaagaagaaaaaggtgaaccattaaaacaaactaaataaaattgatgaatgtttggatagaagctagagcatataaggacaactgatatgctgaaatccatgcataatggcggcaatgtttctcttaagttacttcttgat

SEQ ID NO: 60774 - DNA, 423 bp, Setaria italica
  Peptide Sequence Number=SeqID_126748
gtcatcaattcttatattataagatcttcctctcgtaaaaccttcagctgcaagaaaaaaggaaagaaaaggtggtataggtaacaatgaagtaaactggtgaaatataacagatctagaacaaggacatgatggcttacacccagccggatcaacatttttcggtgtaagggggagtccaacatccgaatctggagaaaacctctgcccatttgatggatgatctggaagcaaatggtttagcttcctttgaggtgacactaaacctccatcatggtcgtctgaaatctctgacactcacaatcgaggaattgggctgtatgatgggaaattggggtcgttctacttgattataaaatggctcacttgtggagaggcgtgatgacagagattgcatcgacaatgagttcctgactgagactg

SEQ ID NO: 60775 - DNA, 425 bp, Setaria italica
  misc_feature (26)..(26): n is a, c, g, or t
  Peptide Sequence Number=SeqID_126749
aaaatgcagcaatgtaatggacatanccttgtactaaaccatccatcataagcatgtaccaaattcatgagctcatgatgattctagaagagtttaagttggcatttcattaaaaaactttgtatttaaaatacaaaggtttcgactttcaactgaaggcatgaacttacaaaatgttctgcaaaactgttagcaatggtaaaggaattttcatctaaagaattgctcacgccaaacaggtaaataatttctctgatatgagaaaaaggatatcgtaatagttcaaattcaaaccaaatcctaataaaggaataaaaagacaccttggttattgtcggcgagccccttcttgaaggatgtaatgcacggggattaattgtttctgatgtttccagggttattgatacctcaaggcacctccgctt

SEQ ID NO: 60776 - DNA, 324 bp, Setaria italica
  Peptide Sequence Number=SeqID_126750
gaatagcctctcctttctccccttcctcccttgagcctgaggctccgacatggtcatctgaaatctctgacactgacaatcgaggaattgggctgtatgatgagaaattgggtcgttctaattgattataaaacagctcacttgtggagaggcgtgatgacagagattgcatcgacaatgagttcctgagggagaattcaggatttgctttggaagggttgtatgaggaaatagatgaaacttcatcttttgaactaatcaataatacctaccttactaagaatacaagaacaaacttaaaactaaattttaagtaacttttaa

SEQ ID NO: 60777 - DNA, 239 bp, Setaria italica
  Peptide Sequence Number=SeqID_126751
tatttgtacaaaagcacttcagaagcagaggacaaacaggccccacattgcacatcctcggaacaactgacggaactttcttttgatgttagtgtagcagtcagaataaagttcctcagttgttccgaggatgtacaaataggccccacattgcacatcctcggaacaactgaggaactttcttttgatgttagtgtagcagtcagaataatttggcattccttacagctgaaaggaac

SEQ ID NO: 60778 - DNA, 230 bp, Setaria italica
  Peptide Sequence Number=SeqID_126752
gttgcaccaagtaaattaagtactttggttaatttccttattgtaacaaatgcagccctcttgatgcaaaaacattgcaacttatgatcaatctccttgctctgtttgtcctctgcttctgaagtgcttttgtacaaataggccccacattgcacatcctcggaacaactgaggaactttcttttgatgttagtgtagcagtcagaataatttggcattccttacagctg

SEQ ID NO: 60779 - DNA, 173 bp, Setaria italica
  Peptide Sequence Number=SeqID_126753
gcggatactgatacccctataagatggtggtaaaatctttgggagctccacacgtacaatgtatcagataacaccagcagttcaatgcccattgaagaaaatgcttgaacaagaaaatactccaaggcttcaaaataagcagttatgtaaaatagataagaaagtaattcgaa

SEQ ID NO: 60780 - DNA, 310 bp, Setaria italica
  Peptide Sequence Number=SeqID_126754
atccacgactgcattcatggcaagatatggccagtcatgggtgctggctaccataccattcaccacacaacttaccgccacaactatggccactacaccatctggatggactggatgtttggcacgctgcgcgaaccagtagatatcctcaagaacgagtgagctgtgtcttctcccgtgtgctgtgctgtgtggggtttctattctgcttggcactttgtgtcgcctgaagcatcggtttgtttacttcagtatgctaggtacattctatattgacttggaagtgccgaattgtacaggcgtctggaat

SEQ ID NO: 60781 - DNA, 248 bp, Setaria italica
  Peptide Sequence Number=SeqID_126755
ccgtccacgaataagagggcgatgtgcgtcctaaagtgtgttgggaaaatgaagagggcaaacacatgtggtattgcttgcaaaatcccatccactggatgaaatgccagcccggcaaatggagacagagtattttccttgttgtaaatatggtgtgcccatgtacttcattaatttggctttatatctcatctttgtggagtttggaatttactggatgcacagagagttgcatgacataaagccat

SEQ ID NO: 60782 - DNA, 300 bp, Setaria italica
  Peptide Sequence Number=SeqID_126756
aatggttttaccctgtgtattgtgtaaggtgttctaatactatttgtaatattattactgtcttatactctcaaaatttgtgtgactatgtctattgctatgcaaggtttgatctaaaattagtgtttgatgcagattccgtccctacaaatgaagctatgaggaagcaaataattgtcgcgtcaaaggctatgcctttatattgtgctcttccaactgtatctgagtacatgattgagagtggatggacacggtgtttctttaatatcagcgaagttggtgtgcccatgtacttcattt

SEQ ID NO: 60783 - DNA, 121 bp, Setaria italica
  Peptide Sequence Number=SeqID_126757
gctgcgctgaccatcactcagacataaagtgtaagacagaaacaatagagattcacctgtgcttgatctctattgtttctgtcttacactttatgtctgaaagaacccaaggctgcacatc

SEQ ID NO: 60784 - DNA, 285 bp, Setaria italica
  Peptide Sequence Number=SeqID_126758
caataaattggagagatcctcccttttgcttcaagaagaagaggcagcatgcttctgttgcatgctacaccagatcaaggtttggaacatatccctcaagtctcatctcatctaccagtatgtccataagttgatacatatcttccgcaccatgctgtggttcagcgcttgcatagaactcaaggacttttgccttttaacctcaacccagctgtctaaccttggtagttctttgtctttgttacttacccctttctttccctttctttatttttaattttcttt

SEQ ID NO: 60785 - DNA, 452 bp, Setaria italica
  Peptide Sequence Number=SeqID_126759
cctctagttactacacgtgctatggaacatttgcacttcagacagttaccagctggcttttgtgggtagtagagaacgtaggccaatgtgtccattcttaactggtagttggtgacataaattcccatggcttgctttcccatagcagactgatatgtattacgaggtgactggttgtgatcaggaaaaggaataattgatgcacaaacaccaagaatcaaagaaggatggatctcacaatgcgtgtaggtctcagaatacgcctcctctgggttgtgtcttgcatttataaggtcatttatagtcatggagatcatggtagtctcctcttcttcggtatctatgtactctatatatccttttgagaccaactcatgccaaccttcatcaggagtctccctttgttgcaatgctcggatatgcgccttcttgatgagcatgccaaccttcat

SEQ ID NO: 60786 - DNA, 354 bp, Setaria italica
  Peptide Sequence Number=SeqID_126760
aaataaggttaagttaggttaggaaattaacaataaggaaaccctagaacctagctaggtgaagactcttaggcgtttaagaagacagattgatgtcaacactgaagttggtgtggttcgtgatatccgtcttaaagaacttcgactctacacggattatgggcgttgcagtcgtccattgtttattgttgagaaccagaggctgctcatcaagaaggcgcatatccgagcattgcaacaaagggagactcctgatgaaggttggcatgagttggtctcaaaaggatatatagagtacatagataccgaagaagaggagactaccatgatctccatgactataaatgaccttat

SEQ ID NO: 60787 - DNA, 394 bp, Setaria italica
  Peptide Sequence Number=SeqID_126761
aagtaagtaagaaagtaaagtaactagaaagaaacctaacaacgacaattagtagaagaataccaataccttactttagaattcttggtgtttgtgcatcaattattccttttcctgatcacaaccagtcacctcgtaatacatatcagtctgctatgggaaagcaagccatgggaatttatgtcaccaactaccagttaagaatggacacattggcctacgttctctactacccacaaaagcctctagttactacacgtgctatggaacatttgcacttcagacagttaccagctggcattaacgcaatcgtcgctatctcttgctactctggttataaccaagaagattcagttatcatgaatcaatcttccattagatcgtgggttcttcc

SEQ ID NO: 60788 - DNA, 248 bp, Setaria italica
  Peptide Sequence Number=SeqID_126762
tttttaaatttgttttatatttttcttcctctcatcaggctaatgttgttataacctttcgttgtagggaatgcgccatgggtcatacgataaactagatgatgatggccttgcaccacctggaacaagggtctcgggtgaagatgtcattattgggaagacatctcctattccacaagatgacgctcaagggcaagcttctagatattctaagcgcgatcatagtacttctctgcggcacagtgaaa

SEQ ID NO: 60789 - DNA, 225 bp, Setaria italica
  misc_feature (116)..(116): n is a, c, g, or t
  Peptide Sequence Number=SeqID_126763
cccctcgattttcggatcattcaaatcagcatccttgtgattttcttccttcactctttgtgactgtggagatctcaccaagtttgcatcagaattattatcaggttcctacacgnattacccacggcaacagagagcacgggggcggggcggatcggaacagaccggagcaggtgcgagcgccctccccgcatccgcagcggtggcggcgccctcgtcctgtgc

SEQ ID NO: 60790 - DNA, 154 bp, Setaria italica
  Peptide Sequence Number=SeqID_126764
tggcaacatgaccgaagatgactggagatggcatatgtatgacacagtcaaaggaagtgactggaaaatggtaagccgtagttctcaagttctataacagcttttggtgcctctctgcacatatactgaatagaatcttggtcgcccaaccagt

SEQ ID NO: 60791 - DNA, 412 bp, Setaria italica
  Peptide Sequence Number=SeqID_126765
acgctcctctcctctgacctcgccaccttgccgactaaaagggaggaagagaaagcgcggagactgaggaattggggtctcaatcggcggtgaacgctcgcgattagcgaggcatgattcatacatccagttagtatggcctcaaaagctataaaaagaaggccttgcaggactgaaactgataacacaagtgaaaaacgaatggagacaacaatatcaaattctgtgacagaacctcttctaggaaatggtcctcatgaagataaatctaagagatacgagcctgctacgcggtcaggtttctgggatgggacaagacaggattgccttcgttgggcgcatcttctatcaatttttattgctcaatctgcaagaaagatagtaaatgttctttctgaatttggatctttga

SEQ ID NO: 60792 - DNA, 379 bp, Setaria italica
  Peptide Sequence Number=SeqID_126766
ctctgaatctctggcaccgacgctcctctcctctgacctcgccaccttgccgacgaaaaggggaggaagagaaagcgcggagactgaggaattggggtctcaatcgggcggtgaacgctcgcgattagcgaggtaagtttcactatgaatatggttcatcaaatagttctttactggcaactgcctagttttgtgtgccagctgttgaacttctaaattattcctgggattcttgttcgccaaagcatattggcatgattcatacatccagttagtatggcctcaaaagctataaaaagaaggccttgcaggactgaaactgatagcacaagtgaaaaacgaatggagacaacaataccaaaatcctgtgacagaacct

SEQ ID NO: 60793 - DNA, 255 bp, Setaria italica
  Peptide Sequence Number=SeqID_126767
cttacaggtagaaagattgagattgttgaacaaaggttagatgtgccatatgactgctcctctgtcaagcatcaggatgctctgaaagagctttggaggttggcttatcctgaccgacaacttcctcctctaaaatcagatctgtggaaggagatgggctggcaaaactctgacccatcaacagattttagggcaggtgggttcctgtccttggagaatctaatttactttgccagaaattacccagattccttt

SEQ ID NO: 60794 - DNA, 240 bp, Setaria italica
  Peptide Sequence Number=SeqID_126768
cttacgacaggtgtcgcgctcggggacagctggatctcgccggaggatttcacggtgagataccatttcttcaatctttccgcgcatgaattgggagctaaaatgaggtttggatggtgcagttagcctacacgccgctgctgctgagcgtgtcgaggctcgatgacaacgccggcgatgaagcaaacaagaaggcggagacagtgaagaagcagatcggcgggcggggcaggtgggccg

SEQ ID NO: 60795 - DNA, 234 bp, Setaria italica
  Peptide Sequence Number=SeqID_126769
agaagctcaggatcgtccccaacggacctcaagtgggtggaggtctcccaggccgtttataacacgctggtcaacgatttcatgaagccaagaatcgatgagattgatgagctgctgtcttatgggatcaatgtgacggtgtacaatggccagctcgacgtaatctgctcgaccaatggcgcagaagcctgccgaggcaatctctgtactgtggacagagcaaaggcaccaagg

SEQ ID NO: 60796 - DNA, 327 bp, Setaria italica
  Peptide Sequence Number=SeqID_126770
tttcattaaccactacaccatgtttgttggagtaaacatcattaaccacactctccaggtctgccacatcctccacagacatcgcaatgtactcattaaggttatcggtggttccatctgaaacaggcagggagaaagcatcaaagataaaataatgtgccatctgctatgtctggacacatcaaatcctcatacaaacaaggaaacaagacttgtcatgttcaaatttaaagtggacaaaaacatttcatatacactcattggattcatacttactactacctagtatacacaattttacatcatattcatcatctgaaagtatat

SEQ ID NO: 60797 - DNA, 339 bp, Setaria italica
  Peptide Sequence Number=SeqID_126771
ttcaacaaccgcaacaagtagaagacaagcaaagctcaagatgctgcccacgatcaagaatcaaccaatgaacagcacgaacaagaatttaaggatgtaaaagaatatacgcgctcagagaccgaaacttccagtgcaaaatgcagccaaaacgatgaggctgaagaagtcgcccttgcagtttcactgcccgaagaagaactacaacaaggctgcaaagatgagcaacctgaaccggcggcaagggcagaggcgggaagcgcagcgggagcaaggcgaaaagcgttgccaacgacaaggtggaggagctcgtcgatgaaggcgaggaagaggaggaag

SEQ ID NO: 60798 - DNA, 479 bp, Setaria italica
  misc_feature (447)..(447): n is a, c, g, or t
  Peptide Sequence Number=SeqID_126772
ctggcacatggaagccagccactaagaccgacggccaaacttaggttcacagggtatggattggcatttccatatttccatgagcaaagcaagttgcagagtatagagcagtagcagcacccatactaaagccaccaacgccaagtttgactgcaattattaatgaagcaggaccaaaggttacaagataaatacaaaattcctggtaaagatcaagtagttcttttttttgttggattgccaatttaatatgttgaattagcctatttcttgcggcaacatgcatgctcttttataaaagtccaagagtttcattaagtgtatggaacatattaagaaacatgcccatgatataacagcaaaggccatgtcagcaatctcatttctagtatttgattgataagatgggatgaactaaaatgaataagcaaccaaaggtaacccatnaacaaacaaagaaaaggggaaaagaacttgag

SEQ ID NO: 60799 - DNA, 438 bp, Setaria italica
  Peptide Sequence Number=SeqID_126773
tcatctaaaaaaagttacatcattcttgtatgtgcccaagaaatgagttgacagtaactgaaaatgttacattaattacaacaacaatcatgtcataggtacgcatcggttttgccaccaaacaactgcaatacaaagaaactgtttcgacgtaatctgcaaaagtctttcatggaaaaaaaatagatctcgtggtggtaagctaccgcatagcaccttaccctccatgtcacctgaaaggttctaacaataaagaggtaaaaaaataccttcagaagatgttgccatatagaagaacctccaaaatccaatgtttttgagtaataatcttctactgggcatggacaaagcatgatgctaatgctttttctgagaagtgtatcatagaggatacgcaaatagagttgggagctgcatcacaggattaagctgggtcat

SEQ ID NO: 60800 - DNA, 442 bp, Setaria italica
  Peptide Sequence Number=SeqID_126774
actttagaatacgtaattacggaagacaatttaattagactaggaagacttagaagaaccaactaagattttcctatacggtttatagtagcaagataaacagcagttgtaatgttggccacaaagacaatggcgtacccacgggcatcaaatgacaagtctcgagctccagcaataaatgctccgaatacgatcaaagccacactgcctattataggtggggtgtgcttctagctttagccaagaaatattccatggtcattgtaaatactactgttgtgcgccgtagagttgtgtacataggaacgttgactccacggacagattccattgaagctagcatgtagagtaaataagccaaagaaagaggtgtggttcgcaacaatatcctaaacggcacaaagaacagtgaatcagaaggcactgatggggtcactatttg

SEQ ID NO: 60801 - DNA, 398 bp, Setaria italica
  Peptide Sequence Number=SeqID_126775
cagtaatatatcgggatttcaaaacatccaatattcttttagatgcggactataacgcgaaactctctgattttggacttgctaaagatggtcctgagggtgataagactcatgtatcaactagagtcatgggaacctatggatatgctgcacctgaatatgtaatgacaggtcatctgacatcaaagagtgacgtatatagctttggtgtggtgctactagagatgatgaccggtagaaggtcaatggacaagaacagaccaaatggggaacataacctagttgaatgggcgcggccctatctcggggaacgacgccgattttacaagcttgtagatcccaatttaggaatagggaaacttactacgaataaaaaggacgactacaagaaagaacga

SEQ ID NO: 60802 - DNA, 247 bp, Setaria italica
  misc_feature (37)..(37): n is a, c, g, or t
  Peptide Sequence Number=SeqID_126776
aggcgacgctgcttcggctcccgggcgaagccgctgntaccccagcgtctgcttcggttcgcctcggcggatccagatgctgtcgaggctctctcgcgccggcctccaggccctgaaccgggcgagaccaggtccgtcatgcacctttcgcctcggtcctcctcgcagcgagcggtcccgttcgccgttctgctgctgcgtgtctcccccaacgcgacaggctttcgatgtgtgcgcgtgtgctgtt

SEQ ID NO: 60803 - DNA, 463 bp, Setaria italica
  Peptide Sequence Number=SeqID_126777
gcctcctacatcgtacaacctatagacctctccacctcttttgctctctccaagagggctaaactgagtttctaccacaccattcgtccgtactcttgcatgaagcacgtcctcctttgttggtacataatctacttcagctaatcggtccaaattgctcatgaagtactgtgcacagtcagggacttgcagaatacttccgcgtgaataagtttcctgaatggctggatcttgccataatttccttacatcctgtacaagttctttgttcagcaatgggtaatccaattttgcaccaatttctgatagtttctccccaatctcctgattatctggggatagaacatattttgaggaatctggttccacttgggctagctctttagctccgtcatatagaatctgtccacatttaactcattactgaggcaaaagatgtgcaaacacacccccataaaaacag

SEQ ID NO: 60804 - DNA, 402 bp, Setaria italica
  Peptide Sequence Number=SeqID_126778
cctttgttggtacataatctacttcagctaatcggtccaaattgctcatgaagtactgtgcacagtcagggacttgcagaatacttccgcgtgaataagtttcctacaaatgcttttctcagtaatcaagctttctgttcaactgtctataaaatttctttaaataaagtagcaatgtttttcacctgaatggctggatcttgccataatttccttacatcctgtacaagttctttgttcagcaatgggtaatccaattttgcaccaatttctgatagtttctccccaatctcctgaagttgggataagttacagtataaataaacaaacattttgctagttcaataaggtggatgatgagaagcttctatgagctagcaaaggcatctcaatgcctacaag

SEQ ID NO: 60805 - DNA, 469 bp, Setaria italica
  Peptide Sequence Number=SeqID_126779
aacaaagcgagaagcagcagcatgcacagccctatcaaccaaatttccaagtcatacgcatcataaccttcacattttgatgctatctcagatagaacttccccagaacactgcaactcatgctcctcaacttgatgttttagtagtgctgtgcgctcaggggctgcaagagcaggaagctcaatgtggaaatcaaatctcccagaagaggttaagtcttgaggaagactctgaagtgattgaactgaagccataaacgcaataggtccatacccgcatgtattttgagtcttatccttgtattcatccataatgtcagccaaataccttactagagaatcagaagaactggatgattgagacacttgaggatctgaagagacagcatttctgaagcgctgcttcattcaccttcgatcatacataatttagaattagaattacttaggaactaagttagttaaattta

SEQ ID NO: 60806 - DNA, 404 bp, Setaria italica
  misc_feature (53)..(53): n is a, c, g, or t
  Peptide Sequence Number=SeqID_126780
ccgtaaactctgttcctcccaccatcctaattacttttcttgtgactagcaanaacccatgcttggtcaggttccttctctggagcgcctcatgctctcgtcgatcaacttaaatgtcttcttcacaagtttctgatccagggcggttgttctgtaaatcttgaacactcggtctacgcggtctggcttgctggtagctgcaaatacaaatactccagtcaaggtttccacaccatctagttctgtcaagaactgattaacaacacgatcagaaactccagcactatgggttcctcgctggggtgcaatggagtcaaattcatcaaagaatagcaggcaaggtgctgctgcaactgcatttgcaaaaaagtcacgaacagattgctcagatgaaccaatgtact

SEQ ID NO: 60807 - DNA, 323 bp, Setaria italica
  Peptide Sequence Number=SeqID_126781
ctaatcggtccaaattgctcatgaagtactgtgcacagtcagggacttgcagaatacttccgcgtgaataagtttcctgaatggctggatcttgccataatttccttacatcctgtacaagttctttgttcagcaatgggtaatccaattttgcaccaatttctgatagtttctccccaatctcctgattatctggggatagaacatattttgaggaatctggttccacttgggctagctctttagctccgtcatatagaatcctttctagtatagcatactttaattgtctgatatacgttcgcatggatgactgaagtata

SEQ ID NO: 60808 - DNA, 288 bp, Setaria italica
  Peptide Sequence Number=SeqID_126782
cgaagtgttcaagatttacagaacaactgccctggaagtagagctcctcaaacttctttttcacaaactcgtaggcatgttcaacctcctgtttgccaggcacagtaggctggtagtctttaaaccactcgcacacactcaaaggaaccttttgtattttcctctcaaatatgtcgaatttgttgagaaacaacataaatgaggttttctcaaaacatctttgctttagcacccagtcaaagagtcctttggtctccatcattgttcttcgtctcatcctcgaatagc

SEQ ID NO: 60809 - DNA, 244 bp, Setaria italica
  Peptide Sequence Number=SeqID_126783
cgcactgtcacttctcctcaaagtgacattgacgatgcaattatctcttttatttttgctgtcaacaaaggctaagattcactatagctccagtaacatgcataaactggagagagaataaactgttcatgagctatgaaacattacaggtcggagagggacgatgctggcagcggaaggagaatgccggcggcgcccggactatctccggcgtcgcggacgccgtcgcctgcccgtctccaac

SEQ ID NO: 60810 - DNA, 294 bp, Setaria italica
  Peptide Sequence Number=SeqID_126784
gcttgaacctgataaaaatagtcatcttgtgcaaacccacaattagttactgatctctggttgtttgttcttttaaaactcatcctgcaaacatcaaggaggaaaacctctacttccccatatattattggttaactgtatactagttcctttatcatagagtttaaatttatgggatcagttggcttacattctttcagggaaagggatcggcaggtgcagttgctacaagagcaccataaggacagcacacaataatctgcttagttgattttcagataacaaaaacaacca

SEQ ID NO: 60811 - DNA, 212 bp, Setaria italica
  Peptide Sequence Number=SeqID_126785
tgtagtgcatcaccctggatgatgatggagttggtgatctcgatgatttcgctgcagctgcagcaacagctgacgcggcggatggtgctgccgcagcctcgtttgaccttaccccgctctatcgagcgatgcatatacaccagacgctggcgctgggtgagcggttcaagaagtactacctggagaacaggaagctgcaattaacatcggac

SEQ ID NO: 60812 - DNA, 144 bp, Setaria italica
  Peptide Sequence Number=SeqID_126786
gatcctccctcttcctgtgctccgccgtgtgcttgtggcagtgcttgcccacgtctctgagaggattgtcgagctcttcttgaatgattcagtaaagctcgacaatcctctcagagacgtgggcaagcactgccacaagcacac

SEQ ID NO: 60813 - DNA, 345 bp, Setaria italica
  Peptide Sequence Number=SeqID_126787
gtaagttcggttgtctacggttacgacgacatgcatagttgtcatcccagagaagtcgcaaatcgggcttttgcattctgacagggtttttgttgttctccaatatcttcccagcattaataagcttgagatcattcacggtcctcggacctttttccttatctgttgagttgagaaggaacggtaagaacactacaaacaaacttaacagaatgagataaaaagtactcaagaaaatttaattgtggtttggtggtttacagaagtgcagcactacattgaatatattcaagttgaaacagttaaagtgaagaaatccagtctaagtactaaaaggtattaaaa

SEQ ID NO: 60814 - DNA, 352 bp, Setaria italica
  misc_feature (335)..(335): n is a, c, g, or t
  misc_feature (341)..(341): n is a, c, g, or t
  Peptide Sequence Number=SeqID_126788
actggatggcaccaaataaaggaggcatgcccaaaacagggtcaccagcaatgatttcaccggacgcagctcctatcgacatggagaggcgtagcgttcaccgctgccgggatggccctcgtgacaggggttatgcatgtgttcatcatgttctcccaggcggagcggtcgagctcagcaagggcggcacgcaaccgggtgaagaagaatgatgaggcaacggtagtctgggtctgctaaaagcaatccaccaaactggctgcagattaaattcatacaggcaccaaatttgagggtctgtgtgggctaggacacaaaaagttgatgtacccaanaggaancggtattcttg

SEQ ID NO: 60815 - DNA, 373 bp, Setaria italica
  Peptide Sequence Number=SeqID_126789
tagttagtaattagtaagtaagttctattctaaaagttttctttcctagtttatttggtcttggtccatgtggtttgcagaatacctctttttggagaggagctgggcaaaggatgaaaagacactaaagtggggcctccaaaggttgaatgacttccctagaccattttggctagcccttttcgtttagggtactcgctttactccagcaaagcttctcgcagctcaggagtatgcagcttcacagggcttaccagctccgcgaaatgtacttattccacgcaccaagggattcgtatctgctgtgagtattatgcgagattttgttccagccatttatgacacaactgtcatagttcccaaagattcacct

SEQ ID NO: 60816 - DNA, 131 bp, Setaria italica
  Peptide Sequence Number=SeqID_126790
tttgttttttttttacttttctttctgaaagtcttaatgtgctgacagctcttttctttgtgtaaatatcagggatttgtatcagcagtaagtattatgcgtgattttgtcccagctatctatgatacaac

SEQ ID NO: 60817 - DNA, 180 bp, Setaria italica
  Peptide Sequence Number=SeqID_126791
gttgagggtacacggtttacgccagcaaaacttctagcagctcaagaatatgcagcctcacagggtttgccagcccctagaaatgtgttgattccacggacaaaggtatccgtttatgctgtttcctgactgaaatttaatatgttaccatgaatgtttccactgttatagtgaaatgtt

SEQ ID NO: 60818 - DNA, 144 bp, Setaria italica
  Peptide Sequence Number=SeqID_126792
ctttgcccagctcctctccaaaaagaggtattctgcaaaccacatggaccagccaataaagtggggcctccaaaggttgaatgacttccctagaccattttggctagcccttttcgttgagggtactcgctttactcctgagct

SEQ ID NO: 60819 - DNA, 239 bp, Setaria italica
  Peptide Sequence Number=SeqID_126793
tgacttctcatgaccaacttaaaggaatgtttttgaagatccattatccaccaaccgagtcaaacattgtctttacttacaatcagattgctcctgtgtaaagttcatggcaaatcatcgtcatcagattgatttattgtaaggctagacatgcactgaagaataccaacagatttttttgtctttattgtccattccacgatggatcagccattgctcatcatgtagcttggagagga

SEQ ID NO: 60820 - DNA, 308 bp, Setaria italica
  Peptide Sequence Number=SeqID_126794
tcttgtaaaccttgcggtattcatgttttgggttcagctgatgtcgggaaagcttccaaacaggacgtcttagatcttagctggtgctatacagcaaatctcatccaaaccaaccagaggagacttaatacgccgtgactccggaatttgtcaggtcaacgtcgcccattcctgtgtcttcctcctcttcactgtcatcatcaccatcaacctcagcattttgctccatcagggaatcaatctggtccaggaatagcttgtcttcccgctcactcacagctcttggtggttccttcactaccaacttt

SEQ ID NO: 60821 - DNA, 282 bp, Setaria italica
  Peptide Sequence Number=SeqID_126795
aatgacgccaggttcttccggcagtgcgccaccacgtcgtcctccccgatcaccaagccctcgcgggggatcaccgcgcagttgatctcctcgccgtacttgtcgtcggggacgccaacgtgacggcgggatacaagggcaacccggaggcgaacgaggcggcgttccggttcgggtggttccacacgggggacatcggcgtcgtcgacgaggaagggtacctccacctggtggggcgcatcaaggagctcatcaaccgcggcggcgagaagatctctccca

SEQ ID NO: 60822 - DNA, 221 bp, Setaria italica
  Peptide Sequence Number=SeqID_126796
gccgcctcgttcgcctccggttgcccttgtatcccgccgtcacgttggcgccccggacgcacacctcgccgggcttccctgccgccacgcgcgccccttcctcgtccaggatcgccatctcctgccccacgggactgggcctcgttgacggtgatgctgcggccgtcgagcttccttgccgttcactcccctgatggcgtcgcgcatcgcctgctcgctcg

SEQ ID NO: 60823 - DNA, 210 bp, Setaria italica
  misc_feature (61)..(61): n is a, c, g, or t
  Peptide Sequence Number=SeqID_126797
ctaccgcaacgacttgatcaagagaattggcacgcagctggacagagcttcggcctcggancttttgatacctgcagactccagcgatgacgcaatgtacaatgtcgatgtggtcacagcgatactggaggagttcatgctgcacaacaaagatgtgagtgagccaaagttgcaggaagatgatgatgacaccatggatgtagctaacaa

SEQ ID NO: 60824 - DNA, 162 bp, Setaria italica
  Peptide Sequence Number=SeqID_126798
tccacgtccggcggcgacgccagctctctccggtcggtgagcctggccgccagcaagagaggcgacagctccggcggcaagaagaagtcgaagggcggcgcggtggtgaaccggaacgaaccggacgaaaagaagggtagactaggggaaagactagtaggt

SEQ ID NO: 60825 - DNA, 357 bp, Setaria italica
  Peptide Sequence Number=SeqID_126799
tgcagccatctcttgtgttagatggaatagtgcctcagaaaaactagaggcaaatatatttgaatatttgaatgagagaaatgcataccaagtcaatggtgacgcatcaagcagttgctttgatgtagatatgcattcagcaagtctggataaagggacacagacatcctgcacaaacaacagatacagtagcattaggagactcgttgtagaccatgcattgttaactgacaacatgttccatgtaaagttgccacaatcacaatgaccttttggacgagctacacaagcataggagtagaaaataacaaatcgctaatgagagaaacaaagctctttattttcaaacaagggtat

SEQ ID NO: 60826 - DNA, 248 bp, Setaria italica
  Peptide Sequence Number=SeqID_126800
cccgcattgttccatacctcacagctaatgaaccagaacagcgagtagcacacatgcctccaatagtggccccaggccctggatcaagagggaaaaagaggccatagggcttcaggtactcgttcagctctatccgtccaactccaggttcaacaaccaaatccctgcatattgaggatatggatgtggttgttgaacctggagttggatggatagagctgaacgagtacctgaagccctatggcctc

SEQ ID NO: 60827 - DNA, 188 bp, Setaria italica
  Peptide Sequence Number=SeqID_126801
tgaattctaaacatcaaggttggcacttcaggcaagtttttaccatttgccatgtttattgcccttatctgaacctcatccaacaattccactcttgaaacctagtcatgtagaaaagaaaaacagaaatattgacaaactgcaagagccccacaggattgccactgatacacatagatgtaagttcc

SEQ ID NO: 60828 - DNA, 388 bp, Setaria italica
  Peptide Sequence Number=SeqID_126802
atggaaggaatgtgtctcctgtttctttttctcagagcacagaatatgctttgcagcattcacaaaatcagaacccattggataggatttgccaggagaatgtctcattgccctcccaaacaaatgttccatccaacggactctcaccatcttcttcttatgccgcttcagaggtttcttctgtttcgaggtgttatagctttgaggatagcgctgagatgcatggaagtggaacagacatgcactttccaaggaaggtatggaaatgttgtttgccaatatctgatcttttgtctgtctgtaagttactagcaacttgatattcttctctttttttcattaacctgggtgatgatgtttcattttattttattttttgtcttagtag

SEQ ID NO: 60829 - DNA, 202 bp, Setaria italica
  Peptide Sequence Number=SeqID_126803
tgactgaaaattttctttttgagtatgacaattgagcttttcaacaatttccctatctgactgaaggtatccttgcatcttcaagagagaatgggaaaatactgtcaaatcaaacagtaagctttgaaagcaaccagagcccagctccaggagcaaaatttgtgtctcacaaggagcaagttgcactagacagtagaaccaa

SEQ ID NO: 60830 - DNA, 210 bp, Setaria italica
  Peptide Sequence Number=SeqID_126804
ctgtctgtatgcaataattgcataaacccatgcgtagctagcttcatgtttgtgttattcatctgctaatttagactggtgattatgtgcagctagctttaatcgtattcgaacagctttcttatatggtgctcgaaagcttggtcatatcctcatgttaccaccagaagttattcctgatgaaatttacgttttttcaaaacacgttgg

SEQ ID NO: 60831 - DNA, 287 bp, Setaria italica
  misc_feature (287)..(287): n is a, c, g, or t
  Peptide Sequence Number=SeqID_126805
aagaggcaaggtacagaccattcgtcaaggttacctttcaagagatcgtcaaacttgagagccgattggaaagaaggttcttcgtacttgatagtcgaggaatgttgtactactatcgcaaacaattactaggccacctgtaggtctccgctgtaacatttggtgttgacataattaagttggaatggcttttatgcattcatgatatattcagtcccatccttttctcaaccattttcccttgatcttataggccggttgttccatccaaagaggcgttaaccccn

SEQ ID NO: 60832 - DNA, 249 bp, Setaria italica
  Peptide Sequence Number=SeqID_126806
ttttcatttgccacttggctggttaaaaaccaagtcaattttggatggacaacgggtcctggaattgggaagcttgtctatgttgttcattagttcctcttataatgcttagtgggacgggagctctggcgatctttctgaggaagtcatttgggatggatatcacaacctctgattatgacgacaaggaaattgaagagaatatagcttacaactgccgagctaataatttggatgtgctacctcata

SEQ ID NO: 60833 - DNA, 239 bp, Setaria italica
  Peptide Sequence Number=SeqID_126807
acaagacaacagagcaaacagcaagagtatttgatctgataacctgagctgcagcagtacttaccttacctccgaggagttgatccagatggaggaacaatagtcttcaacttaattactcgtttctttcgtcgccttgacttcttgacgcttacaaaggagggatggtcctttttattggcaagctgacccttctaacgcttctcggcatactagctgacttgcagacagagcactag

SEQ ID NO: 60834 - DNA, 374 bp, Setaria italica
  Peptide Sequence Number=SeqID_126808
caatggtctagtgtatcaggcatgtactgcaatgacttgacaccaagtgtggaaaggccccacagtgcctcaataaccgattttggtgccgttggagatggcgtaactcttaacacgaaagcatttcagaatgcactcttctacctcaactcatttgcaaacaagggcggggcgcagctgtttgtgcctgctggaaggtggttgaccgggagttttagtctaataagccatctcacgctgtcactggacaaggaggcagtaattcttggatcaccagtaagatgatttcacaaaatggtttgtagacatgcctacttcaagtaaattattctatttttgtctcaccactgtacttttaaattaccttctggaac

SEQ ID NO: 60835 - DNA, 263 bp, Setaria italica
  Peptide Sequence Number=SeqID_126809
aaagcaaacatgatgtctttcaggttcaaactatgagtactttgcaatgttcaactcaggttgaactgaaaacaacattatccaggaggccgcttcaagagtctgcctccaatcttttgctggtaccaaccaacattataactgattcaaggttatataatcgtgttgacaatgttcctctatcaagtgatttacctaaaaaatggtaaatatgctatggtaatgatcaatttatccaacctttctacaactattgttttatt

SEQ ID NO: 60836 - DNA, 134 bp, Setaria italica
  Peptide Sequence Number=SeqID_126810
ttgtggtaatgccgtgtatgctgttaccagaaaattcctacttctttgatttagattgatcaccgtccaccatcaaccagtgcaacgaaataaaggctgcgaatcttgctagcaaagaaggtgcgacctcagca

SEQ ID NO: 60837 - DNA, 258 bp, Setaria italica
  Peptide Sequence Number=SeqID_126811
ccgattgaatggggttcctgcgttcctaaacagtccattcttttaacattctatttttccttaataggcaattgcaaaaggcatgttgaaagaactgcagttccagtagaaaatagaccaactgcgaacagctcgttgctcgcgttctggacttctggtgcccctttgctggcgtctccgcgctccctggtcgccgtcgacgacgacgactccctccccctcggcgtcgaggcagcagtcgggttcgggtagagaggc

SEQ ID NO: 60838 - DNA, 278 bp, Setaria italica
  Peptide Sequence Number=SeqID_126812
ttccaatattatgttttgatacttcattactggaacatccatttttgctggtttcgcccttgatgtttggtcaaacgtactcttttgataatgaggatctttaaaaagtccattggatgtaccgattgaatggggttccgaacagctcgttgctcgcgttctggacttctggtgcccctttgctggcgtctccgcgctccctggtcgccgtcgacgacgacgactcctccccctcggcgtcgaggcagcagtcgggttcgggtagagaggacaaagga

SEQ ID NO: 60839 - DNA, 215 bp, Setaria italica
  Peptide Sequence Number=SeqID_126813
atttttatagtaagaaacaatatgctgacaagattataagctctgtagcgtgcatacttgtgttcaggatgatagcccaagtaatctgaatttcggctcccatgcagttatagccttgacagttctgaagcggaaagagatgctgttaaggcccagaacaggaagggatatctgttactgaggaagcattccctgacgaaaatctgcatacagca

SEQ ID NO: 60840 - DNA, 168 bp, Setaria italica
  Peptide Sequence Number=SeqID_126814
gaaagctacagcagcacgctcgctgcaatcgcatatagtagtaggtcatctgttggaggggctcccaacagatgacctactactatatgcgattgcagcgagcgtgttgcagaagcgtaaactgatcatagaaagctacactccctaatgatctcatccatgctgctg

SEQ ID NO: 60841 - DNA, 313 bp, Setaria italica
  Peptide Sequence Number=SeqID_126815
cgccccccaccatagccaccacttgtaggcttcttattgtaaccatctcttgctcatacctcccccaccatagccaccacttgtaggcttcttctggtaatcatcttcttgctcatacctccctccaccatagccagcactacttggcttcttcctgtgatcctcctcttcctcataccttccacctccatagccactcccaccaccaggcttcttcttgtacccttcctcctcctcctcatatctacccccctaccaataggaaccaaccgaactaagggaacttaacttaagaaccgtaaacttaaggaaa

SEQ ID NO: 60842 - DNA, 206 bp, Setaria italica
  misc_feature (18)..(18): n is a, c, g, or t
  Peptide Sequence Number=SeqID_126816
attatattatacctgaanctttttctgagatcattcgtcatttgtgtctcaataggatgttttggattggctgagaaagagatggaatacagggttgatcttttcaatcggcttacacagacatgttttgccaagtgcatcgagaagaggtacacctgaatttggcatgtgtttttcattttcctcttagtttttgacttcttaaa

SEQ ID NO: 60843 - DNA, 484 bp, Setaria italica
  misc_feature (484)..(484): n is a, c, g, or t
  Peptide Sequence Number=SeqID_126817
tgatgaatttgtatctacagccagtggtttgcaattgctgatttgttagtcacctcttgtaaatctctctctgtctctcttatgttattagagtttagaaaaagatatttcagtcaccatgacttctctcttagtctcttagcttctaccctttttgtttgtctgtagcatttcagtttttatttgtataatttatgtgcagtgatgctcgagtcatgtgggacaacaaaactgggcgctccagaggttatggttttgtctccttccgtaatcaacaggaagctgaaaatgctataactgaaatgactggaaaatggcttggaagcagacaaataaggtgcaactgggcaacaaagaacaattcagaagagaaaccagaaactgacaatcataatgcagttgtactaacaaatggtaggctcgagtaattcagcaacagatgcaagccaggatggaggaagtaaagagaaccagagaacaaccn

SEQ ID NO: 60844 - DNA, 239 bp, Setaria italica
  Peptide Sequence Number=SeqID_126818
ctaaattagtgaatagtttgcaaagtactgctagtaagacacagtgtaatgttaatttcttttttgttttaattttttattttgtatactatggtccatgaatatgaagttcaagtatgaactggcatttccatttcttccacacttcctgactcggtactattttccttgttggtgcaggaagctgaaaatgctataactgaaatgactggaaaatggcttggaagcagacaaataag

SEQ ID NO: 60845 - DNA, 439 bp, Setaria italica
  Peptide Sequence Number=SeqID_126819
gtggaaagatgcaaactcatccggaaagagaagtcttcctttgggtttgtggattactatgatagaagatctgctgctctagcataatgacccttcatggtcgtcacatatatggacaagcaatcaaggtgaactgggcgtacgcaagtacgcagagggaggacacatctgggcatttccatatttttgttggtgatttaagttctgaagtgaatgatgcaactctttatgcctgtttctcagcatatccttcttgttctgatgctcgagtcatgtgggacaacaaaactgggcgctccagaggttatggtttttgtctccttccgtaatcaacaggcaagaacaactcaggctttgcctctttggatttcacagagcttttaccttttttgttgcgtggatcaaacacagcagttttattattttgtactactattta

SEQ ID NO: 60846 - DNA, 328 bp, Setaria italica
  Peptide Sequence Number=SeqID_126820
ttaaaacttttaaaaggggtttaaggggtaactaaaattacgtaaggaaaatttacgttgttcaacaggagaaagggtttggatttgtgagatatagcaaccatggtgaagcagcattagctattcagatggccaatggattggtagtccgcgggaagccaattaagtgctcatggggcaccaaaccaactccacctggtactgcatccaagcccctacccccaccagttgctccgtaccagcctgctgttgcaatgccaggcgtcccgcaaggcttcacagcagctgagcttctggcttaccagaggcagcttgccttaagccaggc

SEQ ID NO: 60847 - DNA, 208 bp, Setaria italica
  Peptide Sequence Number=SeqID_126821
cacataacttgtggactgcttcagtaggccacaggttatattcttatgcaacaggagtaccacgaatggatcaaacaactcctatcctcaaagtcctattacttaggttcagctgtcagcccaaaatgcttaggaagaaattgttttgaagtataagtctggtgcttctgtgctatgcaatcagttctttttatccgctagacaatgt

SEQ ID NO: 60848 - DNA, 491 bp, Setaria italica
  misc_feature (336)..(336): n is a, c, g, or t
  Peptide Sequence Number=SeqID_126822
ccggacgctggcgctgcccgacctcgcggaggagagctcgctcagggcgctggtgaagaagcagatgcaggcgtcgtccctgaccggctccgatgaaggcgatatcgacctcattgctgaaacgcgggccaaggaagtctcggagtttcttcaaatgctaaacacttcgagtgacgggcgatcttccaaggttcatgaggtgccacagaaggagtggaaggtgaagcaagatacagaccaattaagagtcatgtaccgcgagggaccagaggggaccccatttcacacccttcttcttgaaggctttgctgatggacctattgatgtttgtaaggnttttaatcatcaaccagtaaaatactacatcttaacacactgacactggcacaatttttttcataggtacatgtgtgtcatgggaatcggctctatacaaaaatggtttccacaatacaacctgccaactttagaattgatcagtcaggctgctt

SEQ ID NO: 60849 - DNA, 369 bp, Setaria italica
  misc_feature (369)..(369): n is a, c, g, or t
  Peptide Sequence Number=SeqID_126823
aacttttaaataacaagtaacctaagaaggtaagaagacaatagacaattgggcatattggacaccgctattgcagttatcagaggcgataagaccacgaacatcaccacgctacaaaatttgctcagttatgatgcggcttcgaaaggaagtactgtcagttcgagaagttcacgagctaacattcgcaatgcagacaatcttctgaacggcggtcctgctaccacacaaccacaggactccagagagatccgacaagcatattcactgcccagtgagaaagttagcgatagggcagaagacgccatcgacaaaggttctctgaagaattcgacagcttctaccgtaacaaggacgatgtcaatgacn

SEQ ID NO: 60850 - DNA, 212 bp, Setaria italica
  Peptide Sequence Number=SeqID_126824
gtctcggagtttcttcaaatgctaaacacttcgatgacgggcgatcttcgaaggttcatgaggtgccacagaaggagtggaaggtacgggttgaactgagtttgttaactcgttcaaataagcttcttgatctgttttcgctttgaccattcgcttgatcccctgttctgcattatagcgtgaataattcaccaatttaattcttgtactta

SEQ ID NO: 60851 - DNA, 499 bp, Setaria italica
  Peptide Sequence Number=SeqID_126825
caacgcctccgtcctccggagccgccgccgaggccggcgtcgaagctgaaatcaaggaggccgtgcccttcatcaagctctccggatgtcgcgtccgaggccgagaaggcggagcccgatgccacgaggacggagcccgaggccgagcgggccgtcaccgtcgacactgacgtcggcacgggcgacggtgctgcggcggcgacggcggaggaggagaatcccgtcgcggaggcggtttcctgcgacacggaggcgcccgtggactgcacgggggacagggacctcttcaacctgctcatgcgcacagccatcgagcggttccccgacctccacttctaccgcttcggccgtcccgtggcggtgccggggagccccatggagtgcgacctcgcctggcgcttccgccccgccgccgacgccatcggcaaccggccggaccaacgtaactaacaaaggaactaaccgaccgacttacgacgactacaacccgacgaacgta

SEQ ID NO: 60852 - DNA, 443 bp, Setaria italica
  Peptide Sequence Number=SeqID_126826
aaaccgaacttaacgaacgaactacaacccgacgaacgtcaaacacctgcacactcgtcgtcgacagcgtgggcgaataccactcgggtgtaggtgccaagcgcagtggcaagcgcaagggaaagaaggggaagaagggaaagcgtgaggcaccagtgaccgactttgtgccggccaagacacaggttaggctggacgagaatgctgccaacaatgaggctgccggggctgtggccgagccggtgtttgttgttggtgaggctgtcaatgatagcttgccagtggttgcctctgagtccgaattcagccgcggaaggtacctcatttacatgggtggaggcgagaggtgcaagagcatgaaccacttcatttgggggttcttgtgtgctcttggtgaggcgcagttcttgaaccggacacgttgtaatggacctcaatgtctg

SEQ ID NO: 60853 - DNA, 342 bp, Setaria italica
  Peptide Sequence Number=SeqID_126827
aatagtgagtggtttactgaactaaggagctgagcaacggtaaaccggtggagtttgatgggtacatgagggttgcagttgacactgaggtgtttctgaggggcaagaggcatctggagacattcaacgaccttacacgcgattgcaaggatggcgtgaatacatgcccagcttcctcctgaacatctggtggactaagcatgggcgagcgggatgggtatgagcgcttcatatggcacggatgttgaacaagtcctgtgagcattcgtttcgccttttcttttctttctttttttttggctttagccctatgttttagttctattaaaaaaaaaaaaaaaa

SEQ ID NO: 60854 - DNA, 250 bp, Setaria italica
  Peptide Sequence Number=SeqID_126828
gttactttccattctctaaatgttatgtaacatgatcgtgatgacaaaacacagctgcaataaggtatcatcaactagttgtttcagcacaagtccaactatggccaaaccttgatagagatacctctccggacagtctgcttatgacacttaatgacaaagttggtgctggccggtatttgtacatcgctaccgatgagcctgacaaatcgttctttgacccacttaaggaaaagtataagacacgctt

SEQ ID NO: 60855 - DNA, 414 bp, Setaria italica
  Peptide Sequence Number=SeqID_126829
attgccactggcagcaaggatcagattcaggtattatcgtctgaatcccttttgcgtttcctatacaaatgctgttcgtgccatcaaagggatgttcccccatgtgaactaaaccctgtacctgatctcattttttatgttgtgtctcgtaattcttccaataggcagtaattgatgcaagcattattagtcctctcattgtcctcctaaagacatcagaggcggatataaaaaaggagctgcttgggctttatcgaatgctgcgtcgggtgcttcaagtgaacaaattcagtatttggtgagccggggatgtttagagcccctgtgcagcgtcctcacctaccaagatcctgacctagtacatgcttgtcctggaaggtcttgagaatatactccaggcaggtgaggcaggga

SEQ ID NO: 60856 - DNA, 274 bp, Setaria italica
  Peptide Sequence Number=SeqID_126830
gtcgacagagtctaacgggcctaccataccctcggaagagaaagcccctccaagaattgggaatgttgtcacatgacaaggatagccaataagcttattcagttgggaaatagtaacagcacaatccaggcacatttacaggaaaataccgagtgggttgaatggcaaacaaatgtgctggtcaaacgcaatgaagtggagaatgtttattcactgggtctttgttggggcgaccctaaactaattactaatttaactaattagtaattacgta

SEQ ID NO: 60857 - DNA, 234 bp, Setaria italica
  Peptide Sequence Number=SeqID_126831
cagcttcctcggtctctagggatatctcctcagaattgggtgacgatgagggaacagaatcggatatacggtcattgatgcctctctctccatcaaatgtgaaccagtttgaatttgtaaagagggagctgccgtcctggtcatctcccagacgcagagaagatattaccacctcttggcaaacatcgtctgaagattgtagagttcatctctgtgctgcttacaattggtagt

SEQ ID NO: 60858 - DNA, 304 bp, Setaria italica
  Peptide Sequence Number=SeqID_126832
taattgtatttgtcttgtattaagttttagtcttctattcggtatttcttccttgaagttgcatgccaatgctgcagaaattctatgtgcagtgacacgatgtgcacctccatctcttgctgcaaagatatgcagtccaagttttgttggaaggttgttccatcatgctcttgaagaatcaagaccgaaatctgttctggttcattcgttgtctgtgtgcatatcattgctggatccaaaaagacttgcatcagcttcctatcaagcattcagaagcaacttaagtcatggggcattggtcact

SEQ ID NO: 60859 - DNA, 306 bp, Setaria italica
  Peptide Sequence Number=SeqID_126833
gctggtccatgcagcttcagttattcattcgcaagactcctaccagatggcgtcttgcgaatgaataactgaagctgcatggaccagcttatacctcagcctctgctaagtagctgagtctgcaggatctggttgtcttccagcaaccggtcgtactcaaggagcagctcctccgactgcttctgcagcgcgttcacatgggcctccgctgccgatgccttcctctcgtgttcttcgttctcgaatttcagcttcttcatgctctcgttcagctttgcaatctcccgctggagcttcttcatttca

SEQ ID NO: 60860 - DNA, 245 bp, Setaria italica
  Peptide Sequence Number=SeqID_126834
ggctgaggcagattgagtacgtcaggaataggagaaacttacatgtcaggattagcatcaatcttcctgtaaaaaccatccattggataaactgaactgatgagcctgtcaactacaacatcagtatcaacattgaagtatggagcataagatgcaacattgaagtatcctttccaattggcttggttttctacatctccatctggggcacctggtgggcgataccctcctccattaccaccagg

SEQ ID NO: 60861 - DNA, 269 bp, Setaria italica
  misc_feature (20)..(20): n is a, c, g, or t
  misc_feature (43)..(43): n is a, c, g, or t
  Peptide Sequence Number=SeqID_126835
cacttttattcttctgaatnaaggggggccattatgtttaatntaaattgcctcctattttgtttgtttctaggtacttttgctcattcctgtggaatttcttcggtgggtcatcatagctcttgctggcggtgtgtcatcttggttcattgctttaaacttgaaggaatgcacagaaggagctgatctgatggttttgatgaacagtgccagagcaaactgcagcactgctgcactagctatcaaaaccatcagatcagctccttctg

SEQ ID NO: 60862 - DNA, 261 bp, Setaria italica
  misc_feature (98)..(98): n is a, c, g, or t
  Peptide Sequence Number=SeqID_126836
gttggtcgtagcggaagcaatggccaatgagtggcggtggtggtggtagcgccctcctcgccttttctccccgccctctcgccctctggttggtgcancgggtgggagtggggggaactcgcgctgcccccgtcgcttcacgggcacgcctccctcgctcggatctgggccgcgcgcgcgagatcctgagcttcgggttcgagacttcccttgctcccgttggggatttttttcaggtcggttgttgcatgactggtggcg

SEQ ID NO: 60863 - DNA, 463 bp, Setaria italica
  Peptide Sequence Number=SeqID_126837
agagcagcagtaattacggtgaaggattacgggtacctggagaccagaggcagccacaatctcttcctagccatttagttgaagtacttcttttggggatgggcaacaaagttttggtgataattctggtggctatcccaaaaattcctcaacattcacacctagtggtgtcaacacccaaggaaatccggtcaggcatctggaggacagttacttggaagacctgcgccatcacctggaggcacaggaacccctaattttgagaatgtgtctactcctccaatgccatatgcgaactctcctaggtcaggcaccaatatgatgaataccccttcaccccagcagcagcagcagcagcaaggggtgtacgggaatatgcaggcaggtgctcagaacatgcaacagggcatggtgggcctccagaaccaggggcagaatcccaacttccctcagcagagacaac

SEQ ID NO: 60864 - DNA, 352 bp, Setaria italica
  Peptide Sequence Number=SeqID_126838
aatgctgtcctcttatactaactgtatcttgtccatcatggacatgatttcgtgattagtgaagaggcagttttatataaagatcgcagcctctttttttgctgtcttgtttctggaacctctaccattcttcacacatactctgtaacttgtatttattgatgattgttgatcagtacggtatggctggtgggcatccacaaaggagtcatccatcccagatgctgaccgaccaaatgtttggtatggggagcccacaaaatagcaacatgatgggaatgcagcagcagcagcagcagcagcagcaggcaagggggtgtaacgggaatagtgcagggcaggtgctcagaac

SEQ ID NO: 60865 - DNA, 464 bp, Setaria italica
  Peptide Sequence Number=SeqID_126839
tacaaatctgttcctacattggacaaagcacaagctgcaaagatacaggagcaggaaaacctacttagagcagcagtaaattacggtgaaggtgaaagacataatgtgtttatcagtgttgataaaaaaattacaattaggattacgggtacctggagaccagaggcagccacaatctcttcctagccatttagttgaagtactttcttttggggatgggcaacaaagttttggtgataattctggtggctatcccaaaaattcctcaacattcacacctagtggtgtcaacacccaaggaaatccggttcaggcatctggaggacagttacttggaagacctgcgccatcacctggaggcacaggaacccctaattttgagaatgtgtctactcctccaatgccatatgcgaactctcctaggtcaggcaccaatatgatgaataccccttcaaccccaagta

SEQ ID NO: 60866 - DNA, 321 bp, Setaria italica
  Peptide Sequence Number=SeqID_126840
atctccctcagggccttccccggctccaggagcccgatcagtctggcgacgaggacgcactctccctcacatgctccaggtccttggtctcggtccagaggcgccgagccacctgcagtcgtctcctcttggaggaaagcgagattccccacttggtgtacatgctctcccgttcctggatcgtcagccgcttctgcatctgacggcagagcatctcctctcccgttgcagcttctttgcacttgaaaccagggaagtgttacaaggactagacctagaccaaccaacaatttacgtaacccaaataagcttccattggag

SEQ ID NO: 60867 - DNA, 363 bp, Setaria italica
  Peptide Sequence Number=SeqID_126841
atcgcattgaggatgaaagtgaaactaatatgcttgggagcacgcactaagttgttatctttaatttgatctgcaggtgccactttcaaatttcgcagatgctgagagcttagtttcacgtggtatgctgaagcgcagcactgctgcaacaagtgccaacagcaagtcaagccgatcacagtgcatcataacgatacgtggtcataaaagcagtgatgtggacagtggaaattcacttagcagtgctgttctgaccatagcagaccttgctggggcagagcgggaaaggaaaactggaaaccaaggttccaggctgttagaaagtaatttcatcaacaatacatccatggttttcggtctctg

SEQ ID NO: 60868 - DNA, 466 bp, Setaria italica
  Peptide Sequence Number=SeqID_126842
tcgagatggtgcagctgttgtgcagtaccttgcttggctggataatcagatgcaggagaactatggagcttctggatacttcagtgaaataaaaggatcacatcaaaaggaaaatctaggaaccaaacttactgaggtttctgtcagtgataaacttgaaggcttccgtgcaacaaaagagcactttagaggtttgagttttcctacaatttcatctgtgggaccaaatgcagcagttattcactataaacctgaagcgagtacgtgttcagaaatggatgctggtaaaatttatctttgcgactctggtgcacagtacctggatggtacaacggacattacaagaactgtacattttggtaaaccctcattgcatgagaagtcatgctacacagcagtcttagaaaaggtacaacaatacgacaactaagaacaattagactagtaatttacctaaataggaaca

SEQ ID NO: 60869 - DNA, 353 bp, Setaria italica
  Peptide Sequence Number=SeqID_126843
ttttcacaagacaaagaatatcgggaagaataataatctgtccacgcatgttcctttcctgtgaaaaatggagtcagtctcgaaataaagtgaagtgcttaatgttcagatgaagtggattgtacaggtcttcaaatgattaaatctcgatatgaaaaatgttgcattatatgtgtgcgtcgaccgtaggcagatcgatgaacatgttgacttatcagtagcgttgctttctctctagcgtcgtcctcccatgaaggtatgcatgtttgtttctctcacatgatgtagattatccacccgacttttaagttgacatgaagttaaatttcaatgtgaaaatgttgcatgtttag

SEQ ID NO: 60870 - DNA, 235 bp, Setaria italica
  Peptide Sequence Number=SeqID_126844
ttttgagataagggttatttggcatttgaacatataacatgggtaagcattgcttgcttactttcttattcttccgtgtcacagtggcatctgagttcatggtaatatcacttgtcttatcatctattgatgaatcccttctgttatgcaggctccataccaggccaaactcatagacaccaagctgctgacccctgtcgagatcgaatgggtaaacacataccactctgactgc

SEQ ID NO: 60871 - DNA, 203 bp, Setaria italica
  Peptide Sequence Number=SeqID_126845
ggtggaggagggtggtgggttggtgtgctgccttggtggtggtgccgggatggagggagatggaaggaccgcccgccagttgaacctaggcctgtaattgtacaccctgtagaatttgcagggcgtagtgtatctgaaaagatcaaggagctaagagaaaagctagtacatgaaaaggctagtgccattataataactgctct

SEQ ID NO: 60872 - DNA, 165 bp, Setaria italica
  Peptide Sequence Number=SeqID_126846
gttgtaagttgtatgctctatgtgctccatgttacctcagtactgcaacactttctgtactcttgcagtgaggtcctaaggggctctacaaactctggaaagtccatctcgtcaagcgcattgaggacatcatcagcattgatggtctgcctctttgattctttg

SEQ ID NO: 60873 - DNA, 186 bp, Setaria italica
  Peptide Sequence Number=SeqID_126847
tttttgctttttgttttgcttctgaccttctatctgcatttttgtttctgaactcttgcagtgaggtcctaaggggctctacaaactctggaaagtccatctcgtcaagcgcatttgaggacatcattcagcattgattggtccgcatcttcatccactacctctccgccactgccaatgatatgt

SEQ ID NO: 60874 - DNA, 319 bp, Setaria italica
  Peptide Sequence Number=SeqID_126848
tactaacctaagtctaaagttctattattggtaagtctagtcctttgttgtttaattcaattctatttcgtcgacatctctgacaacgcctccacctattgttttgagtcaagccgatgcaaagataggtctccagcatctctttcctcgacaggcaagctctggtactcatcacagcccatcatgatgtgccatggcactccacagtttgatacagatatctctatggcattctgggcactcaacacaactgagatctgactgacttgatgaacttgcccgagaaaagtgctgactaaggtctaataacactgaacag

SEQ ID NO: 60875 - DNA, 363 bp, Setaria italica
  Peptide Sequence Number=SeqID_126849
gcgccgcctggcatcacgttccgtccagctagaggtgcgtcgtcaatgcatgccctttatatgattcaattcatgcatgtgcttggtcattggaactgctagctccttgttcatggttgttaacaatgcaagctggttgtgtcgacctatgctggagggcctgcgttgcacattcacaacaacagaaagcaagtactacactgcaactcaaaaaatcagcaaccagcagacctctggtaaagctccttctagtaaagctgcactgtctgttctacaaaactgtgtgcagactgatcactagtgctaattgtttggaggatactgaaaagagagatctgacctttgtcattcctgaaaatctaa

SEQ ID NO: 60876 - DNA, 155 bp, Setaria italica
  Peptide Sequence Number=SeqID_126850
aactgaagcgcaagccattcctccttcaattcaaatttctgatgttctggttcagcaggatgaaacacccccaatggttggatctgtgtggtaataacgctgctgcgatccttagcttgttctttctctttgctgatgttctggttcagcaggat

SEQ ID NO: 60877 - DNA, 360 bp, Setaria italica
  Peptide Sequence Number=SeqID_126851
atattgtcacatatctcttttggatttgcaactttccattcaccctggcacaaattgttgcaattcgtaattttatatagtgtaatcccaaaatgtcccttgctcaattggtcattggatgcaggaagatctgtacatttcatttcccttgttctcatgcatttgtctctataattccatagataaatgttacaatatatgactgggacattgtatggaaaagcacaatccttggttctgttactgttccagtcgagtctgagggaccgagtggaccagtttggtatacacttgacagcacatcaggccaggtgtgtctccatattaaggcaatcaaggttcatgagagttcctccaggg

SEQ ID NO: 60878 - DNA, 262 bp, Setaria italica
  Peptide Sequence Number=SeqID_126852
gttttctaatggaactttcctatgcactgcggagcagttttttagtattcttttaagtgatgactcgagttacataacagagtaccggacagatcggaaggataaagatataaatgcagcctctctcctcctgcagacaacgctgcccctacctaaaagtcgacagtgggaagctgtcggagtctggatccagttatcaccaaccaaacttggccacatccttctgctgttcggcccttgcccccttaccctcgactgccag

SEQ ID NO: 60879 - DNA, 233 bp, Setaria italica
  Peptide Sequence Number=SeqID_126853
tgctgactctgagcaggtcagttttgtgttgttgaagatataaacaaagaaagaaacaaagagaaatctgtgccctagaaccatcagaacttgtgcagtgtacaaatttgcatcattttggaacagaaaccatacatttagagcattgcagcgagctgtgaagaacttccaaatgatgatagaggctgaagaaacaggaacgtgctcagtctgccctagtgcacacagtagct

SEQ ID NO: 60880 - DNA, 245 bp, Setaria italica
  Peptide Sequence Number=SeqID_126854
cagcctagtaaatttagaaatggataatagtattattgtattatattcaagtgagcaccaatctagcagataccaatggacaccacgaacataaataaccttctcccattcatgaatcctcggcttgatatcattttcaatgtcagaaagaatgataggaggaaatgacagcaaaactgatgcaatccttgggtttggaattccaatgtactcaagaaaatcaattaatggctttagatgattat

SEQ ID NO: 60881 - DNA, 210 bp, Setaria italica
  Peptide Sequence Number=SeqID_126855
ggaggagggtgataagagcaagaaggcgaggaaggagaaggctggggcgcagcggatcgccgggtgggggctccgcgagtacagcaagatagtttctaaaaaagttgagaccaaaggacggactacttataacgaggttgcagatgaaatttgtgcggagctaaagttgacgcttaatggccaagagtttgacgagaagaatattaggag

SEQ ID NO: 60882 - DNA, 213 bp, Setaria italica
  Peptide Sequence Number=SeqID_126856
gtttatgcttaacactatatatgtttttctttcatgatgtaaactaagttgccaacctgctactatgatgtaatcagcatttgatttgacattgcagtttctaaaaaagttgagaccaaaggacggactacttataacgaggttgcagatgaaatttgtgcggagctaaagttgacgcttaatggccaagagtttgacgagaagaatattagg

SEQ ID NO: 60883 - DNA, 253 bp, Setaria italica
  Peptide Sequence Number=SeqID_126857
caaagtattgttcaaagaagcaagaaaatatatataagctcaaaattttagaggacaaggatgcacttgacctcttcacaagaaagacacagtcctggccaactaatggaaagaaggcaatgcatgtattgtaaagctaagtactgattaacattgttctttgcatgaactatcatgttaacttttaaaaatcaaataaatgtgtggcattataattgtggtgaaaatggatcagatactgatgggtatttct

SEQ ID NO: 60884 - DNA, 390 bp, Setaria italica
  Peptide Sequence Number=SeqID_126858
ttcccttttcttcttttctttccttagtattccttcctagtcttcggtctacttgttactaccttcctttccttatttctttatgatggccataagattgaacctaatctcactctgtgaataacgctcgattctttcttgaatgactggctgcaccatctgtagccaatcgaggtcatcaagaccaccgcactgcccaaggtttacaggcccttccttcagcccatccagctcatagagcacaccttcaaaaggtaaatagcttatgaaatggtacacatcatcatccttagtcgcggctctctgctcatcagaaatgaatggctctggccttgcaaaactgttatgagctgtccgaatggattcgctgttgccgatggctaagccttc

SEQ ID NO: 60885 - DNA, 238 bp, Setaria italica
  Peptide Sequence Number=SeqID_126859
aacgtatcactgagcttctgaaggttgggaaggacaagcgtgcacttaaggtggccaagagaaagcttggtactcacaagagagcaaagaagaagagagaggagatggcaaatgtcgtcaggaagatgaggtgcggaacattctctttgccatttcataccatgctatttcattctgttttgttcggatgcagttatttatatttaattgaactgctttgttgtatcatgtcagtctg

SEQ ID NO: 60886 - DNA, 335 bp, Setaria italica
  Peptide Sequence Number=SeqID_126860
tgtattagtaacgggtctttgtctagtcttattgttaatttctttggttgttctccatcatttaagagcctgatatacaaccttaacatgaggaaatcacttggttcctcgagtactttcgaaccatctgccacgatgactagttgaccacttcatggttgctactggaatttatctgcttctgtcatgccatcatcagaaaattattggacgacttatctgcaattgacatgagattaattttggtgatagatgtcaattggaacaccatttggtctgggacatctatgatggtgtacccttgggagccacaccagctgacacagttcaccttc

SEQ ID NO: 60887 - DNA, 241 bp, Setaria italica
  Peptide Sequence Number=SeqID_126861
gtttgttttcaaccccaattcaacatgatgaaatgaatatggaacttggtgctcttgttgcaggcttgcagctatgtaattcttggtgtctccatcatttaagagcctgatatacaaccttaacatgaggaaatcacttggttcctcgagtactttcgaaccatctgccacgatgactagttgaccacttcatggttgctactggaatttatctgcttctgtcatgccatcatcagtaaaa

SEQ ID NO: 60888 - DNA, 261 bp, Setaria italica
  Peptide Sequence Number=SeqID_126862
gtgggttgactcccttttgtttcatggaagactgatctggtgtcttgggtttctggtgggactgatctagattgttgggcttcttgttctgccttttgcccttgccgttgaaaaagccaaaaccaaatggtccaaatgctgatagacttattgtggctgctctagcagccaatggattaaacggcagagcaggttcggtcttctcgctctccaagaactcggcgaggatggaaatgtttttcggcagctttctcagtgaat

SEQ ID NO: 60889 - DNA, 347 bp, Setaria italica
  Peptide Sequence Number=SeqID_126863
gttcgtgcaagggcggctcggatagcaaccacagcaggtgggcacttcagcttcataccagctggtggctgtaaagccttggcgacaaggggcaaaacaccactcattgcccgataagaccgcgcaagtgggcactggccattttccaaccattcttcgctgaatgcctcgtgcgatggtgggttgactccttttgctgaaaagaacaaaggaaagataatgagaatacagataataagataaactaaaggcaggaagaatgagatagctatggtttctgagcaactacattagccttggatatagccatctaatgaatagctagtaaatgttctgtactttggatg

SEQ ID NO: 60890 - DNA, 194 bp, Setaria italica
  Peptide Sequence Number=SeqID_126864
tttttttttagttctttcgttcttacttaattggttttcttattctaagtacttttctttaatccgacgctataattttaaatggaaatacagcagcaccaaattgcatacacgtgcatcagccccgaccataataacataccacactgccatattggtactgacgcacctcttattccactcgtctcgcccca

SEQ ID NO: 60891 - DNA, 357 bp, Setaria italica
  Peptide Sequence Number=SeqID_126865
gctgcccctttaacatgtaacagcatgtttttctttcaatgcttacttttatgacattttttctgcattttcctggagcagatagagattgtggccaaccggaatgtccgaggtaaacccaacaccggcaacagaggatccacctccattagtgaatggagaatttgctgcttcagataagaataataatgctgagaagttcgggcctgaggagagcagggaagtagcagtgactagcaacaatgctgatgaagtgaagaatggctgtgaaaatggaactgagggcgcagcagatgaggtcgcaaatattgtagaggctgatgattcgaacggaggtgattcaggttgtgctaatgt

SEQ ID NO: 60892 - DNA, 143 bp, Setaria italica
  Peptide Sequence Number=SeqID_126866
catcctgccaagtctctaatttcattggatgcttgattcaacttttacagggaactgaacattgatggagcaaaccagtcactcagaattattaaaaacttaattgatgccgggtcatgtcaatcttatgcagcaattgacat

SEQ ID NO: 60893 - DNA, 284 bp, Setaria italica
  misc_feature (16)..(16): n is a, c, g, or t
  Peptide Sequence Number=SeqID_126867
tttttttttttttttntttttttttttttttttttttttggacagtatcaaacaatctattgtaatatacatccagaaacaatttagtcacgtgctcagcaaagagtacatttttccagtctaaaacggaaagagctttttagctctaaaattgaccaaatacatggtcactgaattagatttgctatggcgatgcacatcgtagcaactcatcctgcatcgaggagcttgtaaaagtaaacaaaaatggtcttcttttctcaacatcttcggagcttgccgat

SEQ ID NO: 60894 - DNA, 418 bp, Setaria italica
  misc_feature (250)..(250): n is a, c, g, or t
  misc_feature (355)..(355): n is a, c, g, or t
  misc_feature (368)..(368): n is a, c, g, or t
  Peptide Sequence Number=SeqID_126868
ttttggtacttgtattattcaagaagggaaagcaatttgtctacccaagattactgttcattatcactggtaaaggacctgataggaagaaatatgagaatcagataaaaaggttgaagttgcgacgtgttgccttccggacgatgtggctcgcaatagaggactaccctctattgcttggtatgccagctgttacagcctaccacaacctgaaggcattctaagcatttaagacttgacattttttaanattgcagggtcagctgatctaggagtatcgttgcatacatcttcgtcagggctggacctacctatgaaggtggttgatatgtttggatgtggattgccagtttgngctgcttctttcncctgcatcgaggagcttgtaaaagtaacaaaaatggtactttcttttctc

SEQ ID NO: 60895 - DNA, 477 bp, Setaria italica
  misc_feature (366)..(366): n is a, c, g, or t
  misc_feature (375)..(375): n is a, c, g, or t
  Peptide Sequence Number=SeqID_126869
tacaatttagttagtttaaccaagggaacaaccaataggtagacaaggctgtctatagggccaatgttattctgccatcttcagcattcagtgagaaggaaggtacctacgagaacactgaaggttgcacccagtggaccatcccagctgttcctactgttggtgatgctagggatgattggaagatcattcgtgctctttctgaagttgctggggctcagctgccttacgacagtctctcagctgtgagggaccgaatcagtactgttgcgcctaatctcattcatgtagatgagaaggaaccatgcacaatttctgctgaggtgaagccgccagtaaaagcaacaagtgagctcaaccccgttnaaaaccgtnatcgagaacttctatatgactgatgcaatcacacgagcttcaaagataatggcccaaattgcagtgcgaccttgttgaagaatgagctctgctcccttcaag

SEQ ID NO: 60896 - DNA, 448 bp, Setaria italica
  Peptide Sequence Number=SeqID_126870
tgattcggtccctcacagctgagagactgtcgtaaggcagctgagagggaccgaatcagtactgttgcgcctaatctcattcatgtagatgagaaggaaccatgcacaatttctgctgaggtgaagccgccagtaaagcaacaagtgagctcaaccccgttcaaaaccgtcatcgagaacttctatatgactgatgcaatcacacgagcttcaaagataatggcccaatgcagtgcgaccttgttgaagaagtgagctctgctccccttcaagctaatcatcggcaaacatcatcctagttccctttttccttgctacgagtttcaccacccgttgcttgcttggttgggaggttggtgtataatttggactgcctctagattttcagagcagcaaaacttgatcggtgcatttctgtgttgtgtatgagaagcagagcacactcaaa

SEQ ID NO: 60897 - DNA, 406 bp, Setaria italica
  Peptide Sequence Number=SeqID_126871
acgtatcaatgaggacaatcaatgaggaatggatatctgacaaaacgcggttttgttatgatggtctgaagaggcaaagactaaatgaccctatgattcgtggtcctgatggcaggtttaaggccgtgacatggcgtgatgctcttgctgttgttgctgaggtcttgcatcaagttaagccagaagaaattactggagttgctggaaaactttctgatgcagaatccatgatggctctgaaagattttgttaacagaatgggttcagacaaggtcctctgcgagggaaatggtccgaatcctccagcagatctgcgatcgaactacctgatgaatacaggcattgctgggcttagtaaaaaagtacttagtaattagttactttaccttttttaggttttaggtta

SEQ ID NO: 60898 - DNA, 419 bp, Setaria italica
  Peptide Sequence Number=SeqID_126872
gatataagcctagacaagcttccagaagatgcatttgttgtttaccagggacaccatggtgacaaggctgtctatagggccaatgttattctgccatcttcagcattcagtgagaaggaaggtacctacgagaacactgaaggttgcacccagtggaccatcccagctgttcctactgttggtgatgctagggatgattggaagatcattcgtgctctttctgaagttgctggggctcagctgccttacgacagtctctcagctgtgagggaccgaatcagtactgttgcgcctaatctcattcatgtagatgagaagtaaccatgcacaatttctgctgaaggtgaaagccgccaagtaaaagacaaacaaagtagaagactacaaaccccgttacaaaaaccgtacaatacgaagaa

SEQ ID NO: 60899 - DNA, 336 bp, Setaria italica
  Peptide Sequence Number=SeqID_126873
acctaactagttaggtagaaatagactaagggaatagaattaggaaagaatcattcgtgctctttctgaagttgctggggctcagctgccttacgacagtctctcagctgtgagggaccgaatcagtactgttgcgcctaatctcattcatgtagatgagaaggaaccatgcacaatttctgctgaggtgaagccgccagtaaagcaacaagtgagctcaaccccgttcaaaaccgtcatcgagaacttctatatgactgatgcaatcacacgagcttcaaagataatggcccaatgcagtgcgaccttgttgaagaagtgagctctgctcccctt

SEQ ID NO: 60900 - DNA, 316 bp, Setaria italica
  Peptide Sequence Number=SeqID_126874
caagcaaagtgggctacatcggtcctccagccgacttgaactatgaccatgagcatcttggcacaggtcctcagacccttgttgagattgcagagggtcgacatcctttctgctcagtactgcaatctgccaaaaaccctgtcatcattgctggagctggattatttgaacgggaggaccaagatgccctattctcaacgattgagactgtagccaagaagttcaatgtgacaagaccagactggaatggccttaatgttccttatttgtcttcctattgtcttgtcgttcttaaggttactttagtttacttaaa

SEQ ID NO: 60901 - DNA, 361 bp, Setaria italica
  Peptide Sequence Number=SeqID_126875
tcgtagaacacttgaaggtttgcacccagtggaccatcccagctgttcctactgttggtgatgctagggatgattggaagatcattcgtgctctttctgaagttgctggggctcagctgccttacgacagtctctcagctgtgagggaccgaatcagtactgttgcgcctaatctcattcatgtagatgagaaggaaccatgcacaatttctgctgaggtgaagccgccagtaaagcaacaagtgagctcaaccccgttcaaaaccgtcatcgagaacttctatatgactgatgcaatcacacgagcttcaaggaaaaaagggaactaggatgctgtttgccgatgattagcttgaagggg

SEQ ID NO: 60902 - DNA, 295 bp, Setaria italica
  Peptide Sequence Number=SeqID_126876
ctgctcagtactgcaatctgccaaaaaccctgtcatcattgctggagctggattatttgaacgggaggaccaagatgccctattctcaacgattgagactgtagccaagaagttcaatgtgacaagaccagactggaatggccttaatgtcctattgctccatgctgcgcaggctgcagctcttgatcttggccttgttgctaatcctgctgagagcatcaagttcagtcgtaagtttctttgttaccttgtattgggttagttctttgttatttgttatttattaagttcctta

SEQ ID NO: 60903 - DNA, 247 bp, Setaria italica
  Peptide Sequence Number=SeqID_126877
cctgtcatcattgctggagctggattatttgaacgggaggaccaagatgccctattctcaacgattgagactgtagccaagaagttcaatgtgacaagaccagactggaatggccttaatgtcctattgctccatgctgcgcaggctgcagctcttgatcttggccttgttgctaatcctgctgagagcatcaagtcagcgaagttcttgacctgatggaagcttgtctaggcttatatcatcagct

SEQ ID NO: 60904 - DNA, 170 bp, Setaria italica
  Peptide Sequence Number=SeqID_126878
ggggctcttacatccaagccatttgcatttaaagctcggaactgggagctgaagggcaccgagactattgatgttactgatgcagtagggtcaaacataagagttgacagcagatatccattcctcattgatgtcctcattgatacgtggaacaatacgcataacttcag

SEQ ID NO: 60905 - DNA, 169 bp, Setaria italica
  Peptide Sequence Number=SeqID_126879
tgctgaccgtggtcggttcaccgagatgaagcggtcagttgtggacaagaatttgggccccttggttcatcagcaggaactccatgacaagtgaactatctggaaatgttattgatatctgccctgttggggctcttacatccgagctttaaatgcaaatggcttggat

SEQ ID NO: 60906 - DNA, 232 bp, Setaria italica
  Peptide Sequence Number=SeqID_126880
agagaccagggtgtccttggggtcgcggcacacgtagacgaccttgcagccgccgccggcgacggaccccggcagcgccgcgaaggggacgtgcgtggcgaagagcctcggatccgggaggtcgccgatgtcggggactctgccgtgcgcgtagatctggtactccaagatctggacgcactcgtggggcccgcttcgccgcgcggcccacggacgtcgtcctcgccagcct

SEQ ID NO: 60907 - DNA, 468 bp, Setaria italica
  Peptide Sequence Number=SeqID_126881
caggaaagctgctagctcaggattgttatctttgaggtggtgaaagttttcctgaatttgccaagattggtgcattgttctgatactgtagctactccatagtgattctactcgtagagattttattttttgatatcgttttattcctggagaagttaccagattaaagatggtgtaaattttgttcattttccttttcatcacaagccactctgttttcacaagttttttggacggtacagggggaaattgagttgcttgatgatcaatgatctagatgctggtgttggaagatttggtacatcatcttataaacatatttatttttgttgtttgattgttgtgaatgttgtgagatctgtttccatgtttatttttcaagagcttggctacttcgtttgtccagttttatcaattccttgccatttggcaagcatgttctacaacgatcaaacgttcttttttttt

SEQ ID NO: 60908 - DNA, 397 bp, Setaria italica
  Peptide Sequence Number=SeqID_126882
aaagttcaaggaagagcaagtatgactcagattcagaacaggaacatgacatgaaaacaaagaagaagaagagttcacaccgtgattctgaagatgattcggggactgattatgatgagaagaaggaaaagaaacacagcaagaaaactcatcttggttcagatgatgattctgaaactgatcggaagaaagacaagtacagtggtgattcagagactgattcagatgctcgtgttgaagcaaagaagaaacttgaaaagtcatatcatcacgaccccaagaaggataagcaagcacaaaaattacaaaagaaaaaaaaggaatagactaatgggaagaaacaatttagaattaaaggacaacaagcgccacgattctgattcagaatctgacggtt

SEQ ID NO: 60909 - DNA, 187 bp, Setaria italica
  Peptide Sequence Number=SeqID_126883
gagactgattcaccactgtacttgtctttcctgaggaccttgctgcgtagcttctcagcaaaaatctgaacaatgatagactgaagagtggctctaggaatgttgactacagaactaacaagtctgtcaagaatttgagccatgactcagatggtgagaagctacgcagcaaggtcctcaaggaaag

SEQ ID NO: 60910 - DNA, 459 bp, Setaria italica
  Peptide Sequence Number=SeqID_126884
aaagccaggacccatgcagggacgtttcttctatggatgcggcaactggaccgccacgaggcgggcgatatgcccatactttgcatgggcgtcgtaaaggaataatatgatgacgtccaagcagatctcaagggcaaaggacctggtgctttaactaagggaggcgctatgttgcggtggcctgctgctcctccgctgcgcctcccgatccgtatatattatgatataactttgctcataagacaatggaagttcactaggtagtgtctaacctgtcatgctgacttctgttgatacaagagaatggggctcagatgctgcttacctcgttatccttcactctcctcaaaaagtattgcactactcccatgctagtcagtctgcaggagtacacaaaagctgggtaatttgtgagtacacatatcacgctcacacaagaacagtacagtactaatctta

SEQ ID NO: 60911 - DNA, 477 bp, Setaria italica
  Peptide Sequence Number=SeqID_126885
cacttagcgctacagatttgtcatggtttctgtaaccttgaagctcatcctgcaccctcccaacactattccactaacccaacaaatcaactgccttctgggctgtctgaggcccaaggtgtgtgtttgcaacgggagtagagatgtgggtgctaaatggaactatttagcttgcatggaggttcatttgcaattgatactgatttacagggtggtttgtgcaaattcatcttttgtggatcaacttgaaggtaccattccatgaagtgtatggtgatgttcgctgcaacttaaaggaggcagtccagttggctggccttacatgggagggtcgtgctcactgtgggcttgacgacgcccgcaacactgctcgcctcctggcacttatgatgcaccggggcttcaagttctctataaccaactcgcttgtgtggcaaccgcaacctgccccacagtcaacaacctgccagctatccc

SEQ ID NO: 60912 - DNA, 393 bp, Setaria italica
  Peptide Sequence Number=SeqID_126886
tgtaggtctacctacttagggttgtccttctaagtccaaattatttgagcagagaggtggaattgaagggtttcctgagaacaatgaaaaacggaatgatgtggttgctgtggaaaaagtctgggaggcatctcctattccaacccaagtccttagcagacccttctatcgacaagaattttatgcttggccatatatttattcggattaccaaatggtgcgtcagccactaccttatggctttgacagccaattttatcaagtaaatagggatcatggctttcctatttgagaacagagttcagtatcttccattcaagatgctccccaaggtcacccccatcgatgcacaacttcaggaatttcaatattttgtggttattgactttgaag

SEQ ID NO: 60913 - DNA, 334 bp, Setaria italica
  Peptide Sequence Number=SeqID_126887
tctttcactgcacagagcagtcattgcatgtaatattttaatccttaaaaccaggctgtaagctagaggaccacctctggccttttctagctatttccaatcgtgtaatgtaaactagttgcatttagctccccacatctttagtgtgtttgcaaactcatgcccttgtatttggcaggaagtgtcggctgtaaagtcaaaatcaaaacccaagttggttgatgtataacctactcgagaaagccacggccaaccaaaactgcacttagcgctacagatttgtcatggttctgtaaccttgaagctcatctgcaccctccaacactattccact

SEQ ID NO: 60914 - DNA, 395 bp, Setaria italica
  Peptide Sequence Number=SeqID_126888
gccgaatgagatgctgggatctcctgtgcaggttaatccatatgctgcctctgcagggaaagacagagcaatgtactgctactgcggagtgctgagcaggtggagcgttgtgcgcaagccaggacccatgcagggacgtttcttctatggatgcggcaactggaccgccacgaggcgggcgatatgcccatactttgcatgggcgtcgtaaaggataatatgatgacgtccaagcagatctcaagggcaaaggacctggtgctttaactaagggaggcgctatgttgcggtggcctgctgctcctccgctgcgcctcccgatccgtatatattatgatataactttgctcaagccacacctacaagagttccattaagttaaaaacagtgtccac

SEQ ID NO: 60915 - DNA, 359 bp, Setaria italica
  misc_feature (58)..(58): n is a, c, g, or t
  Peptide Sequence Number=SeqID_126889
tccgtccccctctcccccccccccccctccggctctcgcagtcacatgttgtgtggcncgggggggagctctgatccggatggtgcagcgcagcgggattgcccacggccatgattgatcgcgaacgagcaggaggaaatgcaagttaataatgaggcaccactagggtgcctcaagccaaatattgagcagagaggtggaattgaagggtttcctgagaacaatgaaaaacggaatgatgtggttgctgtggaaaaagtctgggaggcatctcctattccaacccaagtccttaagacaagaacccttacttaattacgtaactaaagtaaatttttaattagtactttaggtaccta

SEQ ID NO: 60916 - DNA, 315 bp, Setaria italica
  Peptide Sequence Number=SeqID_126890
ccaaatggtgcgtcagccactaccttatggctttgacagccaattttatcaagtaaatagggatcatggctttcctattgagaacagagttcagtatcttccattcaagatgctcccccaaggtcacccccatgatgcacaacttcaggaatttcaatattttgtggttattgactttgaagcaacctgtgacaaggtgaacaatccatttccacaagagatcattgagtttccatctgtcttggttaacagtgcaaactagggaaaactaggaaagaaatagactttacaaaaacaataatagttacggaccga

SEQ ID NO: 60917 - DNA, 379 bp, Setaria italica
  misc_feature (263)..(263): n is a, c, g, or t
  Peptide Sequence Number=SeqID_126891
tagtctagtagtaggttggtaatttgtaagggttttccttgtagtaactaatgaaaaacggaatgatgtggttgctgtggaaaaagtctgggaggcatctcctattccaacccaagtccttagcagacccttctatcgacaagaattttatgcttggccatatatttattcggattaccaaatggtgcgtcagccactaccttatggctttgacagccaattttatcaagtaaatagggatcatggctttcctattgagaacngagttcagtatcttccattcaagatgctcccccaaggtcacccccatgatgcacaacttcaggaatttcaatattttgtggttattgactttgaagcaacctgtgacaaggtgaac

SEQ ID NO: 60918 - DNA, 457 bp, Setaria italica
  misc_feature (390)..(390): n is a, c, g, or t
  Peptide Sequence Number=SeqID_126892
tttgcaattgatactgatttacagggtggtttgtgcaaattcatcttttgtggatcaacttgaaggtaccattccatgaagtgtatggtgatgttcgctgcaacttaaaggaggcagtccagttggctggcctcacatgggagggtcgtgctcactgtgggcttgacgacgcccgcaacactgctcgcctcctggcacttatgatgcaccggggcttcaagttctctataaccaactcgcttgtgtggcaaccgcaacctgccccacagtcaacaacctgccagctatcccctgaccgctctccagaccccgtccaaccacagcataagccgaatgagatgctgggatctcctgtgcaggttaatccatatgctgcctctgcagggaaanacagagcaatgtactgctactgcggagtgctgagcaggtggagcgttgtgcgcaagccaggacccat

SEQ ID NO: 60919 - DNA, 203 bp, Setaria italica
  Peptide Sequence Number=SeqID_126893
aactgcacttagcgctacagatttgtcatggtttctgtaaccttgaagctcatcctgcaccctcccaacactattccactaacccaacaaatcaactgccttctgggctgtctgaggccccaaggtgtgtgtttgcaacgggagtagagatgtgggtgctaaatggaactatttagcttgcatggaggttcatttgcaattga

SEQ ID NO: 60920 - DNA, 332 bp, Setaria italica
  Peptide Sequence Number=SeqID_126894
attccatgaagtgtatggtgatgttcgctgcaacttaaaggaggcagtccagttggctggccttacatgggatggtaccttcaagttgatccacctgttaaaaataagggggcttcctgattctcttaaatctgcattctgactccagcattgtacggcagtcccagttagaccaggtaacaatagcaaagtttgtgttcttaatgcccttgtcctctagccacttatcatgcatgagtaaggcttcacctagaggcacacctctgtccacctgaatctgttgtataccagtaagctccttgcagaagtcagtcaaaaattgatgatatgtc

SEQ ID NO: 60921 - DNA, 172 bp, Setaria italica
  Peptide Sequence Number=SeqID_126895
agtcaacaacctgccagctatcccctcgaccgctctccagaccccgtccaaccacagcataaagccgaatgagatgctgggatctcctgtgcaggttaatccatatgctgcctctgcagggaaagacagagcaatgtactgctactgcggagtgctgagcaggtggagcgtt

SEQ ID NO: 60922 - DNA, 248 bp, Setaria italica
  Peptide Sequence Number=SeqID_126896
aattgatactgatttacagggtggtttgtgcaaattcatcttttgtggatcaacttgaaggtaccattccatgaagtgtatggtgatgttcgctgcaacttaaaggaggcagtccagttggctggccttacatgggagggtcgtgctcactgtgggcttgacgacgcccgcaacactgctcgcctcctggcacttatgatgcaccgggcttcaagttctctataaccaactcgcttgtgtggcaaccg

SEQ ID NO: 60923 - DNA, 242 bp, Setaria italica
  Peptide Sequence Number=SeqID_126897
tagagatgtgggtgctaaatggaactatttagcttgcatggaggttcatttgcaattgatactgatttacagggtggtttgtgcaaattcatcttttgtggatcaacttgaaggtaccattccatgaagtgtatggtgatgttcgctgcaacttaaaggaggcagtccagttggctggccttacatgggagggtcgtgctcactgtgggcttgacgacgcccgcaacactgctcgcctcctg

SEQ ID NO: 60924 - DNA, 230 bp, Setaria italica
  Peptide Sequence Number=SeqID_126898
tggcacttatgatgcaccgggcttcaagttctctataaccaactcgcttgtgtggcaaccgcaacctgccccacagtcaacaacctgccagctatcccctgaccgctctccagaccccgtccaaccacagcataagccgaatgagatgctgggatctcctgtgcaggttaatccatatgctgcctctgcagggaaagacagagcaatgtactgctactgcggagtgctga

SEQ ID NO: 60925 - DNA, 120 bp, Setaria italica
  Peptide Sequence Number=SeqID_126899
cgcttgtgtggcaaccgcaacctgccccacagtcaacaacctgccagctatcccctgaccgctctcctagaccccgtccaaccacagcataagccgaatgagatgctgggatctcctgtg

SEQ ID NO: 60926 - DNA, 109 bp, Setaria italica
  misc_feature (2)..(2): n is a, c, g, or t
  misc_feature (4)..(4): n is a, c, g, or t
  Peptide Sequence Number=SeqID_126900
tncncgggcttcaagttctctataaccaactcgcttgtgtggcaaccgcaacctgccccacagtcaacaacctgccagctatcccctgaccgctctccagaccccgtcc

SEQ ID NO: 60927 - DNA, 429 bp, Setaria italica
  misc_feature (17)..(17): n is a, c, g, or t
  Peptide Sequence Number=SeqID_126901
agcgaggagtgtggagntaaaatgtgatacaataccgctgtcataataagtcttctaatcacagcgctgcctttgatataaaagcctcacacacaggtttgcagtatgcaatgccctctctggtgtagctgtagcacgatcaagtgaaaatgaaccactgatctctacaagcctatccacattcacatcctttgtgtcaggcacaggcaaagctccaccgatatattttgaagtttgctccttcacatatgaaaatgacatcagcaggtgtataagatttagcaaaaactgactgcttactgctcaggtaattattggcacatgcatatcatatttttgagcaactaaataaactaagcatctacaatctttcatgcatttttgttgcttctattttctggagtctgaagctgatacagggttgtgtgc

SEQ ID NO: 60928 - DNA, 230 bp, Setaria italica
  Peptide Sequence Number=SeqID_126902
caaattcatagacaagggaagaccaatctccatttactatgtgtatgatgcttgcaagcatagcacgccaacacgaccttcaggagtataacgcaagttgccaggatgaggatcagcatgcaataagcctgtctcaaagaagctgcactagtgatgcctcgactacctttattgaccaggtcaagaaggcgagattttgcttccaacttctgcttttctgaagcttcagg

SEQ ID NO: 60929 - DNA, 230 bp, Setaria italica
  Peptide Sequence Number=SeqID_126903
accaacttgcccatctcggttccccacctatcgaacctcagtgtcctcaccctctgcagcattgcactccaggtctgctcaggcatctatgccatttcctttcagcccatttcattgccaacaggcttatatacttgttcgcctttgccttgtagtacatttctgctttcacagctaaggccgtagtggagagcaagctgcagagcttgagagagctcaatttcctcatg

SEQ ID NO: 60930 - DNA, 204 bp, Setaria italica
  Peptide Sequence Number=SeqID_126904
tcccgttctgaaccacactggtcactgtacagaacactcttatcatagagaaatgaaggagaatgatgatttattgacaaaaatagatggtagagacctagaaccacccaagccaagaccaaagacatctgcaagaacagcacaaaggctaattgctcatggtatggggctgaagcagtttacaaacttcgggtcagatgagct

SEQ ID NO: 60931 - DNA, 143 bp, Setaria italica
  Peptide Sequence Number=SeqID_126905
aacaaccacgcagaaatagtgttagaaagagctgtaagaatcaaagtaccagctgatggagtccggaaaacagcaagtgcagaagtatcattaacccagcgaatggcaactccatgatccccaaactactcacactgagttct

SEQ ID NO: 60932 - DNA, 130 bp, Setaria italica
  Peptide Sequence Number=SeqID_126906
cagcaatcacaatatcctcttgatcaatctgaaccccaagcctcatcacgcatggcttgtcgagcagcaatcctgttctttctctcttccagctgctactgaggctcaatcttgcatacctccaagatac

SEQ ID NO: 60933 - DNA, 162 bp, Setaria italica
  Peptide Sequence Number=SeqID_126907
agaattactactccttttaatcatgtatggaccatcttttgattcgaggttcaacacaacaaacgtaacaaaaaattctcacctctctctgcatttcttctgaatcaggttcatgagctgcatcggttgtaccatgttcagaagcagctgatgcagcagatg

SEQ ID NO: 60934 - DNA, 333 bp, Setaria italica
  Peptide Sequence Number=SeqID_126908
gcccgccttagtagtgctgtttgccacaccatttgtgcaagataattcatcaccagcaacatgccttgcgagatcgtgtaccatatcatgcatacaaagtctaagtgtgggttcaaaactccttgaagccggcaccttgcaaaagaaaatagagcatagttcatatcttttcaagataaacaattgcaatttcgtaattacaagtacgcttactgtaggagtcaaatttgtgaggaaggacattcccaagaattcattaacatattccctaccaatcttctgaagcgttgcccattagtatcttgaataaaaccccaaagcaatccattgctg

SEQ ID NO: 60935 - DNA, 225 bp, Setaria italica
  Peptide Sequence Number=SeqID_126909
aggaggccctggatttcggtctgcatccgcagcttcatcttgtggtagtcgtagtgcgagttctcgagcatcttgagctcctccatcttcttcctccgcttctcctctgtctcctggaatcccagcttcgccagcttcgtggcatactcctcctccagcttctgggtcttggcgctgacgatgccaggaaggaagtggacagctaccgccacatcgtacgcgcca

SEQ ID NO: 60936 - DNA, 343 bp, Setaria italica
  Peptide Sequence Number=SeqID_126910
taactttaacctaagaactaacaatagggactaaacagaagcaagattggctaccgcctgccaggtcaagatatcaggatggtgtagaacaaaaaccagacccacacaatttagtgcctagcaccggccatgtgagcccaccatacgaggagagtgggagaactgcaggttcaaattgcgtgaatgatgatcctgttcgtcaaacttataacctgaaaagtaagcagcataatttgttcaaagatgcagacagacaagcatagacctcatgcaacaaaactagcatatttgcaaatggtagacgaggcaagtgtgactaaaaagagtaactatggcaggcaat

SEQ ID NO: 60937 - DNA, 336 bp, Setaria italica
  misc_feature (335)..(335): n is a, c, g, or t
  Peptide Sequence Number=SeqID_126911
aagaactctaaaagaaataatgccagtacttatggacacacaatttcatctcttgcatcatcttcctcagaaaggcgtcaggttgctgggagatcacttggtgagcttgtaaggaagcttggtgagagagttttgccctctattattccaatcctgtcacagggactcaaagatccaaatgctagcagaagacaaggagtctgcattggtttgagtgaggttatgggcagcgctggaaaacatcagctattaagttttatggatgaacttatcccttacttatttcgttacttgtcttcttattgttgtactagtctacccaagaggtaccgtana

SEQ ID NO: 60938 - DNA, 432 bp, Setaria italica
  Peptide Sequence Number=SeqID_126912
agactgagatttcagatttggtgcaaatcctgttgaacatgagcacctcaccagactggtgtaccaggcatggtgctttgttaggattctcatctatatcaatgcattctccattcaaaattgtgtcatttggcatcctttccatctcttgttgatcttctgaaagattctcttaaagacgacaaggtattggatgaagttgcacgccttgtctgttttaactattattctggtgtctatgtgtaactcgtctgcattgtgtgaagttccctgttcgtgaagttgccacaagaactctgggtaggatactctgtttccagttacagttggaagccggtaccttgcaactggttcagttgcttgtcttagctttgcgtgatgattcaagcgaagttaggaggagatctttgttcgttgttaattctaaaagta

SEQ ID NO: 60939 - DNA, 347 bp, Setaria italica
  misc_feature (37)..(37): n is a, c, g, or t
  Peptide Sequence Number=SeqID_126913
atggaggagactgagatttcagattggtgcaaatccngttgaacatgagcacctcaccagactggtgtaccaggcatggtgctttgttaggattctcatctatatcaatgcattctccatcaaattgtgtcatttggcatcctttccatctcttgttgatcttctgaaagattctcttaaagacgacaagttgccacaagaactctgggtaggatactctgtttccagttacagttggaagccggtaccttgcaactggttcagttgcttgtcttagctttgcgtgatgattcaagcgaagttaggaggagatctttgtcgtgtatcaaagctgctgcaaagataaa

SEQ ID NO: 60940 - DNA, 328 bp, Setaria italica
  Peptide Sequence Number=SeqID_126914
gtaatagtccaccagacgaattaaatctgatttacaataacagaaaaattgaattttcataagtcaaatccattcattctgaacaacgtgatgagttatatcatttggtcaatagtggtaattatttcagaaaaagaataacaaatcaaagagtagcaagctaatttcagatcacattcattctgaactacaaaatgcaatgtactgtttgtaaggagggacttaccttgtcatgtttagcctggagagtggaaatattactcttttcctccaggattttagcacttccttgcaactgcttccattgtttctgttcttgtaattaacg

SEQ ID NO: 60941 - DNA, 372 bp, Setaria italica
  Peptide Sequence Number=SeqID_126915
tttttttttttttttcacaggataaagggcataagggcagttataccttatgttgtagtaaggtagcatgggatatgttgttcggcaatacctaagacacaataataagatcaaagcttctctcaaagtacacctcaatggtgactaaaagcgatatatacagccacagcaacaaccaagtaataatagccactcagcattcatgtaattagctccttcaggtgaaacgaactaacatagaccatagcgatgatcttatgactcagaagcgcagctggtcagaaggggaatcagcaattattatgaaattctctaatcattcagatatgaggactggcggtgatgtcttggataccaaagaggcgatataat

SEQ ID NO: 60942 - DNA, 479 bp, Setaria italica
  misc_feature (365)..(365): n is a, c, g, or t
  misc_feature (422)..(422): n is a, c, g, or t
  misc_feature (430)..(430): n is a, c, g, or t
  Peptide Sequence Number=SeqID_126916
aaaaaggacggtaggttttaggacggacggacaaagggaaggcggtttcgccggcttccaaccgccatacgccaagtcgggtttcgccccgaacgttagcaaccgccgccactcctgctcagctgggtcgccgccacatccggaagcaagctctctgcaatccgaggtacctacacctccacattctccagctcagatctgcaattgaaagtcgaacgcggcttgtttcgttctcgtcagtcatggccttacgtggatagtatttgagtcggttgacagattgatggtgcgaccatatgttgcttgctttgtatatatgttcagtaatgacttagctcacattgtattgttgctcttggaaaatnttcggcgattgcaactgttcaactatggtacatgttcaaagaacgtaacaggggttnacgggttntaatgttcagagatggtagttcagacatctaacaacgtagtttcgagtg

SEQ ID NO: 60943 - DNA, 400 bp, Setaria italica
  Peptide Sequence Number=SeqID_126917
ctgaaggtgatgctgtcgctggtgaccgggctgtggcccagggagcagaggctgctgtacagggggcaaggagagggacgactgcgagcacctgcacatggtgggcgtccaggacaaggacaaggtgctgctcctggaagacccggccgtgaaggagaggaagctcaggtcaaccaccttggcgcagctcatgggggtgccctgccactccttcatccaagtgtagtagagagaccgttccctgatcagtttcttgccagctttctttttgttttcttctttctttcagtttgtttcgtgagcgaccgagcaaagatttcagctcggtctaactgcaatgttcacagtaatttacatgatgtgtttatcgtcttacagtatatcctatgactagtgcgac

SEQ ID NO: 60944 - DNA, 301 bp, Setaria italica
  Peptide Sequence Number=SeqID_126918
tcctactgatccccagtacaagaggagtgcgcctttcatgcggaagcaaactgggaagccaggggcgcacgcaagcaaagcagagggatcatctctgggaggcgcattgccacctgatgatgcagctgctaagaataatgatgatcagaaacctgatggcgcatccaaagagaagctgcaaattttgtctgctgtcaaagtactactacaaaaaggaaaccttaggtagactttacaaaaagacaaagaaacaaggtagaaccgaataagaaaaaagaagaacaaactttaaactaactaa

SEQ ID NO: 60945 - DNA, 397 bp, Setaria italica
  Peptide Sequence Number=SeqID_126919
agaacagaagtactcattgccggcgtttagcccaattgaaccataaccatcaaccaatatgctgccagtttttcttgtgttttcaggttcaatcggtacagtgccatcaagagtggctggactgttcacaatagccttcgtccacttctccaagcatcgaaaacctccaggagctgcatattttctgtaaatgttttgactgacaatcgtcttgctatcacagctgtggggaaacatcagaatcatagcaagacgattgtcagtcaaaacatttacagaaaatcgtcttgctatgattctgatgtttccccacagctgtgatagaatctgaaggaatagaatttattccttgttttcattaaatcttcatccaaatcatgaattagaaaaacatgat

SEQ ID NO: 60946 - DNA, 231 bp, Setaria italica
  Peptide Sequence Number=SeqID_126920
aaataatgttctggctcatgtacaaccacatggttggcatgcatagcaacgttgctactttggctgcatacactgctccccactagctccacttttccattgacattatgatcgatctctgtcctgctgcttccacatttggatattccatcaggactcaagggtttctcaacaggcactgttagcattgattcgacaaaggcacaagttccttcaggtccagcagggttt

SEQ ID NO: 60947 - DNA, 484 bp, Setaria italica
  Peptide Sequence Number=SeqID_126921
attaaccaatgctggcagtgtgagccacggttctctaacacaaaaaattatattccatccatcatcaccattagcaaaacaaatgcctcccagatgccaaggtaatactacaggtattattggacttctatcctcaatgtctaatcgctgaggcgccatacgacgcaggatttgttgcgaccacccccgatgtagttccccatcatatattagctctgggcactgaccggacaaagaaaggattgccatatttactgtcttctagggtgctcacggcttgttgctgcgctttttggactcactgtaaagaataacgcctataactgtgagagtgtaaccgagcattcctgttatagacacaggattcctgaatatcataattgagacgacaactgccacagcaccctttgcatttcctaagtaaccttgttagtagttctagttgtctacttagttattgtctttggttctaacctaagttaaa

SEQ ID NO: 60948 - DNA, 347 bp, Setaria italica
  misc_feature (1)..(1): n is a, c, g, or t
  misc_feature (78)..(78): n is a, c, g, or t
  Peptide Sequence Number=SeqID_126922
ntaaagagagttgcaggaagcaagagaataacggcaattggagccatgtacaataacagattcatagaattaagcttntccctgtgagatatcagtacagagaaacactcagcattcacataatgcacaaaatgaaagtaatatatgaaaccaacacaatctgtatataatagtgtatagcaaatacatataaaagggaaaatggagttacccctcagaagacagaagaattccttgcaaaactgtcttcaacgcccttgctgcagtggctcctatgcacatgatgaatccaaacagatgaaagctaggctcgccctggaaattttgtttttgtctattgtcttcta

SEQ ID NO: 60949 - DNA, 247 bp, Setaria italica
  Peptide Sequence Number=SeqID_126923
ggttgaaggagacggggaggtagcgcagcgagacgttcccgacacgacggagccgcagaagacgaggctgagtgcggcgatcttggcgagctggacgcgggaacgcacgagctgcatgggcacgacgcggagccaggcgatggccgcggcggggaccgggcgcttcttcacggtggggctcgtcagcgcctggtactcctccaacatcggcgtgctcctgctcaacaagtacctcctcagcaactac

SEQ ID NO: 60950 - DNA, 210 bp, Setaria italica
  Peptide Sequence Number=SeqID_126924
ggtgagataggtgacccatgactcgcgcttgacggtcatgatgtacgcgaacacggcggtgaagaagggcgtggtggcgccgaccgcctggttgaaggagacggggaggtagcgcagcgagacgttccccgacacgacggagccgcagaagacgaggctgagtgcggctgagacacgcaacaggggataggaaggcacacaggggatagg

SEQ ID NO: 60951 - DNA, 214 bp, Setaria italica
  Peptide Sequence Number=SeqID_126925
cgttcgccggtctcccgtgcacctcactctcgtgattttccccaggcggcgattatcgggcgacggcgccgccttcgccgttcttggtgccgcccttcgcccgcgacgagcacccaccagggtttgaaaacatcttgtatgctcagggttcggcgctgactggtgaaaattgtttgggggctctgaggaccgaaattctgtgaatcaattgtaa

SEQ ID NO: 60952 - DNA, 165 bp, Setaria italica
  Peptide Sequence Number=SeqID_126926
accgttcgccggtctcccgtgcacctcactctcgtgattttccccaggcggcgattatcgggcgacggcgccgccttcgccgttcttggtgccgcccttcgcccgcgacgagcacccaccagggttcggcgctgactggtgaaaattgtttgggggctctgagga

SEQ ID NO: 60953 - DNA, 182 bp, Setaria italica
  Peptide Sequence Number=SeqID_126927
ctgaacttatagctccccaaagtaaaagaattaccttgattatctcttttaaagaaatgataagggcatcaaaggaggagtatgagcaacttcctccttacatgaagagtctagcatcatgggaggaattgcaggagggaatatccaaactaaattcatacttcggtagtgacgaagccaag

SEQ ID NO: 60954 - DNA, 220 bp, Setaria italica
  Peptide Sequence Number=SeqID_126928
ttgtcaacttcaaaacctcgttgttgctccttcttcatcttgtcctcccattgttgttgtatatctcctctactgattaattcttccattatttcagctatagcagaaagatggcttcaattttacggacttactaagtactagtttaaactacaataacaacgaaattaagaacttaacctaaccaaattaacgaaaccaaaactaaactaacaaacaa

SEQ ID NO: 60955 - DNA, 423 bp, Setaria italica
  Peptide Sequence Number=SeqID_126929
catcttgtcctccattgttgttgtatatctcctctactgattaattcttccatattttcagctatagcagaaagatgggcttcattttcggcttctagtctgtttaactcatcacgaattgcttcctccattcgaccactggtcagtgcagcagctgcttgtgctttcgttacaggtttgtgtggttgaaggcgtcttgtatttcctataatatcccatgatcgtaaagaaaattaggctagcacactgaaacagggcatagctgaccttctcaaatagttggcattgacatagtatgagcaacagatctggtactaggtaagttcatatacatctccaagccagataaggacatgtttattcgataagattagggtttttttccaaaagagtaaaaaaagctaacaaaatagctagtctatt

SEQ ID NO: 60956 - DNA, 200 bp, Setaria italica
  Peptide Sequence Number=SeqID_126930
atcagggtcatcaatatttacatcatcaaaggcactttggactgaaccagaagttaatttgtcaggaacaatcctctgcatccttttcctctcaaactttgagcacaacttaacaaaccatcttgcaaattccctccgagtacaaaaatcatgagcaagtcttcaatgatacaatccccagtttgcttgcaggggtcaat

SEQ ID NO: 60957 - DNA, 195 bp, Setaria italica
  Peptide Sequence Number=SeqID_126931
tgttgactctgttgacaatttctcttgaacgtaatgcaatggggcgaacaatgagttgctgaaaacctgaaaatcagtatgattccaccattcagttttgttagcaataatcttgacagtagtgctgagtagctaaatgtaaattacttagggttcaagtctactctttgcattagggaccaagtctttgccgtt

SEQ ID NO: 60958 - DNA, 246 bp, Setaria italica
  Peptide Sequence Number=SeqID_126932
gtaaatgataacagcgtattactttctaatgaggtgcactttttattctatccttttgatccaagtttgttgtaataataagcaccaccagtccttttggtatcttgctactcatatggtttcctatttttggttatgttttgcaggtcataaggaatgaagcactgttgctccttacttatctgacccgggatgcagaggaaattcaaaaaattgttgtattgagggtgtgtttgagaagatatt

SEQ ID NO: 60959 - DNA, 187 bp, Setaria italica
  Peptide Sequence Number=SeqID_126933
caggtgtaattcgccctcatgttgggtcatgatgttgtgatggcaaatgtacagtggataatgtgtagacaaaggcatcatttcattctaagttatttgtggaggatgggattaaattgctgacttgccttctttctgaatgcatctactcaagtagctaagccaattttataaaaaaaaaaaaaaa

SEQ ID NO: 60960 - DNA, 341 bp, Setaria italica
  misc_feature (309)..(309): n is a, c, g, or t
  Peptide Sequence Number=SeqID_126934
aaatacaaggaaaagaagaaataatgtgcatgcactatcacagatatactgttctagggaaaattgctcgccggacagccatctatttcgcaataacctccttgtgagccttaaatgacaaaatcacgttccatgcaagggctacaaaattagcagcaagcacctgaaacttctgaggaacaaagtaaaaattcagaaactgaaacggtatccataattgccaatttgccaacactgatgataaccactcctgcttaagctgtggcactacaagagagggctttccctccaaggtgactagtaagctcntaaaaatgccgatgaaaatgggagcgaaaatg

SEQ ID NO: 60961 - DNA, 394 bp, Setaria italica
  misc_feature (1)..(46): n is a, c, g, or t
  Peptide Sequence Number=SeqID_126935
nnnnnnnnnnnnnnnnnnnnnnnnnnnnnnnnnnnnnnnnnnnnnnggttctccatcacaagttcacaacacacctacaaggaggatcctccaggatatagtatacatagaaacatgtcatcaccatgatactatattcagtttcaactttgatcagaacgccgccctccggcaccacaatttacaatctaacattttcctacaccagtaacctgccttcatctctcccaggacccaataatcgctctggtcggccgctacattcctcatcaccacctaaatacactatttcacaataacctccttgtgagccttaaatgacaaaatcacgttccatgcaagggctacaaaattagcagcaagcacctgaaacttctgtaggaactaaagttaa

SEQ ID NO: 60962 - DNA, 200 bp, Setaria italica
  misc_feature (189)..(189): n is a, c, g, or t
  Peptide Sequence Number=SeqID_126936
tttaatttagaaccaagcatgtatgtgtcacgcaagggtgcccatgctggctcatcttcatctttgccagtacgcttagagaaatttggagatgccatcacatcaagataaaaagagccaggcaccttcaaatttctctaagcgtactggcaaagatgaagatgcctggctctttttattctttgtatntgtattggtct

SEQ ID NO: 60963 - DNA, 266 bp, Setaria italica
  Peptide Sequence Number=SeqID_126937
tttggtacttaatggtacgatccaatcagtaaggcactgttgcagtgactgttctatgcctggcgtcggtcaggatggaacaaacattgataaagccaacttgtctcattgtctcctcccactcccgcacacgcgccgccactcccttccctcccgtctggatctcgccccctcctccgctccctccgccgtgcccgatccgccgctccctccggcgacgcgcctccgccgcccctctgccgctgcgcctccgccgcccctccgcc

SEQ ID NO: 60964 - DNA, 278 bp, Setaria italica
  Peptide Sequence Number=SeqID_126938
gagtgaacaacactggggatagttcctgaagtactttagattttggcgaattgtcggttaaggcgattgttcctcccgggcgaaggacccggaatgcttccttcaccaatccagttattgctcgtgcacataagcaagggagacaaggtcgaatgaatccgagggcaatcccgtcgcttcaccattcgcatgaacccaacgaatagggttttgtcgtgacaatttttcttccctttgtgccgccaccgcaagaaagtatggtgataggtcgagtccaa

SEQ ID NO: 60965 - DNA, 255 bp, Setaria italica
  Peptide Sequence Number=SeqID_126939
tcgatttttgaaaagtatgcactcatatgtagcaaaggtgaaacgaaatatattcttaccgaattgtcggttaaggcgattgttcctcccgggcgaaggacccggaatgcttccttcaccaatccagttattgctcgtgctggacactcatggcactgcagttttcttagatgtggcattactgaattggtggtgaattatattcggtgcatgattattgcactgtaaagaatgaagataatctgggcactttta

SEQ ID NO: 60966 - DNA, 275 bp, Setaria italica
  Peptide Sequence Number=SeqID_126940
gcacgtcgtcgacgaggaagacgatctcgtcggggttccagaggatggcgtagtggtggaagtcggcggcggggtcggaaccagaggtggaagcgcatctcccggccgacgaggcgggcgccgtcgccggtgccgcgcacgtacacgttggtctgcagcgtgtagggctcgccggggaccgtgcccagcagctccatgtcgatctcgtcgtgcttccccggaaggaaagtgaagaagacgatggcgtacgtagaaggcggtgttgacgccggcgg

SEQ ID NO: 60967 - DNA, 392 bp, Setaria italica
  misc_feature (355)..(355): n is a, c, g, or t
  Peptide Sequence Number=SeqID_126941
ccaagacttgcaaactgggaagctattacctcgtcaagctctatccgggaatttgaccggcatgccacttgtgtcgttgcaaaatacgaggtattctttctcatggtagagtctgcactgtgtggttatcaacaaccagcaaagtgttcatattagattcttggttacattcagcttcactgctcttgttattcattgttggtgactttccttttttgagttttttctattccattgagaattaagtggaaggaagcaatcgcatttggttgaagtggaaatggatagcgaataccttccctacccttgtttggtgaggggacgggatccatattggtcatagtcataagttggngcatcgaatcaaaattcttggagagtagtaactgaat

SEQ ID NO: 60968 - DNA, 334 bp, Setaria italica
  Peptide Sequence Number=SeqID_126942
aaacaaataactaaaatttaagaactaacaaaccctaagggaaataactagactaggtagaaccaaacaagatttaatttcacgcaagcttgtgcagcggtgttatgacagagctcttgcaattggtctcaagggatatgcaaaactacaccaaccagtcttggcaagacttgcaaactgggaagctattacctcgtcaagctctatccgggaatttgaccggcatgccacttgtgtcgttgcaaaatcgagacagtggacacattctaccgcaaatgcagcagtgcgaactatattggcaatgtgtcagttcccttgctttgatcagtgcttt

SEQ ID NO: 60969 - DNA, 236 bp, Setaria italica
  Peptide Sequence Number=SeqID_126943
atttctaaggatgattcaacaccccttccttcttgtgatacctggattaactagtgattctagtgctgctatgcagggattttggtgcagtatgtcaagcatttagtcttttctatggcaagcaaaggatggaatgttgttgtcagcaatcataggggtctgggtggcatctccataacatctgattgcttctacaatgctggatggacggaagatatgcgtgaagttgttaatta

SEQ ID NO: 60970 - DNA, 236 bp, Setaria italica
  Peptide Sequence Number=SeqID_126944
ttggtagtaattcacgtgtcagcttttttgttaacatggtataacatgtcatagttgaatgcaggcacaggagcatggtttgcactcttcactggaatccttaatcgacaagagcccgtatgttaatttcatggaagacggaatggtagctgcagtaactaatgatggtcctgacaacgatgactccttgcataaccagattgttgatgaaatcaaactcagtgatgatatggttg

SEQ ID NO: 60971 - DNA, 221 bp, Setaria italica
  Peptide Sequence Number=SeqID_126945
tgatcccatctgccaggcaatattgcaaaatctggatgaacctttgatctgcacaagtgtcaaatatctatcggaggatggatggatacttgatccagtaatcattgctgatctttatgagccactggtatcttcttaaatgttaacattgtacctgaaactctgtattctttactttttggtaccaccatcatagttctagttcctacttctcttagagc

SEQ ID NO: 60972 - DNA, 480 bp, Setaria italica
  Peptide Sequence Number=SeqID_126946
acccgaacccaaaagaaaccaatagtcgaaaccgacccaaagaaccaatgtcgatgaagcaaggttctgctgctggtttcgagcgcaaaccctgaaccctcttcttgtcaggttctggttattttctgctcaatcccaagcgacggcaggggaatattctccgctacggcttactgctattttacacagaatttggcttgttttcgttgagagcgagatccccatcactccagatcactagtgcctgcacgcgctgcgccctgatttcttcttctccagaacattatttcgatcagtgcatagcacgttgattgagtcctgaggtgcaggatggaaattctgatatatatctcacttgttgtgcttcttggtctgggagccctgtttgttattccaaggtctaactgcaaagtaaggagatgcagcgcatctagcaggcagtggaaagatatctagaagctataccaagaaagaggtatc

SEQ ID NO: 60973 - DNA, 471 bp, Setaria italica
  Peptide Sequence Number=SeqID_126947
tatctccgctacggcttactgctattttacacagaatttggctgtttcgttgagagcgagatccccatcactccagatcactagtgcctgcacgcgctgcgccctgatttcttcttctcccagaacatatttcgatcagtgcatagcacgttgattgagtcctgaggtgcaggatggaaattctgatatatatctcacttgttgtgcttcttggtctgggagccctgtttgttattccaaggtctaactgcaaaggtaaaagtacgtatcacttgtaatcttagtttgaacccattgccacttagtatttgttatattgcaggtaaaggagatgcagcgcatctagcaggcagtggaaagatatctagaagctataccaagaaagaggtatcaactcacaacacaaggaaggattgttggataataatcaaagataaggtttacaatgtcactgcatatgtggaagagcac

SEQ ID NO: 60974 - DNA, 254 bp, Setaria italica
  Peptide Sequence Number=SeqID_126948
cctcctgcaaggcattcaactggaacaatatgaacaagagtagtttttctagttttttcccttagtttctgaaataaaaattacctgggctttagtagacacaatcaaacgggagagatgttgcatcttagggctgcagaggctccctcctgttcctctgtagttccaggacaacagactcatggcgcccgtggcaccttgcaggctgcaggaccttcctctctaatactaggaggatcaccttgaagttgaag

SEQ ID NO: 60975 - DNA, 181 bp, Setaria italica
  Peptide Sequence Number=SeqID_126949
ttagttaaaagttcctttaatttcttcctacttacttttctagttaagtctttggtacggtaagtatctggcattaggaagccatgatggtgacttctgtgctgttgatgtaaagaaaatggaagtttctcactggagcaagaaggctcatcttggttccccagtcacatccattggagtt

SEQ ID NO: 60976 - DNA, 175 bp, Setaria italica
  Peptide Sequence Number=SeqID_126950
tcaggttgtcaagccgcgcctgcaagtcgtcgtcgattccgccatccggcccgcctgcagcttcagcttgagcagcaggaactttgcctgctgccaccggtttagcaaccgcagtcgcaggagccttcacaagctggtgcacagaagaagaatcagcattgcatataaagtacca

SEQ ID NO: 60977 - DNA, 385 bp, Setaria italica
  Peptide Sequence Number=SeqID_126951
ctcagcagataacaagaactattcagatgtcatttggcaatggaaatgctgactacagaatggcagagagaatcaattcttcaaagaagtgcaaatcctaccactgactggctgttcccaattaagtacattcaagggtatcaagacacacagtactccagtttctggaaacatgaaacttgatagtttgatacttactgaaagtggacgcaagatgtcactagcaacatatgatggaatcgtcatgataacacttttagcctgcactgaaacaacgccttcaggtgtttcatacaccaatacatatcccatgccatctgattttgtaatgctagtgagtttccacgaaagcttgactttactacccaagctggatgtaatggga

SEQ ID NO: 60978 - DNA, 360 bp, Setaria italica
  Peptide Sequence Number=SeqID_126952
cctgtaaacactacatgagtctgcatatagatctacgtagactgaacgtgaagaaaatttgttttgtaggatggcgaactagaacaatgtcctacagcctacaacctactaattgctaatcggaaaagatcagaggtagtacaattagttttgtaggatggcgaacagaacaatgtcctacagccctacaacctaactaattgctaatacggaaaaagatcagaggtagtacaatttacaaaataagatggaaaaatgctcgtaaacttcgtgccaatcctggtctcacctcttctgtgcaaaacaacgaccaggtccatttctttcatcacttgtaggcgtacttggtcaagaaatcag

SEQ ID NO: 60979 - DNA, 322 bp, Setaria italica
  Peptide Sequence Number=SeqID_126953
tttacggtaactaacccaaggaactaaaagggtaccaactgacgctagggttgatgagcattttcctgaggtcacggtcaactgcttctaccagctcacttgcactcttggaaacaattcctgtgtttgtggcacctcctatgtagtttagaagtaacacccttccagcaggagcgcgatttggaaagagtgatgagctgtatatcgtccctaatgtctcaactccttgactacgtggatgcaactggccaaaaaccctggagctccccatcaatcaagcattcctttctattatccaccagttgctgctgtaactatttcg

SEQ ID NO: 60980 - DNA, 259 bp, Setaria italica
  Peptide Sequence Number=SeqID_126954
acaaatcaagatggaaaggataagcttgccctaatttgcatcaacttttttcttgaatagtaggtgcaggtgccttcctccatgtatatgattcagagagcaataccataacatgtcttaagggataactgattcgctataaataaatatacaagacaataagaacaaacctggatgtaatggcatttggaagcatggcgagacccttcctaaaagatgcaactgtctgcccctttggcgtaggaaggcggggatcccg

SEQ ID NO: 60981 - DNA, 462 bp, Setaria italica
  Peptide Sequence Number=SeqID_126955
tgtgcgattgaatcgcaaaacggttgaagggacgtactggagaaggagactgcagaatttctctttcaacgctgtaccatgctcttgttacaacttgtgtggcgatggctccatttacaccgttctttactgaagttctttatcaaaatctgcggaaagtgtcagataaatccgaggagagcattcatttctgcaagttcccctccacaaccggagagagagatgagcgtgttgagcaaagcgtaagtaggatgatgaccataattgatcttgcacgcaatattcgtgagcggcataacaaagctctcaaaacaccactcaagtatgtccaggcacccttaaaatcatgcatttatatattttctataatggtgcacatcattttggaagattacagttattttgaaatcaatgaaatctgagggtagtagtagttgttgtaacattgatacaatttgggtt

SEQ ID NO: 60982 - DNA, 389 bp, Setaria italica
  misc_feature (386)..(386): n is a, c, g, or t
  Peptide Sequence Number=SeqID_126956
ttccctctaagagaggacctgatttggggtgctcaaacgtgttgatgatgttttcgactgctggttcgagagtgggtcaatgccatatgcctacattcattatccatttgagaataaggaactatttgaaaagaattttcctggcaattttgttgcagagggtttagatcaaacacgcggatggttctatactctgatggtactctcaacagcactgtttgggaagcctgcatttaagaatcttatatgcaatggtcttgtcttggctgaggatggtaagaaaatgagcaagagtaaaagaattacccttcacccacagatctcatttgtattgtagttattggtagtcggtattgttctttttgttcgtttactttattattttntta

SEQ ID NO: 60983 - DNA, 413 bp, Setaria italica
  Peptide Sequence Number=SeqID_126957
gaagatgacacaggaacagatcttagcctttgagggaaagtggggagggttacattctttggtcattgcttgaagctggacgatattaaggttgtccgacaattcaagcgtcctgaaaatgtgtcagagaaggagattgatgctgcaggcgatggtgacgttttagtcattttagatctacgagcagatcaatcattgtttgaagctggagttgctcgagaggttgtgaacaggatccaaaagttacggaagactgctcagctcgaaccttctgatccggttgacgtgtattataaatcttcaggcaatgaacaaaaatacactggaacagattttgaagtcacaggtaaaattgtttgttctaaaggatccttgttttcggaacacctttctcaggaaaactggtttattct

SEQ ID NO: 60984 - DNA, 358 bp, Setaria italica
  Peptide Sequence Number=SeqID_126958
tactaagtaattactaaattactaatttagttttagtaaagtacttagggtaagtttgtcttcgagtaggttgtgaacaggatccaaaagttacggaagactgctcagctcgaaccttctgatccggttgacgtgtattataaatcttcaggcaatgacaaaaatacactggaacagattttgaagtcacaggatcagtatatcagagacgcacttggttcgccacttgttccaaaggaatggcaccaacagatgtggtagtacttgggtgaggagtcgcatgatgtacatgacatgtcatttgtcatatgcattgcaaggtcctgccctgttcttgaccagtatcttgctcatgcct

SEQ ID NO: 60985 - DNA, 231 bp, Setaria italica
  Peptide Sequence Number=SeqID_126959
tggatcctgttcacaacctctcgagcaactcaagcgtcacttcttaagtcatccaatgtgttagatcactggataaactctgcaactgaaagtctagtcagctttgttcgacaggagatggatgcatatcgtctttacacggttgtgccttatttggtaaaatacatcgacaaccttactaacatatatgtgcgattgaatcgcaaacggttgaagggacgtactggagaa

SEQ ID NO: 60986 - DNA, 251 bp, Setaria italica
  Peptide Sequence Number=SeqID_126960
aggcgatggtgacgttttagtcattttagatctacgagcagatcaatcattgtttgaagctggagttgctcgagaggttgtgaacaggatccaaaagttacggaagactgctcagctcgaaccttctgatccggttgacgtgtattataaatcttcaggcaatgacaaaaatacactggaacagattttgaagtcacagtatatcagagacgcacttggttcgccacttgttccaaaggaaatggcaccaa

SEQ ID NO: 60987 - DNA, 182 bp, Setaria italica
  Peptide Sequence Number=SeqID_126961
tttagttaaaaacaaaaagggaccaatcaactcaaaattgggatgctgcaattattttaaacagctcagttccatttatgcacctcaccgaagtcatgttttcacattcatcgcttgttaaagatgaatgggagatgtatgtatgtatgctatagcaaaatttgcattggctcccgggttac

SEQ ID NO: 60988 - DNA, 150 bp, Setaria italica
  Peptide Sequence Number=SeqID_126962
tggagttgctcgagaggttgtgaacaggatccaaaagttacggaagactgctcagctcgaaccttctgatccggttgacgtgtattataaatcttcaggcaatgaacaaaaaataacaactaggaacagattttgaagtcacaggatcag

SEQ ID NO: 60989 - DNA, 317 bp, Setaria italica
  Peptide Sequence Number=SeqID_126963
gaatactttgctatatgatcataaaaaatgtgctctgatcatttaacttttataggccacatgtcctcatagggggctggatacattatctcctgatgatatcaagcagatgttagaggataagctcacacagcataaaacctcatccgatggtggttgtagtgaagagttcaaggaatgcttgaaaaaatttcttgaggaacgtatacaattactaaagtgcacaagaaaggcacttcatctagatgagaaacattgttaggtaaagtaattgttatttctttgttcttatttagttaagttaaatttcttatttt

SEQ ID NO: 60990 - DNA, 156 bp, Setaria italica
  Peptide Sequence Number=SeqID_126964
tcttcattacttgttctagtattaccaacaacaacagaaggccttataggtaatgggaataaggatggcatttactctgttcttctaagagattataattctcatgctgcagcaagttgcatgaatcgcttggcaaaatttagtgcaagatttatt

SEQ ID NO: 60991 - DNA, 429 bp, Setaria italica
  Peptide Sequence Number=SeqID_126965
gccgaagttgtatggcgggacaacattatgaatgaaatcatacgtaatatcacacaggataaacattgtggtgaggtcctcacagtcattccaattgttggtcctggggggcataggaaagacaactcttgcacaacatgtatatcacagtggagaagtgcaagaacattttgatgtcaaggcttggaaatgtgtatcactcaactttgatgcgaataagctgatagaagagattgaaaaagatatccctggtattgatggtgaaagcaaaggtactgcaggacagttgattcagcaaaggttgaaaaagaaaaggtttttgcttatactggatgatatatgggactgtagcaatgaggatgaatgggaacagctacttggttgtcctatttcttaaaaaattcttacttaagtttacttagggttctt

SEQ ID NO: 60992 - DNA, 358 bp, Setaria italica
  Peptide Sequence Number=SeqID_126966
aacaaactaataaggttaaacaaagctcaactggtaccctctctatcttgtggtgttatcatttccagtttcttacacatgtgaacattctgtgcagatgttgtgcgatcagcgattggctttaccatattttctgttgttctgatcacttgggccacgactttcattgttggaggcgaacgattgtttggaccagcgtggaatgatctcgtaatgtacaatgttgctgacaagcttggcctctctggatttatggggatagcctccgctggctccgaccatctcactggttgtactccattgctttttccctggaggagatagtttcgtcttcgtgggcttggtactatttgctgta

SEQ ID NO: 60993 - DNA, 263 bp, Setaria italica
  Peptide Sequence Number=SeqID_126967
ggcaccagatatcgcgtacgacatttgagcgtctgcttgagccttcatagcagcaaactcctcgggtgtagtgttggcgagtttctcagtcatatcacgcatgtcctctggtcttgcctgattcatctgctgtgcagctcgccttaagtcctcagctttcatgttcttcatactctcagatgccatctttaagaggtccgggttggacatcagctgctgcttgtcattccttggtcgtaggttcgttccggtcgtactattgt

SEQ ID NO: 60994 - DNA, 225 bp, Setaria italica
  Peptide Sequence Number=SeqID_126968
tgcaggagttgaagatcatcacagtaaaggttcccttgcattgccccgattgtgcagtaagggtcaaagagattctgctggagcacaagagtaatctctatctctctgacagttcctctatctctatataatcgatccaagtaaacctgtacttgcatgatcccattatttggcacatgctcatgttaatatactgatgaaggtatctatgcggcaagacggacc

SEQ ID NO: 60995 - DNA, 335 bp, Setaria italica
  Peptide Sequence Number=SeqID_126969
aatccccccctcttcttttgttgtttatactgagcccaacacaaaacccgatatcaggaacagtgggcagagttttgtttttaactatactctggccaaggctattgtggaatatgcttcagctgtatacatgacagacctaacggctctatatacatggacatgttcaagatgcaatgacttgactcgaggctttgaggtgacatgtataattgttgatgtccaaaattgcttgcaggcattcgttggtgttgatcccaatctcaatgctatcattgttgcaataaggggaactcaagagaacagcatacagaactggattaaggacttgatat

SEQ ID NO: 60996 - DNA, 205 bp, Setaria italica
  Peptide Sequence Number=SeqID_126970
cccgatatcaggaacagtgggcagagttttgtttttaactatactctggccaaggctattgtggaatatgcttcagctgtatacatgacagacctaacggctctatatacatggacatgttcaagatgcaatgacttgactcgagtatgatatctgggaatatggtgtctagtaatagtttattgtaattttgtttcagtttaag

SEQ ID NO: 60997 - DNA, 240 bp, Setaria italica
  Peptide Sequence Number=SeqID_126971
aaccattacatactgttagcggcggtactgcaacaacatgctaattctaggcaataacggtagcaagctagcaactaaagagtgctcagcacatacaaatacacacacgattcatttacaagcatattcaagcagcatccctgctcaatccctgatctctgtgccaaagacccgatatcttctgctgccccaggggtcgtttttgtccagccggtaagatttcaagcaacaccatatccg

SEQ ID NO: 60998 - DNA, 294 bp, Setaria italica
  Peptide Sequence Number=SeqID_126972
aagaagaggaccttgacggagacgccctggaggtcggtgaggtggtcgggcttgatcttgccggtgatcttggtctggtagcggagcgagtaggagccctggatggagaactcgcagacggaggagcccgcgccggacgcggaggcgtcgagcgtggccgtgaaggcgcccgtggcgttgttgagggtgtaggccaccacgcccttagggagaatccccggggggaagtcgaagccggacttcctaacgttaccgtcaaccaccacgtcccggctcgggaaatcttaacccgat

SEQ ID NO: 60999 - DNA, 228 bp, Setaria italica
  Peptide Sequence Number=SeqID_126973
taatatccattgtagttggaagtgaagaagcagcacttagggctggcaggcatttgctaagatctggatttcatgttacaccaatccgaccacccacagtgccacctaactcctgcaggttccagttctcctttgtaattgttattttcctgttccacgcaactcaaggtcattgtcagccaacctaaaattttggagtgagttttgtagtggtcatagaccgagtaa

SEQ ID NO: 61000 - DNA, 104 bp, Setaria italica
  Peptide Sequence Number=SeqID_126974
tccagtttccagtttgtacgatgtgtttgctttgctgcatcctaaattatgacctaaacttgagagaatggagtgaattttgcaaggaatggtaacattttcag

SEQ ID NO: 61001 - DNA, 210 bp, Setaria italica
  Peptide Sequence Number=SeqID_126975
gcaatcatcagcagatcctggacatgttgctccactggcagacgccgtcgaggccccagtcctggtccgacgagccagacggtgcagttcctctccccgacgccgttctctgcgccttcgtccccgtgggcgaagccgttcgcgcggaacgcccagtacttccagctcgcgcactcgtcgcccgtgtcgccgtcgacgccgaccgggccg

SEQ ID NO: 61002 - DNA, 194 bp, Setaria italica
  Peptide Sequence Number=SeqID_126976
ccgggtacaccagctcccggccggcgccgctcgacctggctcgccagctcgccgcgacgagccagacggtgcagttcctctccccgacgccgttctctgcgccttcgtccccgtgggcgaagccgttcgcgcggaacgcccagtacttccagctcgcgcactcgtcgcccgtgtcgccgtcgacgccgaccggg

SEQ ID NO: 61003 - DNA, 236 bp, Setaria italica
  Peptide Sequence Number=SeqID_126977
tgtgtgtgtgagagagagcatcggcgggtgatgtccttggagtcaggattgttaagaaaattaaagaattcatttctcgtgctcgcttttgcgctgcaggtgaggaaagagaagctaggggacagaatcactgcgctccagcaactagtctcgccttttggaaagactgataccgcatcggttcttcacgaggccatcgaatacatcaaattccttcacgatcaagtttcttcact

SEQ ID NO: 61004 - DNA, 200 bp, Setaria italica
  Peptide Sequence Number=SeqID_126978
agggatacgtatctcatctgggcctttctgtccttttagtttctgcttaaccttttgtgttgcatctactttatccagattggtttgaagtaagaccatctctgtgtactccgacggaattacttatttttgttattgtctttaatttttattctaccttttctcttccagttgtttgtctgcagaaagacacgcctttg

SEQ ID NO: 61005 - DNA, 344 bp, Setaria italica
  misc_feature (12)..(12): n is a, c, g, or t
  misc_feature (22)..(22): n is a, c, g, or t
  Peptide Sequence Number=SeqID_126979
tccagaagcttnaccgggcagngtaattcccggttcttgagcatctgtaccaccggacgccagagcagtgacatattcctccaagctgtattctggagacacttctgatctagttggtgacaacttgatttgtgaagctaactgttatatatgcccatgaagcaaggtctaaatgatcttctatatgatatgctgcatgatcggtcccaagttcagcaattgccaaagttccataaacctccagcctgttgcctttctcaacgatatcgatccagagcgtcaaatccgcctcctatttcttcaagtttagacaacaacaattactaccaacgaataactaagaa

SEQ ID NO: 61006 - DNA, 202 bp, Setaria italica
  misc_feature (157)..(157): n is a, c, g, or t
  Peptide Sequence Number=SeqID_126980
cgggcagagtaattcccggttcttgagcatctgtaccaccggacgccagagcagtgacatattcctccaagctgtattctgaaaacaagaataatttcttagagatctcacatcactgctgagctagccatgctaaagatagcattgttttttttangaaacagccaaaaacttagcaactgattcaaagctaactgagaca

SEQ ID NO: 61007 - DNA, 471 bp, Setaria italica
  Peptide Sequence Number=SeqID_126981
catgattataagcaaactcaacatgaggctaagtctaaattctttccctaacgttttctaagttgttttattcttaaactagccctaagcatagtggacaaggttcgattaaccacctcagtttgcccatcagtctgagggtgacaagtggtgctaaacacaatttagtcccattttatccacagttgatgaggacaccacgagtacatctacaccagcagcacctcaggcgcctccagttgctcctccagtttgggccaatcactcgagcccgtgcgagagaattaaacttcatcatgctgttaaggaacgaaggcccatcggaataagaagatggcccaacagggcagcccaggtggggcgcctagggttgggcgccgtgaccccttcggactccaggggctgcgccccctttatttagtccgagtcctttttgtttacgacttgagttttgttttacatctagcttta

SEQ ID NO: 61008 - DNA, 267 bp, Setaria italica
  Peptide Sequence Number=SeqID_126982
ggggagcggccgccgccgcagccatggttgatggcgagaggtggtggtgggggaggagggaaagggagaggtgaatttgacacaaagcaaaatcagatgaaaaaggagacttgagcttcaggatctgctgaagcatactccaataatgcacggagccctgtttttcagggcccacccaacaaactgcttctaaggaagcagtcggaacaatatcaagattacaccaaaagatgatattaacatttttcaccacaactttcgataaag

SEQ ID NO: 61009 - DNA, 231 bp, Setaria italica
  Peptide Sequence Number=SeqID_126983
aggagcagaccaacccgcaaggcacaagctttacgtttctctttttaagtgcatagtcaattaccgcctcgttctccgggatcattattgaacaagttgagtaaacaatgtaaccaccagttttggagttgggaaagaagtgcaccaggagcagaccaagcaggcaggccacaaaaagaagtttgcttctgatagaaccaagaaatttgatacctgaggtgctcttagggc

SEQ ID NO: 61010 - DNA, 216 bp, Setaria italica
  Peptide Sequence Number=SeqID_126984
tagttgttgtggtgatatttggttttgtcgctgcacttgtcacctggaacatctgctggggaacgaaaggtgtgactgggtttgtcagtcactatcctgatgcagatcttagaactgcaaaagacggagagtatgtgaaggttactggggtatgtaaagtactgattactttgttttaatgatattcagttattctgtttattcatcagcctctat

SEQ ID NO: 61011 - DNA, 403 bp, Setaria italica
  Peptide Sequence Number=SeqID_126985
gggtttgtcagtcactatcctgatgcagatcttagaactgcaaaagacggagagtatgtgaaggttactggggttgttacttgtggaaatttgcccctcgagtcttcattccaacgggttccgagatgtgtttacacttccacttgcttgtatgagtataggggttgggattcaaaagctgctaacactacacatcgccgattcacttggggactcaggtcaatggagcgacatgcagtggatttctacatctctgatttccaatcaggattgcgtgcactggtgaaaacaggatttggtgcacgtgtaaccccatatgttgatagaaatactagttagttaattagaacaataaaacccaagaacaaacaaaggaactaattagttacgttacctttagtta

SEQ ID NO: 61012 - DNA, 194 bp, Setaria italica
  Peptide Sequence Number=SeqID_126986
gtgcaaatgcagggtgtgattatatgggctaagtaagtacaacaatatcagtggatggtcggttacctggagcttggttgtatagtatattatatgtggatggtcggttacctggagcttggttgtatagtatattatatgtaattttctctttctttttggttgagccatggatgttacaggtatcatccatg

SEQ ID NO: 61013 - DNA, 133 bp, Setaria italica
  Peptide Sequence Number=SeqID_126987
ctttttttctctctttctccggaccagagaatcgccagagccaagctccctgctgaacccatctccaccggctgccaagtgggccaagtgcattgctcccaaccagcctcgatggcctggtcctgaggtgtga

SEQ ID NO: 61014 - DNA, 439 bp, Setaria italica
  Peptide Sequence Number=SeqID_126988
agttaccttactttaagttagactacaagctaattccttcaaatgcataagaatattcaagcgcattccaaacagtgtaagcaatttcgtcgagactgcgctcaacaaatggatatttcgattttactattctttttaaatgcccagtatctgtaggcatctgctttgctttgaatccaaaaaatggagcaataaaagagttagcaaagttacacatctagctttgcaccataacaatcaaaataaattagcaatacctatctcaattaaagccttatttggcaatacatagccagtgctctcatcttcttgacgagctaaacgatctctccacccatgcaaagcctgagacagggggagaagaataaacaggggttgctctttatacttacactttgatagaagaaaccgcatataatataatcttacatacataaac

SEQ ID NO: 61015 - DNA, 313 bp, Setaria italica
  Peptide Sequence Number=SeqID_126989
actttggcttattgattgaaaggtgggctcaaaaccagacaggtagctggacatctgcatgccttcaggttcataatggttccctacaacttcagtgctatatcctggaagctgtgggtagtaagtagcgttgctcagctgcatcgcttcattcatctgagttgattgaatccaaacattgtcactgtgcattccagtatttggataaaatgattccgtggggccaatagcagctgaatgtttcaaccccaatcaagaagaaactagactaggaaaaaggaaaaggaacaagaaagaatactaaaagttacta

SEQ ID NO: 61016 - DNA, 251 bp, Setaria italica
  Peptide Sequence Number=SeqID_126990
ggttccctacaacttcagtgctatatcctggaagctgtgggtagtaagtagcgttgctcagctgcatcgcttcattcatctgagttgattgaatccaaacattgtcactgtgcattccagtatttggataaaatgattccgtggggccaaataagacaagactagaaatagtttacaaccccaatacaagaagaaactagaactaaggaaaaaggaaaaggaaacaaagaaaagaatataaaagttaataa

SEQ ID NO: 61017 - DNA, 370 bp, Setaria italica
  misc_feature (1)..(35): n is a, c, g, or t
  Peptide Sequence Number=SeqID_126991
nnnnnnnnnnnnnnnnnnnnnnnnnnnnnnnnnnnggtttaaattcccgtttggaagaccaacaattaataatacaacgaatccgacaccatgcattacctttctcttggttggatctttaaaaggttcttgcaagtagagaccaatgtatatgcgaaagcttaagagtgtccacaataaagtcttctgttctggttgaaatctgcatcaagcaggtcaaaccttgaaatgacctatattgattgtgctccaaatccacagcaaactcagttacactcttcagctttttagctaattccatcaagcctttgtgatcctcaaccagcgtaaatgtgtatcctctaaatcagctggcttcaatagtcgctag

SEQ ID NO: 61018 - DNA, 239 bp, Setaria italica
  Peptide Sequence Number=SeqID_126992
gtgcagaataataataaaaaccatacagctgtttgatatatttcttacctgctgatatctattattgctcaggacatccttattaattggtctggtaaggcctgacaaggtcttgaagttcttagttgatgtggttcgagtattgtcgtctaggtggatgctgtcgatcatggctgtttcattcataaaaccagccccactgccagaagcaacactgacatttgcagttgatgaaggag

SEQ ID NO: 61019 - DNA, 364 bp, Setaria italica
  misc_feature (126)..(126): n is a, c, g, or t
  Peptide Sequence Number=SeqID_126993
ttccctacaacttcagtgctatatcctggaagctgtgggtagtaagtagcgttgctcagctgcatcgcttcattcatctgagttgattgaatccaaacattgtcactgtgcattccagtatttggntaaaatgattccgtggggccaatagcagctgaatgtttcaccccatcagagaactgctggaaaggaaggacagaagatctaaagttctccacattgctcccaccctgaaactgctccttagaaaaccctccaaaaatttctgtctgtcttccaggttctgaatttcctaaagctcctaaagtgggtctcttcaagttacttagaagtaagacctagactagaataatactaattaata

SEQ ID NO: 61020 - DNA, 398 bp, Setaria italica
  Peptide Sequence Number=SeqID_126994
gagaaacatacacaatgcagcaatataagtgcagaataatataaaaccatacagctgttttgatatatttcttaccttgctgatatctattattgctcaggacatccttattaattggtctggtaaggcctgacaaggtcttgaagttcttagttgatgtggttcgagtattgtcgtctaggtggatgctgtcgatcatggctgtttcattcataaaaccagccccactgccagaagcaacactgacatttgcagttgatgaaggagccacagaagactgatcagctgtaccaatattactcttatcactgtcaacatccaaaagagttgtttcatcactggcctgaacacttttcagtgccaactgttctgaccgttccttctttagttgctcagct

SEQ ID NO: 61021 - DNA, 158 bp, Setaria italica
  Peptide Sequence Number=SeqID_126995
agtgacagcaaagaaggaatatcaaaatgcagactggaggtcgaggccacttcctgatgaaatgatcaagtatgctagaagaagatcattttcaggtgtcgactccctttgtagtctctgttcattaagtcgtatatgtacagcaggtagtgtgtatc

SEQ ID NO: 61022 - DNA, 437 bp, Setaria italica
  Peptide Sequence Number=SeqID_126996
cttttagtccctgctgtaaatctaaatgtcattgacttccttattcttcgaagttgctgatctttaatatggtgtgatcaacaactgaagaaaataatggtagtttccttgaaataaaacagaaacttagtggatactcataataaaagcttcacgcaaactggacaatgcaatactagccaacaacctgacctggatgagtatgttttacagtgaaattctcatctgggaagatgcctccatatatcgactcacttcctttcccatcacctctaactatgtcaccaccttgaatcatgaaaccagggatgatgcgatggaatggggttcctttataatgaagaggtttgccattggacccaacacctttttcacctgtgcaaagggccctaaagttttctgcagaatgtagaataaagaaaattagttgccaaacg

SEQ ID NO: 61023 - DNA, 290 bp, Setaria italica
  Peptide Sequence Number=SeqID_126997
cacctggaagtggtaaaggtgatttgattgggatcaaactaaatatcttgaagtagtcaaacttaactgccactcttctaggattaagaggtaccaatcaaatcacctggaagtggtaaaggtgaactagaaattacttatcttgatgaagagctcagggtttcaagaggagacaagggaatttgtttgtactgaagatggtcgacccagcatacagagttccattgtaataatcttaaacgatgccgtctttttgcagtactgtacctaaaaaagtacatcactatata

SEQ ID NO: 61024 - DNA, 269 bp, Setaria italica
  Peptide Sequence Number=SeqID_126998
agcgccaactgtaattgaggcaaacgattcttcctccaatgatgaaagagatgtaggagaggatacaccagaacagctgtcaagtggaggggaaaatgagaaatcttccgcatctgagagtgaaaagaaagagacaactagtaaactttctgctgcggcagctccattcaatccgtccaccgtaccagcttttggttacaaataggactagtaaccaaggtttacaagaagaaacaataggtaggaactaattagaaccaaataacaaa

SEQ ID NO: 61025 - DNA, 225 bp, Setaria italica
  Peptide Sequence Number=SeqID_126999
cgtactgagctctccctgttgatggaaggacactgacagatttatgcacactaggggccgttcagatgcggtcactgggacgagtggttgagctttctgacaagcttccacatatacagtccctgtgtatacatgagatggtagttcgagcatttaaacatgatgcaactgagtctgccacatcatttacatcatcaacagctgcaataacagcccgaagtatgt

SEQ ID NO: 61026 - DNA, 252 bp, Setaria italica
  Peptide Sequence Number=SeqID_127000
cagcgatggagaggttgaggctgttgaggttgcaacagatcggggcatcggggacctcgtaacaagcctatgttgccaagtggtgaagcacctacagaaacaaacacatctgcgcccagagttatgaaccctaacgctccagagtttgtgccaggccaatctcggagtcctaatggacaaccagcatctccaaatggtcctttaacatcaccaggtggtattacatcttccccacagggccttccatcctct

SEQ ID NO: 61027 - DNA, 254 bp, Setaria italica
  Peptide Sequence Number=SeqID_127001
tgcaagtttcaagttagatgttaagttggatggaagtcaggctccagggatgtctcctgatgagcttgctaggcgaaacttgttgaaaggcatcactgctgacgagagtgcaacagtacatgatactgctactcttggtgtggttattgtaaaacattgtgggtatacagctgttgtccaagttccagtagatcctgatctgactaacttactttcccttagtcttactagttcttaggttacttatttcctta

SEQ ID NO: 61028 - DNA, 475 bp, Setaria italica
  Peptide Sequence Number=SeqID_127002
cttgaaaccaaattagaaactaggttagaattacaagtgagacccaatgaccaaccttactacctgcaagcttcccatttacaaatacacgtgctacatcacgaatttggtctatggttattgatggaagaacgcctttggaattccaatatgcaacatcctcatcagaaatgttcacactcgtagtatatgaaaggtagtcagagatgtcttttgtcacatttaagtgctctaatatcccctgagcagcaaagctgccttcaccccatttaccaataggctctttagaagtccaccaagtacttgagagatatggaccaccaataaggggtagactcctacgcttatgtctacttgaataactggggaacctgattccacagtaaaaattgaagtctgtgtaccaacctgaaaagagctgagctaacaattaaaaagtgatcacatatgaaatgttcagtttctggtaagcgag

SEQ ID NO: 61029 - DNA, 450 bp, Setaria italica
  Peptide Sequence Number=SeqID_127003
aaaggatttggcagttgaggccgagtgctccccgccattggctaccaaagaatctcgagatgatatgtgatcaggatactgtagtttggccctgagaactgtggttgcagggagcgtttctacagccttggcggagcatttctgcgtcgttgtatgtgacctcttcttttgcacccatgtatgtaaagacaatcacctgcttgggggattgaaagaagaagggaaagaataaagttgcttcctttacgacttttcggcatggatcgccaaatacatcgttggtgacactgatggaacatttgttctggccgacacatgcctctgtaaccaaatccagagtagtcgatgcatggcaattcccgacagagaagttctggcaactacctgaaggggttccgtaactcgcaaatgtaatcttcgagatcacatgccctcatcacactgtaagtg

SEQ ID NO: 61030 - DNA, 388 bp, Setaria italica
  Peptide Sequence Number=SeqID_127004
aaagcactgtcttgaacaggcctatgaggcaatggttcaccccagtcatccgtcccaatcctcagtccatattgtcggcttgttgtaggaatttggtttaaatccatcgcagtaaaaggcattgcatgtatcgagaatttgttcgggtgcatctgtttgcctacacatcacccaaggaacaccagtatcaagtgcaagtgccatctgagctgcccatagcatgtatctcttccctgcttgaccatagcgtccttgaatgttaccgtattcattttcaatctgtcaaacattctccagaggaaaacaattatacacatgttatatgtatgtaattcaactgacacgttaagcatgaatatgatccttttatagaactgagcctatctca

SEQ ID NO: 61031 - DNA, 325 bp, Setaria italica
  Peptide Sequence Number=SeqID_127005
gcaaccacagttctcagggccaaactacagtatcctgatcacatatcatctcgagattctttggtagccaatgcggggagcactcggcctcaactgccaaatcctttacgacttttcggcatggatcgccaaatacatcgttggtgacactgatggaaaatttgttctggccgacacatgcctctgtaaccaaatccagagtagtcgatgcatggcaattcccgacagagaagttctggcaactacctgaaggggttccgtaaactcgcaaaatagtaaatacttacgaagaatacaacaatagaccaactaacttacaacaaca

SEQ ID NO: 61032 - DNA, 375 bp, Setaria italica
  misc_feature (305)..(305): n is a, c, g, or t
  Peptide Sequence Number=SeqID_127006
gattgatggccgattatcatctattctggaaatattaaggttagggatatcacttgtgatagcaggcttagcaccgtggaggtgaagtacgcggttgttaaagtgcagtggaggctaccgttgaaattcaggtcatccatggaacattttatggctaaatcacagctcacaccaccagcatccttcacagaattgtcctttatgatagcaaagctggtggtgtggcgacctctgatggtagcggagctatccaactgtggcgccgtgtcatagctgtctgcttgaacgagaagttgatgttaacngttgattctcaagctagcaatgacatacagattattcagtttggtccatcccttaatggtgcgagccaac

SEQ ID NO: 61033 - DNA, 348 bp, Setaria italica
  Peptide Sequence Number=SeqID_127007
attttcatatgctcaaactcgcaatcttcttactcctattacaatacatgctgtttggaactccggagtaatattgctgctaacctttcttcagctgcaaggttatgatataaaggagctgttgcaggcatcttgaagatttcacttgacaactgtgaatgatagtaacatcaagatgcaaaccagggggtgggacctttcaatactgtattataatcaacacggtagctggtgtcttacctgctaacgttattcagaggcaacgattagaagaagagacgtgttgcggatttggaagaatcagaacggaaaatactgctatgtgtcattctttacagtacccatctt

SEQ ID NO: 61034 - DNA, 429 bp, Setaria italica
  Peptide Sequence Number=SeqID_127008
agggactaaaactaagtaggaataatggcaaagtaacgaaattctagtgcaggcatagaatatttctattgttttaagcatagcctggattagaattacttcctacggatccaatccaacatccataaacggtaattgtatgtttaggccaatgcaacagtccaatagaatccattgctatatattatttcaatttgtgttatttctggttacatttataatttgtctaattcagaaatcacttttgtttacagttattggaatttatcaattctggtattgattatacatctagtaaccaagaacgtaagatattgattgggatattatgctttgttttgcatcattcagtaaacaaagttcttgttgagcctgcaaaggccataatcttgaacagttctttggtttctttaaccgatgttatagtac

SEQ ID NO: 61035 - DNA, 250 bp, Setaria italica
  Peptide Sequence Number=SeqID_127009
cccctgtgtgccttgcctatcctctgttgcgtgtctcagcatcgacattttctgaggaagatgaatggcttcctcttactgtgaagttattggaatttatcaattctggtattgattatacatctagtaaccaagaaccatgtgcaaaaggcccatctttatttcaacacgatcaggagacagactttggagaatttatgatccttgtacttctaatggtgtttttctctctaagaagtttgcatacaat

SEQ ID NO: 61036 - DNA, 386 bp, Setaria italica
  Peptide Sequence Number=SeqID_127010
ctccctataataacaataataacctcaaataacaaaggacttttccaaccttgaaggatagtagatctttgactcatccctacacaagtgcagtttcattaatggaacaatctataattgctcaccatcttacattataattgatagcaacaaaatgtaacatgtagagatattatcactgttgggttaccatttattagatatctcagcatcatttgatctagcaggctctgcatcatcatcatcatccaagagaaccacatcctttataaatgaagccgaggccttattttttgcaaggttccaacttcaagaaatttgctgcacgtgccctttgaatcaacagtgttacttttctgtgaatttctggtgcagcttccttaaag

SEQ ID NO: 61037 - DNA, 413 bp, Setaria italica
  misc_feature (342)..(413): n is a, c, g, or t
  Peptide Sequence Number=SeqID_127011
ttggggttctttcgtttcttaccgtttcgtaccttgtcccgttgtccggtaggtaggtagtattgttaccggttggtacgtcttggtagtattcgttggttgtaggccgaggcgtgacgccggacgctcgtctgatcgatcgccgcggctgagccattctcagcgggcagagacgatcatcgccattggtgacgtgcgcgagagttgtataattagtgtggggagacgggagagtggagtatgctttgctatgctagtatcagtatgctgtgttcttgtaccctgtgacatgaatgttgtattattatactactgggtaataaaggatggtgctcctttacnnnnnnnnnnnnnnnnnnnnnnnnnnnnnnnnnnnnnnnnnnnnnnnnnnnnnnnnnnnnnnnnnnnnnnnn

SEQ ID NO: 61038 - DNA, 167 bp, Setaria italica
  Peptide Sequence Number=SeqID_127012
tttttgtttttcggtcgtcgttacttgtcttcgtcggtaggtccggtcgtaggttgtcgttgctggacgcggcggaggtggagttcggctacgacgccgacacggggctcgtcaccgtcgacctgcccgtgccggaggaggagatgtaccggtggacgctggagatc

SEQ ID NO: 61039 - DNA, 265 bp, Setaria italica
  Peptide Sequence Number=SeqID_127013
tgtccttccgggtagtccggttgtccggtcgtcttgtcggcgggatcgattgattgggaattcctgctgaaggcggtcactcggcgagggttccttatcaatctggggttcgccagtgtattgctttctggagcagcttttctggatgggagtattctagaaatttggaatatgaataactctgggaaatcatttgaagatgtgatcgagtcgattgagaaggctaaaaaggatgcagaaaggagataggtagtagaagttcggg

SEQ ID NO: 61040 - DNA, 307 bp, Setaria italica
  Peptide Sequence Number=SeqID_127014
tttttactttttcctttttatttttacccttttagtttcttagttttagttaaagtactttctgttgccaaggtgtattgaggcgctgctcattcaaatgcaccaaacttttctggtcagtgaaaatgacaaactcagcatgcagcaaataagctctccactgttcaatagcaattaatatagccaaatattctttttcataggtagaaaggccttgagtcttgacccccaatggtttactaataaagggccaaagggtgaccatcttgcaagagaacagcacccacaccatttttacaagcatctg

SEQ ID NO: 61041 - DNA, 222 bp, Setaria italica
  Peptide Sequence Number=SeqID_127015
gcccttctagacaaggcgtcagcaactctattgtcagagcccggcttatacaccactttgtactccatacccagcagtttagtaaagactttctgttgccaaggtgtattgaggcgctgctcattcaaatgcaccaaacttttctggtcagtgaaaatgacaaactcagcatgcagcaaataagctctccactgttcaatagcaattaatatagccaaatta

SEQ ID NO: 61042 - DNA, 471 bp, Setaria italica
  Peptide Sequence Number=SeqID_127016
cagctcccgtgaaacaaaaaggcttagataaagcaaaacagtaatcttcaatgcatcggcagaacccctgttcctcccgttcaaagggaacataaagcaaactataagaacacctgacataccctaggtctatcatctatgaaaagatttagcctatgtaatgtaacaaccatcgccctgttcttaggtttctgtgaagggttattaacggactaacgatctcgaaggcggcatgcaatgaaaaattgaaaacagctatacataccaatcaacatcgtataacaagtaaacaaagataaactcgtaaacagaccagtaatcagggaccaaataaaagccaacctcacacgcccatgtaagaaaaccaccgtaatctagcagcaatcaagcgatcgaccggtaaagagattagctcacctgaggacgacgacaggagcagcaagctgcaggcggcgatccacagggcactca

SEQ ID NO: 61043 - DNA, 229 bp, Setaria italica
  Peptide Sequence Number=SeqID_127017
gttcgggtggaagaggcgcacgtcggtgatgttcctggacctgtacagcgcgatcaccttgtccggggacgggaggttgttggcgatcatgccatagttcacgccgatgccttcaactcctgaggacgacgacaggagcagcaagctgcaggcggcgatccacagggcactcatcatctcgactagacggctacgcccttgagggttgaggctcgcagacgagctcgtg

SEQ ID NO: 61044 - DNA, 491 bp, Setaria italica
  misc_feature (52)..(52): n is a, c, g, or t
  Peptide Sequence Number=SeqID_127018
gatatgcccagcaacacagcaagataaacggacattctttatagtagtagcncggaatttccactgcttggggttcagaagggattctacatgagaagggtcattccaatcagccatcagtatatttcggcgaatagtaaccaccagttcattgtagctttttgcatgcccctcattgaagtctaggaaggttatcttctttatgcaaggaggaatatttttcagatcagcttttcttgcagtaatcatagtcctctgaagcagctgcacaagacgaactcgtccctcttccatttgcgcctcaaaaggcctatggattccagagtcccacgactggtagttttgaccgtaaacttcatcatgaagaaacttaagcatggggtgaagatgagcaacctgaactaagttaggtagtaatttaggtagtaaggtagtaaccaagttaaataataccaacctaatttagaatagacaaaccaaaagacgaacaa

SEQ ID NO: 61045 - DNA, 339 bp, Setaria italica
  Peptide Sequence Number=SeqID_127019
ccaccattcccctattctgtatcgttgatatgcttgtactgttgtgcctatattttcatgaaccatttggtatttccagaagactgctattgtgtgatgtatgaagttgtgacgcttaaaaaattggcttgcttgcttatgtattttgtgtgctgtcggttcaatggtctggacacgcccaaggctacaatggttctaccctacattgacgagtggtaaactatggaaaaagagcgtcgaatcacacctacactacagcacacaaaatacacaagctaagaccacctcacctcagcaccccgcacccccctcctcctaactgctaggaaatgctgagct

SEQ ID NO: 61046 - DNA, 108 bp, Setaria italica
  Peptide Sequence Number=SeqID_127020
aggcgcacagaaccaccattcccctattctgtatcgttgatatgcttgtactgttgtgcctacaacttcatacatcacacaatagcagtcttctggaaataccaaatg

SEQ ID NO: 61047 - DNA, 211 bp, Setaria italica
  Peptide Sequence Number=SeqID_127021
acgattcatgccccgcctctgggctcaaggtaattctagtgtattttcctttcttttgtatgaaaagtgtccttaaacgtttacctttgaaattgatgtagaacagcaaacttgaggatctgcgctgatggaggagctaatcgtatttttgatgagatgtttcatatgaccaatgatgaagatgaagaaaagcaccagaaataggtatgtt

SEQ ID NO: 61048 - DNA, 272 bp, Setaria italica
  Peptide Sequence Number=SeqID_127022
actgaagcagtttttttcatggatattagttgatatttttccgattcaggctccttcgttgttttgttgtttccactatcttctgcagctacttctggcttagcctctttgtcttttgtgttatcttcgttctgttctgcaattggtgcttccattcaaccaactagctggttgaatggaagaagttgttgttgctgcgagaaggcattcgccaaagctagctggttgaatggaagaagctgttgttgctgcgagaagatagtggaaacaac

SEQ ID NO: 61049 - DNA, 264 bp, Setaria italica
  Peptide Sequence Number=SeqID_127023
cttctttcttcagatttgagatatcttccatagaagtttttgacccttcttgcagcttagtctgagaatttccagcatcagttgaacaaaaaagtgaggatgctggaaaagaacaggagggaactggcatcaatcagcagcctgaagcaaagaaaaccggtaagaagaaaataattcgaagggttgttaaaagaaaagtttctgcttcagggtctcacgttgactgcctctgctacacctgctgaaacgagtaagcaagaagca

SEQ ID NO: 61050 - DNA, 217 bp, Setaria italica
  Peptide Sequence Number=SeqID_127024
acgtcaccctcttttaaaagatcagcatctatacttttacccttgttcacctcccctgaaacttgcttctgctctttcaactcaacagggctcttttcctttttcatagtgagctgttccctttctctttcacgttctcgtagtagtctttcacggtccctttccctttcacgctctctttctctttcacgatctcgcaagtctcgtaactcgcgtt

SEQ ID NO: 61051 - DNA, 340 bp, Setaria italica
  Peptide Sequence Number=SeqID_127025
taaagaaaataaacttaaacctaaacaaaataaaattaaacaaaggaaataacttaacctaacaataccaatactttagtaatcagcttcaggttcattgggagcagcttctgaagtgctcatcttttcctcaccctttttggctggttcatcatggttagccatcggatgatcggcgcccactttaacctgaccctcttttaactgttcatcatggacacttgctgaatgatctgggctcatcttttcatcaccctcttttgtcattttaacatccccgctggattatcagcactttcagttgcagtctcttgagttgtcttgggtcgcttctctgagg

SEQ ID NO: 61052 - DNA, 212 bp, Setaria italica
  Peptide Sequence Number=SeqID_127026
aagtgctcatcttttcctcaccctttttggctggttcatcatggttagccatcggatgatcggcgcccactttaacctgaccctcttttaactgttcatcatggacacttgctgaatgatctgggctcatcttttcatcaccctcttttgtcattttaacatcatccatgtcctcatcatcttcatatatttctatttcttcaggatcttcc

SEQ ID NO: 61053 - DNA, 403 bp, Setaria italica
  Peptide Sequence Number=SeqID_127027
aataagatggtggtgatccgtcagttgactgttcttgcttgattcgaactgccggatcaccaccatctattgctgcattccaagggcccccaattgcaaaagagaacgatccttcttgaatacagcaaattttaagatattgttcaagttcacaactcgttcctcgttacttctcaatgagttatgtcagcgtaggcacctttgctcatgccactcatcaatagtacctttgcattccaaatggtggctggggtattggagcttgatgatttctcagaagatattgctccttcatcagcactatcatcagcatcatggatatcatgctccagactcactggtgtgtgcagagaaagatttaagtttctttagcccagttcaagacaatctttgaaaattcggg

SEQ ID NO: 61054 - DNA, 382 bp, Setaria italica
  Peptide Sequence Number=SeqID_127028
cgggagtaattgctagtctgggatatcgttttgtcaaggacagataatccctttcatcatccacgaagcgaaatggaagaaccttgcaaatatattctcgctttatttctttaacaggtgaacgatgcctatgcacagcttcacgtcgaggggaaattcgccgcacaggcttctcagatctaacagaagaagaacgccgtcgatcaccggggactctaggtggagtgtgctcccgccttggatcagctgcgtgcttcctatcccgctctctctccttctcccgccgctcgcgaaggcgttctctttcacgctctctttcacgttcgcgttccctttctctttcacgttctcgttagttagttcttttactaacggttaccta

SEQ ID NO: 61055 - DNA, 250 bp, Setaria italica
  Peptide Sequence Number=SeqID_127029
ccaacgaaagggatgttgaacggagtttagattcgttattactcctttttgcctgaagaatgaatcctggatatttcggggggtcatcagacttcttcttttctttcatttcattgagtggcttttgctttggatccatcttgaggaagatcctgaagaaatagaaatatatgaagatgatgaggacatggatgatgctcatgctgaagcaccaattgcagaacagaacgaagataacacaaaagacaaa

SEQ ID NO: 61056 - DNA, 406 bp, Setaria italica
  misc_feature (290)..(406): n is a, c, g, or t
  Peptide Sequence Number=SeqID_127030
tatttcgtttcccggtttaaatttctttggttgtagtcctttttgtcgtttcgtcttgtcttgtatttaagtcgtaggtttcgttattcgttgtttcttacagtttgtactcgtgtcccgccggtgtgtgtagtacttgtgtgtgcaaagcgattgcacgagatagttgggtgtacagcatttcctttttttaaggattcggagtcgaacgaacgatgaatgtgtaccctccagccctggttagacaatgcaaaggcggttgactgaaaatagcggtgtttcttttactnnnnnnnnnnnnnnnnnnnnnnnnnnnnnnnnnnnnnnnnnnnnnnnnnnnnnnnnnnnnnnnnnnnnnnnnnnnnnnnnnnnnnnnnnnnnnnnnnnnnnnnnnnnnnnnnnnnnn

SEQ ID NO: 61057 - DNA, 451 bp, Setaria italica
  Peptide Sequence Number=SeqID_127031
ggctgttttaccatcaaacatcaaaactgggcctgccaattgcttaactaatgtactccagagaagtgcccctgtttgtagtcaagcaacacatggccagctaagaagggatttaactgagcatatctggcagcagtttgggccatttggcgacaagtaaaaaagatatagtattagtgtacgaagtcatgtcgcttggtgggtcactggctacaattagctgtataaacggcttttttgggggacaaaaggctaattggcaggatacaatgagacgtggcatctgactgaactatcaattctgccaatggaaattgggtggaaaaaacaatgtcttattttttctgtaagagatagcgttattcttcaaaggaatcttcagtctgcacaaggaactctgtacccttgctgtagtctattctataaaagtatttccaactaaagcatcatg

SEQ ID NO: 61058 - DNA, 209 bp, Setaria italica
  Peptide Sequence Number=SeqID_127032
acacaacatgtaggaagctggacaacattcaaggggacattgagttcaagaatgtttacttttcatacccagcgaggcctaaatagcagatctccagaggcttctgctctcttcccatacatgcagccttcttctcaggagtcgtaccccgctggccggccagcccctcgagttgcttcttaagatcagagatctccaaaccccacctg

SEQ ID NO: 61059 - DNA, 377 bp, Setaria italica
  Peptide Sequence Number=SeqID_127033
gcacataactttctaatattgcaaatagtagaaaaagtaatgcactatagccttccttcttccgaatcagttatacattgcttctccatcacccgtgaacccatgtcttaatgaaatgtaggtgttagcagttaacctcagtcagaactgccttgcacattcattctaactctttaccatactgactgaaacattgttaatatggatgaaaaagttgatactaacaggacagctgaacagtcaaccccagtcagaactgccctgtgcgttcagtctaagtctttaccctactgagtactgattgcaacattgtttatattgatggaaaagtctatatgtagcagttcagtcactgcaaaggaatttgtcaagtgaac

SEQ ID NO: 61060 - DNA, 184 bp, Setaria italica
  Peptide Sequence Number=SeqID_127034
aacggacgagccgaatcgagttggcaccactacctgatcggaatcggatcaggcacagccggggccgtggcgaggagaggggttacctgcgcctagttcgcggggagggctggtgtgtgtcagcgggtggcgtcggcgccccatctcctccgcctcttccgacctgcctgcctcccatcgcgcc

SEQ ID NO: 61061 - DNA, 295 bp, Setaria italica
  Peptide Sequence Number=SeqID_127035
ggtactggtggcaacaacagtaataatagtagaagttactaaatcatccagcttcctgaaaaacagaatcagtgaggtcaatataactgcatgcagtctgtgttaagtggtgtacaacattaaccttcttttagattcagtctcatcctcatcaccctcacattctatagaaatggtgcagaaaagcttgacctgccgtgccttgcaggcatgtccatgtctgtagattctgcagcaagctcaccagcttccttgggctgatggccaccatcttgttctccagcccaggctggcc

SEQ ID NO: 61062 - DNA, 363 bp, Setaria italica
  Peptide Sequence Number=SeqID_127036
ttatggattatagcatgtgtgctgatacgagtcgaggggctgctatccgagacttgattgcaagagccttaaaaggtccacttgcacctgcccaacaggaggttcactgctacattctaatatttcttttagataacaatgggtgttctagtaaattgataagcactatatctagttcctatgatgagggtttctcttctctttgttccttataaaatctgtaatttcattagcctcagtgatggatagatttattgcacctagacttcatcaccctttttttctcatacgcattcagtggtgcataatatatttccaatggtacatgcctaatttgttcgcagcttattgcagcaagtcata

SEQ ID NO: 61063 - DNA, 198 bp, Setaria italica
  Peptide Sequence Number=SeqID_127037
agttgtgcaaattcatcagagtatctacgcttatctacaccctccttacctagatttatcttgtggtgcttggagttgatttgcctactcttctacattctctattgatttgtaatcttataaggtctgcgatatcattacctggaagcaaacagaaatctgcttctgatgatagagattctgctcttgctggtttac

SEQ ID NO: 61064 - DNA, 181 bp, Setaria italica
  Peptide Sequence Number=SeqID_127038
ggcaggtgcaagtggaccttttaaggctcttgcaatcaagtctcggataagggaagcagctggtttattccgactactcaaatctttggagtgaaaggaattaccggttgtatcgacatcgaatgtacttttcttgttctggatagttctatggccactctgggtgttcaagatcacttgt

SEQ ID NO: 61065 - DNA, 216 bp, Setaria italica
  Peptide Sequence Number=SeqID_127039
tgacattgcaggttactttgaaggtcttgtgcatatggacatgagcctgcattctatggaagttgtgaacaggcttaccactgctgttgaacttccaacagagtttgtccacgagtacatcacaaattgtatccaatcatgtcaaagcattaaggatgagactctgcaggaaaacacatactagtctcaccagtctgttttgcatgtacttatcct

SEQ ID NO: 61066 - DNA, 238 bp, Setaria italica
  Peptide Sequence Number=SeqID_127040
gtgatacagaatcctgtgaacctgcttgctggttcttctcggttccaggaactgcattttctgattcagattcagaagacctagacctatcaaaggaggacctcgtgaagctacttcttgagaaagatgaatcactgaagtcgaaagatcaagaggttaaagacatgaaggataaggtgctacgcagctatgctgagatggagaatgtccttgccagaacaaagcgtgaatcggagaa

SEQ ID NO: 61067 - DNA, 254 bp, Setaria italica
  Peptide Sequence Number=SeqID_127041
ttgccaacttagtagggtccacttctgaaaaactcacagaccaagctcttttccggtgctctgtaaactgtgtgaatccttgaccagaggaacacaaggatcccttggtgtactatttcgggacatggtaaagctgtcagttatgtaaggttcttggatccagaaacacttatctctgcatcaacggacaacacattgaagatatgggatcttaaccggactaattgcagtggattatctactgattcttgcag

SEQ ID NO: 61068 - DNA, 288 bp, Setaria italica
  misc_feature (72)..(72): n is a, c, g, or t
  Peptide Sequence Number=SeqID_127042
gcggtggcggcactggctggatctggagctggaggctggttgggacgactaagcgcgggaaactttggggcnccttttgccttcctctcccctgaatctgcgagcacctcgatggggtcgcagttgaagggctggagccgggagcccaatcctcggttcgtcggggcaccgcccccaccgacgccctgcttctccagacgcgacccgctcggatccgctctgagcttctgaccgacgcggcggctcgcctccggcccgtcgaggacaaattcggtgggggcggtgccc

SEQ ID NO: 61069 - DNA, 252 bp, Setaria italica
  Peptide Sequence Number=SeqID_127043
aggcgccgagtgggtgcggtggcggcactggctggatctggagctggaggctgggttggggacgactaagcgcgggaaactttggggctccttttgccttcctctccctgaatctgcgagcacctcgatggggtcgcagttgaagggctggagccgggagcccaatcctcggttcgtcggggcaccgcccccacgaatttgtcctcgacgggccggaggcgagccgccgcgtcggtcagaagctcagagcgg

SEQ ID NO: 61070 - DNA, 190 bp, Setaria italica
  Peptide Sequence Number=SeqID_127044
ataggtcaacatatgccccgaggacgtcagattaatgattctcccctcaacgccactgtccctgcaggcactcttcatgttctccagtaagaggtttgttagaagaaaatgccctgtcatccaaaccaaacgctacaatgtgatttgttgcaaaatgcaattccagaccgtcacgggaacgtgtgcagtt

SEQ ID NO: 61071 - DNA, 276 bp, Setaria italica
  Peptide Sequence Number=SeqID_127045
tgcagtcttccgcgggtcactactatctgcctcccgatccagccgaggtctgcgtgttccgggtttccggccccaagttcctcaagctgaacaaggggacctggcatgctgggccgctgttcaaggcggatgccgtggatttctataatctggagctgggcaacaccaacgtgagtgctaaattactgaactagtagttcattgttgcgttgctgatcctagaacaaaggaaaaaagggttagacgtaattaactaacttacctaagttaacaata

SEQ ID NO: 61072 - DNA, 355 bp, Setaria italica
  misc_feature (311)..(311): n is a, c, g, or t
  Peptide Sequence Number=SeqID_127046
taacgtaaattttaagtaaaactaaaaccctaaaattttaactaacctaaattacggtaaccctaattacttcttcttctttgagagaatttttctttggctacatgaatcagcaagttagaaactgttcctctgatcccaaacccaactacttgtcaagcttgcctaagcttaagagagagctcgacttcgacccgatcgaaggctcacacgaaatggtgcgtggggtactcgtgctcggagccattgtagtcgtagtagagcctctccccccttggagatgtccctgtttgccacgagcagcacccggnactcgccggcgacgtcgtagcgcacgcacttgaggttctgcttc

SEQ ID NO: 61073 - DNA, 180 bp, Setaria italica
  Peptide Sequence Number=SeqID_127047
cccgatttgaacaacccaatttcaccaatcggacccatctctctctttgagagaatttttctttggctacatgaatcagcaagttagaaactgttcctctgatcccaaacccaactacttgtcaagcttgcctaagcttaagagagagctcgacttcgacccgatcgaaggctcacacga

SEQ ID NO: 61074 - DNA, 369 bp, Setaria italica
  Peptide Sequence Number=SeqID_127048
cctgagtgttcaccttcaactaatcaatgggcattgccaactcattagtcaagcatgtgcggtgccatgtgcatagcaacgttggatgtctgctagttggagtttggctcttcgttattatttcctcccttggtccgttattgcagggcgtgtatccatggattgtaagagaaactttcgcgccgtggtcggccaaggacaccgactcctggaagctatcttggtcaccggtatgagcgtagagaccgtgggagaggataccgccgaggctatggtggcggtcgtgatgaggattaccgcaatggctatgggtaccgcaggtctccacctcccatgtattcctacagggagagtcgggacttacccttt

SEQ ID NO: 61075 - DNA, 247 bp, Setaria italica
  Peptide Sequence Number=SeqID_127049
acgggtggttggttgccatgttgttcttgaaccccatacacgtgtttcccgtggattcgcctttgtcaccatggacactgttgaagaagctgagcgttgcatcaagtatcttaacaattctgtaatggaaggtcgaaacattacagttgaaaagaagatactgtgcaagctatgtgcagcaatcaagattctgagttcatcaatttcaactttagcaaatacagctccatcagtggacagcccaaag

SEQ ID NO: 61076 - DNA, 248 bp, Setaria italica
  Peptide Sequence Number=SeqID_127050
ctgtggctgccgcaaaggcttctcttgagcttcatcacattcaaggaaacagaggaatttggttctgcggtgcataccaaggttatggtttccatgaagatggactcaaggctgggaaatctgcagctcaagatttgctcggtaataagaagggccttctggagaacccaaaacagatgatcccatcgtggactgaggctggagcacgtcttctggtagcaagatttcttggccaataacaataatac

SEQ ID NO: 61077 - DNA, 361 bp, Setaria italica
  Peptide Sequence Number=SeqID_127051
tgtactaactttgtaagtaaggtagtattattcttccttcttgtcttggtccttttgtctattccaggctccaagaacatctcgcgcaagtctaattaaaggatcacgttctcaagcaaatgccttggctcagcaaactctgattgcccattggcagagcattgtgaagatattgacaaattatttgaatattttgaaagccaattatgtaccttcattcttaatcagcaaagtgttcactcaaatattttcatttattaacgttcagttgtttaatagtttgcttcttcgacgggagtgctgttcatttagcaatggagaatatgtgaaagctgggttggcagaattagaacagtggtgc

SEQ ID NO: 61078 - DNA, 356 bp, Setaria italica
  Peptide Sequence Number=SeqID_127052
tcaccaacgatttgtgccctgtccttagcatacaacagctatatcgaatcagtacaatgtattgggatgataagtacggcactcacaccgtttcctcagatgtcatctcaagtatgagagtaatgatgaccgaagattctaataatgctgtgagcagttctttcttgttggacgatgattccagcattccatttttccgtggatgacatctcaaaatcgatgacagaaatcgaggtaacagatgttgatatgccacctttgatccgggagaactcagggtttacattcctacaccaaagaaaggaacttaaaccttagggttaggtttactttacctaagtacttagttacttaaa

SEQ ID NO: 61079 - DNA, 306 bp, Setaria italica
  Peptide Sequence Number=SeqID_127053
gccctcgtccttacgtcatacaacagctatatcgaatcagtacaatgtattgggatgataagtacggcactcacaccgtttcctcagatgtcatctcaagtatgagagtaatgatgaccgaagattctaataatgctgtgagcagttctttcttgttggacgatgattccagaaatcgaggtaacagatgttgatatgccacctttgatccgggagaactcagggtttacattcctacaccaaagaaaggactaacctggtggttcttccagctgcaagcggcaagcctcttgctttgctctccac

SEQ ID NO: 61080 - DNA, 258 bp, Setaria italica
  Peptide Sequence Number=SeqID_127054
tttgtgccctgtccttagcatacaacagctatatcgaatcagtacaatgtattgggatgataagtacggcactcacaccgtttcctcagatgtcatctcaagtatgagagtaatgatgaccgaagattctaataatgctgtgagcagttctttcttgttggacgatgattccagcattccattttccgtggatgacaatactacaaaaatacgaatagaacaagaaaatacgaaggtaaacaagtaattagtttagta

SEQ ID NO: 61081 - DNA, 242 bp, Setaria italica
  Peptide Sequence Number=SeqID_127055
ttgccagtacatatggcaaaaagtttattctgcttttgttgatatttgtggtattgctatacacctaagttcaaattgtgtcttaacaaagtcccaggacaataatgacaagttggcatattggctgtcaaattcatctacactactgctgctgctgcaacgaacactgaaaacaactggagcagctggactcactcctcaaaggcgcagatcatctgctgctttcgttttggggaggggtg

SEQ ID NO: 61082 - DNA, 423 bp, Setaria italica
  Peptide Sequence Number=SeqID_127056
attgaagctcagagctacgtgccttgtacacttcagcaacttggtaatactgcagatggtgtaaatattggaaatgacagtttcttaagtgagaaatgtttgtcaaactggcagatcgtgcaactgattctattgctttatgttgaattctactggtaattaatttcttatcagctaaagtagtggtttacactttgcagtaattggaactgcttttgctctgaacatgctgttcagaatcccagtatggtgtggtgttctaataactggactcagcactctaatgctcttattactacaacaatacggggtccgtaagctggaatttctgattgcatttctggtgttcttaatagcaacttgtttcttagttgaacttgggtattcgaaaccagatgcttcggaagttgtgaggggcctttt

SEQ ID NO: 61083 - DNA, 416 bp, Setaria italica
  Peptide Sequence Number=SeqID_127057
ctcatcaacatatctatcatatctgttagtggtgccgtctgtggttcaggtaatttgaaccctgaagatcaggcgaactgcagtgatctggatctaaacaaggcttcatttttgttaagaatgttcttggaacctggagctcaaagttgtttgcagttgccttgttggcgtctggtcagagttctacaattacaggaacatatgctggacaatacgtcatgcaggtttgtggaacttttccatacttcagtcctaattcacaagttgaatagaagtcttttctgtcgattacaggaaataaattagtacaccgccactcccttctgtcaattagggttacgaaacttttaaaactcgaattgaagtttccttaaaccttggaaaaatttgcatcatgaaagggagaaaaacattgg

SEQ ID NO: 61084 - DNA, 181 bp, Setaria italica
  Peptide Sequence Number=SeqID_127058
cagttgccttgttggcgtctggtcagagttctacaattacaggaacatatgctggacaatacgtcatgcaggtttgtggaacttttccatacttcagtcctaattcaacaaagttagaaataagaaagtacttttactagtacgaattaacaaggaaaataaattaagtaacaaccgacca

SEQ ID NO: 61085 - DNA, 219 bp, Setaria italica
  Peptide Sequence Number=SeqID_127059
agatcaaacaagatgatatggcacacacgaaccgtactccgtaagccatgttcataacttatgccaaatgttcagagaagcctgcgcagtggataactggagaagcaacgcagtggttgaggagatgtttggaaggatggctctgcagataaccgactaccctggttcaggcccaaatgatcgtcacactcccaaagcaccgggtccatgattttgaca

SEQ ID NO: 61086 - DNA, 281 bp, Setaria italica
  Peptide Sequence Number=SeqID_127060
atgtagctcaccctagctactagctctagtgcctgtcaatccgggacatgccgatcaaggatgctgccgccggagacccgtaccgccacgaagagcgccgtgccgatgtccacggccatgtcaacgacctcttgcagtctgcagatgcttcttctcatcatcacccgcagcaggacatggagcgcgcagtccatggacgccatcgtctagcctgcctcgctctcttgctgctgccgctgctttttgttatcgctagacctgctaacttgtcttgtctaact

SEQ ID NO: 61087 - DNA, 160 bp, Setaria italica
  Peptide Sequence Number=SeqID_127061
gcggggagtagtagtatgtagttgtagtgctggccgagatcgacggcacgcgcgacgacgacgacggcagccgccggcgggagaccaggccggagacccgtaccgccacgaagagcgccgtgccgatgtccacggccatgtcaacgacctcttgcagtct

SEQ ID NO: 61088 - DNA, 400 bp, Setaria italica
  Peptide Sequence Number=SeqID_127062
tttcttagttagttctagtcgtccgccgccgccgcgacggcgacgaggaggagcgccgagaacctcggcgagctcctcatgggcgaccgcatcgagaactcgccctaccgcttcaagatgtacaccaacgagtccgacgtcttcctctgccgctctccctcgcggcctttgccagcgccaagtccaggaacaccggctacaacccggcactcatcaagaagcagaaagagttctacaaaaatgctaaattaattagcaagtacaaaaaggacaaagaagcaacaaaatcagtcgagcaatcctccagaatttccaattcatgagggtggtggtgatttcaatgtgccgaagctgcaacacaaagggaagaagcgcactgcacaaagcttgaaggaagagt

SEQ ID NO: 61089 - DNA, 341 bp, Setaria italica
  Peptide Sequence Number=SeqID_127063
tcttgtagttggtacctagttgttcttgtcgtacccttcttactatttgggttacttctacttctttctattggttgtatttgtcttatttattgtcttggtcaactggaacggttgggtttatttcttcattctgctttgtccactatcttttctcatcggtgaaagcagactgagtttattcctactgaggagtcaatcactcaattgagaggtgagcataatggacattgaaaagtttgtagtcacaaaaatcttagttcatgtcatcttttggtatacagagcctgaataactattgtaatgattactagggttcatcaatggattttatgaagagg

SEQ ID NO: 61090 - DNA, 301 bp, Setaria italica
  Peptide Sequence Number=SeqID_127064
aacaaacaaacaaataacgaaagtaaaccctaagtaccgacaacgaaaccaagaatacccccgtgagatccctcctcagaggtacccatcctggttgttggttcttggtgctggcacactgcccttcggcaccctattcattgagctcttcttcatcatgtcgagcatatggatggggcgtgtgtactatgttttcggattcctcttcatcgtcttgctgctcctggttattgtctgcgccgaggtttcactggttcttacttacatgcacctgtgcgttgaggattggaagtggtggtgg

SEQ ID NO: 61091 - DNA, 282 bp, Setaria italica
  Peptide Sequence Number=SeqID_127065
tagtactaagtaacttgtagttttatttccttacttgtaggtagttctaattcacttcaattgagaggtgagcataatggacattgaaaagtttgtagtcacaaaaatcttagttcatgtcatcttttggtatacagagcctgaataactattgtaatgattactagggttcatcaatggattttatgaagaggtgctagcagcatgcacgatgtaatagaatgaattgctttattcacatgttgtgttattttagttgaacttaaaaaaaaaaaaaaaaaa

SEQ ID NO: 61092 - DNA, 153 bp, Setaria italica
  Peptide Sequence Number=SeqID_127066
gcttcttgagcagggcgaaggcgtcgggggcgagcggggcggagcggcagaggaagacgtcggactcgttggtgtacatcttgaagcggtagggcgagctcctcatgggcgaccgcatcgagaactcgccctaccgcttcaagatgtcggact

SEQ ID NO: 61093 - DNA, 176 bp, Setaria italica
  Peptide Sequence Number=SeqID_127067
acaggcttgctctcctttattgctgtagagatggcagtgtcaatctgttcaggtgcttccagacggtcacgtgctaccaggctgtggtgaacaacttagaagatgcacatgaacagatggcagtgtcaatctgctgagacacgcaaaggggataggcaaggcacacaggggatagg

SEQ ID NO: 61094 - DNA, 179 bp, Setaria italica
  misc_feature (145)..(145): n is a, c, g, or t
  Peptide Sequence Number=SeqID_127068
aggatcctgcaccataccatcgggttgccggatttcacgcaggagctcaggtgcttccagacggtcacgtgctaccaggctgtggtgaacaacttagaagatgcacatgaacagattgacactgccatctcacagcaataaaggngagcaagcctgtttacatcagcatcagctgccaa

SEQ ID NO: 61095 - DNA, 453 bp, Setaria italica
  Peptide Sequence Number=SeqID_127069
acccttcgcattcctccctctcaggaccgcgcctgaaacccttgcgcccccgcctccgccgcctcggccaccgcctcccccgacccgaatccgccccgccggtgcgcgcttgtagttgaggagtgctgctgctgctgccgtgaacaccgatcgaccatggcgacccgtattcagtttgagaacaattgtgaagttggcgttttctccaagctaacaaatgcctactgtctggtagcgattggagggtcagagaacttctacagtgcatttgaggctgagcttgcagattccattcccgtggtcaagacctctataggtggcaccagaataatcggccgtctctgtgttggttagtttttgagcttggctttgctatctgagttattatttactcgacttcagcttacttttcctctttgatgacccaggaaacaagaatggacttctattgcc

SEQ ID NO: 61096 - DNA, 342 bp, Setaria italica
  Peptide Sequence Number=SeqID_127070
tggggaggctactgtgcgttctctaacaggggtggcttggttcatcctcacacatccattgaagaccttgatgagctctccactctcctgcaagtcccgctcgtcgctggaaccgtgaacagaggcagcgaggtcattgctgcaggcatgactgtgaacgactggactgccttctgtggctcagacacgacagccaccgagctctcggtcatcgagagtgtcttcaagctgagagaagggcagtccaccgcgaatcgtacgaatagaacaatagaaggaaagtactactagaatacgaacaagttaatagtagtaaactagaaggaccctagacaagaacga

SEQ ID NO: 61097 - DNA, 337 bp, Setaria italica
  Peptide Sequence Number=SeqID_127071
gattgtacctatttgttagggatgtataaccattccagcttggtaaccggcatggcctcattgtcaattgcaaagttgctataacgattctctcatttgttgtagtatccgttcatctcaaacccatctaagtaatagagaagtaggtggagataggaggaattttcctgtcaacttggttgtatatgttgtgatatttttgcctcttcatatcatgaattatttatgcttatatcctccctgtgctttgaaactgttctagagcttcagcatctgaggaactgcttgcctgatcaagtggtggtacagcgtattgatgagaggttatcagcccttg

SEQ ID NO: 61098 - DNA, 413 bp, Setaria italica
  Peptide Sequence Number=SeqID_127072
gactttatttcacaagcggtactactactgatgcacaagtgaccaagaacgttgtgcatgtacaagctctgcagggtctgaggctagagatctactatacatagccctacaattcaagccaagacgcgttgtgctcttccagattcatgttttacatgtggccggagattcagttcacaagcggcagcgagccggacggtgactcgtcggagcggccgctctgatttctggcatgttgctcttcaaggagcccggatccagctagttcacagccggtggtggatttagatctcagagttcatcgtctaagaggccgccgtgatgaaaggatgctgaagactagacccccaaggaaacggacggacggacaaaggaacccggaacgttagtacgttaacttaacctaacgttaa

SEQ ID NO: 61099 - DNA, 171 bp, Setaria italica
  Peptide Sequence Number=SeqID_127073
ttttttaaacatttaatttcctttcgaaaaagtaaactaagcatatgatcaaataaccgcatattatgatctccattagcacagaactgccagaaccaaaactgcaggcaaatcctgcagtgctagctaaagctctctgatcgaagccttgccagctagcctatcagtgct

SEQ ID NO: 61100 - DNA, 370 bp, Setaria italica
  Peptide Sequence Number=SeqID_127074
gaatcgctgagctgatataaatcgtctttactcgtaaaactggcgtacccaccacggtccaagacgaatcaatacctggtccatcatcacctgctaaataccaaggtcagagaaatacacaaacagggaagaaagcaaaggtacaaaacaagttccagtagacagctactctgcaattaaaatacgtggagcaaactgttctttgtatgtagattagcttgctaacaaccacagatgtacatccccaagaatcagattagaacaagcaactcaaggaagttcaagttaccaccaagttatcagaggattgtgcctagctcaccagtgtacaccacgttgtacaactacagttacattagttctccctact

SEQ ID NO: 61101 - DNA, 328 bp, Setaria italica
  Peptide Sequence Number=SeqID_127075
ttgttattgtctaccgtctaccggtctaacgtagtcttctttgcagcggatgcagtaaccttgtatagaagtgcctcggtgacacacttggttgcttgctcatggtctatatcagtgcatgttaggaccttccgcagcttcctacaggtcatgtggctgaatcgcacaagagggagcaaacgagagctcaagatctcacgcctctcctctgattttgggtattgcgcacgagcccatctgagcaagaagtcgtagatggtatcttcagatgccactgaaggtcattacttgacaagatggcttcgatcccagcaagagggatgttcat

SEQ ID NO: 61102 - DNA, 210 bp, Setaria italica
  Peptide Sequence Number=SeqID_127076
gtcagcaagtacaagggcaactacaccttcaccggtgggaaggcggtcgggtacaggaatctcttcgctatcccaccggtgaaggtgtagttgcccttgtacttgctgacgaactcacccgagggtctcgtcctcgcggcaaactcgtagtctactgtcacgctcatcgagcccttctcttgcatccctaggaagaggccgaagcagtag

SEQ ID NO: 61103 - DNA, 382 bp, Setaria italica
  Peptide Sequence Number=SeqID_127077
gttgtattcagcccagggttggtatggggggagctcttcttcaccaccatattgctcctctaaagcccgcttcgtgtcttcttttgttacccgttcatcatcaaacttgtaccattggtcagacaacgtcgggcgaatgaaggcatagtagtgtcctccatgaactccaccactatgaactagtacactgcatcgaagagaggctgtgaagagtatataggttacgcacacttctatccgcttctggagaaagatattttccatcatctctatcaagatccaattgaagtgggaactcatagcggtcgtttatcttgaccattgtatcccgcacaaaatcgtattcgaaccgttttaactgaagttgcaagactggagggaa

SEQ ID NO: 61104 - DNA, 211 bp, Setaria italica
  Peptide Sequence Number=SeqID_127078
tttctcttcctcaggaacctcttcaatacgaaggggtccagattggtcactaactgaatctatcttatctcctggttgataaaaatgctgggcctaatgaccgtttggttcatgtctatcacttcttcaaagatattcatcatattcaatattttggagaacctttcttctttttaattcgtgatggtgaggctttgtcggatatcaaagt

SEQ ID NO: 61105 - DNA, 252 bp, Setaria italica
  Peptide Sequence Number=SeqID_127079
gtcacacatctgctaaatcaaacgaagcttgtgtaatctgaagaggaatatagttaacactcgaaaaaggagttcaaacctgattgtgatgctgtagcatgtccgaaagataatcaagacctctgtatttgatgtagtaaggtttgggttggtgagaaagtggatggtgttgagtaagccgaattttagaaggttcatccagaccaagttgatgagcaaccttctcaaacaacatcatcatatgtggaacgt

SEQ ID NO: 61106 - DNA, 375 bp, Setaria italica
  misc_feature (152)..(152): n is a, c, g, or t
  Peptide Sequence Number=SeqID_127080
tccttaacaattgaagcagtgctctctgaggataactgtccttcttgaagatcagataagctaactcctgataggtccatgacagccacaggcctggcttcagctactgatgctccgtcctctccaagaggcacattgattttctcgaaggngtactgcaaccgttaaacttgagttcaggtgttccattgacatctttagatcgaccaaccggtccatgtattactttcaagctcaaaccatctaatctccatgaacctgaccttcaagggtaaaaaattaaaaattaataaacaaaggagggaaaacactcatcaggtgatcatattaccattatattgcgacaactagtatatttgcaaagaacatgaaaat

SEQ ID NO: 61107 - DNA, 325 bp, Setaria italica
  Peptide Sequence Number=SeqID_127081
gttacacatggccttacgccttctgattgatgttaactgttgtgcattaatggagtaatgtcttatgccttcgataattgatgcaaattgctgtccacaaggctgcccatgggaaaatggtggatactgtggagaaaagcttgttgacatgcagaaaggcggctattgtcaaaatcaagtattaggttcattacctttcgaatagcataataacaaaagtatttccaaattcaacacttagtgtagccactgtgtaaatagcatggaggatttcattttcaattcatgctggatatggtcaactgctctctcttctttctgcaag

SEQ ID NO: 61108 - DNA, 252 bp, Setaria italica
  Peptide Sequence Number=SeqID_127082
cttactccaagctgcagaagagaagaaaaacgaaaaaggaagcgatataagctgccataaattcctcacatcaaagatatgagaactgaggcacacaatgcactagctagtacagtacatagtacataccacaccatgacacccgacgacgcagacaacgtgacaaactccttcaagtccacgaacgccgacgtcgagaacccgctccacgtctccgggcacccgccgccgagagcgtacgcgaccagcagc

SEQ ID NO: 61109 - DNA, 253 bp, Setaria italica
  Peptide Sequence Number=SeqID_127083
cgacgtattcacttcactagttcaacagaatcatatacaacttggcaggaatcgacatgcgtacagaacaaacccaacacaaagcttgcttatcccttggagaagttccattctgatgttgctggtagaagctttcacaatggaaggtttatacagaggatgcgtcagaaagctgcatctttgcccaatgtccaattagagcaaggaactgttacatcccttcttgaagaaaatggtacagttaagggtgtta

SEQ ID NO: 61110 - DNA, 254 bp, Setaria italica
  Peptide Sequence Number=SeqID_127084
tttggtttaaggtttttatttacttagttaggttatttgttcgtttctagtaaagtctgcatctttgcccaatgtccaattagagcaaggaactgttacatcccttcttgaagaaaatggtacagttaagggtgttcaatacaaaaccaagtcaggtcaagaactaaaggcttatgcacccttgacaattgtatgtgatggctgcttttcaaatctacggcgtgccctctgctctccaaaggttgatgttccgt

SEQ ID NO: 61111 - DNA, 215 bp, Setaria italica
  Peptide Sequence Number=SeqID_127085
ccttcacctaaacgaatgtggattggagcatcaggcgaccaacaccatagatagcaacagcaaagaagtgtgcaactaaactcaatggccgtcgggtgcatgttattgagagagatctgacagaacctgacagaattgtgggtgaattgttgcaacctgggggttacttgaaattaatcgagttaggcctcgaagattgtgtggaagaaattgat

SEQ ID NO: 61112 - DNA, 402 bp, Setaria italica
  Peptide Sequence Number=SeqID_127086
caacgcacctcggtgctgcttattgggtaaaataggatgggcgaaggattggccaagataacatgcccatgatttggtgggaagctggcaattctttggagagcagagggcacgccgtagatttgaaaagcagccatcacatacaattgtcaagggtgcataagcctttagttcttgacctgacttggttttgtattgaacacccttaactgtaccattttcttcaagaagggatgtaacagttccttgctctaattggacattgggcaaagatgcagctttctgacgcatcctctgtataaaccttccattgtgaaagcttctaccagcaacatcagaatggaacttctccaagggataagcaagctttgtgttcctcccatctttgaataaagcataacc

SEQ ID NO: 61113 - DNA, 283 bp, Setaria italica
  Peptide Sequence Number=SeqID_127087
gaggcactgaagaccttatataaagcaccagccaatgtgtttatccgtggaagcaaccggcttaaaccgaacaaaataagtaaataaagaaaataagaaattaacaaaggtaatttaacaacaaggaagatgcatcatgcagattgcgaagaggcttgagaagattgcgtaggacaacaatgtcagataatgcaacagtcattcctccaccagttaaaggatgtctcatattgaaggcatcccccatcaaaagtgcaccaggggttggatgtggggcagctgg

SEQ ID NO: 61114 - DNA, 462 bp, Setaria italica
  Peptide Sequence Number=SeqID_127088
ttgtacgttggtccccactttctttgtcggtaactttcttcgatctggctgtccatcaccaccagcgccgaggtgtcgccgacgtagtaggggtggttcccggaccacacgtccaccgtgtactccggcttggtgccccccgtcaccagcaccagctcgccgttgcagtacaccttcgcgtcctcgtagatctccgggtgcagccccttcttgcgcatcgagcagcgcatcccctgcatcgcgccgcccggagtttggttttgctcgcagacttagtggcggcgcccatggtaatttcattcgtgcaggaattgcgagaggggagggtcggcgcctacgcgcgcgcgcgcacgtacctggggaggggacgacggagcggagagtgcgggcggtggtcctcggcggcggcagggggtggggagggaagggagggtgggaggaggggagaggcggtcagtgggc

SEQ ID NO: 61115 - DNA, 343 bp, Setaria italica
  Peptide Sequence Number=SeqID_127089
tttctaactttttaccttagttacttaactaaagtaatttacgggaacttggatcttcaaatgtaaaggatgaagaaaagaagaagtccagggctgagaggtttggccttgcctcatcatcttcttctgatgaggaggctaagaagaaggcccgtttagaacgatttggtcagggcacaaatgttgacaaggcagaagaagaaaaaagaaaggcacgggccgccaggtttgcagaaacatccagtggatcacctcgggaaaatggcaaggcaactccaagccggatgcagccactgtgacaggcacagcgtgatcagagcactctgccttcgatgaggtctca

SEQ ID NO: 61116 - DNA, 412 bp, Setaria italica
  misc_feature (351)..(351): n is a, c, g, or t
  Peptide Sequence Number=SeqID_127090
aaaagaatacctaggttaacaatacaagcaagaatgtaagagactcacaaaatcaaagagatgacgaacctttgttgaagagggacctggacaaccttgaacttctggatggtaattggtctcaactatgtataacttgcaaatatcaatagattgtcaggcctgtacgctcaaaacactgctctacatgcgaccgctgtgttgagcaatttgatcatcattgcccttgggtatcaaattgcattggaaaggaagtgtaggagacccagcttctccagcatcatttggtggatggcttggctatacagctataaaccattcgtgggtgtgtcttttgtcataatggacctnttcctttctttggcattataactctaacagtaattcaagcatcacagatatcaaggaatgt

SEQ ID NO: 61117 - DNA, 253 bp, Setaria italica
  Peptide Sequence Number=SeqID_127091
cttggtccgatgcctcaaagatgatatctgcacttgattgtttggctgtcatcacatttgttggtgcaactgatctggctgaaacagagttagctttgaaagccatgtgggatgtgattcatccaaaatctggttcaaatgtgggaactgtccggaaacctaagcctcctgtgttagcagctgctatatctgcaataggaacgtttactacctaaactaactaattaggttacaataggaaggaataaaataa

SEQ ID NO: 61118 - DNA, 300 bp, Setaria italica
  misc_feature (75)..(75): n is a, c, g, or t
  Peptide Sequence Number=SeqID_127092
caagtttatgtgtccagttgaaagtatatcctgctaaaagaatacctataaattacagatgattgaaattgaacngaaaataaaaaaggttaatgataaaaggagggaatacaatgttattaggttgcaggttttcggattcgggaggggctgtccacatgctcaactccagtagtgttagcaggcaaaacacggcccgtgcagttcttccttttgaatgatatcttttttggggccactgaggcaccgaccaattgtgttcatgtccaaatagattaattactaatttactaaaaagta

SEQ ID NO: 61119 - DNA, 436 bp, Setaria italica
  Peptide Sequence Number=SeqID_127093
cgaagaacatcaccagaatcacgcaattgcagccttgtgcttttttagtgttcccaccgtaggctacgaggatatggaatgcattcaggagtgattggaagccaatcaaagcatgtatgcacagagtcaccaatcagattagggtagctcccagtagtgtggagtgattccgatccaaccatagccttgggccccggcatgtctaattcatatcttgaaccattgtgggtgactattcctctcagccaaatttggtacttgtcacacacaatcatgagctgggactgaccatcagtgagctcaaatacaacaaaatagaacccgttaaggtagtaatagaatactaaataccctttagtaaacaagacaaacaaaccttagttacttactttaccaatacttacaagaaaaccaagaagtaaaaggtagaacaata

SEQ ID NO: 61120 - DNA, 411 bp, Setaria italica
  misc_feature (379)..(379): n is a, c, g, or t
  Peptide Sequence Number=SeqID_127094
aacatgaagaactaccaataccgttaggtacctaggacccaaaaagacaactactttcaggccaaactaagttcaacttcatcgcaaagtccgccacttctctatcaatctcttccctcattgcaggatcaagtccatcatcaagatcagcatcatcaaaggggtactcgatatcatcttgcaaatcttgactttggcaaggaagctcagaaatattaccactatctgctttgcgcgaaaccacacagccagctccctccttatttacaggttcagagttcgctcttgcgggattcttagcttgatctttccttcttttattctttttcttacttttagcagctttccgccctagacctccatcaccatttataaaacngagtaattcatccaaagatctctcatcttttt

SEQ ID NO: 61121 - DNA, 331 bp, Setaria italica
  Peptide Sequence Number=SeqID_127095
agcagggggtcaccaagtcaggatgaagcatagctaggtttagactcaaaggaaaaggacagggttgtttctttggggagggatggttagaggtctgccagtttggtctttagctctcctccaagctgcatgtccacaaatctcctctgcttccgtcttttgatcctgccagcttaacactcacctgtgattgaatccgggaaatctctgcagagaaccattaccaccgatatgtgactcaatccttctgtcctgtcccaaatgcattctttcaggccaaactgaattcaacctcctcgcgaagtcctcgacttctctatcaagctcttct

SEQ ID NO: 61122 - DNA, 216 bp, Setaria italica
  Peptide Sequence Number=SeqID_127096
ttagtttctggcgttcctggagttctttccgcttctttgcatacaaccggttcaataaacgaattgtaggatcatcatttatattttttagcggctccaatttttcttcctctgtcaagtctatctggtaaatggaaaatatcgagtacccctttgatgatgctgatcttgatgatggacttgatcctgcaatggaagggaagagtattgatagag

SEQ ID NO: 61123 - DNA, 205 bp, Setaria italica
  Peptide Sequence Number=SeqID_127097
aaatggaggaaacaaaaaccgatatggaggtagtggtggtggttctgacggcccagaggatgaatctttcaaggattcattatatgagatgatccagattcctgatagcaactattgccttcataattgtggtaacttcatcacttcattttccttgcattgttctctgttctggaattgctacattttataggtggacatcttt

SEQ ID NO: 61124 - DNA, 480 bp, Setaria italica
  Peptide Sequence Number=SeqID_127098
gactgaaagagtagattcaaggcctgaaatggcagctttgtctcacgttgaagaagctttctaatggctggccaggtgtcttcactggctgaatctagcagagcttcaacaggttctgccagagctttggtaagttgtgcctcatatttggcacaaagatcagataattttgctgcccgaactgaagccacatgtgactcaatgtcacgcttaagcttatccttaacttttgagggatcccatttcacttgctgaatagcagcgtcttcagatcctttatcaaacttttctaagaaagtctgtgtacaatcacgagcagcaacagcaaatccctcctttgttagggccttgtcaaaggaactccttaaaataacttccaaaagttctaagtccgtaaaatagaacccaagaaagacgaattaggtaatagacaaggaattagaacaaagactagacaagaaagtttaagaactacaaaga

SEQ ID NO: 61125 - DNA, 394 bp, Setaria italica
  Peptide Sequence Number=SeqID_127099
ctgtaagggcaagcttcaaaaaccgcaaggcacttcaactcttccaggtttcaaggccatgtgcagcctcaaactgctaggtggttttcagcaaaaagctaaagatcacaaatcatttgccaccgggcttgaatattccggtccattctctgtcctggttacactggagaccctgcagacgtcacattgctgtgtgaagaaacattcgttggttggagttccatctctctttgcctttcgggggctgcaggtctctgcccctcatctgctaatctcttcaaaaatgttcattatcgtgggaacaaattttgttgacagcgaaaggagggctggaaggaagccattttggaattccgcggcaatgtctaactgtacccaaatggccttaccaaca

SEQ ID NO: 61126 - DNA, 315 bp, Setaria italica
  Peptide Sequence Number=SeqID_127100
atttctacagaagtggagcactagccaagacaagaaacaagtaatgactaacgtttctgaaaacataccttcagatcctttatcaaacttctccaagaaagtctgagtacaatcacgagctgcagcagcgaatccttccttttctagggccttgtcaaaggactccttaaatgcttctaaagttctggtccgcaagtgattcagaagagattgataggcaggattgacaagctgcaagagtttagactctaagttgtttgttctttttcgtagtttcttgtactacctttcttatttcttaaaatttaaatttta

SEQ ID NO: 61127 - DNA, 259 bp, Setaria italica
  misc_feature (38)..(38): n is a, c, g, or t
  Peptide Sequence Number=SeqID_127101
tgactcaatgtcacgcttaagcttatccttaacttttntagggatcccatttcacttgctgaatagcagcgtcttcagatcctttatcaaacttttctaagaaagtctgtgtacaatcacgagcagcaacagcaaatccctcctttgttagggccttgtcaaaggactccttaaatacttccaaagttctagtccgtaaatgacccagaagcgattggtatgcaggattgacaagctgcagaagtttagactcaagttg

SEQ ID NO: 61128 - DNA, 379 bp, Setaria italica
  misc_feature (34)..(34): n is a, c, g, or t
  Peptide Sequence Number=SeqID_127102
tgcagaagtttagactcaagttgttgtctttttnaggttctgacaccttcatcaaataaatagcctccatgtcatactctgataaacatctatcaagaaggctgctgagtttcttcccaaaaccaggtacatagtcatgttgaacagcctcctcgaattgttgccattcctcatcagctgtaaaactggcaactttctcattaccaatttcctcacagcgtacagtagccaccataactttatgagcaggtagatcaaggtctttgttctccttaatgaccttccaaaactgctgtgaactaaaagaaaaaacctagaaagactagggaacaaacaaccaacggacggtacaaccaagacaaaagtaccaaccaaggaa

SEQ ID NO: 61129 - DNA, 362 bp, Setaria italica
  misc_feature (331)..(331): n is a, c, g, or t
  Peptide Sequence Number=SeqID_127103
agagattgctctcccactgtcccacaggccaacatggaatgaaaagaagaacgtgtggcttggaatttggatggtcgcgtacttgggcacgttgaggttggggtagagctcggcgactttggcagcgaagtcgctccagtgagagatggactcgacgcagatgtgcctcccggacgctgatgggttctcgaagacaaggatatgggccaaggcaacgtcttccacatgaactggtcccatgaagaaatccgcgtactcctcggtgcaacctgcaggcagaaaggtgttgctttgcttcaataatgttcccctgatctcgtaaaaaacggtnttatggatacactacatacatgtcatttttg

SEQ ID NO: 61130 - DNA, 423 bp, Setaria italica
  Peptide Sequence Number=SeqID_127104
caagggatgctgcagatggaattaaaatcaagcagataggcgacacttgagcaagtctttagcttttcacattatctagtgacacccttattactggtttgtacttaactagcgaaggtccaggaagacatcacagtagccagccgtctcaagagatgtatcccctgctcttgaggctctccacagcatccctgatgatcttctccacggggctgatctgcagacccagggcgatgagcttcttcgaccccacctccgctctcaccagcccaggctgggtgtcctcgggcaacttgggcacgttgaggttggggtagagctcggcgactttggcagcgaagtcgctccagtgagagattggactcgacgcagattgttgtccttcccggtacgtctttgttattttgggtttttcttttcttt

SEQ ID NO: 61131 - DNA, 276 bp, Setaria italica
  Peptide Sequence Number=SeqID_127105
gctgtagtaaaaaagggtttcagaactgaggtgacacccctggtactgatcatgacggatcgttcagtatgctgatttaaagatgctttcagaaggaccgaccaagacatgataagttgatagttccattcacttcgaggaggcggcgaaacatggccatgctagcgttgatggttggcggaatcatcggccccaggactgtccccgggttaaccacaaccacatctagcccctcctcctctgcaaacttccacgctgccttctccgccagtgtct

SEQ ID NO: 61132 - DNA, 219 bp, Setaria italica
  Peptide Sequence Number=SeqID_127106
agtgagagatggactcgacgcagatgtgcctcccggacgctgatgggttctcgaagacaaggatatgggccaaggcaacgtcttccacatgaactggtcccatgaagaaatccgcgtactcctcggtgcaacatgtcatttttgtttcgtttcaacaaagtcaatgcatgatcattgtatcaactgaaactgctgatgcctgtaagtttgtccgagtag

SEQ ID NO: 61133 - DNA, 400 bp, Setaria italica
  Peptide Sequence Number=SeqID_127107
ctcgaaggagttgaatgagttctcggtgccgcagagcgacggcaacaacaggctttcattgacaagtacaactttgatcctgtgaatgactgccctctcccaggcaggtatgaatgggtgaagctagactgatagattttcaggacaagagagcagcagcatggatctctcctccgctccctccaccaccgcagtgtcgtggcagtggcgcataccatcgcgttagctttgtttctgttgtaaaaacttagggttagcctgtagccttaatggtcctgtgtaacaatacagaactgatgctgagttacaacaccctgatctgatctgatttctcaactccaatgtaacccttaacagctcattctgtaaggaacctattaccctgctaccagttgctgga

SEQ ID NO: 61134 - DNA, 239 bp, Setaria italica
  misc_feature (3)..(3): n is a, c, g, or t
  Peptide Sequence Number=SeqID_127108
tanattttgcaggaccacaaatggtgttgatgtgcacatgtattaatgttttcttggattattatattttggagttcttgtttgtttgtgagattccgttcgatataacgttggagttagagattatgctgctttgtatggaattgtctcaagattttcatgtatatgatgatcttgttggttgcaggagcactagagagacaacaccttgcagcttgattaactcggagacgataagc

SEQ ID NO: 61135 - DNA, 250 bp, Setaria italica
  Peptide Sequence Number=SeqID_127109
ctcctttgttccttttcgtttcgttggacgagggagggggagcatggtgagcggcagctcgcggctgcgattttggaggaggaggaggaggcgactgacgggcgctgaacggcggatggcgcgtcggattggaggcggccgagctgcttgggggattccgagctcctcgggaggggatcgaatgcggagcctgctcggcggcgggttgtgaggagctctagtgccagtcggagtcggtgttcttggcggc

SEQ ID NO: 61136 - DNA, 246 bp, Setaria italica
  Peptide Sequence Number=SeqID_127110
gggagcatggtgagcggcagctcgcggctgcgattttggaggttcacgtttcgtgttcggttccgtggattgatttgctgctcttgcttgtctgatgcgatcgattcaggaggaggaggaggcgactgacgggcgctgaacggcggatggcgcgtcggattggaggcggccgagctgcttgggggattccgagctcctcgggaggggatcgaatgcggagcctgctcggcggcgggttgtgaggag

SEQ ID NO: 61137 - DNA, 299 bp, Setaria italica
  Peptide Sequence Number=SeqID_127111
tagtctaatttggtactagggtccgttgtattgttcttctagtagtctagttttgatgagttcccgctggcctataacaaggaagattctgacaccatgtagctgatgccgattgcgcattggattgtgaaacctttttggtgaggctcaatgatgctatacagccttgttatgacaggatcagaggcataatgattggtaagccaaccatattgaggcaccaaagttatcgctggatgccaggtggtcaatttgatcgttgcatcaactcgggatgcgataatcacgtaagctgtaag

SEQ ID NO: 61138 - DNA, 345 bp, Setaria italica
  Peptide Sequence Number=SeqID_127112
accctagaataaatagtaacaaaaccaaagaaacaaagttagactaggaactaccctcctttgtcgaatagaccctctcgtgggactcgtcgaggataatgttggtggcctggtcaaatcctctgagcgtgcccacgatgttgcggccatcgttggtgatgacggagatgacctggttgacgagagactcgagcgccgggcctccggacgccatctgcgctaccgaggaaggagattagggggccgccgccgccgccgccgccgccgccgccgcctactactactgcctcaggcctgaatcctctccctcgccggagttggatgcggcggcgtcgatggctgcga

SEQ ID NO: 61139 - DNA, 403 bp, Setaria italica
  Peptide Sequence Number=SeqID_127113
cagaatttacagtttctagtctggaagaaactttgattgaagttaacttgatccttgacatattgtttcttgctttctatgataacttctcaagatgtaatggtggattgtggataagtttgtgttcccttttcaaggacattctctgtggttcttatgatgttgggaaatttgctgtatctgttgaggcaaagattcgtttcattatgctaaagctcagcttcttctcattcttattgaaactttggactttgaaaatcttctcagaatgattcgggatgaagttcctctcaggtctcatctactttcttattttaatctgtggcttatttgatattaagatttttacatttgatattttgtttttgtctcagtgtggggtgttctacattttctgttggtg

SEQ ID NO: 61140 - DNA, 428 bp, Setaria italica
  Peptide Sequence Number=SeqID_127114
cgttcgtaagagtatgaaggtcatgggagatgtgctacaagatcttggggagggagctggtccaccaacgggagttgttctacaagctcctctcggactcgcccaagtacttcagttgtcagcgtcatgtcaacagagccattcaagatgtagtttccttgctccggtgtacaaggcagagcctaggagtcatggcatcaagcagaggggccctgattgggcgccttgtgttgcatgtgtgctccatgatatatttaaatatgtcctaattattggaattatctgccgagggaatacatgataaactcttgtttatcttttcacaaagcacctaaactgcatgtttaaactaccttaggaaccaggtgaagaacaaatttaatttgctacaaataacaattacaaggtactaccaagttaaaatttaa

SEQ ID NO: 61141 - DNA, 262 bp, Setaria italica
  Peptide Sequence Number=SeqID_127115
aagcaaccctaatccgtggccacggacccgccgcaagctccttcgcgcgaataggttggagattcaatcgaggctgcgcgggaatcggtcgtgctcgatatctcaacccccacacttgaaatcttgctattgctgtggcggtgtgtttgtgatgagatcttggggagcccgcctcgctcggtcctaagatgctggcaggctacggcggtggtggccgcggcgtccatctctcctcccaaaaggcctccccctcggccgcggg

SEQ ID NO: 61142 - DNA, 214 bp, Setaria italica
  misc_feature (199)..(199): n is a, c, g, or t
  Peptide Sequence Number=SeqID_127116
ccctaatccgtggccacggacccgccgcaagctccttcgcgcgaataggttggagattcaatcgaggctgcgcgggaatcggtcgtgctcgatatctcaacccccacacttgaaatatcggtcgtgctcgatatctcaacccccacacttgaaatcttgctattgctgtggcggtgtgttgtgatgagatcttggggancctgccagcatctta

SEQ ID NO: 61143 - DNA, 384 bp, Setaria italica
  misc_feature (340)..(340): n is a, c, g, or t
  Peptide Sequence Number=SeqID_127117
tcgttttgaagaatctttttcatggatctatttgcccttggggtattgcatccttgtctcaagtttcgtctcgattcatggagatttgagagagtatttttagtttgaagtttaagtggtgttcttggtgttcttgtttctctctgtctgttcgtgcgcaggaagaagcgcagcaagcaatcgagcgcacaggcacgcggggcgcacgtgcaagttgcagcagcgagcgggccgtcagctgctaggcggaccagcccagcacgctactcctagcggtccagtccagcacgggccagagcaagtgcagctagcgcaggagcttgcggcggccaagcaggtnctcgtggccccaggcaacaaggtagagcagcaacccagcttgca

SEQ ID NO: 61144 - DNA, 209 bp, Setaria italica
  Peptide Sequence Number=SeqID_127118
cctgttaggaaagcctgtttagcatttctgagccccttgaatacaagttcattcattactgcctcccagatacgctgacctctgaagaagaatcttgtgccattctgcaactcatctttgacgttcccagagaatgacgccccatcgcaataccttatcttcactttgttccagttgtaaaaatcaggattctgggatttatcattgct

SEQ ID NO: 61145 - DNA, 216 bp, Setaria italica
  Peptide Sequence Number=SeqID_127119
ccctctggcaatctgtgttgctgatgtctcggacatatcacgatttgctttagtggatcacttgccgcatggcttgcttgatagtctacttcctgggcctgtcactgttgttctcaaacgaggtgaaaatagtatattagagagatcacttaatcctggcttagatagcatcggagttcgtgtaccggatctggatttcatacgatccattgctcg

SEQ ID NO: 61146 - DNA, 212 bp, Setaria italica
  Peptide Sequence Number=SeqID_127120
gcaccccattagtaaattccatggttacatctccaaactgcgaagtgactagaccgttgagagtccatgcgatggggcaaatccagtagaaccacctccaccatactggaattctcgttcttggtattaaaatcctgagaaaaggttccaaatggcataaaacgccgtggatgcaacggaggagacgttgtagtttggagtcaggcccacca

SEQ ID NO: 61147 - DNA, 386 bp, Setaria italica
  Peptide Sequence Number=SeqID_127121
agacgagcagaaaggttcacctgggcagctactcaaggagtgaatgaagaggagcttttgagtaatttacctgaagatatccagagggacatacgtcgtcatttctttagattccttaataaggtccgattgttcaccttgatggattggcctatcttggatgctatctgtgacaaattaagacaaaacttatatatcagtggaagtgacattctttatcaaggtggtcctgttgacaagatggtcttcatagtgagaggtaagctggaaagcgtcagtgcagatggaagcaaggctccgttacatgatggagaatgtaatagtaggaagaaggaagactacctacaacaataggtaacttaggaaaaactacaatacggtagaaa

SEQ ID NO: 61148 - DNA, 343 bp, Setaria italica
  Peptide Sequence Number=SeqID_127122
agcatccaagataggccaatccatcaaggtgaacaatcggaccttattaagacaaaacttatatatcagtggaagtgacattctttatcaaggtggtcctgttgacaagatggtcttcatagtgagaggtaagctggaaagcgtcagtgcagatggaagcaaggctccgttacatgatggagatgtatgtggagaggagctcctcacatggtacttggaaaactcatcggtgaatagagatgctgggaaaatcaaatttcaaggcatgcggttggttgctatacgtacagtaacatgttcaacaaatgttgaagcttttgactcagagcaagtgatctcgaag

SEQ ID NO: 61149 - DNA, 266 bp, Setaria italica
  Peptide Sequence Number=SeqID_127123
taatgacatttcagccatgcaaactaatgacatttcattctagttacatacattttaactctgacaagtgtgttttctcataccttacggtttgatttcagcaaataagtaccttagctggcaaccttgtcccaagttactttgcatgggaagttctgttcacgatggctattattggtttgggactgttgctttttgcattacttatcggaaacatgcaaaactttctccaagctcttggaagacggagattggaaatgctaacg

SEQ ID NO: 61150 - DNA, 499 bp, Setaria italica
  Peptide Sequence Number=SeqID_127124
gttggaaagggcacaccagcctcataccagccttcattggtatcatggaaaataatgatgcccatcataatgtgatacgaacaataggttacatcagttcacatcagagccagaagatccctgagttgagttctgagtatccagggcgattccctgaacgccaggaagcatcaggttccgagaatgatccttataaggtgttcaagttgcctgcaagatgtaaaaaacaccgaagatcacaaagaagtaccaccggtcaatatcgaggtccataatgacatggctactcatgctagtaatctggcttacaaggaaccttccagaacacagaaatgctacgattctagagaagattctaagaatgtgatacctttgagtcaacaggaaagtgcttgttctggacaagacaaaacccaaaaattactaaggaaataagaaaacaaaataaaggtaaaggaaacaaaaaacaaaataaaacaaaagaaacaaagacaataaa

SEQ ID NO: 61151 - DNA, 423 bp, Setaria italica
  Peptide Sequence Number=SeqID_127125
caagagtctactgaaatgaacatgatttggaagttcaattccaagctttcttcacctgaggttgggattgttcagcctcgtgatttttcatctgagtttgcttgaggttaataacaccagtgttgattcgccttgtggaagggcacaccagcctcataccagccttcatttggtatcatggaaaataatgatgcccatcataatgtgatacgaacaataggttacatcagttcacatcagagccagaagatccctgagttgagttctgagtatccagggcgattccctgaacgccaggaagcatcaggttccgagaatgatccttataaggtgttcaagttgcctgacaaagaatagtaaaaaacaaccgaaagaatacaacaaaagaaagtaaccaaccggtacaaataatacgaaggtaca

SEQ ID NO: 61152 - DNA, 380 bp, Setaria italica
  Peptide Sequence Number=SeqID_127126
ctctatccggaagctgaagccgttcctgtacacgacgcaagagcccgatcctcctcttctagctgacgaagatgatggagggtcgcagcagcactcgtcgatcaagcagcagcagcagagcgcggccaggctgcagaacaatttcagaccaagggcacaaaattaaagtgagctcgcttgcaacttgtgcctactacatacacccgttaaaagtaaaagctatcacaggaacaaaaaggacagagatttgggcgtgcataccagccttcgaggaagctcggctccctcctcggcggcgcggcggcgtactgcggcggcgccatcaccggcgggccctggtacggcccctggtagtaaccttttatagcaacacaaaagac

SEQ ID NO: 61153 - DNA, 215 bp, Setaria italica
  Peptide Sequence Number=SeqID_127127
actattttggaggacataaatgagataccaaggtcccgcatgttctggcctcgagagatatggagtaaatatgcggataaacttgaggatttcaaatatgaggaaaattcagaaaaggcagtacagtgcttgaatgatctggtgactaatgcattgattcatactgaaggcagtcttcagcatgaatcaatgcattagtcaccagatcattcaag

SEQ ID NO: 61154 - DNA, 304 bp, Setaria italica
  misc_feature (252)..(252): n is a, c, g, or t
  Peptide Sequence Number=SeqID_127128
tacttaactagtagttactattggttcggtacttgtactattacttttgtcccttctttaagttcttccatatgaaaaaagggcaacaagggcttcacttggtatacagcaccccaaatataatagccaacagcagaagaacaatcatgatcagcataggcttgtaaggtgacttgtccaaatggtaaccccttctctttagcaaaccagatgacttgcaagtttgctttattgaatccacacgtttttcgngttagcgcagcatttggatcattgtcgtcaatctttgactccaacaataaag

SEQ ID NO: 61155 - DNA, 209 bp, Setaria italica
  Peptide Sequence Number=SeqID_127129
cgtctcatctttacaactcctctaaagacattcacgttattgtagcaaaaggcacacgttccaattgccattatctgaaaagagaatggcaagttaatagtaccctatagaggaagttgtttcagatgtaacgagcatataacatgcaaagtgtaaagaaaacacttcatcaaaacaggagactagtcaagaaaccaggaatgctatct

SEQ ID NO: 61156 - DNA, 431 bp, Setaria italica
  Peptide Sequence Number=SeqID_127130
gggtgaaggtcaggtcggaggtcgccgcggagaggacgcggctgcgtggcgaggcgcccgtgctcgcgtcgaggacgatgtcacgcggcgccttgcgggggatgatgtcctgggggacctcccatctagggtgttcggcgtcggtgatgcggacgtgcagccggctgtccgtctcaaggctgccgccggcgaggcaaacaaaacagtaaaatgtcagaaaaacagtgtttcaagaaaatgacttataaatgttttactaatttaagaaacacagtggtcgcgtggcctaatggataaggcgctcgcctccggagcgggagattgtgggttcgagtcccaccgtgatcgtttatcagcatttttatttttacgtttgtattccctattcaattttctcatccatccccttttggtcttccatcaaagcaagg

SEQ ID NO: 61157 - DNA, 233 bp, Setaria italica
  misc_feature (197)..(197): n is a, c, g, or t
  misc_feature (224)..(224): n is a, c, g, or t
  Peptide Sequence Number=SeqID_127131
tgagcacagagttatgatatggttggggatcacccttctgctactcttccatcaactaaggtgcgcataattcatgaaataaaccagacatatgccattctgtgacaggcagataaaactgttttctcataaattatgcgcaccttagttgatggaagggatagccaggaagcatacaattacagtcttattttagngttcatggttcttactacctataaacntgagcacag

SEQ ID NO: 61158 - DNA, 235 bp, Setaria italica
  misc_feature (227)..(227): n is a, c, g, or t
  Peptide Sequence Number=SeqID_127132
tgcaggatggcttactgatatgttttcattttttttattattgaacatgcaaactcttaagtttggattataattatgagaaaacagttttatctgcctgtcacagaatggcatatgtctggtttatttcatgaattatgcgcaccttagttgatggaagggatagccaggaagcatacaattacagtctttattttagtgttcatggttcttactacctataaacntgagcaca

SEQ ID NO: 61159 - DNA, 244 bp, Setaria italica
  Peptide Sequence Number=SeqID_127133
gcagcgaacgtagcatgcttgaacacatgcaataatcgacctgacgaaactgaatgccaggttattcccagaaaccttgagtccacccgaagtctgtcagaaaaataaagctttatatgctttgttttatcatcccacagatcaagtgcggagacctgttcgagaacagcgtagttgatgaattcaatgaatgtgctgtttcacgcaagaaatgtgtcccgagaaagtctgatgtcggcgagtt

SEQ ID NO: 61160 - DNA, 275 bp, Setaria italica
  Peptide Sequence Number=SeqID_127134
agtttgctgtgcggacggctgatgatgcaaggctctccaacgggctcattggaattggagagccttgcatcatcagccgtccgcacagcaaactctgccagggcggtgcttatcttggtcctgaccaggggaggaacaactgctaggcttgtggccaagtataggccatccatgccgatactgtctgtcgtagttcctgaactgaagacagactccttcgattggacctgcagcgacgagggaccggcaaggcagagcctcatcgtgaggggtgt

SEQ ID NO: 61161 - DNA, 251 bp, Setaria italica
  Peptide Sequence Number=SeqID_127135
catatatgttatggatttaaattgcagggacctttagttttcttcacataggagaatagaaccaaggaagaaaactaaaggtccctgcaatttaaatccttggttctattctcctatgtgaagattgaccccactgctggtagtcttgtcggaactgctggactgctggtaccaaatgacacatggaattcatatctcaggtgtccaaaatttgcatactgcaagctaatttaagtgaagactgaaccgat

SEQ ID NO: 61162 - DNA, 109 bp, Setaria italica
  Peptide Sequence Number=SeqID_127136
ccaatgatatagatatacagtgtgcttaatgatactactaccacataccactctatcaagcacactgtatatctatatcattggagcaatgcacaaccaaaatagacaa

SEQ ID NO: 61163 - DNA, 239 bp, Setaria italica
  Peptide Sequence Number=SeqID_127137
acaagaccacatcatgctattgtatgcaatataaaaataaatggaaaggaatcgccaaagttggcatgtaagcttttcactttccatttattttatattgcatacaagaccacatcatgctattgtactagaatttgactaattgtcctgttattttcttcccctcctcaaaggctcaaaatgatatgagaacattggcgtattggttgtccaacttgtctacgttaacagttctcctt

SEQ ID NO: 61164 - DNA, 250 bp, Setaria italica
  Peptide Sequence Number=SeqID_127138
gaacttctcactcaagtcttgcaaaaggccatcttaatggcatgggtcaacagaaccaactcacacactggttgggcattgtgaaaatcctcactagctacttggatgtactgaaggcaaatcatgttccatcaattttggtgcacaaacttttcactcaaaatattctcactgattgatgttcaactatttaaccctgagacagggagaaattggttgcatataccttcctgtattggctaccattcta

SEQ ID NO: 61165 - DNA, 241 bp, Setaria italica
  Peptide Sequence Number=SeqID_127139
ccttttgcagctctcctattttccgcctgagagtcagcttgttgtttcatgatacaataacaagacttgaacaagaggccactgccaaagaggctttattgcttacagaaaagcaggcacatgaggcaacaaggaagactctcagtgaagttcaggaaaggaatgaagaattgctgaagaatattcatgataatgataaacatattcttcagcttcagtttcctcaacgcctctgtatagt

SEQ ID NO: 61166 - DNA, 344 bp, Setaria italica
  Peptide Sequence Number=SeqID_127140
agagcatatccatacatccttctcaggtgatgcctaaagactagttaacacaagaaaaatataatacattgctttgtgcaagaaacacgcacttttgtattcaagcaccaaaagtgggcagacttattcgatggtgcatggaacacctagagaacctcagctggttcatacataccatgacgaacagctgctgctggtggtaaagacatttttagttcaccagaaaacactcttgtaatggcaattatgacccaattcattctttatggggttgattatttagccaaaggaacctctgcacttgcgagaccaacaaaagcaattttttgcctttcgacagccag

SEQ ID NO: 61167 - DNA, 387 bp, Setaria italica
  misc_feature (111)..(111): n is a, c, g, or t
  Peptide Sequence Number=SeqID_127141
agcacgaactgaaaagaggctatcagaatctgctaggatcagggacaagtacccagacagaattcctgtgattgttgagaaagctggcaagactgatgtcccagagatcgntaaaaaaagtaccttgtccctgctgatctcaccgtcggccagtttatctttgtggtgaggaagaggatcaagctgagccccgagaaggccatctttgtctttgttaagaacactttgccaccaactgcctctctgatgtccgcgatctatgaggagaacaaggacgaggacggcttcctctacatgacttacagtggcgagaacaccttcggctctgccttaagctagtcttgtcccccttgtcctacttgttaaattaaactaagtctttgtact

SEQ ID NO: 61168 - DNA, 281 bp, Setaria italica
  Peptide Sequence Number=SeqID_127142
cgctccccttctgcttccgccgatcgacttgcccgctcgattccgccaacccctcgacccgatcggctcccccgatcgccgcacccgccgggcgctccaatcggtaagcccctcgatcgctttcccccaaaggaaccgccggaattcgggaggattcagcgggttcctcttcagttcgtcagttcagtctcttctacgttttctcgatcgatttgatctttgaccaggctgttggcgtttgttgatggccaaggcttccttcaagatggagcacgaactaa

SEQ ID NO: 61169 - DNA, 262 bp, Setaria italica
  Peptide Sequence Number=SeqID_127143
tcctcgtccttgttctcctcatagatcgcggacgaggacggcttcctctacatgacttacagtggcgagaacaccttcggctctgcctaagcagctgccccctgccactgtaaataaacaagcttgaccaggctgctgcttcttgccgtcgtaaacatggtgtacatacacgtcgtctctactacgctgccggattgcttcaatggtttatttcgtcattaggtttgaagtgttttgggcattataaaggtggaatggcccg

SEQ ID NO: 61170 - DNA, 204 bp, Setaria italica
  Peptide Sequence Number=SeqID_127144
aaggccatctttgctttgttaagaacactttgccaccaactgcctctctgatgtccgcgatctatgaggagaacaaggacgaggacggcttcctctacatgacttacagtggcgagaacaccttcggctctgcctaagcagctgccccctgccactgtaaataaacaagctttgacctaggtcttgcttgctttctttgtccgt

SEQ ID NO: 61171 - DNA, 229 bp, Setaria italica
  Peptide Sequence Number=SeqID_127145
tcttctgaatgatgtgcagaatgagttccttagttgcttggatactcaagccctttataaattatttcagcagcaaattctcccatagctttaagtgcaccttcacttgcaagcttagcagcatacttgattcgctctctagatgtacacaaaacttgaagtggagcaagaaacatatatgcagatcgaattgatggaggaaagattgatgattccaaaaggtgctttg

SEQ ID NO: 61172 - DNA, 453 bp, Setaria italica
  misc_feature (433)..(433): n is a, c, g, or t
  Peptide Sequence Number=SeqID_127146
ttattgtcctagttactattgggtagtaggttgggggtcttaatttttgtaagttttattcgtctaattgatgagatcaccgtggaagaaattaagaagttggtagctgtttcttcctatgtaaagtcctacatgtctgcatgttgatttctcttaataaaaaagttatatgcagcgtgttgcttgttctacaggatttctcctagaggaatacttatctccccaggccctggcacgcctcaagattcaggaatatccttgcaaacagttacagagcttggaccctctatacccttgtttggggtttgcatgggtttacaatgcattggagaggcatttgggagggaaggttgtccgatctccttacggagttgtgcatggaaagggctcccttgttcattatgatgagaagcttgatggaactcttttttcnggtcttccaaccattccaag

SEQ ID NO: 61173 - DNA, 456 bp, Setaria italica
  Peptide Sequence Number=SeqID_127147
atttcaaggataatcactctgtcgaatgttttggctgatagaaatattgagcagtatcaaacatctataacttctcttgcagttctatggtaggtagtctctagatggataacaaatcataaaggatcagaaagcaaggtcccgacgtgtaacaatgtattataaacatactggattcagaattcagacgacttgctatattaatcaaaagctcagtcaacaccgcacaattcaaattgccaagctgaatttcacaagatcaaagcatcttccagtccagcgaaagggcggacagccctatgctcgagcagatggttatgaaaatctgagaacttccacctgcagtgctcggctccaattacatacaggcttcctgtaagaagttaaacggaaaccttagagagattgggcagagtaagatatagcataacaattcaccaagtgatgcacgcctca

SEQ ID NO: 61174 - DNA, 363 bp, Setaria italica
  Peptide Sequence Number=SeqID_127148
tatgtggacgaagccttcaggggccacccctcctaccgatcgactcctacgaccgtgctatggcccgcttctgggctgacttcatggacaataaggtattatctcatgcctacaagctaggcctgtccttatgaaatctgaacatctgctagttgtactaacactgttcagcagcttctcaagctgttctggctggcccactggacagagggcgaggtgcagaagggaataacgaaagaggcgaaggagagcctggcgcttctggaggataagctcagggggaataggttttttggcggtgacaccgtcagctaccttgacttggtctattgttggttagctccttggactacaagacgtaca

SEQ ID NO: 61175 - DNA, 247 bp, Setaria italica
  Peptide Sequence Number=SeqID_127149
ttctcggtggtggtggatataccatcagaaatgttgcacggtgctggtgttacgaggtatgatgatctaagtaaatgctcaatttcttgaattcttgttcctgtgtgctgcattacctatgcgagttggttaacattatttatgatagggaaaggcaggctagaatcttatgtttcacatcagtgcacactttctgttaacaatttagttcatagaatacccatggtctgacttttgagcaataacg

SEQ ID NO: 61176 - DNA, 308 bp, Setaria italica
  Peptide Sequence Number=SeqID_127150
caattgaatcaagagaaaggacacctttggttagttgctgggtgtaaatcatggtaaagaaatgcgatggccatcgatgagccaggcaacgtcaagaatgaaccagagagctcaactaagttaccagaccaaccagccatgtaccataagccatgactgcgacatctgaacttgccagctgtctggtgtccaaattcctggacgctttcgacggtccaaaaactaaaagtgaatccatgatacagcgtgcgattttaaattcgatttgagttctacccatctgtaatctgttaatcccatgggagtat

SEQ ID NO: 61177 - DNA, 227 bp, Setaria italica
  Peptide Sequence Number=SeqID_127151
cctatcccctgtgtgccttgcctacccctgttgcgtgtctcagacaacagacagggtcatgaccgtctcgttccacaagtttggggattattttcctggaacaggggatatccgtgacattggccactcaaaggggaagtactactctctgaatgtccctctggatgatgggattgatgatgaaagctatcagtccctgttcaagccgatcatgggcaaggttatgg

SEQ ID NO: 61178 - DNA, 245 bp, Setaria italica
  Peptide Sequence Number=SeqID_127152
ttaattaccttgtatttcttgtattattggtaagttggtattgaccacaaggctgtggaagagtcaacaaggaggagcaacattctagggataagagttaagagagaatttggtgaaagtgacaccaaagttcaggatggtggcagagttacatctgaacatagaggactggaacccatggcagaagacattggttcctccaagcaagctcctgcagatgccaatgcgatggccatcgatgagcc

SEQ ID NO: 61179 - DNA, 434 bp, Setaria italica
  Peptide Sequence Number=SeqID_127153
gttttaccctactgatgaccgtgccgcgatagtaattcaacctagtacgagaggaaccgttgattcacacaattggtcatcgcgcttggttgaaaagccagtggcgcgaagctaccgtgtgtcggattatgactgaacgcctctaagtcagaatccaagctagcaaccggcggcgagaggctttgcgcattacccggacggccacggcttcgagcccgagttcctgcagttcatcggccacggcttccgctccgggatgctgccctgcaacgagactgacatctactggttcttcacctggactcgatccgaacacgataagggcgtcgacgagagtgcggcgaagatgaagcagttcgtgctggataagctccgggctcgaaggtgccagaagaggcgctggcggtgatcgacaggagcgagatgagcgacgt

SEQ ID NO: 61180 - DNA, 327 bp, Setaria italica
  Peptide Sequence Number=SeqID_127154
tcgtgtacttgtactattcttacttggtttctttctaccttggtacttcgattccgtaacacgattaagggcgtcgacgagagtgcggcgaagatgaagcagttcgtgctggataagctccggggctcgaaggtgccagaagaggcgctggcggtgatcgacaggagcgagatgagcgacgtcctcgccgcgccgctgcggttccggccgccgctctcgctggtaaccgcgagcatcagcaggggcaacgtgtgcgtggccggagacgcgctgcacccgatgacgccggacctcggccagggcggctgctcggcgctggaggacggc

SEQ ID NO: 61181 - DNA, 249 bp, Setaria italica
  Peptide Sequence Number=SeqID_127155
aatactgaacatgattacttaactggattacatggttagaggttcaaatgaaaaacacactttttctttgtgagcacatacctttactctgatgaaaagtagagagaacgagagaaatgctgacaacaagcagtatgaacaagataggccaacaaatttagtgcttaggatgtaaagaaaataagcactcgcagtcgccatagaagtagcaagcagaagcaatgttaatcgaatatccaggtcatccaa

SEQ ID NO: 61182 - DNA, 475 bp, Setaria italica
  Peptide Sequence Number=SeqID_127156
tgcgattcaggatgttgtttgagactgaggaatctagtttccgcaggtacatgggtctgcatcacttacttctgttatcgtccccatgtacctgcggaaactagattcctcaggtacatggggacgataacagaagtaagtgatgcagacccagtgcgctggcctagttcctattggagatcggtaaaggttggttgggatgaatcaacagcaggagaaaggccacctagagtttctctctgggaaattgagccattgacaacctttccaatgtatccatccctgttcccactgcgagttaagcatccttggtattctggagttgctgctcttcatgatgacagcaatgctttgatgtggctgagaggagttgctggtgaaggaggcttccagtctttcaacttccagtcacctgttataggttcctggggacaacagcgactccatccatccttacttagcaatgaccacgatc

SEQ ID NO: 61183 - DNA, 311 bp, Setaria italica
  Peptide Sequence Number=SeqID_127157
gacggccacatccccaactaccccaacctgccgccgcagctgatctgccagctccatgatgtcacaatgcatgcggatgtggagactgatgaggtgtacgcgcagatgacgctgcagccgctgaacccagtaaggcaccgtgggctgatgattcgcggtgctatagattttgttgagttcttatggtttcggttgtattaattttgtccagcaagagcagaacgatgcatacctcccggcggagatggggatcatgagcaagcagccaaacgaattacttctgcaagacgctgacggcgagcgacaccagc

SEQ ID NO: 61184 - DNA, 302 bp, Setaria italica
  Peptide Sequence Number=SeqID_127158
cagcccaagtgctatccagcagcagctccaccaactccagcaaatgcagcatgctcataatgaccagaagcagaagattcaaccagatcaaccttatcaagttcctaccacttcattagctctagcagcaacgaaaacatgttggaatcgaacttccttcagggaagctcgaaatgtgtggacctgtctagattcaaccaaccaacagttagtgagcagcagcagcagcaacaggcgtggaagcaaaagtttatgggctcacaatcaatgtcttttgggggcttcggtttcgtctttaactt

SEQ ID NO: 61185 - DNA, 336 bp, Setaria italica
  Peptide Sequence Number=SeqID_127159
taagttcttctttttagggttattttctttcttgttaccttgtattccggtttgtctattcttgtttgttgtactaaatttggggtcctttgtattcctattttagttagtaggttgctttactcctacgttgcagttggagcatcaggaagagattatgatattcttggaaggccagttgcaaattgtttatttttgctggtgaagcaacatgcaaagagcatccagatactgttggtggtgcaattttgagtggtttgcgagaagctgttcgcatcattgacttagtaaacactggaaatgactatatcgctgaggtagaagctctacaaactt

SEQ ID NO: 61186 - DNA, 370 bp, Setaria italica
  misc_feature (364)..(364): n is a, c, g, or t
  Peptide Sequence Number=SeqID_127160
acgaaggtagggacctaccgtacttagactttactaagaccgacaatacgaacaatgaacccctgcccgtcgtagaggaactccaccttgtccggggtcgccttgaacttgccagcccacgccttcgacccgcccccactagtcaggaactgaagaggactgtctctgctggtgatgcgctgcaggcagtggtcatggccgttcacgtacatgtcggcgccatgggccttgatgactgggagaagtaactcctcgagctcagtgttgttcccatgcccacagccgctgctgatggggtggtggccgacgacgatcttccagggggccttggattgcgtcagagcgtactccaggttcttgaggngatttg

SEQ ID NO: 61187 - DNA, 228 bp, Setaria italica
  Peptide Sequence Number=SeqID_127161
ctgaagaaggactgtctctgctggtgatgcgctgcaggcagtggtcatggccgttcacgtacatgtcggcgccatgggcctgcgttgcatcgtcatcgtgaagcaaatcagtttcagagttactggacactactactggtaaattgttttgattgaatgccgataagagaagacgagatgtcaatgccttgatgactgggagaagtaactcctcgagctcagtgttcg

SEQ ID NO: 61188 - DNA, 426 bp, Setaria italica
  Peptide Sequence Number=SeqID_127162
ttaagaacaaagggtaaaccaaaagaactaagggaacgaaagaacgacaattagacccgtgtagtcatggttgccaaggacgagataccaaggcttctggaggcccttggcagtgtagatgttggagaaggactccttgaagagtgggtcgctggtgttggcgatgccgtcatcgtagatgttgtcgccggtcgagatgacgaagtcgatgtccatcttctcccccactactcccatctgctgggcaaccaggtctggttgaactgcccgcgccgcccccagtcaccgacgacgaggatggcgagcgacccgtcggccttcggcgggtgctccagccgtggcagtgccgccgccacctgaagcaacgccaccaccgcacccaaagcgacgagcatgatccccaacccgagcccatggcactccaac

SEQ ID NO: 61189 - DNA, 190 bp, Setaria italica
  Peptide Sequence Number=SeqID_127163
cacagccgcactcgcacacagtcagccaccgctcgagcacccgcaggggcgcgcgtgtgagcagagagcagagcacagcacatcaagggaaggaaaagccatgggcgaggtgagcgaggacgacggtgctcttcgtgctcccgccggcgtcaccaaagacggggttttgatggatttcgtgctgctttgc

SEQ ID NO: 61190 - DNA, 261 bp, Setaria italica
  Peptide Sequence Number=SeqID_127164
gagacgttcaaaggggacgatagaggaggccagtaaggagaacagtatttccaggagctggacgaaagaaaaacgtcaggatcacgatgcttatgtcgagataaatccaattcaatcaaagcaattcctgatcatcaatcatcaccgcgggcgaggaggacgacgaccaacagggcgaggaaaccatgccgttgctggtgtacgtgtcccgcgagaagcggagggcgtcccctcaccacttcaaggccggcgctctcaacg

SEQ ID NO: 61191 - DNA, 244 bp, Setaria italica
  misc_feature (212)..(212): n is a, c, g, or t
  Peptide Sequence Number=SeqID_127165
cttgggcaggtcttcgtcgggcgcttcatcagcgacaagccgataagcgtccgccagggtctcaccatgtcccacgttgggtgcgccctggtgatgctgattcttgacatggcgaaacatcgagcaatttaatcccatggcttccttaggtgcctcatgaagatgtgaagcatgaatctagttttttggaggttcctcacagtttggggganctgcctgaacaacaacacaactgcctcaagta

SEQ ID NO: 61192 - DNA, 243 bp, Setaria italica
  Peptide Sequence Number=SeqID_127166
tttttttttttttttgtcacaggtaatcgccaattaatttattcgattgttcttcgtcatcatctctgtttggtactacattacatggtacagggaaaaaaaatgtctcgagggacaaattgggtgcgtttgcagggcggtagctgatgaactagcagtactgaatgctgatgatactgaaccgtgtggtgttcgatgcgtgccatccgcgtttcgtttcagtcccgcgagccgccggactgg

SEQ ID NO: 61193 - DNA, 357 bp, Setaria italica
  Peptide Sequence Number=SeqID_127167
ttttcttaggacaccatgaagtcctatagagctgctattaatttcttttgttttgattattcttttaccaggatggcataacttgttctggttctcaacgattccccttgtagtgattctagcagttggaacaaagctgcaggctataattgctatgatggctgttgaaattacagagaggcatacagttattcaaggcatgccagtggtaaaactgagtgatgatcatttttggtcggaagcctcgtctggttctccatctcatccatttcgcatcatttcagaatgcatttgagtattacattatttcttttggattttggtacaattttgggcttggagatcctgcttcatgac

SEQ ID NO: 61194 - DNA, 377 bp, Setaria italica
  Peptide Sequence Number=SeqID_127168
cccgcccgcgaggcccggctgcgcggccgcagcccgcagcgccgacggcgggaggaaggacgcggacctgtggtgcgactcgtgaccggcgagaaacccatccgcgccgtcccacactccgctgcgcgttctccctctctgaaaggtttgccgccggacgagcacggccgcagccacggttggtgcatgccgtcgcgggcggacagcgccgtggcaatgccgggagctcgggaagcagatgctctgactctagacaacggtaaaagtacaaagaagtaccaataaggtaaccgtaagaaaccgtttaacttaacgaaaggggaaaataacggaaccgaaccggggggaaaataaccttaaggtaaaaataacgaaca

SEQ ID NO: 61195 - DNA, 254 bp, Setaria italica
  Peptide Sequence Number=SeqID_127169
atactttggcagaatcacctcaaccttgtggcctaaatatgattgtttaaaccaaagtatgattgcttaggtttaaacaatcatactttggcagaatcacctcaaccttgtgaaggatttacattaccaacaaagttttgcttggggtggcacagagataaaagtatggtttgggaaggttgaagacctccctgtttacttcttggaaccacaaaatgggatgttttgggtgggatgtgtctatgggaagaatg

SEQ ID NO: 61196 - DNA, 232 bp, Setaria italica
  Peptide Sequence Number=SeqID_127170
tcctcagttgttgatccctcttgttcatggacaccaacaactgggatcaacaactgaggaacatgacagttcaattgttgatgaaccgccaaaaggcaggccatttgccgaggcagttgtaggctatccagtgaaagatgcagaggaggatcaggaacagtatgaaccagagatgcaagcaccagtagaagatgatgtggacccagaagtgctaaagaggaggcttcaagag

SEQ ID NO: 61197 - DNA, 236 bp, Setaria italica
  Peptide Sequence Number=SeqID_127171
tttaccagccaattctctgctgttcctcaagttgcccctcaatactgaacatgcgagccagagcatgcttcaactcatcgtatccagaataatgactaatgtcaatggaccggcctacagctccacgtttatacacctacaagaacttctaggttaggcataagaggcaacatgaatatgcgaaagcagcgtatgcttcagtttataacagttctagcacagaatactagtattat

SEQ ID NO: 61198 - DNA, 109 bp, Setaria italica
  Peptide Sequence Number=SeqID_127172
aagagcagcaaaagttgattcttgatatgcagcagcagctgtcaaactctcaatcgtttgttgctgggaaagcgattgagagtttgacagctgctgctgcatatcaaga

SEQ ID NO: 61199 - DNA, 355 bp, Setaria italica
  Peptide Sequence Number=SeqID_127173
gcgtaggggttgacagtggacgaaatcagagccgacccgggcaaattcgaggtgcagacaaccggatccaccacacaggcagccggatttgaaccactggaggccgaatcgactccgaagacggccgaggcgagggggaaaccgagcagatcgaggcgacgagtggaaggatccgacccgcaagaagggggagaaagagaagcagagctttatttattgagactcacctcacagccgtggccttggcgaaggaagtcggaggaggcagggcccccctggaggatgccggaccgccggaggcaagaagcagtgcatcttggagatgatgaagctgcaggagaagcagcgttaaacc

SEQ ID NO: 61200 - DNA, 362 bp, Setaria italica
  misc_feature (41)..(41): n is a, c, g, or t
  Peptide Sequence Number=SeqID_127174
tgggaggctcgctgctggacaggcgtcgaaggacatgaggngaatttgatgaaatttggcgcagagctgctcggaggcggaagatggctaggggttgacagtggacgaaatcagagccgacccgggcaaattcgaggtgcagacaaccggatccaccacacaggcagccggatttgaaccactggaggccgaatcgactccgaagacggccgaggcgagggggaaccgagcagatcgaggcgacgagtggaaggatccgcccgcaagaagggggagaaagagaagcagagctttattttattgagactcaccttctactagtccgttggtccgttacgttatttgttacgttaagttacgtt

SEQ ID NO: 61201 - DNA, 213 bp, Setaria italica
  Peptide Sequence Number=SeqID_127175
aggaacgaaaatacaagaagaccgaacccgggacaaaattacgaaggtgcagacaaccggatccaccacacaggcagccggatttgaaccactggaggccgaatcgactccgaagacggccgaggcgagggggaaaccgagcagatcgaggcgacgagtggaaggatccgcccgcaagaaggggggagaaagagaagcagagcttatttatga

SEQ ID NO: 61202 - DNA, 242 bp, Setaria italica
  Peptide Sequence Number=SeqID_127176
tggtcggtcggtttgtcttaacttttacgtagaagaaggaggaggaggaggggtcgagagagagggaggggcagggaggagcggcgtctcagaggtagggacgaccagcatttgccctctccctctctctcttcctcaatcgcgcacaccaccaggcaggcgcggctcggcaggaacagatttgatctggcggagcgaagagaatcgaggcaaatccctttcgagggagggagattttcgag

SEQ ID NO: 61203 - DNA, 458 bp, Setaria italica
  Peptide Sequence Number=SeqID_127177
cgtcaatgtgctgtatttgtgttggtaacacacccaactatactgtgcaggtaactgatgttgctgatgctatgattctaaaccggctgttcagacaattgttcagtaaaggcgttgtacgtagctaccattttcttccactttctggagtgactaaaattctcaggttatctatacaatacatcaacttttgacatggatttatttgcatctcttgtgctcagattcttgtttcgacttctaaccgcgctccagataagctttatgaaggtggcttacagcgggatcttttcttgcctttcattgacaccttgaaagaaaggtgcattgcgcatcccattggatctgcagtggactatcgtcagttgggttctgtatgtgaccaatttctgctagctagtagtgtcagtttggtttcttctgccctatttcctttttcttacctattccttttgaac

SEQ ID NO: 61204 - DNA, 328 bp, Setaria italica
  Peptide Sequence Number=SeqID_127178
tagtagtaattactttggtagggtctttcgtaagtcttaggtttgtctttctaactagcagcagcagccattgcaaggcgtagataatggtgctgatattgtactagcataagtggcaacatcactgtttgcctcatttgaaatgatcttgtattcgccccacttggcttacataggcaacagaaaagctctgcttttccaacagtgaagcatgtaaatgtgcaataagctgtgttaagtattttcccgaacggtgggtgacccataaaatgttactcaatctttactgagtttcttaaagaaaattgtactgtagcacatgttattc

SEQ ID NO: 61205 - DNA, 357 bp, Setaria italica
  Peptide Sequence Number=SeqID_127179
ccaatttttttttgctccctccctcaatcggctccagtcatcgcgattcgcggagcttctccgctgaagccattcgccatctcgtcgtttggtagggctccagcttcgaccggtggagatgccgaagagggccctcccaaacggggcctaagcactccttttctggttccataacttccgtgtggtgtttgtctagaaagtggtaaaaataaagacatagtggaagatgagatcagtagttcggtcgctgcggcagctccgccgtttcacccagcaccatgcagagagccactcatcaacaaccagattgatcaggcagcagaatgctttgatcatgtgcaagttcgaacaatacca

SEQ ID NO: 61206 - DNA, 375 bp, Setaria italica
  Peptide Sequence Number=SeqID_127180
gaatgtacatagtcgcttcagatgcataaaggtgtttcagatccccttgatgttgtagcagccgagatttcagatgaggccatcatattgtgtcttgatgagtttatggtaactgatgttgctgatgctatgattctaaaccggctgttcagccaattgttcagtaaggcgttattcttgtttcgacttctaaccgcgctccagataagctttatgaaggtggcttacagcgggatcttttcttgcctttcattgacaccttgaaagaaaggtgcattgcgcatcccattggatctgcagtggactatcgtcagttgggttctgtatgtgaccaatttctgctagctagtagtgtcaatttggtttcttctgccc

SEQ ID NO: 61207 - DNA, 370 bp, Setaria italica
  misc_feature (341)..(341): n is a, c, g, or t
  Peptide Sequence Number=SeqID_127181
agaatttactagaaaaaaactaccggtgatagatttttcacactgcagcctacgctttgcttatctccaaataatggtgatttctcaggttatgtatgagaacaaagcaaggctgttgtgtacagcagaagctggaccaatagaactgtttgagaatatcgtgactgttgctgaagcacacaaggtttcaccaaggtcatcacgctcacagaaaagcgatgatcccgatctatgtgtggataacgagcttggatttgccaaggatcgtactattagcaggtaaccggaatgggtgctacttttaagtttcctgcaggctgcagatttcatattagtgcctntgcctgccatgtcaatcactgatgctgtg

SEQ ID NO: 61208 - DNA, 147 bp, Setaria italica
  Peptide Sequence Number=SeqID_127182
tataacctagtagagacttgtgaggcttcgaagctaggttgcttcaacagcagcagcaaccattgcaaggcgtagataatggtgctgatgttgtactagcataagtggcaaagagtgatgttgccacttatgctagtacaacatcag

SEQ ID NO: 61209 - DNA, 284 bp, Setaria italica
  Peptide Sequence Number=SeqID_127183
cgaaaacgaagtgcgggtgtggatactcagaaactatagcttgttacccttgattcttttgtatgtaatatgggctctgttagacctcactgtgtgatacaaggtattttcaactttttcaggtattaagcataaaacaaagttacattgggttctgatatgtcacttttttccaccagttgtaaccccaactacaacattgctcaccaattttcccttgtcatctactgtcattggattttcaacaacaacagttacgttctgtgattgactcattggcgcgg

SEQ ID NO: 61210 - DNA, 354 bp, Setaria italica
  Peptide Sequence Number=SeqID_127184
cacaaacaagaaacattgtaggagttcaaaacaagctgcattgatgtgcagtaatttattttcagaagaccttgtggagaaagtgtttaatgttgacaatgggaagtacacctataaccactatgcacttgctttagttgcgcatgctatgacttatgcagcaaactcaggatttagtctgggaagaaagatttttgttcagtatgttacttatcttttggagaaggcaaatgatacatcatccagctcatttaaatgtttagttgtattttcttgttgtctaagttcttcccttgtgcttttcattctttgtaaattctttttggtctaactatttttcttatttttaacgtt

SEQ ID NO: 61211 - DNA, 187 bp, Setaria italica
  Peptide Sequence Number=SeqID_127185
ggaggaggaggaggaggaccggggcagcagagcctccccgccgggtcaaagcagagccacgaaagatgccaagggcttgtatatatgtgaaatacagaaggctcagcaagttgttgctgtaactggatcatattctttacgccttatgtatgtcctgtaatctgaatgtctatcttgaagtttgata

SEQ ID NO: 61212 - DNA, 244 bp, Setaria italica
  Peptide Sequence Number=SeqID_127186
gactcgaacaactccgaagcacactagccaacgagatagcgaaccctaggaacccagtggccatctttggagcggccatgacggtggatcagaagcaggccatgccgatgcaggcgcaggccatgcagcccggaaggtgagatcatccttccaatctcccgcgatttctttcgatgtgctcgtttgttagggtttgggcgtgtcgaatccagtggggaacgggtgcctgcacatggatcggggt

SEQ ID NO: 61213 - DNA, 418 bp, Setaria italica
  Peptide Sequence Number=SeqID_127187
cccaactgcagaggatgcagccagggcctatgaccaggcggccagagcgatgtatggagaagtcgcccgcaccaacttccccagacagaatgcagtggcctctagccaagttgcttgggcggcaacccctgcccaggttgctccatcagttgttgaaggtgttgtacatagcacatcatgcgagtcaacgacaacatcaaatcactcagatattgcatccaccttgcataagccggaagtatccgacctttcaagctctgtgaaggtggagtgcccagaagttgtggaggctggttcacgtaggtctgagatggtatctggtacttcgcatcagcatgaagacagccatcccagtacccaagctaagacaacaacccaaatagtaaggtagaacaaaggaaagtacttacgaagacca

SEQ ID NO: 61214 - DNA, 238 bp, Setaria italica
  Peptide Sequence Number=SeqID_127188
atcgacttttctttctcgacctctcgctagtcttcccgactcgaacaactccgaagcacactagccaacgagatagcgaaccctaggaacccagtggccatctttggagcggccatgacggtggatcagaagcaggccatgccgatgcaggcgcaggccatgcagcccggaaggaagaagcgtcctcgcagattgcgcgatgggccaacctcagtggcagctgtcatccagcggtggg

SEQ ID NO: 61215 - DNA, 238 bp, Setaria italica
  misc_feature (52)..(52): n is a, c, g, or t
  Peptide Sequence Number=SeqID_127189
aacttggagatgtgggcgagtatgatggactggtgggcgagtaagttggacnggtttcttcgagggcctgtagtcagtgaactgaatttctgtttggcctgctagccaatgatcctcagcccatttcattgctgagcttgtggagggcaaacggtctatcataatttggagaaaccttttgttctgtaaggccagaactggtgatgtaaatagttcccaccttgtggaaggaaacgaa

SEQ ID NO: 61216 - DNA, 418 bp, Setaria italica
  Peptide Sequence Number=SeqID_127190
aaagatgtcaatatattgtttgctatacacatctgcttccatctgtggagaatagcagtttcctgactctcttcgaacatgatatccatttcagctaattacatgccaggttgacagcttgatttcagatcctacctaacaaatagtgataccaacaactgggagaagagaataaattcgctgacaacgacagcaggggagtggatgcctagaaaagggcacgatatcaacctgcaggaaattctccactgcagatccaacagtcgcaccagctgcaagtcccccgacggtgatcaatgcagccttacctgaatatctgtatttgtttctgatgggctaatactatgtgccctcttgaagattagctaaacttttcttttcatcaggagctcataactctttgaaccaaacctcactg

SEQ ID NO: 61217 - DNA, 251 bp, Setaria italica
  Peptide Sequence Number=SeqID_127191
aaatacaatgacgcaccaaatcctgttgctaggataaaacctggaacatcagggctagtgtatgccgatggtaaagatgtagagcttccactagcatatgtgaaaaccatcagtgcaccataaacgcatgactggatgcccaagctgctcgaagatggagtctcaatgtaattaggtgctatttctttctattggtttgtccttgtctattcctacttgtcgggtacttagtttccctttgttctttcctt

SEQ ID NO: 61218 - DNA, 180 bp, Setaria italica
  Peptide Sequence Number=SeqID_127192
atatctgtgattatttcacttatttgaaggcatctttctctcgattgactgtaggcacggccgattcttcgagatcaagatagattagaggaactagctgaccccaggcttggcgcccagtacccgaaagatgattttgtgcgggtgtgcacaatcgcagcagcctgtgtttcaccagag

SEQ ID NO: 61219 - DNA, 275 bp, Setaria italica
  Peptide Sequence Number=SeqID_127193
aaacttaacctccatcgactactttcctattataatttcagagatattattacttatgtttttttctttctaccctttttagtgcagttatgatctattaattcttttggttatttgcatttctggtaccagcgatgccatgttcaatgctgcactatccaaaatttttatcacatctcactcttggtctgcaggttttggacaaacatttgtcaattcttgcgaaacagcatgtagagacacggtttattaaggttcatgctgagaaggctcca

SEQ ID NO: 61220 - DNA, 286 bp, Setaria italica
  Peptide Sequence Number=SeqID_127194
taaattaagtaaagtactaaagtctttctttcgtcttttttcgtcttggtatttcaagattgacaaagaggatgagcagtttgaagcagacaaggagcaggtcattaaagaaatatcggcactttgagtatgtctcaggatgtaattagtccttgtgatggtttttctttgttaagaaagtgcatgtgtaataatacatttctgtgtggtattctgtcggacttagcggaacaatatgaccaaattggagttggatttctgccatgaaaaatgtgataatttctat

SEQ ID NO: 61221 - DNA, 389 bp, Setaria italica
  Peptide Sequence Number=SeqID_127195
gagtcaaataaggatctcttggacatcttaatttcagggtatgagaatatggacattgctttacattatggtgctatgttgagggaatgtattcgccaccaaagcattgcaagtatttgttcatccataggtatgttttagaatctgaacacatgaagaagttcttcgactatatacagcttccaaattttgacatagcttctgatgcttctgcaacctttaaggaactattgacaaggcataaagcaaccgtggctgaatttctcaccaacaattatgattggttctttgaagaattcaactctaggttgctatcatcaaccaactacataacgaaaaggcaagctatcaagttgctgggagatatgctgctagatagatcaaatgtt

SEQ ID NO: 61222 - DNA, 179 bp, Setaria italica
  Peptide Sequence Number=SeqID_127196
ccaagctacatccattaagtactcaaaattgttgaaattggaagctcctttggaattggtactaatttgttatatagtatttgttcatccataggtatgttttagaatctgaacacatgaagaagttcttcgactatatacagcttccaaatttgacatagcttctgatgcttctgcaa

SEQ ID NO: 61223 - DNA, 364 bp, Setaria italica
  misc_feature (172)..(172): n is a, c, g, or t
  misc_feature (249)..(249): n is a, c, g, or t
  misc_feature (263)..(263): n is a, c, g, or t
  Peptide Sequence Number=SeqID_127197
ttctttccctattctttctatttcttttctagttagttttgttcggtcttttgtctttacttgcattgaactggaatagtaatcgagttcctcagcttatgtcatcggggttgctagccttcttggtacattggtgaaaccactgatcccagctgcctccaccggtttttanggtgctgtacatatgaagttcttctttttggtcacctagctactactatgactctctgagtgccttccagaaaaagngaaaaaaaaaaggnggaaaagaaaaaagaaaaaaaatgtaactttggcagttactgttatcctgagatttgtaaacgtgaacatgcttataaatgacatagtggatcacgatatt

SEQ ID NO: 61224 - DNA, 210 bp, Setaria italica
  Peptide Sequence Number=SeqID_127198
tgtactagtccaaaattttctcaccccttgcatttgtttccctgcaaaatttgcagaatcctggttctgtggttcctaagattggaccagaccatgccagcccaatgaatgatgggacagatgccacagactacctattccctgaggatcttcctgaggatcttacagtatgttgtatcctggtaatgatgacttcagtaatagtatatt

SEQ ID NO: 61225 - DNA, 213 bp, Setaria italica
  Peptide Sequence Number=SeqID_127199
aacattaatttctgcagtcagtcaaatgattcgatgcaacatctgaaaaaaatacaataataatgcgctggcgagatgaatgcagtgtacctgtctggtcggcgatctgtactttgaggaagatggtgtcctcctcggcgttgagctttgccggtgatggtcatgtccgtcctgatgggggtaggaggttctgcagtcctcctcaacatcgga

SEQ ID NO: 61226 - DNA, 257 bp, Setaria italica
  Peptide Sequence Number=SeqID_127200
gtcttctgttattttctcttaggaagaaaatatcacaaacagttggtggcatactgcatacttttccttattgaaatggatagcgcagtaataaccataaaagtacagcagaccaaataaattggaatctgatacatactttaagctctagtaaagtcattgggtctttgtcaacagcagctgacctagatttatattgcaagagtacaatgaattgcattgcatgggtcacaaaaacctgttactacgataattta

SEQ ID NO: 61227 - DNA, 487 bp, Setaria italica
  Peptide Sequence Number=SeqID_127201
cagatagtattgagcgaggtagaatgactagctctaccagctttcttgaggtcatccacaaatactttttcacgtccttccatagcagcaaggcattttgccactcgagcagcatacaactcagcacggtgcccctgacagccacctcgtatagcttccatgacaagatatttgagctgctctgtgctaatattaacatccttcagatactctcttgccaaaattatctgtgtgaccatgtggtcccctgagtttttgcaacttcagtttcttcttccaccattttgaaaacctctttgctagactcctgaaactgtgttgcaatttccacggctgcaacgcggtcatcaaaactcattggaagatcagcaagatccttcctccgggttgtaagtagcaattaaaagtggtttgcagggatgacgaaagctaatgccctctctttccacaatgttaactccctccgtcaagacattcagaagtagat

SEQ ID NO: 61228 - DNA, 208 bp, Setaria italica
  Peptide Sequence Number=SeqID_127202
cttgatggtggtagcaaaacctcagcataatctccacgaaaaggaataattgaaacctgatctcggctggtgtagctttccgcaagcaacttcaatgccgcaccttttgcattttgcatacgattcagagccatgctaccactagcatccacaacaaatatgaccaagaggtgcggcattgaaacctgatctcggctggtgtagcttt

SEQ ID NO: 61229 - DNA, 368 bp, Setaria italica
  Peptide Sequence Number=SeqID_127203
tcagatagtattgagcgaggtagaatgactagctctacagcttcttgaggtcatccacaaatacttttttcacgtccttccatagcagcaaggcattttgccactcgagcagcatacaactcagcacggtgcccctgacagccacctcgtatagcttccatgacaagatatttgagctgctctgtgctaatattaacatccttcagatactctcttgccaaaattatctgagtttttgcaacttcagtttcttcttccaccattttagaaaacctctttgctagactcctgaaattgcaacacagtttcaggagtctagcaaagaggttttcaaaaatggtggaagaagaaactgaagttgcaaaaac

SEQ ID NO: 61230 - DNA, 206 bp, Setaria italica
  Peptide Sequence Number=SeqID_127204
cagagataaagagcattgtcgcatggctgcaggagaaccatgatggttcaactgggctgagtactgacagcttagtggaagcgggttatcctggtgctgctgcacttcgtgaggttgtgtgtggcatggcagccataaagatctcttcctgccgttctcatctgcatccactgcttcatgcttagctccaccccacttgatctcct

SEQ ID NO: 61231 - DNA, 389 bp, Setaria italica
  Peptide Sequence Number=SeqID_127205
ccattgcattcctgttgattgaatgttttaagcctgatttccagattttgatggtcaactcctgctgcagtcgggacctttcagagaaagttgttggagtttgctttgtagcacaagatttgactgggcagaagatgattatggataaatatactaggatacaaggagactatgttgccatagtgaagaaccccagcgagctcatccctcccatatttatgatcaatgatcttggttcctgcttagagtggaatgaagctatgcagaagattaccggtatgaagagggaagatgccattgacaagttgttaattggggaggttttcacccttcatgattatggctgtagggtgaaagatcatgctactctaacgaaacttagcatactt

SEQ ID NO: 61232 - DNA, 357 bp, Setaria italica
  Peptide Sequence Number=SeqID_127206
ttttttaagttaacttaagtagtagggactacggaaccagaagatgagatcaagtggggtggagctaagcatgaagcagtggatgcagatgagaacggcaggaagatgcatccacgatcttcgttcaaggccttcttggaggtggttaaatggagaagtgttccctgggaggatgttgaaatggacgctatccattctttgcagttaatattacgtaggactaccctagacaaagatgaagatgccaacagaaacaatgtaaggaccattgtaaaagctccatctgaggatacgaagaagatacaggggctacttgaactaaggacagttactgatgagatggtccgcttaattgag

SEQ ID NO: 61233 - DNA, 485 bp, Setaria italica
  misc_feature (151)..(151): n is a, c, g, or t
  Peptide Sequence Number=SeqID_127207
cccagctggcatccagccactcagtccaacttttggagaaattcttctgtcaagcatggtgtagtattgagtaaatctttagttgtagctgataaaaaaccttgtagaaaaaggcaatgattaactgtaaaagagaagaggaaagtagttnaaaggacacaggcaacaatagttgctgctacaattgaaggtattccaagcaacattgacctcttcaaggaacttatgcttccttttgtaataatggctgaaaaattcaagaaactgcaacgctgggagaacccacgttcgaccatttgttttctactattagttcatactgttgttttcaggaacatgctttcttatgtatttccattcaccctgatgatgatggccctttccatgcttgccgtgaaagggctgaaagaaacaaaggcaaggactaaggtaagaatactttacggacaaaagtagaacaaattaagggaatacaaaccgaacaa

SEQ ID NO: 61234 - DNA, 393 bp, Setaria italica
  Peptide Sequence Number=SeqID_127208
ttgtatgatggccctttccatgcttgccgtgaaagggctgaaagaacaaggcaggctaggtagatctttcggcaaagtgacaattagggatcaaccgccgtcaaacacaattcagaagatcctagcccttaaagaagcaatggcctccgtggaaaattatctacagaacctgaatgtctctcttctgaaatccgcacaatctttttagctggccaacctgaggtaagataaaatgaattgtattattggtcacgttggtgtcttagtgacaagctgtcagataatggaattatcatatcttccctaagtatttgttggtcatctgacaggtgacgacacaggttgcgcttgttcttctagcatcctcagtccgttcttcttgtttttccgttc

SEQ ID NO: 61235 - DNA, 251 bp, Setaria italica
  Peptide Sequence Number=SeqID_127209
aagagacaagctctagggaaatggagcttatgcaagagctcgatagggagagaggcctcgagatggaacgtgaagtagaaagacagcgacaattggatattgagcgtgcgaagtctagggaactgcagttcaaccttgacttggaaaaagaaaaacaaactcagagagagcttcaacgtgaactggagcaagtcgagttggggctccctgcctcctgctgtgctctgccgccatccctttcgcggtaccgc

SEQ ID NO: 61236 - DNA, 227 bp, Setaria italica
  Peptide Sequence Number=SeqID_127210
cagggacttcggtgacgccagcagcatcggtgaccccgagttcgatgggccgaggccgcaagggccacgaggcggcggtggcggcggcaagtcgtcgtcgtccaggcaagttgtggagcggagggagcgtgatggcaccagtgccggcacaggcagaagggaagggaaatgggagaggaagcactgagacacgcaaaaggggataggcaaggcacacaggggatagg

SEQ ID NO: 61237 - DNA, 279 bp, Setaria italica
  Peptide Sequence Number=SeqID_127211
tccggtcgaagaatcatagcggaaaccaagttcacccggcgagagctaggtgcgggaaagggtccgatggatcagcaaccccaggttatagctccgcccctttccctcttcttgctccgtgcataagattcggatcgaacagtttgattccccttccacctctaggttttggattggactcacgatcgctttggatctctggatttctcggattggacagttagtttggtcctgagtccagattggggctttctttggaccgcgtctggatcttatcgg

SEQ ID NO: 61238 - DNA, 229 bp, Setaria italica
  misc_feature (45)..(45): n is a, c, g, or t
  Peptide Sequence Number=SeqID_127212
caactggtgcagagcatgacttgcaccaagcaaaatctaacaggngccattgctattgttgttttgcagatgccaagaagaacatccaggctttcgctcaaaatgcgctcgcttcccgcgtcacatcatcgctgcaatcagcatttggggtcatctgaaatcccatatggagtctacaatttgtcaaaactcaaaagggcgaccttgcaaggatgcaactccaccggcg

SEQ ID NO: 61239 - DNA, 289 bp, Setaria italica
  Peptide Sequence Number=SeqID_127213
gtgccttgatgcagagtctctggctaggatgaacaagaaggactcatggctgttttggttggactctatatttggctgctgctgcatggattattcttgggatattctcgctcatcagacttcaagcagattaccttcttgttattggagtttgcttgagtctcagcattgcaaacattgttgggttcaccaaatgcaacaaagatgccaagaagaacatccaggattggactaagaatgcccttctatcagggagcgtcaggtcacatctgcagtcaagcaatttaga

SEQ ID NO: 61240 - DNA, 300 bp, Setaria italica
  misc_feature (272)..(272): n is a, c, g, or t
  Peptide Sequence Number=SeqID_127214
ttaagtaattaggtactaataagtaaggtaatagacggacccttaccaataccctagacaagaagccaattgtgatcaatatcgatcacaaagtccttgtggtagcaaccatcgaccttgtctcgcactacctgcacgacatcagggttcaatggcagctgcttcaagcctgctcgctgattccgcacctgccattgcttgtatgtctcagggcgctccacccgatctgtacccctcacacgcaatgacattcagggcggccctcccaaagntgttctgctcaatcagcatcctctggtt

SEQ ID NO: 61241 - DNA, 371 bp, Setaria italica
  Peptide Sequence Number=SeqID_127215
agagcattccttaatacttttcctgcagcattgctttctttctttttaatcatttggctgaaagtcttgatatgctgcagggaacactcatcgatggatcagtatttgattctagctatgacagaggtgacccatttgaatttactcttggaaatggacaagtgataaaaggttgggaccaaggattactaggtatgtgtgttggtgaaaagcggaagctaaagatacctgcaaagatgggttatggtgagcgaggctccccaccgaagattccgggtggagcaactctgatctttgacacggagcttattgccgtcaatggaaagacatctggtggtgcaaaggcagaaagtctaactagtcgtagtctt

SEQ ID NO: 61242 - DNA, 261 bp, Setaria italica
  Peptide Sequence Number=SeqID_127216
atctctcccttattattgtcgcagtcttctcccacgaaggtttcagtcgattgctccagtaacaccagggggcataaaagttgacaaccaaaacaggatacctaaaaaggaataagagcaggataactaagcaatattagggatcccataaaaaatacagtaggggtgaaatactgcaccaaacattaggtgacaaataaagaatctggccaaaagaattggagctattgagatacgctgaatataaactgcgacatgaat

SEQ ID NO: 61243 - DNA, 252 bp, Setaria italica
  Peptide Sequence Number=SeqID_127217
ttttttttttttctctctgcagattctgcgaatgggcaatctacaagaacagcaggttaccttgctcaattagcacggggttcactcacaaggatccactgtcttatttgtaagtgatgtagcaaaacagtgatgtccctagtatcaagttcatgacccctagttccaactctgtcaaccccacgttttccctctttaatatatccatcagcatgaatccatgtataacaaaacaatggctaccaagcgccc

SEQ ID NO: 61244 - DNA, 338 bp, Setaria italica
  Peptide Sequence Number=SeqID_127218
aaaaaggaacggacaagggactaggaattaaagaactgcaacaagaagtagtttacaaggaccctacaaggaattgcagttaatgatgaactccgggttctggaagattcactccattcaagctttgactgcctagcgacaggtggccgtcttgctgtaatctcgttccacagcctggaggacagaattgtgaagaagaccttcttggagctcatccatgggggtgaagctgatgatgaagaggatgatgaagacgacctggcactccctgacatcgatgatgaagatgaaccatggtttaaccagagactgcaaaggaaggaacgggatcgtcctca

SEQ ID NO: 61245 - DNA, 473 bp, Setaria italica
  Peptide Sequence Number=SeqID_127219
cgcatgaagttactaggggcaaccaaatatatacagtggaatagcgaggcgagtaactgtcatgcctaaaatatactgtggatgcagaggttttcttgtatccctgattatatttgtgacaatttgaggtacccaaaaggagtacatcaggagaagaagtgggcgtaagaaattgtgcaactcatacattagaaggattcctcccaaaagaatgccataaaagcggctgtaaagaacagacagctctcgcctcattatctcccaaccttctccactgtttaaaggcctacttgctttccatatggcgagaaggtacctcatttcaaaaatagaaaatacaaccaatatccccagcagtcaggtgaagtagacacagatatgcatccatgatagcttgttggccaatcattaaaatagaaaccttagcagctcctgattgagtgttgctattgtcttcctatttttgtttcgtt

SEQ ID NO: 61246 - DNA, 424 bp, Setaria italica
  misc_feature (16)..(16): n is a, c, g, or t
  misc_feature (233)..(233): n is a, c, g, or t
  Peptide Sequence Number=SeqID_127220
catccatcatgttcanatttatggtacatctcttgtggatttttggcacaatatttgctcaacaccgtcccagtgttaattggaccctctttttgctgaagcggtacctcttgacaggaatccgagatggtccccatgaaccattcattgcagactcagtagattttgttgtgggtcaggtcgagacattgtcaagagatgacctttcatcaaggttgatgttaaatgttaangtttcatcagttgggtcattgatgctacctgattcactcatcactataatggatacaaacgactactctgctgttccccagcagttgaaggaccagttgaatgaaaggtatcctggtgcaaggcgtgctgtactgaagactggtggcgatttcccttcctgtcccgtccagattgaagtttaattcttgtt

SEQ ID NO: 61247 - DNA, 224 bp, Setaria italica
  Peptide Sequence Number=SeqID_127221
tacgaactttttacggaccaaccaaaactaactttacgacctaccaaaccaacccgtacccaaggaagaagtgaaagtccttggtcctatcaaatacttttcttgagacacacaagtttgctgctgccatgccatggtctccagtgaatccgagatggtccccatgaaccattcattgcagactcagtagattttgttgtgggtcaggtcgagacattgtcaag

SEQ ID NO: 61248 - DNA, 322 bp, Setaria italica
  misc_feature (312)..(312): n is a, c, g, or t
  Peptide Sequence Number=SeqID_127222
gcccctgtgacctgacgaagccatgagcaccgcgacggcagtgatgaacatgaacagcatgaaccccgagcaggatgtaagtcctccgcgacgacctccgggtactctccgaacagaacgacgccccagaacgtgctcacaagcggcaatgcctgaacagcatcagcagcagcgtaagccagcagcctggccgcccatgaactggagcccatttccgaagccaccgatcaggccggctagggaaggggccccaaactaggaaccccgggacctttttacccaaaatccggtttgatgtaggccctgaaaggnggacttgggc

SEQ ID NO: 61249 - DNA, 219 bp, Setaria italica
  Peptide Sequence Number=SeqID_127223
gcggtgtacaccaccaggtgcggcacacccttaaggatggcgtgccactggtcgttggtggccaggttgaacgccggtgagaagagcgagaagcacacaccagagaagaagacaatgccaagcccaatgaaggtgcttgatccgaagaccttaattgatcgcccctcctttccccctggtcctctgcctctcccagtctccctggctcgcttcacagat

SEQ ID NO: 61250 - DNA, 237 bp, Setaria italica
  Peptide Sequence Number=SeqID_127224
cacggcggcgaggaagttggtgagggagtagtccaggtaggtgtgctgcggcagccggccacggcgctccagcagcgtcagcagggccggccaggtgcccaggaacaggagcgacgccagcatcagcgcgatggcgccggccttgtcctcgatcaccagcatcttgagggctcctcctgcgatcaccttgtcccaagcgctgagacacgcaacaggggatagggagacgacacaggg

SEQ ID NO: 61251 - DNA, 141 bp, Setaria italica
  misc_feature (139)..(139): n is a, c, g, or t
  Peptide Sequence Number=SeqID_127225
cgttgtcagctgcattggaggcatggacagcggagccgaggatgacggcaacaaggaagcacgccacaccagggaagagtatctctgccctgttgtattgtcggtttgttccttaggttaagtttagttttcttatttntt

SEQ ID NO: 61252 - DNA, 259 bp, Setaria italica
  Peptide Sequence Number=SeqID_127226
ttttctcacatctataacaacaaacagtcactaatcttatttccctctttctttttcaaatgaatccccgtactccctttgtgatacaatagaacatttacattctttaatccattgacccgtgtttacaatattgctccatacatgaaatttcatcctggaggagttgatatgcttatgaaagctgctggaaaggactgcactgctttgttcaataaataccatgcttgggtaaatgcagagttcctcttggagaagt

SEQ ID NO: 61253 - DNA, 144 bp, Setaria italica
  Peptide Sequence Number=SeqID_127227
tggatgtacaactaaggcaattgagaaggcggctgacaacccaaaggttgtcgaagcaattggagtgcctatagtcagaggaccgtggtatgaagctttgcttgcaaccttcaccaacgttttctgctgctcatcatctgaagg

SEQ ID NO: 61254 - DNA, 235 bp, Setaria italica
  Peptide Sequence Number=SeqID_127228
cgacctgcttcgcgaagaaggcgcccatggcttccagcgggttggtgccgttcttgccagagctattggaggcggccattataaatataggatcctcgcctcgagctctgacatgtgccgatggttgatctgtaggggctttggccttggctgatcgatccggatcggaggaggaacggggaagcgaggcgtggtgttcttgcgagctccgcagctgtttcctcaaagatttcgg

SEQ ID NO: 61255 - DNA, 373 bp, Setaria italica
  Peptide Sequence Number=SeqID_127229
tcagtgccataccagtgattgaaagggaaggaagctttggaagaaataaatgttagaatggggcttgcttttgatgaacaagatatcaaatactacacccaccttttcagagatgacattaaacgcaatcctactaccgtggaactttttgatatagcacaatccaacagtgagcacagcagacattggtttttcaatggtaaacttgtgatagatggagaaaccatggctagaactctgtttcagttagtgaagagtcccttgaaagccaaccccaataactctgttattggatttaaggacaactacgaagtagacaaatacaaaaggaataatacaaagtaaaatacaagttaaacgtaacccgaacaaa

SEQ ID NO: 61256 - DNA, 177 bp, Setaria italica
  Peptide Sequence Number=SeqID_127230
atgccgcaccccgagcgttccttcatgatgtggcagtatccgtggtatcccaaggattggcaggttgagaagagtggccccagtccttggcgcttaattattgaaatactctgatactttaacataggtgcaaacataattagatcatccatagcacatcagttctgcagcagaaag

SEQ ID NO: 61257 - DNA, 296 bp, Setaria italica
  Peptide Sequence Number=SeqID_127231
aagcgttgtttggataacttaagttgtcgcgttgagcatggcatgtgttattttgaatactctgctgcagaactgatgtgctatggatgatctaattatgtttgcacctatgttaaagtatcagagtactttcaactaattaagcgccaaggactggtggccaaggaagcgttgtttggataacttaagttgtcgcgttgagcatggcatgtgttattttgaatatgaggatatacctcctgttctgttagtcactttgcccgataattatatgccctagttaaaacttggttagt

SEQ ID NO: 61258 - DNA, 416 bp, Setaria italica
  Peptide Sequence Number=SeqID_127232
agattattttccaaccacgagaccgaaagctttttattaatcgccgctggcacaacccttgcatccgcaatggacgcattctatcactttctcctccctgaggtgcttggggaccctacagacgcaagtggtttgcaaagttgtggtctcgtgtttgtatgcatcggaggcaacagaggcgtcttctattaacctggctttttccactttgcaatcagattgcgatcagcatagccttggtccaagcaaaactcatatagctcttttgatatttccttccttcgatagtaaagatcgtatatgtagcgactcttctgatgggaagaggaagtgtgaagctctatggcccatcttccgtattctcatcagaagagtcgctacatatacgatatttccttccttcgatagtaaagatc

SEQ ID NO: 61259 - DNA, 248 bp, Setaria italica
  Peptide Sequence Number=SeqID_127233
cattgcggatgcaagggttgtgccagcggcgattaataaaagctttcggtctcgtggttggggaccctacagacgcaagtggttgcaaagttgtggtctcgtgtttgtatgcatcggaggcaacagaggcgctcataacctggctttttccactttgcaatcagattgcgatcagcatagccttggtccaagcaaaactcatatagctcttttgattatttccttccttcgatagtaaagatcgtata

SEQ ID NO: 61260 - DNA, 298 bp, Setaria italica
  Peptide Sequence Number=SeqID_127234
agggttcgtccacaaaatcagcttaggcaactgaaataattgctcttaacactctccttcacttgcagtccatcaagcctgatcttgaggttcatgcagagccgatcgtggacccttaggccctccattgttgaccaaggtcttgaggccatcattgtcaggttaggattctcttgccctacatatttcttatatggaccatctcatttgcccagtagtgccctagtaggcctgaccaaagtgttggctcagctcaattgaatgcccaaattcttttaagtcttgtattatttgtttt

SEQ ID NO: 61261 - DNA, 230 bp, Setaria italica
  misc_feature (227)..(227): n is a, c, g, or t
  Peptide Sequence Number=SeqID_127235
actccacaagaacttgatgcgatgaaggagtgcatgccagagccttatgcagaacttgtcgagaactgcaaaatcttggaaaaacattacaaagaaatgatggtggagtatactgtccaattatcaagctttctctttctatgacattgagttcactgttcaagaaaacagactttggatgcttcagtgcagaacaggtaagcgtactggcaaaggtgctgtaaagnttg

SEQ ID NO: 61262 - DNA, 448 bp, Setaria italica
  Peptide Sequence Number=SeqID_127236
cagacagatcacataatggtaaatattttcagaagcctttcagagtgagagcaaactttattgtatatgaaaggatactgcttagatatttggatcttggagtgtagatgtcttcacacctagggcagtaaatcttcacagaactcgaacgaggaatatccgattgcccaactggaagacacggttgaccactgcaattcactcgagggcatctgccgaagtcaacattcttgtacttatccaacatcgcagccagccctttacttgtaatgatataccggacatgaatcagtccatagagcatctcagcagctgattcaataagttcattttgctcttctgtgaacatatcgccatgggaagattcaacatccaatatcagatcaagagcataatcgtaatatggaaccttggttgctttaacccacagagattgatgaagactaca

SEQ ID NO: 61263 - DNA, 337 bp, Setaria italica
  Peptide Sequence Number=SeqID_127237
caataaacggcaacacacagacagaaaccagcagctcacaaggggctattgaacgcagatgaatctttaacatcttcagccttcaaatttctcatggcttatgaattttgaacccaaataccctggggatgtattgttgcgcgggcttctggggcttcaaatgcgggtatgtcatcagaaacaagtgagtaaatgttgttccgaagtaagttccatcgatgtctacatgacaagtcaagggaagtgcatgatggcctatgtttcaaataacacgaaacacaattcttacaacggtacaggaaaaatgaggcctttctttctgacggtccaaaaatca

SEQ ID NO: 61264 - DNA, 401 bp, Setaria italica
  Peptide Sequence Number=SeqID_127238
agaaagtaagttccatcgatgttgcttagatatttggatcttggagtgtagatgtcttcacacctagggcagtaaatcttcacagaactcgaacgaggaatatccgattgcccaactggaagacacggttgaccactgcaattcactcgagggcatctgccgaagtcaacattcttgtacttatccaacatcgcagccagccctttacttgtaatgatataccggacatgaatcagtccatagagcatctcagcagctgattcaataagttcattttgctcttctgtgaacatatcgccgtcagcgagcttgctcatggacatcgcggtggatccggagccggagcggggcacctccggctgcttgcccgcgacgatccgctccttctcgcggcctccgga

SEQ ID NO: 61265 - DNA, 413 bp, Setaria italica
  Peptide Sequence Number=SeqID_127239
gtccatctaggactactcgatgtaaggttgacctacaagtagtgaaaaacaaagtgtaatgcaccataagagaacagtaacaataagagcatagaaaaaagttcatcagcaattttcgtcttcaaactgacagcttggtgtggaagcaaacattatttagttctcccaatgataagcaagtaataatagtatctagatgccaataaaagaagtcttgccactttgctagatataagttggcctacctgaaaatgcagttactccacctttcaagcatatcaccaaggtttgacgatgaatcctcctttcacaggagctacatattcacacacttgaggctgagcattcctgtccttacatatttgaagtccaactacatcatcggttgccaggaagaagttaattaaggacca

SEQ ID NO: 61266 - DNA, 241 bp, Setaria italica
  Peptide Sequence Number=SeqID_127240
ttaaggttactttaatttacttttagtttttaccttaagttaacttaaagggttaaaatttgttacgttagttagttcgtttcttcgttcctattcttaggtacttacttcgtattgttaaggttgacctgaaaatgcagttactccacctttcaagcatatcaccaaggttgacgatgaatcctcctttcacaggagctacatattcccacacttgaggctgagcattcctgtccttaca

SEQ ID NO: 61267 - DNA, 162 bp, Setaria italica
  Peptide Sequence Number=SeqID_127241
gtcctcacttggtttggaaggccagtcgattttccagagaagagctgccaaatttctttggcaaatagtgatatccatatacgaagtaatatatcttgtccacatggagatacaggacaagatatattacttcgtatatggatatcactatttggacaagat

SEQ ID NO: 61268 - DNA, 349 bp, Setaria italica
  Peptide Sequence Number=SeqID_127242
gatatagtttatgcaatatcctatattgttgcatgctgtagatatcttcatgcttaaactgtggtggcagtgggaaggtaatttctgaacattgcacagaatgtcacggttcacgcaaagtccaagttgaacgcaatatcaaagtagacatacctggaggtattgatgatggctccaccattcaagttagaggaggaggtagtgttgataagcaaaggcaagcaatggaaactattatataaccatttagagtaacccgtcatttatatagttatgtatgcttgatttgagcataacttgttcaatgcagtccctaactggaatctttacaagttgacaaggtgctgaa

SEQ ID NO: 61269 - DNA, 470 bp, Setaria italica
  Peptide Sequence Number=SeqID_127243
gttacctagttctcagtctaggtaactgtgcaatgaaactgtgcagagactgaccttagctgtaaagttgatttagtgaaagccgatttttctaaaactatcaaaccaaacaatcatttaatctcatttaaataggcgcccaacagaattgcatggcaacgatttaagatccacctaacagaaatagatgcaactgtttcatgttatgcatttctatcttattggcaggggtgcaagtggtgacctgtatgttttcattcgcgttcatgaaaaacaaggcatccacagagatggtcttaatttgtactcggacgtctcagttgattatactgatgcaattttaggaactacagtgaaggttgagacaatagaaggattgaaggatcttcatattccttctggcactcagccaggagataacttaaaatttctcaactgggattccggacattaaaagcctaatgtcagag

SEQ ID NO: 61270 - DNA, 394 bp, Setaria italica
  Peptide Sequence Number=SeqID_127244
tgttaacgtaactttgtccgtctagtccgtcgtctttgacgatgtcccggtcctcgcagatcacgacggagccgtccgccgcgatgccccagtagagcggcacgccgccgtcggtgctcagggctgcgaagacggcgccggacttgttgtcgaagactgccgaggaagacgcagtagatgtcgtcgaggccgcagaacatccgctggtagccgccggaggcggggcaggagccgccgacgcaggcgagcgcggcccgccccgaaggaggtggagaaggcgttggcgggtgcgtggcgtggaagtccctgaggatctcgtcggggttccttggcttgcactcgccgccgctccgggggctggttgagctcctgcggcgcgtgcgccacctgtttc

SEQ ID NO: 61271 - DNA, 269 bp, Setaria italica
  Peptide Sequence Number=SeqID_127245
attgacatttgaggactgggcaccaagatggtgcttatgcgttgaatctcactactgctttttgtttgggtactctcgtggtccaaaaatggttgatccaatcctcacattcgtgctgcccatctctatcgcttgctcgaagtcaccagacattcccatggagaatccaaatcaggtatcgatccctccagatgcgtcgagcttgctaagcatgtgaaactagcatgcccgcacctgatattttcaggcctgatgacaataggaatgaa

SEQ ID NO: 61272 - DNA, 298 bp, Setaria italica
  Peptide Sequence Number=SeqID_127246
cgattctgtgatggctttcattacctgttgttatgtgtgatttgataccaggcactggtagattgtaagcttgaagtttgcaaggcccttgagataccaacagctaactttgaactctccatggggaatgtctggtgacttcgagcaagcgatagagatgggcagcacgaatgtgaggattggatcaaccattttggaccacgagagtacccaaacaaaaagcagtagtgagattcaacgcataagcaccatctcggtgcccagtcctcacaagttcttgtttcctattccttacctt

SEQ ID NO: 61273 - DNA, 361 bp, Setaria italica
  Peptide Sequence Number=SeqID_127247
tgatccattcagatgtcttactgttatagtacctctattggtcagtgatgatgagaagatacttgtcgtgtgtatcaactgtttgcaaagcttgttgggcgccttttcccaagaggaattgatcgatcaattgccaacatttttgccagcactgtttgatgcttttaacaaccaaagtccagatgtccgaaagactgttgtgttctgtctggtggatatctacatcatgcttgggaaagcattcgctccatacttggaagggcttagcagcacgcagctgcgcctagtaaaccatctaacgctaaaccggaatttcaacaaggacgaaggtactaggacaaaaccgaatacgaattactaa

SEQ ID NO: 61274 - DNA, 344 bp, Setaria italica
  Peptide Sequence Number=SeqID_127248
agacacagctttgatgatagccatgtaacatcgggtgacgtgtctggctatacagattctctggcttctctaaactgactgcacttccagagactcttctaaggaagtcaagtaatgtcaagggcttctgcaagtggcagacacagctttgatgatagccatgtaacatcgggtgacgtgtctggctatacagattctctggcttctctaaatgatgcactttctgagggtctcagccctagttctgactgggtagcaagagtttcagcttttgattttattcggaatttattgaaacaaggccagaaaggtattcaaagaaaatcaactacaaaaattttaga

SEQ ID NO: 61275 - DNA, 274 bp, Setaria italica
  Peptide Sequence Number=SeqID_127249
ctccaaaaggcaaaattagctgttcttgagtttgcaaataaatcattcagcaagtacactgtagattctgatggttatagtaacagtggcttcctcaaactatggctttcaaaattggcacctttagtaaatgaaaagaatgcaaaattgaaggaagcatctatttctggtatcatagctgtttattctcactttgattcaacagcagttgcttaaatttttatttcttctagttttattctagtttgttaagttatttcttaaaacctttttt

SEQ ID NO: 61276 - DNA, 216 bp, Setaria italica
  Peptide Sequence Number=SeqID_127250
cccaaaattttcctagagacctcttctaaggaagcaagtaatgtcaagggcttctgcaagtggcagacacagctttgatgatagccatgtaacatcgggtgacgtgtctggctatacagattctctggcttctctaaatgatgcactttctgagggtcttctagtcccttagtttcttgtacttgggttagtctaagtagtttctagtcttttgta

SEQ ID NO: 61277 - DNA, 448 bp, Setaria italica
  Peptide Sequence Number=SeqID_127251
agttgcgcgaacctcactcatcgcgtctgctacacagcattttatcatatcctcatataaatcagccgaacgttgtatctctggggcatcagcccaatactcaagtaccagaagtgcatactcacagcaccttgcacggaggattgcgcttcggtcattctttgcagtgtcaactatgcgaggaagaatccttgcaaccttgcaatttcgcagaatagttttaatacatgtgtctgcagattcagcgattacaagcacagttatgacaacaagcttaaaaagcatcgggataaatatttcggcacatggctcaaaatcaccaaggagttctttggacagtatattaagaagatggcatgcctgttttacaatgctagaacgtcgatcagacagctgcgtggacaatggaggaaccagttgcttcaagagcataagaaacgagggataa

SEQ ID NO: 61278 - DNA, 471 bp, Setaria italica
  misc_feature (250)..(250): n is a, c, g, or t
  Peptide Sequence Number=SeqID_127252
aagtgcatactcacagcaccttgcacggaggattgcgcttcggtcatctttgcagtgtcaactatgcgaggaagaatccttgcaaccttgcaatttcgcagaatagttttaatacatgtgtctgcagattcagcgattacaagcacagttatgacaacaagcttaaaaagcatcgggataaatatttcggcacatggctcaaaatcaccaaggagttctttggacagtatattaagaagatggcatgccngttttacaatgctagaacgtcgatcagacagctgcgtggacaatggaggaaccagttgcttcaagagcataagaaacgagggataatcaattgcacctccataaacgagggcttcaatcctttgcatggcagcaatacgtaaagaccaatccttttctggaacaagggtagctgcaatcttactagtgcgactgagtcggagaactagtgcgactgagtcg

SEQ ID NO: 61279 - DNA, 457 bp, Setaria italica
  Peptide Sequence Number=SeqID_127253
ttctttgcagtgtcaactatgcgaggaagaatccttgcaaccttgcaatttcgcagaatagttttaatacatgtgtctgcagattcagcgattacaagcacagttatgacaacaagcttaaaaagcatcgggataaatatttcggcacatggctcaaaatcaccaaggagttctttggacagtatattaagaagatggcatgcctgttttacaatgctagaacgtcgatcagacagctgcgtggacaatggaggaaccagttgccttcaagagcataagaaacgagggataatcaattgcacctccataaacgagggcttcaatcctttgcatggcagcaatacgtaaagaccaatcctttttctggaacaagggtagctgcaatcttctcaaactcccgaagtaattctttctcagaatgaacttttacttggtttccacttgtcttttttcttgt

SEQ ID NO: 61280 - DNA, 382 bp, Setaria italica
  Peptide Sequence Number=SeqID_127254
taccacttgcatgagatggaagcacgagaaggctgcacaaccctatcacgcaacgaaggagaagcataccttttgtgcacaccaccatcttcatcatttattaccctctgtatcgcaggatcgaatgacataaaaagacggcgtgaacgctcaggccacgtctttgcaaacattctatagcaagtccttgcagttgcgcgaacctcactcatcgcgtctgctacacagcattttatcatatcctcatataaatcagccgaacgttgtatctctggggcatcagcccaatactcaagtaccagaagtgcatactcacagcaccttgcacggaggattgcgcttcggtcattctgcgaaattgcaaggttgcaaggattctttc

SEQ ID NO: 61281 - DNA, 383 bp, Setaria italica
  Peptide Sequence Number=SeqID_127255
tactcaagtaccagaagtgcatactcacagcaccttgcacggaggattgcgcttcggtcattctttgcagtgtcaactatgcgaggaagaatccttgcaaccttgcaatttcgcagaatagttttaatacatgtgtctgcagattcagcgattacaagcacagttatgacaacaagcttaaaaagcatcgggataaatatttcggcacatggctcaaaatcaccaaggagttctttggacagtatattaagaagatggcatgcctgttttacaatgctagaacgtcgatcagacagctgcgtggacaatggaggaaccagttgcttcaagagcataagaaacgagggataatcaattgcacctccataaacgagggcttacaa

SEQ ID NO: 61282 - DNA, 413 bp, Setaria italica
  misc_feature (370)..(370): n is a, c, g, or t
  Peptide Sequence Number=SeqID_127256
ttgatgctggcgctgcaagtggcacaggaggatcacgagatgatggaggatcaactccaagatccaagcttgttgagcgtgcagcagagaaattttgccctgatatattggcacctttcaacaaactttcaatggcagaaacttttctttgctggagttaagcacactctctaggcttctttcagaacttctgccaatcgtctttgactgtgataaccgaagactgtttgatgaaaaagatgaatctgaagatatagctgcgctcttgtccattgcaacaatagctgaagtgccatatccaggtacatgtgtaccacttgcatgagatggagcacgagaaggctgcacaaccctatcacgcaacgaaggngaagcataccttttgtgcacaccaccatcttcatcatttatta

SEQ ID NO: 61283 - DNA, 376 bp, Setaria italica
  misc_feature (362)..(362): n is a, c, g, or t
  misc_feature (374)..(374): n is a, c, g, or t
  Peptide Sequence Number=SeqID_127257
tggggtcgaactgttgttgtcattgtatccaataagcgggaacctccatttcgtgaactagcagctgtgatggaaggaagggatgaatccagcagtgctgagttctgcaatgacaaaacatttgatgctggcgctgcaagtggcacaggaggatcacgagatgatggaggatcaactccaagatccaagcttgttgagcgtgcagcagagaaattttgccctgatatattggcacctttcaacaaactttcaatggcagaaactttttctttgctggagttaagcacactctctaggcttctttcagaacttctgccaatcgtctttgactgtgataaccgaagactgtttgatgaaaaagntgaatctgaagnta

SEQ ID NO: 61284 - DNA, 434 bp, Setaria italica
  Peptide Sequence Number=SeqID_127258
attttgccctgatatattggcacctttcaacaaactttcaatggcagaaactttttctttgctggagttaagcacactctctaggcttctttcagaacttctgccaatcgtctttgactgtgataaccgaagactgtttgatgaaaaagatgaatctgaagatatagctgcgctcttgtccattgcaacaatagctgaagtgccatatccaggtacatgtgtaccacttgcatgagatggagcacgagaaggctgcacaaccctatcacgcaacgaaggagaagcataccttttgtgcacaccaccatcttcatcatttattaccctctgtatcgcaggatcgaatgacataaaaagacggacgtgaacgctcaggccacgtcttgcaacattctatagcaagtccttgcagttgcgcgaacctcactcatcgc

SEQ ID NO: 61285 - DNA, 367 bp, Setaria italica
  Peptide Sequence Number=SeqID_127259
tatactgcattgcagtatcagatgatcgaacctttggttctattctctccaacctagaatttatttcttttaccatgtaagaaggcagattatggcgctgcaactcttcatgaaattgtgaacccatgtgcttgtacatctcctcaatacaagagatagcagcgtctctaacactttggttcgaatcattcattaactgcaggacaggtgaaagcaaaactcgttgcaaggaaatctctgtagaagcaaatagcccgactgcagtggctaccgtacgtacaaactcttcccgcaccctccaactcttatgagtccatgcataatttccagctcctttcaacgattattgttggcgaagaaacctcca

SEQ ID NO: 61286 - DNA, 354 bp, Setaria italica
  Peptide Sequence Number=SeqID_127260
ccaacctagaatttattcttttaccatgtaagaaggcagattatggcgctgcaactcttcatgaaattgtgaacccatgtgcttgtacatctcctcaatacaagagatagcagcgtctctaacactttggttcgaatcattcattaactgcaggacaggtgaaagcaaaactcgttgcaaggaaatctctgtagaagcaaatagcccgactgcagtggctaccgtacgtacaaactcttcccgcaccctccaactcttatgagtccatgcataatttccagctctttcaacgattattgttggcgaagaaacctccatcagggtgatgaggagctggcgcgcggcaatcgcgga

SEQ ID NO: 61287 - DNA, 400 bp, Setaria italica
  Peptide Sequence Number=SeqID_127261
cgccctgatatattggcacctttcaacaaactttcaatggcagaaactttttctttgctggagttaagcacactctctaggcttctttcagaacttctgccaatcgtctttgactgtgataaccgaagactgtttgatgaaaaagatgaatctgaagatatagctgcgctcttgtccattgcaacaatagctgaagtgccatatccaggtacatgtgtaccacttgcatgagatggagcacgagaaggctgcacaaccctatcacgcaacgaaggagaagcataccttttgtgcacaccaccatcttcatcatttattaccctctgtatcgcaggatcgaatgacataaaagacggcgtgaacgctcaggccacgtctttgcaaacattctatagcaagt

SEQ ID NO: 61288 - DNA, 340 bp, Setaria italica
  misc_feature (249)..(249): n is a, c, g, or t
  Peptide Sequence Number=SeqID_127262
ttactttaagtaacttaaagttaggtctactaggtaggtatcacgagatgatggaggatcaactccaagatccaagcttgttgagcgtgcagcagagaaattttgccctgatatattggcacctttcaacaaactttcaatggcagaaactttttctttgctggagttaagcacactctctaggcttctttcagaacttctgccaatcgtctttgactgtgataaccgaagactgtttgatgaaaaagntgaatctgaagatatagctgcgctcttgtccattgcaacaatagctgaagtgccatatccaggtacatgtgtaccacttgcatgagatgga

SEQ ID NO: 61289 - DNA, 237 bp, Setaria italica
  Peptide Sequence Number=SeqID_127263
tctctgactaatggagtaagctagtgcgagctgggcgcatgtgatgacccctttgctcgtggtgggggttggtgttcatgctggtctcttgttcttgttggatacaatgacaacacagttcgcccccaaagagcgatcaagatcaccatatttgagtaatatgtcgtctgagtccatgtctggcttgtcaatgccttactcaagaagatctacggagaggcttcaagaaggagcccg

SEQ ID NO: 61290 - DNA, 383 bp, Setaria italica
  misc_feature (296)..(296): n is a, c, g, or t
  Peptide Sequence Number=SeqID_127264
attttgccctgatatattggcacctttcaacaaactttcaatggcagaaactttttctttgctggagttaagcacactctctaggcttctttcagaacttctgccaatcgtctttgactgtgataaccgaagactgtttgatgaaaaagatgaatctgaagatatagctgcgctcttgtccattgcaacaatagctgaagtgccatatccaggtacatgtgtaccacttgcatgagatggagcacgagaaggctgcacaaccctatcacgcaacgaaggagaagcataccttttgngcacaccaccatcttcatcatttattaccctctgtatcgcaggatcgaatgacataaaagacggcgtgaacgctcaggccacgtctt

SEQ ID NO: 61291 - DNA, 248 bp, Setaria italica
  Peptide Sequence Number=SeqID_127265
cgaatcattcattaactgcaggacaggtgaaagcaaaactcgttgcaaggaaatctctgtagaagcaaatagcccgactgcagtggctaccgtacgtacaaactcttcccgcaccctccaactcttatgagtccatgcataatttccagctctttcaacgattattgttggcgaagaaacctccatcagggtgatgaggagctggcgcgcggcatcgcggacgggctgcttgccgtccccgagccgct

SEQ ID NO: 61292 - DNA, 353 bp, Setaria italica
  misc_feature (331)..(331): n is a, c, g, or t
  Peptide Sequence Number=SeqID_127266
agaaattttgccctgatatattggcacctttcaacaaactttcaatggcagaaactttttctttgctggagttaagcacactctctaggcttctttcagaacttctgccaatcgtctttgactgtgataaccgaagactgtttgatgaaaaaagatgaatctgaagatatagctgcgctcttgtccattgcaacaatagctgaagtgccatatccaggtacatgtgtaccacttgcatgagatggagcacgagaaggctgcacaaccctatcacgcaacgaaggagaagcatacctttgtgcacaccaccatcttcatcatttataccctntgtatcgcaggatcgaatgaca

SEQ ID NO: 61293 - DNA, 307 bp, Setaria italica
  misc_feature (280)..(280): n is a, c, g, or t
  misc_feature (295)..(295): n is a, c, g, or t
  Peptide Sequence Number=SeqID_127267
attttgccctgatatattggcacctttcaacaaactttcaatggcagaaactttttctttgctggagttaagcacactctctaggcttctttcagaacttctgccaatcgtctttgactgtgataaccgaagactgtttgatgaaaaagatgaatctgaagatatagctgcgctcttgtccattgcaacaatagctgaagtgccatatccaggtacatgtgtaccacttgcatgagatggagcacgagaaggctgcacaaccctatcacgcaacgaaggngaagcatacctttgngcacaccaccat

SEQ ID NO: 61294 - DNA, 304 bp, Setaria italica
  Peptide Sequence Number=SeqID_127268
ctgcaagtggcacaggaggatcacgagatgatggaggatcaactccaagatccaagcttgttgagcgtgcagcagagaaattttgccctgatatattggcacctttcaacaaactttcaatggcagaactttttctttgctggagttaagcacactctctaggcttctttcagaacttctgccaatcgtctttgactgtgataaccgaagactgtttgatgaaaaagatgaatctgaagatatagctgcgctcttgtccattgcaacaatagctgaaagtgccatatccaaggttaactaatta

SEQ ID NO: 61295 - DNA, 233 bp, Setaria italica
  Peptide Sequence Number=SeqID_127269
agactagaaagtagaccaataatccaaggtacatgtgtaccacttgcatgagatggagcacgagaaggctgcacaaccctatcacgcaacgaaggagaagcataccttttgtgcacaccaccatcttcatcatttattaccctctgcatcgcaggatcgaatgacataaaaagcggcgtgaacgctcaggccacgtctttgcaaacattctatagcaagtccttgcagttgcg

SEQ ID NO: 61296 - DNA, 234 bp, Setaria italica
  Peptide Sequence Number=SeqID_127270
cgaaggagaagcataccttttgtgcacaccaccatcttcatcatttattaccctctgtatcgcaggatcgaatgacataaaaagacggcgtgaacgctcaggccacgtctttgcaaacattctatagcaagtccttgcagttgcgcgaacctcactcatcgcgtctgctacacagcattttatcatatcctcatataaatcagccgaacgttgtatctctggggcatcagccca

SEQ ID NO: 61297 - DNA, 233 bp, Setaria italica
  Peptide Sequence Number=SeqID_127271
gaagcataccttttgtgcacaccaccatcttcatcatttattaccctctgtatcgcaggatcgaatgacataaaaagacggcgtgaacgctcaggccacgtctttgcaaacattctatagcaagtccttgcagttgcgcgaacctcactcatcgcgtctgctacacagcattttatcatatcctcatataaatcagccgaacgttgtatctctggggcatcagcccaatacta

SEQ ID NO: 61298 - DNA, 323 bp, Setaria italica
  Peptide Sequence Number=SeqID_127272
cgccctgatataattggcaacctttcaacaaactttcaatggcagaaactttttctttgctggagttaagcacactctctaggcttctttcagaacttctgccaatcgtctttgactgtgataaccgaagactgtttgatgaaaaagatgaatctgaagatatagctgcgctcttgtccattgcaacaatagctgaagtgccatatccaggtacatgtgtaccacttgcatgagatggagcacgagaaggctgcacaaccctatcacgcaacgaaggagagcatacctttgtgcacaccaccatcttcatcatttattaccct

SEQ ID NO: 61299 - DNA, 322 bp, Setaria italica
  Peptide Sequence Number=SeqID_127273
attttgccctgatatattggcacctttcaacaaaactttcaatggcagaaactttttctttgctggagttaagcacactctctaggcttctttcagaacttctgccaatcgtctttgactgtgataaccgaagactgtttgatgaaaaagatgaatctgaagatatagctgcgctcttgtccattgcaacaatagctgaagtgccatatccaggtacatgtgtaccacttgcatgagatggagcacgagaaggctgcacaaccctatcacgcaacgaaggagaagcaataccttttgtgcacaccaccatcttcatcattta

SEQ ID NO: 61300 - DNA, 233 bp, Setaria italica
  Peptide Sequence Number=SeqID_127274
tttttacttttgctggagttaagcacactctctaggcttctttcagaacttctgccaatcgtctttgactgtgataaccgaagactgtttgatgaaaaagatgaatctgaagatatagctgcgctcttgtccattgcaacaatagctgaagtgccatatccaggtacatgtgtaccacttgcatgagatggagcacgagaaggctgcacaaccctatcacgcaacgaaggaga

SEQ ID NO: 61301 - DNA, 254 bp, Setaria italica
  Peptide Sequence Number=SeqID_127275
aaatactctgtagaagcaaatagcccgactgcagtggctaccgtacgtacaaactcttcccgcaccctccaactcttatgagtccatgcataatttccagctctttcaacgattattgttggcgaagaaacctccatcagggtgatgaggagctggcgcgcggcatcgcggacgggctgcttgccgtccccgagccgctcgacggcggccgggacgagggcgttgaggtggatcttgaagtgctcgccggcgac

SEQ ID NO: 61302 - DNA, 261 bp, Setaria italica
  Peptide Sequence Number=SeqID_127276
aacgagggcttcaatcctttgcatggcagcaatacgtaaagaccaatccttttctggaacaagggtagctgcaatcttctcaaactcccgaagtaattctttctcagaatgaacttttactggttccactgctttttctgttatatcagtgtcacctccaaatagtgtactttcccttggtaagcttttgtccttgggctgcctcttttcggattagcactaacagatctagactctgctgccttatactgcattgcagta

SEQ ID NO: 61303 - DNA, 244 bp, Setaria italica
  Peptide Sequence Number=SeqID_127277
tgcagtatcagatgatcgaacctttggttctattctctccaacctagaatttatttcttttaccatgtaagaaggcagattatggcgctgcaactcttcatgaaattgtgaacccatgtgcttgtacatctcctcaatacaagagatagcagcgtctctaacactttggttcgaatcattcattaactgcaggacaggtgaaagcaaaactcgttgcaaggaaatctctgtagaagcaaatacg

SEQ ID NO: 61304 - DNA, 233 bp, Setaria italica
  Peptide Sequence Number=SeqID_127278
cttttcggattagcactaacagatctagactctgctgccttatactgcattgcagtatcagatgatcgaacctttggttctattctctccaacctagaatttatttcttttaccatgtaagaaggcagattatggcgctgcaactcttcatgaaattgtgaacccatgtgcttgtacatctcctcaatacaagagatagcagcgtctctaacactttggttcgaatcattcat

SEQ ID NO: 61305 - DNA, 248 bp, Setaria italica
  Peptide Sequence Number=SeqID_127279
cggcggtgggaacgagcagaggctgggaaggaggaggaggaggaagactggaagagggaggaggtggtgcggcggcggcggcggcgcggggatgtttgatccgaggcagctgtgcgacatggagcatcacgaggtgaagttcggccagggcggcggcgacatgacgcgggacttcctcggcgtgggcggaggcggcatcgtgcgcgggatatcgacgcccaggggggaccaccagagcagcagcgaca

SEQ ID NO: 61306 - DNA, 249 bp, Setaria italica
  Peptide Sequence Number=SeqID_127280
tgtcacctccaaatagtgtactttcccttggtaagctttttgtccttgggctgcctcttttcggattagcactaacagatctagactctgctgccttatactgcattgcagtatcagatgatcgaacctttggttctattctctccaacctagaatttatttcttttaccatgtaagaaggcagattatggcgctgcaactcttcatgaaattgtgaacccttgggctgccttcttttcggattagcac

SEQ ID NO: 61307 - DNA, 252 bp, Setaria italica
  Peptide Sequence Number=SeqID_127281
aacagatctagactctgctgccttatactgcattgcagtatcagatgatcgaacctttggttctatctctccaacctagaatttatttcttttaccatgtaagaaggcagattatggcgctgcaactcttcatgaaattgtgaacccatgtgcttgtacatctcctcaatacaagagatagcagcgtctctaacactttggttcgaatcattcattaactgcaggacaggtgaaagcaaaactcgttgcaag

SEQ ID NO: 61308 - DNA, 196 bp, Setaria italica
  Peptide Sequence Number=SeqID_127282
tgcagtatcagatgatcgaacctttggttctattctctccaacctagaatttatttcttttaccatgtaagaaggcagattatggcgctgcaactcttcatgaaattgtgaacccatgtgcttgtacatctcctcaatacaagagatagcagcgtctctaacactttggttcgaatcattcattaactgcaggaca

SEQ ID NO: 61309 - DNA, 206 bp, Setaria italica
  Peptide Sequence Number=SeqID_127283
agattatggcgctgcaactcttcatgaaattgtgaacccatgtgcttgtacatctcctcaatacaagagatagcagcgtctctaacactttggttcgaatcattcaattaactgcaggacaggtgaaagacaaaactcgttgcaaaggaaatctctgtagaagcaaatacgcccgactgcagtggctaccgtacgtaacaaactct

SEQ ID NO: 61310 - DNA, 271 bp, Setaria italica
  Peptide Sequence Number=SeqID_127284
gagcataagaaacgagggataatcaattgcacctccataaacgagggcttcaatcctttgcatggcagcaatacgtaaagaccaatccttttctggaacaagggtagctgcaatcttctcaaactcccgaagtaattctttctcagaatgaacttttactggttccactgctttttctgttatatcagtgtcacctccaaatagtgtactttcccttggtaagctttttgtccttgggctgcctcttttcggattagcactaacagatcta

SEQ ID NO: 61311 - DNA, 251 bp, Setaria italica
  Peptide Sequence Number=SeqID_127285
ggacaatggaggaaccagttgcttcaagagcataagaaacgagggataatcaattgcacctcccataaacgagggcttcaatcctttgcatggcagcaatacgtaaagaccaatccttttctggaacaagggtagctgcaatcttctcaaactcccgaagtaattctttctcagaatgaacttttactggttccactgctttttctgttatatcagtgtcacctccaaatagtgtactttcccttggtaag

SEQ ID NO: 61312 - DNA, 196 bp, Setaria italica
  Peptide Sequence Number=SeqID_127286
cagctgtgatggaaggaaggggaagtgaatccagcagtgctgagttctgcaatgacaaaacaatttgatgctggcgctgcaagtggcacaggaggatcacgagatgatggaggatcaactccaagatccaagcttgttgagcgtgcagcagagaaattttgccctgatatattggcacctttcaacaaactttcaa

SEQ ID NO: 61313 - DNA, 243 bp, Setaria italica
  Peptide Sequence Number=SeqID_127287
aagtggcacaggaggatcacgagatgatggaggatcaactccaagatccaagcttgttgagcgtgcagcagagaaattttgccctgatatattggcacctttcaacaaactttcaatggcagaaactttttctttgctggagttaagcacactctctaggcttctttcagaacttctgccaatcgtctttgactgtgataaccgaagacttgtttgatagaaaaagatgaatctgaagatata

SEQ ID NO: 61314 - DNA, 236 bp, Setaria italica
  Peptide Sequence Number=SeqID_127288
tttgatgctggcgctgcaagtggcacaggaggatcacgagatgatggaggatcaactccaagatccaagcttgttgagcgtgcagcagagaaattttgccctgatatattggcacctttcaacaaactttcaatggcagtaaacttttttctttgctggagttaagcacactctctaggcttctttcagaacttctgccaatcgtctttgactgtgataaccgaagactgtttgat

SEQ ID NO: 61315 - DNA, 230 bp, Setaria italica
  Peptide Sequence Number=SeqID_127289
aattttagaccctagatatattggcacctttcaacaaactttcaatggcagaaactttttctttgctggagttaagcacactctctaggcttctttcagaacttctgccaatcgtctttgactgtgataaccgaagactgtttgatgaaaaagatgaatctgaagatatagctgcgctcttgtccattgcaacaatagctgaagtgccatatccaggtacatgtgtacca

SEQ ID NO: 61316 - DNA, 217 bp, Setaria italica
  misc_feature (141)..(141): n is a, c, g, or t
  Peptide Sequence Number=SeqID_127290
gatatattggcacctttcaacaaactttcaatggcagaaactttttctttgctggagttaagcacactctctaggcttctttcagaacttctgccaatcgtctttgactgtgataaccgaaagactgtttgatgaaaaagntgaatctgaagatatagctgcgctcttgtccattgcaacaatagctgaagtgccatatccaggtacatgtgtacca

SEQ ID NO: 61317 - DNA, 202 bp, Setaria italica
  Peptide Sequence Number=SeqID_127291
cacctttcaacaaacttttctaatggcagaaactttttctttgctggagttaagcacactctctaggcttctttcagaacttctgccaatcgtctttgactgtgataaccgaagactgtttgatgaaaaaagatgaatctgaagatatagctgcgctcttgtccattgcaacaatagctgaaagtgccatatccaggtacat

SEQ ID NO: 61318 - DNA, 244 bp, Setaria italica
  Peptide Sequence Number=SeqID_127292
gcagattcagcgattacaagcacagttatgacaacaagcttaaaaagcatcgggataaatatttcggcacatggctcaaaatcaccaaggagttctttggacagtatattaagaagatggcatgcctgttttacaatgctagaacgtcgatcagacagctgcgtggacaatggaggaaccagttgcttcaagagcataagaaacgagggataatcaattgcacctccataaacgagggcttcaa

SEQ ID NO: 61319 - DNA, 229 bp, Setaria italica
  Peptide Sequence Number=SeqID_127293
ttgcgcgaacctcactcatcgcgtctgctacacagcattttatcatatcctcatataaatcagccgaacgttgtatctctggggcatcagcccaatactcaagtaccagaagtgcatactcacagcaccttgcacggaggattgcgcttcggtcattctttgcagtgtcaactatgcgaggaagaatccttgcaaccttgcaatttcgcagaattagttttaatacatg

SEQ ID NO: 61320 - DNA, 227 bp, Setaria italica
  Peptide Sequence Number=SeqID_127294
tataaatcagccgaacgttgtatctctggggcatcagcccaatactcaagtaccagaagtgcatactcacagcaccttgcacggaggattgcgcttcggtcattctttgcagtgtcaactatgcgaggaagaatccttgcaaccttgcaatttcgcagaatagttttaatacatgtgtctgcagattcagcgattacaagcacagttatgacaacaagcttaaaaag

SEQ ID NO: 61321 - DNA, 240 bp, Setaria italica
  Peptide Sequence Number=SeqID_127295
tagtgtctgcagattcagcgattacaagcacagttatgacaacaagcttaaaagcatcgggataaatatttcggcacatggctcaaaatcaccaaggagttctttggacagtatattaagaagatggcatgcctgttttacaatgctagaacgtcgatcagacagctgcgtggacaatggaggaaccagttgcttcaagagcataagaaacgagggataatcaattgcacctccataaac

SEQ ID NO: 61322 - DNA, 145 bp, Setaria italica
  Peptide Sequence Number=SeqID_127296
cagcattttatcatatcctcatataaatcagccgaacgttgtatctctggggcatcagcccaatactcaagtaccagaagtgcatactcacagcaccttgcacggaggattgcgcttcggtcatttctttgcagtgtcaactatg

SEQ ID NO: 61323 - DNA, 195 bp, Setaria italica
  Peptide Sequence Number=SeqID_127297
cttgcacggaggattgcgcttcggtcattctttgcagtgtcaactatgcgaggaagaatccttgcaaccttgcaatttcgcagaatagttttaatacatgtgtctgcagattcagcgattacaagcacagttatgacaacaagcttaaaaagcatcgggataaatatttcggcacatggctcaaaatcaccaagg

SEQ ID NO: 61324 - DNA, 224 bp, Setaria italica
  misc_feature (27)..(27): n is a, c, g, or t
  Peptide Sequence Number=SeqID_127298
ccttgcaaccttgcaatttcgcagaanagttttaattacatgtgtctgcagattcagcgattacaagcacagttatgacaacaagcttaaaaagcatcgggataaatatttcggcacatggctcaaaatcaccaaggagttctttggacagtatattaagaagatggcatgcctgttttacaatgctagaacgtcgatcagacagctgcgtggacaatggagga

SEQ ID NO: 61325 - DNA, 202 bp, Setaria italica
  Peptide Sequence Number=SeqID_127299
ttcggtcattctttgcagtgtcaactatgcgaggaagaatccttgcaaccttgcaatttcgcagaatagttttaatacatgtgtctgcagattcagcgattacaagcacagttatgacaacaagcttaaaaagcatcgggataaatatttcggcacatggctacaaaatcaaccaaggagtttctttggacagtatattaag

SEQ ID NO: 61326 - DNA, 188 bp, Setaria italica
  Peptide Sequence Number=SeqID_127300
aacgttgtatctctggggcatcagcccaatactcaagtaccagaagtgcatactcacagcaccttgcacggaggattgcgcttcggtcattctttgcagtgtcaactatgcgaggaagaatccttgcaaccttgcaatttcgcagaattagttttaatacatgtgtctgcagtattcagcgtaattac

SEQ ID NO: 61327 - DNA, 151 bp, Setaria italica
  Peptide Sequence Number=SeqID_127301
tctttggacagtatattaagaagatggcatgcctgttttacaatgctagaacgtcgatcagacagctgagtggacaatggaggaaccagttgcttcaagagcataagaaacgagggataatcaattgcacctccataaacgagggcttcaa

SEQ ID NO: 61328 - DNA, 219 bp, Setaria italica
  Peptide Sequence Number=SeqID_127302
aggaaccagttgcttcaagagcataagaaacgagggataatcaattgcacctccataaacgagggcttcaatcctttgcatggcagcaatacgtaaagaccaatccttttctggaacaagggtagctgcaatcttctcaaactcccgaagtaattctttctcagaatgaacttttactggttccactgctttttctgttatatcagtgtcacctccaaa

SEQ ID NO: 61329 - DNA, 177 bp, Setaria italica
  Peptide Sequence Number=SeqID_127303
aaacgagggataatcaattgcacctccataaacgagggcttcaatcctttgcatggcagcaatacgtaaagaccaatccttttctggaacaagggtagctgcaatcttctcaaactcccgaagtaattctttctcagaatgaacttttactggttccactgctttttctgttatatc

SEQ ID NO: 61330 - DNA, 116 bp, Setaria italica
  Peptide Sequence Number=SeqID_127304
ataatttccagctctttcaacgattattgttggcgaagaaacctccatcagggtgatgaggagctggcgcgcggcatcgcggacgggctgcttgccgtccccgagccgctcgacgg

SEQ ID NO: 61331 - DNA, 166 bp, Setaria italica
  Peptide Sequence Number=SeqID_127305
ttcaagaggcataagaaacgagggataatcaattgcacctccataaacgagggcttcaatcctttgcatggcagcaatacgtaaagaccaatccttttctggaacaagggtagctgcaatcttctcaaactcccgaagtaattctttctcagaatgaacttttact

SEQ ID NO: 61332 - DNA, 175 bp, Setaria italica
  Peptide Sequence Number=SeqID_127306
aaacgagggataatcaattgcacctccataacgagggcttcaatcctttgcatggcagcaatacgtaaagaccaatccttttctggaacaagggtagctgcaatcttctcaactcccgaagtaattctttctcagaatgaacttttactggttccactgcttttctgttatatac

SEQ ID NO: 61333 - DNA, 121 bp, Setaria italica
  Peptide Sequence Number=SeqID_127307
ttcaagagcataagaaacgagggataatcaattgcacctccataaacgagggcttcaatcctttgcatggcagcaatacgtaaagaccaatcctttttctggaacaagggtagctgcaatc

SEQ ID NO: 61334 - DNA, 112 bp, Setaria italica
  Peptide Sequence Number=SeqID_127308
cgcttcggtcattctttgcagtgtcaactatgcgaggaagaatccttgcaaccttgcaatttcgcagaatagtttaatacatgtgtctgcagattcagcgattacaagcaca

SEQ ID NO: 61335 - DNA, 250 bp, Setaria italica
  Peptide Sequence Number=SeqID_127309
tggtacccccagaacgcctgcagctgggcctgctgctgctggagcaggtggtggtgcggcaccggtggcggcccggccgcgccagcaccacctgtcgaggagaaccaagcctgaggcggcggcggactcgggaagagaaggtggaacgcaggaggagacggtggaggcagccatgtccgtgaagggcgaggaagcagaggaggtgaacagatccaatccaagtagaggcaaggggatcggatgcgatggc

SEQ ID NO: 61336 - DNA, 164 bp, Setaria italica
  Peptide Sequence Number=SeqID_127310
taggaacaaagttggcagtgatatttgctattgatgtgaggaaggcaacattgcaaggattggctgagcttgatgtccatgtacctgggtctggtttgagaaagcaagtaaacgacatcatcatccatgcttaggatggggcatgacactggaagttctctctc

SEQ ID NO: 61337 - DNA, 159 bp, Setaria italica
  Peptide Sequence Number=SeqID_127311
aggtaaagggataagcttgtccctctcgaactcattcactgacaaccgcttggagatccaccctttggaatctgaggatcaagcgccgtcttcgcggctaatgagggcagttgcggagtcgtcgagcaccctggggtgcgggttcggtagcagatttag

SEQ ID NO: 61338 - DNA, 235 bp, Setaria italica
  Peptide Sequence Number=SeqID_127312
cagcggcttgcctatcaaggtgaccttccgcgccgcccgcccgccacttctctcggcggtggtgttgttggggaggtcggcgatgtagcaccacctgtcgaggagaaccaagcctgaggcggcggcggactcgggaagagaaggtggaacgcaggaggagacggtggaggcagccatgtccgtgaagggcgaggaagcagaggaggtgaacagatccaatccaagtagaggcaag

SEQ ID NO: 61339 - DNA, 214 bp, Setaria italica
  Peptide Sequence Number=SeqID_127313
taaatcaactcaagaagttcaatctccaatgtctgcatccagattctttgtaccatgtttcaacaaacaggttgacgcttctttgtcctagccagttcttcgcatgcacctcagatggtttaccctgtttagtttgtttgatagctacttttcagctcaacttacaagtagacttactagacaacaaagtagaagaatactaagaacaaaggaa

SEQ ID NO: 61340 - DNA, 424 bp, Setaria italica
  Peptide Sequence Number=SeqID_127314
taaggtaaggaacaattaactagaaactaggtaggactagacaagaaggaacactagtgtgtggtggtggtggaatgacagcaccaacatttggtattggctgaggaccaagaatggaaggttgatcgctgcttgtagtaacatttcctttggtataatctctacctcgctcattgttaaccttaacattaagctcagtatgtcgtgaaaatgcaaggtgaagcttgcagtatccaccttcatagatgctgtgcccttctaatgcttcttttgctgcaactgcagtttgaatgtctggatactggatcaatgcttgaaagccattcttctcaaaaattgcaatcttttgtacaaatccaaaagcagaaaagacctcatgaagcacatcaattgtaacaacatactgcatgttctcaatggatgc

SEQ ID NO: 61341 - DNA, 431 bp, Setaria italica
  misc_feature (1)..(48): n is a, c, g, or t
  Peptide Sequence Number=SeqID_127315
nnnnnnnnnnnnnnnnnnnnnnnnnnnnnnnnnnnnnnnnnnnnnnnnaaggtttattgatacaaatacaatgcccattatgaaacatatagaatctctgcagtgagaaaaggattcatacaaatacaatgcccattatgaaacgtttaccacgattaacaagtaccctactacggagtaacttggagcagcaatggattttagcctcagagagaaaacgacaacagagaaggattgacatacatccatctatgattctagcatagttcgattagctaacgactatagggaccccgtggagcaaatggaagctgccggcctccctgctcagagaatggcatacaataactaaggggaactaaccaaataaacccggaaagggaaaaactaaagaaactaaaggttaaagaaaccgtaaaacaaataaacaa

SEQ ID NO: 61342 - DNA, 361 bp, Setaria italica
  Peptide Sequence Number=SeqID_127316
taaactaaagaaacaaataaagttaacgaaattaaagaactaaacgaactaataagggaccccgtggagcaaaatggaaagctgccggcctccctgctcagagaatggcatcatctggggctccatacccggagggaactgctggttgccgtacatcgggaactgcggcattggttgccgtggaccttgtgaaaacggtggcctccataacctggagcttgcatcatctggggacctggaggtagctgctgcgcactgaggccagggaacggcactgcttgtgggccatgtgtgtttggaaccagatggtttccattgccaagatactgcatgaactgggctgaacctggaggcagctgat

SEQ ID NO: 61343 - DNA, 306 bp, Setaria italica
  Peptide Sequence Number=SeqID_127317
aaggggaaggggaaggtaatagggaacgggaaagggtaggaaaataggaaagggaaggggacagcggaggggaggggaaggagtagggcagcgatgagtaagggagaggaaacaaacacacacatgtgttccagatgctgcctgccatgatactccgtgacaactgcttgctaatccattcagatcaggcaaaagaatgtgctagaagttactaagacagtcctggcacatcaaaatattcctgcagacaaaatcagttgacctaaataacataattctcgatgctactgttaacatccttaccac

SEQ ID NO: 61344 - DNA, 384 bp, Setaria italica
  Peptide Sequence Number=SeqID_127318
gccgtgtgcccactgccgagtgttacactcggcaaagggttcgccgagtgtttttggggctttgccgagtgccccaggcactcggcaatgttcctgtgtcccgtagtgcaacccattgtgagggtggtggactgagtctcgtgcaggatcgatcattcgtgcaaggctgaagatcagcggcccaggtgcccaggagggttcaatttggtacgtgcgtaccagtgtccatgccgcccttccctggtgctcctactactcccgcaaggggtgcctgcggatggttacgaatgaaccctccaacctgtttctactttactttctggtgttatatgaagatgtttttacgtgacaagaatccattgatattaattatttttacggccc

SEQ ID NO: 61345 - DNA, 209 bp, Setaria italica
  misc_feature (168)..(168): n is a, c, g, or t
  Peptide Sequence Number=SeqID_127319
gtggagggagatggcggcgccactggccagggggagggagatggcggcgagatccagggagggcttgggccagtgacggtggcggcatgtggccggcagtggcggcggcggcggcggtggtcggcagtggcggcggcgaccagcgacttggttttttttattttttcngaaattgttgccgagttgttttttgggcactcggcaaaagt

SEQ ID NO: 61346 - DNA, 307 bp, Setaria italica
  Peptide Sequence Number=SeqID_127320
attacaaacggagcatagagtgcacgcatttggatgaaaaaggagagaaaggattttttctggttcacaattcatttgcctcttattacattacaaacggagcatagagtgcacgcatttggatgaaaaggagagaaaggaaggtggactaatttcattcaaacagaacaacagaattggctggccacctaggcaacatggacaactccacctggtcccatcagtgcttcttgtgctcctggacgaacttggagttcttgaggtcctcctcggtgaagttggccgtcatcaccggttcctcatcacc

SEQ ID NO: 61347 - DNA, 408 bp, Setaria italica
  Peptide Sequence Number=SeqID_127321
tttacacctcggctggttcgtctacaccatcgaggacacggaaggcctagagctgaacccctgaagaagccatcacttccacagctcgttgtcgagcccaccgatgcaagatcaaattcatttgttgggacccacgaataccttgccccagagatcattcgaggagatggccatgggcctgaagttccctgataacccagctgtcagcttccatgcacgagatctgatcagaggcctgcttgtgaaggagccagagtatcggcttggttcatcaagaggagctgctgagatcaagcggcaccccttctttgaaggcctgaactgggccttgatccgttggactgctccgccagagaccccgaaaagcttcgatgctgctgcagcaaccctcgcgacgacacgcaagaa

SEQ ID NO: 61348 - DNA, 413 bp, Setaria italica
  misc_feature (316)..(316): n is a, c, g, or t
  Peptide Sequence Number=SeqID_127322
gccgaggcggagaggccattggacaagacgtttggcttcgggaagaacttcggggccaagtacgagctggggaaggaggtggggaggggggcacttcggccacacctgctcggccgtcgtcaagaagggcgagtacaaggggcacaccgtcgccgtcaagatcatctccaaagctaagatgacgacggccatttccatcgaagatgttcgtagggaagtcaagattttgaaagctctatcggggcacaataatcttgtcaaattctatgatgcatattatgtgaaggtggggagttgctagatagaattttggccngaggcgggagatacacagaagaagatgccaaagcgatcgttgtacaaattttgagcgtggtggccttctgtcatcttcagggagtagtgcatcgcga

SEQ ID NO: 61349 - DNA, 252 bp, Setaria italica
  Peptide Sequence Number=SeqID_127323
gccacacctcttaaacgcttggcattaaaggcactatctaaggctttaagggaggatgaacttttgtatcttagattgcagtttaagctgcttgaacctagagatggatttgtatcacttgacaactttcgaacggtaagttatgaagacatgtccacattatgttgcatgttctaacatgtaaactcccatggtgtacccaggctctgacaagatatttaactgatgcttattgtagggtaattactaaaa

SEQ ID NO: 61350 - DNA, 434 bp, Setaria italica
  misc_feature (21)..(21): n is a, c, g, or t
  misc_feature (193)..(193): n is a, c, g, or t
  Peptide Sequence Number=SeqID_127324
ctcagaactcttaatatgcanggtttgaatgctaatgtggtaatacctaaggagtttggtggttagaaatctaaggacactttttgggttcagggtacacatggatatgaatgggggctggtgcagcttggaagagatagggcctcttcctaagcttagggatcttactctacatggtcttgagaatgtatcngccagctcgttggctgaaacggccaggattagcagcaaggagcaccttgagtacttggtattacgttggagtagcagtggatgcatggaattgaggaataagatcgagatgcaacagcaacagcaagtgtgcagagatgggtgaggaagctcaaggacgccatgtacgacaccaccgacatcatagacctgtgccaaacttacgttaggtacggtacttaaactaaagtacggttaagtta

SEQ ID NO: 61351 - DNA, 362 bp, Setaria italica
  Peptide Sequence Number=SeqID_127325
aaggttcctcctggtcttggatgatgtatggagtgaccaagtatggagtcatgtcttagtgtcccagtaaaaaatagcaagcaagaaacaacaggggaactgggtcctaatcactacaagattgaaaaacctggcccaacggatggtagcctccttctaccaacaccgtgtcagccactgaatgaagaggacgcttggtccctgctcaccaaacagctgccgccatctcctaatcagggtaatcttcttctagaccactcggcgatgccttggtgggcttggttcatagtcaggtggagtagagtacccaccagaatcatcctcctcctccgaggattcaacgtcatgtcagaatttgatgg

SEQ ID NO: 61352 - DNA, 241 bp, Setaria italica
  Peptide Sequence Number=SeqID_127326
attgctcttctgcattcggaatcccgtgttcgcccacaagataggcagccggatcaaggagctgaaccagcgactggatggcatccacaaggaggcagacaggttcaacttcagtatcaacctcggttccaacccggagccgaggaagctaactgatgctgaaaggtctacgcagaacatgacgtccgagtttgatgagtcggccattgttggtgagaagatcgagcaggatacaagagag

SEQ ID NO: 61353 - DNA, 234 bp, Setaria italica
  Peptide Sequence Number=SeqID_127327
gcccaagcaacaaaggcaaaaagacacaagcagttgcgccccgggaattcagatcgtactccagagccatggccgccatcctgaatgctttggcagcctacgtgaagaagcagatcgctgacatggcagaagaaaaggtgtccatgctgctgggcgtctccgccaagatcgagaagctggagggcaacatcgaaagcctcaaagctttcctcgcggatgcagagaggaggcgca

SEQ ID NO: 61354 - DNA, 238 bp, Setaria italica
  Peptide Sequence Number=SeqID_127328
atggatgggggctggtgcagcttggaagagatagggcctctttctaagcttaagaagcttactttacatggtctcgaggatgtatctgccagctcgttggctgaaacggccaggattagcagcaaggagcaccttgagtacttggaattacattggagtagcagtggatgcatggaattgagggatgagatcgagaagcaacagcagcaggaagtagtggaagaggtattggagaacg

SEQ ID NO: 61355 - DNA, 211 bp, Setaria italica
  Peptide Sequence Number=SeqID_127329
ttctggaaggcttgtgcgaatgggaggagtgggactgggaggagcagactgtggatgtgactgcaggcaccatggccatgcacgctctcgagtttctgaagatcgacaaatgcaagctgagctgtttgccaccggggcttgccaacaacaagaggcatgctctaagaggtctgtatctgtacgagctgaagaccaaacctggcatctgtgg

SEQ ID NO: 61356 - DNA, 202 bp, Setaria italica
  Peptide Sequence Number=SeqID_127330
aaggaggctcccactccgttgggccaggtcttctaatcttgtagtgattaggacccagttcccctgttgcttctggcttgcattttttacttgggacactaagaacatgactccatgcttggttacaccatagatcatccaagagcacttcaaagtgaaggtgtggctcagcatcacccagcacttcgacgagattgagctg

SEQ ID NO: 61357 - DNA, 249 bp, Setaria italica
  Peptide Sequence Number=SeqID_127331
taggttggagatgtggtgcttgttgaggatgaatctgtgatcgagaatgaatataatctggttggattgcacagcttggtatgtcagctttattaattggaacaaggtttattaaccatagtccatcaaactatatttgttcagcgaataattcaaattaaagaacaacctctgtggaattctctttttcccatgtgtacaatcttccttcaaaagggtgcagtttctttgtctcaaattgctcacaat

SEQ ID NO: 61358 - DNA, 367 bp, Setaria italica
  Peptide Sequence Number=SeqID_127332
ccaaaataagactgattaggaattaaggataggacagacttcatcttaattaaatctttgttgatgtctgtaactgcatggatgacatggagaaatccatgtttaaacatttacttaaatatcaagctgggatatatgtgctgaacatcttttgaacgaaattttaagatacatgttgtccaacatggtgacacctcatactattatcattgcagcagtgatctggtttgcttgaggccccgagcatatcagagggaaacctggtgcttggaatcttagtgattgcagaacttttgatgcttcagcaagatatttccataagataatattattccgtagtctatttatttgttctttgtttttcttt

SEQ ID NO: 61359 - DNA, 483 bp, Setaria italica
  misc_feature (11)..(11): n is a, c, g, or t
  Peptide Sequence Number=SeqID_127333
gtacgaacttnaagtctgaacttgatgtccgatcttgttgctttcttattatgtgatcttgatgcccaaactgattggttgatccattaggctcctctccatcattcctaataataataaaatcatcacaatgacttagtagcatccaattctgagatgagggtttatggacagcgaggaatgagttaacctgataatttagctctcgtgatttagctctcgtgcacaagctcttgtcattggtccttgctgcatagtaggtatggttgtatcattggaagggatgtcctcatcacttatgaggagctatttcatccttccattttcttttttttatctttcttccctttttactggttcagaaacatttaccagccggaatgcttgctatcgcttatggtacccttttttgtcagcattagcgcgaagcacaaatgctactggccccggggaggtcatggcaccataactgatgctgcatag

SEQ ID NO: 61360 - DNA, 511 bp, Setaria italica
  Peptide Sequence Number=SeqID_127334
ggcactctgcaaatcaactcagaaactgcgctgtgccaatatgcaggtgtgtatgccacatattcaaatacagttttaactgttgcaggtgtgtatggcacatattcaaatacaattagaaaaaagacagggaaaaacttcttttccagtaaaaaaaaaataccaccaagcactgtcaatctatcagacagcacaagatgccgacttttcacaaaatacctgaagcaggcagcaccaggaacccaacttgggcgtgttccaattcccattcctgcaggtcttgtccctccgttccgcgatatttatccatgaatattcacccatgtatgcatagaccgaggaacactcaatctaagcgttaataaggaatgcccacagccctattatatgattctacagctacttagctttttacaacatcaatgaaggggtaaacagtggacaagcaatgttgactactatttgtttgttaaacttttgttttctttttaactttttccttttagtttta

SEQ ID NO: 61361 - DNA, 331 bp, Setaria italica
  Peptide Sequence Number=SeqID_127335
taagtaatttttacttagtaaaccgtagtcttttgggtacttctactttggtcttctagtcctcctgaggtcgagtagcaggtggttgcatcggaggtatgcttgatgacgtagtcggggaggttagttggtttgtatttttgaggagcaggcatcatattgttattggatgctgtgggtaccggggaagggaaagaggtagatggatttgactgcaatgagcttgttgagttcaccttgggaattgccgcattgccacgccattgtagggaccaccattagtgctgctcatcggatgatcttgtctagaattcattgaactttgcaagag

SEQ ID NO: 61362 - DNA, 282 bp, Setaria italica
  Peptide Sequence Number=SeqID_127336
ctctttccctttccgaagcttctcgaccgcctccacctcctcctcctcctccccccctcccccctcacatggccgacgacgcgaaggccgaggcggcgcggccgaggccggagtcctcgcaggaggaggaggaggactggaaggaggccgagggggactcgccgaggcgcaggtgcccacggaccgcccgatccgggtctacgccgacggcatctacgacctcttccacttcggccacgccaggtcgctcgagcaggccaagaagctgtttccaaatacata

SEQ ID NO: 61363 - DNA, 445 bp, Setaria italica
  misc_feature (406)..(406): n is a, c, g, or t
  Peptide Sequence Number=SeqID_127337
ttcgtttcgttactaagtctagtagtcaaccagatcctgatactggcacaatgttgtagaaaggagattcatcagttcttgaggaactgttgtcttctgcaagctctgcgaaggcctctgaaaatgcacgggacattgcatctgctgccactgagttatctaccgaatagtagaaccgcaacatctgcatatttcaatccagaaatgctggttaggatatgaatgtagctgcaacgtagttatgcaacaaacataccgttgtgctgtcccaggaaaaaattgttgtctgccaggatctttgtgatctggaaagcacaaaaatctaagccatagctttcaaattttcctcagtgtagtatagctgtcctagctgtagaacataatcttttgtcgcaaatatcggttntgactgagaccacagcagaacaaattctccaccaaattg

SEQ ID NO: 61364 - DNA, 287 bp, Setaria italica
  Peptide Sequence Number=SeqID_127338
ttcagccgcttcaggaagtccacggcgttccgcttcttggctggcccacctgccgccgctccgccggcgcccttcttgtcggccttctttgctccgcccgtcgtcgtcgtggccgcgtcgccgtccgcccccttcgtcggcctcggaccaagaccggctgggttccggacagcaccgccgcggcccttcttcgtcctcagcccccacgctttatccttggtcgccgtcacggcggccgcggccttcttctcgtcctcgctctcttcctcctcctccgcggcatcggc

SEQ ID NO: 61365 - DNA, 242 bp, Setaria italica
  Peptide Sequence Number=SeqID_127339
ctcggcagcctccttctcgaacctctcgatgacgcgcttgtcgatgcctccgagcttgtagatgaggtggccggtggtcgtggacttgccggagtcgacatggccgatgaccacgatgttgatgtggaccttctccttgcccatggctagaggagaagagaaaatagtccaaggctcaaaatctctggatctcaagactcaaggtgggtggagatgagcaagaccaattagagcaaatcaac

SEQ ID NO: 61366 - DNA, 232 bp, Setaria italica
  Peptide Sequence Number=SeqID_127340
gcccatggctagaggagaagagaaaatagtccaaggctcaaaatctaacataggagccgttgacaccgatcagcagaggcatgaacaacatgataacagattgagcgatggatcatgagttacctctggatctcaagactcaaggtgggtggagatgagcaagaccaattagagcaaatcaacaaggcggctgttgccctctggaagttcgagaccaccaagtactactgca

SEQ ID NO: 61367 - DNA, 410 bp, Setaria italica
  Peptide Sequence Number=SeqID_127341
ttgtctaaggtattgtaaagtaatttggtccttattattttgtcctaggtagtattaaagaatcctcttagtggcatccgatttaccaactctctgttgcagatgactgatttaaatgatgaccagaggcagttccttgaaactagctctgcttgtgagaaacagatgtccaagattgtaaaggacgccagtctccaaagtattgaggatgggtaagcattctaatcttacccttttcactcacacatgctctaatatttgcattgaatgaatacatttgattcatttacgtttgtttcacctgtgcccaagagtaaccattatctgagtctgagtatcagtggcactaatattgtctgtagactgtagaggtacaaaatcataataggaatacagagaagttcatcagt

SEQ ID NO: 61368 - DNA, 386 bp, Setaria italica
  Peptide Sequence Number=SeqID_127342
aactggcattgtcacacagagccctagcatcatggaccttgtgaagtgcgatggggctgcactttattatcatgggaagtactatccattgggtgtcactcccactgagtctcaaattaaggatattatcgagtggttgacagtgtgtcatggggactcaacaggcctcagcacagatagcctggctgatgcaggctaccatggtgctgctgcattaggcgatgccgtgtgtggaatggcagtagcctatattacgccaagtgattacttgttttggttccggtcacacacagctaaggaaatcaaatggggtggtgcgaagcatcacccagaggtattaaggtattgtattggttcttagttaggtttattttgtttcttacctt

SEQ ID NO: 61369 - DNA, 261 bp, Setaria italica
  Peptide Sequence Number=SeqID_127343
ctcgctgctcaacccgctatggatccactccagggtctctgccaagccgttctacgccatcctccaccgcatcgacatcggcgtcgtcatcgacctcgagcccgcccgcaccgaggaccccgcgctctccatcgccggtgcagtccagtcccagaaactcgcggtccgcgccatctcccgccttcaggcgctacccggcggggacgtcaagctgctctgtcgtactacttgttcgttggtagtctacgttccgtcgtagtc

SEQ ID NO: 61370 - DNA, 450 bp, Setaria italica
  Peptide Sequence Number=SeqID_127344
aaaccttcaaccgttgtgaccataccacccaacgttccacttgtgagctccaactcaagttcaggtacttttcacactagctgaatctgactttatgacatcacgagtgaggtctttttacatttttgaacacgtagcgtagttttctttcctttagctggaatttcacccccaggcttcagctctgaattgcggtaaccacagatgtcacatgttgttgccataacaatcacctcccggaaatatgggatctctagaaaaggtcaaggatcagatactttttacttgcagcattaaacagcagaaaggaatcactaaaatgttttgtgcctacatttaggaacctaatcaaagggttgcactatgctgcaggctcctgaccacatgaatcgttatacctccctgtaagcatgcgtggtaacccaaccaaactattcctgtttaaatgga

SEQ ID NO: 61371 - DNA, 202 bp, Setaria italica
  misc_feature (170)..(170): n is a, c, g, or t
  Peptide Sequence Number=SeqID_127345
tgatcagatcgaaaccggtcgcctacatgatgcagtgaacatactattatccttacaggcacgaagctactttactttgcatcccgcatgccatagacaagttcaggatagctgaagaaattctgtttcatgatagagtttggctgtgaatctaaattttttaaaaaaanaaaaactaatatagcatgcaaatgcagtgatg

SEQ ID NO: 61372 - DNA, 207 bp, Setaria italica
  Peptide Sequence Number=SeqID_127346
aattaaaacaaagaacaaagttagaaagaattaaaagaaatacaatgacatgccatgcatcagattttaaagcattgctaaaactatatacaacattgagaaactagataatcaatgatctactttacaggtttggatcttggggtatttgtttcacatatggtacatggtttgctatagagggtctattcagccgttggacagaag

SEQ ID NO: 61373 - DNA, 287 bp, Setaria italica
  Peptide Sequence Number=SeqID_127347
agagaaacggggcgggtaattctctcctcatctcctttgcatggttgcaaaaaagaaaaaaaaacaccaagagcttaattaccactatgttacagcacttaaaaacaccaagagcttaattaccactatgttacagcacttaattacactctcatcagaccacttgccgttgcagcacctcatctccggcggcttctcgccgggcggagctctgctccgttcgccgcctgcctcggcttttagcagggtccgtgcggcgctcccgccgccgcggcggcggccgtcct

SEQ ID NO: 61374 - DNA, 150 bp, Setaria italica
  Peptide Sequence Number=SeqID_127348
tacctgcacagtccatcttcaggtagggcatgcaacttccctcattctggtaccagatgcaccaccaccagatacgggacctgaagacttgcggtggtgcatctggtaccagaatgagggaagttgcatgccctacctgcacagtccgca

SEQ ID NO: 61375 - DNA, 132 bp, Setaria italica
  Peptide Sequence Number=SeqID_127349
atttgggaccatcttcagtcttcaccgaatctatcttgcatctgcttcactagtgttatgccatgcaagatagatttgggaccatcttcagtcttcaccgaattctatctgtattctccacatacaccctgt

SEQ ID NO: 61376 - DNA, 388 bp, Setaria italica
  Peptide Sequence Number=SeqID_127350
aaccaagaagacgtacaagacgtgaatgagaaagagctgtctgctgcacttgaagctattaagaaagtcatgaagatggacgctgctgagccgttcaacattccagtggatcctgttgcactaggaatacctgtgagtattttgtgctatttctttcatttcaaatgtaccataatgccgcatctgttaagcatggcttgcctgtccagcgtggcaaaactgccctgcaaaccacctcagggtgttgagtagtttagcctgcacaagtagtacatgtgaaatgaaacgcttagttgtctcatcctccgagaagttatggcgtaacagtttccataaagtgtattcagtttgtcgttttccctgtagtttctcttgcctgtgttacatg

SEQ ID NO: 61377 - DNA, 189 bp, Setaria italica
  Peptide Sequence Number=SeqID_127351
attttatgctgatcggttgattcgattggttgtcgagcatggtcttggtcatcttccgttccaggaaaagcaggtcattactcctactggatctgtttacactggtgtggagttctccaaaagcagaacatgcctatttgcaatatctttcggtaaattatgatagatgagctgttgcccattgtctcc

SEQ ID NO: 61378 - DNA, 301 bp, Setaria italica
  Peptide Sequence Number=SeqID_127352
cacacaattatacgggatgctgccacagcaacacatgatttcatattttatgctgatcggttgattcgattggtcagtatatacatgtatttgatgagttttcttttatatgggttcgcatggtagcttgaatttccctgtggaaaataggttgtcgagcatggtcttggtcatcttccgttccaggaaaagcaggtcattactcctactggatctgtttacactggtgtggagttctccaaaagattgtgtggtatctcagtgattaggagtggtgaaagcatggagaatgctactacgg

SEQ ID NO: 61379 - DNA, 352 bp, Setaria italica
  Peptide Sequence Number=SeqID_127353
ggacaagccttaagccaccagcaggtgcttcaagtctgagagggaatattcttacttgtaacaaaggcttcttgccagagttcatgcttggaccatgatggagagatctctcgtactgggattccaatatcattgcacaccctgttcgaaacaaatagaacttcagttacaagggttcagcatttggtattaacttcagctacaagggttcagcatttggtatatctctaactcatagtagctcagtcaggatcccactatcccagtgtgaattatttgccagccccccacttatgcaacccctttagtatgccattatcaggcctagtatatatccactggacctagtgca

SEQ ID NO: 61380 - DNA, 223 bp, Setaria italica
  misc_feature (213)..(213): n is a, c, g, or t
  Peptide Sequence Number=SeqID_127354
ctgtaggatatcatgtccagcagcagtgattccatgagtaactgcattctgcaatttatgtgcagagattcgtgaatcgtgtggactacatgtcaatttatgcttctgatcttgtgcaagcagttcgtaaatctgctggagacaaagataaaccattggaggggctgcacatagtcgttgatgcagggaatggtgcgaggcggtcttttttgnggataaggta

SEQ ID NO: 61381 - DNA, 390 bp, Setaria italica
  Peptide Sequence Number=SeqID_127355
agtcttcctgactgcctcccattcctatcgtcttaggacctcattcctcttccttttagcacactgcacagatgataaatggtgagcttttagttggccatttttcggctgttgttgtttctttggcatgcctcaatgcatggcttaaagatgatagcttgtttaccggaatgttttgattctttggcatgcctagtccatgcatagtttaaggtgatggcttagctagctatccaactggtttaagttttagataccactagtgattgttttggaaatgtaaacacatcacactaataagacttattaggtaggatatgaaaactggctgcatactcaaactttaggagacacaaaaaaatgttgtcccatggaacatgcgggcggcat

SEQ ID NO: 61382 - DNA, 222 bp, Setaria italica
  Peptide Sequence Number=SeqID_127356
ttcttttggcatgcctcaatgtgtggcttaagatgatagcttgtttaccggaatgtttgattctttggcatgtctagtccatgcatagtttaaggtgatggcttagctagctatcccactggtctaagttttagatcccactagcacaatgatataactgattaactagtgattgttttggatatgaaaaggcatcacactagtaaattggctgcgtactca

SEQ ID NO: 61383 - DNA, 343 bp, Setaria italica
  Peptide Sequence Number=SeqID_127357
agctcatcaaaagaggattttctgaaggtgaagatgaaaggatgatagagtcagtctcttagactcatatcataggagccgcgaatgataacatccttgctgagtgcctcttgcgaagttgaggagtcaagaactaagcaaacaccaaaaagaatcaaaggattctggagcaatggagattgctctacaaaacactagccttttctctctccttcctttcttttccaggtgggaactatcaaggcagatataagggataagaatatctctatccaaatatgcaatctttcatgcttgtgccggttgtttgcgtcatgtacaaaaaaagttgaaaaaaactaga

SEQ ID NO: 61384 - DNA, 228 bp, Setaria italica
  Peptide Sequence Number=SeqID_127358
cattcctgtccttggtggcacccgcatggtagtactctgttgtcttctggaccagctcaagtctccagaagcctcttgatgtctgtgagtcggctgcctagaattgaacactcgctgacaaccgcatcgtagtccaccatggctgccctcttcacgttggcaaactctgtgctgagacctccaacaattggcagcccgaggttcatgtattcattttgcctctcctca

SEQ ID NO: 61385 - DNA, 248 bp, Setaria italica
  Peptide Sequence Number=SeqID_127359
ggcgcccaactccaaggtagggcgcaggtgttcgagcagtacgccaagcaggcggcggcacaagggcaccactccgagcgccaccggtcagttccatcatcaatcaatttgctttaatttgtttcccgttcattttctttgcctcgctagctgcttgcatgatctagtagttgcatgtttgatatggcttcaaaatacggttagcttagctagctagctagattacctgtagatgccacacggttgtt

SEQ ID NO: 61386 - DNA, 306 bp, Setaria italica
  Peptide Sequence Number=SeqID_127360
cgcatgctcatattcaagagttgttttttcagctgatccttctccttttcattttctctcctgcgtctcagattgattacacccagccaatgaaagggtcgcagcaggcaccccaagacaccccggccccagccgacgacaacagccagacgggcacggtggggtgcgtggccgtcgacgccgcgggcaacctcgcgacggcgacgtccacgggcgggctggtgaacaagatggccggccggatcggggacacccccgtggtgggcgccggcacgtacgccaacgccctgtgcgcggtctccgcca

SEQ ID NO: 61387 - DNA, 195 bp, Setaria italica
  Peptide Sequence Number=SeqID_127361
tcgcgggcctctccaccgtcgccaacgccgtctcgctcgccaggctcctcatggagaagacgccgcacatctacctcgcattcgacggtgccgaggccttcgccagggaactggaggccaacagacgggtctacgtgctgacgtggtcagttggccagttttaacttatcaggaaatttattattgaatctgctg

SEQ ID NO: 61388 - DNA, 183 bp, Setaria italica
  Peptide Sequence Number=SeqID_127362
ttccagataatcccttttcatcttacatagagagaatgtttacttaacctctttatccaccaaaattaaacttacctatgcaagtacggcatgaatagtaaactttcagtgttttttggcaccatgtcttgtgctacttctttcctaagtgaacctctatcgaaacgatcagaattcaccatg

SEQ ID NO: 61389 - DNA, 265 bp, Setaria italica
  Peptide Sequence Number=SeqID_127363
ttccttagtagatggaagttcccacagcaaatagaagacaaggacattgcagaaatggagtgaatggggcatcaaaggtattgctactcctatttttcagtacagcacgagtttactgaatattgaatgtcccttcagtattaatccttgcgaaccggccgaggcggccaagatccaaaccgacggcgagagagcgcagagagcccggtaaattgagcggcaggggggcactaatacaggatgggggcggaagcaggggacgcta

SEQ ID NO: 61390 - DNA, 245 bp, Setaria italica
  Peptide Sequence Number=SeqID_127364
aggccggcgacgtacgtgacgctgacggcgaacgtggccagcagcatcagcaccttgcggagccgcagcagcgcgctcttgtccgccctctccgcctccgattcgccggcatgctccggcgactcatcctcccccttgtccatcttcttctcgggcgcgccgtctttccccttgtccgccggcgccgtcaacgaggccagcagcatcagcaccttgtggaccttcgcaaccgccctcctgtccat

SEQ ID NO: 61391 - DNA, 419 bp, Setaria italica
  Peptide Sequence Number=SeqID_127365
agaaggacaaccggaagggacaagacaacaatacaatacggacttacaatactagaaatactagaaatctgcatcagacagcgattctgatgacaagggcagccggaggaagagcaaaaggcggagcagtaggcgctgagtttgaagaactggagaaggcattgtggatgtcaagtatcatgatatacttatcgatcgattcacgagtatctttttttcatcgtcagacctgcatgtgccgggcgttctccaagaagcaaatgtagcattcctttcctgaatgctagtaccgatagttttccctgtaccaagaagtgcctaaagctctaagtgttcttattctatggtagttgtgagaaccattgaatgctgtaacaatattcgcatatgaatttctgagttttgcgtgattaccttcc

SEQ ID NO: 61392 - DNA, 235 bp, Setaria italica
  Peptide Sequence Number=SeqID_127366
ccttctctcttttgcttcctcctgtgttgctgcttcttgtcctcggagtccgaggacaagaagcagcaacacaggaggaagcaaaagaagagaaaggcaccggagggacagcacatcatcggcttcatctgaatctgaatctgcatcagacagcgattctgatgacaagggcagccggaggaagagcaaaaggcggagcagtaggcgctgagtttgaagaactggagaaggcatt

SEQ ID NO: 61393 - DNA, 269 bp, Setaria italica
  Peptide Sequence Number=SeqID_127367
cacaaccaaatgaactcgacttttatgccctgtctttaccctgccggcatttctctgtcctccggctccggctctcgccgtctttctccgactgatggatggatggtttttggcagcgcactctcgcatcctccgcgcctattttcctgaagaagacgaaatcggaaatgtcagttggtttaccagtggtgtgcaccttgaagatattcgccctgttcggctggacttataagccggctgaaaagttgaaacggcttatttgttggaag

SEQ ID NO: 61394 - DNA, 255 bp, Setaria italica
  Peptide Sequence Number=SeqID_127368
gcgcggacgagccatgggcccttgacgatacggttggcgatcttgaagcgcgcgttgcggtaggcgtcgtcgccgtggacgaagcgaccgagcagcgagtccggcgggatgggcgcctccgccgcgaagtagaacaccgcgctgtacgcgtccggccggcccggcacctgggagggagaatcgaaggacgcgtcacaattcagaaccaaaaaaataaaaagatcgaatctctctctctctctctctctctctctc

SEQ ID NO: 61395 - DNA, 234 bp, Setaria italica
  Peptide Sequence Number=SeqID_127369
tatccagcaaattatcaaaggtatgtattgtcttaggatcctcagtttggactgatcttcttttactgaattatcctcagctgccgttattaacatctatcgtgatgttaatagttcacatggttgatttctttaggcctgaaactcagcccacacattaccacggcagtgaagctgttgcagcacgacctaggctggctgagagacccaaggacactagtcgtctgccccaat

SEQ ID NO: 61396 - DNA, 217 bp, Setaria italica
  Peptide Sequence Number=SeqID_127370
agctcttgagtaggactgtggaggaaacacgggtgagagaagacgatgtctctcttttatttgaggtatagccgtatagggccttacctgtaaagtagccggtaagacatgtaaggtttggttgaaatcataatgctcaaaagctggtgctacctcagtcggattgccttcaaacacatcagcgcttgatgattcagactcctcagggaactcctgt

SEQ ID NO: 61397 - DNA, 497 bp, Setaria italica
  Peptide Sequence Number=SeqID_127371
tttttgtagtaacttgtagtaaccctacgttctactagtcttactttatttctaggtatttgcacgcgtgcatgcaagctcttgcacgccgccgcaccacctcactccgcacctacttgtactggtcgccggagaagacgctgcactcctgtggctccagccggcacatcatcggcagccccgcggcgtactgccgggccttcggtcaacctcacgcgaccgatccttctagggaggaaacggcagggtacccctcccctccctcgccgccgccgtagtacccttctccttgctcgccgccgtagccgtagggcccctcctccagcggcggcatggcctcctcgtagccgcgcaccatgcggcggacggcggagcaccggcactcgcggctcacgtcctggagctgctggcagcaccgcatccggagcccggtgccccaccggaacggccgacgccgtagcgcatgccgccggtcagctgccggtcgaggacctgcc

SEQ ID NO: 61398 - DNA, 376 bp, Setaria italica
  misc_feature (245)..(245): n is a, c, g, or t
  Peptide Sequence Number=SeqID_127372
gtaccagtaccagctggccacattccttattcatcacttatcatcatattgatttgtagcacacaacaatgtgagaactgagaacccacgtcacagcactttattcaggatttgcacgcgtgcatgcaagctcttgcacgccgccgcaccacctcactccgcacctacttgtactggtcgccggagaagacgctgcactcctgtggctccagccggcacatcatcggcagccccgcggcgtactnccgggccttcgtcaacctcacgcgaccgatccttctaggaggaaacggcaggtaacccctacccctaccctacgaccgaccgaccgtaagtaacccttactaccttagactacgaccgaccgtaagaccga

SEQ ID NO: 61399 - DNA, 417 bp, Setaria italica
  Peptide Sequence Number=SeqID_127373
tagtccgttaggtcccttccttcctagtcggtcggtctattggtccttcctcgtagccgcgcaccatgcggcggacggcggagcaccggcactcgcggctcacgtcctggagctgctggcagcaccgcatccggagcccggtgccccaccggaacgggccgacgccgtagcgcatgccgccggtcagctgccggtcgaggacctgccggcacgcccacagagggttctcctcgacctcgcgctggcaccggaggtccctgagcctctgccgctcgaacccgctttggccggcggccatggcaaccagggccgccaggcacagcgcggctgtggcggcggcgacgacgaacttggccatctcagcacggatcactggcagatctctgtagctgccttgctggtgttgttggtctggct

SEQ ID NO: 61400 - DNA, 363 bp, Setaria italica
  Peptide Sequence Number=SeqID_127374
acgaatgatggcgaggaagaagttgaggaggaggggatgatgagggcgtgggagagctgacgaatctactacctacgtacccgaaggtagtagactagtaccaacttagttagaagtaagtaaagaataattaggcaacaaataaggctcaaatcaacgtttttctttgctcttttaactcttggtttgctgtgcttgctcttttcttcttcgtctaatgcaccattacatactcccttctcgtgtaatttcattccggtttgtttgttgttcctggtgccttcccatgtttagaatggaaaggcgacgattggcaaaagaaacacagaaaaaagcaaacaggaaaagaagaagagagaatgg

SEQ ID NO: 61401 - DNA, 268 bp, Setaria italica
  Peptide Sequence Number=SeqID_127375
taattttccctgagcagatgttgttgcccagttcataattagctgtcctcgactcgtttctggctctactgtaagtacacttcaaagatgtcttacttttatgagctatcctgaattatattaatcaatatcatagttaattatttttttgtagagagttaattaattaattttaccttcttgtggccttgtgggtcgccccccccccccaccgcgcacacaacacacacacacacacacatctgctgataacaaattttaggtcatt

SEQ ID NO: 61402 - DNA, 227 bp, Setaria italica
  Peptide Sequence Number=SeqID_127376
tagtaagtttggatccttttggacagtcattgcagccaactttctaactgagtatcagaagcagtgttatgaggtagtacttaagagtgcgctggaaatctcaatttaaatgtctattttgtattctcagttgtgtgtgcttttaacgcaattttgtttctaaaatattactaactttgatctcctgtgctttctattctttgcttcacttgtatagtttaaagaag

SEQ ID NO: 61403 - DNA, 209 bp, Setaria italica
  Peptide Sequence Number=SeqID_127377
aaacttaaccttaacaaataacttacttacccaaccaaagctcgtaatgtagagcaatcatgacatgagggaagaagaagccgcttctacaagactgtagttggcagcaatgaagaacccccatctcgctgcaccccggaagtagtgcacttcattgttcagcagcattttgatgctccatcaatgtgggcaatctttccacttcagga

SEQ ID NO: 61404 - DNA, 178 bp, Setaria italica
  Peptide Sequence Number=SeqID_127378
aaagactgtagttggcagcaatgaagaacccccatctcgctgcaccgagctcgtctgacacagatggcaaagtacttcacagcatacaggatagaccacatcttgggtttctttaggatatgggagcttccagatcatgctgcaacaggtttagttgggaaattttaggacccttcaa

SEQ ID NO: 61405 - DNA, 312 bp, Setaria italica
  Peptide Sequence Number=SeqID_127379
ggcaaaggcatggtagcgcttctaaggggaacatcccatactttgagacatctgccaaggatggaacgaatgttgaagatgctttccagtgtatcgtaaagaacgctctgaagaatgaaccagaggaagaactgtatgtgcctgataccgtggatgtggtgggtggcaaccgggcccagagatcatctggttgctgttaaagcatgacgcatcatggggtgctgtgatcatcggctttgcagtaaccaaaacataacctttagaacaattagactagggtactaccaataggttacttacaaattttactaa

SEQ ID NO: 61406 - DNA, 386 bp, Setaria italica
  Peptide Sequence Number=SeqID_127380
ttgatccgagaaggcctgataatgcgatcgataatcccgtattcgagagccccttcagcgtcaaagcgcttcaccctggacaggtcctcatgaatctgcaaagcaaggagtaaatgcttgagatgaatgggactcttaggactgaaaacgctaatacaatcgtatcgaatcacaagtgaaaagattcaaaaacaaaatcctctatgggatagtctcaaaggaacagaatatggtaccatagcatgtaatgtaatatggcattctgaatcagatttggaccttgttatgcaatacaacaaaccagagcaatgcaaaccatcatgcaccagactggtacatgacgcaacaaaaaaacttgtttaagcacacataattgaaaaaggtaa

SEQ ID NO: 61407 - DNA, 448 bp, Setaria italica
  Peptide Sequence Number=SeqID_127381
cccagatttagcatatccttcctgtgaccagtggacccctctttcttgatccgagaaggcctgataatgcgatcgataatcccgtattcgagagccccttcagcgtcaaagcgcttcaccctggacaggtcctcatgaatcttttcgacagaatgacctgtgtgctccgcaagcttgccatacagatagttcttgatacgaataagctcatttgcttcattttcaatatcatcagcctggcctcgagcagctccagcaggtgactgaagtgaaatccggcataaaggcataccagtacgtgaaccctggacaatacagaagaacagatatatgtattatactagagcatattcaagacacacaggactaccaaaaagaaccaataattaaatagttacaccttttcaccagctgcaagaataaatcctagccaagttgaatgacaaag

SEQ ID NO: 61408 - DNA, 153 bp, Setaria italica
  Peptide Sequence Number=SeqID_127382
gatacgaataagctcatttgcttcattttcaatatcatcagcctggcctcgagcagctccagcaggtgactgaagtgaaatccggcataaaggcataccagtacgtgctctgctttttcccgagaacgttcttgttggacagtacatttctct

SEQ ID NO: 61409 - DNA, 408 bp, Setaria italica
  misc_feature (345)..(345): n is a, c, g, or t
  Peptide Sequence Number=SeqID_127383
gctgctagctaccagagcagagccaggcccatgcagcaaaccatgattaagtcgacccgtccggtgcacctccatcatcatctggtgagtcctttctgtcctggttctccttccacttggcccaggcccatctcaacacaatgaacgccccaagtgcatacacctgccagaggttgcgcggggccatctcctcttcggttgcgggcggcggcggggcgccttcctcctcctcgagctttatcggcggcggctgccgggccttttggcgctccgcatcggggaagaacggaccgtggacggcggcgccgccaccaggagcacggcgagcagaaggcagcaggaagngaggcgacgcgtcgccattgctgcagctccgacgaactctgcttgctctctctctctgtgtgt

SEQ ID NO: 61410 - DNA, 333 bp, Setaria italica
  Peptide Sequence Number=SeqID_127384
tttttttttttttgtttaccgttatttatttaaaccttttgttttgttaactaaaggttaaattaagtactacacagacacgctgacaccggcagaacaaatcagaaggccgggctagctggattaacgagacgatggatttcttacaccaggactaaccaaaagtccaaaacacacacgctctttattcatgaactgcgcctggtgacacgagggttggaaaagggcggcggcagctagtgagctagccatatgcatggcccggccatcatgcatctcgcgccgggcacgcacgggcggcagccagctagctcactcacggcagtgcgtggt

SEQ ID NO: 61411 - DNA, 182 bp, Setaria italica
  Peptide Sequence Number=SeqID_127385
ggcgcagttcatgattaacgagacgatggatttcttacaccaggactaaccaaaagtccaaaacacacacgctctttattcatgaactgcgcctggtgacacgagggttggaaaagggcggcggcagctagtgagctagccatatgcatggcccggccatgcatatggctagctcactagct

SEQ ID NO: 61412 - DNA, 432 bp, Setaria italica
  Peptide Sequence Number=SeqID_127386
cctcaagattaggtgcacttgaatccaaaacatgctgtattggtaagtctgagatgaagccaacagtatcactaagaagtgcttttctccctgatggaagaatcacacttcgtaagcggggatctactgttgcaaacagcctatcatcactgtacagggcagtttcagaaagtgcactcactagtgtagattttcccgcatttgtatatccaactactgcaacagttacaagctcttgaccaaatgagccaccatgccttttccgacctgaacgttgtattgctctagtacggcgtacatgttcgatttgagttaacaatttcacacgacgttcttggattctcctccgttgtagttgaagctctgtttcaccagcaccactcatgaagccccgcccccacttcctctccctcttgcactgacaacctcagc

SEQ ID NO: 61413 - DNA, 251 bp, Setaria italica
  Peptide Sequence Number=SeqID_127387
cctcccataaatgcaccagaaacattctttacaatactggtggattagtttggaactcatcaatctgttaagtgacttgctttgatcagaattaatgttcctcagtgcatttcttgtcaacctattgttctgcagccttttcgccatccatagaggaagaaggtctccattttctatcgaaaggcccatagcttctttgcacaacatttttgttgttcagtcagtttcctatctatcaatgccaacaactc

SEQ ID NO: 61414 - DNA, 426 bp, Setaria italica
  misc_feature (4)..(4): n is a, c, g, or t
  Peptide Sequence Number=SeqID_127388
cagntaaaactttcctgcagacatcattcaaattcaaatttgacaatgggtggtccatgtagatggtaaatgtaaacactatgaaaatccaaaaattgtaaaccaaagtgctattgattcatgtgcactcatcaacaaaaacttgttgctacttagtacttacctcactttcatcatcaagaacgcgctccatcaaatagacatcacagaattttgcaatttctagaagaacctccataacagaaggcctcactgtgacatggttctgcaagaagatacataattccattagttaactagtacaaactgaagtttcttttggcagcaatgcagcattgttacagcccacctgaagctcctctggagttgtttcctccaaaatcacaccaagtaagcggcatgtgacccttcttccttcgctcaagc

SEQ ID NO: 61415 - DNA, 371 bp, Setaria italica
  Peptide Sequence Number=SeqID_127389
caggaaaaagaaataggcaaattagaaaataatttcaaataagcaaatttaaaaactaactccaagaatgtgtcagaaatatgtccttgtaactacgagtgcttacagataattggtgaacaatttccggacttgtgtcaatgtgccaatcaggctcgagttgccgaacaaaagatgtacggccgttctctgtactacagaagagaacctacagatttcaataatgatttttagatacatggcagataaaagatggctacaaccagaactagaataacaatcagtcctcttttgcagactggcatcatcttgcaaaataccttgtcatttatcaaggcaccattagcaaaaagtccagcttcgctcagggc

SEQ ID NO: 61416 - DNA, 257 bp, Setaria italica
  Peptide Sequence Number=SeqID_127390
ggggagggagaggagaggggacggcggcggcggcgaaggcaaggccgccgcgccggcggtgctgaggtcgtccggcacggtgtggggcgagggctcggagacgttcgccgccgtctgctcgcgacgcggcgagaagggcaccaaccaggactgctccatcgtctgggaggaagaatgtgagataatcgaggttaatgttcattgtcctgtgcaaggagacattgtaattgagtgcatcagcctggatgaggactttg

SEQ ID NO: 61417 - DNA, 250 bp, Setaria italica
  Peptide Sequence Number=SeqID_127391
cctttatgagaaagtaaaactttctcaaaattcttgtgttctgaacagaacttgttctcaaatgccatcatctgttcagggattcgggtgccaggaggacaccatcttctgcggtatcttcgacgggcacggcccgtggggccactacgtggccaaggccgtgcgcgactcgctgccgccgtcgctgctgtgccactggcaggaggccctcacgctggcgtcgctcatcgacggcgagaagaggctcagc

SEQ ID NO: 61418 - DNA, 323 bp, Setaria italica
  Peptide Sequence Number=SeqID_127392
cgtgtagattcctgcgaagaggagaccggcggcgccggcggtggccaaggtgtagctcagggtgtacaacggcttgttcatatgcatgccaaagaaatccatggcgaagcccaggactagcatactgaaggaagggatcaaccagttcatgatcctctccctgtgtttctggaaatgtacaatgacgtgtccgtactggagcccgatcaagcatgtcacaatggccattctacggaacttgtagtaaggtcctttctagggttctaaaaggtagtccttggtcttaccttaagtttagggttagtttcgtttttcttttaagg

SEQ ID NO: 61419 - DNA, 372 bp, Setaria italica
  misc_feature (286)..(286): n is a, c, g, or t
  Peptide Sequence Number=SeqID_127393
agaatagaatagacaatctagccgtgccatttgaaaatctacaaagtaccttttagttaaggatctaatgagatcgatgacttctcttcagttgattctcttaacctcttcccaagtttaagggctttctgataatcctatagccgatcctgccaagggtggcgctccccgatttgtgcttattgctcgactaggaaaagttaaaatacttaatggcagtgaggtaagcccacgtgaacggagggaatcagaaatacgatatattcgccttgttatgggaaaaacncaatcaaatgacatagaagatatcaaacggctgcaccctagatttgctgaactcaaggcctttcattgtatcgaagatgagaagcc

SEQ ID NO: 61420 - DNA, 330 bp, Setaria italica
  Peptide Sequence Number=SeqID_127394
ttagtaaactaaaaaactaaggtaattactaagtctattgttaaagttattcctattcttaattcttccatcagctcttgatgatgcatctgccgtgccatttgaaaatctacaagtccttttgttaggatctaatgagatcgatgacttctcttcagttgattctcttaacctcttcccaagtttaagggacgtcaggctttctgataatcctatagccgatcctgccaagggtggcgctccccgatttgtgcttattgctcgactaggaaaagttaaaatacttaatggcagtgaggtaagcccacgtgaacggagggaatcagaaat

SEQ ID NO: 61421 - DNA, 424 bp, Setaria italica
  Peptide Sequence Number=SeqID_127395
atgtacagcaccaggggccttgttatcttacccgctggagcagctatttccacactttgacggcaccatctctgctggctgatatcaacctctggcttgacaagttgaaggatgccaatgcaagtatagtatcacggtggcacccagcggagtctgcagcagccaaagcgagctgtgtcttgggtgtcaaaccggacaccgtggttgtttgcttgtacatttcctgaacgacttgtactccaaaactggatcttatatcataacactcattgtttccaactgctttctccaaaatatcgctggtccctcggccaaagaagtccgttcggcaaaaggagattattttggagaacggacttctttggccgagggaccagcgatacagaagtccgttcggcaaaaggagattatttttggagtaact

SEQ ID NO: 61422 - DNA, 247 bp, Setaria italica
  Peptide Sequence Number=SeqID_127396
ttcaaatgaattttagtttagtgctcaaagtttggcattctgctccggtttggtacaaagacaagctagtggcacgcctcccattgggacagagtttcgcgtgccacttatttctgggatcctgagatatggggtgccttaactaaacgaaataatttatcagagtgaaacacgctaataacaacgacaacaataaaggaaagacaatttactaaagacgacaaataataccaaatttagaataaga

SEQ ID NO: 61423 - DNA, 468 bp, Setaria italica
  Peptide Sequence Number=SeqID_127397
tgcttggagttgatccaaagaagatgtcagtgttcctgttgttggcgggcatgcaggggtaactatattacccctcctctcccaggtcaaccctccaagctcattcactcaggaagagatcaaatatttgactaaccgcattcagaatggtggcacagaagttgtggaggcaaaggctggagcagggtctgcaactctgtcaatggcttttgctgctgcgaaatttggtgatgcatgcttgcgagcaatgcgcggtgaagctggcatcattgaatgttcatatgttgcctctgaggtgacagagctgccgttctttgcaacaaaagtgaggctgggtcgcggaggagctgaggagatccttcctcttggaccaactccaagcacctcagccacaaggtgttagccctcacaacatcaagtgttgtgactccaaggagacgcttgggattataagttccagtctttctt

SEQ ID NO: 61424 - DNA, 254 bp, Setaria italica
  Peptide Sequence Number=SeqID_127398
aaagttaatatgtttcttcttgagcactgtacattaccatcacgattaatagtctggcacttttcaataaaacttgcaggatgacagcatcttggttgaccttgctgttgccatcacaatggaaggaattagtgcttttcggtttgatttttctggaaatggggaaagtgaaggtgaattccaatatggaagctacagaaaagaggcagctgatttgcgctctgtagtattatatttctcaaaacaaaatatga

SEQ ID NO: 61425 - DNA, 404 bp, Setaria italica
  Peptide Sequence Number=SeqID_127399
tttttgaaacaaacgtacaatgctcgaatatacaccacgccccataacccccaattacaccaccttgcttgcagtagataacaccacccacacaaccccggatcagacactaatccatatcactgaggcacacaggtacaagccacacacttttggtctagtcttcggcagcatgcatccgcctgctgtttgaattgcacacatgctcccccgccaagactgcctctgcaaccacctcacgccaccagcacgtacagcgcgtagatgatccccggtatgtacccccagtactggtcagcaacaggtcgatccagaactccaatctgcgtcatccatcatgccaagtcaaaaaaaaaaaagcgcacaacacaggggagagcctaattctctccaggagacgagaa

SEQ ID NO: 61426 - DNA, 247 bp, Setaria italica
  Peptide Sequence Number=SeqID_127400
ggccttctcaatcccttgaataacggtaacgcaacaaatcatatcgttgctatcgagattgataccatacagaacgatgagttacaagacattgacagcaaccacataggggttgacataaacggcctgatttcagttgggtcggcaacggcaggttactatacccctactcatgcgtttcataagttgagcctcatcagtggacagcccatgcagttgtgggtggactacgacagcaaccaagcca

SEQ ID NO: 61427 - DNA, 244 bp, Setaria italica
  Peptide Sequence Number=SeqID_127401
caatggccccttgctgcctctccaaacccagccggccgctgctatcagtcgcatgtaatctgtcaaccgttttgccaggaacggaagtttatgctggattttcctcagcgactggcccaattcccagcagacattacattctgggttggagcttcaagctcaacggagaacctgcagcactcaactaccccgccttatccatcaagactatccaagaacttgcagcgcagcttcaatatcagcc

SEQ ID NO: 61428 - DNA, 146 bp, Setaria italica
  Peptide Sequence Number=SeqID_127402
tcgaattccctatatttcataaccagccacggttaccagctccctttggagtctttgcatatccagagctgcaggtacgggtatccaactgttcagcttgtgttatacatcagcttacttcctaaccacttatgcattgcttgtcg

SEQ ID NO: 61429 - DNA, 228 bp, Setaria italica
  Peptide Sequence Number=SeqID_127403
catcatagcatgacatcatgaacccaacatgtccatgctcgcggttgtaaacctgagccggaaaccagaacttgccactctccatggacagataccaacgacatgatggaatcatccagcacagggccggaggtggcttgccgcgctgtcctgcgtctgcccggtggtgtcctggatgcggcccaaggccgacggcgccaagtcatcctagcacagggccggtacgac

SEQ ID NO: 61430 - DNA, 187 bp, Setaria italica
  Peptide Sequence Number=SeqID_127404
atcagtgctgcaaagactggtggaagaagctcaggcaagctgtttcttgctggaagcttggatttacccatcaaaaagttcttggagagagggaggaaaatttgagacatgcctaagataaagacaagccgtgtgaaatatcctgaaggatgggagcttattgagccaacactttgtgatttggagg

SEQ ID NO: 61431 - DNA, 439 bp, Setaria italica
  Peptide Sequence Number=SeqID_127405
cgcggccgcccaaacagcgcgggctgctcggggctctagttcgcccggagatgctcccgcggcagcgccgtccgcgccggcgtccgggaagcggtggtgaggaatggcacctcgatgccgagcgccactgcttgcgagggttcccgagagaaaacatccgcacgatattcgggctaatccaaaagttcagcttgcacaggccaagaggtttgcaacgggtgtcttggagcgctacaataaaaggaagaaggtgcgctatacaatttatttacttgttctagaaacgaacatattatctatattggattggtgatttgcattgtcatggcctttcttgatttcttgttcccagatcaaatttgagctcttggatgccaagcctgtgatcagtatacctgagccacgatgttgttacacacacattaactttactgcaagg

SEQ ID NO: 61432 - DNA, 253 bp, Setaria italica
  Peptide Sequence Number=SeqID_127406
caacaaagaagattcggaggaacaacttttcttcgcggagatttaccactgtggcccaaggcgggctccaaatggcttcattgtcactagctgtgagccattgggccctgattctgcagtcggaccaaacatttcgcgagccggattgtacctcggtggtgaggaagaatgctgattttacatattgctttgcctgcaccgagaggaagttgcacccgaggggcgaaaattatgtcgctgggcactgcaacat

SEQ ID NO: 61433 - DNA, 229 bp, Setaria italica
  Peptide Sequence Number=SeqID_127407
acaggaaagctgattaaaggaagtacgcgttgctgtacctcacctttcgcatgcatgtggtgtggataaaatacacgcatgagaaaggtgaggtacaggaaagctgattaaaggaagtacgcgttgctcaagcacctagcttggtgtacattacatgtttattaattacctcttcgttacataaatatcctagtgctcctgtaatactgttttatgcgtttcttttatg

SEQ ID NO: 61434 - DNA, 200 bp, Setaria italica
  Peptide Sequence Number=SeqID_127408
gtgggagtatattgtaaccgggaggtatatgatatgtatgctgtataggtaaattaaaggactatgtatatttctgatttaccttcttacaacttccaaggatcattcctcccttggtacacagtgggagtatattgtaaccgggaggtatatgatatgtatgctgtatgcattttgttaatatatcacataagtaaaat

SEQ ID NO: 61435 - DNA, 309 bp, Setaria italica
  Peptide Sequence Number=SeqID_127409
tggtaagtcttacgtctactacggtacgggtcttcgtctacttggttaacttaaattaattaatgagcagcgcatctaccgcttgctttcgtctgaactcatcatttcgaccacgcaagctcagctccttacagtgcatgcatgtggtgtggataaaatacacgcatgagaaaggtgaggtacaggaaagctgattaaaggagtacgcgttgctcaagcacctagcttggtgtacattacatgtttattaattacctcttcgttacataaaagaaacgcataaaacagtattacaggagcactaggata

SEQ ID NO: 61436 - DNA, 258 bp, Setaria italica
  Peptide Sequence Number=SeqID_127410
ggccacggacacccaaggaaggaggagagaggaacctgcctttcagataagatggcgttgctccttcggcttcttgccctctcgctgctcctcgctgtggccactccaatcagggatgtcaccgatgcttgctcgtctcaagtaaaggatttcccgcacctcaacagctccgggatccacctgacgccgctccccgccgacctccccttctccgcggtgctcacccacgacgacgcgcgcatcgcctccctcgccgcg

SEQ ID NO: 61437 - DNA, 389 bp, Setaria italica
  Peptide Sequence Number=SeqID_127411
agtagaagtagtactaacgtactagtgctgtgtgattcgaaaaaaacttataatttggaacggatggagtaccaagtagaaaaacatataagaatgaacaaaaaatttatatctatatcttgggcgccgatagggttgatgagcttggagccttcaggtccttgtacctacagcaagatcaaataaagattgctgacttaatcatcagtaaaattaaggaaattaaatgattacatcaatttgtttaatttgctggatacatgcggatatatatagattatgcatgcatgtatgtattgccaacttgatcacatatatataattggaaggaattattacgatgtgtacggtgagagtggtcgctctgctttcgccggctctctgctgga

SEQ ID NO: 61438 - DNA, 248 bp, Setaria italica
  Peptide Sequence Number=SeqID_127412
ttaagtatcaagcagctagtaggccgttgttgcttatattaattaattccaagtgagatgggatcgatcgattacttgaggaggaacgcagggaagccgatcctgttggtgcccagggatgtaaccaggacgaagtgctcgacctgtgcagcagtggctgcttgtacaagcttggtggtggccatgtagtcgatgcggtacggccccgtgacatccaagatctccttctcgctggacaaccaaataga

SEQ ID NO: 61439 - DNA, 249 bp, Setaria italica
  Peptide Sequence Number=SeqID_127413
aacccaatgccaccaatccttcagctttctacacaggacggtcacccaggttccacgccccatggccatgcgagttaccggaggaatcgactttagcagcggcatgtgcacatcgtctagggtctcgttgggcgtgataagcgccgcctcgaggtcctcggccgtgaactccgcagtgatgttgagcagaggccggaacacgtggaggaagttgaggacggagccgagctcccacatgcagcggagccg

SEQ ID NO: 61440 - DNA, 411 bp, Setaria italica
  Peptide Sequence Number=SeqID_127414
tgtcatcgagtgcttctagaaagaaggaatagaaagaagttaccggttaggaaagaaagaatgctgaagatgatgatgaagaagaagaggaatattcgttgagtaccagtgaagatattgagccacaacagcataaaaaaattggaaacacgtggccggcgaggttccaagttgagatctgttgatgaaatccagagcggtctcagacgcagcaagcgctcttcacgtcctcgtattaactatcggcaatatgatttttcagactcggatacagagccaggaaaggcaaggaaatctgatgcatcagatcctgatgctggctctgatgcagagaatgatatggaactctcgacgtcaagtcaagagcaagaggaggaagaagaggatgatagtcctgatgagacaaacggt

SEQ ID NO: 61441 - DNA, 250 bp, Setaria italica
  Peptide Sequence Number=SeqID_127415
taaaaaaggttttaaaaaagtaaaaactaaaaagttaaaaaacaaaaggaaagaaaggacgaaggttaccaactaggaaagtagggtttagaagacttacttacaaaatgttatccgagtgctatttcatacttggaagccatgaggaagtttttgcttttggttatgtacactacatgaaggggcgcgcatcaaatggaccgctgctgtattatggccagactaattgatgctgcattgcggccagttc

SEQ ID NO: 61442 - DNA, 257 bp, Setaria italica
  Peptide Sequence Number=SeqID_127416
ctgctagaaaagacttttctatgaatcataattttttctagcaagtgtattaagttcctttgacattagctgattggtatgtgtatggaaataggttgcaatgtttctttgaaattagctgcaagttactttttcataacatacctgactatcaggcataatttcgcagcaagatgatattcggaatttcatcgacagttccctcaagcaaggccatgacctatctaccttccgtaaagaacggattgggtggagta

SEQ ID NO: 61443 - DNA, 251 bp, Setaria italica
  Peptide Sequence Number=SeqID_127417
tagaagccatcaaaattacaaagtatggaaatgatttcttcttgatatgtcttattcagaaggaatataaactacagtgtaatcatctcttgcattctcgtacaggaaaagagaggagaactcagctgagcctgtcactactactactaccaccaatagaagggtgcttcctctgagatcagaggcaccaagcaatggaaagttaaatggtccctcaccaacagccaacgattcatttgacgggaattctt

SEQ ID NO: 61444 - DNA, 250 bp, Setaria italica
  misc_feature (239)..(239): n is a, c, g, or t
  Peptide Sequence Number=SeqID_127418
atatcacatatagctttcaaaatcactaaacgagtcgccggctctagtgtcttgtacgtttcaatttcagttccatgggatgcaactattggaagatcaccttctgcaacccaatgccaccaatccttcagctttctacacaggacggtcacccaggttcccttggaatctcatactggtatgaagatgatgagattctcggacatagattgtatcgtgagattaggacgggtggaacnggtcaagaagg

SEQ ID NO: 61445 - DNA, 265 bp, Setaria italica
  Peptide Sequence Number=SeqID_127419
cactccaaggagatgctcaaggcgctggggttcccgggcggggtgatgccgctgcgggggctggaggagtgcgggtgggtgaaggagaccgggttcgtgtggatgcggcagaaggcgccctacgagcactacttccggggcacgggcacccgggtgcgctacgacgccgaggtcaccgcgtacgtggaggagggccggatgaagcgcatgacgggggtgcgcaagacaaagacaaggtacctagactactagggtagacccaata

SEQ ID NO: 61446 - DNA, 253 bp, Setaria italica
  Peptide Sequence Number=SeqID_127420
cgggcagcacctcgagcttgtcgatggcgtccttggcgttcttgatgagccagtcgacggccttgctggggcggtcgtagcccaggcggtcctgcacgtcgtagaactggatggccgtgtgcgccgacaggcggacgcggcggtcgcgcggcccgcgcgccgtacagaccttgctgtgccggtccttgcgccccgtggagcgcacaatgtgcccgccctgcaccgccacgatctccccgccgccgccgcctct

SEQ ID NO: 61447 - DNA, 417 bp, Setaria italica
  misc_feature (98)..(98): n is a, c, g, or t
  Peptide Sequence Number=SeqID_127421
tccgccgcttccgccgtcggcctcgccggaccaggcgcggcggacgtgctgccgttcgtggaggcggacctcaagcgcacggcgctgcgcgtcatcgngaaagccaaggagctctgcgcgcaggtggccgacgccgagtacgaggcgatgagggggacgcacgtaacgtcctctgcgacgccgtcgagaggcaccacgccgagatgctcgtcgtcggcagccacggctacggagccatcaaaagggctgttcttggaagcgtgagcgattattgtgcccaccatgcacactgcaccgtgatgatagtgaagaagccgaagcccaagcattaagcgcgatgcggcaatctgctgactgatggtattccaacaaagtactaaaattaattaattagtacgttagttacgttacttaaaa

SEQ ID NO: 61448 - DNA, 179 bp, Setaria italica
  Peptide Sequence Number=SeqID_127422
gggggacggccaggaacgtgctctgcgacgcggcggagaggcaccacgccgagatgctcgtcgtcggcagccacggctacggagcgatcaaaagggctgttcttggaagcgtgagcgattactgcgcccatcagtgcttgtgctttggcttctttactatcatcacggtgcagtgcgca

SEQ ID NO: 61449 - DNA, 515 bp, Setaria italica
  Peptide Sequence Number=SeqID_127423
acaaatagtactagactagggaactacctttacaagttacaatagcggcttgaagttgaaaagggtggtagaaagcggccatttggaagacgggtattagggtctcgaagctcatcaaagaatgggtgaacaagtgcctcaacagcagtgcatctcagattgggggagtactggagcagccgggagaccagatcaacagcttctggtggcatccttttgtgaaacaccttgtgccatgggtgtgctttgatttgtgggaatttaaactctgtgtagttcgggttcatgcatttaatttcttcccttgtagggtaccaaggccttgatgatttcaacaagttggtccacaccactttcaccgggaaacaaggctgccctagcataagctcagcaagaacacatccagcagaccaaaatgtcaattgctgtagtgtactcagtggcaccaaatatgagctcaggtgccctgtagtatcgggaacagatgtatgatatgttgggttcccccttgacca

SEQ ID NO: 61450 - DNA, 406 bp, Setaria italica
  misc_feature (138)..(138): n is a, c, g, or t
  Peptide Sequence Number=SeqID_127424
ctcaggtgcctgtagtatcgggaacagatgtatgatatgttgggttcccccttgaccagaacttttgcacttccaagtcacatagtttaagctggtgagtgtgtgggttcaccagaaggtttttgtggcttgatatcnctgtggcaaacaccaatactaccatgaatgtaagccagtgccctacatatctggtacatatacagcttcacataaataagtggcatacgttggttcatcttgttgtgatgtttcacgactcgatgaacagtctcaggcacataactacaaagaaaccaaagtttaagaataacaagttacaataaccttaactaacggtaaagttaagaaaaaaagaaaaagaactaaaaattaaagtaaactttaaactaaaaaagtaaacgtaaaa

SEQ ID NO: 61451 - DNA, 327 bp, Setaria italica
  Peptide Sequence Number=SeqID_127425
tatgagctcaggtgccctgtagtatcgggaacagatgtatgatatgttgggtcccccttgaccagaacttttgcacttccaaagtcacatagtttaagctggtgagtgtgtgggttcaccagaaggttttgtggcttgatatctctgtggcaaacaccaatactaccatgaatgtaagccagtgccctacatatctggtacatatacagcttcacataaataagtggcatacgttggttcatcttgttgtgatgtttccacgactcgatgaacagtctcaggcacatactcaactaccgagaaggatgaactgtatctaaacttgga

SEQ ID NO: 61452 - DNA, 314 bp, Setaria italica
  Peptide Sequence Number=SeqID_127426
tttatcaaaataacaatttaacagtatccggaaaacaaaaggcattacagtgtaacttaacaatagcaaaagtacccaaaatcgaagaggacaaattattacctggtacatatacagcttcacataaataagtggcatacgttggttcatcttgttgtgatgtttcacgactcgatgaacagtctcaggcacatactcaagaaccaagtttagatacagttcatccttctcggtagttgaaaagaagcaatgcttcaaagcgacaacattagggtggtcaagaaggcgcatggtctgcagctcacggttcttgt

SEQ ID NO: 61453 - DNA, 357 bp, Setaria italica
  misc_feature (311)..(311): n is a, c, g, or t
  Peptide Sequence Number=SeqID_127427
cccacctcttactaactgacgctcacctgagattgccatagctgatcttgtaatatgttctagagcagtatgaggtggggtgccgttacatgtcattgcgacatacactactcagctacgtacacaggccacggctgtcgtacaagcaggtaacctagcatcttcaacgacggacaggcgtgcatgccaccaatcatccaacatcccaagggaaaatgcacacttgcagagttccggtctcaaggcacgatcaatctcacaatccaacataggggcattgcttctttgcgtgttctgggatcaaatttcgngacaatgtctgctgggactcctttcagttcatgcggctcgaagttg

SEQ ID NO: 61454 - DNA, 270 bp, Setaria italica
  Peptide Sequence Number=SeqID_127428
ccatctctgaagaagaaggggcttacaccaatgccaactcagctttgcatcaactcacaacagctgtagtagatctaatgcgctacctctccaacctcctcttccgctgctcttcctcctccgccacgggaatctctgggctcccctccaagatttgcttccccttctctcttcctcctctcccccctctggctgctctcgctcccgcgtcctcccctttcctccctttctacctccctcccccgcctcttctttccgcttgtcgggacg

SEQ ID NO: 61455 - DNA, 263 bp, Setaria italica
  Peptide Sequence Number=SeqID_127429
gtctgctgggactcctttcagttcatgcggcttgaagttgaaaaggggtggtagaaagcggccatttggaagacgggtattagggtctcgaagctcatcaaagaatgggtgaacaagtgcctcaacagcagtgcatctcagattgcgggagcgagagcagccagaggggggagaggaggaagagagaagggggaagcaaatcttggaggggagcccagagattcccgtggcggaggaggaagagcagcggaagaggaggttgg

SEQ ID NO: 61456 - DNA, 410 bp, Setaria italica
  misc_feature (313)..(313): n is a, c, g, or t
  Peptide Sequence Number=SeqID_127430
gtcagttagtaagaggtggggtgccgttacatgtcattgcgacatacactactcagctacgtacacaggccacggctgtcgtaaaagcaggtaacctagcatcttcaaagacggacaggcgtgcatgccaccaatcatccaacatcccaagggaaaatgcacacttgcagagttccggtctcaaggcacgatcggatcgtcacaatccaacataggggcattgcttctttgcgtgttctgggatcaatttcgcgacaatgtctgctgggactcctttcagttcatgcggcttgaagttgaaaaggggtggtanaaagcggccatttggaagacgggtattagggtctcgaagctcatcaaagaatgggtgaacaagtgcctcaacagcagtgcatctcagattgggggag

SEQ ID NO: 61457 - DNA, 397 bp, Setaria italica
  Peptide Sequence Number=SeqID_127431
gtcagttagtaagaggtggggtgccgttacatgtcattgcgacatacactactcagctacgtacacaggccacggctgtcgtaaaagcaggtaacctagcatcttcaaagacggacaggcgtgcatgccaccaatcatccaacatcccaagggaaaatgcacacttgcagagttccggtctcaaggcacgatcggatacgtcacaatccaacataggggcattgcttctttgcgtgttctgggatcaatttcgcgacaatgtctgctgggactcctttcagttcatgcggcttgaagttgaaaaggggtgtagaaagcggccatttggaagacggggtattagggtctcgaagctcatcaaagaatgggtgaacaagtgcctcaacagcagtgacat

SEQ ID NO: 61458 - DNA, 310 bp, Setaria italica
  Peptide Sequence Number=SeqID_127432
tgtcagttagtaagaggtggggtgccgttacatgtcattgcgacatacactactcagctacgtacacaggccacggctgtcgtaaaagcaggtaacctagcatcttcaaagacggacaggcgtgcatgccaccaatcatccaacatcccaagggaaaatgcacacttgcagagttccggtctcaaggcacgatcggatcgtcacaatccaacataggggcattgcttctttgcgtgttctgggatcaatttcgcgacaatgtctgctgggactcctttcagttcatgcggcttgaagttgaaaaggggtg

SEQ ID NO: 61459 - DNA, 407 bp, Setaria italica
  Peptide Sequence Number=SeqID_127433
gtcagttagtaagaggtgggggtgccgttaacatgtcattgcgacatacactactcagctacgtacacaggccacggctgtcgtaaaagcaggtaacctagcatcttcaaagacggacaggcgtgcatgccaccaatcatccaacatcccaagggaaaatgcacacttgcagagttccggtctcaaggcacgatcggaatcgtcacaatccaacataggggcattgcttctttgcgtgttctgggatcaatttcgcgacaatgtctgctgggactcctttcagttcatgcggcttgaagttgaaaaggggtgtagaaagcggccatttggaagacggggtattaggggtctcgaagctcatcaaagaatgggtgaacaagtgcctcaacagcagtgcatctcagatt

SEQ ID NO: 61460 - DNA, 171 bp, Setaria italica
  Peptide Sequence Number=SeqID_127434
gctgggactcctttcagttcatgcggcttgaagttgaaaaggggtggtagaaagcggccatttggaagacgggtattagggtctcgaagctcatcaaagaatgggtgaacaagtgcctcaacagcagtgcatctcagattggggggagtacgtggagcaggccgggagacc

SEQ ID NO: 61461 - DNA, 191 bp, Setaria italica
  Peptide Sequence Number=SeqID_127435
aagaggtggggtgccgttacatgtcattgcgacatacactactcagctacgtacacaggccacggctgtcgtacaagcaggtaacctagcatcttcaacgacggacaggcgtgcatgccaccaatcatccaacatcccaagggaaaatgcacacttgcagagttccggtctcaaggcacacaggggatagg

SEQ ID NO: 61462 - DNA, 179 bp, Setaria italica
  Peptide Sequence Number=SeqID_127436
gccgttacatgtcattgcgacatacactactcagctacgtacacaggccacggctgtcgtacaagcaggtaacctagcatcttcaacgacggacaggcgtgcatgccaccaatcatccaacatcccaagggaaaatgcacacttgcagagttccggtctcaaggcacacaggggatagg

SEQ ID NO: 61463 - DNA, 106 bp, Setaria italica
  Peptide Sequence Number=SeqID_127437
tagcatcttcaacgacggacaggcgtgcatgccaccaatcatccaacatcccaagggaaatgcacacttgcagagttccggtctcaagggcacacagggggatagg

SEQ ID NO: 61464 - DNA, 323 bp, Setaria italica
  Peptide Sequence Number=SeqID_127438
tgtaaacaacgaaccagtgaccagcctaagttacaggacttctagtaccgctgagctttcaaaaatttgcatctgtaagagtaattgtaataataatgtaaaatgcttggcataaaaaaagacattgttataattgcgatgcaaaagtttggaaattatgtaaaattttgtaccattttataaaggaggttcattattatgaaacacatcagcatcagatatttgtatgatactatttgatcagatttccccatgtcagtaagaggagaaatctgatcaaatagtatcatacaaatatcttgtattgtcttagtaattagtaa

SEQ ID NO: 61465 - DNA, 251 bp, Setaria italica
  Peptide Sequence Number=SeqID_127439
acatatatgatagttttgaataacatcaagtacttgttcaagacctacttcatcaaccttattccaaataaacatgtaaacaacgaaccagtgaccagcctaagttacaggacttctagtaccgctgagctttcaaaaatttgcatctgaatgtatgggtagttctgcaagtactctctggtgtaattagtagaagcaggccaatatgggccacagaatagcacccgtgtaacagcaccatggctattgct

SEQ ID NO: 61466 - DNA, 444 bp, Setaria italica
  misc_feature (425)..(425): n is a, c, g, or t
  misc_feature (430)..(430): n is a, c, g, or t
  Peptide Sequence Number=SeqID_127440
tgtagtagtaatcaaggaggaacccaataaacagtatagcagagtaagcagaccatttcaaggctgggaattaatgaaagcaagtatgcaacaaaagtaggacaaacctgacccaatagacatgtccactgagggaataccaatgtgttgaacaaatgcactatgatcggaccctccaccgcctaatcttccgatcttaatacatatatgtgtcattagcactcttaaaagtcataaaaaatctttggtttgcatataatgcagtaaaaccaacacatacctgaacttggaacaaagaggaaacaaaactaggtctacactacctataatatttttcctttacatgccaactactcaaaatactgaaagaacaagcttgcacagggttaaaagtaacagcgatattattaactgcttacaagggnaggtnttagaggccatcca

SEQ ID NO: 61467 - DNA, 176 bp, Setaria italica
  Peptide Sequence Number=SeqID_127441
agacatgtccactgagggaataccaatgtgttgaacaaatgcactatgatcggaccctccaccgcctaatcttccgatcttaatacatatatgtgtcagactatccagtctatcatagcttgtatgatgacttcatatggatggagaagtttggagatcccttgttccagaggcat

SEQ ID NO: 61468 - DNA, 245 bp, Setaria italica
  Peptide Sequence Number=SeqID_127442
aaggtgttagaggccatccacaagtcatacagactctcagttctgttatccggattttgtaccttcctcgataacaatgaaaacagagaatatttagagtcaggataattgattggtaagacaatcaccatcatatctttgatcatagatagcaaatgttcatactaaccacaattgtattacccaagaaaaacaattctatcaaagatcaagctgctacatgtcaggagtgataacaaaacaat

SEQ ID NO: 61469 - DNA, 167 bp, Setaria italica
  Peptide Sequence Number=SeqID_127443
atacccattactccattctcaagctctgtggcataatagctgtagttgaagggtaggatctcctcatctgacagccgcagagcaacaagcccccacattgtctttgtccgtcttgtcgtactatgcctctggtaactaagggtattcttcctaaacttcttcctatt

SEQ ID NO: 61470 - DNA, 365 bp, Setaria italica
  Peptide Sequence Number=SeqID_127444
atcaatgaagcacatttgaattgtatcaacgagaattcgataccctttaagaccaagatacaaggggcacacatacctcgagtagctgcgtgaaggagaacggcccctagaataaggaggggacctagagcgagaatatctccggtcataggaacgacctctgcaatgggcagcaaacaatgaatagagaaacaatgtgccattcagtagcaaggtagtcgcactgggaagaatcaacaaacctgactctgtccctagctctcatctcctgaggcttcttcctattctcctccgcaaatacaacagttatttgcctgccaagaactatttgcccatccatgtagtactttgcatcagcagcatct

SEQ ID NO: 61471 - DNA, 291 bp, Setaria italica
  Peptide Sequence Number=SeqID_127445
gccgtcgccgtacgcggcgatgtgctcccggtggcggaggcccagcttctggatcgccttcttgatcacctcgtacccgccgtcgctcctcatcgacttggtgctgtagttggtgtgagcaccagccgattccgggagattggaatggtgctggtgctcacaccaactacagcaccattccaatctcccggaatcggcttgggatcgaaggagacgaccacaccggcgatctcggtgaatacctactacaaagaaatagtaagacgaagaccaacccaagaatactaggta

SEQ ID NO: 61472 - DNA, 356 bp, Setaria italica
  Peptide Sequence Number=SeqID_127446
agggaagctggagcgttatcaggctggaatgcagccacacaggagactcgggatattttgtttgaacttcctctggtacatttcacaatggcagtatgaggttgaaacttgaaacatagcttcaagagcagcatgaagaactgctgaccatcctctcatttggtctctggttcagaaccattccagcctgtgggcttggatcctgttgcccttgaagcagtctctttgcaatctcataaaatatgtcattcacattgattgcagttttagcagatgtctccaatagaaagaaaaagacccaattactacctagacgacaataacgtactttagacttacctactagactaggacaa

SEQ ID NO: 61473 - DNA, 249 bp, Setaria italica
  Peptide Sequence Number=SeqID_127447
cgcaatcatatgataagagcacaatcaacaattcagtaacactatccgtgcagtgatattctagtattgacatttacatgacaaacacatgagaagacaagagggaagctggagcgttatcaggctggaatgcagccacacaggagactcgggatattttgttgaacttcctctggtacatttacaacaaataggacaagtaataagaaaggtttaagtaaaaaactttaaagtaaaaagtaaactaaa

SEQ ID NO: 61474 - DNA, 273 bp, Setaria italica
  Peptide Sequence Number=SeqID_127448
gaaaagccccattctcctgcgcattacgttcttttgcttcctctgctggcacctgccttgcatctagcatatcagctttgttgccagcaagagccactattgtattcgggtttcatgagcttgaagttcttggacccatttcttcgcacgagtgaaggaggccggatttgtgatgtcatagacaactatagcagcagtcagtcgtccccttattagttactattgggggtccttaagttctttatttggttttaccttttctttcctttgttt

SEQ ID NO: 61475 - DNA, 216 bp, Setaria italica
  misc_feature (31)..(31): n is a, c, g, or t
  misc_feature (47)..(47): n is a, c, g, or t
  Peptide Sequence Number=SeqID_127449
ctgaccatcctctcatttggtctctggttcngaaccattccagcctntgggcttggatcctgttgcccttgaagcagtctctttgcaatctcataaaatatgtcattcacattgattgcagttttagcagatgtctccatgaagaaaagcccattctcctgcgcatacgtctttgcttcctctgctggcaacaaagctgatatgctagatgcaagg

SEQ ID NO: 61476 - DNA, 452 bp, Setaria italica
  misc_feature (452)..(452): n is a, c, g, or t
  Peptide Sequence Number=SeqID_127450
ttacttagctcttggtttcaatatgtttgtttggggataccttgtgtattgtctttggtttagttgtaacttttgtttgtgtcaaaagattggttgtctgctcgatgtgcttaaatgtgtgcatcaccgacatgagcaatctgtttgttttatagaatggctcctggataactgtatagggcatttatagtcatttgccatagattgtgacaggtttgctttgtgggcattgttggaaaaatcatctcaaattgatggaaattaggaaatggagtacatgtcagtgaatttaggatttgccaatgttccatgggaattagtgtcattgtagcattttgtgaacgttttccaggaatttctcgaagactagtgtaatctattggaaaatgtatcttctctgctatcaatatagtagtggtcattgtcttatacaaaaaaaaaaaaaaactaan

SEQ ID NO: 61477 - DNA, 299 bp, Setaria italica
  Peptide Sequence Number=SeqID_127451
ttcctttcctttggggttattttttcttattttcgttgtaaattaccttcttagtcttactcgcattcctgaagatgctaagttggaggcatactttgatgaggctgcttcagtgcttgagatcatggtaccaaaacgaggaaatgaacctgaagagcatgaagttagggtctctctgcgacctcctcacttcggagctaatgatctacttttgacataaactaagtaaggcctacgcaccatgtggcatcttgtttgtaaccccagattaatgctgaatagctcagaatcaaggtttc

SEQ ID NO: 61478 - DNA, 358 bp, Setaria italica
  Peptide Sequence Number=SeqID_127452
tacagttttgctaattttgatgggaaacaatcctagttgattgaagcattctggtagttggcaattgcagcatctggaacatttttaggaatatgctacaggtcacaaggaccatgtctgcattacttagctcttggtttcaatatgtttgtttggggataccttgtgtattgtctttggtttagttgtaacttttgtttgtgtcaaaagattggttgtctgctcgatgtgcttaaatgtgtgcatcaccgacatgagcaatctgtttgttttatagaatggctcctggataactgtatagggcatttatagtcatttgccatagatttgttgtactaggttttgtcttttgttggtt

SEQ ID NO: 61479 - DNA, 370 bp, Setaria italica
  Peptide Sequence Number=SeqID_127453
aagactactgtacaacagcccagcacagttttgctaattttgatgggaacaatcctagttgattgaagcattctggtagttggcaattgcagcatctggaacatttttaggaatatgctacaggtcacaaggaccatgtctgcattacttagctcttggtttcaatatgtttgtttggggataccttgtgtattgtctttggtttagttgtaacttttgtttgtgtcaaaagattggttgtctgctcgatgtgcttaaatgtgtgcatcaccgacatgagcaatctgtttgttttatagaatggctcctggataactgtatagggcatttatagtcatttgccatagattgtgacaggtttgctttgtgg

SEQ ID NO: 61480 - DNA, 239 bp, Setaria italica
  Peptide Sequence Number=SeqID_127454
ggaagcataccgtgatgaaacagggacaggcctagagattattgtcccctaaaattccggtgtttggcccctgaagaacatgaagtgcatgtgtccatgaggccaccctcgtcatggtgccaatgaagacatgttcaaggtgtgtggtagatgttcttgtagcagctaggagtccattcttgttagctgctcttcgctgatgtctcctcgtaagctagagggttagcagacaacaaaac

SEQ ID NO: 61481 - DNA, 241 bp, Setaria italica
  Peptide Sequence Number=SeqID_127455
cttttgtttgtgtcaaaagattggttgtctgctcgatgtgcttaaatgtgtgcatcaccgacatgagcaatctgtttgttttatagaatggctcctggataactgtatagggcatttatagtcatttgccatagattgtgacaggtttgctttgtgggcattgttggaaaaatcatctcaaattgatggaaattaggaaatggagtacatgtcagtgaatttaggatttgccaatgttcca

SEQ ID NO: 61482 - DNA, 254 bp, Setaria italica
  Peptide Sequence Number=SeqID_127456
ctcttggtttcaatatgtttgtttggggataccttgtgtattgtctttggtttagttgtaacttttgtttgtgtcaaaagattggttgtctgctcgatgtgcttaaatgtgtgcatcaccgacatgagcaatctgtttgttttatagaatggctcctggataactgtatagggcatttatagtcatttgccatagattgtgacaggtttgctttgtgggcattgttggaaaaatcatctcaaattgatggaaat

SEQ ID NO: 61483 - DNA, 245 bp, Setaria italica
  Peptide Sequence Number=SeqID_127457
cttttgttttgttgtcaaaagaattggttgtctgctcgatgtgcttaaatgtgtgcatcaccgacatgagcaatctgtttgttttatagaatggctcctggataactgtatagggcatttatagtcatttgccatagattgtgacaggtttgctttgtgggcattgttggaaaaatcatctcaaattgatggaaattaggaaatggagtacatgtcagtgaatttaggatttgccaatgttccag

SEQ ID NO: 61484 - DNA, 235 bp, Setaria italica
  Peptide Sequence Number=SeqID_127458
gtttgttttatagaatggctcctggataactgtatagggcatttatagtcatttgccatagattgtgacaggtttgctttgtgggcattgttggaaaaatcatctcaaattgatggaaattaggaaatggagtacatgtcagtgaatttaggatttgccaatgttccatgggaattagtgtcattgtagctattttgtgaacgttttccaggaatttctcgaagactagtgtaat

SEQ ID NO: 61485 - DNA, 169 bp, Setaria italica
  Peptide Sequence Number=SeqID_127459
aaaaatcatctcaaattgatggaaattaggaaatgggagtacatgtcagtgaatttaggatttgccaatgttccatgggaattagtgtcattgtagcattttgtgaacgttttccaggaatttctcgaagactagtgtaatctattggaaaatgtatcttctctgctat

SEQ ID NO: 61486 - DNA, 219 bp, Setaria italica
  Peptide Sequence Number=SeqID_127460
tgctacaggtcacaaggaccatgtctgcattacttagctcttggtttcaatatgtttgtttggggataccttgtgtattgtctttggtttagttgtaacttttgtttgtgtcaaaagattggttgtctgctcgatgtgcttaaatgtgtgcatcaccgacatgagcaatctgtttgttttatagaatggctataaatgccctatacagttatccaggag

SEQ ID NO: 61487 - DNA, 243 bp, Setaria italica
  Peptide Sequence Number=SeqID_127461
ctggtagttggcaattgcagcatctggaacatttttaggaatatgctacaggtcacaaggaccatgtctgcattacttagctcttggtttcaatatgtttgtttggggataccttgtgtattgtcttttggtttagttgtaacttttgtttgtgtcaaagattggttgtctgctcgatgtgcttaaatgtgtgcatcaccgacatgagcaatctgtttgttttatagaatggctcctggataa

SEQ ID NO: 61488 - DNA, 240 bp, Setaria italica
  Peptide Sequence Number=SeqID_127462
cgtcatggtgccaatgaagacatgttcaagcttacgaggagacatttggtgtggaggttccctattgtgaccataagactactgtacaacagcccagcacagttttgctaattttgatgggaaacaatcctagttgattgaagcattctggtagttggcaattgcagcatctggaacatttttaggaatatgctacaggtcacaaggaccatgtctgcattacttagctcttggtttcaa

SEQ ID NO: 61489 - DNA, 242 bp, Setaria italica
  Peptide Sequence Number=SeqID_127463
atgaggccaccctcgtcatggtgccaatgaagacatgttcaaggtcttacgaggagacatttggtgtggaggttccctattgtgaccataagactactgtacaacagcccagcacagttttgctaattttgatgggaaacaatcctagttgattgaagcattctggtagttggcaattgcagcatctggaacatttttaggaatatgctacaggtcacaaggaccatgtctgcattacttag

SEQ ID NO: 61490 - DNA, 253 bp, Setaria italica
  Peptide Sequence Number=SeqID_127464
catgtttcaagcttacgaggagacatttggtgtggaggttccctattgtgaccataagactactgtacaacagcccagcacagttttgtctaatttttgatgggaaacaatcctagttgattgaagcattctggtagttggcaattgcagcatctggaacatttttaggaatatgctacaggtcacaaggaccatgtctgcattacttagctcttggtttcaatatgtttgtttggggataccttgtgtattg

SEQ ID NO: 61491 - DNA, 119 bp, Setaria italica
  Peptide Sequence Number=SeqID_127465
taagactactgtacaacagcccagcacagttttgctaattttgatgggaaacaatcctagttgattgaagcattctggtagttggcaattgcagcatctggaacatttttaggaatatg

SEQ ID NO: 61492 - DNA, 185 bp, Setaria italica
  Peptide Sequence Number=SeqID_127466
atgggaaacaatcctagttgattgaagcattctggtagttggcaattgcagcatctggaacatttttaggaatatgctacaggtcacaaggaccatgtctgcattacttagctcttggtttcaatatgtttgtttggggataccttgtgtattgtctttggtttagttgtaacttttgtttgtgt

SEQ ID NO: 61493 - DNA, 258 bp, Setaria italica
  Peptide Sequence Number=SeqID_127467
ggtctacctcccctcttcccaagctccacaaccagagcacacaggcctttctcctctatctatcgcacaagaggcgcgcacgaaaatggccaaggtgcaccccaacgccgccgatacagagccgccctcgccggcgccagaggtggaggagacgcccacggtgctgacggtctggcgcaagtcgctgctcttcaactgcgacggcttcaccgtcttcgacgccaagggtgacctcgccttccgcgtcgactgctacgg

SEQ ID NO: 61494 - DNA, 243 bp, Setaria italica
  Peptide Sequence Number=SeqID_127468
cgaagctccaagcgcagcaagcagagtagaaaccaaagccatctcagctcacaactgaaagagaaacagaggagcagccatgggcaaggtgcatcccaacgccgtcgcgccagagcccgccacaaccaccgtcagacgatcggccgaggaggaggcgccggcggtgctgacggtgtggcgcaagtccctgctcttcaactgcgacggcttcaccgtcttcgacgccaagggcgacctcgcctt

SEQ ID NO: 61495 - DNA, 242 bp, Setaria italica
  Peptide Sequence Number=SeqID_127469
cgcacagctagcctactgcttccgtcttcctccatagcaagaccagagcagaggagagccatggccaaggtgcaccccaacggcgccgtcgcgccagagccaacaataagcagcggagcggcagccgaggaacaaccgccggcggtgctgacggtgtggcgcaagtcgctgctcttcaactgcgacggcttcaccgtcttcgacgccaagggcgacctcgccttccgcgtcgactgctatgg

SEQ ID NO: 61496 - DNA, 364 bp, Setaria italica
  misc_feature (125)..(125): n is a, c, g, or t
  Peptide Sequence Number=SeqID_127470
ttaattctattgttctaaattctagttatgtcctgcacctgcaagtgtagccaggagcccaggacctgttgatgacttgaaactagcccaccagaggataggcggccgcaaagaaaaaaaaaggntcaggatgtttccatcctgcgaagcaaattactagaagtggcagcatgccagcgtctgatcgctgacgtcttgctacaaatgtaactgagcagaaggcaagacagagtagcctgtcagtcggtgggaatcattgcatcagtgaaggaatctgaggctagtcgcacaggttcacaaatttgcttggctgtcgagaagcaaaagctgcttagcttcagccgacatggatccggacggactc

SEQ ID NO: 61497 - DNA, 242 bp, Setaria italica
  Peptide Sequence Number=SeqID_127471
gcgtccaaatgtcaccaacggtgacaacggccgccttgttcagctccacctggtagccatgccggccagccgtcctctccagattttcttctcccatcacggtgtactcgcacttcttcaacagctccgccgacgacgatgatcccgagtgctcctcttgctcttgctcttgctcttgttggatgatctgggccatgtatgagttgagcagctgggtgttccttccgtaggcgaaggacgct

SEQ ID NO: 61498 - DNA, 320 bp, Setaria italica
  Peptide Sequence Number=SeqID_127472
cggagtgcttaaacttaaccgcatgcctccattgctcgaccttcagtaagcacagaaatgcccacaagtcggattcaaagctgtaaatcgcacaaagcaccttatttattgacggcgccacgaaagagcacgagcactgacagaggtcaacaacagagtctaactctagcaacgctcgtggcgcacgtgcttcttcaggactcttgtctgcgaaggaaacagagttgagcatcgatcgtcgatcgatcgtctgactacgaataagaaaggaactaacaaaagaacaaagaacttaaactaaccttaaggaaccaaaccaa

SEQ ID NO: 61499 - DNA, 437 bp, Setaria italica
  Peptide Sequence Number=SeqID_127473
tcttacgcacccacaggatgccgcggatgagccggcacaggatgcggctctgccgccagtggagcttggcggtgtactcgcagaggagcgacacgatgagccaattggagaggataaagacgaggaactccatgacttcctcgtagacgaaggccaggatgagcagagtggtggtgcctaggtcgatgctggcgaacagcacctcgggtgaatgggcgatgtttctcaggaggcatctggccagcgtcgtcgcgccagtgtatatgatgtagttgtgcggcgccagcatcgagccagcggttaggttgacgaggtagacgccgatgtcggagtgcttgaggggctcgtagtcgtgcttgtcgacggcgatggtccagccgtaggtgttccggaacccgggctcgctgtcatacaggttgtacggcttcggcgcgctg

SEQ ID NO: 61500 - DNA, 339 bp, Setaria italica
  misc_feature (44)..(44): n is a, c, g, or t
  Peptide Sequence Number=SeqID_127474
gtctaactctagcaacgctctggcgcacgtgcttcttcaggacncttgtctgcgaaggaaacagagttgagcatcgatcgtcgatcgatcgtctgctcgatagaaggctcaagcagcttactccttggccacctgctcgatgaccagcggcgcctccctcctccccttccccttcccatgctcctcctcctccttccccttcctcccgtgcttctccttctccctcttccccgtgtccgggagaaggagttcagggagctggtgctcgcgcaggaggaggccctgatactgccgtcgttcccggacacggggaggaggccctgatactgcccttcttcc

SEQ ID NO: 61501 - DNA, 244 bp, Setaria italica
  Peptide Sequence Number=SeqID_127475
gtgcttgctgcgtagccccgcagccccaggccttctctaccgcctccgctttccccgtcgcctcccggatcggacgctcccctccccgggtcaccgccggccgcctcccctcggatcagctccacctccacaggataggcgagttcccactgcattgcagcaatgaggtgcctgcctttctggcatggagaggtcaaagaggagtatcctgtcaccatgtccgcgtctgtacggtccatcagca

SEQ ID NO: 61502 - DNA, 202 bp, Setaria italica
  Peptide Sequence Number=SeqID_127476
ttaaagttccttaatttgttctttgttatttatttgtattgtagtaggtactagtactattctggtctctaggatgcaccctttatgcaatcatgtttaatgtttcaccatttgagtatgctcttggtgaatctggaggaagtctgcaacttgccattgtcaatgggcagttgaagtggccagcaggacccaaccctcctta

SEQ ID NO: 61503 - DNA, 250 bp, Setaria italica
  Peptide Sequence Number=SeqID_127477
tggtcctcgtcgacgagctcgtccatggcgcgcagcacggggtcgccgtcatccttgcgccgccttgcaagcagcaccgagaagcgcccgcggccgctgcccgccggcgccctcacgcggtgcacgcacgccggcaccctcccgttcgtgacaacctgcgacggcgacgacaacggacggcgtgagacagtcgatgttattgttaccactcggagaggcagcaaacacggtcgtctaattatacagtgaa

SEQ ID NO: 61504 - DNA, 251 bp, Setaria italica
  Peptide Sequence Number=SeqID_127478
gggggtggtcctcgtcgacgagctcgtccatggcgcgcagcacggggtcgccgtcatccttgcgccgccttgcaagcagcaccgagaagcgcccgcggccgctgcccgccggcgccctcacgcggtgcacgcacgccggcaccctcccgttcgtgacaacctcgtgctgcgcgatcaccgtggtcatgtgctcgtcgcggtgtgcgtgcagggacagggacacaccgccggcggcggcttcctcgccggga

SEQ ID NO: 61505 - DNA, 228 bp, Setaria italica
  Peptide Sequence Number=SeqID_127479
atatccatttgagttttcgactgttgaaatgccatatgagtcttacaatgggacaaatgtcagactgaggtacattttgaaggtgactattggcagaaactatgttgggaatatagtggaataccgggatttctgtgtacgaaactactctcctgtccctacaatcaataacagtattaagagagaagcttatcggaaaagacaaaagataggcatatgccttattga

SEQ ID NO: 61506 - DNA, 235 bp, Setaria italica
  Peptide Sequence Number=SeqID_127480
cttaattgaaacctgcttcctggtccttccatcagagaatgtaatcgagatgtcacatggtggcttgaggattgcttacatattgagtttgagtacagcaaaagcaagtaccatctcaatgatgtgattattgggaagatatatttccttcttgtcagaataaagataaaaaatatggagctggagattcggcgtagggagtcaacaggatccggctctaacacatatgttgaaa

SEQ ID NO: 61507 - DNA, 448 bp, Setaria italica
  Peptide Sequence Number=SeqID_127481
agaatcatcttcagctgtcacaagtccactccgaatcttgcaatcaccatcatccaaacaaaccactgcttctgcatcaatatagtacgatgggaaggaaagtgtgctgctttcctcttgcacataccaatcatcatcacagctggttaaagagtattcatcttcatcaatagatccaatcgtgccatatactggagtgcatgctatatgttgaaattcacttttgcaaaggggcagcgatttgtgatggcagcccagttgtcaatgcatgtatagcagaaccagtgttggcaacaatccaagactcctctatcaatgacgatgtctctacaaatgccgcaactttcgttctcgaatgcataattttccatatcatccaccttccccggagctccactcgattctccatcaacctccatttcccacgggaacatcgtgattgagcttc

SEQ ID NO: 61508 - DNA, 208 bp, Setaria italica
  Peptide Sequence Number=SeqID_127482
cactccgaatcttgcaatcaccatcatccaaacaaaccactgcctgcagaacgggataaacagatcaagacacacaatcaacttcatgggacagagaagtatatgacaaaaggagattgtgagtgttatctgaatattgttacttctgcatcaatatagtacgatgggaaggaaagtgtgctgctttcctcttgcacataccaatcat

SEQ ID NO: 61509 - DNA, 464 bp, Setaria italica
  Peptide Sequence Number=SeqID_127483
gagcttgctgcaggagactcagttttggcatcgaacaaagatgaagactcaggactcaggtgatgtgaccaccaaagaggtactttgctttttgcccctttactttatgtgtctttagtgagcatagatactcatcttagaaagtcctccccctaatagtccctgagaatatggttgttttactgttgaaaacaagatgagtgcctataggccaaacatgtaattctgatagtagtaatatctgggaacaagggcaaaagatcagaaaggaagtgctggtgcagtaacatagcagagcttagttggttctttttttttggttcacaactggttagtgatcttcaagtttttcactttgtgttttatataaaagtatcagaacaaggtgttcacataatgatgccctgtgtaactagcatttctcgatagaggaacataggcggtcctttgctatcatgaatgtt

SEQ ID NO: 61510 - DNA, 234 bp, Setaria italica
  Peptide Sequence Number=SeqID_127484
tacatagttatacattcctttccctggagttctctgttttacatcttcaaattgatacaagttctgcaaagttgtgcaggcattggtcacagctttggttggccttgtggcataaacacgaggcgttgaggcaagattttgcaagttctgaacttgatgtgatgctgaagagccgagcacaatggatatacatgtgatggatgatgattccctcgataataaggaggagggtgc

SEQ ID NO: 61511 - DNA, 332 bp, Setaria italica
  misc_feature (124)..(124): n is a, c, g, or t
  misc_feature (140)..(140): n is a, c, g, or t
  Peptide Sequence Number=SeqID_127485
atttttcctaaggcattaaggagaaccacgagtttcaagaaaatgtgatggtcagaacccccacagggtggagggataggttagatggagtggtctctctgttcttgcgacatccgaaccagcncctaaaagaagagtgngaaatggcaacaaagagcttgctgcaggagactcagttttggcatcgaacaaagatgaagactcaggactcaggtgatgtgaccaccaaagagttgtgcaggcattggtcacagctttggttggccttgtggcataaacacgaggcgttgaggcaagattttgcaagttctgaacttgaatagtagaataga

SEQ ID NO: 61512 - DNA, 213 bp, Setaria italica
  Peptide Sequence Number=SeqID_127486
tccacacacaggaatacaacatctttccttgtacttttgtcaataagagcagcaaacagaggcccatctttcaaatcaatacctcttggacgcatcacgggtcttgtcccaagaagaccatcatcattcagagccaatccagcatggtaagggttgcagtaatctccagagtcttctgatcctccaactggcctaccacagtcccaaagtgca

SEQ ID NO: 61513 - DNA, 417 bp, Setaria italica
  Peptide Sequence Number=SeqID_127487
aatgcgccaggtgatggagcggcaggaggagatgcagcagcggttcatcgatgccatcgaaaggcgggagcaggaccggatgatacgcgagaaggcgccggcggcaatggcgtcgcgacgaacaagcagccagaaggcatcatcacgaaggagacggcggcgacgacggagccgaggccgcagccggtgtcgatgaacgacagctacgtgaacgacaccgtggacagcgacagcagcatggacgacgatgatgacgaggacgacttcgacgacgacgacgagggcaacgtcggcggcggcaacagcaagatgcagtacgagatccagttccagcggcagcagcagagccagagcagcgtcgtccggccgaacgcgagcggcggcgccgggtcagggccgggcggcccagggcccggc

SEQ ID NO: 61514 - DNA, 302 bp, Setaria italica
  misc_feature (145)..(145): n is a, c, g, or t
  Peptide Sequence Number=SeqID_127488
catggtccagtgatcgatccggccatccgctcccaaaccattttcaccccggtcgattctcatctcctctcatcaatggcttccatttctctctcatgtaccttttgtatctacctacctgtcgcctccatgctcgtctatatcnctacacctcaaaacctcaaaacctcaacagctctccccctcttccaagctccggcagttctcttcctcatgcacgcagcgacacctcgatcaatgtcgtcgtcgtcgtcgctagaccaacaataacccgacaaccaataatacctacctaatttaca

SEQ ID NO: 61515 - DNA, 334 bp, Setaria italica
  Peptide Sequence Number=SeqID_127489
aaaaaggaaaacaaaagggaaaaacgtagacaaaggtacctacccggacaaacaaacggacgaagaacggacaacccgacgaaccaaccgtgcctgatgacggcgacaaaaacaagagggcagaggacagcatgaaagaaacagacgtgcagctgctgcagcagcagttcggagcagacgagacggagagcgacgacaacgacatgggaggcgactacactgaagaaggcggcaacgatgaagacaaaacgaagtacaagacgagcttccagaagcctaatgtgatcgggagcagtggcgacgcaaactgcaccaccagcgacggctgcggcaa

SEQ ID NO: 61516 - DNA, 261 bp, Setaria italica
  Peptide Sequence Number=SeqID_127490
cggcaaggactgcagcaacggtaacgggaacgggtgcgcggcgggtaggggcggctcggacaataatggcggcagctccgggggcatgcaaacgcaggcgagcaacggcggtgttgcggccaggttctccttcatacaacgggtcaccggccagaccatcccgatgccctccgtcgcgccgccggtcttcatcagcgcgctgacgccgccgcccctgcagcccactccggtggcttccgctgcaccagcggcggcaccggc

SEQ ID NO: 61517 - DNA, 256 bp, Setaria italica
  Peptide Sequence Number=SeqID_127491
aaggagagcaacaagaagcggcccgaggactccaagacgtgcccctacttccaccagctcgacgcgctctaccgcaacaaggcggcgccggcaatccgcccggcaccaccgctcccagcacggccgcggccgcgacaacaacagccggatctttcttgggcatggtccagtgatcgatccggccatccgctccccaaacattttcacccccggtgattctcatctcctctcatcaatggcttccatttctctctca

SEQ ID NO: 61518 - DNA, 209 bp, Setaria italica
  Peptide Sequence Number=SeqID_127492
cagcaccgcgccgggagcgtacacggccgccgtcgccgtcacggtgctggagaatccgaacctgaacccgcgcgagctcgagggaagagcagccacgacgctggcaagtcgaagaatgatggacagggaaacgtgcaaggtcctcccggcaacaacggacgaagaacggacaacccgacgaaccaaccgtagacctagaatagaacgga

SEQ ID NO: 61519 - DNA, 191 bp, Setaria italica
  misc_feature (11)..(11): n is a, c, g, or t
  Peptide Sequence Number=SeqID_127493
cggtgccactntccccagacgccgccgcacgccgagcatggcggcaaggactgcagcaacggtaacgggaacgggtgcgcggcgggtaggggcggctcggacaataatggcggcagctccgggggcatgcaaacgcaggtcgtagtctaacggtcggttgtttgttcggttccttaggttttctttccttt

SEQ ID NO: 61520 - DNA, 156 bp, Setaria italica
  Peptide Sequence Number=SeqID_127494
aattcatattgaagggaatcctgatgttgtctcctgtaccatttacaacatcaggattcccttcaatatgaattgacacattttgaagggaatcctgatgttgaagatgatgatgacaatagtgtgcctttttctcgtactagtagtatggatgcc

SEQ ID NO: 61521 - DNA, 184 bp, Setaria italica
  misc_feature (138)..(138): n is a, c, g, or t
  Peptide Sequence Number=SeqID_127495
gcaataattactatggactaagtactaactaggaccaactaaaatacaaggacagaagagaagaatggctagatgtttgtagttcgattggtctggggcttcagaattacaaagtggaagaaatggaaaggattttancccttagttacaatgatcttccctaccatttgaagacatgcttact

SEQ ID NO: 61522 - DNA, 315 bp, Setaria italica
  Peptide Sequence Number=SeqID_127496
agaactaatatttagcgcacctaattattgctaccgctgtgggaacatggcgtctatcttagaagtggatgattgcagggagcacactttcatccagtttgagccagccccaagaaggggagagccagatgtaactcgtaggacacctgactatttcctgtgatgcggaagtgatgtggatctgcagcaaagctggaaggaccccgattgtgttctcacttatctctaactggttgatgcttttggcttggtgggggtgctgcagtggtgggttcaagcatcaagcagcaatctgtattatgagaggaatctgtt

SEQ ID NO: 61523 - DNA, 453 bp, Setaria italica
  Peptide Sequence Number=SeqID_127497
gagattgtttcattcacatttacctcaccagttgacaaatcattacacagcgtccatccccaatcattcagtggaaaaacaatttatagagaatctgaacgctgtgtcaacttcaagcaatacatcaaacactaaacttgatgtcattgatggcgattatttgggactcctgttggagcaaaaattgagagagttgacgtcaggtgtgagatcaccctactttaatccagccaaaggtgttaaagtgcatggcacttcaacagctttggaagatacggcatcagcatgtgaaacatctagcattgcttctactgattatgatagggagtcgatgcagtctttcaatgatggaaaagctactctcccccagacagatcttgctactaaaagtggccaggtatggtacatcattctcgggcacacttcttccagtcacacccttttgtcagcacc

SEQ ID NO: 61524 - DNA, 261 bp, Setaria italica
  Peptide Sequence Number=SeqID_127498
cttgcctaggagtctcgatgcgtttgttctgtgattattgatgcggttattcgttgacctgatccgttttgtgctgttggttcttggattgttaggcatggattgtgggggagaagggcgaggacctccaagggcccaaggaattcctgcccctctccaagcttgaagatgtcggtgtgttgtattggcaattggaccctaagaagtctgaaagcgaagaagagcttgcaaaaattcgcaaagaaagaggatacagttaca

SEQ ID NO: 61525 - DNA, 380 bp, Setaria italica
  Peptide Sequence Number=SeqID_127499
acagcagccaaccgtaccaatggtatttagtagagtctgttaagtctctttgttctgtacctgctcgttatgtgacttaagtacctgttttttgcagatgtcggtgtgttgtattggcaattaggaccctaagaagtctgaaagcgaagaagagcttgcaaaaattcgcaaagaaagaggatacagttacatggatcttattgagatatgtcctgacaaactggagaactatgaggagaaggtgaagaacttcttcacggagcacatgcacgctgacgaagagatccgctactgcttggagggcagcgggtactttgatgtccgtgacaaggacgacaagtggattaggatttggatcaaagaaggagacatgatcatcc

SEQ ID NO: 61526 - DNA, 227 bp, Setaria italica
  Peptide Sequence Number=SeqID_127500
gctcccagttccgcggttcccgttccactcggcatggctccgcgggcatggattgtgggggagaagggcgaggacctccaagggcccaaggaattcctgcccctctccaagcttgaagatgtcggtgtgttgtattggcaattggaccctaagaagtctgaaagcgaagaagagcgaggacctccaagggcccaaggaattcctgcccctcttcaagcttggagagg

SEQ ID NO: 61527 - DNA, 387 bp, Setaria italica
  Peptide Sequence Number=SeqID_127501
attcagtccatcaatccacggtttctggttgtgtgctcctgctaggcatgtattcttcagcgcgttcaagttcatgtccaaaaagtgattcgagggttccctcatgccctgcggtatagctaatcagatacaataatttgtagctgaaagtttcttcgagaacaagcaagagctttgcgtgtctcgacattaaagaagaaattgtagctgaagcaacaacagcaaagggaacaatggcactatcacgtagtatgagaacatgtttgcacagtggaagacttgcccttcttgccatattggtctctggtggaattgtgttgcagatcctggcttgtgctctctataacaactggtggccaatgctaacagttctgatgtaccttatcc

SEQ ID NO: 61528 - DNA, 247 bp, Setaria italica
  Peptide Sequence Number=SeqID_127502
agcagcctgggcgtggtggccccttctccgccgcggctcactgggcggcgtcatcccggctctaccgcgcggcggtggcggcgcgcgtctcctgcggtgctcgtgctcctcccgcgcccagccagattgctggacactgttgtgctgcaagtgtaaaatctgacacaactagttcgctagttactgttaaatacactgatttactttgaaagatcagctgagagaggatccctgggatgttgaaggg

SEQ ID NO: 61529 - DNA, 265 bp, Setaria italica
  Peptide Sequence Number=SeqID_127503
gctctctataacaactggtggccaatgctaacaggttaggaaattttgtgtagaactggtaaacttcattcattttctgataattgtctttagggaagccataagtaatctttgacattttgtgcagttctgatgtaccttatcctaccgatgcccctcatatttttcctgggttctgatacttcctcgattatgtctaacgggggtgatggctgggtgaacttcacgaaattcttgacgggcgcatcaatagtggggagcattg

SEQ ID NO: 61530 - DNA, 236 bp, Setaria italica
  misc_feature (3)..(3): n is a, c, g, or t
  Peptide Sequence Number=SeqID_127504
tanctttgctgatccgaatctctcggccatcatttagtagcggatttcgttgctgcgtggtggatggactaattcagtccatcaatccacggttctggttgtgtgctcctgctaggcatgtattcttcagcgcgttcaagttcatgtccaaaaagtgattcgagggttccctcatgccctgcggtatagctaatcagatacaatttgctggacactgttgtgctgcaagtgtaaaa

SEQ ID NO: 61531 - DNA, 209 bp, Setaria italica
  Peptide Sequence Number=SeqID_127505
aaagtaatatcttcctggcgtctcagcttggctcaacattgtatttcaggttaagcttcatttcacagatggggccgcttagaataattgccaaaaaggcaatgtccaaaaatacgggtgcacggggttaagaactatccttgagaatatcctcatggattccatgtatgagattccagatgcaaaatctggggagaagcgaattgatg

SEQ ID NO: 61532 - DNA, 263 bp, Setaria italica
  Peptide Sequence Number=SeqID_127506
aacatgttcagggtgctgaaatatgattgaagttgttagtaatgattggcataaatgcagacacttcacccggcaaatgttttaggaacatacctttagggcatactttgccgcaatatatcctccaaaagaatggccaagcaacacaaaattactgaggttcttggccttgcgccactcctcaaaagaatctatgaaccacgcctcagtttctgtttacacacacccataagaaaggcaaaagaatataacttgttactata

SEQ ID NO: 61533 - DNA, 161 bp, Setaria italica
  Peptide Sequence Number=SeqID_127507
ctgaggttctttggccttgcgccactcctcaaaagaatctatgaaccacgcctcagtttcttcggtacttttacaggtgaagtcaggtctgcttgaaccaccccagctgcaaaaggaatgagagagtcaatgctatagtgccacgaaatgacaaaataaaa

SEQ ID NO: 61534 - DNA, 366 bp, Setaria italica
  Peptide Sequence Number=SeqID_127508
ctgcttcgcccacaccggggaggtagttctcgtcggtccagtactggaggtcgccgatccacagcgtgcggacctccagtactggaccgacgagaactacctctacggctgcttcgcccacaccggggaggtacaatctgtgacatcaggtgccaggtctcctacgaaaatcgaatgatcaggtcctgcatcaggacgcctctcaccagagctgaaagaggcccagttcaatctgaacgtgtgctcagttccaggcatttgtgtgccattgtaagtctgcagaactttctcagcagcttcatgagaaatgaattctataaacccataaccctctggaaggcttgttactttgttgcgtattatttt

SEQ ID NO: 61535 - DNA, 368 bp, Setaria italica
  Peptide Sequence Number=SeqID_127509
tagactaggaataatagccagtataagcaccatatgcatatgatgggtcctgagcatatccatatgtatatggtgcttatgctggatatagccagtatccccaacaggttgacggaactggtgacgctacttgtgttgctggtagccatccaggcatggaacaaaaagaggagccatacgatccaatgaacatacctgacgtcgacaagctgaatgcttcatacatggctgttcacggtagagccatgctagggcggtccttgtggttgaagacgaacccgctgccccagccgacatgagcctgcatccaacgttgcctttctctgaagactgcaatactggtggacgcagctgggtctccctcgcag

SEQ ID NO: 61536 - DNA, 374 bp, Setaria italica
  Peptide Sequence Number=SeqID_127510
ttaaacattatgatggtttcttttcatcttgtatcccccttgagaaggtcttcaacagagcttctgtactttgtaatcaactcctttctttgatcaagcagctgccgtgtttcatccaaactttgcctttgtccctcgaccgtagtagactttgaacttattgttcctgatatggagttcaacaattgttggcacctggcaaattggctggtcaactcttcaaccagtgcatcaaaaattttgatcccttgttcctgaaccaatcgcatcagataatcttgtgaccaactgacatagcaaaaaaagatgtaaagaaaaagcaaccagtatttcacaaaacattccactactttctcaaaggataaaggaaaact

SEQ ID NO: 61537 - DNA, 247 bp, Setaria italica
  Peptide Sequence Number=SeqID_127511
ccattcaattcaaatacaaaagagatttcaactactggtgacagtgatcgctaaatattaaacattatgatggttttcttttcatcttgtatcccccttgagaaggtcttcaacagagcttctgtactttgtaatcaactccctgaaaaggcaagatacacaatcaaacacacttaagagtaaatcaatttcaaacttcaaatgcagaataaaattcaagaaaaacccatgctttgcttgctagaaa

SEQ ID NO: 61538 - DNA, 353 bp, Setaria italica
  misc_feature (45)..(45): n is a, c, g, or t
  misc_feature (51)..(51): n is a, c, g, or t
  Peptide Sequence Number=SeqID_127512
acatttctgtgaagattacagttctcgcaaatatagaggctctcncttttntacccctgcagttccatttaggctgatgcaactaccacctgtctaccaagttctccttgaaagatatatcaagatgcaatgccccgattgtggctcagtgcctgatgaaccggcattgtgtttgctttgtggcaaactatgttcacctagctggaaaccatgctgcaggactggtaaatgcctgaatcatgcatcacaatgtggtgccggtgttggcatatttcttttagtgagggtatgtattagcttattatttgccatcacaccaaattattatggccagtgtactttcctttgttctt

SEQ ID NO: 61539 - DNA, 157 bp, Setaria italica
  Peptide Sequence Number=SeqID_127513
ctgtgatacttgaagcagatgatggcgacgtttgcacacattcagaatgctgagcaaacgtcgccatcatctgcttcaagtatcacagttgattccaagaaaaccagaagccccaagcgttctggttttcttggaatcatctgcttcaagtatcaca

SEQ ID NO: 61540 - DNA, 395 bp, Setaria italica
  misc_feature (345)..(345): n is a, c, g, or t
  Peptide Sequence Number=SeqID_127514
tagatgatgatgaggcagttggcttctgtgaccgacaattatgggcatgctgatggcacctggaacctatggcctgagccaatggcagggtcctctcttgttccatccacttcctcggtacctgatagtgcagctgctgctggattgcggctccgaggcactgcaggcactactcgcaatggaagtctttcagaggttctcactatggtagatagagtacgggaagttttacctcatatccctgatgagctaactatacagacttttcttataagcttttatagccagtaaacatcatacttatatgttgtattgccgatgcccctatattgcatcagcaaaagnttatcacagtagcatttatgttgttcgtcctcatcaaatcctctataatt

SEQ ID NO: 61541 - DNA, 298 bp, Setaria italica
  Peptide Sequence Number=SeqID_127515
accaattcagtcatctcttcctcttgcagtctgcaagtttgaagacaacaggaacactttgtggcattgttgctgacagcacacacaggcctagtgtttgtattcactgaagagtttggaagagagcaaaaggccgtggacagagcccgagtgaggagggattacgtgaagtaaggtgggtagttgaagaagggcggcagcctgaaatcccccagcctctgcatctccactcctgtgcttgctcaaaaaccaggtgcttagcagttgtcttggcgcgtttgtaacggagattgtatgg

SEQ ID NO: 61542 - DNA, 200 bp, Setaria italica
  misc_feature (169)..(169): n is a, c, g, or t
  Peptide Sequence Number=SeqID_127516
tgacctttatccatccactctgcacgaccttcactgacaagagctgcaaggaacacttcctttgcttcgtggctaagagatcctgcattacaaaagcctgtaaatgcagtgaaatgactaaacaagtgtgcaaaaaattatagtaatttagagtggtggaccattttangtgtatagatcagtacagtatacacaaattt

SEQ ID NO: 61543 - DNA, 221 bp, Setaria italica
  Peptide Sequence Number=SeqID_127517
caagtatcagatctttccataactgtacttgcttttcccgcgtttcgcgcacaggctgcaaagtgaagtaaggtgggtagttgaagaagggcggcagcctgaaatcccccagcctctgcatctccgctcctgtgcttgctcaaaaaccaggtgcaccaaatcccctcgcaggcaggggttgagagagctggatcgcaggacagcaggtcgttgacccaggt

SEQ ID NO: 61544 - DNA, 294 bp, Setaria italica
  Peptide Sequence Number=SeqID_127518
ccaccatttactgtaattggtcccacattactttcatctttgtacatttgcaggttcctactatggctgcgtccacaccacaaaatcatggacgcttgtgaggtagaggatcagattaccattaagttcagttatgatgatgcaatatcttgacaagttttgttggtcttgacatcctgccttcaagattttctatcctcaggtttcttccatgatgcacacacaattcgactagactgcaagagcatgtttgtcaataagcattacgaagagaaacctgtagttgcaggttgt

SEQ ID NO: 61545 - DNA, 451 bp, Setaria italica
  misc_feature (335)..(335): n is a, c, g, or t
  Peptide Sequence Number=SeqID_127519
cagctgccaaattgcccatgctttgccttggccaattggggccaacattgaaacatgcccttgatttccagtattggtgttagtaattatgcacgtgtcagttttagtaacctttatgttataatcctagtctgtcaaacttcatcttatggatgagtaccctgttcatacgatgttagtattactgcaggcaaaagtttttttttaagtatctgacttccatttagaaatagtgaatcatccctgatttggtcagaagcagaattcctagtgctttagcattttacaataaagcaagctctgtgataggtttactcaacagtaatccttaggtnagtaatgatatgtaattatttacagagcatatgcattgagaatctacctaagtagtcagtaactatgacatgtgtttgtaatttgcacctaagtcagtaactatgacatttagcca

SEQ ID NO: 61546 - DNA, 240 bp, Setaria italica
  Peptide Sequence Number=SeqID_127520
accgcccggagccaggacgacgtcgccgccgccatcgaccgcctcaacggagaattggacagactattagagaatgcaccttcactggtaataatgcaacattcagcaaggatttccactatccgtaaaagaatttcagcactgaacatgctactgaagtccatacagcgccgcattgataacattgatagagtaatttcgactggtttgacaagtgatcattcatctcctgtacagtct

SEQ ID NO: 61547 - DNA, 239 bp, Setaria italica
  Peptide Sequence Number=SeqID_127521
tccattaagatgaacacatggctttgtttttgcagatcattcatctcctgtacagtctcaaagcctgaagcccaagtaaagttgaatttaaggtgcaccacttagtttttcttcatgttattatccatttatctgtgctggagtcatgataaacctaagcaaacaacataaagtatgctggcttttagtattatgacggtacttctgtagatgcaggtcttagtaatttttttgctaac

SEQ ID NO: 61548 - DNA, 387 bp, Setaria italica
  Peptide Sequence Number=SeqID_127522
cagtctgattgtttgtctggacgaatcctgagcacagtagattgtagcatcctgttccattatacgcattgcgagtccagtagatgaagagtctaggattgttatccccatagaaatcttggtaaacctgccatcctgcttcaatggtattgagatccatgttggcataggaccctgcaacggtccagagttgggtcaagctgaagtcttgggccgtctcggtcattggtttccacagatttatattgatttgagttccatagtattggccatctgctgaagatactacagcatactcgtggccactcgtcacactagcttcagggtggatatttggtatgctgtcgggcctcttctttccataacaaaatttgtaaccgtaagtaa

SEQ ID NO: 61549 - DNA, 275 bp, Setaria italica
  Peptide Sequence Number=SeqID_127523
cgactagacttgcaaggaagagtgtagcaccggctctattgttaccatccagcaatggttcatgaggaagaaggctactacattagctgcttccggatttgagtgtgttactgagcctgcaataatagtttgagtgtgttactgagccagtccaaaccttcaaaaagcccctccccttttatggcagatgttttgaaaatcgcccattggcggctcttgatcttgtggagttctaatgactccgttatggcagcatcatcgagcgcacctggaag

SEQ ID NO: 61550 - DNA, 230 bp, Setaria italica
  Peptide Sequence Number=SeqID_127524
cctattcttgatctcaatatgagggtacatctaatgtactagtatctgaaactttagcaagcactttacagacactagtacattagatgtaccctattcttgatctcaatatgagggtacatctaatgtactagtatctgaaactttagcaagcactttacagacaattgactggtggtgtaaaacttctggagttaaaacaaagagaatggggattgtcacgctgtact

SEQ ID NO: 61551 - DNA, 457 bp, Setaria italica
  Peptide Sequence Number=SeqID_127525
ccggccagacaaaaggtgagctgatgctgctaaagcagcaggtcattggattgaaggcaaggaagaagaggcggcaaaaaaagaagccgaggtccagcgaaagctcaagaagctcaaggaattggaagtggaggtaattgagctcaggaggaagaacaaggagcttttgtacgagaagagagatctcatagtgaagttggatgcagcagaaggaaaaataacagaggtaccttactactggtactctattattaatgaggcattgaattagcaatacattgttttctcttacacatgattctcagtttgtcaccatgcaagatattacagcctacctatcaaaatatttcctggctacttcaacacaaattcagtttgataaattagcactttactaaagcatgggttaagaagtagccttacatttaacaaccacatcagaattttcatattctat

SEQ ID NO: 61552 - DNA, 252 bp, Setaria italica
  Peptide Sequence Number=SeqID_127526
caacatagaacagtttggatcttcatccagctccttatgaacttccttcctaccctagtacggtagtcgtctaactagggtctatcttaaaactgtcaccgccgttgcttccatgcttgatctttgctaaaatgtacagcctagggcgcagcacccaaaaggctctggcaatcgccatggcttccccatgctctctccttccagagctgctccacctgctcgaagctcagacccttcgtctccggcacatac

SEQ ID NO: 61553 - DNA, 244 bp, Setaria italica
  Peptide Sequence Number=SeqID_127527
taaagccaacggggagattctggcagaaaaagcatcagaacaaactgcacaatggcaggcacagcagcaactccaagcatccagcgccatgttccaggaaccgaacaacatcttgtaggtaataaatccattgctgctggcaggggaaggccgactcttgttcattgacagtaaagagtgttacacaattaactagcaccaacaaggaagttaacgccatgtagaaatataaaagagaacagat

SEQ ID NO: 61554 - DNA, 170 bp, Setaria italica
  Peptide Sequence Number=SeqID_127528
cccacagtcccattgctcctctgtgactcttggagtctctcaagatgagtagaaaccgagtcaatcattgcctcaagctgtttaatcctcgctgctgcttgtagcatgagaccattctcactgattttaccaatcccaggtatcattgataacgaaaaaaaaaaaaaaac

SEQ ID NO: 61555 - DNA, 245 bp, Setaria italica
  Peptide Sequence Number=SeqID_127529
tttcattcttttcaacaaacatatatgaaaatatttaatagcattggacaacataataatgaaattgtcagaggttgatcatcgttcctcctgaactggcgtatggaaagaaaggtgtccaagaaattcctccaaatgcaactattgagctggatgttgagctactatcaatcaagcagagtccattcgggactcctgtgaagattgtcgaaggataactgtgcatagctttctgaagagaatgg

SEQ ID NO: 61556 - DNA, 288 bp, Setaria italica
  Peptide Sequence Number=SeqID_127530
gcccatttccttgtgcttctcttcttgtctgccttgttttgttggacttcacgctgataatgccgcttgcagacaccttggcactcttcagggcctcctccatttcattgtcattattatcaattgcatacttctgcagaatttttgggtccacaggggcttcatttgcggctcttctcttttcctctacttccttggctgcttctgcaagatcctcatccatcgattttgcttaagtaggggggtctattttctaattcttcctttctagttcgtaggttaaggttt

SEQ ID NO: 61557 - DNA, 403 bp, Setaria italica
  Peptide Sequence Number=SeqID_127531
tgcgtgccgacgcaccgccaccgctgctgaggtcctcactatcttcagcaggggcctccccatcgccattaatgagtgggagctgcacaacctgctgctggttcccgacctcttgggattcgaggcctcttcgcctccgtgcaccaggacgtcaccaccaagagaaacttaatttcttggaagtaaaatcagtgcttaccggtttgaactccggaatatggcaaggatcatatatgagttgaaagattgccttgagtctgaagaaagctttgctgttgaagggtgaaattattgagatattaacttcagaaaagcaatgcatggggcttcacagcatcgaggttgctttacagaaatttcaagatttatgaagtagcattgggcatgagggaactattttgga

SEQ ID NO: 61558 - DNA, 250 bp, Setaria italica
  Peptide Sequence Number=SeqID_127532
gttcgttgaacatcaatgtacaacaataccgttaacacttaacacagcaagctaacagaatccaaaacgtgtacaaatattgcaatttccagttgcctcaaagatccaaattgattgtgcatgttatttacgtaggcaatgcatggggcttcacagcatcgaggttgctttacagaaatttcaagatttatgaagtagcattgggcatgaggtatggtgcagatgttagataacttgaatagtatttttg

SEQ ID NO: 61559 - DNA, 410 bp, Setaria italica
  Peptide Sequence Number=SeqID_127533
ttacaagaaaaagttaaattctcaatcttgttttaatttagttcggtacaaaaggaagttgcggcggtgaaacaagtattaggtgatgtgcattttctggttggtgagaaggaaaatgtagttgctgacttgaaggataaggtccaaatgatttctgtgcttgagaaagatgttgtagataaacttaatttcttggaaagtaaaattagtgcttaccagcttgaactccggagtagggcaaggatcatatatgagttgaaagatcgccttgaggctgagaagcttaacaacagttttcagccccaactggaagaaatatccattaacaagttaaatatattgcatatatttgatcttagtttataacaaactatgacattggttgttttgtaccttaatgatgttacctt

SEQ ID NO: 61560 - DNA, 394 bp, Setaria italica
  Peptide Sequence Number=SeqID_127534
tatatttgcattatatttgatctttagtttataacaaactatgacatttggttgttttttgtaccttaatgatgttaccttaaaaaagctttgttggtgaaggatgatattattgagagattaacttcagagaagcaggcaatgcgtgtggagcttcacaatatggagattgcttttacagagatttcaagatttattcagtagcattgggcatgggaggatgaagaactttttagcaatttctggaagtcaggatgtgaataatgggcagcctgaaagcattccgggtacacagggaggtctagccaatgagcataactcggtaactgcaattgacgaagcagctaccactcaaaatgtagaccatcagttggaaattagtccaggctagtct

SEQ ID NO: 61561 - DNA, 236 bp, Setaria italica
  Peptide Sequence Number=SeqID_127535
catcgctcttcagcagctgaaagggttccttggcataaaaaatttcactaacaacaccgacatagtctcggtcatgaaatcaatattcaagagtgctcaccatgggtggaactggcagaccatattgatcgctgcatcattccttggatttcttatggtcaccaaatatattggaaagaaaaagaagaagctcttctggatgtccgcaactgcaccgctcatttcagtgattgtat

SEQ ID NO: 61562 - DNA, 396 bp, Setaria italica
  Peptide Sequence Number=SeqID_127536
acctcaaaacttcttctgcttcctaagaactctattcttttaaagttacaagtcctttctctgctgattcggcacttgaatacaacgatcgaagtcgatcagcgtgccgagaatctgtatgcaaggccatgtctatctcatccattgacatgttttcctggtagaagttgtagatgtgatccagcacttgtatacgtgtaaagccaccatggttatagaacgtcttcgaggaaggtccaagctctccaaaacggtcaatagggaagagtatggtaagaaagtgattcttgaagatcaactcacttcgctcactttctttcaagtagggacgggaaaaaattaatacaagttaggttagaataactaaggaaataaccctaacgaacaaataaccca

SEQ ID NO: 61563 - DNA, 174 bp, Setaria italica
  Peptide Sequence Number=SeqID_127537
accaagtttacaattatatcatgttttacataaattcatgttgatataataccttttttttctatgcccacaaaggtacatcaatttgccaggatgcatccaggactgcagtttctcatggtcaactataatgaacagacagagatctgtaggagactcaatgtttatgtcttg

SEQ ID NO: 61564 - DNA, 252 bp, Setaria italica
  Peptide Sequence Number=SeqID_127538
accatgctgcttcctggatgccttctatgtcgggccgaagcgggatcactctttcggaattcggaccctgctgatacccaacaattgtcgtcccacgccgatggtagctcggcgtccctggactagacaacacgtctggcctgctgtatgacgaatatgacacacccaaccccttgttcatcaccctgacaccgttgacagggaaccctggagaatgtgtcgaggatttggcaacaccagagcagccaaaat

SEQ ID NO: 61565 - DNA, 350 bp, Setaria italica
  Peptide Sequence Number=SeqID_127539
gtgatctctttccttcttcacctttgttctggtggtcaccaactccgaggcacggaacacgaaggtcagacctgatctatcacccctagtttttcccagctatgatactgtcagaacttagtctattggaagggatctacaattgccttgctgcttcctctcactggagctgagacctgctgctgctttcaggccaatggaagcttggcgcattgttgtattgtgacaaatcaaatgaaatggtctccactccataagggaaagtttccggaagcacccgtcgaatagttaaacggaccaataccctacaattttaacaaggaatttacgtaccttaggtaactaattta

SEQ ID NO: 61566 - DNA, 242 bp, Setaria italica
  Peptide Sequence Number=SeqID_127540
aggcgactggagccgtcgccagcgagctgcagcgcgacgccgccgacatggccgtgcaccaggtggacgcacacaacgtggtgcccgtctgggcggcgtcggggaagctggagtactcggccaaaaccttcagaggcaaggtgagcaagggtttgcaggtgcggcagggtttttgcagtgaagggtgacactttcgcctggaaagtatattagcaatttagcattgataatgagggttatat

SEQ ID NO: 61567 - DNA, 413 bp, Setaria italica
  Peptide Sequence Number=SeqID_127541
aagaaaggtagttacccaaggaagaatctgtaattatatcgagttgatgtaccttctccagaagcaatatctaggattcgaaatgagaaggctaggcgctacttgagcactatgaggcggaaaaaggctataccatttacacagaagttcccaaatgcagatccacttgcactaagtttgttagagcgaatgctagcttttgagccaaaagacaggccaagtgctgaagaggctcttgctgatccttatttcaagaatatagccaatgtggatagagaaccttctgcacaggctgtcacaaagcttgaatttgagtttgagaggcggagagttacaaaggatgacataagggaactcatatatagagagattcttgagtatcatccaaagatgttgagagaattccttgaggg

SEQ ID NO: 61568 - DNA, 368 bp, Setaria italica
  Peptide Sequence Number=SeqID_127542
acattttacttcctccaatcaaggagggaattcaaggatatatatgttgtgtttgaactcatggagtctgatttgcaccaagttataaaggctaatgatgacttgactccagaacactatcaatttttcctgtatcagttacttcgaggattgaaatacatacatacaggttctcatggtggggttccgagtatagctggtgcccatgcagggagcattcgaccctagccagccaaatttagcaaatgtgttccacagagacctaaagcccaaaaatattttggcgaatgctgattgcaagctcaaaatatgtgattttggacttgcaagagtagctttcagtgatactccgactgccatctttctgg

SEQ ID NO: 61569 - DNA, 258 bp, Setaria italica
  Peptide Sequence Number=SeqID_127543
gcgttgcctgcaggaatttgatatttttcttattacttcgtcatctcaatcaggttctcatggtggggttccgagtatagctggtgcccatgcagggagcattcgaccctagccagccaaatttaggtgctaaagatctctttatgtaatttgtttggataagattgattacttaccaaacagttatttttcatttttaggccctatctcctatatggggtcaggctctgttgaaggagtcaagaagctatctgtcaa

SEQ ID NO: 61570 - DNA, 329 bp, Setaria italica
  Peptide Sequence Number=SeqID_127544
gaactgcagatgcttggttcagattgctgatgaattgcaggtaaagctaccagttggccattccggccatcaactgtagtaggtagtttgtttggtatgtatggctttggttgcccagtttgtctcacatcaatcctgtcagcctcacttgtttcgcccttgcaggtaggaattcttttggggtatgagcttctaggtgagacaccattagctattcgtctctgttcatattggtcagcagcaggtgatgcataattaccataacgctctgcagaaccaatatgaacagagacgaattagctttcttaaggttagtaagtaactaacta

SEQ ID NO: 61571 - DNA, 332 bp, Setaria italica
  Peptide Sequence Number=SeqID_127545
ttgcaccaacagaggaagaatctagctgtgctctccgtgcatcatctctgattacacactttgaaagatcctccgtgacattggttgtgctttgggttcggttatccgagtataacacgctaggcctgtttatgcatgagtgcttggtagagagttatgttgcctttcaggtggagctgctgttgatccctttgcataatgttcttcaagatatgcaaattgcttcttaaaatgatccacggcacttgggtacatgaaaccagttgactcagtcccctcaaggaattctctcaacatattaggatgatactccagaatttctctgtagatga

SEQ ID NO: 61572 - DNA, 198 bp, Setaria italica
  Peptide Sequence Number=SeqID_127546
cctttagttctacgttcttttagaactcaggtatctggattaagaatacaaatctgtacaggactacatttctgaatttgtcagaataatgtagcgcttagcataagttacctgctaccgtggacggtcgcggtggccactggtagatttccgcagcagtgcaccagcgaaccatttcctaacatgttatcagcagcg

SEQ ID NO: 61573 - DNA, 168 bp, Setaria italica
  Peptide Sequence Number=SeqID_127547
aggtaaagctaccagtggccattccggccatcaactgtagtaggtagtttgtttggtatgtatggctttggttgcccagtttgttcttgaagctggtggctccagactctgaattatgcacataggtcttattgttgtaaaatgtaacatggagtttgaatttgaaca

SEQ ID NO: 61574 - DNA, 413 bp, Setaria italica
  Peptide Sequence Number=SeqID_127548
aagagcgcttaggcaaagaatttatggatagaataaacaaagaaggctacattgatgtcacaaacaaatcaggaaagtttttgtacagagtaaccaaagagagcttgatggaacgtctgaacactgatatgcatgcagcaagcctttccatcagcaaagaatgcaggttctttacaattcatggttcagctgatgagatcataccggtagaagatgcatatgagtttgcgaagcttataccgaaccacaagctgcgtgtcattgagggagcaaatcactgctacactgctcatcgtaaagaactttctgatgccatagtagaatgcatcaacaatccaaacgaaggacaaggggaataatacccaacgactaagaagaccgacaacgttacccctaaccgtactaagtactta

SEQ ID NO: 61575 - DNA, 177 bp, Setaria italica
  Peptide Sequence Number=SeqID_127549
gtaaaggttgtttgaagagcgcttaggcaaagaatttatggatagaataaacaaagaaggctacattgatgtcacaaacaaatcaggaaaagatatgaaacaacagaatgcaggtcatcagcctccttcctgtagttaccatactggaattcaccttcgctttccccatttccactg

SEQ ID NO: 61576 - DNA, 380 bp, Setaria italica
  Peptide Sequence Number=SeqID_127550
tttaccattttgagtcgaaggagtcgatggaagctaattttgatatatgagagcgaacttcagatgatgatgcaacaccattattactaacagtgtttgactgttggttaactgtggtacctcccatgtgtgataaccaattggaatcctggctatcctcatcttcacttgcctgaattgggatattgtcagcaagatgaaggccagaataaattaaccgatttaattgacatatgtaaaaaatacatttgggtcaatcgcgagctttggtggtcgtgtcttcctcaggttcttccagtcaatacctctgaagaaaggatgcttcttcaatgaagaataaccatcaaggtacccgacaacctaggaccttttagaactta

SEQ ID NO: 61577 - DNA, 276 bp, Setaria italica
  misc_feature (245)..(245): n is a, c, g, or t
  misc_feature (267)..(267): n is a, c, g, or t
  Peptide Sequence Number=SeqID_127551
ttttttttttttttttttctttaattgtaaattagttttccttgttgtttaattatttctgggcgcagccatttcatgctatttgctgcgacagacacaaaaacaacaaacaaaattgtgccctgtatgtaagtgtagacagaaactggaaaattcataggggcatcatcaacatgccaattagcgagtaacaacttccttgcagccaggcgcaggagcagaacagcaggagaaacagccccctnacgttcctccaagtgaaaaggntgtgatgta

SEQ ID NO: 61578 - DNA, 246 bp, Setaria italica
  Peptide Sequence Number=SeqID_127552
gctttatttggcataatggacctgctatttccactggaaacacatcgggactttttgttttgcagtatttatataataaaaacagcattgtatctacatgaagaataaaggaggaacttgtgcacgaaatctatacaagtaatgagtatttctacataccagcaacttgtcaataagatctcttgcttcatctgaaaaatactcagggaatttgatgtcccttgcaatgattctctggaaaatcaa

SEQ ID NO: 61579 - DNA, 343 bp, Setaria italica
  Peptide Sequence Number=SeqID_127553
agcctgtggctgctggagctgctgagaatgttgtggctgctggtgtaagacatcggcagctgctgctgctgttgctgcatatcctgcacaacatccatctgctgttgctgctgctgcgaagtcgcctgcatgttgtctgaacagcagatggggcaatctgaccagaacggtccagcccagatgatgcgtagtgctagtggtgtgaagcttgagccgcagcagttgcaagcccagatgatgcggagtttgagttcagtcaagatggagcaacagagttcagactcatcagctttcttgcagcagcagcagcagtctaactaactagtctaactagtctagtcta

SEQ ID NO: 61580 - DNA, 243 bp, Setaria italica
  Peptide Sequence Number=SeqID_127554
ccatgggaaatcattaactggtatactggctgcgatcgacaccttctctgagcatatcgtaattgggatcttctactttgtggggtttgggctgttctgtttggagacactgctgagcattgcagttcttcagagagtgtacatgtacttcagagggaacaagtgaggccagccatagtggaaaactacatttgtcggaaaaggtgctactagcattcataagtaattctccatcacattttc

SEQ ID NO: 61581 - DNA, 388 bp, Setaria italica
  Peptide Sequence Number=SeqID_127555
aggcttcattgtatctttcttcgaaaatatggcttgcagtcattgacggcttggaagaaagatcatgagccttttctcctgttttaccacaagcaatgaactgatctccttggggaacctctgggaattggcccaggccagcgtttctggagaccagcagatggccagttccttgcaatagcagtttgccacaagcaatctccttcaaatatgttggcccactgcttgttgacacatgctatttgcacccactcggagactggtaaacgaatgaatatttctacaataagatgctctgggagcctaccaattggtccatcacttcttccttccagtcccatgacagacagaagttgatgacaattggtaggaagccgcttcttcttcc

SEQ ID NO: 61582 - DNA, 282 bp, Setaria italica
  Peptide Sequence Number=SeqID_127556
cagtcacggaagtcagtgaacagcttgtcatacacctccatagcaccttatatgatctggagtatggaaatggaaggaaaaattctccttctcgtgcgaggtgttttaacagcaagaatgttttctggttttcttccaagccgtcaatgactgcaagccatattttcgaagaaagatcatgagccttttctcctgttttaccacaagcaatgaactgatctccttggggaacctctgggaattggcccaggccagcgtttctggagaccagcagatggccag

SEQ ID NO: 61583 - DNA, 464 bp, Setaria italica
  Peptide Sequence Number=SeqID_127557
gatgataatgcctaagaaagctgaactgtggctttcacactgaaagatatatagataaaccattgtcaaaagcatggccattgaagttgagtacactatattgtctgaatacttcatcaaccatgataccagcagaccggtggaccctaaattgaacacaaccatccatgttgtgatagaatagccattaaataggcgctgccaccagggacccaactcaaatccagctttgaagtcaccataaattagccatcccatgttgaatataactccaaacctgaaagcttataggatgaatatttagtagacatgctgttcaagaacactggggaattcaagaagtatgcacagatgcacagtgggttcttggttggtggaattaggaattacagacagtggacaagtgtaagatatagatacctacgtatacaattgtacattttgccagtacaaactatcattgt

SEQ ID NO: 61584 - DNA, 343 bp, Setaria italica
  misc_feature (97)..(97): n is a, c, g, or t
  Peptide Sequence Number=SeqID_127558
gcacacatcccaaacaatcaacaaggctgcaaaacagaagcgatcctatgggttctaccgcctgagattgcctcccaacttcccgcatcacatgacnggaaatcctgatacagcagtgaatgggcaccggtccatcgcctgttgcctgttgcctgttgcctgttgcgatacagaaatggacacgagggttccagttgctaagaataaggaagcttgttcaaagcttccgctgctgagtgatggcagctatttctgctgagtgatagcatcaacttgtctaagtaaactttactttagttaaaattttttaggttacttaacttttactttaattttacgttta

SEQ ID NO: 61585 - DNA, 229 bp, Setaria italica
  Peptide Sequence Number=SeqID_127559
tgatagcatcactgcagaacttcttgaaattttggcactcatcggtcaggaagtcatagatacgttcaaccatttctgcctgatcccatctaggactccagggatagtcatttatcgggggcgacgtaataggtgtcccgtcagcattacagtgctgagaactctgcaatgtgagcacattaagccaaccagattagtgcagaaacaatcaaagaatacaaaacctggc

SEQ ID NO: 61586 - DNA, 404 bp, Setaria italica
  Peptide Sequence Number=SeqID_127560
tgttcttagtttaagttggtaattccttgtatgttctgtactggaatttgattagcagtacatccatttattctaccaatgtttggtacactatatcaataataaatgttaacagttgcaatgattgcggttatacatctctgttactttctttttacagggctgattctccagaatcatctgattccagctgtggactttatgtttcgtcatccagattgcttctctgacgtcgtaatcctatccagtgttgcaacagctagtcagttcttcatatcctacaccattcgaacatttggagctctcacatttgctactataatgacaactagacagctggtgagcatattgctgtcatgtgtctggtttgtgcatcctctcagctggatgcagtgggttggcga

SEQ ID NO: 61587 - DNA, 346 bp, Setaria italica
  misc_feature (317)..(317): n is a, c, g, or t
  Peptide Sequence Number=SeqID_127561
ttaactttttactaaccttagtcgtcttgtaggtttttctaagttgtcttgcttcattgttgcttattgataccacattgtcttttgctctattaggaatggagttatctgcgtggaggactgacaacgctcgatcgggattatggattgatcaacaatatccatcatgacattggaactcatgtcatccatcaccttttccctcaaatcccgcattaccatctcattgagcgactgaggcagcaaagccagtgcttggcaaatactacaaagaaccaaagaagtcgggtcctctcccgttgcatctatttggggtnctagcggaaagcttaaagcaagatcacta

SEQ ID NO: 61588 - DNA, 256 bp, Setaria italica
  Peptide Sequence Number=SeqID_127562
cgtcggccaccgcacacctgacccgaggaacccaatcccatccgtcgcgaacgcagaagatcccgtcccgcgcgcctcgacagctggctcgtctggccgctctactgggccgcgcagggaaccatgttctgggcgctcttcgtcctcggccacgactgtggacacgggagcttctcaaacaaccccaagctgaacagcgtggtcggccacattctccattcctccattcttgtcccataccatggatggaggatta

SEQ ID NO: 61589 - DNA, 118 bp, Setaria italica
  Peptide Sequence Number=SeqID_127563
caagattatatctgtttgtttaggatagtatcttcttctactaataatgtcctaacttaattgtgcaacattaagttaggacattattagtagaagaagatactatcctaaacaaaca

SEQ ID NO: 61590 - DNA, 240 bp, Setaria italica
  Peptide Sequence Number=SeqID_127564
ttgtgtaaaataatctgactcggaagccttgatgcctttgtttttgcaccggaccatccaatgcagttgaggggtggtcatttgagaattggtgtgaactatatagtgatttacccagcagacagttgaaggtgaaagttattgatcgaagttcaattgtcacgacagacgcagagacaaaagttagtcaaccttctagtttgcagtctccttatctatcaattcttgcaaactagaagg

SEQ ID NO: 61591 - DNA, 269 bp, Setaria italica
  Peptide Sequence Number=SeqID_127565
tcagaagcatatggccataatagctttgcctttttttattgaaagagtaaggttttattgcactagatactagtgcacataattgattcataaatcataattttacaagtctaccggaattcttagaaggtgaatcttgaaaggtatcaagggccaagatgtaagcttttggtattaagtatctttctggtttgtgcagatatacctttaatgcaagctcttcaaaacatttctccacgttctctcttgttttggcactactttcgaag

SEQ ID NO: 61592 - DNA, 430 bp, Setaria italica
  Peptide Sequence Number=SeqID_127566
tcgccgatggacgcggatggacccatggaggagaaggattgcttcatccttagccaggatttctttggtcggttccgattcgagctctgtgttggtcttctgacagtatggtttcagtctacatcacgccggagatgacgcaggtggccaacgaattcgatgacgataaggttctcgtgagaacatagtttgatacttcacatctgttttgagaacgagcaactttgtattcaaatggaactatgtgattgttgtctatctgtgaatctaaaccagccactgaagcattgggaagccttggaacttctgtatcaggtttgagacttttagttacgaagccgtcttttaccaattttatttcttcttgatcacttatcaaatgaatacattcatctttacttccttcatatcttaattcttaagtcctact

SEQ ID NO: 61593 - DNA, 241 bp, Setaria italica
  Peptide Sequence Number=SeqID_127567
ctacatcacgccggagatgacgcaggtggccaacgaattcgatgacgataaggtgggtaagatgagatttttctcttattgagtgtgtgttagtgcagtaacattgtgctgtcctgactgctcatctgcattcctcgctaacaattttactggttttgtgaaggagaacatcccttttctttcagctgcattcgtgaggaaggttgtaacttgtaacatcggtgtcatgtgtttccaggtt

SEQ ID NO: 61594 - DNA, 192 bp, Setaria italica
  misc_feature (9)..(9): n is a, c, g, or t
  Peptide Sequence Number=SeqID_127568
aggtcctgnccggtgcatccatcaaaattaccagtgtccatcttacctattagagaatgcttgcagatgaactgattttggtacttgattcatctacactttatttcttttccatgttaatagcatctgaaatattttcctttcattggcaaactatactacttttctaaaagcataccttactcattgaaa

SEQ ID NO: 61595 - DNA, 203 bp, Setaria italica
  Peptide Sequence Number=SeqID_127569
agtgagtgaaaagttaagcgacaagattcaagttgtgaaaattgatactgagaagtacacaagcattgcaaatcgttacagaattgaagcattgccaacttttatcatcttcaagaacgggaaacattctcaatctgttcaatcagctggttagcaggcaatgctccctcaaaacgatggcaaggtttcccgttcttgaagat

SEQ ID NO: 61596 - DNA, 435 bp, Setaria italica
  Peptide Sequence Number=SeqID_127570
ttgcccggagagttgaacagcttgcctccttacaagatcgccccgaatcagagcctgaagtcttatgatccctttcaatgcacggaatgctcggcgtgcctggaccagtaccacgataccaattagcaccatactaagccaagtatctacaacaagaatagttatgtattgctctatcacagcagtttcaaaggctcaaagcatcaatgtcacagtagtgcagcacaacattttttatttatcttattgtttttatatgaatgactctaaaagagacttggtgcagtgatagataacactagaacatggcacaaagccacaaacagatagtacaagtaataagctaagcgaatcaaaaatagagaaaaataaacatcaccagataaccacggaacgcagcttgcgccttcacagccgtctttgtcttctttccct

SEQ ID NO: 61597 - DNA, 177 bp, Setaria italica
  Peptide Sequence Number=SeqID_127571
gtatctaatccagcacctgagatccctttgaggtttctgccatggaattagtaaccttcctaaggctacgtttaaccttctcaagttcagttaactgtccatcaggcactgaatgagtagtgctcctgctgattcagtgcctgatggacagttaactgaatcagtagtgctcctgct

SEQ ID NO: 61598 - DNA, 260 bp, Setaria italica
  Peptide Sequence Number=SeqID_127572
aaaagaatacaaagactagtaactttacaatagtagaaagaaagaagaataataacacgttcatattgtaggtgtattggatgagcgtgttatgtttagcgggaaaaggaacaagcgaagatatgaaagctggaacaaaactgctacattgtgggggaggggaggcccatacataaatttttataaaacccatgcagaaaactgtagatatgcaagtgatagaactgagaccagtcctgaacaaagaagtacccaattta

SEQ ID NO: 61599 - DNA, 261 bp, Setaria italica
  Peptide Sequence Number=SeqID_127573
cgtccgaagtccggtgaataaatcccttcgtttagtaggcaaaataaccatttccatgagtgcttgctttgccttgtcgagaccagcaacatcatcccatttaacagcggggcttctgtccacaatggttgtattaatcatttcagcaagcttgtcatcatagcttccgccagccttttgaacaggtttggaacctcaccctatccgcttctagacacttccctgctcctcctctcgcatctcctcacaccctcctccccg

SEQ ID NO: 61600 - DNA, 243 bp, Setaria italica
  Peptide Sequence Number=SeqID_127574
cataatctgtcaggaaccaattccagataggtttcaattcgcatacaaaataaaataagctatcaagtgaaatcatggagcacttactcgacaatttgaatgcttgtcctttgagctgatttttcagaagtaacctccgtacatttggatcaggtagtggtacatatattctcttcaccagtcttcgaagaacagcgtcatccaactcttgaggtttattagtagcccctagacaaagaattg

SEQ ID NO: 61601 - DNA, 310 bp, Setaria italica
  misc_feature (52)..(52): n is a, c, g, or t
  Peptide Sequence Number=SeqID_127575
ccaccatcgtctcggatccatcgtcaactttgtcatcatggtacctcctcgngcccaccgccgccgcctcgtccgtggcctccgcgctccccaattacatgttcgagcccggcgcctacacgctcggctcccgcgtcgccacgctcttgtccaagggcgcgaccttcacgatggtcgggttcgcggccgggctcgccggcaccgctctctccaacgggctcatcgcgatgcggaagcgcatggacgcgtcgttcgagactccctaactaaggtcgtccgtccgttacgttctttgtttcttttaacgttt

SEQ ID NO: 61602 - DNA, 279 bp, Setaria italica
  Peptide Sequence Number=SeqID_127576
tcgtccgtattgtccggtcggtccgtctattctacctattgcgccgcaccgtcaagagcgctccccagagcatctggtacggccctgaccgccccaagtacctgggcccgttctcggagcagacgccgtcgtacctgaccggcgagttccccggcgactacgggtgggacaccgcggggctctccgccgacccggagaccttcgcgcgcaaccgcgagctggaggtgatccactcgcggtgggccatgctcggcgcgctggggtgcgtgttcccggaga

SEQ ID NO: 61603 - DNA, 270 bp, Setaria italica
  Peptide Sequence Number=SeqID_127577
tggatttggtttacggttggtgagcggagatgttgagggcgctgacgaggtgctgcggccactggccgccgatgccggcggccgcatcaccatgcgccgcaccgtcaagagcgctccccagagcatctggtacggccctgaccgccccaagtacctgggcccgttctcggagcagacgccgtcgtacctgaccggcgagttccccggcgactacgggtgggacaccgcggggctctccgccgacccggagaccttcgcgcgcaaccgcga

SEQ ID NO: 61604 - DNA, 267 bp, Setaria italica
  Peptide Sequence Number=SeqID_127578
tttcatcacagggtcttcattttttttgtcatagtttgcagtctaactataactaattaaattttcacaaatttgtgcagggaatagccaacagattggtgaaggctgccttgaaggaagcaacaaggaaaagggaggtcaggtaccgcgacctgaggacgatcgagaggggagtgaggcggcatttccacgacgacatcagtgttgtggtggtctacctcgaccgccaccgtgaacgtcgccacaccagggtcatcgattcgagca

SEQ ID NO: 61605 - DNA, 228 bp, Setaria italica
  Peptide Sequence Number=SeqID_127579
ttcctgtatttgacatgctaacatacctcttggtatttatatcgattcttcattagctgcacatgagataggggaaaaacctcaactggagatgggtaagcttgaggtgcatttttctatgatgcatgacatgctggttgcactcacaggccaatgatccagttttctgcggatgagtcagtcggttgccggatgatgcctaatgagatacagttcttgatccaaaag

SEQ ID NO: 61606 - DNA, 125 bp, Setaria italica
  Peptide Sequence Number=SeqID_127580
cccattgtctatttggtagtcttggagctgttgtagcagtcataaagtgacgaccagccagtgttcagatattttcttgcaacaaggatgcacaaaatcaagctgttgctcgcaggagtcttttt

SEQ ID NO: 61607 - DNA, 437 bp, Setaria italica
  Peptide Sequence Number=SeqID_127581
ccaacagcgccttccacgcatcagccttcgtctcggcgactccgatggcgatgccttcgaagacggagtgaaagcagagggcggcgatgagcagaatgctgtcgcccagggtgttcgcgttgtgcagcatcgatgcaaccgagtgatcggatccatgtgcctcagctggttgtggctcagagctggtgccatttgtggtgctcaccttgccctcctccagctctgaacgaaatatataaaaagaagaggtgaattataaacttctgagaatagtaagcatcgattgaatacagttcatgcaggaacagaattgctttacagagaaaacgtgacaatcaatgtacagtagagagtgacagatagccttctctgattgataaccgactattcagacttgtaatatagatacatattctcctctcgtgtacgcattttga

SEQ ID NO: 61608 - DNA, 361 bp, Setaria italica
  misc_feature (18)..(18): n is a, c, g, or t
  Peptide Sequence Number=SeqID_127582
aaaattatacaccaaaanaacccagcaatgaccttaagacataaacaatgtgaacaaaccatacctaccgacagagatctttgcctacgacagttgcttaatgtgaacattggaaattttgggcacagttgtgtagcaggtagctgttgccatagctacaaatggtcagaataatactaagaatgctgaaaaggaacaaaagcacaatggacaactaaaagaaatgcacaatatcttccacgaacgcttataggctatgactactccacgccattagctgagagccaaccaaaggtatatcatctgaaagttaattgacaaggacaaattactagaactagaataaataataacctttaga

SEQ ID NO: 61609 - DNA, 220 bp, Setaria italica
  Peptide Sequence Number=SeqID_127583
gacaagtcgaccagcgaatcttggcgtcgtcatcccctttctctctcgctcaaaagttgccggagccccctctctccgtctccccaccgccatggaggaggcgcaggttgttcagtcaaaggatggaaccatctcggttgcttctgcatttgctggtcatcagcaaggtgagaccatacaacagtgatttaacatcttttactctaggtctcatgtaggt

SEQ ID NO: 61610 - DNA, 384 bp, Setaria italica
  misc_feature (328)..(328): n is a, c, g, or t
  Peptide Sequence Number=SeqID_127584
taggtacgttctaattctttcttcgtttcaggaagggctccacctgattggggtttccccacacagggtaacccttgatcccaccaagaacgttgagagcagccagcgttgacattccttcacgtgtccacttggaggctgatgcaatgtgtggtacaaggaccgcgttcttcatgtcagccagtccaggtttcatgtaaggctcatcctcaaagacgtcgagcccaacgcggaacatgggattggccttgaggtgctccaccagggcagcttcatcgatcaggccacacgccttgagaagttcgtcacagcatatgggcagttcctnaaagcaaacggtgagcagcctgtcacctggaagagggcccgccaccatcggaggat

SEQ ID NO: 61611 - DNA, 245 bp, Setaria italica
  Peptide Sequence Number=SeqID_127585
caacatggccgtcggctacaacaacgtcgacgtcgcggcggccaacaagaatggcatcgccgtcggcaacacgccgggtgttctgaccgagacgacggctgagctcgccgcctccctcacgctggcggcagccaggaggatcgtcgaggcggaccagttcatgagggctggcctctacgacggatggctcccgcacctgtcagtagatatctgcttgctcttgtacttattcagacataatacgc

SEQ ID NO: 61612 - DNA, 219 bp, Setaria italica
  Peptide Sequence Number=SeqID_127586
gtctggtctctttaatgccactgaacttttcccaggtccaatatccctcaaaggattaagatctgaaaataatcttttgcactcctccttgtcttgtgagttttaaagcagaaacaagacttgaaattacttcaaaactcacaagacaaggaggagtgcaaaagatttcaagtcttgtttctgctttaaaagcgtaccagctagtttgtattggtttgt

SEQ ID NO: 61613 - DNA, 343 bp, Setaria italica
  Peptide Sequence Number=SeqID_127587
acgccgaccaataggaccgacggtcgcgccgccaccgccgccagccaccgcgaggtcgctcgagacggggacgaagctgcacatctccaaccttgacgccggcgtcaccgtcgaggatgtccaggaactgttctcggagggaactgcggaagttgtctttgcaaggaaagtggatgctttggatgctatcaagaaatacaatggtgttctacttgatgggaagccaatgaatatagatctcattggaagcaatgcggaacgaccttccatgccaccgttgatacagaaccgtcctttgcagaactataatgatatccatagcagtgtacctcaaaaacccaaa

SEQ ID NO: 61614 - DNA, 388 bp, Setaria italica
  misc_feature (336)..(336): n is a, c, g, or t
  Peptide Sequence Number=SeqID_127588
taattacaaggacacttgcgtaggaaattctgaagactcgcaagaacaccagttgtgaccatctcatcaggcttctctaccttcagatccactgaaggagagcaagagataagtgaccctgccattgtagcaatgaggggaaagcgtcggcagtcggcgactcggcgttgctgcgtgcagtcgcgaagaccaccggcggctcgacctggacgcgtcctcctgccccgttgcagcccctgcagctgcaggcgtcggcgcggccgcacgtcccagtctcgcctagcagtagctgattcctcgcgcagctcgggggcagctgcggcggccggcgaagcngcagcagcaatgcctcgggaaaacggccgtaggggcaggtaacagcgtcttg

SEQ ID NO: 61615 - DNA, 247 bp, Setaria italica
  Peptide Sequence Number=SeqID_127589
agcaaataaatcaaaagtgatcagaacctcccatattgtaagaatatttgtggatgtcagcacaacaaaaaggttatatctctttgaggatctttccaagcctaatagatgatatctgattgcctgctttattaagaaattaatctacatatgttgctaccaatataaaactcaccactgaaggagagcaagagataagtgaccctgccattgtagcaatgaggggaaagctgcaaataggaaaata

SEQ ID NO: 61616 - DNA, 384 bp, Setaria italica
  Peptide Sequence Number=SeqID_127590
cagcaaccagtcctatgcgtgcttgccatctccctgggaacattcagtacgctgcacaataattttggcatacccatgcttttgaaaagtaactggattgagaatactgatgatttttcttatgttttcaatcagaaactgaggaagaagctgcggaggcttatgatattgctgccatcgagatacgtggcaaaaatgctgtgaccaactttgaccgaagcaactatgttgacaagggtatgcactgtatagaaggggaaggcttgaggctgctcgcatcgaagccagaataataacttgaactaaaatgcggcgtcatctattgagcagttttgcccagagacagatttggaacttagtggtacatacagataggagaactgg

SEQ ID NO: 61617 - DNA, 408 bp, Setaria italica
  Peptide Sequence Number=SeqID_127591
ttttgaagcactgctggagaactatatcaacctatgcagagatctttcaagaaagatcatgcgtggtatagctttggcattgggaggggcaattgatgcatttgaaggggaaacagctggagatcctttctgggttttaaggttgattggttatccagtagaaattccagaagagcagcgcactgatactggatgtggagcccatacagattatggactactaacactggttaaccaggatgatgacatatgtgcccttgaggtgcaaaaccgctctggtttggtcgaatggaatttatgaatccacgcttcatagagttgtcaacaactcgcctcgttaccgcatatccgtcgcattcttctacgagtccaactttgatgctgccatagagcctgttcagttctgcc

SEQ ID NO: 61618 - DNA, 224 bp, Setaria italica
  misc_feature (16)..(16): n is a, c, g, or t
  Peptide Sequence Number=SeqID_127592
caaaggaataaggganaatattacaaggtaacctgatatgcacgaagcaattgattgctacactcctattaaacctggcaaatatggagatcttgctaaaccaatggagggatctaacttatggccagaaaacccatcaaattttgaagcactgctggagaactatatcaacctatgcagaggtccacaactcgacctactcttaacaatcttttccactcatc

SEQ ID NO: 61619 - DNA, 329 bp, Setaria italica
  misc_feature (295)..(295): n is a, c, g, or t
  misc_feature (317)..(317): n is a, c, g, or t
  Peptide Sequence Number=SeqID_127593
aggcagatatcaagaaagcactagaaatagatccagacaacagggatgtgaagatggggtacaggaggctgaaggagacagtcaaggagtacaaaagaagggacgccaaattgtatggcaatatgatttctaaactgagcaaggttgaagatacagaaggcaatgaccatgaaagccgggggcaaagcaagaagcatggcatgtggccactggcacaactgcttagcagattcttcactaaggatggtaccaaggggtccacactgtggcttgtgctaaggctgttgattttggnggtgctagtggttgcagtttgngtgggttactac

SEQ ID NO: 61620 - DNA, 219 bp, Setaria italica
  Peptide Sequence Number=SeqID_127594
ggcagatatcaagaaagcactagaaatagatccagacaacagggatgtgaagatgggtgtgtgcctgtgcccttctgtacaaggccttcacatttgtgcagtcaagttccagaacctcagtacacagttcctttgcttccttgtaatctttaagttttagtttgcatgcagcattgttgagcttgcagcttatcttaagtggtttcgaaagctgcttct

SEQ ID NO: 61621 - DNA, 204 bp, Setaria italica
  Peptide Sequence Number=SeqID_127595
catgtatacacacgtattccttcccttttacgctatctatctacagtgcccggaaggaatacgtgtgtatacatgtgtaacgctggatgtacgaagatagatagcgtaaaagggaaaggaggcactcactcttgatgggctgtgaactgtagagtcttgttgagatcttatctcttgttcgtttgattcattttccaaacctca

SEQ ID NO: 61622 - DNA, 339 bp, Setaria italica
  Peptide Sequence Number=SeqID_127596
aaaaccaacaggagttggtggagtatgactagatcacttgaaaaccaagttgtaggacacaccagttcattcatactgttcagtcacacgaacagttgagcacgaacttagctggatcagtttggactttggagtgaccacaacacaacagttccatgcatcatagtgcatttgggattctgacaacatgatgagaatgtgggatcagatcagatcagatcagatgtggggacctgagcctaacgacggttggcgtcctgcaggctcaccaagcttggggccctcgtgtggcagaaggtggtgcacgagcaccagggctggcgcctcctttccagcatg

SEQ ID NO: 61623 - DNA, 255 bp, Setaria italica
  Peptide Sequence Number=SeqID_127597
ggagcgacacacgattatacagtccaagagaacaggtcgttgcttaacttcccagttcccatgctcgtccagacccaagcgaatgtgtatcttgcattggaaaacaaccttgaaatcataccggttctaaacaaaatagatcttcctggtgctgaacctgaccgcgtcgcacaggaaattgaagagataattggattggactgcagtgatgcaattcggtgttcagcaaaaggaaggtattaggcatcactgaaa

SEQ ID NO: 61624 - DNA, 258 bp, Setaria italica
  Peptide Sequence Number=SeqID_127598
ctatgaaagagctcatgtaatctttctaaagtctctcctttctgctgtaaagatctctgcttgggagcgacacacgattatacagtccaagagaacaggttatgaagccagaaaatttcgtatggcacaattttggcaggaaaatgtacgaaactcgtcagctttgtggcgaaggccattacgtacttcaattacatgtaatgctacattatgacatgtttcatagttgaatatatcttctgaaaatttaaaaaaaaa

SEQ ID NO: 61625 - DNA, 335 bp, Setaria italica
  Peptide Sequence Number=SeqID_127599
agggaagaagggcctttgcatttttgcatgtggctacggcgagtttgaagtgtgcggaaatccttctggaggctggtgctgcagttgacgccctggataagacaaaaacactccgctgcattacgctgctgggtatggccggaaggaatgtgtggatcttctgttaaagcatggcgctgctgtcacggtccagaatctggatgggaagacccccatcgaggtcgccaggctcaacaatcaggatgaggttctgaagttgctggagaaggacgccttcctaaatgaaccaatgtaaatccaatagcttgacagcttgatgcgctttagcccagggg

SEQ ID NO: 61626 - DNA, 421 bp, Setaria italica
  Peptide Sequence Number=SeqID_127600
catatatacggttagttcaacttgcaagagttgctgaataatgctgcatgattacgtacagatatgcgattcgggtggttcagtgtgtaacgaagagaggcaggcagctaatgggcatcttaagcaaggtaaaatcggctgccgtagaatccataacctgggataatagatgacacgttctagttcacgctgtggtcgatctgtggaagactcgaagttggagctctgctggtgattagatttggggatcagcaacgagctcagggaagaaattatgtagtggcagcacagggccacatgcaacctagctacaagagagatcagactcacaaaatgttatagtcacaactgtctactactgtacttacgaaaatttgacaaagtgaactctgaataaacgagaatctaatgataaaaaaaa

SEQ ID NO: 61627 - DNA, 183 bp, Setaria italica
  Peptide Sequence Number=SeqID_127601
taaaaacgggttaaaaagttaaattacgttacctaaggttcgtttcctttggtctaaattaaaccacatcatgagccaacgaattgcctgcaggaaactagctaataatagttgccattgctttggtagcttctttatgtccatgaattatgagttttaatctgatcgagtgaagtgttgagt

SEQ ID NO: 61628 - DNA, 238 bp, Setaria italica
  Peptide Sequence Number=SeqID_127602
ggtggctgcggctgcggcgccaccggcagagcgttggcctgctcaccgacagctggctgcgggcgtgcctgtggcgccgtggcctcagcttgctgcccgtcgtagttcagcggacggccgctgtagtagccagcggcaggatcgttagggcgtcggccatggcggctctccgctccggctgctggcacctccaccggcgagagcgtggcggcggaccggcggtggagcggagacgcgg

SEQ ID NO: 61629 - DNA, 252 bp, Setaria italica
  Peptide Sequence Number=SeqID_127603
cggcggagtggtaaggaaacagcatgcacacgcttgttcttgttctgtttggagcttgggtttttggttttcagaaatgggaggtagatgcgaaagctgagtgacataccggcaggatcgttaggggcgtcggccatggcggctctccgctccggctgctggcacctccaccggcgagagcgtggcggcggaccggcggtggagcggagacgcggaggaagggagagtagacagcgttccttttccggctct

SEQ ID NO: 61630 - DNA, 349 bp, Setaria italica
  Peptide Sequence Number=SeqID_127604
taaggaaataaagaactaacaatagaagaattttagaatagttccaatcaacaaccaatggtttggcaactgcaaaaggggtattgttgacaacagaaacattcaggacttgaccatgtcttgttttgaacatgttacagctttacatgaacaaggaatagataaacatagaagatgcagcatgctagaatgaaaaataatgaggtgaaacctaaaggaattaccagagaatttccaaaccatttagtgttgcctcatcattagttgaactagaaggaataatggaagagtaaagttcagtaacagcgaatatccctatcatacttgatccggagaccagtctcacctt

SEQ ID NO: 61631 - DNA, 151 bp, Setaria italica
  Peptide Sequence Number=SeqID_127605
ggatcaagcaaaggcaacgatgactccacatatgcaagggatagctcatgagattttgatgttccatcaacaaccaatggtttggcaactgcaaaaggggtattgttgacaacagaaacattcaggacttgaccatgtctttgttttgaac

SEQ ID NO: 61632 - DNA, 399 bp, Setaria italica
  Peptide Sequence Number=SeqID_127606
cggcacaaccacaggatgactccaaagctacgttggcacccaagttaaattctgaggagtcatggttatcatttgaccaagaagctaaagagctccataacaagggtggcctggaactcgtgcaaagctacaactcataaatcaaaatggtgaacccgatatgctagagattaaggttatcagtacaaaggtttcggcatcatgtgacaaggtcggagatgaaaacgagatactattctccgggagttccttgctgattccttgcagtggatcaacctggctcgaggtgttggaacttcaactccctggaaagaaagtaacaacggctcgggacttttggaatggtttgcgtggtcagaagctgttgaaatcaccatagagtggatatctgcattcgca

SEQ ID NO: 61633 - DNA, 459 bp, Setaria italica
  Peptide Sequence Number=SeqID_127607
taatttaatcaactagttaagactgcctggtataagtatgtaattatccttagttatctgcttaactgttgatttgtttccttcagtggttggaacattcgctgcatggcttctggtaacatgcaccacgttgtgggtgctgatgattcatgcataagctggggtgttgcccagaatggggagcttggttatgggcctaatgggcagaagtcatctgcaaatcccaaaaaggttgacattcttgagggaatgcatgttacaagtgtcggttgtggatacggactgtctctaattgttgtggacagggcaaatattggtgatcgacttgataagctggagatttatgatggtgatacctccactgaagtagaggtggaggtgcaagcagccaagaaggcgtctaccagcaccaattcccgtgcccaacaagcgcaagaaaaccaggatgattctgaatct

SEQ ID NO: 61634 - DNA, 252 bp, Setaria italica
  Peptide Sequence Number=SeqID_127608
ccggcaagttctgcatgcacagctggtggtgggcagttgtacatgtggggaaagatgaagaatacaggcgatgattggatgtatccaaagcctgtaatggatttaaggttccttacacacttgtcgcaataatgcagaattccaaattctaccgcacttatgttattgtttgttcctttttgagaggctgtttgtatttatcactgttagctgcctggtataagtatgtaattatccttagttatctgctta

SEQ ID NO: 61635 - DNA, 261 bp, Setaria italica
  Peptide Sequence Number=SeqID_127609
agaaagttgtttcacagctattaccctcccatcaggtagcttacccttcttgctgctgtgccactcttcttctcttctttaccaacataaagactccaagtagggctgctaatcctaaaactgaagcgccaatcactattccagcaattgcacctgctttacttttctttttaggaacaccatttctcacagtaggagtaaaatttggtgtcacacttaatgctgagatcatcggtccatagtacccttgtgttggaatgc

SEQ ID NO: 61636 - DNA, 259 bp, Setaria italica
  Peptide Sequence Number=SeqID_127610
atatcctgcagtttctcagtattctgtacaaagacatccaatgtcagtaccttaattactacactgccaaagatatgaaactatacatctatagtgaaaagcatgtagcatacaggacatccaaagatgtcaagttactaataaacgacattgaagagctcccatttacaatatcaccaatccgtaagtttgtcaattttgttagattggacaaactttccggaattgggccttcaaacgaatttccttggaatctcaa

SEQ ID NO: 61637 - DNA, 256 bp, Setaria italica
  Peptide Sequence Number=SeqID_127611
cctgatatctggaacgccatcaagtttggaactggtacatccctaaactttcggtttcttttgctataatagtggcatttcagatcttgcactgtctttgctctgaacgggctaattgaatgtttctgtcgcagtgctggagaacgtcgtcttcgacgagcacacacgtgaagttgactacaccgataaatctgtcaccgagaacactcgtgccgcttacccgatcgagtacatccctaacgccaagatcccctgc

SEQ ID NO: 61638 - DNA, 239 bp, Setaria italica
  Peptide Sequence Number=SeqID_127612
acgaggccgccgcgcaggacctctggtggggcaagtgagtagcgcctcgtcctcgtgaccatcattctgtttcgcccagctgagttgctgcctgccgaggccgggcctctgcttcgcggctgaccaacaagcacctctggtgaccaacgcaggggctcgcccaacatcgagatggacgagcacacgttcctgacgaaccgggagcgggccgtggactacctcaactccctggacaaggt

SEQ ID NO: 61639 - DNA, 434 bp, Setaria italica
  Peptide Sequence Number=SeqID_127613
tttaacggcggccggagaaggctttcctcttggccatgttcgggatgctgagtttttagatgaaggttcaatttgtaactatggatgtatgctttgtcacaaccttcataggggcagacatacgggcgatcggcaaagcttgtggttgctggagtcgaaggctttggtgtgctgtgcggtttttctgctggtggggtatgttgcactgtaacaggagttccagtcttttcatgtgacttgacatggactcttagtttggagtcgcttgtaaatcttttgccacatgctgggaaagggcatatgtgataattctccaatgcatgtgtttttaggtgcgaccgcaagttaaaatccaatgagaaggccttaccacagcctggatgcggacagacaaaatccttttgtcctgttgttgttgttaagtattagttagt

SEQ ID NO: 61640 - DNA, 261 bp, Setaria italica
  Peptide Sequence Number=SeqID_127614
tagctaggataacttggctgctgcctgcacgggagggcccactccgtcagttcctccagttgccaccagattcgccgcggctgccgccgtagccgccaccgccgccgtagccgccgtcgcggtgtcggaccgagctgaagtggactgggcgtcccggacccggagaggatagagggagggtgcggactgcggaggcggaaggccggatgccggaagcggagagccttatctgcagcctgcagggtgggcgcagcttggggc

SEQ ID NO: 61641 - DNA, 220 bp, Setaria italica
  Peptide Sequence Number=SeqID_127615
tgtcctgggtgctcgtcattctgctcgcggccacggtgaggcagcggacgccgccaccaatcccggctcccgaaccctctccttgccttctccgtttccacaccagctcgaacaccatccccgacacctgcaccgacaccagctcgaacaccagccccgactcctgcaccgacccctactccgacacctgcaccaacgcctgcacctactcctgcaccaa

SEQ ID NO: 61642 - DNA, 252 bp, Setaria italica
  misc_feature (162)..(162): n is a, c, g, or t
  misc_feature (187)..(187): n is a, c, g, or t
  Peptide Sequence Number=SeqID_127616
cttgtgtttgaagatatcagccaagaccatgcacgaaaaacggtgactattgaagaccatccccacttattagcaggaaggcatgcttcagttcacccatgcaaacatgcagatgtgatgaaaaagatagttgacgtccttgtgtctcgaggagttgaaccngaagttgacaagtaatactctttangttgctaacaattttcaaaggcaacaaattagaatagaaaagcaatcaccctcctcttttaacgg

SEQ ID NO: 61643 - DNA, 274 bp, Setaria italica
  Peptide Sequence Number=SeqID_127617
cgaagcaaattgggcagaattggggcgtccagccgccaacaaaaaacacaaggagcatccccaactagtgcaggcagatcaggggcgcgcgcgtaccttgtcggcgagctcgtcgagcgacatggcgccgcgatccggtccgcttcgcttcctcgccgacgcaagaaaaatcctccgtgcttcctctgctctcggcttcgtcttgcccggggaaggacgggcgggtagtgtacgtggtctccgattcggcggagggggcaaagaggtgggtggc

SEQ ID NO: 61644 - DNA, 422 bp, Setaria italica
  Peptide Sequence Number=SeqID_127618
attcaacatactacgcgttctggacatctagcttctctgtaacgcaatctgtatacatccctggcaaactaactaatggccaccaaaagggtagctttaaaatcaaaacagcataccaataaaccatcactcgagtaacttaagtgttaccctagcttggctcatcatgataattgataatgactactctctccgttccaaattgtaggtcgttttggaacggagggagtagtttacaacaaacggtcggtaagggtcacataaagatgaaaatgcctttaactaatcagaatgtttgtgacttgtgaggtttgatcacttgagcacgtgtgaatgtgacatacaacaccttcattttaccaggttgcagatcagtacttgcagtaaatgctttgcaactgacagtctcaactgcagcacag

SEQ ID NO: 61645 - DNA, 240 bp, Setaria italica
  Peptide Sequence Number=SeqID_127619
cataaaataaaggggggaaaaggtacatataagcaatctcacgtctaggtgattttcggtgctactccctccgttccaaattgtaggtcgttttggctttctaggtgcataatttttactatgtactttgatatagtgtatgtctagatgcataataatatctatgaacctacaaaagctaaaaagacctacaatttgaaacagatggagtacatgatattacactcttcgaaaaccata

SEQ ID NO: 61646 - DNA, 255 bp, Setaria italica
  Peptide Sequence Number=SeqID_127620
ccttaagtgttaccctagcttggctcatcatgataattgataatgactactctctccgttccaaattgtaggtcgttttggcttttccaggggcatagatattattatgcattgtagatatagtgtatgtctagatgcataataatatctatgaacctagaaaagccaaacgacatacaatttggaacggagggagtagtttacaacaaacggtcggtaagggtcacataaagatgaaaatgcctttaactaatc

SEQ ID NO: 61647 - DNA, 539 bp, Setaria italica
  Peptide Sequence Number=SeqID_127621
agtgcacagtttggaacttcagggagtgagccacattattgctgaatcctaacttgggcccggtgctggaatgtcataggactcttagatggaggccaggatatccagcttttcccttgtacttctcaaaaagctcccgcaaggccatgatgaactgctcatggacttcattaatctcatcaattgcaggctgggggtttttgtcgacttcaataggtttacccacgaccacatgcataggtcttgggaagggaaaagggcgtcccaaatcttccccagaagataataggagtaaatttaactgctctagcaatgttgacaaacaatttgccacctggcctccaccacttgtatgcatagctctgcccaaaacagaaaacagggaccaaaaggaacaagaccaagaattagacaataggactaatacttagaacaaaaaccttttacttagaatttaaaggaaaagacaaacctactagaaatacaattaataccaataatagaaagacaatttacccggaacaaccaaccaaggacaa

SEQ ID NO: 61648 - DNA, 236 bp, Setaria italica
  Peptide Sequence Number=SeqID_127622
ttgtacttctaacaaaaagccctccccgacgaacggccatgatagaactgcctcagtggtaccttctaatttaattcctcatactaattgcgaggcgtgggggttttttgtcgacttcaataggtttacccacgaccacatgcataggtcttgggaagggaaagggcgtcccaaatcttccccagaagataataggagtaaatttaactgctctagcaatgttgacaaacaatttg

SEQ ID NO: 61649 - DNA, 220 bp, Setaria italica
  Peptide Sequence Number=SeqID_127623
agttgcttgctacttttagtggctgaaatacatatgtaaagattggtattcacacctatctttacatatgtatttcagccactaaaagtagcaagcaactaaaaagctttctgactcatgagcatccggtgcacgtttttacatcggagctaggagccttatggtcatctccacaatgttgtaactacaggcctacagcctgaatgcatgcagagtgcac

SEQ ID NO: 61650 - DNA, 413 bp, Setaria italica
  Peptide Sequence Number=SeqID_127624
tttcttcaatctaaagctactgatccagtgatagcagtatgcatgaacactgataaaagtaaagctaatggtacaattccctgttgctatccattcacctaaagcaaaataagatttgaaccttggatgttattaccgagtgaagcaatcaacaacatattctggaagaaggtgaaacgaatttattagcttcaactggaatttcatcaaataccttaactgcaagcactaacagcacaaagcagcaagcaagggtacctcggacatggcaagtatggccagatcaacgggcgggaagcacggagcaggaagcagggcatcagcaacctcctgctggcaggatgcctcgtcgaccttaatggtgggcaagcgaatgttttggcgtggtgagcgtggccatgtcaaggcagagc

SEQ ID NO: 61651 - DNA, 208 bp, Setaria italica
  Peptide Sequence Number=SeqID_127625
atcctgcccttctcataactaaatgcgctgaatcctatgggtgtatggctgctatttgacatggctgttccaaggattaccattgcacacgtccaggcgtggtgaggtatccatgttgtgggcatgaaaacacaaactgagataatgttatttttttatcgaacggtaggtcttaatctcttacctaatcactgttcgaatttgctgc

SEQ ID NO: 61652 - DNA, 425 bp, Setaria italica
  Peptide Sequence Number=SeqID_127626
cttcattgcttgcacctgccttccaccggcagctagcgccaataagcgagggtgcttgctcaactagcatgccaaccacagatatcttctgctactagccagtataattgattcaaggctagctgctcctccttccctactcgccatcgatctcatcggaggacaacgacctgcttgctaccggcttccttcccagactgaaattttattgaaggttcctgtgctgcatgttgaattcctcaaggctaccataacaagtgaggatatgaattggtgttgtatacctagaaccaagaaacaggagaatccttactccaacagcatcggcgatatttattccgagaagaacataaggctcttctcctatgcggagttaagatctgccacagacaacttcaatcgcacaaacaaagtaggtcgaggtg

SEQ ID NO: 61653 - DNA, 141 bp, Setaria italica
  Peptide Sequence Number=SeqID_127627
agaggtggagatcataggatgattgtcaatgggactttcaacaatactgtgcttgtttcattgtacaccgtaatccacctttgtgaagaaatccaaccccattaccacagttcactttagaggatgatgcagtaccctagt

SEQ ID NO: 61654 - DNA, 329 bp, Setaria italica
  Peptide Sequence Number=SeqID_127628
aaaaatgtcctctatgatgcctcttgcaaaacaatgtgcattcatggagccatccgttgagacaattagtggagagaatgtattgacgtggccaacagtggtgtcacaagtggactgttataccatacaagctcaggaacttgaaaccattaccgctgcatttaaatttacatcaatgttgcaagctccgttacatggttttgcaattttggttcgatgttgaagttcaaacggaaccaagttacgtacaagaaaataccaaggaaagacaaagacaaaaccaaataccttagggtagggaaacaacccaaaaatagactaagacccga

SEQ ID NO: 61655 - DNA, 303 bp, Setaria italica
  Peptide Sequence Number=SeqID_127629
ttgaaaaattctggtttcatttttttttgcagcactagattcatttacactcttattaaaagaaaagggtctttatactaagattgataattcctttcgaccagtttggattgatagagttattttgatccgcaggggcttgctaaatggcaaactgctcggcagtaatgcacatctggaacgtcctcttcttgacgaacttgtgtttgagtagatacatagcagcatacgacttaagataattttgatagcaagcagttaaccatccactgcatatttgggccattggcttattcctccaat

SEQ ID NO: 61656 - DNA, 261 bp, Setaria italica
  Peptide Sequence Number=SeqID_127630
ctctaggaaaagaagggcctcttgttcatactggggcctgcatcgcttctcttcttggacagggtggatctgcaaaataccacttgagttctaggtgggtacggatttttgaaagcgatcgtgatcggcgggaccttctggagttgctgcagccttcagagctcctgttggtggggtactatttgccctggaggaagttacatcctggtggagaagtcatcttatgtggagggtattcttcacatctgccgttgtggtccg

SEQ ID NO: 61657 - DNA, 433 bp, Setaria italica
  misc_feature (19)..(19): n is a, c, g, or t
  Peptide Sequence Number=SeqID_127631
cggcggagcagaggctgcncaagaggcggcctcaccgccgagggcttccaccgctggctctgccacaacgccaacgccgccctcgacccgcgcagaggggtttaccaggacatgggctcgccgctgtcccactacttcatctacacgggccacaactcgtacctgacggggaaccagctgagcagcggctgcagcgagaggcccatcgtgaaggccctcctcgacggcgtcagggtcatcgagctcgacctctggcccaacgccgccaaggaccaggtcgaggtcctccacggcaggtgggctaatgcattttagtataaatgggccaaaacctggcccaacaacgtaagaaagaaaaggactgggctttgtctcgaatgcccaaatcaaaagttggctcaatatgctacgctgccctgctgctgctctgacg

SEQ ID NO: 61658 - DNA, 266 bp, Setaria italica
  Peptide Sequence Number=SeqID_127632
tgcaaaacacctagctgccataggctggccgataccatcaggtgttttagatcagcatttctgatttcggcctttctgtgccatttgtgttgttgttgcggtggtgtaatgtaagctaaaacatgcctaaacccgtgtgcttgcgcccggataggcccgcgatgtacaaaactttttcttcttgatacaaagatacgcagctctcctacatattcaacgaaaaaaaatgggaaacaacatcattaacttaaagaagacctcaatta

SEQ ID NO: 61659 - DNA, 260 bp, Setaria italica
  Peptide Sequence Number=SeqID_127633
tggtaatgttcagctcttgttaggaaaaaggatcgtagccttccttgccttactacctctgaagcttcacattatttaccagggaaaggctccacggcacggcttgagttcaaacaaaggctgtcaatagccattggggcagctaaaggtttaaaccatctgcacagtcgcgatgttcctttgattcacaaaaacttcaagacaaacaatgtgcttgttgatgaaaatttcattgcaaaggtggctgatgctggacttgt

SEQ ID NO: 61660 - DNA, 407 bp, Setaria italica
  Peptide Sequence Number=SeqID_127634
acaacaatacgtacttacgaagaagtgccgatggtccggcaagtgctctatttgtggtcaagatcacaaggacgtggtttgtaggaagaatcctgatgccaagcttcgttgggagctagtgtcttcttcagctcccaatggtgcattccatatgatggcggctgcatcttctactcctacacctacttgcaccgccaccgcagcagtacctacctgcccctacacctcagtacttgctagcgccaccggtgactccatcagctgcccctacacttcagactggggcttactggatgccccatgctactccttcagcacccatggttccatgggctcccactccgacgggtcctacttcgggtgcctcttcttcgtctggcgttccaggggcatatgttatgcctgcc

SEQ ID NO: 61661 - DNA, 247 bp, Setaria italica
  misc_feature (10)..(10): n is a, c, g, or t
  misc_feature (18)..(18): n is a, c, g, or t
  Peptide Sequence Number=SeqID_127635
ttttggtttnttcttttnttaattcttacttagttactttttcgttctttccttatttggtttagttagttaaagttcctttgggtagtttgagatgcagcttcaggtcacagctgatctaaataagtctttgagtggtgaccagtctcgtggtcagggtgacaagaaggtccattctggtggtcatgttcataggaagggcaagtttcagcgtcaccagccgtaccgtggtggttcagctcagcct

SEQ ID NO: 61662 - DNA, 345 bp, Setaria italica
  Peptide Sequence Number=SeqID_127636
tttttttcctttgttctttttttcctacttgttgtagtattagtattggcacctcactttgcctgagctgtgacatgactgttcatgttggtggcaaacgcacccatggaagatacctgctcctaaggcaaagtgttgaatttccaggagataaactaggccatatggatgatgtagctatgcaaagcaaggatcctgaaacccagatagatcagaagccacctcattcagtaacgaaggagcaaatggcaaaccaccataacggctctgatagatccagcatctgatggaaactgcgaagaccagggtaacattaattcgaaaatgatcgatcttaatatgcga

SEQ ID NO: 61663 - DNA, 245 bp, Setaria italica
  Peptide Sequence Number=SeqID_127637
tccatttgcacccttaaccctagagctgtttgagtggtacatctcgctcataatggaactctatgataaagacctcaacgttgaacaaactgggtggcctagacggtatttatggtcaagtctattctcgttgcgattgtcagaactcatgtcacttgtcacattgccgctatatagaagcgcaagtggctgacacggtggcacctgtgctttggagttgggaatgctgtatgccattagaaaaa

SEQ ID NO: 61664 - DNA, 128 bp, Setaria italica
  Peptide Sequence Number=SeqID_127638
ctttgtatgtgcctccatgcttcagtccagcgatcctgtcaacaagctctgcggggacaatctcgtggttgcgcatgcccatctccacggcggtgaggacgcggaagtcgtccttggtgaggtagcgc

SEQ ID NO: 61665 - DNA, 330 bp, Setaria italica
  misc_feature (300)..(300): n is a, c, g, or t
  Peptide Sequence Number=SeqID_127639
ttgttgtggatgatagagcaagatggtggtgtgatttatggatgggagaaggttggttaagtaagtttgatgcatgaagcatcagcattacatacctaccgtggtgtaatgtaatgcaatccttgttggagccgatcagtcgttgctttatcatccacacaaacacatgctctccacactccccccaccctagtccctacccatgcatgccaagctcaatgcacactaccaagtcccagattgaaggagaaccctctgatatcacacaccttagagcatgcccatgcaagaccaaaaacnctaccaagtcccagattgaaggagaacccc

SEQ ID NO: 61666 - DNA, 236 bp, Setaria italica
  Peptide Sequence Number=SeqID_127640
cccaataaatcatatgctggaagcatagcaatggcggtcgctggttttctggcttcagttgggtaatgtctgatgaattactgaattctcgattgcatctgcttcttttagaatcattcagtttcatgttgttcaggtacatgcattacttccacacttttggttttattgaggaaacatggtacatggcgttaggcttccttgtggtgtctattgctgctgcacttgttgaatca

SEQ ID NO: 61667 - DNA, 227 bp, Setaria italica
  Peptide Sequence Number=SeqID_127641
aatgaaaaatagcattttactttttgttgcagaaactcagcaggaaacttgttcatataagtgttgggctggtgttcttgctgttttggcctcttttcaggtaataacatcctcagatgcccaagttattttatatcatcattctagtgttcatattctgacattccacacagctctggaacatatgctcctttccttgctgacaactaagaacaaaccaaagggaa

SEQ ID NO: 61668 - DNA, 363 bp, Setaria italica
  Peptide Sequence Number=SeqID_127642
ttaacttaaagttaaggttcttaagttaggttcttactttttgtcttgtattgttaattgtcttcagacgccttacaaagcttggcatttctaagacagaccccaatgagcttacaccagatgaagttaggcgttttgcaaggcttgatattgaccctgagtccattacatggagacgggtgatggatgtcaatgaccgtttcctgaggaaaattactatcggacaaggccctgatgaaaaaggtatggtgagagaaacaggctttgacatatcagtagctagtgagataatggctgtgttagctcttacaacttcccttgccgacatgagagagaggcttaggaagaatggtgatagggaac

SEQ ID NO: 61669 - DNA, 379 bp, Setaria italica
  Peptide Sequence Number=SeqID_127643
tagtacgtaaccgtaccctaacgtaccttacggttagtaattacttagtcttgcgcggaccactcggaggtgccccagtagaaggcccatccctggtcgatgacccagttcatggcgcggacggtctcctcgatgggcgtggaggcgtcggggcggtggcagtagacgacgtcgacgtagtccatgtcgaggcgcttgagcgagcctttgagcccctcgacgatgtgcttccgcgagaggcccttgtcgttgggcccctggccgccccagaagagcttggtggagatgacgacgtcggagcggcgccagccgaggtcgcggatgggcctggcccatgatctcctcggcgcggccgttggcgtagacctcggcgttgtcg

SEQ ID NO: 61670 - DNA, 231 bp, Setaria italica
  Peptide Sequence Number=SeqID_127644
caccacatgggaaatgtttggaacacagcaccacgacagggacaccgagaatacacaaaagcatgcatatagttccatgacatcaaacgctggtgaggtagcatggcctaaactcaatcagatgaatgccgaatccctccctggcactcattctgcagtctgtaccacttcacctgtatgacttcggttgtcgttttcggccttgtcttttggtacctacttgtccttcta

SEQ ID NO: 61671 - DNA, 246 bp, Setaria italica
  Peptide Sequence Number=SeqID_127645
tttgtatcctttggaatctagcataaaggagaagattgaatccatagctaggtcttatggtgctagcggcgtcgaatactcagaacaggctgagaagcagattgagatgtacaccaagcaaggcttctccaacctccccatctgcatggcgaaaacccagtactcgttctcccacgttccccgggaaatgcagaatacacacaggacaaactgctgtctgtgaccacaaagtggtcaccacatggg

SEQ ID NO: 61672 - DNA, 170 bp, Setaria italica
  Peptide Sequence Number=SeqID_127646
tgggaagcctctagatcatgcatatgtgagcgaaaatgtggcccttgttgaagctggatgtgtcaatccactgtacctacactttatatccatgaacttctcagttccgatatcagcaccaaaacctgcctcagtaacaacaaagccacccttcccaaccaacttcaatt

SEQ ID NO: 61673 - DNA, 359 bp, Setaria italica
  Peptide Sequence Number=SeqID_127647
caatgcagctatggctgctggagcttttgatgctgtcgtctgcacacaccatgcccatggtggtagaggagcggttgaacttggactcgcagttcaacgagcatgtgaaagccaggcagagcctctgaaatttttgtatcctttggaatctagcataaaggagaagattgaatccatagctaggtcttatggtgctagcggcgtcgaaataactacaagaaacaaggactagaagaaagacaagaattagaagaatagtaacaaccaaagacaaaggacttactaccaaacctaccccaatactagacaataggacgaaaaacccaagtaactacgttactacccaacgttaccctaca

SEQ ID NO: 61674 - DNA, 414 bp, Setaria italica
  Peptide Sequence Number=SeqID_127648
actacgcaaaattcaacttagcatcgcaatatataaattctgactggcagagccttattattagtgcacaacaccggaactcgatactgtgtacgcagacttaacatgaccaaaagatcagtttcataattacttcaaacacaagacgatcagaagataccatatccagtatatacttacggatgtaagaagtgttcgaacagccatgagcgaagaacggacaccgcacgctcaggaagccccctttgaggtctccaaatgttgtgaggctgaccgaacgcattcacactgttccccttaggaggcctgaaccacctcccatcagtgcaaagtttgccatatcctccttgccgatgccatcattggcggcgaccttactagtgttgcgcagctggtttaggatcatgcccttca

SEQ ID NO: 61675 - DNA, 266 bp, Setaria italica
  Peptide Sequence Number=SeqID_127649
tgaagtttttcgctcttctactacatattctatcattcttaactttaattgtgtctaacaagtaacaacaccgtatcgttctaagttgggtgttgtgtatacgcattatttgactttttggcgtgcctgtgcatgtatggcagccggcgaagctacggcgtctacgcgagagcggtgaacgtccacgtctccgccaccgccgccgtggggaggacggcggacggcgcggcggatggcggcggcagggcgacgagcaacaaggacgt

SEQ ID NO: 61676 - DNA, 238 bp, Setaria italica
  Peptide Sequence Number=SeqID_127650
ggatcggcaacagcagagccccccacccgcctactccccgtccgcaccaccgcaaagcaccgcccgacaacgcgagtcatgtcgtcgtcttcctccgcttcggatgccgctgccgccgccgtgccgttcgagaagcccagggccgtggtcaagaagctcctcgccgagtcgcagcccgaggggcagggcgccaccgtccggaggagcatcggcaggcatgagctcaggaacctggacc

SEQ ID NO: 61677 - DNA, 215 bp, Setaria italica
  Peptide Sequence Number=SeqID_127651
agaattactgttcgtcttgagggatttttcgtttagtcatagccttgtttgtgtatttgtttcatttcaggctgacagcatttcaggtttccattccaatacacacattccagttgtcattggtgcacagatgaggtatgaagttaccggagatcctctttgcaaggccggagtatgcatcccttcaagccatcctatttgggccatttgttctt

SEQ ID NO: 61678 - DNA, 249 bp, Setaria italica
  Peptide Sequence Number=SeqID_127652
ggcccatctcttcgataagccatgctttcttgggctgcttgcagttcaggctgacagcatttcaggtttccattccaatacacacattccagttgtcattggtgcacagatgaggtatgaagttaccggagatcctctttgcaaggtgaattcattgcgaatcttattactacagagttgaagtattccattttcatcttgggagacttcttccatttggcgttcccgacgaggagttctttggtggtg

SEQ ID NO: 61679 - DNA, 172 bp, Setaria italica
  Peptide Sequence Number=SeqID_127653
ttatcactacgctttcccatcaggttaagaactgaagcaattaaagatgacaggccggagtatgcatcccttcaagccatttagatttgctcctgcaccatcagcaaatgtccatgatggaattctaacattcaatttggcagactgacttgtcgtctctgcagaaatggag

SEQ ID NO: 61680 - DNA, 347 bp, Setaria italica
  misc_feature (315)..(315): n is a, c, g, or t
  Peptide Sequence Number=SeqID_127654
tattacgttcctttgttagttctttgttaggttcttacctttcttaccttatttaggttattaactttggttagggtcgtaccgtcggtctaaactaaaagttttctaagtacaaggtagcgagatcagacagattttcccaaagttgcacctgtccacttgtagattctttaattttgatgatggggcaaagataagaaatttagctcggtaaaaacttgaagatgcgaccctgaaatcagttagctgcacacagtttgcaagaatatcatcgaccaatccaatatatgaagctccacccaatgagagtttggngagcctctttactgtcaggcagttccatgcac

SEQ ID NO: 61681 - DNA, 321 bp, Setaria italica
  Peptide Sequence Number=SeqID_127655
gcggggtccttttgaagaatttgctcggtggatatgtcctccataggataacttggtagggcgaccgcggcaaacaaaagtttcaagacaaggtagcgagatcagacagattttcccaaagttgcacctgtccacttgtagattctttaattttgatgatggggcaaagataagaaatttagctcggtaaaaacttgaagatgcgaccctgaaatcagttagctgcacacagtttgcaagaatatcattgaccaatccaatatatgaagcttcacccaatgagagtttggtgagcctctttgctgtcaggcagttccatgc

SEQ ID NO: 61682 - DNA, 241 bp, Setaria italica
  Peptide Sequence Number=SeqID_127656
tccgtcggtctaaactaaaagttttctaagtactaaggttagtcgtagtattctagacagattttcccaaagttgcacctgtccacttgtagattctttaattttgatgatggggcaaagataagaaatttagctcggtaaaaacttgaagatgcgaccctgaaatcagttagctgcacacagtttgcaagaatatcattgaccaatccaatatatgaagcttcacccaatgagagtttgg

SEQ ID NO: 61683 - DNA, 162 bp, Setaria italica
  Peptide Sequence Number=SeqID_127657
aggacttaacacaagtagcacaaagcttactactagcaaggggggacatctgaactgagtaatacgttgtaccttcaatctgctgtgcacatgcatttcagagatgtggatgttaagtcctcttatcacaagtagcacaaagcttactactagcaagggggg

SEQ ID NO: 61684 - DNA, 253 bp, Setaria italica
  Peptide Sequence Number=SeqID_127658
cctgcaatagagcaccagaatatggtctctcggacccaaaatttttggaaatgctggataattgtatgtcatagcattgttattgtttgtttggaagcaaagcttgcttgcttgcttgttacttctgcagaatgaattggtgctgcaatgatgtgttttagccgtcttaactttttgttccttttgtctgcttacagtacaagaacaggacactaaagggacacaatccttgtatgacaaatacggaaattta

SEQ ID NO: 61685 - DNA, 267 bp, Setaria italica
  Peptide Sequence Number=SeqID_127659
cggcagaggagagggaggccatgctggtagctagtggtaggtgggtggtgattatggaggagcctgattccgccgagattttgctgaaactgacaggcgctgtggtagacaatggaggcctgggatggttctttattcttatccataatcaagtgcccatcctacctgtaaagtcaattttctacaattttctgtgcgttttgtttcgtggggtaaaaaatagaaaacgttgtaaagcacaattggtttagaaaaaaaaaaaaaaaa

SEQ ID NO: 61686 - DNA, 263 bp, Setaria italica
  Peptide Sequence Number=SeqID_127660
aaggaaagtacttaaatacgccactaatctttcgatcgcgccgaggagggacaagtgaatacgacgtagaccaacaaccaaggaggagttcgactcccagatgaagaaggccgaggaggccaaaaagctggtggtcatcgacttcactgcctcctggtgtggtccttgccgcttcattgccccgatttttgctgaactcgccaagaagtttgctcacattgtcttcctcaaggtggacgttgacgagctgaaggaagttgcag

SEQ ID NO: 61687 - DNA, 259 bp, Setaria italica
  Peptide Sequence Number=SeqID_127661
cgttatactgctgctaactttgggcatttgtcaacttttttgcaccccaggtggtcatcgacttcactgcctcctggtgtggtccttgccgcttcattgccccgatttttgctgaactcgccaagaagtttgctcacattgtcttcctcaaggtggacgttgacgagctgaaggaagttgcagctgaatacaaggtcgaggcgatgccgaccttcctcctcatcaaggagggcaaggaagtccacaaaattgtcggcgc

SEQ ID NO: 61688 - DNA, 264 bp, Setaria italica
  Peptide Sequence Number=SeqID_127662
agcacggtgtaccaaatagttctccaaacacttgcccttgccctgtaacgtcgtactaacgctgtttccttgttcaacaggaagttgcagctgaatacaaggtcgaggcgatgccgaccttcctcctcatcaaggagggcaaggaagtccacaaaattgtcggcgccaggaaggaggagctccaggggaaggttgctgagctcggcgcccttaccacttccgcctaaggatatagcatcaccagtcatcgctcataagggccag

SEQ ID NO: 61689 - DNA, 252 bp, Setaria italica
  Peptide Sequence Number=SeqID_127663
tcaacagcgtgcagtattccagcaatgcgccaagcactcatgaccctccttggcagccaattctcacatgtgtgaacattctccattgtcgccggtatcttcattgcgggagtactcaggtaagtgcaatccttgcgaatcttcttaagtgggaactgtgatgtaggaacaaacgggcgggtgggcggccggcttcctagcagctgcgggcttcttctccttgggggccttcttctccttgggggccttctt

SEQ ID NO: 61690 - DNA, 385 bp, Setaria italica
  Peptide Sequence Number=SeqID_127664
taggtaaattacgggtacgtaaattacgtccccgggccaagtaccggaagccgaagcggaggcgacctggtgcggccgtgcggggaggcggaactgactgcgctgttactgttctacttcgcccgaattgttggccaaggttatgggttctgtgacgatggaggcatggtggtgtgagtggtagcgagagtagaggaaatggtggtgcagggcccgatggaaccagtagtagaggaactcaacaggccccatgtgaagaagcacagtaatgatagccccgtcagttctccagaccggaaggagcctgacattgggaatcattgcataggccagatagaactcgagcccattgaagatgatctggtcatccctgtacagaatggta

SEQ ID NO: 61691 - DNA, 409 bp, Setaria italica
  Peptide Sequence Number=SeqID_127665
aatgtctcctgcttggctttcgtcatcatgtcttttaagaggcttatgtttccttttgaggtctttcacttgttgttcaagcattatgtgctcatcattcgggtgcttgcttgccacgaccagcttctttgcttgttctaaaagctcagaaaatgtcgtctctctcgaagacagaaattcactgtaaactttctgcatcctctcccatatcacctcactgtttatttcctctggattaggcaccgcaatgggagctgattccttaatggcttcatggtgttgaactctctcagcaatagattgtgtaggatcggcttctttgggaggatcatccctaacacgccttttccattgaagaggcaggtgagggtcgagttgatcctggtgactgaggattcagggccactgc

SEQ ID NO: 61692 - DNA, 382 bp, Setaria italica
  misc_feature (284)..(284): n is a, c, g, or t
  Peptide Sequence Number=SeqID_127666
aactagaactagaacaagacaagaataggtaaccttacttacaagttttttgtaatgcaactttcttcaggagccaaagacagtggaatattgttatgtgtttcggtatctgatgaacatgtgttggcacttaagttctgaatagcatctccaaatgaatcaatatcatcattaacaatagcctttgcagcagaccagcactctatagcgcttgagagagtgcacttacatgactcatcaagttcctcagtacaaatacaatggttcgtgaagcactgctttcngaattgtcggttaggaagccaatatctacaattgcatttctccgaggacaaattgaaactgaacaattgctggttgacatatctgacattgatgcaat

SEQ ID NO: 61693 - DNA, 409 bp, Setaria italica
  Peptide Sequence Number=SeqID_127667
tacccttccgaacttcgggctcgcccaaggtgtgcgtgcagacgagcacctccgcggggcttgagcagatcctgccctggctcttctatcacaaggtcgttggtgtcgcgcagttcctgctcttcgtggaggggagggcggccaaacccaatgtcgccggagtcctcgagtctattcctggcgtaaaagtggtgtacagaacaaaggatcttgaggagcagcaggcgaggagtcgaatctggaatgagacttggctttcaggctttttctacaaaccttgcaactatgaactctttgtgaagcaatcactcaacatggagatggctattgtaatggctcgggattatggcatggattggatcattcatcttgacactgatgaactactataccctggtggagcttctga

SEQ ID NO: 61694 - DNA, 353 bp, Setaria italica
  misc_feature (135)..(135): n is a, c, g, or t
  Peptide Sequence Number=SeqID_127668
gtgaccggagacggtaccttcatctttatatttattatagatgtttctgagtagagttattcttacaatatttttggcacattactaacagtgagatcaagttagaggaggctgcagttctgcactatacatacncaaattttcagatttgacatctagacgtgatcgctgtggatgcaagcctacaaaagaagatgttaaaagatgttttatgctagactttgacagagcagtaagtagagatgcttctataagtaattttgaatctcagaagaaatatacgtagtggttggatgataacttaattctatttgatatcaataagtgcctttactgttaggaattatagcctt

SEQ ID NO: 61695 - DNA, 444 bp, Setaria italica
  Peptide Sequence Number=SeqID_127669
atacttattttggcatgtataaggaagcaacacgaggaaatcctaattattttctcacttatggtaaatggaaaatctgctgcacgaattcaagatcatctccgtcctaatggcgcacacagatggcataactatgcaaagagcccaaaacgtgatcgctgtggatgcaagcctacaaaagaagatgttaaaagatgttttatgctagactttgacagagcagcttttataattgcatcaactgctagtgaagaggaaatgcttcgctggtacaacgagcgggtcgtgtggaatgataagcagctgaatctgaagcttatgaggaaaggagtgctaactcgcatttacacccctatggctattgttcaaggtctgcgggaatctggtgtcttcacttcggtcattgcaggtggccaagctgctgtaaacgagaaactctcaccg

SEQ ID NO: 61696 - DNA, 378 bp, Setaria italica
  Peptide Sequence Number=SeqID_127670
tccattcagtgaagtatctatgttcaagaagaattatgatcatctcccgaaaagatacttattttggcatgtataaggaagcaacacgaggaaatcctaattattttctcacttatggtaatggaaaatctgctgcacgaattcaagatcatctccgtcctaatggcgcacacagatggcataactatgcaaagagcccaaagtaaagatctttcgctaatatatatttttacattataacatgtattcatcattactacctctggtcacaaatacttatgcagtaagctgtaatttgaaccatccactatttgacattgagaacatgtaaattttttcttgttattattttgttccttaaaagtttttcttaatttt

SEQ ID NO: 61697 - DNA, 393 bp, Setaria italica
  Peptide Sequence Number=SeqID_127671
ttccccaatcgccacgcggtggcaggagatagatctaccatttacaggaaggtgccaaagcttgcaatccctatggctttgtcagcagctgcaccgggcaaaggaggtgtgcttgatcggccagttgagaaaactactcctggtcgtcagtccgaatttgatgtgaagaaaaagcgcaaaatgacgcccccataccgcgtgatcctgcacaacgacaactacaacaggcgcgagtacgtcgtcaaggtcctgatgaaagtgatcccaggtatgacggtggacaacgcggtgaacatcatgcaggaggcgcacgtagaaacgggactagtacggtaggtaagaaataacgtaactaagaactaacccaaagtaacggaaaggaaccgaaaggaa

SEQ ID NO: 61698 - DNA, 287 bp, Setaria italica
  Peptide Sequence Number=SeqID_127672
cctaaagaaaacaaaataacttaaaccaaaataaagggaaaattaaagaacaaagaaaaggttagaactagaagacaacaaataggaagcagcactgaactgctattcaaggttgctagttgtccttaatggttttagaattgtgttttccagttgtcaaaattatgctgttggattgtattttgatccctatttttcttcatgcccatctactttatatgcattaaacttcttcataccatcatattaacttgttaaaacatttgtgcattttctagttatctgtt

SEQ ID NO: 61699 - DNA, 179 bp, Setaria italica
  Peptide Sequence Number=SeqID_127673
ttgttattgtcgtttcatttatcttgccatctacttatatgaattgagtcatcatagttcactgctgctttgctttctggttatgtttctgtagccgtaaaggaagggtcaaagaggctgtggagaaatcacaagacaggtcaagaagccgtagtccaaggccaagggcacagagggac

SEQ ID NO: 61700 - DNA, 368 bp, Setaria italica
  Peptide Sequence Number=SeqID_127674
agatcgaatgatcgagactgagtgagtatgcttcaacccttctcccgatgaggattcaggctgacaccagaatatagtagatccgaagcatatgctacaacacacctatgcagagcttgatcgtctgaaagctttcctcgagctctaaaccagaatttaagcttggtttatattgagacgctgaatcttcacagaatctcatttctatgggccaaggcgtgaacttctttttagctgccaagttcctatattgcctgcagatgactacacagtcaagaatctgcagtgcatcaagtaataaatagatgaacgataagcaaactcgcttagaaagtatatttgatattgtaaatgttcatttaacagaa

SEQ ID NO: 61701 - DNA, 251 bp, Setaria italica
  Peptide Sequence Number=SeqID_127675
agagaagccaagtgacattattttcccaaccctcactcatattcaattaggcctgtttacacttcgagaagctacaaatatccagctcataacaatcggtatcacctttttccttctatataccgcctaacattgtacattttcttagactggaccatgttgaaggataccatgaactctcagcgaagacaaaaaattttcttctcaaccgctgtcggcatctgggatgctgacttctacgtcaaggtcga

SEQ ID NO: 61702 - DNA, 270 bp, Setaria italica
  Peptide Sequence Number=SeqID_127676
aggagcccgggaggcactgcaggaggggcacctgccccaggaactcggtcactgcacaccaatggcaaccaggccgcagattagccagaattggtcccaaattcggcgggctctgcgccggcgctgatttaccttcctcacgatccatcgccggacggcgggagcagcggcgggggcaccggagcagcgagggcggctgcggtcgagggggcggaggaggacgccgaacaaaaaaaaatctctggatttaaaagcgcggtgaagcgagac

SEQ ID NO: 61703 - DNA, 255 bp, Setaria italica
  Peptide Sequence Number=SeqID_127677
ggccaaggcgtgaacttctttttagctgccaagttcctatattgcctgcagatgactacacagtcaagaatgatgggaagcgtgggtcagtaagccgtctttctcgtatctcctccagattaaggagctgttctggaggaggaacattaggcatggttgcagcctgatgctgaaaacctacttcttccttctggaaagaagcaatcaaagtgaatataactaggcctttctgctttgcctccacttttctggttg

SEQ ID NO: 61704 - DNA, 245 bp, Setaria italica
  Peptide Sequence Number=SeqID_127678
ggacgcccaacatcatgattttcttagactggtgaggatttactcttcaattactagtgaattcataattttctggtgctagccctgactattttactgcatgtggtttatttaatcatcacgcagggaccatgttgaaggataccatgaactctcagcgaagacaaaaattttcttctcaaccgcgtgtcggcatctgggatgctgacttctacgtcaaggtcgatgacgatgtgcatgtgtaa

SEQ ID NO: 61705 - DNA, 224 bp, Setaria italica
  Peptide Sequence Number=SeqID_127679
tggtgggcctgcataggcaaaccatgagagcttaccaactatgctacatatttacgggcaaaaggagggtatgtgcatagttggtaagctctcatggtgggcctgcataggcaaacacccctggtgaactcgacaagaccaaggatcatgccccatcgaatataatctggaactgcagcaaacaggacgttgccaatgttgctttggcttgccggttctatggc

SEQ ID NO: 61706 - DNA, 240 bp, Setaria italica
  Peptide Sequence Number=SeqID_127680
ttggagccatttaggcacaagtgcaccttattctccaggaataagaacaatgaagagtacgtagctgaataattctagttcgcagatttgctcatccttttgaaaatagaagtagcagttcgttcgtttgtgttgctaacagacgcacaactgcattcaccttccctgcagatgtgtgatatgcaaaacgacttataagagccgtcagaagatgataagactgccctgcagccattgtta

SEQ ID NO: 61707 - DNA, 250 bp, Setaria italica
  misc_feature (169)..(169): n is a, c, g, or t
  Peptide Sequence Number=SeqID_127681
agtagaattaatagttaaggactaagttagggttaatagtagacttaacgaaaactgtttagttggtttaacacgcactgttaactgtacctggtcttgtttgatgacgggtcgatgaatccacgagttgataaatgtgtgggtacagtacttcggttgccagttttcngtctatgcaaccaagcaggattccttttccatttttctggagaaattaaagcaggactagttcaatgtaatggtatgttta

SEQ ID NO: 61708 - DNA, 178 bp, Setaria italica
  Peptide Sequence Number=SeqID_127682
tggtttacacgcactgttaactgtacctggtcttgtttgatgacgggtcgatgaatccacgagttgataaatgtgtgggtacagtacttcggttgccagttttctgtctatgcaaccaactagcctaacataatcacatagcatggcccatatgaagcccaacgtgaacgatgaagct

SEQ ID NO: 61709 - DNA, 314 bp, Setaria italica
  misc_feature (61)..(61): n is a, c, g, or t
  misc_feature (70)..(70): n is a, c, g, or t
  Peptide Sequence Number=SeqID_127683
tccttacttcccttcgttgttgtcctttggtcttagttcttctttttttagtttttttttnttttttttntttttttttttaggttatatcatatcaacttgttagcacaggaaccatactacttcctccgtcccaaattgtcgttttagcatttctacatcaattcctgggcaaccccaggctcctagagggtgtagtgttgtagacctttaacatgatcctaagatcaatttgttgattcaagttccatccaaccgagcaaagagccaccacttccattctgatgtttggcagatgcactgctgacctgaat

SEQ ID NO: 61710 - DNA, 234 bp, Setaria italica
  Peptide Sequence Number=SeqID_127684
agagaactaactcaaagaattggtgatgccagtcgtataagaagctactgaatgaatatatgtacagtcagtattctatttaacgtgcagtgtgcttaactttctagatcatgatgtcagcggcagtgtatataagcaaagagccaccacttccattctgatgtttggcagatgcactgctgacctgaatctacaaatttatgggcataagcccaagtatgtacagaacctaat

SEQ ID NO: 61711 - DNA, 316 bp, Setaria italica
  Peptide Sequence Number=SeqID_127685
gaaccccatttgttgcgcatcctaaggttgcacaagagcagattggcaagggaggctacttagccggaacccgatattcatgtgccatggttagttcttacaatccatcatttgcccaatattctaccacttgcatcaaactgtatctccatgaattttccaaatcagctgcaaccaagcgttttccgaattggctgcaaccaagaaagcgttcaggttacaatatggcaaaagaaaggcggtcaaaaaggttaggttgtacatattaaagaagaaattatgtattatttggatgaacacacaacgaaccttggca

SEQ ID NO: 61712 - DNA, 437 bp, Setaria italica
  Peptide Sequence Number=SeqID_127686
agaaagagaagatagcctgtggtttgctgaacccatttgttgcgcatcctaaggttgcacaagagcagattggcaagggaggctacttagccggaacccgatattcatgtgccatggttagttcttacaatccatcatttgcccaatattctaccacttgcatcaaactgtatctccattcgccaccacaacatgtgtgagaaagtatttaattgatgatcaaaatagttctcccaatacattgtttcatttttgggcaacataagcaagaaagtaatcactatccactatttctttgacacctcatcaaatactgacatgacaccctataatgaaatgaaacccattatattggcactagcccttaggattctttttctcctgtgatgtatcatgtatgcattcgtcccaagtatattaattagaaatttttgcaa

SEQ ID NO: 61713 - DNA, 377 bp, Setaria italica
  Peptide Sequence Number=SeqID_127687
cctcaagtagaagaatctgctgatgtaaacaaatcttctccttcagaaccattagacctggcaaagtatggttcagctgcagaattggagactcttggcttggagaagctcaagatggagctacaaactcgcggactaaagtgtggtggaactttgcaggagcgagctgcacgacttttccttctgaagacaaccccactggacaagctaccaaagaagctgctcgcaaagcctgccgctggggggaaagtgagcagtagtagcaaacatataacaagttaaaggcttatgatacattacaacagactccagtatcttcaaatacaacttgaacatttacatttttttgttttcctttaattcgtttgaactttgtt

SEQ ID NO: 61714 - DNA, 391 bp, Setaria italica
  Peptide Sequence Number=SeqID_127688
tcttaggatactgtgctgaagggaaccaaaggatgcttgtgtatgagtatgtaaataacggaaacttggagcaatggctccatggtgatgttggtcctgtgagccctctgacatgggatatcagaatgaagattattctgggaacagcaaaaggcttaatgtatttgcacgagggacttgaaccaaaggtggttcaccgtgatgtcaagtcaagcaatattctccttgacaagcgttggaatgctaaactttctgattttgggctagcaaagcttttgggttcagagaggagttacgtgacaaccagggtcatggggacatttgggttagacatcaactctctacctataaaattggatcacaagaaagaatacaacaaagaaatagacga

SEQ ID NO: 61715 - DNA, 314 bp, Setaria italica
  Peptide Sequence Number=SeqID_127689
caataggaaaataaataatctaggccgggttcctgttgattacaacaggccaccaggggaggttaatcttgttgaatggctgaagacaatggtcagcaaccgaaattccgaaggggttttggacccgaagatgactgagaagcctacttctagggcattgaagaaggctttgttagtggcttttcctgacagctaggtctcctgagttctccatttgaaaggctctcctcctttcggtgtgtcttttggcgtgttgttcccactgctatcgcccggatcacttgcaggtgtttccactgatctcgcttgagttg

SEQ ID NO: 61716 - DNA, 346 bp, Setaria italica
  Peptide Sequence Number=SeqID_127690
ccaaagccttcaagaaccgccaagtagttctttcctctaataatttcagattcttgtaaaaagtaaagcgatatttttccaaaactatacagacttagattgcaactttttgctactctcttggcaggaacgtcgcggtggcaaggctccaactcaagcgagatcagtggaaacacctgcaagtgatccgggcgatagcagtgggaacaacacgccaaaagacacaccgaaaggaggagagcctttcaaatggagaactcaggagacctagctgtcaggaaaagcggtgattgttccgagtcctcgtgcccgaccgttaagttcttgttaacgtccgtcgtaagta

SEQ ID NO: 61717 - DNA, 373 bp, Setaria italica
  Peptide Sequence Number=SeqID_127691
catgaatgttatctcatcaatagtttttggaaaactatactcactcgaaacatatagcaagttcagacattatcgctgaattaagttcttctgtaaccatgagcaggtcaggaagaacaagctcatctaccaggacaggccccggctgaagtctgcgctggagctgctcaggaccagcatggatgtggaagataatctgtcagaggtcctctaacaacctctatctgctagcaatatacagaatgtgttagctttctcaatccagatttttataatttgtaatttatggatatgtttctgccaggtgagggtgccatttctggtcctgcacggcgaggccgacacggtgaccgacccggaggtcagccgcacc

SEQ ID NO: 61718 - DNA, 244 bp, Setaria italica
  Peptide Sequence Number=SeqID_127692
taagctgcaagctaagtttggtgcaacattgaataaattgatggggtagttaccatatagtatttcagtaatgttggtctaacagacctgttctcagagcatagttgtgacaatgacatgaaatgttttgtctccaggaaatggcttgaagaacgaacaattatcaatgtgatagctttgttagatttacatctctccagctggtgctgcgataaactggagaaaaggagcagttgttgacctt

SEQ ID NO: 61719 - DNA, 234 bp, Setaria italica
  Peptide Sequence Number=SeqID_127693
tgtgatattgtcgccatcaaacaaattgttaagtgctattgctgtcaaataggaaggtgatgtacaatataatttccttgtcaagaaacttgcttactttactaatgtagttcgcccttgtgaaaacatcatgttctgcaaggtgagggatgagcttgagcatttgctggatgatgaaatggatatggctgaaatgtacttgacagagaagcttactcaacaagaaatcagtga

SEQ ID NO: 61720 - DNA, 208 bp, Setaria italica
  Peptide Sequence Number=SeqID_127694
cgactcagtgtgagtagtgtactgcgcataaagtttacacgtgctgtttctttgcaaatcctcttggagatatatatgtacatggtactattgtcttgtttagatttgtttatatgactgatcgcaagacttattatctctgaacaggtcctggaagtggtcagcaatccgtatgcacagaagaaacgctgcctgcgaagaacattga

SEQ ID NO: 61721 - DNA, 281 bp, Setaria italica
  misc_feature (246)..(246): n is a, c, g, or t
  Peptide Sequence Number=SeqID_127695
accaagaagtacttacgaccctccaagagaaatcgtcagaaatttcacgcatgtcagtttccaaggagatgtgttcgtcatttgttgactcctccataatatgcacttctgaagccatttttgtactagatcgaccaggacatgggcaaaccatttgaaaaccagctctgcctatggaatgagtcgctgatgcgcaaaatgatagaccgtaaatgtgtatcttctcccaccgctgtggaaaaaggnggcagatatctccctcctgcacatgattgtcacgc

SEQ ID NO: 61722 - DNA, 211 bp, Setaria italica
  Peptide Sequence Number=SeqID_127696
ctccagagaatcgtcagaaatttcacgcatgtcagtttccaaggagatgtgttcgtcatttgttgactcctccataatatgcacttctgaagccatttttgtactagatcgaccaggacatggtgtttgtcaacgtctatttgaacggcgaggatttcgcattacaagctgtgtcagcagcctgcatgtatttttggttgccagagtcttt

SEQ ID NO: 61723 - DNA, 370 bp, Setaria italica
  misc_feature (336)..(336): n is a, c, g, or t
  Peptide Sequence Number=SeqID_127697
tgtttcttccttgtattcctattgttgtcgtagtagtcttagttgtattgatcatcaaatgaatggatacaagacaacacacagttcaagaaatgctgaaagtatttcagagatgttgaacctcggcacaaggatgtacccacctcataacagctttccagagcaactggaaaccatgagcaagtaccatgatggcataaagctggaggcacctcctgccaagcctgttactgaagttggagaagctcgacaatttgcttacacctacgcaaggagaaagccgcacaagaggtcaactatggtaggaagatgcagtgtcaccaagtgtgctaaacngcatgaccaacatgaaagcgaaggcaatcaaact

SEQ ID NO: 61724 - DNA, 369 bp, Setaria italica
  Peptide Sequence Number=SeqID_127698
tgggtttggtctaactaaaggttattctaaagttttggtcttctacctagtattccttggtaactaaggtattggtattgtactaggtccctattcgtagttgtcccaattccccagtaattattctttcgttagggccggaacaaaactttcccaacctgatagcccttcatcattctgtgcttcatgtaaagcctatagtcatgcccaccaaaatccctgtagatctctactagagatccattgctgcaggccaaaagccccttctggctaaaatccaaggattgggcacgtgctgcataagaatttacaacctcatactttctcaggtcccagatttttatcttcccctgtcaacacctgccgttg

SEQ ID NO: 61725 - DNA, 239 bp, Setaria italica
  Peptide Sequence Number=SeqID_127699
caaacggcaccatgcgaactaacgcacaaatcggatcaccgttatgatcatgagtcgaactagatggcgaggtcagggaaattgaagcagatcagataagagtagtagaggatcgcctcacatggggtggggatgctggtgacgacggggaagacgtgcacgaggtagacgaagctccggggcctggtgagccggcccagccgcccacgacagcgccgccatgctcggacccgcccttg

SEQ ID NO: 61726 - DNA, 248 bp, Setaria italica
  Peptide Sequence Number=SeqID_127700
ttttcctctcttcagcttcctgtgttcattccaacaaatttagcataaatttgcattagcggctggcaaacaattttatatttctgtcaattccatgctgcatggtatagaccttaccgcacattggacttcgaaattcccagcactaactgttttatgtgcaggacaggaacaagttcaatgattgcgttagcgatttgatcgctctcgatgaggtatacatcgacggtaacctgaatgtataaaag

SEQ ID NO: 61727 - DNA, 353 bp, Setaria italica
  Peptide Sequence Number=SeqID_127701
ggccttccagtacgccacgcagttctccgtcaccttgtccgagtactgctcgcccgtcagcggcaggatcatcgtcacccgcgtgaacttctcgaagtcgcccgtgacgacgtcgcggaagaaggcgacgtcggaggcgagctcgtcggcggacttccctgcccacttcttcgccagcgcggacacggccgcgtcctcctctaagtacacgccgatggcggtgaacttgatgaagttgccgccgatctccaaccctcgcacaccgtcagggagcgcgacgcacctgcgccggcgaggaagtgcgggcgggcggagcccggcgggcgtgccaccggagggaagacgacgccgtt

SEQ ID NO: 61728 - DNA, 265 bp, Setaria italica
  misc_feature (2)..(2): n is a, c, g, or t
  misc_feature (4)..(4): n is a, c, g, or t
  misc_feature (6)..(6): n is a, c, g, or t
  misc_feature (8)..(8): n is a, c, g, or t
  misc_feature (10)..(10): n is a, c, g, or t
  misc_feature (12)..(12): n is a, c, g, or t
  misc_feature (16)..(16): n is a, c, g, or t
  Peptide Sequence Number=SeqID_127702
gngngngngngngggnggggggggatgggggatcagaagttcagaacaccgaccacaaacaaagacgacaggtgccggcgtgcggcatctcccagccgatcgcctggttcttttttcttctcgcgcgctgtccgctcacgcggagaccgggacgggctccgcctgctgcgcgtcgcgatcgagaacaggcccctctgcgaggccgtcctggagtccatcatcgggaagcacggcgtctcgccggccgcgaagctgagcatcgcgg

SEQ ID NO: 61729 - DNA, 263 bp, Setaria italica
  misc_feature (5)..(5): n is a, c, g, or t
  misc_feature (38)..(38): n is a, c, g, or t
  Peptide Sequence Number=SeqID_127703
gaccncaacaaagacgacaggtgccggcgtgcggcatntcccagccgatcgcctggtcttttttcttctcgcgcgctgtccgctcacgcggagaccgggacgggctccgcctgctgcgcgtcgccggccgggctggtctcggccccattgaggagctccgacaccctggccgcgatgctcagcttcgcggccggcgagacgccgccctcccgttcgtctctctcgccgcctccgcgccgccgcctcctcctcccctcccgcgc

SEQ ID NO: 61730 - DNA, 221 bp, Setaria italica
  Peptide Sequence Number=SeqID_127704
cagctgcacagaatgaaaagaagttcagttccatatggttttcattggttgcctcgtttgaccaagatggaaatgtacccgcttcatctatccaaaagtaccttatgcagaagctcagtcttccaagtgagtggagataaagtgttgcgagcagccagtgaaccctatgcaacctctgcgcaatttagtagagctgtggctgaagggaaaagcgacacagg

SEQ ID NO: 61731 - DNA, 513 bp, Setaria italica
  misc_feature (251)..(251): n is a, c, g, or t
  Peptide Sequence Number=SeqID_127705
cacttcctgtacagaagccaccatcagtggctaatgcatttcccattccagcagtgatgatatcaattttttcaataggaactccataatgtcagcaaggccacgcccagacttgccaagcaccccaaaagaatgactctcctccagaataacacggaaccgatatttctctttcaacttgacaatctcatccaaggggcaatttggccagaattctggtaaatggattctacaacaatgtagcgtctaancttttcagcacgtttatttccacgagaagtttttccaaagcgcttgcaagtgaagccatatcgttgtgcttgaagtacaccactgtacttcttgataggtggagaccattttgcactgcccaatgaactacctcggtttaattggcaatgagaagattattgattcttgcgttggttcactggagaaatatggtgttgggtcttgtggtccacgtggcttttatggaacaattgaattagttacctaacctttagtaactaa

SEQ ID NO: 61732 - DNA, 286 bp, Setaria italica
  Peptide Sequence Number=SeqID_127706
acttccataacgatgtatatggtcaattgctgattgtacatcatcaacaaattcaactgtgcaagccatagagctgtactcatgatggaatgaatctgcttttggaatggacagtacttcatgcgcaacaggccctccatagatagcaactccttctgttttgagtgatagcagtatgtcatcaagacctggggactttataagatctttatgaacaagtaaatagtttccaattagacaattagacaaggactagactagggtaaatacaaattttaggacaata

SEQ ID NO: 61733 - DNA, 193 bp, Setaria italica
  Peptide Sequence Number=SeqID_127707
cctatcccctcgtgtgccttgccttcccctcgttgcgtgtctcagcttcttgatatttcatcattgttactgtcaggcaattcttttgtgttgaatcttttctgggtggggtaatttgtgaatgcatcggtcgcttggaggaattggaagttgcatacatggttttgatgtagagtgtatattgtcatgtact

SEQ ID NO: 61734 - DNA, 293 bp, Setaria italica
  Peptide Sequence Number=SeqID_127708
gaagctaaagttgtacatgagcaactttgctcaatggtggagaggtatgttcttgactggaaatctgccaactaaggtggatcccatttgcggtttataataaccattctgcttgcaggtcggatggagaaattcttggccctcagaatcagtatcttctgaaaattatttcaatatttgcagaggttttgtgccctgggacagagcttgctacagatgaaacaaaaaacaagatggtcaatatcttgaggcgattccagcagactttacctccagattttcttcgtcgttct

SEQ ID NO: 61735 - DNA, 248 bp, Setaria italica
  Peptide Sequence Number=SeqID_127709
tatcatgttcccttgacccattctcccgttttacttcggtctcattggacactgatataatgctggacctcttcatttaggctgctgtctatggtgtgggtgtatgtgctgagtttggtggtcatgtttttcgccctctagttggagaggccctatcaaagttaaacaatgttatccgacatcctagaagcacgacttccagacaatattatggcctatgacaatgctgtttcggcacttggaaaaat

SEQ ID NO: 61736 - DNA, 233 bp, Setaria italica
  Peptide Sequence Number=SeqID_127710
tagacaaactcaaccgccaagtgcctggtcccatcttccagctgtgcagcctcagcaacttgtgtgctggaagagaaagcaacagcttgcaacatgctgtgctgttatgctgatgagcttaaggagggtttcttcccatggattgatcaggttgcccccacgttggtccctctgctgaagttttacttccatgaagaagtcagaagagctgctgttgcggcaatgccgaacgt

SEQ ID NO: 61737 - DNA, 281 bp, Setaria italica
  Peptide Sequence Number=SeqID_127711
ttaacgttttacggttcttaaaagttttggttctttgttttagttaagtaaaggtactaggtcttctaaggtccgttgtacgtagttctttattgttaaacagttgtctgactacgtaattccagctcttgttgaagcacttcacaaggagccagaaacagaaatgtgctcatccatgctggactcattaaatgagtgcatgcagctttctggtcgtttgctcgatgaaacccaagtacgagctatttcggatgagattaaaaatgtcattatagccagcg

SEQ ID NO: 61738 - DNA, 310 bp, Setaria italica
  misc_feature (108)..(108): n is a, c, g, or t
  Peptide Sequence Number=SeqID_127712
gagcatcgtcagaccctaaggctgtcataacaacctatgaaggaaaacataaccatgaaccaccggttgtaggggcagcaaccagaatgcaggagtgtcacaacaganagggcagaacagcatatctagtaatcaagcttcactttcgatagcagactacagcatcactaaccagaggccaattgggctattacaattcaagagtgaacaatagtaactgccattttgactctgttcggaaccttgctgtgttatttggaatagttacttttaggaaaaataatacaaggtagacctagacaaattacga

SEQ ID NO: 61739 - DNA, 241 bp, Setaria italica
  Peptide Sequence Number=SeqID_127713
taacttaggtaattactaaccgttactaaaacgttcgttgggttcagtactggccacattaccatcaaggatcttgtaactaccgggctaccccctgaagattgtcggaatcgcatctctgacaatcttgctgccaagtttaggtaacagctgcacagatcaccattaagaactattcaggaaaattcaggatatgtttcttagttctgatgctcttcttacttatgtgattatgcaggat

SEQ ID NO: 61740 - DNA, 359 bp, Setaria italica
  Peptide Sequence Number=SeqID_127714
aagttaaccttggtccgttcgcgtcggggccggcggcgtgcgcactcatctgcgctctggggaactcggcgggcacccggcggcgcgcaacatgctcggcgtgctggcctgggtgttcctctggtggatcacggacgccgtgccgctcgccgtcgcctccatggcgccgctgttcctgttcccggcgttcggcatctcgtccgccgacgacatcgccaaggcatacatggacgacgtcatcgccctcgtcctcggcagcttcatcctcgcgctcgccgtcgagcactacagcatccaccgacgccccgccctcaacgtacgcgccgagaccaaacgtttcgagctagcaacttgtacag

SEQ ID NO: 61741 - DNA, 389 bp, Setaria italica
  misc_feature (229)..(229): n is a, c, g, or t
  Peptide Sequence Number=SeqID_127715
tgtcccttgttctttccacttgggcgagaagctgatggactggaacaagtgcaggaagctccagtgggacataagcctgcgccgaggaggaggattatgtcccactggagcttcctgctcggcgcaggcttcgccattgctgacggcttcagctcaagtggcctgactgatatcctctctgacgggctcaggttcctgaaggacgcgcagacggtggtcatcgttcctntggcctgcgttgttgctgctgtcatcacagagttcacgtctgatgatgcaaccacgacgctggtgttgcctctgttcgcggagttggcgaagtctatcaatgtgcacccggtgttgcttatgatttctggagcagttgggctcagctatcatacttgttg

SEQ ID NO: 61742 - DNA, 404 bp, Setaria italica
  Peptide Sequence Number=SeqID_127716
atcgagccactaccaaatccaccgtcgcctcgccctcaacatgaaacgtgaaactgcagatcacggcgctgttctgcggggacccggtgcggccgccgctgctgctgctggggatcaccggcaccaccttcttcgtcagcatgtggatccacaacacggcgtgcacggtcatgatgatgccggtggcgacgggggatcctgcagaggctgccgcggggcggcgccggggcgccccggggtgccaggaggaggaggaggaggaggtgcggcggttctccaaggcggtggtgctcggcgtggtgtacgcgtcggcgatcggggggatggcgacgctgacgggcaccggcgtcaacatcatcctggtcgggatgtggtccacatacttcccggaccaggagcccatc

SEQ ID NO: 61743 - DNA, 195 bp, Setaria italica
  Peptide Sequence Number=SeqID_127717
tactggccacattaccatcaaggatcttgtaactaccgggctacccctgaagattgtcggaatcgcatctctgacaatcttgctgccaagtttaggatcacagatttttggcacaaacagcaggtcctaggagcacgaatgcaaattgatagacttcgccaactccgcgaacagaggcaacaccagcgttcgttg

SEQ ID NO: 61744 - DNA, 231 bp, Setaria italica
  Peptide Sequence Number=SeqID_127718
tattccactgtgaatttccggtggtaaataacctctggttggaaatttatatagtcaaataattgaaaggaaataagagaatgtgatatactccttcctgtcaatatctcttttattataacaccgagactatatatatccgacttgaacgtgattattccactgtgaatttccggtggtaaataacctccctcagaaagagctttcaagaggcttagtaagcttacagtg

SEQ ID NO: 61745 - DNA, 473 bp, Setaria italica
  Peptide Sequence Number=SeqID_127719
tgagctttgttttgcttcatttcctcaatatcctatttaaattttgttgcagataggagctgatggttccaagtccaatgttagacagattgcaggcataaaaacaactgggtggaattatccgcaaagtgcaattatctgtacagtggagcatgttgtggaaaatgattgtgcatggcagagatttctcccttctggtccaatcgcactgcttccgataggcaacaacttcagcaacattgtatggacaatgagcccagaggaatcacttcgacataagtcaatgagccctgaagagtttgtgaagtcagtgaaccacgcattggattttggctatggtccgcatcctcgctctagtgctcttgaccattacatggaaaagttctttctggcattgggaatactgcagcatctacaaaagaatgtttgaagtaccaccaaagcaactggtgtagtgtctgagagaatggcta

SEQ ID NO: 61746 - DNA, 337 bp, Setaria italica
  Peptide Sequence Number=SeqID_127720
tttcgtttctttccctttgtcttcgtccgtcctttcgtcctaacctttgttctattgcttcatgcttcaccattctcaccatccacaagagctcctcctactattaggagaaagggatcatatcatatatatgttgacgtggagcttgctgatgcagctggtgatcgactcaagatatactagctgccaattatattggaggcggtaattagatggacacagattatatcagcttggaactttcgaggcaagtcatcgatcagtagtagtaataactagatagcaagatgtatgcgaatcataaccgttttgtaacaaaaaaaaaaaaaaaaaacta

SEQ ID NO: 61747 - DNA, 248 bp, Setaria italica
  Peptide Sequence Number=SeqID_127721
tcatattgatgaaagcatagcccacattacacttgttctgaggaaggcaaacagtgcaagagtcagcacctaagaatcttactgcaagttccaacctttatacttgggagaaataataacagaccttaaaatcaattggaagatagatgaaatcatatgttccacggtgattctcgtcaatgacagctaaaagtagcttacagttgtacctgttgatagcgtcaagggtagtaagtccaggatgaaag

SEQ ID NO: 61748 - DNA, 242 bp, Setaria italica
  Peptide Sequence Number=SeqID_127722
catcatgagagtaagaataaagatgctgttgacaaatgacaataaaacaaaacgaatacattgagcggcacgggagcagacaacgagaactttttgaagcaatcatgcaagtacagattaaaaagccaaactatattaggattagcttaatattaaacacttgtctcgggacaaaatcacaacagaaaattgacaccactagctcagacgtacggccacatcagagtccaaaaatctcaacc

SEQ ID NO: 61749 - DNA, 467 bp, Setaria italica
  Peptide Sequence Number=SeqID_127723
atctcaataagtggattgttccagggcttggttatgacaattgtggtagcaccaaatctttcttactaccaacaaacaatatgtacagtctgaaggcaatatccatgaaaagcaagagaattgcagatactgttgaagctttgattggggcctatctcagtgcttctggtgaacaggcagcatttcatttcataaaatcattaggaatgggtgtagaactgcatagtgaaatgcaagaggaaaggaaaattataacaaaatctgaagaaatcattgatgtgagaagcttagagacaatgcttgattatgttttcaatgatcgttcactgttaatagaagcattgacacatagctcctacaataattgctggcccttgctatgagaggcttgagtttcttggtagatgctgtattggaccacatcataactgattacttctacaactatactaccctggatgtacacc

SEQ ID NO: 61750 - DNA, 357 bp, Setaria italica
  Peptide Sequence Number=SeqID_127724
atgattcagtggtaacttacattctggttctgaggtacttagtttgaattttgcaatactggaaaagtacttagttttgtgatcatttgacattaaatgctgaggaattaattagatatatttatctatacatctgcaaaaaagttctatcattaaggtttatcactactttttttgaatggaaaacactagtatcgggacctatcgtggtcactgcatcttttcttctcacacaagtttgaatctgtcatcatttctagattgcaaacttaaagagagacttagtttttcaggttgtgctaactcccacacatttggccatagttatggaatatgcttctggtggtgagctattcg

SEQ ID NO: 61751 - DNA, 363 bp, Setaria italica
  misc_feature (314)..(314): n is a, c, g, or t
  misc_feature (354)..(354): n is a, c, g, or t
  Peptide Sequence Number=SeqID_127725
gcgcggcactaaccagtacggaaaaaggtgaagtgcccggctccggccccgctgaactctaactcctttccccacaacaactgcgtgtccgatcggatcccacctcatggagaaagcagcgcaagctgccaccggcgggacgcagggctcacctcagcacaggctttgcgcagtaagacatgaccgggctgaagtgattcctgaaaggtgatttttacagtttcgaaaagcaagctgctctttcatcgatggacattgatgctgatatttggtgaatacgccagacttgcggtggtcacaggtggaaacaaggngttggcctcgaagtatgccgccagcttgctctccagggtntggcggtta

SEQ ID NO: 61752 - DNA, 321 bp, Setaria italica
  Peptide Sequence Number=SeqID_127726
cgaagctagcctcctgcgcctcgtcctgcgcgaaggcgtgcagccggtcgtgcaccaccaccgtctgcacggcgccgaaatcgtccttgtccaccagctgcaccatgcaccgggagatgagctgcttgaggtactcctgccccacctcctccatggtgctcccgcgccgcggccgcacgaaccctcggcgacccacagccggaccagccgacgaccgacctaccaaccggggtagactactacccgacaatacgaccgaccaaggtaagaaggaaagacaacgaacttagaaggtaggtagacggacaagaatacgtacga

SEQ ID NO: 61753 - DNA, 284 bp, Setaria italica
  misc_feature (198)..(198): n is a, c, g, or t
  Peptide Sequence Number=SeqID_127727
tcgttgtagagcttcaaccaataacggggtgggagggcagggggaaggcttgcctggaagaggagtgagcagaggatgttgttcgttgaacgaatgatccgctcagctcgaccgttttgcggcaacgtgtacgggtaagacatgcagaagtggacgccatgggagttatcaaactcacgaccgttgtcgcactggacngccttaatggtggcgccgaactgcgtggacacggaggaaaagagttagcaagtgtagcaaatgtgtttgatttcagccgtagcggg

SEQ ID NO: 61754 - DNA, 242 bp, Setaria italica
  Peptide Sequence Number=SeqID_127728
aatgtatccaccgacggcttcatcgccgaggtactcgacaagagcttcaacttcaatgccaccagcgtggccctggaagaggagtgagcagaggatgttgttcgttgaacgaatgatccgctcagctcgaccgttttgcggcaacgtgtacgggtaagacatgcagaagtggacgccatgggagttatcaaactcacgaccgttgtcgcactggacagccttaatggtggcgccgaactgca

SEQ ID NO: 61755 - DNA, 364 bp, Setaria italica
  Peptide Sequence Number=SeqID_127729
atgaaacgctaaatttacaagcaagccgagccgtattgttagaaaattgaagccggatggatggattgctttgctaagctgctccaacaataattaatcatgatgcctggcttcaagggttgaaatagcctgaagcaccaaggttggaggacacgagcactaccacactcgttatggccgcaagccacaccagagccgtatctgtggagctattagatacagtctccgcattagccaccgcaggagagactacactgtcggcacttcctgatccactgcccacctgctcaggatctcttgaaagttacccgtttaccaaatagaacaactaataaccttaggaaattacctacaactacgacaa

SEQ ID NO: 61756 - DNA, 249 bp, Setaria italica
  misc_feature (216)..(216): n is a, c, g, or t
  Peptide Sequence Number=SeqID_127730
tccatcttggattatgtcacttgcaacattttgaattatgtcacttgcaatacttcctgaaacaggtcccatagctcttcccttctgaaaatcaaggactatctttttgggccgcacaaagagacgtggcaaatcttctgtcagaagttttgtgagaaacattagaacaagaacaggaatggctagcagagacaggcaccaggtccatgcaaaagntgtaagaatattgttagccaagctattagattt

SEQ ID NO: 61757 - DNA, 240 bp, Setaria italica
  misc_feature (238)..(238): n is a, c, g, or t
  Peptide Sequence Number=SeqID_127731
agattgcatccacctccatatcatgttttcattattcataactatctcataaaacctgtgaacacgttattcattattcataactatggttcatctaagaaatgtcaatgtgcaggtgactgagaacatgttaggtggcaagaaagttacagttgtatttgttctaggtatgtgttctatctttagtaatgtttggttatttgtattctacctcatagaggagaatgagcttatacgngt

SEQ ID NO: 61758 - DNA, 385 bp, Setaria italica
  Peptide Sequence Number=SeqID_127732
gaggagaatcgtgcagcatttgaaaacgttgtaaggccctgtttttcatacacaaaatctgtttgcatttagttctcatgatagtttaagagactacgattccattcttttaggtatttataaatgatttgttgaccattaattctttctcatgtttcagaccaaaatttctcctgcattcgtgctattctttgactgttctgaggaagagatggaaagacgtcttttggggcgcaatcaggggagagttgatgataacattgagactattaagaaaaggttcaaaacttttgttgaattcaagtctgcctgtcatagagcattataactcaaaggacaaggttaaaaagattgatgctgcaaaaccaattccctgaggtgtttg

SEQ ID NO: 61759 - DNA, 478 bp, Setaria italica
  Peptide Sequence Number=SeqID_127733
aaggatgcctctacgtatgaattctacaacccttccgttgtagcacgtcagtttcggcatgggtcagctgccgattcaggtgtattttgctagccgaatcaagtttagagatgagctcacatctggtctggattacagtcggttaggagaccgaattccggactccagtactattaacctgaacgactggctagtagctccctttgctgtccagccgttcaaactttggtgggccgattggaagcaatttctcttctgcaactcagcatcggcatactgcaacctcttggacccagccaacatcgacccgaacgccgaggtactttacttagccgatttgtattccttttatcgtgactaatcactaatgattttattacttcttcaggccgagaatcgaactcctccaacacacagccgtagcggacggctaatagagaatacaataaccaaataaaactaaaaccaaaaacgaaaa

SEQ ID NO: 61760 - DNA, 212 bp, Setaria italica
  Peptide Sequence Number=SeqID_127734
tccatttgctgtccagccgttcaaactctggtgggccgattggaagcaattcctcttctgcaactcagcatcggcatactgcaatcttctggacccgaccaacattgatccaaacgccgaggccgagaatcggacccctccaacacacagccgcagcggacgactaatagagagtcatccatacactacttatccccttatcagctataacg

SEQ ID NO: 61761 - DNA, 487 bp, Setaria italica
  Peptide Sequence Number=SeqID_127735
tttctatgatctagtctagtgttgattagtcaacagttacgtattctacattgtcactttgattgtgattgacattgtagcctatctaattgtagaaaagcaactactattacttttttctgtaatgactagtctttgctaggctccataattacaagttcggtactcagtagctagttttggacttttgattgaaataggattgtggttcttgtgagctctcactgtttttatgacactgttctgagtgtagttgtgtttccttgtaccagacaatgttgacctgggtacggcctgtggtaaatacttccgtgtgtgctgtctcagcattattgatccaggtgattctgatatcatcaagactacacctggtgaccagtaaggaagcggcatctgtaccccttctctgcatccgtctgttctagtgtagtagtggatcttgctggacttgttctttcatcttaaattgtgttaaacggcatttacc

SEQ ID NO: 61762 - DNA, 180 bp, Setaria italica
  Peptide Sequence Number=SeqID_127736
cgcccctcctaggaggtgagcaaactgctgcacagcttcctggagactggatctccattggccatagctctcagtggctctggtactccgtgtatgcgacgtaagtgtttccctttccatgacaacaaaggcgatcatgctaccacacttgtgccccatattcctgattcatcagcagca

SEQ ID NO: 61763 - DNA, 250 bp, Setaria italica
  Peptide Sequence Number=SeqID_127737
caaccctgtgctgacatacccaattttgtctccgagatcgagcaactcctcccagcaatactcttgtctgaaacatcatgatctcttcttcgaggccgccggggagtgacggtacccgcgcatccggcggaggcggccggaggggatgaggtcggcaccgaagaaggggcgtcgaggtggggcggcggtggcgagtccatgaatgacgaggatatctgctcctgcacggtcgccctccgggacaagcacg

SEQ ID NO: 61764 - DNA, 237 bp, Setaria italica
  Peptide Sequence Number=SeqID_127738
caagcttgtccagttctctgtcacttgctcgaactgccatcagcggctgctaggaccttcttctcgagctcaggtttgttcgcaccgaccagcttgtcgatctgctgcccgttcttgaggaagaagaaggtcggggtcgcacggatatcccatgatgagctgaaatcctggagattatcgcaaatttagaattgggtaacagctggacgcaccagggcaacatgcacttctttacag

SEQ ID NO: 61765 - DNA, 259 bp, Setaria italica
  Peptide Sequence Number=SeqID_127739
cttctgatcccagccctctttgcttgttatgatatgcacatttcacctttgaaatcaagcttatcttcgtcatcacgacgtgccttccctgcacagcctcccattgtgaactccaatcagcaaagcttgcacaccactgaaacaaaatgctgcctggagacggagctggggattcggccggcaaggggagccggcgcgcggacgggaccaagacaacctgactcgacccgaaaccaaggagatccaaacccaaaccaac

SEQ ID NO: 61766 - DNA, 210 bp, Setaria italica
  Peptide Sequence Number=SeqID_127740
aataccctggtgctcctgtgcatcttgtgatcgggatgggtggtcaagactggcaacctatatggcaaccgaggcctgatcaccctgatgttcccatctttccgcagcctgagaggtccatgttccgtggtggtgtgtttggatacacgagacttgtctagtctaactaagggtagtaagttctttaacttactttaacttttattgttt

SEQ ID NO: 61767 - DNA, 414 bp, Setaria italica
  Peptide Sequence Number=SeqID_127741
cttacaaaaccgtatacacaacgtcggtgttcgtggccgtatccttacggcgatacacgcccccgttcgccatggtctgctggtgcgtgtcgcttcaggttggctgccccacagcacgggctccgccgccgctcacgatccacgggtgagcgaggacttgctcagcggtgaacctcctccactcgtcacggcagatcatgcgcctcatcaggtccttggcggccggggacacgccgccgaacagcctgggcgggaaccgcacgctgccccgcatcacggccgccagcacctccgcgccgctctcgccgccgaaggggagcgcgccgccggagagcagcgtgtacatctacctaccccggtcgtcttcctactacgttcggtcctttggtcgtccgttacttcgtccgtccggta

SEQ ID NO: 61768 - DNA, 270 bp, Setaria italica
  Peptide Sequence Number=SeqID_127742
attcaacagttttgcgaaatggctgtaccttccactatgctcgtttagaccatgcaacaggacaacaacgcccttgacgcggtcggcggcggccggagtccacgactgcgtgaagagcgcgtcgcccctggcggtctcgaacacggcgaagtccctcctgctccgccccgtccccgccccggcctcgttcgcctccgcctcggcctcctcccgcagcctccggatcgccagctctcgccgcacggccgcgtccatctccaccgccttcgt

SEQ ID NO: 61769 - DNA, 285 bp, Setaria italica
  misc_feature (8)..(8): n is a, c, g, or t
  Peptide Sequence Number=SeqID_127743
tactatgntaaaagcaagagcaaaatttgcgggggtagtggggggctgggggtaggagaggtgtgaatacttgacgcggtcggcggcggccggagtccacgactgcgtgaagagcgcgtcgcccctggcggtctcgaacacggcgaagtccctcctgctccgccccgtccccgccccggcctcgttcgcctccgcctcggcctcctcccgcagcctccggatcgccagctctcgccgcacggccgcgtccatctccaccgccttcgtcctcccggtctccctctc

SEQ ID NO: 61770 - DNA, 505 bp, Setaria italica
  misc_feature (450)..(450): n is a, c, g, or t
  Peptide Sequence Number=SeqID_127744
tgcaggttcttcactaaataaaccttgcagatggaatgtaactttaccttcgatggtgttactgttctttgttttgattatatcatgtagttctgcttgtgatgcttctttgtgttccttataaatgtcaggtgaatttccaatggactgccctcttcatgatagtttattgagagtgcattataagggtatgctccttgacgaatcgaaatcaatattttatgatacacgagttgataatgatggtgagccattggagttctgttctggagaaggcttggttcctgaaggattcgaaatgtgtgttcgactaatgcttcctggtgaaaaatctattgtcacctgccctccggattttgcatatgataagttcccaaggccagcaaatgttcctgaaggagcgaccgttcagtgggaaattgaactacttggattcgaaatgcccaaggnttggactggcttgaccttcaaagaaatcatggatgaggcagacaaaataagaacg

SEQ ID NO: 61771 - DNA, 503 bp, Setaria italica
  Peptide Sequence Number=SeqID_127745
aaatctgaggtcctaaagggcttgagatgggcattgggacaatgacacgcaaggaaaaaggcgattatttttgttagcagtaccatttgacaaaggcctcactaatgccacaccttgaaggccttgaagaagttcatttttgacgttgaactgattcagtttgttcaggtgagagacatgcttggcgatggtcgcctcataaaacgacgtgtagttgatggaaaaggtgaatttccaatggactgccctcttcatgatagtttattgagagtgcattataagggtatgctccttgacgaatcgaaatcaatattttatgatacacgagttgataatgatggtgagccattggagttctgttctggagaaggcttggtaagtaataccacattaacctttctcatgctatacaatgatcagtggaataaaatcttgctgttaaatttacaaatcgacgaagcatgttgtaggttcctgaaggattcgaaatgtgtgttcgacta

SEQ ID NO: 61772 - DNA, 356 bp, Setaria italica
  Peptide Sequence Number=SeqID_127746
atcccatcgctcgctagggttgcactgcggcggcggcggcgactccggcgggcggcctcgagctccggctcgcccaaccctccgctctccatcctgggcagtcaagcgccgtccgaagctcctccgtccgcgccgaccgtcctctactcgacagtcggtactgccccaagcttttccgtccgcgcgaccagtccctccgcaccttccttctccctgaacccacgtcaccctccaccccgcagcctcgaattgacctcctgccgcacggactgcacccgtcggcgccgcgccgcctcctgcccctcccctgcactcgtcgtcgtcggtcgccggctcgccgccacccaccaggtcgc

SEQ ID NO: 61773 - DNA, 409 bp, Setaria italica
  Peptide Sequence Number=SeqID_127747
tagttatttgttttgtctttttgtattacctaactagtcttgtaaatttctagtattttgcagatgggatatcaagaatgagatcatcaagactctcagcaacacgagagaatcctttcatcatctgactagagcttatcagacattcttcagatgcttccttcagaagcttgacaataagagcttcagcagctgggctctccattccaagcgtaagagctcgcttcaccacctcgtgatgaaaaaatggcactgccaactctctaatgcacctacatgcctcagctgtatcaccatttctgatgtattcctttagaagatcagcaatcctcttcttcacctcttctactgtgatgtgagttgaaccaccccatccgtcgctcaatcaactctgcatggtgaggtgctg

SEQ ID NO: 61774 - DNA, 452 bp, Setaria italica
  Peptide Sequence Number=SeqID_127748
aattgttatgagcttcttgatgaaaattgggttatattctggataaccaagctctttgaggctacggataacctctgctgtatcatcagaaaggaagtactcgtgaacttatagatacagcctccctcttgtacccttgccagcttctcatgttcatcatcttcaacacttccgttggcacctgaactcatatacgaagaatctagccatccctcagatgttgcttttgataccaacagctgaaattcagattttgcagatgggatatcaagaatgagatcatcaagactctcagcaacacgagagaatcctttcatcatctgactagagcttatcagacattcttcagatgcttccttcagaagcttgacaataagagcttcagcagctgggctctccattccaagcgtaagagctcgcttcatcacgaggtggtgaagcgagctcttacg

SEQ ID NO: 61775 - DNA, 411 bp, Setaria italica
  misc_feature (236)..(236): n is a, c, g, or t
  Peptide Sequence Number=SeqID_127749
tttaagtaaaactaaaaattaaaagtaaagtaactttaactaagtactaagtacttgggtacttactaccaattaccaagcgtaagagctcgcttcaccacctcgtgatgaaaaatggcactgccaactctctaatgcacctacatgcctcagctgtatcaccatttctgatgtattcctttagaagatcagcaatcctcttcttcacctcttctactgtgatgtgagttgaaccnccccatcgtcgctcaatcaactctgcatggtgaggtgctgaaggtagctcttctctgcaatttgtacaacctgcaaaccctttgaggactctgagagagtcacttttgccttgctgaggaaagcaggtggcaaaatgtcatcaacaactgcacgtgcaatgaaaagcgcgagcac

SEQ ID NO: 61776 - DNA, 223 bp, Setaria italica
  Peptide Sequence Number=SeqID_127750
caataagagcttcagcagctgggctctccattccaagcgtaagagctcgcttcaccacctcgtgatgaaaaaatggcactgccaactctctaatgcacctacatgcctcagctgtatcaccatttctgatgtattcctttagaagatcagcaatcctcttcttcacctcaccatgcagagttgattgagcgacgatggggtggttcaactcacatcacagtag

SEQ ID NO: 61777 - DNA, 207 bp, Setaria italica
  Peptide Sequence Number=SeqID_127751
ccaaatcatcaacagcctctaacagcagcacaaagcccagtctgatttgagttgaactgatcacattgccataaagagatgatagcagcacagacgccatctctttctccttgtcatgcctgtccattgccatggaaacaagcttcaagtcaccaagtactgctcggatgagccagtggggatggtaccagcctccatcgaagctgt

SEQ ID NO: 61778 - DNA, 437 bp, Setaria italica
  Peptide Sequence Number=SeqID_127752
aaagtctggacaccttagatgaaccagaggctaaggcatcaatgatctggataattggagaatatgctgaaagaattgacaatgctgatgaacttcttgagagcttcttggaaacattccctgaagaaccggcattagttcaactgcagctgctaactgctactgttaagtgtttcttaagaagccaactgagggaccgcagcagatgatacaggttgcgattttcagatgctaccttgtttacttatgtgtgcaatattgtttagacattagagagcattgagtacatggcaactttccacctggtttagtgtgtctctggatatttacttatttgctaccatgagctcgcagcctatcatggatgacatggtggtgtcttgagagcactgaattaaattaaaattaagtttaaggtttaagtttaagtttaagaa

SEQ ID NO: 61779 - DNA, 271 bp, Setaria italica
  Peptide Sequence Number=SeqID_127753
ggcgaggggaatcggtgtggaagggaaggtggttgggagggagttggagtggaggggcgagttactcagggaagaagggcaaaagatcgaaaaggaagcgcatggtgcagtaatcgttacaacctaattggatgtcagttttgttacaactggttaattcagttgaccagttcagtggcacagttgatctcagcagacaattttgatggtctcttggaggcctaaatttgaggtgctgacaaataggccatttctgggggtcacacgtata

SEQ ID NO: 61780 - DNA, 255 bp, Setaria italica
  Peptide Sequence Number=SeqID_127754
gggagaacaggggaaaactcaacaaagcacttgctgcaggagattcaaaagcatcggcatcaacgtatgactcggaggatgaagagtcagatgatgagaccacagaggaggtactcttgacccttttcagttacttatatatctttacatagtaggacatcgtgaggctaattgtattggaaaatcctccttgccattacaccacctgaaaaatgtaagttcctcctgtattactcatgtaaacctgcaacaggg

SEQ ID NO: 61781 - DNA, 260 bp, Setaria italica
  Peptide Sequence Number=SeqID_127755
ttgggggggtagtattgcgtaagctcacaaccaatggtttaataggttacatgagaagaaaaggaaagcgcatggtgcagtaatcgttacaacctaattggatgtcagttttgtttacaactggttaattcagttgaccagttcagtggcacagttgatctcagcagacaattttgatggtctcttggaggcctaaatttgaggtgctgacaaataggccatttctgggggtcacacgtatatgctcagtatatgctagg

SEQ ID NO: 61782 - DNA, 258 bp, Setaria italica
  misc_feature (3)..(3): n is a, c, g, or t
  Peptide Sequence Number=SeqID_127756
cgnggaccccaagaccatcgacgacgtgatccagaagatcggcacggagagcctccgggtggacgaggagcggtggccgcgcctatgctccacggagggcgacgccggccgcggcggtgccgggatcttctcgctggggagcctcgtgaagaagaacctggtcagccttggcctcataagatcctgctcgtgaggacgtgatcgacggcgacgtgtgccccggcgggatccttgtgtaaatatgggatggtgcatggg

SEQ ID NO: 61783 - DNA, 259 bp, Setaria italica
  Peptide Sequence Number=SeqID_127757
cgcgtgttccgggagaacagcctctccgtcacgcacgccgagatcaccaccaggggcgacatggccatgaacgtcttccacgtcaccgacgtggccggccggcctgcggaccccaagaccatcgacgacgtgatccagaagatcggcacggagagcctccgggtggacgaggagcggtggccgcgcctatgctccacggagggcgacgccggccgcggcggtgccgggatcttctcgctggggagcctcgtgaagaaga

SEQ ID NO: 61784 - DNA, 170 bp, Setaria italica
  Peptide Sequence Number=SeqID_127758
ccaatctgctcggcggccgagaggcggcgcgtgatccaatgcttgcaagcggccatcgagaggcgcgcatccgaggtgcgtgatcgctgaatctctcccttcctttccctccatgccacgccaccgcagacaaaagcacacgattccgggatttcacactcccaagcgca

SEQ ID NO: 61785 - DNA, 417 bp, Setaria italica
  Peptide Sequence Number=SeqID_127759
tctttctttatattatttaaatggcgattgccggtggagacggcggtgtgcatcgcgcacaatgtgttcctgctgctcgatggctgggtctggacgtgcgtcctcgccgccgatgagaccgcgcgcctcctccgttcggcaacacagagatcggccagctaactcaaggtgaggctttattaacaattgttttctttctgtcgattattctccctagctttcttcaaagccatgttgttcttttgcatacatatttctgggggtagttcttaagtttagttcagctatacatttgtctgattacatttcatgtccctgttgcattgttttttgaattaaatttaccaaatttactggtcatgtacaacagtacaaggcaccaccacattctgctctttcttatcagaagctaagcta

SEQ ID NO: 61786 - DNA, 376 bp, Setaria italica
  misc_feature (233)..(233): n is a, c, g, or t
  Peptide Sequence Number=SeqID_127760
tacgtacgttacaagttcttccgttcagttcgtgcgagatgagatgacaaagtggaggagcgacaatctcaaccccaacacctgcccaacagcgacggcgcaccatttttttctgcttttaggtggccaatcaagctcgcggcttttcgatccatggctgagatgagaatgagagtggactacgtgtttgggtcgaaggtacctgatgcgagtaggcgtaggcgagggccctntcgcgcttgatcacggcctccaccttccgcttcgtccgcgcgtccgcctcctcccgcgtcagccggctgtcgtcccagatgccgccgtcctgcgagccggcacgccacctgccgccgtcccggagcatggcgccgtggtgctg

SEQ ID NO: 61787 - DNA, 251 bp, Setaria italica
  Peptide Sequence Number=SeqID_127761
gtcgtgaatgaagcaaaagagatgctaggcgggacatctaaaggccaaagatttacttatgggaagaattttcagtgttgtttgatgtacccattctagatgttgagctgtaatgccagatgtgttgcttgcatacacaccacctaggaccttggaaacagtctccaggaacattccagggcggactggccgtggcttgcgccctgatacacttccccttccagatactccagttagatgctcctgttcag

SEQ ID NO: 61788 - DNA, 240 bp, Setaria italica
  Peptide Sequence Number=SeqID_127762
agagctgcttgtaggggatgttgaggtcctggtacgggttgtagaggcggcggccggagtcatcccggcggtcgtcggatcttaaagcatggcacgatacagaatatattagaatcagtgtatctgaacctgattatacatgactcgctcattttcatcaattgacagtccatacttaaaacacaccatctggtcttaaaggtgaacaggtttaggagctacagactgcaatgcctagaa

SEQ ID NO: 61789 - DNA, 216 bp, Setaria italica
  Peptide Sequence Number=SeqID_127763
atatatccgtcctctcatcaatgtcagcatggcttggacattcccatagttcaggagcccggtattgatcagaacagtgctctgaagcccattcctgcaactgcaaagcttcggcttgtgatctaatagcccttcttgctggaccagcacctccgggatcgccaggaagaagggcgttgacccatcacacatctcagccgatggaatatatgctac

SEQ ID NO: 61790 - DNA, 148 bp, Setaria italica
  Peptide Sequence Number=SeqID_127764
gaggacattatcaggtttcaccgcattgtgcgcatatggtgggtcaaaactgtgcatatgctttaatccagcacaaagctgacctcgccatggcccctccaccgcacaatctgccgccttgctttgattcgaggctgggctccggtga

SEQ ID NO: 61791 - DNA, 241 bp, Setaria italica
  Peptide Sequence Number=SeqID_127765
ctgtgctgcttctcgtagttttgtgtggtgctagcatggtgatcggtgatggtgttcttaccccagcaatatcagtcctgtcatctatgtccggattacaagttcgagctactggtttagagcaccgttctgtagttctcctttcgtgcattgtattggttggtctatttgccttgcaacaccgaggtactcagacctcaagggaagaacatctctgtccttcctctccgcattgcactca

SEQ ID NO: 61792 - DNA, 243 bp, Setaria italica
  Peptide Sequence Number=SeqID_127766
atatggtaagttttttaggaagactggtaagatggctggatttctttaggagggattcttctttcaatgacaggcagtgaagcaatgtttgctgaccttggccactttacgagtgcatctgtcaggaaagaatgttcaagtgtaccattgttctctccttggcttcaggtggctttcgttaccgtcatatatccatgccttatactacaatatatgggtcatgctgcatttctatcgaagaac

SEQ ID NO: 61793 - DNA, 237 bp, Setaria italica
  Peptide Sequence Number=SeqID_127767
ggaggagggggcatggcggattcgatctgattcggaagtggagtcgctgcaaatacaagtatagggaagtacttcactacgttgtgctattctgctgatggaagttatattttagctggaggaaacaccaaatatatttgcatgtatgatgttggagaacaggtgctgttgcgtagattccagatcactcgcaatctctcattggatggagttctcgattttctgaattcaaaaaag

SEQ ID NO: 61794 - DNA, 364 bp, Setaria italica
  Peptide Sequence Number=SeqID_127768
attttaaaaaaaagttagatctataaattgatggctcaactacctaataatggattgtccaaggaacattggtactagagcatgtactacctttgtaaaacagcatgttaaaaattaataaaatggagagctcaccactgataaatagaaagaagagtcaccattagctgtatcaatcatctgagtatctgatggcaacatgctcaaaataatcttttcttgcatcatgtttcatagttaaagaaggatcttctttctccatgtaaccaaccacctttgcgggattacctacagccatactttgaaaataaaaggaaaacaacagacgtaaaaatcaatggttaacttataacacagtagaaaa

SEQ ID NO: 61795 - DNA, 358 bp, Setaria italica
  Peptide Sequence Number=SeqID_127769
caatgcaaaataaatacgacgaaatcccttttttcactcaacaacaattcctgcaaataaacaacaaaacttttttcactccacaagacttccactgataaatagaaagaagagtcaccattagctgtatcaatcatctgagtatctgatggcaacatgctcaaaataatcttttcttgcatcatgtttcatagttaaagaaggatcttctttctccatgtaaccaaccacctttgcgggattacctacagccatactgtggggaggcacattctttaaaaacaagggatccagcagcaatcatggcaccttcacctacatttatgttgccaaggatagtagcaccagctccaatgag

SEQ ID NO: 61796 - DNA, 402 bp, Setaria italica
  Peptide Sequence Number=SeqID_127770
tgggtcccttaaaaattctaaaaacttgtctaattcttcgtcaattgaagatccactagccgttaatttgagggaagatctgtgatatcttcatgaaaacatccatgacctctttgtcattttggtatttcacaatgttaagagggttctgcgagcaatccatgatggctgtctggatttttggattttggaatgcaacagcgacttctgggtttgccattattttcgatactacttcctccggagtcatgccaacttgcgcaaactgctgtcgcacttctggactgctaaggtcaaagttcttcaggtgatcaaccatgcggttatcccattgatcaggagacgaacccatgttatttagcatatcctgtagttgttggcggtacattggattctgcagca

SEQ ID NO: 61797 - DNA, 241 bp, Setaria italica
  Peptide Sequence Number=SeqID_127771
cttaaaagcctctccatttgtgggaacttctcgctcagtatcctccttactttcactatctgtactatcactttttacatctacggtctccagtgaagattggaggttcttttgctgcaactcttcaggagaaacatcgacaaatgctgcatgcatttactgatggtagtcagaatgagacagatatcaaatatataatgaaaacgaagttcaatattaagataagcagcagtatcaccaa

SEQ ID NO: 61798 - DNA, 200 bp, Setaria italica
  Peptide Sequence Number=SeqID_127772
tactttcactatctgtactatcactttttacatctacggtctccagtgaagattggaggttcttttgctgcaactcttcaggagaaacatcgacaaatgcaaatttctttgaaggtttcggtgtttcagccccatccgccattgcctttcgccatttcttctcttccctcgcatccacatctccgcgtgctccatctctc

SEQ ID NO: 61799 - DNA, 263 bp, Setaria italica
  misc_feature (1)..(34): n is a, c, g, or t
  Peptide Sequence Number=SeqID_127773
nnnnnnnnnnnnnnnnnnnnnnnnnnnnnnnnnnttttttttattattgaaattaatataatgatctcgacatttacgcatgaaatggtgacaatttccaagaagatagattacagggccaagaaaggaagagccaaaaagacggtggataattaatgctgcgcgtcgtcgcctatgattggagtcgggaggcggcgccggcgccgcgtcaagtgagcgttactcggctgccccaccggcctaccccgcaccgacgacggcgc

SEQ ID NO: 61800 - DNA, 505 bp, Setaria italica
  misc_feature (1)..(64): n is a, c, g, or t
  Peptide Sequence Number=SeqID_127774
nnnnnnnnnnnnnnnnnnnnnnnnnnnnnnnnnnnnnnnnnnnnnnnnnnnnnnnnnnnnnnnnggtatcttcatcgtatattgaaattaatataatgatctcgacatttacgcatgaaatggtgacaatttccaagaagatagattacagggccaagaaaggaagagccaaaaagacggtggataattaatgctgcgcgtcgtcgcctatgattggagtcgggaggcggcgccggcgccgtcgtcggtgcggggtaggccggtggggcagccgagtaacgctcacttgacgcggcggcagagggtgacgccgtcgccgacggggagctggcagatctcgacgcgctcgtcggcggcgagcgccttgttgaggactagcacgaagtcgcggtagtagcggatgtacttgcgcatgggggcgtcgttggggagcacgacggagccgttccacagcgtgttgtcgttagtccgtattgtaggtccgtccctagttctttcttacctt

SEQ ID NO: 61801 - DNA, 334 bp, Setaria italica
  misc_feature (289)..(289): n is a, c, g, or t
  Peptide Sequence Number=SeqID_127775
tgtacggggtagtcgtcggggtcccttcgtcggtaagttcgtattctttgttgggtcgtacgtccggtcctttcttcgtattgtctagggcaggccgagctcgtagttctcgcggttgatgtccatggccaagatcgtgccgtcctcggggagggcgagcgcggtggcgaggagggagtagccggtgtagacgccgatctccatggtcttcttggcgccgatgagcttgatgagcatgttgaggaactgcccctcgtccgccgacgtcgtcattcaggttccaggggtncttggcggtgatctcgcggagctccttcatgctctccggctcccg

SEQ ID NO: 61802 - DNA, 408 bp, Setaria italica
  Peptide Sequence Number=SeqID_127776
gtaggccggtggggcagccgagtaacgctcacttgacgcggcggcagagggtgacgccgtcgccgacggggagctggcagatctcgacgcgctcgtcggcggcgagcgccttgttgaggactagcacgaagtcgcggtagtagcggatgtacttgcgcatgggggcgtcgttggggagcacgacggagccgttccacagcgtgttgtcgtagccgatgaggccgcccagcttcaccagcttgagcagcctctcgtggtagttgaggtagttgtccttgtcggcgtccacgaagacgaagtcgaagctgccgtggttcttctcgtcggcggacgaggggcagttcctcaacatgctcatcaagctcatcggcgccaagaagaccatggagatcggcgtctacaccggct

SEQ ID NO: 61803 - DNA, 366 bp, Setaria italica
  misc_feature (353)..(353): n is a, c, g, or t
  Peptide Sequence Number=SeqID_127777
ttaagtaacggaacgtaaccaaacgaaaagaacgaaagtacgaaagactagaccgtaggttacttactcgtcggcgatgaggtcgtcgaggacggggagcgcggggccctcgcggaagtcgatcttgtgggcgacgccggccttctcgatgcagggcaggccgagctcgtagttctcgcggttgatgtccatggccaagatcgtgccgtcctcggggagggcgagcgcggtggcgaggagggagtagccggtgtagacgccgatctccatggtcttcttggcgccgatgagcttgatgagcatgttgaggaactgcccctgtccgccgacgtcgtcatcaggttccaggggtncttggcggtgatc

SEQ ID NO: 61804 - DNA, 367 bp, Setaria italica
  Peptide Sequence Number=SeqID_127778
tactaattcttacgggtcccgttgtcgttctttttcgtatttgtattttcttggcctattgcaattcaacgccgaaaagggcatgtttgttcacttctatgccttcatctttctcttctttctcttgctcttgttcttcttggattttggccttggtggtgggcttgctcttgtagtcaggagctttgtactcaggcacatcgcgaagccccagctttgacagaacaaggcagtaagagtcccaatcggttcttctcaagtatttgaggtacttcttcctcctttggaccatctcttgaagcccctttctagaatgtttatccttcttgtgtagaaacagctgacaaatgcttgattttcagagtca

SEQ ID NO: 61805 - DNA, 279 bp, Setaria italica
  Peptide Sequence Number=SeqID_127779
ggcggagaaaggtcggcggaacagacagggtcgggcgagacggaaccggagtcgggcagataggaggggtcggaggagatgaacaaagggtcggtagcttaccttcgtcttacagatgaggcttggggttgggaaagagcagactcgggcggaaagactaaggcttgggacagcggcgaggttcggtgggttccggcggcggcggggcttcttgtgaaccacaagcaagcgtttgcgcagcgcggaggagcaagaggctgggcggattgagagagcggt

SEQ ID NO: 61806 - DNA, 193 bp, Setaria italica
  Peptide Sequence Number=SeqID_127780
atgatccaattatttattgcttagaatatgtgccgactactgtcctaaaagtcctaaatggttagtactatatttgtgcgtttcttggaactacaaaacctaccttaaaaatctgacttccagtgtgagcatctactgcactaaaaggatcatcaaagaggtaaatatcagcatcctcatacatcgaccttgc

SEQ ID NO: 61807 - DNA, 199 bp, Setaria italica
  Peptide Sequence Number=SeqID_127781
tgcctgaaggctcactagcagagttaaagaaaaggcaaagacaaagttggatagcatgtttagcctgaaagaaagccactccattgaagagatgttatggaaccatggcctggagtggttgtcaacaagaccaaggtgtggagtcaaagaaagacattggggcatgcatgatgcagtggagcatgttcttagaagtaac

SEQ ID NO: 61808 - DNA, 407 bp, Setaria italica
  Peptide Sequence Number=SeqID_127782
tgtcgagctcctcatctcctcggatggccagctgaaggtggcgaggggtgatacgcttcaccttcaggtccttgctagcattcccagccagctccagaacctcagcggtcaggtactccaggatggcagcagagtagactgcagcagtggcaccaacacgaccgtttgcctgggtcctctgcttcagttggcggtggatacggccaacagggaactgcaggccggcgcgggaggagcgggagacgggtgccttcttcccttgtccttctccgccgacttggccgccgtcgtcttggccgcgagcagccccttgcctcccttcccggccatctcctccgctccgagtggaaacccgagtccctgcagcgaacaagccaaatccgacggcgccggggccgaatcagagc

SEQ ID NO: 61809 - DNA, 241 bp, Setaria italica
  Peptide Sequence Number=SeqID_127783
cagcagtggcaccaacacgaccgtttgcctgggtcctctgcttcagttggcggtggatacggccaacagggaactgaaaatgtgaaggtaaaattagcaaactcatgtcatagaaacaataaactctgcatataaagacaacagcagcagcatcattcatcaatcgttcaaccccttgattaaaccatgtcaacatcaaagttgtcttctcacatcacatgaacacaaaagaatcaaacaa

SEQ ID NO: 61810 - DNA, 305 bp, Setaria italica
  Peptide Sequence Number=SeqID_127784
cagtggcaccaacacgaccgtttgcctgggtcctctgcttcagttggcggtggatacggccaacagggaactgcaggccggcgcgggaggagcgggagacgggtgccttcttccccttgtccttctccgccgacttggccgccgtcgtcttggccgcgagcagccccttgcctccccttcccggccatctcctccgctccgagtggaaacccgagtccctttcgcgagttttggcttccctccgactacctacctacaacgaccaacgaacgaaaaacgaaaaagaacgaaagtaaattttttta

SEQ ID NO: 61811 - DNA, 214 bp, Setaria italica
  Peptide Sequence Number=SeqID_127785
cctatcccctgtgtgccttgcctatccccttttgcgtgtctcagtcactttaaacctgacagcttaactaagacctacataacgaccaggacttacaacacaggagcgcacaaaagtccagtttaaactaagatgcacatcatctctagcccctcactccttggaggacttgttgatcagggacttatggatgtgcgggatgacacctccaccg

SEQ ID NO: 61812 - DNA, 420 bp, Setaria italica
  Peptide Sequence Number=SeqID_127786
tgacatgtgaaggatgacaacgtgtttggtttcaccaactagggcatacgtattagaagtttcgaagtcaatgatcaatccatatatcactctttaggatgccttccgattttccctgactttttatgccaaccatatctgatatgctattttaagcacaaccttactttgttaagagtttattttcttgtgaatcacttaattatccctggagtgataattattactcacattggacaagcagaatcaagcactaatggaaacataaggaccaaacaatgtcccatgagatggatcgacttcagtatgccgaggaaccctaccacatcgatgtcaaattggggttaccttggagattctcagatatttgttcagttcacgccaaaaatcaaggtttgtctaagtctacgtaggtttctt

SEQ ID NO: 61813 - DNA, 410 bp, Setaria italica
  Peptide Sequence Number=SeqID_127787
tgtttgtctaaagtctacgtaggtttcttcttgtatttattctatttttagtaaattgcaatttggcagagaggctagcgcgatggatggagaatggagacagtgagggggagctgcagctgcagcgcagaaataagtctagaccatcacccagatcatgcattttgcatattgtcgagattgctaaattgatagttgcggtatataattaacaaggatcagtgagaacagtgaaggaaatagaagcaagcgatcgtttctgtcttcatgtcttgccactggcttatcgtggtactgaacatacccgtgtggacagttctacaccgttcctacatctatattatcaattaatttatacatcaatcttagcaccagacatgtatgctgaacaaatagggcatacaaagagt

SEQ ID NO: 61814 - DNA, 393 bp, Setaria italica
  Peptide Sequence Number=SeqID_127788
tgacaacgtgttggtttcacaactagggcatacgtattagaagtttcgaagtcaatgatcaatccatatatcactctttaggatgccttccgattttccctgactttttatgccaaccatatctgatatgctattttaagcacaaccttactttgttaagagtttattttcttgtgaatcacttaattatccctggagtgataattattactcacattggacaagcagaatcaagcactaatggaaacataaggaccaaacaatgtcccatgagatggatcgacttcagtatgccgaggaaccctaccacatcgatgtcaaattggggttaccttggaggtatgtttgttgcattcaaagttcaattactctagcacttactattttgttacc

SEQ ID NO: 61815 - DNA, 485 bp, Setaria italica
  Peptide Sequence Number=SeqID_127789
tccttggtctagttcttctagttttttttttttttttagtatttaggaatgacaaaacagctagatactatgtaaatatggttgaaactctagccttcatttgagtaaactttcaatttggtcgatggacagcacaaagttgtcagctccagtttgggcagcttcaactgtgcctgtaacagtaagaatgcgagtacatggggacccattcatcttgattaagtagggaaccctggaacaggggatctcgacatctgaacccatgacttcaggtcagtcaccacaaacatgtgtttttactatgaatcaagttaggatttgcaggactcttcagtttcatcagcagtaaaccatccatggtctgacattgccctttcaagaatcttcaaagaataagagaaaagaatgagaaggctacatggcaaagttgggattctaataatttctcctttgtctccaaaggctcaaaatagtagcgaaataaa

SEQ ID NO: 61816 - DNA, 345 bp, Setaria italica
  Peptide Sequence Number=SeqID_127790
tttagtaaaagttttaacttactaaaattagtaaaggtcttaagtaagttttctaacctattattttacatagtatctagctgttttgtcattcctaaatctaattaaaagaaagagaaaaaaatcgatcagggtttcctatagctataagattgttgatttactatcacctgttcattgtattttgtcactaacctcactcagttttgcccgttgctattcagattctcagatatttgttcagttcacgccaaaaatcaaggttgcaagcacgaggttctctgattatcattttagaaatgcattggcagagaggctagcgcgatggatggagaatggagcagt

SEQ ID NO: 61817 - DNA, 200 bp, Setaria italica
  Peptide Sequence Number=SeqID_127791
tggggacccattcatcttgattaagtagggaaccctggaacaggggatctcgacatctgaacccatgacttcagattctcagatatttgttcagttcacgccaaaaatcaaggttgcaagcacgaggttctctgattatcattttagaaatgcattggcagagaggctagcgcgatggatggagaatggagacagtgagg

SEQ ID NO: 61818 - DNA, 361 bp, Setaria italica
  Peptide Sequence Number=SeqID_127792
tcagggtttcctatagctataagtattgttgattttactatcacctgttcattgtattttgtcactaacctcactcagttttgcccgttgctattcagattctcagatatttgttcagttcacgccaaaatcaaggttgcaagcacgaggttctctgattatcattttagaaatgcattggcaggatgctgcacgaagatagatttaagcaggaagctgcttgtctccctggtggttcatttctgttgatttgtttctatatttgaataaaatatgttaatactacagtctacggtaaagagttaaatgccaccttagcagagaggctagcgcgatggatggagaatggagacagtgaggg

SEQ ID NO: 61819 - DNA, 128 bp, Setaria italica
  Peptide Sequence Number=SeqID_127793
cgggttggaaatttaaaggggtacgaatcaggatgagcctaccatggagaaagctcacagggacctcccttggggctgtgcttggctatcaccagcattcatcctcgcctgagctgcagaacttacca

SEQ ID NO: 61820 - DNA, 232 bp, Setaria italica
  Peptide Sequence Number=SeqID_127794
tcgggtcgccgcagcgcctgcgccgcgtacggcgtgcagcagtactgcggcgcgccgtacgcggcgcagtactgctgcacgggcaacttcgggacaccgcagcagtgcaagcccacggcgtactcgaggctgttcaagtcggcgtgccccaaggcgtactcgtacgcctacgacgacccgacgtccatcctcacctgctccgccggcgcgtcctacgtcgtcaccttctgcc

SEQ ID NO: 61821 - DNA, 233 bp, Setaria italica
  Peptide Sequence Number=SeqID_127795
ctattgagaggatctcaaagtttatgttgttatcaaaggatgaacatttcactcgtactatgtcacatcattatgcagatcaagctgagatctcggaaggggcttctagtcgctgtggtttcacggttattgctcatccctgcattctactacaccgcaaagtatggcgatcagggctggatgatcatgctaacgtcacttctgggtttgagcaacgggtatctcaccgtgtg

SEQ ID NO: 61822 - DNA, 245 bp, Setaria italica
  Peptide Sequence Number=SeqID_127796
ccaggctccatctaaggagctctatcgttagtgagtactccctccgttttcaaaatgtagggagtgattctgtaagaggcagtttgaatagtacgaataaatgattgtgtatgaggtggtttgaactctgaccaaagacatcatgtaaacaatgctgcaaacttcttaatggaagactgtgcatcattcttgcttgtttggcatggagattgggccattgatccatttgacaccgaatggaacca

SEQ ID NO: 61823 - DNA, 196 bp, Setaria italica
  Peptide Sequence Number=SeqID_127797
agctcgggctcctcttccacgtatgtatgttgtgggttgtgcaaaggtacgcgtatagtccctttcgtatgtatcaacaacatcatactggggtgtgggtatttcttgggcattcttcttgttaggtgctggatgcgcctcccctgcttcggtactctgcaccggagccggcggctgacggcgaggcgcatccagc

SEQ ID NO: 61824 - DNA, 254 bp, Setaria italica
  Peptide Sequence Number=SeqID_127798
ggttgcgtcttggcgttgccatcgcccacggatgacccccgcatctccaccgcgggcacctctccgcggtgcgcgcaccatccgtggctgaacacctcctcgatctcctccaatggccggcaatgcgtctcggggcagaggaagtagaagaacacggcggccaccactgagagccccgcgaacaggaagaaggcgccgccgatggtcatggccttgtacagcgacacgaacgtcatggacacggtggcgtttat

SEQ ID NO: 61825 - DNA, 443 bp, Setaria italica
  misc_feature (68)..(68): n is a, c, g, or t
  Peptide Sequence Number=SeqID_127799
tccgacgtcttcagctttggaattgtgctcctggaggttgcaacggggcggcgtgcggtcgacctggngtaccccgacgacgaaatcttcatgctggactgggtgcgtcggctgtccgacgaggggaagctactcaacgctgcagacggtaaaactgccggaaggcgcctactctctgttcgacatcaaccggctcatacatctcggcctcctctgctcgctacatgacccgagggctcgtccaaccatgaagtgggtcgtcgagaacctgtctgacggctgctccggcgacctcccgcgactcccgtcgtttgtggctcttccaaagtacatctctctcacttcatcctctgactctggcaacgaacaaaccaatacaaccaacggaataagacaacggaccaacaaactactaataccaaagacccgttactaacgaacaa

SEQ ID NO: 61826 - DNA, 459 bp, Setaria italica
  Peptide Sequence Number=SeqID_127800
tggctggaagagcatctcaggcgtttacagaatggaatgatcaagaccgtatgctgttgaagtcaaggtatatcagcttatatccagaagcaccgccattatgtacttcagccatgacaaatggtgttaaggtgcgtgcatctgctgtctttgtgccagaacatcctcaaactcaaggtcatgagcgaagtttgttgtacacttattcaattcgcatgtcagttccagaggcttgcatgctaggtggtgtgtactattcttcctgccagcttcattcacgccactggaccattcgatcaagggacagggttgtttctgttgttagtggggaaggtgttattggacagtatcctgtgctgtcacctggtcgggatgagtttgtctatgagagctgcacgccactgcccttctggtcggctcaacttgccaggcacaaattgtaaaaagtagtcctttcca

SEQ ID NO: 61827 - DNA, 385 bp, Setaria italica
  Peptide Sequence Number=SeqID_127801
gtgtgcctaaagcattggtaaagccaactgatagtgatctaccccaagatggattacttctgtggctggaagagcatctcaggcgtttacagaatggaatgatcaagacccgtatgctgttgaagtcaaggtatatcagcttatatccagaagcaccgccattatgtacttcagccatgacaaatggtgttaagaggcttgcatgctaggtggtgtgtactattcttcctgccagcttcattcacgccactggaccattcgatcaagggacagggttgtttctgttgttagtggggaaggtgttattggacagtatcctgtgctgtcacctggtcgggatgagtttgtctatgagagctgcacgccactgcccaaagggccttgg

SEQ ID NO: 61828 - DNA, 501 bp, Setaria italica
  Peptide Sequence Number=SeqID_127802
tgaactggtacaaggtaatgttgactctcttgaacatagttctgtacagtgaaatttattgctggctctatgtttcatagcaaccatggtattctgcttctttcagggtctagaagaggacaagtaagcaacaagaaactccggtgggataaagattcaggtttgaaaactttcaagaactaaaggataatatcctttttatttcttcatgaaatagtacttgagcaatctgattttcacgactctatttcctgttgggtagcacaaataactgaagggaacacttgctactgctagatattactcagctatacctcaactttttacttggatcctacctttgtgtttgacagatgaaaatgcatttgaagtgtttgagaagctagaagagaagcacaaggtaaggacatcaccatcgtccttttttcatagtctcgtttagccttgtatataatgttcatttagtgagtatgtttaaatttgttcttattatgactggtt

SEQ ID NO: 61829 - DNA, 257 bp, Setaria italica
  Peptide Sequence Number=SeqID_127803
aaaaaggaactgctctagtcaaacttgctaagagctctaaggattttgaaatcagcacggagttctcttcccctctccacagccttgtcacaatccttaatgcattcatcatactttcccatctcaatgtagactgccgctctgttagtcagataggagatatcctcatcgtcaagttccaaggctttggtgtaatgctggatcgccgtctcaaagtcctttttcttgtaagctgcgttacctgcctccttctcctt

SEQ ID NO: 61830 - DNA, 240 bp, Setaria italica
  Peptide Sequence Number=SeqID_127804
tctagttcgagacacttctctgcatctttaagaccttcaggcatggctcctaacttggtgtagcaggcagctctgttgctgtaagccttaggatccttcgggtttctcctgagagcctccgtgtaatgctttattgcttctgggtatttctgctccttgaagaactcattacctctccatcctcctccgtcctcacgctaacactgagctctccaaccccctcactagcctctgctcccc

SEQ ID NO: 61831 - DNA, 215 bp, Setaria italica
  Peptide Sequence Number=SeqID_127805
caagatgatctcaagggcactgacaagaaaaggaactgctctagtcaaacttgctaagagctctaaggattttgatgtcgccatagagaccatcttgaaatcagcacggagttctcttcccctctccacagccttgtcacaatccttaatgcattcatcatactttcccatctcaatgtagactgccgctctgttagtcagataggagatatcct

SEQ ID NO: 61832 - DNA, 363 bp, Setaria italica
  Peptide Sequence Number=SeqID_127806
caatttaggccatgtaatcatcttactagtcgctgcttagctatatctaatgttgagtcaattgctataatagctcagtttgaatcagttctgttaattttgacaataatttatatttgataggaagtttagaggattcattaattttttattggttttatatcttcggcagataattttgtggtataaaccgtcattagatggcattgaaccattgtcaaacttaggtgtggttgattttcaccaaatgaaacatgagagatgaatgtcacacgtttgctatacttgacggatgaaaaatacaccttttcccaaaaaaacagtttccttttttaacaaattggcaggggagtcccctacctg

SEQ ID NO: 61833 - DNA, 194 bp, Setaria italica
  Peptide Sequence Number=SeqID_127807
gacgtagcatattacattgctaagcaaggactagcccgataatttcatggcataacctgtcattagatggcattcaaccattgtcaaacttaggtgaatttgattttcaccaaatgaaatatgagagatgaatgtcacactttttcaataatgaaaaaaacacctttcccaaaaaacacttcctttcttaaaaa

SEQ ID NO: 61834 - DNA, 287 bp, Setaria italica
  Peptide Sequence Number=SeqID_127808
gggaggagtagtaggcggaaacgaagcaacggaagcgtaagcgttaggagacgggcgccgagggaaggaggcaagcggaggccccgcgctccgatcacaccaaacgcttcgtgctgctgcccccgccgtgatcccagggcggcgggccgatctcaccgcggccgcggaggcgagctttttaggcgcgccaccgccgtccgacgccgcgatccagatccaggtacccctccgtggacagcccccgcgcctctcttcacccctcccgtcggcgacggcctcgtccccgg

SEQ ID NO: 61835 - DNA, 299 bp, Setaria italica
  Peptide Sequence Number=SeqID_127809
gccaggctatgcatgggtgaagtgtgagatggaggaagacgacgactgctacgaggcgctgctgaaaggcaaagatcaatcacacgttcaggcgctcgcttcgaagctagcagccggtacacgaggttgagcctcctcaagacggatgacgacttcgaagtcctcatggagagggttacggatcttgtcaatgccgagaattacgacgagcctgcctcgagctccacgacctttggtaaatgttaaaagggaaacttaccaataggaaccaatagggacaacccaaaaagtagaccgga

SEQ ID NO: 61836 - DNA, 150 bp, Setaria italica
  Peptide Sequence Number=SeqID_127810
cacgaattatataattgtatagagacgacagagagaggcaatgacacatctcctgtgcgtgcattacgcaggtgggcactgatcagggacgagaacgtggccaagagggccaacgattacgtgcagaacagcatcatgggcgcgtcccgg

SEQ ID NO: 61837 - DNA, 231 bp, Setaria italica
  Peptide Sequence Number=SeqID_127811
atgcatgcgagtcgctgcttgatagcatcttccaataaatccaagaccttttcaaatccctgagggcctccataataaggatctgggacttcagactcagtatgtcgtttgcaataggagcacatcagcttaacgtttttgtatatcacaagtcatatacaggattatgatcatcacaatgctaacagatccaagtcccatccaaagacctgggtccatgatcaatgttcc

SEQ ID NO: 61838 - DNA, 232 bp, Setaria italica
  misc_feature (30)..(30): n is a, c, g, or t
  Peptide Sequence Number=SeqID_127812
tagactctgctggtaccattggatatcatnagggtaacaaggcagactcgaggatgagatctgcttcaaagaagcgggggattgaggtgacctcaatatccagacctatcaaaccctcagatttccgtgacttcaatatatcttcatagttctgcctgtccattgcaaggataagatcgaagtcacggaggggctccttgtgtctccatctctcaaatgagttcaatatatc

SEQ ID NO: 61839 - DNA, 233 bp, Setaria italica
  Peptide Sequence Number=SeqID_127813
ctggaggatggcgatgaactcgtcctggcccccgccgtcgcgggtgccgaacgcgccgcgctggaccgctttatcgacaagatcatcgacgagcacatgaagcgggggaagagccccgacgacgccgacgccgacatggtggacgacatgctcgccttcctcgccgaggccaagccggccaacaagtccgccgccggcggcgacgtggacgacctgcagagcacgctccgcct

SEQ ID NO: 61840 - DNA, 347 bp, Setaria italica
  Peptide Sequence Number=SeqID_127814
attttcctgtgttctaggctgctatagctacaccaggaggtagtagatacctacagagtttaaagtaaacctcatgtcagcaggaacgtaaatctaaaaaaaagttatggtgaaactactaaaatatgaatagtaagcctgatgagcaagtttccaagggttctcactttttaaaagaggctatctcaaattaaaaaaaaatgagaggaaggggctagtgacaaacctcctggaaaaatggttggcgatggctaaatgtataatgtcatccaagagaatgcagagaacacagttgatcatgacgctggtaaattaatggtagattcggacaataagttaccaataca

SEQ ID NO: 61841 - DNA, 237 bp, Setaria italica
  Peptide Sequence Number=SeqID_127815
ccatgagttggattggtgccaagatgttctgtttacttgtctccacaatgcaactcatggagaaagcctcttaaaatagtgatcttgatctgtctaatttcccatcctcaggcttcttagcacctttgcttgtcccctttcatagatttcccctctgtatgcgaagagctaacaatctctgtaagcatgatttactgaattgacctgattgcaacctaccgatattttgtgatcttc

SEQ ID NO: 61842 - DNA, 351 bp, Setaria italica
  Peptide Sequence Number=SeqID_127816
cttttggatcttcagtgacacgataagcagctagctagatatgcacgttggtagttttagatactagtacttcgtagcttggtttggaggcaagttgaggcacgcaccagtcgtagacgggtggggctcctcggcgtgccgggggtgtcggcgccgtcggcggcggccatcctgcctttccggcgcagcttcttccagccctctcccttgggcgtcgtggctgcaccaagagacaagataccacgtgtaaagagtcgtcctgatgtgaacatgtgtgctttcattatctaaaattaaaagatccaacatcgaagtagcatagatcccaatagatctctaaaatccaggcgc

SEQ ID NO: 61843 - DNA, 177 bp, Setaria italica
  Peptide Sequence Number=SeqID_127817
gcgcagtgaggtgtaattgtatgtattgtaactacacctcactgcgcaggcaaagaccacaagcacgcacatcttcagcaaacaatacacacagcagaacaatagccaagatgccgaaaacatacacacacgaaaacaagccaaaactgcaagtgatgaactacttccaccataaag

SEQ ID NO: 61844 - DNA, 199 bp, Setaria italica
  Peptide Sequence Number=SeqID_127818
ttttttttttattgctacaggcttttcacatttgtaaattttttttcggttagttacaatacatacaattacacctcactgcgcaggcaaagccacaagcacgcacatcttcagcaaacaatacacacagcagaacaatagccaagatgccgaaaacatacacacacgaaaacaagccaaaactgcaagtgatgaacta

SEQ ID NO: 61845 - DNA, 246 bp, Setaria italica
  Peptide Sequence Number=SeqID_127819
gccggttgaatccatatcaggtagaagccatattgccttcttcacaaaactccgtactgacttaaatgaccatgggtggtgaacaggaatgacatgatctctgccttctgaacgttgccaagctggctgattagtcacccactttaaagcttccctataaagtgctttgcattcttgtttctccagcaagaagtaactgattgttgtgaagaatggcacatagaaaatgtctgcttcttcttgccg

SEQ ID NO: 61846 - DNA, 243 bp, Setaria italica
  Peptide Sequence Number=SeqID_127820
gaggcttgttgtaagcttgctgatgcatatatgtctcatgccagcttacaatacaagcctcacaggaggaacatgttgacataaaaggaagaactttagagcttcagaacaacccttttcaatctgaaaaaagacactccctattttgtacagacaattcgatctttaaggaatgctcgagctgtatgtatatttactatcggagatgggatcacaggtacactaaccctgggcgcagcatgt

SEQ ID NO: 61847 - DNA, 494 bp, Setaria italica
  misc_feature (22)..(22): n is a, c, g, or t
  misc_feature (125)..(125): n is a, c, g, or t
  Peptide Sequence Number=SeqID_127821
gtgttcatggtctcgtactcancctttccgcaaagcattacgaaatttttagctttataaatgtaatgcatttatcatcattacagcacccaaagatttactatatgctgttaagcatgttttanctttcagcagacaaaaaaagaagtaagcatagcagttataaaaaataaatttgaatcatacagacttgcaaaaaaaatcattcaacacaagaacattgaaagtgaacctaaaatcaagagaagttggaacagaaagcaaaggaagctgttacggtgaaaaagaacaaactttgccacgacaaactgcaaaaaatattgccccagaagtagaagaatcatttaatttcgctgcataatcctgcaaatcaaatggttcacaattatatgagcatatgaagtgtttaaagttcaagtgtatgtagtaacatatttcataacctcaattgcatttggaaagtttgatgactgcctaggctctataactggctg

SEQ ID NO: 61848 - DNA, 457 bp, Setaria italica
  Peptide Sequence Number=SeqID_127822
atacttgctttaaccaactagacttgcctgagtacacatccaaagagcagctccaggagaggttactgttggcgatccatgaagcaaatgaaggtttcggattcggctaaccggtcatccctgtgcatgtgccctgttggggagtctgtacagatactgagatttgcaataggcccttgcaaatgatagttgggagggacggccgtgatggaagaacatgcccaggattgagaattttcagggaggagcgggagtgtagagagatggcaactatttgatgttcataatattcttttcctttttatggtcgtttttcggccgttgccccattaatagttgtcgccttgacacatttggacttttggctcctaagggttttttggttactttatttttcacgtttgtcttggggcatagactggtgtaactgaacattatgtcgaatgcaagttttctg

SEQ ID NO: 61849 - DNA, 311 bp, Setaria italica
  Peptide Sequence Number=SeqID_127823
caaagagcttgaacttctaattagcggacttccggatattgacttggatgatttgaaagcaaatacagaatattctggctacagcatagcctctccggtcattcagtggttctgggaaatagtgcaagggttcagcaaggaagacaaagctcggttcctccagtttgtgacgggcacttcaaaggtaccgctagaaggtttcagtgcactgcaaggaatctcagggccacaacggtttcagatacacaaggcctatggacaagacaacgaaaccaatacttaaccttaacggaactaacaaataaactaaa

SEQ ID NO: 61850 - DNA, 246 bp, Setaria italica
  Peptide Sequence Number=SeqID_127824
cgccctccaggaatcaactcactatcagtgacctctgccttctcgtatagtatcagcttttcttcgtctgcatccatgctaaatgtgagatccaaaacatcaaactgagcacctttcatacttcaaatttgttggacgagtggttggcaaagctctcttcgatggtcaacttttagatgcccattttactagatctttctacaaacatatacttggtgtcaaggttacataccatgacattgaacg

SEQ ID NO: 61851 - DNA, 253 bp, Setaria italica
  Peptide Sequence Number=SeqID_127825
aaataaacttaacaaaatttagttaggaacgaagtaggttaggacaaaagactactcttcgatggtcaacttttagatgcccattttactagatctttctacaaacatatacttggtgtcaaggttacataccatgacattgaagccattgatcctgcatactacaagaatttgaaatggatgcttgagaatgacataactgatgttttggatctcacatttagcatggatgcagaacgaaagaaaaagctag

SEQ ID NO: 61852 - DNA, 175 bp, Setaria italica
  Peptide Sequence Number=SeqID_127826
tgaacagctgtttaccttgactattagacaatgctagtgtgaataacaaagcagtaaaggacattcgtgatgctttaagtgaggcaaccaaagcattctccgcaaacaggcatcctacagcccaccttttcttgaagatgttgctagcaattcgagatgttttgctcgatgggac

SEQ ID NO: 61853 - DNA, 266 bp, Setaria italica
  Peptide Sequence Number=SeqID_127827
ttccaaaagtctgacaagtgacgggagaggtcgtggaacagggatattccttgacctgtaaagcctcttcaaacttggattcaaacatttggatgatccaaaaatgcacaagggttccttttcatctgtgcaaccgacaaacagagaatttcatacatgcgatattaagtcctccacctcctaaattcttgtaatcattcatctgttggtgtataccgcgttaccacatcgagtgatttcttacagtctttgtttgttggttgcaa

SEQ ID NO: 61854 - DNA, 237 bp, Setaria italica
  misc_feature (47)..(47): n is a, c, g, or t
  Peptide Sequence Number=SeqID_127828
ctcttccgaacaatgtaatgtctggtcctccagtgaagaatgtacanatttagacatcagtgccattgaacttaaatttgtgccatcccctccacctgaggaaccagacattacattgttcggaagagccaggtttggatctcaagcaattgacataatgaaagaagagttatgcagccaatacaatgactgagcttgagatccttctaactgtcttgacgataattcatgctgaca

SEQ ID NO: 61855 - DNA, 175 bp, Setaria italica
  Peptide Sequence Number=SeqID_127829
tttttttttttcttagaacaattcactcaagttatccaatagaattgtcacgtaaatacaacaatactctgtacaacaacttgaaattcgtacaaagcacttgtacaaggctatacaggtatctcttcagaaataatctcaactatatgaaaaagcaagtaggaagcttgaagag

SEQ ID NO: 61856 - DNA, 379 bp, Setaria italica
  Peptide Sequence Number=SeqID_127830
cgccccctcctgccggctgccgcgagtcctcgacttcggccctccacgcccgcggatctaattccaaggaatctgaattaagacgaactttagtgtgatgtctttcctgagattgttacctcaaagactacctcatcttatcaggcaggtggagcaagatgttgagactgtaatccatgttctccagccaggtccaataggaatcgtggagcacaaattcacagacgtggagatccttgaggccagggccacagtaaaaagagcagtggataattggcaaaggaactgggcccttgagagaaatcttggtagtggttcttttgataaatggaagaagtgatatagccctcaattaatcaattcctcatgactcccagct

SEQ ID NO: 61857 - DNA, 263 bp, Setaria italica
  Peptide Sequence Number=SeqID_127831
acttccatcctctgcaatgtattgtcaacccagtgatgacatcttccgctgggaaaccatacttgaccccaatctcatttccccactgtgtgttatgttcgtaagtgcatgttgttagcaactttgctttctcttcaatcttatttatggacagttctctttttccttattaattcctctgtctcaatcttccttctactagcacccgcccccctgctctgttccatattggcaaaccaccccacttcacctgttacaacgac

SEQ ID NO: 61858 - DNA, 244 bp, Setaria italica
  Peptide Sequence Number=SeqID_127832
caactgctccaatgcaaaggactcaatggcagatgcaactctagccccctggtatgggaatgggctctccttatcagcaccaaataccaaaatagtagggaagccttcaaccttgtacttgctcatcaaggactgtaaaatacgagaagttgaataatagtgaattagtaatcaaggactgcctcaactcctgccaatatgcatttagacatcaaacatcatttcacttatcatcataataaag

SEQ ID NO: 61859 - DNA, 391 bp, Setaria italica
  misc_feature (232)..(232): n is a, c, g, or t
  misc_feature (357)..(357): n is a, c, g, or t
  Peptide Sequence Number=SeqID_127833
ttaatcaatattggcactgctctacatcaaattaggcagcatataacacataataatctgtaactgtttacaacacaataagaaggtgagggtggaaattgacatttaatttacgattggggggtaaaaggagaaagatatatctacttcaccatgctctggttggtgtagctacattcaaggagttcatatctaagaaaatcagttgtacccacagcaaagtagaaaaggntgagtctgccaacagatatttttgccaacattctcgcagtcttaaaatcatatatcttgggatgggagtcacatgttgaaccttctaaaaccagtgaaatgagtatcactgatatgcatgtttcncagaacaacttatgcatttgaagtactcaggttc

SEQ ID NO: 61860 - DNA, 314 bp, Setaria italica
  Peptide Sequence Number=SeqID_127834
atactaattagtggacagaacttataattaacctagcagaaggtagatgtactagatgagattccctgtgtcaactttgcagcatgtactcgtcagactccaagtcccaaccaagaacaaccaaccgagatgaggatctgcagctgcctgtcctcaccctcacacgggctcatggcttgcccttgtgctgggtgtagatgtagtcgaggtgcgcgtcccccacccaccctccgccaccgttttcccctccccatctcgcccgccgtcctcctcctcctcgatctcctcgcgcccgcacctcttcccgttcgttt

SEQ ID NO: 61861 - DNA, 510 bp, Setaria italica
  Peptide Sequence Number=SeqID_127835
ataaagactgaacgctttcatggaagcatggcatgccagaagcaagtaatttcgaggttgtaccatccattgcaaacctcataaagagtccagaatacacacacattgctgctgtcatattgccggatatcatttcaggaggcttgttcatgtcaaccaaaccctgatgttagatcattggtcagtccaaacaaatgagcaggtccaacttaagttacttagcatccatgaaaaaaaacctgatgctctgaaatttttaaaccaggcttgccagctacgcaccccgactccccccaagtaaaagtgtaattacagcgatccgcgatgacgaagccccagttggcgacagggccccagaagtgggtggtcttggggccgacggggctgttcaggaacgacttgagcaccgtcgccattggtcggtaacccgtcttccccgtcggtaagtcttgtaaattctaccttcgcgcagatttcgtccgtaacggtcggtcggtacggggttactta

SEQ ID NO: 61862 - DNA, 268 bp, Setaria italica
  Peptide Sequence Number=SeqID_127836
ttcaggaacgacttgagcaccgtcgccatggcggaacccgctccccgcggaagctgaaatcacctgcccaggccacgcataccgaatcaccacatcgaattcaggggggaggaagcagcgcggaatcgtgggcggcggtctcgacaggacgtaggatccaatcgtagggttccgcgagaggatccaccagcctggagaggggagggagggatacctcgcgcagatttcgccgacggcggcggcggggtcgagtcgacgagcgagggcg

SEQ ID NO: 61863 - DNA, 277 bp, Setaria italica
  Peptide Sequence Number=SeqID_127837
caagtaatttcgaggttgtaccatccatgcaaacctcataaagagtccagaatacacacacattgctgctgtcatattgccggatatcatttcaggaggcttgttcatgtcaaccaaacccgcgatgacgaagccccagttggcgacagggccccagaagtgggtggtcttggggccgacggggctgttcaggaacgacttgagacaaccgtacgaccaataggacggaaacccgactaccccgacggaaagactagaaaatacaacctacgacgac

SEQ ID NO: 61864 - DNA, 176 bp, Setaria italica
  Peptide Sequence Number=SeqID_127838
ttttttttttgatcaagaggaggaaacctcaactccctccatgagaacaaaaatatatgcaacctcgatcagcctacattggttggatgcaaatcaaattacacagtatatttcctttcctttcctttgtaatttgatttgcatccaaccaatatatgcaacctcgatcagcctac

SEQ ID NO: 61865 - DNA, 175 bp, Setaria italica
  Peptide Sequence Number=SeqID_127839
agatacattgcgatggcagcctcgcaggtttcaggtttctgtatcatctgctcaatcagggggataacgccagctgagagcagctgtctcttgttcctgtcattgctgacagcaagattgaacagagccattgtgccaacctcctgagattgcacatcttctctgaagatagcca

SEQ ID NO: 61866 - DNA, 237 bp, Setaria italica
  Peptide Sequence Number=SeqID_127840
cgtagtgcaagtagtctacagccaataccaattgagcgaaccatttaagcaataccttcctctttatgatgcttcaaaccccatgcgggtgccagagaaaccattacccacttcatggagcagtcagagaagcatgtctgacagccaaagcagtagcgtttctagtagtgacatagacagtacccagtcaagtgacagaagcacatcaggcggaacaagttctgacatagcttgatc

SEQ ID NO: 61867 - DNA, 508 bp, Setaria italica
  Peptide Sequence Number=SeqID_127841
cgtaaggaaataacgggaaagaccaaactttagaaaggttagaagaagactagaacttacaatcaagttatttcgtctgatggtttctcttttaccttggatgaatccaaagaagcagttggttgcacgcttgcagattgccccgatgaagagccacttacatcagaatgtgacttcttgtggcttgtgcctttcttgtgctgttgtccatttgcttgtgtggttgaaacaagtacttttccttttggtttgtttggagctttagtcttgtcttcctcagccactttgtcatcaccaactgtgacactctctttggcattactgtcaagtaacctgttctcccatgggcgtgcagccatccacctctctaaccagttccgcccccactgattctcgtctcctgcgagtccttggtcttggaggctcgctgctttctgtttccttgacctgcctgccactgatgtgtcaaagcatatgccatcgccctttccgcttagctgcagcttct

SEQ ID NO: 61868 - DNA, 375 bp, Setaria italica
  Peptide Sequence Number=SeqID_127842
ttgtgctgttgtccatttgcttgtgtggttgaacaagtacttttccttttggtttgttttggtagctttagtcttgtcttcctcagccactttgtcatcaccaactgtgacactctctttggcattactgtcaagtaacctgttctcccatgggcgtgcagccatccacctctctaaccagttccgcccccactgattctcgtctcctgcgagtccttggtcttggaggctcgctgctttctgtttccttgaacctgcctgccactgccagaggaaagtacatattaggaagcctagtgcactatgtattatgaccgtcagttttctgacagtgagctcagacccaagtaggcaaacatagcaagttcttcctgc

SEQ ID NO: 61869 - DNA, 312 bp, Setaria italica
  Peptide Sequence Number=SeqID_127843
tgtggatcatgccaacaatacaacctgttcattcatgacagcatggaccagcatgcacttatttcgcttttccttgatgataaatcactgccaaggtccggtttatgtaactcgatatctcgaacatggtcctcatgaacatttttttcaggtggtttcttctgggtcccttggctttacaaagaaacacggactcgtcttgctctgacacgagcttgagctcgcaccagcgctttgcattgcactgaagtgtttctgccgcttgctttctcacagcattggccccttaactaagttgtccttggagttctt

SEQ ID NO: 61870 - DNA, 471 bp, Setaria italica
  Peptide Sequence Number=SeqID_127844
acctgctcagagattttcctcctgctggagtacccttctcgctcagtgttcatattatctgacaatgcaggataattctcagccttcctagtcaatttgttgttgaaattgatctgttccaagacatatccatcagtctcatgaagctgcgtgctcacactgctgtactcagaattcatcggggatttgccctttggtggttcctccattttgcgcttcaactcctcaatgcttgcttggatgctcaacagcctctgagcatcagaagcgagcctctcgagtacactcttgctccacacttcatgaggctctacagctccctttgacacctctagcttattgatttcgaggtctcttccccttactagttcagaggaagggtattcactcttcaccttccttctaaccgtctttgttattattctattgtcttctagtattgtattgtaggacttggctgtttgattcttg

SEQ ID NO: 61871 - DNA, 441 bp, Setaria italica
  Peptide Sequence Number=SeqID_127845
ttttttttaataaaatgccttgatggcttcatatatcacattgatagctaagatttaacacattgaactagctaagatggcctcattttagacagcaaaccggaaaatttaatacataagcttgttcagaatgctaagattctaactcaattacaaatgggatcctactaacatcactcgctcttccaaaagcagtgagccagtgacactctgccagcctcttagaggagccagcatctcaatttcctttatttcttctgccgtgagaacaaaaaaaggttagggctcagttctggtttcggacgcacgcatcaaaaattgacgaaagcagaactctgacaccatctctttgaaatcctttgacccataaaacattttggctgcttgtaatcccctgctttggtaattggtcattcaagttggcaccctagacgacacgac

SEQ ID NO: 61872 - DNA, 426 bp, Setaria italica
  Peptide Sequence Number=SeqID_127846
cagtttcggatgctcgaggattggagcccaatccacgtttaggaacgcatactagtaccttgttgtcgcaccaagtgggagtacttgccagtaggacgacagctcatgtgcctgtgtgaattcaagctaattttgcttggacctagcgggctctcgttctgcactcatcgcctgccctttgcaaccaggcagttcctacctgttcttaggaggttatgtactgctgtaaacctgaaacatcacctcttgtaaaaccctaagcatgttcttacttattaacaccttgcagcacttaagctctatccttgtgagcatatatgcgtttgttgtttgatgtggacatcagctaaatctgacatttgtacttgctgcaggtcgaggaggaattggagcgtgccagggttgccatcgcagatagtgatgtgg

SEQ ID NO: 61873 - DNA, 312 bp, Setaria italica
  Peptide Sequence Number=SeqID_127847
gcaacaaaacagttgagagaactgagagctcaatgtacatgagcctattcacatcttcggtttcatcctaagtttcagaatgttaatggtttcatctgaaacagtctgcaacagaatttcatcttcagctaaatcagcaggtcctaaatctttgcagatattcagaaccttcatttgctgtgaaatccctaccctcagtttttcattatgcattagcaatgtttctctctcttccttgttatatctggcttcctccattctagcttcttgtaaacttaactatttgtttgtctagtaattgtattttgtcct

SEQ ID NO: 61874 - DNA, 305 bp, Setaria italica
  Peptide Sequence Number=SeqID_127848
aaattttccggtttgctgtctaaaatgaggccatcttagctagttcaatgtgttaaatcttagctatcaatgtgatatatgaagccatcaaggcattttagacagcaaaccggaaatttaatacataagcttgttcagaatgctaagattctaactcaattacaaatgggatcctactaacatcactcgctcttccaaagcagtgagccagtgacactctgccagcctcttagaggagccagcatctcaatttccttttatttcttctgccgtgagaacaaaaaggttagggctcagttcttggt

SEQ ID NO: 61875 - DNA, 223 bp, Setaria italica
  Peptide Sequence Number=SeqID_127849
ggtcaggttggaagtttcatcttgtgaaaccctgtaggactctcttaagcaagatagcttctcttctatgacggatacttcagtttttagcacatttccctttcaactagacttttaccctagtaaataccttagacctagaagactagttacaattactaccttacaaacaatactaggtagaattaactaagtttagacaaaagacaaagttagaattaca

SEQ ID NO: 61876 - DNA, 251 bp, Setaria italica
  Peptide Sequence Number=SeqID_127850
ttatggagtgataggtcaaaactgtcctgaccatgttggtatggcactttgtcatgaactgaagtttgcaccatgttttaaattttgccaggttgtagtttgtgggatcttgctggtggtaatggcagtgggcaactttgtcaacactgtggagacactggtattgaagttgaggttcaaagcaaagatgaagagggcaaagagcaggcaggaccgcccgcatcaaaattgacgaaagcagaactctgaca

SEQ ID NO: 61877 - DNA, 129 bp, Setaria italica
  Peptide Sequence Number=SeqID_127851
gaggctctacagctccctttgacacctctagcttattgatttcgaggtctcttccccttactagttcagaggaagggtattcactcttcacctcatcatctgagcatgatatacaagcggttgaggagg

SEQ ID NO: 61878 - DNA, 216 bp, Setaria italica
  Peptide Sequence Number=SeqID_127852
acgccctccaccaagaagaaggtcaagagcttcctgcagcccaagctgctcgcgctcgccaggaagaaaggcattcatttcgcatcaattgatgagactcgtcctctctccgaacaagggcccatttgacatcattttgcacaaggtccgtcgtttggtctttatcttgagatgatattgcagttttgggtatcctttatttcttacataggtttt

SEQ ID NO: 61879 - DNA, 166 bp, Setaria italica
  Peptide Sequence Number=SeqID_127853
ttgccaccgaccactgctacatggctgtttggcatctgtcaatagtctccatcttggcaagcttctctacgcttcagctcccgcttaaaagcatcttgcatttctcctttgacttctaatatgcacttcctgtcaaggttaacccccatccccgcccacatgctgc

SEQ ID NO: 61880 - DNA, 243 bp, Setaria italica
  Peptide Sequence Number=SeqID_127854
acgacgaaagaagactacaaaggggtctagcttgatcgctctgccacaatggctcataccgtaaagatttaaaacatttattacagctccataccatcaatagcttggtctgtgtctctcgtagtgcctgcatgctttgtggctcctgccgccgtatgatatggttttcatgctctggtgtcttggttgtaatctggagttggaaaccatatcatacggcggcaggagccacaaagcatgcag

SEQ ID NO: 61881 - DNA, 241 bp, Setaria italica
  Peptide Sequence Number=SeqID_127855
cttgatcacaaattcacaactagcccgagcccctggtggcattcaagatcaaccttcaggtttatcctgtacatttaaaaaatctgctagtcttgaagttcaagtcctcaaagaaattggcatattcaagcaaccaaatcttgcaaatacacaagaattactcttaagcgccatacaatgggtaaatcacagattctgacaactgtttgagtagtctgctacttgcttcagatatggagta

SEQ ID NO: 61882 - DNA, 224 bp, Setaria italica
  Peptide Sequence Number=SeqID_127856
acctttcaattctctcgagtgacctgatcagctattgcttccactatttgaatgaataaaaccatcagattgcttcacacccaaccctccaagttcctcattgaaggaagccatcgtctcaacaacatattttgtggatgtccttccaactcctgatgttccaatcagaaccgtaggtttgatggaaaggtcgtcaaaggctcatgctcatttgcacaagtatt

SEQ ID NO: 61883 - DNA, 266 bp, Setaria italica
  Peptide Sequence Number=SeqID_127857
tgcaataagttacagagtttcagttttccttaataatcttgtttgttcaaaaaaaattaaggatgtaggagtcccagagctctatgctgtctcagccttaaggccccttacccagaatcaacctttatcttgtctaaccagccaattccaaggccaggaccactgacaaccatcaccaaggcaggcagggcagctgcaaccaacaagaggaagaaattcacaagcaaaaaaagacagcaaggcatctgaagcaaagaagaggaaga

SEQ ID NO: 61884 - DNA, 392 bp, Setaria italica
  Peptide Sequence Number=SeqID_127858
taaagctatctaagcatggaagtcaacatgcattgcaggcattgttccgaagctagacacaatacagctacttgcaaccctaaagaaaataggacttcaattcagaagatgccaaaaagttggtggcaaatacaaaagctcaactgcaaactgaggcagcacaagttgggacaccacaggagcaaccacaagatttgcctatcaaccaggtatgtgctcttgaggttctgttcaacaagatttaatagttgactgaatcattgatcttttgcaggaggtaagagtacaagatgatgtaggttctcaacaagtgacacaagctagtacagcaaccttgtctcaactctttgaggagtcccagagcttcttattgcttgttcttctagtccttt

SEQ ID NO: 61885 - DNA, 498 bp, Setaria italica
  Peptide Sequence Number=SeqID_127859
cagggacacgatggagccccgcttccgggggatcatgacgcgcgccgcgtgcttcatgcccatgaacacgccgtgcacgttgatgtcgaacaccttgcgcacctcggcgaagtccacgttgcggatgtcagtgaccttgctccccgtgatgccggcgttgttcaccatgacgtccagcgcgccgaacctctgggccaccgcgtcgacggcggcactcacgtcctcctcgaccgtgacgtcgcagtggacgaacatgacgtcgtcgccacctccgagggcgtcgcgtagcttctggccggcctcgtcctggatgtccgcgatgcagaccttcgcgccatggttttttgaagaggcgaacgatggtttcaccgataccgctggcaccgccggtgacgagggcgaccttcccttccaacctgtggctcggaaggagacacacgatcaaattcaatacggtaaaaaccgtaaaagctaattggctatatggctgatatgttt

SEQ ID NO: 61886 - DNA, 465 bp, Setaria italica
  misc_feature (230)..(230): n is a, c, g, or t
  Peptide Sequence Number=SeqID_127860
tgttgtcgtattgtccgtcttgttcccttgtctacctactaaccttcttgttcatggcccacaccgggagagctagatgacctgtatgccatctacctgaagggcaccccgaagccagagaagctatcaaggttgcagtacctgctcggcataagtaacgagacggctaacaagatccgggacacggcctccgagggaacgctgccgattgctgcagctgacgagaaagnggagttggcgttctaggaaggggcgcaattttgttagggtagccagcagagttgctattgtagccaggcgcatacatgttttttggaaaaggaaagtgacgcgtcatcctgacaagcataactatttgtatagacaagtctctgacaccaaatttggtgacactcttcttctgctgttgcattcttccagaccacactgaaagcgtctttttgtttaatgttcccccctttgttc

SEQ ID NO: 61887 - DNA, 423 bp, Setaria italica
  Peptide Sequence Number=SeqID_127861
tttatactcgtcgcagctcaagtctatcgggagaggtcttgacataggcacactcattgatgtaaggagagcgcaactcgcatataaactttctgatgagattgctgctgagatgttccgggagcatgcaaagaagctagttgaagaaaacatttcatcagccttagacatcatgaagtctcgtatcccggatagtctaactaaggctgtggaagaggtgaagagtgttattagatttaatagtttgcttacaatattaagcaagcaccctcaggctgatcgatttgctcgtggtcttggccctatttcgttaggtaaaatggtgaagttttttgtaattcagatttttgtgagctgagccttgtttaagttttttttgggtttggtcacgcataggtggtgagtatgatcatgataggaggg

SEQ ID NO: 61888 - DNA, 390 bp, Setaria italica
  Peptide Sequence Number=SeqID_127862
caagatgttcacattaagttcacagaaaaagcttttgtgcaacaggcagaagtaattcttgctgatgggaagttaacagaggccaaggctgaacagcttgcaaagattcaaaagcagtttggtttgcctactgaaaatgcacagaaaatcattaagggtatcacaacaacaaagttgtcatctgcaatagaagcttctgttgctcggggtcagatcggtatacagcaggtcagaggattgaaagatgctaacttccaactggatagtttgattgcggaaccactacgggaaagcatttacaggaaaactgttgaggagatcttttcatcaggcgcaggaagaattttgaatagaaagaaggaaagtagtaacgtaaaagaatacccaaga

SEQ ID NO: 61889 - DNA, 428 bp, Setaria italica
  misc_feature (406)..(406): n is a, c, g, or t
  Peptide Sequence Number=SeqID_127863
gactgagtctcagattgacattgctatgagggaaaatgccaagaatttatactcgtcgcagctcaagtctatcgggagaggtcttgacataggcacactcattgatgtaaggagagcgcaactcgcatataaactttctgatgagattgctgctgagatgttccgggagcatgcaaagaagctagttgaagaaaacatttcatcagccttagacatcatgaagtctcgtatcccagcattggtggatttaccttactgaaccatgtgattacagggatagtctaactaaggctgtggaagaggtggtgagtatgatcatgatagggagggctgatgatctcaagatactctacaaggcctatgctacagaagtactttcagatggaattgtgatgatgagaaggtnatttcatatatatttcatttct

SEQ ID NO: 61890 - DNA, 242 bp, Setaria italica
  Peptide Sequence Number=SeqID_127864
ctttaatgctgcttgtgtaaggacacattgatataatccccttctagttctggtgcgatggtaccctagtgatcatatcgatgtgaattattggggatatctcaaggctcaacagaagttttctgtgcttaaaaaaatgcagcttgctcctttgaatgaactgagaaatgtatttggactggggaagcgtgaagcagaaggaatcttgtctgatgtcaaagctcacatatacagaaggacac

SEQ ID NO: 61891 - DNA, 274 bp, Setaria italica
  Peptide Sequence Number=SeqID_127865
acagctcagtcctgtctctcaacggaatgtcatccttgaggggttatctctttctggattgaaagatgctaacttccaactggatagtttgattgcggaaccactacgggaaagcatttacaggaaaactgttgaggagatcttttcatcaggcacaggagattttgatgaagaggaagtgtacgtaaagatcccagctgatctcatcataagtgctgagaaggccaagtcaattgttcaggatattgcaaaggttaggttggagaactccctt

SEQ ID NO: 61892 - DNA, 218 bp, Setaria italica
  Peptide Sequence Number=SeqID_127866
ctgggatctttacgtacacttcctcttcatcaaaaatctcctgtgcctgatgaaaagatctcctcaacagttttcctgtaaatgctttcccgtagtggttccgcaatcaaactatccagttggaagttagcatctttcaatcctctgacttgctgatgggaagttaacagaggccaaggctgaacagcttgcaaagattcaaaagcagtttggtttgc

SEQ ID NO: 61893 - DNA, 200 bp, Setaria italica
  Peptide Sequence Number=SeqID_127867
ttgttacttacgttattcccggtattagttaacttaaacttaaaggtacttagttaggtaaagtaaggttagaaagtaagttagtttaatttaagtattttaatagtttgcttacaatattaagcaagcaccctcaggctgatcgatttgctcgtggtcttggccctatttcgttaggtggtgagtatgatcatgatagg

SEQ ID NO: 61894 - DNA, 187 bp, Setaria italica
  Peptide Sequence Number=SeqID_127868
aagtaacaaattagttacaaggaataattagacaaaaggttaaggttaggaagaaactacccttagttcaggctattgccttgcttcggcagaagaagagagatgatgtgctttcttctctgaatgacttgctcgcgtgcgatgccgctgtccctgcaccacaacctctgtcatggcccacaccggg

SEQ ID NO: 61895 - DNA, 259 bp, Setaria italica
  Peptide Sequence Number=SeqID_127869
aagcgtcaaggcaactacatcaacactcaggaagagtcaagttccaagaactctgaaccaaacttgggatggttcgtttgccatccaggacttagggggagaatgttagagttaagtcttgatggtgatagaataatgtattagtagtgcctgtgtgcacttgtatccgtgggtggttcgtgcctacgtgcaccttatcaccaattactgctttagatgctctttagatgctttgtttagcttgtaagccacctaccca

SEQ ID NO: 61896 - DNA, 346 bp, Setaria italica
  Peptide Sequence Number=SeqID_127870
cgccatgctgagacacttcccaattgaatcaaaggggcggagaaagaagctttacgaggtcgggactgtgacaggaatttgtttcacatgtttcttgataagatgcattgtggtgtcattttcatcatttaatcctgaactatctcttgaagttttggatcatccagttttggatttcttctactatatgttgacagagatactgccttctgcccttgtactatatgttgacagagatactgccttctgcccttgtactattcatcctacggaaacttcccccaaagagagtatcagcacaacaataccacaccattcgttagatgtagtgccaagaaatccttag

SEQ ID NO: 61897 - DNA, 337 bp, Setaria italica
  Peptide Sequence Number=SeqID_127871
tagcttcaaaagaaaatgaaaaaggaaaatatacacttggacatgaaatagaaccatcatttcttttatagaaaaagtttggtacactaatcttttttgtacaaacaaaatgtaaagtgaaaaatgaatattgcatcataaaacttagtgatgatgtaaagaaattaagaggtggtccacattacttgtttatcatattcactcaaagttggcaaattgatgtggacttgtgaaacatggaaagtgaaaatggggccagcaagtgtagctgtgttcttcacaagacaattcacattttcaccagaagtctccacaacctctaaccaaacagatgttg

SEQ ID NO: 61898 - DNA, 426 bp, Setaria italica
  Peptide Sequence Number=SeqID_127872
gcaatttgatttttgctagtggactcaacgtcatatggatacctcagatatataatgtactagaaggaaccataataaagaaaacgaaaagcaggcggccactcaactattcaactgaatgtttaatcaagcacaagattggcagaactaggaagaaaactcacctccctgacatcctcagcagagcgggtatggggaaagagaaataatatcaacactgttacgggaaccccaagttgaaatgacttgtttatcatattcactcaaagttggcaaattgatgtggacttgtgaaacatggaaagtgaaaatggggccagcaagtgtagctgtgttcttcacaagacaattcacattttcaccagaagttctacctaactaaaccttacttaaacctaaaactaagtaattagtttagttttacta

SEQ ID NO: 61899 - DNA, 304 bp, Setaria italica
  Peptide Sequence Number=SeqID_127873
ctcggcgggaggaacatgaagctcagcgaccaggcggtcgaccatgtccggcacggactcgtagttctccgatgtcctgccggacatggtcgaccgcctcggcgggaggaacatgaagctcagcgaccaggccatgaccgcgctcaccgtcgacatcgtcatcatcatcttctccgtctgctgcatcatctacgccgtgttcttcaaggagcagtactgacggtggcgtatcaacagcagcagcaaggttgcgcgagtccaccacatacaagacagtcttgtggtattatcagtatgttaattt

SEQ ID NO: 61900 - DNA, 274 bp, Setaria italica
  Peptide Sequence Number=SeqID_127874
tgttggtcttggtttattactactagttcttctagtctttcttgtctactattatttcttgcccacagtactcactgcatcaacaggatagagccctcgaagtgtctccgcaccaagcaaaataccatcagttccatccaggacagcatttgcaacatcagtggcctctgcacgtgtagggcgcaggttgtcaatcatgctgtccacaactctagtaacgatcacaggtttaccctccagattgcatttatgaatagctgtcttctggaacatg

SEQ ID NO: 61901 - DNA, 381 bp, Setaria italica
  Peptide Sequence Number=SeqID_127875
gccaagtgagaagcacccaggaagcttattagaaggttttttcatactcaaatcagtaccatggcagtgaaggataatttgctagtagctggcggtctccaaggagagctaatatgcaaatatcatttgtaattatgatgcagcacctagatcgagaaggaataagcttttgctgcaggacaacatttgatgataatgcaattaccaacgcattggagatattcaacacatctagtggagctcttcacttcattgcatccaacaatgattgtggtgtaagggagtatgatatggaaagataccagcagtataagcatttccgatttgattggccagtgaatcatacttcatttgaagacccttagtaattaggtaaaagta

SEQ ID NO: 61902 - DNA, 536 bp, Setaria italica
  misc_feature (67)..(67): n is a, c, g, or t
  Peptide Sequence Number=SeqID_127876
ttgagcttggccacgtacgtgtccacggtggagaaggggtcgtcgcaggtctcgatcacgttgtacncgttcatgaagagcgtcgccagcgggtccgcgtcctgcgccacgctgaagaactccatggacgcgttgggcccccagccgctgctcgtagaagttgtagtggagcatctcgttgttcacgtcccagtgcgcgaactcgccgcggtaccgggtcatgaggctctggatgcgggtgttcacggcggaccggaggtcgtcggccgtcaggttcttcacccaccggggcgtcgcgtcctggttctcccagaagatgttgtgcccgcgcaccatcacgcggtgggaacgcacgaacgccagcatctggtcggggacgtcgaagcggaggagccccgacatgggctccgtcgagtaccacttgagctcgtcctcgaacaccgccgcgttgaaccggtccaacgaaaccaactgctggtaacgacctaggttagacccaaggaataggtaggaaggacgaatacgaccgaacccga

SEQ ID NO: 61903 - DNA, 377 bp, Setaria italica
  Peptide Sequence Number=SeqID_127877
tattattcgttaattgtaagtaaaacgtacgtagtcgtctattgtattattagttgtagtcgtccctaaaaaccaaataaccaaacaaaaatagtaagttaggaatttaagaaagacctacccaagacttagaagaagtgcagtaaaatctgggggtactgtagagctgttgcttcagagatatccttgtcaaaaattatagtcatcacaggtagacttgtatagaaaacattataagccatcaggctaactgaattgaataagctagttcctgagagccccgaaaagaaggcaaacagaatttgtataaagcatataagaagtgacttgtagaaggaatactgtgaaataaatgccgttcgattgtatgaataacg

SEQ ID NO: 61904 - DNA, 350 bp, Setaria italica
  Peptide Sequence Number=SeqID_127878
ttttttttaactaaaagaaaataaccgaaaaataaaaataatacaataaacgaatacaaaataaacagtaaagtagctgtgacaaaaaagaaagaaagaatagttaagtaggatacatttcttggcctgagaacttatctctcgactctcaactgaaagcagcttactgaagaaagaactcgagcttcagtccttctacagtacatcccaggcccaggtgacaccaaccaacaatcctctacatcctcgtaacctgtctctctcaagcagttttattattcacaacccaattagcaatcaatccaagctcagattgttccctccatccatcaccaaccatcgatctccaa

SEQ ID NO: 61905 - DNA, 211 bp, Setaria italica
  misc_feature (204)..(204): n is a, c, g, or t
  Peptide Sequence Number=SeqID_127879
ttttttttttttcttaagaatccgaaataaatatcataacgatcaaataacagtaagtagctgtgacaaaaaagaaagaaagaatagttaagtaggatacatttcttggcctgagaacttatctctcgactctcaactgaaagcagcttactgaagaaagaactcgagcttcagtccttctacagtacatcccaggcccaggtnacaccaa

SEQ ID NO: 61906 - DNA, 334 bp, Setaria italica
  Peptide Sequence Number=SeqID_127880
acgctatggaatggacaatctttaattttgaaatgatacttcaggctcatgatcaacctgtgagatcaatggtttggagtcacaatgaaaactggatggttacgggtgatgatggtggcgcaatcaagtattggcaaagtaacatgaacaatgtcaaagtgaataaaacagctcacagagaatcggttcgtggtttaagcttttctagaacagacttgaagttctgctcctgctccgatgacagaactgttaaggtttgggactttgcaagattgtcctaagtaggtaaaaattcttattttgtttacttttggtttcctacggtttgggtatt

SEQ ID NO: 61907 - DNA, 370 bp, Setaria italica
  Peptide Sequence Number=SeqID_127881
cacaaaagaatcaatgtaccaagtcgggactttacatcagttttcagacaagggagcagcagctacagatcatcctattggcaccagcagtttgtgccatcagaagaagtatacaccagctacacaagtatacgcctatctatctcgtcagtgtatgcctaattctccatctacctctttcacttagtaatgctcatcatactcacgggcagcagtcggactcagtttccccatgcgcagtgtgttgatttgggttctcacttctcaccagtggagctctctaccgtggcggtctgttattcacctgatttctcaccactgcagctacctccctggtcttgacttggactcttagcggtcgggctctcca

SEQ ID NO: 61908 - DNA, 329 bp, Setaria italica
  Peptide Sequence Number=SeqID_127882
aaatcattcaatcgtggcagaaacaataagtcgatgctggtgctccagaattgtacctgttcatagagtgatggcggttttgtttcagtgatgagtaatctggagcctggtcatccaagaccctgaataatctgtacttggaaaccaaacattgccaatgaacttcagcacggagtgttatgtgcagctggtgtagtaaattcatttggaccatatttccctgcacatccagaagcaaatacattttctgcgacttcagagcaggtgcagtacagcaatccgcacgcacctctaaaataaaataaaataacaaactaataaatgaaaca

SEQ ID NO: 61909 - DNA, 236 bp, Setaria italica
  Peptide Sequence Number=SeqID_127883
cgaggagcagctcgccgaggatctcgcgctcaagaggggcatctccgtgggggctgcggcaaatctgctggttgctggaggggagaaggacgacgacatcatcttttgattacctaaatcattcaatcggtgcgtagaatcatcaatgccttgtccttctgttctggatctgggatcagaaactttcacaatatgtgttcgctgcgatgatttctttaattcctatatggatccaa

SEQ ID NO: 61910 - DNA, 266 bp, Setaria italica
  Peptide Sequence Number=SeqID_127884
gtcatcgccttcgtcgtgcccatggcgcagtactacgcctacgtgtccaagaagttggactccctcttgttctccttgaacgacgggccgcccgtgtccggcagcccgtcgatcgccgccgccagccgcttcgccgtgctgaagatcgcctcgttgtacttctcgtccgtcgccagcactgggaggttctcggagacggtggcgtcgaggatctggtcgccgacggcctggacgaaggcggggccgccggtgatggcgccctcctt

SEQ ID NO: 61911 - DNA, 172 bp, Setaria italica
  Peptide Sequence Number=SeqID_127885
caacctggaacatatttacagatcttaccacaagtataatcttatagtaaacaagtttcaggttgagattctttcccttcgaggtgtggatttacctcagctagaaatgaggccaggagtgagtagtgagtaatccgaactaggtattccagagcatgacattacaacacag

SEQ ID NO: 61912 - DNA, 404 bp, Setaria italica
  Peptide Sequence Number=SeqID_127886
aacacatctcaagattgcacttttctatctataagaaatatcttactggattcctggattacacatcaggttgacagaaggttgctgatggtttgttgcggctcatccttctgaaaggacctctggggagctgtgtttttactggggagtatgacaggaaagcacttgatgaaacccttcatgcattctgcaacaactgatccttctaggttttggatttcgcctctgtatactaataggctatattgatcctcagggaagagagtgcattgtatttatacccattgaattttgtgtcaggaaataatgctatcgttaggattggtttgagtttgtagggaactatatctgatcaactttgatcagtcatcttctagtaataaagaagtcctagtgcatccaaa

SEQ ID NO: 61913 - DNA, 325 bp, Setaria italica
  misc_feature (302)..(325): n is a, c, g, or t
  Peptide Sequence Number=SeqID_127887
tccttctagggtaagtagagtgcattgtatacagaggcgaaatccaaaacctagaaggatcagttgttgcagaatgcatgaagggtttcatctaggttttggatttcgcctctgtatactaataggctatattgatcctcagggaagagagtgcattgtaaaatttatacccattgaattttgtgtcaggaaataatgctatcgttaggattggtttgagttttgtagggaactatatctgatcaactttgatcagtcatcttctagtaataaagaagtcctagtgcatcctttctgaaccnnnnnnnnnnnnnnnnnnnnnnnn

SEQ ID NO: 61914 - DNA, 242 bp, Setaria italica
  misc_feature (22)..(22): n is a, c, g, or t
  Peptide Sequence Number=SeqID_127888
aacgtcaaagcagcaaatgcanaagtttcagtattggttcctaaatttttagtataccttctttggttttttactagatctcaacagttctcctggatgaataaacttgcatcagaatcgtacaaaagttacatcaaaatcaagcagctatttttttctcctgtacctcccgagaaaggtgtattcccattggatcacttgcatgagtgtgacttcgagaagaaagactatcttgcctgcct

SEQ ID NO: 61915 - DNA, 390 bp, Setaria italica
  Peptide Sequence Number=SeqID_127889
tgatggttggggtctggctactgatggaaaggttctttttggcagcgatggtagttcgaagttatatcagatggatccaaagtcatttaaagttatgaaaatggtgaccgtcaagtatcaggataatgaagtccccaatattaatgaactggagtacatagatggtgaagtctgggcaaatgtctggcagactgcatagctagagtctcccctgaagatggccaagtgctgagctggatctttcttcatgagctgaggcggaacttgttgaattctggttatacggtaggtagtttattcgttattgttccttttttgtccagaatggaccatcaacaactggaacaaaaaggacaataacgaataaactacctaccgtataaccagaat

SEQ ID NO: 61916 - DNA, 260 bp, Setaria italica
  Peptide Sequence Number=SeqID_127890
ttaaaaatagcacgccacaactagtttacaaaattatcatagggcctttgcataacctgagaacagcttcattgcctctgcggacaacttcctctttaatggcaccattggcaacggcaataaaatatggtagcagattgcccgtggacttggaggttacagcgaaatacttctggtgtttctgcataaccgtaatcagtacatctttcggaagttctaagaaggaatcatcatattgaccaaggatgggcataggcgcc

SEQ ID NO: 61917 - DNA, 385 bp, Setaria italica
  Peptide Sequence Number=SeqID_127891
ttcccaactggaaaagttctggttcaccaccaaatggatggggatatgtttggagaaggtttaacccttcttggtgacagattgtttcaagtcacctggttgaagaacgatggatttatatatgaccgacataacttcaccaaacgcaagagttttacccataaaatgcgtgatggttggggtctggctactgatggaaaggttctttttggcagcgatggtagttcgaagttatatcagatggatccaaagtcatttaaaggttactgctgttgcacttgatattctgttaacataaagtcttctatctttttggtttaatatgtattttcatgcagttatgaaaatggtgaccgtcaagtatcaggataatgaagtcccaata

SEQ ID NO: 61918 - DNA, 236 bp, Setaria italica
  misc_feature (228)..(228): n is a, c, g, or t
  Peptide Sequence Number=SeqID_127892
tactgctaacagaagtaacatatacacggtacaggttattttcttcaatgtcgataatgctataaacactgaatgggctaagtctgcgtgcacagtacctatcagcaaccgcaaggactatgccagcatccgttcttggaaacacatcacccgaaaaccgaggaagtgctatctcaaatagtgcttctgcaatctcttcaggaatgccatctctcaaagcataatggngtgccata

SEQ ID NO: 61919 - DNA, 166 bp, Setaria italica
  Peptide Sequence Number=SeqID_127893
aaatagtctggcagacagactgcatagctagagtctcccctgaagatggccaagtgctgagctggatctttcttcatgagctgaggtctaaaaggctttgtcatcgtcgtgtagcatgtagtgttcccacctaagagtaatgatgtttgtgttgttgtcatcttgc

SEQ ID NO: 61920 - DNA, 270 bp, Setaria italica
  Peptide Sequence Number=SeqID_127894
actgcatagctagagtctcccctgaagatggccaagtgctgagctggatctttcttcatgagctgaggcggaacttgttgaattctggttatacggtaggtagtttattcgttattgtccttttttgtccagttgttgatggtccattctggaattagcctcgtttcaatactacatggtagctttgtcagggtaacggattgttccatcattataggtatatattatataagaaaagaaaatccaaatctaatagcagaaatggcatga

SEQ ID NO: 61921 - DNA, 285 bp, Setaria italica
  Peptide Sequence Number=SeqID_127895
aaaacaacaacaccaaagctgtatgtgtcaaccttctctgatagttggccatggattgcatattctggagcagtgtagcccctgcccaatagaaaagaatataataaaaaatataagataagtgcttaattcataatgccatactccatccaacccaattactattcgttttggcttttctagatacatagcttttactattacctatgtatctaggaaagccaaacaaacggtaatttgcaggaacattgtaagtttaaacaagcaaatactccctccgtccca

SEQ ID NO: 61922 - DNA, 196 bp, Setaria italica
  Peptide Sequence Number=SeqID_127896
atttctcgtcaacaacaacacaaccacttctgacatcattggccttgcagcaacagctgattgagtgcagagaagagctatctccatgattctttttacctcctctggcttataattacttactaaggaaataactaaagtaagaaattaacgtaaaccaaaaccaaaaaggaaaccaaataaacaaaaagtaaaa

SEQ ID NO: 61923 - DNA, 492 bp, Setaria italica
  Peptide Sequence Number=SeqID_127897
gaacaccccgccgccagccgtactgcgtcgcgttcgcgcgccgaatcacctcctccacgccgctgaacttgaggatgggtctggaccggcccgaatatctcctcccgagcgatcttcatttcgccttggcgtcggcgaacacggtcggcttggatgtagaagccccggctgcccgccctgtcgccgccggcgacgagggtggcgccgctgtcgacgccggactggacgtaccgcaggattttcttgaattgctcctcgtcgatctgaggcccctgctcgacgccattcctgaaggggtcgccgacgacgcgcttctgggcgcgggccttggacttctccacgaactcgtcgtacacgcgctcgtgcacgaacgtccgcgaccccgcgcagcagcattggccctggttgaagaagacggtcgttggttgtcgtcgtagtcttcgttacggttcctttggtttcgtttacgttttcggtttacgttttacttta

SEQ ID NO: 61924 - DNA, 199 bp, Setaria italica
  Peptide Sequence Number=SeqID_127898
atgatccccacgggcgaggtcgcgcctgtgtccggcaccccctacgacctgcgcgtgatgaggccgttgccgtcggcgtcgaagaccatgaaggcgtggcgcaggtcctcctcgacggcggcggcgtcggcgtcggcggagcgcacgagcgcggcgaactcgggcaggctgatgcagccgtcgccgtccgcgtccgcct

SEQ ID NO: 61925 - DNA, 439 bp, Setaria italica
  misc_feature (128)..(128): n is a, c, g, or t
  Peptide Sequence Number=SeqID_127899
atgttatttttctattggcactgtcactgtattttgtcttctttttctttgtttaccgctaccttttacaggataataattgtttttacctacaggaagttgcagtcaagaagtttctgcaacaaganctttcaggtgatgctcttgaggagtttagaactgaggtatacttgtctctggaatctggatgtcattccattggcataatagactgaactccaaattttggcgatgttatttttatttatgcttttgtattttctgaggcacacatgtctatatgcattctgtgtatttctcttcaatacttataaattacattaatgtttttgttagggtgtgacagttgatagataatgcttcattttgacaatagtttcttaattaaattgcaaattacagctgtctatgtctcacagttttggagaatatgccatcg

SEQ ID NO: 61926 - DNA, 267 bp, Setaria italica
  Peptide Sequence Number=SeqID_127900
tcttaatcataatactatttcagtgactgggaaatgattttcttttgatcctctttttgaaaaataagacatcatgttttttattttttaatttcagtccaaccctattgtgttccaggatcatttggagaagtttatagaggagaatggcatggaacggaagttgcagtcaagaagtttctgcaacaagatctttcaggtgatgctcttgaggagtttagaactgaggtgcgaataatgaagaggttacggcatcctaatgttgtt

SEQ ID NO: 61927 - DNA, 252 bp, Setaria italica
  Peptide Sequence Number=SeqID_127901
cgttggccagttgctaatctcctcgtcttactgatctgtttgttgagctgtctgcctaggtgcgaataatgaagaggttacggcatcctaatgttgttctcttcatgggtgctatcactcgtgtgcctaatctttccattgtcaccgaatttcttccaagaggcagtttattccggttgattcatcgacccaacaaccagttggatgaaaaggaaacgcttaagaatggcacttgatgtggctcgtggtatg

SEQ ID NO: 61928 - DNA, 233 bp, Setaria italica
  Peptide Sequence Number=SeqID_127902
acattctccttgactatgggaccagaatatcacatctcacaggtgaacctctaactcttaacttgttggcatgatttctcatataagcaaaaacaaagccatgtgtctgcttttctgtttgattgaattcatggaacaccattccacaattttcatctgcagatcacagatgctgtggttgttgcaaggtatctaggtgcaacacttgtacttccagatataagaggaaatga

SEQ ID NO: 61929 - DNA, 247 bp, Setaria italica
  Peptide Sequence Number=SeqID_127903
aggacaaggcggcggcctagttgcagcagcagcagaggcagtcgaggcagcactcgcaggtctcgtagcagcagaagcagcacagcgccgtgaagatgctgcgagacagttagaacagagacaaatgagaggaagcagagttaagttcagcagagagaaaacttcaggagaagggtgagagaaaaaacaggaaaatggcctttctggcagagaacgatgtgagtgagcatcgatttcacgtgcaaat

SEQ ID NO: 61930 - DNA, 250 bp, Setaria italica
  Peptide Sequence Number=SeqID_127904
tcgaggcagcactcgcaggtctcgtagcagcagaagcagcacagcgccgtgaagatgcatgcgtagaggcagcccttctcctcgtggcgcctctgcacatggtcgtagtaggacatctcctgcgcggatggggcgtcgtacatcttgcctggccggctggtgatgaactactgaagaagtagaaagaaagaaagaaagaaagaaagaaagaaaggaaggaagggaacaaaagggtaacgtaactaacgaa

SEQ ID NO: 61931 - DNA, 296 bp, Setaria italica
  Peptide Sequence Number=SeqID_127905
cggcgcggagaagttgccgtaccagatgaagttgacggcgatgcggcccgacaggagcgcgcccctgtggtacttcatggtaatggctggctcctgcacgagcgcggtgagccgcctcccggcgaggcaggcctggaacaacagcgcgaacgccagcagcgtcgctgctagagatgcggtggaacaagccattggtgatgtaggtaggaactaaccaaaataaaccaaaaaagaaaaaacgaaaaaacttaaaacttaaaactaaaaactaaaaggaaaaggtaaaaggggaaaaa

SEQ ID NO: 61932 - DNA, 108 bp, Setaria italica
  Peptide Sequence Number=SeqID_127906
ccagcggtgccagcttcaatgccaacggggcccacgggaggaggtacctggtcccgtgggccccgttggcattgaagctggcaccgctggcctggtccaccagcagcg

SEQ ID NO: 61933 - DNA, 202 bp, Setaria italica
  Peptide Sequence Number=SeqID_127907
ggctccctgcaaatggaggtacacagtatgctgttctgaaacatttaagtataactacaatatgagcagaggagaagaagctggttgcggagataaagaagactgccaagaccggaaatgaggcggcaaccaaaatattagctcggcaacttgtcaggctgaggcaacaaatcctcaatttgcaaggcacacaggggatagg

SEQ ID NO: 61934 - DNA, 202 bp, Setaria italica
  Peptide Sequence Number=SeqID_127908
gaggagcaaacttgaaagtgactctgttattccagtgaatgatttctctacatccttaagtaacactatcagaggtccagatttgttttcttctgaaagtgttacttaaggatgtagagaaatcattcactggaataacagagtcactttcatctttgaggagcaaactttgtgaaaaggaaacccccaggatgtgccttct

SEQ ID NO: 61935 - DNA, 149 bp, Setaria italica
  Peptide Sequence Number=SeqID_127909
atctacttggaggcacactggctgaaacaaggaattattagtccaagtgacatcaatatcacttggactaataattccttgtttcatcccgtccttaaaggcttgacatctacttggaggcacactggctgaaagatccctgatgatat

SEQ ID NO: 61936 - DNA, 348 bp, Setaria italica
  misc_feature (300)..(300): n is a, c, g, or t
  Peptide Sequence Number=SeqID_127910
aagaacgactagaccgtagaacaacaacaagaattacttacaaggtacgacttcctgaatatccatcagtcatattggcaagtgagtccagatcaacatctggtcccaactcttcttttgccaaaaattacttttaaaattttctccctatttgatgcatcaggtaagtttaccattaacctgcgggggaacctcctaatcacagcctcatctaggtcaaaaggcctatttgtagcaccaagaaccagtacacgctctttatcttttgtgcgcagcccgtcccagtttaccataaattcntttttcatcttgcgcattgcttcatgctccctggattctctctccttc

SEQ ID NO: 61937 - DNA, 176 bp, Setaria italica
  Peptide Sequence Number=SeqID_127911
gtgccaggaggtccaaaaagcaatattcccttgcaaggctttgttaactgccctttgcagaacaattcaggcccttgtaaagggagcatcaccagctcctttaatgtgtcctttacattctccaaggcttctgacggatgttataccacctaatgacattggagttacctttgatg

SEQ ID NO: 61938 - DNA, 297 bp, Setaria italica
  Peptide Sequence Number=SeqID_127912
actccaatttttgaggatccattgtcttcaaaagcaagcatcactctgcctcgataaccataacttggtcccctttgtgacaatgaggttggctgagctggacccacatatcttaccctatcaccttctctaaaagtatagctcttggatgtagctgttgacgattcctgtttgggtagtgatgcagaatgcagagtggatgttcccacaatatcagcattcacacttgaagtttggttgtctagtcttggtccttcctttgttaagtttgttaaacttagttcttatttctttgtt

SEQ ID NO: 61939 - DNA, 400 bp, Setaria italica
  Peptide Sequence Number=SeqID_127913
acgggactagaataaccaacaccgaggtcgagactgatggtgtcactttcggctgcctgagaatattgattggtgaaggcccttgcatcgcatgctctcatcatgccaccaaggcccggcatgttgctgttaataggatgcacagcaggcttcatgggagctgtggacatttcatggcttgcattcctggaagctgggacttcatggttatgtttcccttcgtatgttgtgatcactgactttgggtcatgtgatgctctctcaacatgcttcctgaccgggcatcccatatgtgtgcatttgtagtaactcctgcaatcaagaacagaagcgaaaatatcacatatgaatgtactgcctaatgtgtcatccctaagtaaaaaagagtagcagacaaact

SEQ ID NO: 61940 - DNA, 329 bp, Setaria italica
  Peptide Sequence Number=SeqID_127914
accaaggcccgggccatgttgctgttaataggatgcacagcaggcttcatgggagctgtggacatttcatggcttgcatttcctggaagctgggacttcatggttatgtttcccttcgtatgttgtgatcactgactttgggtcatgtgatgctctctcaacatgcttcctgaccgggcatcccatatgtgtgcatttgtagtaactccgtggattggggtttcctttcactactttctgcccatacttgcgccagcgatacccatcatccaatattatcaactttcacttgtactagttttgttactaactaactacggggtcttcgt

SEQ ID NO: 61941 - DNA, 246 bp, Setaria italica
  Peptide Sequence Number=SeqID_127915
gaaggcccttcgcatcgcatgctctcatcatgccaccaaggcccggcatgttgctgttaataggatgcacagcaggcttcatgggagctgtggacatttcatggcttgcattcctggaagctgggacttcatggttatgttcccttcgtatgttgtgatcactgactttgggtcatgtgatgctcttctctaactattgtctttccttgtaccggggttcttatttcccttattttattttgtttt

SEQ ID NO: 61942 - DNA, 241 bp, Setaria italica
  Peptide Sequence Number=SeqID_127916
attgacagcaggagccactgactgagaattgagatgaggcttgaattcaaaatcccgagaacccccatcttcatggccactgccagctgatttatccctaggtgaaggcagtatgtccaagtgagtgctcttgttgaggatcgcagccatgctcagagtaccagttgttggagagggttcaaccaagcaaggccgctttaggccgtgggttgtcagaaagaagaatgaaaacgagaaacag

SEQ ID NO: 61943 - DNA, 337 bp, Setaria italica
  misc_feature (135)..(135): n is a, c, g, or t
  Peptide Sequence Number=SeqID_127917
ccattaagatcatgcttggacttgtacgagaaacgcctcccatcatactgtattttggggttgttcctcaagctgttaaagacattcttattaccatgaatatcaacataagttgcttcatttatttgctctgcngtaaaagcttgtcttgtcttgtagagcagttcgatgacaagtttcatctgtgctccaacaggggatttcctaatcgaattaatgtgctgaagcctttcagtgtcatttgaaaacttaataggttttgatggcctcgctggaacagcaggagaggtgccagtcatctttagctagcatagctttgacctcaaagccaaagcac

SEQ ID NO: 61944 - DNA, 321 bp, Setaria italica
  Peptide Sequence Number=SeqID_127918
aaaacaaaaagaaacaaagttaagaaataacttttacccttacaagaatacaatgcttggacttgtaagagaaacgcctcccatcatagcttactttggggttgttcctcaagctgtcaaagacagctttattaccatggatatcaacataagttgcttcatttatctgctctgcagtaaacgcttgtcttgtcttgtaaagcagttcgatgacaagtttcatttgtgctccaacaggagatttcctaatcgaattaatgtgctgcagcctttctgtatcatttgaaacttgataggctgtgatggtcttgctggagcgga

SEQ ID NO: 61945 - DNA, 254 bp, Setaria italica
  Peptide Sequence Number=SeqID_127919
gggccctgtgctttggctttgaggtcaaagctatgctagctaaagatgactggcacctctcctgctgttgtttgaatctggaaaggctatccttgagatccatctagaaaaagaacattcttgtaagtgattggttacataaacaaaatttgaagagaaacagctgaatgaccaggaaaagaactggagcagcagtatgctatggtcttccgaataagccagtactgaccaaaaaactaatgcaactgtttata

SEQ ID NO: 61946 - DNA, 174 bp, Setaria italica
  misc_feature (2)..(2): n is a, c, g, or t
  Peptide Sequence Number=SeqID_127920
cncggaggagagagagagagagagtaagagtgcaggccttggcgccttgcctaggaagcaggcgccgatcggcgaagacggtgcggcggctggtgccggcgaacttcgccgccgatgacggcgataacgcctccgcttccctcttccagaaacgccggccgcttctcaggtatg

SEQ ID NO: 61947 - DNA, 242 bp, Setaria italica
  Peptide Sequence Number=SeqID_127921
gtgctttggctttgaggtcaaagctatgctagctaaagatgactggcacctctcctgctgttgtttgaatctggaaaggctatccttgagatccatcttggcgccttgcctaggaagcaggcgccgatcggcgaagacggtgcggcggctggtgccggcgaacttcgccgccgatgacggcgataacgcctccgcttccctcttccagaacgccggccgcttctcaggtatggtttccttcc

SEQ ID NO: 61948 - DNA, 250 bp, Setaria italica
  Peptide Sequence Number=SeqID_127922
caatgtcctcctgggagtccatgtttgacaaaagccaaacttcacctgaagctttcagagcctagaccacagcaaatactcaagattataggtatatgcttaaatataaatagtagaagatttagcttcgccacttgtgattctagcacgctagttgagattgcacctgcagatcttccagtacattggggtatgcatccttgacttccactacagcaagaccttctgggaacctttcttgtacaaaaac

SEQ ID NO: 61949 - DNA, 212 bp, Setaria italica
  Peptide Sequence Number=SeqID_127923
ttagggtacaagactagactacgtacgttttagacaagtagttggtacatgggattgaagccgttcttctgaagctccttttccatgtccaccatgtcgcgtggtaactcaatgtccccggaagagctgtttcagatcatcatcaaccttgatcttggctttaggatcattagggtacacaatgtcctcctgagagtccatgtttgacaaca

SEQ ID NO: 61950 - DNA, 220 bp, Setaria italica
  misc_feature (40)..(40): n is a, c, g, or t
  Peptide Sequence Number=SeqID_127924
cccctgtgtgccttggcagtctcttttttaggtttttttnttttttttgtttacacaatctgggaaaattgtttttcacgacctttggctacattacatcattacatggctctcaaaaacatgaacattaatgttacaacagaattgcctttactcagtttcttgtaagcacagctactccagattacaagaaactgagtaaaggcaattctgttgtaac

SEQ ID NO: 61951 - DNA, 134 bp, Setaria italica
  Peptide Sequence Number=SeqID_127925
cacgacctttggctacattacatcattacatggctctcaaaaacatgaacattaatgttacaacagaattgcctttactcagtttcttgtaacattaatgttcacgacctttggctacattacatcattacatg

SEQ ID NO: 61952 - DNA, 323 bp, Setaria italica
  Peptide Sequence Number=SeqID_127926
gttatacttgctgtgtaaggagaaaagcttcgccaaaagttggacattgcgggaggctgctgtgatgacttcctttcacatctgctgtgttgttgctgcgcccttgttcaagaatggcgggaggttgagattcgtggagcttatggcgaaaagacgaagactaccccaccccccatgtcaatacatggagcactgagcagccatgacaggggacctggacttctgtaaagatattgacaaaatatattctgatatcgtacttccagagttagttgtattacttgtattacgtactaattatttttcttgtttgttcttgttta

SEQ ID NO: 61953 - DNA, 247 bp, Setaria italica
  Peptide Sequence Number=SeqID_127927
tggatgctgatcttttcttgctaattccagattatatgaaacctgatactgagtcgtataactgggttatacaagcatttactagagcatcttcttatgacaggtatatatttacttcaatatataattctgtagttatccactatttgtttgattcattctgttggtcctgtttaattgagccatccagttaacacagtcatgtattggtttcttcttagaatcaaatctgatctgttgggtccaa

SEQ ID NO: 61954 - DNA, 452 bp, Setaria italica
  Peptide Sequence Number=SeqID_127928
gttttctgggagagactcgaaactatctttgtgaagaagatagtaatgaagatgatcaagatttagatgatgaattggatgatgacgacgacgatgaagatgacgacgaatccacaaaagaagcagaagaagatgagatagatgatgaagaggctgttgagcaaactgaaaacgacgtttccaaaaactccgtgttcccatcttctagcttgattcttgagatcaactcatctaacccttcatcaacctcttcctcatcttctacaggaggaacccaaagtggtataccacgtgaacgattgattctcctagctttttgaactcgttggtaaagtacttgtctggttccatcagtaggcaatccttgagcttcaagctcagttttcaactcagatactaccattttgcttagcagccttgggcttagcaacattcttctttggccctacaac

SEQ ID NO: 61955 - DNA, 267 bp, Setaria italica
  Peptide Sequence Number=SeqID_127929
cgtttgggcggtggctggaggagtggggactgctggttgtgattggggaaggacgggagtggcatgaagaaagttgtggtgggcggcggctggtgctggaactggtggagccgagatccgtgctggactgcacgctgagccacagccccaacaactccaaatcgacgctgtcgtcgtccctgggcggcggcgccgcggactcgaccggcgtggcggcggtttcggacagcagcgcctccgccgccaccgaagcccaccgaggggatc

SEQ ID NO: 61956 - DNA, 251 bp, Setaria italica
  Peptide Sequence Number=SeqID_127930
cggtagtcctctttccctccattgcctcctctttctgctaccttccttggttacctagctaagtttattagtgctgcgagaatggaaggtcagcacgatcgccgccatggtctatggcaatcacaatcttaggacctagctgtttcaccaaccgaaggatcgctggcaacggtggtgcacgagcagagcaaccaacagggaggacaacagctacaacttcatcgcctgtggtagaaatgagctccgcagga

SEQ ID NO: 61957 - DNA, 247 bp, Setaria italica
  Peptide Sequence Number=SeqID_127931
cgggcgggcggcggcctagggttcggcggtgggacgtgcgtgtgcgtcgcgggggaagatgatggcgccggccggatgtgtacgaccgaccgggatgaggtggacttagaatttttgacgaaggcgtgtcggggggcggaccaatactacgggggatagattgagatgtgaccggggctcggctgtcggtccgaggtttcggttgccgttggaccgtggtgcggggaggaggcaagctggcaggaac

SEQ ID NO: 61958 - DNA, 224 bp, Setaria italica
  Peptide Sequence Number=SeqID_127932
caaaccctcaggcagctcagaaaagggtaaccttgacaacttagtgaaggccatagctggtgttaccatgtccagcaattcagagtctgcaaagcccagcaaggttgcaaagcggcgacagaagaaggcaaaggaggaagctgctcgagagcaacggatccaaagaagaacaaagtaatctcgtcagccgaccgcatgctaggaaaacgataagctacgaaagt

SEQ ID NO: 61959 - DNA, 342 bp, Setaria italica
  Peptide Sequence Number=SeqID_127933
acaaaagaaccagcatttgtcagctgataactaagacagaaagactacattaaatttcaaaaatctccacatgatggtcaaaacggtagaatttaggaatactttgaatgaaaaaaatgcatataaagtgtattacatgactgcaaagtcactgctcctttctttagtccctgataaccttgtcgagaatgcaacccacggaagtgtttctgaatacaaagggttccatggagcatctgttttttagcattttccagtgcagcaacctgtcctgtacggaaaaacaattttgtgtagccaacttgatacatttcagggggaatgttcaattgctgcaaaaca

SEQ ID NO: 61960 - DNA, 232 bp, Setaria italica
  Peptide Sequence Number=SeqID_127934
ctcgtgcggccacatcatcagaagctaggctctgcagtgaagagagctgtctcttccacgcctcttccatagatttcattttagcctcatactctgaccatttcctctcatactgttccaattgttgtttcagcattacattttcttcctctttgtcccgcaatgcagcctcagtttttgaaatacgaccctcaagttctttgatgactggctgctgtggataatgtccatt

SEQ ID NO: 61961 - DNA, 226 bp, Setaria italica
  Peptide Sequence Number=SeqID_127935
ctggttaccacagcagagcataaactttcagagtaagcaggcaccaaagggaagaagaacagagtaaatgcgttacacatttgaacattttcttactgtacacatcttacagtgctggtgtcgcatctctatttgctcatggtggataatctgtactaattacccttccatatctctggtttatcactctacatacacgatgacatacatacacgggcaactgagg

SEQ ID NO: 61962 - DNA, 245 bp, Setaria italica
  Peptide Sequence Number=SeqID_127936
taccttaccccgttaccaagaagaataggttaatttgactaacaaacaaataccaagtacaaaataaagtagtagcaataagattgactttgctagtgcatcccttgcatcgatggcctgagtcaatgtcagctttttaacaatactgtcatttccagctcggattttacgagtgcacattgcagtcaccagttgattggcagtgcagcctagtagctttgcagcagtagccaacccttcatttg

SEQ ID NO: 61963 - DNA, 356 bp, Setaria italica
  Peptide Sequence Number=SeqID_127937
caaatcagctcttatacacacgcaatacatctttgatttaaaattctcggactgcagaactgccaagcagttacatagatgaatattctcaacaaggatgtgatctgtgagaacagcatccgctgcttctctcccaaaaagagaggtacagccatcaatgaatgcatatgcaatacaattgacaaaacgtctaaacgaatgataaatataacagaaacagtgaagggttgtggttaatgacttactggacgaattggaagacccattggacttaagacacaatctggaggcggcagtgatctcaccctgggatgatggaacttgcacacttgcacctaaattttactaattcttct

SEQ ID NO: 61964 - DNA, 283 bp, Setaria italica
  Peptide Sequence Number=SeqID_127938
ctgatgctgagaaaccataagcgtagactcccattggagcggtcattggatggtcgaacttacagttggctcaaacttgcagatgccataacgtgaatagaatttgcagagttcttcacccctgggatgatggaacttgcacactgcaccaaatttacaatctcctgtcttcatgtaatattggcattctggttgatcaggtctctcaggaaatacattctctctctgcagcgcatattgaggcacaggaaacgaactagtattcttgttagggttgttattt

SEQ ID NO: 61965 - DNA, 423 bp, Setaria italica
  Peptide Sequence Number=SeqID_127939
tttcttgtaagtctttgtattagggtattgttcccttgtctaaccttattgtagttattttcttggttctcatggcatgatctctgatgaaatatttctagcgatcagccacagttgtgattttgaggattacaccttcaatgacccccataatgagagcaagtcatgtaacgatgccatatctgaagcaaacactatagttgggcagtacgtcaacaactacgatgttattctcgatgtctgctacccatcaattgtgatgcaggagctacggctgcgaaaaatatgcaacgaaaaatcagcgtgggagtggatgtttgcatgacctatgagaggtttttctatttcaatcttccagaagtgcagcaggctctgcatgctaaataggacacatttgaagtatcaaatggggcatgtgcagtg

SEQ ID NO: 61966 - DNA, 269 bp, Setaria italica
  misc_feature (18)..(18): n is a, c, g, or t
  misc_feature (150)..(150): n is a, c, g, or t
  Peptide Sequence Number=SeqID_127940
cggcaatgtcttcaggcngtaaaagatgccggttttgaggttgtttgggataaggatcttgctgaagattcccccttgccgtggtacttgcccttggatccaggaatgaaggttttggatgtgggctgcggaataggtgggccactaagngaaattgcaagatttagctcaacttcagttactggattgaataacaatgaataccagattaccaggggaaaggagctcaatcggctggcaggagttagtggaacctgtgattttgtacg

SEQ ID NO: 61967 - DNA, 331 bp, Setaria italica
  Peptide Sequence Number=SeqID_127941
tacgaagaagtacgaagaccaatccaacaacccccgtcgtccgcggctctcatctgctccctccccgcttgctccaaccagtcgcccctcctcgaatccctcctgcactgccgcagggtggatctacccacacggccctgggatagtctcctctccccagtcggagaaagtattgcaggggcatttgatccaacgcggcggcggcggcagaggacacgatgtcgaagtcgggaacactggatcttgcgtctggccttggagggaagatcgacaaggaggaagtcaagtcagccgtcgatgagtacgagaaataccatggatattatggagg

SEQ ID NO: 61968 - DNA, 235 bp, Setaria italica
  Peptide Sequence Number=SeqID_127942
cctatcccctgtgtgccttgcctatccccttttgcgtgtctcacgacaaggaggaagtcaagtcagccgtcgatgagtacgagaaataccatggatattatggagggaaggaggaagcaagaaagtccaactacactgatatggttaataaatattatgatcttgccactagcttctatgaatatggttggggtgaatccttccactttgctcacagatggaacggagaatcttt

SEQ ID NO: 61969 - DNA, 202 bp, Setaria italica
  misc_feature (180)..(202): n is a, c, g, or t
  Peptide Sequence Number=SeqID_127943
cttttgctgttcttggactgacagtttgaatccctttttcttgtcctaagctcagtagcacaaaataagtgcctgtacacgactcctttgattgatctagtaaatgttgaaataagtgcctgtacacgactacctttgattgatgtagtaaatgttgaaataatttcgggtgatgattcnnnnnnnnnnnnnnnnnnnnnnn

SEQ ID NO: 61970 - DNA, 172 bp, Setaria italica
  Peptide Sequence Number=SeqID_127944
caacttcagacaatgttgtccgtgctggtgagtatgaaggaatatgatggattttacttcgctaccccatcatattccttcatactcatcagcttgccagtatcctcatgcctacctctcctggggaatgcattgaatgtatggcaacttcagacaatgttgtccgtgctgg

SEQ ID NO: 61971 - DNA, 459 bp, Setaria italica
  Peptide Sequence Number=SeqID_127945
gtcacggttgcttttgcagagagaaaaaagaaaggacccttgaacattgaacaaattgttaagatgtttccaggatgaaaagacatcaaagataaggaaaggaagatatgtatcatacttctgttggaagcagaacaacaggctcactgttgttagcagccccaacatcaaccacgatagctgtaaactcagtgcccccttcaaggaaaacctctacaataactctatcatcaattccctctgaaattatttcctcagctttctgagcagcgtcattcacaccataagcaacaaccacaccaatacttgacccagccctcgtaggtttgacaatcacttttccattttcttgctcaaatttgtggttttggaaccatgcctccagctctcgcttagccaacttgtccttctccacaacgaaagtttggcacagttaagaaccttgtacatcaagctcga

SEQ ID NO: 61972 - DNA, 274 bp, Setaria italica
  Peptide Sequence Number=SeqID_127946
caaccatcaaaacaagcagaatcaatccaaaaaggtacatccagacagaaggtttttgtgatcttcggaggggacacttcagagcggcaagtatcacttatgagtggcaccaatgtctggctcaatttgcaaggttttgatgatcttgacgtgacaccatgttttcttgcacctgctaatggatatttcaactcgttctggttcagttgcctcaacacatgcagcatgaacttcttcagtggtatgtcgtaacacttaattgtaattacggtct

SEQ ID NO: 61973 - DNA, 388 bp, Setaria italica
  misc_feature (43)..(43): n is a, c, g, or t
  Peptide Sequence Number=SeqID_127947
gtttgaatggtaccatcctctccaataccaccatgcactgctntaaacactacagctccagcttcttttgcatggttgatccactgttgcagtgagtatttgataggttgttcataagcaatgtcaaagcccgcaaaccaatcatgtttgcttaatgctggcccaagttcattcattacttgttcacgcaaacgagaagttatttcaactcgttctggttcagttgcctcaacacatgcagcatgaacttcttcagtggtatgtcgtaacactaatgaatacggcagcatccaaacttcacgtgaaatgtcactgaaattctttggttctattgggtaggtagtaaattattccttattttagttcttaggtttgttcttaagttaaa

SEQ ID NO: 61974 - DNA, 151 bp, Setaria italica
  Peptide Sequence Number=SeqID_127948
tccagtgccaccttgaaatttctcctcaagagataaaatatcaccactttctttcactgtgatgcttggatttggtcgtcagctgctactacatcgactctggcatgaacgccttcgcgatatcgccggcgcagctatattccaacacacc

SEQ ID NO: 61975 - DNA, 244 bp, Setaria italica
  Peptide Sequence Number=SeqID_127949
accctttggaaggacatagccaccgatctccacacgctcggaggtctctcgcgccaccaatggcgacaccatgaagaacctcatcgactccttcaccacctggtcgaggtacgggaacttggtctgaagatcgtccgccgtgggaacgctgtcgcgggggccgaacgcgtcgatctccctgagcagcttctcctccacctccgggtgcttggcgacgaggtagaccaccgaggacagcgtgaac

SEQ ID NO: 61976 - DNA, 384 bp, Setaria italica
  Peptide Sequence Number=SeqID_127950
ttgttggtgggtgtggctctggagggatctcccatgtcatgctattgtctttgcaaactccccaatggatgacaacttctccaggaatatcggtgtcaaattccacaagccttttatgtgtttcattatccctcttcacagtaacagttacaaagttctgggtgtactccgatttaataatttggaattcctgatagaacccggaaatatgttttccacttaaacctgtacccccaggtatagtttcttgtggctgagcattagatccttcatgtttcttcaaatggcccaaatctcctggccatacaaccaaataatacttaggtttagttacctaaataggaaactaccaaccgtacaaaaggaataccaacttaaagggta

SEQ ID NO: 61977 - DNA, 214 bp, Setaria italica
  Peptide Sequence Number=SeqID_127951
ttttttttgtactactttctaaacttggtctattactattgtctttggctaaatgtgtatgatcttacatagctccaacatagcggaggcatatctgaagtgcagataagcacaacagagctaaatgaatgggcaatgtgcctacataacaggtagttctgtatcatatcaaatgttcgactgtattatatatagcttcgcgtcagcacaatcc

SEQ ID NO: 61978 - DNA, 290 bp, Setaria italica
  Peptide Sequence Number=SeqID_127952
ggggacattcttctgaaaaagtgtttgctggccatctcgggatccaacagcaacaactcctgtgcatccatggtgactccaaaaaacagcttcggcaccttgtgcctatgattgatttctagtattgtgtgcctactatctgttaaccaccttgataatgtatcgggtgagctttgttccttgtaatttgcctggtggttgctaatgggatggaatgaaacggtcgtgtaaggtattgttgttaattccttaagttaaattttgtttcttttgtttttggttttctttaa

SEQ ID NO: 61979 - DNA, 301 bp, Setaria italica
  Peptide Sequence Number=SeqID_127953
taccaacaatactagaaaatgagagctcatttgctgtcccctcatcatccttgtagccagtcttttctagaatttcatgtattgctgtcagatcctttctggaacaggcttcagcaagaggggaaagagtcaatgattggatagatgatgcaccgccacgtggaatgtccattagttcataagatggagtctgcaaaagatttaaacattatatactagttcaacaaagatggcagaacagtatctatctgaagacggacaggaatggtccatataagatgggagtctgcaaaaagtttaa

SEQ ID NO: 61980 - DNA, 259 bp, Setaria italica
  Peptide Sequence Number=SeqID_127954
attaatttcctgtctgcggtacttattcacctttggatgtctttgccatctctttcagggcctctctgttgtcgctttcttccatatatacatcctacatgaagtatatgggagggacgactttccaaacgcacaaaatctgaagaaggttaaccaacccctagccaaattgacaaatcaccaacacctgcttccatacacaatcatcggcccacataacactgtccatgagggtcgtatctaccagctgaagttgttc

SEQ ID NO: 61981 - DNA, 292 bp, Setaria italica
  misc_feature (272)..(272): n is a, c, g, or t
  misc_feature (282)..(282): n is a, c, g, or t
  Peptide Sequence Number=SeqID_127955
tttgtttatttggtttcttttggttttttaaacccttagttaggttaactttagttagtaaccttccgtctaaggtattattcctattcgttccaagcgaatcggaatagcgaaattgcagattatggtacataacaagatggtgccaagtatattagttggcaccatcatccaatatagtagtatatacattctgctgagtttcatcttcacaagcggctcattgaggaaatttgaacattgtttgagaatctattgtagtgcagttttangcatggaagngagatattta

SEQ ID NO: 61982 - DNA, 256 bp, Setaria italica
  Peptide Sequence Number=SeqID_127956
catgtaatgtactgtagattatttaaaatgaaatgcgccttgtattattttaatagaggagttactaatacagcttaaatttttacccttgcaaattttattttgcaaacttcatctataatgttatgcagcattatttctcgtactttttgcaggaagttgtatgttcctattttgggaaagcatgtcttgtcagtagttgtatcatatatattctgccacctgcttgtttagcagaaccatgtgagcaagagta

SEQ ID NO: 61983 - DNA, 274 bp, Setaria italica
  Peptide Sequence Number=SeqID_127957
taatttggttagttaaagttcttatttggttcttaggttacttacttaggttaatttgtttggtcttgtaggtccgttttacattctcaagcccatggtcgtccatcattaaggagcttggttatagcatggaacaagatgctacagaaggagctggatcacacaccaacagtgaaaaccgatgccgcagcagcgttcttggcttctcttgaggatccaaaagctcaccagcttgggggaaactgagaaaaagcctcccattgaaatacttcct

SEQ ID NO: 61984 - DNA, 240 bp, Setaria italica
  Peptide Sequence Number=SeqID_127958
gtgtaaagcaggtttccttttatgatgacgatgttcgcttttggcaacattggcgcaattgttctgctgctgctgaggccccaactgcagtcaatcaacaagcttccacattcagtgcgcctgcaccgtcgacacgaggaagacactttgttgtcatttgctgtgagaacaaagtcatatttttggatttggtgactatgcggggtcgtgatgttcctaaacaagagcttgacaacagat

SEQ ID NO: 61985 - DNA, 271 bp, Setaria italica
  Peptide Sequence Number=SeqID_127959
accaattttggttacactgagttgtttatggatcaacgaaaaatagaaatggcacagaacatttgtatataacttgtaaaaaactttaacctagcatgtgggttggttaatactcttttttatatgtgtatttgtcaaggcccatgatggaggtgtggttgcagttgaactttcaagggtgatggggagtgctccacagctcattacaataggggctgataaaactttagccatatgggatactgttactttcaaggaaataaggcgcatt

SEQ ID NO: 61986 - DNA, 221 bp, Setaria italica
  Peptide Sequence Number=SeqID_127960
ctttagcttcatcactgctgggagctgcagcagcttctgcagacgggggagctgcatcggcagctgtagcttccgacggctttgcctcccattgaaatacttcctcctgggatgcctcccctatctgcacctccgatcgtgattaaaaagtctgccacaaaacctgacctacctaatgcagcaccggcctcaaatggacctataggtgctccgatggttca

SEQ ID NO: 61987 - DNA, 174 bp, Setaria italica
  Peptide Sequence Number=SeqID_127961
agcttggttatagcatggaacaagatgctacagaaggagctggatcacacaccaacagtgaaaaccgatgccgcagcagcgttcttggcttctcttgaggatccaaagctcaccagataggggaggcatcccaggaggaagttatttcaatgggaggctttttctcagtttccc

SEQ ID NO: 61988 - DNA, 276 bp, Setaria italica
  misc_feature (194)..(194): n is a, c, g, or t
  Peptide Sequence Number=SeqID_127962
tttattgggttccttgggtatgggattggatgctggacggtggcgagaagaagacggctgaatttgattgccagagttctttcttggtcgttcctcgtctaatctcatcttagaatcttcttgattgcaatccgtttcagggaacgtcttcgcattcgtgctcttcatctccccactgtaagttcccccttttnttgattattaagcggatttccttggtcaaattaatctcgacaacacaagttttccccttgtttctatcctcaaccgatccaa

SEQ ID NO: 61989 - DNA, 471 bp, Setaria italica
  Peptide Sequence Number=SeqID_127963
tggtcctagtcgtagtacttattttggtacctattgtctaacttgtcgttcgtattttcttgtctttgggtctacttccggttactagtttcctagtcctttttagtctaaggtttagtttctttcgtttccatgactgcggggtcttcgtcaagaagcttggaaagttgcttcatctctcttgctcctagttcagtgaagaagtggtcgagaagtgagcgctttgcctcacggacttgacaataaacaatagatttcgggatagagtttctcaacgtcgcgcacaccatattaacatatgatagaacagtttgtccaattcgtctaagataagagtcgttatatctatcaaaaatagagtggcttggatttccacccttctcaacatcctgaggaagcttcctgaagaaatctacagtcaagtagctgcattccatatcaaccagctttaatgtattcttcttgctttca

SEQ ID NO: 61990 - DNA, 240 bp, Setaria italica
  Peptide Sequence Number=SeqID_127964
cccaggaagagatatacagattttgctgctgtgaggaaggagatagctgatgaaactgacagagaaaccggtcgctcaaagcaaatatcacctgtccctattcatttaagcatctattctccatatgttgtgaatctgactcttattgatcttcctgggcttactaaagtagcagttgagggtcaaccggacagtattgttcaggacattgaaaacatggttcgctcatacattgaaaag

SEQ ID NO: 61991 - DNA, 331 bp, Setaria italica
  Peptide Sequence Number=SeqID_127965
tttagggggttaagttaaatttacttaaccttaaaacttaaaggttaagttaaaagtattgtaactattgtctaagtagtctagggttaagtttggtccagcgagactatttggaccatgcaactgcgtcgatttctgcttgggcactccggtacagttccagccttttagcaaggttagttcttcgttccatgactgcggggtcttcgtcaagaagcttggaaagttgcttcatctctcttgctcctagttcagtgaagaagtggtcgagaagtgagcgctttgcctcacggacttgacaataaacaatagaatttcgggatagagtttc

SEQ ID NO: 61992 - DNA, 231 bp, Setaria italica
  Peptide Sequence Number=SeqID_127966
aatattgtcaaatcaatcatgaaatattattttggtacataggtcttcatatgtttgtatatagatttggtcaaagctaagatagtttgacttaaaacaaacctaaaagtagctatattttgtgagggatggagaaagtatttgatacttctcactgaacaggattgctgatgaaataaaccctgtaagtcgttagactacatcatcactcagggttgatgtagtctaacg

SEQ ID NO: 61993 - DNA, 180 bp, Setaria italica
  Peptide Sequence Number=SeqID_127967
tggttgcatggtggaccttttcagcagagcagggcttattcactctacatgtcttcaattccatggagagttgagtaatcgtgtcttcttcgtcgagcatcaaacactatggttgcatggtggaccttttcagcagagcgagggcttattcaccgtgcttatgaattcgttagcactatg

SEQ ID NO: 61994 - DNA, 198 bp, Setaria italica
  Peptide Sequence Number=SeqID_127968
ttttaggcatcttatgattttttgatgaactgggagctagaatgattctcaaagaaacattgtcagtcattttactaaagccaatagtagtaacttcatgatagtttttctcgaatacacaggagagctgcgtatcattgcattaagaccctaagtgtgggtggtgtgtggttgtatggctatctgagccttttcttt

SEQ ID NO: 61995 - DNA, 406 bp, Setaria italica
  Peptide Sequence Number=SeqID_127969
agtttccttgttatcacttgtatatctgcttcttgaagggggcctagatctgatttctttgatgcgcatctgaatttgccttttttctggagctctgagaatagatctcacagaaagtgtgttcttcacatcctttaaaggagcacgaaggccactggcacgggagcctgggtatctgaaagatgataccaatgcagcaaacttatccattgatttttctgcaattccactgtacatattcacatgggaaacattgcatccaaatcttccttcagtccttatatttgcatcatcaaggtcatcagtatcacgacctgcataagtttcttaagatcaagacaagcgtactaaaaatgttttttattatagcttgatacataaatgtattaagatacaggaagaacta

SEQ ID NO: 61996 - DNA, 309 bp, Setaria italica
  Peptide Sequence Number=SeqID_127970
aaaaaattaaaaccaaaaaaataaagaaacaaaaggaactaagaacggaagtaagaacgaagtttaatgcctgtgtttgctgaggtaaacgagaaaacagaaggctgagatgagaaagttggagctggctgtgctccaaatgcaaaaccaccgcttgaagacgctgattgcccaaatgtaaatgtgctgggaggggatgaacttgagccgaaagggttgctgaaagtggaggctgacgaagctgtggaggtgctggcaaatacacttgtactggccactgctgatgcaccagcagaagagctagctgaa

SEQ ID NO: 61997 - DNA, 362 bp, Setaria italica
  Peptide Sequence Number=SeqID_127971
aaagtttaaaacaaaaagaaaccaaaagaaaccaaataagggaatagtaggtagactaataggtcctagctgctggcaaatctgtatggccgtatgaaccggatcgtagttatctttctgtcccttgactatcaaccgagccgagagttgtcacgagaggtgcaggtccgatcattcttctgttcgacattgatcattccaacagaggggtttatctcttctttggtgcccttttgaccttgatcattcttctgttcgacttgtcaccgccacctccaccgctgcccaatgagaaattcccacctgaaactctagactgcctgcagctgggaaggatgggttctgctgtgctgcttgttgtt

SEQ ID NO: 61998 - DNA, 253 bp, Setaria italica
  misc_feature (12)..(12): n is a, c, g, or t
  Peptide Sequence Number=SeqID_127972
aattccaaaagntaaggtcccagatccagatgaagaagctccaacaccaggagtcacggacgggaatggtgagccaaattgtggtttgggactctgggatggttgttgaattgtgccctctgactgcgtcggcttactaccaaagaatgtgctagcagcagatggttgaagaaggtaactagccaagacaagaccgaatagaatagtagactagaaggaccaagtaaggactagggactaggacgaagttaga

SEQ ID NO: 61999 - DNA, 190 bp, Setaria italica
  Peptide Sequence Number=SeqID_127973
attgtttcacgtgaggaaaagaatgaagatattagaattgatgtaggcggatcaggctcaatggttcttgcacgcaacaagtctgtaagacgatcaaactcaaccctagtgaacgtcttccgcattaacaagtgctctacttcagacaatgctttgtcatctgatgtcgcagctatgttcttcccattat

SEQ ID NO: 62000 - DNA, 247 bp, Setaria italica
  Peptide Sequence Number=SeqID_127974
cgatggcaacgaaggcgaagaatgccatgctgatagccgccgccgccgagtcggtgaacaggttgtccgccttctggcgcatgtagtccgtcaccggcgccgccgcggacattcccgatatcatgaggtaagcgacgacctgcaccagcgatcgttccagtccccttcaagaaaaaaaaaaaacagaagcgagacagcaaacgcgatcggcgggtggagacgacacgacgctgccaggttggccatc

SEQ ID NO: 62001 - DNA, 354 bp, Setaria italica
  misc_feature (354)..(354): n is a, c, g, or t
  Peptide Sequence Number=SeqID_127975
taaaattaaaagttaactaaaggtaaaggtaaccctaaatttaagtaacccaagactacggaaatacaatggcatctgaagattatcgacatgatgaatataatttggagagagaaaatagacacccgcctagcaacccaggcccactagtggcatggcctggtgataaaaataacttcttcagtggccttgatgaagctagctttgcgcatgctgagcaaccacctgtgatgggatggactggttgggcctcagatgattcatcctaagtatggtatatcagcagaagagagccaatttgagccaaatatcaccgacaatcatttaatcaagaagcctatttcaattaaaacn

SEQ ID NO: 62002 - DNA, 195 bp, Setaria italica
  Peptide Sequence Number=SeqID_127976
gtggcatggaaagcacctcaacaaagggacctgattatgccacctagcagcatctgttgacttatcattttcagatgcacctggatgcatggaaagcacctcaacaaagggacctgattatgaaaatagtttttaccagcaacctcagcatgttgaatcgttctcaaagacttcagattatggagagcatattac

SEQ ID NO: 62003 - DNA, 369 bp, Setaria italica
  misc_feature (33)..(33): n is a, c, g, or t
  Peptide Sequence Number=SeqID_127977
gcttgatgagaagattgcaaactggacggcccncctttgagcaatgctgccatgctggatcaggaatcagaagtttgtgttccaagtgggcttgattctcgaatcgctctatgttcttcaactgatgagaatgtacatgaattggatcatcctcctttgagcagttcagttttaatcaatcctgagtcagaagatcatgtgttgggtgacactagttccaaggttactatgtgttctttagttgaagacaagattgatgaatccgaagatcctcaaccaaaccataattttcctgagaagggcctccatcgtgcaatggccgggtggaatcagtaaaaggaattcttgtatttgtcttctaatttgtaa

SEQ ID NO: 62004 - DNA, 270 bp, Setaria italica
  Peptide Sequence Number=SeqID_127978
aactagcgaaaaggatgattcccttatgggcaaacctgttctagttcaggagtcagaagtttttgccttcggtgaatttgattctccaatcgttccattatcttcaattgatgacattgaagacaatcaagactctgcttcgaggacttatgttcaaacagaacaagagtcagaatgctgcacctcaggtgaacttgattctacaaaccactaccaatacccctttagacttagaatagaagaaagaattaagaaacaaaaactaaggaa

SEQ ID NO: 62005 - DNA, 217 bp, Setaria italica
  Peptide Sequence Number=SeqID_127979
agtcgagagtggctgaaccatttatgtcattttcagtgaggtttaatgggcaataaataagctgccatgtagctaattttgtgacatggtatattatttatgaagtgagaagaaactagtttcatgagggatgaaaccatctttacaatatttccaacacattttgtgtaaaatcttagaaacaacaaaagatgaaataatacatcgtgcgacctat

SEQ ID NO: 62006 - DNA, 421 bp, Setaria italica
  Peptide Sequence Number=SeqID_127980
attttctttgttttagttctctgttgttcaacctagttttcgcatcaggaactgtctaaaacatgagaataacattatgtgtatgcaatttacaggtgatcgagtcagcattccagcaagaccgtggccagccaagtgccatggagaacttctcgaacaacatcctgggaggcaaaggccaggttaccgcgatggctgctctgaccgagctccgcaagatcagcaacctgctccgcgagatgtgatgtacccgcagtcccacacccaaggtgccacgccccccattctttcccgattcattagctcctcctcagataacgaaggcccctgtagttaaaattaaggcgcctaggcaccctctgtatatatagattccatcccattccattgagcccggtacgatagaggctctcctgtacct

SEQ ID NO: 62007 - DNA, 453 bp, Setaria italica
  Peptide Sequence Number=SeqID_127981
caattgtcttgttcagtaccagcactagctgcatagaaaactggagaattctcacccgtggaacaagcttctattccttttattgaactctcatcagtaggtttcactggagaatctacaagtggattggctgtttccacactcgagcttagtgttaaattctcactagctgcccttaactttagccgcgagggcctttcacgctccttgtgaattgagatagggaattcatcctgctcaattttcccagcgacttcacctgcccgtactacgtcatcataagaatttagaagacaacgtctcactgaattcttggcactaataataactggagaaacctgcataatgatggaacagctcccaaggagattgaaaaggtccaatcttataagagatcactaaagaaatcattgagtcaaaggcttggtttatcaaggacagaatcagatcctt

SEQ ID NO: 62008 - DNA, 277 bp, Setaria italica
  Peptide Sequence Number=SeqID_127982
aagtaactaagaaacaaagaacaaattagaccaacaaacaaacgaattactagaagaaggagtagcatcacttcaaactcgtgcgctggtgatgatgatagggatgaagttttgcaagatgagtcatccagcagtatatatgaggaccaaattgtctcagaagtagcggcatctgaaaaagatgcagatccagttggaccctctgagaaactgcggtatctaatgaaagaaagccatttattaataagctacaatggttcttgagatttggcagacc

SEQ ID NO: 62009 - DNA, 238 bp, Setaria italica
  Peptide Sequence Number=SeqID_127983
ggcggggaggcgctgctcgtgcggaggagcaagggcaagaagaggccgccggcggcggcgcatgcggagagggactccggcgccgggggtcggttccgctcgctcatgcgggactacaacgacctgctggaggtgggcagcgcgctcgccgtcttcccttggcagttcacttctcctgttcaatctagcatcgaatctttttttctctgcttttcttgctgctcctagttaatggatt

SEQ ID NO: 62010 - DNA, 385 bp, Setaria italica
  Peptide Sequence Number=SeqID_127984
aagaaaggggacttacttagacaagacaaaaaacccaaaattttgacttgaatcaaggctctgcaatgaatgatgaggggaatgattaccaggggcataggagccatctggaacttgataactttgatcaggttggggtggatgaagagatgattgcagccgatgtcaaattatctgtttgtagggattcaggaaattctccggcaagtgatgataagaggacaatcccttggcaagaccggttagcattgaaggcctagtccttccatagattggttaagaaataacaattctctatgataattgattacccttgctattccccaaatgcttagtagtctttgtactaggaacaatacgataaaggatagttgtatgcatggtg

SEQ ID NO: 62011 - DNA, 475 bp, Setaria italica
  Peptide Sequence Number=SeqID_127985
aagagcatcaagctcccctatttcatcatgatcttcgcctccgtccagttcgtgctctcccagctcccaaacttccactccatctccagcatctccctcgtcgcggccgtcatgtcagtcagttactcggcgattgcgtggatcgcgtcagcagatcatcacaagaaaaattcagcagaggtggactacaacctgcgtgctacgacgacacccgggaaggtgttcgacttcttggggggactgggggatgttgcgttcacatatgcggggcacaacgttgtgcttgagatccaggccaccatcccgtcgacaccggacaagccatccaagaagcccatggtggaagggtgttgtcgtcgcctacatcatcatcgccgcatgctactttcccgttgcgctcgtcggatattgggcctttggcaaccaagttgatgagaacatcctcatcaccctaaacaaccaaagtggctcatcg

SEQ ID NO: 62012 - DNA, 154 bp, Setaria italica
  Peptide Sequence Number=SeqID_127986
ggatcgcgtcagcagatcatcacaagaaaaattcagcagaggtggactacaacctgcgtgctacgacgacacccgggaaggtgttcgacttcttggatggcttgtccggtgtcgacgggatggtggcctggatctcaagcacaacgttgtgccc

SEQ ID NO: 62013 - DNA, 348 bp, Setaria italica
  Peptide Sequence Number=SeqID_127987
ggtggaagcatgccatagtctgttacgatcatcgacacataatcagaggggttgcatcgtacctatcagatgtacacaattacttccatcaaagggaatattaccagaaaaaataggcaggtataatggaatttagaaacatacgtaagatttaggagttggagatttgcattttctgcccagttcttaagatggtcctctgccttcccaggaactttcaaaatgacatccgggtcaccaagctcatttgcacatatagaatcaagctgcactctctcatgaaatttgtaccagaaccggtactccaaatgcatgtgcaaccatagccacagatgctgttccctaaca

SEQ ID NO: 62014 - DNA, 278 bp, Setaria italica
  Peptide Sequence Number=SeqID_127988
taagtaattggttccttcttgtcctttccctaggtaacttttctaaaattgtactattccgggttcaccaagctcatttgcacatatagaatcaagctgcactctctcatgaaatttgtatgcctcacagcaaaccagaaccggtactccaaatgcatgtgcaaccatagccacagatgctgtcccaactcgagaataaactgttccatttgataatattgaggacgcacccaggaagactcttgtaacttcatgcatgatgtatgagatggcattta

SEQ ID NO: 62015 - DNA, 486 bp, Setaria italica
  Peptide Sequence Number=SeqID_127989
actacaacaagctcttcactggaccgctcggtgagttttgccactctgctctctcacgacgaggaccgcgtcgagccactgcagtacccaccatggtggacattctcggcgaccagtcgctgctgggatgggaccggtgccatgcttcacctgatgcgcgacaacggtgagtctcgctccttgactgaggctgagggacacgtggcctggcgcatgcaaatggtcgctggatagcaagtccgctcaagttcgttgaggaagggagcgtcaaggcaaccacatcaacactcaggaagagtccttagaataatatattagtagtgtctgtgagcacttgtgtctgtgggtggttcatgcctacgtgcacctaatcaccaattatgctttctttctatgtaaaagctgctagacttagggggagattattagttaagtctagtagctctattagcttttattcctattttacccctttgcttagccacc

SEQ ID NO: 62016 - DNA, 335 bp, Setaria italica
  Peptide Sequence Number=SeqID_127990
ggatagcaagtccgctcaggttcgctgaggaagggagcgtcagggcaaccacatcaacgctcaggaagagtccttagaataatatattagtagcgtctatatgcacttagtgcctgtgagcactagtatccgtgggtggttcgtacctaagtgcaccttatcaccaattatgttttcttttatataagctgctagacttagggggagattgttagttaagtctagtagctatattagtttttatttctattttacctctttgcttagccaccaagctatctagcctatatatgtaactaaaactgggaattgctccttggtggttaacgagaaag

SEQ ID NO: 62017 - DNA, 240 bp, Setaria italica
  Peptide Sequence Number=SeqID_127991
atggacgctggatagcaagtccgctcaagttcgctgaggaagggagcgtcaaggcaaccacatcaacactcaggaagagttaagttccaagagttagtgcctatgtgctcttagtgcctgtgagcactagtatccgtgggtgattcgtgcctacgtgcaccttatcaccaattatgctttcctttctatgtaaaagctgctagagtttagggggagattgttagttaagtctagtagctc

SEQ ID NO: 62018 - DNA, 249 bp, Setaria italica
  Peptide Sequence Number=SeqID_127992
cctatacattttccatcttcaattcccccaaagcatagcatgcaatagcaatgcaaaactaataactaatggcagtgggtcctgacgacgtggaccaacgaggagtgcacggccatcctcggcaactgctacagcgcgctgccggacggcggcaaggtcatcgcctgcgagccggtggtgccggaggagacggacggcagcaccaggaccagggcgctgctcgagaacgacatcttcgtcatgaccacc

SEQ ID NO: 62019 - DNA, 292 bp, Setaria italica
  Peptide Sequence Number=SeqID_127993
taacggcaagggacagggaggccaacgaggtgatgctccgggccatgaccggcgtgtcggagcccttcatggaggcgctgctggacggatacgccgccggattcgagggcgtggccacgctggtggacgtcgggggcagctccggggcgtgcctggagatgatcatgcgcagggtcgacaccatcagggagggatcaacttcgacctgccagacgtcgtcgccgccgcgccgccatcgtcggtacggagtactcggtagcatgtagcagtataaccttatctgcgttccgat

SEQ ID NO: 62020 - DNA, 151 bp, Setaria italica
  Peptide Sequence Number=SeqID_127994
gcagaagcaagctcgtgttgccatggactccaatgaaccagttgagcaggttgagcaagttgagcaactggttcattggagtccatggcaacacgagcttgctcttgctgctattattgttcctgctgctctggcactgctttatatgagg

SEQ ID NO: 62021 - DNA, 444 bp, Setaria italica
  Peptide Sequence Number=SeqID_127995
ttgaggggcagaagacagcggctattgagatactgcagcagttcgattgggaggtgccagattgggtcattgttccaggaggcaatcttgggaacatctatgccttttacaagggattcgagatgtgccgtgttcttgggcttgttgatcgtgtgcctcggctcgtctgcgcacaggctgccaatgccaacccgctgtacagttattacaagtcgggttggactgagttccagccacaggtggccaagccgacatttgcatcggcgatccagatcggtgacccggtgtctgttgaccgagctgtggtcgcactcaaggcaacaaatggaattgttgaggaagccacagaggaagagctcatgaacgcaatgtcgcttgctgaatcgcaactggaaatagtttagacctagacccaacaataactaggtagttagacgactacga

SEQ ID NO: 62022 - DNA, 251 bp, Setaria italica
  Peptide Sequence Number=SeqID_127996
acgaactacagtctagcgactggttctcggcgtggtacgaacccctgcgcggctccggggccccgcgcaggggttctcggcgtggtacgaacccttcccccggcgcccggcggcgaccccaacgagcgctactcgatcgacgaggtcgtctaccgctccagctcggggggcctcctcgacgtgcgccacgacatggaggcgctggcgcgctacccgggctcctactggcgggacctcttcgactcccgcgt

SEQ ID NO: 62023 - DNA, 442 bp, Setaria italica
  Peptide Sequence Number=SeqID_127997
tacaaggcatggtgctcaggtttttgcaccactatgtgttggagggacatggaatcggtggcagttcaggagtttagccggacactcttcaacatacgtccagacattgcacttagtgttgcccagacgatcttccagagtgatgtgcgcagcctccttccgctcgttagtgtcccatgccacatcgttcagagcaccaaggatcttgcagtgccagtcgttgtgtctgagtacctgcacaagcacctcggcagtgattctattgttgaggtgatgccatctgaaggccatctccctcagctcagctctccagacatcgtcgttcctgtcttgcttcgacacattcagcatgatattgcagtctaggttgggcaacaattcctcaagacgatgagcatccaacatggtagcctacattagacggcaaatggattacacagac

SEQ ID NO: 62024 - DNA, 391 bp, Setaria italica
  misc_feature (59)..(59): n is a, c, g, or t
  Peptide Sequence Number=SeqID_127998
atcatactgttcccaattgttttttacttcgaagacatatttattaccaacctattgtnagatttctgacacaattttctcctgtgaaatattatgaaatgaatttacttgtttgacagattcatcgggctgcttttgttctgccaacatttgtaagaagagaactggaatcatataccactcctagtacttctaatgaaaaggagaagccaaaagaatcagtttcgaagtcgcagaagataaagatattgccaaacaatgccattgttacagcttcctaggcttgaaccgtactcgatctacttctccgaattctggtgcatccaagctggggtcgtgtatagttgtattcttaccgtaaagatagtcactgagatggtaatgacgatgc

SEQ ID NO: 62025 - DNA, 417 bp, Setaria italica
  Peptide Sequence Number=SeqID_127999
agaatactacgtagtaccgaacttaacaaataagttaaggtaagaataagactagttagaatttacttagaaggaattctcctgaagggaaatatgatgctattattgttgattcatcagatccaattggtccagctcaggcacttgtggagaaaccattttttcagacaattgctagagctttaaagtctggtggtgttctttgtaatcttgctgagagcatgtggctgcacacacattttaatcccaggatatgctggctatctgtcgtcagacattcaagggtgctgtgcactatgcatggacaagcgttccaacatatcccagtggtgtcattggatttttgctatgcgcgaagaggtcgacccgtgaacttcttaactcctgtgaacccattgagaaaatacaaggagctac

SEQ ID NO: 62026 - DNA, 310 bp, Setaria italica
  Peptide Sequence Number=SeqID_128000
tttgttagttagttcttatttgtttggtcttgtctactactactattttaattcctaggtattattgctggctatctgtcgtcagacattcaagggtgctgtgcactatgcatggacaagcgttccaacatatcccagtggtgtcattggatttttgctatgcgcgaaagaaggtcgacccgtgaacttcttaactcctgtgaacccaattgagaaaaatacaaggagctacaaaagctggaaaggaactcagattttacaattcagagattcatcgggctgcttttgtctgccaacattttgtaaagaa

SEQ ID NO: 62027 - DNA, 249 bp, Setaria italica
  Peptide Sequence Number=SeqID_128001
aataatgtgttcccctctgtttctggtgtttgttgtgcacagctgcacaagttcccaacttgcaacttgtaagacctgttgatgtaatataatcctattttgcatttgtcctgagacatcatctacttcatgacggtagatttgtgatctgtctttgtttttacatgataactgtcgtgcaagatatatttccacatggccgagcggatctgtggaaataagagatacgggaggggtttgtaaaattgt

SEQ ID NO: 62028 - DNA, 248 bp, Setaria italica
  Peptide Sequence Number=SeqID_128002
tcgtcgggatcggagatctcgcggcgcggggaagggggtgtgggggagggagaggcgtgtgcgattgattgggtggtggtgttgatttcttgaggaattctcctgaagggaaatatgatgctattattgttgattcatcagatccaattggtccagctcaggcacttgtggagaaaccattttttcagacaattgctagagctttaaagtctggtggtgttctttgtaatcttgctgagagcatgtgg

SEQ ID NO: 62029 - DNA, 449 bp, Setaria italica
  Peptide Sequence Number=SeqID_128003
tgtcttggtttctaccgtaaccctagtattcgtcgtctttcggttaaaactaagtctaaaattgtctagttacttactaactaacccttattgttggtccttggtagaggcttcacttctctgaaagttggagaagattctgtaccaagggaatcaccttaccaagagattttagtttttgaatcttcaacctatggaaatgttcttgtgcttgatggtatagttcagctgaccgacaaggacgaatgtgcataccaggaaatggttactcaccttccactatgttcaattccatcaccgaagaatgttttggttgttggaggtggtgatggtggtgtactgcgggaaatgccagacatgattcagtggagactattgatatatgtgagattgatcaactagttattgatgtttgcaaagagttctttccgaacttatccattggatat

SEQ ID NO: 62030 - DNA, 227 bp, Setaria italica
  Peptide Sequence Number=SeqID_128004
gaacatttcatacctgacacattgtgcctatatatgcagtctacggtatatggagtcttggaacaaccctttggttcccctcctgggtgccctttattttcaccatctcagcttctacggtatatggagtcttggaacaaccctttggttcccctcctgggtgccctttattttcaccatctcagcttctccgggaagtacttgtggagaaggtgaagccctactac

SEQ ID NO: 62031 - DNA, 253 bp, Setaria italica
  Peptide Sequence Number=SeqID_128005
gtggagcagcaccttgcccaggtctgaaacgcagagacgtctcccatgtcacaaaacgaacaggccactgaactgagggaactccgagaagaagagaagagagggtaccgtggatgaggccggtgaggtggagccagtcctggtcggggtagtccttgcggatggcctcggcggtctggaggaggtgctcgatctggggcatgtccaggtccgggtcgctgtcgtccacgaactcgttgagcagctcgatgca

SEQ ID NO: 62032 - DNA, 284 bp, Setaria italica
  Peptide Sequence Number=SeqID_128006
cagtgtcgaggaaaggaaaggggaagcgtttcctttctttctgccgatgggcgccggcttttgacctgaacacaccagaagtaattactggaaggctgttttcacctgaaggttttgccgaaggcgttggcgtccggcacgatgaagccgccgtccagcaccagctccgccgggttggcgccggcggcgaccttcctctccgccaccgcatcgagctggggctgttcaatggtgatcgtcatcttcttccccgatcagcctcaccaaaaaaaaaacccttgaaa

SEQ ID NO: 62033 - DNA, 227 bp, Setaria italica
  Peptide Sequence Number=SeqID_128007
tattattctattcttgttattgtcttgtaattagtctaggtagtcttgtttattgtttaaattaattttaacggtctaaggtattacctaatgacaagcaatagcaaggatactagacatgcatatatattgtgctctaacagtactgaataggattaactatcctggtgcacggcagccacagcagcaaatgttgaataggattaactaacattactgcagcaagg

SEQ ID NO: 62034 - DNA, 370 bp, Setaria italica
  Peptide Sequence Number=SeqID_128008
agggcagaagctcttgaaatgttcgctgaaaataaatttaaggttgaaatcattaatgagttgcccgaggacaagaccattacagtatatagatgtggtcctttagttgatctatgccgtggaccacacatcccgaatacttcattcgtcaaagctttcgcctgtctgaaggcgtcatcatcatattggagaggaaaagctgaccgcgaaagcctgcagagagtatatggaatttctttccctgattctaaacgcctacaaaggtaattaacaagacatataattcctgctataatgttatcgccaatgatatggacaattgtaaacttattcctaatctataaccctgctgaacatgtctctatttctc

SEQ ID NO: 62035 - DNA, 487 bp, Setaria italica
  misc_feature (28)..(28): n is a, c, g, or t
  Peptide Sequence Number=SeqID_128009
tttaaacttattttttattagttagttntttaattaacgttttgttatttcttatttaggttacttacttagggtcttggtcgtctaggtaacttctttctttttccatccacttagccctggaagctgcttcttccttccacatggtgctagggtatataacaaactgatggactttatgcgacagcagtatagagatagaggataccaagaggtgttgagcccaaatatttacaatatgcaactttgggaaacttctggacatgctgcaaaactacaaggagaatatgttcgtttttgagattgagaaacaagagtttggactgaagccaatgaattgccctggccactgtctaatgtttaataatagagttcgttcatacagagagttgcctcttgcatggctgatttggagttcttcatagaaacgagcttagtggtgcacttacaggtttgacacgtgttaggagattccagcaggatgatg

SEQ ID NO: 62036 - DNA, 167 bp, Setaria italica
  Peptide Sequence Number=SeqID_128010
gtaaaacgtacgttattccaaaagatcatttagctgcaccacgctatttacaattctcatgcgatacagctaaatgatctttttgtgggacgttcgttgagaacgtggtgaccatgtaaatgttgtaaacgtacgttatcccaaataaagagacttgttccgttttg

SEQ ID NO: 62037 - DNA, 291 bp, Setaria italica
  Peptide Sequence Number=SeqID_128011
ttagctctgaaagactcaggatcggagcaaatcatgagtcgtgactctgacgcatttaacatgaagatgccttcgcctggtttttcaaataggcgacagggtagttgtgatttactgtctagccaaactaacttcagacaaccaatggaggatgtcggaaacatagaggttagagccaatcctacattagaaggacaaaagaaaaccaaagactttagaacctaaccaaggaaatttaagttaaacaaataacaaaataagaaattaactaaccttaacaaataaggaacc

SEQ ID NO: 62038 - DNA, 200 bp, Setaria italica
  Peptide Sequence Number=SeqID_128012
catccgtatttgtagaatagaatcgaggcctttgctgttcatactcatgatcatccttttgtcttgtgttatttctctggtattgcttctcttgcccaaaagaatgcacatgtaccttacaggaatagtaaattaacgcaacttcttcaagattcacttggaggtcaggccaaaaccttgatgtttgttcatataagccc

SEQ ID NO: 62039 - DNA, 268 bp, Setaria italica
  Peptide Sequence Number=SeqID_128013
atgcgtgaacttggatggcctgacggaagcgcagattgataagaagctcgaggagctcgcaaaggctggagagtctgccaacgcgaagtgatgttgggaagttccacaacctctcgtcatgatgttcacaaataagtgaaactttagcagtggttttcctgctgtcatgacttcttgttgtcttaagtaattgtaaattgtaagttctttggtattttgtattaacttttgcaagaaacgtagactgctattcacttgtttgccgcaa

SEQ ID NO: 62040 - DNA, 233 bp, Setaria italica
  Peptide Sequence Number=SeqID_128014
gtgatgttgggaagttccacaacctctcgtcatgatgttcacaaataagtgaaactttagcagtggttttcctgctgtcatgacttctgtgctaagaatgaaatgaagtcttggatttgtattaacttttgcaagaaacgtagactgctattcacttgtttgccgcacattcttctcatgtttatcagtttatgcatatttcattggttcaccggtataccgtaaaaaaaaaa

SEQ ID NO: 62041 - DNA, 384 bp, Setaria italica
  Peptide Sequence Number=SeqID_128015
cttttaaataatcttccttctattgttttctgatatacagggatggtggagtacaggtttttcatatggcttgtggattgcttctctagtgtcatcggggttttcagttgttccagttgcatcacagacatggaaagcttactttgggctatcacgaagtgaatcgccaaaggataatagcagacaagctgcatccattttgttccctgacaaagctctatccctgaagttgaaaaaacatcatgggcgagcggaggctcttctgttagcagcctatgggaaaggccttgtgctaccatcagggaagttcagcaaaccccaacttgacattgatgttgattgctgattgactggccatttttcatattgatggcactgcaaaca

SEQ ID NO: 62042 - DNA, 505 bp, Setaria italica
  Peptide Sequence Number=SeqID_128016
taatcatttatctctgatataggttgagattgaagttaagagactgacccatctgaaaagccagcaaaatgaaagagctagtcttcaagaaaatgactgagcttgaagaaatctatagaagtgttcacatggagattgatagtgactctgagcggcggatccttaatgatctcatttgattctggttcacttctttcttgtgctttcatactgaaatgcttgccactaaacttaatatacacatattttatttatttaacttttctttcattcaaaattttaatgcaccatgtggtgtctagcttaaatctggctatctttcccaacaaaaatctgttactggtttcatgcatttgtgttaagatttgatgcttgtcttctcaatcaccattttctaaaaattaacatgtaactaattatttatcttatttattatcgtcgcctatatttattgtattagcttatttccctgttttaggtcaatggctaatgtaaatgccaccag

SEQ ID NO: 62043 - DNA, 112 bp, Setaria italica
  Peptide Sequence Number=SeqID_128017
acacacaaacaaattttacttacaagttacaagtaagacttctgccactccagcattcgttccagtacatgcttcttcatgtacactcacagtacgtacggacagaaacacc

SEQ ID NO: 62044 - DNA, 161 bp, Setaria italica
  Peptide Sequence Number=SeqID_128018
tttcttcgattgattccatgttgttttacacggtgaaaatcttcttcacttgagctgtggattctttggtctgtaaaggcatggtgcttctgccactccagcattcgttccagtacatgcttcttcatgtacactcacagtacgtacggacaagaaaacaa

SEQ ID NO: 62045 - DNA, 416 bp, Setaria italica
  Peptide Sequence Number=SeqID_128019
gctagataagtgtcagtataatcggagaatgatccaaataggacaagaaatagagcagtagagaatcagagatccattctccaatttgtgaaataacaggagagcatcaacttccaactgtttattagcaaagagaaaggcccgtccatgattcataaatctttacaaaccagtaatcccctgctaataaaaatcatgctaagcagccatcacccatcatcagtggcttttgttagataggtggtaccttccatataaatcgtagtgaatgaagacggtgagctcgaacccctgcgcgatgaaggcggtgagcacgaagcccggacgcccccgtcacgctttgccgcgccgagcggacctccagcgggaacacctccgcgggcaccagccacgtcacggggccccacgaccagctg

SEQ ID NO: 62046 - DNA, 226 bp, Setaria italica
  Peptide Sequence Number=SeqID_128020
ataacaagactgtagtttaggctagataagtgtcagtataatcggagaatgatccatggcagaatagagcagtagagaatcagagatccattctccaatctgcatcagaaaaattgacaatagatgatgctatagaggtccatatgttgaacagctgtcaatataaagagctagttacttgtgacataacaggagagcatcaacttccaactgtttattagcaaaa

SEQ ID NO: 62047 - DNA, 309 bp, Setaria italica
  Peptide Sequence Number=SeqID_128021
attagtttgcaactacagtagtaatgacaaatcgttaacttacatatctccagccaaggagtcgttggcagcagctacagtagatatcattcactatatgcattccagtcatgagaatacgatcctcgttgggaccaaagctcacattcaccctggatttgacattgaccccggatcaacatgtaaacaagaattggcaatgtttagatattcaaaagtcaaatcttcaacgaccaattatatacgatatttaactcaatgtgatctggagttatgtaatggtaataaccatgagaataattacatgtc

SEQ ID NO: 62048 - DNA, 245 bp, Setaria italica
  Peptide Sequence Number=SeqID_128022
tttttttttttttaaagaaaacaaaaccaaaaaataaaatttaacaaataaaaacttaaattttaacaatacgacaacttaagtacttctccggcacaataatgtttcggaaaccactaacgacaaatcttcatgaataatttacacagttggaaatgtctgcttttgcaggcacagtagttgattgatttcttcagctaccatcattctttgaccatcatgctcttctccagtatgtacttgcc

SEQ ID NO: 62049 - DNA, 440 bp, Setaria italica
  Peptide Sequence Number=SeqID_128023
ttagatgagtaatacctagatgagcaattatctttagtgataactgaaaaaaaacatcattaatccttaggcatgatcaaatatacaagcaaccagagcaatttaaagttcttactgttatgattttagaagaaatttgttgaactaatgttaatgtcaatacgctcccaggtttatgatatggagaccacctacctgcaagagtctaatcaatttggaagtgtgactgaagggtttcgaatcatttttgtcatcctcaaaaaacacttccaacctcaagcgctcccggaaatttcaggctgacgagaggctattctctttgtcatcagttacttctccagcggtacagatagtagtgctcaatgttgctgaacagcacatgctttcaaagtgttatttttgccctattgcttttgcattttggagtttgctaattctga

SEQ ID NO: 62050 - DNA, 243 bp, Setaria italica
  Peptide Sequence Number=SeqID_128024
taaagttcttactgttatgatttagaagaaatttgttgaactaatgttaatgtcaatacgctcccaggtttatgatatggagaccacctacctgcaagagtctaatcaatttggaagtgtgctgaagggtttcgaatcatttttgtcatcctcaaaaaacacttccaagtaagacacctaagttttcattatttggttcttgaataaactgatgcggtcttcaatatttggagatctgtatca

SEQ ID NO: 62051 - DNA, 243 bp, Setaria italica
  Peptide Sequence Number=SeqID_128025
cgattgaagtcggcgccggagtcggtcgacttgatcggcggctcgatgagcaccattgtgacgtcgtagccatggtcgaggaagaccttggcgagctgcgtcatggggccgacgtgcccgatgccgcccacggggtacagaacaacgatctgcttcacggatgcgctttccatttgagcggttgctagtgaattaggaggtaagaagatggactgccgtggacatggctgcctctggctgcgc

SEQ ID NO: 62052 - DNA, 287 bp, Setaria italica
  misc_feature (278)..(278): n is a, c, g, or t
  Peptide Sequence Number=SeqID_128026
tacaaaattccgttcatatagccccattcccattggaccaaccagctggtgatgatggatcagaacacagctgtttgactgatgttggcttgactcatctctcaaggggttgcagaggccttgagaaattaagtctaatatggtgttctgccatatcctcaacagtcttggtgaggatagcagagaactgcaagaatttgacttctttggatctccaggtaattcagtgttctctattcttcagattttgctgtgtatccaggtcttattcttttttnttttcgttt

SEQ ID NO: 62053 - DNA, 481 bp, Setaria italica
  Peptide Sequence Number=SeqID_128027
aaattggtgaaaccactgtgaagcaccttattaaatacaagtacaactgaatgcatgaaatgggctgtcgtttaggcacacggcaagcttactgaatcactactggggctacaggggaaacgacttctgaacgggtgcttctcagtgattgtaatttgcatgagaaaaagaagagctgcagctcctacttcctttggaacaggtaatgtgcaaccatccattcatcaccattattgtacccgaaaagttcagcgacagagatgaagaatgtccgccaataagctatccatttggtagttgattccttcccgtaagtttttcaaaaatgggcctaatggaaacgatgctccggtccatacgcttcagccactcctcactagttctagcataatgcgtaccactgacaagccaatgattgaccacagatacatcttcctgcatgaacatatagtcagtaaatatcactagtgcgactgagtcg

SEQ ID NO: 62054 - DNA, 319 bp, Setaria italica
  Peptide Sequence Number=SeqID_128028
gttagaatgcaatggattattatggcatagatagtttggactttggaggaatatacctagttctagcataatgcgtaccactgacaagccaatgattgaccacagatacatcttcctgaaagtagagaagaaggtttgccgatggcattgttcctccagtgaaaaaatatcttgtgatccaatcatcatcattgttatcctcaaaatgatatgcaaatgtcttgtggcagaagaagtgaacaaataataagctgtcctctttcatccacttggatatcttcgtaagaagttgactttgttagttttttctattgttggt

SEQ ID NO: 62055 - DNA, 325 bp, Setaria italica
  Peptide Sequence Number=SeqID_128029
gttacaatgcagttcctatatttctttgcaatgtgcagtgaaagggatccccatccacatccaacatcaaggatgctctgtccatcctgtatttttgccctctcgcaatacagttccatcattgcaacctcagcatcttctagggtgcttgaatcgtcagggaagtagcaggaactgtatttgagattccttccgagcactaacttgaaaaatgttgttggcaactcataatgttgggctttagctttgtccgtttctatcgcaattgggcatctctttgtaagtagtagttggtacgtaacttggtaggtagtcttgtttgtct

SEQ ID NO: 62056 - DNA, 259 bp, Setaria italica
  Peptide Sequence Number=SeqID_128030
cggcgcggaggggaggtagccctggcggaggcgctgcgcgagcaggagccgcgtgaggcgccgggtgaccgcgtccgggatgaggttgcgctcaagcgccgccagcgccgaccgcgtcgccgccgcgtaggcccgctcggccacggccgccgccaccattgttgttgccgcttgtcgtcgtgtcgtacgtgctcctgtagggggcgcggttccgggtgggagataggagctcgacggctgccggtgctggaggagggag

SEQ ID NO: 62057 - DNA, 267 bp, Setaria italica
  Peptide Sequence Number=SeqID_128031
acgacaccgtcgaggccaacgtcgagctcggcctcgccgtcgacgcccgcgaatacggcatcggcgcccaggataacgggggaaattgggaaactgatgtgctaaaaattgaagcgttttcgatccaaatgtctgttccagatactccgtgacatcggcgtgcgcacgatgcggctgatgaccaacaacccggccaagttcatcgggctcaagggctacggcctcgccgtggtggggagggtgccggtgctctccccgatcaccaag

SEQ ID NO: 62058 - DNA, 421 bp, Setaria italica
  misc_feature (79)..(79): n is a, c, g, or t
  Peptide Sequence Number=SeqID_128032
aagatgctgtgctattggcgatgaactcggtggtcaagggagaataaatcatccttttaatgaaaacaataatggaccngttttccaaggaatcaatgcatcaggtgctcttttcgaactgttggtgctgaaatcactcaggaaacaggagatttctttgtcagcgatgcagagagtgacccggacaaacctactgatggtttctcctcaatcgaccaagcgataaatgctttgcgtcaaggaaagatgatgaaaatggtgataatgagggggatcttgttatggcagccactctagtgaacccggagtcaattgcattcatgatcaggaacggttctgggattatctctgtaggcatgaaagaagaggatttaacaagactgatgattcctatgatgtccccaatcacagagatcgaaga

SEQ ID NO: 62059 - DNA, 256 bp, Setaria italica
  Peptide Sequence Number=SeqID_128033
cctttgtttctgcttttgtattgtactgcttgcataactctccaagagcaaacagatacctgaaaactgaactgtatcggttttgtgtagcttagttccaggtttcatattcgcgacaaataattccagtttgcaaatatcctttctgaaggttttgacaaaacatttggtatgattcaggtatagaagaaaacgggagaaactggtggagctgattgcggtgtctcgcttgccaacgaaatggggcctcttccgg

SEQ ID NO: 62060 - DNA, 328 bp, Setaria italica
  Peptide Sequence Number=SeqID_128034
gaattggggcattagtggaagcagtcctgttcctaacgaagctcgcctgaattgattttgctagtgcccctgctgatgtgttatcggtagaagctgctactcatcagcttgaggtgtcaaggctggaatctgcagacatactgtttgagtttgattggagttaagcagtgtctggctgcacttgcatttcatgggcaccatgaaacaattgattggagttaagcggtgtctggctgcacttgcatttcatgggcaccatgaaacaataaaatcgatggcaccaacgtgcctctctaggtttcctaccacagattctacatactagtaa

SEQ ID NO: 62061 - DNA, 265 bp, Setaria italica
  Peptide Sequence Number=SeqID_128035
ttaggaacaggactgcttccactaatgccccaattctctgttatttccaaggacatttgcctgacattgctaactgttgtgtgactggataagtcatgcatatgagaagacatcaagttctccattgcagcaacagactcatgctgaagactgaacccctggtttgctggggaatgcacaggttgagagtcggtcattacatgggaagacatacttgctaccgtggcatctgatctgggggtagcagattacgatatcagcacca

SEQ ID NO: 62062 - DNA, 163 bp, Setaria italica
  Peptide Sequence Number=SeqID_128036
cggcaatgcctggtccatcagggaattatctggacaagcagcaccaaattggctagcatttttggatgcaaagcctggagaaacagcccctgctgatgtgttatcggtagaagctgctactcatcagcttgaggtgtcaaggctggaatctgcagacatactg

SEQ ID NO: 62063 - DNA, 350 bp, Setaria italica
  Peptide Sequence Number=SeqID_128037
tgtcatcgttagcagaggctcgcaataatgaagcttccagatggcagtcgtgtgtacatgtgagtgccctcctttatgctttttaaggacaaatgggtcatgtcttcatcagagctgcttgaatgaacgtgtgatacgtcttcatattcaaagctgtcaagcagctgtttggtggcgttagtaaaactgcttcatgtctatggctgggcagtcttcgatctcacggcactgaagagcagagtaactcccacgaccaccatcacaccctaaagatgcaaggcataggcagcgataaagaacagtgttctaatgatgggtggtctcccaatgaattgactgactgtacttat

SEQ ID NO: 62064 - DNA, 281 bp, Setaria italica
  Peptide Sequence Number=SeqID_128038
gctgctgatgattaaatgtttgagggacggtggtagatttggaagtgttacccggctatcacatcctcatatttttagatctgttgtttgtgtagatttgatctgttgtttgtgtaggttcgccacctgtttcttgtgtgggccctattagcttgttgcaggacagaatccacaagttcttcaaagataccaagctttggaacacttcttctggccagtagatgagcacatcacatttttcaattatgaaatttgcaagatgttcaaaccatttccagacc

SEQ ID NO: 62065 - DNA, 241 bp, Setaria italica
  Peptide Sequence Number=SeqID_128039
atctcaacaccaatatgtggggttacaccagttagtcaacaaaataggagggcatgcaaagcagggaaatttgaaggaaacaaattgaataagaggaaagtgaaaggtcgtgccttcatcagagctgcttgaatgaacgtgtgatacgtcttcatattcaaagctgtcaagcagctgtttgatggcgttagtaaaactgcttcatgtctatggctgggcagtattcgatctcacggcactg

SEQ ID NO: 62066 - DNA, 233 bp, Setaria italica
  misc_feature (11)..(11): n is a, c, g, or t
  misc_feature (24)..(24): n is a, c, g, or t
  misc_feature (92)..(92): n is a, c, g, or t
  Peptide Sequence Number=SeqID_128040
gaccccacggngttagctgtgacnggtttgatacgagaaaaagttagcagccagatatgctcagttctgacagaggtgcggcttctgtgccncccaaagatagttccagttctgtgatgaatccccaattataatctatctgaggcagtgcttctgtgtcacggacacgcagctctagctcagatattggaaacagtaaatgaacgaaccagtactattcggtgctgcaggta

SEQ ID NO: 62067 - DNA, 250 bp, Setaria italica
  misc_feature (241)..(241): n is a, c, g, or t
  Peptide Sequence Number=SeqID_128041
ttacctactcaatatttgaaattaaagcaaggctgatgaagttgaagcagttctggccaatacaaagcaaattcttaaccagtttctccaaaagtcacagctgaagcaatccggttcactttatttcaagccttttaagccactggcaaactattcttcagtgctcagtcaaattgaggatcttatatctagaaaagggactatgatactgccatgaaacattctgaagagctccgaaggntggctcttg

SEQ ID NO: 62068 - DNA, 300 bp, Setaria italica
  Peptide Sequence Number=SeqID_128042
tggggagcttacctactcaatatttgaaattaagcaaggctgatgaagttgaagcagttctggccaatacaaagcaaattcttaaccagtttctccaaaagtcacgtatcctttttatacttgaactttaaattttgcttactccatgcttctaagcttctaggatatgctattcttggtgagatgtgtggtagtgtgaatgggtggtgtggagacatcattgatgttctatcattgaagtcacagtttaacataacagtttgtacctaacttaagttactttgtttcttaatttgtttt

SEQ ID NO: 62069 - DNA, 440 bp, Setaria italica
  Peptide Sequence Number=SeqID_128043
cgacccggatagataacaccttgcctaacaccacacacgattagacatttctggcacgcacttcgtttgtacaactcctaggcacaaccaccacaatcagagctacgacctatggaacagactcatgcggcgaccttccgggccttcttggaggcgggggacttgacggtcttgggcttggccttggccttcgccgcgggggacttcttcggcttcgcaacaatcttcttcttctccggcgtcttgcgcttggtcccggcggcggcggtcttcttgggcttggtggcggctgcggcggtcttcttgggcttggcgggggcagggcatggtggcgagctcgaaaggcagggagggctctagaaactgcagctgtgtaagcgctactacgatttcggaagcttgagtttctagagccctcccgtgcctttcgaactagtgcg

SEQ ID NO: 62070 - DNA, 158 bp, Setaria italica
  misc_feature (25)..(25): n is a, c, g, or t
  Peptide Sequence Number=SeqID_128044
ttgcctaacaccacacacattaganatttctggcacgcacttcgtttgtacaactcctaggcacaaccaccacaatcagagctacgacctatggaacagactctagctaggctccactacccagcagccaacaaactcctccaccggccggcgcgaga

SEQ ID NO: 62071 - DNA, 272 bp, Setaria italica
  Peptide Sequence Number=SeqID_128045
cgccgcgggggacttcttcggcttcgcaacaatcttcttcttctccggcgtcttgcgcttggtcccggcggcggcggtcttcttgggcttggtggcggctgcggcggtcttcttgggcttggcggcggcgggcttcggcttcggcgcggcggccgtcttggcggggcgggaggcgggcttggcgagggcaggcatggtggcgagctcgaaaggcagggagggctctagaaactgcagctgtgtaagcgctactacgatttcggaagcttgag

SEQ ID NO: 62072 - DNA, 214 bp, Setaria italica
  Peptide Sequence Number=SeqID_128046
gcgttcaacgggctcagtcactgcaagaacaacacgtctatgattctatgaatgatagtagtcagaacaaataagtgtgctggacatgcactgaaggagaacatgtagacatgtagcagcgttcaacgggctgactgccgctacatgtctacatgttctccttcacaaccgtcacggggcggcagcgtgagcacctatatcgtcaaccacgcgg

SEQ ID NO: 62073 - DNA, 381 bp, Setaria italica
  Peptide Sequence Number=SeqID_128047
tagtacgctttaattccgagcgatcttcaggaagcacagggcgggcatgatgagcgccacaagtatactaaggagagatccaatgagagccatcacaagacctgcaataatgggcaacacaactcagatgttatacattgataaacaacaaagaaattaacctcaccaaaattgaagatgcatgggtctcctttgtagtttttagaaaatatctcggcctaataacagttaaacagaattcttgctccctttaacagcaagtgaatcattttctcattctatagcttctgaacctgctcaagatgagcgacactaaagattgaattgtgtttctgaagaataaaagaaagcatgctttctgaaagcttcaaacagaccaca

SEQ ID NO: 62074 - DNA, 270 bp, Setaria italica
  Peptide Sequence Number=SeqID_128048
tagaagaaacttagttacggaagaattactctagcatatcagataaattttccccgagtcattttatataataaataaacaggacttacagaaatgagaagacgaccgatcctcccaaaggctgcctctccaatgtctggaaaggttttaacaccatctttgctctcaaagcaatacttgagaagaaccccagtgtagcagcaaacaatagcgaaaaaagccagaaccacaaggctggcccatccggcctcactaatcgtgtatgagcag

SEQ ID NO: 62075 - DNA, 470 bp, Setaria italica
  Peptide Sequence Number=SeqID_128049
gcacgatcaaaggacgtacgggggttacagggcacgatggcgccctgcgccggcgcgacgtacgggtcatggaagacttggacgcgtcctgtgcctcaaacttggatgcttcttctcagtagttctcagcaatcttgacgatcgagttgacgtcccgagaacggcacagacggtgcccagcaccacggtgacgacgcttgcgatgacctgcgagcgtgtcgctttattccgagcgatcttcaggaagcacagggcgggcatgatgagcgccacaagtatactaaggagagatccaatgagagccatcacaagaccaaagaatggcaggagaaaggcaatgcatacagttgatgcaacaagggcagtcctcagagtaacagagaagactctatcagtaagaaaccctgctggaacgacaaactacttactaataactaccgaagaccaaatagggtttaatacaactaata

SEQ ID NO: 62076 - DNA, 372 bp, Setaria italica
  misc_feature (1)..(55): n is a, c, g, or t
  Peptide Sequence Number=SeqID_128050
nnnnnnnnnnnnnnnnnnnnnnnnnnnnnnnnnnnnnnnnnnnnnnnnnnnnnnnggtttagataagctgatagatgccttaacaacaaacagtatctaaccgcaataagcgacagttattacaaagaaaaaaaatcgacagaacagaaacatgctacagcgaaatgatagagaagcagctagaaaaggcacatggttacattattgcaagtgacgacacagtttttagtcgaatatatattgtggtccgaataataatctacagaaacctcagaaattctagcaaaattttgatcgtacgcaacatatctgaccattttcaggtcccacaagcggagtcaggtaatgatctgcacgtattgggttgccgct

SEQ ID NO: 62077 - DNA, 199 bp, Setaria italica
  Peptide Sequence Number=SeqID_128051
tttttactaggttaccctactaaagtcggtagttctaggttaattgtattcttgtctacgttatttgggtttgccgctgctcaagattagtagtagagcttagtagttttctgcaatcctttctatggaggagtacgtccccacgatagcactgataatgcccaatattatgatgccaacgcttgcgattacctgtgaa

SEQ ID NO: 62078 - DNA, 261 bp, Setaria italica
  Peptide Sequence Number=SeqID_128052
gtcgttggattaatggaggcggtgaggtgttggtttggagttgaggagggggcgttgggaggaagaaggcagaggcaggcgagggaggtggagaggggatgagaaggctttgaggcaaatcatggttgggttggtgtgacaaggggagggttaaagatgcagtggcgtcgcgtccgtgtccagcgtcgtctccgaggcgttcttcaacggcatcaagaaccaggccgggaacgggtgcgagggcaagaacttctacacgcg

SEQ ID NO: 62079 - DNA, 260 bp, Setaria italica
  misc_feature (257)..(257): n is a, c, g, or t
  Peptide Sequence Number=SeqID_128053
gcgggtgcggagggcggaggagggagggggcgatgcggcggagggtggggaggtggagaggggatgagaaggctttgaggcaaatcatggttgggttggtgtgacaaggggagggttaaagatgcagtggcggagcgcgccggtggtttagtgagacagctcccaaagagattattgacgtggcactagagaagaaggaagcgcaagtagttgaagtgaaggagcacgaattgcctgtggaggctgctccacaaccnttt

SEQ ID NO: 62080 - DNA, 247 bp, Setaria italica
  Peptide Sequence Number=SeqID_128054
taggtaaaactaatgatgtgaatgttagccacgaaggcagctccagtgataaagtggtcactgagttgcctgtggagtcagtgacattgccaccgactcctcttcaggaaccagttcttcttgttgatcaattggatgggcctcgcatttaggttcctccttgctctgcacatcctcgtggacgttgacagcttcttcaacgggttgaggatctttaagctcttccttctctgccaatggtacatcg

SEQ ID NO: 62081 - DNA, 231 bp, Setaria italica
  misc_feature (158)..(231): n is a, c, g, or t
  Peptide Sequence Number=SeqID_128055
gggttggtgtgacaaggggagggttaaagatgcagtggcggagcgcgccggtggtttagtgagacagtgaccattgggctaaagaccttgtaactgaatataagtcgggtcattctattaagaccggcaacaagaaataatcgctcattctcgttacnnnnnnnnnnnnnnnnnnnnnnnnnnnnnnnnnnnnnnnnnnnnnnnnnnnnnnnnnnnnnnnnnnnnnnnnnn

SEQ ID NO: 62082 - DNA, 262 bp, Setaria italica
  Peptide Sequence Number=SeqID_128056
cgaagggcgggctgagcaagctgcggtgcatgatccggaggtggcactcgtccagccggatcgcccgcgcgccgccgtcgcccggcgaggacgacggcgccatcgccggcgtggaggaggacgcgcgcggcgcgtcgttccacggcgcggacgaggtgcccaagggcctgcacccggtctacgtcggcaagtcgcgccgccggtacctcatcgccgaggagctcgtcggccacccgctgttccggaccctcgtcgaccgcag

SEQ ID NO: 62083 - DNA, 419 bp, Setaria italica
  misc_feature (398)..(398): n is a, c, g, or t
  Peptide Sequence Number=SeqID_128057
tcttgtctttcccccgtcgtccgtccgtccttgttaacgtacctactttctacgttgtcccttattcttttcttccttcctgctgtgttcacggctcccatcccctctccagagtctaggcccatctcccgaagccgctgacgcaggaaggcgagtcgacatggaggccaagaagaagtcggccgcttccgccgccgccgctgccggagccggagccgcgccgccgccggctaacgggtacttcagcgccgtcttctcctcgtctcctgcggggaacgcaaagcgcaagcagacggacttgtacgcgatgctgaacagcagagttctagagggcagaatggcagtagcatcacagatagcaaatctcatggccgcactacatacaaggatggaaaacntgcctatccaaatgagtcatc

SEQ ID NO: 62084 - DNA, 267 bp, Setaria italica
  Peptide Sequence Number=SeqID_128058
gttgggagttggcgtcgggactacatccgtcttgtcggtggaggcagtatttagatgcctgacggctcagtatcaacagttccaacactacaacaagcgctactccttttattcctttgttcacaaaaggagagcccacaggaggttattcagtaataaagtgaaccttgccaccaatcgcctctagtagcagagccatctggattgtcctctttataatttcttggtggttcattggcaggttgcttctgttgagagctactgtag

SEQ ID NO: 62085 - DNA, 248 bp, Setaria italica
  Peptide Sequence Number=SeqID_128059
agttctagagggcagaatggcagtagcatcacagatagcaaatctcatggccgcactacatacaaggatggaaaacatgcctatccaaatgagtcatcagaatccccttattttggctcatccgtgcattacggtggtcgggagttctacagtagctctcaacagaagcaacctgccaatgaaccaaccaaagaaattaataaagaaggaacaaataccaagaataggactactagactaactaagaa

SEQ ID NO: 62086 - DNA, 212 bp, Setaria italica
  Peptide Sequence Number=SeqID_128060
tgggagttggcgtcgggactacatccgtcttgtcggtggaggcagtatttagatgcatcatctcacctggacagatgtgggtgtaggccgtgtccttctcagttcccttttgcctttgtgttcttgtggtttaggtgcagtactgaaactactaatggactgttaggtcctgagacacgcaacggggataggcaaggcacacaggggatagg

SEQ ID NO: 62087 - DNA, 175 bp, Setaria italica
  Peptide Sequence Number=SeqID_128061
agctctcaacagaagcaacctgccaatgaaccaccaagaaattataaagaggacaatccagatggctctgctactagaggcgattggtggcaaggttcactttaatactgcctccaccgacaagacggatgtagtcccgacgccaactcccaactatgattttgatgcctgacgg

SEQ ID NO: 62088 - DNA, 263 bp, Setaria italica
  Peptide Sequence Number=SeqID_128062
ccaccaactgcttcccccgcgccgccgcctgtaacgaccacttcacgtgccctatctttctcctcctgctgtgttcacggctcccatcccctctccagagtctaggcccatctcccgaagccgctgacgcaggaaggcgagtcgacatggaggccaagaagaagtcggccgcgccgccgccggctaacgggtacttcagcgccgtcttctcctcgtctcctgcggggaacgcaaaagcgcaaagcagacggacttgtacgcga

SEQ ID NO: 62089 - DNA, 264 bp, Setaria italica
  Peptide Sequence Number=SeqID_128063
tcgaccacttcacgtgccctatctttctcctcctgctgtgttcacggctcccatcccctctccagagtctaggcccatctcccgaagccgctgacgcaggaaggcgagtcgacatggaggccaagaagaagtcggccgcttccgccgccgccgctgccggagccggagccgcgccgccgccggctaacgggtacttcagcgccgtcttctcctcgtctcctgcggtaccgtctctatcacgccgtctttcggacccatgtggtg

SEQ ID NO: 62090 - DNA, 326 bp, Setaria italica
  Peptide Sequence Number=SeqID_128064
ttgtcctattcttgttctactaggtaattgtcctaagtactaaccttctaattgtacgtattccaaggcagtttcatggaaactgaatgcaactgaaaagtgatgaatgcctgctttaataacagactgtatcaagaccgtgtgagtggtgaggaaattggaaagagtgctccctgttttgcagggaacatataaaaccccattctgttttttttttgtgtctgcataatagttctgatgactgtccaggttgatataatcatataagtttgctgtagttcattcatgaagttacctaattttgaggtatggtgctttgttttctg

SEQ ID NO: 62091 - DNA, 352 bp, Setaria italica
  Peptide Sequence Number=SeqID_128065
tgtttgttgacagtctttgtttagcaaggaaattgaagaaattggatgatttttctgttctcttgcaggaaatataggtcatgtaaacttggaggcactgggtaaacactatggcatcattttcaaaggcccttctcatagagcaatgccagatgtgcaagcattatccaaaattttccaaaaaatcactttgggcttaaaattgacacgcgacggtctcatgagtgaggccagcatcttttacgatttcaggaaggtttctcgaatatgaattttcgatctcatcattctgtcttagttataaactatttgacatttttcctataggataacaaaatcatttacattaaaa

SEQ ID NO: 62092 - DNA, 187 bp, Setaria italica
  Peptide Sequence Number=SeqID_128066
cgcaaaacagtttgatatccctttccttatgcaagagttcgaacgatgttcagcccaggtccctgcagattggctgtttgttgacagtctttgtttagcaaggaaattgaagaaattggatggtacgttgttgattgctctaacatacctctttgatcatatagtatttgctagcaccctgttaaga

SEQ ID NO: 62093 - DNA, 224 bp, Setaria italica
  Peptide Sequence Number=SeqID_128067
cacgttgtttcttttatcagctctgaactttctacatgaacacaacgtggcatctgtatgtctgtatctgcgtttaggcacgaggagcacaagagttgcatcagcattgagcaaggcacaactccaagacggatacgtggcatatccatgggagaagaagatgcgcgacactctgcgcatgcccaactctagctgctacctctcgatgctcgtccttcccaagg

SEQ ID NO: 62094 - DNA, 266 bp, Setaria italica
  Peptide Sequence Number=SeqID_128068
aatgctcaataatgttttaaacaacatctagcttcaatattattactgcataaattactgaacattatcattattgagcattactgaacattattattactgcataaattactgaacctgaaattaccaaaaggccaaaaattactaaacactatattattggcctacttgattacaaaagcttaaattacagaatccaaaattaccaaagacctaaaattactgaatgctgtactgctggcttacttgattacccaagcttaaat

SEQ ID NO: 62095 - DNA, 260 bp, Setaria italica
  Peptide Sequence Number=SeqID_128069
taactaaaaaattaaatttaagttaacgtaaaactaatttaattaaattaacttagtaaccttaatttttagtacttgggtacacgtgaagcctaaaaatgaatgctaaaattactgaagcctgaaaatgacattcggtaatgaacagtgaaattaaaatgaggctcagtaatgaatggtgaaactacagaagcctcaaaatgatgttcagtaatttatgttttttcaggccatcgatatctcaatttttttcagtagcc

SEQ ID NO: 62096 - DNA, 360 bp, Setaria italica
  Peptide Sequence Number=SeqID_128070
caagcggaaatcaatccttaaccctgctgctatgaaacaggcccttgttgagggtgcttctaagctttcagggccaaacatgtacgagcaaggtgctggcaagcttgatctgtaagtttctcgccccccttttgggataccttttcataaattacaaaatgagcaattacaaggtctgtttcctgttggatatttcagaattatcttattccatgtctccattgttttacgacattaagggtgcatccatttagaatgcaggaacatgatcatattgacctttgctttccctagcattgcacaaaatcatactcatttattgcaccatttgttccagttggcagtcatatgaaatcttag

SEQ ID NO: 62097 - DNA, 230 bp, Setaria italica
  misc_feature (12)..(12): n is a, c, g, or t
  Peptide Sequence Number=SeqID_128071
atgacaaccacnccaaagctatatacatcacacttctctgtcaataccatcgtagatgataattctgtgacaagaataaaattatcaaaactatgagtttcctttaaaacttgtaaaatcatgttgcgttatagcattaaaggattaaagccatgtacctggtgccatatagccgcatgtccctgcaaagattagttacttcgtaactttgtagttaaattattgtctta

SEQ ID NO: 62098 - DNA, 190 bp, Setaria italica
  Peptide Sequence Number=SeqID_128072
attctgcccattgctctcaagtcatctcgtggtgaggaggtatccaacatgaagtttggaggagaggttgaagcaattacaggaatggaacagttccaaatggctacatctttgccaggtgtttcagtcgtccatttcatgttggatacctcctcaccacgagacagattaaatgaataaattgagtagg

SEQ ID NO: 62099 - DNA, 404 bp, Setaria italica
  Peptide Sequence Number=SeqID_128073
taggcgtgatcgacatgggtggtggatctgtgcaaatggcgtatgctatctccgcaaatgctgctgcgagagcccctgcggcggccaatggagaggatccctatattacaaaagagtactacaaaggaaaggattacaatgtctatgttcacagttacttgcgctatggtgctttttgcagcacgagcagagatcctgaagtcaaagaatgggccattcagctcctgcatgctgcgtggattcagtggtaattacacctatcatgggaaggaatatgatgcgactgctaagaaccaagaaggaagacaagtaataatagaagaaactagacaagggaaagaagaataaaccaaaggacaactagaaagttagaaatagacaaccaatagaccaacaacaaaaaa

SEQ ID NO: 62100 - DNA, 390 bp, Setaria italica
  misc_feature (121)..(121): n is a, c, g, or t
  Peptide Sequence Number=SeqID_128074
aacagtctccaagggctcaggttgcaatcttcgttgttcttgccatgactttaagaaggaagcctgaggtactaacaaacattatgccaaagataatgggaaacaataaatatcttggacnggaaaagcttcccatcattgtctgggttattgctcaggcatctcaaggtgacctagtaactggcatgttttgctgggctcattccctatttcccacattatgtgcgaagtcaagtggtaatccccaggcaagagatttggttttgcagttgcttgaaagaattttgtctgtaccccaaaagactacgaatacaaatacttaattagaaataggaagactagttaagaaaagggggaagacgacctaggttaccccctagtttacaatta

SEQ ID NO: 62101 - DNA, 185 bp, Setaria italica
  Peptide Sequence Number=SeqID_128075
gtttggtgcttgactcaaaatacagagtcctacaagcagtgggaaagaatttatgctgaaaatattgaagccagtgttgctgtcctgagcaagattgtgattgattggaaggatgtgtctccttaagctcaattggttgtaagtcttctttaaggtcttaacttgttgttaagttaacttttaaa

SEQ ID NO: 62102 - DNA, 180 bp, Setaria italica
  Peptide Sequence Number=SeqID_128076
taaaagggggaagtacgttacctaggttacccccctagtttacaattttagaatttagtttcaatgagagccacatttcctgtttctaacgctcggatcaaggctacagaaaggtttgaagcggcctacccaacagtcaaggagttggctcttgctggtcctcctggctctaaaactgtg

SEQ ID NO: 62103 - DNA, 474 bp, Setaria italica
  Peptide Sequence Number=SeqID_128077
cccagcagcccatatatctactttctgcgagtaatctccgagtagaatctcaggtgccatgtaggcagggctcccggcaacaccagtcaattctggcctgaccatcatgctgccattctattgaagctgtcaagtgtcaacacacacatccagaactccatgggaataacaactagctttggatgacaccaactcaactgcgactaccaaatagcaccacttggactcttgaccgaccatcagccactcgcacggccagtccaaaatctgcgagtttcaaccttccggccttggtgagcagaacattatccggttttaatatccctgtgcacgacgcccatctcgtggcagtactcaagcacggtcatgagctccctgatcacataggcggcgcggcgctccgagagcctcccctccctggccacctcgtcgaggaggcggccgccgcggcagagctccatgacgaggtagaag

SEQ ID NO: 62104 - DNA, 374 bp, Setaria italica
  Peptide Sequence Number=SeqID_128078
gctattaccaacaataacccaagtaacatggaaatatttctgaaatatataaacagtacagctaaattcctgattgatactacattgtcggaattcactgttataacaatgtaaccaataccatcttgttgagattcaaactgaaagctagcaatattgcataaaatttaccattagtgacacgcgcagcaagtccgaaatcagcgagcttcatcttccctgccttggtgagcaaaatattctccggcttaatgtccctgtgcacgacacccatctcgtggcagtacttgagcaccgccatgagatctttgatcacaatggcagcccgctgctcagagaacacttagttgtcgtacttgtagttcggtagtact

SEQ ID NO: 62105 - DNA, 418 bp, Setaria italica
  Peptide Sequence Number=SeqID_128079
caatgtaatctttaaccttgacattccatgcaagcaaacagaaactcaatatgaagatttcctagcaccaggtctcaattatcttatcatacctagatagaggagatgacacgtgaatgaacacttgttgtgaactcatgactccaaaaacacagcttgcgctcatttctctgagcacgtattgagaacatttcttcttatggagtaatgtacacgacgcaaaacatcacatcaattgtcagttagaactcagatgggaaataaaacagaccactgagaccagatatcgactgccgccaacttaagggagactccagagatgtgacctcatcacaaccaagccaggaagaccagagctacatggctcacttaggttccttaggtcctattaaacgttaattaaattttagttttgtta

SEQ ID NO: 62106 - DNA, 412 bp, Setaria italica
  Peptide Sequence Number=SeqID_128080
aacactgggtcaggtcagaaagccgtgcacagattgctcttcaagtttgaagagcattcctgctgaagagcagggctacagagccgacttctcttcggctctgatattctaacacgggttattgctgctgtcagtgcgtcaactatgccacattcatcctgctcctctgaactctggcttaagtctgacaatgactcacattctgacctaagtctgccccgtggaattatgggtgctataatcttgttagtgacacacaaattagcagttaccacttcagggggcattccgtgtaaaacaggacccatgggtgacctgaaataggcatcagtaagtaaagacatcctacaaaacataaagcaaaggcactctttgaagcttgaacttactaaggacttcatcagcagtcaat

SEQ ID NO: 62107 - DNA, 268 bp, Setaria italica
  Peptide Sequence Number=SeqID_128081
ctcccccacccagcagatgcagaaattgtacgggtgctccagcaaaaaggcccaccacaaaattccaccactgtggaagcagcaggctttccacgaaagagaaccccaatggacacagaaaagcttggataaccatgtgcaaagtttgttgttccatctaaagggtcaatgcaccagagatactctgacaaggaatctccaataaggccaccttcctccccaagtatgaggtggtttttgaagttcttcatgacaacttccaaaatta

SEQ ID NO: 62108 - DNA, 350 bp, Setaria italica
  Peptide Sequence Number=SeqID_128082
tcttgtccgttggttttccgttttactattctagtccttctaaaactagtagtttcttagtcctaactagttatttgtcttttagttcttggtattaccttgtattactattgatgctgatgtaacggaaccacggcagtaaaatcgacaacatctatttgcgggcaatgggagtcagcggcccaccaattaacttctatacgtacagttcatcgcgatgcagcaggaagtggttcctggcctggagaagctcgtaccgttgatcgtcatgcagcaggaagtggctcactggcctggagaagctcgtcaagcagaccggtgaacatgacggaatcagtctcctgggcttg

SEQ ID NO: 62109 - DNA, 262 bp, Setaria italica
  misc_feature (180)..(180): n is a, c, g, or t
  Peptide Sequence Number=SeqID_128083
aaaatagctattaacaaaattttactaggatcagaaatttctgattattcacatattgactgcttgcacattcttctgaacttgtatgcctcttgcaggaaaaggtgagaaggcgggtgagccaggatgattccagtaagggcggctcatggagtgatatctggggagcaccaacaaganaccagaaaaacggtaaactaacacattagtttttggaaattgccctttgttttttgtgttttctatccttcacctatatgtg

SEQ ID NO: 62110 - DNA, 240 bp, Setaria italica
  Peptide Sequence Number=SeqID_128084
tcacggtggatgattgggtgatctgtataaccatgtaagtaggcaatggcatgaactatgtcaatagcaatgttgagacgctgtgcaaattccaatggttcaccttgtgatccatccaagtgttgacggagtgttccattattgacatactcaaccagaattaggcgttcatcctcgtattccacgtacccaagaacttcaccaagttcaaatgctcgacctttgacaacatctggattt

SEQ ID NO: 62111 - DNA, 181 bp, Setaria italica
  Peptide Sequence Number=SeqID_128085
tctgtatccgatttacccataatcaattagtggtacaaactgaggggaattgccgaattagaggcagagatcaaggaatcagagataagaggcaacaagaactggtcttgtcttcctcctaggaagtctctgattccttgatctctgcctctaaatcggatacagattagggtacaaactg

SEQ ID NO: 62112 - DNA, 475 bp, Setaria italica
  Peptide Sequence Number=SeqID_128086
ttacgatccatcagtgcctggattgtcacagaatggcatcagcttttttctgcagttaacccataattaccatgaaaagaatccaatctgacaatttggcccatgttgtactctctttccgatgcctccaacagcttggatagcttgctgcatgctattatcaatatctctgatctaccatgttccggcagtatccttgaaagagatgcgggcatacaccatcaagctgagctgtgatctggaaaagataaaaattggccaacacaaagggaccagtatcgatggagagcatgggcccagatatttagtgcgtaagaatgtcacacttccccaacagctaacttagtggactgaaaccatgctgctgaaccccattcatgtttcagtgttctgaatggaccactcactgaaacctcagctttaaactctttcccggataagtcaaggtcatggagttcaaaatgctcccttgatt

SEQ ID NO: 62113 - DNA, 189 bp, Setaria italica
  Peptide Sequence Number=SeqID_128087
ttacttaggacttacagactttatcgtcttctatgcaattcaaccaaaattcttgtatgtgtgtgtggctcatctgatccatttcccaacagtctgatgataacttgaaagagatgcgggcatacaccatcaagctgagctgtgatctggaaagataaaattggccaacacaaagggaccagtatcgat

SEQ ID NO: 62114 - DNA, 327 bp, Setaria italica
  misc_feature (1)..(67): n is a, c, g, or t
  Peptide Sequence Number=SeqID_128088
nnnnnnnnnnnnnnnnnnnnnnnnnnnnnnnnnnnnnnnnnnnnnnnnnnnnnnnnnnnnnnnnnnnagttctatcaatggaaatttcagcaaagcaacgtatacatggttctgtcacttagcctaaatggaaatttcaataaagcaacgcatacatgatgccgtctatcccagacaaacatatatctatccagtttccagagagtttcaatatacagcacctctaaattaatgttgtcacgactttggagcttttgggaaatgaagcttaacaatcattgggagttctaagagctgcactttggacctccccaattaattacagtt

SEQ ID NO: 62115 - DNA, 273 bp, Setaria italica
  Peptide Sequence Number=SeqID_128089
tgagcaactactaacatcagcctatagatctagaagtaccaaaacatgtaacatcacaaagaaacaaacaaacatggaaagaaaaccattgattaacaaaaaaccaattgattaacagaaaactttttagttgcattcaaataacttagatatcagaagttaatcagcatgaagtaccttgaaaaaggcagaagaattcgagtgattaaagatatctttttccctgaactcttggattttgtaaccattaagatggtgttgctttcctaagtt

SEQ ID NO: 62116 - DNA, 436 bp, Setaria italica
  misc_feature (432)..(432): n is a, c, g, or t
  Peptide Sequence Number=SeqID_128090
taaataaataagaaaggaaagaacctaagtaagaagtaagtaataactaggactagacaagaattgcaccgtaatggtagggcatcgcagcaccaacaggaattggaagaggtataaacccatatgaaggatggctcatactgtcctgtctatgggaggaactgcttgcgcctgcatcttctctagcactactggaacacagtacagcagctccctctgtgctgctgtccaagggatccgagcttgccttgtactctcacctgtattatgttcatggggaggcaacaccccactgggttgggaaactgggtccttgtcatgaacaggttcttgatgagttatgcagagagaaggggaaaactggtgctcagctgagggctctatccttttatgccatatcttgaaaagcagaagaattcgagtgattaaagntatc

SEQ ID NO: 62117 - DNA, 358 bp, Setaria italica
  Peptide Sequence Number=SeqID_128091
taaaaagaaaaaaggaaaacaaaagtaaagtaaagtaaaggggtaaataagactagaatagttaatagaacctactacgtaactcaattgtgcctgtaagggcgtactggaatctgctttgtaaaagacagaccagtgtatcccagcctttggtactcaactttgaactggaaaactccataaacatccggaactttgaaggatattgaatataaacccttcttgtcagtcgacatagttttcaaaaacataaggactcatcatgaaaaactgaagttgaacatcatcagcaacataatggcttccagcttgttccagaccattcgtagatctcaaccgactattccaggtcatcatt

SEQ ID NO: 62118 - DNA, 195 bp, Setaria italica
  Peptide Sequence Number=SeqID_128092
gcaaaacacccactgcaaaagaaaaaataacaaggaagcttgagaagtaacgcagcatatgaccttcagatggcccctctcgtggaaaatccatttgcttgtttctgtcacaaactgctcatttccagctctctcatacctcttcttgctaccagccttttgaacaccagactttaagaaccggttgctaaacag

SEQ ID NO: 62119 - DNA, 228 bp, Setaria italica
  Peptide Sequence Number=SeqID_128093
caacttctccggcgaggtgccgcgcgccggcgtgctggcgagcctctcgccggaggcattccgcggcaagctcccatagatgaaaatgaggcagtgtagtaggggtatgctgatgttatgaacctctcgtactcattgtgcctgtaagggcgtactggaatctgctttgtaaaagacagaccagtgtatcccagcctttggtactcaactttgaactggaaaactcca

SEQ ID NO: 62120 - DNA, 236 bp, Setaria italica
  Peptide Sequence Number=SeqID_128094
cggcgacatcacggcggagggcctgcgccgtggagaagatgtagtgaagaagagcgtggggcccagcgcgaagccgacgcaggtgaagcccagcaccctcaggaggatgaagaggtaggatggtgaagcaccactcgcatttatcacggctaactgttaatttcattcgtttgcgccggtttcccctaaaaggggaagacttacaaatatggaatctatttattgaagtagattat

SEQ ID NO: 62121 - DNA, 176 bp, Setaria italica
  Peptide Sequence Number=SeqID_128095
tcaatacaaggaccaggattgcatttatagctgaacattcaaaaagaacgagcttcaaataccaccttgagcaatcgtggacccaattcctccaaggatggagccaccaccgctctgagcaggagcgtggaggaggagcctggcgcgctgacaaaaagatattcagctatcacatt

SEQ ID NO: 62122 - DNA, 233 bp, Setaria italica
  Peptide Sequence Number=SeqID_128096
tggaacttctatggtgctgataatataggatatcagaatgtactactcccaggataacagaacataaccacaaactcaacacccaccagtgatagtgtcacggcacacagacatcaagttgtggcggtagttcatagttttacttggtcttattaatgggagatcatgagagtgaaaagagaacccatgaatcaaatccaagtaaaactatgaacacccaccagtgatagtgt

SEQ ID NO: 62123 - DNA, 233 bp, Setaria italica
  Peptide Sequence Number=SeqID_128097
cgcaccaccacggcggcactcgttcagcatgtcaaggtagaactggcacttgctgatgtcgcttccatagtggttgaggcaatcttggaaggccttggaatggttgccgcaagaatcagcaccgttcatcattggagcagcaggagcagcagcagcagcctccgagacaacagtctcatgctgaatggtccgggggcccatttactagtctattctaacttagtcttcttgtt

SEQ ID NO: 62124 - DNA, 205 bp, Setaria italica
  Peptide Sequence Number=SeqID_128098
cctatcccctgtgtgccttgcctttcccctgttgcgtgtctcagtcatggccaagagtaccaactttaggcatgtaattcctcattatttcgtatcttccctttggcattattggtatatcactcagtgcccattttggctgaaagccaagtccaagaaatcctattcccatttcctctccaactgctttgacctgataaagatg

SEQ ID NO: 62125 - DNA, 409 bp, Setaria italica
  Peptide Sequence Number=SeqID_128099
tgttcgtttgttaatttggttatttcttaagttacgttagtatttgttgttattctaaaattctactagtagtcgtctatctacaagctctgtccagcgatcgtcaagtcatcagtatagcaagtgctggaaaacatggtccacgttgcgttgccacttggtctcgtatagattcagaagcctctcggcaggtgtcactcctgtgctcaccacttgctcaacctctctcaagaaaccaacctccttgtaccctcttctttctaatccattcttagccaatgttagaacttcttcagctaaatgtcttacatatccatcacgaaatggtgtcttaaaaccagtcaccggtaccttccgtcttagcatctctcgttcctcctttgtccaatcaaaagtcatgtaccaaaaa

SEQ ID NO: 62126 - DNA, 268 bp, Setaria italica
  Peptide Sequence Number=SeqID_128100
gcggcggcaggggacgccggcgccttggcggccggcgaggaggagagggagacggccacggccgtgacggcggccatggctcgcgaaaatcagctgttgaatgcgcggggaggagaagggattgcccaaataccgcaagtactggtcgagacatgtcgatttcgatcaagtgtttctacgggagtgcaatataaatccctgaatagcaagtagaggtgtatgatttatattttcgtttttcaactgtttcttagatcaattctttgtg

SEQ ID NO: 62127 - DNA, 213 bp, Setaria italica
  Peptide Sequence Number=SeqID_128101
ggaacgtgtaagtctcagctcaggcgttgaatggatcaagacgagattgtgtatcaaaatacacagagcgcatctacaagctctgtccagcgatcgtcaagtcatcagtataggagggatcggatgaagcaggggagaacatcgtttctggaatgcacactgtaaggaaacctgaattcatcttctagtgagactagagatgctactacctcc

SEQ ID NO: 62128 - DNA, 304 bp, Setaria italica
  Peptide Sequence Number=SeqID_128102
aacaaaggaaaattactaccgaaaataattaggaagggaaaatacgttaatcaaattgcaagaactttcttgcgcaatgccctccgtttagagcctacaaaccaccgagcctggttgagccttgggcttgtcctgaaagctgaaggatcgctggtggaggccgcggactgcttccaggcagcatacgagctcagagaattgtcgccgattcaggatttctccgagcaactccccatcatgctgcattaggaacctgtagcaaaggttcacagtttttcatgtagaattttcttcattttctcag

SEQ ID NO: 62129 - DNA, 367 bp, Setaria italica
  Peptide Sequence Number=SeqID_128103
tctttattgtactattgggtctaccgtttcctaagttggtagttcgtattgttggttcctaaccctaaagtattctagtcagcagtgtgtactcaacccgcccggttgcagtgtatgaggtcaacaaggttctcctgccaatgcaaatcttcaagagcgaccccccgcttgctccagcccctgctcctgcaccagatgccaaggcctctgatgtcgctcccagcccaacctcagggaaagccgcgagtgcaaaggcgaaggcggaggagaagaattcatcgtaccaagtcagtgtcagcatcgtcaattacttggtccttgctgtctcaggtggcttgatgctcttgtggtgagaatcagaagttcc

SEQ ID NO: 62130 - DNA, 352 bp, Setaria italica
  misc_feature (321)..(321): n is a, c, g, or t
  Peptide Sequence Number=SeqID_128104
acgggcaggacgaggaagaaatggatggggtggtgggatgggaggagttaagagggagtgaaggcaatcagattctatgatggggttcaaagccggaatttttactgtgaccatgctagtcattgtgctctcctcaccagcaattgctcagaaggccaagagtcctcctgctccagcatccccaatccttccaccttccccggcaccggcaccggcgccacaccatgtcgacctcgcagacctcctcagtgtggccggtccattccacaccttcttggactacctgcaaaagaccaatgtcatcgaaacctttcaaaaccngcaaacaacaccaaagaggcatcactgtctt

SEQ ID NO: 62131 - DNA, 404 bp, Setaria italica
  Peptide Sequence Number=SeqID_128105
gaatgacaaataggttggagtgttgtacatcgaacagttgaatcgtgaagattcccttgctctgcatgagtgaagcttgcaaagcagagttgcatcatcctctttttggcgagggaattggaaggactagtatgacatgctagccaaggtaagggattagtggtcagatgcctatactgaagttagttccatcgatgtagctcgagattcaaaaggagaactgtttaggtgcttggggaacccatgccgatgcaatgtcacatgtgagaccagtttgtttatagaagagcacaatatattcttgccacataggcagttgtattcgcatagaattggggtgattggtaaaattggtattacttccctttcgtttcttccgtttcctaaaatttgttaggtttgtt

SEQ ID NO: 62132 - DNA, 359 bp, Setaria italica
  Peptide Sequence Number=SeqID_128106
gccttgcctgcggcgaaaaacctcaacaccagcagctgcagctgcagcaaagagaagccacgggagcccaagtaacgtgaaaggtccaggacctctcaaagagttgttgaaaccgatccagaaaagatgatgatgcaaacaccacatcttattgtaggtagtaatgagtttgtagaactagcagcctgcgttgttgtatgcaggacagcagcagtgcccagttactacatacctttaaaattttttaagggaattgtgtcaagttcagctcctagtatagaatgtactccggttgttgtttgggtctagtctaaattggtattattgtttctaacgttgtttaccctacttggtttgta

SEQ ID NO: 62133 - DNA, 273 bp, Setaria italica
  Peptide Sequence Number=SeqID_128107
gaggaaggagggggcaggcggagcccgagggtgtgtgcgggcgcttgcatggcgggagacggagctgcggccgacgaatgggggagcgaggtgggtgcggtggttatggcggttatgtagacgccgcggcgggggcggaggcggaggcgccgcgcggcgagggtggcagaggatgtgtgggttttggagggagacgaacctgccggaggacctcaaggagcggtacgccgagtacgccgccagcggccgcggcgacaaggccatggccttcga

SEQ ID NO: 62134 - DNA, 304 bp, Setaria italica
  Peptide Sequence Number=SeqID_128108
gtaaagaaggcagaagagaaaggaatagttgttgttcatgaagccaagtgcaaggtgtatgtgaagcatgatgatgctaccaagggttggaaagacattggtgttggtcaactctctatcagaagtaaagaaggtgcagagaaagcttcgaaagagtccactccgaccattgttattagaaacgatgttggtaagattctcctgaatgctttgatctacaaggggattaaaatgaatgttcagaagaaataacaagttagacctaccaataatttacaataacttacggaatagacgacaagaa

SEQ ID NO: 62135 - DNA, 261 bp, Setaria italica
  Peptide Sequence Number=SeqID_128109
acgagttcagctacgacccccgccgacgagcacgggccggcgcactggggccgggatcaaggcggagtgggccaactgcagcgccggcgggatgcagtcccccatcgacctcgcccacgagcgcgtcacgctggtgcgcgccctcggctacctcgaccactcctaccgccccgcgcaggcctccatcgtcaaccgcggccacgacatcatggtgaggttcaagggcgacgccgggagcgtggtgatcaacggcacggcgta

SEQ ID NO: 62136 - DNA, 234 bp, Setaria italica
  Peptide Sequence Number=SeqID_128110
aaagtaaggaactaaacaaaataagaacaaaaaagaaaaactaagaaggaagaaccgtacttacaacttcatttgttgatgctgtcacttgttcttgaggataagtccaaacaggattgccaccatcaacccaagcaaacacaagataaacccatacaacatcttcttgtcataaccatcactcctgatcctattctccaaagtagagcaggttgtctgagcaagaagagtcct

SEQ ID NO: 62137 - DNA, 255 bp, Setaria italica
  Peptide Sequence Number=SeqID_128111
ccgccgcagccgccgccgtcgttgcctgcgcggctgcgtcgctccgaacccatcgcccgccgcgttgttccgtcggagatatacaatgaggctgctgcaagcggaggagcttttccggaaggttctggagggcgggtcgaagaagaaggcggctcggctgctcggcctcgacgttggcagcaagtcgtcgggctggccgtctccgatgagaagaacaggatcgctttgcctctgagtgtcttgagtcggacaaag

SEQ ID NO: 62138 - DNA, 258 bp, Setaria italica
  Peptide Sequence Number=SeqID_128112
cttaccgctaaacatacccacaaggttgtcataccgaccaccagctgcaatggagccaacctattgccaaatacagtcagtacagggatcaactaaaatggtcttcagctctttagtcagaaaaaggcatatgtacttccaatgttccagataatagagagtaaaataaaatttgagatataaatcagttttgaatacattgatcaccaacatattaagtgaatgaacaagaacaatatgctttacggccactcgtaa

SEQ ID NO: 62139 - DNA, 267 bp, Setaria italica
  Peptide Sequence Number=SeqID_128113
aatgccctagattttgagtcgacaggaattatatcgagcacatcctggtggcctttctttgaccaggcatcggtttgttgctgggaatgtatgtcttgtactttgttccaaacaggcagcactttttttttgcccttttttgcaggccaataataagagctttctttgcttaaagcggggttacactccaaacaggcagcacatggacagttgggtgttggtttggttgtatgatgcgcactgaatcggtacttttagcgaggaaca

SEQ ID NO: 62140 - DNA, 413 bp, Setaria italica
  Peptide Sequence Number=SeqID_128114
aagcacagctgcaatgaccctacatgcctttgcattgtgtacagttttgctcaagccttatggatgttgtcactatggcactaaagctgcggtgtacatttcaatccacgacataatgcaactctgcaaggtggagatgcaaaatgcttacattagcattgtagtaagtatctcccacgaaaccgcagatccagatttgttctccctctcagttatcggacagcaacgcatcgacgtgacaaaagaaaccttttgcaaaattacagaggggcaaagaaaaagtatccccaaatgaagaactcatagatgcgggatccgtaagtctcaccgttggcattcggggagcggaggaagcggtggaggctgagcgcaggagcccagcgagaagaagccgtcccggcagcatcatggcc

SEQ ID NO: 62141 - DNA, 229 bp, Setaria italica
  Peptide Sequence Number=SeqID_128115
aacacattctaaggcactaatctgctacctccacactgacaccacatcatatctcaaacttatcaaagtttatgggtgctatctttcattagtaaaattcaagcactagacaatagcttgatgcaagaaaatgataaaatgaattggatatgtacctgcagcgctgtgctggagttattgacatctgcataagctcaccagtaacaagattatttacagcagttgctag

SEQ ID NO: 62142 - DNA, 221 bp, Setaria italica
  Peptide Sequence Number=SeqID_128116
gccccaaatatacaagttagccattgtagaaaaagcatatgatattactttcttccccactttgaagttcaatgagtccatgccacgcctagtatcagcatcgtccaaaacgtcatcatgaataaggctcgatatatgaatcatttcagttatctcagcaagatgcatatgccttgctcgaggcttattctctaagccatcagctatgtccatgcttatag

SEQ ID NO: 62143 - DNA, 126 bp, Setaria italica
  Peptide Sequence Number=SeqID_128117
aagtacgcgagctatcacaattccttgatggatatcagacaaggaggctttgcctagtgaagctgatgtgccaagtgtctgccatactgataagcaagagcttgtacttctgttgtttgctaagca

SEQ ID NO: 62144 - DNA, 208 bp, Setaria italica
  Peptide Sequence Number=SeqID_128118
cttccatcgcaaaaagtaatgggagctgtcacaattccctgtccatacagggcatatatgattccttgcatgtcattgatatcttaaaaagtaaaatactactgaaaaaatattgagtgaataactgtattacttgatggatatcagacaaggaggctttgcctagtgaagctgatgtgcctgtgaaatcgaggatgtcatcgatcaa

SEQ ID NO: 62145 - DNA, 237 bp, Setaria italica
  Peptide Sequence Number=SeqID_128119
cctatcccctgtgtgccttgcctatcctctgttgcgtgtctcagtggtggaggctgcagcatgtgtggcggaggagcatgcttcagcttcactaagacctggcgcatccgggagaggtccgtgggcttgcctggcttcgggccctgaataactgtgatggatggcttcttgtccttgtctttctttccccccgcttctcgatggtggctatttcatgcggaatgagctctgaaatcg

SEQ ID NO: 62146 - DNA, 279 bp, Setaria italica
  Peptide Sequence Number=SeqID_128120
tcacagcttgagatatcagtaatcatgttgcagcagtagtctatcatccagtattcagttaagctctcgtaacagtttcagatctgaacttgagatcacaagcatactacttggttgggcaaggtagaaaacagtaaagatacagctgctgtgatactaacatgaatgttcttcgctgatataaagccatcctgatgcaaatctctacaaaagatcgctacaggatacatagtctgcagatcagaaataaaacaagcttccatctacgcaaaaaaaaaa

SEQ ID NO: 62147 - DNA, 211 bp, Setaria italica
  Peptide Sequence Number=SeqID_128121
tgcccgcgccgcagtcggcgttggggcattccttgcggaggcgggtgaccttgccggtggcgtcgtccaccttgtaaaactgcagcacggcgagcttcaccttcttgtgcttgtgcttgatcttcttgggcttggtgtacgtcttcttcttgcgcttcttggccccactgagacacgcaacaggagataggcaaggcacacaggggatagg

SEQ ID NO: 62148 - DNA, 272 bp, Setaria italica
  Peptide Sequence Number=SeqID_128122
cgacgtcggcgccctcaccgccggcgaggcccttcttccgccgggcggaatctccaacgtccctacccgtaccttgctgggagtgcagatccatcgttcggaagtcgatcgggttcttcttttgccgctcgattaggttctttcttcagcgcgcggcatcaatcccctttggtttcaagaaggatcaggaacgtcgtccagccttggagatacttccccgctccgctgcgtttgatgcatcatttcaggatggaccagtcctctcagtttta

SEQ ID NO: 62149 - DNA, 362 bp, Setaria italica
  Peptide Sequence Number=SeqID_128123
cctccagttgaagatagaaggaagtggctgtgtatccagcaataccagatgtaagggcatatatgacaacaagggcagtgaaaagagctcccctgttgtatgggtagaagacgccaacaagtgcaagtaggaatatgaaaatcgcactgtgaaacaagaatcgtttattactggtcagaatcatttcaaagtttgactcataacataatctaaaactaaaaggttcttacagggcaagaagctgagttccagatccaataattgctgcaaaaaagggacttttgcttcggggaaagcgggaaaaacgtcgccatgccacgggacaaataaagcttgcacataccttggattgtgaaaaaagg

SEQ ID NO: 62150 - DNA, 420 bp, Setaria italica
  Peptide Sequence Number=SeqID_128124
gagtggaaccatgcatgaacagctctcatttccaggtggcagagcgggctctatttctctggaacaatgaccatattgaaaacctaattaagcaaaactacaaggtgctactacctatcatctatccagcactcgagagaaacaccagagatcactggaaccaagctgttcgtagcctgacattgaatgtacgcaagatcttctctgatcatgattctgcattcttcggggagtgcgttcagaggttcaacgacgaggagctgaagcaggaggaatccgatttgaagcgagaagccctgtggaagcgcctggaggaaatggccacctcaaaacctgagttccaggcacaagggtcaaagagttgcaaggccaacggctgtcattgcgggtgtcctagccagcagtttgactggatttgcc

SEQ ID NO: 62151 - DNA, 159 bp, Setaria italica
  Peptide Sequence Number=SeqID_128125
aggatgagcccctcatggacccggcatggtcgcacttgcagattgtgtatgaggacctctgagaacttgccatttgccgacgtgacgtaatcgacaagctccataagcgtctggcgcttcaccttcctttttccttcaggtttctttgtcggatccgtg

SEQ ID NO: 62152 - DNA, 252 bp, Setaria italica
  Peptide Sequence Number=SeqID_128126
tgatcgagacactgttcacgcagtggcgctcatccgtgggtgtcttgaagccttctcccttgaatacatggcccagatgcccgccgcaggctgcacaagtgatctccaccctccgaccatcaggatcgggtgttcggtttatggctcctggaagtccttcaaagaaagcactacaaaacgacgaataagatttgtattcagcatgtacgtttacgtgtctcccgttactttggccgtgagctgaatctgttg

SEQ ID NO: 62153 - DNA, 247 bp, Setaria italica
  Peptide Sequence Number=SeqID_128127
ttatggctcctggaagtccttcaaagaaagctggccagccgcagcctgagtcgaatttggtgtcggacttgtacagtggggttccgcagccagcacagttataaaccccgtcagctttaaatttgttgtactctcctgttccaggtaacctgaacatgaatgtgcgcttagcttgacgacagatgcttcgttaattattatgctgggatcactttcagataatcattttcacatcaagtgacaaaca

SEQ ID NO: 62154 - DNA, 248 bp, Setaria italica
  Peptide Sequence Number=SeqID_128128
cgtaggttccgtgccttttttacgtttccttgctttatttctaaaattgcccacccatgccaagcagcaatgtgctttgcatcagccacagtagcagcatcaaatagctctcgtgccctccatccacttccaccctgcttgactgacgcagctggccatcatcgtcttcccgggccattcgaaaatccgacgccgccatgctgatgcaattcctctcgctccccgccgcctcctcgcccactccccac

SEQ ID NO: 62155 - DNA, 360 bp, Setaria italica
  Peptide Sequence Number=SeqID_128129
gtttgctattccagtttcaagagtaaatagtaaaaaggaagaacattatcatgaagctgctggacttcattgctgaacctcgcgctaatgatgattccacactttctgatgatcagggatcaaattctaggaagcgcaaacgagagggaggaagtgcagctaagaattcagagggcacacacaagagatctaggaagagtttcatcatcaccaaaaagttctaaggataagcagagctctgctgaggattcaaacttaaggaagattaaacccattacaccaaagcacacggtaaattctcaaaaagagaccagtggaagaagatcatcaggcataaggttgacaacaagtaaagggaaa

SEQ ID NO: 62156 - DNA, 255 bp, Setaria italica
  Peptide Sequence Number=SeqID_128130
agtggctccctcgggccgcggtgtttgtgctcgtagatctcatggtcgttatggtgggtcgtcctaaagggatatttaaggagtgtggcaagagaatagattcaggcctccggctcatccatgatgtggcaaaattgactatgacggctactggattatagacatactttgaagcgtgtgcagcttgagaggttctggttcctctgcttttttagggaggttgccaacttaattccttcctatttgttcttattt

SEQ ID NO: 62157 - DNA, 253 bp, Setaria italica
  Peptide Sequence Number=SeqID_128131
attgcttggcatttttgttccttaggcactagaattggttggtcctgcttatagaacaatggactcttttgttggtgtgcgagagaagacttgtattatttttgtttatggacttctacttatgagacagcataatccgcaagaagcacggtaagtgtaatgactcagtaactacggaacaagagaacactaaatggttccgcatgttgtgtgataggattatagggtgacatacatgatgtgttagctgtgg

SEQ ID NO: 62158 - DNA, 296 bp, Setaria italica
  Peptide Sequence Number=SeqID_128132
caagctccattggatccggatttttcttctgtggcataatgctgcttcctgttgaaactttatcacttggtgtcaggaatccaaattcctccgatgcccaaagaacccattcttcaccaattcgagaaagatgaacagcagcgattgaattggcagcaagaaactccaatacaaagtcacggtctgatactgcatcaatgctgttcttcattggagctgtaaacttcaaatcttttcgcggttcttgtaaaccttgttctaattgggtaagttccagttccttccgtatgcccaaa

SEQ ID NO: 62159 - DNA, 234 bp, Setaria italica
  Peptide Sequence Number=SeqID_128133
ttgaccagccgaccagcatctcgctccagctgttcaacatatgataagagaagatgtggcagcaaaacaggctgtgccctttgcagatgagtataaccaggaactatcaagtcaacgtattttgaagctaacaaaaccaaagacacatgatgaatgagtaaaataaagcttcaaaacttcaacagcataggcttctcttaatcattggaatggttgtgtgtcaactgccaacag

SEQ ID NO: 62160 - DNA, 241 bp, Setaria italica
  Peptide Sequence Number=SeqID_128134
attcgagtagacgacgagccgttcgatactgtgccggatgctgagcgaggctctgacctaatactcgagaacatgaatgatcagcaacaagttgtgatacaggtgctgttgtgcgtacttgcggactgatcatgggacaagtatagtaagcacaactggaacttgggtatttgcgtacccggggtcctgacagtatgcttgtttcatagagtgttgatgcttattattggtattacttttt

SEQ ID NO: 62161 - DNA, 448 bp, Setaria italica
  Peptide Sequence Number=SeqID_128135
ctagcctaatatccagcactagctccctaaaacctcctacacgtaaactaaataagaaaagaaggagagccccacgctcatgcagctgttcagctcacacctcgttaacccaatcttctttcttcacccattgcattgccgttttgttcctgatttcttgtgcaaccaataaaggtaccaaccttctcaccaacaatagcctttgcaatgtttcctggcttttgcaagttaaacacgacaacaggaatgttgttttcttggcatagtgtgatggcagtcatgtccattaccgagagatctcttgtagtcacttcatgatagctcactgtctcaagaaggtgagcatttgggttatgcctggggtctgcatcgtacacaccatcaaacaatttagtttagactttaaagacaactaacctactagacaattaaatttacttagtactaa

SEQ ID NO: 62162 - DNA, 257 bp, Setaria italica
  Peptide Sequence Number=SeqID_128136
ggttcaatagcttttatttgatctgtaattctgtatacagctaggcctcccgtagacgacgtagctacagcagtaggtaattgtcggcgatgggcagcttgccactcgacgcgtcactacgtccactggaccccgaggccttctccggcgagtcacgcgccgtcgtggacttcctcgccgagtactaccgcggcgtcgacaagtacccggtccgggcggccgacctcgagccgggcctgctacgcaagctgctcccc

SEQ ID NO: 62163 - DNA, 268 bp, Setaria italica
  Peptide Sequence Number=SeqID_128137
gccaaagcaaacagcctgtagcttctcgccttctcctgctgttgctttgtactgctaagctaggctaagctaaaacttgttggctatgggcagcttgccactcgacgcgccagtgcagccactggaccccgaggccttcgccggcgactcgcgcgccgtcgtggacttcctcgccgagtactaccgcgacgtcgacaagtacccggtccgggcggccgacctcgaaccgggccgtctccgcaagctgctcccggactcggcgccggag

SEQ ID NO: 62164 - DNA, 210 bp, Setaria italica
  Peptide Sequence Number=SeqID_128138
ctgccgagtactccacgtccagcttcggcgcctccaccggcgcgacgagctgctccagaatttccgggtccatcagctcctcggcacgcgcgctcgcttgcatcctggtggcttcatcggatatccgcttccagatgaccagctcgtcctgtacatcctcaacggccctgagacacgcaacaggggaaggcaaggcacacaggggatagg

SEQ ID NO: 62165 - DNA, 267 bp, Setaria italica
  Peptide Sequence Number=SeqID_128139
ggagatgcgagaggaggagcagggaagtgtctagaagcggatagggtttacggcgaaggggggagggtggtggagtttcggggcggcggcggcggcggatgcgggggcctcttatatgttatggaagcagctctgaacctttgttttccagatcaaattcagactgctaggctattgactagtgttcttatagtagagtcttaatgtttttttcattgtatttcattctgtgctgcaggtgtcgtaccctgtctaatttgattatta

SEQ ID NO: 62166 - DNA, 334 bp, Setaria italica
  Peptide Sequence Number=SeqID_128140
actacgaaccgccccaatcgatccaccgaccgaatcgcttcctcgccggagccgctgcccgtctcccggcaccgcccgcgccggcctctccaccaatcgagagcgtgtccttgccctggccgcccttttcctgccgccggacttgatgcgctaaaagttctagttgtgttgcatagattgatccaacgcattactactgcttcaagacagtctgttcctgaaagcatgttggccagtgtgtactaacgtaagcctggtagcagtgtatcataaggctattgggacaatttgctagatattgtgatggagttcaacaaagaagaggccttacttg

SEQ ID NO: 62167 - DNA, 489 bp, Setaria italica
  Peptide Sequence Number=SeqID_128141
ccaatgttgaaaacaactccaagcagctcaattaaagtggatttgttgtttatgttgttttgaatacaattgcagctccatagatttacatttatcatctgactatttcgagttgctatactgttcttagcaggtagtccagctgcatttacatgtcttgtaactttaactttattaatgtagtatcagtcagttttgacatgtatgtatacaaaggtacacggtgtatttatagctacttttcactaaggttgaaggaatggaggttgggtttccatgggcatgaagaatcaaaatggatctctcaagctgtctgttatggaatgtggctgttatatgaaggagttagacataacattaaatggaggagcatcttggttttatcaagtgtacgtggttcacaaatttgttctacaagcactatgttgttagtacctttgaagggggctcagtaaattgaactttccttcaccagcagccagtaaatat

SEQ ID NO: 62168 - DNA, 243 bp, Setaria italica
  Peptide Sequence Number=SeqID_128142
ccgcgttcccgaacgggctgatcacgccgccgtacttctggttcacgatcggcgccgccgtcgcgaagaagatgaggatgaacgtgcccatgaactccgcgcccagttttatctgaaattcagaacaacatgcagaaccgcgtatgattgcaaacgacgaaatcagcaaaaaaggacgccggaacgtccggcattcagagcttcaaatgacagcatgtcgttgttttccatcaaccaataatc

SEQ ID NO: 62169 - DNA, 132 bp, Setaria italica
  Peptide Sequence Number=SeqID_128143
tgaaggcacacctcttgagtttgcaacagaatcaactggtgacaaaataaccttaagtagtgcttcagctttactcaagcggttaagactattcttctagatatcccagctcttggaaaacagagtactggt

SEQ ID NO: 62170 - DNA, 242 bp, Setaria italica
  Peptide Sequence Number=SeqID_128144
ttatatgttgagataaaaccgaggaccaagagaggctgcaagtttgtccaggaaatactggaagtaggtaggtgaaagcaagctaccaagcacaggaatactgctggacagaatagagctgataccattcacatattctgattgatcaccatcagcattcatctttctttcccaggcttcagcagcatcctcacctcgcacccacccaccaaattccaaagcaagcaacagcccgaccgacc

SEQ ID NO: 62171 - DNA, 388 bp, Setaria italica
  Peptide Sequence Number=SeqID_128145
ttcagcatcaaatttggtttcaagccatgaacaagagtcattaatgcttttgtgatcacggccgagaactcatcctgaacttcagacatgtccaccttgtcagcaaactgagggttaatcatcttagaaacattctcagctagctcaccagatgtctggtgacaatattctgcagtattgacaatgtagcatatcattctctcgtccctgtccgaggtcctgatctgcccatcggtaccagtggccgctgcaacaataccagttccaccttttggtaacctgaaataagttgaataatgtttggttcttcgttaatgcactgcacctctttaagctttttctaatcaccaagaaaaacctgcattactgcttgatagaatgtttgtct

SEQ ID NO: 62172 - DNA, 273 bp, Setaria italica
  Peptide Sequence Number=SeqID_128146
tagtattttttagtaattcgtaagtagcttaacaattcttgtctctcaattcatgtaccaatttcagaaccttgtttatctgaccttcagcgctataacctttgatcaatgaatcaaacacagcaatgtcgggcacaaagccacttgctgtcatctgtttaagcaccgtctcagcttcttctaggtctcctagttttgcaaacatgttgattagcatagaatatgtcacagcatcaggagtcagaccctcatcaagcatatctttaagcagtt

SEQ ID NO: 62173 - DNA, 281 bp, Setaria italica
  Peptide Sequence Number=SeqID_128147
caagaagacatgtacaagtagaaaaaaagagaaacttgtatcctgagtcctgattttgctccaaggaaaagtatctattgaaattgccagttcagaccattgtaaaatccattccatgcgtgccactgcctgtaagctgtctgctattgcttgcaagattgcctgaccaggcaattttgacgagggctgcatccaaacaaacccacagtgcttgcatatgtatatcatgacatttgattacgattagttatctgatggtcatcttcagaaagcacattcta

SEQ ID NO: 62174 - DNA, 243 bp, Setaria italica
  Peptide Sequence Number=SeqID_128148
taaaagaaaagaaaactaaacaaaataaaataaggaacgaataatagacttacctagaaataatacttcgctagaacagggagcactatatgctgagcatggaagcttttccatcacttgttgtcatcatatctgttcttgcatcttttctatttgctcgaaactgccgacttctacgtcatggagttgataatcacccaccttacgtcaagaaacatgtggtggaaaagcttccatgctcag

SEQ ID NO: 62175 - DNA, 190 bp, Setaria italica
  Peptide Sequence Number=SeqID_128149
ttcttcggaccccttgacgggcgcttttatccagtatactacactctttcttattttttttctaggatttggcgcaagtttcgaactaaagtcaaaagatttgaattcaaatctcttctacccaagcgggaaaagcatgctgtccctccggcaggtgagcggcggctggctagctcaggagtccgacgac

SEQ ID NO: 62176 - DNA, 244 bp, Setaria italica
  Peptide Sequence Number=SeqID_128150
tcggttcagcttcatatcgaggaaagggctcgagaccttccgggagcggctcaagcatggggttcttgatcttggcctaaccattcaggtacttagttttcttctgctcctggcgcaaagcaagcctttgactgaatgtctgaaacctaaccgtggtctgatcctggttgtaggcacagaagactgaggagctgccggagcatgtcttatgctgcatgaggctgaacaagatcgacttcgccga

SEQ ID NO: 62177 - DNA, 243 bp, Setaria italica
  Peptide Sequence Number=SeqID_128151
tgcaatgcaatgcaagcaacatgatcgagcgattagcgagctcaaggggcagaggacgacgacggacctatgacgtagggcatggacttccatccccggtagtcgccggcggcaccgtcgtcgtcgtcggagaggtgcctcttcttcatgttatcgccatccgcgacgacggcaaaggcgtacgccttgtgctcgtcctccggcttatcgccggtggcggctttgtccatcataatatctgcc

SEQ ID NO: 62178 - DNA, 274 bp, Setaria italica
  Peptide Sequence Number=SeqID_128152
acggttactagtagcaataacaacataagtattggaaatccttccatggcctacttgtgccctctgaagtacatgtatactttctgaagaacccatatgctcacaagtgtctccaagcaaaacaaggcaaatccgacaaagtaaaagatcccaactatcgcatgatctgagaaagtgtcaattgcagccaatatacccgttaattatattccgtggaaaatcattaacgggtatattggctgcaattgacactatcgcatgatctgagaaagtg

SEQ ID NO: 62179 - DNA, 324 bp, Setaria italica
  misc_feature (170)..(170): n is a, c, g, or t
  Peptide Sequence Number=SeqID_128153
atctgagaaagtgtcaattgcagccaatatacccgttaatgattttccacggaatataattggaggagcaatggcggcaaatacgcaaaagccaatgtggagcaggtagcagaggaaaaaccatccaaagctgaaagcactgtcagttcatagatagtagccaggaaaanagtttggaatctccccctctgatccaacagactatgacagcaataaaaattccagaagagacaaagcacaatgccaagccagctcgcgaacgcaagatactgcaacttctgagcgtttgctggtatctcattggcaatgtcgtggtggatgatt

SEQ ID NO: 62180 - DNA, 248 bp, Setaria italica
  Peptide Sequence Number=SeqID_128154
gcaggacctctccacggtgttcgtgccgcgcggccccgccgcggacaggtcgccgccgccgccccggggtgccaagaagatccgccgcctgttcgtcgtggggtgaagcggcggccggcgacgtcgctcgccggagagattgctatcctcatccagtgctgatcgatccactcgccgcacgtgcgcgcggcttgccgagctcggttgcggcggcgcgccattggacatctgctgcgactgcgagcggg

SEQ ID NO: 62181 - DNA, 391 bp, Setaria italica
  Peptide Sequence Number=SeqID_128155
gagacatccagctctgtcaatcgcttgctcagagttgatagaagatcatacacgagatcacttgagaatgacaccaaatatacacagatagcagaagagtaaggtaagatttctcagagatagaccatcttcttttgagtactcatcctcaaacgtcttagcaatggacgcaaggatcttggcgctgaagtcaataccaaccaagcaagacatgcctgcaacaaaggctgcaaaaacagcagcatactgttcattgccacgaggtcctcgggaacagctagccaaaacttcatcaccaattatctgagagccaacacttcgtggaacagatcgaaaaagcgttggtctaattttccttgtagttaattagtacttcctatattttgtactt

SEQ ID NO: 62182 - DNA, 465 bp, Setaria italica
  Peptide Sequence Number=SeqID_128156
ggggcagtcagcatgctcccctgaaactctgtaaggtgcattttttgtgcctttgctgtagttacagccatggatgagatatttggttagggaagcagggctctagggttgcttgcaagtgctcctgcatcacttagaatcaactttcgttcttaaagcaatgaaatagtagactagggtattatatacttatgttctttcttcctcgtccaggaggagtatgttgatggagacaatcttgggagacttgactgcgggcacgacttccatgttggctgcatcaagcaatggctggtgctgaagaatgtgtgccccatctgcaaaagcaccgcgctgaagacctgaaactgaaccgaggctcgtcagaggacacccatgttctatgttcattcgatcgcaagatcatttaccgattcatattgctgtgctttttggttgggtaaattttgccactcaccttcgatt

SEQ ID NO: 62183 - DNA, 390 bp, Setaria italica
  misc_feature (239)..(239): n is a, c, g, or t
  misc_feature (353)..(353): n is a, c, g, or t
  Peptide Sequence Number=SeqID_128157
tagtttattcagtactatgctgggtcttatggaagtaaaatgttaaattaattttcattttcctatacagttccgagaggacctaatttgctgggagaaggtagccatgtgcatattgattctgtttaaagcattgcccaggttgaggatcagatgcagctaggaacaagcagttggaacagatagggaatttgaatgactaatagttttggttgcttgagaactctatttttcccttntgaaatggcttgtatctgatttgattccgtaagtgggttggcttctctgaattctgaaaaatgggttgaaaatgggctgaaaaccggcccaactttggtgggctgaatttttangggctgctagtggtctagaatttgaattgatatgatt

SEQ ID NO: 62184 - DNA, 442 bp, Setaria italica
  Peptide Sequence Number=SeqID_128158
tttgtttttcttttcttttaagttttagttttctttagtttacgtttctttaaaatttcttaacttctaagtcttattgggtgatgccatgaagggtgttacaaaagcaatggctcaaatgaacaggcagctaaatctgccaggattgcagaagataatgcaagagtttgagcggcaaaaatgagaggatggagatggtgagcgaggtgatgggggatgccatagatgatgctttggaaggagacgaggaggaagaagaaacagaggagcttgtgaatcaagtacttgatgaaattggcattgatatcaaccaagagcttgttggagccccgtcggccgctgttgctcagccagcttccgccggaaaggttgcccaggctgaaagtgctggggccgctgatggcggaatcgacgccgatttgcaggcaaggctggacaatct

SEQ ID NO: 62185 - DNA, 198 bp, Setaria italica
  misc_feature (10)..(10): n is a, c, g, or t
  Peptide Sequence Number=SeqID_128159
agagagcagntgcaggccccaggagaagaagctcatcactgagatcaagaaaacagctaaacgaaggcccagatgggagctgtcaaagtaatggccaaagatcttattcgtacccggcatcagataacaaagttctaccaacttaaaatactacaagactaccaaaggaagtttactactaaagaagttacaagaaca

SEQ ID NO: 62186 - DNA, 398 bp, Setaria italica
  Peptide Sequence Number=SeqID_128160
tatgcacgatttctcttacgtacatacgttgaaggtagcaagaagactaaatggtgtccagctcctgattgtacttgtgcagtggagttcttggtgatgagaactacgatgtctcatgcaattgcaagttcaacttttgttggaatgtatgctggttccattcacctaatgacttgatgctttgttttcatgaggcctagtgatctaatatgtaagggttcatcaatattcattaccgtttgcagtgcaccgaggaagctcatcgaccagtgaactgtgagactgtttctaagtggatactgaagaacagtgcggaatctgagaacatgaactggatactggctaattctaagccctgtccaaaatgcaaacggcctatagagaaaaaccagggatgt

SEQ ID NO: 62187 - DNA, 362 bp, Setaria italica
  Peptide Sequence Number=SeqID_128161
aaaagatgagcttccagctgctgcactggtgtatagagtcaacgaagggtctcagttgcaaatggaatggaagctgaaaaatgcgcgtgtgggttcatttggtttgctagcctgtgtctgttgttccttgtaaatattagttgtgaggtggtgatctgtgttttatgtgttgggttttgcctgactttctgactgacctgtgaaaaaaaactgggaggacctgtgaaaaaaaactgggaggtagctctatttattcccccaaaatattactgcactcttgttacttacctggatggctggtgtatattaccacgtccaaacatcatgttcactgtgtgttgaacaaaaaaaaaaaaaaaaaa

SEQ ID NO: 62188 - DNA, 264 bp, Setaria italica
  Peptide Sequence Number=SeqID_128162
gcccaacgcttagctaattttggtagctcttaccaaacagcgtgaggtctccgtcctccaaggcggggatcctgccgaacggctggcacgggggaatgaactcgagatcagcgcaaggattagcttagagatgacgacgaattgctattccaggggggcaagcgagagcgcgcgtacgttgcgggcgaggtggtgcggcgccttctgctcgcacgccgccatgtcgagggggacacctcgtaggcggcgccgacctcctccagg

SEQ ID NO: 62189 - DNA, 289 bp, Setaria italica
  Peptide Sequence Number=SeqID_128163
ccttgagcttgcgattaattacgaattcaatcaacaaagggactcacagtttttattcaaaaccagctaagataaccggcgatcatcctttcccccccaactcccctcgaagtaacccggaactcccaagaagagaggctcaagctccgcaatcgctgggccacaaaccaagaaggcgcggatgagccgcttgagtgtgagccagcgagcgacaggctaaccgccggtcgcagaaataaagcccgtttttttcccctctccttttccttgatccaagaacaaggaaccg

SEQ ID NO: 62190 - DNA, 273 bp, Setaria italica
  Peptide Sequence Number=SeqID_128164
ggaactaacgtaaccgggaaccctagacctagaaccgactacctaccaacgaacggcgccgttcttcggcacaacggcgccggcgtacaccaccccgaacgagccctctccgatgcgctcgccgaccacgaagtcgctcatcttcaggctccgccggcccagcacgctgtccagcgccagctgcagcggcgccagcacgtacgtgtccacggcgccgctcaacacccccggccgcgccgtcaggtatagccatgtcacgcccaggaacccgag

SEQ ID NO: 62191 - DNA, 421 bp, Setaria italica
  Peptide Sequence Number=SeqID_128165
gtcaggatagcatcaggacgagcatgaccaaacacctgatcggctgaaacgggaacagctcagaatttcgcaaccagtcgacgagctctctgggagtctgcatctgcgtagtttggaggaactgaccagcggaagtaggatttccagccatgagccatggacggatgctatttgatgagcgagagcttggacagcacggccgcggcctgatctccacccaggagaaaatatgggtgccgtagcgccgcggcggcggagagcctgcccccgccgttggcgcccctctccgagatgagcttggtggcgaggtcccagcctcgcccggagtcgaggtccaggatctgcaggtcgggcctaccgaccgacgtagactactagaccgaccaacctagttagaaggtacgttaagaccggacggtaa

SEQ ID NO: 62192 - DNA, 207 bp, Setaria italica
  Peptide Sequence Number=SeqID_128166
cgggcatcgtgcaccgcccgagctctacgtcctccccgaggagacgcccgagccccctgccagaggatgggggagaggatggcggcgatgggctccggcgggggctcgggcgtctcctcggggaggacgtagagctcgggcgggcagtagtccgggtcgagcagggcgcggtcggggacgtagttcttgccgatgcggaggtcggtg

SEQ ID NO: 62193 - DNA, 484 bp, Setaria italica
  Peptide Sequence Number=SeqID_128167
ttttaactttccttaggttaacttaatttgttcgttatttggtctttccctaattactattttccttgtacatgtaggcggcaatcatattattccatgatactagagttttgtctgttatctgatcaaataccttttcggatgattccacttttccaacttttccgtacatgtccagaagagcagtttcaagcaccacatgaggaagaaaatgtctccgaatcacataagcgtgagcgctccttccatacagtgaactttcagtttgagcacaggcggcaagcaaattgatagcggtgaccacttccacctgaaacccctctgctcccatttgcatgaaacagtcaaatgcatccacaggccgctcattcagagcgtacccgcctatcatacaattccatgtcaccacggtcctcaatggcatcgttgcaaacacgtactcagcagacacaacattgccacacttgcagtacatgtcaagaga

SEQ ID NO: 62194 - DNA, 221 bp, Setaria italica
  Peptide Sequence Number=SeqID_128168
cattgccttagtgaccctagcaagacaaatgctggcactactgtcgtcatggtgaagtagtcaggataaagtggttgattcagtaactccaggaacaatgcgatggcttcccaatacatttccttgtacatgtaggcggcaatcatattattccatgatactagagttttgtctgttatctgatcaaattaccttttcggatgattccacttttccaactt

SEQ ID NO: 62195 - DNA, 227 bp, Setaria italica
  misc_feature (184)..(184): n is a, c, g, or t
  Peptide Sequence Number=SeqID_128169
aaaccaagaatgatccaccgcggtattcttcataggccatataatgtaaagctgcataaggaacaattcgagcaacactagctccattccccctgtaaaatgagtttaacccttgcggtgctgtgatgctccttgctgccttagcattcataaggcatgtaggatagcattcttttttggagcngcatcaccatagctgctaggcttctccaacgcaatggagacaa

SEQ ID NO: 62196 - DNA, 292 bp, Setaria italica
  Peptide Sequence Number=SeqID_128170
agtcgcactagtccagacctacttaactctgtcacttgaagatattgcttcgccaaccctaggttgttgtcggattgaaacactgctgcatttgattcaacaaatgtctctaagtcagtgtagcgaccgttgccatagcatgtagaaagctcaacataaatctgggcatgatttttcatatttctttgagcagtggcagatgtatacttcggaaatgatgggacctgtccattctgaatgagcgaaacaaggatgtacttcttgtaggcttccacagcaatcgcattcaact

SEQ ID NO: 62197 - DNA, 277 bp, Setaria italica
  Peptide Sequence Number=SeqID_128171
ttccattcttgtcatgtaaatactctttctagtgcaggaaatggtttgtttctttttcaaatggctaaaagttatgaaagttcaaatttccttgggcttgagatgaacgaaaaggtaagtactgcattttactctatggaatcccattttttctataatcttttcagtaactcacatctactgtagcttgttataaggtgcctccagggtatggcttgggatgagaaaaggaacctacattttgtagcaacgaatgcaacgtccacattccactcca

SEQ ID NO: 62198 - DNA, 233 bp, Setaria italica
  Peptide Sequence Number=SeqID_128172
gtgaagtatgtgagaggggctgctgcgtcttagggcatgtcttgtgtccagaatcaagccatttctggatgcacggtcgctcatatgtctgaaaagaagacaagagaagttgtactaattaaaccaatgtattcaaggagtagagcagtagctataactttgccctatggatgcatacctgcccactagaaacgatgacagggtcttgcatgagctcaagggatatcgggcat

SEQ ID NO: 62199 - DNA, 379 bp, Setaria italica
  Peptide Sequence Number=SeqID_128173
tgtattaggtagttattcttgttgtattttattggtaggtctaaagtcttggtctaccgtagtcgtcctctggtgcgggaggttcagtgatgacacagtctttgagcttcttgagcaaggaagacatctcctcaacacatccatcaggttcgccgccactggagatgaccatctcatgcagggcgacggattctttcttgatatcggccatagtctgcagttgcaacttctctgagatccttgtgaagaccagagggtcaaaggtcttgtcagcgagagcggaggatatatcctttgagagctgcgcgtctggtggatccattctggttgcagcccttttgaactgagaatgcacaagcgcgacctgctcctgcacttc

SEQ ID NO: 62200 - DNA, 274 bp, Setaria italica
  Peptide Sequence Number=SeqID_128174
tcgatggcacgatatagtccatcatcaacaatgcgtgcgtaatccggcaatagttcaataagagccatgaacttctgcagcttcagatatggatctggagctatctctgctagatagccatccattagtcttccaaccttcaagactgaactgtgacttggagacttcagtccatctgaatcatatccacaagtgtcaacgtcaaacattgagtcgcttgtttgcgtcgaggggatcaggagatcgtctagtgatgccatctcaagctggagac

SEQ ID NO: 62201 - DNA, 420 bp, Setaria italica
  Peptide Sequence Number=SeqID_128175
tctagcaagcaaggaggagttggcacctttcttaccatattcatctcgcatggctgctcttgattttattgtgtgtgataggagcgatgtttttgtgacaaacaacaatggcaacatggccagaatgttggctggtcgaaggtatattatttcttttctgttattgtcttgtgtcaatataaattcaatgacaattgattgaccaaagtaaaattgctttatgtcttccttacaaggaaatgataattgactgataaattgtgggtttcaggaggtattttgggcacaggaggaccataaggcccaatgctaagaaactgtactcactatttctgaatcgaaccagcatgagttgggacagattcgcatccaaagttcagacattccaaaagggatttctattgggggtagtccctaatt

SEQ ID NO: 62202 - DNA, 246 bp, Setaria italica
  Peptide Sequence Number=SeqID_128176
ccaattacacgtgaaacatgcttggtctgaatgccatccccagattgcttcagtctcttgatatggtttagttgtgttctactaacatcaatcagctgttagaggcaaggtttctgaggtgtcgcctaggtgtccaggcatgcccccagcaccacagaatgccacaaggtcctagttacaccttgtcgcctagggcgttgtctaggcatccaggtgtgcccccaaagccacagtatgccaacaaat

SEQ ID NO: 62203 - DNA, 242 bp, Setaria italica
  Peptide Sequence Number=SeqID_128177
tggcatccggatgaatatcaccatagcaaagagaagatgaccagctgaggaaaggatttccaaagtgatgattttttcctgtaagcaacaaatgtacattttcttctgcatcagtctcacttggaagaaattgtttgagaaactttctctcagtttctgtcagacatgtagaccatacctacaatcaagaacaaactctcataggatagcacacctctcaggctctcgagagaaaaagtttc

SEQ ID NO: 62204 - DNA, 141 bp, Setaria italica
  Peptide Sequence Number=SeqID_128178
ttcttgacatgctggagttcattccatctcatgctgcggtcgtgtttgaccatgatggagttccatatggtcattatactgccatgccataccaaagaatgtcacatggacaaaaggaatcgtacccttttcgtacattat

SEQ ID NO: 62205 - DNA, 257 bp, Setaria italica
  Peptide Sequence Number=SeqID_128179
cgatccttgggcactgtgttattcatcagtatatccagggtaggtagtaccaccttttgtgtggcttttatactgtcctattaccaccatcttccagttgcaacggcttcatggaacgcaaaactttaacctagcagacagtactgaacttatgtaacaaaaccgttgaatggtcatttaaacatacacatgcacagtaaacacatatgcacgtagacaataagatcaatgtattctgcttgaattatagttgaaag

SEQ ID NO: 62206 - DNA, 339 bp, Setaria italica
  Peptide Sequence Number=SeqID_128180
aagtttaaccaaattaagaacaaaataaaggactaagtaatactagaaggagatgattctgcattatgtctcgaataataccgtagccatcgaagtatcctccacgtccttcagtaccgaagtcttctgagaatataagttgcacatttcttatatattgccttgaccaaagaggctcaaacacgagatttgagaagcgaaggacagataaattctccacagttcctttcccaagtaatggtcaatcctgaaaatttggtcctctacaaggtattgcttcagacctcttgttaatgcagcagaagactctgagtcacggccaagggcttctcaacaatt

SEQ ID NO: 62207 - DNA, 337 bp, Setaria italica
  Peptide Sequence Number=SeqID_128181
aactgcgctgatgaaagcacggttccgcactttgttgtgcactgtaccagatattgtctcaaggacagggtcaagctctctcaacagtacctccaccctgtttgatgcggtatcaccaacataaagggtgtcccagagaacatggcccaagtcatagaatgtgaccttatacgcagttgtctcacagatctgctggatgccttcttgacaggccacctgacaaagctcaaacttgatgtccactccatctgtgatgtctgcctgaagactagaactacaaacaatttacgacaaaacaatagtttttaatacttacttactactaaggttactacga

SEQ ID NO: 62208 - DNA, 220 bp, Setaria italica
  Peptide Sequence Number=SeqID_128182
atttgattaattcgacaaactgaatcactaaccaacactacagcctgaccagattggtagcgatttgagcaaaacgaaggtaagaatctggagggcgaaatactcacatcgaccttgcccttcttggcaacgctgggccaatccttggccgagacgccgctcctccagtcaaactcgaagccgatggtgaccggcggcttgtgggtcgggcgacccagaa

SEQ ID NO: 62209 - DNA, 123 bp, Setaria italica
  Peptide Sequence Number=SeqID_128183
ccgtcgccgtgaaggcaaagtgccccgactgcacgttctccgcgtagtgcatgctgttcccgtacggcgacgtcacctgcgccaccatcaatcgaagcaaagagccccagttactcaaacaca

SEQ ID NO: 62210 - DNA, 118 bp, Setaria italica
  Peptide Sequence Number=SeqID_128184
caggtgtaacttttttgtgtgaacggttaatctatgttacagagcgtgaagcacatttctcaagtatgacacacatcgtttcttacatgggttcacgctctgtaacatagattaaccg

SEQ ID NO: 62211 - DNA, 179 bp, Setaria italica
  Peptide Sequence Number=SeqID_128185
atcaatcaatgtcaatggtcatgtctatggagttagatatgggagatcagccacaagatgtcaaggtaataaaggaggatacccagatagcctaacatcatcttcttggaccacagcaccggtgcaaacacctgctgtcgctgtgtgattccatatgtggccctggtggcgagtatcct

SEQ ID NO: 62212 - DNA, 405 bp, Setaria italica
  Peptide Sequence Number=SeqID_128186
ctagtgatatgtcatatagtcaatcttgatagctttagacatactagtggtcaatttttgaaagtttgacagtttggattctgaaaggactattgttagccaattgccgccatgctctcttgttagcatccacttgcatgcatgaatagctgttttagcttgtgcattaccatctcagctatattcctttaattaatcctagtagtgtggatgcggcaatggagctagagctgatgttgctaggaagacgaaggaggttgaacatatgctggcaaatttagaaaaagagggagtggagatagatggcaagatagctagtattattgatgatgaggtagctagaattaaagctgaagctgccaggtaatttatttaatgcgctacaacttattttgtattcttgtt

SEQ ID NO: 62213 - DNA, 403 bp, Setaria italica
  misc_feature (135)..(135): n is a, c, g, or t
  Peptide Sequence Number=SeqID_128187
cgctcgcaagccaccaggtcgaggaagcagacaagcaaccggcacccaaaaccctagccgacggtcccctcctcctccagcagactcttcctccgtgccggtgccatggcgctgcgctctccctccagcactccnccgcggttctgggccccggcgattcgccgccggcggactctccgcctcccacctctcagtgtggatgcggcaatggagctagagctgatgttgctaggaagacgaaggaggttgaacatatgctggcaaatttagaaaaagagggagtggagatagatggcaagatagctagtattattgatgatgaggtagctagaattaaagctgaagctgccaggtaatttatttaatgcgctacaacttatttgatctgtactcaaatgaaact

SEQ ID NO: 62214 - DNA, 443 bp, Setaria italica
  misc_feature (249)..(249): n is a, c, g, or t
  Peptide Sequence Number=SeqID_128188
ttgttcttttgttacttacggttttgtttacttttgttacggttctttaggttttcttagttcttatttttccttggtactagttcttgtcttctatttggtttttcgagtgagtgtcaaacctcttcaaaattagtccatcggtccatttctttttgtgcaagttcagcaacatttttctcctcaagctcgtttttccggtaattgattgcaattgagtagtaatgtctgttcagcccatggataagngcctgaatagacggcttatttaggtgcccaaacatttagacgttgtctgtcgtggctcctggccaagcatcatggtctgaggattaatgaggcggaatgcatcaataaccaccttccccttgacactctggatggggtctatcacaacagcaaccgccctggggttcaaagcttcaaaactctgttgagtattg

SEQ ID NO: 62215 - DNA, 348 bp, Setaria italica
  Peptide Sequence Number=SeqID_128189
tttttaaaaacttaaaactaacctaaaagttactaaactaagaaagaaatgtctatttcataaacaaaccttagaaccaaaatgtatctggcgtaaggtcattgcacatgtcaggcctccataaacttaaagtgggtatgtgtagacagttaggtacaacaagagtgacaacctaaaagacaaccgtgtcaagcatggttcctagggtctgaactatgtttgatgacattaaattcgacacatgctcttccaaatgcttcttcgcatcttgccgaccaacatttgctatcgcgagtttctcaggtggcagctcatcctcctcttgcactgccttgttgtacttgacgg

SEQ ID NO: 62216 - DNA, 363 bp, Setaria italica
  Peptide Sequence Number=SeqID_128190
ttttttttttaaaaacaaaacaaaccaaaagaacaaaacaaagaaagaaatagacaattacaataaacaaaccttagaaccaaaatgtatctggcgtaaggtcattgcacatgtcaggcctccataaacttaaagtgggtatgtgtagacagttaggtacaacaagagtgacaacctaaaagacaaccgtgtcaagcatggttcctagggtctgaactatgtttgatgacattaaattcgacacatgctcttccaaatgcttcttcgcatcttgccgaccaacatttgctatcgcgagtttctcaggtggcagctcatcctcctcttgcactgccttgttgtacttgacggctaggttcagca

SEQ ID NO: 62217 - DNA, 249 bp, Setaria italica
  Peptide Sequence Number=SeqID_128191
cggcgtggaggcggcccgcgacacgcggcgacctagggttgcccctgccggcctgccgtggacccgtggtgcggatggaggaggagaagggagagggggcataggtacctgcggacccctggaggaggcctccggtggagatgcgctcgtcggcgacggggaagctcccggcggtggagttgtcgccgcgatggggacgcacgcgagcggacgagcgcatctccaccggaggcctcctccaggggtccg

SEQ ID NO: 62218 - DNA, 289 bp, Setaria italica
  misc_feature (108)..(108): n is a, c, g, or t
  Peptide Sequence Number=SeqID_128192
cgagctggcacctcgaggaggcgctgcagctgttctacatcgacggcgagtccgccctcgcggcgcgtccggcggccccatcggccgcggcggcgatggcggcggcanccggggtggaggaggcgttgaggttcgctccacccccagcggctgcactgggcgatccgatgctgcagggacttggggttggggaggacgacgacgtccgcgcgccgctgccttgttgtaagtcgggttagttactttctttcttttacggtttcgtttacggttttccctttttgttttt

SEQ ID NO: 62219 - DNA, 487 bp, Setaria italica
  Peptide Sequence Number=SeqID_128193
tcttcctcacggctgatttagatttctttcagtcatagtcctttgcatcatgctctcagatatgcgctcgacatagtactccatgctcttagttctcttgggtggtgggctgtcaacaacatgctcctttcctgacctttgcgacacacgacccacactagatcgtccaacattgtcctccaaccaggcaacattttcatctgccgcagtgtcagggttgccttcacttccagaacttggtgttctatctccaattccaccaacacataacattggaccgccttctatgtccgttgtcccgaaaagtgtggttaactcatcatagaatggaaaagccttgccacggaaatatttgtttgcctcattctcttcaattcaggctgtccaccattcatcatcgcagtcgatggtgcgggtactgctgttccacccggtaccactcttgttcttcagttttctccaatccttgtactgcctcttaaaggca

SEQ ID NO: 62220 - DNA, 356 bp, Setaria italica
  misc_feature (132)..(132): n is a, c, g, or t
  Peptide Sequence Number=SeqID_128194
gtatacaggttgtgccaacctaccttggttaggccccttttgttgtagttgagcttgttcttctcatcaatgcaaaggtctaggaatattttttagtgttatcatcccagttggcacgacctgcatccatcncgttgtgcttacgtcttgcaggagttgtacgcagcaggtaccaggggcttcatgtggagaccatgacgatgtagaggagtttgccagtgctgctgcctgtggaagttctttttttggcacacaaggaatgctctccttagctagagtcgtatttactaccccaggttctctgttgagatgcacaaaatctagcagcatacaaatgtagatcgagaatggagagg

SEQ ID NO: 62221 - DNA, 495 bp, Setaria italica
  misc_feature (320)..(320): n is a, c, g, or t
  Peptide Sequence Number=SeqID_128195
gagcataagtcgcacttccaaccaactcaccatcaatcaacacctcaaccttcaaactttttatcccattcatctttcacgattttcactcctcgacgagtctttggcaaaactcaaaaagctcgctacggggtgcttgcctaatgtctctaagctaattagtggatcagccaaatttcggaagacccgccaaacttcctcttgatcaaagttggagtcgaagtatatagcaccaattagagattccacaatatctgacagaactttaggaggatccaatagtccatttgagtgaaccggatacttgcacatttcttctntaaaacatgaatctgccctttcgacgttgcggcgccttgtggcggaggaagcggtggagcccacgcacaacggccacgcgcgcgagcttctccgtgtcgacgttggcggcgcgtagcctggtgagcggtccgggcgggagggtgcggtaggtgcggaagaccttcccgtcgtaca

SEQ ID NO: 62222 - DNA, 218 bp, Setaria italica
  Peptide Sequence Number=SeqID_128196
gacaactctgccgttggcgctttctgcagcagcagcagccggtgggtccacgcggcgcggccgatccagatccgccgcccgcctccgcgctgctgccactccccagcagcggcagcggcttcgccacgcggggcacggctgcgccagaggaggggacggacggtgcgagctcggccaggtcggaggaagaggcggaggcaattaatgattcgttctcc

SEQ ID NO: 62223 - DNA, 203 bp, Setaria italica
  Peptide Sequence Number=SeqID_128197
ggaagctaagatcactgcttgggaaaaatctacagaaagcaaaagccgaggcagctattaggaagttggagatgaagcttgaaaagaaaagatcatcgtcaatggacaaaatttttaggcaaactccgctctgctcagaaaaaaggacaagaaagaacaatagacgaaagtagacaagtttacttaccaaatagaaagaacaa

SEQ ID NO: 62224 - DNA, 428 bp, Setaria italica
  Peptide Sequence Number=SeqID_128198
ggtaatgaaggcattcatcgcatcggtctttgtacggaatttaaccagcaccatttttatgggctctgggacaccaggtctgagaaagctttcaaatggcggaggttcaaagttagtgccacacaaaaagcgttctatgtcctctggcagggcattccgtggaactccttgcaaaagtacagcttttccatcaaaagactgtttgagatcccacacatcacgacttatctgttgtattagagtagacaaacaaatcattgtttaccacttgctggaccaaacgaatcaaaactgataaaaaaccaagtattgccttaccatgtccatcttgtacagacgaatctgacttgtttgcctaattgctgtggtaaacgctgcctttgaaggaaacctcaataaactaatcgagcaaagcattacaaaaaaat

SEQ ID NO: 62225 - DNA, 271 bp, Setaria italica
  Peptide Sequence Number=SeqID_128199
ggtcgtagcacgtgtcgaagagcgagaacccgctgggggagaggcggagccccgctcttcgacacgtgctacgacctgggcgggcgcaaggtggtgaaggtccccacggtgtcgatgcacttcgcgggcggcgcagaggcggccctgccccccgagaactacctgatccccgtggattccaagggcaccttctgcttcgcgttcgcgggcaccgacggcggcgtgtccatcatcggcaacatccagcagcaggggttccgcgtggtgttcg

SEQ ID NO: 62226 - DNA, 356 bp, Setaria italica
  Peptide Sequence Number=SeqID_128200
aaccaattttaaagtaaagttaactaagaactaaggttacaagtacttgtagaaaccccattttgtagttctgctggttcagtagttgcagaaatcccattttgtagttctgttggcttggtacttgcagaaatcacatcggccttcctcttacaccagaaacctttgtttctggtgaaagaatctaaaataaaaaattgggccgaattagtgaaatggagcatgcatatataacaaactaactgtagaatgcactgctgctctggaacaagagcctgactgaattatttaggggcacaaactaaatgaatgtatggacatgaaacatcaatggagagatgcatcagcaaccaatg

SEQ ID NO: 62227 - DNA, 306 bp, Setaria italica
  Peptide Sequence Number=SeqID_128201
ctctcacttgacagactgcacagctccagtacctggcagcattttgtagttctgttggctcggtagttgcagaagtcacattttgtagttctgctgtttcagcggttcctgaaatcgcattttgttgttcagttggctcggtagttgcaaaagtcaaaaagtcgcttttttgaacaacttcatgtattgctcctttgaccaagatgtggattttcttaggtgcatcactagggcctgcacctttgtcacttttattgtcacaaaggtgcaggccctagtgatgcacctaagaaaatccacatcttg

SEQ ID NO: 62228 - DNA, 455 bp, Setaria italica
  Peptide Sequence Number=SeqID_128202
tcgtagatgacgccggcgaggccgccgccgatgagagggccgacccagtacacccactggtatccccaggaccagctgacgagggcggggccgaaggacacggcggggttcatggacgcgccgtcgaaggcgccgccgaccaggatgttggcgcccacgatgaagccgatggcgatgggggcgatggtgcccaggctgcccttcttcgggtccacggcggtcgcgtacacggtgtacacgaggccgaaggtcatcgctcctggagctcctttttgttaaggaagcgacctcctggtccacggactcgcttcattgcatgacaatgtcgagattcatgaagatatggcttccgacctttcaccagtttattttgagcctccaattttgcacgcatttgccgcctcctgaggatagcatggtattgctttgcattgacaaatatgggctcttctgct

SEQ ID NO: 62229 - DNA, 305 bp, Setaria italica
  Peptide Sequence Number=SeqID_128203
agtggcgcttcagtaatttagttgcaacaaatacaaatgagttgatctgagacaaggtctactacatatgaaactgaaagcagactattagtagacacttcataagccaaggatgaattgccacgggcacaacagagcgtgccagtgatggtgccaccactgaagcaatggaggcggttcacctcatgacggggtgcggtggcggacgccattgacagccatcttttcaactagaccgttactactactagacggaaagttacaatagactaggggaaggaaaattaaggaagaatagaagaaga

SEQ ID NO: 62230 - DNA, 394 bp, Setaria italica
  Peptide Sequence Number=SeqID_128204
aacaagaataattgatgtcatgcattcatctggtgaagtcacactgacggattctcacatgctcttagtagtaaattgatgcaccaaaaggcaaaactgcaatatactgctatgtaacaaatagtgccagtgattagtatgaaactcacggggcattttctgcaggctttagattgtactcagcaccatcagcagacacaattgaaaattcagtaggacggccatatgggacattgatagtcatggattgctggaatttctctgtaacgacgacaccacgctgtccattacacttaatgctgtaaccttccctctttattgccaagacagctggttcccacatatctaaaacctacaggtaacaaacttcataagacacatgccccatagaaag

SEQ ID NO: 62231 - DNA, 288 bp, Setaria italica
  Peptide Sequence Number=SeqID_128205
ttttctaaaattgaattcatccctctttacaacgagacaaaattgggtgtggtgccaattgaatcgaattgaatcggatggaacctttacagataccggcacattctaaacttaactcacactttccttctacatacaaagactcgcgaacgtaggtaaatacaaacacacaacatgccatgccactacctaatactactactgagactacttgaagaatatgccctttcttcttcctttagtctcagtagtagtattaggtaaatacaaacacacaacattgtccta

SEQ ID NO: 62232 - DNA, 241 bp, Setaria italica
  Peptide Sequence Number=SeqID_128206
taaatcgaacagcacgcgaatcatgttcagttccttgagggacatccttcatattgtggttgctggttgaaggagaggtccttccaatgttatcatgctctgcattcgttgtggcaacctcactttgaatggcctgacggctttcattccctaacaaatcccagtcccgtctagctcgaacaggagaagaagctacttccttccacaggatcttcttgctaaggttaaagaacatgaggag

SEQ ID NO: 62233 - DNA, 407 bp, Setaria italica
  Peptide Sequence Number=SeqID_128207
aaccaaagaaggtaatagacctaccaacctacaagaaactaataaacccaccctaacggtggttacccaccgcagggaccccaagaggcggcatgggctgggaccaaaggcagggccctccaccccatccttcatatcagggtggtggttctgactactacaagcagggatctcaaccatacgatagccagccaccaagctaccctcctggaccagggaactttaacagttatgggcaatctcaggctcctggctatggacaacctccgtatccgcaacatgcacctcaacagaactatggccatgggtatggtgatcctagatacaatgctccaccgccgaaccagtattatgggcagccaccaatgggtcctcagcaaggctatcctcagcagccagatccttat

SEQ ID NO: 62234 - DNA, 320 bp, Setaria italica
  Peptide Sequence Number=SeqID_128208
ttatagctgaggctgaggctggcggttcccctgctttaatagctagaggttttggaagtggtcagtcgggatcagagcaatttgagatgacagttcctgataacaaggcggtgagacaattaaaggcctgcaaacaagatctggtgctcgtattcagttgataccccaacatcctccagagggtgttacattgactgaaagaactgtacgtgttactgggaataagaagcagattgaagctgcaaaggatttgatcaagcaagcaatgaatcagaatttctcaaagcatacaatcaatctggtggatatggttcgcaagg

SEQ ID NO: 62235 - DNA, 237 bp, Setaria italica
  Peptide Sequence Number=SeqID_128209
aagaacaaataaggtttaagtaagtaaagttaaggtaaactaggtaaggactagacctaattagaccgaaaggaaacagaaactgtatggcattggaagacagcaacaggtgtatccttgccatgaaaaggctactgcatcaccatgtaatttctcaaagcatacaaatcaatctggtggatatggttcgcaaggttaccgccctcagggtcatggtgcagcttctcagtgggggcc

SEQ ID NO: 62236 - DNA, 345 bp, Setaria italica
  misc_feature (341)..(341): n is a, c, g, or t
  Peptide Sequence Number=SeqID_128210
aagaattagaaagactagacaaaaggaatttagaatacaaagacaaagcaaatagaaatcagaatttctcaaagcatacaaatcaatctggtggatatggttcgcaaggttaccgccctcagggtcatggtgcagcttctcagtgggggccacgctctcaaagccagcctggctatggatacccaccaagaggtatgcctccacctcagaactataacccaccctacggtggttacccaccgcagggacccccaagaggcggcatgggctgggaccaaaggcagggccctccaccccatccttcatatcagggtggtggttctgactactacaagcagggntctc

SEQ ID NO: 62237 - DNA, 207 bp, Setaria italica
  Peptide Sequence Number=SeqID_128211
gatcttttggatgtttctgtggatgcaatgggtggcgcttgagttttgttatctggaagagattgtaaccccccaacttgtaatacatgcatcactgtagtacctagtagttcggttaatgtgactttaaacatcctattcagttttaagagaaccatcgttttactaaaactgaataggatgtttaaagtcacattaaccgaacta

SEQ ID NO: 62238 - DNA, 155 bp, Setaria italica
  Peptide Sequence Number=SeqID_128212
aagttgatgcagcggatgcatcgcaggagacatctcgtaaaatcgaagtgcccaatagcaaggttggtgtccaactagttcaaccgaccgggtcagagcattcgaatcagcatcgacgtccttggtgatttggatctttgcgcccgagctcattt

SEQ ID NO: 62239 - DNA, 214 bp, Setaria italica
  Peptide Sequence Number=SeqID_128213
cataagttgataatttatgttttatgaattttacccggttgcaggtaaattggtagatgcctgttctgtcacaggagcagtagtaggtgatggcttatctggcaatgtgttggtctgcttcagaactgtcatgatcagtgaagcaagataacattagtggtgttgagaggagagttcaaaataaaacaacactatgacatagcacatagcagca

SEQ ID NO: 62240 - DNA, 246 bp, Setaria italica
  Peptide Sequence Number=SeqID_128214
gaccggtactggaggcaattcaattgttttggatcaatatgctccggaagttcagagtcatgatgccagcttcaaaagtgaaattgctgaggatggtaatttactgccttatctatttgatacttttgtcagagtttatcctgttcttgtctttgcttttgtagtattggggtctagtttattttgaagtacgttgcttactgcagtggactttcctggatggattcagttttggttgctaatgct

SEQ ID NO: 62241 - DNA, 431 bp, Setaria italica
  misc_feature (92)..(92): n is a, c, g, or t
  misc_feature (418)..(418): n is a, c, g, or t
  Peptide Sequence Number=SeqID_128215
gcaatcaagtgcacccggactcggctggatctgctgcggcggaagaagcaagccatggtgaagttcctcaagaaggacgtcgctgacctccncttgaacggcctcgaatcgcatgccttcgcacggatggaagggttgatcgttgagatgaaccaagcatcctgctatgatatgatagagcagtactgtgaatatattgtgaaacagctcaacaacctgcagaaagagagtgattgccctcaggaagccttggaagctgtgtctactctaatatttgctgctgctagatttcctgatttgcctgaactgtgtgacctcagacatatattcacagagagatatgggagttccgtaggaagaccttttagttaaattactagaagtttagttacaagaaatactaccaagaaacaaatanaattaactaaata

SEQ ID NO: 62242 - DNA, 298 bp, Setaria italica
  Peptide Sequence Number=SeqID_128216
acagtctactgattcactttatggtccagatgttgttagattgtttaatgaagcagctcagatgtcacctgaagatgccgatgtccatatagttctgggagtcttatacaacctatcaagagagtatgataaagctatagcttcatttaagacagcactacagctcaaacctcaggactattcactctggaacaagcttggtgcaacccaagcaaacagcatccagagtgctgaatagacaaataactaggacgtaatacaagaaaggactactaagaacttagaaaaccgaaactta

SEQ ID NO: 62243 - DNA, 322 bp, Setaria italica
  Peptide Sequence Number=SeqID_128217
agtaatttcataagcattgaattgtttgtttgcacaagtttgggcaaaatactcctatctgtttcttgggatatttggtgtcatttttcattcttcttgccgcagagaggtgaagctaaacttctctcagaagattggaaggagcggttcaagatctaaaagaggccgcccagaaatctccacaggtaaaattatatttgatctgaaagtgctgaatttggatggtgtatatgagcaacagttctagcatttttatccatctggctttccctgacgctgacactgccaccccccgaaacaacaatcattagaccccacccct

SEQ ID NO: 62244 - DNA, 254 bp, Setaria italica
  Peptide Sequence Number=SeqID_128218
tgtaatatattttttttctagtaatttcataagcattgaattgtttgtttgcacaaggtttgggcaaaataactcctatctgtttcttgggatatttggtgtcatttttcattcttcttgccgcagagaggtgaagctaaacttctctcagaagattgggaaggagcggttcaagatctaaaagaggccgcccagaaatctccacaggatatgggcatccgcgaagcacttatgagagctgaaaagcagcttaa

SEQ ID NO: 62245 - DNA, 305 bp, Setaria italica
  Peptide Sequence Number=SeqID_128219
ctttgaagaagactaagagtgctgaagatatgctgccagggtaagctacgtgtgtctgctgaggactacaaggcagctctagcaatggatcctgaccatactgcttataatgtacatctttatcttgggttatgtaaaactctggttaaacttgggagaggtaaggaggccatcagcagttgtactgaagcactcaacatagacagcgatcttgttgatgcacttacacaggtaacattgcctgcctggaatcacatagaacatcaatgtaaattcagaatgcaaattccagcattttcttaagt

SEQ ID NO: 62246 - DNA, 243 bp, Setaria italica
  Peptide Sequence Number=SeqID_128220
aacggttaacaaagaatacttactgagagaagtttagcttcacctctctgtgtaagtgcatcaacatagacagcgatcttgttgatgcacttacacagagaggtgaagctaaacttctctcagaagattgggaaggagcggttcaagatctaaaagaggccgcccagaaatctccacaggatatgggcatccgcgaagcacttatgagagctgaaaagcagcttaagttgagcaaagaagaga

SEQ ID NO: 62247 - DNA, 430 bp, Setaria italica
  Peptide Sequence Number=SeqID_128221
gttttagtaagtgttttttttctaagtcattgtttctcaagtactatcatagaagtgttttagtaaattgttatttttccattgataaaattgttgcttatagtgagttggtcttgatatgcttgaatgatgtttggctgctgtgagcaagtgagcacaaattagttgaacttggtttagtaattgaatgttgcacaaaattcgatgcttttacttaatgatcaaagctttttttttccatttttgaatttcattatctgacttttaggaggtaatggttaacatgctaacattgttttttattttgtcttggttgatggtcttccaggttttggctgtgacagtacagccgtgataaacatacttactcatcgtgattcagtgcaacgtggactcattcaacaggaatacagggctatgtatcatgagg

SEQ ID NO: 62248 - DNA, 232 bp, Setaria italica
  Peptide Sequence Number=SeqID_128222
agtacctctatacctgataaccaacttttctgatatcctcttgtttcattcgacttgtcaagagtgaggtcctaagggatttgtcgtcaatgcatcggttagttgttgcaactggaggtggtgccgtgatccgaccaatcaattggtactagaagtgataaactaccctgaggttgattttcaaaaccaattctcacactgggaaatttgcaggagttacatgaagagaggg

SEQ ID NO: 62249 - DNA, 434 bp, Setaria italica
  Peptide Sequence Number=SeqID_128223
gtggccattggccatggctgctgcaggattctctagctcgctgccaggtgctgctatgacacttccattctgctggagaagagttaagggcaattaagttttcagattcagaacatgatgacatacagtttaccaaaataaaatgaggcaaaccagaggaaaaaaaaaagttatggaagctgtgaaagagactttggaagagcatgataagatagtccattacatactgtccttaaaacactatgaagaatgctgccactttaacaattaaccagcagtaatgtaaagacaatgtctcaatacctctatatgggtgaagattaataaatataatgctttgatttaaagtctctttgggagaaaaacatagatggcaaaggcacgcacctaccactgagttttctagtagcttgttatcattgttactttggtct

SEQ ID NO: 62250 - DNA, 353 bp, Setaria italica
  Peptide Sequence Number=SeqID_128224
taaatgttcaaaagtacctctgccttgtcttccttcttcccccccagtgaaaaacttgataccaccataaataacagcaccccacatagacaagctggctagcacaaactgcatgatgacagaaagcaagaaaactaatttcaacagacatgcagtcgagtgcccaaaaaaataaaaaactatttaaactgaacttatattcttttggagataacaaaattcaactatcattgatgtaatgtaaaaacacaatcagaagcagaccgtgtaaacaaaattacagaaccatatagaaatcaaatgcagcagatatcatataaacaaaaccactagtaagactataaatcaactgc

SEQ ID NO: 62251 - DNA, 237 bp, Setaria italica
  Peptide Sequence Number=SeqID_128225
tacataaatcaaaatctctggttgccacaatttgtcgtcaacaaattgaaagcacaacataacatttctttttatttgacatagttgcttggccgcagaaaggtggtacaactctggtgcaaccaactatgccgcctgtgctggagccgcctctgccttgtcttccttcttctctttacttgcttgtttttgctccatctccatctccagttcatgccgatggagctgcaactgacg

SEQ ID NO: 62252 - DNA, 250 bp, Setaria italica
  Peptide Sequence Number=SeqID_128226
tggtgcaaccaactatgccgcctgtgctggagccgcctctgccttgtcttccttcttccccccagtgaaaaacttgataccaccataaataacagcaccccacatagacaagctggctagcacaaagtgctcttccttccacttgctcgggctcatcgggtccttccataacagcaccccacatagacaagctggctagcacaaagtgctcttccttccacttgctcgggctcatcgggtccttccataa

SEQ ID NO: 62253 - DNA, 358 bp, Setaria italica
  Peptide Sequence Number=SeqID_128227
gtgtattccatgccttatttaggggttaggtacagttacatgacctggcatttcaggagaaagttgcttccgcattgcaagtactggtcctcggaaatgttgagcatactgattgacaatattggcataatatcaataatttgcgatatcttttctcatgattccaggaattaaaactgtggagcttgcaaagccaattggatgggtccatatatcattatctggggctgatccacgagaaacattcattcatacatttatgctccaaattgctgttttgtccaatcacctaaacgggcgggacactcatatccgacagatcaagatctatgggccaagaccgaatcctgttcccctc

SEQ ID NO: 62254 - DNA, 228 bp, Setaria italica
  Peptide Sequence Number=SeqID_128228
ttgtgtgctgttggatcgcacagggacatgccctggcgccatctaagaacagcaaacctaattgtgtgtagtcctccatgctggagttgtctgctgaagattggagagtgcttaactgcttatacggtttcaacactgaaagcacctgtcaaagcctaagcctgagttgcccctgaatacctggactggagaattcacactccgtacgagttaacaatctgttatcca

SEQ ID NO: 62255 - DNA, 467 bp, Setaria italica
  Peptide Sequence Number=SeqID_128229
tcttagaaggacctaaatgaagtatgggggatttaatttgccgctgctcaactctggagcctatggccgcagggctggatccccgatcaatccaaaagaaaatcagaaacctgaatactccaatcttctgttgcgcccagatccacctggattatgtcggaccatcggctgctacgacacacacatcatggacagctgcagaggtcgaacggggaaaattgattgaaagtgtggtaaagaagtatattcaattaatcagcaacgtacgctgataatcagaccaaaaccaaaacaaattcgaaacgcatgcggaataggggattgttgctgtcgcgcggcagctcacctgccttccgatcccctgcccacaaagcagcctcacagtatcaccgacgaatggtctcgtgcaccgaggaatctggatccggagccttctcccggcagcacatcctcgatgcaggccggat

SEQ ID NO: 62256 - DNA, 210 bp, Setaria italica
  Peptide Sequence Number=SeqID_128230
ctaatgagtatgggggagtttaatttgccgctgctcaactctggagcctatggccgcagggctggatccccgatcaatccaaaagaaaatcagaaacctgaatactccaatcttctgttgcgcccagatccacctggattatgtcggaccatcggctgcaccgccccccgcaatccgcggcgctcccttcccctctcccaccacaaagcg

SEQ ID NO: 62257 - DNA, 489 bp, Setaria italica
  Peptide Sequence Number=SeqID_128231
agatatgtgaaaagaaaagtttaaaagaattcatgtagaaatatattaccatcaatcaacatagagcctgaaaaagataaaacaggttaacaatatgaaaaatgacagcaaacctgtaggcaatttgttcattagttctactgcaaaagaaggtcctgatagaacaataaatggttggcggcggtttcccaatgctcgtgggatgattttagacattgtccgaagggtattgagttccagccctttgctaagtgatatgaatggcaactttggatcaacatgtgttgaaaatactttcaagaaaggatgaactgaactgccgcaaaaaaatatcagagtcaaaaaaggacgaaatccctgcagaaagcacaatgcttcataaagaaatgtgaatacctgaaccgaacagcatggaagcagaaatcagctcctgctaaagcatcagcagcacttgtgttgcaacaatatttctggcaatctgtgttctgg

SEQ ID NO: 62258 - DNA, 365 bp, Setaria italica
  misc_feature (336)..(336): n is a, c, g, or t
  Peptide Sequence Number=SeqID_128232
ggcagatgttaaaaaggaagaagctaatggcatcaagaagctatgcctgatgtaccttctcttggagattcatagtgagcaagtctttggccttgttctttgcttcaagtgattggattatttcttccatgctcttaatctgagcatctttgttcttactgtcctgcttggctttcccaacctagcagaaccgatagcgtgttacagttgaacagagttaaaacaaaagggcttacataacatgcagatattggcagaatactacagtaccatgagcttgtatcttgacaattctccaatatcgacttgctttctgcttgcccaagctctattccncgcactctgcttgcgagtcagtgagcaaa

SEQ ID NO: 62259 - DNA, 165 bp, Setaria italica
  Peptide Sequence Number=SeqID_128233
tctttgttcttactgtcctgcttggctttcccaaccatgagcttgtatcttgacaattctccaatatcgacttgctttcttgcttgcccaagctctattcctcgcactctgcttgcgaagttcagtgagcaaagagtttcacctacgtcattctcattaggactg

SEQ ID NO: 62260 - DNA, 316 bp, Setaria italica
  Peptide Sequence Number=SeqID_128234
gtgaagctgaatggctttacacttggtaatgtcagcaatgtatgagagggccaggtggaggcaaggcggatcatggagcaatccactctgagctgcatttgccattttgtgctcaatgtgagcaccatcttctgcccttctatggggtagtgcacattggatacttcgatgatggaagcggagaaggcattgatcggtcacattttcaggccttggttcatttctatgggtgcaagcttcaaggttacaaagaaaaggaatgaacaaaggacaagaataagactagaaagacaagttttaattaccgtttacaaca

SEQ ID NO: 62261 - DNA, 286 bp, Setaria italica
  Peptide Sequence Number=SeqID_128235
actgaaggcgttaactttcttctaggagtattcttgttgaacagtcttgtttctctctttctgctttcttttcaatttggatgatacaatttacgaggacgccctactgctggagaatctaacaaactagctgtatcttgcaggttcttcattatcacaggagtgatactacttgttagttcaacccgattgattgcacgtctacctaggccagtgcagaagtttttgaagagcaacatggagcgctcccacagcatcaaggaaggacccggttcagcacgaggga

SEQ ID NO: 62262 - DNA, 381 bp, Setaria italica
  Peptide Sequence Number=SeqID_128236
tgaacgcactggtgatagtgtaataatcagcaagaatgatgcctggaaaatcaaagtgaacagtcaactgggaacaatagacagttggaaggtcagcaatgttgagcttatgagcaaggggatattcccatgcttttggcgcgcaccaactgacaacgcaaaggaggtttctacaccaagccctatgtttcgcaatggagagaagcctccctcgataacgtctcgttctacagcagccagttttccgtgaaggaattgcccgacaacactgtggagctttccactgtctactatggtcttcctgggaaacttaacccaaagacccgaacgaatagactagactactttacaacaaagactacccgaagtactaactactta

SEQ ID NO: 62263 - DNA, 292 bp, Setaria italica
  Peptide Sequence Number=SeqID_128237
cgcatgctatgggaaacagtaacggaaatattggatgcatattggatggccatagacaacacttttgggctccaaggaggtttcatatgggactgggttgatcagggtttactaaaggaggattcagatggatccaaattttgggcatatggtggcgactttggagatactcctaatgacctaaacttttgcctcaatggcattgtgtggacctagaatacggaacaaattacaacccaagactagttacaatagaaagttaaaataacctttaaccaagactaatacaaaa

SEQ ID NO: 62264 - DNA, 240 bp, Setaria italica
  Peptide Sequence Number=SeqID_128238
ctcaaattgacacggtccatattgcagagcaggaacgcaaagaagcaaaggagaacgatcgtccagcgctttgggaactgctgccaccagggggaaatgttgcttgtatctccaaccagaattgtatcagcaggaccgtcagaagggctcaacggtgaccctgtgattccatactgctcggctttgcagtcagcgcgtcttctgatgggcactctgtactccaggtggacacaagcgctc

SEQ ID NO: 62265 - DNA, 283 bp, Setaria italica
  Peptide Sequence Number=SeqID_128239
gtagatgaggtaaacctgtgagcttaatgaagttttgattgattttgttacaatgctcgttttttggtttgtgtaaatgcttatctgtttctaggttgtaagtgatgcggagaaagtaagagattggttggaggagaaggaaaaccctgcagaaaagcacccctgctcacagtccacctgctttcacatctgaagaagttgttgacaaaattctggacctacaagataaggttgcgagtattaatagaattccgaaaccaaaacccaagattgaaaaagaaaa

SEQ ID NO: 62266 - DNA, 171 bp, Setaria italica
  Peptide Sequence Number=SeqID_128240
ctcagactgccttctttgagtataaattttggttgctcaaattttctcaagttttgttcggtgaccaaaagacgaggctatgtaggattttaatgaacactagatgttgatctatagtttctgagttcagtacagcaatgcaattcttggtcctgaactgcacctttgagg

SEQ ID NO: 62267 - DNA, 267 bp, Setaria italica
  Peptide Sequence Number=SeqID_128241
gtggttgctttcaggttcttgctttgtggtatgaatcagaggatgggttgtgggagaaggaaaccctgcagaaaagcacccctgctcacagtccacctgctttcacatctgaagaagttgttgacaaaattctggacctacaagataaggttgcgagtattaatagaattccgaaaccaaaacccaagattgaaaagaaacctgcaaaagaggaagagcctgctaataaggagaaaactgccaatgagaatgaatctactggaacat

SEQ ID NO: 62268 - DNA, 236 bp, Setaria italica
  Peptide Sequence Number=SeqID_128242
gttggactgtgagcaggggtgcttttctgcagggtttccttctcctccaaccaatctcttactttctccgcatcactaaaaaataacctagagtcatacatatactctatgaaggaaaagctggaagaaagcacagatatgttgactgtctcaactgaacaggagagggaatcctttacagagaaacttaacgaggtgcaggattggttatacatggatggtcttaagttgatcaa

SEQ ID NO: 62269 - DNA, 172 bp, Setaria italica
  Peptide Sequence Number=SeqID_128243
gtgaaggcacttgataagaaggatgctgagcggaggaagactgctgaactaaaaaataacctagagtcatacatatactctatgaaggaaaagctggaacaattctttcgaaggagttgtattctgaagcaaaaagtaggttggaggcacttgataagaaggatgctgagcg

SEQ ID NO: 62270 - DNA, 253 bp, Setaria italica
  misc_feature (195)..(195): n is a, c, g, or t
  Peptide Sequence Number=SeqID_128244
aacagacgtgtttaaggtggctgttgtactgtacataataggaacagtggtgtggaatgtagccagtggcagcagtaccaaaaactcctgcaagcccgaccagcagcctgcgaaaatgccagattgtatctttctgagctgcaaaagattgtcaagaactgggagacaaacaaaccatggcttccaaaaaaaagngtagatgaggttgtaagtgatgcggagaaagtaagagattggttggaggagaaggaaa

SEQ ID NO: 62271 - DNA, 279 bp, Setaria italica
  misc_feature (16)..(16): n is a, c, g, or t
  misc_feature (21)..(21): n is a, c, g, or t
  Peptide Sequence Number=SeqID_128245
cctcctgtgctcgtgnagtcncaagtgggtaaagctggctggttcccttacgactacattcaccttcgggcccatccattgtttgaaaccttttcggaccactatgtagtcaccagctgcaaggttgagctcagtgtcgctctcagcccgatatgactggatggcctcagccaagaagtactccacagtctcgaccaattctgcaacagtgttcctcatgaatataccattgacttcttcatgaggaacactgttgcagaattggcctcagccaagaag

SEQ ID NO: 62272 - DNA, 259 bp, Setaria italica
  Peptide Sequence Number=SeqID_128246
ttgctgcaacagcttctttgcccaaaacccccatatttgacttcaactcctgcagctttgtttcagcagcctctagccttgaaatcatatcgccatttccagatgcctctcttaatttcatttggcgcttcgaaacttcaatagcctgcagaaaccaaagagttattttgaacagtatagcgtgctgagtgaatttaaaattaccgtgcaataatttaaaaagtgttgtgcgacaaaaaaagggaaggtcgactgatga

SEQ ID NO: 62273 - DNA, 177 bp, Setaria italica
  Peptide Sequence Number=SeqID_128247
ctgaattttttccttcttattacaacggttgcccctgtttctttcatgatgtgatttatgtactgatcatttggcccacgaattcgagctgcgatgtttaatgatggatctgcatcaaaacccaaaaatatcgaggcactaaaaggataaacagcctgtccactgctagaagaataa

SEQ ID NO: 62274 - DNA, 211 bp, Setaria italica
  Peptide Sequence Number=SeqID_128248
aataacaaaacaatcaaatcaaaccagcatcacatatagttatacaagaacatacatttggcccacgaattcgagctgcgatgtttaatgatggatctgcatcaaaacccaaaaatatcgaggcactaaaaggataaacagcctgtgaaagaggagtagagatgaagttaacttctcaagcagaattccttatgtagcagcacagcaaaac

SEQ ID NO: 62275 - DNA, 373 bp, Setaria italica
  Peptide Sequence Number=SeqID_128249
tttttctcacatagactgtatgatttttcatattaaagaaaacttctagagtaaaatcagcattgtcgcagtgatccaatgttgaatgtacaagggtctcatccaaatccagcacaagagtcacatgttttgttctcactggtgttttgttaagcgactgggcgaatcgacatccattaaatcaggcagacctctagaaagtagcttttgatcaagatattcagtttcaaccacatctccagtggcagaactactactttcagtttctgagtctgtggctcgcttgtctctagatgacacaccggaatcgaataacactagcaatgaggttccggtagaccacactacactggatcctgatgaaactatcctt

SEQ ID NO: 62276 - DNA, 291 bp, Setaria italica
  Peptide Sequence Number=SeqID_128250
tacaaaggacttgacaattctaggggtcgacttggcaaaagttgcaatagttgacaatactccacaggagtcacggtaaatacgttttgaaatatatttcccatcaggatcaagcctatctataagctgctcagcgtagattcttgagaaggttgctcagatgtttgaggttgtcattttcacagctagtcagagaatctacgctgagcagcttatagataggcttgatccgtcagaaaataaacaggagtcacggtaaatacgttttgaaatatatttcccatcaggatc

SEQ ID NO: 62277 - DNA, 240 bp, Setaria italica
  Peptide Sequence Number=SeqID_128251
ctgttcttgccggagcaaggttaggagcgaggagagcctgtcgtgctgccgcaagactacaagcagcgaggggtcggcggcgctgcgagctcgctgctgcctggttggccttttcctactggaactgcagtactttgaacatgctttttgcaaatacttgcattaaggatgaataaaatgttaagcaacgactgtttagggacacaggagcttcatacattttgcaagaccactgataca

SEQ ID NO: 62278 - DNA, 170 bp, Setaria italica
  Peptide Sequence Number=SeqID_128252
taccaaacatctgagcaaccttctcaagaatctacgctgagcagcttatagataggcttgatcctgatgggaaatatatttcaaaacgtatttaccgtgactcctgtggagtattgtcaactattgcaacttttgccaagtcgacccctagaattgtcaagtcctttgta

SEQ ID NO: 62279 - DNA, 492 bp, Setaria italica
  Peptide Sequence Number=SeqID_128253
acaggtacatccgaggaaaggctggtagtcatcacaatttttgtaccctctcccaccctcgagccacgtcaatattgttctctgaataatattgagatgattccattgatctgaggatgctatctacagaacgatctggcgcgattccaaaagtagcatcaggtgtcttactcgcagaaacccaaactcacatcctacagagcatttattccaatccttagcggcgccgccgacgagcacgggttccctgtcgaagtcgcggtcgtagggcacggcgtcctccctctcgagccgctcctggcaccgccggatctcatcgtcgccctcgtcgcctcccccgcccctcgcgccctcgccccagtgggtcgagcggctgtagaaggaggtggtccagctctcgacggcctcggcgttcttcgccatgtcgaggcggccgaggaacgcgatctcggcgaggaaggcggcgccgacgaggagcggtctagtctagta

SEQ ID NO: 62280 - DNA, 255 bp, Setaria italica
  Peptide Sequence Number=SeqID_128254
tacttacctttttactaattgtaattcttttgttagtctaattattgttattgtcaaagccgacaagatgaatgaaccgctgccatgtcgataagtgctttgaaagaatcagacggaccatcatacttccacctcagagattgattgaaggcatcaggatttgaagcaatatttttcattgtcttagcaactgaagcaacatcatcaagctccttaatatgtaatatcgcgccttactacctaggaagaaaaact

SEQ ID NO: 62281 - DNA, 228 bp, Setaria italica
  Peptide Sequence Number=SeqID_128255
acattccggcgcaaccaggatgcatgctcatgctacgcacatcccggtccttgtcacactggcggtaggcaggggcggctccgccacgtccgagtctgtgaggagcggcatgggagccaatgctggtggttgcgcaagtttgctgatgatttgcatgagatcgccagcacgaggaggggccatgaaaatcggcgcgctgttgcccatgttcatgcaactgttcacctt

SEQ ID NO: 62282 - DNA, 273 bp, Setaria italica
  Peptide Sequence Number=SeqID_128256
cgagagagagccggaccccgcccccacccaccaccatgtggcgccgcctccaaaccctagcccccacccctgcgccgggccgccaccgccgccgcctccagccccgcggcgcccgcctcctctgcagccgcgccgcccctctctcctcggcggccgccgccttccgccgcaccagcccgctcctctcaggggacaagccggcgacggtggaggacgtcatgcccatcgccacggggctcgagcgggagagctggaggccgagctccaggggaa

SEQ ID NO: 62283 - DNA, 255 bp, Setaria italica
  Peptide Sequence Number=SeqID_128257
ttttagtggtggtggaggtggcggcgggagagtagcatggctggaatttgtgaggtcaatgatttcactatacttcttttctagcaccagactgctctacggggtccttgtttatgaatagacaattggccatcaagcaggtggtagttttcacctagggattttgtccaaacaaaagctttttgcgatttgacccatgcatttctttcagagcatcatcgaataaaagatgactgcatcagattgctttctttt

SEQ ID NO: 62284 - DNA, 233 bp, Setaria italica
  misc_feature (207)..(207): n is a, c, g, or t
  Peptide Sequence Number=SeqID_128258
tcaagcaggtggtagttttcacctgcttgatggccaattgtctattcataaacaaggaccccgtagagcaggtggtagttttcacctagggattttgtccaaacaaaagctttttgcgatttgacccatgcatttctttcagagcatcatcgaataaaagatgactgcatcagattgctttctttgttatctaatgcccatcgggtntgatggacatgttatattcagtcatg

SEQ ID NO: 62285 - DNA, 268 bp, Setaria italica
  Peptide Sequence Number=SeqID_128259
agcctcctcgcctggccctaccgccgatgccctcgcaccgtcgccctcctcggcctggccgccgccgtcactctcccggcggcaacgggcggcgcggggatagggacgctgctgatgagcacgacggcggcggcagtgaccaaggcgcgggagagcccgtacctgctggcgctggcggcgaacccgacgttcgtgtcggggctggtggcgtgggcggtggctcaggccgccaaggccctgctcacctccgtcgtggagcgccggtggg

SEQ ID NO: 62286 - DNA, 173 bp, Setaria italica
  Peptide Sequence Number=SeqID_128260
gacgatgagaactgttgtcttgggaagccactagtaggtcgtcactcgtccgagccacagcaggtttgccacactgaatccagatgccattcctcgtgaaatagcagcatcggcacccttgcgggtgaataccgtccctcctagcagatgcgcatggaaagataactgagatg

SEQ ID NO: 62287 - DNA, 422 bp, Setaria italica
  Peptide Sequence Number=SeqID_128261
cttaaaattattttttcataagactactcctcgagtttgctaccacataatagcagtaactgtaggctgtttgcgttatttttttagttaatttcaaatgcttgtatatcatggactatttgtataacatactcctatcgtttttaaatatatgatgtttaggacaaactaattagtttagttttgttcattttaaactaattagctgttctaaatatcgtatattaaagcagggagtgtatcaacgctgttagcacggttttttctgtttgtggtgacgcttcccactctctttctctctgactcagccattttcaccgcagatgtccgcactgaagatcaggacccgaagatcacgagctttatcaaggctcgctttgtgcgggaggtgcatttcagtgagatctccgagatgaaacgtt

SEQ ID NO: 62288 - DNA, 518 bp, Setaria italica
  misc_feature (1)..(34): n is a, c, g, or t
  Peptide Sequence Number=SeqID_128262
nnnnnnnnnnnnnnnnnnnnnnnnnnnnnnnnnnggtaaaacggaaacaaaaaagaaaacaaattaagtaagaagaaggacaaaggtaatactctggctcatgttattaaccaggcggaagcttgttctcaacaaggtggctggtctagacacaaagctgtatctattgcggaaaaactagaacaagataatttgagattggagcctagatccagtttgctttgttggaaagcttcaagcacttccagacgaaagatgtccgcactgaagatcaggacccgaagatcacgagctttatcaaggctcgctttgtgcgggaggtgcatttcagtgagatctccgagatgaaacgttgggggcagtcgccccagatttacgtgtagctaacttagtagggatccataacttgtttttctgtagctgtagcagcactttgttaggtgctattatgtactagtatatagtagcgtgtaacatgtaggagaatgagagaacaccgtgcccattcttttccgtgg

SEQ ID NO: 62289 - DNA, 267 bp, Setaria italica
  Peptide Sequence Number=SeqID_128263
gatgcattgaaacttaatttgcttcccggttcagatgggtcactgagggatgcagagatgactctggatcagttgagtttgcttggacagagaatttcgatgtcgcttgttcaagaacttgtaagttatccaacaacagtcatcaaaattgctgttttgttccctcttttatttttccttctttgctaaatatttataacatagaagaactgtaatgttcattttaaaatggccaaactctctgttttgcatttctttttcctaaag

SEQ ID NO: 62290 - DNA, 400 bp, Setaria italica
  Peptide Sequence Number=SeqID_128264
ccgtggaaggtactatgggctcactggtatcattgacaaggacgaggttgatgagttagcaaagtccacaccaaattgttttggtataaaagggcacctgcagaagttcacgcaggagcaggtgcagcagatgattaatcaggccctgcaggggttaaatgaaacttgggagaagaagtttaagtccttggagcaaagtttgcgtggagcgccaccattaggtactggtcccgagcatgcccctggatcttctgcagctagagagggaggccaggaggatcagtcaagacatcatcaggatgcttcggatgcgcagaccggggaaagccgcgaggacgacgatgaggaagtggtgtctaccagcgtctgaagcatcactgtgttattttcgttttttccc

SEQ ID NO: 62291 - DNA, 252 bp, Setaria italica
  Peptide Sequence Number=SeqID_128265
ctagctggtacccgtaaaatacttaatgcatgatggaaatgtatatatatttcctttcatataacttgaaagttaacctatggatatatatttcctttcatataacttgaaagttaacctatggatatcccttgatgaactgttaagcagctattgcatacactgttctgcaagtaaggtgcggcactgttcatgagaactccctttctctctcaagggaacatgactcggtttatttttttccataaaatt

SEQ ID NO: 62292 - DNA, 376 bp, Setaria italica
  Peptide Sequence Number=SeqID_128266
caaaaatgaggtctagcacttcatgactagctggaagctggaagtggttggaggggccttgagggggattcataattactccatcaatgaggccatactccttcgcttctttcgcgctcataaagtaatcacgatcagtatctacgttgatcttatccaggggttgtccagtgtggtatgccagatatccatttaagttagccttgtggtgcagcatctcattagcctggatctcaagatcagtctcttgtccttgggctcctccaagaggttgatggatcattattcttgagttaggaaagcgatacagcttacctaactcaagaataatgatccatcaacctcttggaggagcccaaggacaagagtacttgta

SEQ ID NO: 62293 - DNA, 257 bp, Setaria italica
  Peptide Sequence Number=SeqID_128267
gggcggacctcggcactaccaaatcatccctgatcgaccaaatcccgcgccgctgggcagccccgtacgccccgcgcctacttctcggaggagttgggcccgcgcttcttgccgaagccgacgacggcggtgacgaaacggcggttgtactgcatcctcttgtgcgcgcggccgcggggcttcttcttcttatcctgcttcgccaccttggggcgttctggccgcggaccttcccggcacgggccaacgatccgtgc

SEQ ID NO: 62294 - DNA, 275 bp, Setaria italica
  Peptide Sequence Number=SeqID_128268
agtgtatttgtacgcatgttctggaccggatcaatgaaatatgcacctcgttgtagtacatacgaatacatacgtctacggcgaccccacccccggccggtcgcttcacctcgccgtgcgcgtcatccacccatgcccatcctcgctcactcacttgccggggacgaagttggtggcgtaggcccaggcgttgttgttgacggggccgtcgaggggtaccgcattgccggcggcccgctcggcgaggtcgtcgacccgctctaccccggcggcag

SEQ ID NO: 62295 - DNA, 293 bp, Setaria italica
  Peptide Sequence Number=SeqID_128269
ttttttttaaattcaaataaataaaaataaattaacaaagtaaaaaacaaataactaactaattataaattatttacaacgaggtgcatatttcattgatccggtccagaacatgcgtacaaatacactactggtacaacaacctgtggtcccaggcttccttccttcacaaatactcgtacacgttgcagtacatacgaatacatacgtctacggcgacccccacccccggccggtcgcttcacctcgccgtgcgcgtcatcccacccatgcccatcctcgctcactcactt

SEQ ID NO: 62296 - DNA, 264 bp, Setaria italica
  Peptide Sequence Number=SeqID_128270
cgtgcgcgatgcgttccgggccgcggcggcggccgcgggcgggctgcggccgagccccggcgggttctcgctgttcgacacgtgctacgacctgggcatgcggcgggtggttaaggtgccgacgctgtcggtgcacctggcgggcggcgcggcggtggcgctgccgccggagaactacctgatacccgtggacacgcggggcacgttctgcttcgcgctggcgggcacggacgggggcgtgtccatcctcggcaacattcagca

SEQ ID NO: 62297 - DNA, 222 bp, Setaria italica
  Peptide Sequence Number=SeqID_128271
taaggaacgggttaactaacgaactaagttacgaacaacgtagactaacgacctgggcaggcggcgggtggttaaggtgccgacgctgtcggtgcacctggcgggcggcgcggcggtggcgctgccgccggagaactacctgatacccgtggacacgcggggcacgttctgcttcgcgctggcgggcacggacgggggctgtccatcctcggcaacattcag

SEQ ID NO: 62298 - DNA, 255 bp, Setaria italica
  Peptide Sequence Number=SeqID_128272
cgcgcggctggaggtgtcggagctcgggtgcagcgggcggtgcgccaccagcctgtgcggcggcggcgcgcaggcgcagaaggcctcgacgtcagatggccggccgggctcgccgggtgccgcgttccgcgtggcggagttcctgtcgtgctgcgacatgtgccggtaccacgccatcgtgagcgacgagttccaggaggagaaggagcggaagcgccgcgcggccgccgccgtgtccccggccgccgccgacgg

SEQ ID NO: 62299 - DNA, 469 bp, Setaria italica
  Peptide Sequence Number=SeqID_128273
ggaacccagcagaggcatcttcccgctcatttttgttgcttcttctgccctgatctgatgtatgtgtgaagtgccaacttttgcagacagcttcgtcagccttgccctcggtgagtgcttcttccgctttttggacctccaggtaatgattcttgaactctacaatagctacccgagcactgctgcttgtgtctgcaagccaaacatccaaatacattaatatggatagtctaaaatattcaaagcatgaaactgacacatccttatttgataaggtgttaaaatccaaattgttattatacttttgatataacccaaatatagttgttggacttgatgttatccaaatcgggatatctattataattactacagctgaactattatcctaaaccaataactccatacatatcctgctaacgctttatttagttaggtgacaaagctcaatcatgttgcttctcttgac

SEQ ID NO: 62300 - DNA, 375 bp, Setaria italica
  Peptide Sequence Number=SeqID_128274
aaagtaaacaaaacaaaaataaaaggtaaagaaagggtaacaagtagtagactacaacgatgcgctgaagtccatgtacaatgctgagaagaggggaaaaggcaggtcatgatcaggccatcgtctaaggttatcatcaagttcttgatcgtcatgcagcgtcatggctacattggtgagtttgaatacgtcgatgaccaccgtgctgggaagattgtggtggaactgaatggaagactaaacaaatgtggtgtcattagccctcgctttgatgttggcgtcaaggagattgagggatggactgcgaggctgctcccatctcgtcagtttggctacattgtgctgacaacttctgctggcattatggaccatgag

SEQ ID NO: 62301 - DNA, 356 bp, Setaria italica
  misc_feature (183)..(183): n is a, c, g, or t
  Peptide Sequence Number=SeqID_128275
gctgtttttgttttcactcaggtaaggtcaacatggtgagggtcagtgtgctcaacgatgcgctgaagtccatgtacaatgctgagaagaggggaaaaaggcaggtcatgatcaggccatcgtctaaggttatcatcaagttcttgatcgtcatgcagcgtcatggttagttctcaatatgcncctttcacttgcttatttcggaggatgtgcctgattagtgttccatcatgtaggctacattggtgagtttgaatacgtcgatgaccaccgtgctgggaagattgtggtggaactgaatggaagactaaacaaatgtggtgtcattagccctcgctttgatgttggcgtcaagg

SEQ ID NO: 62302 - DNA, 242 bp, Setaria italica
  Peptide Sequence Number=SeqID_128276
cttggaaatatcctaatactttcatcatactcccttcaatagaagaaacctagcaccttgcctccaacattcttcctacgggcctcctcatggtccataatgccagcagaagttgtcagcacaatgtagccaaactgacgagatgggagcagcctcgcagtccatccctcaatctccttgacgccgccgtccgtcgaggtcaacatggtgagggtcagtgtgctcaacgatgcgctgaagtc

SEQ ID NO: 62303 - DNA, 446 bp, Setaria italica
  Peptide Sequence Number=SeqID_128277
gttcaccatcttcttatgtttgtgctcatcagattcttggtgctgcaaaaggatcagaatattgcaagctccaccaatggtagcttcaggaagccgttctatcgagtacctgtgttgtgtaatatacatgattggaacaccaggaaccttccttatcctccttttcaaatctctatcacatgtagcaacaatgtagcatttgtgctgagtaaccctatccacaatgcagtcatcagcataagtccccttgtgtgtgcatgctaatctttggaacctagggtccttggcaattctcaaggccacgcgatacttctgtcccagcttttcaagctcagccataacacagtcagtgatacacggggtgcattttgcataaaggcagtccatcattcctttctccaaatccagcttgttctggatggaaaagttgatgaagttggtgtcca

SEQ ID NO: 62304 - DNA, 314 bp, Setaria italica
  Peptide Sequence Number=SeqID_128278
cagcgagaatattcggctgttgatgatggttagtgcttgtcattacaagttctgatgatataccaaacttctgtgatctttggaaccataaaatcatccagtaatattctcgctgttgatgatggttagtgcttgtcattacaagttctgatgatataccaaattctgtgatctttggaaccataaaaatcatccagtagtatacatgcgggtctgagatacatgtgaacaatttcccttttcttgtgaagataacgtaaaccctcacagattcccctgattatctgatatcgtgtatgccactgaagtcccct

SEQ ID NO: 62305 - DNA, 384 bp, Setaria italica
  Peptide Sequence Number=SeqID_128279
tttgtttctagtcatatttctctgtgacgtgcaaatcttcttgggatgatttgtgattgatcctgaatacatcatagcatgctcgcactgctataattgcctctgtatagcttcatctactatccttttcttctgcagacagcagctttagcccagaagaattctgaagccacctgtatactagctgcacaagaagtccttctagaaaaagaaattggcgcaattcagaaggtgctatatgcaatgcaggaacaacagcaaaagcaacttgacctgatccttgcaattggggaagcaagcacgatactagatggtgaacaagacatgctagaccgggacagtgctagatcttccagcgttgatccagctccagagatagagaac

SEQ ID NO: 62306 - DNA, 199 bp, Setaria italica
  Peptide Sequence Number=SeqID_128280
cagttcgctctgcaggcccttgatgtgctccactgcaaggtccaacatgtcggcggtgctcgtttgctgtttgcaccatatagacaagatcatagatcacttcatcagttagattttcttttgccatatcaaaacgaatactagagaagcccattagctatgtattcgttttggcttctttagaatacatagtttttga

SEQ ID NO: 62307 - DNA, 256 bp, Setaria italica
  Peptide Sequence Number=SeqID_128281
cctcgtaatttcgtcaagtggccaatctagaccacggatctagactctccgttcgttccgcctctcgagaaataccagcagccaacctgccatgtgggacccaccacttggtttagcactggccggacacggcaggtttgaatcaggcaaggtagcgttagccttggatacggtttgcttcttcgtagatactgtgtcttcagggcatgcagaatggtgccattttggccacttgcgaaattacgaggcatgctag

SEQ ID NO: 62308 - DNA, 265 bp, Setaria italica
  Peptide Sequence Number=SeqID_128282
tgtacctgtccatgcccgccatctccagcgccgtgcccgccatggcgccgctaaactgagagtcgtacgcgccgagggtggcgatgatgtccctggactcctcccacggcccgacgatggagaacccgccggagaaggagcgcgccgcggccgcgccaccaccgctgctactactctcgccagcgcggtcaccaaccaggccgggcgggaaggcgccaccgctgcctccggcgccttttgagcccggatacccgttgtccaccac

SEQ ID NO: 62309 - DNA, 269 bp, Setaria italica
  Peptide Sequence Number=SeqID_128283
ccagcgcgggtcaccaaccaggccgggcgggaaggcgccgtcctcggagatctgcgagaggtggcccgcggcgccgcctggctgcggccgggtgaagttgaactgggacggcttcatcttcctgccgctgccgctggcttcggcgccaccgctgcctccggcgccttttgagcccggataccctgccatgtgggacccaccacttggtttagcactggccggacacggcaggtttgaatcaggcaaggtagcgttagccttggatacgg

SEQ ID NO: 62310 - DNA, 189 bp, Setaria italica
  Peptide Sequence Number=SeqID_128284
ggctgcggccgggtggaagttgaactggacggcttcatcttcctgccgctgccgctggcttcggcgccaccgctgcctccggcgccttttgagcccggataccctgcgtagtttaacccaaccagccgcgtataattaaaaatcatcaaattgcccaaaatagttaatgcatgagctgaacagagatta

SEQ ID NO: 62311 - DNA, 426 bp, Setaria italica
  misc_feature (377)..(377): n is a, c, g, or t
  Peptide Sequence Number=SeqID_128285
ttcagccttagcttggtaaatcttttgtaggcttacataatactcagtaagtgaagtcatagtacaaggaaattagttaccctacgaagaaggacaagctcaccattgccctcatttgcaacaaattccttcaaagcagccactaaaatccagaaatccgttgaagatgaattgacttccgcggagttatcatcaattatctgctggatctcatttcttattcctggagtggctgagactttatatgaagactccacagcttctttgtaattttcttcatctacattaagcatatgggcccgaatcaggtccttaaactcccttttctcttgactagttgaaggtaattaccatcatgagcatctgcccatttttcngcagcctcacaaggataacaatgtatggtgtatgcttgtgcacgacagg

SEQ ID NO: 62312 - DNA, 222 bp, Setaria italica
  Peptide Sequence Number=SeqID_128286
atggaatggcctatcatggaatatactagtaaagaagtcaacattccgtacattataatcataatatgatatataccttcaaagcagccactaaaatccagaaatccgttgaagatgaattgacttccgcggagttatcatcaattatctgctggatctcatttcttattcctggagtggctgagactttatatgaagactccacagcttctttgtaatttt

SEQ ID NO: 62313 - DNA, 293 bp, Setaria italica
  Peptide Sequence Number=SeqID_128287
ccatgaggcctctggtggcacctaattcaccaatcttagccttgttgctgttaagagcagacaaactgaagatggcagctgcggaattaggtgccatgaggcctctggtggatctccttgaacatggcagcatgatagccaagaaagatgctgcttcggccatcttcaacctctgcatgctgcatgaaacaaatcaagggccagcaagatgactttgaaagctatcgcagatgacttgcttgtggatgagtccctggccatccttgttctccttgttgcgcttgcactggtcc

SEQ ID NO: 62314 - DNA, 469 bp, Setaria italica
  Peptide Sequence Number=SeqID_128288
gtttctaagcaagcattcgattggattcattgatttctggatacagtacatatcaccacacccacccctgatctaagcatctttcctacaaatagaatacaatgtggccaattcagagtatccggggaactcacaatggaactacgactcgtcagtttggaccgtcagatcctgaatgcccaaatcctgatacagaccatgggcatgttcaaggaccgcccgatcatcagcaccactcttcacctatgcaatccaaaagaaccaacattaggcatcacgcttcacagcaggctttgcagctcggtgtcaaagggttttaccctgatggacagagatccaacagcctgaccaggtacaagctcccagaatcgaccttgccatacttcggaaacatcttcacaagcagtaatctggagaatatacatcacaacatcatgcgtcttgagtgcattttttaatataataacta

SEQ ID NO: 62315 - DNA, 401 bp, Setaria italica
  Peptide Sequence Number=SeqID_128289
ggtagaactatctggaaaaatgcatgtattggcaagattactggggcatctgcgtcagaaaactgatgatcgtattgtccttgtatcaaattatactcagacattagacctgtttgttcaattatgtcgggaaagaagatacccatatgttagacttgatggagcaacatccattagtaaaaggcaaaagctggtgaaccaattcaatgatctatctagggatgagttcgtctttctactaagtagcaaggcgggtggttgtgggcttaatttggtaggaggaaatcgtttggttctctttgaccctgattggaaccctgccaacgataagcaggctgctgctcgagtatggagagatggacaaaaaagagagtccacatttacaggttcttaagcacagg

SEQ ID NO: 62316 - DNA, 480 bp, Setaria italica
  Peptide Sequence Number=SeqID_128290
tttctgcagaacaatttgttgcccactataactttttcaaacagtaggattaagcaagaacaatgtaaatttctcctgatttattaacacatactattctgtattttattctggaattctcagaattctagcctcttgacggtatataatttttccatgatagtgtgctctctaacagattgatagcgatatcactccacaaaacaggaaaacaggctagaactctgggcagagagcttgtattactgttgttttctgggcatcatggatttgtaattcatctttttggttataagaaaaatccatgatatatttgtcggttgcctgtcttcatattgcagctgatctatgacaccataaaaagtaacaattcaggtggctctggttttgatgattgtctgcgcttttttccacctgaactgttttcaggaaggtatttcacacttctctatctttttattttgctgaatcaacttacaa

SEQ ID NO: 62317 - DNA, 338 bp, Setaria italica
  Peptide Sequence Number=SeqID_128291
aagcaaagcaatccaaaattctggcatacattactgcacttaagaaattatgcaaccatccaaagctgatctatgacaccataaaaagtaacaattcaggtggctctggttttgatgattgtctgcgcttttttccacctgaactgttttcaggaagatctggatcatggactggtggaggaggaatgtgggtagaactatctggaaaaatgcatgtattggcaagattactggggcatctgcgtcagaaaactgatgatcgtattgtccttgtatcaaattatactcaggtcaggcatttatagcgcaatacttcgatatgatgtcataaggggcga

SEQ ID NO: 62318 - DNA, 220 bp, Setaria italica
  Peptide Sequence Number=SeqID_128292
agtgaccaccatcatttcggtcctaagcttcgcctctgtctctattcatgaagaatactacttattgtaactaattgcttttggataccctcaaagtttgaaatgactaattgttgccattttttcttttgcatcagacattagacctgtttgttcaattatgtcgggaaagaagatacccatatgttagacttgatggagcaacatccattaagtaaaa

SEQ ID NO: 62319 - DNA, 277 bp, Setaria italica
  Peptide Sequence Number=SeqID_128293
ggaatcactgcccgtgtcgtagtctgagtattgccaaccaacctgctgcccagttcagctaatacactgacatttgattctggacaactgtcagaaatgtgaccatgcgaagatgtacgagatgatctccgacgagaacctgacgctgatgcgggagcggctcatggagacggtcatctggccaaccgatgacaccaacaccggagaagatcggctgatgcggaggcgtagaattcttttggttgtgattaagcttagctccttaggtatgttgtca

SEQ ID NO: 62320 - DNA, 312 bp, Setaria italica
  Peptide Sequence Number=SeqID_128294
tttaaactaacaactaacccaaagaagacaaatagtagtaggagctttggagttgtgttactggagctaataactggaagaaagaatcttgatgtcagttcctccaaagaagaacgcaatatcgtcaagtggagtaggcctttccttactgatgatagtcgcctatccctgatcatggactcacgaataaaagggcgctttcctaccaaggctgctcggatagtagcagacatcattctgaaatgcttgcataatgatccttcagagaggccaacgatgagggatgttgtggaggccctaacagggggtcca

SEQ ID NO: 62321 - DNA, 245 bp, Setaria italica
  Peptide Sequence Number=SeqID_128295
attacataaggccacttggtcttacaatacagcacatagcactaaaaatcactaggctaacaaagaaacaaataaatcgaagaaaaggaaataaaagaacaatatggacaatcaaaagccttccacgctagacctacacatgatgaaggaccatttcaggccatgtacagtgagttttcaacttcaaacatccaaatagataaagatttcactgctaagctttcaggatatggttgtgctggctt

SEQ ID NO: 62322 - DNA, 258 bp, Setaria italica
  Peptide Sequence Number=SeqID_128296
tttttcaagcaccttctcttgttccgttggctttaacttgtatttgtatttccttttgttttcaggccatgtacagtgagttttcaacttcaaacatccaaatagataaagatttcactgctaagctttcaggatatggttgtgctggcttcaacacagaggagatatctaatgcacctgtgtctgcagcacacctttcggtggagaccttggcgaaaggtttactcactcccaagagcaatgtgtggagctttggag

SEQ ID NO: 62323 - DNA, 292 bp, Setaria italica
  Peptide Sequence Number=SeqID_128297
ctgaagacaatgatgaagctgcaaagagtggtgtcaattttcctagtcgtccacgttttgtcgcatcaacagtgtcatcatctattgaacttggagttgctgaaccatctgacacacgccttggacgtcccctcttccttttaccactttcaggtgaggtggttgcaggtgtctgaaaagtgggctcattatcttttgagtgaattggaggagtcggagtatctgaactatcctgcaaacatttgggacgcccccttttcctcgtaccagattcatgtacagtgggtgtcaa

SEQ ID NO: 62324 - DNA, 290 bp, Setaria italica
  Peptide Sequence Number=SeqID_128298
taggggtattcctacggtattactaccgtacctactaaggtccgggtttccgtccgggtagtctactacggttgttcaagcgagaaggccggcggctcgcacggcccgctccgggcgtccgcgcacatccgcctctccgcgcggttcgactaccagcctgacatctgcaaggactacaaggagacgggctactgtggttacggtgattcctgcaagttcatgcacgacagaggggattacaagtctgggtggcagatggagaaggagtgggaggaggctgagaaggcccg

SEQ ID NO: 62325 - DNA, 299 bp, Setaria italica
  Peptide Sequence Number=SeqID_128299
attgcagtgtggaagaagactgaaatgccatcaggttggccaggttctctgagcaacttcgtgtttaaacacattgaaaccagatggcatttcagtcttcttccacactgcaatgccatcaggttggccaggttctctgagcaacttgtgtttaaacacattgaaaccagattttcctttctccatccaggcttctttaatcttgtaaaggccatcatatacgtatatcttgccagttggacaagccaaatcttttacactacgaatgactctaattggattacctctatgcaaactcc

SEQ ID NO: 62326 - DNA, 392 bp, Setaria italica
  misc_feature (64)..(64): n is a, c, g, or t
  Peptide Sequence Number=SeqID_128300
ttcgcccagtaattctggtgcatagttccatctaaattctgctctgaaggagaggtctcgaagntaaagtcatcttcgctgttcccactatttctgtcaatgatttcacctgcatattcacagataaatgtacctgctcggattggatcccaactacggaggccccaaccacgatctcctgtcttaaacacttcaaaacgaatctgggtacctttctgtacaactcggttgcggcaattttgtgaacaagtgcaggaatcattacactcatataacataggcatgcggctaacaagtatgcatcgaaatgccggtgaccttccttacagtgcttcaggcatacttgttagccgcatgcctatgtgaacaagtgcaggaatcattacactcat

SEQ ID NO: 62327 - DNA, 182 bp, Setaria italica
  Peptide Sequence Number=SeqID_128301
cttccttacagtgcttcaggcatacaagagcagttgttatcaccagggaggcatacacttgtgcatttgcaaccttgcatctttctcatggagctcagagaatctaatacaatgacactgcacgcaacgaggggcagacttattggatggtccatggaacaccttaagggacctctacggct

SEQ ID NO: 62328 - DNA, 240 bp, Setaria italica
  Peptide Sequence Number=SeqID_128302
gacaagggaagagcgtctggagctgctcgggcaggcacaatggccgaagtaaaaacgaaaagcaagagaacagttgggttaacctaaccggccggcccgtttgtcttactgtacttccattgcatgatttcatgcaaagatcatgcgtgatgtaccgacgacgttgcattggtcctcgtcgttacctcttaaccagcacgtcttgatctgaattattctgacgcagctccaatcctccac

SEQ ID NO: 62329 - DNA, 182 bp, Setaria italica
  Peptide Sequence Number=SeqID_128303
tgttaacgacgaggaccaatgcaacgtcgtcggtacatcacgcatgatcttaattattctgacgcagctccaatctccacaggtgtatccggtgaaggggacctcgtcgttacctcttaaccagcacgtcttgatctgaattattctgacgcagctccaatcttcaccggatacacctgtgg

SEQ ID NO: 62330 - DNA, 454 bp, Setaria italica
  Peptide Sequence Number=SeqID_128304
taatacaacccttagaacgacaaataatagacgaattacccccaagacaataataggcctcctcgtctgtttcaagcgtgcaggtccttgccgggtgctccggtgtgcctctatggtaaatgcaagcaagattgaaggtgcgcttgtagcccttgatgaagccgaggatcttgtcatcgaagtcgaatccggggttccagatcagggacccgtagccgaagacccagagcaccatcctgcagctccttgtttattcgatttccctcggaggaagcggcggcagcggcggcggcaagaacgacgcgctgattgggcacgggcgggcgggatggaggaggaaagatctgcgattctggggtctcctcgtcctctcccgtcccgagcctccgcgcggctcggtctcgctgcctggtccgctctcctcgccggcgcacttgcctgcctggggattcgg

SEQ ID NO: 62331 - DNA, 384 bp, Setaria italica
  misc_feature (6)..(6): n is a, c, g, or t
  misc_feature (314)..(314): n is a, c, g, or t
  misc_feature (359)..(359): n is a, c, g, or t
  Peptide Sequence Number=SeqID_128305
tttttntttttttgttttttaacttttttaagttttttaactttttaaaggttttaggtttccttaagtatcactgatcgaatcgtcctcatggattatgctggccaatgccttctccattgagaacaggtaatccctattatagccagtggggccattggctgtagcaatttgccttgccatatcctgcaaaggggcaggaccaaggtagtacttgttgccgattggatcaggtgtggatacgaaaacaagtacgccggtcacagctggtttcagagaatctccttccttgaagaagtcaacagatattttcnggtcatactcacactctcttctctccaagtactgcattgctttcngctctttgtctgtatcacccttgac

SEQ ID NO: 62332 - DNA, 317 bp, Setaria italica
  Peptide Sequence Number=SeqID_128306
tgtggccatcgtgtactgaattttcctttgcaacggttgtggtgaggctgtatgtacacgatggccacaaacatggaagaactgaaagcaaattcagagtctctggtggaacaacatcaagagtgagtatggtcggaggacattccatctcctccgctgatccaactgggcttcaaggatcttgctatctcgagtccacaacagtgccttcgggaagcgcagacaggtgcaccagaggaacatgagattgcaaggatacgtcagagccagtgatcttggcctccttgttctgttcagcaccttcctcacctcattcg

SEQ ID NO: 62333 - DNA, 323 bp, Setaria italica
  Peptide Sequence Number=SeqID_128307
aaatagtacctaccgaaccaataactacactcttgatgttgttccaccagagaaacatgagattgcaaggatacgtcaagaagaccaagtagaatcttggcctcctttgttctgttcagcaccttcctcacctcattcgcaagctcaatgatcgaatcgtcctcatggattatgctggccaatgccttctccattgagaacaggtaatccctattatagccagtggggccattggctgtagcaatttgccttgccatatcctgcaaaggggcaggaccaaggtagtacttgttgccgattggatcaggtgtggatacgaaaac

SEQ ID NO: 62334 - DNA, 226 bp, Setaria italica
  Peptide Sequence Number=SeqID_128308
ggtggaacaacatcaagagtgagtatggtcggaggacattccatctctccgctgatccaactgggcttcaaggatcttgctatctcgagtccacaacagtgccttcgggaagcgcagacaggtgcaccagaggaacatgaagaattgcaaaggaatacgtacaagaagaccaagtagaatacttaggacctacctttagttactagttacaagacaaccttaccta

SEQ ID NO: 62335 - DNA, 262 bp, Setaria italica
  Peptide Sequence Number=SeqID_128309
cgatcgaattgctaatctccgtttaattcctcttcccccttggggtgagtgaatccgcgtgctgatcctgccgctgtcgattacgtcctagggtttctatcccgtccgtggccggcgactccgggcgccatgaacaagcaggcgctgatttacagcttcgtggccaagggctccgttgtgctggcggagcacaccgccttctccggcaacttcagcaccgtcgccgtccagtgcctccagaagctcgccccccaacagcacg

SEQ ID NO: 62336 - DNA, 257 bp, Setaria italica
  Peptide Sequence Number=SeqID_128310
acgagcatgaggaaagccatcgagaagatggaccggcggggcggggcggcggcggataggggggcgccgtcggcggcgaccgacgggaggtggggctcgatggtgacgaagcgtttcgggtgcaagttcccggcgcaggtctgccagtcccagcagcggacggtggtggcacggcctcgccggccacgcatcgagcagagcccatgagctctcgccgccgcacgtcgtagagcttcgagtattttcattttgttctg

SEQ ID NO: 62337 - DNA, 230 bp, Setaria italica
  Peptide Sequence Number=SeqID_128311
aaaatgagatagatgactcttcacttcatcatttggtttcgctccagccttctcatcaacatcaatgttaaaatcagtgtcagcatctttctgcttgaatgttagcaatatcctcccaactatatccgtgctcgagacaccttctgttcgcttgatttgcttgtaacgcccaaccttgtcttctacctgatggcactgatgcatatgcattagcaaagaaggttgggcgt

SEQ ID NO: 62338 - DNA, 245 bp, Setaria italica
  Peptide Sequence Number=SeqID_128312
gttcatacatgattctttttttgtactttgttgtccctggaggggatatatatatttgtagctgagcatcttcagcgaaatcattgttggcgcaccatgggaagtttcgaaggacatgatcaccacgtttaacatttcattggttgtgcatggaactgtagctgagggcaatccagctggtgaaattgatccttatgctgttccaaagagcatgggtatctttaagacaatcacgagcccgaaat

SEQ ID NO: 62339 - DNA, 123 bp, Setaria italica
  Peptide Sequence Number=SeqID_128313
agagaagaaggtgcgcatgatggcgcggcagagcgtgggcgcgcacacgcccacgcagaagttgtccgtcatccgctgcgccagcttcagcatgctcctccgccccaccggcgttattgcggc

SEQ ID NO: 62340 - DNA, 272 bp, Setaria italica
  Peptide Sequence Number=SeqID_128314
taccgaaaatctaagagattattcactaatcacaatggtaaaaaatagtaaaggagaacttacatttggacggaggagggagacggcgttgccgtggtgctggcccttggcgatgtggtccatctcctgcatggcctccccgttggcgaggatgtcccactcgccgcggcgctgctcgtctcggaggtagtcgaacacgcgctgcgggggctggagggcagccgcacggacgtggtggcgctcagcaccacgccgggaggcctcccccgggg

SEQ ID NO: 62341 - DNA, 483 bp, Setaria italica
  Peptide Sequence Number=SeqID_128315
taaaaacaaaacttactaagaaagacaataataaggagaagccctaggggttttgaacttctttgccagagacttaagtcaatacccgaaccaccacatgagcacatcaagcttgagcatacagtaaaaaacatgtttgctcaagagattagagcctagcgcgcggttcgttcttgacttaatccctgtgtacctcacccccatatattgctctatgcaatacatttatactccacactatataacttatttttcctttttatctttcaccgcccctcaagcaccagcagatcctttgcagcatatggccattttcttcttgtgccattttgtagagctagcatctcccatcatcgcctcaagctaagcatttgacatggcatccgggctccgaccttttgcaagaaccggtggccggaatccacgtcaaatgcccgctagggtgtgacgatgctggcctggagagcagacttgatcttctgg

SEQ ID NO: 62342 - DNA, 248 bp, Setaria italica
  Peptide Sequence Number=SeqID_128316
tgttgtagacttcgctgctgtgttatgaaggtggaaactataagactaatgatgtgccatgctgaatcagttgtgagactcgctgcttggcacatcattagtcttatagtttccaccttcataacacagcatgcagtgaacaaattgtctgagagcatactctcctagagtgctttaacacaatactaccaaaggttcgcagaaggaaatgagttttgactacctcagcctatttaagtaccctgtag

SEQ ID NO: 62343 - DNA, 248 bp, Setaria italica
  Peptide Sequence Number=SeqID_128317
gcagaaggaaatgagttttgactacctcagtcctattaagtaccctgtagtattgtgttaaagcactctaggagagtatgctctcagacaatttgttcactgcatgctgtgttatgaaggtggaaactataagactaatgatgtgccatgctgaatcagttgtgagactcgctgcttggtgctcttagtaaaaaatttaataccctaggaatactaataataggaaactaatagaaaaaaaaaaaaaa

SEQ ID NO: 62344 - DNA, 192 bp, Setaria italica
  Peptide Sequence Number=SeqID_128318
atcctaatcaacaatcaattcctcagtcatctcaagctcatgaagcaggttcatttggagattgaccatttcgttcatcgttaccaatagtgtttgctctttgtcgaactctggtgatcagtggatagataataccaacacctccactagaagaccctgatggagcacgactgataccagcaggcatggcaa

SEQ ID NO: 62345 - DNA, 235 bp, Setaria italica
  Peptide Sequence Number=SeqID_128319
aaccgcgaccaaattgatgagcctaattctaaaagacaaagattcagcgactgattcaaatttggtcgcggttatgttgatgggaactcgtagaatctcttgggtcatcccttgctctgtttgcactcccagatgcagcctgtgcatgtgtgctgctagtgtctggtggagcactttgattctgtgtttcaacttgggagataaatggcataatttgtctgaccatgctagcaaa

SEQ ID NO: 62346 - DNA, 366 bp, Setaria italica
  misc_feature (151)..(151): n is a, c, g, or t
  Peptide Sequence Number=SeqID_128320
catgctccggctagaaccaccagagaagaggcttgattatcgcataaataattccatcccggatagattaagcttctacatattggagatcggatgccggcatgtacggttgtgcactcaaaaataacagcttataagatgcgaaaaaagntaagccattaggtgccctcgtccagtgtcctcaatgccaactatatactacagctagatccatttgtctcaataccgtcaccatttgcctcaactcccgatttgacaatttgatgggttaagcaagaactggcaagattctcatctctcaagtctaaattttgtaattctagttcgtcttgtaattcttttgttctttttagtaatttaggtctt

SEQ ID NO: 62347 - DNA, 244 bp, Setaria italica
  Peptide Sequence Number=SeqID_128321
tgctgaagaatgaggaattgggacaaagcattttgaacgcagaattggagtggtttggaattttttgctcccccatgtcaacatttaggttatgcctgctcctaccacctgacgttcagcaacctccttcactgagcaaagtcattggcagacaattatcgtcgtcgttgttgcctgactcgcctccttctctgagctgttggtggtagcttctccgagggcccacaaggaagtatagttcctg

SEQ ID NO: 62348 - DNA, 247 bp, Setaria italica
  Peptide Sequence Number=SeqID_128322
ccatcgatgcaaagacatggaaggtcaagacagtggtggttcattcttttgcatattattactcttgaaaactgatacaccaatagctttcacaattatcgtcgtcgttgttgcctgactcgcctccttctctgagctgttggtggtagcttctccgagggcccacaaggaagtatagttcctgtcgcttgcttgctgctcgacctctctcttgctcctccataatcaccacccacctaccactagc

SEQ ID NO: 62349 - DNA, 228 bp, Setaria italica
  Peptide Sequence Number=SeqID_128323
actttttggccccccagggacaggaaagacaatgttggcaaaagcagtcgctactgagtgcaaaaccaccttcttcaacatttcagcatcatcaattgtcagcaaatggcgtggtattgtttcttgacaccaccccagaccccaactcccgattctaccttttcttccccctcgtttcttcacattctcgtttctttctttgaccttacattaattcaacttttctag

SEQ ID NO: 62350 - DNA, 243 bp, Setaria italica
  Peptide Sequence Number=SeqID_128324
tcgagcaatttgaccatcactgcccgtggatatcaaactgtgttgggactaaacgtggatactattttagtcctctggaagaataaaatgcttactgctaaagagagtatacagtcatttgattgttcttttaaaatctgactgcaataagactgtcacacttgaacctcatctgcatgtttgtattcaattgttttctgcatgtagctccgatatatttccatatactactgatatatattt

SEQ ID NO: 62351 - DNA, 194 bp, Setaria italica
  Peptide Sequence Number=SeqID_128325
caaaagcagtcgctactgagtgcaaaaccaccttcttcaacattggccccccagggacaggaaagacaatgttggcaaaagcagtcgctactgagtgcaaaaccaccttcttcaacatttcagcatcatcaattgtcagcaaatggcgtggatggtgcatagaataacctaagacaaagactacaaaacaagaa

SEQ ID NO: 62352 - DNA, 247 bp, Setaria italica
  Peptide Sequence Number=SeqID_128326
cgggcctgatgggcgcttcagaaatccttatagtcgaggttgccagaggaactgcactgattttcttgtcaatggatacaccaatgatgaggagattgcatggccaacccttcagcaaacagtacagagaagctagagctacggatcttgcaacctaagttcaagttatacgtcacagcttatacaccaagtaggtccctcttcacacccattgtcaatccatgtctgaacaaactaaaatattccg

SEQ ID NO: 62353 - DNA, 298 bp, Setaria italica
  misc_feature (236)..(298): n is a, c, g, or t
  Peptide Sequence Number=SeqID_128327
tttcttaaaattggtttgtctatttagttaacttagtccttccttctagttagtatttgtcaattttgcccaacattggctgaattgtgaagttgctggcagctctcatatctttgtgggggacatttttgccaggctgagatctttcgcgaaaccttacagcaaaaaattgattcattgtttaatcacatgtcgaaataaatgtttggtgccgcagaagagtactgtctaggttnnnnnnnnnnnnnnnnnnnnnnnnnnnnnnnnnnnnnnnnnnnnnnnnnnnnnnnnnnnnnnn

SEQ ID NO: 62354 - DNA, 355 bp, Setaria italica
  Peptide Sequence Number=SeqID_128328
tttttttagttcctctctaaccttctttccaaactcggcagagttcgaaccctctgcaatagactcaatatccatgcttccagtgcgactcctccggtttctccggtcctgaattgttttttcaaaaggtgttatgacaatcaaatatcttacttacagtatacatcaagtaagttttcaattattattacctcccggtacggaacttcttcagactcaagcatcctgacaacctgtcccatcttgggtactcttttcagagtcaggattcaacacaccttagtgccactaaaagagctcgcttcagagacctaatagatggtctaacttctaagcttaggatcagccacttcct

SEQ ID NO: 62355 - DNA, 164 bp, Setaria italica
  Peptide Sequence Number=SeqID_128329
tgtggagttctggagtggagcagctccacccggagttggagccatgccaaacagggccttagatgctcttcagatgctttgcttagcttctaagccactggttggtctatatgtatcccaaaacccctttgtgggagtgtcaatgaaaaagatcaatttgggcc

SEQ ID NO: 62356 - DNA, 259 bp, Setaria italica
  Peptide Sequence Number=SeqID_128330
agacaagttcttccagctgttccataccttttacatactgtacaggttgaaggaacatttgtggacggaacaaaactaattactgtacatgaccctatttctttggatgatggaaatatggagttagcactgcatggttcttttctcccaggtccaagactctgatcagcataattggttcaattatgttcaaactttttttctgacttatatggttacaaaattctttgattaatgcgttgatggaatctgtggagat

SEQ ID NO: 62357 - DNA, 220 bp, Setaria italica
  Peptide Sequence Number=SeqID_128331
gagaagggaggagaggaacggaggcgagaaggaatcagcagttcagcacggtacccagaatcttcctgcctagatacagttataacaaatgctgttgtgattgactatacaggaatatacaaggctgatattggtataaaaggtggacttatagttgctattggaaagggtggaaaccctgatgtcatggatggtgttcatagcaacatgattggtgggg

SEQ ID NO: 62358 - DNA, 206 bp, Setaria italica
  misc_feature (3)..(3): n is a, c, g, or t
  Peptide Sequence Number=SeqID_128332
ggntaaaaacaatcccagaagatgtagcatttgctgagtctagaattcgagctgaaacaattgctgctgaggacatattgcatgacatgggggccataagtattatatcatctgattcgcaggccatggggcgcattggagaggtctgttacatgattatcctaaatccatagcttctgttactaaagtttgttgaaagcctggac

SEQ ID NO: 62359 - DNA, 167 bp, Setaria italica
  Peptide Sequence Number=SeqID_128333
gtttttcaagaatacttcattagtggaaaaaagaactgtaccccatattatttaactgatgcagtgccttcacctgaaaagttctccgggggtgatgtcgaagactatcctggtgaaatacattacagctctggtcgcatagttctaaaccttcaccgcaaggggac

SEQ ID NO: 62360 - DNA, 496 bp, Setaria italica
  Peptide Sequence Number=SeqID_128334
gcccgcccgcgccgcggcgccatggacgccatccggaagcagctcgaccagctcatgggcgccaaccgcaacggcgacgtgcgggaggtcagccgcaagttctacgaccgcgacgtctgccgcctctacctcgccggcctctgcccccacgacctcttccagctcaccaagatggacatgggaccgtgcccgaagctgcactcgctgcaactgcgcaaagaatatgaggaagccaaagccaagggtacagataactatgaccgtgaattggaagaaacaattgaacgacttattgtggagtgtgaaaggaagattcagagagcccttaagcgcttggaggaggacgatgctaaggcagccattgctatatctgtcactgaggttacacagactaaagaggtaatggagttatccaaacaaattaggcagaagatgaaggattattcgattgtctttttgtattcttttgttagggtttaacttacttagttaggtt

SEQ ID NO: 62361 - DNA, 388 bp, Setaria italica
  Peptide Sequence Number=SeqID_128335
ttaaactaaaagaaacgaaactaaagaaataagaacgaacggaaacaacaaagaaatagaataaatagaagaaactagaaaaaggacagaagaactaggtgagagtggaatgattgatgaagctcaaaaattgttggatgaggcagaagcgctgaagaagctgagtgcccggccacagtctgttccagactcttcaaaaatgacagctcatgtccagattgtaagtttggtgtgaactttccttgctaaaaaagtcatttctattttagttctgttctgaatccatataaactctggagggtgtggtgtgagaactgagaagagggagggggtccttggtatggacactttttcttctcctactaatataatgatgcacagctctcct

SEQ ID NO: 62362 - DNA, 425 bp, Setaria italica
  Peptide Sequence Number=SeqID_128336
acacgcaccatgaactgcgagcgagacattcgtttgagcttctggcacggctctgccccaactccactggagcggatataaggagcgtttgcacagaggccgggatgtacgccattcgtgcccgcaggaaaacagtgacagagaaagatttccttgatgccgtgaacaaggtgatcaagggttaccagaagtttagtgccacaccaaagtatatggtgtataactaatccgactgccattgcacatgaagcctgttgtttttagagctttgaaatttgggtgcggccctcaaggtcaggtagtccgaattctacctttctgtccagacgaccaggacgcagaagtgcagggtccaaggtatcaggcctgttagttgccatgagaaccttgatgtttcctctggcatcaaacccatcaagttgatt

SEQ ID NO: 62363 - DNA, 281 bp, Setaria italica
  Peptide Sequence Number=SeqID_128337
gttttcctgcgggcacgaatggcgtacatcccggcctctgtgcaaacgctccttatatccgctccagtggagttggggcagagccgtgccagaagctcaaaacgaatgtctcgctcgcagttcatggtgcgtgtatggatcttgaaaatttgggtgcggccctcaaggtcaggtagtccgaattctacctttctgtccagacgaccaggacgcagaagtgcagggtccaaggttctcatggcaacttaactaggtccttgtattacctttggtacccttgt

SEQ ID NO: 62364 - DNA, 237 bp, Setaria italica
  Peptide Sequence Number=SeqID_128338
gtcgccacctaccccatcatcaaaacgagcgccaccaatagcatcaacttcatcaaagaagacaatgcatgctttctttgagcgggccatctgaaacagttccctaaccatccgagcaccttctctgacatacaacgacgttggtggatgcaaggaacagatcgaaaagatgcgtgaagttgttgaacttcctatgcttcacccatcttttcgatctgttccgagcaccttctccga

SEQ ID NO: 62365 - DNA, 216 bp, Setaria italica
  Peptide Sequence Number=SeqID_128339
ggaaatagcagtctgatgcagtaattcctggcagcaaactaatggtataccaagttgttgtgctgaagaagcgggctgaacattggaggccctgcacttaaatcggccagtgatgagtatctccataggccatggtacactgatgaagcattcatgttttctacaaatgctgctcagaccgtttccaatgcttcaagcataatgtatgtctcaagc

SEQ ID NO: 62366 - DNA, 503 bp, Setaria italica
  Peptide Sequence Number=SeqID_128340
aatttggacagcatttcgcatcactccgcattaactttcttctagagaacaattacttcgcattaattgctagcgtgtcagtaccccctctgaagtcctttggagtatgcaattcaggcctcaaacttctgtaattgttccctgaattgtctgattggtcaggaaaaagaaaaacttgacctgttagtagttggatgttattatgttactctgttcgccaatcgacttgttaattcggagctcaattaaatgctgatcgctgttgatggtggcaggttcacgctcgcctgacggacgaggagaagatgaagatctgcagggggctgagctacgagaagctgtcaccggagtgctgcaagcacctggcccggaacggcgggttcccgacgagggcggcggtgcaggcgctggcgtcacagcacacggtgctcaagagcctcgtcctccgcgacccggcccagctgaagccggtgtcgccgtccccttcccccgttcctacgggt

SEQ ID NO: 62367 - DNA, 410 bp, Setaria italica
  Peptide Sequence Number=SeqID_128341
tggttagtactaaaactaattaaattgttgttccttggtatttgtacgttcaccttggcggttgtcttggatgatgaagtcgaggaggaaacaccagtggctataatggctgaaggcaaacaacacgcactggcaattggatttacaaagatgtcagcgaaggacataaggaccatcaacaaagggattggagttgataatatgcactatctaaatgatggcctatggaagatggaaaagctcgaataagaagaatacagtgagggatgctgaacttacagtatggtcatattgcaatgtaaggaccagtagaactatgtatctacacagctggtatcgtttgaacaaatgaagtatccagaagctacattttccggatagaagttgagtttactccgcccttttgtgtt

SEQ ID NO: 62368 - DNA, 221 bp, Setaria italica
  Peptide Sequence Number=SeqID_128342
cttcatccgacgccgaacaagggggaggagaagagaagcccgtgcgccatgttcaagaagttttcttcagaagatatatccggacagaatcaagttaaagcctctgtacagcgaaggattcggcaaagtatcgctgatgagccaaaaccatctgaatcttgtggtggtgaataatgtcccgctatttttcaacatccgtgatggtccttacacgtcacgac

SEQ ID NO: 62369 - DNA, 159 bp, Setaria italica
  Peptide Sequence Number=SeqID_128343
tttctgctggcaatactgctcctgattatttttgcagaaggaccatcaacaaagggattggagttgataatatgcactatctaaatgatggcctatggaagatggaaaagctcgaataagaagaatacagtgagggatgctgaacttacagtatggtca

SEQ ID NO: 62370 - DNA, 341 bp, Setaria italica
  Peptide Sequence Number=SeqID_128344
aagaagtactaattagaactgaggagatcactttccagtctggcagtccataattggtcttttgattcttgacagcggacaaatgttctatgtagaattgatctgcttgtccctgttttttaccaccatgaatgagtttgtaaacccttgaaaggtccaacagaaacacatgcgcaccccctaaccaagtccatccatggagcttctggactctactttttttttgttctgtccaatttcaacagctctgagatgtaagttctgattcccatgcaaaacgtttgcaggataaacgatgctccagagatcatgaagcagatgccgccgctacctgtgaagat

SEQ ID NO: 62371 - DNA, 264 bp, Setaria italica
  Peptide Sequence Number=SeqID_128345
tttaagatgtttttttactttatgcatttttaaattttgatggaagttctagctgcttgaatcttgagtgactaggcgctgacttgttagattattcaccttttttgcctttctgcagccattggtggaccaacaggagaaatccttgaaaccaatgcccaagttttgggtcaaatctcgataaatcttagcaatatgcaggtatccttttacttcaagatacaggataacatctcactgctgtgccaaactcgggataatata

SEQ ID NO: 62372 - DNA, 237 bp, Setaria italica
  Peptide Sequence Number=SeqID_128346
ttcttcccatggacgatgacgagatctcgtccaaagccattggtggaccaacaggagaaatccttgaaaccaatgcccaagttttgggtcaaatctcgataaatcttagcaatatgcaggtatccttttacttcaagatacaggataacatctcactgctgtgccaaactcgggataatatactcagggtcttgaaagagataaacgatgctccagagatcatgaagcagatgccgc

SEQ ID NO: 62373 - DNA, 346 bp, Setaria italica
  Peptide Sequence Number=SeqID_128347
agcaggagtcggcagagtcggtcgtggacgacgaactcgacgggtgcgtctgctcgaggacgacgccgtggagcacctcgcggcggaggcggagcttgaggcggaggcgcttggagtggggctcggagaagacgaactcggcgccggagagggagacgcggagccgggccagcggtcggttgatgcggcgcagcaggatctgcatcagctcgggccaacatgtgcgcgcgctgcctccgcgggcgcatcgacatcaccgagggcgtcccgcgccacgccgccgtggtctactgccccgactgctgctcctacctccagccgccgcgctccttggtcttgtcgtcgt

SEQ ID NO: 62374 - DNA, 152 bp, Setaria italica
  Peptide Sequence Number=SeqID_128348
gagcgatgcctgctacagcttcatccccttcatcctcctcatcatcgccaagggtaaggtggaatgatcaatattgctactttgtttcttcattgctcactgggaaggcttggcgctcactgcaggcatatgcatatgacctgcagtgagcg

SEQ ID NO: 62375 - DNA, 302 bp, Setaria italica
  Peptide Sequence Number=SeqID_128349
actaggtagaatacaatagacccttagggtaatagaatactactaatggacgcgaacctgaatgatgatgacatggacacggctatgacacggtacagcttaccggaggtggttcttgtcaagaagagctatgagaagaggccacgcacacggagatggaagctgaagaggttgccagtggaggaagatgctgcgaacaaggccaagggcgaggaagagaagaggctagatgagtatgagtctttcctcaaggatttggagcaggacccagagttaaggtttacgataaatctgtacaagaa

SEQ ID NO: 62376 - DNA, 336 bp, Setaria italica
  Peptide Sequence Number=SeqID_128350
attgacctcatatctatgacgatgccgctcatctacatgtggaggactcccatacagttttgatgtaagacaatcaggtttgcggaagaatgttctcctgcagcccaacctcatcgtgtttcccatatgtgtttttgaaacctcaggcatgtacataacaacatggtttggtgtatccttgttgaactcttcactgtctgcatctcccaggcccaagacatgtctggacatctcaatcactgatatctgcatgcccaagcaaataccaagatatggaactttatttcttctacgggtctattatttttgtctagtcctaattattctattccttgt

SEQ ID NO: 62377 - DNA, 239 bp, Setaria italica
  Peptide Sequence Number=SeqID_128351
cccaaaaaaaaataggatcactgattcatcatgtgctattactgtagttgtccctatcttactgaacacatgattagtgacttacatttattgcagttgcatcttcaagatctgaagctgcaatccactggatagatggctttaatgaacaggcaacactggcatgtaggagagccttcaccactgatagataagaatctgtcaagttagtatacttcccaaccaaagcaatttttaac

SEQ ID NO: 62378 - DNA, 465 bp, Setaria italica
  Peptide Sequence Number=SeqID_128352
ttaggtaaactaaattaacttaactaacctaaagtaaaataaaccaatgaaacttacttgtttattccatcttgagcccaagtgtggtgtagcagacgtaataaaattgattggttctaaaccagctattttaccagcaccaggtgtttcttgttcatcagagagcttatcagtatcaagagaagaggtttcattcgtggcaggttcataagagagcttatcagtatcaagagaagaggtttcattcgtggcaggttcataaagttttccgattgcatatcttgttactaaaccgccaagcgaatgagcaacaaaagatatcttcttcaagtttcttcttctctgaacaacttgtcgaacctcctcagctagcctttcgcccatcaaatcaactccatcatatgttaattttgaatgattgctctgactacgatgcacaaagactttcctggcaacctcttcacg

SEQ ID NO: 62379 - DNA, 241 bp, Setaria italica
  Peptide Sequence Number=SeqID_128353
gtcaacattaataacatgaggatacttttcatcctttgctgttaacttaagttttggttaattcatgctgacgccgaattgacgatgttctccaaccaactatatgatcatatgttacattagcataggcaacacgacgcttaaaagagcgcaaagcagacctgcatcaggtaaaaagcgtaataaggatgtttgaaggcagcatatgaagtatagatatcaataccacttggtgcagtta

SEQ ID NO: 62380 - DNA, 203 bp, Setaria italica
  Peptide Sequence Number=SeqID_128354
tcatcacagtcttcaaccatacggaccagaagtggaggcttcccatcatccctgtctgtaaggaataaatgtgtacctgttctcccaactataaaatgtgcagttcctgcagcagttctctccaaaactgggacaccgaaaagaaagggaagctgtttgtccatgtcgatagaaggactaagagttataaagttcagaaataa

SEQ ID NO: 62381 - DNA, 181 bp, Setaria italica
  Peptide Sequence Number=SeqID_128355
gcagcagttctctccaaaactgggacaccgaaaagaaagggaagttgtttattccatcttgagcccaagtgtggtgtagcagacgtaataaaattgattggttctaaaccagctattttaccagcaccaggttgtttcttgttcatcagagagcttatcagtatcaagagaagtaggtttc

SEQ ID NO: 62382 - DNA, 241 bp, Setaria italica
  Peptide Sequence Number=SeqID_128356
gcctcctcaacgttttgtgcggttttcgcagatgcctccatgaagatcaggccatgttcttttgcaaactgctcgccttcctcgtagctcactgcacgcctggtgatatcatagaccaaaagagcaccagcggcccctctgtagtacgatctagttatagatctgaatgactcttggcctgccgtgtcccaaatctggagcttgatgggcttgttgtcgatggtgatcatccgggaccccg

SEQ ID NO: 62383 - DNA, 339 bp, Setaria italica
  Peptide Sequence Number=SeqID_128357
accaataggaaccaagacaaggctaactgtgtatgctgcttaagaacgtgaagtttgcacctgaaggcttcaggtcatatgtgttagctgcagccaatgctgcaataagttgtgcataggttgtccccacacgaggatgtgctccagtgataactgcgtatctggcacgtgatgctagaaagaaatcaaacaatggctgcccaccttggagctggcccccagtctcttaaacgaaaatccagaggaggctgagttaacttcacatgtaagtggaagaatggcataatgggatcagaaaacatatgccatgaagatatcagagtgaaaataagcatagca

SEQ ID NO: 62384 - DNA, 365 bp, Setaria italica
  Peptide Sequence Number=SeqID_128358
caagctcgccaagaactggagcagagctgcatcagtgtacatcaagattgctaactgtcatttaaagggagatagcaagcatgaggctgcctcggcatacgttgaggctgcaaattgctacaaaaagttctcacctcaggaagctgcacaggcactaaatcaggctgttaatctttttcttggaaattggtagattgaacatggccgcaagatacagcaaggacattggtgagatatatcagcaagaacaagatttagagaaggctacagattacctggaaagagcggctgacctttttgacagtgagggacagtcatctcaagcaatttctgctactttctgcttgatggtgtttgcttgagat

SEQ ID NO: 62385 - DNA, 413 bp, Setaria italica
  misc_feature (344)..(344): n is a, c, g, or t
  misc_feature (382)..(382): n is a, c, g, or t
  Peptide Sequence Number=SeqID_128359
ttctagttggtaacaagttaaccctaaaagctaacttgtagtattttttgtaagggtatttgtcttcgtcctagttctaattctaactaattaattctttcttaaatatagtgtcagaggcattctccttaacgctggcatttgccaactatgtagaggtgatcctgttgctatcacaaattcattggagcgataccaggaaattgacccgactttctctgggacacgtgaatacaagcttttagctgatcttgctgcatcgatggatgaaggagatattgccaaattcactgatgccatcaaagaatttgatagcatgacacgtttggatccttggaaaaccncctgctcctcagggcaaagacgagttgaagaaaaaggnggacgatgaggacgacctaacttaagcatta

SEQ ID NO: 62386 - DNA, 254 bp, Setaria italica
  Peptide Sequence Number=SeqID_128360
tgcccggcgacgactgccgctacgccgtcttcgacttcgacttcgtcaccgtcgacaactgccagaagagcaagatcttcttcatcgcctggtcaccgacggcgtcgaggatcagggccaagatcctgtacgcgacgtcgaagcaaggcctgcggcggctgctggacggggtccactacgaggtgcaggccaccgacccctccgagatgggcttcgacgtcatcagaggccgcgcgacaaatagaaggactaga

SEQ ID NO: 62387 - DNA, 330 bp, Setaria italica
  Peptide Sequence Number=SeqID_128361
tcaactcagcctccagttgctgaaaagaaagtaacagatctcattacgtcttcttccaggaagcagaagcctgttggcgttacttccaagaaacatctaaaggaggaaggaagctcttagctgcatgtgacagcgctgatactgaaaatgatgcacctcaagtggcccctagtattcccgctgatcagcagcactctgattggtcggttggttgtcttagttatttgtttattttcgttttccgttttaacttttaattaccattttctcccctacataccatcatcacaaggatggtggtctgaataacctctcaaaagccggctcata

SEQ ID NO: 62388 - DNA, 308 bp, Setaria italica
  Peptide Sequence Number=SeqID_128362
aactcgcaaacaagagcttcatatagattacacagatttttccccaggaaggtacgatggagaactgctgccagcgtggcccttcttcttgtggaacatgctcgtgatgtttggcagcataaagctcttccttagtagcgtcctgctgtttctttgatggccctcattcttctcagaagctttcccgccagaagcctgcggcacaggcggagatgtacctgcatgttctcctgttggaaggtcttgtagtccttccgtctagtttttctttcttgtctcctttcttcgtcgtcctattcttcttttaa

SEQ ID NO: 62389 - DNA, 250 bp, Setaria italica
  Peptide Sequence Number=SeqID_128363
aaatgttctatctttctaacaaatcaattgcctaatctgattgcccgacatttgaaagcagcaaaggacgccgtagaacagaggagagaggacataggagaagaaaagttgcttgcttgttgctccggcttctgggacatggatcaaaactaccggacttcgtctttctcagaaagtcaaccgccaggtcgctgctggtagtctccgccgccgccgccgccagccgcagccgcagccgcagccgcagccg

SEQ ID NO: 62390 - DNA, 218 bp, Setaria italica
  Peptide Sequence Number=SeqID_128364
ctgggtgaaacgttgcctagggatggcctgagaactcgttcgatattttccagaggctacaaacgctatatagccggctatatcctcagatagttgttgctccggcttctgggacatggatcaaaactaccggacttcgtctttctcagaaagtcaaccgccaggtcgctgctggtagtctccgccgccgccgccgccagccgcagccgcagccgcag

SEQ ID NO: 62391 - DNA, 145 bp, Setaria italica
  Peptide Sequence Number=SeqID_128365
ctccgcatccagtatggatattgccttttctgaggcagttgctagatatttaccttgctgaaacctaaatctacactagaagagcactcattactaattacagatgttcgctttagccctggcatgacccgccttgcaacatctt

SEQ ID NO: 62392 - DNA, 330 bp, Setaria italica
  misc_feature (93)..(93): n is a, c, g, or t
  Peptide Sequence Number=SeqID_128366
actaaataattaactacctaacaagtaacataataatagtctaatactaatttaattagttgtaactgtaataattagtattgttatttatgntgattgtaggaaagtgcttgaggtcggtgttgtgacatggtctttggccactgctacaattcctgttgtagcagggttcatgccaggacttgtgttgtcaaggattctggtaggcattggagaaggtgtctctccatcagctgctacagatttaattgctaggtacattcccttgcaagaacgatcaagagcagttgctgttgtttttggtggtttaagcttcggaagtgtcttagg

SEQ ID NO: 62393 - DNA, 249 bp, Setaria italica
  Peptide Sequence Number=SeqID_128367
gtcctcattcttttggggtttacggcgttgagtcaactaccgggaggatggctggcaaaattagtttggcggaaggaaagtgcttgaggtcggtgttgtgacatggtctttggccactgctacaattcctgttgtagcagggttcatgccaggacttgtgttgtcaaggattctggtaggcattggagaaggtgtctctccatcagctgctacagatttaattgctaggtacattcccttgcaagaacg

SEQ ID NO: 62394 - DNA, 252 bp, Setaria italica
  Peptide Sequence Number=SeqID_128368
taggatgggacatgcaggagttatcaaaattttcactaagaaacagaacaacactctgcaatcagtaacacatgacagaaaaaagtagctaccggttatgacaacatcagtcaagttgtatccatttattaagcttcgatgtctaggaccaggaagatctagcccttggccataagatggcaaaggttccacaatcggccactgcgacgagtcctttgagccgatgatgacggcgcctttctccaggtaaag

SEQ ID NO: 62395 - DNA, 197 bp, Setaria italica
  Peptide Sequence Number=SeqID_128369
gaaaacagatttctttagaattagggaattaaatgctaccagcaagaatgacttcaaatatctatgctatctgaacaaaaaacgacaaaacaatgcaccaagactagggaaaaaaattcacacctggaactatgccatcagtcaatggagcatccagtgcagtcttaatcgtcacattgtgaacctttacattactg

SEQ ID NO: 62396 - DNA, 408 bp, Setaria italica
  Peptide Sequence Number=SeqID_128370
aacaagggttgacattatgtacaaggaggcaggcaactatctttttttttttcctattcttttcattgcagctcatgtgagatgactctgcagtcaactcgttatacctcaaccccgatcctctctgcaacctgcaatacaatcataaacaagcacccaggtatgagcaaacgcaagaatctgaaaaattgatgcggatatagaacagcaggggaaccctgggccaagttgccctttaggaacccagcgcaagttaaattgttcctaaatcttgatgatgtagaacaaaaacatagtgctgccggatcttgaattactgtataataaactaagctctgtgtcttatgctacctaattgttagattctgtgcttggagttctcaagaagtgttgagcagaagagaaatt

SEQ ID NO: 62397 - DNA, 402 bp, Setaria italica
  Peptide Sequence Number=SeqID_128371
acaaccaacaagggttgacattatgtacaaggaggcaggcaacatcttttttttttcctattcttttcattgcagctcatgtgagatgactctgcagtcaactcgttatacctcaaccccgatcctctctgcaacctccttgaaggagtaaacatcgctgccccaaagccaggcatcacagcctgcatccctagctccccataaatcgttcctacggtcatccccaatatgcacagcttcttcaggtttcacgcccaacagctcacatgccttcaagaatattgttgggtttggcttttctgctgcaacctcagcagatatggcaaactagacaatacaaaaccaagtagaatacgacaatttacaagggacttagacaaaaagtaggaccgaaagaacgaa

SEQ ID NO: 62398 - DNA, 353 bp, Setaria italica
  Peptide Sequence Number=SeqID_128372
agctcacatgccttcaagaatattgttggtttggcttttctgctgcaacctcagcagatatggcaactgcatcaaaccagtgatcgcatttcagggcttgcaaaagtggccgaagacgagtgtcaaagttggacacaacagctgtttttacaccagcccttctcaatgcctggaaaacgcgtcctgcatctggatcacagagatgccaagccttttcagtcgtatagtactgatacagttcctcaaagtactgcagatctgagcagcctgtagaggaactgactatgtattgccaaaaagggtcttaccaatacaattagaacaataacctagaaggacgacgaatttaacca

SEQ ID NO: 62399 - DNA, 180 bp, Setaria italica
  Peptide Sequence Number=SeqID_128373
ccttgaaggagtaaacatcgctgccccaaagccaggcatcacagcctgcatccctagctccccataaatcgttcctacggtcatccccaatatgcacagcttcttcaggtttcacgtcccaacagtcttctactattgtcctttctaagtaattatttgtttgggttttggcttttcttg

SEQ ID NO: 62400 - DNA, 240 bp, Setaria italica
  Peptide Sequence Number=SeqID_128374
attgagatagatggttggcaataagcacttacatacagttccacatacaggattatctgcaacagggaagccacaaacaagaaaaaactcaagttagcacaaaggtattcctcaactacacatcatattgaaaatgcgcagaaactgaatcacagccattgtttataatctgaatgatattataccgagatggctatacgaccggtggtgccaaaggcggcatggccaatatctgggtat

SEQ ID NO: 62401 - DNA, 234 bp, Setaria italica
  Peptide Sequence Number=SeqID_128375
aattcctgggaggttcagtacagtccctttgttctcaaaaccgacgtcatcaacaaccccaacccagagcaggcagatgaccacaaggattgatgcaatgacacctccagctacagacataacaatgttgcgagcatcaatataatggctagtacatgcataggttacagtatctattgcggccaaacagaatgagaagcaggcaaaagaagacctgaaatatagctcagacag

SEQ ID NO: 62402 - DNA, 241 bp, Setaria italica
  misc_feature (83)..(83): n is a, c, g, or t
  Peptide Sequence Number=SeqID_128376
caatatagtattgctgggcagctggatcactaggataactgcattatgtgtagttctggattattctggacagggatgagtangtccccacacaagcgcagcaaaccccgacaacgatgatgaacgagcaagctgctatctgtaatcaaagtgatccgatcagtagggtgcatgattctctgaacccatttcagtgcaatcatattcggatattccaacgaccctgtcttcttctcaaacc

SEQ ID NO: 62403 - DNA, 232 bp, Setaria italica
  Peptide Sequence Number=SeqID_128377
cctatcccctgtgtgccttgcctatcctctgttgcgtgtctcagtgtttgagtacttctgttgatttggcggcagcaactcctccaaactcatagacagtgggattatggttaatgcatatttggttattggatttgccaccgtggtccaaactgcaacctttgaaactactaaattctctggtaagttgagtgtgaactgagactttgtggcttcaccaaacattttgtat

SEQ ID NO: 62404 - DNA, 242 bp, Setaria italica
  Peptide Sequence Number=SeqID_128378
atacggtgggtgactggaataactgcaacatgtacactgatcaggtgtaactctggattatcctggacagggacgagtatgtccccacacacgcgcagcaaaccccgaccgccatgatgaatgagcaagctgcgacctgtcaatcaaaacagatccgatgattatacatatacctaataactgaggggcctggattacagttctacccctgtttcaaagcaaatcatattcatgtcttcttt

SEQ ID NO: 62405 - DNA, 234 bp, Setaria italica
  Peptide Sequence Number=SeqID_128379
aaatctgtggcacacaatagtcaaacaaaatgcaaagcaacatgcaaatggatacctgaaaggtagctcaggcagctaaggtcacggagccaagtggtgggcatgacaatgatggtagtcaagattgcgaaaaatacatgggagttcaatgtcaagctcccaatggttaggtgtgcattggggaataattttgataaattgtcgctctccagtatcagatactcgatgcaacag

SEQ ID NO: 62406 - DNA, 449 bp, Setaria italica
  Peptide Sequence Number=SeqID_128380
gccccctccccttcaccttgtcagagaaaccctgaggtatcttggaagtctccgaggccctgacaacccacaggaaatccttgccactgttgtagagcccctccgccacctcggccatttggcctgcaccgggcgcggcgaggctgccgaaggagacgtacacgacggagtggtcaggcctcgcgtcgagccaggccttgctttcctccgtcatcggagtgtagaggtggaacccgtgcgacacgtcgtcggggaggcggttgtcgaggtacgccgacggcacggttggtccgaccgtctcgatctccaggtcatagaacgagttgacgaggacgtggtctgccacctcgtacccctggcactgctgcagcaccaggtcaaggtaggcgcggcagccgccgtccggctccgtgaggaacgtcgggaaatcggccggctacgaagtacca

SEQ ID NO: 62407 - DNA, 354 bp, Setaria italica
  Peptide Sequence Number=SeqID_128381
tttgtttaagttcttttggttagtcctttgggtaattctaggtccgaggattttgaacatcgccttgtccgcatcaaagtcgttgtttgcggttgtgaggagcttctcgccggcgaagatggagttggccccagcaaggaagcagagcgcttgctctggcatggagaaccttacgcggcctgctgagagcctcaccattgcctttggcatcacgatccgagcagtggcgaccatgcggatcatttcccagatctctacaggcttctgatcctcaagaggcgtgcctttacagcaaccaatgcattaataggaacgctctctgggtgtgtaggcaaggtggccagtgtgtgcaac

SEQ ID NO: 62408 - DNA, 316 bp, Setaria italica
  misc_feature (1)..(49): n is a, c, g, or t
  Peptide Sequence Number=SeqID_128382
nnnnnnnnnnnnnnnnnnnnnnnnnnnnnnnnnnnnnnnnnnnnnnnnnatttggcatccccatttatttttgaattctgatcagtctcaactctcaagcgtctagacaatgtagtggtttctacaatataatgctctagctacaacagcagtgctagttttgcactaactgagatacataaaatctgtaatgatgttttacatagaagcggcttgctcgggcctctcagtgtcggaatcaggagccgccgcctcttcgtcgctgaagcttggagccttgggaatcaggccgaggattttgaacatcgccttgtcc

SEQ ID NO: 62409 - DNA, 474 bp, Setaria italica
  Peptide Sequence Number=SeqID_128383
atacacttgctacatggctcgatgactttcaggttcacagctgggggcactctcccctcgatgtatctctgaatggcaacgcgggccctttttagcctccacaagtgcctccttacccagctgcaggcacttatcaaacttgacaagcctcctatcgtacccacgggtagtgtctagtgtaaggcacgccagtgcctttgttttctcgataatacagatcgtgagctcaatcatgctcttcgcagagcaaaagccggttatcatcacattcttgaggttgtcatggcactgttcttgaaggcactgtggacgtgagtagccatttgagtcttcaataactgaatctcgccttattgtcggctgcgcaatctgcataggtatacatgatatgtcagagtgtatattcaataataatcataaagtttcaattatactgaatatactgattttcaaccctaaatatgaagtttttaa

SEQ ID NO: 62410 - DNA, 260 bp, Setaria italica
  Peptide Sequence Number=SeqID_128384
ttcggtcgtcttctagtctacctaggttgtcttgtagggttctattcttgttattcgatgcgtcgaggacacccttgggccttggcgtaccaaacttcactagaattttctcattgataattaacgtgctgcctcctttattcccttaataaattgagccatggacttgatcatacttgctgtgcagcttccccgacaaacggaaacgctgtacgctgcgccattcttgcctgtcctggcaagcactgcacgcctgcacg

SEQ ID NO: 62411 - DNA, 167 bp, Setaria italica
  Peptide Sequence Number=SeqID_128385
ggtttttgttgacaagataaccggtgcatagttcgtgcctttgatttgtataatgaatcttttgtagcttgctttctttcttctgatgatctttgggatttcaggaatgacttcatcaggaaatgtgccacagatcgaccatcacattaagaccgttaattaggtaa

SEQ ID NO: 62412 - DNA, 434 bp, Setaria italica
  Peptide Sequence Number=SeqID_128386
gtttccctactacggtctagtgaaagcattactgtctttgcttgtgactgtagtaaagacactctcgagaaggcaaatgagattatatccaatacaaaagggattgatatcaaggataggttccagccctttctaatggatgtttctaaagaaacttttccagattggctatgctgcattgcctgtaaaagttcacatgatgcaagtcatcataaaatgagaaaagagcacccaggcttcctgagagagaatcaatgttgtgtcggcggcatggatttttatcaccatgatattcacattatcagccatacccttcgccataatgccaagtactatagagcaatgtgtttctgttctgaaaccaggtggcctccttctgtttaggattatggtctttatgacatgacaatgcttcggttcttacctcatcaaag

SEQ ID NO: 62413 - DNA, 267 bp, Setaria italica
  Peptide Sequence Number=SeqID_128387
agcagaaggtgcctccctctctctcatcccgatcaattctatcgtccgtttcttttatggaaaaggaaggatttttttctacggttcttttggttcacctccctggttgcttgtttcaggtgatcgggatcgcggcggcgccggccgtggcggaggcaggtaggccgtgctgcgtcgagtgccgcactaccgcgacgcccatgtggcgcggcgggccgacggggcccagggtgagcgctactactctctctatctcccttccgactg

SEQ ID NO: 62414 - DNA, 208 bp, Setaria italica
  Peptide Sequence Number=SeqID_128388
cctatcccctgtgtgccttgcctatccactgttgcgtgtctcaggatgagaagatcaagaagctcgatgccgagctcgcgcgctacaaggaccagatcaagaagacgcgcccgggtcccgcgcaggaggccgtcaaggcacgcgccatgagagtcctcaagcagcgcaggatgtacgaaggacagcgtgatatgctgtacaaccaaac

SEQ ID NO: 62415 - DNA, 371 bp, Setaria italica
  misc_feature (23)..(23): n is a, c, g, or t
  Peptide Sequence Number=SeqID_128389
caattatttcttagttaccaaangttgacagatacagagggatgctctctatttaaggcagcatcagttaacatgacccgagcggaaagtgaatacacgcattattcctctttttttatcttctgcagcagcaccgtggggttcaaccaggggttttgattcactcgcaccctgcaaagacagagtgaacaataagcaattcagagctaaaccaagcagataatagatggcgactgattaaggttctcaagtcccttcagcagaatgatacgtgcaactcaaggataatacccatgggtctagtagtgatgtaacaagtaaattgtttgcctttgacgagaagcaataaatagcgaggtgtctgcgatagt

SEQ ID NO: 62416 - DNA, 240 bp, Setaria italica
  Peptide Sequence Number=SeqID_128390
gtctgcgatagtttgttaattccttgaataatctggaggccaaaattagcagttgcgaaccagcatgcattttgcaacagctaatggtcagaagagtagcatgagcatgtagccttacttcatcgttcttctgagcagcaggtttgtaaggacaggcaggtggggctctctcaggtctcctgtattcccatccaaatagccgatacacctttctgaggatgagatcgaagagggtagggg

SEQ ID NO: 62417 - DNA, 129 bp, Setaria italica
  Peptide Sequence Number=SeqID_128391
acctgctgctcagaagaacgatgaaggtgcgagtgaatcaaaacccctggtttgtaaggacaggcaggtggggctctctcaggtctcctgtattcccatccaaatagccgatacacctttctgaggatg

SEQ ID NO: 62418 - DNA, 338 bp, Setaria italica
  Peptide Sequence Number=SeqID_128392
caagaaggccgccaaggggaacaagcccggcaaggggggcaacaggttctggaagagcattggccttggtttcaagactcccagggaggccattgaaggtttgccctatatcttgtccaacagatactagcttagatgtattatctatcttgccattttggagcttatcagcgtgatacaactatatttactcatggtgctcgttcattgcttcctaatgttgctgattttatttgaatggtaaggaactagcatatagtctacaactgaatcagactctgaaaatttgtctgttacaaatgtgccctatatcgagctcacaattacttggtatgtgg

SEQ ID NO: 62419 - DNA, 290 bp, Setaria italica
  Peptide Sequence Number=SeqID_128393
tcttaattgtaatttggttctttagttttaattgtcttctaattgttaattcctattagtttgacatgaaatatctatcatggctcttttggcactttggcgtaatctgtaagttgcattgttctaatttcaggccactatcaaagaccgtgaggttcaatgtgctcaaagtgatcccggcaggttcaaagagtggagcagtgaagaaggctttcactgccgcttaagacatgatgagtaaaccgtcgagggcccggaaaagctaggcagcatcaaaatgttatgacaag

SEQ ID NO: 62420 - DNA, 457 bp, Setaria italica
  Peptide Sequence Number=SeqID_128394
gcatctgtgtctaagtagctgagactgccaccattttcatactatactactatagtaatgaagcgatattagttttgtttccagaaagttctggtacccttttagattgttttaggtgcttggctttagatttactctgttgaaccaattttcatttacttgtcctttatatgcttcttggtgcaggaacctacattgataagaaatgcccattcactggcactgtgtctatcaggggtcgcatcattgctggaacatgccatagtgctaagatgaacaggaccatcattgttcgtaggaattatcttcactttgtcaagaagtaccagaggtatgagaagagacactccaacatccctgcgcacatttcaccatgcttccgtgtgaaggaaggggatcatgtcatcattggccagtgcaggccactatcaaagaacatacgtcactgagtcggaga

SEQ ID NO: 62421 - DNA, 373 bp, Setaria italica
  misc_feature (317)..(317): n is a, c, g, or t
  misc_feature (350)..(350): n is a, c, g, or t
  Peptide Sequence Number=SeqID_128395
taggttaacttacctttctacttttgttctaagtaaattacctagtaggttattgagaagaggcactctaacatccctgcccacatctccccctgcttccgtgtgaaggaaggagaccacgtgatcattggccagtgcaggccactgtccaagaccgtgaggttcaatgtgctgaaggtgatccctgccgggtcaaagagtggtgctgtgaagaaggcattcactgctgcctgaggaatacatcaaagattctgaaagctatgagattttgatgtcccattctgtattgcaattccatctgtcctaggatttttacngagaaaatatcgtctgaagttaaagtcaaaagngcgctgaagttaagacaaaaaaa

SEQ ID NO: 62422 - DNA, 262 bp, Setaria italica
  Peptide Sequence Number=SeqID_128396
ataaaattggaacgatacagagaagattagcatggcccctgcgcaaggatgacacgcacaaatcgagaaatggtccaaatttttctcgggcatttcttcgtctccacagctcccgccgccgccgccgccgccgcttgaggtcagcgcgttcctctacaccgggcatcggcgcctcctccttcgcgcggcgaccatggcggagcagacggagaaggctttcttgaagcagcccaagggtgtttctctgttccaagaaggcccg

SEQ ID NO: 62423 - DNA, 467 bp, Setaria italica
  Peptide Sequence Number=SeqID_128397
atcttgtggagtggcaaatacgtgttgcaaatggagaacgcctaccactatctcaggagcaggtcccattaaatggacatgcatttgaagctaggatatatgctgaaaatgttccaagaggatttcttcctgcaacaggaaccttacatcactacagaccagtcccttctgcctcaacagtaagagttgaaactggagttgaagaaggagatactgtcagcatccattatgatcccatgatagccaagcttgtagtatggggtgaaagccgcagtgctgccctagtcaagctgaagaaatgtctgtcgaactttcagattgcaggcttgccaaccaatgttggtttcctccaagaacttgcaagccatagttcctttgaagaaggcatagtcgacacacacttcattgagcgttacaaagatgatctttgagtacttctacaaaggcctcaactagtgcgactgagt

SEQ ID NO: 62424 - DNA, 217 bp, Setaria italica
  Peptide Sequence Number=SeqID_128398
cttggttccttctgttatctgttcgagcgcaggagcaatcgaccggcagcttcgcacggacgcggggcaggccagctcatcgggccaggccagcagcagcgagcccagctagtggcagcaggctgcccagcagcagcacgccctgcttgtgcttcgcaggccaggccagcaggccaacagtagcaggcctggcgagcaccgcagctcaacctggtgg

SEQ ID NO: 62425 - DNA, 234 bp, Setaria italica
  Peptide Sequence Number=SeqID_128399
ttaaggacaatactgcgaactgagatgcagcatcccagaagctgtccgactacagcagtatcaaacaattcacggatgatccaggagttgatcgacaacgctggcattcagatagaaagcaaatgaataaacagttggtgccttttcttggttccttctgttatctgttcgagcgcaggagcaatcgaccggcagcttcgcacggacgcggggcaggccagctcatcgggccag

SEQ ID NO: 62426 - DNA, 224 bp, Setaria italica
  Peptide Sequence Number=SeqID_128400
ctggtatcctggaccatggatggcacagctctctcgtagtcttgtggtacaaaaggtgcatcataattcatgttaattccacaatttgttatagagacaagcttgtcgatcaactcctggatcatccgtgaattgtttgatactgctgtagtcggacagcttctgggatgctgcatctcagttcgcagtattgtccttaatagtagaaaaggacactagagtac

SEQ ID NO: 62427 - DNA, 448 bp, Setaria italica
  Peptide Sequence Number=SeqID_128401
atcttgtggagtggcaaatacgtgttgcaaatggagaacgcctaccactatctcaggagcaggtcccattaaatggacatgcatttgaagctaggatatatgctgaaaatgttccaagaggatttcttcctgcaacaggaaccttacatcactacagaccagtcccttctgcctcaacagtaagagttgaaactggagttgaagaaggagatactgtcagcatccattatgatcccatgatagccaagcttgtagtatggggtgaaagccgcagtgctgccctagtcaagctgaagaaatgtctgtcgaactttcagattgcaggcttgccaaccaatgttggttcctccaagaacttgcaagccatagttcctttgaagaaggcatagtcgacacacacttcattgagcgttacaaagatgatctttgagtacttctacaaaggcct

SEQ ID NO: 62428 - DNA, 239 bp, Setaria italica
  Peptide Sequence Number=SeqID_128402
ctctcataaaggtatattgcatttccatgttggtcgccaaatacctggacttctacatgtctgggttgagtaatatacttctcaatcaatagtgtgtttaccccaaatgatgctgcggcttcccgttgagcgctcagtacagagatgattgtcggtcaagatcttgtggagtggcaaatacgtgttgcaaatggagaacgcctaccactatctcaggagcaggtcccattaaatggaca

SEQ ID NO: 62429 - DNA, 232 bp, Setaria italica
  Peptide Sequence Number=SeqID_128403
ttccagcattgtagtaaccaactgcctttgctgcagacacagcagctccaccaatatgagaacgaaactcagctgtaacatttggagctggagcttcctcaataatcttttgatgtcttctttgaagactgcagtctctctcataaaggtatattgcatttccatgttggtcgccaaatacctggacttctacatgtctgggttgagtaatatacttctcaatcaatagtgt

SEQ ID NO: 62430 - DNA, 237 bp, Setaria italica
  Peptide Sequence Number=SeqID_128404
tgttccagcattgtagtaaccaactgcctttgctgcagacacagcagctccaccaatatgagaacgaaactcagctgtaacatttggagctggagcttcctcaataatcttttgatgtcttctttgaagactgcagtctctctcataaaggtatattgcatttccatgttggtcgccaaatacctggacttctacatgtctgggttgagtaatatacttctcaatcaatagtgttcg

SEQ ID NO: 62431 - DNA, 227 bp, Setaria italica
  Peptide Sequence Number=SeqID_128405
aaccaactgcctttgctgcagacacagcagctccaccaatatgagaacgaaactcagctgtaacatttggagctggagcttcctcaaataaatcttttgatgtcttctttgaagactgcagtctctctcataaaggtatattgcatttccatgttggtcgccaaatacctggacttctacatgtctgggttgagtaatatacttctcaatcaatagtgtgtttaccc

SEQ ID NO: 62432 - DNA, 400 bp, Setaria italica
  Peptide Sequence Number=SeqID_128406
atcttgtggagtggcaaatacgtgttgcaaatggagaacgcctaccactatctcaggagcaggtcccattaaatggacatgcatttgaagctaggatatatgctgaaaatgttccaagaggatttcttcctgcaacaggaaccttacatcactacagaccagtcccttctgcctcaacagtaagagttgaaactggagttgaagaaggagatactgtcagcatccattatgatcccatgatagccaagcttgtagtatggggtgaaagccgcagtgctgccctagtcaagctgaagaaatgtctgtcgaactttcagattgcaggcttgccaaccaatgttggtttcctccaagacttgcaagccatagttcctttgaagaaggcatagtcgacacacac

SEQ ID NO: 62433 - DNA, 233 bp, Setaria italica
  Peptide Sequence Number=SeqID_128407
aaagagtgtccacaataaactccactgttccagcattgtagtaaccaactgcctttgctgcagacacagcagctccaccaatatgagaacgaaactcagctgtaacatttggagctggagcttcctcaataatcttttgatgtcttctttgaagactgcagtctctctcataaaggtatattgcatttccatgttggtcgccaaatacctggacttctacatgtctgggttga

SEQ ID NO: 62434 - DNA, 342 bp, Setaria italica
  Peptide Sequence Number=SeqID_128408
cttcaaagaagacatcaaaagattattgaggaagctccagctccaaatgttacagctgagtttcgttctcatattggtggagctgctgtgtctgcagcaaagggtcacttattggattctttgtgttgaaggcagttggttactacaatgctggaacagtggagtttattgtggacactctttctggagaattctacttcatggagatgaatactcgacttcaggttgaacacccagtaacagagatgattgtcggtcaagatcttgtggagtggcaaatacgtgttgcaaatggagaacgcctaccactatctcaggagcaggtcccattaaattggtact

SEQ ID NO: 62435 - DNA, 247 bp, Setaria italica
  Peptide Sequence Number=SeqID_128409
tattggattctttgtgttgaaggcagttggttactacaatgctggaacagtggagtttattgtggacactctttctggagaattctacttcatggagatgaatactcgacttcaggttgaacacccagtaacagagatgattgtcggtcaagatcttgtggagtggcaaatacgtgttgcaaatggagaacgcctaccactatctcaggagcaggtcccattaaatggacatgcatttgaagctagg

SEQ ID NO: 62436 - DNA, 238 bp, Setaria italica
  Peptide Sequence Number=SeqID_128410
ggcgaccaacatggaaatgcaatatacctttatgagagagactgcagtcttcaaagaagacatcaaaagattattgaggaagctccagctccaaatgttacagctgagtttcgttctcatattggtggagctgctgtgtctgcagcaaagggtcacttattggattctttgtgttgaaggcagttggttactacaatgctggaacagtggagtttattgtggacactctttctggaga

SEQ ID NO: 62437 - DNA, 247 bp, Setaria italica
  misc_feature (35)..(35): n is a, c, g, or t
  Peptide Sequence Number=SeqID_128411
ttttaggtcggaccaaccaatggaaatagcaatanacctttatgagagagactgcagtcttcaaagaagacatcaaagattattgaggaagctccagctccaaatgttacagctgagtttcgttctcatattggtggagctgctgtgtctgcagcaaagggtcacttattggattctttgtgttgaaggcagttggttactacaatgctggaacagtggagtttattgtggacactctttctggaga

SEQ ID NO: 62438 - DNA, 251 bp, Setaria italica
  Peptide Sequence Number=SeqID_128412
attcgtgtagaagtaaaaaaaattacttgcgcatttatcattccatatattggtatgaagaaggtagttggcaacttggcagttgatgtgtgtagggtgaaaaaataacttaaactacaataataagctgaaaatatcaaatccatctcgtgaatgatttaatcaaggcctttatactagaaagcaatcacctttgctgcagacacagcagctccaccaatatgagaacgaaactcagctgtaacatttgg

SEQ ID NO: 62439 - DNA, 241 bp, Setaria italica
  Peptide Sequence Number=SeqID_128413
cgttctcatattggtggagctgctgtgtctgcagcaaagggtcacttattggattctttgtgttgaaggcagttggttactacaatgctggaacagtggagtttattgtggacactctttctggagaattctacttcatggagatgaatactcgacttcaggttgaacacccagtaacagagatgattgtcggtcaagatcttgtggagtggcaaatcgtgttgcaaatggagaacgccta

SEQ ID NO: 62440 - DNA, 229 bp, Setaria italica
  Peptide Sequence Number=SeqID_128414
ttactggctgctgcatgatttgcaagaaggatcacattacatctaaagaatcaatacgatgcatcactttgctaggcaaccactagaattggagtttgaagaacatgatggattcagtgagaaactgcttaaactgttcattacgtataagcctgatggaagctacttcatcgagactgaagatggcacttctggtttggatgtcaaagttgatcacaagggtgaccat

SEQ ID NO: 62441 - DNA, 233 bp, Setaria italica
  Peptide Sequence Number=SeqID_128415
ggagctgctgtgtctgcagcaaagggtcacttattggattctttgtgttgaaggcagttggttactacaatgctggaacagtggagtttattgtggacactctttctggagaattctacttcatggagatgaatactcgacttcaggttgaacacccagtaacagagatgattgtcggtcaagatcttgtggagtggcaaatcgtgttgcaaatggagaacgcctaccactat

SEQ ID NO: 62442 - DNA, 233 bp, Setaria italica
  misc_feature (145)..(145): n is a, c, g, or t
  Peptide Sequence Number=SeqID_128416
ctccaaatgttacagctgagtttcgttctcatattggtggagctgctgtgtctgcagcaaagggtcacttattggattctttgtgttgaaggcagttggttactacaatgctggaacagtggagtttattgtggacactctttcnggagaattctacttcatggagatgaatactcgacttcaggttgaacacccagtaacagagatgattgtcggtcaagatcttgtggagt

SEQ ID NO: 62443 - DNA, 192 bp, Setaria italica
  Peptide Sequence Number=SeqID_128417
aagtttgaagcaaatttcagcggaattagcagctaatagagccttagagcatccttgatagaatttatgaaaacaaaatgtcagggcaacagcaaacacagccttacagctggagcttcctcaataatcttttgatgtcttctttgaagactgcagtctctctcataaaggtatattgcatttccatgttgg

SEQ ID NO: 62444 - DNA, 367 bp, Setaria italica
  Peptide Sequence Number=SeqID_128418
gcacccagacttacccatcaaggatggggagactgttgtgaaacatcaccattgcaagtgcctgcttaccaagagagggggccccaagcttacatggacgaagccatgagcgcatccatatttttttgtacctttttgagttcgactcagcaattagcatattggcagaaagaggtttgcagttttttttggaagatgccttgcagcggtagccctgttgttttgccagagattgatgattcaattgactcgtctacctggacttcagaatcagcctgtgcagtactgaaaagcgtgaactccgaccatctaacttcatgtgcagctgaaaactcagcatgtagaatgtggatgatagttctgttct

SEQ ID NO: 62445 - DNA, 391 bp, Setaria italica
  Peptide Sequence Number=SeqID_128419
cgcgtcggcggagtagtcggtgccgtcgagcgcgtgaggccgccggcgaggatgtgcggcccgtcgccggagcggatgatggcgtccacctgcttcatccgcacccctcgtcgaggtggtcgaggtgggtgcagtggaagttgatctccccggcctccggcacctcgatcgtggcgcgcagcacgttcctgcaaccaatcacaccgcgcattgctcagtgatcgatcgagatggctgttgttgctctcggaagctatctgtcaatcaatcactcgaatcgacagggaggaatgatcgcgatcacgtttttgggacaagccatttatgctaggacagcgagggcacgagtcaccatgttgctttcagcagttcgcttgatgattccaagctc

SEQ ID NO: 62446 - DNA, 245 bp, Setaria italica
  Peptide Sequence Number=SeqID_128420
ccaatgtaactgactgaactgaagaagttcagacatttcacaaagcaactgaactgagcttatctgagaattatgtcatctaccttgtcctttggccacaaccacgacagcttcgcattctccggcgaagtccttggcatcgacgtactgcttccccttgaggtacttcatcacctctaccttgggcgtcggcttgccgatctcctcgtagtactgcaaagccgtcagagatgagcacaacatcc

SEQ ID NO: 62447 - DNA, 227 bp, Setaria italica
  Peptide Sequence Number=SeqID_128421
agaaaaaagaaatgcaaaggtctacgacccaaaaaaaagaaattatttagcaccccatatcccttttcttgagctcttcttgttcaccctgagtactctctgtttccggttcacggtttcggtgtcggtttctttgacctgaggtatggttacatcgaccctaacgatgtgatgatccgatgttcctttggaagagatgaccgagtaggatccgggcacgaacttgt

SEQ ID NO: 62448 - DNA, 276 bp, Setaria italica
  Peptide Sequence Number=SeqID_128422
tacttttaaggtagactaggttacggatgtcgcaagaacagagagaccactccatctacacacaactgtgttcattcttcatcagtataaaaaggaagtgatttttgaatcaatcaaaacattcccatacctggacggctggaccatattcctgaagtacttggtccaagactgtctgtcaggccacttttgacaatggcatcgccgcgggtaaaaactcctcgattctacctgtgcagcacctcgccggaacaacgcctgcccagccatcagatc

SEQ ID NO: 62449 - DNA, 309 bp, Setaria italica
  Peptide Sequence Number=SeqID_128423
caatcccaacatcagttaggattgagaggttatcgttcaacaaggatctcaatgtactggatcttagagactgccgcagtttgggtgatgaagctgtaagagctcttagctgccttcccaagttgcagacactgtcaatgcttcatcactgatatcagtaccatccaatgacagtgtctgcaacttggatggtactgatatcagtgatgaagcattgaaatatctgggacttggaacatgtcctctgacttccttgtctttgaggggttgccgggaagctaacaagggaatacaatcatttgttagctt

SEQ ID NO: 62450 - DNA, 247 bp, Setaria italica
  Peptide Sequence Number=SeqID_128424
ctttgccctgtgatgtgcatatcgtgaacctgaaggtccctcagccttttaagatttcctcattctgaagcagccgacccaagatttgctattctgttgcagaggagaggctgggacgcctcatactgcaaaaggggtggactgcagtgtacaacagttggggaagaaccagtaaatctgttctacattgttctaaagtattcttgttcggtcttgtttgttagtttgtttgtttaaagtttcttaa

SEQ ID NO: 62451 - DNA, 240 bp, Setaria italica
  misc_feature (157)..(157): n is a, c, g, or t
  misc_feature (206)..(206): n is a, c, g, or t
  Peptide Sequence Number=SeqID_128425
gttcttgttcagttcatacctagggtgaggagaacccttgattggcttctgcccatacttccgccaagaatattcatccggagggatatcagcaattttattgctaatggctggcacttttatcgacctcttaattcgcaatttcctgtcaaaaagngtggcgtcatcagattgagtaatatcccacccagcaagagataaaaatntaagcatacaaatcactaaaagacacaatttacc

SEQ ID NO: 62452 - DNA, 470 bp, Setaria italica
  Peptide Sequence Number=SeqID_128426
aagaaaacaatacctgatgcatggccattcaaagagcctgtggattcacgtgatgttccagactattatgacattatcaaagatcctattgatttgaggacaatgtcgagaagagttgagtctgagcagtattatgtgaccttagagatgtttgtcgctgacatgaagagaatgttcaacaatgcacgaacatacaactctccggatactatctattacaaatgtgccacacggtgagttctttttatgttcttgcagccagggacgtctatggtcctggccagtaagataggagttgggttgccaatatctttccagagatttttctagtttgaccgtttttatcatgttcacattatgcaacctagtataatcaaccatgccattctatgttctaaatggaacgaaatgtagcttagatctcgctgacattatttggcaccagctggcagatgggctggaaaaatctt

SEQ ID NO: 62453 - DNA, 376 bp, Setaria italica
  Peptide Sequence Number=SeqID_128427
gagtaaattcctctgaaatatgtcgaagcactcatccatcctgtaatcgtcttgagtattgtgtttgcagaatctctgagttcttttataatatcaccagaaatatctctctttttatctttggtatacacagtacacaggacaacttcctccataagtgctccaagagaaccctggataaaaattagcagcatcgtcagcttcaagctcaaaaatcaactctgtgtcttgcaacttagacagaacaagcaaagcaaagcacgaaaactgaagcatagctctgttattactgcgatcaaagtggacaagatatctggtccatatttcagcaacttgtgcttaaagattcttgaatcaaccactctgtcaatcaatt

SEQ ID NO: 62454 - DNA, 258 bp, Setaria italica
  Peptide Sequence Number=SeqID_128428
agaacatcaaccatgttctacagttcagcgcaagggagtagattgtgactgagcatattagactgcatatgatcgatgtgatatacaggtaatgagcatggctgatgctctacagttcagccatgctcattagatgcatatgatcgatgtgatatacaggtaatgagcatggctgatgctctacagttcagcccgagggagtagattgtggctgacagtcagcctcacaggtactgccggaggctttcgccactgagg

SEQ ID NO: 62455 - DNA, 273 bp, Setaria italica
  Peptide Sequence Number=SeqID_128429
cggcggcgccgtccagaagtacgggtacaagcaggacgtgtacggcggcaaagccgccggaggtctccagcgcggcgcgtacggctacggggcgcacgggaaggcgggcaggacggacttcgccggcggctacaactacaacctcaaggcgtacgacagcgagaatgagagccgtacccggcgtcgcagtcgccgtacgactcgtgctggtagttgcttttcttcacggctacaaccagaagcacaaggatgcctacggcggcggagcggtga

SEQ ID NO: 62456 - DNA, 337 bp, Setaria italica
  misc_feature (9)..(9): n is a, c, g, or t
  Peptide Sequence Number=SeqID_128430
tcctacggngaaaacggcgctggctacggtgctcatcactacggcggcggcggcgtggagcagcacggctacaaccagaagcacaaggatgcctacggcggcggagcggtgaagaaaagcaactaccagcacgagtcgtacggcgactgcgacgccgggtacggctctcactacggcggcggcgccgtccagaagtacggtacaagcaggacgtagtaacggaacggaacaaaaagaaaccgaaaccggaaaaggtaaaactaaaaccaaaaagaaaaacgaaaaacggaaaaaacgaaaaaacgtaaaaaaacggaaaaaactaaaaacggaaaaa

SEQ ID NO: 62457 - DNA, 265 bp, Setaria italica
  Peptide Sequence Number=SeqID_128431
gggaaccgggggagtctggcatccagatgcataaacctcttcctaataagtagttcttagctaggttagggttagttacccatggtagagtcgatgtggtatggccatgggttcttctccttcccgttattccttggtgatggcatcaattatggtgaaatctctgatggattagctgtgagggagtcggcttccaacctcttccttggtgcttttctctgcttcctgcgatggggaagtaccgagcagaggcggatccaaccgg

SEQ ID NO: 62458 - DNA, 197 bp, Setaria italica
  Peptide Sequence Number=SeqID_128432
tgcatcagcaacattggagagagacgagggcaatgggccttcaagttactctgtgctaggctgatgggcaacaagtcagctggaaaagggtttcgggagaagtcggtgcaggagctgctcacaaagtcctgccaagcaatatcttgatgtgactatctagcggcacatatcaaaatagactcatagtactacttcct

SEQ ID NO: 62459 - DNA, 358 bp, Setaria italica
  Peptide Sequence Number=SeqID_128433
ttgttcttaaggttaaagttacttagtaactaagtctacggtaaggtattttagtaacgttctttgtcttttaattaagtactagtcaaagggcagatgctgcaaagaaacgcgaagaggagaaagctgccaaggagcagaggaagtccgaagcgcggaagtaactgcaataattatggaccacgaaggcatgagctgcgttgattggatatttatttccaatgcatctgttatcttttaaactcgatctctattcccataaaatatgtatttacagcagtaacgtagtcttgtggtcgtggcatgctgtaaacttgagcttggcaaaattgaaatgtagtaagatcagcttgtgtag

SEQ ID NO: 62460 - DNA, 506 bp, Setaria italica
  Peptide Sequence Number=SeqID_128434
cttgatctgatgtttccggcgcgaggtggttctggcggccttgcgtggtcgcgcggaattcgaacctacggggtagcttgtcgcgactgagattcctgcttttagtcggcgccgcggggttaccatatagtgattggattatatgggtgtcccgggtcgttggaggaagggggattcgctgatctagttgttcgatttagaagctcagtcacctgtttgcacgatccgtttggttgggtacatattcggcttttcatagagatcttcacgtaaaagtgtttctgtgaagtttaaacgcagtgagaaatcgaaggcacgctgtatctggcctcggacaaagggtctttagaggctgggtccaggaagaaatgctacaattaacctcttaccatgcttttttattatttcctacttgagcatccggatggctgcatcctgtggatatcctgctaaaattgacttggttctgataacctttctttcaaataattgcagctagtggtact

SEQ ID NO: 62461 - DNA, 306 bp, Setaria italica
  Peptide Sequence Number=SeqID_128435
tgcggcgtgcgtttggcaggtcctgcttggtgtgaaaaagggaggaagggggaggaagcttgggaagtggaaggtgacgatggccgaaggggaggggaaagttcaagggaaagcccaccggccgccgcaacttctccacccccgaggagatcgctagtggtacttcaggtcgcccacgcacctttaagaagaaggaggaggaggaagaggaggaagaggaagaaagagaagaatctgaggaggaagaatctgaagacgagtctgatgacaagcctaaacataaaggtactagaaggtattattcag

SEQ ID NO: 62462 - DNA, 221 bp, Setaria italica
  Peptide Sequence Number=SeqID_128436
tggaggtgctggcggtggtgtcatgggggacagcttggaggtgggcaagtgaatggcctggctgacctccacagcctctgctccctcccccgtttctctctctatctccccttgttgggtactgggtgatgcggcgtgcgtttggcaggtcctgcttggtgtgaaaaagggaggaagggggaggaagcttgggaagtggaaggtgacgatggccgaagggg

SEQ ID NO: 62463 - DNA, 377 bp, Setaria italica
  Peptide Sequence Number=SeqID_128437
tcgtcctattccttccttcgtccgtaccgtccttctattgtatttattgtactttgtaaaggtcccgtttctagtattgtttctattgttgtaacctttccttgtcttctttctagtaagtctttgtattgcgatgctcattgtgctaggatcatgcccaatttgtatgttgcagccatagtatgaggagtacctaatgaagaatagaatttttcatgccataccagtcctgctggcagcaaatcatctcaagttgggaatggaagaagtgatggagttcgtagggatgaagagttgaacagcatagaaagaaatatgtttgcgttattcttggatccatcattgtaatgcttgtgttgttgtgcaatctttggcac

SEQ ID NO: 62464 - DNA, 373 bp, Setaria italica
  Peptide Sequence Number=SeqID_128438
gtgatagcgccgtcctcctcgccgaccgcctcacggtacgggaatccgcttatgaagtgttcctcgaatcctcagcttattttttgttacaaagtaaaataactcagtcttatttggttactttcaactggaccatgctgattatgactccaaaggcccgttcagatgttcatgtgaaccttcctgctcttcagaagcttgatgcgatgctcattgtacgttgtcattgtctgtgttactacattcatagttctaattgacagttttcatttctgcttggtggcatagtttctcttcattcttactagtactatttttgtatttagtaacggtgtatgcaataaaatatgcaggaagtgatggactcaatgat

SEQ ID NO: 62465 - DNA, 375 bp, Setaria italica
  Peptide Sequence Number=SeqID_128439
ctggggaggaggaggaggaggaggatcggcggcggaggagggcggagatgaggatgaagacgctggcgtgctgccggcggcggccgcaggacttcagcatcgacatggaccaggagcccgacagggtgatgacatataatggcctcgagacctgcattatcaatagttccgcctatgacgatgatagtggcattagtgcaacaacaggtggagatggctgtgttaccactgattcccttgatgatgaagtctcaagttgctctagtaaaagatgcctctggttcttccttctcttcccaactgccttaagcaaagcaaggaaggaagcaatttaatttagaatagaagttagggtaacaacccgttagacaagta

SEQ ID NO: 62466 - DNA, 175 bp, Setaria italica
  Peptide Sequence Number=SeqID_128440
atgcgcctttctgacagtgacagcgccatcctcctcgccgaccgcctcatgattatgacttgaaaggcccgttcagatgttcatgtgaaccttcctgctcttcagaagcttgatgcgatgctcattgtgctaggatcatgccctaatttgtattgttgcagccatagtatgagga

SEQ ID NO: 62467 - DNA, 525 bp, Setaria italica
  Peptide Sequence Number=SeqID_128441
gtccgccggcaccgtccgcctcctcaagtacgccgagggggtgccgatgctgacgttcgccaaggagaaggtggagcttgtcgacgcgaagaactttattgactgggaccagactgcaacctgcagacgcacacgatcgctgaatcgccgcaggctgcagcgacatcaaccgcggaaacaaggacacgaccacccataactaccaaaccaacacggactcggacaccaccgccaccaccaacgacgacatgcactagcgcgtgctaaacgactgcgatttccgcctcggcggacggaacgatttccgcctggttcttgagtaggtagtcgtcgaggtcgtggaacgtcttggtggcggtctccttgatgacgtccgggtcgggcacctgctcgctggccttgtcgaactccatggaccagttgacgacggcgccggcctcgccctccttggccggggacaccttgagcgtgatcttgaagttcttgtagaagttgaccagctcgccgtccaccacgctgtaacga

SEQ ID NO: 62468 - DNA, 331 bp, Setaria italica
  misc_feature (1)..(47): n is a, c, g, or t
  Peptide Sequence Number=SeqID_128442
nnnnnnnnnnnnnnnnnnnnnnnnnnnnnnnnnnnnnnnnnnnnnnngttaaaaacttaaaagtaaaagaaaaagttaaagaaaccaaagaactacgaccgtaccaaccaacgactgtacgacaccaccctgttctcgtcgtcgacaagctccaccttctccttggcgaacgtcagcatcggcaccccctcggcgtacttgaggaggcggacggtgccggcggacttgccgtcgccctcgacggtctcgatgctcttgtactgctgggggaagatcttggggaacagctccgtcgagtcgcgcagcgccgcccacagcttctccgccgggg

SEQ ID NO: 62469 - DNA, 314 bp, Setaria italica
  Peptide Sequence Number=SeqID_128443
atttgttcttgttttctatcatggttaatctctatggctgggtctgttattggtggatcacatacaagtatagagcagttttatctctgaaaactactcaaatttgttcttgttttctatcttgattgatctctatgggttgggccttttattggtggatcgcatacgggtataaagcagttttatcttccaaaactgtagtagtggcacatgctaattaattgttgttgcttgggcagagtgtgcctgaaggctatgtatttgtactcggggacaacagaaacaacagctttgattcgcataactggtatgcc

SEQ ID NO: 62470 - DNA, 370 bp, Setaria italica
  Peptide Sequence Number=SeqID_128444
ctcgccaacacgttcgacgccatggagcccgaggcggtggcgtcgctgcgggagcacggcgtcgacatcgtccccgtcggccccgtgctctgcttcctcgacggcgcgacggcggcggccggtgccaagagcggcggcggcaacgacctgttcaagcaggacgagggctacctcgagtggctggacgcgcaggctccaggctcggtggtgtacatctccttcgggagcctgtcgatgatgagcacgcggcagatcgaggaggtggcgcgcggcatgtcggaagaagacggaccggaccgttacctagtagggtagaactaagaacgggaacggaaacaaaaccgaacggaacggaacgaaccgaaccgaa

SEQ ID NO: 62471 - DNA, 397 bp, Setaria italica
  Peptide Sequence Number=SeqID_128445
cacgtcgggggatgacgggtgaccattgttgccacgcgtgcttttctggggaggtgcggctgacttgcccttgctgccaggctgagcggggaaaccaggcggcgcaccctggaacatggggcaagagtaccctatgacgaatgccacagggggaggggtaggacggtgcagctgtagccctgtgcagtcgtggcagcagtgcgccgcccgaaaacttcgcaggtcacgtcgaggaacgcgagcgcctctcccgtgtgtcaaagccgtgttccggtaaagcgcgccccatcggtggcatttatggcgagatcggtggggcccccataagatctacgccctcgtctgcgggtccgggtatgtcctagggcgaggtggagctctatcctgtgggtccaaa

SEQ ID NO: 62472 - DNA, 235 bp, Setaria italica
  misc_feature (214)..(214): n is a, c, g, or t
  Peptide Sequence Number=SeqID_128446
gctgaccgggggggcggcggctgacacgcccctgccgccgggccgagcgggaaaccgggcggcgcaccctccttagttaggtagcatgggcgatgagtgccctatgacgaatgtcacagggggagggttaggatggtgcagctgtagccctgtgcagtcgtggcagcagtgcgccgacccgaaaactccagcaggtcacgtagaggacgcggcncctctccgtgtgtcagacgcc

SEQ ID NO: 62473 - DNA, 328 bp, Setaria italica
  Peptide Sequence Number=SeqID_128447
atgtagcgagaatgatgatggcattgctccattagatgaacgagaagatggttggctgtgcttctatgaaattcttgctaatcatttgttagagtgcctgaaagcgggaggcgtatacttgagttgatagtgcaactctggagccagtccttcgcgtccaacatattttcccttcttctccacaaatggttgtttgaagcccctcttgatggaaaggaaataccactaagatacagctctgctcttgttcaaggattgacatacagacaaatacaagacattttctctccttgtatcattatctccttgaagatgttgctctagtccc

SEQ ID NO: 62474 - DNA, 407 bp, Setaria italica
  misc_feature (307)..(307): n is a, c, g, or t
  Peptide Sequence Number=SeqID_128448
ttttgaaggacaaaattgggacttctgtgtatttttggagtcttccaagttgcgccggtaaccagttgaggagtacttacaataagctggaatttgatctttcaagctctaaaaagcgttacatggagcttgttgaacagagagacaacctgagaagaggcagggaagactctgaagagagggaagctgctttggaggagctgaaggctgtagagctacaccataagaagctcaaggaggaactggctgcatatgccgatagtgatccagctgcactagaagcaatgagtgtgtgatccaaaacccntctttttcaatacaaggcttggatagatatgctactgttattgatacatccatctgattatttctcctttcatctaagttctagcaatattaactggacc

SEQ ID NO: 62475 - DNA, 237 bp, Setaria italica
  Peptide Sequence Number=SeqID_128449
atttgatctttcaagctctaaaaagcgttacatggagcttgttgaacagagagacaacctgagaagaggcagggaagactctgtaagatttttttgcgtatttttgagatatctgcactgcaacaagcatattgtcccaactcatgcatttccacaggaagagagggaagctgctttggaggagctgaaggctgtagagctacaccataagaagctcaaggaggaactggctgcata

SEQ ID NO: 62476 - DNA, 240 bp, Setaria italica
  Peptide Sequence Number=SeqID_128450
tccctcgtcaccacgttgcaggcgcccgccagggacgtcgtcgcggtgctctccgcctacgtgcgtaagctcgaggaggaggctggctctgcatagcgcggttgcgaaatgaagtgcataggtatggggatgtcaaccgcacaatggatgtggatgctgcctgcagaattttttctgagttacaatgaaaagcttactcgatggcaacaagtttgaaatccaacaggttattcatgtgga

SEQ ID NO: 62477 - DNA, 403 bp, Setaria italica
  Peptide Sequence Number=SeqID_128451
tggtattccgttgggtagtacctagtcttgtaagttcctacttactattttctaccttcagggacttcttgtcaagaagggagaacgtatcagtttcatagacagatattatgttcttcccaagccttgcaaaatatttatcatcctttccaccaccccacctaaatatgggccatgagacaccagaaacgccaatattaccgccagcggtaaactcatcagcacttcccttgaagtctcgcatcactttcccagtccttacatcaaagatattcaggacaaccctatgtgtgtctcgagggttgctgggctcatggctgctgtatgtgatcaagtatctctcaccaggagaaaaagtcaatcagttttaccattggatgagcaaaacgcattaaccgctcaa

SEQ ID NO: 62478 - DNA, 359 bp, Setaria italica
  Peptide Sequence Number=SeqID_128452
taatgttgcatgataattagctgcttcaaaaatgttagacactaaaaagaagtaggctatcagggagtagagaagccatagagacttactccaggagtgtacggctttatttcagcaggcgtccatgtgtcaggaaccttcatgtacttctcaaagtcatcaagcatattaactgcaaatatatgagatttgtcgagtttgtacccatttgtttttcccttgcaagctcagcttcctggcagtatgtgaaacaaagataattataattaacttaatacctttcaatgaagatattttttctgtttcaatcaactcaagggggtttaaagtaggggccttaaaacgtaaaacgtattagt

SEQ ID NO: 62479 - DNA, 321 bp, Setaria italica
  Peptide Sequence Number=SeqID_128453
tttttgttattaccttattctaaccttggtactagtctaagtattatttcttcctatttatttcttgccaattacatcttgcagtcactgacactgaaaaggtttttctgccgcagctcctctttgcctggaatttgcacaagactcacccttgcaggctgattcccaccacccatttcaggcacaaaaagggatatgattggatccgtgggagaccagctgaagtccactacattttctaccttcagggacttcttgtcaagaagggagaacgtatcagtttcatagacagatattatgttcttcccaagccttgcaaat

SEQ ID NO: 62480 - DNA, 303 bp, Setaria italica
  Peptide Sequence Number=SeqID_128454
atcacttctatcagtttatatggcgtccgagaccgccatcacttttgtactcctgagaaggaagagggagatctcgaagaacctgaagaagtacagcaagaagtacgagcaagaagaccaggatgcattcaaccagctgagcgagcaggagcgcaagaggcggacacagctccaggaagaatgggactcatgggttgccaagtggaagcagatacataagcctttcactcctgatccaggtcgaatgcgagaacttcttccgtgacatccaccacttcctccacctcaacctccttggcctcg

SEQ ID NO: 62481 - DNA, 419 bp, Setaria italica
  Peptide Sequence Number=SeqID_128455
aaagtaaccgaaacctaaacttaaagaaacgaactaacctaagaactaacgaactaacaagactaggttagaaatagacaatacctaggtcttcttgctcgtaacttcttgctgtacttcttcaggttcttcgagatctcctcttccttctcaggagtcaaaagtgatggcggtctcggacgccatataaactgatagaagtgatcctttgacaccttgtaaaggtgcttgccattgaaggaccatatttgaaatccattctccatctcatggactgaggtaactgcagttgcaagataccttccagtaggatcccacattatgtctgttgccataaaatgctctcctgttgccatagtttcaagctcatcaacattgtagaattctagctgcccattaaatcccttcagcccagcaag

SEQ ID NO: 62482 - DNA, 298 bp, Setaria italica
  misc_feature (201)..(201): n is a, c, g, or t
  Peptide Sequence Number=SeqID_128456
tttttaaactagtagaccaaaagaccaagacaaagattagtaatccagcagcaaaatttgatatctgaatgcatgatccgcaaattcaagcagcaagtgtacagacaacaagtaaaacgatcagcaaactgtgcgcttgatcactgagcctattatgcaaagcaacagcgatgaactttgacacgacggaaaattaaaacncagcagattctaacataagcctttcactcctgatccaggaagagtacgaggccaaggaggttgaggtggaggaagtggtggatgtcacggaagaagt

SEQ ID NO: 62483 - DNA, 366 bp, Setaria italica
  Peptide Sequence Number=SeqID_128457
gccgttctctttcttcagctatacattcttgtggacagcactttcatatcttgttacctaaagttctggagtgcttatctacaaatttcttactgtttcaaaggcatgactgcttcttgagaacaggaagctattgttgcatctagctcgctgcttgagctatcatttcaaaaggcagctatatgttctacagcaatgcaccgaggagcagcacttgcatcaatgtcatatatatcatttatatgtcatctgcaggttttcttgaggttgttcttgctgctgtgctagaatctccagagtgcatccctgacggatcacctggtgtggtcctaattcaaatcttggcacgctgtggtgaaggtttat

SEQ ID NO: 62484 - DNA, 250 bp, Setaria italica
  Peptide Sequence Number=SeqID_128458
tttagctagaaaatataagaaagaatatggttcagatgcattaaggatacaccatgagaagctaaatgagaaagaaaaatattcccgtaagttacctgcaccatgccacaacatgcatggtaaaacctttgaagctgctgtttgtcaccttcataggccggtaagatcttgtatcgagtttctgtaaaggacatctcactcttagaaaaggaatggctaccaatttctctcagatggacatgacagaaat

SEQ ID NO: 62485 - DNA, 261 bp, Setaria italica
  Peptide Sequence Number=SeqID_128459
tacaatgcaaatcatatcaacaaagcaagcagccaataacataatcaagcattcaaacatgccaaatctgcaaattgaaaactataagcatggtacatacttgttcctttatcaaaaatgacaacggaagggtcagccaggttaagctttggttcctcaatttgcgatttccatagtttaactatagcacgaggtttagaagcccgcagtttatgacaacgaaaaatttgggctgtggttttaccccgtgaagtgcggact

SEQ ID NO: 62486 - DNA, 345 bp, Setaria italica
  Peptide Sequence Number=SeqID_128460
aatagctgactgaattgaggcattgatagccatcgctaattcaacatcctcctggtgggtgcagatacttctgaaggtgccacagatgagtttgcaggtactggatttggcactgggagatttgctggtggtgctggaaccgtgttggaaacctaaaaaggtgacatttagattatgttattgttttttctgtacaaaccaaaaaatttaaaaccagcaacttctggttcattcaaactattgagcatagaccacaacttcacatcatcactattgttgctatttagatatctatatataaagaaatattgttaaaaggacaggccttttaaacgaatttagcta

SEQ ID NO: 62487 - DNA, 461 bp, Setaria italica
  Peptide Sequence Number=SeqID_128461
cgatttccatagtttaactatagcacgaggtttagaagccgtgtaatgattcttacacatgtttgctccatgatatgcatccagaaaattacatttttcgtgtcataaactgcggagcaattgcatccagaaaagcaggagcataattctccctcatccatccacaaaaaagagaaatccgtccctctatggcccgtacaacattaacatggcccttttctcttgccaattcaagggcagtattgcaatcatcatttggtatgaaaggattagctccatgcgtgagaagtaaatggacagtctgctcaagtcctttcttagcagcatggtgcaatgcagtcccacaatgtgatccaggccggtacgcgttgacattggctcccaactcgatgagcaccttggcgacgccgagcagatcgggccgcatgcaggcgaccatcaggggcgtcttcccctccttg

SEQ ID NO: 62488 - DNA, 246 bp, Setaria italica
  Peptide Sequence Number=SeqID_128462
ttttcgtgtcataaactgcggagcaattgcatccagaaaagcaggagcataattctccctcatccatccacaaaaaagagaaatccgtccctctatggcccgtacaacattaacatggcccttttctcttgccaattcaagggcagtattgcaatcatcatttggtatgaaaggattagctgcaagaatatgcatttagcaaagaactactacaattcatgtggggggaatgaagcatttcatata

SEQ ID NO: 62489 - DNA, 365 bp, Setaria italica
  Peptide Sequence Number=SeqID_128463
aatttgctctgcttcaaggtatcttgacacataatcaaactcaccagagctaaagatgtaggattgaacagacaccaataggaagatcactatttcaacaaaagctgaccgtgatgttatcttaaaaccgtagtcatacttgtagaatccaattatttcatacaggtagtcaatttgatcacacatgccagaactaaactgcccaacataaggagattgataggcaagtgacaaaacaatgagagcaaaattatacatccttaaatacttgaaaatcttattcttcttcttcaatatttcaagtctcattctaaagaaaactagagtatgatgttctgcaccttggctaccttggatttgctctg

SEQ ID NO: 62490 - DNA, 247 bp, Setaria italica
  Peptide Sequence Number=SeqID_128464
ccaaagcttaatgaatatttggctgctcatcaggaagaatttggagctagttgtcaggctgtgccctctgttaagtatcctatttacgatcaaactgtgtatctcaacaattatcataagaagacattgaaggatcaatatggtaagtactaagtactattaaaaatcatactatttttcacttccaaaaggttgatgtatgacgtattagttgtggacttgctgactgctatggcactatagtatt

SEQ ID NO: 62491 - DNA, 192 bp, Setaria italica
  Peptide Sequence Number=SeqID_128465
cttggtaccactatcctcaaaaaatatatatatatatatcctgttttgttactcctgttcaggtggatatcgagctcaaacagtttatcaaaggttattcagatggtaacaaggggggtgatggccgcttgttgatgctgaaattgaaagagtggccccggcccagtgtcttagaggagtttctgttgtgcc

SEQ ID NO: 62492 - DNA, 384 bp, Setaria italica
  Peptide Sequence Number=SeqID_128466
tggttggttgttgtaagtctaaagtcctacttgtaattaacctatttgtcctttttgtaagtgactgtaagtgatgttgatgtgcaacatcggagaaatcctcatcgtacttgctgggttttgtttgtcgagatcttgaaagcaccctctcaatgatctcttcaaaacaagccttggatgcatctccagatgagaatggcagatactccacagcagagaggaagagcttgtacatagtatgcaaactgctaatttaaccttaattccatcatttccacaaacaaatcaatgcaaaggtcacgttgaagctgagaagcgtatactccaaccaactcctcttggtcctctgagaacaaatatctcacatacatgttgatgatgagg

SEQ ID NO: 62493 - DNA, 426 bp, Setaria italica
  misc_feature (1)..(25): n is a, c, g, or t
  Peptide Sequence Number=SeqID_128467
nnnnnnnnnnnnnnnnnnnnnnnnncaaaaataaacggaaagaaaatacctacaatacgtaacttgctgggttttgtttgtcgagatcttgaaagcaccctctcaatgatctcttcaaaacaagccttggatgcatctccagatgagaatggcagatactccacagcagagaggaagagattgtacatagtatgcaaactgctatttaaccttaattccatcatttccacaaacaaatcaatgcaaaggtcacgttgaagctgagaagcgtatactccaaccaactcctcttggtcctctgagaacaaatatctcacatacatgttgatgatgaggtcaccgacagcaaccagcttttcctccaactcatcttccatttcatcactgatgaaaatgtatctcagtacaagaacgacatgtgccgcg

SEQ ID NO: 62494 - DNA, 213 bp, Setaria italica
  Peptide Sequence Number=SeqID_128468
cttcaaaacagccttggatgcatctccagatgagaatggcagatactccacagcagagaggaagagcttgtacatagtatgcaaactgttgccagaatacaaaatgtgagattgtacaatgaattcattgaaagtcgccgaactctaatcatatatcaaatgctgcctatttgacttctcaacaaccagcaaaagtaaaactaagtatttgta

SEQ ID NO: 62495 - DNA, 347 bp, Setaria italica
  Peptide Sequence Number=SeqID_128469
ttgatttccttccaaagtggagaagactaccaatgtgactcgcacctgagaacatgaaggacttagccatcagaaggtaactgctgctcctcctcaagctccattttacatatcaagcattccctctcgaaaatcaggaattcctggcaaacattgaacaacaatttttgtcgatgtcataaaaagaaactaagcacttcttggacgaacaaaccaaaggtcacagaagtaaacctgcaactgctgctggctgaacaaatgcatcattccggattcggacgaaccaactaactcaataagtttatcacaatcatctagagaatcacctgctgccgaaagcgaaatac

SEQ ID NO: 62496 - DNA, 319 bp, Setaria italica
  misc_feature (276)..(276): n is a, c, g, or t
  Peptide Sequence Number=SeqID_128470
ttaaattggtctacttttgtcctagtaacgtattgttgtagtcccgggtcgtcgtctagtcttcaagtccaccatgaccaagaatcatgggaaggctctggtggacaagactcaaggccctctttgcatggcttgatccaagggccagccacaactcggcaagagtaagtgtggcggaggcttcaagcagatccaagttgaatgacttgcagaatgattggctggctaacgcataagggagccccaagggacccgcaatttgtcagatttttttgngtatttcagcaagtaacaaaagacacttgcattctgacttgca

SEQ ID NO: 62497 - DNA, 241 bp, Setaria italica
  Peptide Sequence Number=SeqID_128471
ggagaactgattactccaactgtgtttgacatgcctatctttgataatagattggaaatggctccatctgagaaacacgcactgcttctgcaaatgcctctagagctttcttagggtgtccaaagtaacaatgcaagttgcctaagcatagcagggcactctcatagtttccaacaacaatatcttgcactggagacacagaacgaccaaaaagtccttgcatccctgtaatcaaagtagc

SEQ ID NO: 62498 - DNA, 366 bp, Setaria italica
  Peptide Sequence Number=SeqID_128472
tctttgtagttcttcttctagtctacgtattcttattccttacttagtaaaagtattacttctttggtaggtattttagttgtgcatgttccttatgtttcaaggatgaggagggggcgcccctaggaaggacttcattttcattttgtggataaggaaccttctgttcaatgtaatgttcagacaacagttgggatgttgtcaaaagagtgcgaagaggggaaccatgtgaggaaagcatctgaagttccaccaacagtaaatccggagagaggacatttagaggcagttgataggaagggggttcaaaacctacaagcaaacgtttacaaagctgcttccaagcccaaaataaaacggggtttg

SEQ ID NO: 62499 - DNA, 339 bp, Setaria italica
  Peptide Sequence Number=SeqID_128473
cttcagcacgatctatcctactagaaagatactcttggaggatttagtgtgcatgttccttatgtttcaaggatgaggagggggcgccctaggaaggacttcatttcatttgtggtaaatccggagagaggacatttagaggcagttgataggaagggggttcaaaacctacaagcaaacgtttacaaagctgcttccaagcccaaaataaaacggggttgacgcggaaaagacaatacaatcgaagcaatggacaactgtgtgaagtcgtgaagctggttgatggtgtggcccggtatggagctggcaagtggtctgagattaggaaattatcctttt

SEQ ID NO: 62500 - DNA, 263 bp, Setaria italica
  Peptide Sequence Number=SeqID_128474
ccaaactttgaatgcattagtcggccaatcatctgagaaatacttcaccagcaacaccgcttcccttcagaatccagaagcaaaatattcttcacagaagggcaagattccttggagaaatacttcacagcaacacgcttcccttcagaatccagaagcaaaatattcttcacagaagggcaagattccttggagaaatccgccatgatctatcgccctcccctattccaccctggtgctgctggtggccggagaagagcccg

SEQ ID NO: 62501 - DNA, 361 bp, Setaria italica
  Peptide Sequence Number=SeqID_128475
aagcaagaaaaatagtacttagactaagagctgacaaaaatgaaaagtgggagtctcaacataggatttttttcccttagtaaccaaatccatctcaaataagggaacacagtgctaaccttgttgaagttgatcaggtgtcaagtcctgcataacatgaatcggtcatcattatcacgatgattccaaaattaacaagcaatatagtatcctcttcaatgatgataatctagtagccaatacatgcaaacataaaacagatacaggccttcttggattgatacaatcagcagaatggagaaactacatgaagcctagaataaggatcacagactattttggactgaactcatagccacat

SEQ ID NO: 62502 - DNA, 423 bp, Setaria italica
  Peptide Sequence Number=SeqID_128476
tcccaggatgtggtttggagcttcgagcagatatattttcacatacgatctcactgttataagcaatcaacgaacttgcaggtcaggaatatttacatcaatgtaagtgtaccacaaaggttggaacttggaacgatgtttcccttttgatattttgaaacgcagggaagcctttagcattgccgctggacactgtttgcacgtttgcaccgtccagccatatggaccattcacagaaaatttggatattacacggcaggatgtcaaaaggctgctgttgctgcttgtacaatcgctggattctggtagataccaatagctgtcgcactccatgatgctatattgtaaataacttttgttccatcccatgaccttactagaaaagaacttaagaacctttaacctaactttttaaagaacaaa

SEQ ID NO: 62503 - DNA, 184 bp, Setaria italica
  Peptide Sequence Number=SeqID_128477
acagctattggtatctaccagaatccagcgattgtacaagcagcaacagcagccttttggacatcctgccgtgtaatatccaaatttctgtgaatggtccatatggctggacactgtttgcacgtttgcaccgtccagccatatggaccattcacagaaatttggatattacacgctgagactg

SEQ ID NO: 62504 - DNA, 258 bp, Setaria italica
  Peptide Sequence Number=SeqID_128478
cgcttggtctgcgaggtctccggcccgttggaccagaagaggtgctgcagcaggagcgtagagttgtgatcaccttcatccgcaccctccttgatgatcccagcagtttggccggccagcttctggattcattccaggaaattgttgctagtaagaagccaagaactggtttctgtactaagctttggcactaaccagattgaacaaaaaaaaaaactcaaaactgctaccgagaatactcatactcttacaataggg

SEQ ID NO: 62505 - DNA, 161 bp, Setaria italica
  Peptide Sequence Number=SeqID_128479
taacaaggaaatagaaaattacctaaacctaggttacaagcttgagatcaacagagcaggagcgtagagttgtgatcaccttcatccgcaccctccttgatgatcccagcagtttggccggccagcttctggattcattccaggaaattgttgctagtaag

SEQ ID NO: 62506 - DNA, 460 bp, Setaria italica
  Peptide Sequence Number=SeqID_128480
cctcatgttccataccatcatcataagacaggcttcctccttctaaatttctaacgtattgtttttctagttgtatctgcgggctgaaccggctgaacgtggtccagaaatgtgtccacatgtggcctcaagtttcccaagtggagtcagcaacggcctttttggtgtctgcattgctggtgttccagccaaaaatggtgactctgaggtcccttgttttggcgtgctctctggacaacaagagatcaaatggcgattgggggtagcagaaatttcgtagttcactggaactggagcatttgtatcttgctttttagggcttctgtttatcccttctgtaacataagcactgacagagctcagttctgctggatcaagaagaagacaaactagaagtacttttacaagttaccaatacaagacaaacgaattttactagtagaactaattagtaagttta

SEQ ID NO: 62507 - DNA, 421 bp, Setaria italica
  Peptide Sequence Number=SeqID_128481
ggtttgctttcctgtcaaagcatttgaagaagtatagatacagtctggaatatgcatccctagaagttaaaaaccatctcgagcgagtaaacttctctgatttggttgaaaccatcatgattatgttagttcactaaaatatcatttcccgtcattttaccttttaacattgtgcgcttgattaatatttgttgcattttttattagatatgatggatgtgacaaaacaagaaaaggaggaccttggaccacccattttcatataagcaaggaaatgatgaagaaaaaaggttaggattgggatttgttgtagaagagcttacaaaagaatacgacgccaccagaaaccagctaaacaatgcaatcccatcagttcatattcaaagagaaaatgttcaagttaaggttaagtaaaccaaaa

SEQ ID NO: 62508 - DNA, 241 bp, Setaria italica
  Peptide Sequence Number=SeqID_128482
cttgctgtatcacattggtagcacaagctgaatccaattccatgtctcagttggacactatcaagaaaagagtgattccaagcatactggacacactgctgaaaggttgttatggttttatgcattttacaaaatatatcccatatattattgcgagtttcctgtagaacttagaaatcatggtcttagctaaggattcctttctaagctgcagtgcggagaggtaaaatatttccaggtg

SEQ ID NO: 62509 - DNA, 237 bp, Setaria italica
  Peptide Sequence Number=SeqID_128483
tgaagaaagccctggtcgatagtcatggcgccaccttggacggtcgcactgtctttagacttgcatgctaacctacatctcaaagcattttcagtactttgtctgcaggtatccatatgatccccattttctgaagcatgtttttctaggcctgcacgaagttttataaatgctgcaaagcattgttcagtggacaatctgtgtggaagtctagattgtccactgaacaatgctttg

SEQ ID NO: 62510 - DNA, 262 bp, Setaria italica
  Peptide Sequence Number=SeqID_128484
aacttaaccaaataacaaggacaatagaaatttacaagttagtagataagcaagttgcacatcatagacagtgaagttcttacctgctcttcggggtcttcttggttacaaaatagcacaaccggtctcttttctatcatgttcaaacagtatggtcgcaaggcacttgacttcctttcttctgcccaagaagtactatgtgagttcttaaccatgaggggtttaatgtctctctttcagatctctatatgttctccgatca

SEQ ID NO: 62511 - DNA, 229 bp, Setaria italica
  Peptide Sequence Number=SeqID_128485
taatgcaattctcttatgatactgctgatgatatgtgctgtaatcatgatctggtaggtgaacttggtgcccctgttggttcttgggccgcttgttccatttcagaagctgcatatggagctttggatcaccctgttaatggtttagaggactcccctctcatgaatctacaagtgacattcttctctctgttaatgtctatacttattatgtggccactgccgtctgt

SEQ ID NO: 62512 - DNA, 184 bp, Setaria italica
  Peptide Sequence Number=SeqID_128486
tattgtaacttttgtaaggttttcttcttgttggtacttggttaaactaatttttctagtctattgtcttcttccatcaggcatgaatttcagttgtgatagcaagttgcacatcatagacagtgaagttcttacctgctcttcggggtcttcttggttacaaatgcacaaccggtctcttttc

SEQ ID NO: 62513 - DNA, 317 bp, Setaria italica
  Peptide Sequence Number=SeqID_128487
agaaacaatggcgactgacacgcaccaccatggccaaggtggtgcgtgtcagtcgccattgtttctttctttcttttctcctctttattctttctttctttgtcctttcctttgagtgtatattgatctccacaaaaaaggcaagaactggagtgagctagtggcgaagaagaagcacatcgaatccatgggtgttggtgtctgtctgcaaaataagtggtggcctggccttgtgatcgacgaaggatttttcccatgaccatatgtgtatagtaagtagctgtgcagtgtatagtgtacatgaatcaaaacaatct

SEQ ID NO: 62514 - DNA, 176 bp, Setaria italica
  Peptide Sequence Number=SeqID_128488
cggcgggggccctcccccgcccccgccgccttgggcttcttgaggagcttgcggaggagtaggcgggaggcgaagcggcggctgaagcgcggggacagggtgctcatggtcaccttcgggtcggggttcaagtgcaacagctgctactgggaggtgagcagggacctcgccgacgc

SEQ ID NO: 62515 - DNA, 370 bp, Setaria italica
  Peptide Sequence Number=SeqID_128489
ctgattgatgttgcgatgatctaagaagatctggtctttttttctctctgcatggcatggtatggaatccatggctgcaatggaagcaggtggcattatgagagtgtgtggaggtgcgggatgggcgatggcctgcgcagatgaaggagcgacagaggtggcggcctgaggaagacgcggtgctgcgggcgtacgtgcggcagtacggcccgcgggagtggcacctggtgtcgcagcgcatgagcgtggccctcgaccgcgacgccaagtcctgcctcgagcgctggaagaactacctccgcccggggatcaagaagggctccctcaccgacgacgagcagcgcctcgtcattcgcctggaggcgaatta

SEQ ID NO: 62516 - DNA, 135 bp, Setaria italica
  Peptide Sequence Number=SeqID_128490
gtgcgcgcagatggatcggctctggcggtccatccccgccaagggccagcgggacctctggaagagaaaagtggagcaactgtctgaagaggttgattcactgaaggaaacccttgacaggcatactttgcgtca

SEQ ID NO: 62517 - DNA, 347 bp, Setaria italica
  Peptide Sequence Number=SeqID_128491
atccaaataaggtattctggcttgtcttgatggatacatgaacatcgcgatggagcaaactgaagagtatgtgaatggtcagctaaagaacaaatacggtgacgctttcataagaggaaacaatggtatgcattgtgccacattgatattctgagatatatgttgtgcaaactctgataatggtcttctgagtgcagtattgtacatcagtacttccaagcgtacccttaccgacggttcttgaggaggaactgttggcatcttcagtgccagccttgcaacttgatcgattatggagtgactcgtattattttcttttccatttctcattcttctatctggtgagc

SEQ ID NO: 62518 - DNA, 362 bp, Setaria italica
  Peptide Sequence Number=SeqID_128492
aaccatcatcttttctggtgacaagctcaaacctcatctatatccttgctatcatcaacaattccaccagctgcggtgtcttcttgaggttcagatcagccaaaagttgaatctttatgatttgtgatatcaatccaagaactaaatgaggctgcatgcaaaacaatataagtttgtgtaagccatgatgttttcaatgatttgcttggataaaaaacaagaactgagagtaatattgagtccatgcaagaaggtgactaagtgcctgttgtagttttgtagagaagcagataggagaagagcaaaaatatagggagcacgtaccaatctctatattctttatatcacctattagtacgttg

SEQ ID NO: 62519 - DNA, 209 bp, Setaria italica
  Peptide Sequence Number=SeqID_128493
taccgacttagttacaaagtaaaaccaaaagttttaaagaaccctactacaatacgggataccttggtatccaatgtagtttcaggggaatgctctggagcaagagctttcagaaggtaagcataggcttcaccatccttcacatctgaagagaaattgttaacagttttcttgtagccagcttttttcagatgatggttcatccaccg

SEQ ID NO: 62520 - DNA, 304 bp, Setaria italica
  misc_feature (103)..(103): n is a, c, g, or t
  Peptide Sequence Number=SeqID_128494
gcagctttgctgatacagctgtctacctctttcctgcggtgcccagggtagagctttctgaatgatgtcagggcctgaatcgctgctgatgtacattcaacanacgggtaatcaatcacaatgtccccaaaggtctcagcaggattaataagctccaaccagggataagaccttgtgagctcatatgttgcaaaaccaccattatcattcatataagaacaatacaagaacaaactagaacaagacaatacaataaaaattagaatttaagtactttacctaagtacgtaatttacttaacctt

SEQ ID NO: 62521 - DNA, 430 bp, Setaria italica
  Peptide Sequence Number=SeqID_128495
aactacgtaacaaagaattactaccttttagtactaggactacgttaattaggagttgattgatattttacaaagctagccagtattcctgtaacatacaacgacacttctcatgttaacagtcagcagcaataggcaataaacttcttgccgcttgtaaagcttttctcgacggcgtgcagctctgaagagataaaacagtctccagctcttccggctttcatagagtgaagtaaaccggcggcggatggacaatctccatcttcgacctcgtgacgttgccagtgagcacactttccgacatggcctcgtcggcctggaaggctgcacctgcgcgatcctcgtcggggatcgcctggctgccctccactcgagcaaggacctcatagtgcgctctcagattcttgggcttcgtcttccactccgggaa

SEQ ID NO: 62522 - DNA, 265 bp, Setaria italica
  Peptide Sequence Number=SeqID_128496
cctgggagcggaagatggggaggtcgacgaagtcccagcgtttgacgtcctcgagcaggcgcaccggcaggaccttcctgccgacctcgatgtcaaactcgtacgataccgcgtgccccaccagcgcatcccgcacgtcgaacccggacaccttgagcccctccgcctggaaccccagccccttcacgatcgcgtccctcaggtcctgcggccggcatcgcattcgatccgcacaccaatcagatcagaccctaggacaaacgaa

SEQ ID NO: 62523 - DNA, 240 bp, Setaria italica
  misc_feature (43)..(43): n is a, c, g, or t
  Peptide Sequence Number=SeqID_128497
cccttaacaagcttcttctccaccgcgaatgccatcttgacanaggtttgcgcggaggctcgcgccttcaccagcttgaatgtcccattctcgcctgcttctttccaaggaccgaggccaaaagctcctcaaatccctgcaggctaccatctgatccgttcagtgacaagaagaggaccaacaaatagacggtaattagtagtaggttacaatacctacgtacttacaagtagaacaaga

SEQ ID NO: 62524 - DNA, 314 bp, Setaria italica
  Peptide Sequence Number=SeqID_128498
gaacccctcaactgcctgaaaacaggtcatggtccctggcgtttgttctagcttctgctttgcctccataacagatctatattcaggtgcacattccgggcatctttttcattgtccccaaggcagcggaggtggaatgaatgcatgcacatgaaatggacagctggaagatcaagggtgaaagtacaagcagtacacttgctgagtttggtaaaaacttttacgtacgttttagttactttagtaagtaattaactttaacttaaaatttaactttaacccttttttaaactttaaaattttaaactttaaaa

SEQ ID NO: 62525 - DNA, 325 bp, Setaria italica
  Peptide Sequence Number=SeqID_128499
cagattctgactcaggcagcgactctgaaagcgaatctgaaaaagtgggcagcccagcaaagcttgcaaaggtacttgggtgattataattgggtgctttagaaataataatagacctttgaaccttattagtgaatggattatttgagtgatcagtagtctaaatatattacttcatccggtcacaaataagtgatgttttggggttgtcttcaataaatgattcaaatttcggttacatgttatgttaattgtttggacaagcgaatttgttaattttgaactacctaaatgttgtatatatttataaaaaagtattggagta

SEQ ID NO: 62526 - DNA, 253 bp, Setaria italica
  Peptide Sequence Number=SeqID_128500
cttatttgttgggctaacgggtccttaaaccacaggtcctgctgatattgtgggactccgtgaagaggatagtgaatcaaagcctgcaccagagggtaagcatgaatttgtaggcatatgagactgttgagcagtctcagcgcactaagatgatcggatcatctgatcctttcccaatgaaacatttaggggaaaactcaaaacccgatacgcaagtttcaccggacaggctcttgcgagcagccgttttgag

SEQ ID NO: 62527 - DNA, 323 bp, Setaria italica
  Peptide Sequence Number=SeqID_128501
caaatctttgctgtccagtcatcagaacatgaagccaaaaaggaaccagttggatcccacttgatagcattaacttcactctgatgactggacagcaaagatttggagtatgaagcaagataagtgtgtatttgattttaaggagcataccaaggaaatatatactattcggtggagcccaacaggcccaggaacaaacaatcctaatcagcagttgcttttggctagcgcatcttttgattctactatcaagctttgggaagtagagcaaggacgccttttgtacagccttgctggccataggcaaccagtgtattctgttg

SEQ ID NO: 62528 - DNA, 194 bp, Setaria italica
  Peptide Sequence Number=SeqID_128502
aataccgaagagaatgatgaagaaattgagaaggaggcctttctgcacaacagtgatgagagcaccaggtgggactgcattacatagaactggaatcaaataccgaagagaatgatgaagaaattgagaaggattttgccctccaggacgccgttcatgctcctcattacgttctttctctttcccttatcctt

SEQ ID NO: 62529 - DNA, 434 bp, Setaria italica
  Peptide Sequence Number=SeqID_128503
gggagtaggttatacagcctagatactttgttttctcctattcttttgtctcttcctttcattatgatgaacggatttcaggagagctgaagcagacattgttcaaacacaaggggcctatattttcgttgaaatggaataagaaaggagattttctcctaagtggaagcgttgataaaactgctattgtttgggacacaaagacatgggagtgcaagcagcagtttgaatttcattcagattggggaacagcgtccagttaaagcattcagtggtcatcagagtgaagttaatgctatcaagtgggatccaactggttcctttttggcttcatgttctgatgactggacagcaaagatttggagtatgaagcaagataagtgtgtatttgattttaaggagcataccaaggaaatatatactattcggtggag

SEQ ID NO: 62530 - DNA, 236 bp, Setaria italica
  Peptide Sequence Number=SeqID_128504
atgatgaagaaattgaagaagggatttttgattccagttctatgtaatgcaggtccccacctggtgctctcatcactgttgtgcagaaaggcctccattacatagaactggaatcaaataccgaagagaatgatgaagaaattgagaaggattttgattccagttctatgtaatggaggcctttctgcacaacagtgatgagagcaccaggtggcattgatggaaaatgcagtccc

SEQ ID NO: 62531 - DNA, 331 bp, Setaria italica
  Peptide Sequence Number=SeqID_128505
ctggttcatgagagttttccgaggctacttcactatcgtcattgtcctctgagttctcatcctggtttcgttctctacctataagcaaaggttgagctaaaccttcctccaagttagtgtttccttggtgacctattttagagagataaacatcaaatcagactagttgcgggtaatggtaaaaacactgccagaggcagcttacacatcctaatagtacaacgaggttagattcgggtataattcctcaaatcaaacaaaacaagtcactgtttcagtgggttgagagtttaccagattctgacgactgtttattgaccacacttttgct

SEQ ID NO: 62532 - DNA, 311 bp, Setaria italica
  Peptide Sequence Number=SeqID_128506
cattgcctcttcagtagagcgtgttgtaagtgtagagtgttgcagcgatcgaggctatgcagatcacaagaggtggcagaagcgtgacgttgaggaggaggtccgtgcctagataacctgctgcggtaattgtggcatctgcgattacacgggccaacgtcccagcctctgtcgagaggagtccgccattgtaggtccctcgggaaagcctcgacgacattactcgcgagagcaaggacagattcactcctgcatcgctcgatatcagtagttgcgtggcggataaatcagtaacatacgtcactgagttc

SEQ ID NO: 62533 - DNA, 386 bp, Setaria italica
  misc_feature (28)..(28): n is a, c, g, or t
  Peptide Sequence Number=SeqID_128507
gtgccctggtcgagtccttttctaagcnccttgatgacaggctccacagcagcgtcaatctcatcactgaccttgtcgatcttctcagtgactgcttcaaccttctctgcatcagtatccactacctcagcaatgtgctcaacctcttccactgctttctgcagagaccgtctttaggaagttgcttagccacatttgcagctagcttctctgttacctcagctacatgctccacaacctccacagtattctccacaaacccaactgtctcttcttcaagctgcctaactctgttgtagaatggcaaccaaccgtgtaacaaccaacaacctaccaaagaaacccaatacgtagacccaagactaaggaaatacgactagaaagaa

SEQ ID NO: 62534 - DNA, 251 bp, Setaria italica
  Peptide Sequence Number=SeqID_128508
gtagaatggcaccaccgtgtacaccacacctccaagaacccatcgtgcccagctaggaatcgctgaagagcctaaacgctgaccgccactgatggcggcggcggccaagtccgccgagacgatatccgagttcttgaggacaacccagctgtgcagaatcatagcaacatcaataaatcatgagctaattcgctagggaagtcaggtactgcggttaaacgggcacggaagcaattaccccgagtcgatgt

SEQ ID NO: 62535 - DNA, 423 bp, Setaria italica
  Peptide Sequence Number=SeqID_128509
aaatacgggggtactatcactaatcagattagacgattgggcgcatcttgtgattggagtcgtgaacgtttcactcttgatgaacaattgagtcgggcagttgttgaagcattcgttaggcttcatgataaagggcttgtataccaaggatcttatttggtcaactggtctcctaacctgcaaactgcagtatctgatttagaagtagaatactctgaacaacctggaagtttgtacttcatcaagtaccgtgttgctggtgggaccagggatgattttatgactattgcgaccacaagacctgaaactctatttggtgatgttgcaattgctgttaaccagaggataagcgttaacgaccaaaataatagttaggacaaagttaggaccaattagtaacccttagaacaatttagggaagaa

SEQ ID NO: 62536 - DNA, 251 bp, Setaria italica
  Peptide Sequence Number=SeqID_128510
ctgtgcgacgcgtgcgaccgccgtgtccaccgcgccaacaagctcgccgggaagcaccgccgcttctccctcctccacccttcgtcatcgtcgtcagcagcgcagacgaagccgccgctctgcgacatctgccaggtagctattgttctttgccgtcgttgcttctgtcgatcggggtccgatcggtcgttgcttctgaaactgaccgattgcccccgtggacttgcgcgcaggagcggagggggttcttg

SEQ ID NO: 62537 - DNA, 234 bp, Setaria italica
  Peptide Sequence Number=SeqID_128511
gtgtgcgcggccgaggcggcgtcggtgttctgctgcgccgacgaggccgcgctgtgcgacgcgtgcgaccgccgcgtgcaccgcgccaacaagctcgccggcaagcaccgccggttctcgctgctcaacccggcgccgccgtcctcgtccgggtcgtcggcggcgcagcagcagcagccgcctccgctctgcgacatctgccaggagaagagggggctcctgttctgcaaggag

SEQ ID NO: 62538 - DNA, 411 bp, Setaria italica
  Peptide Sequence Number=SeqID_128512
aagaaaacgaacgtaagacgtaggaacgtagactagaagacgggactagaatccacctggtgatcgggcaggaggcgaggtccaagtgctgcccgctggtgcaggggatcgcggacctggacgcggcgctctgcctctgcaccaccatccgcgcccgcctgctcaacatcaacatctacctccccgtcgcgctcgagctgctcatcacctgcggcaagcacgcgccgccggggttcaagtgcccgccgctctacgactgatcgatgacgagaggggtcgtcgaggagatcgatctcgctccccagctagctacatacatatggcgccgcctgagctcgccggcatgcgtggtggctgggatcatgcgccgcaggcggcggctgccagcgtgtcgaggatttgtgtcgtcat

SEQ ID NO: 62539 - DNA, 449 bp, Setaria italica
  Peptide Sequence Number=SeqID_128513
cttttgccacccttgagatccctgaccttatacgagcaggctctgtctgctcatcctggcattccgcctacacatgcctgcgcaacctgggacgtcaaaaagtcccagacgccatgcctgctttacacttctagatctgctggtgagaatgttgcatgtctatacagcctcgtggaaaataggacctacaagttaactctaccagagccacccatccgccgtaggcttctgatcggatcctccaatggctggttgattacagcagatgagaggtctgaactgcaccttgtcaatcccatcaccggtgaacaggttgctcttccgtcagttatcaccatcgagcaggtgaaacccatcactgatggttcaggtatcatccgcaagtacaagttatcatactactgtagagaaatggacgagggacgaccgaagatagttgctctcgacaa

SEQ ID NO: 62540 - DNA, 204 bp, Setaria italica
  Peptide Sequence Number=SeqID_128514
catgcctgctttacacttctagatctgctggtgagaatgttgcatgtctatacagcctcgtggaaaataggacctacaagttaactctaccagagccacccatccgccgtaggcttctgatcggcgctgggtgagaatgttgcatgtctatacagcctcgtggaaaataggacctacaagttaactctaccagagccacccaag

SEQ ID NO: 62541 - DNA, 320 bp, Setaria italica
  Peptide Sequence Number=SeqID_128515
cgtaggaaataaaagaagacggtaggaatgcgtgcgtggcgatggctctccgcacgagagagctgtcttgtaccgcatgcgatgatgtaaatatggggatgtgagggacctgctatgtggtggcactgttctgcctaaatcatgctcgaaacgtgtgtagcatgttgagaggctatgtgtggtgttaaataaagtgaacctgccatgtactaaatcgcatgcatgcgtccaccatatatcatcatcttctttctacttcatccttactccttttctttagcgaattaaatttgtatttctcatatgcatacccatatgag

SEQ ID NO: 62542 - DNA, 394 bp, Setaria italica
  Peptide Sequence Number=SeqID_128516
tcccctattcgtccgtacgtacgtaggtaggtactaacgtaccgtcttgcaggcagcggtgccagcaccaccgcgactactccaggaggcagcagtgcgtgagcgagtgccgccgccaacacggcggcggctgggaggcggcggtggccggcgccgtcctccaggtggtgtgacgcgcatggcgtggcgcacagcgagtaaaataaaaacggccgtacgacgtgtcaccggccgccgccggcgtgcctacgtggctagctggcctgcggagacaaccccacatcgaccgagcactgcttcccgtccgtatatacacctgtatatacgcgcgcgtatacgcctcgctgtacgtagaggaggcgtaggaataaagagcggtgatgcgtgcgtggcg

SEQ ID NO: 62543 - DNA, 297 bp, Setaria italica
  Peptide Sequence Number=SeqID_128517
aacgaaccgaaccgaacgaaacggaccccaatacgaccgaacgaacgaaggaggacaacgaccgctgcaggcagcggtgccagcaccaccgcgactactccaggaggcagcagtgcgtgagcgagtgccgccgccaacacggcggcggctgggaggcggcggtggccggcgccgtcctccaggtggtgtgacgcgcatggcgtggcgcacagcgagtaaaataaaaacggccgtacgacgtgtcaccggccgccgccggcgtgcctacgtggctagctggcctgcggagacaacccc

SEQ ID NO: 62544 - DNA, 176 bp, Setaria italica
  Peptide Sequence Number=SeqID_128518
ttttcgtttacgtttaggtttactttaactttaactttacttttgttctttccgttaccgtcttgtcctagtcagagctgccagcgccacggcgaccgtgagacgcagcgccagtgcgtgagctggtgcgagcgccaggagggctgccgccgccgcgacggccccatcgccgacga

SEQ ID NO: 62545 - DNA, 199 bp, Setaria italica
  misc_feature (191)..(191): n is a, c, g, or t
  Peptide Sequence Number=SeqID_128519
acgaaagaaagaacgtaacggacgacgtaacaaactagacaaagaaagtgtcgggagcggtgcgagcgccgccccgccggggactggcaggagaagcagcgctgcctcatggagtgccgccgccgtgacggccccatcgccgacgaggaggaggacaacgaccgctgcaggcagcggtgccagcaccaccncgactacg

SEQ ID NO: 62546 - DNA, 165 bp, Setaria italica
  Peptide Sequence Number=SeqID_128520
gcggcagcggacgtcgacgtgctccgctccgggaggggcgagtgccggtggaggtagacgtagacgaccgactaaccaaggaaccagccgttgctgttgcaggagtgcatgacccagtgccgcagccgcgaggcagcagggcgacggcgtcgaggaggaggaggg

SEQ ID NO: 62547 - DNA, 419 bp, Setaria italica
  misc_feature (178)..(178): n is a, c, g, or t
  Peptide Sequence Number=SeqID_128521
ttgagatggcagcatccgctctgaaccccttcgtcgccgcctgcctcgtggccctcgtcgtcgccgcaggtgcggcgcggatcgtgccggacactgccacgatggatccggacatgctgacgacgaggccgtgccacagcaacaacgggtggagcggccacctctgcaaggacgtgtncggggctatcgggttcagccgctacgacttcaccctggccaacacggccacgggatcccagtccacctgctgttgctgccccaagggctacaagaacgcgtgcctcaacgtcaaggagtagtgggtgggtttgccgtcgcgtgcgcaggctgtgaacgaagccaacaagtagactacgtagtaaatagtaaaggggaagtttaaggacaataaatacaaaagaagaaataaaagttaaaga

SEQ ID NO: 62548 - DNA, 405 bp, Setaria italica
  Peptide Sequence Number=SeqID_128522
tccgactcagtgacgtatgtaccacaagcacaaagctcatcgcagagcagagaacccaaccaaccgattgagatggcagcatccgctctgaaccccttcgtcgccgcctgcctcgtggccctcgtcgtcgccgcaggtgcggcgcggatcgtgccggacactgccacgatggatccggacatgctgacgacgaggccgtgccacagcaacaacgggtggagcggccacctctgcaaggacgtgtgcgggctagcgggttcagccgctacgacttcaccctggccaacacggccacgggatcccagtccacctgctgttgctgcccaaggctacagacgcgtgcctcaacgtcaaggagtagtgggtggtttgccgtcgcgtgcgcaggctgtgacgagccacagt

SEQ ID NO: 62549 - DNA, 321 bp, Setaria italica
  Peptide Sequence Number=SeqID_128523
tttgttcttacttaaagttctttcttatttcgttcttagtagtctagtagaacccaaccaaccgattgagatggcagcatccgctctgaaccccttcgtcgccgcctgcctcgtggccctcgtcgtcgccgcaggtgcggcgcgtatcgtgccggacactgccacgatggatccggacatgctgacgacgaggccgtgccacagcaacaacgggtggagcggccacctctgcaaggacgtgtgcggggctagcgggttcagccgctacgacttcaccctggccaacacggccacgggatcccagtccacctgctgttgctg

SEQ ID NO: 62550 - DNA, 491 bp, Setaria italica
  Peptide Sequence Number=SeqID_128524
tattcctactaagtagtctaagtctacggtctagtcgacttccgggacctattgacaacgagggcaggttcatgccggtgaacttcgagaacatgttcagcaagtacgcgcggacctcccccgaccggctcacctacagggagctgtggtcgatgaccgaggggttcagggaggtgttcgatttctacggctggttcgcggcgaagctggagtggacgatcctgtacgtgctggcgcgggacgaggaggggtacctgtcgcgggaggccatgcggcgcgtgtacgacggcagcctcttcgagtacgtcgagaggcagcgcgcgcagcacgccaagatgtcctaggcttgtccgggggctgcatgcggctgcctctctgcccgccttccagttcgagctgcacgcgtgcgtgaaatggcgtgtagctgagactcggacatgtcactctgctcgccggcgtctctggatgtaaataatcaccaaacgtgtcgc

SEQ ID NO: 62551 - DNA, 436 bp, Setaria italica
  Peptide Sequence Number=SeqID_128525
taaaaagtaaaaaggtaaaacgaaaataaagaaaccgaaaggggttaacaagggaaggtagttacgaatttactaacggctggttcgcggcgaagctggagtggacgatcctgtacgtgctggcgcgggacgaggaggggtacctgtcgcgggaggccatgcggcgcgtgtacgacggcagcctcttcgagtacgtcgagaggcagcgcgcgcagcacgccaagatgtcctaggcttgtccggggctgcatgcggctgcctctctgcccgccttccagttcgagctgcacgcgtgcgtgaaatgggcgtgtagctgagactcggacatgtcactctgctcgccggcgtctctggatgtaaataatcaccaaacgtgtcgcaacatgtcagcatgtagccgtcgtcgatcggtcaataacaacgcaggagttcgcct

SEQ ID NO: 62552 - DNA, 381 bp, Setaria italica
  Peptide Sequence Number=SeqID_128526
tctttctcttctggtactgttaccatctgcagtcactgaacaaaattaaagacctgatctctatgaccatttccccaaatgtcaatctgccgggggtacggcgggtggttcaggttcatgccggtgaacttcgagaacatgttcagcaagtacgcgcggacctcccccgaccggctcacctacagggagctgtggtcgatgaccgaggggttcagggaggtgttcgatttctacggctggttcgcggcgaagctggagtggacgatcctgtacgtgctggcgcgggacgaggaggggtacctgtcgcgggaggccatgcggcgcgtgtacgacggcagcctcttcgagtacgtcgagaggcagcgcgcgcagcacgccaag

SEQ ID NO: 62553 - DNA, 372 bp, Setaria italica
  Peptide Sequence Number=SeqID_128527
agggacgaagactagggacgaacgaccaaagggacggggaccgtagtaaccaacggacatgtcggccacggaggggaaggactcccagaccatcgtggcgctgcagtcgccggtgaccgtgatgcgccccgtccgcggcgacctcgaggagcacgtccccaagccatatttggcgcgagctcttgcggtcccggacatctaccaccctgacggcagcacggacggacacaggcaccaccacatgagcgtgatgcagcagcacgtcgccttcttcgaccgcgacgacaacggcatcatctacccctgggagacctaccaaggatgccgcgcgctcggattcaacatgatcatgtcgttcctgatcgcgctcat

SEQ ID NO: 62554 - DNA, 357 bp, Setaria italica
  Peptide Sequence Number=SeqID_128528
caagtacgcgcggacctcccccgaccggctcacctacagggagctgtggtcgatgaccgagggggttcagggaggtgttcgatttctacggctggtgagcccactgaccgaaacgcccccagattttccccagatgacacgagcgatgaggccttcgttcgtggctgatgccatcatcatctatgtgatcgtaggttcgcggcgaagctggagtggacgatcctgtacgtgctggcgcgggacgaggaggggtacctgtcgcgggaggccatgcggcgcgtgtacgacggcagcctcttcgagtacgtcgagaggcagcgcgcgcagcacgccaagatgtcctaggcttagtaccga

SEQ ID NO: 62555 - DNA, 400 bp, Setaria italica
  Peptide Sequence Number=SeqID_128529
gtgccaagaacctgccggccatgtgtggcatttcactgcccagttactgcacccagagcagcatgctgaagttcataatacccagagcagcatgctgaagttcataatactcggagccttgcagcatcatctgctgtactgtagtttcaaccaagctgcagacctcctggcatcgatggagcggctccacttgcctgagctgctggcagcactgctggtgcatcgccatgcagctgcttggctgccatgtgcgcgaccaggcgtagggccaccctgtgaccgcgggacacctctgcctgaggaattcaccacatgggtgcaggcttccatagtagcctggctgctgcgcagaggcgctgctagctgcgagagtgaggagagcgagcacgatgaagatctt

SEQ ID NO: 62556 - DNA, 355 bp, Setaria italica
  misc_feature (320)..(320): n is a, c, g, or t
  Peptide Sequence Number=SeqID_128530
ttggtcgtctacggtagttggttgtctagttaacttgggtctagttgaaattgccacacatggccggcaggttcttggcacccagagcagcatgctgaagttcataatactcggagccttgcagcatcatctgctgtactgtagtttcaaccaagctgcagacctcctggcatcgatggagcggctccacttgcctgagctgctggcagcactgctggtgcatcgccatgcagctgcttggctgccatgtgcgcgaccaggcgtagggccaccctgtgaccgcgggacacctctggcctgaggaattcaccacatgggtncaggcttccatagtagcctggctgctggcgccaga

SEQ ID NO: 62557 - DNA, 329 bp, Setaria italica
  Peptide Sequence Number=SeqID_128531
taacaaataaaataactacggaagaccttagacaagacaatacaatactagctgtactgtagtttcaaccaagctgcagacctcctggcatcgatggagcggctccacttgcctgagctgctggcagcactgctggtgcatcgccatgcagctgcttggctgccatgtgcgcgaccaggcgtagggccaccctgtgaccgcgggacacctctgcctgaggaattcaccacatgggtgcaggcttccatagtagcctggctgctgcgcagaggcgctgctagctgcgagagtgaggagagcgagcacgatgaagatcttcatgccggctg

SEQ ID NO: 62558 - DNA, 334 bp, Setaria italica
  misc_feature (301)..(334): n is a, c, g, or t
  Peptide Sequence Number=SeqID_128532
gtgcaatgtgccagatgatgcacctgcaatagattaggatggcgatgcagctgccatttatgtggaacacagcagccatggtgatgcagccaacctattggaggcagccctttcctagctgtgcctgctagatagatatatatgtcttatgttgtacccaaggaataaagttcacataccatcgtgtgtgactcaccagaaataaattattgagtatgatacatatattgttgtgaaaattcaaataccatcatatgtgtatttatcatgtggattacattaggtgtgtattggttgaacnnnnnnnnnnnnnnnnnnnnnnnnnnnnnnnnnn

SEQ ID NO: 62559 - DNA, 242 bp, Setaria italica
  Peptide Sequence Number=SeqID_128533
tgacgtatgtcgcgggcccaacagccgcaggaacacggcgtcgctctgcgccccgatgacgcggtgttcctgcgcgggcccaacagccgcagggtctcgtccgcgtgaacaggagcggacgatcgccggcgttgacgctagctcgtggccaccggctcgaggtcatgccatggagagagaagaaagtggcattgcattatttcacgtacaagacgtaggtaggttcgattactattactact

SEQ ID NO: 62560 - DNA, 341 bp, Setaria italica
  Peptide Sequence Number=SeqID_128534
aagaatacgaccggacgttagaacgctagctcgtggccaccggctcgaggtcatgccatggtgagggagggtaagagtggaataagttagctgccgcgcgtgtacccgcgggtggcgtcgtgtacgtacgtgtagaggagggtgctactgttgcgcgcgtgcatgcatgtgttgtacgggaatgtgtatgtaatcgaacctacctacgtcttgtacgtgaaataatgcaatgccactttcccgtacaacacatgcgtgtacgtacgtgtagaggagggtgctactgttgcgcgcgtgcatgcatgtgttgtacgggaatgtgtaggtaggttcgattacat

SEQ ID NO: 62561 - DNA, 333 bp, Setaria italica
  Peptide Sequence Number=SeqID_128535
ttccccatcggaggcgagagcccggagtcgttcttcagcgtcttcagcgacgacgttctccaggccgcgttcaacactcgccgtgaggagtgggagcaagtgttcgagaagcagagcaagggcgagatcacgacggcgtccgaggagcagatacgggagctcagcaggtcctgctcgcgcgccggccgcagccacggcggcggcgagtccatgtgggacatcaagctgtgcagcctcacgagcaagaggccgctccactccaacaaccacggtctaggtctacttacgtagtatttcttaccggttcgttacgtttacttttgtttcccgttt

SEQ ID NO: 62562 - DNA, 223 bp, Setaria italica
  Peptide Sequence Number=SeqID_128536
cctgcgcgggcccaacagccgcagggtctcgtccgcgtgaacaggagcggacgatcgccggcgttgacgctagctcgtggccaccggctcgaggtcatgccatggtgagggagggtaagagtggaataagttagctgccgcgcgtgtacccgcgggtggcgtcgtgtacgtacgtgtaagaaggaagggtagactaactagttagacgacgacgtagacaata

SEQ ID NO: 62563 - DNA, 207 bp, Setaria italica
  Peptide Sequence Number=SeqID_128537
tactaaaagtactaaggttagaaagtcccgcatcagggagggctccgtgatcgtgatcccggcggggcacccgatgacgctcgtcgccggcgaggagcgtcatcgggtgccccgccgggatcacgatgacgctcgtcgccggcgaggacaacaacctcgccgtcctctacttcagcgtcaacgccaggcacgacgagaaggtgttcc

SEQ ID NO: 62564 - DNA, 176 bp, Setaria italica
  misc_feature (176)..(176): n is a, c, g, or t
  Peptide Sequence Number=SeqID_128538
tgtattcgttgtattcccggtcgggtctacccgtattgtacgtcttcgttcgtccggtcgtaggacaacaacctcgccgtcctctacttcagcgtcaacgccaggcacgacgagaaggtgttcctggtgggcagcaacggcctgctgcggcagatggacgaggcggccaaggcacn

SEQ ID NO: 62565 - DNA, 272 bp, Setaria italica
  Peptide Sequence Number=SeqID_128539
aacggtaaggaacgaacctagaagaacgaataggaccaatcagcaacgtcaccccctaccaccactactcctacccgtcatcgtactatgcttacgcgcacccgtcttattattaccagtgccagtatccgcagccgtattacccggcgtactcgtacgcttgcggccatggcatgtatgggtatccgccggaggcgttcaccgaggagaacccaaacgcgtgcgccatcgtttgatgtggtaaagggcaaggagcttgtaatatatactcc

SEQ ID NO: 62566 - DNA, 217 bp, Setaria italica
  misc_feature (1)..(57): n is a, c, g, or t
  Peptide Sequence Number=SeqID_128540
nnnnnnnnnnnnnnnnnnnnnnnnnnnnnnnnnnnnnnnnnnnnnnnnnnnnnnnnngttatcctgaacactgcgtttttattcctcattataaacatgacatccaaactagacatccaccgtgcagtacatccgatccgccactccgaccaagaagaacgctacttcttggtcggagtggcggatcggatgtactgcacggtggatgtctagtact

SEQ ID NO: 62567 - DNA, 102 bp, Setaria italica
  Peptide Sequence Number=SeqID_128541
ttctcgtggatgtacaagtacctgacgggcaagcacccgccggcggtcgcggcagtcgccgccttcagggccgtcatcatggcgctctgcctctgctgcgtc

SEQ ID NO: 62568 - DNA, 440 bp, Setaria italica
  Peptide Sequence Number=SeqID_128542
cacagagtcagaagttgagataatcacaaatcacaagggtgcctgcggagaaggaagaaaaatctccgaagccgagctgaactatccttcaattgcagtagctgccagcaccggcaaacttgtggtgaacaggacagtcaccaatgtcggagatgaaatttcatcctactctgtggacattgagatgccaaaggaagtaacagcttcagtgtcaccaagaaagctagaatttaccaaggcaaatgagaagaaaacatttactgtgagtttaacttgggatgccaatgaaaccaacattaaaagggcttattattccatataacaagttgcagactcgcatacaagtccaagattcactaggttacattagaatattacaatggggctctcacaacatgtttgtcagagacccacctgaggcttccttcagcatgcttagt

SEQ ID NO: 62569 - DNA, 369 bp, Setaria italica
  misc_feature (50)..(50): n is a, c, g, or t
  Peptide Sequence Number=SeqID_128543
tactccatctcctgtggttgcttacttctcttctcgcggtccaagtactnaaaccctggtatcttaagctgacataatcgggcccaggagtgaatgtattgcagcttggccagtcaaggttggaccaagagcagaaggtgaaaagaatatggcatttaataccttatctggaacatcaatgtctgcacctcaccttagtggaattgcagctattatcaagagtgcgcatccagactggtcacctgcggcgatcaagtccgcaatcatgacaactgcctatgtgctggatgataacaagaagccgatcctagatgagaagctcaattccagtcttgggtctattttctattttatttaggtttgttctta

SEQ ID NO: 62570 - DNA, 273 bp, Setaria italica
  Peptide Sequence Number=SeqID_128544
caatagacaggaggatggaagctattgtcaagctgggtgacggccgctcatttgcggtgagtcagcctaccaaccatctaatcttgattcattgccactggtgcatgaattagattctggagatgctaaagggaaggttattgcttgcgaccttggtggttctctctcccaactcaaacttgggaagactgttcaggatgctggtggtgctgggatgatatacaacttaggaaaaagaaggaagaagtaggaacaagaaataacttttagaca

SEQ ID NO: 62571 - DNA, 175 bp, Setaria italica
  Peptide Sequence Number=SeqID_128545
agaagccgatcctagatgagacactcaatccggctgggcatttcagtataggtgcagggcatgttaacccctctcaagctgtcaatcctggtctaatctatgacattgatgaagagcagtacatttcgtatctgtgtaaccatcaagcccacaaagatacgaaatgtactgctca

SEQ ID NO: 62572 - DNA, 278 bp, Setaria italica
  Peptide Sequence Number=SeqID_128546
ccggctccgcgaccggcgcgcgcggttcgtgcctcagcgcgtggccctccgtacccgcgtttcggggtgcgcctgacgcggctgctgattcctccttcgtcctcctcgccgtccccggcgcgatggaggccggctactgcaaccgcaagaagaccgacatctgtgagggcgtctgcgacaacgaggtgagcccccgctccggccagatccgtctgtcgctttccctcccgcacgcgtgtcttccccccggcgggtcgccttgtccgcgcgggggagcc

SEQ ID NO: 62573 - DNA, 456 bp, Setaria italica
  Peptide Sequence Number=SeqID_128547
caggtaccagggcccagcgggccatttgcttggttgtgcacctgctgttgcttcgatctggctgacatctccatctggatcaacctttcaaaggcctctggatgattgcctctcacctctgggcctgatgggcctggcatcatcaatccaaattctccatagttgggctggcgagggtgcatatggaaattatttacattgcccatctcaggtctataaccagccatgtgatgcacaggctgagatggtagaacacctcttggcaagccttctggaggaaaacttccaggcatggacatgtgttgtagcataagatgatgtgcagccgggtccaagtgagggacccctggaccatgaagattatgttgcataggattcgcattagatgggaaagaacggtaggaaccagcaaaccccattcgacatgccacagtcgatacgccatgatccccaccg

SEQ ID NO: 62574 - DNA, 339 bp, Setaria italica
  Peptide Sequence Number=SeqID_128548
gccaggccgcttgtccctcctggttttgcaaatgcatttgtggacaaaaagcttcagtcacagtcatccaatatctcacttgacccaaagctagaggttaaccagtcagcaacagagttcactgcatttgaaagcaaagggaagggaatttccgataacattgctattatgggttcaaagcacacgcttccatctggtggagttgcctcttcaactgaattggcctctagcattctgaaagggagtgaggattgggaagctgatgtgatggataagtattctataggaaaagaaggcaaatcaaaaaatattgatccagttaggaaggatgattcaatc

SEQ ID NO: 62575 - DNA, 223 bp, Setaria italica
  misc_feature (9)..(9): n is a, c, g, or t
  Peptide Sequence Number=SeqID_128549
aaggctgcncctttttcgcggaaagacattgactcaatgaacgatgagacatttgggtcttctgagtgctcaaatgaggatagagcagaagaagaaaaaagcggaggggttagtttctcttactgcaacataaaacatccatttttttacccacctcaatcatctatgctgtctcacattgccctatatgcagcgtcttttgaattgatgagaaaagagcaac

SEQ ID NO: 62576 - DNA, 154 bp, Setaria italica
  Peptide Sequence Number=SeqID_128550
cggtttgggtaaagagtgaccacacacatacaacaaaccacacttctggagcagcaagtctatgggaacaaggatatgatggtgtggtgactggcaggcacgctgtcgttgtcttagcagcctcctgtgtaatgatgtgtttgtgtcctgtggc

SEQ ID NO: 62577 - DNA, 341 bp, Setaria italica
  misc_feature (1)..(48): n is a, c, g, or t
  misc_feature (117)..(117): n is a, c, g, or t
  Peptide Sequence Number=SeqID_128551
nnnnnnnnnnnnnnnnnnnnnnnnnnnnnnnnnnnnnnnnnnnnnnnngggtttacaacttggaactgaagatcatgcattgcaagtatgcaagaatgcgcatgtccacgcaggctnaaggggggaatcaacactagagaccagcacaaaacatcacagcagcaactaatcagcttgaaaccctgccttgataaatatattagcaagttgaaacagacaggtttatcatctcagatcactcatgcttgcaggacatcaccccgagctgaaatgcaagtgttgtaagggttcgtccgatcaccttggagggtcgcatcatgccgcctcagcgtaagtcctaa

SEQ ID NO: 62578 - DNA, 392 bp, Setaria italica
  Peptide Sequence Number=SeqID_128552
taaccgttaagttactaaaagtacggttgttggttaggtccccctattgtaattattattctaccctaagtattcctagtagtaggtaccacgaggaggaggaatgtccatagctgtgaaaccactgatgcactgagcagcagttccttcaccaaccttcaggatatattgttctggtttgagtgcgaactttctacccccgatggtaaaggcaatgtcaggcatggatgcaactctgctgcagtccacagatgactctcccataggactaggaagcttttcacacagctgattaatgtactgcaacactagatcctgagtttgattctgtgcaagctggctcgtatccatacaacagcagttcacaggcattgcacactagcttcattgaa

SEQ ID NO: 62579 - DNA, 240 bp, Setaria italica
  misc_feature (22)..(22): n is a, c, g, or t
  Peptide Sequence Number=SeqID_128553
aactgctgctcagtgcatcagnggtttcacagccatgaatatatcacccaagatccagagaggaccacgaggaggaggaatgtccatagctgtgaaaccactgatgcactgagcagcagttccttcaccaaccttcaggatatattgttctggtttgagtgcgaactttctacccccgatggtaaaggcaatgtcaggcatggatgcaactctgctgcaagtaccaacaagaatagaaca

SEQ ID NO: 62580 - DNA, 325 bp, Setaria italica
  misc_feature (76)..(76): n is a, c, g, or t
  misc_feature (95)..(95): n is a, c, g, or t
  misc_feature (322)..(322): n is a, c, g, or t
  Peptide Sequence Number=SeqID_128554
aggaatgtccatagctgtgaaaccactgatgcactgagcagcagttccttcaccaaccttcaggatatattgttcnggtttgagtgcgaactttntacccccgatggtaaaggcaatgtcaggcatggatgcaactctgctgcagtccacagatgactctcccataggactaggaagcttttcacacagctgattaatgtactgcaacactagatcctgagtttgattctgtgcaagctaggactaccgtaataccaataacaaacaagaacaaagtttaacaaacaaaggaacaaaatttaaagtaaacaaacaaataaanaaa

SEQ ID NO: 62581 - DNA, 426 bp, Setaria italica
  misc_feature (1)..(59): n is a, c, g, or t
  Peptide Sequence Number=SeqID_128555
nnnnnnnnnnnnnnnnnnnnnnnnnnnnnnnnnnnnnnnnnnnnnnnnnnnnnnnnnnnagtttttttcttttactttaggtttctttattttgttcttactattagtcttcattgaagagaccatttgattccccagcttcatcatccaccacgctccgaataccagcactaactccatgagctccatcaaatgtacatagaccaactgaagagcatatctttgacggttgtgtctctgctagtagctgatctatgatctgttgcccatactgagaaacaactgccttacattcttggctgactacaccagcagcaccaatcttttcatttatcagagtaattatggctgtgggtccagtaagcaacgatgttccagatctgctatgctgcacagcccgaagcacagaaacctgtggactttcct

SEQ ID NO: 62582 - DNA, 177 bp, Setaria italica
  Peptide Sequence Number=SeqID_128556
gaaactgctgttgtatggatacggagccagcttgcacagaatcaatgtcaggcatggatgcaactctgctgcagtccacagatgactctcccataggactaggaagcttttcacacagctgattaatgtactgcaacactagatccttgtagttttgtaattttctttgtttgttta

SEQ ID NO: 62583 - DNA, 310 bp, Setaria italica
  Peptide Sequence Number=SeqID_128557
ggagggtcggcatcatgccgcctccagcgaagccaaccttcaggttgccgtagtcaaagacggtgtggtaggcccccatgaatatatcacccaagatccagagaggaccacgaggaggaggaatgtccatagctgtgaaaccactgatgcactgagcagcagttccttcaccaaccttcaggatatattgttctggtttgagtgcgaactttctacccccgatggtaaaggcaatgtcaggcatggatgcaactctgctgcagttcctactagtattgtacttcttccctattaggtacttaggtaagta

SEQ ID NO: 62584 - DNA, 354 bp, Setaria italica
  Peptide Sequence Number=SeqID_128558
tagtacctaacttgtaagtagtcattattcttttgtacggtttgttgttcttcttgcttagttagcttgattctattgattcttgttgcccatactgagaaacaactgccttacattcttggctgactacaccagcagcaccaatcttttcatttatcagagtaattatggctgtgggtccagtaagcaacgatgttccagaatctgctattgctgcacagcccgaagcacagaaacctgtggactttcctccaatcaggacatcgcccataccaaactgccagtatcccttcctagttgacagggacatatgtatgatttcctttatagtgattaggatcaattcctccaaac

SEQ ID NO: 62585 - DNA, 371 bp, Setaria italica
  Peptide Sequence Number=SeqID_128559
tggatgcaactctgctgcagtccacagatgactctcccataggactaggaagcttttcacacagctgattaatgtactgcaacactagatcctgagtttgattctgtgcaagctggctccgtatccatacaacagcagtttcacaggcattgcacatagcttcattgaagagaccatttgattccccagcttcatcatccaccacgctccgaataccagcactaactccatgagctccatcaaatgtacatagaccaactgaagagcatatctttgacggttgtgtctctgctagtagctgatctatgatctgttgcccattactgtagtaaactaacttgtcctttactatttctttggtcttgtactta

SEQ ID NO: 62586 - DNA, 362 bp, Setaria italica
  Peptide Sequence Number=SeqID_128560
cgcaaggtggcgatgaagaggagaagttgatagtctttggagaggaagcacaagcgaagaagacggagcaagaatgcttgatcatggtcataagaacacatagagtgtatgtggagccactgcgtgcgcaaattatagcgtcaaggatgggcgggagtggcagtgtgggatgctccatgttttatgcatttcgatcataatttatgtctgaatttgaatttttcaaattgtgggtttgaaatgatgttcaattgtgtgcggtagaaaaaactaaaatagttagacgaactagacaaggaagtaattaccttaagacaagacttaactaaccttagtacaaatagttaaacttaccttaaaaa

SEQ ID NO: 62587 - DNA, 293 bp, Setaria italica
  Peptide Sequence Number=SeqID_128561
acctgcgcgaggcggtgcgtctgcccatcggggaggacctcaacgagtggctggctgtcaacactgtcgacttcttcaacaatgtgaacatgctgtacggcacactgatggagttctgcacaccagcgacctgcccgatcatgtcagctggaccaaagtatgagtacaggtgggccgatggagtcaaggtcaagaagcccatagaggtgtctgcgcccaagtacgtggaagtaacctgatggaactggaatcgaaagacccaagactaggaatagaatagaaaaccaataata

SEQ ID NO: 62588 - DNA, 424 bp, Setaria italica
  Peptide Sequence Number=SeqID_128562
ctgcatcaactttctgaagaagagagttcatgggctgaagatgaagtggagacaactgaggatgaagaacagtatgaagttgaggagtcgtcttttgtgtctgccgaacaagatacccaagaatcaccacaggattacctggatccacaagcactacagaggatgcttcaagaacttgctgaaaaaattattcgctgggaaacaaactttttgtttttccagaggtactgaaagctgattcaactattgatctctatttcaatcgtgatctatcatctttagccaatgagcctgacgtactcatcaaaggagcattcaatgggtggaggtggaagtttttcactgaaaaattgcacaagagtcgtaacttgggtaggggtacttggtttggtttccttttgtttcttttaaactttttgtttta

SEQ ID NO: 62589 - DNA, 495 bp, Setaria italica
  Peptide Sequence Number=SeqID_128563
ggcatccgcaactaccgcgtcgcgatcctggaggccaacccgcgctccttcatcgtgcccagccacaccgacgcgcacagcatcggctacgtggcgcaaggcgagggagtggtgacgacgatcgagaacggcgagaggcgctcgtacaccgtcaaggaaggcgacgtcttcgtggcgccggccgggcggtcacctacctcgccaaccccgacggccggaggaagctcgtcatcgtcaagatcctccacaccatctccgtgcctggcaagttccagttcttcttcggccccggcgggaggaacccggaatccatcctgtcgagcttcagcaagagcgtccagagagctgcttacaagacctcgagcgaccggctggagaggctgttcggcaagcaggataagggcatcatcgtgcgcgcgtcggaggagcaaggtccgacgaagactagacggacgaaccaaattaagtaaaccttaaacttaaagtaaaaattaa

SEQ ID NO: 62590 - DNA, 486 bp, Setaria italica
  Peptide Sequence Number=SeqID_128564
taggttccccatgaagcgagccggccagccagccgaggtcgcgccaagcttcgtcttcctcgccagcgagcaggactcgtcgtacatgtcgggccagttcctccacgtcaacggtacgtacggcggagtatgttgatactgtacgtacaatttcacactgagactgtatactaactacatgacgacgagcatggatttgcaggaggcgtcatcgtcaatggctagagaggatgaagcagccggaactcgagggtcgccgccgacgggatgtcgtcgcttgggctggtgtcagcgtgtcgccatgggagtgcttttatggctgtgtatgtatgtcgtgtccaggtcgaaaatggaagaagtgacgcgtttgtgtgcgcgtgtaccaagtagggtcagtacgtgcagaagcagctgtagctgtgtcgttcggtgcgcagtgcttgagcacagcacgtgtaaaaagggaggaatgtgtccgaataaata

SEQ ID NO: 62591 - DNA, 333 bp, Setaria italica
  Peptide Sequence Number=SeqID_128565
ggtgcccgccgacctgggctacgaggagaactgccgccgcgtggtggaggaggtcgccggcgcctacggcggccgcatcgacgtgctggtgaacaacgccgcggagcagtacgagcggccgtcgctgtccgacatcaccgaggcgaacctggaccgcgtgttccgcaccaacatctactcctacttcctggtgaccaagcacgcgcttgccgctacatgcgggaagggagcagcgtcatcaacacgtcgtcggtgaacgcgtacaaggggaacaaagaacgactagaaccgaactaacaacggaccaaccaaagggacgaccaatacgtagga

SEQ ID NO: 62592 - DNA, 284 bp, Setaria italica
  Peptide Sequence Number=SeqID_128566
aaataattctatctaatgcaagatcttagccttaaactggacagcgcgagtaggaaaccgaggatcagggggctcgactgggagaaggaaagggggcggcttaccgattcctagatccggatggatgacggcgactttaagctttttgtcttcgtccccgacggcgacgagccgccgacaccccctcccgccacagccatctcctccatccgactcgtgctgttgttaaggaccaggaccagtgattgctgcacacacgagaaaaaaaaaggaaaagaaaagga

SEQ ID NO: 62593 - DNA, 364 bp, Setaria italica
  Peptide Sequence Number=SeqID_128567
tctcagcacgccgcggcaagctaattgaattgcgtcgccactccactagaagtatcaattagtacatatatgaagcataagttgcaaaacttaatcttccatcaacacagtgagacaaccagcgtccagcgcttgcgcaaaattgagaatcaccaaaatctctaaaccggctttgctctcttgcagtaaaagccaaaagtgtttcttcctgggaagtggcccgatctacaaaataattctatcgattcctagatccggatggatgacggcgactttaagcttttttgtcttcgtccccgacggcgacgagccgccggcaccccctcccgccgcagccatctcctccgtatctcctccgtccgac

SEQ ID NO: 62594 - DNA, 400 bp, Setaria italica
  Peptide Sequence Number=SeqID_128568
tccttgtcttacttgttaaagttgcatcttgcaaagcaccaccagaacggagcaaagcaaatgctgaaatggctagatcaagattcttcttcctctcaaatagaacaccaggctcaattcctctagcatgtacggcacgaaaggtccttgcaaaggttgctgcagtgaacttgctgttgaccaaaatcaaatctgccataccagtagtgtactcctcaatcatgtcaattggcttgcggtataacctcctaagcatggtagtatgttgtgcaagcaaaagatcagggaaatgacaatagaacactatcttggatgatgcctttagttgagcagtggaatcacaacagaaacttgatctaccaatataacatacaaaaggagggaccaccagagtagcaca

SEQ ID NO: 62595 - DNA, 255 bp, Setaria italica
  Peptide Sequence Number=SeqID_128569
cttttgagctcctcaaggtaatcaacattttccttgagacgcttatcatagccacctgctactgttaaagttgcatctcgcattagatagaattattttgtagatcgggccacttcccaggaagaaacacttttggcttttactgcaagagagcaaagccggtttagagattttggtgattctcaattttgcacaagcgctggacgctggttgtctcactgtgttgatggaagattaagttttgcacttatgctt

SEQ ID NO: 62596 - DNA, 403 bp, Setaria italica
  Peptide Sequence Number=SeqID_128570
caaacatagtgatacgattctagatgtggaggactataccagtagtgtactcctcaatcatgtcaattggcttgcggtataacctcctaagcatggtagtatgttgtgcaagcaaaagatcagggaaatgacaatagaacactatctggagatgcaacaaacaaactgttaacatgatagaagaaactagagagcactaagcattccgaacaagagattgataccttggatgatgcctttagtttgagcagtggaatcacaacagaaacttgatctaccaatataacatcaaaggagggccaccagagtagcacacagagcgcaacaaaatgcatcgaagataagcacagacagcatgaaagcggtaaaacacatggcgggcaagaatctccataaacagtaa

SEQ ID NO: 62597 - DNA, 292 bp, Setaria italica
  misc_feature (164)..(164): n is a, c, g, or t
  Peptide Sequence Number=SeqID_128571
accttttcgaatccctgaccataacggaggaggaggaggaggagccagctgctgatgcagtaagaacgttgcgaagtcttactttcctgatctacacatcatttatctttgttttgctgatgagaccgcctaatacctgctttctttcaaatattctgtgacangtttttggtacagatccagatacagcaaccccccagcgtaccacgtgatgagagaacactcttcgtgactttctccaatggctacccatttactgcagatgaactgtatgagttcttcacaaggtaaa

SEQ ID NO: 62598 - DNA, 218 bp, Setaria italica
  Peptide Sequence Number=SeqID_128572
cgagggtcaagtttgtgataagggggaaacacctatgggctcggaagttcgttccaaagaggaagaaagctcagaacttctgagctaatctcacatgcctggatgttggggccaggcttggtgccttacggcacatgcatgccgaaaaacgttggaataaaccatgccgatcaaggttccacagacggattattatagggagcgagagagaagaagac

SEQ ID NO: 62599 - DNA, 408 bp, Setaria italica
  Peptide Sequence Number=SeqID_128573
caaatagcaaaatacaggaatagcagaaagacagtgaaggagaaagccagagtaggacatgtccttgttgtcagatcttccttgtcttgtatgacttgagctcaatggtgtatacttcatcttctgttgtcacgacaatgcaattgatggcatgcacaaaccagtcagatatggtgacgcacggcgaatcggggggagcagcaactccagaggaatgaccctgcgcttctcccattgggggtttccatcagggcctgcttcaggatctcattgccgaagtcgccgatgaagtagagtgcgttctccatgagcgcggcaggcacgacgtcgacggtgatgcaggtggtggtgaagtgatccggcgcgatgtagtcgaggtcgatggaggtcagacccgactaccaacta

SEQ ID NO: 62600 - DNA, 379 bp, Setaria italica
  Peptide Sequence Number=SeqID_128574
cgaacccagcctgccgtccgcctccggcatgacgacgacgccatcacagcaagtctccacgcccggcggcgggtcgatcgccgtcaggctcggctcctccggatcgaactcatacttcaggatctcattgccgaagtcgccgatgaagtagagtgcgttctccatgagcgcggcaggcacgacgtcgacggtgatgcaggtggtggtgaagtgatccggcgcgatgtagtcgaggtcgatggaggtcagcccgctccactcgccgctctccgatgagtagaggcaggcgtgaatctgcccttcagcgctggcgacccaactaaaggaccaacgaaggaaagggacccggtagtaggacaaggacgaaggttaggtacga

SEQ ID NO: 62601 - DNA, 221 bp, Setaria italica
  Peptide Sequence Number=SeqID_128575
gtatgacttgagctcaatggtgtatacttcatcttctgttgtcacgacaatgcaattgatggcatgcacaaaaaccagtcagatatggaaacccccaatgggagaagcgcagggtcattcctctggagttgctgctccccccgattcgccgtgcgtcaccatatctgactggttttgttgttattactttctattcttttcttgttttgtttcttacgtta

SEQ ID NO: 62602 - DNA, 343 bp, Setaria italica
  Peptide Sequence Number=SeqID_128576
agaacgctgacttgctaatagctgatggtgttggtgtgcaacagtcctgatgcttatcgattggcaaagactgcaatgatcctcgtgatttctctgggaaacaagatcttgctactccgaacaagtggttgtgattcatttcttgagctgctgatgttgtactgataatgttctccctcaactgggaatgtacgagctgctcttgctgcttttgatggcttggaccgccaccagatggagcctggtcaccactaagattgatgatttgtggctgcccatgaaaaatctgaggcttatctcttgcatccatcattcgatttttacttctcctgtagtaacctac

SEQ ID NO: 62603 - DNA, 445 bp, Setaria italica
  Peptide Sequence Number=SeqID_128577
aatcatgttgattaatggagaggagaatgactaactagaaattgagtgacttttagctctacaaaaggttagtatatcccaagagaatgacagtctcaggcatatgtcattcggagctcaaaagtgaagttgattccctatcctccttgaaatcctcaaatattccatccatgatacatactctccatgtatttataattgctatcaaaggaaacctaggatgattcttttgttcaagattcaatcttgatggcacctgaaatgaaaattttgtgtcggtattgcaggagtggagggcgtgattgctgactccaagacgcacaaggtggtggtgaaggggaagaaggtggccgcagacccaacaaaggtgatcgagcatgtccagaaaaagaccggccacaaggtggagctcctctcaccgataccgcctccggtggaggagaag

SEQ ID NO: 62604 - DNA, 345 bp, Setaria italica
  misc_feature (98)..(98): n is a, c, g, or t
  Peptide Sequence Number=SeqID_128578
ggacgcggcagcccatcgccaccagccaaacctgtacatgtactacccgcagtttgcattccctggcggttactactcaccccccgacactgctaccncctgggtacatctaccaagcggcctacccgccaccgtcatacacagcatatgcgccgcaccaccagatgatggcaccacagactttcagcgacgagaacccaaatgcgtgttccatcatataaaaaggtagaaccatggggatctagagacaataagaagtaggggaagcaagaaaatagggaaagactagacaataaatttagaaagaattagtactttagacaaaaaaaagaaaggacccggaca

SEQ ID NO: 62605 - DNA, 193 bp, Setaria italica
  Peptide Sequence Number=SeqID_128579
agtagaaagggtagtagttaagaaagaaggaccaaaactaagaccaaagtaacaatgtaacaaagcgcaatcggcaagaacgtgtccatcatcaagtctgagccggttgccccgctggagagccctggcggcgatgacatggtcaaggaggagaagaaggtggaaggtgttgaggagaaggagaaggagggtg

SEQ ID NO: 62606 - DNA, 325 bp, Setaria italica
  Peptide Sequence Number=SeqID_128580
tcatgttcccaaacaaagcactgttcatctgaagcatgtcgttgcccgtgctttgtttgggaacatgatggccgttccgccaccgatgcccttctcccaccagttgggcataggaacagcaagtgccagcaccttcatggctgcaccgcagagcgaggcttcatcgatcctgtctcagaagatgttgggatgagccttcgaccagaccaatgccatggatatatcgtctatggtgtctgcaaccctcaaggtctatgggcaccatggacatggatggcttttggaagtactaaagaggtgaagagatatgtgaagacaatgggtc

SEQ ID NO: 62607 - DNA, 397 bp, Setaria italica
  Peptide Sequence Number=SeqID_128581
taaggaaccccaaccgggtaccaataggtgaaagttcggtagcataggaagttgcagcggtgggggcatggggatgctgtgtttgggaacatgatggccgttccgccaccgatgcccttctcccaccagttgggcataggaacagcaagtgccagcaccttcatggctgcaccgcagagcgaggcttcatcgatcctgtctcagaaagatgttgggatgagccttcaccagaccaatgccatggatatatcgtctatggtgtctgcaacctcaagtctatgggcaccatggacatggatggcttttggaagtactaaagaggtgaagagatatgtgaagacaatgggtcacataaatatgtttgtcatattgcaaagctttctttgaccttagaata

SEQ ID NO: 62608 - DNA, 357 bp, Setaria italica
  Peptide Sequence Number=SeqID_128582
taataggtaacttacttttaacgaagaaggaccgtaagtatcggacggggttgaggatgaaccgtgccacagagggcggttattggaaggccacgggcaaggataaggagatttacagggccatgacaggggtactcattggtatgaagaagacgctcgtcttctacacaggacgggctcctaggggccaaaagaccacttgggtcatgcacgagtataggctcgaaggcaacaacaagtccccccaccttcatccagctcaacctccaccaccattaaatcatcttcagcttccgaggcgacggtagcactagcatacatgcatcaatactacttatttgcttaccctaactattc

SEQ ID NO: 62609 - DNA, 233 bp, Setaria italica
  Peptide Sequence Number=SeqID_128583
atatgggcccacaaaccatggaggctgctgaaagcccaataagtggacaaatttcagattatgaagacactgaatcagtgtatctaaagcgaaattcggtgcagcagataatttccgagcaagctccagataccaccctctcgctgagatgcagcagcctgtggatggattcatgacagaaaacatgttatacgcttcttcttcaactgttggtagtagacaaggttatcatt

SEQ ID NO: 62610 - DNA, 406 bp, Setaria italica
  Peptide Sequence Number=SeqID_128584
tttctaacgttggtcctattgtaattggtcggttggtaatttgtaccagagtagcatctctatgcctatgccgctacaattttccatgctatcagacttcacaatggacccagcggcatcctactactccaccattgacgcaagatccttagcggtgccacctgtaatgccacctttgtcaggcatgggcaacatcggtcttcaagtggctagcaccttgtttgggaactcgatggttgtggcgccgccgatgtccatctaccaccagatgggcatgggagcagaaggcgctagcagcttcctaggtgcatcgaagagtggaccttctttgatggtgtcacaaaaggcacaggggtagaccatgaccaggccaatgctaatgagatatcacagatgattctgcaaa

SEQ ID NO: 62611 - DNA, 370 bp, Setaria italica
  Peptide Sequence Number=SeqID_128585
taaggtaccgttaagttaccctaacgggtaaagtaggtacgtaaccgggtcctacgtaagggcggctactggaaggccacggggaaggatagagagatctatagggccgcaacaaaggatgagctaccgctgcttgttggcatgaagaagacactcgtcttctacaagggtagggctcccactggcaaaaagaccgactgggtcatgcacgagttcaggcttgaaggcaccaataaggatgaatgggtggtctgtcgcgtgtttgacaagaccactagggtaaagagggaacctgcactaccattgttcaacgtggccatgaatggcggtggaattgaccagagtagcatctctatgcctatgccgctac

SEQ ID NO: 62612 - DNA, 340 bp, Setaria italica
  Peptide Sequence Number=SeqID_128586
agaaagtagtttagcaacaataagaagcatgggaggacaaaaggtgcaaccaaaagggatgagcatcaaggatggccttcagctgcctccagggtttcggttctaccctagcgatgaggagataatcaccttctacctcaagcccaaggttcatcaaagcaacttctcttgcactgccattggagaggttgacttgaataggatcgagccatgggaactgtctggtacacactctacacatatatatcctgttcatatggtccatggtcacactatagtgagttatccttgaatcattatgtaggcaaggcgaagatgggggacaaagagtggtacttcg

SEQ ID NO: 62613 - DNA, 314 bp, Setaria italica
  Peptide Sequence Number=SeqID_128587
gaagggggaagttgagacaatgggtcacataaatatattatgcctatagctacatcgcattttatgaaataatgcatggtttctatattttggtaactagctaagctaattatgtatatgcttgtactattcgaagcactgtattgttgcatgcatgtctatatgtgtttgttcttaataattggtcgggatgtgtgcatgtatgtgtatggtatattcaaggactagtctaagatatagacatgcatgcaacaatacagtgtcttcgaataatgcatggtttctatattttggtaactagctaagctaattat

SEQ ID NO: 62614 - DNA, 419 bp, Setaria italica
  Peptide Sequence Number=SeqID_128588
gagggaggaggaacgtaggtatggtggtggaagcaaaggttactgaggtcgtggagaagccagatttagaaggtgagaagagtgagaaggtaggttatggaggtggaaatggtggtaaattaggcaggaaaatgaggttggggtccctgttgttactattgtggtagcagaactagaggatttgttagcccttttgctgaagctaaatgcccattagcttttgagaaggagaaaacaatgatatagtggctttaggaggtgatgaagccacgaaagaatcaacaaagaaggatgttggtgttgaagatgacgctgccaagcctgagccagcatgcaaggttgcacgtgctggaagcgtaaatgaggttgattcagcaagtgtagacagtatgctcgagggtagttctgggaaagagcag

SEQ ID NO: 62615 - DNA, 342 bp, Setaria italica
  Peptide Sequence Number=SeqID_128589
tgttgcaaataaatatgaagatgatgcaaaggttgcagtggctgagtatgagaagctggaacaacaaggtgagaagggtaaggaggtaggttatggaggtgaggatggtggcgaattggacaaggagaacaaggctaaggtctccgttgttagtgttgagatagctgcaccagaggataacgtagccattttagttgaacctaatagtgaattgggttatgagaaggaagaaaacaatgatatagtggttatgagaagaataggaagaaagaccccaaaaagaaattaaataagaagaataaggaaataagttaaaatttttaagtaaaagaaataaagaaa

SEQ ID NO: 62616 - DNA, 135 bp, Setaria italica
  Peptide Sequence Number=SeqID_128590
ttgaaggttgaaaatattgctgctgccgtagaaggcataggtgttgtgaaccctacagagattgaaaatattgttcctatagaaggcgtcgatgtcaagtttgtatcaatgagtgaggttgtgcatgatggaagc

SEQ ID NO: 62617 - DNA, 385 bp, Setaria italica
  Peptide Sequence Number=SeqID_128591
ttgaaaccgacaaccaacctcttagcaacaatggcagccaagatatttgccttccttgcgctccttgctctatcagtgagcgctgctaccgcggtccttgtaccacaggtgctcagtagccgccgccgcagccacaattccccagtacctctcaccttacacagctgttgggtatgaacacccaattgtgcaatcctacaggctacagcaggcgctcgccgcaaacatcttatcatcaccggcactccttcctacaacaaccatgggccctatcgcagcagcaatccttcgcacatgtgacagtacagagcaccaccgcacaacagcaacaatttctaccagcgtttctagcctaacttagtcccttagtcttagtccccgtcct

SEQ ID NO: 62618 - DNA, 362 bp, Setaria italica
  misc_feature (323)..(323): n is a, c, g, or t
  Peptide Sequence Number=SeqID_128592
ttacttaatttttctttaccttagttcgttttcttagttcctaacttagtcccttagtcttagccccgccgcctactggcaacagcaacagctgcttccattcaaccagctagctgtggcaaatgcctactggcagcaacagcagctccttccattcaaccaactggctattgcaaaccctgctgcctactggcagcaacagcaactgctgccattcaacccattacatttggctaactctgctacgtactggcaacaacaacaactgcttagtgtcaacccactgggtgtgatgaatcccgccgctttctggcagcaacccntcattggctcggctatcttctagattaactatgagttgt

SEQ ID NO: 62619 - DNA, 299 bp, Setaria italica
  Peptide Sequence Number=SeqID_128593
tacgacctaactaggacaaacaagacaaacagactagacttccaattcaaccagctagctgtggcaaatgcctactggcagcaacagcagctccttccattcaaccaactggctattgcaaaccctgctgcctactggcagcaacagcaactgctgccattcaacccattacatttggctaactctgctacgtactggcaacaacaacaactgcttagtgtcaacccactgggtgtgatgaatcccgccgctttctggcagcaacccatcattggctcggctatcttctagattaacta

SEQ ID NO: 62620 - DNA, 259 bp, Setaria italica
  Peptide Sequence Number=SeqID_128594
catcaccggcactcttccacaacaaccatgggccctatcgcagcagcaatccttcgcacatgtgacagtacagagcaccaccgcacaacagcaacaatttctaccagcgttcagccaactagccctagctagccccgccgcctactggcaacagcaacagctgcttccattcaaccagctagctgtggcaaatgcctactggcagtctaactaagttcttaagttactttaccttttaccttaattttacttaaactta

SEQ ID NO: 62621 - DNA, 255 bp, Setaria italica
  Peptide Sequence Number=SeqID_128595
gaaaaatccaattgtgcagtcctacaggctacaacaggcgctcgccgcaaacatcttatcatcaccggcactcttcctacaacaaccatgggccctatcgcagcagcaatccttcgcacatgtgacagtacagagcaccaccgcacaacagcaacaatttctaccagcgttcagccaactagccctagctagccccgccgcctactggcagcaacagcagctccttccattcagccaaatgtaatgggttgaatg

SEQ ID NO: 62622 - DNA, 144 bp, Setaria italica
  Peptide Sequence Number=SeqID_128596
gtgatgataagatgtttgcggtgagcgctgccactgcagtctttcttccgcagggatccctagctgctactgccgctagggatccctgcgatagggcccatggttgttgtaggaagagtgccggtgatgataagatgtttgcgg

SEQ ID NO: 62623 - DNA, 277 bp, Setaria italica
  Peptide Sequence Number=SeqID_128597
tactaactaacgtaagtaagggttgtacgtaggagaagcccaactggactgaggacattgtcgacgctctgttgggttgtagggtataatcaatggtgggatcttcgccgatttgatcgcttctgccacctctcgttggaccccaaatcctagacgaagaacttctgtttcgaaccctttgagcagattactgacgctggaataagcttccaccttgggcttcgagggcatcgacgtcgatgaccctcgaagcctttgagcagattactgacgctgg

SEQ ID NO: 62624 - DNA, 294 bp, Setaria italica
  Peptide Sequence Number=SeqID_128598
cgttgttgaaggacatctgcgccatcgggtggaaccgcggcaccacgaacagccctcctttacccggaacaccgtgttcctgcaccgaacccagcctttgccttaaaaaaaaaaaaaaaaaaaaaaaaaaaaaaacgccttcctcgtcgccgcggccacccggcctgccccgctcgtcgccgcggtggcctctccggctctcgcctgaagggttgctgctgctagggcacagggatcgttcagacggtgtgcccgagcagcagggattcgtttctagtacggtttgtcttgtct

SEQ ID NO: 62625 - DNA, 403 bp, Setaria italica
  Peptide Sequence Number=SeqID_128599
cagggcgtcgaggtccttgttggtcatcgtcctgctccacccgtagcagttgtggacgtcgggcttgccggagtagaagttgaatgccttgctcctggacttcttgtccttctccttcttcttgtgcttgtccttcttcttattgtttataaactcctccgggtctcgcactcccaacagagcgtcgacaatgtcctcagtccagttgggcttctcctcgtcacccttctcgtgtgggttgtagggtataatcaatggtgggatcttcgccgatttgatcgcttctgccacctctcgttggaaccccaaaatacctaagaacgaaagaaacttactagtttacgaaaccctttagaagacaagaattaactagaacgactaggaaataaagacttaccaacca

SEQ ID NO: 62626 - DNA, 232 bp, Setaria italica
  Peptide Sequence Number=SeqID_128600
atctgcgccatcgggtggaaccgcggcaccacgaacacgtccccttcctttacccggaacaccgtgttcctgcaccgaacccagcctttgccttcgccttcctcgtcgccgcggccacccggcctgccccgctcgtcgccgcggtggcctctccggctctcgcctgaagggttgctgcttgtcttcgggtctactaccgtttctttgttaacgttattttcccttttgttta

SEQ ID NO: 62627 - DNA, 496 bp, Setaria italica
  Peptide Sequence Number=SeqID_128601
aaaatgaactgatttatctagtactccgacagttttttttgctcctggatgttttcttacacatcaaattatttcgacagacaaaaataagggatgtgtttataactgtataagtctataaatcttcaaatgattgttatctgcatcctaccacttttctgtgactaagctgctacctccatggattatccgggtaatttttgactaaggtgacatggctctgtagcatgtctgccatttttacttttcttctacttttatcttttgtgtttattttgtgcacatgctgccttaggatctgtttacttttgaaggtttacttggtggatttgttgtctgccggtattctttttagcaatcagtctgatcacagtttgttggtttggtttcagtatgagctgttaaatgaaaaatctaaagagaagctggaagttctgagggagatcactgggacagtaacgcataggaagcatctcgacagcagcgttgattttat

SEQ ID NO: 62628 - DNA, 393 bp, Setaria italica
  Peptide Sequence Number=SeqID_128602
tgccaaatctaccgtatatttacgctggtgacttcatgaaggtgttaagagagaaacatgcttccaacagctatgcaaaaatggtaagattgtttgtcataaatttgttaggaaatctgtcctgtctaactggaagcatgtggacaggttatatatgttgaagcatgcgaaagtggcagtatatttgagggcttaatgccggaggacctgaatatttatgtcacgactgcatccaatgcagaagaaagtagctggggtacatactgtccaggaatgattccatcgcctccttctgagtacattacctgcctaggtgatctttacagcgtctcttggatggaagacaggtaggcttcgtataatatggatgctgactttgatagcaactacctt

SEQ ID NO: 62629 - DNA, 371 bp, Setaria italica
  Peptide Sequence Number=SeqID_128603
agacttactagaagtcgtaatcttggttgttgttgttcatgctggagtgaactaactcgttctggtggagcttctttaggtacgaatctttgaatcccattgtgggtcgctcactcagtacggtatgaagcacatgcgcgcattcgcaaacatatgtaaccgtggcactcctgccaccgcgatgaaggaagctagcatcagtgcttgcggcagctacaactcggcgagatggagcccgttggtccagggctatagcgcttgatcttccccaggtaatggggagcaatgcgtaacggattattactgcttaacttgcttagtgatctgctcgagcccagcttatctggatgtgtaatatatggctgtgtatc

SEQ ID NO: 62630 - DNA, 230 bp, Setaria italica
  Peptide Sequence Number=SeqID_128604
cctgaaaatgccgacatcacatataagctactttggcaaggccaaaagtctgtggtcaaccagagagatgcggatattttattcctatggaagaggtatgagctgttaaatgaaaaatctaaagagaagctggaagttctgagggagatcactgggacagtaacgcataggaagcaatactacgaacaaagaacaaaactaaactaacaaacaaactaagaaagtaacaa

SEQ ID NO: 62631 - DNA, 447 bp, Setaria italica
  Peptide Sequence Number=SeqID_128605
agttccagctaaatgaatagacagcacctccctcttgctgtctattcatttagctggaactgtgtagcttccgcacttgtagccatgctcaagtggcctcccgcatttttcggcaacaaatgcaaccttctccattgacacaatcgcctcaatagccttggtgaccttggagcacaggcatggaacatccaccttttttaccagaccgcagcaaccatctgaaggagggatctttgggtccttaggtggcatcacgtattgctggcattctttaattaggtctttgaggccatcgccgcaggcagcttgggtgcctcaatggacatggctactacaaaacaaggaccaagaacaggttcaagagtttcgccattggctattagtattcttactaagttagttttggtccttcttcttttggttatttgtttactttttaaactttta

SEQ ID NO: 62632 - DNA, 431 bp, Setaria italica
  Peptide Sequence Number=SeqID_128606
caggtaggcagttgagaactaagcactacatccagcacctccctcttgctgtctattcattttagctggaactgtgtagcttccgcacttgtagccatgctcaagtggcctcccgcatttttcggcaacaaatgcaaccttctccattgacacaatcgcctcaatagccttggtgaccttggagcacaggcatggaacatccacctttttttaccagaccgcagcaaccatctgaaggagggatctttgggtccttaggtggcatcacgtattgctggcattctttaattaggtctttgaggccatcgccgcaggcagcttgggtgccctcaatggacatggctactaacaaaaacaaaggaaccaaagaaacaaggttacaaagaagtttacgaccaataggactaattaagaatactaacaaagtaaga

SEQ ID NO: 62633 - DNA, 462 bp, Setaria italica
  misc_feature (128)..(128): n is a, c, g, or t
  Peptide Sequence Number=SeqID_128607
attttcgtatacatcattatctctctctcgaaccttacaatgtctcaacgcaacctcataagccacacttttccagaaggtaaatcagctaggcagttgagatctaaggactacatccagcactcccnctttttgtgtctattcattttgctggaactgtgtagctcccgcacttgaagccatgcggaacttgcctcccgcatttttcggcaacatacacagccttctccatgcacacaatcccctcgatgatcttggtgaccttggagcacaggcatggaaaatccgccttttggaccacacggcagcagctatctgaaggagggatctttgggtccttaggtggcatcacgtattgctggcattctttaattaggtctgagaggttgtcgtcgcaggcagcttgggtaccctcgatggacatggctactccggagcatgttcttggtccttgctttcgta

SEQ ID NO: 62634 - DNA, 479 bp, Setaria italica
  misc_feature (45)..(45): n is a, c, g, or t
  Peptide Sequence Number=SeqID_128608
tcagctaggcagttgagatctaaggactacatccagcacctcccncttttgtgtctattcatttgctggaactgtgtagctcccgcacttgaagccatgcggaacttgcctcccgcatttttcggcaacatacacagccttctccatgcacacaatcccctcgatgatcttggtgaccttggagcacaggcatggaaaatccgccttttggaccacacggcagcagctatctgaaggagggatctttgggtccttaggtggcatcacgtattgctggcattctttaattaggtctgagaggttgtcgtcgcaggcagcttgggtaccctcgatggacatggctactacgaaagcaaggaccaagaacatgctccggagtttcgccattgctattagttcttacctagttggtttttggtccttcttctttggttatttgttctttaactttactttaagtttaacttttattttgttta

SEQ ID NO: 62635 - DNA, 325 bp, Setaria italica
  Peptide Sequence Number=SeqID_128609
aacatacacagccttctccatgcacacaatcccctcgatgatcttggtgaccttggagcacaggcatggaaatccgccttttggaccacacggcagcagctatctgaaggagggatctttgggtccttaggtggcatcacgtattgctggcattctttaattaggtctgagaggttgtcgtcgcaggcagcttgggtaccctcgatggacatggctactacgaaagcaaggaccaagaacatgctccggagtttacgccattgctattagttctaccagtggttttggcctctcttggatgcttaacactaagtaacttattgta

SEQ ID NO: 62636 - DNA, 290 bp, Setaria italica
  misc_feature (286)..(286): n is a, c, g, or t
  Peptide Sequence Number=SeqID_128610
cgagagagataatgatgtatggaaccttacagtagtctcaacacaacctcatattgcacattttttcagaaaggtaaatcaggtaggcagttgagaactaagcactacatccagcacctcccctcttgctgtctattcatttagctggaactgtgtagcttccgcacttgtaagaccaatagactacaaagtaggacctacccgacaatttttacggacaaacaaaatagacaaaccttactaccaattagaacaacaaatacgacctacaaataagacttagtanaaca

SEQ ID NO: 62637 - DNA, 305 bp, Setaria italica
  Peptide Sequence Number=SeqID_128611
gtgatgagctaataaaggcttctcttcaaaatattttccatacatcattatctctctcgaaccttacagtagtctcaacacaacctcatattgcacattttttcagaaaggtaaatcaggtaggcagttgagaactaagcactacatccagcacctcccctcttgctgtctattcatttagctggaactgtgtagcttccgcacttgtagccatgctcaagtggcctcccgcatttttcggcaacaaatgcaaccttctccattgacacaatcgcctcaatagccttggtgaccttggagcacag

SEQ ID NO: 62638 - DNA, 251 bp, Setaria italica
  misc_feature (11)..(11): n is a, c, g, or t
  Peptide Sequence Number=SeqID_128612
tgcctacctgnttctttctgaaaaaatgtgcaatatgaggttgtgttgagactactgtaaggttcgagagagataatgatgtatggaaaatattgtgatgagctaataaaggtaaatcaggtaggcagttgagaactaagcactacatccagcacctcccctcttgctgtctattcatttagctggaactgtgtagcttccgcacttgtagccatgctcaagtggcctccgcatttttcggcaacaaatgc

SEQ ID NO: 62639 - DNA, 335 bp, Setaria italica
  Peptide Sequence Number=SeqID_128613
taccaagacaacctacccctacttagctgtctattcattagctggaactgtgtagcttccgcacttgtagccatgctcaagtggcctcccgcatttttcggcaacaaatgcaaccttctccattgacacaatcgcctcaatagccttggtgaccttggagcacaggcatggaacatccacctttttaccagaccgcaagcaaccatctgaaggagggatctttgggtccttaggtggcatcacgtattgctggcattcttaattaggtctttgaggccatcgccgcaggcagcttgggtgccctcaatggacatggctactacaaaaacaggacc

SEQ ID NO: 62640 - DNA, 241 bp, Setaria italica
  Peptide Sequence Number=SeqID_128614
tttttgtttttactttttaattttaaaggttcttttcttctttctactaattattttccatacatcattatctctctcgaaccttacagtagtctcaacacaacctcatattgcacattttttcagaaaggtaaatcaggtaggcagttgagaactaagcactacatccagcacctcccctcttgctgtctattcagaaaggtaatcaggtaggcagttgagaactaagcactacatccag

SEQ ID NO: 62641 - DNA, 160 bp, Setaria italica
  Peptide Sequence Number=SeqID_128615
ttttttttagaaagaagaagcctttaattaagctcaatcacaatattttccatacatcattatctctctcgaaccttacagtagtctcaacacaacctcatattgcacatttttttcagaaaggtaaatcaggtaggcagttgagaactaagcactacat

SEQ ID NO: 62642 - DNA, 391 bp, Setaria italica
  Peptide Sequence Number=SeqID_128616
ataatggggttgaggaaactgcaattctgtcgaatgagggggttgtggataatgcagttctacaggatgatggtgatcaggaaatggttcaagaaaatgaacacatatcgggtatgaaggaggatgaaggcaccgaagatagacttcatgaaatgatagccgacatgcgccatgctaaagagcttggaggaaaaatattagaatgtataaaggaacatataaactataaggagcatgtgttccgacatcttacaatgatgcaataaagtacatacgtaccaggggacttggctctgaatctatccatgtttgcaagaataattgtgtattatttcgcaaggatctagcagaacatgatgtgtgcctagtgtgttgtgaagcagattcaaga

SEQ ID NO: 62643 - DNA, 256 bp, Setaria italica
  Peptide Sequence Number=SeqID_128617
cgaaacctttgcttcatgggctgtcaatcctaccctcagaccggacatcaccaatctggtagacccggcgctgcagggtcagtgctccgcgagtcgtttgtaccatgcatttcttcttgctgcacgatgtgtcagtgaattacccgctatgaggccagccattacagaagtggtcaggactctcgaacaaagaatactacgaaagaccaagactaactaaagaaagaaggactagttagtagactagggtacccca

SEQ ID NO: 62644 - DNA, 473 bp, Setaria italica
  Peptide Sequence Number=SeqID_128618
gagagacaacaagaaagggatcttacagttcttttgtcaacaagccaatgaaagccgaaaccaagaaaaggttgtcttttgctaagacaactgtggcattcatgaatgtcagaccaaataccctcaaatgaccttccctttctgccctttatcatatctcctaaggttaatcgcgtcaattgttttattgttaacgccaatcttcaccgaattttgtttgggcaatatacagtagccaatgcttggtgcactgtcagctgaataggaggaccataagccatcacatcttgatgttggcttctgccgtacgttccttctcctctagcaattacctcaccgtccacgtctataatgccaccctttttgggttcccaacaagcgggcctggagataatttaaaagatcttaccttgagatatgtaacataaggtgatttgacatagctcccatcgctcatcttcatcagtagagct

SEQ ID NO: 62645 - DNA, 339 bp, Setaria italica
  Peptide Sequence Number=SeqID_128619
tccttctaaaaaggaaaaacgaaaaaacaaaaaacgaaaaaccgaaaaacttaaaacttaaactaaaccaaacaaacaaagtaacaagaccaaggtacctgccggagctgcccctctcgcgtgagcgccatcatgatctgcgggagcccgagcgggagcgcgtcgccgcggtccacctgccagaagtggacggtcttgccgtaggtcctgcacaccttctccaggtcccggcgctccaccaccccgggcacgcccggcatgaagagcaccccgcccttcacctcgaactcgtgggtgtgccacagcggcttctcggtgtcgggcagcgtcaggaacacc

SEQ ID NO: 62646 - DNA, 359 bp, Setaria italica
  misc_feature (267)..(267): n is a, c, g, or t
  misc_feature (309)..(309): n is a, c, g, or t
  Peptide Sequence Number=SeqID_128620
ggtcgccgggatgtccacctcacggatctcggtcttgagtcccttaccggcggcgttcgccagcgggtggattccgtgctccagcccgctcatgtacgcccggttctccctctccttctggaacgacacgccgaacttcttctccacacctgcacgccgttccaacaagcagccgatcagaaacacacacaaaaaaggccaccaaacaaaacaacaagctacgagagctcgcgtacagtcagccaggtcctgccggagctgcccctntcgcgtgagcgccatcatgatctgcgggagcccgagcgggancgcgtcgccgcggtccacctgccagaagtggacggtcttgccgtaggtcc

SEQ ID NO: 62647 - DNA, 398 bp, Setaria italica
  Peptide Sequence Number=SeqID_128621
agggggcggaataagggggagtttttggaccaatgaggagcacaggttaatatttttttaaatataattaagttgatccttgtgcatactcataatttgcaactcttttggaaaagtcatggatcatattttttgtggattagaaaaacttattataagcatgtggtgtgaggtattgattatgattggaaagatctgaattattcatcctaagctcaccaatatttctcactgcaggcagttcctttatggcctgcgcaaatacggccgcggcaaatggaaggacatctcaagggaattcgtcaccaccagaacgccggtgcaggtctccagccatgcgcagaagtacttccataggcagaacacctccgagaagcaacgctacagtattaatgatg

SEQ ID NO: 62648 - DNA, 455 bp, Setaria italica
  Peptide Sequence Number=SeqID_128622
tcgtagcgttttcagaggatttcgacgatgttcgtctgcttgttgatgttggcggtggcacgggcaacacccttgagatgatcacatcccagtacaagcacatcaagggcatcaacttcgacctgcctcacgttatatctcaggccccatctcttcctggtacgtacatgatacttgtgtgaacttctgaaactatgttattgtcgtaacgctttggtgttacaggtgtggaacatgtggctggaaatatgtatgagagcgtaccctatggagatgcagttcttctgcaggtctgtttaaagaaaatcctaataaaataaagcagtaaacaactaagaacaaaatcaaaggaactgtctcattaaaatgggcagtatatagtaaaaaaaatataaccgcctcttttgattggtcaagaatgtgacctttttcagttttctaaactaataatatag

SEQ ID NO: 62649 - DNA, 290 bp, Setaria italica
  Peptide Sequence Number=SeqID_128623
ctgcagtggatcctccttatgcagacgaactgcatctccatagggtacgctctcatacatatttccagccacatgttccacaccaggaagagatggggcctgagatatgtatgagagcgtaccctatggagatgcagttcttctgcagtggatcctccttatgcagaccgatgaacaatgtctcaagatcctgaagaactgccacaaagcactgccggaaggcggaaggtgatcgtcatagacggcctccttcctgaaaacacatatccaaggtgaacgcatccttcgca

SEQ ID NO: 62650 - DNA, 349 bp, Setaria italica
  Peptide Sequence Number=SeqID_128624
ctggcccctttcgccgtgttcctcgcgacccggaccaccatgttgccctggcaccacatagccgacacggtggtctccggtgggctgctgtcgtcgtcgttcgagaggaccaaaagggatgccgttcttcgactacttggggaagaacaagcggctaggtacgctgttcgacaacgccatggctgagcactcggtgatcctggtcaccaagatgctcgagcgtttcagaggattcgacgatgttcgtctgcttgttgatgttggcggtggcacgggcaacacccttgagatgatcacatccctagttactaagtctactatttcttaagggttcttatttcttaacttt

SEQ ID NO: 62651 - DNA, 388 bp, Setaria italica
  Peptide Sequence Number=SeqID_128625
tctaccgttggtaccggtcttgtttcccggtcgtaattcttctacgtctttgggtaacggttgttcgttgtcttcgagggccagtccctttacatcatgaaggccaagggaacagccatgatcccgctagtgtccagtggatcccctgatgactggacgcccgacacggtcatggggaaaatcgtggtgtgcatggacggcgcaaccgacgcgtatggcattctcttgcagaatgctggtggagcaggcatagttgatgtggatcctcgcgagtggtctcgagatggcagcacggcctatccattcaccctttccgggtcccacgctcagctacacctccggcgagaagctcagggcatacatggcctcggagccccaacccggtcgg

SEQ ID NO: 62652 - DNA, 381 bp, Setaria italica
  Peptide Sequence Number=SeqID_128626
tcatgcagcagctaaagcagcaacatcaggagcatcagattatgcaaagtcagcaaatgaagcgtcagcagatgcttcatcaacagatacatcaaaagcaattgcatcaatcgcagctcccaatacagcaacaattacagaacaacagcagcaagggcagatgcaggttccacagcttcattctggaaatgacatgaacgagctaaaggtcaggcaaggagctgcaatgaaatctggaatgtaccaacagctgggccaacgcaactattatcagcagatgaaacagggtagtgcctttccaatttcttctccacaaaacctccaagcatcacccccacaaataaataccaatagcaccacattactagattcaggaaagac

SEQ ID NO: 62653 - DNA, 468 bp, Setaria italica
  Peptide Sequence Number=SeqID_128627
ctgtgctcatacttggcaaactcgcttgaggcatctgattagtatgactatcatgctgctgcaaaccttgggaattctggtgttgctgtgaaatgttagagccagaagcttgcccaccaggttgctgaaactgttgctgtcctggtgctggcacaggcttccttctttgagaatttaggatattgacaatttgcctctcgtatatagggattttttctctaaaaccaggctgaatgctgctcttgttaacttgcaggaaatgcaatgtgcgctccaacaatgctttaaagttcttcatcttttcatactggtctgatgacttttgagctggcatgtggttgtcaacatgttgtatcttcatagatattttattgtacaaatcattgagttctgcaaagtactggtcttttaagctcttaatcatttgatataactcctcttgcaaatcacctgcccctgtatgaccta

SEQ ID NO: 62654 - DNA, 446 bp, Setaria italica
  misc_feature (335)..(335): n is a, c, g, or t
  Peptide Sequence Number=SeqID_128628
aacagggtagtgcctttccaatttcttctccacaaaacctccaagcatcatccccacaaatttcgcaccactctcctcaggttgatcagcacaatctgttgcagtctcaaatcaagaccggaacaccattgcattcagctaactcaccatttgttccatctccatccccacctgttgccccatctcctataccagtggattcagataaaccactctccaacttatcatcacttactagtactgggcaggctggacatcagcaaacttcccttgcacatcaatcgcaatcaatagccgttaacacaccaggcatttctgcgtcacccttgctagcngaattcacaagtgctgatggaagtcaggctaacgtacctactcaagttccaaccacacattcagcagcagcaatcttattgcagtcaacacagatgcaatcttcacagcag

SEQ ID NO: 62655 - DNA, 482 bp, Setaria italica
  Peptide Sequence Number=SeqID_128629
aaaccttgggaattctggtgttgctgtgaaatgttagagccagaagcttgcccaccaggttgctgaaactgttgctgtcctggtgctggcacaggcttccttctttgagaatttaggatattgacaatttgcctctcgtatatagggattttttctctaaaaccaggctgaatgctgctcttgttaacttgcaggaaatgcaatgtgcgctccaacaatgctttaaagttcttcatcttttcatactggtctgatgacttttgagctggcatgtggttgtcaacatgttgtatcttcatagatattttattgtacaaatcattgagttctgcaaagtactggtcttttaagctcttaatcatttgatataactcctcttgcaaatcacctgcccctgtatgaccagtttgagcagtggaatccacagatgtactggatgaaacttcttgaaggcccctctgagcctgaatatattgcttttg

SEQ ID NO: 62656 - DNA, 268 bp, Setaria italica
  Peptide Sequence Number=SeqID_128630
agaacaaacgaaagtaagaaccaaataagaacctacttaaatagtagtacatacgacctggaagcgtcaatgatagcttgaagcaatcatatagcatggacactcctgagctacaatcaactgcaacctcacgcgttaagtggcaaaaggctgaggtaaccatgctctaatggaggagattcaggagataaaccaacagctcatagatacagagctccatgtctccgaagatgatgctgagtcattcgcagctacatctgagggggcc

SEQ ID NO: 62657 - DNA, 447 bp, Setaria italica
  Peptide Sequence Number=SeqID_128631
ctgttgctgtcctggtgctggcacaggtcttccttctttgagaatttaggatattgacaatttgcctctcgtatataggatttttctctaaaaccaggctgaatgctgctcttgttaacttgcaggaaatgcaatgtgcgctccaacaatgctttaaagttcttcatcttttcatactggtctgatgacttttgagctggcatgtggttgtcaacatgttgtatcttcatagatattttattgtacaaatcattgagttctgcaaagtactggtcttttaagctcttaatcatttgatataactcctcttgcaaatcacctgcccctgtatgaccagtttgagcagtggaatccacagatgtactggatgaaacttcttgaaggcccctctgagcctgaatatattgcttttgatcaatgttattttgctgtaagagcatgccagct

SEQ ID NO: 62658 - DNA, 287 bp, Setaria italica
  misc_feature (4)..(4): n is a, c, g, or t
  Peptide Sequence Number=SeqID_128632
ggancttgtcgctatgacaaaatgccgcttgcagccaggaacttccataacacatgatgggagtggtacatcaaagaaaatgaagcgggacacgagtgccatgcctcttaatgtgtcatcgcctggaagcgtcaatgatagcttgaagcaatcatatagcatggacactcctgagctacaatcaactgcaacctcacgcgttaagtggcaaaaggctgaggtaaaccatgctctaatggaggagtattctaggtagtattaaacctaactagtcttcttatttagtt

SEQ ID NO: 62659 - DNA, 312 bp, Setaria italica
  misc_feature (272)..(272): n is a, c, g, or t
  Peptide Sequence Number=SeqID_128633
aagcgtcaatgatagcttgaagcaatcatatagcatggacactcctgagctacaatcaactgcaacctcacgcgttaagtggcaaaaggctgaggtgcagttctctgaattttttttctagataagctacggagagaatgattttaccaacagtcgttcattaacttgcatatttgtatccaaaaggggaagtagctgtttatctgatatccaaactgttggctacttggtgttttgatctcgtatcatgcgcatcgttatgcaggtaaccntgctctaatggaggagattcagggagataaaccaacagct

SEQ ID NO: 62660 - DNA, 394 bp, Setaria italica
  Peptide Sequence Number=SeqID_128634
ctgtcctggtgctggcacaggcttccttctttgagaatttaggtatattgacaatttgcctctcgtatatagggattttttctctaaaaccaggctgaatgctgctcttgttaacttgcaggaaatgcaatgtgcgctccaacaatgctttaaagttcttcatcttttcatactggtctgatgacttttgagctggcatgtggttgtcaacatgttgtatcttcatagatattttattgtacaaatcattgagttctgcaaagtactggtcttttaagctcttaatcatttgatataactcctcttgcaaatcacctgcccctgtatgaccagtttgagcagtggaatccacagatgtactggatgaaaacttacttagaaaaggaacccccaa

SEQ ID NO: 62661 - DNA, 388 bp, Setaria italica
  Peptide Sequence Number=SeqID_128635
ctgcaacctcacgcgttaagtggcaaaaggctgaggtaaaccatgctctaatggaggagattcaggagataaaccaacagctcatagatacagagctccatgtctccgaagatgatgctgagtcattcgcagctacatctgagggggccgaagggatggtcattagatgcacatttactgctgtcgctgttagccccagtttgaaatccatgtttgcttcggctcagatgagcccgattctgccgttgaggttgcttgttcctgctagctaccccaaatgctccccggtgctcctagacaagtttccggatgaacaaaggaactcggatgacctgtctacaaaggccaagtcaaagttcggcatatttgcttccgttggtctagcgga

SEQ ID NO: 62662 - DNA, 384 bp, Setaria italica
  Peptide Sequence Number=SeqID_128636
ctgcaacctcacgcgttaagtggcaaaaggctgaggtaaccatgctctaatggaggagattcaggagataaaccaacagctcatagatacagagctccatgtctccgaagatgatgctgagtcattcgcagctacatctgagggggccgaagggatggtcattagatgcacatttactgctgtcgctgttagccccagtttgaaatccatgtttgcttcggctcagatgagcccgattctgccgttgaggttgcttgttcctgctagctaccccaaatgctccccggtgctcctagacaagtttccggatgaacaaaggaactcggatgacctgtctacaaaggccaagtcaaagttcggcatattgctccgtggtctagcgga

SEQ ID NO: 62663 - DNA, 347 bp, Setaria italica
  Peptide Sequence Number=SeqID_128637
attgtagctcaggagtgtccatgctatatgattgcttcaatcaactgcaacctcacgcgttaagtggcaaaaggctgaggtaaaccatgctctaatggaggagattcaggagataaaccaacagctcatagatacagagctccatgtctccgaagatgatgctgagtcattcgcagctacatctgaggggggccgaaaggggatgggtcattagatgcacatttactgctgtcgctgttagccccagtttgaaatccatgtttgcttcggctcagatgagcccgattctgccgttgaggttgcttgttcctggtagctacccaatgctcccggtgctcctagacaag

SEQ ID NO: 62664 - DNA, 376 bp, Setaria italica
  Peptide Sequence Number=SeqID_128638
aattgtaagctcaggagtgtccatgctatatgattgcttcaatcaactgcaacctcacgcgttaagtggcaaaaggctgaggtaaaccatgctctaatggaggagattcaggagataaaccaacagctcatagatacagagctccatgtctccgaagatgatgctgagtcattcgcagctacatctgagggggccaagggatgggtcattagatgcacatttactgctgtcgctgttagccccagtttgaaatccatgtttgcttcggctcagatgagcccgattctgccgttgaggttgcttgttcctggtagctaccccaatgctccccggtgctcctagacaagttccggatgaacaaaggactcggatgacc

SEQ ID NO: 62665 - DNA, 370 bp, Setaria italica
  Peptide Sequence Number=SeqID_128639
actgctgtcgctgttagccccagtttgaaatccatgtttgcttcggctcagatgagcccgattctgccgttgaggttgcttgttcctgctagctaccccaaatgctccccggtgctcctagacaagtttccggatgaacaaaggaactcggatgacctgtctacaaaggccaagtcaaagttcggcatattgctccgtggtctagcggagcccatgtcactgcgagaaatcgcaaggacatgggatgcctgcgcccgcaaagtgatcgcagagtatgcccagcaaactggtggaggcagtttcagctcgagctatggttgctgggaaagctgcgtaggcgcttgatgactctggcggacattggcgatgg

SEQ ID NO: 62666 - DNA, 394 bp, Setaria italica
  Peptide Sequence Number=SeqID_128640
ctcttaatcatttgatataactcctcttgcaaatcacctgcccctgtatgaccagtttgagcagtggaatccacagatgtactggatgaaacttcttgaaggcccctctgagcctgaatatattgcttttgatcaatgttattttgctgtaagagcatgccagctgaagtttgaagcctctgttgcattcccaattgttgttgcagttgattagactgagactggaactgtgacatcatatgttgttgagattgctgaagctggttctgctgagactgaggttgcatcatacccatcgatggctgctgagcatgctgttgctgctgtggttgctgcattgcctttgctggctgtaacatatgcattcgttgactgtttgcaacattaggcgtcg

SEQ ID NO: 62667 - DNA, 226 bp, Setaria italica
  Peptide Sequence Number=SeqID_128641
taaaccatgctctaatggaggagattcaggagataaaccaacagctcatagatacagagctccatgtctccgaagatgatgctgagtcattcgcagctacatctgagggggccgaagggatggtcattagatgcacatttactgctgtcgctgttagccccagtttgaaatccatgtttgcttcggctcagatgagcccgattctgccgttgaggttgcttgttcc

SEQ ID NO: 62668 - DNA, 271 bp, Setaria italica
  Peptide Sequence Number=SeqID_128642
aactcaccatttgttccatctccatccccacctgttgccccatctcctataccagtggattcagataaaccactctccaacttatcatcacttactagtactgggcaggctggacatcagcaaacttcccttgcacatcaatcgcaatcaatagccgtttaacacaccaggcatttctgcgtcacccttgctagcagaattcacaagtgctgattggaagtcaggcttaacgttaccttacttctaagtttcctaacctaaattctaaatt

SEQ ID NO: 62669 - DNA, 402 bp, Setaria italica
  Peptide Sequence Number=SeqID_128643
tccgttagtattcgtcgtaatttgtcccgtaggtaggtagtcttcgtaggtaggtagttttgaccgcgagcccgaggaccagcagcacgtgccggaactcccggaaggctttgaagatggcaagtccaatctcaccctttgttgcatacttaatacctagtttttcaaacacaacctattggcctgctttataaaatgcatattgttttattgcaagacatggttggatagccaccccttgattgttatgaacattccttgttatcctatggttgtttctaaatatgacccgccctatttagacgataaccactgctagaacgcttagaaaatcgctacctaaacttcgatcactattacaatggttcacttggaaaataagtgtgtgtgtgttctattggg

SEQ ID NO: 62670 - DNA, 228 bp, Setaria italica
  Peptide Sequence Number=SeqID_128644
tcccccaaaactagctcccccggtcgctcctagacaagtttccggatgaacaaaggaactcggatgacctgtctacaaaggccaagtcaaagttcggcatattgctccgtggtctagcggagcccatgtcactgcgagaaatcgcaaggacatgggatgcctgcgcccgcaaagtgatcgcagagtatgcccagcaaactggtggaggcagtttcagctcgagctatg

SEQ ID NO: 62671 - DNA, 235 bp, Setaria italica
  Peptide Sequence Number=SeqID_128645
taaaaccaaggctgaatgctgctcttgttaacttgcaggaaatgcaatgtgcgctccaacaatgctttaaagttcttcatcttttcatactggtctgatgacttttgagctggcatgtggttgtcaacatgttgtatcttcatagatattttattgtacaaatcattgagttctgcaaagtactggtcttttaagctcttaatcatttgatataactcctcttgcaaatcacctg

SEQ ID NO: 62672 - DNA, 244 bp, Setaria italica
  Peptide Sequence Number=SeqID_128646
ttctttgagaatttaggatattgacaatttgcctctcgtatatagggatttttctctaaaaccaggctgaatgctgctcttgttaacttgcaggaaatgcaatgtgcgctccaacaatgctttaaagttcttcatcttttcatactggtctgatgacttttgagctggcatgtggttgtcaacatgttgtatcttcatagattattttattgtacaaatcattgagttctgcaaagtctggtta

SEQ ID NO: 62673 - DNA, 342 bp, Setaria italica
  Peptide Sequence Number=SeqID_128647
ggaaatgcaatgtgcgctccaacaatgctttaaagttcttcatcttttcatactggtctgatgacttttgagctggcatgtggttgtcaacatgttgtatcttcatagatattttattgtacaaatcattgagttctgcaaagtactggtcttttaagctcttaatcatttgatataactcctcttgcaaatcacctgcccctgtatgaccagtttgagcagtggaatccacagatgtactggatgaaacttcttgaaggcccctctgagcctgaatatattgcttttgatcaatgttattttgctgtaagagcatgccagctgaagtttgaagcctctgtt

SEQ ID NO: 62674 - DNA, 227 bp, Setaria italica
  Peptide Sequence Number=SeqID_128648
atataactcctcttgcaaatcacctgcccctgtatgaccagtttgagcagtggaatccacagatgtactggatgaaacttcttgaaggcccctctgagcctgaatatattgcttttgatcaatgttattttgctgtaagagcatgccagctgaagtttgaagcctctgttgcattcccaattgttgttgcagttgattagactgagactggaactgtgacatcatat

SEQ ID NO: 62675 - DNA, 247 bp, Setaria italica
  Peptide Sequence Number=SeqID_128649
tacctacttgcaaatcacctgcccctgtatgaccagtttgagcagtggaatccacagatgtactggatgaaacttcttgaaggcccctctgagcctgaatatattgcttttgatcaatgttattttgctgtaagagcatgccagctgaagtttgaagcctctgttgcattcccaattgttgttgcagttgattagactgagactggaactgtgacatcatatgttgttgagattgctgaagctggtt

SEQ ID NO: 62676 - DNA, 237 bp, Setaria italica
  Peptide Sequence Number=SeqID_128650
tgtcaacatgttgtatcttcatagatattttattgtacaaatcattgagttctgcaaagtactggtcttttaagctcttaatcatttgatataactcctcttgcaaatcacctgcccctgtatgaccagtttgagcagtggaatccacagatgtactggatgaaacttcttgaaggcccctctgagcctgaatatattgcttttgatcaatgttattttgctgtaagagcatgccag

SEQ ID NO: 62677 - DNA, 227 bp, Setaria italica
  Peptide Sequence Number=SeqID_128651
tgcccctgtatgaccagtttgagcagtggaatccacagatgtactggatgaaacttcttgaaggcccctctgagcctgaatatattgcttttgatcaatgttattttgctgtaagagcatgccagctgaagtttgaagcctctgttgcattcccaattgttgttgcagttgattagactgagactggaactgtgacatcatatgttgttgagattgctgaagcttgg

SEQ ID NO: 62678 - DNA, 219 bp, Setaria italica
  Peptide Sequence Number=SeqID_128652
gtccccttcgtatgaccagtttgagcagtggaatccacagatgtactggatgaaacttcttgaaggcccctctgagcctgaatatattgcttttgatcaatgttattttgctgtaagagcatgccagctgaagtttgaagcctcttgttgcattcccaattgttgttgcagttgattagactgagactggaactgtgacatcatatgttgttgagattg

SEQ ID NO: 62679 - DNA, 125 bp, Setaria italica
  Peptide Sequence Number=SeqID_128653
gctcttgttaacttgcaggaaatgcaatgtgcgctccaacaatgctttaaagttcttcatcttttcatactggtctgatgacttttgagctggcatgtggttgtcaacatgttgtatcttcatag

SEQ ID NO: 62680 - DNA, 130 bp, Setaria italica
  Peptide Sequence Number=SeqID_128654
cttttcatactggtctgatgacttttgagctgacatgtggttgtcaacatgttgtatcttcatagatattttattgtacaaatcattgagttctgcaaagtactggtcttttaagctcttaatcatttga

SEQ ID NO: 62681 - DNA, 252 bp, Setaria italica
  Peptide Sequence Number=SeqID_128655
tagaagaactaggaaactgtgacaatcatatgttgttgagattgctgaagctggttctgctgagactgaggttgcatcatacccatcgatggctgctgagcatgctgttgctgctgtggttgctgcattgcctttgctggctgtaacatatgcattcgttgactgtttgcaacattaggcgtcgttccaagagctgctgctgctgctgctgctgctgctgcttgatttgctgctgtctgttgctgctgctga

SEQ ID NO: 62682 - DNA, 234 bp, Setaria italica
  Peptide Sequence Number=SeqID_128656
agctgagatgccatttctgcaagaaaggtggtcatttcaagaaggactgcccccaagaagaaaaaatggttcgaatggttgacggttcctgcaggtagcagcagcaaagggaagaagggaaagaagctgagatgccatttctgcaagaaaggtggtcatttcaagaaggactgccccaagaagaaaaaatggttcgaagagaaatgaattgcttatgatccaacccataagcgg

SEQ ID NO: 62683 - DNA, 264 bp, Setaria italica
  Peptide Sequence Number=SeqID_128657
agaagctgagatgccatttctgcaagaaaggtggtcatttcaagaaggactgccccaagaagaaaaaatgtaattgcttatgatccaacccataagcggacctaaaatacatgggaatggagtgaaggcactgaattgaatggaccgggacttgtgaataatccttgacattggtctgtgctcttagagctaaaagggtgtctttatgtttttgaatgttctagaaatcttatgtctatagaaaagttggatgtactaagtttt

SEQ ID NO: 62684 - DNA, 205 bp, Setaria italica
  Peptide Sequence Number=SeqID_128658
ggcccctctgagcctgaatatattgcttttgatcaatgttattttgctgtaagagcatgccagctgaagtttgaagcctctgttgcattcccaattgttgttgcagttgattagactgagactggaactgtgacatcatatgttgttgagattgctgaagctggttctgctgagactgaggttgcatcatacccatcgatggctg

SEQ ID NO: 62685 - DNA, 240 bp, Setaria italica
  Peptide Sequence Number=SeqID_128659
ttcccccccggttcctagtattcgtcggtagttacccgtaggtaggagtctacgaggaggagtttgtaccgcgagcccgagcccgaggaccagcagcacgagccggagctcccggaaggctttgaagacggaattgcttatgatccaaccccataaagcgggtaccctaaaaataacatgggaatggagtgaaggcactggattgaatggatcgggacttgtgaataaatccttgacatt

SEQ ID NO: 62686 - DNA, 193 bp, Setaria italica
  Peptide Sequence Number=SeqID_128660
tgccagctgaagtttgaagcctctgttgcattcccaattgttgttgcagttgattagactgagactggaactgtgacatcatatgttgttgagattgctgaagctggttctgctgagactgaggttgcatcatacccatcgatggctgctgagcatgctgttgctgctgtggttgctgcattgcctttgctgg

SEQ ID NO: 62687 - DNA, 178 bp, Setaria italica
  Peptide Sequence Number=SeqID_128661
actgagactggaactgtgacatcatatgttgttgagattgctgaagctggttctgctgagactgaggttgcatcatacccatcgatggctgctgagcatgctgttgctgctgtggttgctgcattgcctttgctggctgtaacatatgcattcgttgactgtttgcaacattaggcgt

SEQ ID NO: 62688 - DNA, 171 bp, Setaria italica
  Peptide Sequence Number=SeqID_128662
tttagttactaagtttagtaattttaagtaacttgtagtacttggtaacttgttgtactattctattatgtttgtttgagtatttgtcttgaagctggttctgctgagactgaggttgcatcataccccatcgatggctgctgagcatgctgttgctgctgtggttgctgc

SEQ ID NO: 62689 - DNA, 214 bp, Setaria italica
  misc_feature (1)..(1): n is a, c, g, or t
  Peptide Sequence Number=SeqID_128663
ngcaggtagcagcagcaaagggaagaagggaaagaagctgagatgccatttctgcaagaaaggtggtcatttcaagaaggactgccccaagaagaaaaaaatggttctaagagaaatgtatatgaattgcttatgatccaacccataagcggacctaaaatacatgggaaataggaagtagaaaggacaactagaaattagaaataggaaccga

SEQ ID NO: 62690 - DNA, 190 bp, Setaria italica
  misc_feature (171)..(171): n is a, c, g, or t
  Peptide Sequence Number=SeqID_128664
gttcttgagactgaggttgcatcatacccatcgatggctgctgagcatgctgttgctgctgtggttgctgcattgcctttgctggctgtaacatatgcattcgttgactgtttgcaacattaggcgtcgttccaagaagctgctgctgctgctgctgctgctgctgcttgntttgctgctgctgttgctg

SEQ ID NO: 62691 - DNA, 168 bp, Setaria italica
  Peptide Sequence Number=SeqID_128665
gctgagactgaggttgcatcatacccatcgatggctgctgagcatgctgttgctgctgtggttgctgcattgcctttgctggctgtaacatatgcattcgttgactgtttgcaacattaggcgtcgttccaagaagctgctgctgctgctgctgctgctgctgcttgt

SEQ ID NO: 62692 - DNA, 180 bp, Setaria italica
  Peptide Sequence Number=SeqID_128666
gctgagactgaggttgcatcatacccatcgatggctgctgagcatgctgttgctgctgtggttgctgcattgcctttgctggctgtaacatatgcattcgttgactgtttgcaacattaggcgtcgttccaagaagctgctgctgctgctgctgctgctgctgcttgtattttgctgctg

SEQ ID NO: 62693 - DNA, 156 bp, Setaria italica
  Peptide Sequence Number=SeqID_128667
ggatgacctgtctacaaaggccaagtcaaagttcggcatattgctccgtggtctagcggagcccatgtcactgcgagaaatcgcaaggacatgggatgcctgcgcccgcaaagtgatcgcagagtatgcccagacaaaactaggtaggaaggcaag

SEQ ID NO: 62694 - DNA, 112 bp, Setaria italica
  Peptide Sequence Number=SeqID_128668
tcggatgacctgtctacaaaggccaagtcaaagttcggcatattgctccgtggtctagcggagcccatgtccttgcgatttctcgcagtgacatgggctccgctagaccacg

SEQ ID NO: 62695 - DNA, 323 bp, Setaria italica
  Peptide Sequence Number=SeqID_128669
cctaatgaacgtgatagagagggtaagaggagaacatggaacaaggtgccattcagcacattccaaaccatcgccaagtttatgtagatgacagtgtacacatggaggcagatgaaaacgatagctggctccataggggagatttgggagaaataaagacatacttcatgtggggacaggtgaatcaggtgcgcctacacacttttgttgttttggaaaaacatcattgtttcagaaggtgctttatttttatgatcttttaaatatgtagacgtatatttaatcaatgatgaggtcttactttttggtttagttaaaaaaaa

SEQ ID NO: 62696 - DNA, 226 bp, Setaria italica
  Peptide Sequence Number=SeqID_128670
ctacttttggtgagatggaagattgatgcgatcagagttgttatcagccctatatgtgaaggagatataaacgctgcattacgcattgatgatgccactcttggtgacacggggggacgtttgcgtttgaaagttatagcgctgttgcagatgttgtcacagccttcaaacccgcagtacatgcatgagattcttgcagtgttgagaagtccttagcttccagttt

SEQ ID NO: 62697 - DNA, 230 bp, Setaria italica
  Peptide Sequence Number=SeqID_128671
attctagtcagttcattagaacccagagcaaagttattttcacttagaattatgatttctttcagcagaattagctcagcttatcagctgcttacattgcagtttctgcttttcatgattgcaggaacgagttcggaccttcattgaagatgctagtgataaagatgtgcttgtgctcaatgtccaggacccatttcagaggctgcttctgcacggtgtttgtgagttct

SEQ ID NO: 62698 - DNA, 193 bp, Setaria italica
  Peptide Sequence Number=SeqID_128672
ggatgtgggcaaatgtaaattatccagatttaaatttgaatcacattgcaaagcaggtgatgtgtcactggcaatcatacgcctagcatccttgtgaacgctgtggatgttctaacctagttggcaagttgcacgatttgaatccaactagggttagtagtctttccgttttctagttttgtaaaaaaaaaaa

SEQ ID NO: 62699 - DNA, 355 bp, Setaria italica
  Peptide Sequence Number=SeqID_128673
tacttggaccacatcagtatggctgatggtatggtcctgttgggaaacactgactgccagtatgcgttgagctctgacgcagaggcatagtatggcactgtcatcccctccgctcccatcgccagagctgcagagaccatggcgaccagaagtggcacgaagaacagaagaacacccatttggaaatgagaggaacgttaaggaacaggagcactattggtctgtacagtcagaccagcttaacaaagaagatgcaaagatattccataactgggcacacttgatagcttcagagaagctactgtacccagacgaccaccttcacccaggtccaagatcaacctctacatcggca

SEQ ID NO: 62700 - DNA, 214 bp, Setaria italica
  Peptide Sequence Number=SeqID_128674
acatggtgacaatgtcattgaagttctttctggatatcgggattgaatcggcagagtcggggcgaagccaagcgctgtgcaaggcggccgcccggtcgaatagtaagaaggttagaatacttaggaaccctaggggtagaaaggtaggtactactagggtaacaagtaagacttactactagaaagactaatacaaagttagttagtaccctaa

SEQ ID NO: 62701 - DNA, 151 bp, Setaria italica
  Peptide Sequence Number=SeqID_128675
ctcgccgtcgcacatgtacagggtggcggcggtgcgtgtagtcaccgccggaggagccaagccggcggcggtggacaccgtgacgtgccacagcagtctcctccttctgcaacgtaacctcatagatccttgttgggttgacggcgtggca

SEQ ID NO: 62702 - DNA, 300 bp, Setaria italica
  Peptide Sequence Number=SeqID_128676
cccagaggacgtcgccccttgtaaggaagtgacacaccggggcttcccctggcttgacaccaagcttcacccagtacttcagtgtggggtcaaaccctgaggtgttcacgtggcacaccgcaagtgcccgcaccaccgccggccttctcggcgcagggacggcagcagtctcctccttctgcaacgtaacctcatagatccttgttgggttgaacggacgtaggacaagtaagaaacaaacgacgaaacgggaaaagaactaacaaattaagaacttaagttaaggtaactaaacgttaa

SEQ ID NO: 62703 - DNA, 349 bp, Setaria italica
  Peptide Sequence Number=SeqID_128677
gctactagtttggtatccttaaactggatgtgataatgcacttattggcttatactcttactggagctatgccaatgaacacagcttatagcacagtacatggccatatgcttttatttatatccagaacctacagaaaaccatgaggcatatctggcctgattgaacgacttgggccaagtgaaacattctctgtggcatagttggcggcctttcttcctctagtagatttagctttacctgtatacataatatgttgtgttaaccataatggacataaatcttggttcgaaagattgatcaagagagtaagaaaggccgccaactatgccaagtgaaacattctctg

SEQ ID NO: 62704 - DNA, 318 bp, Setaria italica
  Peptide Sequence Number=SeqID_128678
attcttgtcaaagaggataggttcttttcctccatagggaacgagaaccattctcaaaggaaccgcatatagtggatctgtacccttcatctttggatctggaatattcaccgggttttgcagagccggcatgatctgttcctcctccgctttgctcactgcaggaggtggggattcagataaggtcatctcggagtcactcaacgaatcttggttttctactagggatgaatccgtgacctactagtagaggtgcgagacttttgcacctggcaactaaattgggctaaattgtcctttaactacttctttttagta

SEQ ID NO: 62705 - DNA, 461 bp, Setaria italica
  Peptide Sequence Number=SeqID_128679
aagaaaacttggagcaagactaaatctttagaagtaattgaaaaatgcaaatgatttcacacttgtacgagctccagcttagtctggaatatcggttattttgtcatcaatttgtttaagcatcaaaccattacaacttaaaaagatattgttcatgaagcaaagattgataattctaaacaaaggaaacaaataacattttcaggataccaagttattcacaagggattgtcctctaacgaacctcaaggccttcatcttgttccaaagcaaggcctggaccattatacatgtttttcattagcaatgtgcttgacttatcaggataaaaaatgaaccctgctgcagcgcactccaaagcgacaagcccctgtcttgaggtgaaatggacagtgggccttatcctgttctgttccaaaattttggagtctcttgagcaactttctcaagtacctcttgag

SEQ ID NO: 62706 - DNA, 269 bp, Setaria italica
  Peptide Sequence Number=SeqID_128680
gtcctacgtttgtagtagtcccctttcttggttgtcttgttgtttctttttccttgtcttgtattttgtgcgctgtataacgtctttcaagattgtgagcctctgaggatttcctcatgctctttttcggatcgtcatacttgctactggatttgccgcctgaagggcccttgctggcgtctgtatcagttaagtctgaaggccaatcagaagaaccaggttcgcaacttccacgctgatcagactggtgcttcctagaactaattttg

SEQ ID NO: 62707 - DNA, 250 bp, Setaria italica
  Peptide Sequence Number=SeqID_128681
ttactgtatgtacgtcttcataaaattcctcataactctgttcgatttcttcatctgtgaactcaaggccttcatcttgttccaaagcaaggcctggaccattatacatgtttttcattagcaatgtgcttgacttatcaggataaaaatgaaccctgctgcagcgcactccaaagcgacaagcccctgtcttgaggtgaaatggacagtgggccttatcctgttctgttccaaaatttggagtctcttg

SEQ ID NO: 62708 - DNA, 215 bp, Setaria italica
  Peptide Sequence Number=SeqID_128682
ccattcctacataccttgaagttggcaagttcaccaaatttcagaaattctgtatgtacgtcttcataaaattcctcataactctgttcgatttcttcatctgtgaactgaagcatgttaaagaaaaaagcatattaagttacaaacaattacaaacaaaagaaaagaaaaataaaaaaaataacttaaaataagaacaaaatttaacaaactaa

SEQ ID NO: 62709 - DNA, 204 bp, Setaria italica
  Peptide Sequence Number=SeqID_128683
atgacttgggatatagctagtagatcactttccagttactctgttgtactacgcttgtattggacaagttgtgaacctgctgacccggtgcaacgcaatgcaagtgaaaaccaagaggacagtgacttaggacatagctagtaagtatatcactattttgttcctttttgttttcaacttgaattgaaattgcaccgattcaac

SEQ ID NO: 62710 - DNA, 301 bp, Setaria italica
  Peptide Sequence Number=SeqID_128684
ctcataaagtcataatgtcacacaacatcaaggatagctacagactacagagctgtcatgttaaggaggtaatcatagcatgttgattctgcaattatgagacaattaaagcaattcgcagagctgtcaaagaaaaagtcaaagaaagttcattgctgaaaaagaggaagaaaagcatacctgtgaatctcttttagccatttatctacacatgttagatgaaattcatgattacatggaagtatacggacacagtctccctcctcatattcaacaaggcaaatgtagcattgtgcagcct

SEQ ID NO: 62711 - DNA, 450 bp, Setaria italica
  Peptide Sequence Number=SeqID_128685
gtgagcaacctctcgtatggcacaagcgaggcctccctcaagggtgctttctcaaactacggtcccctcaactctgagatcgtggtggatcgtgagacagggaggtcccgggggttcgggttcgtgcagttcgaggacaagaatcgatggacaacgccatccaagacatgaacggccaggaggtcggcggccgcaacgtcagagtcagcgaggcgaagcagcgcccgcgccgatggagggcgtgaacgctggacggtggacacggtctgcggcgtggacgcgtatgacgaacaagttatcctgtcgttaggccttctattaatctcagtagcagtggttgtctacttaatacgttaccaaagttaatacccctaggacctttagtaagttaattagtacaatagaataagttaactaagtaagttaagtaagttaacgtaacgtacgtta

SEQ ID NO: 62712 - DNA, 351 bp, Setaria italica
  Peptide Sequence Number=SeqID_128686
gaaatcgtgatgagggtgggaggaggcaataagcatggccaatattggattggcgacggcgtcatcgacacggcctctactcccactctctcccagatccgagctaggagcacggactcgagcccggcagtacgcccacgacccaccgctgcacacttccagatggaggctctacaggcccaggtggaagaatcaaggaaggcacaagaggagattaaggcgcagatggaggcgcagattggaggaaatgttgcggaggatggaggaggaaaaccggattaggatggagcagatgttccagtacatgcagaacttcgctacgagcatgggacagactttgcctccgccacc

SEQ ID NO: 62713 - DNA, 234 bp, Setaria italica
  Peptide Sequence Number=SeqID_128687
agtaggttagatatctgctaaagtagactgaatgcgttgtagctcagtgatcctctccttttttccccttacagtagcacctagaatactaactcttctttcaaactgctatttaatctaaacagcattcaggcctaattcatcatttataggttacttctgatcctaccatcaatcacatcgtatagtaggggtattacctatttatttgttcgtaacttgtagtctttctta

SEQ ID NO: 62714 - DNA, 340 bp, Setaria italica
  Peptide Sequence Number=SeqID_128688
aaaatagcacacgagatgaattgtcattgatcggcctgaagcagggtgtacttctgaacagttcagggaactgtgggttcactactgctcgtaccatgagtgttctgaagtggttcacgtcttccacctcttcgaacatgcacacctgccagatcgaggcgttgttcaccaggtgatccactgcaaatttctcggttaacttcgttcttacaagttacaagcgagggatgcgtttggaaacagagcttggaggagcaggatgtgtaaggaactgaaccatccgaccgattcaattcactcgtcagagtcggttgtcttggtattgtaaccgttcgtaaaa

SEQ ID NO: 62715 - DNA, 225 bp, Setaria italica
  Peptide Sequence Number=SeqID_128689
acgctgaattcagagggttcgggctcatctgacaagaaatctagatttgcccaccagctttgatcatcttcaccctgcacagatagcaaaagataaggactccagcatttaccaagacctaaacatctggtgccaaactcagtaagagtagaaaccattacctgtgcaaccccattgttctcaaattctgtaggaatgtctgaatcatactgaactcttgatgtt

SEQ ID NO: 62716 - DNA, 231 bp, Setaria italica
  misc_feature (2)..(2): n is a, c, g, or t
  Peptide Sequence Number=SeqID_128690
ancctgacaaccataagctgcagcgagaagaaaagcaaccagatactgtaggtttacctgctcaccggagtcgaactccggctcagtggtgcggtactcatgcatgatccaccctgtccgctcgcccttgggtgcgcgtccacggtggaacacaagggtcttcttcatgccgatgacatgctgcttgcgcttgtcacccttggacttgatgatcctgtccttgccagtggc

SEQ ID NO: 62717 - DNA, 355 bp, Setaria italica
  misc_feature (347)..(347): n is a, c, g, or t
  Peptide Sequence Number=SeqID_128691
aaagaaaaaccaaaaccgaaaaagaaaccaagaccaaggacggtagtaatagaattaggaagcctcccttctgcgctggtgctctcaccagcgactcaagaccactctcctgctttatagtatccttgtcactcttctcagaagccttccgcagccttggaacaggtttggcttctggaacagccatttcagcaacatgttgaggcatggtcttttgctcattatcatcgcaattgaccgacagatcatcaacacttccagcaaagtttttactgcatcctctgcaatctcagatttctctggttggtggtgacttttctgttttcgttatgatgcagctcgaagtntcatcagt

SEQ ID NO: 62718 - DNA, 237 bp, Setaria italica
  Peptide Sequence Number=SeqID_128692
tctggaacagccatttcagcaactgcaggttggcaacatattgaatcagcttaacaaaagcataacttagcaatcacaaaagctacacaatatacggaagttccaaagccttcttaccatgttgaggcatggtcttttgctcattatcatcgcaattgaccgacagatcatcaacacttccagcaaagtttttacttgcatcctctgcaatctcagatttctctggttggtggtgta

SEQ ID NO: 62719 - DNA, 233 bp, Setaria italica
  Peptide Sequence Number=SeqID_128693
gctggttctttcggtggttctgctactgcttctctctgttggggtatatgattggaagcctcccttctgcgctggtgctctcaccagcgactcaagaccactctcctgctttatagtatccttgtcactcttctcagaagccttccgcagccttggaacaggtttggcttctggaacagccatttcagcaacatgttgaggcatggtcttttgctcattatcatcgcaattga

SEQ ID NO: 62720 - DNA, 218 bp, Setaria italica
  Peptide Sequence Number=SeqID_128694
ttttagggtttaaacttatttaccgttcttgtctagttaggtctacttaagttatcatttctgcccgccagccaccttgttattggcatagcatgagtttcaacagaattgggcagctcaattggactttcatgcagaccagattctggagattccctatttaacggcgtgtttgcttcctcatttgcctctatgttgtcaggtgacgagcgagaagg

SEQ ID NO: 62721 - DNA, 133 bp, Setaria italica
  Peptide Sequence Number=SeqID_128695
cctgcttctcgtggaaggggtggtcgggcaacgctgccggcccgacgccatcctgcttctcgtggaaaggacgtaggtacgggacaaacgacggaccggacccgaacgaccgtacctagacttactacgtaga

SEQ ID NO: 62722 - DNA, 342 bp, Setaria italica
  Peptide Sequence Number=SeqID_128696
gtgtagtgtgagtttgtatgtaacatccacacacagttggtggtgaacctctcggatcataatagtgtctagacgcaggtgcgacccgtccgcttctgtggagcggaagcgatcaactgacactttattcctgggttcatctttttattatctcggaacgccgtgacaggtagcacggtttgtcaccagtatatacgcgaccgcacttagtgctgttccgggcagcttcgccgtgacaggtagcacggtttgtcaccagtatatacgcgaccgcacttagtgctgtccgggcagcttctccttgatcttgtccatgatacccttcttctcgccggtgccctc

SEQ ID NO: 62723 - DNA, 407 bp, Setaria italica
  misc_feature (26)..(26): n is a, c, g, or t
  Peptide Sequence Number=SeqID_128697
agagcacgcggctgctcgccaacganagcaccccatgcacctccacggcgtcaacttctacgtcctcgcgcagggcgtcggcaactacgacgaggccgccgccgcgccgcggttcaacctcgagaacccgcaggagcgcaacaccgtcgccgtcccacccggcggctgggccgtcatccgcttccaggcaaacaacccccgggggtgtggttcatgcactgccacatcgaagatcatcttgatgttgggctggcaatggcgtttgaggtccaggacgggccgacgccggagacatctgtgccgccacctccattggacctaccacagtgctaaatgcgatttgtcagctagtaagtaagttgttactaacctttggttctttcctttgttatttatttgtttattta

SEQ ID NO: 62724 - DNA, 414 bp, Setaria italica
  misc_feature (363)..(414): n is a, c, g, or t
  Peptide Sequence Number=SeqID_128698
ttaacgtttaggttttcgtttcctttagttttcgggttccttaacctttcgttcctaaagccatggtcgagaaaatgctcggcgtcgtggacggctacgccacagaccattttattgatgatgatgacgacgacgacgacgacgagattagtgatgaccaccgcagcggcggtggcgccgacgatgacgacgatgacgatgactaggcaactaggcagctagctaagttacccctagataacaactgcgattgatgatgaataacgtactgtgtcaggtcaagcagaatatgctatgtatttgagtcctccaatctaaagcacaaatcttgacacaaactaatgagttataagtttttaactnnnnnnnnnnnnnnnnnnnnnnnnnnnnnnnnnnnnnnnnnnnnnnnnnnnn

SEQ ID NO: 62725 - DNA, 374 bp, Setaria italica
  Peptide Sequence Number=SeqID_128699
tgaggtttacaagtgcagcaagattatgtctgcttggggccatagaagacaaccttctataattcctgagaatgctgccattctacagtttgaggagatcatggtggatgacaccataattgcaagccaggaaaggtcaccaaaagaggatacaccttatgtgggcaacgaaatcaagtatcaagagctctgaggaattgagcaactaataaaaaaggatgcacactttattcgattaatatatgaaacaagagcacatgtacatacactaacagcatgcatgcacacacgcacacaaacctacaaccacaccatgcccttatttagttattgctaaaggcagagggccttgtttgtcttccttaagtgtcctt

SEQ ID NO: 62726 - DNA, 389 bp, Setaria italica
  Peptide Sequence Number=SeqID_128700
catgctgttagtgtatgtacatgtgctcttgtttcatatattaatcgaataaagtgtgcatccttttagcaattaatatatgaaacaagagcacatgtacatacactaacagcatgcatgcacacacgcacacaaacctacaaccacaccatgcccttatttagtttattgctaaaggcagagggccttgtttgtcttccttaagtgtccttaattgtaagactagttttcacttgtgatgccaagtccttgactccctccttatcatttattccctttccatcacctaagatgttcttgttgttcacctttttattagtgctcaattcctcagagctctgatacttgatttcgttgcccacataaggtgtatcctcttttggttgacc

SEQ ID NO: 62727 - DNA, 365 bp, Setaria italica
  Peptide Sequence Number=SeqID_128701
tatttaagttaacctaaaaatttttaaaactaatttgttcgttgtaatttccttgtaggtctagtctaattgttaacccgtcttagtctaattgtccttttccttcctaattctacgttttgtcttacaaccgagcaactgtcaggtgctacaacagcattgttgccatgagcttagacaaatcgaaccacggtacctccaccaagcgatctgcaacatagttcagtccataacccaccaacaacaacagcaggagaaacaacaacaacaacaacattcatgtgagttatgtgggtctcagcaagcttctgaaggtgagttggctatacggatggtagcacaacacctaccatcaatgtgcggca

SEQ ID NO: 62728 - DNA, 431 bp, Setaria italica
  Peptide Sequence Number=SeqID_128702
aggctatcagtgatgccttcctcctgcatcccttcaatggcagcattggcagcggtgatagccttcttgtactggtggggttggtcggtcccattggcaaattgcgtccattggtccagcagataatctcgtgggagcgaccgtttgttactggcagtgtccttgctgtaactttgctaaccatatacaatgagtggttcaattatatgttagccgcatccctgatactggcagttggcgtgatggtttgggctaggcaaaagaaagatcggcaaagatatgctcggaagtgatcatcgacacttcatcggacaagactacaatggagagcatagtggaagcacagcaaaagcctgaggaaagtgcacgagtacatcaagacggcaaaacgtggtcatcctcaggctgtggtcgatcgcgctagcgaggtc

SEQ ID NO: 62729 - DNA, 463 bp, Setaria italica
  Peptide Sequence Number=SeqID_128703
taagtacttagtaaatttactaactagtactaagtcctaacttccttgtattgtactatttacaagttgcttttcaaaggacggaaaaaggacgacgaaaaggcaccttcaggattctggggtttcttaagtggtatattgtgaggcaagcgatctatttatagaatgatgctgtccatcttcttggtattatttccaaggtcagaatggtagaagcaaattaaaaaagttactttttccatgcatcacctatgaaacgcagttggtttgtaggtttaatatgttttccccattcagccttagagtgaatgcctattttccctaattcactgctccttagattctccacctatatccgtatcgaattattgatgtaaagcttcacgtgcatattgagggataaaaagttctagagatttttttggcagcttactagtaccctattcagtgttgaattgctggt

SEQ ID NO: 62730 - DNA, 465 bp, Setaria italica
  Peptide Sequence Number=SeqID_128704
ggtcacagatgctacaactcgactgccatcaaactaggaacagtgccatatgcatgcaaaacagctgtatctatacaggcagttgacttgtgctttgaacaaggatgtgtgaaatttaattttcccttcatcaatttgtacaggggcagaatgtatctagctaaaaacaatcattgcaaggaaataaataaagcagggtgaacattacatatttgccagacttgacatcagagtagatcactatgaaatccccctcctgaagctcattggaacgaacaaattcccctgcaagttcagaaaaaacagaaagttttagaagctaccaagaaataatgctatgccaagatcagatgatgggtagaaattaaagtatactaatgctttgttttcatctcaccggtgttctccaacagatacattctgctcttgttgttgggccaaaacctgcatgcatgcgtgagggca

SEQ ID NO: 62731 - DNA, 381 bp, Setaria italica
  Peptide Sequence Number=SeqID_128705
cccccgttcttgtcctaaactacccccgtacttcgtttcttattttgttgtcgtactattacgaagtttgattgagcccatttgtctgagacattcagtataatgacaattacagagaaatcagtggatagtcatatatgttattctggatagtctagaatctagatcttcctatttatatagcctgcaatctttttttttcattctgatggcttgcagttatcatggcttgtcaccggatacttgatttgttgtcagtgtactgcacaaataggatgatcggtccgtgtgcatgatatacttctgctaggtttgttgctgtcattgtgtatgacataatgctttctacctatgcatggctactgtaaccttggactggtg

SEQ ID NO: 62732 - DNA, 274 bp, Setaria italica
  misc_feature (42)..(42): n is a, c, g, or t
  Peptide Sequence Number=SeqID_128706
ggagcccggcttggaaccgctccacggcctggcagatggccnccttggcgtcgccctcccacgacggccgccgtggcgtccacctgccgctccttgcacatgcccagcgcgcgcgccaggatcctccgggagttctcctcctgcgccttccgcatggactccaccgccgcgggcggcgcgtacgcgatgccgtgcgtggcgatgggggtagacgaagtggtcgacggcgtgctgggcgtggacgacgacgagcgacgcgtccgggtggcaccgt

SEQ ID NO: 62733 - DNA, 307 bp, Setaria italica
  misc_feature (89)..(89): n is a, c, g, or t
  misc_feature (150)..(150): n is a, c, g, or t
  Peptide Sequence Number=SeqID_128707
tggcctacatggaggccggagtgcacaaggagaacgcaaggtacaaggtcatattcgtccacggcttcgcctccactaaggagaccggnttcccggtgtcccaggtgcttgtggaggagctgcggatatacatggtgttcttagacaganccgggtacggcgacagcgacgccaacccgaggaggtgcctgaagagcgacgccacggacgtcgaggagctcgccgacgcgctgcggctcggggaacaaagttctaacgtaggtacggactagactaccaatagggacggaataacgttagacctaga

SEQ ID NO: 62734 - DNA, 214 bp, Setaria italica
  Peptide Sequence Number=SeqID_128708
aggggttagcaagaactcttcaacatcatctgctatcatggtaagtgatgttgaccgttctagagtatcttcagctgcaggtagagcagatgaaacagatgctgcttcctgctcttcaaacacactgtaataggcatagtaagatataatttcagcaaaacaccatagatcgccaagacaccatctatataggtggtgatattctgagttcaag

SEQ ID NO: 62735 - DNA, 390 bp, Setaria italica
  Peptide Sequence Number=SeqID_128709
agtgtagttgcgagtaccaatctgtgagatgtaggagacgtacacagaatggagcacaaagccaattggtggatgaaaaaggcaagcttagtcccacaatgaccttaactcatccacacataattactttttttcaaaaaaaacttcatcagcgcagaattaccagtaacaagcaagaaagaaaaacttaactgcagtttccctcccatgagcatgataccactagtgtagtacaccaccaggcccagttgaatgatggcaattggcatactagccatgtttaaacatatcagaaaccattccttccagtgaattaacagaaatatctatagataacattaagcaataagacaattagaccaactagaaaaataaaaactaacaaggtaa

SEQ ID NO: 62736 - DNA, 229 bp, Setaria italica
  Peptide Sequence Number=SeqID_128710
cgacctcgagcgctacatggctgccaagcagttcgaccccaccaaggacttccccgtgccatacgtcaacaccaccgtcgaggaggacgacaacaccattggcggaggctaccagaagtgagccaggtgaggagttgtgtttccttctgatcttagatctgagcttgcagcaagggcttcgtcattatttgcgattaaaatcaggcatccatgttgttgtgatgggact

SEQ ID NO: 62737 - DNA, 140 bp, Setaria italica
  Peptide Sequence Number=SeqID_128711
ccaagactctgtctacctgatacggatgttatgattgaatgcaaaaaatgtaagttgtattccaagactctgtctacctgatacggatgttcgcatttgaacggaaaccttacattttttgcattcaatcataacatccg

SEQ ID NO: 62738 - DNA, 436 bp, Setaria italica
  Peptide Sequence Number=SeqID_128712
tttttcggtttttacgtttttagttttcttttggtttggtcggttgaccgtcacgccggcgacgcttgagttcggcgagctgaatgagacgaagagctacaaggtcgtgttccagagcaagaacagctcggctggtgcgcatggcgcgggtagtaagatgcagttcgggcacatcgtgtgggaaaacgacgcgcatcgagtgaggagccccgtcgtgttcacctggaactgaacctgacggcggcctgttctgtttcaggcgctgaataaagtcaggccagcgcagacgtgttcgttacttgttggtggtgtacttcacatctggtgtccagtaataaaaggttgcatatcactgtatctaaactgctcgagttcaacgtcatgagacgcagagttcaacatgaatgaaagttgtagtgctaaaactgctaatatg

SEQ ID NO: 62739 - DNA, 273 bp, Setaria italica
  Peptide Sequence Number=SeqID_128713
ctgggtgagcccgttcgggcagcggtgccgcatcgcgctggccgagaagggcctcccctacgagtacctggaacaggacctgagcaacaagagcgagctcctcctccgctccaaccccatccacaagaagatccccgtgctcctccacgacggccgccccgttctgcgagttcccttctattctattcgttcctagttactattcgtacgaggcgttcccggggcagggcgcgccgctgctccccgccgacccctacgcgcgcgcgcaggcca

SEQ ID NO: 62740 - DNA, 195 bp, Setaria italica
  Peptide Sequence Number=SeqID_128714
catgagcatggggttctgctcacgtacacgtagacggtgcggccgttggtattgcggcggcagaggttgcaggtgaggaaggacatgtcgacggcatgggacggggtggtgcgggtgatgcagcatagcttcgcggacagccccgtcccatgccgtcgacatgtcctgcctcttcctgttcttgtccagctcgcc

SEQ ID NO: 62741 - DNA, 309 bp, Setaria italica
  misc_feature (161)..(161): n is a, c, g, or t
  Peptide Sequence Number=SeqID_128715
agggccggaatgatagcctactcagcttcttcggcgcaagtgaagaaggtgggcctgctgcagctcgcttctccggcctccgtcgccttgccggcgtccaccctagtgacgatcctggccatcttgctccgtcccatcaacgccacggcttgcctcttccngttcttgtccagctcgccgaggtggtaatcatccctgcagccccgtgagcagaaccccatgctcctgcatgcatgccgccaaaagattatcatcctaattaatgtttagtttactggtactagtttagttttctttttttagtttttt

SEQ ID NO: 62742 - DNA, 188 bp, Setaria italica
  Peptide Sequence Number=SeqID_128716
agccccgtgagcagaaccccatgctccatgtatcgatccgcaactctcctcgacaaggtgaaaatggactatgaaataatattcccttatggagctctagtatctagcattccctcattacctggcacctgatttgctcttgtaacgaacttctttgtagtctagttcttagttcttacttttcctta

SEQ ID NO: 62743 - DNA, 478 bp, Setaria italica
  Peptide Sequence Number=SeqID_128717
taggttccttgtaggtaaggttgtagggttctaagtattcgtcctaattccgtctaccttccggcgcctggtcagcggcgccatcgccggcgccgtgtcgaggacgttcgtggcgccgctggagacgatccggacgcacctgatggtcggcagcagcggcgccgactccatggccggggtgttccagtggatcatgcagaacgagggctggaccggcctgttccgcggcaacgccgtcaacgtcctccgcgtcgcaccaagcaaggctattgagcatttcacctatgacacagccaagaaattcctgacgcccaaggccgacgagccaccgaaggtcccgatccccacgcctctggtcgccggagccatggccggagttgcctcgaccctctgcacctacccatggagctgatcaagaccagggttaccgtcgagaaggacgcgtacgacaacgtggcgcacgcgttcgtgaagatcc

SEQ ID NO: 62744 - DNA, 391 bp, Setaria italica
  Peptide Sequence Number=SeqID_128718
cgtggcgccgctggagacgatccggacgcacctggatggtcggcagcagcggcgccgactccatggccggggtgttccagtggatcatgcagaacgaggggctggaccggcctgttccgcggcaacgccgtcaacgtcctccgcgtcgcaccaagcaaggctattgagcatttcacctatgacacagccaagaaattcctgacgcccaaggccgacgagccaccgaaggtcccgatccccacgcctctggtcgccggagccatggccggagttgcctcgaccctctgcacctaccccatggagctgaatacaaagaaccaagggttaaccgtacgaagaaaggaaacgaacgtaaacgaaacaaaacgttaaggtaacgtaactaaactaa

SEQ ID NO: 62745 - DNA, 361 bp, Setaria italica
  misc_feature (79)..(79): n is a, c, g, or t
  Peptide Sequence Number=SeqID_128719
tacctattgttcaagtttgtagctcttgaaattcgcttcacttaaatacagtagtagctttgttttgtatatacatgcnccttaattctggcattatggttctaaccctagatgatccaaattttgaactactacaggagagtagactgcaaatagaatacttgaaggcacaattttcagaaaggatttcatcaatcagtcagttcatgcatagaaatcgaacacttacatgtgttttttgtatagtctctcacattcactctgcagctgtttgtgttgtcagatcatatgttgcgagagataactggagtctcttttcaggtaaaatacatgccaaactaacaaggttactactcacaac

SEQ ID NO: 62746 - DNA, 373 bp, Setaria italica
  Peptide Sequence Number=SeqID_128720
ctgagaggcggatctttaatctcgatgttggcttggtgccgctcttcttcgctggcactgacgtatgctcttctggaatcatggcctaaccaactggccaaggctctctttgcttcgatatgcgcttgtgtcaagaagataaacagtgaacaagctagctagttgttgatgcatgttagcacttgtccattcagctgtttgtgttgtcagatcatatgttgcgagagataactggagtctcttttcaggtaaaatacatgccaaactaacaagtctcagaactccatagtccatgcagagtgcagctcattttagtgacaggatgttacatggaatctggatctcagcagcgctacaagtatcttgtgaagat

SEQ ID NO: 62747 - DNA, 341 bp, Setaria italica
  Peptide Sequence Number=SeqID_128721
cgcgtcgtcgagctcggctgcggccaatgtacgtgttcccagcctgataagagagccactacaggcggctctctttgcttcgatatgcgcttgtgtcaagaagataaacagtgaacaagctagctagttgttgatgcatgttagcacttgtccattcagctgtttgtgttgtcagatcatatgttgcgagagataactggagtctcttttcaggtaaaatacatgccaaactaacaagtctcagaactccatagtccatgcagagtgcagctcattttagtgacaggatgttacatggaatctggagtctcagcagcgctacaagtatcttgtgaagatat

SEQ ID NO: 62748 - DNA, 445 bp, Setaria italica
  Peptide Sequence Number=SeqID_128722
ccctgaaaagatgcatagatcataaaccactacaaaacgagttaacatgttgataatactctagaactaagtcttattaccagacaagtgacttgaagatgtcttccagaggaatgtctgtgcgcggcaaaaaatcatcctgaagaataaccgcattaatgacatctgcgtaacggactgccaagttgagggacatgcaccgggcaggtgccattgcaaagcatcttatcatcttcctttctatgccgcccagccgctccctgttatgcactgccactagagccagcattgccacgacaccagaaccaagagaatgtccagcgaacgtgagcgtgtaaccaggattcttctccaaaaggtccctcagaacatcacattcagcatccaaacacccccactcggcggccttgagcaagccattgtgcacatagccgccatcaaacct

SEQ ID NO: 62749 - DNA, 403 bp, Setaria italica
  Peptide Sequence Number=SeqID_128723
attctccaacctcttcagactttttattcattcccactagagctatttcttccatattcagttccctcttgccttccatttctgaagcttcaatccttacagaattactgctttcttgtccccattcctttatccagtttattcgatgggcttttgtttatcgcttcatcagtaacctgctgcttcttacctcttcttttgtatacgtgtttgataggaggcttttgtatacctttgacacggtcttctccaataattgttgttgagtttcgacatatggattgcaccccttcaggttttgaactttctattgttgtttccttcgatttgttcacattggcaagactagacaagtaacttagttttagttttactttaggtacttagaccaatactaaataca

SEQ ID NO: 62750 - DNA, 398 bp, Setaria italica
  Peptide Sequence Number=SeqID_128724
tctccccaacccgcaacgacttacaggcaatcggctgcgacacgttggcgttactagctggcagggaggacggaagctactacaccggctgctacacctcctgcatgagcgtggatgcggcggctaaagacgacgaggagtgcacgggccttggctgctgccagatgtccatcccgaccaacctctccacgatacacatgtcctgggggatcaccagcagctatacgcccccaaatctagcatggggatacagcccctgtaactacgctttcatagtggagaaaggcaggtaccacttcaaacagagagacctcatcacacatgttgcaaacgagacattacctgaccgttttggagacagaaccatccctatggtgcttgattgggccatcagggat

SEQ ID NO: 62751 - DNA, 370 bp, Setaria italica
  misc_feature (336)..(336): n is a, c, g, or t
  Peptide Sequence Number=SeqID_128725
taaacttgttagctgcttcgttcttaaagaaaaataaaggatgcagcccctcgcagccatggcagcacaactgctgtggtttctcgcagacaaggcagcgccaccaccaccaccaccaccggcggtagcagctccaaggccgggctgccctagcatgtgcggcaatgcatcggctgcgacacgttggcgtttctaaacggcagagaggattccagcttcttcagtggctgcatcacctcatgcgacagcttgcatgccgcggctcgagacggcgaggagtgcacgggccttggctgctgccagagttccatcccgagaacctctccaggataaagntctacgtgggggaacgatgagagctatacgccat

SEQ ID NO: 62752 - DNA, 447 bp, Setaria italica
  Peptide Sequence Number=SeqID_128726
tgtccctttcttctattctttgtttttcctattaaggtatttattctattctattctaactaaagtccttgtaattggtacggttctagttgtaacttgttgtcctacctaagtccccatgccaatcgttttgagcatttgaattgttctctttagggcccagtccatcaaggtatcggcaatgtggattccatgcatagacatcaacaaggtgaccaaatctgtcgcctccatttccagcagcattatctatgtgattgccaccataaagacgtccaggaatagcatttccaatttcaaagtgcataatgtcaacctcatgacctctacaacttttacttgtgcaagaacctggcatatctttgcatcctcccatattgtagtatgtggcattatctccaacttggaacatcagagcaaacagaagggcaacttgctacttttccc

SEQ ID NO: 62753 - DNA, 334 bp, Setaria italica
  Peptide Sequence Number=SeqID_128727
cgtaaattgtgcagcgctcctattcttagagacccggtggcccacaaagatagacaggcaaatggctaccaccgaaaggaacagagcaaagccagtcacagcatcccaagagcgattaggagcagggcggtaatatgtagcttccgacgaaggctgtatatccaaaatcaaccagttgcagctggatgagtaatgctccgaatcgctccattctttgccgtcggttgggtaccagaaggctacggccatattgctgggctggcctattgtgaactgtgcatcctgcttgtaaatttgtattcctatttgtttctttaagggttcttcgtagtaa

SEQ ID NO: 62754 - DNA, 459 bp, Setaria italica
  Peptide Sequence Number=SeqID_128728
aggccgcggctcgcctgcccctgcccgtcccactgccacacgtgcgtcgtctcgtggaacagcacgctggccacctcgattctgacattgccggagtagttgccgatgtactgggcgctgagggtgatgacgtcgttgctggtgaaggcgacgccgccgacgtcggcgacgacgagggcgatcgcgtcgacgggcttgcggtcggcggggttggtctggttgaaggtcatccagatgaacatggacgcttcagagatgatctgcctcgggaaatcgagaccgacttcccggtcgaaccgctggccgccgagggtgttggacgccgtgttcgtcacgtcgatcgtgacgatggcgccggccgtcgcggcaagggcaaagcaaggaagggaatagacgaaccgacggacgaacgacgaaagacaagacttacaatacttagtagactaggtagactagaca

SEQ ID NO: 62755 - DNA, 391 bp, Setaria italica
  misc_feature (1)..(24): n is a, c, g, or t
  Peptide Sequence Number=SeqID_128729
nnnnnnnnnnnnnnnnnnnnnnnnactttatatgacacgtatattgatcattctttaagcagaacatagtcgttaaaacgacgtggtcaagatagaaaaaccttattttaatcatcacgccatgctagacgacaatgacgtggagttgacaaccacagaccagctatccacacatcaggccccgtacatagccttgtaatcctgccacagctgctgcacgtccttgcccaggatctgagcgaagagatcgtcggtgtagccgtacctcatcttggcgttgagcagcgccacgaagcccggcctgagcgtgtcgcagtagaccaggaacatcgccgtcaacggaagtaacccctacaatacccaacctttactaccctagacccctagacta

SEQ ID NO: 62756 - DNA, 321 bp, Setaria italica
  Peptide Sequence Number=SeqID_128730
gtttacagaagatggcttgcggcagcgccgcagcctgttcttcatcattcatcaagcgagatagcacattctaaaaacgtttgaatgctatctgcaggcttgggcatgggctcatcgcgcaggaagtgctcgaagagcttcaggccaagccgtggacggtggaggggaacctcatgccccgcaccacggatcgtcaccagtgtcaagcccttgtatacttggcaccatccaccaacctctccttggtcataccaagcataccagttacttatacgttaggtaagaaaagaagacgacaatacgaataggaagtaatactta

SEQ ID NO: 62757 - DNA, 251 bp, Setaria italica
  Peptide Sequence Number=SeqID_128731
aagcccttgtacacttggcaccatccaccaacctgagcaagatccatgccattagaaaagtaagctttgaaactagggaagatagttaatcggtcattgttgccgtattagtgacgctgactaacctctccattgtcataccaaggataccagtttgtcactgttggtagagagagcgcatcaatggagtatcttgtcgcggtgagggggacaacggaatcagcatcaccactgccaaaatcgtccaatag

SEQ ID NO: 62758 - DNA, 264 bp, Setaria italica
  Peptide Sequence Number=SeqID_128732
cgagccagagcacgagcggcgcggactccgggggcacgccggccgcctcgatgagccagtagaagagcgcccgccccgcggccgcgtcgacggtgacgtacccggagtacatggagaagttgaccggcggctgccccggcaggctcgcgatgcggtccgcctccgcctccgccgtggccgacgcgacgttacagcaggacagcgccagtacggcggccagggccgcggccgcggcggccgccattggcgatttggcgctcgcgg

SEQ ID NO: 62759 - DNA, 341 bp, Setaria italica
  Peptide Sequence Number=SeqID_128733
agctcactaccagtcttgctatcctcaccgcactactcatcatgcatcacccctctatcacagccgccgccaccattgcccaccacacaacaacgccggccaacgctagcttggccgccggtttcagcctccagctggtggtccccgaccacgacgacctagaccacaccgtccgccgcggcagcgacggcttcctgcatctgcagagcctccgcaccgacctaccgccacgcccgccatcaggcgctaaacaagactacctacggacggacgaagacgaaccaaaccaaaccctaaacgaacccaaagaaagaaataagaaacgtaaacaaacccgaaca

SEQ ID NO: 62760 - DNA, 351 bp, Setaria italica
  Peptide Sequence Number=SeqID_128734
ctcgccatggatcacgtcttattcctctcccttgatttgcagcatcctcgtctcattcctcaggcagctgcacgcacgaacagagaagaaagccataagattgaacacatcgataaaagcttcactagcagcgtgatgcagtggcaaaaagactgaattgtagaagcttggtgcttacagcagttgactggggcgaggctgcagcgtccgggcaggctgttgatgatgcccatggtgctgcaggcgcactcgtgcgacacggcgctgagcgcgccgcagcagtcggcgctggggtccggcgcgccgggcaccaggtacgcgcggcacgccaggagccggttcagctgcggc

SEQ ID NO: 62761 - DNA, 343 bp, Setaria italica
  Peptide Sequence Number=SeqID_128735
tagtaagcatcagcattataaggaacacaggcaaaagatgcattgtaatctagttttggtggcgaaaaggcagatccttgcttccccatggacaatactggcttcactgtgaactgattatgcttcccatgaccttcatcattgtctgaagataaaataagctaactgtcatgatgatttcaatgtatcaactaaccatattaaatatgaggcttcggcatgaacattgtctgagagacaggacagtaacatagcgaaagatccatcaaaacaaagattacaggagattactcaaaacattagttaaggcatgggtaaagctggtaacaggagcaaaggaaat

SEQ ID NO: 62762 - DNA, 444 bp, Setaria italica
  Peptide Sequence Number=SeqID_128736
ccccgaccactgaatcaactacaaacaatttacagcccgaatagaacaagtacaatcaagtagaaaatttagacaatatcataatcggcaggatgcaaacctcagtcgcaatgggcttcacgacctctgtctccttttccttcatgctctgctcttcttcgtcctcctcttcctcttcttcttcctcttcctcctcttcctcctgctcctgcatcgcctcctcagggccaccaccgacccattcgctgggatcaacccctctcctaatctgctccccgcggatcttctccacgatgaccgcctcctccgccctgcgcatcagcgtctcggaccacctctccccgggccgcgccatggccctgccgagcgggtcctggaacctcccgaggtactcgtggtgcaggtagggctcccgctcccgcatggcctcctcggagaagtact

SEQ ID NO: 62763 - DNA, 387 bp, Setaria italica
  misc_feature (387)..(387): n is a, c, g, or t
  Peptide Sequence Number=SeqID_128737
tcacatatgtgaattgttccagctgatcctgcatttcttcacaagacaacgtttggttgaaagtccctgcagccgaacctctaccattgctggagtccatgggggcagactcattggcaacaacctgcaaatatgtcaaggaagaaattcatatcatgctagggcaatgcataaaaaaggaagaaccacaccgagataactaaattcagaggcaatcctgacttctaagtaggtcaaataagaaatggaggatgccagacgtcatagaggtcacaaaatatgctttaattatgaactgcattaatcaagtttctacatgagcaaacagtttctttacacatgtatcatcatgttatcttagcatgcatactaggacaaaaaaaacan

SEQ ID NO: 62764 - DNA, 306 bp, Setaria italica
  Peptide Sequence Number=SeqID_128738
ctgatccggcgccgtctgcaggtggcggtacatccacgccagcacgccgaccgccgccgcgccgaatcagcagcagctctccagcaaggactgggcgcaccaccgcatcgagcaggcgcgcgcgcactgatacacgccagtttagttgcatgtaccagcaataatataataatgcataccagtccagttcaagtgctttactaggtggtgatgtaatcttgtcagcaataattattaataattattgctgacaagattaaagccgccacctgaccacctaacaaaggctcatccagggtggtgaat

SEQ ID NO: 62765 - DNA, 306 bp, Setaria italica
  Peptide Sequence Number=SeqID_128739
cttaccaattgatgaatctgaggggaactcaaggcggtgcagtgctgtcattggccatagctgggtatctcgcatttcagcacttcaccagggtgggaggtctaggcaaagcattgttgacagcggaagctccagttcacctggaatgaagaagaacaagcgcaccaacagagcaagaaaagcagtccattggccataatcactcttgatccatgagattatgctgcaaggtgcttgcaaagcaaaaaacggcacaaggaaagatttgtgtatggctgttcctttagcaagcaatagcactgcgct

SEQ ID NO: 62766 - DNA, 194 bp, Setaria italica
  Peptide Sequence Number=SeqID_128740
cctatcccctgtgtgccttgcctatcccctgttgcgtgttcaggaccccaaagtcccattccgagccctgattcaaccctaaagctggtaagattacatctttgtagcggtactctgcattgctgacaatcccaactgtgagtcccttctcccgcgcccacctcaggaagggctgtgcatcaggaaatgcagag

SEQ ID NO: 62767 - DNA, 175 bp, Setaria italica
  Peptide Sequence Number=SeqID_128741
caatggcagaaggcagcagaagtctctagctagtatcaatcagtactcagtagtaattgatactagctagagacttctgctgccttctgccattggctattggctaacctacacctccacggcaatggccgtgtcaggcttgatcatcgccagctccggcgccacgaggccgtcg

SEQ ID NO: 62768 - DNA, 397 bp, Setaria italica
  misc_feature (368)..(368): n is a, c, g, or t
  misc_feature (370)..(370): n is a, c, g, or t
  Peptide Sequence Number=SeqID_128742
tcttcaaatatctctgctgaatcaaaaagcaaactggtcctgtttttgcatgagttttgcactctcagtagaagtttgcatcctgatcaacaatggcatctgtctatggatcttgtaagaaaaggtgtgtttgacatcatttatgatgtgttacggagtcagaataaagtactcgtctcagctgggatgaatgtacttaagcattttcttgatcaggatcctaactttcttagaacatttattgcccatcatgaagaaaactatcaagaaggcgattctcttcttggagttcttgttcagggcatggtgattggctctggtgaggaattgcgctgtcagtcttgtctaatgacactgttggatccttntnctccaagacagctaggaattgtgaagt

SEQ ID NO: 62769 - DNA, 424 bp, Setaria italica
  Peptide Sequence Number=SeqID_128743
taaattagtctttttcctagttttttatttcagttgtaccatttagctccttaattgttttggcaaatattctgataactgcactcgtcttttaaccattggacaatacaaatctgctgtccgttcatccatgaaccccattgtgacagctttttctctgttttgcagggtagaaagcggtgttcatcttcttgttgctatatatatggagagtcatcttcttgttgctatatatatggacatgaacaccatagcaagcaccgctatacaaggcctcgactctgccaaaatcaatcttttgtagttgagatagcttgtacattcttgccataatttaaaagagcttctgtagtttactactccttttcttttctagtgggcttgtgcagctgctgtgccacaattctaatctgaagttgttagg

SEQ ID NO: 62770 - DNA, 324 bp, Setaria italica
  misc_feature (302)..(302): n is a, c, g, or t
  Peptide Sequence Number=SeqID_128744
tacttctagttgttgtagttagtttgtctactacttgtcttctagtagtattcacaatacctgaaccatgaagaagccaataaagaggctgctattaatcaagttgtcagcggtgctcttgatcgcttgcactatgaacgtgacccttgtgtactgtatgataatgacaaaaaattgtggacctatctacacaggggtagggaggaggaagattttgaggatgatggcacgtcatctacgaaaaaatggaagagaccgaggaaagatccctctgattctgcagagccaggtgcagcaaacgntgatttgatgatgatggcactc

SEQ ID NO: 62771 - DNA, 239 bp, Setaria italica
  Peptide Sequence Number=SeqID_128745
cgggagcagagggcggcggcgcgcgcagctccgtcgtggccggtcgggcgatggggaaggaaagcaaaaagaagccagagagcaccacagatgcagttactgtagcagaacccgctgctgatgtgccagaaaataatgttgtagcagtagagcctgagaagctggagaagcctgagaagattgagaagcccaagaagaagtatgtaccgatatcaccaactatacatactggcttttca

SEQ ID NO: 62772 - DNA, 252 bp, Setaria italica
  Peptide Sequence Number=SeqID_128746
gcatgagatcaagagaaggcatgatagcaggagaggactgattaatggcattagtagcagcaggtctcccatttgacaaatttctgtctttgcttatgctggtatacgcttgaacctagcgaccgtcaaatagtttgctaccaatatttatacgggatgtatccttgtccgtaatcagataaatggatctatactgtcctagcataagcatgtgggaacatccttgggaagtaagcgtgcttcgccttcacg

SEQ ID NO: 62773 - DNA, 211 bp, Setaria italica
  Peptide Sequence Number=SeqID_128747
catattgttgagaactgtgtctatgagtagaaaaacggcatttagagagtgcatgccatcaggagaggactgattaatggcattagtagcagcaggtctcccatttgacaaatttctgtctgaagctgcatgagaatcaaacaaaaaggaagaagctatgtctgctcttacttcatgatttaatctactcacagaccattttgttattgtt

SEQ ID NO: 62774 - DNA, 399 bp, Setaria italica
  misc_feature (130)..(130): n is a, c, g, or t
  Peptide Sequence Number=SeqID_128748
aggggcgtccagacgatgaaaggtccagaaatgggtacggccaccaggataagccaccacaagcatgaagaacccactggaatgttacataggcacagctccagaaaacaaagaaagccattcggtaccngggaaaaggcatattgttgagaactgtgtctatgagtgaaaaacggcatttagagagtgcatgccatcagtgaccaatgataacccaaacttgtcacggtagaaaaatggcacaaggagcccccaaaatgtgacatcagtcaacattgttgcacctgcactagtctgcatacaggcaaagaatatcaggcaacagcaatacacatgctcagtatgtgagtgttcattagcaggctaagtaaagtacttttacttagtttagtaaggtta

SEQ ID NO: 62775 - DNA, 247 bp, Setaria italica
  Peptide Sequence Number=SeqID_128749
aataatttaatgagtaatcttaccatattgttgagaactgtgtctatgagtagaaaaacggcatttagagagtgcatgccatcagtgacctgcgtgaaattttgatggacaagataccaagatataaggcattgtatatgaacagctaacttggtataaataaaaaaagcataatcttctcagttcatttttcctctactcgtggggctttcaattttcaggaggttatggtaggccatatcagaga

SEQ ID NO: 62776 - DNA, 292 bp, Setaria italica
  Peptide Sequence Number=SeqID_128750
gacaagggcagcatggagtacactgaggtgctgaagctccgtggccttggaggtggtggggagcggcggtactctggctcaaagtacccaccttggttcacctcattggctattgcacagtagtactcctgtttcttgcatctgaacacctcaacatatctccggctgcgaggactcccttttgattgcaacgaaattgacatctgcaagttctttgcggggctggaaatagtggattgcctcctggttaacaagaatggccgctttactggtgaggcttttgtggtcttcc

SEQ ID NO: 62777 - DNA, 276 bp, Setaria italica
  Peptide Sequence Number=SeqID_128751
gctggtcgccttctccgtccggttctcccccgatacccctaaccctagccgcccgaggcagagtcccctctcctgaccgcgaccgggcgccctctcctccgccaccccgccggtcgtcggccgatccagatgaacacgcctccttccagatccagtgaacgcagggagtccattggatgtctcaaagagggccaggatgatggaaccaggccctccctattttggggctatgggcagcaacgctggtggtgccagcggtggcttctaccagccctt

SEQ ID NO: 62778 - DNA, 268 bp, Setaria italica
  Peptide Sequence Number=SeqID_128752
agtggaaacagatcgacctgcttaccatcttatgcttgcgggaaaactttatttggggggatattttcgcgccgctcaacataggcagctgggaaccacccggccttccctcggcattctccttcggcccaaccattgggagcaatctgttgcaggcaagcagaatagtattgacagtcaatgagttgaatagatttgaattggtttttgattggacaggctaattcatccctatttgcttccaccatgttatggtttcttttttaag

SEQ ID NO: 62779 - DNA, 207 bp, Setaria italica
  Peptide Sequence Number=SeqID_128753
ttgaagtcgagtagaaagaaaaatagtttagcttggctgtatccggtggaagcccacctgacatctcacttgaggtaagctgaaattattcgaaaggcgtcagtagcagaggaagggacaagctgagtctacgacctatgctgccggcgagcacatgatagatacatcgatgatagttatacatatgcaaagccgcatcttcagtgt

SEQ ID NO: 62780 - DNA, 168 bp, Setaria italica
  Peptide Sequence Number=SeqID_128754
gaagcagcagctgcgcttgcggctgttgaatctcagcagcaacgggtaacccttcagcggctggttcctttcctaacacagccatgcttgctttgtgctctatcattttagcttcagactgttgaagctttgtagtgtgctccggaattggagcttctctgacccgtg

SEQ ID NO: 62781 - DNA, 385 bp, Setaria italica
  misc_feature (378)..(378): n is a, c, g, or t
  Peptide Sequence Number=SeqID_128755
tcttcttattgcctggtactactgttcggccaagtttgaaggatgctagaactgcaaacaagcgcccttctatatatggcgcagaaacctatctggcctggttctgccgtgctgataatgcaaacgaggaggcggctaagcaatctgttgtggagatgacagaagatgaaggacaacgccgtagtgggggccagattgttggcagtcgttggagcattctatccgaaccacagaccaagttctcacctcccatctggttctatccttgactcctctacctttcagtggtgtgaatgcagaatggggataaactattaatagcgctgtgttcggttggggaaataatctgatgctgtaacgaagttctatgagctttanctaaccg

SEQ ID NO: 62782 - DNA, 315 bp, Setaria italica
  Peptide Sequence Number=SeqID_128756
taaagtttttgttaaggtattgtcttagtaacttgtctaaactaagtcgtccctttctatatatggcgcagaaacctatctggcctggttctgccgtgctgataatgcaaacgaggaggcggctaagcaatctgttgtggagatgacagaagatgaaggacaacgccgtagtgggggccagattgttggcagtcgttggagcattctatccgaaccacagaccaagttctcacctcccatctggttctatccttgactcctctacctttcagtggtgtgaatgcagaatgggggataaactattaatagcgctgt

SEQ ID NO: 62783 - DNA, 214 bp, Setaria italica
  Peptide Sequence Number=SeqID_128757
aataaggataccactgacacacattattctcggagaatctcttgaatttcttcaaagaccaaagttacatagggttaggaattccatttcagtggtatccttattctcggagaatctcttgaatttcttcaaagaccaaagttacatagggttaggaattccatttcagtgtcgacatgctttgtccacagggccttgtattggttcaaagcga

SEQ ID NO: 62784 - DNA, 328 bp, Setaria italica
  Peptide Sequence Number=SeqID_128758
ttagttccatcgagattgagaggatctgtctaactagtagtgaatgatgccatccttgaaacagctgctattggggttccgcctatcggtggtggccctgaacaactaaccatagccgtcgtcttgaaagaccagagctcacaagtagaggacttgaaccagctgaaactagcattcaatgtggctctgaagaagctgaaccctctcttcaaggtgagtccattgttcatgccgatttgtcgctgactgcatccaaattttatgtggcaaaaaccagaggcgtcaccgagctctctttgcttccctctgtacgcaggtttcttctgta

SEQ ID NO: 62785 - DNA, 201 bp, Setaria italica
  Peptide Sequence Number=SeqID_128759
ccgccgaggcgcccctcgccaagaagcccaagaccgccgacgcgcccacgtccgaggccgaggcacccgggcccagcggcgaccgagggcggcgccgcggcggaggcgaaggggccgcacaagctgcaccggcagtggaccttctggtacgacatccagtcgaagcccaagcccggcgctgcgtggggcacctccctcaag

SEQ ID NO: 62786 - DNA, 199 bp, Setaria italica
  Peptide Sequence Number=SeqID_128760
aaggttgtgcgtatcatgaagattggggcttggattggatggtgcgggtggagttttcttctcggtagctactttcattcgattcagcctcagcttgcccgaggcaattttccccatctattatgatgttattttgctctccagcatctctttcttgtactacataggcttattcttgtagtagtctaaaaattaacta

SEQ ID NO: 62787 - DNA, 348 bp, Setaria italica
  Peptide Sequence Number=SeqID_128761
ttaaagggtaaaggtattccttattgtactagtacttcgtcctagttggtctagttcttgaaaaggggagagaaggattcaacagctgaggatggcctcctgaatgcgcttaatgatcttatcgaccaccttacatctggcaatgcttcggacagtctccagggagcttggaagcagtggctgatggaatggaccgcagagaatggttcatacaaagggacacagcgttgctgttagttcgctcagtcgagatctgttcggggagctgggttcaactgagcagaatcagaagcttccggagtattcccagcttgagcaactcacgtattccatatgcagtaaacttgg

SEQ ID NO: 62788 - DNA, 375 bp, Setaria italica
  Peptide Sequence Number=SeqID_128762
aaacggactacccggacaacgtcgtcccctccgggcagatcaccaggtcgtgccggtggcgatggagaaccagatgagcatgttccacgggacgacggcgcgcgggtggaagggctggaccccttctacttcttcatgaacccgagccccgggtacgtggtcaccttcctcaacaagctccccgccgagctcacctgcagcggcggcaggagcagccacgaggtggccaactacatccagaggctcatcgcgtccacgctgtcctacgagtgcaccagcttcacccgcaaggacaagtacaaagcgctcgccggcaacgacggcaccgtcgtctccaagcccaacatcgacaagaagcaggtcatgggctgttag

SEQ ID NO: 62789 - DNA, 404 bp, Setaria italica
  misc_feature (266)..(266): n is a, c, g, or t
  misc_feature (355)..(355): n is a, c, g, or t
  Peptide Sequence Number=SeqID_128763
tttttctactggattagatgcaaaaccctatgttagacttggaacttggtgaatcattcgaaatgctcaatatgttcccatgcatgtctccatttagacaagctattaccgtacagattaagctctatatatctggatcgaccactgaatttctttgatgtgtctgccatttcaggagactatttcatgaagccaagcatatcagctgagccagaggtgaccgtgactgaccgcacgggcacggacgagttcatcatcctggggancgacgggctgtgggacgccatgtccaacgagtacgcttgcagggtcgtgaggtactgcctgagcgggcgcttggcggccaagtccccgngacggtccacgggagctcggccaccgacgccgccaagctgctggcggca

SEQ ID NO: 62790 - DNA, 360 bp, Setaria italica
  misc_feature (298)..(298): n is a, c, g, or t
  Peptide Sequence Number=SeqID_128764
ttaacgttaaggttaacgaaccaaaactaagaacggggaactacccgacgaccgtgctctgccgcggcggcgtcgccgtgccgctctccaccgaccacaagccagaacgcccggatgagttggcaaggatagaatcagtaggtggccaggtcatctactggcagggaccccgtgtcctgggggtgcttgcaatgtcaaggtcaattggagactatttcatgaagccaagcatatcagctgagccagaggtgaccgtgactgaccgcacgggcacggacgagttcatcatcctggggancggacgggctggtgggacgccatgtccaacgagtacgcttgcagggtcgtgaggtactgcct

SEQ ID NO: 62791 - DNA, 237 bp, Setaria italica
  Peptide Sequence Number=SeqID_128765
ctaatctgagtattaaaatagctgatagatatgtcccaagattgtaaccagatttaatcaatccttcaacaatctctacaactaaatcaaatgaaccattcctgatgtattgaccaagaagagaacaatatgcagatctaccaagttcacaccctactcttaaactataacgcataactgtgagcccacaggacagtctacagtctgcacagctggccttaataacatcacacagga

SEQ ID NO: 62792 - DNA, 281 bp, Setaria italica
  misc_feature (188)..(188): n is a, c, g, or t
  Peptide Sequence Number=SeqID_128766
tggtaaggtaaagtaaacgtacccttgtacttactaacgtacgtattgtagtttgtccgtcccaagaagataggcggcggcggcggcgagccctgggaggacgacgtgcctgatgcctcgtggctcagcctctaataaagatcctgcagcgagcatgaggagagacaacattgatgccaaggggaaanagtgaatccagtgcaaagatgttgtctctgtctgagaattcttaggagctccgagggattcttagactagttatccgcccatccaagggtttg

SEQ ID NO: 62793 - DNA, 364 bp, Setaria italica
  Peptide Sequence Number=SeqID_128767
gtcagagtcactcgacctggccaactactggttccaatgtgcctcactacccgttgtgttcctgctgtcccctccatgtgcaaaatgaattcatcttcagcaaattcaattccagttggagttggcaaattttgcaagaacttgaatgacttatccatttctttcaggaatttgtcataagcaggataatgcagcctgttagctgtggtagcagtgagagcttcaaaagtgaatcgagcattgaccacgtcacaagccaaagggaatacagaaccaaaccacacgtatgcttcttctccaacagttggctcttcgttcacctgttaaccaattgattggtctttagtaactaaatttgtaccta

SEQ ID NO: 62794 - DNA, 428 bp, Setaria italica
  Peptide Sequence Number=SeqID_128768
ttttttttttttgtaggtactaacctagtactattcttttatttccctaaagtccgggtttctaattaattttcttaagtaaaattcgcctagaacgcatgcatctcgttccccttattattcggctatcacaattcacacaacggcaacatttattcattcgatcaagctaagcaccgcatcacagagcatgcactgcattactgcggcagtagtctaaccgctcgttgttccttcggcgccgagcgcgtagcagaagggcctgccgtggatggtcaccaggttgcactccgcctccgacacgagcgtcgcggcgaggtcgagctgcgcggcccaggagcacgacggcgacgccaccacgccgccgccggctggcatgccgtccatcatgattctcagcgcgccgcaccggcagtagggcacggatg

SEQ ID NO: 62795 - DNA, 494 bp, Setaria italica
  Peptide Sequence Number=SeqID_128769
tgttggttccgtctttcgttgatcgggcacagcgcgacccccggcggcgcactggaccgcgccgtcaacgtcgaggccgccgcgacgggggacttcctgcggctcgaccacgtggaggggtaccacgagctgtcggccaagacgcgggcctacttcgccaccgccgtcgccacctgggacgccgagttctacgtcaaggtcgacgacgacgtgcatgtcaaccttgggatgctggcgaccaggctcgccaagtaccgggccaggccaagggtctacgtcgggtgcatgaagtccggccccgtcctgtcgcagaagggcgtcaagtaccacgagccggagtactggaagttcggcgacgaggggaacaagtacttccgccacgcgacgggacagatctacgccgtctccaggggacctcgcatcctacatctccatcaaccagccgatcctgcaccggttcgcgaacgaggacgtgtcgctcggcgcgtggctcc

SEQ ID NO: 62796 - DNA, 308 bp, Setaria italica
  Peptide Sequence Number=SeqID_128770
taacggggaaacgaaagggaacaaacaaagtaacttaccgaccaacgaccaaccggaccaagaatctacgccatctccaaggatcttgccgcctacatctccatcaaccagccgatcctgcacaggttcgcgaacgaggacgtctcgctcggcgcgtggctgatcgggctcgaggtggagcacgtcgacgaccggagcatgtgctgcgccacgcctccagattgcgagtggaagaagcgggccgggaacgtgtgcgtggcgtccttcgtactggtcgtgcagtggcgtctgcagtcggtggacgagga

SEQ ID NO: 62797 - DNA, 298 bp, Setaria italica
  Peptide Sequence Number=SeqID_128771
aaaacaaaaactaaagaaccaaacaaacgaacaactagggaccctagacaatactacattggaaccgagaaggaggacgataagatgcagggcccagtgcgtgtggcagtggcgaggcagtgccagtcgcagagccaccggtacaagggcccatgtgtgcatgacacaaactgcgcaagcgtttgcagaccgaaggtttcactcgtggcaagtgtgtaggctttcgtggccgctgcttctgtcttaaggcttgctagctgcctgggcctggcgacctgcatacatgtgctcaatagat

SEQ ID NO: 62798 - DNA, 148 bp, Setaria italica
  Peptide Sequence Number=SeqID_128772
aagttttattcatatgctcatgcccattagccgatgcatacatcttttatttcgatctattgagacaacatgtatgcatcggctaatggcatgagcatatgaataaaataaacatccggataataagtttttttttgtctcaaattca

SEQ ID NO: 62799 - DNA, 453 bp, Setaria italica
  Peptide Sequence Number=SeqID_128773
gcatgtttgtgtttgcactatactacctgtcgtgtcaagtttgtgttagtactacatttgaatatttggagtccaagttgttgcgtttagtaaaaaatacaaatatggaacatgaaaacgcaaactcttaactccaaacatagtactcgatgaaatacaaacatacgacctgaacacaccaaatgtactattctccattcttttctcgttccaggcttcgcaagatcttggtctccaatgccattgccatccacttgatcaagcggccttcttgtcctcgtccccatcgccagcttcgccatcctcctcttcgtcctccttgtcgacgaggatgttcttgcaggcctcatagcacatgaaggagattcctgcagccggcatgagcttgatgcagctcggacccaggccgcggtacaggccagcggcaccctccttcttgaggatgcagtacat

SEQ ID NO: 62800 - DNA, 285 bp, Setaria italica
  Peptide Sequence Number=SeqID_128774
aagaggaggatcttcttgcaggcctcatagcacatgaaggagatgcctgtaccgcggcctgggtccgagctgcatcaagctcatgccggctgcaggaatctccttcatgtgctatgaggcctgcaagaagatcctcgtcgacaaggaggacgaagaggaggatggcgaagctggcgatggggacgaggacaagaaggccgcttgatcaagtggatggcaatggcattggagaccaagatcttgcgaagcctggaccgagaaaagaatgtactattctccattctt

SEQ ID NO: 62801 - DNA, 288 bp, Setaria italica
  Peptide Sequence Number=SeqID_128775
ttaggttacggttacgggttacgttaccttaatttgtcgtagtctacggtcctacgtttcccgtcttggtaggttggtcgtcgcaagcagatgcaggtgggcgccgtcggcgggaggcaggtctaccggaacgtcctgcacgccatgtactgcatcctcaagaaggagggtgccgctggcctgtaccgcggcctgggtccgagctgcatcaagctcatgccggctgcaggaatctccttcatgtgctatgaggcctgcaagaagatcctcgtcgacaaggaggacgaa

SEQ ID NO: 62802 - DNA, 369 bp, Setaria italica
  Peptide Sequence Number=SeqID_128776
acatctccattaggcaaactgctctggggactgagccaaccgctttgcctcagcagcagaagtagcacgtatctccctgtattgttctacatcctcgggggaaagcttgttcaagctcttcaaggagatgcttccgtaggctcttgaaagcgtcagtcttgcccttggtgatctggttcttggcgatgcagctattgagcacgtcccttgtaaactcgtcaggattcttcccgtcgtcaatcaaattgacgacctccatgggcacctggatgttgcacccctccgcgagcttctgcatcgtgtcaagctccgccacgtagtcgtcgtttctaggtcgtcttggtagtaagggggttagtctttgggtta

SEQ ID NO: 62803 - DNA, 441 bp, Setaria italica
  Peptide Sequence Number=SeqID_128777
gcttaatgttcttgattactggttttgcacagatttgacatgttaaagttcatttaatcaactgatttcctcgttacatgtcatttagagtctataatttccttgcttacagaagatgcaaataaatccatcactatcttttatgtttatgctgtatgcacaggttgttgctgagacgaagattgagaaaaatgctgcaataacactgaattatggttgccatcccaatgatttctttcttcttgattatggatttgtgatagcaccgaacccttacgatctagtggaactgagctacgatggagccctttttgatgctgctagcatggcagcaggagtctcatctcccaacttttcagcaccagccaagtggcaacaagatatcttatcacagctaaacctacatggagagggtgcaatttttgaaggttttccccccac

SEQ ID NO: 62804 - DNA, 363 bp, Setaria italica
  Peptide Sequence Number=SeqID_128778
cgctatgtgcaattgctctccaacacttccacacaaagataatggaagacgaggccattctaaaaggggaaccgcctcttaccactgaactggccgtccagtttagattgcagaagaagttcctgatagttgacgtgatgcagaatatcagccggaaaatcaagatgctatctccacagaaatccaccgcttggggctttattatcacccacagcaatcagtacaggaaagtaatcaactgcaagacaaaggcacatccgttggatgatggagatgtaactttccaatgtcaggcattggaagtagtatgactgtggtacagaatggtaactgattgtctgatggcaaaattaaagacctaag

SEQ ID NO: 62805 - DNA, 421 bp, Setaria italica
  Peptide Sequence Number=SeqID_128779
gggtggcacaagggcagcggaagccggaggcctagggttagaacctagactcgtgataccatgtaagattgtgtatattgcgtgggatgtattgcttgagccccttgggctgattatataggagtacatggcttggagggcgagtagcctctcctagagataaggaaggttatcctgggattacaatcaatcctaaactaaccatgtccggagttgcctaatatactctaacaaataggatgcctagcacgtgattttcagacttgattctactatagaatagtacaattttatgactttactagccaagatcaatctgactcttaaggcatcctgcttagtttggcagaatcttaaaaccttagtggatttgccctccgatctgactcagattcaagattatgatagctttgatctggtt

SEQ ID NO: 62806 - DNA, 154 bp, Setaria italica
  Peptide Sequence Number=SeqID_128780
taggtttactagttactagttactttaggtagtctgagctgagaggtcgatggtggtggtcctgttgctcggtagtggggtggccgtcatggtcgcggagctcgtggcggaggcaggcgttgacccattgaggtagcgagctcctcgacgtgcg

SEQ ID NO: 62807 - DNA, 205 bp, Setaria italica
  Peptide Sequence Number=SeqID_128781
ggtacgtcagctgaataatgtctgtaccacacatgagtgcgcacatatgtgtgcatgcacacatatgtgcgcactcatgtttggtacgtcagctgaataatgtctgtaccaccatcgcaattgtgctatatgtcccgctatttatcaatgtgtattgtcatcattgtgccatcaggcctcgttcaactattaaggttttgttatg

SEQ ID NO: 62808 - DNA, 109 bp, Setaria italica
  Peptide Sequence Number=SeqID_128782
ttcatctgcccggccaattgaagttgaacgtatatggagtacgtgcgccgtggtccttgtggcagtagttgaggaggagggtgaggtcgacggggatatcgagcacgat

SEQ ID NO: 62809 - DNA, 328 bp, Setaria italica
  Peptide Sequence Number=SeqID_128783
ttccctgatcatagaaggcgtgatctcacagatagaagtggaaacattcttcctggaactgtggttgatactgacgtttgtcatcccagtgagtttgatttctacctttgtagccatgcaggaattcagggaacaagcaggccaacacattatcatgtcctgtgcgacgagaaccatttctcggctgatgcgctgcagatgctcactaacaacctgtgttacacatatgcatgctgcacgcgctctatctcaagttgttccaaccggacctaactaacgacccaacctaggacggacttacccgacgacaaaggtaactaacgaacaa

SEQ ID NO: 62810 - DNA, 350 bp, Setaria italica
  Peptide Sequence Number=SeqID_128784
ggcgtgatctcacagatagaagtggaaacattcttcctggaactgtggttgatactgacgtttgtcatcccagtgagtttgatttcacctttgtagccatgcaggaattcagggaacaagcaggccaacacattatcatgtcctgtgcgacgagaaccatttctcggctgatgcgctgcagatgctcactaacaacctgtgttacacgtaagcttgattggcactcccattcaccactgctgctccttttttgtcactatatttgttgcccaattcaattttattgttgactgtggctgccagctgatatttgttttgcaaatgcagatatgcattgcttgtctacgtcg

SEQ ID NO: 62811 - DNA, 270 bp, Setaria italica
  Peptide Sequence Number=SeqID_128785
caagcaggccaacacattatcatgtcctgtgcgacgagaaccatttctcggctgatgcgctgcagatgctcactaacaacctgtgttacacatatgcatgctgcacgcgctctatctcagttgttccaccggcctactacgcccacctggcggcttcccgcgcaaggtactacgacgagcaagcaagaagggacgaccgaataggaagacctactagtacgaccaagtaggacggtaccaagtacttagtacgtttaccgtacctaagta

SEQ ID NO: 62812 - DNA, 246 bp, Setaria italica
  misc_feature (183)..(183): n is a, c, g, or t
  Peptide Sequence Number=SeqID_128786
tgaagaacaggcattacttgctttgttgcagattgcctttagggcaggttagttagttattacattacattattacacatttgttcattcaaaggatgtgatactggtagttaaccacaaacagttcatacaaattctttcattctttacatgaataaaaccattagtgaaaacaaaaaaaanaaaaaactaaaaaaaacgtaaaaggaaacgtaaacgtaccgaaaccggaaacggaaccaaacc

SEQ ID NO: 62813 - DNA, 451 bp, Setaria italica
  Peptide Sequence Number=SeqID_128787
tcccagcacctgttgccggacgcgctgggcctcatcttccgcaaccttccgctccaggaggtgctcaccgtcgtgccgcgggtgtgcaagtcctggggtcgggtggtcgccggcccctactgctggcaggagatcgacatcgaggagtggagccagcagcagagcaaaccggagcagatcggccgcatggtcgagatgctcgtcggccgcagcggcggctcgtgccgccgcatcagcgtctccgggcttccctgcgacccgctcctctcgttcataggagaccggtaagtttgaattctcgcgatgctctctgctcctttccgtcttcatttccccatttttgattttgtcgcggtttcctgtgggtagtgaacatttctgcaaaattcttgaaattactactttccccaacggaccattagattagaaatccatgctcttcataatgcat

SEQ ID NO: 62814 - DNA, 409 bp, Setaria italica
  Peptide Sequence Number=SeqID_128788
ggacgtaatgttttgtttttgtttttagacattcattaaattcggattcatttaccgttcgaaaactaagttcagtaattcagtcagcactcaacacgtcaattgtattcgaaaaagttgctgatgatgttgatgttttcagacacgatcaggccggatgacgttgggctttgggacgagatcagcttcttcaacgagatgaacacccatcgtcatcaaaaccctcctatcattacctgcaaaaccattcaccaatgcaacaattttacggtaactatatggatcgatcgagccatgcataatttatcagaaataataagctgaaccggaacacgtgtatttgatcattgacatgtccaactttttttgcacgcatatatcaatcttgcagattgcggtattctttctt

SEQ ID NO: 62815 - DNA, 409 bp, Setaria italica
  Peptide Sequence Number=SeqID_128789
agaatagtacctacaacaaccaaccaataatagacaaccggacaagaagcagcgggcctgcacctactatcaggagtcctcccacgagcgcagtgttatgagaggtggacggatgagccggctggtgtggctgaaggaggttccggtgcctaggaacctaaggatcgtcaatttgcggttccaaggctcgcaaatcttgtagggtcacagattgtccggcagattcaattttctttcttgccttgccgatggctacaatcgaattgcatctacctggataagaatataatctagtagttggaatgacaaacgatgatgacctgtcatgccaatgttacatgatagtctctttagagtgcttcattgcttatcatgtgtaactttgttttagcatgcatcaggttatgta

SEQ ID NO: 62816 - DNA, 337 bp, Setaria italica
  Peptide Sequence Number=SeqID_128790
aatttatcagaaataatgcatggctcgatcgatccatatagttaccgtaaattgttgcattggtgaatggttttgcaggtaactatatggatcgatcgagccatgcataatttatcagaaataataagctgaaccggaacacgtgtatttgatcattgacatgtccaacttttttgcacgcatatatcaatcttgcagattgcggtattctttcttcccttaagatcggttatgcccctccatgatcatccggggatgacagtgttcagcaagctcctcatcgggtctgcacgcctcgaggcatacgattgggtccgtccccgcatcttaacaactt

SEQ ID NO: 62817 - DNA, 374 bp, Setaria italica
  Peptide Sequence Number=SeqID_128791
aggtagaacaatcaattccttgcatcatagactgcatgcaacactgttgctgcagcatggccaatggtgattgctgcatcaacattgctagcaagggtgagcctcctatggtgaatgctcgttgcatcatgcaagattgcatgcatgggaccatggaacccattcccataatcggtgagaatgagcttaccatggtgaatggttgttgcatcatgcatgattgcatgcatgggtccatcatgcctattcccatcattagtgggaagttttgcgggcatgtggctgtagtagtagcaactgcagaaagagcaaggagcacaaccagagcaatgcgtgatgccatggtattcgggtactaattgtgatagtacccg

SEQ ID NO: 62818 - DNA, 239 bp, Setaria italica
  Peptide Sequence Number=SeqID_128792
gggcgagatgcgatggaggtgatgcgatggcggcgccgccgtaatcgatcttcaagagtccagttccagggcattgaatttcagaagaaggcagaaggagatgaagcatcaaaagttgttccaccggagattgctgaaaagtctcgtccttgtggctagtatacccaccaccatataatttgcacagctatgttctatgtgtcctctgaattgcagtttaattagatacctgtgtgttc

SEQ ID NO: 62819 - DNA, 127 bp, Setaria italica
  Peptide Sequence Number=SeqID_128793
tgacgtatgtcttgatagcaatgttatgctacactcatttcattctgttgtaaccagaatgatgttaatggatggaatgatagcatgtagtcctagtactaggactacatgctattcattcctttca

SEQ ID NO: 62820 - DNA, 406 bp, Setaria italica
  Peptide Sequence Number=SeqID_128794
cgacgacgccgcgggggtgttcccgcgcggggaggtggagcggtgcgtgcgcgccgtcatggacgagggcgagggcgcagccgcgatgagggagacggccgggaagtggagggacagggctcgagcggcggtggcgcccggcggcagctccgaccggagcctggacgagttcgtggagttcgtgcgcgccggcgccgctgcggagaagtggaaggcgctggttctggagggaagcgagcctgaagggtctgagatgtgatgacgcgatgcgatcagacaacgcttggcttgctttgtttgtgatgaccggatcggccgggcacaattacatggtggctgggggttaggacgctcaccctcaccacatgatgcatgcatggatgatcctagatggggtggttcaacc

SEQ ID NO: 62821 - DNA, 325 bp, Setaria italica
  Peptide Sequence Number=SeqID_128795
gcgccggcgccgctgcggagaagtggaaggcgctggttctggagggaagcgagcctgaagggtctgagatgtgatgaacgacgaatagacgaatacaagaacaaacgcttggcttgctttgtttgtgatgaccggatcggccgggcacaattacatggtggctggggttaggacgctcaccctcaccacatgatgcatgcatggatgatcctagatggggtggttcaaccaatttacttgtagcatatggttcactctaattagtagaataatgtattaagtgggatggtctcatcctgaatgagttggtaaccaaaaaaaaaaa

SEQ ID NO: 62822 - DNA, 431 bp, Setaria italica
  Peptide Sequence Number=SeqID_128796
ttgcatcggcatctttctgcaagcaatcattgacgaacgagcagaactctgatgaataagcatcttgtggtggagttggtgatggatcatccagtatctgcagcatgagattggctgggccttcatttacatcatatgggaattttccagtagcacattccaatattgttagtccaagactccaaatatcagcagcataagaatagttctcaatacgaattctctcaggtgacatatatgtgactgtgccatagccattgtgttgtccaaaccagcactcacaccaaagtctgtaatcttcgcctcacccttaagatttaccagcaaatttgctggctttatatctctatgcactagatgccttacttcatgcaagtatcgcagaccaagcaatacttctgtagcatatgtgaaagaactagttctggtat

SEQ ID NO: 62823 - DNA, 201 bp, Setaria italica
  misc_feature (57)..(57): n is a, c, g, or t
  Peptide Sequence Number=SeqID_128797
gattgttccatgtagaatgtcttcatatgatgccaaatcccatcagatccattaaanaagaggtagtaatgtatagcaagcatctgaaataaagtaaagaacaatatatgttacacatagtagacatgttgcataaatactaatctttccataaaagagtcagctatttttttttcaacacttgggacgtcagtgtctata

SEQ ID NO: 62824 - DNA, 175 bp, Setaria italica
  Peptide Sequence Number=SeqID_128798
cgtcatatgggaattttccagtagcacattccaatattgttagtccaagactccaaatatcagcagcataagaatagttctcattacgaattctctcaggtgacatatatgtgaccgtgcctacaaaggtagcgcacatagactttggtgtgagtgctggtttggacaacacaat

SEQ ID NO: 62825 - DNA, 330 bp, Setaria italica
  Peptide Sequence Number=SeqID_128799
caggcaggcagtgaaggtgtatgagctgacaccagaggataaggagttggttagtgtcgtccgttattgctgatgtggcatcctgtcttccctctgatgaagaacggatgtaaccaaaaggagttgtgcacggtttgtctcttattccctgtatagcaatgctgtctcttatccaatctatgatgtttatcattgtgctttctgttactggtaatcccttctttggttatgacatttttgatctgctttgttggctcggctgttctgttgtctagttgacagtgtaaattgagcttatcagtggtagaaatattggtttgaatcagtgca

SEQ ID NO: 62826 - DNA, 416 bp, Setaria italica
  misc_feature (66)..(66): n is a, c, g, or t
  Peptide Sequence Number=SeqID_128800
aataaaggaaagcaaaagttatctataaaggtagtagctgtagggcgtgacactatacatgaactnttaatgggcacaattcgtgaagtgaaatttagtaacaaggattgcaaacttgattgcaaagatcttcactggtccacttgtaaaatcaagaaggttgggattggtggaccccttattgattttgatgggagttttgttggcatgaacttttatgatgaaagcagtgcaactcctttccttccaaggagcaaggtcgtccatgctttaagaagtgcgtataattcaatattaccgtcagaaaggggatgcaatcctagggccataaatgttgtcagcagaggcaggaagacacagggaaatattttggatgataggtggccagtgtccaaagcccaataactggtacccca

SEQ ID NO: 62827 - DNA, 381 bp, Setaria italica
  misc_feature (308)..(308): n is a, c, g, or t
  Peptide Sequence Number=SeqID_128801
ttttttacctttactaattaaaacttagttaacctaacttttgcttttgttctaggctgcgcttggagggacacttgtaggacatgactggatatttgatgggatggtcattgatcttgttgagtatggtggagcagcctgtatcatagaacgggaatttctttgtacacgcttggagctacttctggcatgcaatcctaaaaaaactccgctcacgtgattattcactgccttcaggtgtatcaagcataatcccttcaggattcatgaaaactatttaccgattaagatcttttggttatccaatnccgccaccacttgtacttgaatgtaagttctttgtttttgattattttggatgccgcatgtgctcttctttat

SEQ ID NO: 62828 - DNA, 467 bp, Setaria italica
  misc_feature (232)..(232): n is a, c, g, or t
  Peptide Sequence Number=SeqID_128802
acgacgacgaccatccgtggaagtgcttccggtcgtgcacgaaggccttgccaccaccacgacgccgttgccgccaacaaggaatgcaacgtctccgcggtcgtctccggcgagtgcaaggcgggtgccacgacgacgactgcttcgaggacgtgccgaccatgggctacccgcagtgcgtctacaccgcctgcctctcctacccgcggcgtatgtgcacaaccaagacccnttaaaaaaagacctccatccatgtcctatgccttgctctggaatcctaatcgagcgtctagctctgaatgaatctctgatcatgcgtttgcttcttgttaccattctacagatagaagagagaaaagggcgtgcttgaagaagtgctgcgagaagtgcttccgccacagcccgcctgcgcctggtccctctcccaccccggagccgccatctccgactccgcctagtcccacccc

SEQ ID NO: 62829 - DNA, 507 bp, Setaria italica
  Peptide Sequence Number=SeqID_128803
tattttgttctttttgttccttgtaattacgaaaggaatccgttacaagggtaactgcctgtctaactgttgtaatctatcctgttggatgttttcgatgacgattagtctagtactgatcatgacgtcctttgcttaacctttactccatgactgcagtgcattcccattgtacagatcagactccacttctgatgtacttgatcttatcctcagtaaggtaattattgaaaagatcattcattgattgaatgaaataaggcaaactcccaagcatgattaaattgatatccaactttctgtttttcagaatgacccagatggatattcgagcagccaggtgggctttttatgtggctcgcctccagtacgcactaacaaccctgtcatccatgatccactgtttggtgaaagagtaccatccttttctcctttaggaagctcctttggcaaaacgctagcaggaagagttgaagtaggttctccatcttgcggcgttagcagcag

SEQ ID NO: 62830 - DNA, 258 bp, Setaria italica
  Peptide Sequence Number=SeqID_128804
tgattttgtacacgcattggttttcgcctactttctccatgcggccacttccttccaattcagtgtactaaatcctcgtgaccttggtttcaggacgccgtgagcgtgagggatggagcactgctatttgaggcagcccctctcaagggctgaagctatgcccgagaggaggtccaggttctggccgatggattcgccgccgacgccccgtgcagaggtcatctgcccccagcctcgccgcgccacccgcattcccgg

SEQ ID NO: 62831 - DNA, 126 bp, Setaria italica
  Peptide Sequence Number=SeqID_128805
ggcggtgcaggatataagtagtacctttaagctagcctgattagagttgcctttgcccttcagattgtggcatttgaagctgcacaatcgcagtgagctgtaagatgtatataaacgaggtgcccg

SEQ ID NO: 62832 - DNA, 339 bp, Setaria italica
  Peptide Sequence Number=SeqID_128806
gtatgctgggtaccagctcttgagtagctttatgacctcggacacatgctttgggtgcgaattgcagatgtacctcccagacgcctcctgtgtctcatacaccagaagaagagcatcagcgacatcgcgaacatccacaaagttcctgagcttcattttcaccaaacgatctcctgtacagagataatacaaaccacatcacggctcaaatcgatcaactagtatatgtgttcgaaaacagctaagattccagagcagaggaaagcagtgcaacctgtcaggaaatcaactaggaccgcgctgcttgcgttcaatgtggattgcagcaagggcccgatc

SEQ ID NO: 62833 - DNA, 445 bp, Setaria italica
  Peptide Sequence Number=SeqID_128807
cgccggtgatcactagtgaagtgagaaccctcctcctcggtcgtcgtccacacaaaactagccctaggccctagcagctttagatcaccatgccgaccccggcgacccgcaagtcccttgacgagcagcgtgccctagccaagcaatgctcgcgagaggcggcactcgcaggcgctaaggctgcagctatagcgaccgtcgccactgccatcccaccctggcgagcgtgaggatgtcgcgatgggcgaaggccaacatcaaccctgctggccaggccctcatcatctccactgtggctggcatggcgtatttcatcgccgccgacaagaaggtgctctcactggcgaggcagcactcctacgagaacgcaccggaagacaacctacaagggaacaacctacctaaccggggacaaccggtacgtacaaccaacccgtaccttaca

SEQ ID NO: 62834 - DNA, 291 bp, Setaria italica
  Peptide Sequence Number=SeqID_128808
tccgcaagttcccttgacgagcagcgtgccctagccaagcaatgctcgcgaggtagacacactcagtatcacatacagctacactgtcactgtggacacaaagactctgcattttcgtttggtttaggcttttagccgatcttatccactgcttttcgtctctgattcttgagtacacatgtcttgcgtgcagaggcggcactcgcaggcgctaaggctgcagctatagcgaccgtcgccactgccatccccaccgtgagttaatcctctctcttctccgccaccatgcac

SEQ ID NO: 62835 - DNA, 229 bp, Setaria italica
  Peptide Sequence Number=SeqID_128809
ttagttatttagggttacgttaaaggttaccttaactattctaacccttgtcttggtcctaggtccctcatcatctccactgtggctggcatggcgtatttcatcgccgccgacaagaaggtgctctcactggcgaggcagcactcctacgagaacgcaccggagcacctcagggacacctcctaccggggcaccggtcgtcaccacccgtccttcttcaggccatgat

SEQ ID NO: 62836 - DNA, 348 bp, Setaria italica
  Peptide Sequence Number=SeqID_128810
cccctcatcagaatgatgaacaagaacactgtaattaaaatgctagtaccaagtgacaacgcatttgcttctgtaccagatgacaacgctggctatccatttgatttaaatatcccacatgaagaagaccaagaaaagtttgcaacaataattctccttatgaaaaatgtttcataatctatttcctgacaatgaacacaccatctgtaggagatgacaacactgccttgtaagaagaacaagataccttggatgatgccatacatgacttcaacatgtacacagatgatgtcgacatcatatttgatgaagaggagttgtccaactcggatgacgaagatgattagc

SEQ ID NO: 62837 - DNA, 317 bp, Setaria italica
  Peptide Sequence Number=SeqID_128811
tttaaccctttaagtaactaattagacctactaggacctgctattaaaccactttaccctcacgttgcaggaagggagaggaacctagctccctttcctagcttgcttgcaagtccaagaaacgagaggaggggaacaagccgagatctccagcatgggtaggggaaggattgagatcaagaggatcgagaacaacacgagccggcaggtcaccttctgcaagcgccgcaacgggctcctcaagaaggcgtacgagctctccgtcctctgcgacgccgaggtggcgctcatcgtgttctccagccgcggccgcctct

SEQ ID NO: 62838 - DNA, 468 bp, Setaria italica
  Peptide Sequence Number=SeqID_128812
agaaagaagtacctactagactaggaactagaagaagcaattggctcttcttggagttggtgcctctggtctattgagttttgctacaatagcatctgcggatgaagctgagcatggcttggcagccccagattatccctggccacatgctggcatcatgagctcttatgatcatgcatcaattcggcgtggacatcaagtttacacacaagtttgtgcctcttgtcactccatgtccttgatttcgtaccgtgatttggttggggtggcctatactgaagaggaaacaaaggcaatggctgctgagattgaggtagttgatggtcctaatgatgagggtgaaatgttcaccgccctggtaagctgagtgaccgcttcccacagccctatgcaaatgagcaagcagcccgatttgcaaatggtggtgcactaccccccggactcagtctatcacaaggcaaggcacaa

SEQ ID NO: 62839 - DNA, 331 bp, Setaria italica
  misc_feature (291)..(291): n is a, c, g, or t
  misc_feature (298)..(298): n is a, c, g, or t
  Peptide Sequence Number=SeqID_128813
atatgctttctaaaactgcaatgtttcatttaaaagaaaagaatcctgaagcaccagtttagtaaaaaggttaagtctaaacagaggtatcaaggatcaaagatggtgctaatacttctctggtgcatgttagagtgtctggctattgaactcaaaaagcagaacaactcatttaaacatgtcatgaaaaaagacgtgtccggaggaagagatatctctctgatttttgccttaaagaagatttacctcagcttcaaattcgggccgattataggggtttcatcgaccccnccgaggngcgaggtcttccaccgtcttccggttacgggtt

SEQ ID NO: 62840 - DNA, 255 bp, Setaria italica
  misc_feature (247)..(247): n is a, c, g, or t
  misc_feature (255)..(255): n is a, c, g, or t
  Peptide Sequence Number=SeqID_128814
tggctattgaactcaaaagcagacactctaacatgcaccagagaagtattagcaccatctttgatccttgatacctctgttgcatgttagagtgtctggctattgaactcaaaagcagaacaactcatttaaacatgtcatgaaaaaagacgtgtccggaggaagagatatctctctgatttttgccttaaagaagatttacctcagcttcaaattcgggccgattataggggtttcatcgaccccncgaggcgn

SEQ ID NO: 62841 - DNA, 319 bp, Setaria italica
  Peptide Sequence Number=SeqID_128815
tctccgactcagtctagcgactcttttgctacttctcatctgtgtaaattatttgcgtgctggctgtcaaaatgggatggacctgctagctctggttcctgcacaactaggacatgtgtaatgttcgtgggccaagttttctttcctgaatgaaatggacataagggtgtgtctgattgctgtttacaactctacctggtgccacccttgttccttctttcgtgaacaaggagactgatgtggttgtaccatcaaatcatccaaggtgtaaaataaattacacagatgagaagtagcaaaaagcctcatgatcagcctg

SEQ ID NO: 62842 - DNA, 455 bp, Setaria italica
  Peptide Sequence Number=SeqID_128816
ggcctctttatccctgttattcttgctggagccacatatggccgcatagtgggaacacttcttggatctatatccgatcttgatcctggccttttttgccctccttggtgcagcatcttttctcggtggaacaatgagaatgactgtgtcagtttgtgtaatccttctagagctcaccaatgatcttcccatgctccctttggtcatgcttgttcttctcatatccaagaccatagcagataacttcaacaagggggtttatgatcagatagtggtgatgaaaggcttgccatacatggaggctcatgctgaaccatacatgagacatttggttgctggtgatgtggtttctggcccactaatcaccttttcaggtgttgaaaaggtggagaaaattgttcatgcaattagaaggaataaaacgggaaccaaaacaaaaaataaaagggttaaaa

SEQ ID NO: 62843 - DNA, 377 bp, Setaria italica
  Peptide Sequence Number=SeqID_128817
ctggtactagagtacacagatgcataatcactccagctaggagctacgcacacgtacggtgcatatcaccaatcatggtcccgattatttaatttaaggatcgcctgtatcagttgcagttggcgacgccgtcgacgaggccgaggttgatgatgccccaggcggtgcgcggccactcccggcgcttggccttgccctcatcagcctgccccacgacacccttctcatcaatcggctcaccaataacattcataatgcgtccaagtgtagccctgccaacaggcacggtgatgggggagcctgtgttgaggaacgaacgaactaaggaaaccgaaacggtaaaaacgtaaaaaagtaaaacccttaaaaccgtaaaa

SEQ ID NO: 62844 - DNA, 309 bp, Setaria italica
  misc_feature (9)..(9): n is a, c, g, or t
  Peptide Sequence Number=SeqID_128818
ccggaaacncggggacgcaaccagtcgtaggcctcgacgtgcgtcgacccgatgagaaccttgctgaacaccgtcatgcccgggtggtcgtggaggggcatgaccgctcgctgtggcaggaagaagaccgcgatctgcgggccggcaacacgttgaaattaaaattacttgaattcagaggcaaaacacacatgcatttacggtcattgtcttgtgacatgtcagtgatcacttatgcaaagctgggtcggtcgatcgatatagttaccgtaaaattgctgcagctgtaaatggttttgcatgtgatga

SEQ ID NO: 62845 - DNA, 303 bp, Setaria italica
  Peptide Sequence Number=SeqID_128819
tttacttagtacttaagtacttagtacctaaaccccttaagtaaagtaattcttttggggtcctttggttacggcaagttggcaatcctcaggtccttaggctgggggacctcccgcagccatgctagctgtcgtcgcctctgcgcctccgttaacccactgctcacagcacaggggtcgagttcgtcgtagggcaagtcctcgtagtaagtgcaggacctctgctccgccggcgcgtagggcggcgtgaggacgtcgaggaatgcgcagtgcccgtctaccacgaaccggtgcatgttcccg

SEQ ID NO: 62846 - DNA, 145 bp, Setaria italica
  Peptide Sequence Number=SeqID_128820
gatcgaaggaattaatcgtgtaatgtgctgcttgtacaacgctagctacgagtacaggcacgcacgagagctaatatcatcacacggctggtggatccagatgacacttgtgcacgcacatacaaggttctgaatcgtcatcagt

SEQ ID NO: 62847 - DNA, 136 bp, Setaria italica
  Peptide Sequence Number=SeqID_128821
ttctggtgataaattggtcacacattcatagcgaggactcatacatcagccaaactggacttaattggagctgcaaacattcatttaatacttttctgaactgaaggtacatatcacagtaatcatgctttgatcg

SEQ ID NO: 62848 - DNA, 444 bp, Setaria italica
  Peptide Sequence Number=SeqID_128822
aagaagttgattcaatgtttacttaacacagaaaatgccctagaaaaattgattgcataggggacagtaatggtactgctaaagtgaaatcaatgtttgtatttcaattaactgcatagttcaaaaatgtacttaaacaaatctctttaaatgttttatatagtaaagttctaaaaaatattatattttgaaggtaagtttttttccttgactgttttaaataggtattcaatttaggtatgggagcaatatattgtttgcaacaataaaggtatgcatctctacttattgtataatatataagagtatcattcaataaattttacgaccatcgtgtactaatcagtttaatttcataaaatctctttagggggctggtcatgttccatcggactatttgccatttgaagcatttgttgcctatcaaaggtggatagatggggc

SEQ ID NO: 62849 - DNA, 385 bp, Setaria italica
  Peptide Sequence Number=SeqID_128823
ccttctacgtagctggatgttcttacagtggagtgatagtacctgtacttgcacaggaaattctaaaagagaaatgaagagccatatcgaatgaagataaacttcaaggggtattcattgtgcaatccagctgttgatgtagacatagagaacaatgcacatgttccatatgcatttcgagtgggtttgatttcagaagaattgtttcagcctgaagtatcaggaagatggaagaggtgccccaagcatattcaatacacgagggatattttaacattaacagagtatcacttgaatgtaacatccaaaggttacagggtgttcctttatagtggcgatcattcattgctagttcctttttctgcaactatggagttggcttgaa

SEQ ID NO: 62850 - DNA, 233 bp, Setaria italica
  Peptide Sequence Number=SeqID_128824
ttttttttaaagtaaaataaaaaagaaatttaaagaactaagaccaagaatgaattaaccttcatagtgtcatgcacagcactgtttattccaaggctactaacattggccaggatccaagcagagatgctgtcacaatccttggcactgaactcagaattattatggagcgatacagaggagtcaagttatcacaaagaagcagccccatctatccacctttgataggcaac

SEQ ID NO: 62851 - DNA, 302 bp, Setaria italica
  Peptide Sequence Number=SeqID_128825
taccagcagagttgcggacttatatgactttctgtcaaagtggttcgctgaatatactgagtttatgtcaaatcctttctacgtagctggatgttcttacagtggagtgatagtacctgtacttgcacaggaaattctaaagagtatgttgcgacacagttttacaatccatttattgtacagtatacagatgtgatgtattttaacaaagaatgagcaaacatttaggaaatgaagagccatatcgaatgaagataaacttcaaggtaatatgacaaataagtattttgtgttactcattt

SEQ ID NO: 62852 - DNA, 408 bp, Setaria italica
  Peptide Sequence Number=SeqID_128826
acgtctgcaactgatgtcggtcaagttttgtctatatgtgttcaggctgccaatgctgcgctggtgaacttctttgagacgctgcgaaccgagcttggaagcgaaattgggatcacaatagtaacccctggatggatcgagtctgaaatgtcaaaagggaaatacctgaaggagcatggagagatggaggttgatcagaaatgcgtgatgctcaaattggtttgtttccagtggagtacgcgaagaactgcgccagggccatggtgcaagcagcttgccaaggtgagcgctatctcacagtgccggcatggttcagggcaatgtacctgtggagggtgtttgcgccggaggtcgtcgaggtctgctaccgcctcctgtacatgcacggccatggcgcgagccaaaccg

SEQ ID NO: 62853 - DNA, 331 bp, Setaria italica
  misc_feature (233)..(233): n is a, c, g, or t
  Peptide Sequence Number=SeqID_128827
gagcgtttcacacaagatggtcctacgcttgcgatgccagcgttgcacacaagatggtccaatcgatcgtagtgactgatcgcagtctggacaaatctcttgcaacgctggcatcgcaagcgtaggagcgtttcaggagattccagatgtgaccaactacagttctcagcttgatgtgaacttctggggttcagttcagacaacctttgctgcactcccgtatctgaaaaggngccgaggaagaatcgttgtcaccgcttctgcaacagcatggaatcctgttccaagatgagcttctataatgctgccaatgctgcgctggtgaactttc

SEQ ID NO: 62854 - DNA, 187 bp, Setaria italica
  Peptide Sequence Number=SeqID_128828
accggcgcttcggcatgaacatcaccatcccgctctacgataagggcgtcggggccttctggcaggtcaccggcggcatcgtcggcgccaccgccgccatctacctcgtcgcgctgctctgctacaggaggagcggcatactgcagtgacaccggaagatgacgtgtatcttcttgtgtcattatac

SEQ ID NO: 62855 - DNA, 442 bp, Setaria italica
  Peptide Sequence Number=SeqID_128829
atgacaacgcccagatgctaaaagaaaatttccctgcatgttgatagttagctactgagatatcagtaacaccaatactaataccatagcaacaggaaggatggcgtccatggtttctttgatacttgttaacgcttagggttgcttcctttgtccctgatacatttttggtcctctctgcatgaaggcttttgaccacatcctgcagtactaaccaaaccaaatggtgacaaaaatgcaacaccttgaatattgcatcttgttagtaaaaatgctgaaaggttgttgcactgttgtttcgtcatactctatttgccaagaggaacgataagtaacacactagtattctcactggaacaacgaacgatgaggcaaatactatgacctttctgaatcaaagccacgcatgaaaagaaatggaatgggttgagcagaactaatt

SEQ ID NO: 62856 - DNA, 300 bp, Setaria italica
  Peptide Sequence Number=SeqID_128830
tttcttcttgtattttagtcgtactacggccaccatgtgatgttgcgtccaagcgggagcatctttaccagttctggaaatcctacatcaaaaggccgatggtgttagtcgggcccagccttggtgctgctgttgccattgatttttcaatcaactatccggaagcggtaaatgctaagactaatttttgttctctatatttctttggcgcagagtagcagcgcagactgcactgatatatctttcctttgatatttaatttgactatatctgtaatgcttccttgatgttaaatttgag

SEQ ID NO: 62857 - DNA, 287 bp, Setaria italica
  Peptide Sequence Number=SeqID_128831
ttcttaaacttagtctattattagtatttgtctattctaggtaacttccctagattgcaattctgaggcaggtacggcagtgtggccatattcctcatgtcgaaaagccaagggaagctgcaaaacttgttcttgaattccttgaaagagataaagcggaaaacacagatcgggcttcttcagtaacaccagtgcttacgaatagctgaacagatctgccttcaggctagggctgcgtaaagtgaaatgcacccatggatgatggacataactgctacgctcaatgc

SEQ ID NO: 62858 - DNA, 261 bp, Setaria italica
  Peptide Sequence Number=SeqID_128832
ccggcgtcgtccagggcccgcgtcagggtcgcggcttccgccgccgcctctgccccggatggggccgctgccagcggcaccagcgccggcgggttcccgtcgttcctcccccgagcggtggagcgcatccgcgacggcgccgccatccgcttggccaagcgaatcgagcgggtgcccgtccagaccggtttctcggttagtccgatacagagcagctgtgtgaggccgctcaagcagcaaacaggacgctgatccaatcgt

SEQ ID NO: 62859 - DNA, 260 bp, Setaria italica
  Peptide Sequence Number=SeqID_128833
ctgatcctacaattttgaaagtttgtattctaataagctagtataagcttggtttagcaggtctcaaaaatgatcttcattggtgcaagtgtatactctgagggcccaaaagatatgactaggatgcctaagtttgtttcatatgctggggtgtttatactgaagagtcttccactgcgatttttagcaacacgcttggcatttaacaatactccaaacgaattctttgattgggtgcaaattggccgtctacattgcct

SEQ ID NO: 62860 - DNA, 193 bp, Setaria italica
  Peptide Sequence Number=SeqID_128834
aaaatgcctgatcatgtggggagaggatgacgggataataagcagcaaactagcatatagattgcatctgggagttcctgatgcaaactagcatatagattgcatcaggaactcccagatgcaattctgaggcaggtacggcagtgtggccatattcctcatgtcgaaaagccaagaacaagttttgcagctt

SEQ ID NO: 62861 - DNA, 416 bp, Setaria italica
  Peptide Sequence Number=SeqID_128835
taagtaagaacgaacaaaagggtaagtaactttagaccgactaggtagacggaccttacaacctttacttacaacaagccaatcttgggcgaggtctactacctcagctactcaaagtcgcgcgatgccgctggtggcgcaccctacggtggctccagcattggcatgggcccttacaactaaaagagctcgctgaagaccggctgcggtattttcagctcgtttcatggtggaggaatgcagtgttcttgttaacattaccttagtagttacggtgtaattggttattggattcgcagtttctttgctaggttcttgtatgaggtttctcggttgggctgtatactatttggattattgggttggattctggacatggaatacatgtatcgtagttgctgttcatatgtatgtac

SEQ ID NO: 62862 - DNA, 417 bp, Setaria italica
  Peptide Sequence Number=SeqID_128836
catatatgaaaataaaaagactcatcattcaagtaataatcaattgcagttcccatccagatattgaccaataacatgtctcattcccattgacagggtaaccttcctcattgcggaggcgtgcttgctggcgggatcagtccgcaatgcgtaccacactcggtacaggggtatcttctatggcgagtccctctcctgtgagacggtgcgcaagggtgtctttgccgctggtgcggccttcaccttcttcacagccatcttgggcgaggtctactacctcagctactcaaagtcgcgcgatgccgctggtggcgcaccctacggtggctccagcattggcatgggcccttacaactaaaagagctcgctgaagaccggctgcggtattttcagctcgtttcatggtggaggaatgca

SEQ ID NO: 62863 - DNA, 231 bp, Setaria italica
  Peptide Sequence Number=SeqID_128837
ttaccttatttccccttaggttacttaccttaccttaccttagttctagtcttactaagggtagtaggggtctagtaactagaggagagaagcagcaggggagcgcagcaatctcgctcttgcgatggcgtccatcatcgtgcaggcggtggtgatcctcttggacgtcatcgccttcggcctgggcgtcgccgccgagcagcgccggagccgggccaccgtcaccccgga

SEQ ID NO: 62864 - DNA, 227 bp, Setaria italica
  Peptide Sequence Number=SeqID_128838
caccagcagcagctacaagggagaggggcagaacagaggagagaagcagcaggggagcgcagcaatctcgctcttgcgatgacgtccaagaggatcaccaccgctcttgcgatggcgtccatcatacgtgcaggcggtggtgatcctcttggacgtcatcgccttcggcctgggcgtcgccgccgagcagcgccggagccgggccaccgtcacccccggacgccgcc

SEQ ID NO: 62865 - DNA, 275 bp, Setaria italica
  Peptide Sequence Number=SeqID_128839
tccttccatatctagaagctcttgatagagaacatggcgatagtttggtcgaggtggtggagaacttcgctgatcctttttctatggaaagggaagcctgtcttcttctatggtacttacacccacgagctcaaataaacagaaggcagttgctagaataagcacaccaacctcggggggagccctccctgagctagtgctctaactactagaccttggtatggaatacaatagaaggaagaataacaaaagaaaataaataacgtaagaacgaa

SEQ ID NO: 62866 - DNA, 240 bp, Setaria italica
  Peptide Sequence Number=SeqID_128840
ggcggcggtaggggagcggtaggcggcgccggcgatggtggtgggggagacagagaaggagcggagggggagggtaggaggtgatcatggctgcaaaaagtgccggtgtgcctgttatcatggatgctggtggaatggatgctcctgtccctggagaactactcagactcgtcgacatttttagtccaaatgaaacagaattagcacgtttgactggtctacctactgaatcatttgaac

SEQ ID NO: 62867 - DNA, 353 bp, Setaria italica
  Peptide Sequence Number=SeqID_128841
tgcattgctactttgtttacagacaacagtacatgactatatgcttttatttccctccagaaaggctgccaactatcctacaggaaattttccagttgacccaaatcattcaatcaagccaactttgcctcatggttttctgtaggttctgaatgatgtcaactttctggagggaaataaaagcatatagtcatgtactgtgctgtaaactgtgtacattgccatgacttctggaagaacaagcccataaaagtgcatcaaaccatatgatgcttttttatggagaacaataatgttttgctagttttggtacccttaaaactggatgtaataatgcattgctactttgtttt

SEQ ID NO: 62868 - DNA, 298 bp, Setaria italica
  Peptide Sequence Number=SeqID_128842
gatatcatctctgctccgccaaaaccactgaatattgatgatccaaagttgaagggtcagcagccaccagatgcggttcctttgagtgtggttctcagtccctatggaggaaaagaacctatcccctttgacaagaataagcttggtcatttaagagatcaatctgttcctgtcaaagaacaacccatctgttgttttcctcaatcgctgaagtcgcttgaatcttacaaggaagaggactggacagctttcctacaccctgtgttcgtaggtccagtccttgtgcccatcaacaact

SEQ ID NO: 62869 - DNA, 178 bp, Setaria italica
  Peptide Sequence Number=SeqID_128843
cccctttgacaagaataagcttggtcatttaagagatcaatctgttcctgtcaaagaacaaccccatctgttgttttcctcaatcgctgaagtcgcttgaatcttacaaggaagaggactggacagctttcctccacacaagagtccttgtgcccactactcacacttgtagttcggt

SEQ ID NO: 62870 - DNA, 368 bp, Setaria italica
  Peptide Sequence Number=SeqID_128844
aatggggatgtgaacacacttgccactgacggatccaagggctacaagtacaacctcaccgtccgtgctgacggcgacacggtggaactgtcgtcggcgtcccagagcgcggccaaggtgaccaagacggtggtcgacaaggggcccctcgcagtctatctcatcgacgccgtgttgctgccaagtgagctcttcaacgccagccatggccgcactgcgcccgctcctgcgccggcctcgtcacctgcccatgcgccgccacctgctcctgcgccggcctcatcgcctgcacatgcaactccacctgcttccttgttgtccggtccttcgttcgtccttgtctactaagtctaccctactaccgtcct

SEQ ID NO: 62871 - DNA, 346 bp, Setaria italica
  Peptide Sequence Number=SeqID_128845
atttctcgaatgagcctgctagctctccaacaagtgcttaactagtaggcgctccgtggtggaggtggcagcggcggcgagggtggctctggaacaacgtaacctgcgcagttgaaccccacgggcaatggattctcacatttccttgtgacctgaacccacttctcgattttgattcgcgccttctcggcagttgtaagtttgttgcagatgccctggacgtctgctttcctaactttgtcacagcagggagacgagcgttgaggcatcagctcacctgttttctcgaatagtaacaatacaatagaacaatttagtagacaaacaactttacgtactttactaa

SEQ ID NO: 62872 - DNA, 410 bp, Setaria italica
  Peptide Sequence Number=SeqID_128846
tttttttttaagtctaagtaaaaatttaaaaagtctattattctttttattttaattttgtctattccgtattggtattggtattgtcttttacacgttcttattgctaacggcagcagcatattggatgatagtcttgtttgcagtagccaccgaaatggaagccatgtgtgctacacgtatggccacagtcgcgatcgttacagtgttccagagaatagggtgtgaagcagtttattctaccctgaggagattgtggaggcggtgaccgacgtggacggcaccaccagccaatgcattcagtttcgatggattgcgaggtagatgtcatggtcgcaagaactaggaacaaggacaccgtcaagtagacaagcctcttcctactcatcttgacgagtgccatgatgagg

SEQ ID NO: 62873 - DNA, 249 bp, Setaria italica
  Peptide Sequence Number=SeqID_128847
cggcagcagcatattggatgatagcttgtttgcagtagccaccgaaatggaagccatgtgtgctacacgtatggccacagtcgcgatcgttacagtgttccagagaatagggtgtgaagcagtttattctaccctgaatgcattggctggtggtgccgtccacgtcggtcaccgccttccacaatctcctcagggtagaataaactgcttcacaccctattctctggaacacagtcgcgatcgttacag

SEQ ID NO: 62874 - DNA, 282 bp, Setaria italica
  Peptide Sequence Number=SeqID_128848
tgaatcttccacggagtgcgacaatattcctccaatacacagccctcaatacatagctcctgcgcaacacggtgcattgttgcaagaaagaaactcaggggcatcaattaactgtagcagatcttcagcattttgtcataacattggtactccggaaacaggtacaccagtaattttacatacgaagctgcacaagaagcatgatcaaccagaagccctctggaagggtaactttcatgttactggagaactgatacatacttgtgatggacttgaagccca

SEQ ID NO: 62875 - DNA, 445 bp, Setaria italica
  Peptide Sequence Number=SeqID_128849
tgtcctttgtcttacttcttgtaacctagtaagttattacttgtattgtcttaccgtttgtactaattagggttgtcttgtaaagtctaaactattggtagacccttaagtagctaaggtgaagatggctgaggacgcactgaagagggttacagggacgatgagttcatcacagccctccaggccttctcctccggtgccagccaatgctgacgcttcaggccctatccttgacaacatcattgactacctgatgaactcaacagatgccacgactgacaacaattttgagccgaggacggcgacgaccccgtcgttctcacaacaagctgagaagccggcggcggccagcacgacagcgccatgataaacccggatcgctgcgcatcacgcggtggccgtcgagcttctccacaagaggctgggtgccatgccgacggcctcc

SEQ ID NO: 62876 - DNA, 308 bp, Setaria italica
  Peptide Sequence Number=SeqID_128850
gaaaggacgcctcagcaagaagagttttcaacttttaacttgtgcaacctggtctccatctccttcaagtgagctgcctttcttatatcttgagcgcctggctgattctcggttgacaataggtgctgaaagcaaacatggagaccctaagagctaaggtgaagatggctgaggacgcactgaagagggttacagggacgatgagttcatcacagccctccaggccttctcctccggtgccagccaatgctgacgcttcaggccctatccttgacaacatcattgactacctgatgaactcaaattgt

SEQ ID NO: 62877 - DNA, 274 bp, Setaria italica
  Peptide Sequence Number=SeqID_128851
gcttgctacttcctcttcctcaagggatccttcacccctcagatgatgacgacatggatggagaagtagaaatactgggatttaagctgcctactgaagagaaagtgaggaaaaggtaacaactatttgcaacatagtatgtgttttacccacatccttctgaagagcagctgaatgatgaagaactgcaaaatactccagatttctgaacttacttgctatcaaacttttagaaaggaatccaaccgagaatcagccaggcgctcaagatata

SEQ ID NO: 62878 - DNA, 264 bp, Setaria italica
  Peptide Sequence Number=SeqID_128852
ccatgtattttgtgcctccaaggaaaagaccagttggtgcaagagtaccaggttcgtcaaagtccttcatgatggcaacaatctcctcaggcttgtactgggggaaggtcggggactgcgcccagacgctgccgtcgtggccgatgatggcggcggcggtgaggtgctggccgtcgatctcgcacagcaggtggtcgtcgacgtacgcctgccactcccccactccactcctctctctccttcctccctccccctctctccccc

SEQ ID NO: 62879 - DNA, 342 bp, Setaria italica
  Peptide Sequence Number=SeqID_128853
ttgtgtcagtggatgaattgcttgatgctgatgaaatcttctgcacgggaactgctgttgtagtgtctcctgttgggagtataacttatcaggaaaggtggaatatgggcaccaaaggtgtttggcgtagtgtctcagcagctgtatacttcgctgacgagtctccagatgggtcaaacagaggactggatgggtggactatgcaactgaattagcataagaccatcaccatattatagaacctgtgttcctcgcaaagatgggttcgcaagatctccatctagatgatatggtcgtatagtttaaataaactgacgccatgcgccaacacctacggaatat

SEQ ID NO: 62880 - DNA, 194 bp, Setaria italica
  Peptide Sequence Number=SeqID_128854
gctgatgaagttttcttgcacgggaactgctgttgtggtgtcacctgtggggagcattacatatctggggaaaaggtgacaattctactatgccttgcaggttttatttggtatttaatatgcatgtgcgatgaacaagtccgtttgttcctttttgtgaaaacactgttaaacattattttcttgagtaaggc

SEQ ID NO: 62881 - DNA, 387 bp, Setaria italica
  Peptide Sequence Number=SeqID_128855
cgaaggaagcagaaggatgtatttcgaattggtggatagagaattgtgaagtatgaacttcagaagttgccttcactgcacattgcagattttatgtaaccatcatcttggtaaccattgagatgatcctctgtcgaggtgaagatgaaccagctaggcctataccatataaaaaagagaaacctaaaggatcaaaaaggaatgtaaatgacgtgcagtactgaaatgacaaggaatttgataatttgcattgtatgagagcacaaatatgatgataagcagcaaacagctttgtagattcacttcagttacggagtaaagttattcttacatgagtgcagcttcactatgtacaattgttttgtaaggttcttctacctttattct

SEQ ID NO: 62882 - DNA, 230 bp, Setaria italica
  misc_feature (113)..(113): n is a, c, g, or t
  Peptide Sequence Number=SeqID_128856
tttcggagctgtgaataagtagctaggggaataagtgaagtgtctggggagaacgtctgagctagaccgctagcgctagtgtggctgggcgctgggctggatatatatgttgngcatcgagcggtgtcatgtgtcatcttctgttacggaaagcattggtgaatatatgacaccgctgatgcacaacatatatatccaggcccagcgcccagccacactagcgctagcgg

SEQ ID NO: 62883 - DNA, 248 bp, Setaria italica
  Peptide Sequence Number=SeqID_128857
gtcttgcaatggggaggggaggactcactttgttctcgctgttgtccgacaaatccccaggttcagagcagtccctctgttttcataaccgtttatggcttggagcatagctgaggtcatccgctattcccactatgctctgactaccttaaaagtttgtccgtcttgggtgacttatctcagtgtggactatgtaccaagctctcccatttgtgaagaagaggaacctctactcaggtttcttcgag

SEQ ID NO: 62884 - DNA, 416 bp, Setaria italica
  misc_feature (392)..(392): n is a, c, g, or t
  Peptide Sequence Number=SeqID_128858
taaaaatttcttaacacgttcaaaacaatcatcctccaggcagtaatccattgcatcgacttcgtgcagcagatcaatataggtaggaaggtacctttgaaattcttcttcaaactggttaggacattaaggaacctcccaattccacaattcatctggaaagttctctggaataggagaataggccttaaccataagatcgttcttttgctttgcaaaccagtcatcaaactggtatgctccattaccatagtcctgatcttcaccttccaaatcctgacttcgtacacaaagtgtatatatgttttggcacagaatcaaaagatccttgttggccttttgaatcggaggaatcatctggttagataactttgagatggtacgttgaaccntacatggaagaccatcacatagac

SEQ ID NO: 62885 - DNA, 408 bp, Setaria italica
  Peptide Sequence Number=SeqID_128859
tgtattacttactttcctttccttctaattggtctacttcgttctaagtctattacttaattccctattgtacttcttattgtcattggtggctacttcgttggcgcttcttgccatcatgtcttcaaacacccgatcttgcgaagcttggaacggcttcagcggccgggttgggttactgtcactgaacggggacttgccgcaagaatcaccaccaccaccagcatcaagggcaccaccacgggcagaaccgtgctttttgcccactaatccagactattgtacggacccgatctgcgtgcatgtatgcgaggtacatggaattagcaacagcccccgctactgcaggcaagaagcaggctatgacatgtgctgctgcccaatcctaattgacgccgttgtaatgtt

SEQ ID NO: 62886 - DNA, 427 bp, Setaria italica
  Peptide Sequence Number=SeqID_128860
aaaataaccatcaaagactcaatcagaaacggtccagctgattagtaaaagttctttgcaacttttgatgggtagttgttcccatcacccatctgcttcatggttttcattttctggtgtgactcctcaggattcaatgaggtcctgatccattttatatgctgaaatttatttttcagatcccctagatgactgcaaccttggatgtgcacataagatatgtgtggaagctgctcaagtactttgccaagggcatatgagctaagattcgaacacccagctaaaaataagagtcctaatattttgcttctcataaccagccataatatcaataaaaacacagaatcagtgcaaaagagcgaccaaacagaagacagatcaaatgaatctacacatgtcacttatttcttctgcagctacctgtagg

SEQ ID NO: 62887 - DNA, 410 bp, Setaria italica
  Peptide Sequence Number=SeqID_128861
tggttcactatgctcatctgaaggaataaagcagctccgatttcctcatcagtgcccatcagtgatttgcctttgaatttacatgaaaaagagtctgcagttcttgcaaccctgtaaaaatggctgtactaagaactatgtagcttccaaaagcagcaccacttgcaatgcttttctgaactctccatctatctggtgacttgttcaattccacctttccaataacattgcaagggatgtgaagtaattacaagaggcaatcaccaaggccaggatacttgacatgtcgaagttccagaaatgaaatatgatacggacaccaaatagatggactgttgatgaaacggtgtatatctgcagaaaaaacatcatactgcaagtgagtatccattcatatctagatacaaaat

SEQ ID NO: 62888 - DNA, 374 bp, Setaria italica
  Peptide Sequence Number=SeqID_128862
cgactcagtgtgagtagtttatatattttacaaatggtaataagaactatttattgtaactcattgcgcatctaattgaaaaatgctaaccataactacaacaggaacataacaacatatatagcatggaaagtcactagtacataccacaattctctatttgcaatatgtatgaaatttaaaattaaaaacctagaaagcaatatatcataaaacaggtgattattgtaaattcaaacctcggatgttacaactccttagaagtcttgatgcaacaagacggtcaacacaagagtcatcaaccaagagaatgtgaggagtggccatgatactcctttacttaacctttcaaccttgatacaggatggtccgtg

SEQ ID NO: 62889 - DNA, 204 bp, Setaria italica
  Peptide Sequence Number=SeqID_128863
gggcagggaatgaggaagaagggagagcagagcagaggaggtggggtgttgcagttatggaatcatgctccttgaagtcttcactggaaagagacccacagatcccatgttcgtcgcagatttgagcattaggtggtgggttcgtcaagcatttccagctcagcttgcctctgttcttgatgaccggctgttgcaaggtgtttc

SEQ ID NO: 62890 - DNA, 432 bp, Setaria italica
  Peptide Sequence Number=SeqID_128864
gatgagacatgcttgctgtgccatatgatgcaaccattctgttcagttgaataagcgaatttagatggtcttcatttatagataaaggtaatggctccatccgacccatgataccaggcgtttcactcattctgctcaaaatcgttttatgttgctactcgtgcggagaaagagatctgcgttctccactgtcttgaatgtgtcgatatttgcagcaatctggttaagcaactgattattttcctccaggagacgctgggttgcacttctttgggaacctgactttgttggtttggatgttgttgcattgatattgaaaaggggttacagtgtttgtggatgtcatgtgaaaattagccattgggacagatgcacccattttttcctggattggcttcatgtctctaatcttttccctatgtaaaatccatc

SEQ ID NO: 62891 - DNA, 490 bp, Setaria italica
  misc_feature (1)..(32): n is a, c, g, or t
  Peptide Sequence Number=SeqID_128865
nnnnnnnnnnnnnnnnnnnnnnnnnnnnnnnngttatatcaaacatgtttagtattcatcttgataatactttatcacgcatatgggttacatatgagtacacgcccaaactgaattgtgtgatgtggtatatggatattgttagacttcacattccacttagatatggagtgtgtttctctcgacgtggacactagtgagtgacgcttcctcgtcagccaccgctcaacaactccatgaaattttgtctgcacacactgcactttgtacatcaagtgccatgtacgaagtaatcttctagacaggaacacaataccatttcgtatagctctcccaacgtagctctcatagatcacacgtaggtatacggcggcctagttcctcacgtacgcatgcaccacgtcagacgagaatcctacccgtacaatacctagacgggacgaaagtacgttaggacgtagactaccctaggtagaacgacaagactaga

SEQ ID NO: 62892 - DNA, 442 bp, Setaria italica
  Peptide Sequence Number=SeqID_128866
cgtgctccctggtgacgcagctggccagcaagccgcgttccggcgagcggagcgggcgccctcatgacgatgaccgacgcgatgaggtcgcagttcaccagcgggccggcggacatgggcgcgccgtacccgtagtccacgtcgttgaacccgagcttgctccagtccgacacgtacacggactcgtagttgaaggtcatctggaacgggtcgcgccctccggtgcggtcctccgcccagctcaggcactcctcggccatccgccgcttcgcgtcccgcaccatgccgacgagctcgatcaccgacgatcccgccaccttctccgccggcgccgacaccttcacggggaagatggcgtttgccgttagttagcccggtcttcctagtctttcttagttcttacgttttggttcggtttacgtttcttttggttcgttaagtt

SEQ ID NO: 62893 - DNA, 254 bp, Setaria italica
  Peptide Sequence Number=SeqID_128867
agtgctcaacatttctagtaattcaccagtaactctagttatgtaggatcattcaagtggcgttacccaactaatgttctgattccatcaggtgcaactaatggcctccatcaagaagttgctggactccaattcaatcctgaacccctacaaggttctgccacagtctgtactgtaggctatagctgaagttactcagttgtcctgtagttgaatcatcaaaaaagaaagaaagaaaggaatcgagttacttg

SEQ ID NO: 62894 - DNA, 240 bp, Setaria italica
  Peptide Sequence Number=SeqID_128868
attatgccacttgacttgggagcaaagggtagctgccactattggtggaaacatttcaactaatgctggtggtcttcgtttcatacgctatggttcactccatggaaatgtacttggtcttgaagttgtcctggctgatgggactgtccttgatatgctaactaccttacggaaagacaatactgggtacgtattcttgttaagttcttacttttatttattggtatgtactgagtgtgc

SEQ ID NO: 62895 - DNA, 483 bp, Setaria italica
  misc_feature (18)..(18): n is a, c, g, or t
  misc_feature (23)..(23): n is a, c, g, or t
  Peptide Sequence Number=SeqID_128869
gaggtccgtggagactgntacanaaattaacacgaaaaataatacaattaatatctaaggaaattaattgctgcaatgcaagtccaactggccggttgatctgaatacttgtaataaattaacatattaatgagagccgttatacagaccagagtctctaataaagatgccactctgatcccctgtaaaagtttgtgttcatggatgatatccttgagggagtgtattcatagtgaaaagttaagtcagtatcactctaattttgtgctttgcaacatttttgtgtctatcttctccttttaggacagaaaaaaatcaacaaatcacaatgcaaatctggtagacacaaagtgatagatagatagagaaacaaggtcactcaagagataaatagacacatcatattcttagtgtcagagtattctaaactttcaaggttactttgtttgattactcctttattcatgtcaatttattcagagg

SEQ ID NO: 62896 - DNA, 259 bp, Setaria italica
  Peptide Sequence Number=SeqID_128870
gcggtgtctgaagcaagaaaagaaggcacaggaagacaatgaactcattgaatttcatgcccatgtgttcataaatgtcgcatgcctcaaacagatcttttatttcatcatcagtagattcgatacccaatttctggaaacagtgcttgagttcctgttgatctatttcaccattggaatcttcatcaaactgcaggaccatctttcagcaatttgatgaagattccaatggtgaaacagtgcttgagttcctgttgat

SEQ ID NO: 62897 - DNA, 358 bp, Setaria italica
  Peptide Sequence Number=SeqID_128871
ccttgataacataagagctgctgtcagcctctgcctcccacacatactgcttatctgcctttggacttttagttgacaccacaaccttttctgcaacaaggaaagccgaatagaatccgacaccaaattgaccaataagtccattatctgcaccaagatctttgttctcctttaaagccttcaaaaattttgaggtgccactttgcgcaatggttccaaggcaatctttgagttcatctttagtcattccaatgccagtatctgtgatagtgattaaacccgaccaagatgctgggacaatcactatcacagatactggcattggaatgactaaagacaatctttgagttcatcttta

SEQ ID NO: 62898 - DNA, 181 bp, Setaria italica
  Peptide Sequence Number=SeqID_128872
aaccaaagtttaactaagaaaccaaaaataacaaagtaaaataagaaattttaagttactagaataaccaatagtaccttggcagtggacacctttgcatggttggcttcgcgtagcaagttctctagattttctactcgacctcttacaaatgctagctcttcactaagttctaaatttg

SEQ ID NO: 62899 - DNA, 155 bp, Setaria italica
  Peptide Sequence Number=SeqID_128873
agacgataaccaaacaatatagttccagtgtttacatccgttttgctagcagtaattactccccaagcagaagattaaacggagtaatacgtttccatctacagttagtgacgaggtatattttgtaactagtatttactaccctggcatttgct

SEQ ID NO: 62900 - DNA, 317 bp, Setaria italica
  Peptide Sequence Number=SeqID_128874
attatgttgtgttgtgtcataaaaggatggatcaacgtttctagttctacatagtagatagtacatactccaggtctcaaccgcacaagcattgtcagacctaagcagtctgcattctgcagacaatctgcaaccacaaagcagctacattgtcagacctaagcagtctgcattctgcagacaatctgcaaccacaaagcagctacattgtctcataccgtccgctactctctgctagatatgttctacatgtataagatacaggtgaaagacaattcatggaccaacatcttgctccctgcgttaatgaacttcta

SEQ ID NO: 62901 - DNA, 389 bp, Setaria italica
  Peptide Sequence Number=SeqID_128875
tttgtgcagatacggacctgcgcaaagactcagtatccgcccctgctggagagccaattcaagacattgcttggtgacaactattataaccatcaccacttcttgtctgtgcatggtcaagctcaaaatagaagtggtgatggttataatagttgtcaccacttctattttgagcttgaccatgcacagacaagagctttaatttcttgttcaaatcacttgctcctgctaatttcaatcaagttccggctgtttcaagcaaaaggaatcttgcagtatcatcatcaccaactaaaatgaggctaacagctgttcctgacccaaagaaagtcacagcagattctaaggaaaccaatccatttagtgttttatcagatagagcttctcca

SEQ ID NO: 62902 - DNA, 215 bp, Setaria italica
  misc_feature (36)..(36): n is a, c, g, or t
  Peptide Sequence Number=SeqID_128876
aagaaaaggaagtcttgccggaatatgtcttaatgngaaaatatatgctattggtggaggagatggaaatgaaacttattcagaagttgagatgtttgatccgtatcttgggaaatggatatgtagtccatctatgctgctctctaagaatttagactactaggactagacgaactaagaaaactaagaaaataaggaaagtaacaaataactaa

SEQ ID NO: 62903 - DNA, 420 bp, Setaria italica
  Peptide Sequence Number=SeqID_128877
tcaacagatgtggctgaactgctcaagcatgatgaccaactagggatacattttgaacttttattaggctgtatccatcaccagtctcgctcctctagagaaagctaactgtgatgataagactctctgtcctaaagaaatattctttcactgtgctctttactttccattctagaaagagagacaaatcctgggctattatgacacatcttgtgttattgtttctggtgcctctttcttttaacagttctgagtaatcctgcaaaaaggcaagagtacgacaaggcaggcattatatatgttcaagatcagaatgtagtggactacttgaaccggcacaagggtttaatactcacctgcaacggccttggcataaggtactcggtatggtgaacatgttcaggtgcgccacggtctgca

SEQ ID NO: 62904 - DNA, 399 bp, Setaria italica
  Peptide Sequence Number=SeqID_128878
ttctaagtaaaccgtcctattctagtctattgggtaaggtatttgttgtctacttactttgatgactacttcattcgtggttcttgtgatgatttcgaccaactctccatcctgccaagcgtgcttgggcccctggtgttttcgacggacggaaccttgcttccaagttacgcatgttgtgagcgacgattattgccgtggtgtgtgcgaggtgaaccatgttgtgagcaatcgtgcctactgcacatttaaacgtggaaaacgtcgcgctgtatggcaatgctgctgcccgcgttgagcgttgtaatccaccatgcgtgcctggtggaaattaaataaattctgctcatcgatcgatctgatagcaagtatctgtcatcagatctgttccgtgttttg

SEQ ID NO: 62905 - DNA, 353 bp, Setaria italica
  misc_feature (316)..(316): n is a, c, g, or t
  misc_feature (333)..(333): n is a, c, g, or t
  Peptide Sequence Number=SeqID_128879
attcacaccatcatatgagccgccagattcttgaacagcagctgcttcaactacagaagcagccatcagaggcccagaaggctcagcagtagaatcacaggaatcagagcagttcaagtctcatccgaagcagtggaaccattaggacgattcaccgaagacgttgttgaaggtcaaattcagactgcagattcatgaagggatactttccctgatattctttcgcttaggttctaggacaactgttgttggatattccgtctttcgtggtttcttgcgaagcaatttggttggatgttaaggtaaaaaaaaaaanaaaaaaactaaaaaagngaactagaccaaaggacaac

SEQ ID NO: 62906 - DNA, 136 bp, Setaria italica
  Peptide Sequence Number=SeqID_128880
attagaagtaaagtaggcacaaggaagtagtgacatacagacattagaaggtagaaacaatgtgaagttgttcgtactatttctccacctcaatcttacacatacaatgaacaagtaggataatatgatagtcttg

SEQ ID NO: 62907 - DNA, 372 bp, Setaria italica
  Peptide Sequence Number=SeqID_128881
tccatttagattcactttgtgcttctgtggcgatagcctttgcaacatctaattttccaagctgcacagctagatcaaacttgtagtcagcatcagtggctatctcaagagcctcttccaacatacctctagactccaagaaatgagcgacactgccacatgagggggaaaccagaactggagatcagacaataaagtgggacaaaaaacacaaccgatgatgaaagctaagtttatttattcagtaatctgacactttcattagtcagttaattatgaagatacaccataaagtcgacatgtagtttttacaacttgactatatgtacgtacccaaaggagtctatttagatgtgacaatacatatatcag

SEQ ID NO: 62908 - DNA, 252 bp, Setaria italica
  Peptide Sequence Number=SeqID_128882
aacacaattaacacccttttgatgtccatcaagtgtaaagtttggatctggagaacccaaactccatatctttgtagtgcggtcaagagatgcgcttgcaaaggtgttggtatcctttggattgaaagtaacctgcatcacataatgtgaatgtccctcgaagatttgagtggcttgttgttattatactcatctctcggagatgctgaagcaatcttccaatttaccaagcataaaaaggcagaggaaagc

SEQ ID NO: 62909 - DNA, 472 bp, Setaria italica
  Peptide Sequence Number=SeqID_128883
caactgcagatttctctgaggacagtagctcaagcttcttcttaagatcggcaatggtttcattcagttcagatatttgttcctcactcttgagggaagcttcttccttctcagcatgaagttgtttaagctgttacctactagtaggactagtacaacttgcccacgagagaagcaacagagtcatttaagtcactagttgcctgttccagatccttcacacggtcctgaagcagtgctttctcttgcaggcttttccctaagccatctttcaggttcttgattgtagcctgtagctccatgacctcagtccttgaatcctccaactgcctacgaacttgctcaactccatggcacgttcctcgagtacgcccttctcatttgcatcattttccatcttgcttgcagatccttgattattcttgtaacttcattatctctgcagagattcatctaagctatgagatgcttt

SEQ ID NO: 62910 - DNA, 346 bp, Setaria italica
  Peptide Sequence Number=SeqID_128884
ttttctttaactttttggtttttctttaattttaaaccttttacttttagtttaaattttacggtttaaattttctttagttaaagttaagttaagttaagttattgtattcctattctacttccccttcttggtaaatgtctgagcttccaccagaaccaaggaacacatcaaagccagctgctcttgttttgtgcttctgctttggtgtcttctgttccatgttgggctctggagatggtgaagtagattgtgtctccgaatcagtttcagatataccagagccttgagactgcagcgatgatggaagattcttgcgcaattccccagtcacgttgtcataacg

SEQ ID NO: 62911 - DNA, 429 bp, Setaria italica
  Peptide Sequence Number=SeqID_128885
gatggatgttgacactgaagcagcggcagaatctttgctagataatctctagtcatcttcatcactcgaagtatcctctacgatttccgaatccgaatcattcatgctagactcttggacatgataatagttaaaaatattaaatttcactgaaggatgagctattaaaatgctggggatttccttgaatgcactgcattctaatgagaatttttgatagaacttcaaggtcactccttcaagcattgtcgcccttctggttatcactttcaacaaatcaacttcatgatcatctccactgaatccctccacttctacttctttgagattgatcaaggtgatactttgacttctccaattcctaggctggtcacaagggcaacttgcaggcatgttcctctgcgttttctctcctgacgtcgatttaac

SEQ ID NO: 62912 - DNA, 385 bp, Setaria italica
  misc_feature (30)..(30): n is a, c, g, or t
  Peptide Sequence Number=SeqID_128886
gtgggtctgctccttcagtgcggcgccgtnttcggggggctccgacggagaagccctgcacggcagcaaggagatatcaactggttgtctcgacactcccggcacgcaccaccatccggattcatctcgcatatgcaacccccaagtctcccggctgccgagccggagacacggtagggtggtgacggcggtggcaacctacagatcaaatgttagaatgaagaatttgccaaattgtatctatacttacaaatttgattttcttacctgcccgatttgtggtgagatccacggcttgttccctaactttagtgtggtttcgacgagatctgcatacggggaagtgaggtgcaacggatttgtggtggttggcagcctacggtgc

SEQ ID NO: 62913 - DNA, 375 bp, Setaria italica
  Peptide Sequence Number=SeqID_128887
agaatgcataatttagctattactcaatgcaaccatcaacatactgtgaaatcatcataaacaacactcacagagctaataacttaatttaatagcatttcaggggaaaacagcccaacagttagtgataaatcaccaagtttagttatggctatataaatatgataaagtatagcatgtcttgttacctctacgatttccgaatccgaatacaattcatgctagactcttggacatgataatagttaaaaatattaaatttcactgaaggatgagctattaaaatgctggggatttccttgaatgcactgcattctaatgagaatttttgatagaacttcaaggtcactccttcaagcattgtcgccctttctg

SEQ ID NO: 62914 - DNA, 344 bp, Setaria italica
  Peptide Sequence Number=SeqID_128888
aaaaaaaagtgtatcagcagaagaacaagcaagataaagatcactatgtaaatataattaatctgacgagcaattgatagatcgatcatcagtaataccactactatgctgtcctgtttgtcaaaatgtgccgcgacctgctcaatgaacttggggttcttctccctgcctgatgaatccatacaaggtcacacgcagaacagtagacaagctgattatatcacagcttagggacaagaaattcctgacatgtatgtattgctgatataagatctgcaatttagatgtttaggatacttgccttgtgaagtgaagaacaggtagggcacgttgaggaatcctcc

SEQ ID NO: 62915 - DNA, 369 bp, Setaria italica
  Peptide Sequence Number=SeqID_128889
aaaaaaagaaaaaaccaaaaaaagaaaactaaaccgtaacaatacacgttccacttccggccacacctggagccgcagagatatcgtttgccacggagggcaaggacgaggcgaagatgagggtggacaacgagaacgtggcggcgatgatccagaagtggtacctcggcggcgagtccgcggcgtctccgaccaccgtccagagcctcgccgatcgtttcgcggcgctcctctcggcggctgcgtgattatattgctgcgactgctaattaatttccttccagcggaattgaactcgtcaaattctgtcctatcggtcatctcgtgtgttgcggcaaattgaattgcaataattaagactggtttctg

SEQ ID NO: 62916 - DNA, 309 bp, Setaria italica
  Peptide Sequence Number=SeqID_128890
tacctttgttcttagttagctggaagggcaagaccgccgacgagctgctcggagacgacgccttcttccaggccctggtctcggctccagtggagaagctcttcagggtcgtggtgatcaaggaaatcaagggctcgcagtacggcgtgcagctcgagagctccgtccgcgaccgcctcgtcgccgccgacaagtacgacgacgaggaggaggaaggtcctcgaagaaaggtacgaccgaagttacttaccaagtaccaaagtaacttacaaagaccaaagactaccgtcatcacgttccacttcccta

SEQ ID NO: 62917 - DNA, 241 bp, Setaria italica
  Peptide Sequence Number=SeqID_128891
tatccatcagagcctgcaacttgcaactgcaggcatgctcacactctttttaatttcctagctgcctagctccgatcgatcatcctctctccctgcacgatccccttgtcgtcaccactacgttcccaaggcaaaatgggctctgagacgacggagacggtcaccgtggaaggcatcccattcccggcggagatcaccgtcggcaaccctctctccctcctagctaacggcatcacggaca

SEQ ID NO: 62918 - DNA, 427 bp, Setaria italica
  Peptide Sequence Number=SeqID_128892
gactcagtgtgagtagtcgaacagtttgctttatagcaaaccctattgcttagccagatatggcaatatcttgtgacaccaaaagttgcctttaaaggtctaccatccaagatgtagccattaactgcctgtatgcatctgacagcctcctcttctcttgcaaatgtaacatatctaaagggatgcgagcaaagaattacacaacaaataagcatctggcctcaaacataacacaaaataattaaagcttgataagagtaaccgctgttcaatagaaaatgcatccagtaggagccaacaatataattaagtaaaattggaacggcaatccctgctgcaaaatcatatataatattctaatgtcacaaacaaaggtggattgtccatgtcactagaagtggaaggtgtgtaagcaaatttggaatga

SEQ ID NO: 62919 - DNA, 446 bp, Setaria italica
  Peptide Sequence Number=SeqID_128893
catcaatgcggattcacatcgactagtacatgataaaattgtagtataaaaatatgtaccttgcacacaccacagaaacatcatctttggtacaaatatcttctgctgaggctttatgatgcacatacgaacagtttgctttatagcaaaccctattgcttagccagatatggcaatatcttgtgacaccaaaagttgcctttaaaggtctaccatccaagatgtagccattaactgcctgtatgcatctgacagcctcctcttctcttgcaaatgtaacatatacgcggccagaatcaggaatttgttggttagctccaatattatcaatgataatgttttctatcttcccatactgtccaaaggaaattcttctgtctcaacaacttctcgctggcaaactcattcggcataccaacaatataaacagcttccgctgaatcaca

SEQ ID NO: 62920 - DNA, 141 bp, Setaria italica
  Peptide Sequence Number=SeqID_128894
ttctgtggtgtgtgcaaggtacatatttttatactacagaaacatcatctttggtacaaatatcttctgctgaggctttatgatgcacatacgaacattgctttattagcaaactagttcgtatgtgcatcataaagacct

SEQ ID NO: 62921 - DNA, 265 bp, Setaria italica
  Peptide Sequence Number=SeqID_128895
gatagaagaaaaaccttctcttctcaaagatggttgaaccagttttgctgcttcctcaaagtcacccatggtaatatgtaagctctccacctcgtctacatcccaaggttgtctccaccagtcaggcttgttgtttccatcatgcccatgagaatactgaactcttctttcatcaattattctcttcattgccagattacctgccttatcgattaaagccttcaagtcagcaccaacaaaacctggtgtggcccttgctatcttg

SEQ ID NO: 62922 - DNA, 228 bp, Setaria italica
  Peptide Sequence Number=SeqID_128896
tgaccgcgttgtgggagagcttggccgtgtcgcagacgcccgtcgccgccgtgtacgggtagtcggcctccgtggtgatgccgccgttgtcggcgatccaccgcagcgcgcggtagctgatcccgccgtcgcagccgtggtccagcgtgtcgcagtccaccagctcctgctccgacagggacacctgagacacgcaacaggggaaaggcaaggcacacaggggatagg

SEQ ID NO: 62923 - DNA, 348 bp, Setaria italica
  misc_feature (298)..(298): n is a, c, g, or t
  misc_feature (305)..(305): n is a, c, g, or t
  Peptide Sequence Number=SeqID_128897
ttgttatttgtttttatttaaggttagttctttcttagtttagttagtttcgttaaaaaagttctattggtaattgagcatactatatcaagagttaaagcgatgtgtacgtctagtgatttttctgcttccctcgaccagaagaattttgttcctatactgactgaagtgttggcaaacggtgctggtgctaagctaggaaaactgggtgaggagatgagagttatcgaattagggcctaacacctcaaacaaatcaacatcagaaggtcaaagtaatgtgcttttctggtctcacngtatggnttcagattcagttcaaaaagcaacttgaaagatggatttgtgg

SEQ ID NO: 62924 - DNA, 468 bp, Setaria italica
  misc_feature (87)..(87): n is a, c, g, or t
  Peptide Sequence Number=SeqID_128898
ctctcaatgattctccaggcactggtgtcctttgagaatcagaaaggccaaggatgaccctgatttgctctatccgagcacgcttcncttttctacgcatggtcttactttcacccttcaggagagacacagcactagacacattcttcacagcatcttcatcagactcttcatcttcatctgtctggctatcacccccctcactatcattttcattatcgtcagcttcatcgtcatcctcctcctcatcatcctcagaaatttctaaccattcagattccgatgcctgaataaaaagataataacgataacttccacacaaacagtaatggttatgatatgactagaagataatttgttcatatttattccaactaaatagataatactgttaattagtacaaaaatggcaaaaaaaaacagaaagccaaatactagtaaactagaaccggtaatagaataacaaca

SEQ ID NO: 62925 - DNA, 217 bp, Setaria italica
  Peptide Sequence Number=SeqID_128899
ctgcaatcacatcatttagctccctatgttctgatgtgctgctgcattccataagattgaggataatgcctacaagaggagccaagatcatagtacgatttgttttctcttgatgctgccctggccgtcttagagtcctgcatacacaagcttcctactggttaaaaattacgcccaccaacttttgtaggctgtacacataaaattagttgttgca

SEQ ID NO: 62926 - DNA, 314 bp, Setaria italica
  misc_feature (1)..(1): n is a, c, g, or t
  misc_feature (4)..(4): n is a, c, g, or t
  misc_feature (7)..(7): n is a, c, g, or t
  misc_feature (15)..(15): n is a, c, g, or t
  misc_feature (26)..(26): n is a, c, g, or t
  misc_feature (39)..(39): n is a, c, g, or t
  Peptide Sequence Number=SeqID_128900
nttnttntttttttnttttttttttnttttttttttttnttttttttttttttttttttagtttttaatcaattgtacaatatattgtatttcctcagtaacagaagatattccattcagtataaccaaaatgttgtaaggcgaccaaaattccacaataatcaaattgatatactagttacatcattttgaaagaatgctacacacattgccagctcttggatcgctgccaaaattggtctgatcaagaacacatccaatgacagatgtccctctagccttctcttccacatccaccattacctgagcatggt

SEQ ID NO: 62927 - DNA, 284 bp, Setaria italica
  Peptide Sequence Number=SeqID_128901
taaaggttaaactaaggggaaattaacaaataacaaaaaagtacaattacctagggacaatagaatacaaacaagggatgctgaaaaatatgctgaagaggacatctttaaggcactggatgagaaacagtaatattggacatgggagctctgatggaaatgatcaatcagtttgcaaagagcacttaatggatattgcaaggttaagagttgaaaatgctactcttcttgaaggtgttggtactgtggaacgtctaacttcttcagtgcatagactgcatatt

SEQ ID NO: 62928 - DNA, 282 bp, Setaria italica
  Peptide Sequence Number=SeqID_128902
ggcccgaataagaagcaacatctggatgtaatcaattttttaacctttgaaacaatgccagctgtttgaaaattatatgagtatctctctaaaaaaacttttacaatttttactcgattttacaaacaaatcaataatagttttatgggacttggtattttctccaatgtactagcttattaatgaatggtaaggccattaaacatacaggaaacagtataaagtagaacgatttatctctgtacaaaaaccttgcaatatccattaagtgctctttgcaaa

SEQ ID NO: 62929 - DNA, 424 bp, Setaria italica
  misc_feature (404)..(404): n is a, c, g, or t
  Peptide Sequence Number=SeqID_128903
ctcagactttgattttggtgaatcagatggatcgcagagagcttcatggtaattgcatctgatgaatccccagaccagcttaccggaagaaccacactaagagctgttttcataaggtttgcttcggttataagactgttcaaatcttgaaatgtactctccaaagaactagctgatttgacatcatcataggccttcaaaagcacaatatgcagtctatgcactgaagaagttagacgttccacagtaccaacaccttcaagaagagtagcattttcaactcttaacaggaaacagtataaagtagaacgatttatctctgtcaaaaaaccttgcaatatccattaagtgctctttgcaaactgattgatcatttccatcagagctcccatgtccaatattanttctcatccagtgccttaaa

SEQ ID NO: 62930 - DNA, 298 bp, Setaria italica
  Peptide Sequence Number=SeqID_128904
ttttaaaacaaaaacttaaaagaacttaaataacttagaaatttactagacaaacaaacttacgactcagccatgaggattcttcttccaatgttttcatgatttcagccctttgatatttgtggaacttttgaagttctgacaatccatttctcagaaatccatcatacagtgcctgtctcttctctaatatccttgcatttctttgcaaatgttgttcaatttcaaggcccatcctcagattgctttgaagcttcgccattttagcttttaagtgactctttctcctcttcttgag

SEQ ID NO: 62931 - DNA, 150 bp, Setaria italica
  Peptide Sequence Number=SeqID_128905
tccatcttctcctgtaaggcttgtgcaagtgctttagattcatcaaatgatatggaattggaatcggcaggaaaatcactcttagggcttgtgaaaaatatgctgaagaggacatctttaaggcactggatgagaaacagtaatattgga

SEQ ID NO: 62932 - DNA, 274 bp, Setaria italica
  misc_feature (27)..(27): n is a, c, g, or t
  Peptide Sequence Number=SeqID_128906
ttagcgcagcatagtccaccgcggcanaccacgtcgcacagcagcgcaggacacacaattcagacacgcacaagatctctgcatgaaaacattctgctactactagaagtgataacaggacacgatgacacgacacgttcgccatgcagctgctcttttatttcagaagaaggacgacgtcctgcaagacaaataccgaactaaacgaacaaacgaaccggaactaaagaaactaaagaaaccgaaacggaaactaaagggtaaagaaacggaa

SEQ ID NO: 62933 - DNA, 476 bp, Setaria italica
  Peptide Sequence Number=SeqID_128907
ccgcgctggtggtggtagtagtcctgctgctgctggttcatggcgatggccttctcttgagcttggtgttccagtagttcttgacgtcgttgtccgtccggcccggcagcttggaggcgatgatggaccacctgctcccgatggagttgtagagggagcagatgatccggtcctcctgctccgtgtagccgccgtgcttgatgtccgggcgcaggtagttgagccaccgcagccggcagctcttgccgcaccggttcagcccggctttgtgggggagcgcgatccagttgccgccggtgccgtggttctggacgtagctccgcagcagctcgtcctcctcgggcgaccacggccccgcttcacgctcgtcttgtcgcagcacggcgcccgacccatccccgctccaacttcttctctttctcaccgtatcggctccgacctccgaattatcagacgcgcgcgcgcacgtgtaggga

SEQ ID NO: 62934 - DNA, 250 bp, Setaria italica
  Peptide Sequence Number=SeqID_128908
gtggcgggcgcggcgaaggctccgccggttgcggcgctcgcggccacggccgccatggccttcttcttgagcttggtgttccagtagttcttgacgtcgttgtccgtccggccggggagcttggacgcgatgatcgaccacctgctcccgatcgagctgtagagcgaccagatgatctggtcctcctgctccgtgtagccgccgtgcttgatgttcggccgcaggtagttgagccaccgcaggcggcagt

SEQ ID NO: 62935 - DNA, 282 bp, Setaria italica
  Peptide Sequence Number=SeqID_128909
aattcgtctggagatggtaggtctgcctgcatgtttaaggcgcacgggcctgtatccactgacgactgcagcagcggattgcccgatgaaacggaccttgcaagtcaggcctaggcgttggccccctgtaggcaggcagttttggcaggagttgaagatccctgagcgtcaatctgttgttgacctgcatgaaccttggcgatgggttcgccatcaataagaccgttaggtaggaagaccggacggacctagactaaacgaccaaagacaacaagtagggga

SEQ ID NO: 62936 - DNA, 378 bp, Setaria italica
  Peptide Sequence Number=SeqID_128910
tttacaagtaactaaataggtactaagacctaaagtacatcatagagtgaccataaattcagagctgcatttgtggcttgagttagtgatttttccacattgttgctaaagtttttgctcaagccataactaacattctttgtcatcggtatacagtacagctacctgtgctcatatgtccgaactgcctaataccatggtttttggattgtaggtctctagctggagggatttcatgaagacaggaaagaagggacgaaaaggcgaaatcaaaacccccaaaacttaagacagaagatccaaacaaatctatgtgcaaaggccagtgaagcccaagtaagaggactgctattggtgtctgcaatcaaagaacatctg

SEQ ID NO: 62937 - DNA, 260 bp, Setaria italica
  Peptide Sequence Number=SeqID_128911
tgaatattccatacatttcttttaaggattcgtaatcacccagccattcagtttcgacttagtttgtctttccgttgctatatggttaagggcaatgctgattgttttctcgtttgtcgtatttgccaggtttaaattcttgatgttgtaaagcattgccttttttaggtcatgatttgttttcttgaaatcatttgagcgccaaggaaatacagtaaatccttgatgcaacatagaaatagaaatggatgtgcagcggg

SEQ ID NO: 62938 - DNA, 270 bp, Setaria italica
  Peptide Sequence Number=SeqID_128912
ttacttttccctccacctcttccctcctggcgcagaagcgagggagggaagagagggagaggcggcggaggggaggaggttgaggcgacttcctctttgggtgagttccagaagtatggctactaaaatggctggatctgtccaagtggttaaggatgacactgttaaacgcacaccgatggcacggcctagcattggtcgtgaaggaaagccgattaggttgctgtcaaaccactttgctgtgaagcttaatggagtagatgctgtttt

SEQ ID NO: 62939 - DNA, 411 bp, Setaria italica
  misc_feature (42)..(42): n is a, c, g, or t
  misc_feature (54)..(54): n is a, c, g, or t
  Peptide Sequence Number=SeqID_128913
accaatggccctaaagtctgccgcgctcgcaatccttctagnggtttcgctcanctttgcagatcacgtcaaatgccagccgctggtcaggagcgaagggcaggagctcgccggaaacggtagcggcaatggcggcggtggcgaggtgtctcccaagagcgactgcaacgagggagccttataccatgggccgtgcctcgagttgatctgcgcggcggcttgcctcttgcagatgaaccgaggtggacactgcaagggtgggttcttcggcgcttgcttgtgcttcgtgtgcaactgatggcgccttcttttgtgtgctatataaagaggaggaataaaagtgaacgacgaaccgtagtagaatacgacgtaaatagaaaatttactttaactaaataaattaactagtaa

SEQ ID NO: 62940 - DNA, 380 bp, Setaria italica
  misc_feature (117)..(117): n is a, c, g, or t
  Peptide Sequence Number=SeqID_128914
ttctcaggtcagggcagatgagaatggcatagaacgggaaggtggcagtggtgagagtcagtgctctgatcgtggtgccaaggaagaaccgacgtctagtggaacaactacgccaanaggggatgcaccacgtggcctcttttctacggaagagcactcgcctgggcaatcaaccaacccaaacagtgatgaatcaggtgaaggaaaagtagggttacacaagattttgagttcaaaggcagaggccctgctgaacaagaaagggatatcatggccttggaaagggcgggagaatgagggacctgatgaaagaaatcatgtgacatttaccattggtacgtctattggttgttaccttaagttagttaatttggttcctt

SEQ ID NO: 62941 - DNA, 221 bp, Setaria italica
  Peptide Sequence Number=SeqID_128915
caagcagtgcaagcagcactggaagcactaatagcagtgctctctacaaaatagatcatgaagcggattgtctggattatgagatcttgtgggaagacctcgtcattggagaacaaataggtcaaggtagttgcttctcctttaactaatggttgcttgatcatatggatgtgtttatgcatgatttcatatttctttttcgtaccaaataaaaagttcca

SEQ ID NO: 62942 - DNA, 249 bp, Setaria italica
  Peptide Sequence Number=SeqID_128916
gaagaaaagagaaccatgttgtgcccaattctaggcgctacgctaaagtttcttgattgttactttcatctggctctcaagtgttcctttcttttgtagcatgtactccctcagatcatggttatccatggcttccattccggccataaggagagaagctgaagaatcaaactctatgatggccagaatggaagccatagagtttgatcttcagcttctctccttgtggccagcatagcccgttcggcc

SEQ ID NO: 62943 - DNA, 377 bp, Setaria italica
  Peptide Sequence Number=SeqID_128917
tttttagttcttgttcggccattcaattgaggcaggttgcagcaaagctgaagcaattggggaatgaccgatgagcagtaagctgaagcaatcaggaaatggctgatgaacagtcagcagtgcaatgatggttccttgtactatcatccagttatctctgtatcaccaaatttttgcactgttgatgagattccatgaaggtggtgtgctaatatcagcatgaaaactaatcgtccctgggctgagccgccagtcacaggctacatgatgatcaccagaatgccgtgcatgattgcatctccagttgtaggcccaagctcccagttggtctgtttcagtttgccgcggccgtgacatagaattggagatctgaagtt

SEQ ID NO: 62944 - DNA, 148 bp, Setaria italica
  Peptide Sequence Number=SeqID_128918
tggaagtgatcgaaacatgcagattccatgaaggtggtgtgctaatatcagcatgaaaactaatcgtccctgggctgagccgccagtcacaggctacatgatgatattagcacaccaccttcatggaatctgcatgtttggaagtgat

SEQ ID NO: 62945 - DNA, 348 bp, Setaria italica
  Peptide Sequence Number=SeqID_128919
aagtctaccaccagcggtgatgatgacgacgaatggttcattagcgacgacagcggcagcgaggaggatgaggattacgaagatcagggttgctgttttgtatacaactccagacattaaccgtcgagggccttcaccaatcatgcttttccctgcattcaaaactggctaccatctatttggttctgattataatcttgctgataaatctgaagtctctgtgagcaatgattgggattgctcaaataaatgtcattgctattcaatgaacttgattcaattcattgatgccaaaattgctggttatcaacatacccatcctggacatgccaagatctttggctttat

SEQ ID NO: 62946 - DNA, 190 bp, Setaria italica
  Peptide Sequence Number=SeqID_128920
ttggtgggcaaatgggcatgagaaggatgtcacttcatatagctcaagtaatcagatggaaaagaagcccaacagatgagtctgactcatggaactaagcactcaacttttgacttctgcataacttcagaatgctgcttgcttggacaatgagataaaatatgaccaagatttcgactatcattatttt

SEQ ID NO: 62947 - DNA, 397 bp, Setaria italica
  Peptide Sequence Number=SeqID_128921
aaatggtatgctctcgagaagggttctcttcccttagtcgtgaaacaacgatgcaactaagctgttgatgcccctgcaaggcctatcaagaagttgctgcatctttaaactataaagttcacagagcaagctaagctcttgggcaaggcaatcatggagtggaagaaccacaggtacttcccaccgtgtatcaacatattggacatcagctggtaaagagtagccttgccccttcacggtggcagatagcacatgacatgctattccagatgcacatgtccccagcatgatcttggtgtagccattttccagtgcaatcttctgcagtgaaagcatgcgcaagcatcgaataaagtcatccctccctgtctcatcatcgatcatgccgaccacctcc

SEQ ID NO: 62948 - DNA, 243 bp, Setaria italica
  Peptide Sequence Number=SeqID_128922
tacccctcctgcgaagaaagaggcagttgaggctctgcccactgtcaaaattgaagaggttgtcagctgttcagtttgccttgatgatcttgagctggggtcccaggcaaagcagatgccttgtgagcataagtttcactctccgtgtatccttccattggctttgaacttcctattagtttctattgtcccttgttgttgccggtttagagctaaccatctgaaagagaacgaaaagaacta

SEQ ID NO: 62949 - DNA, 389 bp, Setaria italica
  Peptide Sequence Number=SeqID_128923
ctatatatgtcctagctgtaataaagatactcatcctttgatgcattacaactggtaagctacatcgatgagtacttccattgtgaaagttgcaatggtgaactggttgcagagagtgccaagctagcttctgaggaaatgggagatggcattgacaatgtaagaaagtgtaggcatgagaagttgaagggcatgctccaaagagttgatgttagtattctattctttgtagaactcttaacacccgaaattttatattcatagtccaaatatcatgaaagggggaatgtagagtttttgagatgctaacttaactgctatgaagaggtagctgcatagaattaaaatatttcttttgaaactatgttgattatcagtgctgcatgaga

SEQ ID NO: 62950 - DNA, 330 bp, Setaria italica
  Peptide Sequence Number=SeqID_128924
ctggtaagctacaatacgaatgagtacttccattgtgaaagttgcaatggtgaactggttgcagagagtgccaagctagcttctgaggaaatgggagatggcattgacaatgtaagaaagtgtaggcatgagaagttgaagggcatgctccaaagagttgatatccgttccactttaggagcaattgaagccattgattacgcaacttgatagagtgaagaatttgccagcacctgaatttggaagtctaaaatcattggaaagagcaattcttggtgcttttacaaattgtgacattggtgcatctgattcatctaggaactcacaggg

SEQ ID NO: 62951 - DNA, 295 bp, Setaria italica
  Peptide Sequence Number=SeqID_128925
ctggttgaaacaacagaagataaaaatgaccaaaatcaggacccaaaagataagagtatacaggtcagcttgggaatcaacataaacttgattcagaagtaaaagtaatgtttttactatcatgatttttttgtttttcttttctatcctgcaggaagaatatgtaaaggcttattatgaggccttgatgaaaaagcaggaagtggaagatgcaaaagggataatgcaggaggaagatgagaaagttgtttctgattctcaatctgaacgacagttgggcaagaaatacaaatgg

SEQ ID NO: 62952 - DNA, 461 bp, Setaria italica
  Peptide Sequence Number=SeqID_128926
gaggtagaaaccattctgctcctaactatttcaaggaaatcataatcttcatggtgtaagggatcgaggaaacaaaattgcaatctttgatattgacaaaaacacgaaccaatggttgtgaaagagtgtcggaaaaaagagctaaaacgagaaaagaacaacactgtgagattttggagtagactacaatgaacggatatttaagtaacatacattgtttgagtgatgaagaggtctatgcattgatgagcgtttgaaagcgcgagccaaaactgcctcattgactagttcagactcttttaaaaaaattcctattattggaaaacatacaataaagttttgttaataaattttatcacataaaaagttcaaagatagaataacaaattagaaagcatactaacaccaatatttgcaaaaaaagaaatgtgattttgagatatcaggattactagtgggct

SEQ ID NO: 62953 - DNA, 382 bp, Setaria italica
  Peptide Sequence Number=SeqID_128927
gtaagatgacagatgtaatgatatattgatgatatattgttctgaggcacaattgtagtcttatgctatcctattacagcatgattgtgaacaaatccagactatatagctatatatctcatgatgttgaaccatgtgttgagtgtctccttaaacatcaaattcaataatcattgatgttccagaaatatcacagcatttattccataatcaacactatgaattaaaactttggattagatataaaattaagaaatggttgtaaatcttgatgcagataattgatacaaagatgaagggacgtatcagaaacgaaaacagggataacatcaaaagctaacggttacttaacctaattaataagggaacatagaaattaatt

SEQ ID NO: 62954 - DNA, 150 bp, Setaria italica
  Peptide Sequence Number=SeqID_128928
cgtaccatgacagatgaggacgagaaaaccgtagatgtacagcatgtcgtatgttcgcacaatcaggcagcaggcatagtggggttccatgtaggcactgccacgcctaatgctcagatcacatatctctataaattttgctttctcacg

SEQ ID NO: 62955 - DNA, 232 bp, Setaria italica
  Peptide Sequence Number=SeqID_128929
agcccatcgctctattaggcttgaccgcttgatgctgtgaccttgagggaaaacagctaggtacaacaagcatgtcttgtgttctcttggcagatctttgtaggaaaacttgaatatcatcttagccttagccttggtagcatcagttgccattgagtttcccgaaacctgcagggtgtcattcaacctgcgcagttcttcatagttcctgttgggatttgcatacagagca

SEQ ID NO: 62956 - DNA, 284 bp, Setaria italica
  Peptide Sequence Number=SeqID_128930
acaacaacaacgacaagacgacaatacttactttactacttactaccgaccgacgtacgaccgaccggacagcaccgccgaatcgatggagggttgggataaggggacgaagagcacggtgggagagatcccgctgctgacgacgcgggcgggtccgcgggacggcgaggcgtggcggcagcggctgaaggaggagtaccgcgcgctgatcgcctacacgtcggtgaacaaggccaaggcaacgactggttccgcatcgccgccgccaaccccggagggcaccc

SEQ ID NO: 62957 - DNA, 281 bp, Setaria italica
  Peptide Sequence Number=SeqID_128931
tttctgtctatcttgcatcaaatcggtcgaatgcaattagtatggatatgtacgagaatcacctgatagcacgtgttgctaatcatacccaggctatgataatgcttggaggaaggagatttgtttttgttggactgccccccgatgggttgcatgccaattgcccgaactttggtcggcacaggatcagacagatgtgatgagacattaaatcagcttgcaacttcatttcaacttcgtaagtcttagttttcttaactttgtttttgtaatttttatta

SEQ ID NO: 62958 - DNA, 245 bp, Setaria italica
  Peptide Sequence Number=SeqID_128932
ttgggtctccaagagcacctattccagaagataccccttgttcagaagattcaggaatcgagtgaggggatgcttcgctatgatacacctagcatcctttccaaggacaagtttgcatggctccgtgatgacgagtttgctcggcagactgtggcaggaataaacccagttaacatcgcgaggctcacggtaatgaactgaaaacatgatttaaatgttgatcaataacagcagtaatctgtagt

SEQ ID NO: 62959 - DNA, 415 bp, Setaria italica
  Peptide Sequence Number=SeqID_128933
cttcatccttcacgtacatcattgtctgtgagaatatcaaagctcccaaaatcgactccttcctgcttcaaaaatgtcaaccactttacggctgaaaccacaccttggttgctcaggggttcccttcataaacaaaaatacaggatgtgaattgacaagctgctccaatcgcttattcagtgaatctggcaggccaacagagtttgtgccctcatcagcagaagatccattccgctgagccaattcttggaccttttcaagtacagcaggcccagcagccactccaaggctagcaggtaacaagacggaactacaagacaaacaactaagacaaggacccaagactaatttttagacaaaccttaattaggaccaaggactaagactaggaatttagactaccctacaaagaaga

SEQ ID NO: 62960 - DNA, 437 bp, Setaria italica
  Peptide Sequence Number=SeqID_128934
gaaaacctttagaccctgtctaacatcatcatctgcaaggatgtcaaaactggagaaaggaatgttctcttgcttaaggatgtgaaccaacttcccactgaacccacactttagctcctcaggtgaacctttgataaataccatcacagggctggaattaacaaggctttccaaacgagctttcagagcatcagtaagcccgactggttcagaaactgcaccaccctttccagttggagcctcaggttccactgtctcaacgtttttgcttccctgtggtttgaggggaatattgtgctcctcaaaaacatccttcaattcaccactgtcatgcattgcaataacaatatcacatccaccaagcagctcaccttttgtctagttactagtcttgtagggtaaagttgggtcctagtttggtagtaactttctttcta

SEQ ID NO: 62961 - DNA, 225 bp, Setaria italica
  Peptide Sequence Number=SeqID_128935
cagctgtacataaaaggtgagggtaactaggccagtttgagaaaacctttagaccctgtctaacatcatcatctgcaaggatgtcaaaactggagaaaggaatgttctcttgcttaaggatgtgaaccaacttcccactgaacccacactttagctcctcaggtgaacctttgataaatacccacactttagctcctcaggtgaacctttgataaattccagccc

SEQ ID NO: 62962 - DNA, 268 bp, Setaria italica
  Peptide Sequence Number=SeqID_128936
ttcttgtctaaggtattgttctaaaacttggtagtaaaggtaattgtttcttctttgtctttaaggtattgtgaaccaacttcccactgaacccacactttagctcctcaggtgaacctttgataaataccatcacagggctggaattaacaaggctttccaaacgagctttcagagcatcagtaagcccgactggttcagaaactgcaccaccctttccagttggagcctcaggttccactgtctcaacgtttttgcttccctgtgg

SEQ ID NO: 62963 - DNA, 432 bp, Setaria italica
  Peptide Sequence Number=SeqID_128937
tgctccctcctggccgcggcggccggcgccggcgggcggtacgaggccctgttcaacttcggggactcgctgggagacacgggcaacatctgcgtcaacatgacggcggcggaccagctcctgctcaccgtcgcgcacccgccctacggcatgacctacttcggccgccccacctgccgctgctccgacggccgccttgtcatcgacttcctcgctcaggagctgggcctgccgttgctcccgccgtccaagctccggggcgcggacttccgccggggcgccaacatggccatcgtcggcggcacggcgctcgacttcgccttcctcgagtccatcggcctcggctacccggtctggaacaacggcgccatgaacgtccagatccagtggctccgggacattcttccctccgtctgcggcggcggcgcgccg

SEQ ID NO: 62964 - DNA, 185 bp, Setaria italica
  Peptide Sequence Number=SeqID_128938
gagctgcattttgcaacgaatcaccttggatgattcaattcctctctgtttcaagtaataatgcagggattgcatttgttcctttcaagctttcagaggatggcattgagctgcattttgtatagtaccaaaaagtgttgaatacaatatgttttgtaacatatgtgtaaaagagttagttaaat

SEQ ID NO: 62965 - DNA, 455 bp, Setaria italica
  Peptide Sequence Number=SeqID_128939
tgccagggcgccagaagcccttggcggcaacaagaaattgctgtttgacaattgtagtcctataatgcagagaacgaagaacaggctccatctttcttatcacttctatagtgtcttgcagcacaaaccatctaccaggtctaagtatcctgtcaatttctgctgctacttcaatgatatggcaccttcttgtaaggggccctaggagataactcatgtgaagaagatcgtaagtccgtgggtatgtattgaaagattcacaccagtcatgatataccccaatcaaacctctgttaaaaatgatgggcaatgtatctggctgatcaacaggtacaacattcataacccacaatggttgatgaataagtgatgttgcaaatctgttaagggaacaattttgatcaatgtctctcacacaaatgatgtacttagtttatcactacttataagaaaag

SEQ ID NO: 62966 - DNA, 325 bp, Setaria italica
  misc_feature (158)..(158): n is a, c, g, or t
  Peptide Sequence Number=SeqID_128940
tggtcttttgtcttaatttgtcgttgtactaaggtcttgtcggtactaggtcgttaactactattggtcttcatctagtcagagctctgccttcccacccaaagcaaggctgctccagcaacgaagagctcatgctgcaccaacattcaccatcaagngattggcagctgaggcagcttggatgcctgcgattgacaacgtttcactgtgttgtgcttcatcatctgccttgttctcaatataacacttactggtggctcgaaccgtgctatcttcttcctagcacccatccttctgcttttgaaccaggattcaatatctttgc

SEQ ID NO: 62967 - DNA, 463 bp, Setaria italica
  Peptide Sequence Number=SeqID_128941
ggttaaactgaatgtcggaatcataatctctaaagaacgaaatccggcaggaaaactctctccacgtcaatccatgtaatcatgacgtcatgaccgtcaaattagagctcccattgattctcaaacgtcggatttcatatggacggcagctttcattctacactgtactcgacatcgctaggtgtctccagaaacctcatctgcagagcctgccgtcccctcctgcaaagcatcgaagcccacttggccatcatggctgctcatcacaaccgtggtacttacactagcagcagttacatccatcatcccagtgaagtatgttgttgagttgagggctttgtatgcagtggcagttggggtcacactaggcatctacatatctgttcagtgcttcttccaggcagttgttctgtatcctcttcttgtcgcaacattgtctctgctgcagtcttgtcgtattccg

SEQ ID NO: 62968 - DNA, 166 bp, Setaria italica
  Peptide Sequence Number=SeqID_128942
gttattatgcagcctcctattaagctatcatgggtataccggtcagaattgatcacagcagcacaattttaattacttagtaattagtaatagaacaacttacaaataataatagggtttaagtaaagaacaaataactaaaaaagtaaaccctaaaacgtaagaa

SEQ ID NO: 62969 - DNA, 259 bp, Setaria italica
  Peptide Sequence Number=SeqID_128943
ctgagttatggtccttagctggtaggtatacgtttctcagtgtattttgttgttgcaggtaacaactcctctcattttcaaactaattcctgtggtaatgcaccttggcatccttatgcgttggttccccacggaaaatagtgtgcaaaatgaggtatgctttgtcttctttgctgattttgcccacttgtatcagaagcttgacttaattaatcaacgttggtggttgtagtagtaaaagcatgtgttcaaattccat

SEQ ID NO: 62970 - DNA, 270 bp, Setaria italica
  Peptide Sequence Number=SeqID_128944
taataactggacggcgtcctgtaagttcgagacaagcgcctatggatgacaacttggttgactgggtatgttgtgcaccaaaactagtttgaattttgtacccacaggactgtggctaacagggtcgactaatttcttactgtactttcacttatcctaaaaaagggtcttttcctgagaatattttgctgtaattaatcctgtgactatgataccctcattttcgaggtctgcaattaatagctgcatgctttatcttcacacaaacta

SEQ ID NO: 62971 - DNA, 159 bp, Setaria italica
  Peptide Sequence Number=SeqID_128945
ggcggtgatgtggtggtgtccgggtctctgggatgtgaggaggtcggaagaggaattcccttcctctttctttctttttgttttcttatgacgtcttcattgcttgcaatttgtaaagtctggctgagttatataaccaaagttgctgacttgcgtgtg

SEQ ID NO: 62972 - DNA, 254 bp, Setaria italica
  Peptide Sequence Number=SeqID_128946
agaccgaacaaaggctaaaaattgctctgggttctgcgaagggattggcgtatcttcatgaagactgtgagatcacagccctagctactcgttatgctgccagctttatttttcacttacagatgggcaagtagctattctgtactgattttattctgctttcacttacaggccaccctaagatcattcatcgtgacataaaggcctcaaatattcttcttgatctaagatttgaggctaaggtggcagatttt

SEQ ID NO: 62973 - DNA, 366 bp, Setaria italica
  misc_feature (279)..(279): n is a, c, g, or t
  Peptide Sequence Number=SeqID_128947
ccctccctctcactgtcgcagcagaaaggcgcgccgccgcgttccgttaaccccaccgcctccaccagcgatgttaaacagtagtggtgggtcgggttctaattactctggtggcgagatcctacctccaccatcccctggcgctgcccttggcttctcaaagagcacattcacgtacgaagagttggtaagggcaactgatggattctctgatgccaatctcctcggacaaggtggttttggctacgttcacagaggactgctgcctaatggcaaggngatcgctgtaaagcaattgaaacttggaagtggccagggagagcgtgagttccaggctggaggttgagattatcagccgagtacatc

SEQ ID NO: 62974 - DNA, 219 bp, Setaria italica
  Peptide Sequence Number=SeqID_128948
aaaagaaaacggaaacgtaaacctaagtaaaagttaacgaagaacaaagacgcctatggatgacaacttggttgactgggcaaggcctttaatgacaaaagcattcgaggatggcaatcatgatgctttagtggatccccggctgggaagtgagtataatgataatgagatggcgaggatgatagcctgtgcagctgcgtgcgtgacgtcattcttcac

SEQ ID NO: 62975 - DNA, 408 bp, Setaria italica
  Peptide Sequence Number=SeqID_128949
tttagagactctggaagatctttctggaggtttacataggtaataggcattttctacaagtgtgctatggtgtgcatccaaattcttgacatttttcaatctcttcagtatctccaacatgtttgacatgcgaattgtagtttctggcaagcgataaagaaagcgtccacaggtctcaagaagattgcaggccacatcaatgttatgatgtgtgaaatcatctaagcaagccttcaaacagccaaaaacaaggcatgaaggcgcaattttgaatttgcacaactccccaataaatcgaatgtttctaattttagtttcaattttgatctgatccttcttatttatcaaaaaattaactcctcttcaagcattgacaatagcatactcggaagattcttcataaatggc

SEQ ID NO: 62976 - DNA, 486 bp, Setaria italica
  Peptide Sequence Number=SeqID_128950
aagaaagtgaagaagtaggtttcaagattcagacatgctgtcagcggcagcctgtaccccattacttggttcctcacattctgattgtttaaataaccatcctatttgtgcaaatgctagaatcggcattacaagtgaagatttgaagaatacgatagagaagacattgggtggtgctggagtagctctttcatccccaaggcttgtgattcctgctgtgatttttggattgtcagctttatcagatcatttccaaaatagctttttcagttttgaggtgagtgcaccagtctgctattgtactaaatttcatttagttggcagaccatgccagatatatcttagccttgagtacacacatatgccagtacctgttttctcctgttaataatatgtttaattagactaccctaccgtttaaaataataacgaacaatttaaggaacaaaactaaaaacaatacaacaataatttagaaaattagta

SEQ ID NO: 62977 - DNA, 442 bp, Setaria italica
  Peptide Sequence Number=SeqID_128951
catgctgtcagcggcagcctgtaccccattacttggttcctcacattctgattgttaaataaccatcctatttgtgcaaatgctagaatcggcattacaagtgaagatttgaagaatacgatagagaagacattgggtggtgctggagtagctctttcatccccaaggcttgtgattcctgctgtgatttttggattgtcagctttatcagatcatttccaaaatagctttttcagttttgaggtgagtgcaccagtctgctattgtactaaatttcatttagttggcagaccatgccagatatatcttagccttgagtacacacatatgccagtacctgttttctcctgttaataatatgtttattgctccctccgtttaaatatacgacattttaggactaaacttaaaactattctactattattttgtaaaatttgtt

SEQ ID NO: 62978 - DNA, 454 bp, Setaria italica
  Peptide Sequence Number=SeqID_128952
ttcaaaaggagaacaaatttgtaattcttgatgtcagaccagtaagcagagttcaaagaggtatcttgttactctctatttttcacgccacaagtttagtctcaggtttaccaagtaatttctattttgtgccatttcttaattcataatccaccaccttagtatccttgatgcgtatagcgtattagagatcacatgctggacaattctaattgaatatgtattttctcctaacatgacatttcttgctgtatattatctgttgcttcatgtcatgggttttattactccaagattgattcttttgtggcaattgtataaattttatggatttcattcgtatgcaggctcatccacctggtgccatcaatgtacaaatatacagattaataaaggaatggacggcattgggtattatttgtctaaggtcgttgtctagtctatttgtctattt

SEQ ID NO: 62979 - DNA, 238 bp, Setaria italica
  Peptide Sequence Number=SeqID_128953
ttaacaaatttgtttctccttttgaaggcgcagtgcttccttcacatcaacaccgcgtacccgcttttgtgcaaggagttgcctcataagtttttgccctctctctcatgatcacaatgctcgcagctagctctgtagtgaacagcagccttgcttgctcatcgaggatatcatccgggtcagaccttgcatctggccattcctggcgtcccatagaggctgtgaaactccctcggaa

SEQ ID NO: 62980 - DNA, 223 bp, Setaria italica
  Peptide Sequence Number=SeqID_128954
ttgcgcatgacgcgcatgaagcagtagcgcgtcgagcggtagaatatgttgaatgggcagaacagaacccctgttgacagcagtaggagtgcaccgggcctatgtgatttccttcctaccttactactggagagcaatgcagtgtctaaggaggtacctggaagaaggtcatgatatcaaccaacttgctaatgctggcaagtatgtatcagcgatggtggcg

SEQ ID NO: 62981 - DNA, 262 bp, Setaria italica
  Peptide Sequence Number=SeqID_128955
cggtattctcttcccctaaattcccttcatgttgggagcatgccaacaagttcttaactttgtcatggactggggcttcttaaaccccaaatccaagaacttatggctccgggatcagctcatcctgaagaataagtcgatctactatgtttccatgatgctcaaccttgcgctgcgtctagcctgggcccagagtgtaatgaaactcaaacttggtcgggtggagtcccgcttgcttgatttctcactcgcttcactggaa

SEQ ID NO: 62982 - DNA, 269 bp, Setaria italica
  Peptide Sequence Number=SeqID_128956
tggccaatagcgatttgatggagacatgtattgggtctcatggaactcacagttatgtgctaggtacatctgcaaattgttggttgacactcatggattggctattgacacctggagtttctcagagtgaaaaggatttaataaagatcaatatgcttgagttgaaaaggatttaataaagatcaatatgcttgagttggttgacatttactattgggccttggatgccccgaagaatgggaataaggttgtttcctaaaaaaaaaaaa

SEQ ID NO: 62983 - DNA, 239 bp, Setaria italica
  misc_feature (179)..(179): n is a, c, g, or t
  Peptide Sequence Number=SeqID_128957
gaacgagagcagatgttggttgaaaggggcacctacttggaaagctgcagcttgtccaagatgttccttgattctttgatcaattaaaactttgagtttgctgctctcgttcccaggagccatggcccgtcctcgccttccaattctgccaacccctggcatgcctcatggattccctnaagcacctggtgcaccattgatgccaggagttaggcccccgattttaccagctcctggtg

SEQ ID NO: 62984 - DNA, 247 bp, Setaria italica
  Peptide Sequence Number=SeqID_128958
gagaagatggaaaggtatgagaagagttccttatttgtagcagagaattcagatattgaactgaagaaggtacactgataagtcccagatcttgaacttccattttcctgttcatgtaatgattgcatatgcttccaaggtggtattatctatggcccagctctgattgatccattccctatattttgttagaccaaaggccaaagacatggtgtacaaatactgcacccctgtaatctttatttgt

SEQ ID NO: 62985 - DNA, 308 bp, Setaria italica
  Peptide Sequence Number=SeqID_128959
tcggtccatccgtcaatccatcctacggatggcggcgcccgtgtccgccctggagtccgcttggcacggtatccccccgttccgccttctcctctcctctcctctccctgcgtcactccgtctgctcactctccatgacctctctgtttgggaaacgatacgatcgatgaataatgcacgcagttggtgatcgccaacttcaccgagttccagctcgccaccctcatcaccttcctgctccacgagaccgtcttcttcctctccggcctccccatccctcctcttcgagcgattcggcctcttggcca

SEQ ID NO: 62986 - DNA, 208 bp, Setaria italica
  Peptide Sequence Number=SeqID_128960
aaacggagatagatgtctctcttaaaccaccaactagtagacctagaactaaactatggcagcccgacagcatcttgctgagctcagctcagtccatgatatcttcgtcctccgtccggcaggggcatcgacgctgcagctgtaatctcttcctcaatcctgcatgccacgaaaaccattccagattcagaaggcgctcagcattata

SEQ ID NO: 62987 - DNA, 281 bp, Setaria italica
  Peptide Sequence Number=SeqID_128961
gcgaacactaagtacttccgtcgttcttcttgggccattcttggccttggcatagaaattcacatggcgatagagtccagaggcctcaaacatcacggcatcagcaattgcctcaataagagcatacttaaccttgttgtttttgtttttgttgtaacgcttcagagccagttcagcaaacctgctatctgctagcttttggtcagcttctttatccactcttatattaggattaggatcacgccaacttttcatcacagcatccataaatcattctaact

SEQ ID NO: 62988 - DNA, 353 bp, Setaria italica
  Peptide Sequence Number=SeqID_128962
catgtggcttcttggagtatgactcaaatgacaatccactcccggagacagtcaaacctatggtagatggtggaactgaaggatttaagggtcatgctagagtcataataccaggaacaacaccttgcttcgaatgcaacatatggcttttccctcctcaggtcaagttccccttatgtaccctggcggagacaccaagaaccgcagctcactgcattgagtatgctcatttgataaaatgggatgaggttcattctggaaaaccttttgatgctgatgatgcagagcatatgcagtggatttattcagaggctttaaagaatatgtaacacctgaaataccgaaaagctctg

SEQ ID NO: 62989 - DNA, 262 bp, Setaria italica
  Peptide Sequence Number=SeqID_128963
gcacaggctttgccgtcgcaaccacaggtgcggaggcgccgagcagcagcagtggggccgagcgcactagccgagtcgtcgacagggaggatcggaggcggggcaagtggttggcgtatacgctgtcagaagggagaccggcgccgcccgagtcccacggcgccataggggggctacgagctcgtccacagcgacgacgcgcccgccctcgcggtggatctggaggccggcggcggcggcttccccaagagcagcggccggg

SEQ ID NO: 62990 - DNA, 169 bp, Setaria italica
  misc_feature (3)..(3): n is a, c, g, or t
  Peptide Sequence Number=SeqID_128964
ccnccccgcggtacggtatatacacccttgctagggtttcgtggagattggattcttttgtaagccgccataggcgtgtaacccaaaactcttcagatagtgagattgttgttggctggtgcccgtggtttttccccttcacatcggaggggttttccacgttaaaaaa

SEQ ID NO: 62991 - DNA, 327 bp, Setaria italica
  Peptide Sequence Number=SeqID_128965
tttaggcaaaaccccctaacttgccaaagccacttggttgaacacgctagataccagttgggcgataggactcgtcagagctagttggttgaacacgtttggcagcaatcgttgttgttgccagtaggtagtggtgatggggttcaccgaagccacttggttgaacacgctggacaacagttgttgctgctgccagtgggtgataggacttgttagagctagttggttgaacacgtttggcaggaactgttgttgctgccagtaggcagcggtgatggggtttgccagagccatttggttgaagatgtttggcggcaacaacattcc

SEQ ID NO: 62992 - DNA, 299 bp, Setaria italica
  Peptide Sequence Number=SeqID_128966
gcccactggcagcaacaacaactggtatctagcgtgttcaaccaagtgggcgataggactcgtcagagctagttggttgaacacgtttggcagcaatcgttgttgttgccagtaggtagtggtgatggggttcaccgaagccacttggttgaacacgctggacaacagttgttgctgctgccagtgggtgataggacttgttagagctagttggttgaacacgtttggcaggaactgttgttgctgccagtaggcagcggtggatggggtttgccagagcctatttggttgaagatgtt

SEQ ID NO: 62993 - DNA, 263 bp, Setaria italica
  Peptide Sequence Number=SeqID_128967
aagtggcgataggactcgtcagagctagttggttgaacacgtttggcagcaatcgttgttgttgccagtaggtagtggtgatggggttcaccgaagccacttggttgaacacgctggacaacagttgttgctgctgccagtgggtgataggacgtgttcaaccaactagctctaacaagtcctatcacccactggcagcaactgttgttgctgccagtaggcagcggtgatggggtttgccagagccatttggttgaagatgt

SEQ ID NO: 62994 - DNA, 343 bp, Setaria italica
  Peptide Sequence Number=SeqID_128968
tctttcatcagtatactattgaggtgggaaacctttgttaggtcaatacaggaaagatggtgttgagaatgggcacccaaaccttaacactgactacctagaagtggcaccaaagtggtgtgataccatttcttctgtggatcttatgcccacactactctaaggataccttcacaccgacaccaacacgggagaccaactctctacaagggaactcaaatcttttattcacccactcacaacttgatacaacactcactcttacactctttatgtggctaccctaccatgacactactacactacatggcaatcttgatatctcttcacctatggctcacat

SEQ ID NO: 62995 - DNA, 487 bp, Setaria italica
  Peptide Sequence Number=SeqID_128969
aaatgatgcatttggtataaggaattcatgctattcgggataaggctatgtagcatattggttttgtttttatatgcactgattgtggtgattgatatactacattaaatcatgcatggatggtgtatgttagatcatttccacattaactgttttttcaaattaagcttgttatttctagcatgttgattcacacgttaattgcctttcaaatcaagcatatggtttctagatgttgagaaaccggagcccaaaccttgacaccgactccctagaagtggcacaaaagtgatatgacaccacttcttctgtgaaccttatacccacactactttgaggagaccttcacaccgacaccaacacgggagaccaactctctacaaggaacccaaatcttttattcgtctactcacaacttgatacaacactcactcttatgctctttatgtggctaccctaccatgacactactatactatattggtaa

SEQ ID NO: 62996 - DNA, 214 bp, Setaria italica
  Peptide Sequence Number=SeqID_128970
tggtttgagaccgagtcaataatatgctgacagtagataggactcatgtaatatagaacatcatgaactgtggcacctaatgcaatgctgtacataagatccagctgtaggttcggttgtctttcttggatgtaatgttggagctgtacatattacagaagacagatcgacagggattagtctcgagcgatggttgtagttgctaatccctgcc

SEQ ID NO: 62997 - DNA, 287 bp, Setaria italica
  misc_feature (35)..(35): n is a, c, g, or t
  Peptide Sequence Number=SeqID_128971
attcagtgtagaaaggcctgaagggattttttaangttgctgttcatactccaactgcacagagaggacttctctctgtgcagttggagtatgaacagcaacattaaaaaatcccttcaggcctatcaatcattcagtgtagaaagcgattaagtaaatgagagtgaggtgatcattggaaagggatcaattagcgcagccaaggataattctcttaaacggaacttctaagaaagtatgcttgcattcttaacttgaggggacccttggaccagtatttcttcagg

SEQ ID NO: 62998 - DNA, 206 bp, Setaria italica
  Peptide Sequence Number=SeqID_128972
taaccttaagaactaagttaaaataccaactaaaaatacaagacaatagtaactagaagactagaggaactgttgtcatctgtgcgctcacagagagaaaaattggacaaagctcgtcagagcgaagctgcttctctgaagcattccaaatcagcttttgagcataccagtcattccaaatcagctcttgagcatgatggcaattc

SEQ ID NO: 62999 - DNA, 321 bp, Setaria italica
  Peptide Sequence Number=SeqID_128973
ctctctagattcactggaattcccaacagggaaggcatccatcgatgaagtgtccaaatgctcaggagatgcatttcaggtcacggttcgtaacaagaagagagtagggtataattatgagctgagcttgagatttagaggtgaatggttaattaaagaagaaaacaagaaggtcaaaggccatttagacattcctgagttttcatttggtgagcttgatgacttggagttacaagtaaggttacaagacgaatagaacaaagggacctacgacaattaacttaagtaaaacgtaaaactaaaaaaactaaaacggtaaaa

SEQ ID NO: 63000 - DNA, 255 bp, Setaria italica
  Peptide Sequence Number=SeqID_128974
cattcagatggaaatgaagaagatcagtgatgaaattaaggggaagaagcggcaaatagcatctttggaaagggaaatagctcatgcaacattgggaagtcaaggaaaggctacacatattccgtatcgagattcaaaattaacacgactacttcagtcgtccctcagtggtcaagggcgtgtttctctaatttgcacagtgacaccagcatcaagtaattctgaagagacccataatacaacttaaaatttgcc

SEQ ID NO: 63001 - DNA, 388 bp, Setaria italica
  Peptide Sequence Number=SeqID_128975
aggtgttagatggctatacagaaaatattttggtggaggaaagatgccattgttgaactgtagaataattaagagcagagaatttctctgcatctagtatctgaggaatcagggtaatttgatatcaaatatggggtatatttgagctgattgtgctcggtaaacttgtgcagattgcgagtggaaggcgcaggcaggcaacgtatgcgttgcgtcattcgactggagctgcagcggcatctgcaaatctgccgaccggatcaaggaagtccatcagcgctgcggtgagagtgagaatgcgatatggaatgcaaagttctaaacccaagatcgtccaaagaaactacactctttttacaaggaatgcacatatacagacaataattaa

SEQ ID NO: 63002 - DNA, 227 bp, Setaria italica
  Peptide Sequence Number=SeqID_128976
taagaacctaaggttaacaaataacggaacctacgaacgttagaaacaacgtcgaacgatcgccgtctctgctgcggcacgccaccggattgcgagtggaaggcgcaggcaggcaacgtatgcgttgcgtcattcgactggagctgcagcggcatctgcaaatctgccgaccggatcaaggaagtccatcagcgctgcggtgagagtgagaatgcgatatggaatgc

SEQ ID NO: 63003 - DNA, 200 bp, Setaria italica
  Peptide Sequence Number=SeqID_128977
gattcagagaagaatgtacactcaagtgtgcatccattatggtgggcaggagggaccatttgttggcgcttggagttcttgggcagcgatcatgaggttccagagagggagaagcagtagggccctgagccggctgaggtgagaggtagagagagatagccctcggtcgtagggagagaatcagagagtgattgggaagg

SEQ ID NO: 63004 - DNA, 255 bp, Setaria italica
  Peptide Sequence Number=SeqID_128978
atgttgacagccagtatgaagagagcttgagattcagagaagaatgtacactcaagtgtgcatccattatggtgggcaggaggggtatttcttttattttcctttttggggtgtttttggctttaggaattggattattgtaagggaacttttctgttttggtgctcgaaaagatcccgggtttactcataaagaagaagagagaggagatggcgaatgtcctcaggaagatgaggtcggctggtactcacactg

SEQ ID NO: 63005 - DNA, 153 bp, Setaria italica
  misc_feature (127)..(127): n is a, c, g, or t
  Peptide Sequence Number=SeqID_128979
gggaggaagaaaggtggagccttgctcttgacaaaagtgagagcaactgcttgcaggaggaggagggaccatttgttggcgcttggagttcttgggcagcgatcatgaggttccagagagggagaancagtagggccctgagccggctgaggt

SEQ ID NO: 63006 - DNA, 324 bp, Setaria italica
  Peptide Sequence Number=SeqID_128980
atcacactttccttcttggtgacagagttttagtgagtgtttctctcacaaagaggttttaaatgtgatgtaggcttcctgggttaaggtgctgctccaaagttctcacaaactcatccataacatcgctggacagtccaaaatgttgcactatcatgggctcaaatacagctctcacggcatgtgccatcgtgttcggggcaatcaagcttttctctggctcatgcacatgcatcttattgatctcgaaggaaccctcatcttgtatgatctaccgatgtacgtagaaagaatcaagcatttctctactgattaagccccttg

SEQ ID NO: 63007 - DNA, 303 bp, Setaria italica
  Peptide Sequence Number=SeqID_128981
tatgggcatctgtaattgatgatatacgagatgggtgtgggaactatccaaactccaatgctatcagaataactaaactgttggttgtccatacagtgttgtacgtaattgcttgaaagtttaatttcaacaactataagctgcaataggggagacaaagcaacatttaaaacctctttgtgagagaaacactcactaaaactctgtcaccaagaaggaaagtgtgatgtaggcttcctgggttaaggtgctgctccaaagttctcacaaactcatccataacatcgctggacagtccaaaat

SEQ ID NO: 63008 - DNA, 340 bp, Setaria italica
  Peptide Sequence Number=SeqID_128982
gaagcgggcacggaatgcgagcttgtgggcgtagtatgcaggaggagcgattgacaccgagcgagtgcagttcgaatacatgtagcacaagttatatgtgagagactgcagaccatctgcagtgaacttgttgtcatctcgcagcacatggtaatgtgtaggacgacttgttcccttgataccagcatggctgcataggaagaaatcaaattctgttgggtggcatatattcctatcgataacagtgccaggtagaatatttccagtcctgtccgccgagcggcgatcactggggaagagccttgtgtggtgcctcttctgcactaacttattgtaaggt

SEQ ID NO: 63009 - DNA, 233 bp, Setaria italica
  Peptide Sequence Number=SeqID_128983
aggtagtgctaaaaatcagatcatgacaattcatctgtttaacaaaatagtactgcttgtttatttattataatccatgcaatttctacagtgacaacaagcaatactgatgaggcagtgaaagctaaaaaggtatgatcaaattgtcaaagaaaataccagtagtgtgtgcttcagcacagttgcagtgcagatattactcctacattcacgagatatcaccaggcggacat

SEQ ID NO: 63010 - DNA, 224 bp, Setaria italica
  Peptide Sequence Number=SeqID_128984
cggacatgtggaacagctttccagctctctccaagagcaggcttgacagctccattgccagcagaaaccatatgattggttaccagaacagataggttatgctcatctgctaacttctttagaatcattgccactgatatcatcatcgaccgccctgtcagtttattaatgcaggttcagacttcagaggaaagaattgaaagctacttcaagaattttatgac

SEQ ID NO: 63011 - DNA, 392 bp, Setaria italica
  Peptide Sequence Number=SeqID_128985
aatagatttatggtgaggatttatatagtatttttatttactatgttggttcttgtgcagttaacaaataattaggctggcaataaagatatgataagatcctggtatcaactttgtgaaagcagccaatcattattggcagcatcgacggagtcacatcgtgaaagtaaccaaacaaccctgactgcatcaacagggacagcgtgtgaaagcaactaatcaaccttggctgcaatagcggggaatctggtgttgctttttaaaaaacttcaacacatggcctcacctgagaacaatctagttgcaagtacttaaaaagctttgcagcatggagctcgccgcggattgcaagagagagtggaaaatcgaaagacgcttgatatacatactga

SEQ ID NO: 63012 - DNA, 238 bp, Setaria italica
  Peptide Sequence Number=SeqID_128986
caacacccttaaaacaaactgatgttactttctcaccacatagatcccaatgacgctggaagaagatgacccatcaagcataaataatacttgcattgtattaattcccaaggtgggtcagccagaagagcttggtcagtttcgaccaatcagcctctgcaacgtgatatacaagatcggttccaaggtgctggcaaacagattgaggagaatattgccggaaattatagctgaagag

SEQ ID NO: 63013 - DNA, 352 bp, Setaria italica
  Peptide Sequence Number=SeqID_128987
atcacgttgcagaggctgattggtcgaaactgaccaagctcttctggctgacccaccttgggaattaatacaatgcaagtattatttatgcttgatgggtcatcttctcccagcaacacccttaaaacaaactgatgttactttctcaccacatagatcccaatgacgctggaaaaaatgtgctggaaaaccattcaggctctggtgcttcgattggaaacatttggaacagagcaaccttaagttcttcctcgctgaaagttaacaaataattaggctggcaataaagatatgataagatcctggtatcaactttgtgaaagcagccaatcattattggcagcatcgacgg

SEQ ID NO: 63014 - DNA, 390 bp, Setaria italica
  Peptide Sequence Number=SeqID_128988
tttaaaaggaacgtctgagggatggaggtctgtctcttggtcaaccgcttgtttcttccctggcattgtcttcatcgtcctaactgttttaaacttcatgctgtggacaagaaatagtactggagcccttcccatctcacttttcttcggtcttttgtccttgtggttctgtgtctctgtgccacttacccttttaggtggtttctttggcacaagggctgaaccaatagaattccctgtccgaacacatagtagaaccttcctagccaaatactagaaagaatgaagaacagctcgatgaagagtgttccaaaaggtagagttccagcaccaagtatgaagagccatgagtacttctttgtagggatttctctgggtatctgatttgtt

SEQ ID NO: 63015 - DNA, 222 bp, Setaria italica
  Peptide Sequence Number=SeqID_128989
tacatggttggctagatacaaatgaacacaatcacatagtaatgctctgtgtcatgatcggcgatggggttcagattctgggcatggcaattgtcaccattttctttgctgcgtttggcttcatgtctcctgcatcaagaggaatgctgttgacagggatgatagtcctttatatgttacttggaattgtggctggatatgctgctgtcaggctttggagga

SEQ ID NO: 63016 - DNA, 265 bp, Setaria italica
  misc_feature (63)..(63): n is a, c, g, or t
  misc_feature (85)..(85): n is a, c, g, or t
  Peptide Sequence Number=SeqID_128990
gtttttttacgtaacagttatccagtgatgaatttcagaaagtttagagtcaagacctggttntgggtatctccagcacttctgntttaactatatttaagtatcgtatactcgctgtgttcttcatacaacaagattgatgcgtgattccagtccaacaaaaatgccttcagtttgcatagcctgtgcacatagagcgaacaaggatcttgattggataaagtttgcacaaaacgaacaattcaaagcaatttatggaatgatc

SEQ ID NO: 63017 - DNA, 235 bp, Setaria italica
  Peptide Sequence Number=SeqID_128991
ctcttctagaactttttccctgcaagattgatatgtacagaaaaaaccaaacccccaaaatggaggtgtaaaggtaaaggctggcggagagccaatcttggcctcggggatctcttggccctccaagagcttggcaatggcggcgagctcatcaggagagcacggcgtcagcaccgctcacctcccacaacgccctgcggaagcgcgagaacggccacacccgtggggagtgcat

SEQ ID NO: 63018 - DNA, 402 bp, Setaria italica
  Peptide Sequence Number=SeqID_128992
aattttactattggcgacatgaacaagattctgatgaagattctgatgtgggactctgacaatgataatgttctcgaacatggaggtaggagcaaggattcttacattgtctttcatggatttcaatccttacaaagaggttgctttttgagtgacaaattcgacagagtgctagcctataattggagtagctcaaagctccaagatttgggccagcttttcccgaaattttatattgaacgcgaccttctattccaacatcggttagcaagtgcatctttcccatacactccctgctggttgggggagcttcctgaaaaacaaaattaagaagctcatcagctaggattttagaatgcatattttacaagctattatgaagaatgtaaggctactcttgtc

SEQ ID NO: 63019 - DNA, 286 bp, Setaria italica
  Peptide Sequence Number=SeqID_128993
tagttacggttgttgtctaggtaggtagtcttgtctaggtagtcttgttcggacgcgcgggaggccggcatggcgttcatcctcggcaactcgcacgtcaaggctaagagcgggtcgagcttcctccggcggttcgtgatcaacttctgctacgacttcttgcggcggaacagccggggcccaactacgccgtcaccatcccgcacgcctccacgctggaggtcggcatgatgtactatgtctgaagtctgaacccctgaaactctctggagaagatgaacatagt

SEQ ID NO: 63020 - DNA, 332 bp, Setaria italica
  Peptide Sequence Number=SeqID_128994
atttttcactagtaaaccaagactattgcttctttacttgtgttaactgaccaccctttgctatttgtgtaatcttaagcaattggcatatgatgcaacttgctgcgtgtacctgatatacggtggcttggggttttcacatccgactttgaggattttttgccttccagactgttgcctccttcacttgtcacctgaagataggaggaaagctgaaagtattcttgctaggtgctatttacacaaggaagccccagaatggaggtcggagctggaagcaatgttacaaaagggtgtcaagtttgagattgaggcactatcttgctaagctt

SEQ ID NO: 63021 - DNA, 243 bp, Setaria italica
  Peptide Sequence Number=SeqID_128995
tgacaaagcaactggtcgcacaggccgcgagttgcgggctcctcttaggaaaccagcgatctgaccgggacttgtcaaggacagacacttcagtcagtacttcgcagattcagcaacaagatcggaatactgttcaggcacaaaggatttcactttcaaaagcttgcttgctgctcgacctctctcttgctcctccataatcaccacccacctaccactagctaccagcatggcctccctctc

SEQ ID NO: 63022 - DNA, 224 bp, Setaria italica
  Peptide Sequence Number=SeqID_128996
tccggtccggtcgttgtttacttgttgtacggtcggtcgttggtcgtcttatttagctttggtttatgattcaggctgtgcgtgcgtgcagtgggcgtagaattaacgcctgtgcagtgttgcgtgggtgacatggtgcaactccgtgcggtcgtgttatcgtgcatcgccggaatggtgtgtccgtgtcaagttgggtatgaataaagttggaagtgaagttt

SEQ ID NO: 63023 - DNA, 134 bp, Setaria italica
  Peptide Sequence Number=SeqID_128997
atataatagattcactatcatatatctacttgtacttacatagatatatgatagtgaattattatatgcagggcccaccacactatagattcactatcatatatctatgtaagtgaatctatagtgtgtggcct

SEQ ID NO: 63024 - DNA, 295 bp, Setaria italica
  misc_feature (243)..(243): n is a, c, g, or t
  Peptide Sequence Number=SeqID_128998
ctgtgttcataattaatacctcttgcataatttacagccccaatgctacgcgacatgcaaaaagagagaaactggagcacgcttcaagagttacagatttagatcaattctctttttcgagtgcttcaccagccagtcgatgacagaatcaatgttggtcgagttcttgcacgatatcatgaagcatgccacttctcggtcagtgattgtctttaggcccatgacttctgtgaagctttccangaaagcttcacagaagtcatgggcctaaagacaatcactggtcgagttcttg

SEQ ID NO: 63025 - DNA, 441 bp, Setaria italica
  Peptide Sequence Number=SeqID_128999
ataaccttgctgttggtatccatagtagttgtttccattatactggctgttggcatcttgctggggagcctgtttgttttgaggactacgaccccaagaaagccgaacattctgcccaccaatcaggctcccattgagcatacggattgcttcctcagcagatgacctgctggtaaattgaacaaatccacaacgcttgcctacaggaatcttcacataggcaatttctccataaggagtaaaagtttgccttagatactcctcatttacattggaatctaacccacccacaaagactgttgtattgttgggatcattctccgaaagatttccttgagagctctggtatgctcctgcaagtacaacacatataggtaccatcagaaacaaagcaggcaaactgattaggaatagtaacttaacatatttaacactggagac

SEQ ID NO: 63026 - DNA, 224 bp, Setaria italica
  Peptide Sequence Number=SeqID_129000
cctatcccctgtgtgccttgcctttcccctgttgcgtgtctcaggtgcctgctcattcaaatctccaaagcgcacgaaaccatatcctttggggcgtccagtgggcttgtcaataacaactttggcccccctaactgaagggtagctagctctgaacacctcttccaacatggaatcggtaacatcagcagccaaatcaccaacaaatatactctgatgaactt

SEQ ID NO: 63027 - DNA, 372 bp, Setaria italica
  Peptide Sequence Number=SeqID_129001
gaagaaggcgctgcacacgtcgccgaaggagcccaggatgctccccagcgacccgatgcacgagatgatcgcgtccgggtggctcttccagtagtcgcaggttccggtgccggagtagccgggcgtgtagccgccaccgccgcctccgtacccaccgccaccgcctcctcctcctccgtacccaccgccaccgtacttctgctcagcgacgtgatctccctgcaggcccctgctggcagagcaccgagaggcgacgcccaccaggagcacggcgacaaggagagccttgccgctcatcattttgctctctctctctcttcctctctcccctcttctcctgtgtttccgaagaagactaccagcgcaaagaga

SEQ ID NO: 63028 - DNA, 272 bp, Setaria italica
  Peptide Sequence Number=SeqID_129002
acggcacggcatcatgcatcatcatggccatgtgaagacgacgcgcagaaactaatataaggcccctcgatccgggagacacgtctggacctgcatccatcatcatgcacacacggacttatttaacaagcacgacgactacgctgacgatggaagcttcatcatcataagtagtggcaggcgaagttggccttcttgaacatggcggcctgcgcggcggcggcgaacctacggaaggtagaagacgacgaacggacgaatagacaagtaca

SEQ ID NO: 63029 - DNA, 170 bp, Setaria italica
  Peptide Sequence Number=SeqID_129003
cacgtctggacctgcatccatcatcatgcacacacggacttatttaacaagcacgacgactacgctgacgatggaagcttcatcatcataagtagtgatgcttcccttattgtcgttgttgctgatgtgaagaaataagatgagttggttggtagtgaaacagtaacggg

SEQ ID NO: 63030 - DNA, 229 bp, Setaria italica
  Peptide Sequence Number=SeqID_129004
ggcccctcgatccggggagacacgtctggacctgcatccatcatcatgcacacacggacttatttaacaagcacgacgactacgctgacgatggaagcttcatcatcataagtagtggcaggcgaagttggccttcttgaacatggcggcctgcgcggcggcggcgacctcctccgcgagggcgccgccgcctacctcaactccatcgccgccaagaagtacgcctact

SEQ ID NO: 63031 - DNA, 314 bp, Setaria italica
  Peptide Sequence Number=SeqID_129005
gtgcaccttgatccgggccatggcgacggtggcggttccggcggcgaagcggcggtgtcaccgtacccaccgccaccgctcccccgccgtacccgccgccgcctcctccgtacccaccgccaccgtacttctgctcagcgacgtgatctccctgcaggcccctgctggcagagcaccgagaggcgacgcccaccaggagcacggcgacaaggagagccttgccgctcatcattttgctctctctctctcttcctctctcccctcttctcctgtgtttccgaagaagactaccagcgcaaagagaagagagcgcc

SEQ ID NO: 63032 - DNA, 339 bp, Setaria italica
  Peptide Sequence Number=SeqID_129006
aaaagccaagagactggacagaacatggaacagcgaaagaagttgacaatgctggccttgagaaatcgaacgaaatgctaagggaggagctccagaagttgaaaagtgaactgcaggtgcttaggagcaaagaacagcctgtgattgatgtgaaatcttgcgacgcggagatcactaaactgctggccaacatgcaactggccactgccaatgcgtctctcttcaaggagaaggtccttgagctcatcgtgacatgcgaaagttttgagatcagctcatccacataagagttcctccgagtgatctcctccttcaacacctccttctgcaccatgtcac

SEQ ID NO: 63033 - DNA, 440 bp, Setaria italica
  Peptide Sequence Number=SeqID_129007
ctccgacatcttgcgcacgcgctccaggatcttgcgctggctccggctccggaggtccacgtcgtcgcccgcagccgccgacgtgaactcctcagctttcttcaggagcttcccgttcgcgtcgatcagctcctcgatggcgtcctccgcgtcggccatctgcaccttcacgccgtccagctcagcatccgacgacgcctccacaccgccgcgcagctcctggacaatggaccggaggtcccggagccgctgtgcctccgaggacagccggtcgatcaccttcttcttccactcccgctgcggctccatcgtggtggttgccaccgtggtgacgacaggccgcgggaggacctcctgcttgtcgacaccgaggtccttcacggtctacctacttggttcttcggttagttcttacgttaccgttcttttctttgttcctt

SEQ ID NO: 63034 - DNA, 270 bp, Setaria italica
  Peptide Sequence Number=SeqID_129008
ccttggatccaattgaaatttccgcaccagagccgtcacagatgctcagagttctactgagttccttctcaagatagttgttctcgagttgtaggtctccaagcttcttgttcatcagcttgatttcctgataaagctcgtttcctgctgcatgtagagacccaacccggaccaaacaaaaccaaacaccaccacctcctcggcttcctccctccccccgtctcgtcatcgcatcatttcctccccaaaattcccccaaatcgatctccc

SEQ ID NO: 63035 - DNA, 425 bp, Setaria italica
  misc_feature (206)..(206): n is a, c, g, or t
  Peptide Sequence Number=SeqID_129009
tatagcactgaattgagttatgtctgagctgtggctctttgtgccttccttttctagcctcaacagctctcgagtttgatcacttcatctagggccttgtctctgtcctgctcaagatccaagcatcgcccttctaactctgcatattgggtttccaaactgagtagagcactgttgatgctatccacctcacgcataagagttcncttttcagatcgaagtacagaattctggttgcggaatgtatgagtagattcctctgaatctttcagcttccttctaaggatctcaagctctgtattattgtcagacaacaaattttccaagaatacatttttctctgatagcttctccaaggttaacggccatcagtctgagagagccatgtttgttgcacggattgagggtatttctcataccatgga

SEQ ID NO: 63036 - DNA, 378 bp, Setaria italica
  Peptide Sequence Number=SeqID_129010
atccctcacctcttgtgcaagtgattggagtgattctacattgaaattacaccacttggatttgctccttgatcgaaaagtgcttcctatccaagtcgcccttgttatctttgaggtatgaaagctcatgctgaagcacccttttctcctccacatgccgagacacctcttcctcaaggcgccgctgcgtattcttcaaagaaattatctcatcctgcagacggattatcacagaggcagaggagtggttttgatcatccaattttcggttctcttctcgaatagtttccaattcctttttgaagttgaacattgaagcaaccaaagttctcaattctttactttgtctttctacctattgttcttttttcttaagtt

SEQ ID NO: 63037 - DNA, 466 bp, Setaria italica
  Peptide Sequence Number=SeqID_129011
gaattgtggaactaaaaaggtcaaagatggttgatcgaaactgactatttaaaatggctggggctctagaaaagtggaaacttcaaactttctgttaacttgacgttcacccagttggtaaattagaaaggtatagatatataattggctccactagccccgaaatctaaacttgtaagtgtgaataagcagcaatacctgagtttcctttaaggtgtaccgttccaatagtgtcttcttctcctcatttgtaagcacctgatgctcaggaacaagaacatgctcctttatatttataagcaactcggcctcctggaaaatttccaagtgtatctttggctctaattcaatgagaaacgacttggcgaatggagtgagattctgctgaagaaccaacacagctctggagacgttctcatgtgtcatcatttcaacatacttcttgatgtgtttcatccccaccttg

SEQ ID NO: 63038 - DNA, 208 bp, Setaria italica
  Peptide Sequence Number=SeqID_129012
ttagttaattttagtactaacttagggttagtttagacaaatagtttacttaagctgtgcgcactgggttctacaggttttggacacgcgtggccgcctgttgacagctctcggctatggtttatggccgtctatggtgcttctgtcagaaatcgtgcagacattcatccttgcagatttctgctactactatgtgaagagtctggtt

SEQ ID NO: 63039 - DNA, 423 bp, Setaria italica
  Peptide Sequence Number=SeqID_129013
gggcgctcgcctccgccgccgccgccgccgtcagctccacgcactgggaaaaccacgtggacgtggtacacgggttgcggttcatgatcagctcggcgatggcgccgctggcgaagatgacggcgttgaggagcgcccacaggcagaccagcaggacggccggaggcttctccttcctgtccatggacgccgacgacgccggcgatggaggagaaagctccacgtccacgaccacggccagcggaagggaggttgcttcttgccgtccatggacgacgcaggcagcggaaacgacggctccttgtccatggacatctccaacggagctgcaggcttgctcacgttgtcggcctcggccatgggtgattcaaagctacacacgagaaaaacctcgcacacggccggtgagttcttcaattaatt

SEQ ID NO: 63040 - DNA, 268 bp, Setaria italica
  Peptide Sequence Number=SeqID_129014
tgtaccgtccttggggcgcgccgcaccacagctgcccgcgccacagggcgctcgcctccgccgccgccgccgccgtcagctccacgcactgggaaaaccacgtggactgcacgtttgcgtgtgtatatgttacggcaacgtttttgtatatatacatatatccaagaatcggaggagttatgaggagttccttgcactattgtttaccgtggtacacgggttgcggttctatgatcagctcggcgatggcgccgctggcgaagatgac

SEQ ID NO: 63041 - DNA, 122 bp, Setaria italica
  Peptide Sequence Number=SeqID_129015
gaggccaccaccaacaccacgttctactgggagaacgtaataagaggaattgcttattagttcatgaccattgatacgacttagtgaggccaccaccaacaccacgttctactgggagaacg

SEQ ID NO: 63042 - DNA, 422 bp, Setaria italica
  misc_feature (58)..(58): n is a, c, g, or t
  Peptide Sequence Number=SeqID_129016
aactctgaaggattggattgtgcgtgcgcaggtgcaggagatgaggcttccctcaacnctggtgttgctgatatttgcatttgttggaggaaatctgctcatgggcatctcctctaatgcaagaagcgccaagaactccacagatccagggcatggaaacattgagttaaacggcaggaaactaaaggaacgatacactatccggaagacaaggggcctggaaaatattaggacggatgactaccagcccgttgatccaagcccaagctccaaagccaccatcagaccaggggatactcctacgaattcgttcaggagatcgaagttgaatcgatgctgaattctcatgtggtcttgcgaacggatgcatcggtttggaaagccaacatggggtttgctaggaaacgctgaacgaattcggg

SEQ ID NO: 63043 - DNA, 240 bp, Setaria italica
  Peptide Sequence Number=SeqID_129017
aaacaatattttttaaataagcacaaagacaaagtataatgtctgatctaataaacaaaaaagaattgtgaatcacatgacagaggtcttctttttcttactcgatcctggctatgtgtggcatagcctgtcaattcaagtttgcccccaaaaagtacagttcctcctggaccatgaccgtgcatggataaacctaagtggtcacactggtcacgtccatgtcaaaccacaaagcacccc

SEQ ID NO: 63044 - DNA, 148 bp, Setaria italica
  Peptide Sequence Number=SeqID_129018
atgttccgtaggtcagcagggagaggttagcctctttgatctttggtatggcagcacctgatgggggtgaacggggtgatcgtcgacctggtgccagagatcactgaggccgtctccgagctcatcgccctgccggagcctgacccgg

SEQ ID NO: 63045 - DNA, 240 bp, Setaria italica
  Peptide Sequence Number=SeqID_129019
ggggcgttcccaatctgcattcataagcaagaaagatataatcagatgctacttaatccaaattgcttatatcacctaaggtcgagatggtgctctgcttttaccttccccttctcattttgtggtccatactggacgaagtcttccaacccgatgctgcgctgctcatgcgaaaattgcagagcaaataccctgtaagtatgctgaacacagcgcaagcattcgtttcatgtttatgaa

SEQ ID NO: 63046 - DNA, 373 bp, Setaria italica
  misc_feature (136)..(136): n is a, c, g, or t
  misc_feature (180)..(180): n is a, c, g, or t
  misc_feature (203)..(203): n is a, c, g, or t
  Peptide Sequence Number=SeqID_129020
cattgaattgtatatctttcttacgtagctggcagctaaacatttcttttggaaatgttgcattatgtgctagaatatgcatctaacattaccttttctgaaacaggttcactgacaacattttcttactttttanatggatggttgtacgcatcaaatttgaagagaagaatattttanattacagaacatcaataaagggntgaggcttggaagtataaatggattgcggttcaagcagcttaagcttgtcattcttgctattttttcattgttgtttctttttggaatgggacaaaggcacatactatgattctggaatcctccaacctgatccattggtttgactcatccaggtcatcttaagcacaat

SEQ ID NO: 63047 - DNA, 226 bp, Setaria italica
  Peptide Sequence Number=SeqID_129021
tactaatgaattctggaatcctccaacctgatccattggttttgactcatccagctaactcaaagtttgtagatcagcatacatcctcagaagaagactttccaagtgcggacccattgcctcagtcagtagttaaagtagaaaagcaaattactggtgcaccaccaccactgactatggtaggctattctgttgatgttgcagatgaaaacgagtgccgcctcct

SEQ ID NO: 63048 - DNA, 284 bp, Setaria italica
  Peptide Sequence Number=SeqID_129022
gagaagcacagcagagtacgaaggagaggtaatcgaggtagcaaccagctgcaagctagcaggtagctttggatcggcgccgagatgagcacgggcgcgcggccggggcggcggttcacggtggggcggagcgaggacgcgacgcacccggacaccatccgcgccgccatctccgagttcctcgccaccgccatcttcgtcttcgccgccgagggctccgtcctctccctcggtacgtatgcatggtctcattgacaagtgatgatccattatatgcacatata

SEQ ID NO: 63049 - DNA, 248 bp, Setaria italica
  Peptide Sequence Number=SeqID_129023
cggcgcgccgagatcgtcgtcgtccgagagggagcggtcctgctccgcggcggcgttctcctcgtcccagtcaacattattgtcgtggaagctgagcatgctgccgaggttggagaagagcatgctgccgccgcccgggcccggcggaggggcgggagccttgatgtcgtgcacgctgtcgaggagcgcgacgacggggtcgcggaggtggtcgagcacgctgccctggcgcgaacccaggccgccga

SEQ ID NO: 63050 - DNA, 220 bp, Setaria italica
  Peptide Sequence Number=SeqID_129024
tggcggtgcatgacgacggcgcggggcttggaggagggccagagcaccagcgtgtgcatcgccgtggacgggcgggcgcggatgaacccgcaggtgcccgacggctacaccggcaacgtggtgctgtgggcgcggccaaccgccacgagccgctccttctccaccgccccggagctggcgaagtcgatgaacgacttgaagtaggcgtcgttgatccgcg

SEQ ID NO: 63051 - DNA, 413 bp, Setaria italica
  Peptide Sequence Number=SeqID_129025
ccgtatggtgatcaagattacttggccattctttggagatcgcaaacattgccaccggcaaatcgaagtgacgaagcctttccaccccaaggtgcaaggtttcgaagctctgggttggatccggccaaaatctctggaggggaagaagaggggacgtcgaaccggaggaaaatccacaagaggaagcagctcccggtcccgctcccgcctgatgctcaacttgaatcttcaggggaaggcaagcttgagaggatttatattttgtcagagctgctgctgccgcctcatgttgctccgtttaaagttggaataaatatagctacaatgtagctgcgaacatgtccgctattttgaactatgtttgttctttatgtaagacttgtctagacttttatctagttctctgaacaaca

SEQ ID NO: 63052 - DNA, 404 bp, Setaria italica
  Peptide Sequence Number=SeqID_129026
taatagacagaacgaatgctcgtgtccaagaagggcggccggtgggtgctccaccccgaggacgacaatgccagcgccatcgcgctagacgagatgaggcaatttttcttcaacgagatcgtgctctccgcgccgcctgacgccgacggccgaggctgcgtggccatggcggtgctcgcgggctccacggaggtcgccttctgcagggtcggggtcgacaccgcctggacgctgctgcagaccaacctggaatgcaccgtgggctccgtcgtctactgccaagggaggttcttggcgatcgacagcaccgtctgcaggtgcagcaacctcctggacccgacgccggcatggtccagggtgaaggacgccggcgatctgacactgttcgtgtcgacccatttccc

SEQ ID NO: 63053 - DNA, 183 bp, Setaria italica
  Peptide Sequence Number=SeqID_129027
agcgaattctctggctggtgttcgtcacttgttctctgctgctgctgctgtgtgtgtctgcttagaaagaaggagagggagagatggcttgccctgcgcagtccatgctctccgccagcggctgcatcttcctgaggagcaagcctcaggcggagagcatggactgcgcagggcaagccatct

SEQ ID NO: 63054 - DNA, 197 bp, Setaria italica
  Peptide Sequence Number=SeqID_129028
tgcgaattctctggctggtgttcgtcacttgttctctgctgctgctgctgtgtgtgtctgcttagaaagaaggagagggagagatggcttgccctgcgcagtccatgctctccgccagcggctgcatcttcctgaggcttgctcctcaggaagatgcagccgctggcggagagcatggactgcgcagggcaagccat

SEQ ID NO: 63055 - DNA, 271 bp, Setaria italica
  Peptide Sequence Number=SeqID_129029
caaatcccccaatcttcatccacatccactcgtctctccgagctagtcgagcggcaaccccacccgatcccgatggcgcccaaggccgagaagaagcccgccgccaagaagcccgcggcggagggggccgagaacacggccgccatcgcggcggggctcgtcctcatcaccgtcgccgcggcatcctccatcctcatccaggtcagcaagaaccagccgcaggtggcggaggtcgcctacaacggccccccgctaagctactacgtcgcca

SEQ ID NO: 63056 - DNA, 258 bp, Setaria italica
  Peptide Sequence Number=SeqID_129030
tgcatcttcctgaggagcaagcctcaggcgagcctcgtgtaacgcttcgtcgtctccgtctccttcgtcgccgccaccggcgccggcgcaggaggactccgactgcaacgaggtggagtgcgctcccgagaaggaggtcgggagcctgagcgccgagtggctggcggaggagaggaccagggtcgtcggcaccttcccgcccaagaagagaggctggaccggcctgatcgagaaggacaccgccggccagaccaacat

SEQ ID NO: 63057 - DNA, 491 bp, Setaria italica
  Peptide Sequence Number=SeqID_129031
tattttcctttggttgttgttcaacatagtagttcaggttgcggaatgtaagtgcaagttgcatagtaggcataaccatctttgctgcaaagaagatgaagatgtaggagattacgtattggaatggattctggttgagacaaaactctagtagcgtcatatttttgttgagaaatttatgcaaattttatagtaatatggtaccttactaatatcaatgtaatattttagtaggctctccactgctatgctaataagggggcaggagggtggttgatgggattaccttcttgggtcatgtttgcacgatcattagattttttgtggatatcaatctcttcttcctgtccgttaatgcagcactttctaggaatgcttccattatattcaatagctggagcggatagaagcatgctctgtttcttcagtaaataatataatttatagtatcctatgcacttttagtagtgaacttacgctttctataagct

SEQ ID NO: 63058 - DNA, 314 bp, Setaria italica
  Peptide Sequence Number=SeqID_129032
gtttgcacgatcattagattttttgtggatatcaatatcttcttcctgtccgtttaatgcagcactttctaggaatgcttccattatattcaataggctttctataagctaacgctaatccaaaagcaatgtaaaacaaaatgatgtatccaagcaacgctccaactgatatccaataaaaataccaattgtagtagagaccatgattagtcaagatttgattccctattgttttggtctgcatagtttccttttgccatcttggtgctaagaattcatttatggccatgctgatttgttgctattaggtccta

SEQ ID NO: 63059 - DNA, 374 bp, Setaria italica
  Peptide Sequence Number=SeqID_129033
agttcagtgccgctattgatccatcaccagcgcatcatacaatagcaggaagcgggtcacatctaatcgtcgtcgtcaaggacacttcgacgcctctgaatcgtaactttggttttgcttgcttgtgtgggtgttaattttgctccagaagtgagatgagcctttcttcagataccttttcagatattccaccagttttgagcagctctcagcagaacatcctccacccctctagctttgtcaggttttgtaccaaagcttattgtcgggtagtagtccttttcttcttggtctttctagttaagttattttaattttatttttctttttgggtttttctttttaagttttttctttttatttttttcttattt

SEQ ID NO: 63060 - DNA, 354 bp, Setaria italica
  Peptide Sequence Number=SeqID_129034
agaatggagtgaattaaggtggcagcggcaagtgagagcactaacaagttgaatcatagctaactaactactttaggttcagtggaggagatcattgatgcatattcttttgaatatcaggttaaggaagcacacttcagctccatagtgccatgaagaaacagatcactgctggttactttcatcttggttttactaaagcaagttgctactgcaaattttccagtaccatgagatggttttatacggtcaagtcaagaagcataatcggatgtgctggccaagcatctaagtactaacatatattctagatctgtaatatatactcgtgaaactcaaaccaagcagcacact

SEQ ID NO: 63061 - DNA, 143 bp, Setaria italica
  misc_feature (123)..(123): n is a, c, g, or t
  Peptide Sequence Number=SeqID_129035
cagcacatccgattatgcttcttgacttgaccgtatattctagatctgtaatatatactcgtgaaactcaaaccaagcagcacactgaagctgtacattgccaatgaagagaggtgaaactanaattgacaggtgcatgagtg

SEQ ID NO: 63062 - DNA, 135 bp, Setaria italica
  misc_feature (128)..(128): n is a, c, g, or t
  Peptide Sequence Number=SeqID_129036
cggcaagtgagagcactaacaagttgaatcatagctaactaactactttaggtatgagaagtaatctggcatgcacttatgtgccatagttaaggtcacttggttcataataggtttcctgctatganaagtaat

SEQ ID NO: 63063 - DNA, 450 bp, Setaria italica
  Peptide Sequence Number=SeqID_129037
tttaggtaacttaattcttatttcttactagttctactactagttagtcggttttttaaacgtcctaattgtttgtaagtcctattagtttgacgttgtatctgttacaaatcttatttggtgtttgttttcctttataaatagaaatgcattcacaactttgtattgcagttctgtatgcttattatttttaatagttttgaaatgcaatttctattattaatggaattcaatgttcatgttttttattgtaggtaataattgtttgtggaggatcgtatagacgtgggaaagctacttgtggtgacatggatattgttataactcatcccgatggagaaaggtataccaaaaagagtttggatactttatcctcttcactatcttatatttttaaacacaagagtagaaaaatgttctatttagcttttaaaaatttcttctagtcat

SEQ ID NO: 63064 - DNA, 318 bp, Setaria italica
  Peptide Sequence Number=SeqID_129038
aagacgtgggaaagctaacttgtggtgacatggatattgttataactcatcccgatggagaaagtcatgtaggtttttacccaagttgttcaacggctgaaggaattaactttttgtagggaggatctcatctttagtcatacacagtgttgatggaacagatagtggggttgacacatatttggtcttgcacatatccaggacgtgagctgcggcaccgtattgacttgaaggtatacccaagggaacagatatgcatgtgggctgcttgcatggactggaaacgatgtactaaaatcggcgactaagactattagc

SEQ ID NO: 63065 - DNA, 418 bp, Setaria italica
  Peptide Sequence Number=SeqID_129039
tcggtagtagttgtagtacttgtcttctaaggtattggtcgttagacgttgattgcaactgattcccagcatcagtaatcctttcgcaatccacaagctcaagtgtctccaggaattgtgcggacgagaggcccttcattccctcatcgtcaaaattgttggcgccattaagcatgagaacacgaataggacaagactgaaccagcattacaataccctcctgtgtgaagcctatttctgatggatacctactggaacaaaatgtaaaggtgagctcaataacttcaagcatatggcaggtcagacctagggccttaaggctttcatcagtcagtggtgtcctgaaatccatgcccggtccagagcgtagaggcatgaggcgaagtgagaggcttctaaggttgctgcagttccgaat

SEQ ID NO: 63066 - DNA, 231 bp, Setaria italica
  Peptide Sequence Number=SeqID_129040
cgcccgccggtcgtcggcccgcccaagggccccgtccacgcgcccgccggtgacgtacccgccgatcacgggcccaccggtcacagtccctccgatcaccggccccccagtcaccgtccctcctatcaccggcccgccgtcgacgacgcctccggtgaccggcccgcccgtcacctacccgcccgccggtgacgcacccgcccaagaccaagcccaagaaccccaagccgc

SEQ ID NO: 63067 - DNA, 283 bp, Setaria italica
  Peptide Sequence Number=SeqID_129041
gcacatctgaaccaagtcatagcatattctgactacatcatgatgtagtcagaatatgctatgacttggttcagatgtgcaagtccattggcatggatttcaatgcaacaccagtgatagaagttcagtcagcttctcccaacaacatagaagctgctctaaggaatgttcacattaatgctcccaatctccagctgcttattgtgattcttccagaaatttctggtcattatgggaaaattaagaagttgtgtgagactgaacttgatatagtatctcagtg

SEQ ID NO: 63068 - DNA, 343 bp, Setaria italica
  Peptide Sequence Number=SeqID_129042
aatagtaaattaatcggaataattacattgctcttgacaaaagttggccagttgctatattatttggtgtaaatggttgagcatgttttgatgtttgttctcaacaattcagcatttttcaaagttacataatcagttaggcatttcaaatctgagcaagtgaagtctttgctcttctgccctttggttaagcatgaacaataattaaaatgagctggatattctgatgctttcctgcagtatgtagaatctggataacaaaaactccacgcatgtaggtatgaagaagggaatacaacattgcggaaagtcggtttggcatcagactttatatggtctgatg

SEQ ID NO: 63069 - DNA, 459 bp, Setaria italica
  Peptide Sequence Number=SeqID_129043
tagtactaaactaaactaactaaggtaccaatatggtggaagggtgggaaagtcttaaccaacgatccagcttgccccaaacaagaagtaatagtagaaagggtttactaccggaaacaactggtacttatgttggatcacaggttgtagcgtcgctagcgatcgaaaccaacttaagggagtatggaccatatggagaagagcaggacatgcatttcagcattcccctccctaagaacgctagcgttgtgggcttctttggaagtgctggcaaccttcttgatgcaattggcgtttacgtgatgaatggttccatcccaaactagtgtgagcagcgcccgaaaaggcacctaaaaataataaaagtcaggatttccgtcctcagcgagttcagctttccagtgtttcggtcgtaataagatgatcatgcattatgcatgagcatggtgtgtgtttgtg

SEQ ID NO: 63070 - DNA, 479 bp, Setaria italica
  Peptide Sequence Number=SeqID_129044
gcctcgacagcgtgatgattcgagctggtgaaatcatcgattcatttggcttttcctatattgatcaagctggtcagaagcacactctaggtccatatggtgggaagggtgggaagcttaccacggtaaataacattgcatgctgtatgtctcttgcatttactaaaagtagcatagaggtctagtaacctgcaggcaatttttcttcctgcagatccagcttgccccaacagagtatgtgaagggtttctccggaacaactggtacttatgttggatcacaggttgtagcgtcgctagcgatcgaaaccaacttaagggagtatggaccatatggagaagagcaggacatgcatttcagcattcccctcctaagaacgctagcgttgtgggcttctttggaagtgctggcaaccttcttgatgcaattggcgtttacgtgatgaatggttccatcccaaactagtgtgagcagcgccc

SEQ ID NO: 63071 - DNA, 363 bp, Setaria italica
  Peptide Sequence Number=SeqID_129045
aacggtaaaccggtaagggaacaaaacttaaacaaaacgaaataaaagttacgacaaccaattaggagtatgtgaagaagttttctggaacgattgggcgagctgttggctctggggaaatgttgtttgtagcgtcgctagagattgaaacaaacgtcaaaaagtatgggccatacggaaaagaggacaacgaatatccattcagcatcccgttgccagagaatactagtgtcgtgggatttttcggacgtgcagggaggctcattgatgctgttggtgtttacattatatttattgcaaatcccctctcattgatgcaactgaagaaacctcaggtaacaaagatgaagaaacctcaaagac

SEQ ID NO: 63072 - DNA, 392 bp, Setaria italica
  Peptide Sequence Number=SeqID_129046
tggttcgtctagggtaagtattcgtaagttagtagtagtaccctttccctattctaaagggttttggtaccctattgggggttgggagttgaagcgaatccatttgacatcacagaggaacccaagcgtctcgaaagcgtgacggttcggtctggcgctgtcattaattcatttggttttacctatgttgatctagcaggccagaagcacaccgttggcccagttggaggtaacggtgggaagcttactacgatccagtttgcaccaacggagtacgtgaagggattctgtggatccgttggtccgacacaaggaacatgggttgtgacgtgtctcaatattgaaacaaacctaagaacacacgagatatatgaccaagggaacatgtttct

SEQ ID NO: 63073 - DNA, 373 bp, Setaria italica
  Peptide Sequence Number=SeqID_129047
tagttaagttaaccccctttgttactacttggttattgtcgttggtagtccgggtcttggttctacctactattaccctattcggtagttcgtagctcgagctgccctccaagaaatttggtcgccggctcgtgcccgatggcgaagaagagcccggccacctggaggtcggagacctcgccgctgacgacgttcttgaccttgacgccggccaacgggcccccttccgcgccgccgtaggcctcgacgacctcggagtcccagacaacctggatccttgggggttggagagcgcgcgggcctgcatgatcttggacgcgcggaaggcgttgcggcggtggatggatgtagacctgtgagccgtacttggtga

SEQ ID NO: 63074 - DNA, 278 bp, Setaria italica
  Peptide Sequence Number=SeqID_129048
gctccaactgctgaacaaatcacagctatcaaggctgctattgcgaatacccacactcttgaggaagctgcaaggctagagaaggcattgagcactggctgtccaggagtaaacgccttaacaggtaccttctttgcctcttcctctgcctccttcgagtgaaacttttgtgctgccgcaactctctcctgttgtttcactttcttgaaatccaacaaacgcaaatgcttcaatttatggatgacatatagcctgtagtctggctgcttagttacagt

SEQ ID NO: 63075 - DNA, 267 bp, Setaria italica
  Peptide Sequence Number=SeqID_129049
ccgttccataaagtttgggaaagggttatcttcattatagtaagaatcatcaacaggatctgctctactgttctttacaacttgaggatacacaaaaggatctcggttttgctttatgctcataagtgaaggccttaaaattccaatatctacaaatgctcctcccatatgaggaacaagctttgttactatacctaagtaaatactatcacactgtacattgttcttgattggttccagcaggagttcaactagcttcccatcttc

SEQ ID NO: 63076 - DNA, 320 bp, Setaria italica
  misc_feature (1)..(82): n is a, c, g, or t
  Peptide Sequence Number=SeqID_129050
nnnnnnnnnnnnnnnnnnnnnnnnnnnnnnnnnnnnnnnnnnnnnnnnnnnnnnnnnnnnnnnnnnnnnnnnnnnnnnnnnnttttttttttttttttttggttcacacaacgtcatggtttggcaaccctttattcattcggcacacttatgcctaacaagctcccaacactcacatacatgactaccgaattattcttgaggcagtacagggacaaggagaagcttctccgtccggtgcacggtcaccccaaatgattctgacatatcaatccctctatccttcgattcaggtggcagctcccagttgaagtggtaca

SEQ ID NO: 63077 - DNA, 392 bp, Setaria italica
  Peptide Sequence Number=SeqID_129051
ggccagatcgttggtcaacttgcaaagctccatggctgctatgttgtgggaagtgctggaacaaatcagaaggcacacactcatactagtcccttcttttctttttaataaaaattcactccaactagtattagttgcttgcattgcctgtgtagttgcatcatccaatatccacaatatatatctttcaggttgagctcctgaaggaaaaacttgggtttgatgcagctttcaattacaaggaagagcctgacttgactgctgccttaaaaaggtcagaatttcttcttctgcagaaaatgatatcagcttgatttagcattcatgaacagctgatgagccaagctaggatcgtacagaaaagaattaaactttgatggatgatgaacctc

SEQ ID NO: 63078 - DNA, 167 bp, Setaria italica
  Peptide Sequence Number=SeqID_129052
gttaaatactactacctctgtttcataatagttgtcattctagctttgtcctaagtccaacatttctatctttgaccattagttcctaaaaattcgcatagtttaacaacatgaaacaattgtattataaaagtatctcatgttgaatctaaaagcataaatcttat

SEQ ID NO: 63079 - DNA, 226 bp, Setaria italica
  Peptide Sequence Number=SeqID_129053
cttgcagtttgatgtacctatatagttaaatactactacctctgtttcataatagttgtcattctagctttgtccttagccaaacatttctgtctgacaattaattttctaaaaattatatagtttaccatcataagatttatgcttttagattcaacatgagatactttttattaattactaatttgttttctattgtttgtttaaacttattgtcgtaattttt

SEQ ID NO: 63080 - DNA, 484 bp, Setaria italica
  Peptide Sequence Number=SeqID_129054
tgccttggatcaactccctcggccaaaaactcagttcttgaggcatcggctttcagacgaacattaacaacctgatactcttcagatatccaaaattcaaagcagaattggtcatgcgacgagtttaaatgacatcccagaccctagtaccaccaaagtaattatattaattatgacttgagaaaaagattaagttaatgtatggggaaaaaagaaatcaaaaatacaatgggctcaccatgaaaataggataaatcagttgtggagtgtgaagtaaaaaaagaatatgtccttttgtcataaacatagcaggccaagaatgtgcataatcccaatggagagcacattgcagcaagcaatgatgtatgcacaaaacataagaaaaaaaggaaaaaagaactacagctttacaaattttaccttgaaacttccacatcgtacgtaacaaaatggacaaagaaaaatcttcaagtgactggacaag

SEQ ID NO: 63081 - DNA, 405 bp, Setaria italica
  misc_feature (58)..(58): n is a, c, g, or t
  Peptide Sequence Number=SeqID_129055
gtcagatctctcaacagatagcttccttgacttcccaaactgtagcactgttggtggnggaagattgctaccaggtacagtgtggctagggtcaactggagcatctgctacagaaaacccgttctccctttgcacataatcatcttcagacaatgcctgagcatcttcatgtgatcctgattccataatatgtgaatgtacatgcctgaatttctcagcagtcgtttccaaccgtctacgcttcttgaatctcgaccggtaggaaaatgtttggtgccttggatcaactccctctgccagaagccatgtgtgtgaaggaagatagtgtgcagcccaaagccttcagatgtccagcaatattagcagcctttcattctgtttgcttattgtagatcatgaactgat

SEQ ID NO: 63082 - DNA, 310 bp, Setaria italica
  Peptide Sequence Number=SeqID_129056
tttttttttaaaggaaaacaatacaactaaataattacaatacaaaatccaagtatcacccaggatacagtatattgttacagtttgggaggtgccccctgttacgtcatctcttttcagcaacaattaatacaatcgacatcaatcatgaatgaaacaatgaccctcctctcttcccccaggaacagctttacgaacagttgttccccccgaagcattgaaattacttcttgtcttggaaaccttggaggattgtgttgcacgtgtccatggtgcgagcgtctagaaggctgtggttccagagtttaat

SEQ ID NO: 63083 - DNA, 213 bp, Setaria italica
  Peptide Sequence Number=SeqID_129057
ttaacaaagaaataataccaaaaattacaaaagcagaattggtcatgcgacgagtttaaatgacatcccagacccatgaaaataggataaatcagttgtggagtgtgaagtaaaaaaagaatatgtccttttgtcataaacatagcaggccaagaatgtgcataatcccaatggagagcacattgcagcaagcaatgatgtatgcacaaacat

SEQ ID NO: 63084 - DNA, 313 bp, Setaria italica
  Peptide Sequence Number=SeqID_129058
acttgtaacaaattgtcaacttgggagaacaatttgcctcaagtgggttctgtcattatgctcaaggccatgaaaacatcaccatattatgtttcacagctgaactccagattactttggtgactatttccttagagatgttagttcatagttgacaccttcgcttgtaaaaactatatttccaattaatcaaggacaccaagacaaaaagctgacagatgaagaaaaaatgaagtctcctactgaccaagactctacggatttcactgctgtgtgttgctagggaaatccgtagagtctcctactgtaccaa

SEQ ID NO: 63085 - DNA, 268 bp, Setaria italica
  Peptide Sequence Number=SeqID_129059
gccggttttgggtttctccaagcatgctacatgcacgtatctccctagtttgtcaacctgccttggctcccccccttcgtgtccttcttgcagatcttgcaggtcttatcaacccaaccatcctccacgtattccccatcgacttcaacatatgacttgaagaaatcctggtaggtgcccccaattttcctcctgagtgctccgtactgttcccttgtcatcctccctccacctttggtcttctccctggcctcatacagcagctcgg

SEQ ID NO: 63086 - DNA, 205 bp, Setaria italica
  Peptide Sequence Number=SeqID_129060
ccgaaggactggtaactacaagtgaagtggtggaagatgttagtatcaagaaatatttagaggttgaaaatattgctactgcagtagaagacattggtgttgacaagcctacagagattgaagatgttgttgactttaagaaagtacgttagaatagtacaaagacctagactaaagaccaaacaaagacgaaggttagtagaca

SEQ ID NO: 63087 - DNA, 362 bp, Setaria italica
  Peptide Sequence Number=SeqID_129061
gattgccttgcttctcctccaccggggcggtggaagcgccgcccagatcgccggaggcgaccggcgacctctctaactccgaccggtaagttagttatctcctcccgtcctcctcacccctccccacggttggcgatttctccgacagggcaaaggagcctcatcatcagaagccagatcttgctccgttactccccgtcgacccgatcgaggcctggaaccgcagagggcgaggagcgagctccatccaattgagtcttcccctgctgctgctgcggcggtgccgggccgggccctcccctatccaacctctgtcgctcccccttttctcccccgattcagtcctgccgacccgtttcgcc

SEQ ID NO: 63088 - DNA, 427 bp, Setaria italica
  Peptide Sequence Number=SeqID_129062
aacctctcgctcccctctccttctccctctcccttcctgtagctagctaggtaggtgcttaattagcttgcgcacacacgagctagtagcagcagctcgaccgatcgagagcagcagagatcaatgagcatctcggtgaacgggcagtcgtgcgtgccgccggggttccggttccaccccacggaggaggagctcctcaactactacctccgcaagaaggtcgcctcccaggagatcgacctcgacgtcatccgcgacgtcgacctcaacaagctcgagccatgggacatccaaggtatgaacctagctcatggccatggatcggagagctggtgatgacctggtgatcttgaccggcctccatccaactgcctcgttgcaccacctgcaccggtgaccgatcgatgagttcagttcagttgtacgg

SEQ ID NO: 63089 - DNA, 422 bp, Setaria italica
  Peptide Sequence Number=SeqID_129063
ggcagcagccataattactctcctgtttattattgctctcaacttggctattgggatactacctcatgctgacaactttgctcatattggtggattcgcgacgggtttcctcttgggttttgttctgttggcaaggcctcaatttggatggatggaacgccacgagttgcctcagactagccaacctcccaagtacaaagcataccaatacgtgttgtgggttgtggcgcttgtcttgctgttgatagggtaagtgaatgatcagaatgtggttcattataatttgttgttgccacagtttttatttgtcaaacatatcgaaaatgttgatgcaaaatatgcttgattctggattaatgcttaacacatctttagacgagctactaagccacggttttattcctcttggattaatgtttatg

SEQ ID NO: 63090 - DNA, 244 bp, Setaria italica
  Peptide Sequence Number=SeqID_129064
aagttttaacctactagaaatacgaattagaccttagacttacttacctaccaaccggggcggtggaagcgccgcccagatcgccggaggcgaccggcgacctctctaactccgaccgggaggctttgtgcaatcagcaaccgttcctggcaacacaacatgggggtgccgagctggagagcggtgtgcctatcggtgctctgcgccgtgctgttcttgcgcccggccgcgggcatccgcttcg

SEQ ID NO: 63091 - DNA, 249 bp, Setaria italica
  Peptide Sequence Number=SeqID_129065
gtcagtgtactggtgcattccatctattagtgcttggtattttgaatggttcaataaagtttagcaagggttgcaaccatggttctctgtcttagtaaatcatactttggtggttgtagttcatgaaatgcaatttctgttttattgcttccatcataaagtcacagaagatgctttattggtaaacaggttatttctgataaatgccaccgcgtacaccttcctgggactatccagcaaccaatgctt

SEQ ID NO: 63092 - DNA, 221 bp, Setaria italica
  Peptide Sequence Number=SeqID_129066
tttatattctttatttcaaatatgccaaaaataataattcttttctttgataacacgctacgcagggtgacttatccaattctatctttattcggaagaatctgctaagatcgactttggagctagttcattcaaaggaattctctcttttgaatgagcaaaatgttgttctcattcctgaagctattttctcactgtgtgctgctttttcgcattaccaa

SEQ ID NO: 63093 - DNA, 443 bp, Setaria italica
  Peptide Sequence Number=SeqID_129067
ggaacaagagccctttgattctaacagaaataattatattcagctggagaacatatgaaaaggcatttcaaaggtacatggaatatattatcatcaagagtgtcagtgaattcaaatctgtgcaggaatgactacatcagttgctacaatatgctgaaatcaaatgtatatcatgcttaagagttaactttagaaaatactgagattctaagcagtaagataaaatgccaatggagctataatactatcagttaaagttttactattcaaggcatgatgaataacttgcacagacagaagatgaaactgcatgagacaagcaacatcaggcatggcatccaatttgcagtgccaaacaaaaagttagcagtgggctagtcaaataaactgagaacagtagaactgcatgagactaggcaacgatcaggcatggcatccaattt

SEQ ID NO: 63094 - DNA, 400 bp, Setaria italica
  Peptide Sequence Number=SeqID_129068
gcaacatcaggcatggcatccaatttgcagtgccaacaaaaagttagcagtgggctagtcaaataaactgagaacagtagagcaatggactagagcagctcacgtagaaagatcagcataagatacatacttacataagcattccagatgatgctgggattacagactactatctacactcactgatttcggcttaccaagctcaaatgtgcagcaagaacatccctgatcctctccccctccttgtccttctcaccctcaaagtccacaaactcatcagcatcagcattcccctgaatctcctcaggcatcggctccccgcatttgatgagaaaattgtggagcagacaaccggcaactacaacatacggcaatgcctcttggcactcacccttccagc

SEQ ID NO: 63095 - DNA, 182 bp, Setaria italica
  Peptide Sequence Number=SeqID_129069
tttaagtatccaacctcctgtaaggaagtctaattgtatcaaagtgatgtagacctgtaacagtgatggtctatctttgctcatacattcatacagcacttgagagcagaattctcgtaaaattgtcctatttgtctattcttgtttccgttagttcttatttggttaagttaactagtatt

SEQ ID NO: 63096 - DNA, 365 bp, Setaria italica
  Peptide Sequence Number=SeqID_129070
atcactctcgacttctcgaggcactttttgcgcaggctgatggtaaggagtcaccaccaatacaacataatcgcagagtacaccatagtgatcacactgagtatcattacacaaccagaggaacataattacatgtagtagcataagtgggactgaagcaaaacttgtgtctagcactcagcgtgacagataaaaaaagctaattcaagctgacaaggaaaaaagtgcaactgcttcaagagtcacaacgatggcatgagcatacctcaagcgcatccattcctagagcactccttttaactaagaggatgtcatttccatcgaatgtcatcgcagccttcagttttaagggcaaccttaccttc

SEQ ID NO: 63097 - DNA, 477 bp, Setaria italica
  Peptide Sequence Number=SeqID_129071
acacaaatcacattatcaatagagcacacataaaactcatgtgcaagcagcatacatatgcaagggcaaaatggacaattgacatcttctatacattctaaaaagctaggagaagccgttttgccaaacgttttcctacaaaataagccagagccagaaaaaactgcttttccatatgagctagagccagagctattttttcatgagccaaagccgtgacaaacgggccctaagtgtgcaaccagaaaaaataaaatgcttctaatggcctacttagaagctaccaccaagaagtcaaaactgccggcaatcctgaaggtcctgaaggtaaaagaggaacaaaaataaagaaactaaagaattcagcacgacataattcaacatgattggcggcagttaagtatcccaaatcaaaggacaaacaagaaaacatgtgtcaattgtcttgtctaagtctttaaaattttactaaggtta

SEQ ID NO: 63098 - DNA, 383 bp, Setaria italica
  Peptide Sequence Number=SeqID_129072
cagggcagcagatcccgatgcacctattcagattattaatgaagatcaagtagtgaattctcctgaattagtggagttaatggagggagcaggtttaaccgatttcgggttacaacaattgattgaatctgtcctggatgagcaagtgtttgttctattctggaatagatcatttcatacaatgattaaagttcataatcttcaatattgtcttttgagaacttcaacaaactttgctgttctttttttagtatttcacttgctttttgatgcagcatgacggcaatttgtatgctctacacaacagcacggataacatgtctacaaacattgtatggagagagttcaatttacaaggtgaaggcagttctttaactactcac

SEQ ID NO: 63099 - DNA, 418 bp, Setaria italica
  Peptide Sequence Number=SeqID_129073
tctccgactcagtgtgagtagtagtatggcaagttcagccaatgaatatgtttcgaagagatatggaaaatattctattgaggaagtgatggaggttgtgattgcttgtggggccggctatgatagcaatgaacattacatggcgtctgaactgtttgtgaagaaggagcaaaagggagatgttcatgaccttgcctactaatgagattaggttcaattggcttaggaggaagtacaatgataaatatgaaaaatagaaattggcttagtgagagtgatgtcatttgtgtatgctactattttatttttgtcgcatgtgtggtacattttatttattgcattttatttatgtatgacagttgtatcttacatttcatttatgtcaatgttcacagatgtcttcaaagtgagtctgatg

SEQ ID NO: 63100 - DNA, 407 bp, Setaria italica
  misc_feature (4)..(4): n is a, c, g, or t
  misc_feature (16)..(16): n is a, c, g, or t
  misc_feature (19)..(19): n is a, c, g, or t
  misc_feature (21)..(21): n is a, c, g, or t
  Peptide Sequence Number=SeqID_129074
tgtntaattgtttgtnttntntattctaaattgtaggtacctactacgtaaggtttgtagtttggttggtagtcctacggtaattcttgctgccgtgggggagcgcgtcacctttgctgggtactccggggagcctgaggcttccctcagcggcaagagcaagacgtgggagaagttggccgccgagctgcacagcaacggcgagcttgtggcgtgctacaaggacgtgcccttcacaacctcggctgggatctgcaaggtcaagacaatagcaaatggagagattcgctaggcacatggccgaactgcaaccagctgaccgaatctttgcctggtttcattggaagtgatagttcctgatttccattttgcaaagttttggtgtttccatttgaaaatttgcattt

SEQ ID NO: 63101 - DNA, 455 bp, Setaria italica
  Peptide Sequence Number=SeqID_129075
tacctaagtaactagttggttctagtcggttcttcgttgtaaatttctattaccttctttgaagaaatgcagaaccggaaagtttgcgttctctgcaacctgaaaccggtggcaatgcgcggtataaagtcacacgcaatggttttggctgcatcaaatgaggaccacacgaaggttgagttggtggagccaccggaatctgctgccgtgggggagcgcgtcacctttgctgggtactccggggagcctgaggcttccctcagcggcaagagcaagacgtgggagaagttggccgccgagctgcacagcaacggcgagcttgtggcgtgctacaaggacgtgcccttcacaacctcggctgggatctgcaaggtcaagcaatagcaaatggagagattcgctaggcacatggccgaactgcaaccagctgaccgaatctttgcctggttcattgg

SEQ ID NO: 63102 - DNA, 460 bp, Setaria italica
  Peptide Sequence Number=SeqID_129076
agaccttacactttggatcattagttcattggattcaacatatgactgcaattgtcacattgatcacctcgcgcagcttgattagtacatccttctgtaggaatacccctcatgttcgtgaaacagatcactttttcttggatctccctctattgaaagacaagttggtaaactatatcaatgatacttcagtagctggtatgtggagtcaaaatgccattcaagcgacaaatgcatggttgaaggaaggactaaagccacgctgcatcacaagagatcttaaatggggagtccctgttccaatcgagaagtataaaggttttctatgtctggttcgatgcgccgattggctatgtgtctataacagcatcttatacacctgagtgggagaagtggtggaagaatcctgataatgtggaattatttcagttcatgggcaaagataatgtgccatttcaca

SEQ ID NO: 63103 - DNA, 273 bp, Setaria italica
  Peptide Sequence Number=SeqID_129077
acgtagctctccacagagaaaaataatgcgggtagccaagctgagagaaagctcgaaagcagcagctgatgctgaagccaacaaagtcgctaaccagctcaagggcacgaaattatctggtaataaatttggagattcttatttgttcttcttggttggctagaatcattagggagaatagctttttagttgcacatttggagacaaacagaaaaaaatccgtgttgcctgttggttacgtttccttttccttaaaaaaaaatctatgatttg

SEQ ID NO: 63104 - DNA, 262 bp, Setaria italica
  Peptide Sequence Number=SeqID_129078
tacttaaattatgaagcaggaaaattctccaagagtaaaggtatcggagtttttggtaatgatgcaaagaatacaaatattcctcctgaagtatggcgatactacctgcttacgaatcgccctgaggcgtcagatacactctttacatggactgatttgcaagccaaatcgaacagcgagttattaaaaaacctgggaaacttcatcaatcgtgtgctaagctttattgcaaaaccagctggagctgggtatgattcaacta

SEQ ID NO: 63105 - DNA, 110 bp, Setaria italica
  Peptide Sequence Number=SeqID_129079
ggtgtgctcaagtacaagaagatggcagaggactttgtccgcagttccgggataccgttcaccattatcagtcaatcttccaggcctgataatggtgaacggtatccgac

SEQ ID NO: 63106 - DNA, 223 bp, Setaria italica
  misc_feature (23)..(23): n is a, c, g, or t
  Peptide Sequence Number=SeqID_129080
ccagccgattcagacatcatggntaaaaggtccgcatcatttctgtccttgcactttgtgtagcaattgtttgttgtggctacctttgattaccgtagtagtcgtgctatttcgttcatggacgtcggcgtgagcaggtcaccgcggtagatggtaatgttctctcaaagctatatctatgtttttgttttactttgggagcgttgattcctaaaaaggggta

SEQ ID NO: 63107 - DNA, 481 bp, Setaria italica
  misc_feature (53)..(53): n is a, c, g, or t
  Peptide Sequence Number=SeqID_129081
cgactcactgctagcgacctagacaaatacaaggcacatgcatggcttctttntcccccatgtcagccatacacacggcaagggcttcagaagcattcagctgatgctcgtgcattttcgttcatcaagattcttaacctgatgcaaaacatgagccaccctccacaaatgttatttgtggaaaatgtagttggatttgaggtgtctgatacacatgatcagttgctggaggtcctttcaagtctcaattttaacttacaagaattcatcctaagcccattgcagtttggtgtcccatattctagacctcgctacttttgtttggcgaaacgagaacctatggggtttcaaaatgcatcattcaacaagaagctgctctggacacctatgtgcgtaagccagacaatgaacagtacatcacaggatagtgacctccgaactgaagaagagctggatccagtatgtaaaccagtaaaagact

SEQ ID NO: 63108 - DNA, 256 bp, Setaria italica
  Peptide Sequence Number=SeqID_129082
gggctgccacccgcaaagtgttcccaccagttgacggaaccaaacatctgtgtttccttcagaaacgagaaactgtgtctttgtggtgcattttatgaaaactccactggattgtgtggagcaattatgtaactactgccaattttgtattgacaggcgaaacgagaacctatggggtttcaaaatgcatcattcaacaagaagctgctctggacacctatgtgcgtaagccagacaatgaacagtacatcacagg

SEQ ID NO: 63109 - DNA, 437 bp, Setaria italica
  Peptide Sequence Number=SeqID_129083
cccaataatacaatatagttatatgaaatgcatacagtaacgatggtagctggtcaaacaatggatgcggtagacaagagtaacgacctcactataattttacaatagggggacataaaaattaggcaagtaattgctggatgtccacttcatagttttcaagtccacacaatgtagttggtcaatctccacatggacaacagagccacgctgacataatgatgtttctcgtctggccaaccggaacacaaactcactttcaaccaataactcatggtatcatattccagacaatccttttatgctccagaaattttttgaacttcattatcatgtccagtattaagatgcatacctggggtgtagaaacttgagaatggatgaccaactttgaagggatatgttttaggaagtttcttaaccttccttgactcaag

SEQ ID NO: 63110 - DNA, 357 bp, Setaria italica
  Peptide Sequence Number=SeqID_129084
ggtaatgtcagcctcgacactttgaatgccacactggatttcacacaccacaatttgttttcctcccgcaaatagaaaaatagcttccccgatctaatgtttagttttttttcttgcagcgccttgatgtctgcattctatctattcaagattgcaaccggtggcaaccacatcccaccaaagaaagagtaaaccaagatttaacttgtaatatatgtttgattgaactcaaaagatcacgaccgattatgttgtctagttgcacggtaacttcagggactagtgttgttctccatttgtaatttctgttagaatgtaccatggagctctgaactttgacaagaataaagattaaag

SEQ ID NO: 63111 - DNA, 222 bp, Setaria italica
  Peptide Sequence Number=SeqID_129085
cgggaggaaaacaaattgtggtgtgtgaaatccagtgtggcattcaaagtgtcgaggctgacattacctgagaccagcaactcctacctcgccctcgcgctcgagaccctttgtgcattcgccctgacctacgttatggggcagagatacctagaaacttcaaaggtaatgccagctggtgttgttgctggtctcaggtaatgtcagcctcgacactttgaa

SEQ ID NO: 63112 - DNA, 266 bp, Setaria italica
  Peptide Sequence Number=SeqID_129086
agaggcgccccgaagatgcacgacttctgcttcacgatcccctacgggttcgccgtgctggccggcggcgtgctgggctacctccgccgcggcagcactgcctccctcgcggggggcgccggcgccggcgcgctcctcctcctcgcggggttcgtcagcctcaaggccttcgagaagcggcgcaactcctacctcgccctcgcgctcgagacccgtacgcgccgccccctccccttcactctcggctgcgcatttcgatttgtttg

SEQ ID NO: 63113 - DNA, 279 bp, Setaria italica
  Peptide Sequence Number=SeqID_129087
atagaatgcagacatcaaggcgctgaggaccagcaacaacaccagctggcattacctttgaagattgcaaccggtggcaaccacatcccaccaaagaaagagtaaaccaagatttaacttgtaatatatgtttgattgaactcaaaagatcacgaccgattatgttgtctagttgcacggtaacttcagggactagtgttgttctccatttgtaatttctgttagaatgtaccatggagctctgaactttgtacaagaaataagattaaagatgtgatt

SEQ ID NO: 63114 - DNA, 254 bp, Setaria italica
  Peptide Sequence Number=SeqID_129088
aggtttgagaggagaacatatgccaacccatttgaggtttatcgaactttacgaatagtgaaccctagcccatacatggcgtatgtacaggtagaaatagaagcatgaagcacgcacaatttgaacacagttctgcgcactgatttttttgagattctaatcaacaccctttaattgtctatttaggcaagaggctgtgtcctagttgcatctagccctgaaattcttacacgagtcagtaaggggaagattat

SEQ ID NO: 63115 - DNA, 150 bp, Setaria italica
  Peptide Sequence Number=SeqID_129089
agaagagtgcgctcaaagcagagaagataggactatctgagcggttgtctccattgcggttagtaccctctgtatcacaccgtgacttgcaccagtccactcagctccgccatggccacgctcgccaagcacctcatcctctgctcctcc

SEQ ID NO: 63116 - DNA, 487 bp, Setaria italica
  Peptide Sequence Number=SeqID_129090
gtgacgtgatgtatacataaagggattaaaaccagggattaatatatgaagcaatatcaactcaagaaagatgacaacatactaaggttagaatgttctgagcattggtcctctttggatagcatggcagactagtgacaaaatattgaactacagtcctagtagagaacttacagttaaatgtggtacttgcttatatctaactttttaaaacaatttattgtttcttattatcagtgctgttgcatatatgttaataaatatctccacagaaatgttatttggtgttgctgcatatgcaggtagaaaatattaaattacttgaaaagtaattatatttctattgtagttttagtagtcagttctggtatacttattatattttttctatttataaatatatgtacttattaaattttcgaattatgaaacgtatcaattgtcttcagtagtagttgataatgatttcttactaggtatttataag

SEQ ID NO: 63117 - DNA, 416 bp, Setaria italica
  misc_feature (107)..(107): n is a, c, g, or t
  Peptide Sequence Number=SeqID_129091
cagctaattaattagtacaatatatagtccatgtcgtcagtatttttcttccatgttgtcacagtgtatatatgatatacccaatcaataatcatcagtgttatttnacccccgatcgacgagctcacattctcctgccaccagttcctgatccctttggcaattgaagtagacggcggcgaccggcaggccgaggttgtagagctcggcgaagtcacgggtgctgaagttctgccgccaccctggggcgtacaccgtctgccggccgagctgttggaagagcaggaacaccagccgatggattccgagcaccggccgtgggctctcgtagcacacaatctcagtaccaaaaagaaactacctagtacgtacgaccgggaataaataacaaagtaagaaaccaaagaaccaaagaa

SEQ ID NO: 63118 - DNA, 205 bp, Setaria italica
  Peptide Sequence Number=SeqID_129092
tgttcgcctcaacccatgtacaaggctgctccaagtatgtcctgtataaagatgaactagtaaaatggcgccgtagaaatctggcaacatgttcaagtgcccaacaaattacaggtaccaaaacaactgccacaaaagagtatctcattatgcacaagaaaactcagatggttaggtaataatgtgactgaacttcatattaatg

SEQ ID NO: 63119 - DNA, 273 bp, Setaria italica
  Peptide Sequence Number=SeqID_129093
cggcgcccacgccgctgctggacaccatcaactacccggtacacatgaagaacctgtccgtgaaggagctccggcagctcgccgacgagctccgctccgatgtcatcttccacgtctccaagaccggcggccacctggggtccagcctcggcgtcgtggagctcaccgtcgcgctccactacgtcttctaacgcgtccgtctaggtaccgtctattccttcttgggttacgtttcggttccttaccttagttttcgttttacccgtttcttta

SEQ ID NO: 63120 - DNA, 430 bp, Setaria italica
  Peptide Sequence Number=SeqID_129094
ctccagtgcctggaagatgatggtcttgaatggtagcccgacgaaggagaggttgggtgcgacttggcgggaagacgtgcctgtacaatggtccgacgcggttgtcgtcgacagtgagcccgtccaggtcgaggaatgggaaatggtagcgataccctgtgcagtaaagaatggtatctgcagctactgctgaaccttcagcaaaatgcactcggccatcgtcttggatgccatctatctggtcaacaaatattcataacggtgcatagtttcatatactcatacatgttagcttggaggctaagatgttcaagagagctaacaaagtccagaattttgaacctctgcgtgcatccagacattctggtagagttcgatcttcccaagcctgtcttccgagtatcttgccgcgatgtgcacttccttggca

SEQ ID NO: 63121 - DNA, 252 bp, Setaria italica
  Peptide Sequence Number=SeqID_129095
tcgagccagactgcaagaagtagaaggcagaaggagaagtacctgatctcgaaatggttctgggacgcgatagttgtggctgtgaatttgctttccccgccacttgtcaattcctttaacacacaagaatcgctagatattttctttcttcttacctgagattgagaagaaaagtgaaaggagtacctcggatcttgggcaccagaggcgccgtgcagtggccattgcagacgacgacggcgtcgaacacct

SEQ ID NO: 63122 - DNA, 325 bp, Setaria italica
  Peptide Sequence Number=SeqID_129096
gacggagaccgatgaggagtcggtgtagacgaagtgaaggagggatctgaacacgtgtgcttccatgtcgtcaacagctatgacaacaccgcctgtggcggcctccttgccctccttcatttcaccgaagagctgtgcccggaacaccggtgaccgcgccgcgagaacgcaccggtgcgcagagaacgtgccagtgccgcctcctcctgctaccttgaaggtcacgtccgtgccatcttcgcacgccagcaggttgccgaggtgctggtgcatttgttacggtgcccccttctgatctgcaccagcaggttgccgaggtgctggt

SEQ ID NO: 63123 - DNA, 354 bp, Setaria italica
  misc_feature (217)..(217): n is a, c, g, or t
  Peptide Sequence Number=SeqID_129097
tttagtttactttaaagtttacttaggttcttacttattctattctaggtaactaacataaccataccaatgaccagttacttctcccttgtcatcagatctgaaaatgatgacgtttcctgcgtacttgtgacctcccacgtgtgagcatgcactgacagccaccttaccaatacaaagtcccagaccatttatctcttccttgaacctttttaancaaagcaggtccacaaacaccacatcttttgccctgcttccatggctgcaaacaaagacgtaggaaccgctgatagcctcaggacatccaggaagccactcagtatctttcacaagtacttcttcaacaaagttgtc

SEQ ID NO: 63124 - DNA, 348 bp, Setaria italica
  Peptide Sequence Number=SeqID_129098
ccaggtgggcatcgggcatgtctttgtgtgccccttcttgctgccggcgccgctctccttgtcattctccttctcagagcccttctggttctgctcagctgcaacgctcttgtcctgcttttcctttggcaggtcagtttggcagcaagtaaagccaccattgccctggcagcatccaccacctgttgcaggtgggatgcaagaagcaccatctgttccagtttcttcaagggattctttggcaccatttgtcatgttcctaagctcgagagctttgtctttcttgtcttgtcttccttctagtattaaaccctattcttgcccctccatagatggtccacaattctc

SEQ ID NO: 63125 - DNA, 441 bp, Setaria italica
  Peptide Sequence Number=SeqID_129099
ttgacaacgaacacacatcatggttgcaacatcgattcatcaaatgtatcaaatacaatcatggtaagaattgtttcacctgtgaatcaaaagttactaatgtggttgtatccaagcaggttatgtcctcatcattctccccttcttggctgcaagtcgtcctcgacttgctccaatggcattctaaggtgcttgtttttgatgttggagcacggagcgatggctatgctgcatggcaacaaccagcaatgctccccttcttcgagctgaccctgttgcatatgggaaaaactagaaaaactttgcaacacatcattagtgttagtgcaaccctctatttcatcatggtattgttgcccaaaaggatatttcagattagagcaaatataaactttatgcaccaaatattctcctttgctgtcgtatttgccaattgcatga

SEQ ID NO: 63126 - DNA, 358 bp, Setaria italica
  Peptide Sequence Number=SeqID_129100
gggttgtactccttaattccttgcttgattaatttggtacatggggcctctcttatatagaggggacacgacttagctttcaacgaacctaacttacttggcttgcaagccatcctaatatctagactcttcctaattcctatagcctaagtagacgggcggaggccggcgtgctacagttcacgcgagtactgttcacgcacgcaggtccttttgggccagttctggcccccttcggcccagccgtcctcgggttagcctttggccccaattggcctagttgggtcttccaggtccgtaacatctcctgctggatttatttagcagcgtgtcctcacgctgcagtgacacccctcct

SEQ ID NO: 63127 - DNA, 468 bp, Setaria italica
  Peptide Sequence Number=SeqID_129101
gctcccgggcttccctcctgcaacctcgagaccagcgtcggcctcttggccgccgtcgccgagcccgcctccgcacgcctccgcgtcgccggacaagtccgcgccggcgcgtccggcatcatggcagcggtgatcgcggacctcaacggtgacggcacgagcgacaccgaggtcttgatcgcctgcaagcgctgccaccgccgtttgaacgacagggccgtctacctttacatgtaagcctcgagacgccattgtttagcttgctctcctcgtgcacgacgttttcagttttcactgcacccatatgctagctgctgactactctttttttggctggcagggacaagggattctgcatgccggagtgcaggtacgagtacttccaacaagaactctacgagaagaggcggaggctcaccgccgagacacgggagagcaggagggcctcgaggaatggcaacgcggacc

SEQ ID NO: 63128 - DNA, 256 bp, Setaria italica
  Peptide Sequence Number=SeqID_129102
ggaatgtcagaatcaataaggtgactgttttgcattgctactggtatggtaatgttaagggaagttcacgacaagggacttgccttttgtagccagaactggtacgtctcggtgacgtttgttcgtcgccacgcgtcgaggtcgacgatgttgatgccccacgaccacgcgcattgcgagctgtggacgcccgacacggcaggatccgagaaattcaggtggtcgccgaaggtcttgtcgatgcagatgccgcctt

SEQ ID NO: 63129 - DNA, 246 bp, Setaria italica
  Peptide Sequence Number=SeqID_129103
aacagacaaaagcagaaaattgtaaattatgcataaccaggcaaatatcacttcattaacacaaaaaatgaacattttgtcaaattaagctaagaataatatatttgacagagaagagatatgatttaagaactaggcgaatgccagaacctgagagcttgatagtcgctagctctcgttcgacgataacaccttcatcgtccccattagtggattcaatatccaatgctgacattacatgtacag

SEQ ID NO: 63130 - DNA, 409 bp, Setaria italica
  Peptide Sequence Number=SeqID_129104
taatttgtaaatgtttcagatccgagtatgaaatagtccagccattggtgatatgacgtaagcaaatgacccagcaagctctcatggtacacaagaacctacccttattttacttgtacagactcgtatcaaaatgacccagcaccgaaaacaccagaacacatgctcatcctctccaggttctaagcaggcagggtttagtacggctccactggtgccctgaaattttctccggcatagatggccgcggcaccgagctcttcctcgatcctgagcagctggttgtatttggccaggcgctcagaacggcagggggctcctgtcttgtattttgtacccgtacttagttgttcgttaactttaagtttaaagttttaacggttttaaaagttttaaaacttttaaaact

SEQ ID NO: 63131 - DNA, 218 bp, Setaria italica
  Peptide Sequence Number=SeqID_129105
gaatagtcatttgctccaagcttttgtttacaccagccccagtcgttggaggttccatcaagctgctgaaccatgaagttgtcaatgtcaacctgctcagtggggtcctttccaataattgctggtccaataatgctatttacattgttcacggccttaagaacaccaattgcctctcacggtctcagctcaccgccggcgagaagcgcaccccctcc

SEQ ID NO: 63132 - DNA, 214 bp, Setaria italica
  Peptide Sequence Number=SeqID_129106
tatgcaaaggttgaattgtgagcagagtagagaagagaggggatacctttccagtgtatccagccttttctatagctgccttcaacagctcaaggccctctttgttttcctgaatgttaggtgcaaagccaccttcatccccaacatttgtggcatcttgaccatacttcttcttgattatgctctgcatacagaagctacattctgactacac

SEQ ID NO: 63133 - DNA, 274 bp, Setaria italica
  Peptide Sequence Number=SeqID_129107
ccccagaaattcaaactagctatccacaaaggaatacaccctaacatgttattgttatttcaacgccttgttgcatgtttgtacataccacatacatgagaatatattttacttttatattcacaaaaacatccttcgacaaatcatcatctccaaaattctaaatagcggaaggtgtggccaacgggacactcaagctggtcggcggccactacgacttcgtcaacggggtgttctccgtgtgggagaaataagccacccggtttattcatca

SEQ ID NO: 63134 - DNA, 347 bp, Setaria italica
  misc_feature (124)..(124): n is a, c, g, or t
  Peptide Sequence Number=SeqID_129108
cactaagaaatagaactaaaacaacaccattaagtgttggtaaaattttattttgatatcttctgcaatttgttctttagtccacatcctgatcatctgttggctcctctttaatcctcaattntgggggccttcctgttgaacggttgatagtcctttgagttggttgcttctttgcctttagccttcctgcttctgatgttttcttcttccggctcatatggcgaatctgagccagaggtgtcaccatcttgtgggttgtttataatttgatcatactctatttgtggtgtccctctaggtcgggatgatcttgtggccttcgcataaggtgtctcatttattat

SEQ ID NO: 63135 - DNA, 450 bp, Setaria italica
  Peptide Sequence Number=SeqID_129109
gtatttttccgcttacttgctctgacaactaatttgtttgtgctttatgctagcacaagatggtgacacctctggctcagattcgccatatgagccggaagaagaaaacatcagaagcaggaaggctaaaggcaaagaagcaaccaactcaaggactatcaaccgttcaacaggaaggcccccacaattgaggattaaagaggagccaacagatgatcaggatgtggactaaagaaacaaattgcagaaaatatcaaaataaaatttttaccaacacttatggtgttgttttgttctatttcttagtgtgctgttactaccagcaaaaataattatctgtaatagttaaactagtattaagtcattgctgcttcacatttgatggttgatgtttcaatttaaactagtattaaccatcaatatgtagcaacagacatggcttaatactag

SEQ ID NO: 63136 - DNA, 331 bp, Setaria italica
  Peptide Sequence Number=SeqID_129110
acccggcgctgtggctcgccgcgagaggaggtcgtcgtgcggcgtggcggccgggcgggggcgtctccgcccttcttgccgccggtgagctcgagcttgcgcgccttgatgacggcggacaggtagcggtcgacgtggtggacgctgcgcgccagcgtggtctcctggttcttctggctcgtctccacgcaccccgccgtggagcgcaagatcgtgcgcgagctctgcgccgtcctggccgcatcccgcggcgccgacgacccggcgctgtggctcgccgcgcccttcgacttcgaggagctcgaccgtctcgtctacctcaaggccgcgc

SEQ ID NO: 63137 - DNA, 258 bp, Setaria italica
  Peptide Sequence Number=SeqID_129111
gaagcgcgagaggaggtcgtcgtgcggcgtggcggccggggcgggggcgtctccgcccttcttgccgccggtgagctcgagcttgcgcgccttgatgacggcggacaggtagcggtcgacgtggtggacgctgcgcaccgccatgtcgcgctgggtgtcgcgatccatccacggccggctcctgcccatcctgggggacgccaccgcggacggcaggagcgtcgacctccaggacctcctgctccgcctcacgttcga

SEQ ID NO: 63138 - DNA, 214 bp, Setaria italica
  Peptide Sequence Number=SeqID_129112
aaggctgatcatgcatgatgattatgcatcttttatgtgcttcgtttgtgatttcgtattttgccctatatgatgaacattatatcaaagctatggatttatctccagatgaagcttaatgtcatagttactctgatagggcatgaatactcgctttttcaatttacaatactttaagaaataggtaataactagtaattagaaggtacaagta

SEQ ID NO: 63139 - DNA, 413 bp, Setaria italica
  Peptide Sequence Number=SeqID_129113
gcggccgtcggcgccttgctacgccaagtacgacaacggcgacctcgcctacttcgacaacgtggtgcgcggcaacctcagcaagggcgcgcttcgcggcgtggtgggtggtgccttctacctcctctaccgcccgcaccgcccggccttcacgctctccgtggcgcacgtcaccaagctgagcctctcctcctccgccacggcgcccgcgctcaccgacgccatcgacgtcacgctcaccgccaagaaccccaacaagaagctcgtctacttctacgacgacttcaccgtcacggccgccaccgccgccaacgccgtcccgctcggggaggcctccgtgcccgggttcgcgcacgaggccggcaacatcaccgtcatcaaggccaccgtatccgcctccgcgctcgcgatcg

SEQ ID NO: 63140 - DNA, 318 bp, Setaria italica
  Peptide Sequence Number=SeqID_129114
cttgatgacggtgatgttgccggcctcgtgcgcgaacccgggcacggaggcctccccgagcgggacggcgttggcggcggtggcggccgtgacggtgaagtcgtcgtagaagtagacgagcttcttgttggggttcttggcggtgagcgtgacgtcgatggcgtcggtgagcgcgggcgccgtggcgcacgtcaccaagctgagcctctcctcctccgccacggagagcgtgaaggccggtggtgccttctacctcctctaccgcccgcaccgcccggccttcacgctctccgtggcgcacgtcaccaagctgagcct

SEQ ID NO: 63141 - DNA, 375 bp, Setaria italica
  Peptide Sequence Number=SeqID_129115
ctcattgtgctggccttgccactttgcttctatgcctagtctcctataccccaccccttcatgtatgcacttatgtttggggaactgctgtatgatgtgtaaaagtacaactcaagataagaccagcaaaccaaactgcatatagactgtccatgaaacttaatcctattcctagggtgaatgcaagacctgctgcaagcagaatgctccaaatgatgtgaatgtctgtctctgatgagtctgttgagacttgaaatctatgaagcagatgtgaccatcctgatttgatcagatttaccgtgcgtgcttcttgtagtctatctgctaattcgtctactactttgttcgttctttgttttcttttttgttttttaa

SEQ ID NO: 63142 - DNA, 277 bp, Setaria italica
  Peptide Sequence Number=SeqID_129116
ttgttaagttactttaaattaactttcctcatgttggtgttgatcatcaccaactccaatagcattaggatcaatgtcaccatttccattggttttactgctattggagttggtgatgatcaacaccaacatgaggaagaagctaatacttcccttgaagtgaatggtgtgcatggaagcttaaatgcacaagctgttgctgctactagcattggcaacgatatcaattgggatgaatttgacatgttgtatgattctttgcacatacgtcactgag

SEQ ID NO: 63143 - DNA, 329 bp, Setaria italica
  Peptide Sequence Number=SeqID_129117
tggtccagggatatgaggaagcacctcctagcacttcaagtcacaccttggctgcaaccacagtacaagtgaagcttgtggaaacagcacgagggcaaaaagtgcctgtcagagttgatcatgttgatatcttctttcatcgattgtagaggaagggtggatcttgaccaactatgcgtttgctttgtaagcagttgcaagcttagggtactgagctccgtgaggttctatgaggctgaacacctacatcgtcttccaaaggtacaaaatattagcccaatgtcaatgatacaggtgttcagcctcatagaaccttctacggtagtctt

SEQ ID NO: 63144 - DNA, 329 bp, Setaria italica
  Peptide Sequence Number=SeqID_129118
aaatattagaatattaaaaaatgagagtgagttcaaggtaacagttttgagtgtttataatatcttgtttcacttgcaccgtagatacactcttaaatttgtttaatggaacctaagtttgagatatatttttaacatgaaaatatgtattcttatcacttcctctatatatttataaatggtgacatacatcatgcgtatataccttaatgattagaataatatattggtgtatcttgggatatatttttaaacatggaatatgtgagtaatttagatgtaaacttaagggtttactttaagttattttttataatgtaagtggtggg

SEQ ID NO: 63145 - DNA, 244 bp, Setaria italica
  Peptide Sequence Number=SeqID_129119
attttcatgttaaaaatatatattcttatcacttcctctatatatttataaatggtgacatacatcatgcgtatacaccaatatattattctaatcattaaggtatatacgcatgatgtatgtcaccatttataaatatatattggtgtatcttgggatatatttttaaacatggaatatgtgagtaatttagatgtaaacttaagggtttactttaagttattttttataatgtaagtggtgg

SEQ ID NO: 63146 - DNA, 351 bp, Setaria italica
  misc_feature (6)..(6): n is a, c, g, or t
  Peptide Sequence Number=SeqID_129120
ggttgntagcaattgctgtagggataccttgtatggtcttgtagattgtttgaactttttgatgatacctgctgtatctatgaatctttgcctttcaattgagcaatagtggtaacattgttaatagtttcattacgttgcactggtaggttaacatactactctgctgattaacattattactaccttttaaatgtaactgagcgattcatatatggatcatggattaacgatcacgtagtaacagatagaatcaaacaaggagagaactacagttactacgtgtatcgttaatccatgatccatatatgaatcatggattaacgatcacgtagaaacagatagaatcaa

SEQ ID NO: 63147 - DNA, 432 bp, Setaria italica
  misc_feature (76)..(76): n is a, c, g, or t
  misc_feature (88)..(88): n is a, c, g, or t
  Peptide Sequence Number=SeqID_129121
aaaaatcaaactattaaacggaatgttcaagagaacaggaaaagtaccaacaagatgtgcacatacaacataaatntgggaaacaggntaaaaaaacagatagatagcttgaatcgaactagaggcaagagattaccttccaatctcagaaatggtagctctatatacattgatgatgacacaactactctgcatatcataaagaatttagcaaaagaaagaacgaaaaaaatgcaaaaagcctaaagaacagaatggcaataataactacctatactggaataacacagctgaggagtcttctgctggcaaacatattgaaaatgcatgaatgatgctatctgaatacaagactcccattcccttgaggtcttaatttctcgataagcgattgataaaatgacctgaatgccttgatatcatttccctgta

SEQ ID NO: 63148 - DNA, 196 bp, Setaria italica
  Peptide Sequence Number=SeqID_129122
aggacaccgaagccaccacctaggccaccgtcgccaccagtgcccatgccagcaccggggacgccgaagccaccagggaatccaggaccgaggtcatgagagccgccgccgcgtacgatcaggccgcccgacagccgcaattgaaggataatcctcccatcttgttatcgaacatagcaatccatcagtaatcgca

SEQ ID NO: 63149 - DNA, 378 bp, Setaria italica
  Peptide Sequence Number=SeqID_129123
agccaccacctaggccaccgtcgccaccagtgcccatgccagcaccggggacgccgaagccaccagggaatccaggaccgaggtcatgagagccgccgccgcgtacgatcaggccgcccgacagccgcaattgaaggataactcaataccgtagaataagacaataacgtaacaaatagaattaaagtaagtaggtttacaaattaaatgcgattactgatggattgctatgttcgataacaagatgggaggattatcccgattggtagacgtagattgggcataaatcttacataagcctagttctgtgggtctttgtctgcaggatgtactgaagatcatgtcatgtatcagtgaacattattacattgcattgtt

SEQ ID NO: 63150 - DNA, 397 bp, Setaria italica
  Peptide Sequence Number=SeqID_129124
actaagggaataaaaatgttttgcaactctgatggaattgatccactgaaattattatatcccagatccagcatctttatatcctgtagatgtcctatttctgtaggtatgataccatagaacgagttgttgtgaagaatgctgtatgggaaaacaaaactaaatcaggataccaagcagttggtaaaccttccaaaaaaggcaaatacaaaactgcagatacaaacattgaaataagatctttttggttgagtaggcatgcactattcatcagatgaacttccaactgatgataggaagaagttctttaaattcaaatttgtaaaccacaggctacattacccaaggatttttatttaagaaaaaggtcatccaagataggatttgtaagtggata

SEQ ID NO: 63151 - DNA, 393 bp, Setaria italica
  Peptide Sequence Number=SeqID_129125
ccaggaggtaccttttattttctaccatcgaggtatgaaagccgagctattaccctatctttgtatgggagaaacctttatattatgggtctccgggagccccatgaaacttttgagatcaaggagcgaaatgagaagagaaaaagttatatgtcaggagaaaagatcaagatacgtccttttaaaaagaactacatatttcttgcccctaaaggtgacgttattaatgttagattgggcttatttgctctgttggaggcatttgaagttctccacaagtgttgtggtgaaactcagggggtcaagcaagcagtgtcagcatttgctgtgcatctatgtgaaggactaggaacgacctaccaaaagtagtagttagaaaggaatagtactaga

SEQ ID NO: 63152 - DNA, 387 bp, Setaria italica
  Peptide Sequence Number=SeqID_129126
tgcttttcaacatttcaaagacagggacaaaggctctgcttgttctgctgtacctggaggatcatgcatgcaacaaggaaccaagaacctgttttctggacaaaatatcaagattctatcctccaagcaacaaggaactgagaacctgttttctggacaaaagatcaagattctagaacctgaagttcccgttgtatcaacagcaacgcatggcaaggataatgacttcgatgctagtgagttttctggttacgttccttttgttccgtttacatgtaaactaccaatgcaagtacatgaactttcatattccttagtctctagtattaggcttcttctaaaccagcttttcacattcctgtttatgaatgtggtctttcaaatttc

SEQ ID NO: 63153 - DNA, 399 bp, Setaria italica
  Peptide Sequence Number=SeqID_129127
ctgcgtggagaacctgacgccgatgcagctcagggccttcaccaagaactcgagcaggacatgcaagcacaccttcacctcgccgggtgacctgaactacccggccatctccgctgtcttcgccgagcagccgtctgcggcgctgacggtacgccgcaccgcgacgaacgtcggacctccgacttcgacataccatgtgaaggtatcggagttcaaaggcgccaacattgtcgtcgaaccgagcaccctgcacttcacaagctcgaaccagaagctgacctacaaggtgacgatgacgaccaaggctgcgcagaagacgccggagttcggggtcgtcttgttccttggtagttgtacggtcgttccttacttatttcgtttccggtttagtttcccttt

SEQ ID NO: 63154 - DNA, 407 bp, Setaria italica
  Peptide Sequence Number=SeqID_129128
cggcaactcgagcatcccagaccccatgtctctgtgcctgaggggacactgaagccgcacgaagtcgccggaaagatagtgatatgcgaccgcggcattagtcctcgggtgcagaagggtcaagttgtcaagaacgccggtggctgggcatgatactcgccaacactccggcgaaacggcgaggagcttgtcgccgacagccacctgctgcctgcagtggccgttggggagtccgaaggcgtcgccgccaagaagtacagcaaagctgccccaaaaccaaccgcgacgctcagcttcgacgggacaaagctcgggatccgcccgtcgccggtggtcgccgcgttctcgtcccggggacccaaacttacctagaaccctaggaagaatacctacaaagaccggaataa

SEQ ID NO: 63155 - DNA, 394 bp, Setaria italica
  Peptide Sequence Number=SeqID_129129
ggcgttgatgaccaccgcctacgtccacgacaacacgtaccggtcgctgaaggacgcggccaccggcaggcgtccacgccgttcgatcacggggccgggcacatacacccgctgcgcgctctcaaccctggcctggtctacgacatcggccaggacgactacctggagttcctctgcgtggagaacctgacgccgatgcagctcagggccttcaccaagaactcgagcaggacatgcaagcacaccttcacctcgccgggtgacctgaactacccggccatctccgctgtcttcgccgaagacaagaccgtactagacggacgaactaagaaacggtaaacgaaaccgaaacaaaaccgaaacgaaaacgaaaaaacgtaaacggaaaacaaaa

SEQ ID NO: 63156 - DNA, 124 bp, Setaria italica
  Peptide Sequence Number=SeqID_129130
agcagctacaccagcaacatgaataataagcacaccaacattgtggatgagctccaagcatggttccaaagtccaatggtgagtggactgcctcatagaccatgatagatttcatcatcatgat

SEQ ID NO: 63157 - DNA, 344 bp, Setaria italica
  misc_feature (123)..(123): n is a, c, g, or t
  Peptide Sequence Number=SeqID_129131
cataacacaagtgctgcagattcccatagtgcttgacttggctgaggatcatcctggcaattaccttcgaaagttcaaaaatccacctgcatctgctacagccttgggccaactctgtgatangttttcaagagctttaactgcagtttgttgtaagctcaagattccaataccagcaagctgcacaagaggaacaactgcatttttgtagtgatgtcctgttgaaaaatagactacctagttactaagaaagaatagtagaagaagacaacctacaagtagaccaaaagttaagaactaagaaaattaagaacttaagaacgaaagggaaagaaactaacaaa

SEQ ID NO: 63158 - DNA, 202 bp, Setaria italica
  misc_feature (193)..(193): n is a, c, g, or t
  Peptide Sequence Number=SeqID_129132
caaaatgcatttgtaccccccattgtctgtttcaaattattcccacgaatgatggtcactgtcaagcaaccaggcaagcaatgaagcaaactatcagctctctcatgaaaacttgggtaggtactaggtttttctattaagttcttattttttgttttagtttaactttaggttttatggcttcagctgaatntaggtacta

SEQ ID NO: 63159 - DNA, 385 bp, Setaria italica
  Peptide Sequence Number=SeqID_129133
tgataacggaaggtggcttggaattggaaggtctactccattgtccattgtgacaaaaagtgccagaaaaattctccctctacggttaagtggcccgagttgaatagaggtgccaaggcactccaacggaacttcgaagaacaaatttccatggtggccaggagcatgaacatatggaaaactctcaccgataaacagcacaacctcacaataccccggacaggacaagaacttccttgatggtggaagggggtctggaactgagcgaagacctcccaatacaatacagggctgcttcttgcaagaagagggcttcctccaacggtccaacccttttcactttcgggtccgtctcatctcgcctctcgaccaatcttttatgttg

SEQ ID NO: 63160 - DNA, 344 bp, Setaria italica
  Peptide Sequence Number=SeqID_129134
tgttccagaaagctcactgatttaggcaggtctcatttaagttgaaacaaattcgaaagaaattcgccttttgcaaaagatattcagtaacccctagattactggttagtgattgaatagtcaagagatcatgtaagttaccaaatttccatggtggccaggagcatgaacatatggaaaactctcaccgataaacagcacaacctcacaataccccggacaggacaagaacttccttgatggtggaaggggtctggaactgagcgaagacctcccaatacaatacagggctgcttcttgcaagaagagggcttccttcctaacggttcctaacccttttttct

SEQ ID NO: 63161 - DNA, 171 bp, Setaria italica
  Peptide Sequence Number=SeqID_129135
caggtgccggtagaagcggctcacaagatacggtgtgatctcattcgttccagtaggcatagcactaccaaaatcacacagcttcagcttagtttagcctcatttacctacagaacgatacaagtggaaaaaattaagctggagactgaccgtaaaaaaggctagagaatt

SEQ ID NO: 63162 - DNA, 179 bp, Setaria italica
  Peptide Sequence Number=SeqID_129136
cgcttcctcaatgacatcgcttcttacaagcaagggaagtgcgagaaggatgtggccagcactgtggagtgctacatgagggaatacggcacgactggggaagaggcggtggcagcgatcaccgggatggtggaacatgcgtggaggaggataaacaaagtctttgtctattagtaggt

SEQ ID NO: 63163 - DNA, 207 bp, Setaria italica
  Peptide Sequence Number=SeqID_129137
acatcaaagcgcttctcctcaacctgttcacagccgggacggacacgacgtccagcacggtggagtgggcgctggcggagctgataccgtacaacccggaacgtaacctaacgaaccaaaggaaacccaaagaaacaaaaggaaaagaaaactaaaacgaaaacgaaaaccgtaaaacgtaaaacggaaaaaccgaaaaacggaaaa

SEQ ID NO: 63164 - DNA, 496 bp, Setaria italica
  Peptide Sequence Number=SeqID_129138
aagtaatattgctctggttacatgctatggatccatcttttgtattactagtaacaaacttggctgatgtgaaggaaattattttctacaaaaataattctataatatgtggatttcattgtcatgaagtattagagtcaaccctatcaatgtcacgaatatagtatagctctatgattatatcagttgcctcgattctttacttgacttggagtacatggtttgaaacttcaacaattattggtaggaaaaataaaagttttctaaacttgtggttttggttacttgttggaatgagacttgtttcgatcgacagctaatgatctccagagagttctgccttcaaaacaatcagtctgtcatgctcatatgtttgacttaagaaataccttatatgtaaataaagctgttggcaaaacggagaaaatgaataaggccaatgtggatgtgattaattgtattttcgtacaactggggatatgtagtagtatttaag

SEQ ID NO: 63165 - DNA, 227 bp, Setaria italica
  Peptide Sequence Number=SeqID_129139
taagttaattatttgtcttcttggtttactattgtcttattggtattcctattctttttgttatttacttagttaacaaacttggctgatgtgaaggaaattattttctacaaaaaataattctataatatgtggatttcattgtcatgaagtattagagtcaaccctatcaatgtcacgaatatagtatagctctatgattatatcagttgcctgattctttactt

SEQ ID NO: 63166 - DNA, 233 bp, Setaria italica
  Peptide Sequence Number=SeqID_129140
ccgggctggacgtggccaagtggctggaggccatctccaccggcgccgcggggtccaagtcgctggagctgtacgggaagcggatcctggagcgggacatggcggctggcttctacgtccggcacttcgtcaaggacctcggcatctgcctgtcggaatgccaggccatggagctgttgcgcgagcgcgagccccggcagcgacagccccatggcctggcattccgacaggca

SEQ ID NO: 63167 - DNA, 375 bp, Setaria italica
  Peptide Sequence Number=SeqID_129141
tggatgtgtataacgttgccagtgactgttgtgtcgctgttcggcaccagtctcaccgctacacaacagtcactgtggatgtgtataacggtgagactggtgccgaacagcgacatgaaatgcgtcgtctccatgctaacagataaagagaaggaggaacacgatgaggaaaggatcttgtctcttgaatcgctttgcgagtatcatcctcctccatctccaccctcttccttgtcaacataataatcagatcagggtgtagaggaacggatgtcaccgctaatggggtcggtgcatgacactaacatacagtttgaaagatagacatcacagggatcatgctttgacctattttattaactagcatatgtatct

SEQ ID NO: 63168 - DNA, 277 bp, Setaria italica
  Peptide Sequence Number=SeqID_129142
gttcctccttctctttatctgttagcatggagacgacgcatttcatgtcgctgtttcggcaccagtctcaccgctacacaacagtcactggcaacgttatacacatccacagtgactgttgtgtagcggtgagactggtgccgaacagcgacacaacagtcactgtggatgtgtataacgttgccagtggatcctttcttggtgaaagtatgacagtaaaacatgactcttgccttctgagtctccgtacaagtaccagtcactacttgagggggag

SEQ ID NO: 63169 - DNA, 296 bp, Setaria italica
  Peptide Sequence Number=SeqID_129143
tcttggttactttgttacggtagtacttctagtaaggtctaagtagttcattgttttactgtcatactttcaccaagaaaggatccactggcaacgttatacacatccacagtgactgttgtgtagcggtgagactggtgccgaacagcgacatgaaatgcgtcgtctccatgctaacagataaagagaaggaggaacacgatgaggaaaggatcttgtctcttgaatcgctttgcgagtatcatcctcctccatctccaccctcttccttgtcaacataataatcagatcagggt

SEQ ID NO: 63170 - DNA, 343 bp, Setaria italica
  Peptide Sequence Number=SeqID_129144
tcgttcttatctaaatgaagaagtccagtaatactccctccgccaacaccaagtcgttttggtttttccagtgccaaaccacgccaacaaaaatccagtgtcaggcagccactcgcagtcgcccactcgagagaaaggacgcgcgcgagagagagggaccccgatggcgagcgttgaagggaagggggagacggtgctggtcacggcctcacgggcgccagcggcttcatcggctcgacgctcgtccgccacctcctcgaccgcggctacaacgtccacgccggcgtcctcaacccagatgacaaggcggagacggatcacctcctcgcgcttgccgccggcg

SEQ ID NO: 63171 - DNA, 348 bp, Setaria italica
  misc_feature (252)..(252): n is a, c, g, or t
  Peptide Sequence Number=SeqID_129145
agtaatcctacagcgcctacttttggctaatcagaaatattatattttttatctcctttttagtgagtgatggaaaatcaaaaccagttaagttttcactggttttgattttccatcactcactaaaaaggagataaaaaccagtgaaaacttaactgcatagttaataccataaaataagagtggcagtgaatgtcaatgtccaagcgactggtattcaattgtctctacctttttctacatcacctttcncatgtatagaaagggctgcataatagatatgattagtgttttaatggatattctaccactaccaggcaattgctttcctcttgatacattctttta

SEQ ID NO: 63172 - DNA, 355 bp, Setaria italica
  Peptide Sequence Number=SeqID_129146
caagttagtgtgtaactaggaaccttttcattctcttcaaatacaccttatattccattggtacatagctttcatactgttttctgaattcctttagctgaaatgcagggtgttccagaaaaattacatatggattaatatgtagtgcagtaatgtatctattggtcaaaggaagcccacagataaaagtcaacaggaaattaaacctgtttcatgacagcctttctcacatgtttgtgatagtcaggattgcgaaatatctggtctgccaaagctcggaactgacaattcccatccccctctatttgaaattcagccaaaccataaagtaacccaaacctagtacaaaaagaaa

SEQ ID NO: 63173 - DNA, 201 bp, Setaria italica
  Peptide Sequence Number=SeqID_129147
ttggttgccttgaatttcatcgccttctgctacgacactgcgtatccaagacttgagcctgggaatgaacagtttcttgataaagacagcagcactagcaccaaaaccaagcaacagccctgctatgattgagcgagtcactcaatcatagcagggaatccataaacattaccagggaggatagattttctcagtaccgtc

SEQ ID NO: 63174 - DNA, 223 bp, Setaria italica
  Peptide Sequence Number=SeqID_129148
aggttgatttcagtcactagcaagcttgcctggtcactctttgcttgcttttcagccaacagccagaatcaatccactggggtgcagacatacgcaccagtgcagtctgtgctgcctggaaccgctggccctgttgtccttcgtacgcagcccaggttcagctggtaccaagcattccttgccgcagggctgttgcttggttttggtgctagtgctgctgtct

SEQ ID NO: 63175 - DNA, 193 bp, Setaria italica
  Peptide Sequence Number=SeqID_129149
tcagtaccgcccactggaagagcatgcccctcctgctataaggaacgggccagttaacagttcatggagagcttctcagcaaactaacatgtatggtgcatcaaacggtgacttcggctccgggaggtcttcatttgcgccagcaccctgagacacgcaacgaggggaaaggcaaggcacacgaggggatagg

SEQ ID NO: 63176 - DNA, 225 bp, Setaria italica
  Peptide Sequence Number=SeqID_129150
cctatcccctgtgtgccttgcctatctcctgttgcgtgtctcaggcgggtacatctaggagtccgttatacatttctgaataacatctgaatcagaacaacggctcagtagcagaagatggataccagtaattcaataagttgcaaatagtttctatatttatgttaatgctactttgtacacaggaaaacatatcaataagatttcaatggctgtgcatttggg

SEQ ID NO: 63177 - DNA, 358 bp, Setaria italica
  misc_feature (275)..(275): n is a, c, g, or t
  Peptide Sequence Number=SeqID_129151
ttgtttttaagttaaggtattgtattgtaacctttttaacttaacaaagaccctagaatttagatggacgaagcgaaacttatcctaaagaagtgcggtggacttccccttgcaatatccgtgattggtagcttcttgtctgataagcctaaaaccagacttgaatggaggaagttgaattcctaaattgggggattagtgaaccgctacagactatgagaaacatcctgttaggagctataatgatcttccttatcatctaaagtcttgtttcngtacatggccattttccccggaggacctaataacattaagcggaaacgcttgattaggttgtgggttgcagagggttactcaa

SEQ ID NO: 63178 - DNA, 233 bp, Setaria italica
  Peptide Sequence Number=SeqID_129152
acttgcaagacagggagtacaaggtagtgtggctcaccaagatgttgaatttcctgcatgacatggggtttcttgttctgtcatgtatgatgcgcttacatgagatgccttggtggtgcaggggaggactttgcgatgctcattgtcgcaggcaaagcacaggctatttgttgggaatgtgcccaaggggctgagtgaggaggagctgagaaacattatcaaggggaaggggc

SEQ ID NO: 63179 - DNA, 224 bp, Setaria italica
  Peptide Sequence Number=SeqID_129153
gcaattaaatacaaacattatcagctaaatgtaaagtgcagaagtggcaaacctgtgttccccagtatgaattaattatccttgaaacaaaggacagcaggctagcaagaagtggctggttatagtaggccatcagatgctctcctagtcgatgctcaatcagaccagctatgacctggtatcgcaggtttgctgatgttccaaggaagcaactataaacagtt

SEQ ID NO: 63180 - DNA, 246 bp, Setaria italica
  Peptide Sequence Number=SeqID_129154
cggcgacctcgtcttctacttcctgcagggacacctcgagcaggtcaagtgttggaagtatccatggccaaacctttggcagataagagacatgatcattcatacaggcctggaggaggtcctaattatcctcttcctccctacagtggtggttagatggaagatccttatggtgcttttggtggtggcggttctgcatacaaccagacagatgacgaattgcttgagcaaaggagtcaattcacg

SEQ ID NO: 63181 - DNA, 240 bp, Setaria italica
  Peptide Sequence Number=SeqID_129155
ttgcagaaggtttcagaatttggcgagcaccatataagacatctgaagcaactccagctccaatactagaaatgaatccaacaccggcaagtttaagaccgcccataagcactgatgcaaatctctgtttcatgttccagtataaggcctgcaatggcatgaggcttgtaccatctgttttttcggtaacttatttctatcatgcagtgcatgtggctgaaactttgtgttcgctttgta

SEQ ID NO: 63182 - DNA, 474 bp, Setaria italica
  Peptide Sequence Number=SeqID_129156
cctgatcattcacacaggcctggaggtggccctaattatcctcttcctccttatggtggtggctacatgggagatccatatggtgcatatggcggcggcggtcctgcatacaaccagccaatgatatatggtagaggacctgcaccagcaggaatgaggatggtaccaatggtgcttcccgacggtcggctcggctatgtcctgtaagatgatttctccacaaccctgtcagaggtctatatacttgtgagtgcatatctgcagttcctcactgtgtgttctttggccggacaggcaacagcctggtggaatgccgcctccacccccacctaggaggggtggcgaccggcgggatggtgccagaggcggtgaagggagccacagccggcgatatcgcccttattagctttcccttgtgtgctctacctcatcgcgctgcatgatggatttgttaacttatgagacaagatagga

SEQ ID NO: 63183 - DNA, 302 bp, Setaria italica
  Peptide Sequence Number=SeqID_129157
ccttcccctttgataatgtttctcagctcctcctcactcagccccttgggcacattcccaaaccgtaaccgtggcttcctctttgttgagtattataaccatgcctgcgcagactatgccaggcagaatctgtcatcaccgaacttcaaggttgatggaagccaattgactgtcagctgggctgaaccaaagggttcaacagatgcttcatctgcggcttctcaggtgaagactatatatgtgaagaacctacctgagaatgcttctaaagagaagattaaggagctgtttgacaaacatgg

SEQ ID NO: 63184 - DNA, 244 bp, Setaria italica
  Peptide Sequence Number=SeqID_129158
tttaagaccgcccataagcactgatgcaaatctctgtttaatgctccaattctgccctacaatgcccttttgaaatgcattatctggcaatgttcctaaaagtcctttcagaagctccacactatcaccagagccatcatcggcaaaagacaagagcaaagctttgaagacgtcattgtgaccagaaagccatttttgcaccctttatggggtgaatactgtttgtctcctctgcgaatgtaca

SEQ ID NO: 63185 - DNA, 261 bp, Setaria italica
  Peptide Sequence Number=SeqID_129159
gtggcttactatcaagtattggtatcgagttcatccatgtcccttggcataaccatactgcataatttggaacatgtcaccatttgtcacttctattaaaattttggttccatgcttgaatacacagtagggtttcatgtgtaatcaacaaatagtgagtttacccttatgggattattatcccaattttttagaatgaactcactatttgttgaatacacagtagggtttcatgtgtaatgaactcactatttgtttatt

SEQ ID NO: 63186 - DNA, 177 bp, Setaria italica
  Peptide Sequence Number=SeqID_129160
tataaccccacctcgacacattgaaggtgctgctcatagtattctataagcactaagggctccttagctttcaacagcttgtcatctacgagtacttcttttccatcagacctatatgacgaggtatggcagtagccacacctgcccaccagcggaacacccactcttgacactttc

SEQ ID NO: 63187 - DNA, 226 bp, Setaria italica
  misc_feature (225)..(225): n is a, c, g, or t
  Peptide Sequence Number=SeqID_129161
gggggtggtcgtaccgaactttccacctttgatgaaccattcgcaagctgatgctcgtcttgttggtcagtcaagctaacagacagaggagccccttgtgatggaaacccaactgaaactacacccgaactaccctcctggactactctttgcccaagcacattgttgatgcttttgataagcggtcacggtcgccaaggtcctctcggaagcgaaagcgagagng

SEQ ID NO: 63188 - DNA, 398 bp, Setaria italica
  Peptide Sequence Number=SeqID_129162
ttcgtattttgtccggtccacttctcaagattaggcacagcatatcggataacttagaggttgagttgtagaaattccatgcctcaagcatcaatcgcttccttgaacctttgaaatggacaacctgaaaatgagtgtcaagaattagtctgggtgtcacagttaacagaaaacatatacaagaacacacaacttgcaaattaattagattagcctaatcctgaggcccacacaaagttttgcatgtgtagaattgatgaagtggttatcaataggaaagcatagcttaaccagaaaaatatcatgaattttcaaggcatggtacaattacagtactaagaagtttattaattatatgaataggttcatggaaaagaaacgacgaaacaaatctttca

SEQ ID NO: 63189 - DNA, 357 bp, Setaria italica
  Peptide Sequence Number=SeqID_129163
ttatttaaccttttgttctttgttcttacttagttctttgtctaggggttggctgctgagattggaactgcatctgctgtagaacaggatttccatacagaggatctaatccaccattcaaattttgagcctgttggactggcaatagagaagatgtctgcttcaaatgatccccacctctaatttcttccagtgcagcagcagccatctgctggtaagtatctggcttcagacccagcaatggataatctattctcggctgaagccatggtgacactccaaatccctggaagttcaaagctgggcccctctgtttccatctcgaagccacatgagagaagaataacgagcaaactc

SEQ ID NO: 63190 - DNA, 409 bp, Setaria italica
  Peptide Sequence Number=SeqID_129164
ttcttactttgttctttctttgtttagttcttatttcgtttgtcttcctaggttgttagtacagaaggtcgtcccgccacggaccatctgctgcacgtcttgtggcgagaggatctttatgcaccacacgctattcacaaactcctgccacgggtcgtcgccgacgagaagaatatcattttcccggtcgacgaatacaagctgccagcctgatcttacagggtcctccagttggccttcaagaccaaataatcgctcgagctcgctacgtaactcgtagtagctgctgaatctggtgatatcgagcgatctcccgagggaccctgatttgtaaaccttcacaaaggttacaccttgtgatgggttcacgccacaaacatcatcaagagaattgaaggttcctgattca

SEQ ID NO: 63191 - DNA, 349 bp, Setaria italica
  Peptide Sequence Number=SeqID_129165
tttacttttagttttgttttagttttgttttccttttgtttctttattttctttatttactttccttattagtagtcaattcttgcctgccatctagagcttaggctagggctatcgcatagctacaccagctatcataaaacatgtccattaccatagtgatacaatggatcatatctagctatactaacgactaggttattcctcgcgagcgaacgggactagagagaagaccacaggaaatgcggtgactagcggatggcaatcctgcgatgccaaattgctggtttggtttggattccggtcttcatctcagtagtctaggggaaccacaggtgcaatgctgccg

SEQ ID NO: 63192 - DNA, 243 bp, Setaria italica
  Peptide Sequence Number=SeqID_129166
acttcaaaataatgattcttccggactacataagctgccaatggctacaaaatcttgacatgtggaaacaaaaaatgtatgaatgcaaaggatgctgagactattgaaatgctttatgaggaacttaggcagtctgttctttggagcaaggttgaggaattgcagaatgcatcagtgcagcctgaattagtccctgagtggaaaacatggaaacaagaagtcatgaaacagtactttccattg

SEQ ID NO: 63193 - DNA, 253 bp, Setaria italica
  Peptide Sequence Number=SeqID_129167
attttttttcctatgtgactaactaactatggcctatctcttgatgaccttacatgcctacttgttttattgattcttccggactacataagctgccaatggctacaaaatcttgacatgtggaaacaaaaatagtatgaatgcaaaggatgctgagactattgaaatgctttatgagatctggcagactgtggccacggcggcgcgtggggaacgtagggggctggcgggacaagcagaggaacttaggcag

SEQ ID NO: 63194 - DNA, 293 bp, Setaria italica
  misc_feature (234)..(234): n is a, c, g, or t
  Peptide Sequence Number=SeqID_129168
aaaaggaacccaaaaacaaccgaagtacgaaagaaactaccaatagaataatacctccctgctgatggggtagcctttggagaaggtgatgaagagggatcggtagtcgtccggtaatgggctttgcatcgggatccatggggcttccatcaatgggctttgcatcgggatccatggggtcgccatggggttcaggtgggaaggatgctgccattgggtttagtggcaagggtnccaccctcggggtggtatgggataggggagcttaccatcggtggggcaacaggcacacc

SEQ ID NO: 63195 - DNA, 347 bp, Setaria italica
  misc_feature (311)..(311): n is a, c, g, or t
  Peptide Sequence Number=SeqID_129169
ttaaactttactttattgttttaatttttaagtaagtcttcggtacttaaacttaattgcatcactaagtttgtttcaacttggagtcttgtaataactcgtacctctttatgtatgtgttgacgccggatttcgtcatcagaagaatcggcgtcaaaaagggctacagtgcggaatcggtcaagcggcttttacttcacttcagagtggatacgtcggattcccaatcggcagtcctttgccgacgagaaatcggccgagcaggaaggtggactaaagtgggcctgtatgggcttgggaaggtggaaagntaagggtggagttcagcccagaagcgtgggataact

SEQ ID NO: 63196 - DNA, 277 bp, Setaria italica
  Peptide Sequence Number=SeqID_129170
tattatattggttagtcgggtaagacttgctgagtaccccgtactcagggttttccccttgtggttatctttcagaagctccacaggaagctaccaaggaggagatcccgaagacctagagtattgacctgagtctctcaatactctagaaaaccgttatcgacgcatcttctcctaaactacttatgtttaatcttagagctcggctaactatgcatcactaagtttgtttcaacttggagtcttgtaataactcgtacctctttatgtatgtgtt

SEQ ID NO: 63197 - DNA, 258 bp, Setaria italica
  Peptide Sequence Number=SeqID_129171
ttggattttttttgtcaatatttgtatcagacagataattcgatgttgtaatgctagtcgtttccaaattccaaaacggcaatactcactactcttttgagttggacttagcaattgtatatttcatttcacaagtgtgatatgttagtccctccttttcttaatcagttaattgtcttcacttttctgtgatatgcagctttctaaggggctgtacctggaggcattgtcaattgaacttgtattattagctatctg

SEQ ID NO: 63198 - DNA, 483 bp, Setaria italica
  Peptide Sequence Number=SeqID_129172
agtttctctctcacactatttgcgtaagtgacggtttcttgtaatgcattttgcctttatcattgaactacaccatgatgtgggaatatgtgactcgtgtatttgttcatttgcctttttctagctggcttggaaagattacactagagacatacatatcacagttccacatctggctcaggtgaccacatgctgttcctcttctttgttcttacatttgcgcaactggaagttcactccaggttttttttatgactgacattgtcttgttaactttaaataacttcagatcaagggtgcccaatgggcaaccgaagtggctattggcaataatcccaaattaccctttgctcaatttcatgctcactactgctatatatgtcgcggtatgtagatcttcccaacgtaagatactgaagacatcagtatgcagcaacttatgttctcatgtattcccacaggtttcccataggctcttcgaat

SEQ ID NO: 63199 - DNA, 290 bp, Setaria italica
  Peptide Sequence Number=SeqID_129173
agagcctatgggaaaccgcgacatatatagcagtagtgagcatgaaattgagcaaagggtaaatttgggattattgccaatagccacttcgaattgactaacaccttgaaggtggcatttgtacctagtcgtgacaacaagcgcctctcatacaatttttgtggcaggaattgtcatttaacggtacgacaactaataaccttagtaatcatttgttctagttggcatcgcaggatactaggaatctctctttttttttttcttccattttcatgtgttctagttcaacg

SEQ ID NO: 63200 - DNA, 223 bp, Setaria italica
  Peptide Sequence Number=SeqID_129174
tgagatgcatacgtcggctgtggaaatcagatgatgtttcctatttgtctaatagacagattacactagagacatacatatcacagttccacatctggctcagatcaagggtgcccaatgggcaaccgaagtggctattggcaataatcccaaattaccctttgctcaatttcatgctcactactgctatatatgtcgcggtttcccataggctcttcgaatt

SEQ ID NO: 63201 - DNA, 216 bp, Setaria italica
  Peptide Sequence Number=SeqID_129175
atgaaatttgttgcttgcttcttggtagttatccttgtatgggaagttccaggtgtatttgacatagtatggagcccatttacatttcttctaggctataccgatccttctaaaccagatctcccacggttgcatgaatggcaattccgatctggactggatcgctacatttctgagacacgcaacagaggataggcaaggcacacaggggatagg

SEQ ID NO: 63202 - DNA, 316 bp, Setaria italica
  Peptide Sequence Number=SeqID_129176
attcacaagaagggattcagttttgccatcgccatttagctcgcatgtttcatctggattgtcatcatttgctgtttttgctttattcttgtttccatccttaagaccaagaagtttgatctgggcagtggccttgggaaatttatagttgttcttccacaagagcttttgaatatctttgctcaaaggatttctctcatggttcccgtctgagtgattttgaggagcaaagttatccttatgtgtaccaaggataaccttgctcctcaaaatcactcagacgggaaccatgagagaatatctttgctcaaaagga

SEQ ID NO: 63203 - DNA, 190 bp, Setaria italica
  Peptide Sequence Number=SeqID_129177
tgtccgtcttagtaacaaataactacttaaatacctacaataaggttttagttaagacaaatgatgatccagcacccttgttgacaactatatcaattgggcagcccatatttatgtctatgaagtcaactgaacattcattatccacaagttcaactgttcgagctaccgtatctggataaggtccaca

SEQ ID NO: 63204 - DNA, 299 bp, Setaria italica
  Peptide Sequence Number=SeqID_129178
ttgcacatgtgccgctgaatataactcgcagttaagcacgataagcttggagacttcagcagcaacgtgttctaaatcatttgcaagacctctttcaagttggctagtatctgttatccctattttgcgaccaacttcaattttgagggcgcttaatagttcatctctgatgaagcatgcaagtgcctccctcaaatcatcaccaggttttgatttggctgctactgtatttttgaatgcatttgacttgtatgctggtctggaaactttcctggtatgaagtagggtggctcaacaac

SEQ ID NO: 63205 - DNA, 229 bp, Setaria italica
  Peptide Sequence Number=SeqID_129179
ctccttcttcagtgcctcttgatgagctgcattacatcatattagcttgaaacttgtgtgttggagaccaaataaattctgtctaaactgagcagaaggatctgctgataccatctttgaagatcttgtcttgggcaagcgccgcaattctttgcttgagatggctgttaccgacggtgagcaatgatcgctggtgatccaggaaggccacgcgaggggacagtgctga

SEQ ID NO: 63206 - DNA, 411 bp, Setaria italica
  Peptide Sequence Number=SeqID_129180
tctttgtactaaaaattagttcttctaactaacttaaggtctattgtattaaactattttctttctttctattcaagagtggaactccaagtgcatgtatcacactcattccccctcaactgaatcaggaaacatctagatagaaagaactacttcagcagcctcacatagcaacatcctggactccaaaccttcttaagctgacgggatctcgacctcgccgtcgtcgatctcctgctgcaggtccttggggtccttgccgtcgacggtgcacccgacgctgacgcaggtgcccgaggatctcccttgacggtgccggccaactccttggcccatggacctggacctcatggtcctggcgatctcgatgacgtcgtcgaggctgatgttgccgctgtgcttgatgtcttg

SEQ ID NO: 63207 - DNA, 323 bp, Setaria italica
  Peptide Sequence Number=SeqID_129181
ttttttttttttttttttggttcattgaaactctccattctagacttccaaaattggaaaaggatccagtaataacattgaggtctctcagaagacaacactactagaactagacaaaaatagatggaatcgcgttgtttagtgaggtacatcaacatcatgcagaacaaagcaccacttcagcagcaccactgattatctccatagaaatgtctagcctgcatacagaacaaatgaaatataagtacatcatatgtggaacgagtttcttttaaaaacgcgagaacagcactacaaagtagttatgatcggtcacatttttt

SEQ ID NO: 63208 - DNA, 264 bp, Setaria italica
  Peptide Sequence Number=SeqID_129182
tttttttttttttttagtcattcaaaaaacaatatcaaaatttccaataaaactcagagggacaacatatgattctaaccacattaataacttcaatattgcttgtgaatgttcattaaagcttgacaaaaatagtctcaacaactaaggcatgataaacatttcttcttcatcaagagtggaactccaagtgcatgtatcacactcattccccctcaactgaatcaggaaacatctagatagaaagaactacttcagcagcct

SEQ ID NO: 63209 - DNA, 175 bp, Setaria italica
  Peptide Sequence Number=SeqID_129183
gtgaggctgctgaagtagttctttctatctagatgtttcctgattcagttgaggggaatgaggaaacatctagatagaaagaactacttcagcagcctcacatagcaacatcctggactccaaaccttcttaaagctgacgggatctcgacctcgccgtcgtcgatctcctgctg

SEQ ID NO: 63210 - DNA, 326 bp, Setaria italica
  Peptide Sequence Number=SeqID_129184
attgttttctttgtgaaattcgcatatttgacttatattaaaattattatgcactcatcatccatggtttgaagtattagttagcaaggagcaatgctatgtatttgaagtattggtattatcccatcatgttgccattcgtaacagtatcatatctatctcatgtatcttttctgctttcagatttttgttgatgaattggatgcaattgctccatcaaggatggaaggggttgaggagttatctattagaatggtggctactctgttaaaactgatggattgtaagtaattaaggtaaccttaaattagtaattacgttagtta

SEQ ID NO: 63211 - DNA, 385 bp, Setaria italica
  Peptide Sequence Number=SeqID_129185
tggtttcccaagataataaaggtaattcttctttatggtccacctggaaccgggaaaacctctcttgcttctttttgtgcctatgatgcaggagccaacctttttacaatcaacgggccggagatcattagtcattactatggagaaagtgagaaatctctgtatgatgttttcagttcagcaaagaaagctgcacctgctgtggttagattttcttcaaatgctcagctgcattatcttactgccaagtcaactgtaaaaaaagaaatccaaatagagatacctctttcacagatatttgttgatgaattggatgcaattgctccatcaaggatggaagggggtgaggagttatctattagaatggtggctactctgttaaaac

SEQ ID NO: 63212 - DNA, 273 bp, Setaria italica
  Peptide Sequence Number=SeqID_129186
agggggacgggggaggaggaggggcgggagaggagggtgaaggcggaggagagggtggtggacgccatggggacttgctcggggagctcgggcctcgaccttggccctggcggccgccacctccccggcgaaccgctccgcctcggcgcgccgctgggcgtcgatctcccggtgctcccgctcggcctcgatgcgcgcgagctccaccaggacgtgctcctcgttcgcctcctccaccagccgcttcatctcgtcggcggcacgcaggttcaa

SEQ ID NO: 63213 - DNA, 424 bp, Setaria italica
  Peptide Sequence Number=SeqID_129187
gtcttgttcaaaccaagtcctaatatttcctttgacaatccagagagaccaccagtaacccatttaaacagcttctgcatatcaagtagcctttcgtaggaccagcttcagtatattagatgaacacataattcgcctgaagcagctgtccaatacttttgggttatcttcgtacagcttaatcagatcaaagatgaaggctatcttatctgatgcaatttgtatgattgaaaccttactaggtttgctattttctcaaaatttggtctccactcgcaatccatgccaataatcttaaaaccctcgatacaacttgttgcattaagcagtccattggtctcatcgacccagacaatttcttctacatccaatttcttcagatctaagtaatcagatccacaaaataccttctctggaaccaaag

SEQ ID NO: 63214 - DNA, 441 bp, Setaria italica
  misc_feature (68)..(68): n is a, c, g, or t
  Peptide Sequence Number=SeqID_129188
attcttatctttccttcatgtgttatattattcttctattttatatgggactaggtgaacaatggtgnaacctttgtgaaaatagataagatgaagcattctcctgatggggattatgcattggtgatagaaggtgatactcccttagtctatttgtttcccatgtacttggcactttttaaccaaatatttttgtttctaaatacttgacactttcacaatcctaatatgtgtttttcaacttatactatgaaacttgtccatttctcctgctttgtcacctcattttgcatgcattcgcatgctatattattggaggatgatctgggaacttctacttaaaaaggatttgcctagttacttgagcatttttttcccagaaactagttaattatgcgttggcctgtggcaatttattgttacctattcttacccttgtct

SEQ ID NO: 63215 - DNA, 356 bp, Setaria italica
  Peptide Sequence Number=SeqID_129189
cgaatgttggtccgtcacacctagtacccttcactggagtgttactctgtgttttagtacatgtctggacaaactcaatgctattctccctgtcccatgctgtgtctgctgatgcgtgtaattggaaggtcatcgtaacttcaatttaactagggatctgcgtatgtaacgatttctgaacaactggaagagtcatgggcgtactaattgactttcagttttacccttgatgtcaaattcccatgtttatacgtactgtgtttccctgaagggatatgctaccaaaaaaaaaaaataaaaaaataaaaaaaaaaaaaaaaaactaaaagaagaactagaccaaggacacacaggga

SEQ ID NO: 63216 - DNA, 428 bp, Setaria italica
  Peptide Sequence Number=SeqID_129190
tatgacacgacacaagcacacggtaggcgacggaccttgatgcagtcacgtagcggtgaagaaacaaggacgaccgccaaactcagctcactgccctactgttcatcttcgcacgtctcgagggtgggcgtctgctcatactcatctggtgaaatgggattcgcacggctagtgccttggagatccatggcatgtaggctccctcatggcataagttctccaaccagaagaagaatttcctcagcaggctcagtctctcatcacagtcagctgagtttatttgtacggctagatctgcatgattaaccaaatattagtgtttcctgagtagtagtatacggcgatgtatcaattgatttcatgccacatagaaactcataatatagaattctgcattgctggattgaaactgcagatcagcatgatta

SEQ ID NO: 63217 - DNA, 373 bp, Setaria italica
  Peptide Sequence Number=SeqID_129191
cttcgcacgtctcgaggtgggcggtctgctcatactcatctggtgaaatgggattgcaggctagtgccttggagatccatggcatgtaggctccctcatggcataagttctccaaccagaagaagaatttcctcagcaggctcagtctctcatcacagtcagctgagtttatttgtacggctagatctgggtaatgatcgagatacgacagcccaattgcccctgtaacatagccttttgatgcacttcgcaagtgtctttgtctgctcacaggtttccggtcagtggcttttctaccaaaagactacttacgtaattacaattttagaatacaataataggactagaacttaaaaacaagacgttagaagga

SEQ ID NO: 63218 - DNA, 421 bp, Setaria italica
  misc_feature (276)..(276): n is a, c, g, or t
  Peptide Sequence Number=SeqID_129192
actttgatgacgagcctccaaggtttatagcccattgagcagtgctcctcgagggcttagggaccggagttattcacacttcgatctcccttcttactccaacagcagccagtttgatgatctgatgatgaaccagtggcaatacagctctgacatctccatgactagtttcatgtcggacgcaagtggctacacctatcagccgcaggatttcccggtgaatggagtaagcagatacccatcctatcgccctgccaatgggcactgagatttagngattcgacgattggtaataaaggtgtggtggtgagtccattggcagggcgataggatgggtatctgcttactcctatcagccgcaggatttcccggtgaatggagtaagcagatacccatcctatcgccctgccaatgggcactg

SEQ ID NO: 63219 - DNA, 147 bp, Setaria italica
  Peptide Sequence Number=SeqID_129193
caaatttgccgacgctttattgatgaaagaagaagcaagcttagtaggttgattgaggataaactgaggtggtccagtttcagcgcaattactaggactaagacgaattaggtaataccaaagtagtagacggtaacgtaaactaaa

SEQ ID NO: 63220 - DNA, 233 bp, Setaria italica
  Peptide Sequence Number=SeqID_129194
ctcaatttcttcagcattcattctgatcattgttcctatgtatcccaattacttcctcaggttacagagaatggaaatcaggaaaagcatctcgttgctacagtcggcaaattcagtgtggtatggaactttcagcaagtcaaggacagcaagcatgaatgctaccgtgatcaacagggcctcaaaagctgctactgctacaaggtagtcctcaaggatgaatcaatcgttga

SEQ ID NO: 63221 - DNA, 254 bp, Setaria italica
  misc_feature (7)..(7): n is a, c, g, or t
  misc_feature (38)..(38): n is a, c, g, or t
  Peptide Sequence Number=SeqID_129195
cagggcngaaaataatcagcttcttctctcgttctctnttccctgctcggctcaggtgcttggatcagagaagaagagcagctacgcaaacgccgcatgatggggtccaaagctgccatttttgccacggccgtactggccgtcctcttctccgccccggcgccgcactacgtggacctcgcggagctcctgagcgttgccggcccgttccacacgttcctcaactacctggagaagaccaacgtgatcgagac

SEQ ID NO: 63222 - DNA, 239 bp, Setaria italica
  Peptide Sequence Number=SeqID_129196
agtttcagttttgcacagcatgagaatttacttaagagttctaatttctaatttagaaaatctgcacagctacacttgaatttctttgagagatcacaatagagattggacatgtgcctgtacatgttcttttagagacctgtacagctagatgtcaattcgagtactccaatctacacaattgacatggtcaggtaaggttccaaaggattaatttatagtaggctgatgaggttgtg

SEQ ID NO: 63223 - DNA, 413 bp, Setaria italica
  Peptide Sequence Number=SeqID_129197
cccatccatctctggcatctgaacatccataaacatgcgtcgaagcaatgtggaggttgaagtagactgatagcatccttgccactttcgacacaatggaccttagcaccatacttttttagtgcagctgcagcaactctgagattgaccttattatcatctacgatcaatatgttcttcccaaccagcaagctacgagaaatgacggccgattttgattttcttttctttcgggcatctctactttgagcagctgctgaatacatgaagcaattgtgcttgctcttaaaggcttacacatgacaatatcaaatatgaatccatatttgtccttgtcagcttcggaggtgaaccaagaaagaaaccgaccttaaggacgacaatacaaggacaaactagaaccgttacttaga

SEQ ID NO: 63224 - DNA, 144 bp, Setaria italica
  Peptide Sequence Number=SeqID_129198
aatacatgaagcaattgtgcttgctcttaaaggcttacacatgacaatatcaaatatgaatggatatgtgtcaaaacccttcgatgaagagcaactataccaagcagtctccagatatgtagtgggaacaacagattctgctgt

SEQ ID NO: 63225 - DNA, 390 bp, Setaria italica
  Peptide Sequence Number=SeqID_129199
cttaaataatgaagtaaactttgctgatgcatatttacaaatttgagtgcaagaaagtttgtctactttcttatattatactagcagaaatacccgtgtgttgctacgggtccttgctcgcttgttcctaatatgttagtttcgcttcccaatatgttggtgtattgtcccttgtagtcctctctttgcaaatatagtagtagaagatatttgtgggtggtttgatgccatatgtttattacgtgggacccacacattgaaataaaaaaaattcactgtttgacctttgatctatccattcatttgatttcccttgtactcattgttatccagctagtcgttgcctcttcgtccatcggcgccacccgtatcttgccccatcctcaccgt

SEQ ID NO: 63226 - DNA, 331 bp, Setaria italica
  Peptide Sequence Number=SeqID_129200
aaggtgggatagcagaacagacatactgcaaaaaggcatccaagaacttccatgcttaatcagggtggaaggacaaaatagcatggcaccttaagacttctgtatacaataattgaactgttcatctcggcgttgatgaatcattagatatggtgaggcttgttcgttgaaactctcccgtgatgcctgtttgaccattttacttgtcggttattgtgtaatgtgaagtctttgtcccgggctactgttttacttgttggttggcaggtgatactttatgaaatattttgtaagtttatataggttggcagagtgaaacttgtgtcgggga

SEQ ID NO: 63227 - DNA, 471 bp, Setaria italica
  Peptide Sequence Number=SeqID_129201
tgtattctttggtcctaacctacctattcttggtactatttcgattaagtataaatttgaatgacatttttggtcaagccaatgtcaatgctagtgggcaaggatcaagtcaaacaggaaattcaaaccctccacctgcttctgttccaactggtgctgcagttcctccttttgccttctcaggatcaggtaacgaaggaaatcaggcacacgaagcttctagtggacaagaaagggaacatggtgaaccaggcatccatataaacttgacaggacccgagcaggctgcagaggctctgagaactgtgatgcagatgtttgggccacagatgggtccgcatgaaggcacacctagaggaccaggttaagacgtgggaagcaggaaatgtgtaaatgtggctcgtagttcaattattgtatacagaagtcttaaggtgccatgctattttgtccttcaccctgattaagcat

SEQ ID NO: 63228 - DNA, 453 bp, Setaria italica
  Peptide Sequence Number=SeqID_129202
tctaaattattccttacttaacggtattagtcttattcgttgtcgtaaggttgttcttgactttggatttgcaagaagtggccctagtgacacggagaagacacacatatcaacaaaagtgaaaggcaccgctggttacctggatcctgaatacctgagaacataccagctaactccaaagagtgatgtcttctccttcggcatattgcttgtggaaattctttctgctcgccgacctgtagagctgaagcgaacccctgaagagaggatcactatcagatggactttcaagaaatttaatgaaggcaacatgagagagatattggacccgttgctggagatcacgtggatgatgaggtgcttgagaagctccttagcttggcgttccaatgtgctgctccgacgcgggatgaccgaccaaccatgaaggaagttgggagcagctgtgggaaa

SEQ ID NO: 63229 - DNA, 457 bp, Setaria italica
  misc_feature (445)..(445): n is a, c, g, or t
  Peptide Sequence Number=SeqID_129203
tagtaggacaaaactggtggttgttgacaggtttataacatgcaaaaagcataagcttgtacacacaactttctttttcttccagatgaaacccataccgacagcattttgtggcatcgttgtcaccttttgcaaactttatcatgtcattccgtccatatctataccaactatatctcgtgctagacgtgttatatgttagtaaccgacaattaactgagcttcatcaacaggccaggtaaatgatcctgtgtcacggactcacggttaaagatatacaagtatatgacgacggttaaagtcaaaactgagctatcgattccgttggcgatggtgtgcaccagctgtctttatctaatctctaaagctacctttgttgagaagctagcaaagtgtggagttttctttattttctcattaattctacagttgatatccaaaaagntgccatccatag

SEQ ID NO: 63230 - DNA, 300 bp, Setaria italica
  Peptide Sequence Number=SeqID_129204
acggccgcaccttggcagactacaacattcagaaggagtctacgctcacctggttctgcgcctccgaggtggccagtgaaggtccgaggtgggctggcgtaccaagttcaatttgtctgtctgatgtgtctctgaagttgagtctgtctaagtttctactgtgtgtctgaagtttgagtctgtcttaagtttctactgtgataaaagccccgtatgatgtttcgcaaaaaagtaatttgaagtaacaaacaagttttagaatttagacttagtactaaattaggtaattttaaaaaaaaa

SEQ ID NO: 63231 - DNA, 208 bp, Setaria italica
  Peptide Sequence Number=SeqID_129205
cagatctttgtgaagaccttgactggaaagaccatcacgcttgaagttgagtcttccgacacaattgataacgtgaaggcaaagattcaagataaggaaggcattccaccagaccagcagcgcctcatcttcgctggaaagcagctggaggatgccctccttgtcctggatcttcgccttcacattgtcaatggtgtcggaagactcg

SEQ ID NO: 63232 - DNA, 228 bp, Setaria italica
  Peptide Sequence Number=SeqID_129206
tattgcagcgtgcaaattaaaaccctgctccaagatatgggagtgggtctacaaagatgagctctaaattacggtggcggcggattctttgaggagggtgcggctgcggctggggaagaagctgagtatgcgggtacgggtgccgctgccgctggggagagagaaaactggacaataaaagaggggcaaagggtgtccaccctaccttttagcaagttttaggcaacc

SEQ ID NO: 63233 - DNA, 228 bp, Setaria italica
  Peptide Sequence Number=SeqID_129207
cattttctgtgccttcatgcaggcttgattcctcccagccatcttcatcacctttggtaataggaagaaccctagcctctggggcgatatactttgagatgttacttgggaaatacatgacggcacagaaaatgtggagtttcctagtttaccattcgcttaccctggcttgattgtatgatgcatcagtgctcgagctggtttgatgatctcatgccgtttatgaca

SEQ ID NO: 63234 - DNA, 257 bp, Setaria italica
  Peptide Sequence Number=SeqID_129208
ccaagtcaaagatgctcaactctggattgctgtcacctgaaggagcaaatcaagtgcgagccttgcagaacctctgggtgtcccacccagctcctggcatcaatgatgatgtcgtttacttgcttgccagagtcagattccgggacccgaaggcattcgttatcgctcttgatgcgaggaagaatgttctgctaggctcagctgagtttgtccacttgtaaaagtaaattactattgtacgtcctattctaccgtct

SEQ ID NO: 63235 - DNA, 338 bp, Setaria italica
  Peptide Sequence Number=SeqID_129209
gtcacctgaaggagcaaatcaagtgcgagccttgcagaacctctgggtgtcccacccagctcctggcatcaatgatgatgtcgtttacttgcttgccagagtcagattccgggacccgaaggcattcgttatcgctcttgatgcgaggaagaatgttctgctaggctcagctgacagcaatccagagttgagcatctttgacttgggcttgctctggatcgtggtgtgcgatgctttggcctcgcagtccttgatccagtcatcccacgaggtactcatcttggagttgctccatgtcgtgatcacccagtcagacatgagtgagtgaggaacggctg

SEQ ID NO: 63236 - DNA, 376 bp, Setaria italica
  misc_feature (168)..(168): n is a, c, g, or t
  Peptide Sequence Number=SeqID_129210
actgaaagaaacgcggtgatggcgtcatgatttcccaagtaacatctcaaagtatatcgccccagaggctagggttcttcctattaccaaaggtgatgaagatggctgggaggaatcaagcctgcatgaaggcacagaaaatgtggagtttcctagtttaccattcgnttaccctggcttgattgtatgatgcatcagtgctcgagctggtttgatgatctcatgccgtttatgacatgagtacatatctgctgcagggccctgtttgtttgcccctcaagtcaaggttatgtaatctagctattaagctgtgtgctgtttgacaatctagattatcaaacagcacacagcttaatagctagattacataacctta

SEQ ID NO: 63237 - DNA, 209 bp, Setaria italica
  Peptide Sequence Number=SeqID_129211
acttgcttgccagagtcagattccgggacccgaaggcattcgttatcgctcttgatgcgaggaagaatgttctgctaggctcagctgagtttgccactgaaaagaaacgcggtgatggcgtcatgtatttcccaagtaacatctcaaagtatatcgccccagaggcttgattcctcccagccatcttcatcacctttggtaataggaag

SEQ ID NO: 63238 - DNA, 166 bp, Setaria italica
  Peptide Sequence Number=SeqID_129212
tcatatggtagtagtggttaatttctgatgatatatagtgtatttataatcttgactcgttactatatactatgtatggatgactgtatcatcaatcaccgatggcatccgtacatatggtagtagtggttaatttctgatgatatatagtgtatttataatcttg

SEQ ID NO: 63239 - DNA, 424 bp, Setaria italica
  Peptide Sequence Number=SeqID_129213
ttcaaactcactgtcaaagaattagtacaaaacatcgcgttccatcatgccaaggattattgcaaagaaaacccggtgacgtttacggtgctcattatctgatcaagtatcagatgaaaatagagaactttaaaccttggcacgtcagtatcaattctgacctctacaacatcatcataagatctaattagagttttttttaggaaaagtaaactaattagagtttcacaatttgatctccaaaatggtggtacgttaagagagggctttctggacctcagccgtcacttccttcggtggcttctcagcgtgaaggttcgccaccatgcccttcttggagtaatagtcaatcaccggttcagtttgtctgtggaaaagacttacaaagacctaagaacttacaaaaacctacaagactagtaga

SEQ ID NO: 63240 - DNA, 198 bp, Setaria italica
  Peptide Sequence Number=SeqID_129214
aatccttggcatgatggaacgcgatgtttacggtgctcattatctgatcaagtatcagatgaaaatagagaactttaaaccttggcacgtcagtatcaattctgacctctacaacatcatcataagatctaattagaggtcagaattgatactgacgtgccaaggattattgcaaaagaaaacccggtgacgtttacg

SEQ ID NO: 63241 - DNA, 452 bp, Setaria italica
  Peptide Sequence Number=SeqID_129215
aaacgaaaactgcaggatgtcagtgtcagcataaattttgacggaacccaaacaagggattttggtacaattcatgcttaagcttcatcatgagagggctttctgcacctcaacagtcacttcctttggtggtttctcggcgtgcagattcgccactaagcccttcttggagtagtagtcaatcacaggttcggtttgtctgtggaaggcttcaagccttgacttcaagacctcagctgtgtcatctctcctttgaatcaatggctctccagtgacctgagtgaaaagagaaaaggcaatcagtgtacaactactcagcataatgcataccggaaaaaaaattggtaatcaatataattcaaaatcacaagtgcaaaaatattttagtgggcaaaattatacaaactcttagcaataaagagttggatacaacagaaagcagagtattccag

SEQ ID NO: 63242 - DNA, 417 bp, Setaria italica
  misc_feature (412)..(412): n is a, c, g, or t
  Peptide Sequence Number=SeqID_129216
cttcatggcttcatcaataatcccaacaaccaaatcatcagaaacaagctctcccttgtccattgcttctttttgccttaacacctaaaggagtcttagcagcaacagcagctctcaacatatcaccggtggctaaatggcataagcaatattcatctttaataagaggagactgtgttcccttgccagatcccggtggaccgatgaggatgagtcgcttgtcgggcttggagctgcacttcatgcggcggagaagctcgtgcatcagatccagcgatggcacatcctccaggttcgccgccatcgccgcctcgagctctcgcctcgcttcccttgagctacggaagaagtacggaaggaagggtagggtaggaataggggttacgggactactagttagacgacaacttanacaca

SEQ ID NO: 63243 - DNA, 241 bp, Setaria italica
  Peptide Sequence Number=SeqID_129217
agcacaaccgatgatttgtctgattcctcagtggaatctctacccgaaatggagatttcgccagatgatgttgtcagtgctattggcccaaagcatttttggaaagccagaagagctattgtcaatcagcagagggtttttgctgtccaagtattcgagctacataggttgatcaaagtgagtctgcggcaaataatcaacgtcttctggctcatgcttatgggcaggtgaactttacggg

SEQ ID NO: 63244 - DNA, 261 bp, Setaria italica
  Peptide Sequence Number=SeqID_129218
aggaagggacaagtgcccggcataaggtttgtagacaagtccttcagatggaagcttttggtccccattttattcccagctgtgctcctgtaagcctcccttccactgctggagatttcatgagttcaccttatggtattcctatgcctcatcagccacaacacatgggtgttcctggtcctcctccacccatgccaccgatgtacttcccgccctttagcatgccagtgatgaacacagcagtgtcagcctctgcagttg

SEQ ID NO: 63245 - DNA, 343 bp, Setaria italica
  Peptide Sequence Number=SeqID_129219
taattacaagagccaggaaaatggaaaaatgcatgcttgtgggcacgatgcacacacaacaatgctcctgggagctgctaagctgcttcaagattgcaaggatgacttcaagggtaccataaagcttgtattccagcctgcagaggagggttatggtggggcctattacatcttacaagaaggctctcttgatgatgtgtcagcgatatttggcttgcatgtcaacccagacgttcccttaggtggacatgctgcaggaccccatcaatccattgatcctgttgttgctgcatctactgccatcctcagtccttcaactaattgtcgccggaatcgatccgct

SEQ ID NO: 63246 - DNA, 287 bp, Setaria italica
  misc_feature (1)..(1): n is a, c, g, or t
  Peptide Sequence Number=SeqID_129220
natgacttatatagtttcttgctgatatgtcagttgaggtatgtattaggatgaatatttttcataccatgccccagaatcccgggttgtagacgccaacaccgccagttgggcacttgtcacatagaacctcaattcttagagcaacaatatttctagtgaaacaggagacaggatcagtcgtcacatatatggaagactcatctccgatgatgctccatgggtctatgtttgaaggggtatggggccctcctgcttcaaaacctctgttgctaacaagctcctcc

SEQ ID NO: 63247 - DNA, 341 bp, Setaria italica
  Peptide Sequence Number=SeqID_129221
ggccggccggcgtaagatcgacgcgcaccgccgccgtgcatacgcgtgagtcgtgatgttcgctactcaaagagagaaggcgcgcgtatgcactcacctcgaccttcttgtggtaggcggcgtcgatgttggcggcggacgcgcacgtcgccacgcccagcaccgcgtagtggcacggcctcactgagcccccgcacattgctgctcgatctctgtctgccgtgctctcgcgctgacggcgacgactcgccggagattggaattggaatgcctggaccggggccccaacccgtctgtcttatagggcgccgggcacgagggacgcgcggggcgatgccacc

SEQ ID NO: 63248 - DNA, 253 bp, Setaria italica
  Peptide Sequence Number=SeqID_129222
ggatgttgggatgctaaagatcctcacaccagagcaggatactgcttggcctgcagacgaacacgtctcttgtattatgctctggtgtgaggatgttgggatgctaaagatccatgacccatcctgcacatccgcataatagctgcaacatcttcaattatgcatctgaatatggatttgacaagatataagttttctggagtatttcccagtgtaaacatgaaccttttgtgatctgtagatctggcattgg

SEQ ID NO: 63249 - DNA, 238 bp, Setaria italica
  Peptide Sequence Number=SeqID_129223
acagtctgcctctcaattctcaatgaggatagcggctggagacctgctatcactgttaagcagattctagttggaatacaggacttgcttgatcagcctaatccagctgatcctgctcaaactgacggttatcaccttttcatccaggtaagaaagaaacaatgaataagattctgctattcattattattctttcctcacaagattaatgagtttttccccacaaaaaaattcagga

SEQ ID NO: 63250 - DNA, 323 bp, Setaria italica
  Peptide Sequence Number=SeqID_129224
aactgcttggcctgcagacgaacacgtctcttgtattctgctggatcctggatgaaaaggtgataacccatcctgcacatccgcataatagctgcaacatcttcaattatgcatctgaatatggatttgacaagatataagttttctggagtatttcccagtgtaaacatgaaccttttgtgatctgtagatctggcattggcttgaaacaaaattgtttccttaactgctgtaagtgctggagtgattaaatttcatgacattcaacaatctgtaatctcactttggattttgcatattgttaaagagattctgtgtttggg

SEQ ID NO: 63251 - DNA, 359 bp, Setaria italica
  Peptide Sequence Number=SeqID_129225
actaataaccttacaagggaacaagtactagacctactacaaattactacaaatagaaggaataagcggctggagacctgctatcactgttaagcagattctagttggaatacaggacttgcttgatcagcctaatccagctgatcctgctcaaactgacggttatcaccttttcatccaggatccagcagaatacaagagacgtgttcgtctgcaggccaagcagtatcctgctctggtgtgaggatgttgggatgctaaagatccatgacccatcctgcacatccgcataatagctgcaacatcttcaattatgcatctgaatatggatttgacaagatataagttttctggtagta

SEQ ID NO: 63252 - DNA, 285 bp, Setaria italica
  misc_feature (260)..(285): n is a, c, g, or t
  Peptide Sequence Number=SeqID_129226
ttagactgcaggctaagtagtatccggcgttggtctgagaacaattgcccatctagggatccatgctgcacatccgcatagttgttgccagtgtcttgaatgaaagaccaaatgtaacatggtgctttgagaagtaactattgtcattgtgaaccgagtgcgtctgttaacggtgctgttaactgtcctgagcgtgtgttttgtgggataatgtcaaaacccttgctttgtctaaggtttaaaaaaaaaaaaaaaaaacnnnnnnnnnnnnnnnnnnnnnnnnnn

SEQ ID NO: 63253 - DNA, 231 bp, Setaria italica
  Peptide Sequence Number=SeqID_129227
acagtctgcctctcaattctcaatgaggatagcgtaagcctagctatttccaggtttaaattgcatctgagtttgttccaaaatttctgttctcactgtacaatttcagggctggagacctgctatcactgttaagcagattctagttggaatacaggacttgcttgatcagcctaatccagctgatcctgctcaaactgacggttatcaccttttcatccaggatccagc

SEQ ID NO: 63254 - DNA, 452 bp, Setaria italica
  Peptide Sequence Number=SeqID_129228
ctcaaatccaaagacaagtctcccgatgaaatcgatgctgctatcaagatgcttcctgtgttgaacagtttctttaatctctctgagagccctcagcttctcttcagatcccccgtctaactgctcgtacctcttccacatgaagagaagatctgcgtctctctgatttactgcaccctttgggccaggccaaagcagcgtgtttgcagcgttagcattagcaggatcaaaaccttgataaaggaaaagcttctcattcgtgaaggtcttgtcaccatactccatgacatgagaaccctctttgtacttcttcaagtttgaggttcttgttttcaccacttcgtactggtccttgattgtttccttcattagattgtgggtttgactatcttccatccaagaaacactgtcctgggatggacccatcaccccctcctgagtacattacctgt

SEQ ID NO: 63255 - DNA, 231 bp, Setaria italica
  Peptide Sequence Number=SeqID_129229
ccccgtctaactgctcgtacctcttccacatgaagagaagatctgcgtctctctgatttactgcaccctttgggccaggccaaagcagcgtgtttgcagcgttagcattagcaggatcaaaaccttgataaaggaaaagcttctcattcgtgaaggtcatgtcatggagtatggtgacaagaccttcacgaatgagaagctttcctttagcaggatcaaaccttgataaag

SEQ ID NO: 63256 - DNA, 194 bp, Setaria italica
  misc_feature (149)..(149): n is a, c, g, or t
  misc_feature (182)..(182): n is a, c, g, or t
  Peptide Sequence Number=SeqID_129230
cacatcttcgctacttgcacacttgcattcaggctgtccccggttgaacttatttcatcttgactgctattgctaggtgcggattttcgaagcccaatgcggctcgctcactcagtacggcatgaagtacatgagggcgtttgcaaacntttgcaacagtggtatatctgaggcaaagatgngggagtcaagca

SEQ ID NO: 63257 - DNA, 283 bp, Setaria italica
  Peptide Sequence Number=SeqID_129231
agaataaaaggaaaagacttactcaattcgtgaaggtcttgtcaccatactccatgacatgagaaccctctttgtacttcttcaagtttgaggttcttgttttcaccacttcgtactggtccttgattgtttccttcattagattgtgggtttgactatcttccatccaagaaacactgtacagatcacctaaacaggtaatgtactcaggagggggtgatgggtccatcccaggacagtatgttccccaactattttcaacaggatttgaggcagtagtgac

SEQ ID NO: 63258 - DNA, 179 bp, Setaria italica
  Peptide Sequence Number=SeqID_129232
accccccatgatctgagtaatagataaatatgtggtcatttggtttactgtctataaccttcttaactaccctaccaagtaaattagacaacttactaattagacccaaagaagacaacaagacaaaagaaaattttacaagtaagtagaacctaggtacaacctagtaataagtacca

SEQ ID NO: 63259 - DNA, 314 bp, Setaria italica
  Peptide Sequence Number=SeqID_129233
gggtttgactatcttccatccaagaaacactgtacagatcacctaaacaggtaatgtactcagagggggtgatgggtccatcccaggacagtatgttccccaactattttcaacaggatttgaggcagtagtgacataaatatttagatcttgtggcattaatccctcaaagatactgccactttcacatgcttcaacatatataaccattttcgagtagctattggaagacaatagacttacttttttaaaaaccctttagaatagaaagtacaaccaagacaataagaagaataataggacaaagtttagta

SEQ ID NO: 63260 - DNA, 182 bp, Setaria italica
  misc_feature (146)..(146): n is a, c, g, or t
  misc_feature (154)..(154): n is a, c, g, or t
  misc_feature (162)..(162): n is a, c, g, or t
  misc_feature (170)..(170): n is a, c, g, or t
  misc_feature (174)..(174): n is a, c, g, or t
  misc_feature (177)..(177): n is a, c, g, or t
  misc_feature (179)..(179): n is a, c, g, or t
  misc_feature (181)..(181): n is a, c, g, or t
  Peptide Sequence Number=SeqID_129234
attatgatgacatcctttgtgcgaactcgtgtgatctggggaatgtaagccgctcagaatgtgcgttggttgatcagctgtatatattgcaacgtgtgcccgtaccatggtaaagtctgatttgcaaaccaaaaaaaaaaaaaaanaaaaaaanaaaaaaanaaaaaaanaaanaananana

SEQ ID NO: 63261 - DNA, 345 bp, Setaria italica
  Peptide Sequence Number=SeqID_129235
acggggggaattagggacggtacggggcggacggacgattcccacgggaacgaggctccgagccgcgcggaggcgaaggcaggattaggcggcggcggtggcggcgcggttgaagcggcagcgggagggttggatggaggcggcggcggatcaaaggctaacaattattaggttctaaacaacagaaatcattttggatgtgggtacaaaactgattcgagcaccagctaaatgtgcctactacaatgtgtaaagtcttgttttgccctcgaggcacatgaacagtagcttacacacaatcagtattttcattgctgcagcagtttagcatatcctgatgatcct

SEQ ID NO: 63262 - DNA, 342 bp, Setaria italica
  Peptide Sequence Number=SeqID_129236
taagggtaacttaactaagtaaggtaagaacttaacaaataagacaatagctcctgttgctgcttgttatttacctgggccaatatgttctttatctgggctccagtgagggtctcatgttcaagaagtgcgttggctagagcatggagctccttattgtgtttcgtaagaatagtctttgcattattgtatgcattctccaagaaattcttcacctcctgctcaatcaaaagtcttgtttctgagctcatgctctttccatcatcttcgtagttgtaagagaccaaggccgacttgcttgctcatgccatattttagtaacccatagctcttgccgttgca

SEQ ID NO: 63263 - DNA, 225 bp, Setaria italica
  Peptide Sequence Number=SeqID_129237
tgttagcctttgatccgcctgccttatgtacctacagagcataaatcattttggatgtgggtacaaaactgattcgagcaccagctaaatgtgcctactacaatgtgtaaagtcttgttttgccctcgaggcacatgaacagtagcttacacacaatcagtattttctattgctgcagcagtttagcatatcctgatgatcctcttgatcgtcaattgctggaac

SEQ ID NO: 63264 - DNA, 368 bp, Setaria italica
  Peptide Sequence Number=SeqID_129238
cagcggatggattggatacaggacaaaccagctttggagaagttgtcatcttactgaataaggctccgaatcacttgggttcgtggtatttacagccttctcggtagacatactgccaacatcttttatacaatcacctccagcttgacaggaagcttctgcattctctacagaatgttgatgctcctcagagtttgtgccatgctccctaataacaccattggcttcagtacttggcgtgcttgatgcaggcgagtgtggagcatgtttgttctgtagatctgtgtgcttactagatgtactaaaattgctgctgtcactagtacatctagtaagcacacagatctacagaacaaacatgcttcagt

SEQ ID NO: 63265 - DNA, 327 bp, Setaria italica
  Peptide Sequence Number=SeqID_129239
acaccgtatcaaacctgagattttgttaaatgtttgcgagctgctgtgcttttgtgtagttcatcatccctacaaaatctcaggtttgatacggtgtccttcagcatttctaccagcaccaacggagttagctgttgatcgagggggacaagaggatgctattacatcaaccaaatagtcaagatgcctttcgtagaaaaatctcaataatgacgtctctatgtgctccagacatagtgaaagaatccatcagtattcgaaggatttctagaaaactgacaatgcatttcctcaccgagctcagttaccatgcctttaaccagaagt

SEQ ID NO: 63266 - DNA, 405 bp, Setaria italica
  Peptide Sequence Number=SeqID_129240
gcacaattaacccagtcatatatatcttcacttgtgcttactacaatccagagatatgactagaaaacaatccttgttgcttgtgataaattaaacaagcacctaactatcatattcgtatcccacttgatatagtgtatattttgttaggatgagcatcttattcgccatgttgtgaagttcaacttgttgaaaccaataattgatgcgtttgttgaaaatggggataaatacaacatgctacattcaggagtactcgaactgttggaatacatacgaaaggtacattttcaagattactagattctcactttgaattctggtttttacaatttacttggtcgccactatgaattctggcttttacaatttacttggccgccactatgagttctggcttttacg

SEQ ID NO: 63267 - DNA, 341 bp, Setaria italica
  Peptide Sequence Number=SeqID_129241
aactaaccaaaagactaggtttagtacctagtaataccaaatccatccgctggccgacaggtaggaaatacggaaatagtagtttaagctccaaaggctgaatccatcgatcagagctggaagcatggttggaggtgacataggttgcacctaccttagtatctgaagtaaaatcccagctgtcctttttgagcatgtaaagttaattttctacaaggaaagatctgacaaacatgagaatccgaatgactgtcggttagaacattgaatgggccttgctcctgctgctgcgctcgctattgtatctctttatgaactaatggagtagcagggaatatgtg

SEQ ID NO: 63268 - DNA, 240 bp, Setaria italica
  Peptide Sequence Number=SeqID_129242
tggttctgttcttgcatgaattttgcactcttagtaagagcttaccacttgttcagcagttgcgattgtttcgttctccaaatgtgcaaatgcatggcgtaggctatctgtactacaaaaatgaaaagaaatacaaccatataataccagtgtgctgagcttggtgttgtcattgttttcactacctggcaatctcactatcgtttgacttcagatttgctgaggatatcttgtcatagg

SEQ ID NO: 63269 - DNA, 207 bp, Setaria italica
  Peptide Sequence Number=SeqID_129243
ttaaaaaacttaaaaaaataaaaacaaaaggaaaaccctaaaacctaaattaagaaggtacaataataattgtccagcaagaaggaaattctcttctaggacttctggttaaaggcatggtaactgagctcggtgaggaaatgcattgtcagttttctagaaatccttcgaatactgatggattcttttcactatgtctggagcaca

SEQ ID NO: 63270 - DNA, 416 bp, Setaria italica
  Peptide Sequence Number=SeqID_129244
agaaggaatacaagactacaacaaggctacaacaaccaagcatggcagagaaggtgatcttgttctctctctacctctcgatttcgatctcttgacgtgagctccgcgttccacaattgtgtgtttgtgtttccatggatcttctgattgttcatcactaataacctatattctgttcttccataattgaaaggaatggtggtgagagaatatattctacaagtttccacacatatgcttgtcatgtccatgccatatttcagaaatcaaaactgttcaggagcataattaacttacctgagtgtggttggtgcatttcaaaaattgcttttctttccgatcaaaaaaaatgtttttctttgcaagagaataaacaatgttttgatgaaaaattgctcttatttgtgttttcgaaa

SEQ ID NO: 63271 - DNA, 420 bp, Setaria italica
  Peptide Sequence Number=SeqID_129245
cgatctcttgacgtgagctccgcgttccacaattgtgtactgtttgtgtttccatggatccacggatttttctgttcttccgtaattgaaaggaatggtggtgagagaatatattctacaagtttccacacatatgcttgtcatgtccatgccatatttcagaaatcaaaactgttcaggagcataattaacttacctgagtggttggtgcatttcaaaattgcttttctttccgatcaaaaaaactgtttttctttgcaagagaataaacatgtttggatggaaatattgaagagattataatggtgctcttatttgtgtttcgaagtgtccaacaaaattcaatgctgaattcatgggggggagaaaaacctctgctattactaactctgctgtccctgataattcgattccattcat

SEQ ID NO: 63272 - DNA, 390 bp, Setaria italica
  misc_feature (157)..(157): n is a, c, g, or t
  Peptide Sequence Number=SeqID_129246
ctatgtgctcttcgagcagatgagtcagggagatcctcgagagggggaacacaggagtggggcaaccatgggccggctgctgccggtagcactgaggtcacggatcattggcatcaaacactggtaaactcttcataggatcatgctatccgttccnccttttttttgacaaaagctacccattctttctgctgctttctgtagttgcgctgtcggtggtgcgcacctttctaaatagcaagctccatcatcctttagaaattggataagtggcccagtgtggaaaacaatctgtatcccactccatccaatcccttagttggattccatatccaagtgcatatggatatgacagaccaccttcttcttccactgggtgcaggtggacaa

SEQ ID NO: 63273 - DNA, 382 bp, Setaria italica
  Peptide Sequence Number=SeqID_129247
gtggagtttctcaactcgttcgctgcgacctgcgacgacaagctcgcgctactccacaggaagatagtgaaactggactcatctcttgcccttcttgaagcaaagctccacagtattgatgaaaatattgctctgggacacccaacaagccaaaaggcacagcaatcttcgtcggatgagaaaaatttttgttcggaaaatttagtgggtgaatcctctaggtttgtctgtctcctcattgctattttattatgtgcattcatatatttacataagctgattatatgttcggatgtgcttaatagttgtacatagtaattaattacactagagcataggtccacgaaagtcttggcttctaattttctgttcaaccatattg

SEQ ID NO: 63274 - DNA, 334 bp, Setaria italica
  misc_feature (113)..(113): n is a, c, g, or t
  misc_feature (226)..(226): n is a, c, g, or t
  Peptide Sequence Number=SeqID_129248
gcttgttgcttttctgctttagtagctttatggccttaccagctaaaggtcagtccgtttgggctctagcacgttgatacatgcacctaattaatacctgagtaaaaattagntattcaaacaattttggtatgaccttctccaaactctgcaatatgaagccatgtgcttcacatcctagcattgatgattgatcgcccctgcgatagtagctaagccaaaagcngaaactggatgtatttttgattccaggaaggtcatctatggcctcttcagcaactcagcaccgtgcccagccagatgctacaataggcaggccaagggtgcttgtgga

SEQ ID NO: 63275 - DNA, 185 bp, Setaria italica
  Peptide Sequence Number=SeqID_129249
ttaaaaaaataagtatccatgattctgaatttaggttgatcagactgcaacttatttggatcaattcagatatctacatgatgttttcaatgtgaatagcaaacataacaccaaggaatcagggttaactgaccacacaccattgatgattgatcgcccctgcgatagtagctaagccaaaagca

SEQ ID NO: 63276 - DNA, 421 bp, Setaria italica
  Peptide Sequence Number=SeqID_129250
gctatttagcttatgatatgcttgctgacgatggcatttgagctgttttgattagtggccgggaaacctgactggtgagtgatggatgcgctgctctaaccagctaaaggtcagtccgtttgggctctagcacgttgatacatgcacctaattaatacctgagtaaaaaattagatattcaaacaattttggtatgaccttctccaaactctgcaatatgaagccatgtgcttcacatcctagctgaatttcttgataacaaaagaagaaagttagcataagaataggcaaaagatactttaggcatctatctatcaggtgaagaacaacctgcaaaaagggaataatagtaataatcaaaggttaggacaagaaataagttagaatagaaaaattttagacaagaataatactagacaaa

SEQ ID NO: 63277 - DNA, 257 bp, Setaria italica
  Peptide Sequence Number=SeqID_129251
ctagagggatcccaagataatcagaaccgttttccattaccaaatcggtcaactgcaacaaccaatacatccatcgttgaaatgtctagctcaaagttatgctttcagctcagaaatgtaaaaaatgataatgccagacatttgcgtatagaaaaggaactaaatgttaagaattttccttgcaaaatgttctttgtccaacgtactccaacgtttcatgtttataaactatatacagccatttgtccagcttaatc

SEQ ID NO: 63278 - DNA, 301 bp, Setaria italica
  Peptide Sequence Number=SeqID_129252
ctttaaaattgattcttgatggctgcaaatttgtgagtgattcagtatttgcaacctctctgcaggggtgataacatagggcactaacatttgaaggccccaaaaagggttaacctgcagagagtggactttacaatgctgcatcagcagactacatttcctttccttgtacaatttggggtccttttgtgcacatacgtagttacccttatacaacatcacatgccaaaaaaaaaggagcaccaaaaagaacttgctggaagggattggtcatcaggcgaccggtccctgcaaacgtcga

SEQ ID NO: 63279 - DNA, 159 bp, Setaria italica
  Peptide Sequence Number=SeqID_129253
tattgtatttctttgatggctgcaaatttgtgagtgattcagtatttgcaacctctctgcaggggtgataacatagggcactagtatagtgtacgactccaagtttgtactcctattgtgtatgcaaggaaaatagatagtccactctttgtgttttgt

SEQ ID NO: 63280 - DNA, 229 bp, Setaria italica
  Peptide Sequence Number=SeqID_129254
accactgctgcagttgtgaaggtgccccggataggcatgggaatgggacccattgctgatagtccactgtgtgccggaccgttgagcactctgatgtctttctgaaggcaagcacatatgggtcagggcactccgaggcttggagaaagcagggtctaggattccctgcatcaaattaagagaaagaatcacaaaatgaattattgctagtatgaactacatattaagc

SEQ ID NO: 63281 - DNA, 291 bp, Setaria italica
  Peptide Sequence Number=SeqID_129255
cggtgaccgagtcccagaaagctttctccatcgtttctctcactttcttctggaactcctcctcagcagcattagcagcaccagttgcaaatgtatttacccctttgagcattaattcgtctgggaagaccccttctgtggttaaggagaattcgaggacaaatgctctaggatcaagttctgttgcccgttctctgcttggtgcttcttcatcaagcagtacatcaccagtgaagcagctgacagagaatgagcaaatggtcaatgaaatgcttcatgaggatgacagtg

SEQ ID NO: 63282 - DNA, 327 bp, Setaria italica
  Peptide Sequence Number=SeqID_129256
taagaaacaaataagaaaaggacaaattacaagaaagacaaggttaactagaatagatacaaaagctcttacgcgagaaggttcagcacctgagtggcgatgctggcattgagcggatggactctgctctttcagatacgaggtcaaaattctttgaagcaaaggagaatggaagtccattagcagcaccagttgcaaatgtatttaccccttgagcattaattcgtctgggaagaccccttctgtggttaaggagaattcgaggacaatgctctaggatcaagttctgttgcccgttctctgcttggtgcttcttcatcaagcagt

SEQ ID NO: 63283 - DNA, 422 bp, Setaria italica
  misc_feature (76)..(76): n is a, c, g, or t
  Peptide Sequence Number=SeqID_129257
gtggcaagcatcagattgcctagatactcactgagggtgtgcttgcgcttacatgatactggctcatcccagtgcngttttaagcgggcaaggtgaaagggagaaacagcttatggagtcagcagcaaactttatcaaggaattcgagctgttaattaagataatacttgatggaccagggcggtcatctgatgttactggtcagaggaaattccggactcagttggctaattttgacaaggcgtggtgcacgtatctttactgctttgtggtgtggaaggtaaaagatgcaagattattggaggaagatcttgttagggctgcatgcaagcttgagctgtcaatgatgcaaacatgcaagctaactgcggatgggacaagtacaaccaaaataaatacttaactacaatagaacaatagaa

SEQ ID NO: 63284 - DNA, 409 bp, Setaria italica
  Peptide Sequence Number=SeqID_129258
gttggcagcgctgcgcagctcggccttgcaaccgcgctccgcccatagcgtcgtctcgcggctcgcacctcgcaggtgcgccgcccagcttggcatagctgccgtgcggcaggacctttgatcctaccagcggcgagcgaactgagtctctccgacaggagcaagtggtgaggccaaggggagtctggcgcctgctgccacgtggtcgcgtcgaggacggtaggagcgcgaaggcctcgcatctggatggggacgacttggagcacatcccctacgcggatccggccttctctcgccgataatgaaccgcagccgtggcagctttgacggtgcgaggtgccatcgcggctccacctttgcgcagggccggaaggtggcggagaggaggagagaagccacggggctgaag

SEQ ID NO: 63285 - DNA, 479 bp, Setaria italica
  Peptide Sequence Number=SeqID_129259
tatgaatctgattgtcaaagtggtcctgactggccctagggataaatgaccaaagaaaagaaatcggcagaagaattgccaccttacatgagaccctcataacactggtgctagtgtgctgaatggtactaatgagaagcatatgcttcagggctccaatcttttaataccaatcctgcaggaaccatgtattaaagatgtactaagctgtaaaatgcagcataatctatccacaaaatttatttcaaaacagaattagtcgggcatttattttcttaaaagcaatatattatcttcatgttgtatggccattttagttattgttgtcctacgtaattaccatacatgtcgtgaagggcctaaccacattatattagacaatgatatttcttaacttccaaatatattctggatcattagaaaacatgacaggaggtactgagatttcatttggtataaatacgttaaaggttttatta

SEQ ID NO: 63286 - DNA, 262 bp, Setaria italica
  Peptide Sequence Number=SeqID_129260
cgtttattgcacctgaggctcattgtatgtttgtaacatcggactgtatccatgaaattttagataatttcatggatacagtccgatgttacaaacatacaatgagcctcaggtgcaataaacgatgtccatgaaattatctaaaatttggttcaaatagtcaggaagtgacctgtacagggtgtagcatctcaggttgacggagagtgggagttgctggagaaaacgctggttattgcatcacaaaacattgtccactggt

SEQ ID NO: 63287 - DNA, 222 bp, Setaria italica
  Peptide Sequence Number=SeqID_129261
aattgcatgattgttttaggctctacttcatgtacgaataggtagcacatcttaattgatttctagccttcggtttcaatgctaatgtaattttgcttcgctgccttgctgttattattactatcttccaggtgggcgtcttattggtgtacatcagcttccagctaccatcgttatgctcccattgagcaatgcgtagtacctgccgctcacaagactcca

SEQ ID NO: 63288 - DNA, 224 bp, Setaria italica
  Peptide Sequence Number=SeqID_129262
gagaaagatgaagaacccagggatgaccgacaagattcagaaggtgttacagtggatgatgacttggttcaggaagacacactgcaacctgacaattctattgagcagacagatgatggtcaggttgcagtgtgtcttcctggaccaagttttagtagaagcaccctctgaactcgaacttcctccagaacataagctaaatggcgaagcatcttctccgaatg

SEQ ID NO: 63289 - DNA, 246 bp, Setaria italica
  Peptide Sequence Number=SeqID_129263
cggtcaggagagcttcccaattcctgctacaaatttagttgataatcctcctgttcctccatctggatttgtgtactccaagtcactgcagattccagaacatatcaagataccgattgatagaattggttgtaattgcagtggagattgttctacctctgaacattgcttgtgtgctaagcgtaatggttctgaactaccctatgtgtcaacaaaaggaaaatgctaatcggaatgattctaaac

SEQ ID NO: 63290 - DNA, 231 bp, Setaria italica
  Peptide Sequence Number=SeqID_129264
cctatcccctgtgtgccttgcctatcctctgttgcgtgtctcagcaagaatccaatccatccgcgaaagcgagcaatttgatttctgagacaggcagacagagaagagaagcatcgtatccatggcggcggtgatggttgcgaggcagggccgtgagctgcagcgctacagcgacagcacgggcggtcgcatcgtggtggggtgcgtcccctaccgagccagcggcggcgc

SEQ ID NO: 63291 - DNA, 213 bp, Setaria italica
  Peptide Sequence Number=SeqID_129265
atttgcgttggcttggtcttctcctaaggttaaatttaaaaagggaagtacatactacaggagatacgactgtacatcttccatgtggttcaacccaggtggaagcagaaactgctgcacaaactgtatcacccagtgaagaaggcatgctggcaccagcattgaaattatctcggtcaaaggaaccatcctggaccattgtgccccacattt

SEQ ID NO: 63292 - DNA, 220 bp, Setaria italica
  Peptide Sequence Number=SeqID_129266
cctatcccctgtgtgccttgcctatcccctttgcgtgtctcaggtaaactaaagtatgacagtgaagtcaagcagaagctttcaaaggatttaatgagaaagttggggcccaaccttggtaccatcagagctcctggactaggcttagtctgcagtgatattgtgaaaggagttcctgcaattttcggtcattttctgacctcccttcctgcgatacact

SEQ ID NO: 63293 - DNA, 434 bp, Setaria italica
  misc_feature (434)..(434): n is a, c, g, or t
  Peptide Sequence Number=SeqID_129267
gaacaccacgtctggacggcgaagacggatttgccggcaaacaagttgatcgagttcaagttcttgctgcgagaagcctcggggcacgtccgttggttgcacggcgctaacagaactctgcgaattaccgagaccacaaataccttggttgtccacgaagactgggaccacgccaagaaacagagcgtctacgaggaagaagagctctcgatcggggaagaagatgtgatttcttcagaggatcttgcaggaagcaacggcacaatgctggcagataataacatcataacggatgagtacctggggagtgagtcggaagcagtagtagcagacgctcctctgcagggggaaatgatggtagcaaatgaaacgaccagccacaggtaaacacggaatcatcttgtgtttggcatagtcatatacctgacatttcn

SEQ ID NO: 63294 - DNA, 218 bp, Setaria italica
  Peptide Sequence Number=SeqID_129268
ccgttgacaaaaccactcccgcaggctaagcatgatgcgcatgtaagagcttattgggtattaggtaccttctagattgactctagtgcaagtgggagactgttggaggtatgccctagaggcaatcatagagatgatgatattccatttgtatccatgatttgtatattgtgttcattgaatatccattaaaggctacttgaattgatttgcaatta

SEQ ID NO: 63295 - DNA, 366 bp, Setaria italica
  Peptide Sequence Number=SeqID_129269
tgggagagttagcccgtgaactaatccatgtgagatctaccgaaacacatgttaagataatcagcagcccaaacagattttacccctactttgagggatgcatatgagcactagatggcacccatatcagagcatgtgtgcctgctaaaatggtggatagatttaaaggttgcaagtcatacccaacacaaaatgtattagcagctgttgactttgatcttcgtttcacctacgtcctgttggaggtatgccctagaggcaatcatagagatgatgatattccatttgtatccatgatttgtatattgtgttcattgaatatccattaaaggctactgaattgattagcaattatgtgaattgtat

SEQ ID NO: 63296 - DNA, 345 bp, Setaria italica
  Peptide Sequence Number=SeqID_129270
gcaagaggaggaattagtagcctccagcacttatcatgcatagtggcgctccctttgttggctagcaagttatttctgaccggaagacttgggtcaaacgcaaaacgtataaggttgcacgtgcaattttgaagctattacaggatttcatgatgactacttattttcaactaggtggtcagttggatgccaatgatatgatctatagtctgagtattgttggaggtatgccctagaggcaatcatagagatgatgatattccatttgtatccatgatttgtatactgtgttcattgaatatccattaaaggctacttgaattgatttgcaattatgtgaattgt

SEQ ID NO: 63297 - DNA, 427 bp, Setaria italica
  Peptide Sequence Number=SeqID_129271
agttttaattatattggtagtatgtcgctactcacacggcttccagtcatatgaatgaatgccaaagcccttagttgttgccatcactatactacctctatatacaaataactgatgttttatgttgcatgtgatcaatgaaactaaactttgatcagagcttatatttttaaaagactgaagtagatatatgaatatttaaaggctggaataaatatatctcaaaaacttaaataataggtaaatattttttccatgaatatatattgaaatattgtgtactcagtgcttgctttgtttgttggaggtatgccctagaggcaatcatagagatgatgatattccatttgtatccatgatttgtatattgtgttcattgaatatccattaaaggctacttgaattgatttgcaattatgtgaattgt

SEQ ID NO: 63298 - DNA, 204 bp, Setaria italica
  Peptide Sequence Number=SeqID_129272
catactacaaattcagcaaattattgtgtatgtttgtaacatgtgtcgctctaaaaaccgatttgtaggagcgtcccgtatttttataagtgttggaggtatgccctagaggcaatcatagagatgatgatattccatttgtatccatgatttatattgtgtttcttgaatatccattaaaggctacttgaattgatttgcaaa

SEQ ID NO: 63299 - DNA, 370 bp, Setaria italica
  misc_feature (178)..(178): n is a, c, g, or t
  Peptide Sequence Number=SeqID_129273
gcttctgaggtagtggccatgtcttctggtgactcagaagaaaacaccccagcagccattggctttgaacagagcaatgcaagattgctcggatcaattcctacatggtcgtcaaagacccctctgcagagtggcatcgtgccaaaagtacctagatcagctgcagctcttgcaaagnggaaattaggagattggaaggagagaagctaataagctagataattatgatatagagaggaatccctcctcagctaaaagatctgaagctaggagtctttccttctccactgcagggccaagcaatggaccaaacaggttagtgcctacatctaagaagatccggaagccaccgatctatgttgaggactgg

SEQ ID NO: 63300 - DNA, 218 bp, Setaria italica
  Peptide Sequence Number=SeqID_129274
ccggaagcaccgatctatgttgaggactggcactaacctgtttggtccatgcaggactttctgtaatttgggaatcattaaagccaagcatggaccaaacaggttagtgcctacatctaagaagatccggaagcaccgatctatgttgaggactggcaagcgtgcattttcatcttctagtagtaggctcgttcatggttttggccgagatcacgaac

SEQ ID NO: 63301 - DNA, 449 bp, Setaria italica
  Peptide Sequence Number=SeqID_129275
tccggtcggtcgtacgtttcctttgtctttctattggtcgttcggtcgtacgttacccggcgacgggcacggactgggccgacaggaccggcgaccagacggtgacgtcgcggtggccctggtactgcggcggcagcgagacggggaccgtgacgggctcgtcgcggtaggtgacgaagacgtcgaggcggcggtagaggacgccgacgtggtcgttggggttgcgggaggccagcgtcacctgcgccgacgccgagagggacgggtcgcccacggtgatggggcgcggagctgcaggtcctgcaggtagaaggacggcttggaggggcggagcgcgaggtagacgacgagcgcgacgaaggccacgatgaggaccagcgccaggaggcacgacgccatgcacccgcagcagcgccgcaggtggtgctcgtggcggtggtgcttgccct

SEQ ID NO: 63302 - DNA, 304 bp, Setaria italica
  Peptide Sequence Number=SeqID_129276
tttttttagtaataattaacaataaaatttaattactacccaacaagaatactagaaaatgagacatgattacatgaacaaaattaacagcgtaataattaacgatgtatcccgaagaaaactaattaccgctttgccagagtacccgcgcgctactacattcaccggccaaccggcctacacctcgacgctgcatcccgtgggctgcgcgaacttgagcgccgacagcgtggcattggcgccgccgccgaagccggggaagcccgcggagagcacggcggggcagctgacgaagaggtggtag

SEQ ID NO: 63303 - DNA, 412 bp, Setaria italica
  misc_feature (25)..(25): n is a, c, g, or t
  misc_feature (62)..(62): n is a, c, g, or t
  Peptide Sequence Number=SeqID_129277
gccagttctgatttcatcaagaatnaccccgaaagttgttatttcctgtttctctccaccanctttgctacatatcacatcacatctcctcctcatgcagactccagtggagggttactgctgtcatgcttgctgacacacttgaaaggtacagacaacaagagaagtcccttgtatctgattttgaaaagctttgccctggattttttccacggaatggtggaaattgatactcatggcagtctagttcaatgggtggagcgcttttcacctagaaggtaacgttgcttttttacttgttatttgttcaatcctatttaaagtcactgaaacttctaaaaacttttgacaaaaccgagcaacgtacaagaggaactaggtggcattgttaaattaagaaattaggtctact

SEQ ID NO: 63304 - DNA, 471 bp, Setaria italica
  Peptide Sequence Number=SeqID_129278
ggcacaacagctatggggttagctcttggagcggtatgtctaggactccagtggagggttactgctgtcatgcttgctgacacacttgaaaggtacagacaacaagagaagtcccttgtatctgattttgaaagctttgccctggatttttccacggaatggtggaaattgatactcatggcagtctagttcaatgggtggagcgcttttcacctagaagatttggcaaggtgctggatggtgagatcgcgatgtgccgccaggtcgctcagcagaccggcatcctgctggatccgatgtacaccctggccgcctgggagcaagccgtggatctgtgccgtcgagacagtgaggccaaagtggtgatgatccatacgggcggcacccttggcctcttcgggctggcgcagaggtactcgccacagttcaccacaggcgagcaatcctaagataatgttgatatgcaagtgt

SEQ ID NO: 63305 - DNA, 238 bp, Setaria italica
  Peptide Sequence Number=SeqID_129279
aggatatgccagattctgaaattacggctggagcaaacgacttgcatagccagttgtctggcatatcctacaattacggctggagcaaacgacttgcatagccagttgtcagacataaacgccacttgcaaggagcacgaacagagacccaaagcccaggaatacagaagccatagcagctgttgtgatctcctttgccaggctacggctccgcctggatgaagttgcttcataaatg

SEQ ID NO: 63306 - DNA, 274 bp, Setaria italica
  Peptide Sequence Number=SeqID_129280
aggggctgccggggctgaagcagagccccgggtggccgtcgctgcttgtccgcttgagcggccgctcgtcgtccgcgtcagccgcagcagcagggccggcagcaccgcaaccggaaccagcggcggcgttagtacttcctcttgagcgtggagttccagtggttcttgatggcgttgtcggtgcgttcgggaacaagtgggcaaccatcgcgcgcctcctctccggacgcaccgacaacgccatcaagaacctcttgagcgtggagttccagtg

SEQ ID NO: 63307 - DNA, 268 bp, Setaria italica
  Peptide Sequence Number=SeqID_129281
tctaggttggttcctacgtaacggttgtttaactaggtagtaaagtaaaacggttgtctttgttcccgttctattagcgatctctccaaccaaacaaaaaataggatcatcccatcccattcaaccaaacaagaaatgggatcatcccatcccgaaaaactggaacgggaccgtcccgttctacattgtctcccaaccaaacgcaccctaacattccaggtggagcagacccttctgaaggtgagacggtggtgccgtacgtgggccc

SEQ ID NO: 63308 - DNA, 229 bp, Setaria italica
  Peptide Sequence Number=SeqID_129282
aacggtgttaacaggagaagaaaacggtgctcgtcccgtctatagcgatctctccaaccaaacaaaaaatgggatcatcccatcccattcaaccaaacaagaaatgggatcatcccatcccgaaaaactggaacgggaccgtcccgttctacattgtctcccaaccaaacgcacccatggtgttagcttcctgttgccttttgcttggaatctttaatgtttagccccc

SEQ ID NO: 63309 - DNA, 207 bp, Setaria italica
  Peptide Sequence Number=SeqID_129283
ctggtttgatgtggatgtgtgtttgtctgtgaccgactgattgatttgtgatgattggttgatgagatggagcgagttctaagaataaagtggggtgtcagaagtagacaggaagtagaagtaccatctgtggttgcaattggcgaaacatccatccttgtcggggatcaagtcgaaccgaagttgttttggttagaaaaaaaaaaa

SEQ ID NO: 63310 - DNA, 242 bp, Setaria italica
  Peptide Sequence Number=SeqID_129284
ggaacatatagatagcagaggcttgtttgatcgatgtatcttgcgactccccccatgccttgtgacaaagcgctttcaatcagctcaacaaaaccgggggtgacattggcggcatagcttcctcctgggcatcaaccatttctagggatctttcttacagttgcttgcaatttctcatggccaccttccaatgtggattgcccagctgttacattgggtaggatggactccttgttctcaag

SEQ ID NO: 63311 - DNA, 255 bp, Setaria italica
  Peptide Sequence Number=SeqID_129285
tactaattagtttactaaaccgtttttaattagtaattttacaagccgcatctggaatgagacttggctgggaggtttcttttacaagccgtgcaattatgaactatttgttaagcaatcacttaacatggaaatggctattattatggcaagggatgctggaatggattggataattcaccttgatactgatgattgattcatccagctgcggctgaatcataaaacggttgaaacaatggcgcttagacaacc

SEQ ID NO: 63312 - DNA, 212 bp, Setaria italica
  misc_feature (180)..(180): n is a, c, g, or t
  Peptide Sequence Number=SeqID_129286
ttttattacatatcatgtgcgtatacggctaattggataactggggaggactaatgaattcccccttgtgctctgtcatgacaggcctttataattgcatcaacagctactgaggaggagatgaggaactggtatcgagaacatgttgtatggaccgataaggacaccaatttgaaactnttgagaagggtgtgttgacacgtatatatgcg

SEQ ID NO: 63313 - DNA, 256 bp, Setaria italica
  Peptide Sequence Number=SeqID_129287
cgatgtgcttcatttcaaaatcaccttcccattctcccatttggagtgctcaatgggcacgcagaagagtactcaaaaccagtccttgggaatatgacaggttgctctcccactacaccaactccccaaatgttctctgtccttccatttccatctgtgacaatccaatgtcttctaagaagctgaacaggaaggacagagaacatttgggggagttggtgtagtgggagagcaaccagtccttgggaatatgaca

SEQ ID NO: 63314 - DNA, 244 bp, Setaria italica
  misc_feature (219)..(219): n is a, c, g, or t
  Peptide Sequence Number=SeqID_129288
gtttggtctttattttttctttttcttttgctgtattactgaacttggtcatcataggtgtgggcatcttattaggtaatccactgttcattttcttccaaatatcctccacacgtgattttgtgcctgtgagagaagaaaaatgtttgaggctatgtgtttaattttaatgaagaaaatgataaaatataatgacagcatgtgcacaaggatcaaatntgactggcatgttacactgtgctgt

SEQ ID NO: 63315 - DNA, 421 bp, Setaria italica
  Peptide Sequence Number=SeqID_129289
tctccgactcagtcgcactagtcgaagctcttccatgacgaagtgcggtgccgcccagttgagaacatgctcgcctaatgatcacagtcttcaagttcaacaagttctgtagtgctaaggtatgaatttttgtacatagatggcttctgctactggaggaagtggcgatggtgggggcgatcatcgttcctcttccggctaaggggaaaaccatagttgtcccttgggataagccgaagaaatgagcatgttggagaaagcaatgcttcgttatttgcagaaacgtcataagcaatcctcaaggagcggaaggcacgaccttgtatgtcaagcttgattcgttagaagacatctacaagatgcatggccaccactaagtagttactgagacgagtacgtggacctcagatgaatcaagaag

SEQ ID NO: 63316 - DNA, 280 bp, Setaria italica
  Peptide Sequence Number=SeqID_129290
actcagtcgcactagtcgcgagacattggagcgggagctcaccagctactgtcgttgcctcaccttccgccatcacctccgtttgccgtggtgggggtgtcggaggttcagccagcgcggtgatgccaacgtaagcgaccggccaggttggtatggcttctgctactggaggaagtggcgatggtggggcgatcatcgttcctcttccggcaaggggaaaaccatagttgtcccttgggataagccgaagaaaatgagcatgttggagaaagcaatgctt

SEQ ID NO: 63317 - DNA, 243 bp, Setaria italica
  Peptide Sequence Number=SeqID_129291
gccgaggttggcgacggtggctggcgcgaatgccgtgacggactggaaggccggggcggggtcctgggcggcggcgttgaccctgagagctcgggagcggggagagacgagggaagggcttcgacttcctcggatgcgccgtcgccgacgcctccctctccctcggcgacaccgtcatcgccaccctcgaccccaccctgccccccggcaccgtctccatcgcctccgtcacctccccgtccg

SEQ ID NO: 63318 - DNA, 248 bp, Setaria italica
  Peptide Sequence Number=SeqID_129292
taagctatcttcactcaaagaagattgtgcaccgtgatgtgaagactgaaaatatgcttcttgacaaaacaagaactgtgaaaattgctgattttggtgttgctcgccttgaagcttctaatcccagtgatatgaccggtgaaaccggaacacttggttacatggcacctgaggtatcttttctcgagcaactactattcatgttttcctcagagttgctcttttgattccatgatagcataataaaa

SEQ ID NO: 63319 - DNA, 357 bp, Setaria italica
  Peptide Sequence Number=SeqID_129293
tgtacctttcctactaagtaactacctttcctttagttaaacctacttttgttctacgtcttctttagagaaacggactggcttattcgcagagatagactgcgggtccgcactgtctattgtgagagtgtacatgtctgagaatcttggtaacttagaagaaataatgaggccagtgctgttgaaagaacccgcaggagggtgggtgaagaggatggcatccttctccttggtgtagctaaggatcagcagaaccacattcagcgccacatatagtgcgatgcagccgaggaggaactcgcggttttgcgggtaactttttcgggtagaactgtgcgagcaggcgacggcgatcac

SEQ ID NO: 63320 - DNA, 238 bp, Setaria italica
  Peptide Sequence Number=SeqID_129294
tagaagctgattgatgactacaacagcgagcgcaagagtaaatgaattggtagctcatgtctctgaccatctgggagacatcggttgtctagggaaacccctcttgtggaagagagcttagtctaatctaaccagatagttattgatagacacgacagaaagcacagaactaatgtctgtcttgaacggtattcattcactgatcaagcagtacagtatgacaaaaatgtcttgttta

SEQ ID NO: 63321 - DNA, 421 bp, Setaria italica
  misc_feature (404)..(404): n is a, c, g, or t
  Peptide Sequence Number=SeqID_129295
ctcaataccggacaataaatagaagacaagtaagtaggaataccggacaatgcccaagcaagaaaaataataattcctcattctccttgaaatttctctgacgacatttgggacacctgatggtgctacctataggggtcagttgaactttagcactgcggccaatttgcacttcttccatatgcctctcgaacggcgttacatcgctatactgacataactcaaagagcacacattcgttccagaaatggtcatagccactgatggccctgccacagcggaagcagagcaactgaccacagttgccgcacgacatcttgttgcacccttctgatttgacgatgggcatttggcattttggacatagttgaattagaatatcactgaacatttttctgatggtnagcaattcctgcaccat

SEQ ID NO: 63322 - DNA, 388 bp, Setaria italica
  Peptide Sequence Number=SeqID_129296
tcaggttggaagaggaggcgggacgaggaaccggaggtcggaaggacgcagcaggcgcggagcaccgacagagcaccgtgcttgcacctactaccaagactccccctacgagcgcagtgtggtgagggggtgggcaaaggcgccagttggcgtggctgcaggagatcccccagcctaggagcttgaggattgccaacttcaggttccaaaggcccgcagattttgtaggcttgtagatcttcctgcttggtttaactctcaagtagctccgtgccagacaagaatctagctagcagtgacaaatgacgacgacgatgacaacaccaatgttacaggatagcttttagttcgtgcttataacggtgcaacttttttctagcgcacattg

SEQ ID NO: 63323 - DNA, 360 bp, Setaria italica
  Peptide Sequence Number=SeqID_129297
actagaacatgatcgatgcggagtgtacggcttcttcgtcgcacgatgacggcccgggttggtgggagggggggggacgggttgacactaccagcatctgtgcgatcccgtccccactgcctccctccttaggtggtggactaccttgtgtcgggtcggaagcgccttgtagttgagaggggccgaacctcctcttggctgtacgttgggtcatcgtcctccgagttcgtagtgtcatcaaaatacattggcactatctagttcaggggcgaccttgaggggaaccgaataacaggcgtcgctctgtgaccacgtcttccttataaaatggcaaccatggaaattaaatgttggcaagat

SEQ ID NO: 63324 - DNA, 422 bp, Setaria italica
  Peptide Sequence Number=SeqID_129298
gggcatgttaaccactgcacagctccccagaagctgaagcataactaactcgcagcctcaaagaaaagcacttgcggttgcaaatgacccttttcaaacatcacaagaacatcaccccaactaccaataaccttaacagtctggtcatcatacatgacccaccttccatccttgaaagcgaaacaatgataatgctggccatagtaacaaacctgcaggtgtcaagagcaataagatatacatctgatactgtttggattgacagatttctaaacaacagattcaggtaaagactaggtagtctagtgaaaactcatgctatttacttaaagatataacaaccttactgtaaatctgtaatttggagaaaagagaacaaatctatatctatttgattatccagctgataggtatagagctac

SEQ ID NO: 63325 - DNA, 260 bp, Setaria italica
  Peptide Sequence Number=SeqID_129299
aggcgatgaataacaaaatctcatggggtcactatgttgactcatgctttacagatttctcggaacacaatacctgccccagagttagtaccgtattccaaatggtgtttctattccaaacatttctcaacgagtgaatacagctcccgcctcccctccctctccttctccctccgccgccgctcctccaagcccatctccctctcccactccctcccccctccaagcccctcttcaccccacccccaccaccgccgccg

SEQ ID NO: 63326 - DNA, 368 bp, Setaria italica
  Peptide Sequence Number=SeqID_129300
actaataataatactagaagggacaatagttaaaccaactagacaacaagactaccccagaagctgaagcataactaactcgcagcctcaaagaaaagcacttgcggttgcaaatgacccttttcacacatcacaagaacatcaccccaactaccaataaccttaacagtctggtcatcatacatgacccaccttccatccttgaaagcgaaacaatgataatgctggccatagtaacaaaccactgacaccagagtgtgcttgcttccttgatctataccatggaagaagatgctaatgtctatctcagttgaaatccagccaaagttgcagatatgtcatccacactctctttgttgttctgccat

SEQ ID NO: 63327 - DNA, 241 bp, Setaria italica
  Peptide Sequence Number=SeqID_129301
ctgccccaacagttgtcaagagaccattagcacagcacactcctgagctgacggctatggtatgttaactggcttcacattattccttgaattattcaatcttctagagttctgtaatgtaagtggcccattctgctttaaattgttgcaggttcctgcatctgtacgggtcaagagagaatctgctctcccgaaaccaaaaccaaaggtggtgcagcagcagcagtcatcaacaccgtcc

SEQ ID NO: 63328 - DNA, 255 bp, Setaria italica
  Peptide Sequence Number=SeqID_129302
gtgtgccgccctctcgtggtggattggattggatctgcatatctatctattctatctgttcacaggaaaaataataacccctgtgtctgtgttgctgccctgacctggcttaggaggtggaggaaggtgttggtgattgggattgggctgtggcctaggaattcctgttagggccaggagctcagggcagcagcaggtgcaggagcaaacagatccctgcaaagaaacaaagaaaaaactagaaccggtaatctt

SEQ ID NO: 63329 - DNA, 279 bp, Setaria italica
  Peptide Sequence Number=SeqID_129303
ttttaactttaattttgttatttgtttttattgtattagtaattaataggtactaggtaggttagaagggagaccattggacaggtaaagagcaaggtgaagaaggattatgcatctgtccaactgacagcttggaagttctggccaattgtaagttggatcaactatgagtacatgccactccagctccgagttcttttccacagcttcgtcgcatcctgttgggcggtgtttttgaatctcaaggcagcgagatccatcgcaaatactaagaaggca

SEQ ID NO: 63330 - DNA, 243 bp, Setaria italica
  misc_feature (17)..(17): n is a, c, g, or t
  Peptide Sequence Number=SeqID_129304
ccatggaataacatgangtttatgatgtattatggtctggtggttgaaggtaaagagcaaggtgaagaaggattatgcatctgtccaactgacagcttggaagttctggccaattgtaagttggatcaactatgagtacatgccactccagctccgagttcttttccacagcttcgtcgcatcctgttgggcggtgtttttgaatctcaaggcagcgagatccatcgcaaatactaagaaggc

SEQ ID NO: 63331 - DNA, 246 bp, Setaria italica
  Peptide Sequence Number=SeqID_129305
cgacgtcaaggacgtcgccaccgaccccgtcgcgcagatggagctctgccgcaagcccatcgtcggcgccatcgcggggttcgccgtcaccgccggattcgagatcgccctcgcctgcgacatcctcgtcgccggacgctccgccaagttcctcgacacccacgccaagtgcgtcaatagtcctctacttcatccagatcacgattgctcggaatcagtaacctgctattaacttttgctgctctt

SEQ ID NO: 63332 - DNA, 467 bp, Setaria italica
  Peptide Sequence Number=SeqID_129306
ctccctctatgtttacaagaagggcacaagcctcgcctacctgctactctacgtcgacgatatcgtcctcactacctcgtcctcgactctactccagcacatcatggctcatcttcactctgagttcaccatgacggacctcggcgatcttcaccacttcctcggcatctccgtcacgcgctcccccgacagactgttcctgtcccagcgacagtacgccctggaccttctccagcgcgccggcatggctgagtgtcactctacggcgactcctattgacactcatgccaagctctcggcgacgacaagctcaaggatggctccgagtacaggagtcctgcaggggccctccagtacctcaccctgactcgacccgaccttacgtatgcagttcagcaggtgtacctcttcatgcatgatccccgcgagcctcatctcgcgctgatcaagcgcaacctgcgctacag

SEQ ID NO: 63333 - DNA, 378 bp, Setaria italica
  Peptide Sequence Number=SeqID_129307
aagcctcgcctacctgctactctacgtcgacgatatcgtcctccactacctcgtcctcgactctactccagcacatcatggctcatcttcactctgagttcaccatgacggacctcggcgatcttcaccacttcctcggcatctccgtcacgcgctcccccgacagactgttcctgtcccagcgacagtacgccctggaccttctccagcgcgccggcatggctgagtgtcactctacggcgactcctattgacactcatgccaagctctcggcgacgacaagctcaaggaataggactaccgaagtaacaaggaagtacctagacaaggggtacccttacctaagttaaccttactaacccttagttaacttactta

SEQ ID NO: 63334 - DNA, 426 bp, Setaria italica
  Peptide Sequence Number=SeqID_129308
gaccaatcaacccttccatccttggtagcaggaatatctttgagtagggaaccaccttcagcgctgtttgaaagctatattatagaaacaggcagaaatattacatacattcaaaccagaatgcaataagcaaaaccaaggaacaagaagccaaaatggagagttacatatcaatttaacaaaaagttttgtgaaaggataatagatgctgctagtaataattaattttgttcaatatatgcatgaaaataaatgatagtagtacagtacgattatgatattactgttattgtataacttcagtgatagcatttgcattcaccaaaaaactgtgtgcaatcatatttaacagtaaacctgctgaggatgttattataacttccatacaccaaatatttgataggcaaagacttctatacaccacat

SEQ ID NO: 63335 - DNA, 200 bp, Setaria italica
  Peptide Sequence Number=SeqID_129309
tcggagtgtcacaatcaagtacccttacatcggattcttccaaagcaaaatcagctgcatcttctatatttgcaattgtagaccgaaaatcaaggatagacccaagtgaggatgcaggagtgactgttgagacgctgcgaggaaatatagaattccctgagacacgcaacaggggaaaggcaaggcacacaggggatagg

SEQ ID NO: 63336 - DNA, 267 bp, Setaria italica
  Peptide Sequence Number=SeqID_129310
cccgcaagacacgatcccaggtaaaaaatgcataaatgtcataaaaaagcatcccccgcaagacacgatcccgaggtaaaaaatgcataaataccgtgctgaaaaataacctggttggcatctgtttggtcctcacccaagaagacgaggataaggtaagtgtggagaggcttgtcagtctcggacgaagatttggacaagtgttcccaaccatgcacatatcacatttattctattattacagcttcctcctacatatctgcccaa

SEQ ID NO: 63337 - DNA, 419 bp, Setaria italica
  Peptide Sequence Number=SeqID_129311
gaaggtcattgatgaaacttgttctggactccaaatggatctgccgagacttttggtacctctggactgggtagtgaggatgcggatcacaacaccaatggttcgggagcctacgtggagccgcccatacttcagcacgatcctggtgaagcgatggaacaactgtgagggtcgctctgcagagcagcttgagaggagtttatccaccagagcattggaattacgcagtgaactgccctatgttgttagaaggttattatggagatctcgttattatgtcatttgtctgttagagtgtttataatccttagcaaagcgtaaattcgaactaccggacgttgtaggaagtatagtgaacctggtttggtgttgtaggtgttgtttactattctggacctatgtttgtactgcagacggtg

SEQ ID NO: 63338 - DNA, 400 bp, Setaria italica
  Peptide Sequence Number=SeqID_129312
tcctattactttctagtctacgtattccttggttgtaagtcgtattggtaactaacttgttgtagggttcgtcttcttgcagagcagcttgagaggagtttatccaccagagcattggaattacgcagttaactgccctatgttgttagaaggttattatggagatctcgttattatgtcatttgtctgttagagtgtttataatccttagcaaagcgtaaattcgaactaccggacgttgtaggaagtatagtgaacctggtttggtgttgtaggtgttgtttactattctggacctatgtttgtactgcagacggtgaaaaccgagttatctcgtaattgctagatgcctagatgtgtatctcgtaagcaactctgactaaaaaaaaaaaaaaaaaaa

SEQ ID NO: 63339 - DNA, 188 bp, Setaria italica
  Peptide Sequence Number=SeqID_129313
ggaagatggggaggagaggagaggagaggagagggcgaagcggtggtgatgtccgaggatcggtcggtgacctacgaggagctgcgggagcggcttcatcgccgcatcgcggagctccgtggcaaccggtgcactaggcctgagttcttgaataagcccaagaaggagaagggcaagaaggcaaaggg

SEQ ID NO: 63340 - DNA, 251 bp, Setaria italica
  Peptide Sequence Number=SeqID_129314
ttttttccttccagctaaagtcaaaagtccaaaattcatactctgacaccgcctctattctgaatcgctctccaggcttagagccttcaagcctctagccctctgcatgatgtttcactcatgtaagtaacaagcattcaacagaacagaggtagaatacatgcttcttgaagcaaaacaaatttaattgtatccaggttaccttttttgaactcttcttctctcgaacttcatatctctcatgtgacaga

SEQ ID NO: 63341 - DNA, 345 bp, Setaria italica
  Peptide Sequence Number=SeqID_129315
cgaatcaatggctttccattcattatctaatatactcatcatgtgccttttccttgagaggcatgaggccttaatgaattattgtattagatatatagataaatttaataggtagaaatgcctatacataagacacttttcttattcgttatgattcacatgcgatggcatgtcagctttattattgttacagcatgaggacatctatctagaatggaacaccagcaaagggctgctggaagaacataggcgggatcgctgtagccatcgggttgaacatggacggtagttgctgttgctgcatgatctgtgagatggcaccacagtgacattgttgaaacggca

SEQ ID NO: 63342 - DNA, 213 bp, Setaria italica
  Peptide Sequence Number=SeqID_129316
tcttcatagaattcagcaacaaagtcctccatgaacttatgccttttctctgctctccttttgccggcctctgtcttcatcatgtccttcaatttaaaaagcttctcatgaaaatgattaatcgatgtctgtttctcctccttggacatgtacttttcctttgacaagttatcacgtggcagtattctatagtatagactgagtcggagacac

SEQ ID NO: 63343 - DNA, 260 bp, Setaria italica
  misc_feature (5)..(5): n is a, c, g, or t
  Peptide Sequence Number=SeqID_129317
tacancttttctgattatgcatataacctacaagcttcatgaatgtaaaatcaaacattgtctatcctttatgttcttcatgacagtagttgttttatgtatgccctttaacttgtatgttcaacaggttttggtttagcttgtcatcttggcgtccttgcagaccttcctaccatcggagttgggaaaaatgtaggtcatttactgtagttgcaactcgcaagtacagctgttggttttctactgtgaagtcagtagtc

SEQ ID NO: 63344 - DNA, 448 bp, Setaria italica
  Peptide Sequence Number=SeqID_129318
ggatcttgacatcccttatgatcaccctgccctacaagaaatatatgacagaagagacctaaagctcaacaagtataatatacaatgcagtacagcatatctaatcagtgcagcaaatctaatattgacgattttaatggatatggattaattatagaggacttcctccgttccaaattgtagttcgttttggtatttctagattcataatttttactatatatctagatataatatatatttagatgcatagcaaaattatgagcttagaaatgctaaaacgacctacaatttaggatggaggtagtagtaactaaactcagaccttctcagtgacttttttttactatccatgtaggattccaaaggatgtactgcactctataccgacaacactgctacatagcatagagggcatgcccggtttagactggaagagggctggctt

SEQ ID NO: 63345 - DNA, 445 bp, Setaria italica
  Peptide Sequence Number=SeqID_129319
agagcgatgcaggaagaccggaggagatgatgccatgacccacactcatgatcaatagcgtggcacctatgaagaatggcctgccgactcctcgcaggcgaaggaaatgatcggagatgaagcctgcaccaaacctccctgagaagttccagatgctccaaagtgacactagtgtgctggtctccttgtttgtgtagccaagggagccgccgatctggctgatattgttcaccgtggctagacccgatcccatcccgcaagccattgctagaaagagcaaccagaagttgagttttcccatggcctgtagcacattcaggttttctttgcctcttcccggagtaatccaattctttgttctgaagaagttggttcttcatgttgtattgattctagcttctgggcctttacagcaacggctactggagataaggctagcagcagg

SEQ ID NO: 63346 - DNA, 427 bp, Setaria italica
  misc_feature (312)..(312): n is a, c, g, or t
  Peptide Sequence Number=SeqID_129320
tttgtcttcgtaattaactaactattcttgtattgtctttgtctattctattccctattattgattggttatacgaggttgttgaatcatagctttagcatgagggaacatatagcgtttgcctttctttccagctgcaagcacaagacaagcatgaccagctgcagctcctatacagagtgtgtggatctcagctttcatacgcatcattgcatcgtagatggcaaaaccttcactctccatcccgaccggttcaccatcatcacgagctgttcctgttgagttgatgtatatataaacaggctctttacngttcatccattcaaggtcatcaactgggcaacaacaagctcagtcactgctggcaccaacggcattccaatataaacattcgaccatgaagaagcaaatgaaggcaaatctaggt

SEQ ID NO: 63347 - DNA, 256 bp, Setaria italica
  Peptide Sequence Number=SeqID_129321
tccccaatcgtcatctcgtgctgataatactatgagcttggctagttcaacatttgggtcgatcaaaatgggtggactatatactaacagtaaataccaaaatccggcctgatactaatgagaggaacaacaatggcttcgtggaaagctcgtcccagctctcatccagacaccataatattttgatgggcccgctctgaataccactgcgccttcacgcgccaccaccaccaccacccctcgtctccttcctccc

SEQ ID NO: 63348 - DNA, 229 bp, Setaria italica
  misc_feature (50)..(50): n is a, c, g, or t
  Peptide Sequence Number=SeqID_129322
tcatcatcccatatgatggtatacaggtgttgaatcatagctttagcatnagggaacatatagcgtttgcctttctttccagctgcaagcacaagacaagcatgaccagctgcagctcctatacagagtgtgtggatctcagctttcatacgcatcattgcatcgtagatggcaaaaccttcacaactcgcccctccactccaactccctcccaaccaccttcccttcc

SEQ ID NO: 63349 - DNA, 475 bp, Setaria italica
  Peptide Sequence Number=SeqID_129323
aaacaaaaggaaaccgaacaaactaaggttaactaaccaaacccgttaacggaaacaaaacgaactaggaaagaacgtactaccttagaatacgactagaaataggaaaacctgagctggagctttccagggagaagactgaactcgctgaagggccacaggcttggaagatctgaatttttcacagaagcatacgtaataacgtaagtagctaattgtttggtggaccatcacagcacatgttcagaaggggaaagttttaaacttacatctttttgcaggagggtaggcaggttactgaagtcaagtggattcacagttgcgagcttcatcgagaggaactgaaaccacagaacggcaaaattgatcaggattatgaaagctgcatcccatggcatcagatgatccagctatttggagtatgcctgcagcttacctcgacttgccgttgcagcgattgctacgtagtttatga

SEQ ID NO: 63350 - DNA, 425 bp, Setaria italica
  misc_feature (78)..(78): n is a, c, g, or t
  Peptide Sequence Number=SeqID_129324
gtaagcagcgaaaaggattagaatttcgagctccaactgcgtgcagcaatcaaatataactatgtgagtggcatcctnacttcaacttgctgctgaagtgattgcacatagtttatgatctcatcaagcatcagtgccttgccaaccaccttgttgcatcctggcacgaggtcctgaagaaatttcatcctctggctaatcttctctcttctaaccctctctgcgaggctgtggctgtcggtcgcctgccctcgccgcgcccggacatggacgtagtccttgggcggctcgaccggcggcttggagctcttccccttgccctttttctgacctttgtcttcgaccgagccgtcgctcgccgtcgcctcctccaccttcggcttcaccgggctcccgccggcgcccaccctgcacttcttcccgtc

SEQ ID NO: 63351 - DNA, 417 bp, Setaria italica
  Peptide Sequence Number=SeqID_129325
agaacgaattagacttaggaatagaaagaaaagacgtagaagaatagacctactttactacggcttcgttcccggcggtggctgtgcgttcaactccgccggtgagttcagccggagatcttttgtttttctgtttgtttgcgaaacggtgggaagcttagcatcccctctgggttgcttgtcttcgttgttggcggtggcgccggcgacggcagactccttttccagtcgctggttcttccgctggcgatggcggatctgtgcttctcttctgctttcaggcgtgcgggcggccgatgttctttcaacggatcgaggcgtgctggtggaatccaggcgctggatcatgcggcacatccaagctttggagccttgcgtcttggcggaagatgaagatgttctggtcctggtgggcgt

SEQ ID NO: 63352 - DNA, 287 bp, Setaria italica
  Peptide Sequence Number=SeqID_129326
ttggaacaacattttcaatctctgtaggcttcacaacacctatgtcttctacggtagcaacaatgttttcaatctctaaaggcttctcaacaccaaagtcttccaccgcttcacttgcacttaccagtccttcgacatcttgctctttccaaggactacccttgaccacattgtctctgctagctggatcaacctcctttacgcttccatcataagacaacaaatctagaatggtgcatcagcactattcttggctcgctggctggctcaggcttgatatcgacgcc

SEQ ID NO: 63353 - DNA, 235 bp, Setaria italica
  Peptide Sequence Number=SeqID_129327
attcaaaccaggccccctgacatagttgaccttattggtgctacttgatccatcagtatgtttgattggttttccataaatgtgaatgattctgcagaggttgcagccacattacctgctacagcccatcgttattgtgtgtggcaaatttaccaaaatgctcttcagcagttgagtcaagctttccacggttcaaaaactctagaatgcaacttcaagagatgcttatttgatt

SEQ ID NO: 63354 - DNA, 469 bp, Setaria italica
  Peptide Sequence Number=SeqID_129328
ttgcaatagctacgaaagaatacgcaacactagacacaaaaaaggtgatagtacagtcctctaatgtcactacaactgctccacaaacgaataaacagatactcgcaatgtacaaataggctaagacagaagctgctggatccctgacttttggtcagccgttagattagtcgggaacttgatctgaaacttgatccgcaagttccccttcttagacggctcccttgtgatcggcatgccttcgccttgcacaacttcttcataggtaggacatctctcttgaacttagggtgtgcccgttcttctattatgaatactagatctgatggtacaacattgcgcatctcgttgcctttctcaggaaaggtgatttttgtgcccttcttccatccaggcttgatatctatcgtcaggatctcctcaacatttgttggtttcccggcggcgtcaagtacatccctggagatct

SEQ ID NO: 63355 - DNA, 354 bp, Setaria italica
  misc_feature (354)..(354): n is a, c, g, or t
  Peptide Sequence Number=SeqID_129329
cctcataccgcactcgtgcctttaaattgtattatgcaagctctagtcaaaataagcatctccagtgtgcaagcgaaaatcagaagatttaatagaaggcacgacctagcactaagtctctactgatccctactataaccctcatccttgctcaatcaatctttacagaggaacagaatgctaaaacatgtggtcaatctgtaatcttcaggaaacaaattggacaaggaatcagcggtctcacccggcggcgtcaagtacatccctggagatcttcatcttcttagtggcgcccttgtacaggtcctctagactgcaagccagctgccgctcgatcggcggcgccttcctctn

SEQ ID NO: 63356 - DNA, 417 bp, Setaria italica
  Peptide Sequence Number=SeqID_129330
tgactttggtcagccgttagattagtcgggaacttgatctgaaacttgatccgcaagttcccctcttagacggctcccttgtgatcggcatgccttcgccttgcacaacttcttcataggtaggactgacaacggatttcacgggaatagtcaggtttcgtccatccagagttgtcaattggactgtgcagcccgttaatgcctccacaagagagatcttatgtgtgtaaataagatcgttaccatctctcttgaacttagggtgtgcccgttcttctattatgaatactagatctgatggtacaacattgcgcatctcgttgcctttctcaggaaaggtgatttttgtgcccttcttccatccaggcttgattattcttattcgtctaggtattcttccttctaactattttgttt

SEQ ID NO: 63357 - DNA, 238 bp, Setaria italica
  Peptide Sequence Number=SeqID_129331
caggaggacgaggaggaggtggagaaggaccgagtccgacgaggtcgcaggctcggcgactgtctcttgtccccggcggctgcggcggcggtggcggccgcgatctccgagccgatgcggagcgggaagttgaggagcgcgcgggagccgcgcatgcggtaggcggcgcggtcgtaggcgagcgccctctctgtttagctgaggaaacccaagtgagctgtggtgtggagtgatcgag

SEQ ID NO: 63358 - DNA, 242 bp, Setaria italica
  Peptide Sequence Number=SeqID_129332
caatacttgcagctgtagttgggagccaagcagttattactggcacattctcggttatcaaacaatgttgttcctttaattgctttccaagggtgaagattgtgcatacatcctccacagtacacggccaaatatacattccagagatcaattggattttaatggtactgtgcttggctgttactattggcttcagagatacaaagcacatggcaaatgcacaagggttggcagttataaca

SEQ ID NO: 63359 - DNA, 406 bp, Setaria italica
  Peptide Sequence Number=SeqID_129333
tcgcattggtccaaaagagtacaggctgtacagggttattgtcaaatatgggtatcgtgatgtgcagaaggatgacctagagtttgagaaggagcttgtcagcaacattgcagagttcatccgcagcagtggtgaatatgacaagaatggctttgtggaggacacagatatgcccctctgagaagctctctcccgtcagcacgggaattccattgtgggaagaggatggggaccttgatgcatcagcatctcctcataaggagatagacccacagaacatagcacccaagcgaaagaaagcgaggttcatgataccaaagagcgcccaggtggacagcgaggtgcgccgtagaagactagacaaggaagactacaataggaaacgaacaaaagggaaaggaacaaa

SEQ ID NO: 63360 - DNA, 247 bp, Setaria italica
  Peptide Sequence Number=SeqID_129334
cggttcggcgcgcctattccttgtttcccttgcggcgattcgacgaggtttgccgccatggaggcagcaggcgtgacgcattgaggcgcgcgtgcaggggccggggccggagccgggcacatggatctggaggccgcgggcggcgcggcggcggcgcacgggaaggtgaggcagccagctcgtggcctgggaggtggcggcggggagtcatggcgcgcgacgctgctgctcgcgtaccagagcctcg

SEQ ID NO: 63361 - DNA, 222 bp, Setaria italica
  Peptide Sequence Number=SeqID_129335
ttgatttctggtatgtatatctgaccgtgcactgtagaggatgtatgtacataccagaaatcaattggatgctgatgatactgtgcctggctgttactattggcttcagagacacaaagcacttggcaaatgcacaaggtttggcagtaataactgttatgcttgtcaccacatgcttaatgtcactggttattgtgctttgctggaacaagagtatcttca

SEQ ID NO: 63362 - DNA, 190 bp, Setaria italica
  Peptide Sequence Number=SeqID_129336
tcgctttctttcgcttgggtgctatgttctgtgggtctatctccttatgaggtagatgctgatgcaattcaaggtccccaagcgaaagaaagcgaggttcatgataccaaagagcgcccaggtggacagcgaggtgcgccgtgagctgcaggagctcatgggaacgcaaaggggaggcaggcatgtcctt

SEQ ID NO: 63363 - DNA, 217 bp, Setaria italica
  misc_feature (17)..(17): n is a, c, g, or t
  Peptide Sequence Number=SeqID_129337
ttttggtcggccaccancttcatcctcgtctactgcatcggcggcatctcaggtactgtagcatgcaatgtgcgtgcatggacgcgctcgctagctgctgtacgaatcgaaatgaattgacgcgagcatgggacatgggaccaggtgggcacatcaacccggccgtgacgttcgggctgttcgtggggcggaagctgtcgctgttgcgcaccgtgct

SEQ ID NO: 63364 - DNA, 263 bp, Setaria italica
  Peptide Sequence Number=SeqID_129338
cgggcgccgtcgcggatgacgacggcatttggggctggaagattcccagtggcggcaagggggtgaaggtccaggagttcacttcgtggatgctctccacggcttcggggcttgggaactgcctgtcgcggtatgtgcaggacaggttcaggtcgttggtggctgatccggcagagcaggaaagctctgtttcaaccgttaacacaacatttgtttcttaggctgagagcgatagcccatgcccttccacgtgttagtagata

SEQ ID NO: 63365 - DNA, 251 bp, Setaria italica
  Peptide Sequence Number=SeqID_129339
ggcttgggaactgcctgtcgcggtatgtgcaggacaggttcaggtcgttggtggctgatccggcagagtaactcatcacaagcaggaaagctctgtttcaaccgttaacacaacatttgatacttctgatgtgtatctactaacacgtggaagggcatgggctatcgctctcagcctaagaaacaaattgagcgaaaagttcttgtcagcttctgtaattggaatggacacagaagaccttctttataggt

SEQ ID NO: 63366 - DNA, 244 bp, Setaria italica
  Peptide Sequence Number=SeqID_129340
caaagacacattttatggtagctccgggttcctttgtgccgcacatccaatattccacatgcttccaccatctggtatgacccttgcttatcatgcctttgtcacacctgatagtagcttactgtgtctctaaactagcaggtaaggagaagaacttcgtttacagccatctgcatcctcagataagggtttatgaggcacatccaaagcctgtcggcttagcatttggtggaacagttggaaa

SEQ ID NO: 63367 - DNA, 199 bp, Setaria italica
  Peptide Sequence Number=SeqID_129341
ctcgacgacgaggtgcacctcggcaacaaggtgactaaggaataaagaactaacttaaggaaaagaaccaatacgaagggaacaacgtagacttaggtagaaggaccgaagctggtcgccctgttctaaggaggcaccgccacgtagtactgttatggggttctgggttcttgaatctttgttgggcggtgtgccttgt

SEQ ID NO: 63368 - DNA, 301 bp, Setaria italica
  Peptide Sequence Number=SeqID_129342
taaagacgaacccaaagggaacaaagtaggtaaccctagactagggaaagaataaggaaccaaacgtaggctcaggcacaggccatctgtttggcttcttgtagctagcctcatcaacatcaggacctttcacaaagcctcaacctttccagaaccatagaccttgggtagataatgtgtttcttccttaccatggaagttcatgccaatgaaattcccatcaaaatcaatcaggggccctccaataccagcctttgtgactttacaagtggagatcataagctctttgcagtcgagattg

SEQ ID NO: 63369 - DNA, 250 bp, Setaria italica
  Peptide Sequence Number=SeqID_129343
ctccgtgaaatcatcaactggtaatggattaggataaagcaagggccagagttcctcttcttcaaaatctggtgcatcaagctgaagtgaatcaatgaccaagtaccagtaatgataaacaagcaacattataacatgatgacagtgtgcatgataatttaataacattagaacttaagtggcccatgtttacggttaaaaaaggaagtgactcagcttgattcaccttctgaaacactcgcaaaggata

SEQ ID NO: 63370 - DNA, 173 bp, Setaria italica
  Peptide Sequence Number=SeqID_129344
ccagaaccatagaccttggtagataatgtgtttcttccttaccatggaagttcatgccaatgaaattcccatcaaaatcaatcaggggccctccaataccagcctagcacagaagcaaattgacacgtgaacagataatatttattatttctaacaccatgcaaatgcagatg

SEQ ID NO: 63371 - DNA, 397 bp, Setaria italica
  Peptide Sequence Number=SeqID_129345
taattaaattacctaattagtctacctactatttacttagtatttctaggtaagtctaaaaggtctaactacctattggtctagtcctaagtattgttttgtcacttgtttgcacttcttgctttttgtgcaagcaccactactgctacccatgtcccatggcacttaccaccagtgacgacattgggcgccatgaacccatgcatgcagtactgcatgatgcaacagccgttcgccatgaacccgtgcatgcagtactgcacaacgcaacaggcgtttgccatgggcagatttgcctcaccggcgtctatgatgctgcagcaaccgtggaccttaccgttccagcagtactggactccaagggatgatgccgtttcaacatggcaccacagtgaca

SEQ ID NO: 63372 - DNA, 394 bp, Setaria italica
  Peptide Sequence Number=SeqID_129346
tacctaactagtctacctattatttacttagttttctaggtaagtctaaaaggtctaactacctattggtctagtcctaagtattgttttgtctacttgttttgtctactttctttgtcttcttttgttgtctaagtcgtcctacttacttgtcttaccttattgttccctatttgggcgccatgaacccttgcatgcagtactgcatgatgcaacagccgtacgccgtgaacccatgcatgcagtactgcatgatgcaacaggcgcttgccatgggcagatttgcctcaccggcatccatgatgctgcagcaaccgtggacctcaccacttcagcagtactggactccaaggatgatgcctagcatgatgccgtttcaacaatctcactgtgg

SEQ ID NO: 63373 - DNA, 340 bp, Setaria italica
  misc_feature (321)..(340): n is a, c, g, or t
  Peptide Sequence Number=SeqID_129347
caaaaactggaagctcttcaattttgttctcgtagatggatcatggatatggacacaaatgctcttttggatggttccctctcttgtttacatctagctgggtcgctagacttgaaacaaagacaccctttttttttgtaatgctcaattcagggagggtagcgagagtttataccagcataggtcactaatatcttggagtcgcctcagatacagcattctcatgtcctgtttgtgtacggtagcatgccattgcaagtgcagtgtttgatgaagccgttaaactgaagatcaatgtcacaaatgctttgacaattaagnnnnnnnnnnnnnnnnnnnn

SEQ ID NO: 63374 - DNA, 496 bp, Setaria italica
  misc_feature (386)..(386): n is a, c, g, or t
  Peptide Sequence Number=SeqID_129348
tagacaaaagtagacaagggggaattcactatctaaatgacgaaaggcagcaacggctggttaatggtgtatcccaattgaaaccatcctttgctccatattttgatgaatgttgggtggttggggattgacagtaatttgagtaaacaaatcactttagtttattcttgttggtatttttcatccaaacttcatcttctgaatcactgtttgtataaggcatgccattgtcaaattgggctcctagttgccataataacacctaacatgacttcaatagcttgttggtgcagagaatccagttttggttctgcggctgaacaaatctttggtgccggtgggaagagattaagaccggcgttagttttctggtgtctagagctacngctgaattagctggtttgtcggagctaactacagaacatcaacgcttggcagagattatagagatgattcacactgactagtttaatacatgatgatgtcatagatgaca

SEQ ID NO: 63375 - DNA, 261 bp, Setaria italica
  Peptide Sequence Number=SeqID_129349
ttaggcaaaccagcaggaagtgacttggcaaagggaaatctgacggctccggtcatcttcgctttgcaagatgaaccagagctgagggagatcatcgattccgagttcagtgagacggattcgttagctgctgcgatagaccttgttcatagaagtggtggaataaggagggcacatgagcttgcgagagaagaaagggtagaacttaggactaataccaaaaatactagacaagtagaccttaccgaaagaaagaacgaa

SEQ ID NO: 63376 - DNA, 276 bp, Setaria italica
  Peptide Sequence Number=SeqID_129350
taccctttgttgtaagtaaggtcctatttacttacttgtttgtatttcttgttgtaggtgtattttatacaggatcctctgaaaagcaaggacttcaccacataccccgacccccaacaccttgtgcctacattttatctgaatgtgagcttactttgcagctcttgtaaatataagaagcgtaaagtaacttagcattcttttattttgtcatttgcgcatgcttagaagcaacaaattatgcgctatacttgtacggtcacctgactggctgac

SEQ ID NO: 63377 - DNA, 245 bp, Setaria italica
  Peptide Sequence Number=SeqID_129351
ccttgctgcaattgatgtgcccccgcagacgattgtgacgacggcaagcgtccctgaacgcatttctgtttcttcgctgttggaggttgtctcgggcgacttgctcaacctcaacaacaatctcaaatcgcttgttggtgcagaaaatccagttttagtgtctgcagcagaacaaatttttggtgctggtggaaagagattaagaccagcattagtttttctggtgtccagagcaactgctgaaa

SEQ ID NO: 63378 - DNA, 196 bp, Setaria italica
  Peptide Sequence Number=SeqID_129352
ttgctctctgtctgctcgagaagtcgccatgctgtctctgagctgcccgggggtgtccatgagcaagaaggcgttcgattcggggcagctggcctcctgccgctgcagctggccgggcgcgcgcgcagcgccgaggcggcagcgcacgccattgttgttttgttcttttcgttttgttcctttcttacccgttctt

SEQ ID NO: 63379 - DNA, 518 bp, Setaria italica
  Peptide Sequence Number=SeqID_129353
ccttattctcctatcttgggaccagtggtttcccgtgcttacttgtgtcagatgttccaatctcaacccagttgtaagaagattgtgggtagttatccattaacatatatgttagtttaagctcatcctatagtattttattttattatcttatttggcaccgtggatggatgttcacattcctagggccacagagctctgttttttccactagtagtagcaaaaggaaacgtccagctatgagtactgcgatctgattagtgttattagttgtttcatttttatttcacagaacctagtattctaaatttctgataagtggtgcactctaaaatgccgcctgatttttccaatctccatccagtttattttacttggcgctgttccatttccaagtgatgttccgcgtttgaagcaacttggagtttcgaggagttgtgactttgaatgaaccttacgagactcttgttccgacatctttataccaggtaactattccattgttcgctagttgtgtg

SEQ ID NO: 63380 - DNA, 258 bp, Setaria italica
  Peptide Sequence Number=SeqID_129354
cgggtcagcaggagcagcaggaggaggaggttggggcgagcggtggcggagaggtcgtaaggctgaaggcgaagcgcgcgctagtcggtgccggcgcgagggtgctgttctacccgacgctgctctacaacgtcctgcgcaaccgcttcgaggcggatttccggtggtgggatcgcgtcgaccaggtagtcctttcgttctgcgcggattgtgtggtaatttcggatgctattataggctcctgctttaatttgcttg

SEQ ID NO: 63381 - DNA, 201 bp, Setaria italica
  Peptide Sequence Number=SeqID_129355
ggtgacgaaggacgcgctgggcttcgttgcggtgacgctgtgccgcttgccggaggggggcattgaatcgccccctcctgacgacctctgccaagctggatctgagggctagctacgcagaggtcgtcaggagggggcggatcccgagcggcaggtcgcggatccgtcagttgggcccgcgaatccggggtctccggcacg

SEQ ID NO: 63382 - DNA, 400 bp, Setaria italica
  misc_feature (241)..(241): n is a, c, g, or t
  Peptide Sequence Number=SeqID_129356
taaagtaaattacggttttacttaaatttagtttggggtttctttgtttgttctagtattaattctagttttgtaagtctattgtattgtaaggtaaaaggtaatttccctttgtactacctattctattcattccttatatgtgcctgaaatggagcagagctcaaatgatcagatgatgaaaagattccactcatcagcgccaagaagatttcaattccgtgttctacaatgcaaacgngcatagcagcatgcagttcaacatggattttgctgatgataattcactttcttctaccaccagtcatggcaggactgacaagaatatgggtacaaacaggagcatccagtcaaaagcagagggtctctctttctctccaagcaggtctctggatgctgg

SEQ ID NO: 63383 - DNA, 306 bp, Setaria italica
  Peptide Sequence Number=SeqID_129357
tgttctacctattcttgtttttcgttcttgtatttattgtattcggtaggttccgttggtcgttctattctacttttacttcttctattcggtacggttatttgtaagtaggagggcagagttcttcaggaagaaggcagaacatatctgtcgtccagtggatggcgctgcaccttttgccgtgtgcagttcatgttataagctactgcagatgcctgtggaaaaatgcatagggaggaagaagaatcggtttcaatgtgggtcttgttgtcagataatcagtttgaagcatgatgaaggaaaagg

SEQ ID NO: 63384 - DNA, 308 bp, Setaria italica
  Peptide Sequence Number=SeqID_129358
ggaatgctttagtaggatgccttaaaaggggtgggattgcttcattatatgctggatggggtgctgttctttgcagaaatatcccacattccatagtaaagttttatgcctatgagagtctcaagcagtctattttgaaatcagcacctgaaaatgtcaagctcagttctggcgaaacacttatatgcggaggttttgctgggtcaaccgctgctctgtttacaactccatttgatgttgtcaagactacgtagttgtctaatttactaggttcttactttcttagttccctttgttttagttcttaa

SEQ ID NO: 63385 - DNA, 282 bp, Setaria italica
  Peptide Sequence Number=SeqID_129359
tttccgttggtaggttgtaagtctaggtctttctttccgttggtagtattgtatttcccttaggtacgtcttgtcttgagtcattcctttttcagcactgccagcacccttgtcagtctgaggagcatctctttttggaggagggggaggcaccttcataggtgatgcagccctttggcgtggttgaagagtgaatctcaacttaacaacattcccatcaatttgaccaccatccatgtaaagaagagccttctcagcatcagctctcttcttgaattcaac

SEQ ID NO: 63386 - DNA, 463 bp, Setaria italica
  Peptide Sequence Number=SeqID_129360
atctcgtggtctttactcagtcaagatagacgtgtttggctttggggtgttagctcttgtaatcattagtgggcgaaacaatatcatactagaggagcaaggagacactgttggcaaccttgtgcgagatgcatggcagctatggaatgatggaaggctacatgagcttgttgacacattgttgggtgacggatatgaaattgacgagatggtgagatttgttcaggtggcacttctatgtgctcaggaggatccagtagaccgtcccaccatgtcagatgttattgcatttctgaactttgaaagcacaagttcgttacctgatcctaaaccaccgtctgagctgattaacagaggtgctaccggtttcaacttatcgacatgcgtgggtcaactaataggacaatagctataaccatcacgagttcagctcctgtgtcatctagagttcgcatcattgtag

SEQ ID NO: 63387 - DNA, 480 bp, Setaria italica
  Peptide Sequence Number=SeqID_129361
aatgaatccaaagatcgctgattttggatctgctagaacattgagctcagatatagcagaagggcgcacaattagaattgtgggaactagtggttacatagctccggagtatgcatctcgtggtctttactcagtcaagatagacgtgtttggctttggggtgttagctcttgtaatcattagtgggcgaaacaatatcatactagaggagcaaggagacactgttggcaaccttgtgcgagatgcatggcagctatggaatgatggaaggctacatgagcttgttgacacattgttgggtgacggatatgaaattgacgagatggtgagatttgttcaggtggcacttctatgtgctcaggaggatccagtagaccgtcccaccatgtcagatgttattgcatttctgaaactttgaaaagcaacaaagttacgttaacctagaatacctaaaaccaaccgtactagaagactagaata

SEQ ID NO: 63388 - DNA, 441 bp, Setaria italica
  Peptide Sequence Number=SeqID_129362
gaatttgcattaagcggttgtaaccaaggtgaacaaaacgaagtgaagaaagataaacagcaagatggtcaaggtgataggcaagctagcacagggcagaatactgctgaagtcatatcaagtggcataatgcttcatgaacatcctcatctcagtcaaaatcttcatcaaactgataaatctgaaggcctgcaaagtgaaatcttcgaatcaggtggcgttcttgcacttgctgctgcttgcagcaagttctgcatcgccgtgcctgcgcctggtcaaacatggcttgagcttcccaatcgactaccggttataccaagaacgaagaaacagggaaggaaggttgtgatactcaaggacccatgcatgagactctggcccgtgctgtaccaatgcaccccaaggttcagtggcttcatcactggctggttgacatctgca

SEQ ID NO: 63389 - DNA, 388 bp, Setaria italica
  Peptide Sequence Number=SeqID_129363
aagatgccatcttctgtaataaaggccgcactcgcccaaccggcgtactcattccttgttcttgtcctcgacaggttctcccttgctggcccagatcctcagcagacaagttcagggccagaatgaaatggatgggatgccctcgcgacaagaggaggaggcagcaattaagaaaaagtatggaggaatattgcccagaaagactccacttatatctaaggaccatgagcgtgcttactttgattccgctgattgggctctaggaaagcaaggtggtgttcccaacaagcctaaaggtcctcttgaagcacttcgaccaaagcttacaagaaacctaaaactaaaacaaaaaacaaaaaaaataaaaagaaaaaccgtaaaaagaaaa

SEQ ID NO: 63390 - DNA, 382 bp, Setaria italica
  Peptide Sequence Number=SeqID_129364
aagtgatgctactcgcatggttattcaacttacgctctgaagcacaacagctgaaggacactaatggtagtcttgaagaaaagattaaagaactaaaggcagagaaggatgagcttcgtgatgagaagcagaagctgaaattagagaaggagagtttagagcaccagatgaaacttatgacctcagctccagcctacatgcctcatccgaccctgatgccagcgcccttcccgcaggcgccgttagcaccgttccatccccaggggcaagctgcaggacagaagctgatgatgccctttgttagctacccgggaccctcctgtcgcataatcgcttcgagcgactggtcgtgctatgtgaattaatctcaactgaagccccc

SEQ ID NO: 63391 - DNA, 138 bp, Setaria italica
  Peptide Sequence Number=SeqID_129365
ttcaaggagcctggcagtaataaacgtttaaggtcggggatcttctggtaggccaacatctaaagcttctagggaaaaacagagaaggggacaagctcaatgacaggcagagaaggatgagcttcgtgatgagaagca

SEQ ID NO: 63392 - DNA, 254 bp, Setaria italica
  Peptide Sequence Number=SeqID_129366
ttaatttacttaatttaggtagtcttgtatccaatgctggagaacatacagaagtacctatggcctcgactatgcaagcttgatcaacggacactgtatgagcttcactaccaaatgattacatttggaaaggtgttctgtacaaaaagtaagccaaattggatacagctccaatagatgcaactgaagagactcaggtagaggttgaaggggcacccatccaagcctcacacatatcctaccaacattggtgt

SEQ ID NO: 63393 - DNA, 436 bp, Setaria italica
  Peptide Sequence Number=SeqID_129367
tgagcgaatcccattgatttttcaattactaccaaggatagattacatgaataggaaacttactaaaattgttcctctcactttctgagcctgtgcttctcgtatactgttgcaactaaagcatgttgcactttcacagagtttaccgctctcttgggagttgcaaaatgtctgaggtgcatcagttgactgagctgtttcacctggagtccatatagaaagtagataaggacaaggatcatcaggctctctttggtcaagtccctcgagaagtggatgtgagtctggcagttcatagacttggtgctctgtcctcaagcgactgatattcttgagcttgggagttgggatagaagcagcttcaggagttatggcaaccagggcctttgacatatcagcatcttcaatctcaatgtattgcttgcatgtagttctt

SEQ ID NO: 63394 - DNA, 333 bp, Setaria italica
  Peptide Sequence Number=SeqID_129368
ggtgtagtatggcaagtaggtcatggtcgggctgtttttttcatggtttttttcctaacggtggcttagtgtgagtggagtgtgttggggaggttgcagcctctcctgttacctttgtacattttgtacgacttcctttcttaatgaaatgacacgcagttctcctgcgttgttcgagaaaaaaaattataggtttcttgcctggagtccatatagaaagtagataaggacaaggatcatcaggctctctttggtcaagtccctcgagaagtggatgtgagtctggcagttcatagacttggtgctctgtcctcaagcgactgatattcttga

SEQ ID NO: 63395 - DNA, 340 bp, Setaria italica
  Peptide Sequence Number=SeqID_129369
cgacttgagtcatgatcagcgaatacctcatttacttgaaagtatgtcccgttaagtgggaagcttcccctcatggctgttcgacatggtattttctgagcctgtgcttctcgtatactgttgcaactaaagcatgttgcactttcacagagtttaccgctctcttgggagttgcaaaatgtctgaggtgcatcagttgactgagctgtttcacctggagtccatatagaaagtagataaggacaaggatcatcaggctctctttggtcaagtccctcgagaagtggatgtgagtctggcagttcatagacttggtgctctgtccttctaaagtacgtaa

SEQ ID NO: 63396 - DNA, 405 bp, Setaria italica
  Peptide Sequence Number=SeqID_129370
caccccgcatcactactgctctcatcctcaccacactcactgacactcccctgaagtcctgaacttattaggcttgatcgatcctcgctcatcctctcaggcgatcttgacctcgatggtcttgggcttcttgggctccggcggcggcagcttctccacggtcaccgtcagcacgccgtccttgcacacggcggagatcttgtccatgtcggcgttgtccgggatcacgaacttgcgcatgaacttgcccatccggcgctccatgcgcaggtacttggcgtcctcgcgctcctcccgccgccgctcgccgctgatcaccagcacccgctcgtcctccacctgcaccttgatgtcgcccgtgcccagccccggcatgtccaccacgaacgcgtaggaccccgggag

SEQ ID NO: 63397 - DNA, 287 bp, Setaria italica
  Peptide Sequence Number=SeqID_129371
tggcttggctcttgggctccggcggcggcagcttctccacggtcaccgtcagcacgccgtccttgcacacggcggagatcttgtccatgtcggcgttgtccgggaaacgtccagcaggtgctgcagcgccgccatcaggggagtctccagcccgaacatcctcgcgtccatctcgccgccgcggatcctggtcgctcttctctcggtctctcctttggggatctcgcttggtcgctttggttgcttggtttcttgatctgtggattgttcttgcacttgtgtgattc

SEQ ID NO: 63398 - DNA, 394 bp, Setaria italica
  Peptide Sequence Number=SeqID_129372
gcaccgggacctaaaggccagcaacgtgctcctcgaccacaagatgagccccaagatctccgacttcggcatggccaagatcttcgaggacgattccgacgccatcaacacgggccgcatcgtcggaacatacgggtacatggcgccggagttcgcgttggagggcgtcttctcggtaaagtcagacgtgttcagcttcggtgtcctcctcctcgagatcttgagcggacagcggaacggcgcattgtacctggaggagcaccagcaatctctcatccaagatgcatggaagctgtggacccaagatctcgcggccgagttcaataggaacccgtacgactacgggacgactacctaactaccaaaggaacgaaggacctaggagaatagacta

SEQ ID NO: 63399 - DNA, 297 bp, Setaria italica
  misc_feature (228)..(297): n is a, c, g, or t
  Peptide Sequence Number=SeqID_129373
cgacgtctccccagtcgatcaacgatgtgtccatcaccataatcgaaccgcgatgaggtcgttggagaaggtctgaaaatggagtgataatgagatcccctgatgggaagttgagacagagccgtgcttgaagtgtaaataagagtgcaactattttagaatgagtaacatgtaactctaaaatatgcaagttctaattgtgtgctatgcagcatgcacaagtaaacnnnnnnnnnnnnnnnnnnnnnnnnnnnnnnnnnnnnnnnnnnnnnnnnnnnnnnnnnnnnnnnnnnnnnn

SEQ ID NO: 63400 - DNA, 321 bp, Setaria italica
  Peptide Sequence Number=SeqID_129374
gaataatttacttgatgctgcatccctggataggaattctgctcttgatctttttggcatctgcatatggagatgcatcagattctgatgaggatgttctgaacaaaaaaattcaggcctctaatgtctccaatgaattaataagtcacacgatcgaatcaccacccaattcttcaagtaatggtggttgtgatgggacaaacatgtcgtcaagtagtaaagagcgccaacaaggaccattcttcccagtagtcttctactagttgtttatttggttaacttacttaaacttaattttggttaccttaaaaggtttgtttt

SEQ ID NO: 63401 - DNA, 416 bp, Setaria italica
  Peptide Sequence Number=SeqID_129375
cgacattgagatagacaaggttaacaagccaactcttccactggcatctggggaatatacccctgcaactggggtcgcaatagtatcagtctttgctgctatgagctttggcgttggatgggctgttggatcacaacctctgttttgggctcttttcataagtttcgttcttggaactgcctactcaatcaatctgccgtacttcaggtggaagagatttgctgttgttgcagcactgtgcatattagcagttcgtgcagtgattgttcagctggtccttttttctccatattcaggatatacctgatattgaaggggaccgcatatttgggattcgatctttcagcgttcgattaggtcaaaagaggtattctggatctgtgttggtctgcttgagatggcctacagtcgttgcg

SEQ ID NO: 63402 - DNA, 314 bp, Setaria italica
  Peptide Sequence Number=SeqID_129376
ttacaatgaacatttatattgttggactgaatcagttattcgacattgagatagacaaggttaacaagccaactcttccactggcatctggggaatatacccctgcaactggggtcgcaatagtatcagtctttgctgctatgagctttggcgttggatgggctgttggatcacaacctctgttttgggctcttttcataagtttcgttcttggaactgcctactcaatcaatctgccgtacttcaggtggaagagattgagtaggcagttccaagaacgaaacttatgaaaagagcccaaaacagaggttgtg

SEQ ID NO: 63403 - DNA, 218 bp, Setaria italica
  Peptide Sequence Number=SeqID_129377
attcttctcagttgtaatagcgctgtttaaggatataccaaatatgcggtcccttcaatatcaggtatatccttaaacagcgctattacaactgatattgaaggggaccggcatatttgggattcgatctttcagcgttcgattaggtcaaaaagaaggtattctggatctgtgttggtctgcttgagatggcctacaggcgttgcgatactgatggg

SEQ ID NO: 63404 - DNA, 243 bp, Setaria italica
  Peptide Sequence Number=SeqID_129378
ctgccgtgatggatgatgagctttcgtcagccggagaactaacccgtcgtgatcctcggagcagaaaccaagtcgaggcaaagagagcactgaccagtaggtgacggcggagaggctcctctggagggccgacgcgtccttcttctccatgtccgtcggttgctccatcggcgagcttgcctcgtgttcttggcaggcagttaactgtcgctggattggttgggatcttgcgttgccttgtcg

SEQ ID NO: 63405 - DNA, 371 bp, Setaria italica
  Peptide Sequence Number=SeqID_129379
aaaggagttttgagaattatgggtgtaccaggattaacaatatatcatgtgaaaagtcacttgcagaaatataggctagcaaagtacattcctgatgcttcaactgatggcaacaaggctgataacaaggaccctggggatttgcttgcgggacttgagggatcttcgtatgagcacacaactctatttacttttgattcactgaagaaatacatgattcaaagtctatttgttttcccttttgagccaacctttggtatatttatactggcatagcagcatggcatgagatggaacatagaagtatgcaaatttatgtcatatttgaagtttactgggaaaaaaaaacatgtagcataatgagttctctt

SEQ ID NO: 63406 - DNA, 289 bp, Setaria italica
  misc_feature (282)..(282): n is a, c, g, or t
  Peptide Sequence Number=SeqID_129380
tttttgggtccattttagttctttgttttatttacacttcattttttatttgaaaggcgtttaatcattaaaacttttgattgacagtgggttgccaatatctgaagccctcaagctgcagatggaggtccagaaacggctgcatgaacagttagaagtaagtctttactacatgttccaactttccatcctttaccttttgttgtcttatcagaatgtattttgggatctggtaatataccaggataatcatttttcttctgtattccataagaaattttntttgttg

SEQ ID NO: 63407 - DNA, 235 bp, Setaria italica
  misc_feature (215)..(235): n is a, c, g, or t
  Peptide Sequence Number=SeqID_129381
tttttgtttctaccttcttgtattgttacttaaactattcttgtaagtaattttggttcaaaaacggatcgagcttacctgcgtttatgctctttgttcagagctgcgttcacctgtgatgtactaatcatctgaatgtggtcaagaaatggtgatttgttagttgttggatcagttataatgttctgacgaaattcagtggattcttggacttnnnnnnnnnnnnnnnnnnnnn

SEQ ID NO: 63408 - DNA, 245 bp, Setaria italica
  Peptide Sequence Number=SeqID_129382
caccagttacactcacagacgattcgaggttctggttttgtgcctgatctggattgcagttctgtttctacttcataacctctggaaacaggttctgaagtagaaacagaactgcaatccagatcagcacaaaaaccagaaccaccagttacactcacagagactcgaggtctccattctggaatgtcagcctggtgctcaggtccaattggcacacctgttcatgagtacctccctagaaagtg

SEQ ID NO: 63409 - DNA, 349 bp, Setaria italica
  Peptide Sequence Number=SeqID_129383
ctgctgtccattcttttcattttcaagagcacaatccaagtattgattttccattgttgaacttaaagctatcacttcaatgcaccaccctcattaacgagcgatttatctcaaatgttctcctgttagttatcttatcatgcccatcagctgaaccacgttttgcttccatgaccaagcagactacactaccagtgaaggaaataagcgagtctcttcaacaaatgggatatgatgtggcgccttcagatgatgctggtcgatttgtgtgcaactatgtctattatcactctcttaggtttgcagagaaacatggtatcaggtctctcttcgttcatttccccctctt

SEQ ID NO: 63410 - DNA, 331 bp, Setaria italica
  Peptide Sequence Number=SeqID_129384
tttaaggatttcgcccatgtttgagaacatttgatggcacataatccttaaaggtggaaaacgtggaaacttggtttccatagacttcatgaatgggttggaatacatgcactagtacaagaagacaattgtggatcatgtgatttctgatctttatttgcacctcttctatagattttcttttactttttatagacaatatactccctccaattcaaaatacacatcattaggacatgggcacggtctgcaatatgaagctttgaccgatgatttctatgtaagcatgacatttgaacaaaaggcaataaaatattttgaaaaatggttt

SEQ ID NO: 63411 - DNA, 246 bp, Setaria italica
  Peptide Sequence Number=SeqID_129385
cagggacaaataatctggatccactttggggtcaacagcggcgcaacaaggtttgctcttgagaaccaagctgttaatgaagccaccttccgttgtccagatgagctaggatggaaacctcagcttcattgttccaatgcagagggttccgattgtgccagctgatggaagcatctcacggacgagagagactaccctgccagtaaacgaattaaccaagtcactccggaagataggctacgacgt

SEQ ID NO: 63412 - DNA, 219 bp, Setaria italica
  Peptide Sequence Number=SeqID_129386
atgtatcatggcttgcttagcatgcccaccatgttggatgtgtgaatgcattcacgctgtgcagttgcagcaattatctgcattctgcagtaacctcaacaaacatgctttccccctgctggctgcagtaccttacatatacaagccggcctctatccaggttctccggcagagccaaggtttcactgctcaagctgcataacaagatagatgggttcc

SEQ ID NO: 63413 - DNA, 234 bp, Setaria italica
  misc_feature (225)..(225): n is a, c, g, or t
  Peptide Sequence Number=SeqID_129387
ctcttttccatttgaagcattgttgttctcaacgttaatcttgttttcactaccaatcagactaccctgccagtaaacgaattaaccaagtcactccggaagataggctacgacgtggtgccttctgatgacgctggccgatttgtgtgcaactacgtgtactaccactctcttcggtttgcagagcaacacgggatcaaatcgctgtttgtgcatgtgcccctnttcttgacg

SEQ ID NO: 63414 - DNA, 268 bp, Setaria italica
  misc_feature (6)..(6): n is a, c, g, or t
  Peptide Sequence Number=SeqID_129388
ccatcncctgcagcagcgagaaacgcacgaggggtacggctgctgagatcgcctcgaggctcgagttcttgcgtcccgcggtgcctcccttcccaaaggcttgctttggtaggggtaggcatcggatccgtgcacttgcttcttcagttctggtgctgtggattttggaaaagagttctttggtattaggtgtttctcgaaagggtaaatgggatcagaaggaccttcagttgtgactgtccatgttactggatttaagaagtttcac

SEQ ID NO: 63415 - DNA, 392 bp, Setaria italica
  misc_feature (377)..(377): n is a, c, g, or t
  Peptide Sequence Number=SeqID_129389
tctaaccctaacctactattagtagtattacttggtatcatgcattttatgttcccttcaacccagggtgatcatcaaagcatcattcaagcaccatagaacaccagggggaaacataatgtactgcagcatttactatcttaccatcctgtgcagcattgcttgaattcccagagagtcccagctcagccaatactgcatcaagttctgctaattccttctttttcaactcatttttagatagctgcctttctgtatctttgggggggtgcagttgggggtgcaactgtcttcataggaggttcgactgcggcttcttccgcttcatgctcaggttcatcctcagcaccatcatcaacctcatcatcaaggtcctnatcatcactctcaat

SEQ ID NO: 63416 - DNA, 246 bp, Setaria italica
  Peptide Sequence Number=SeqID_129390
accagtttggttttgcgcctttcttctcagcatcctgtgcagcattgcttgaattcccagagagtcccagctcagccaatactgcatcaagttctgctaattccttctttttcaactcctttttagatagctgcctttctgtatctttggggggtgcagttgggggtgcaactgtcttcataggaggttcgactgcggcttctagacacttccctgctcctcctctcgcatctcctcacaccctcc

SEQ ID NO: 63417 - DNA, 319 bp, Setaria italica
  Peptide Sequence Number=SeqID_129391
taagttaacgaaataaataagaacaaattagggtagacaatagaaaatttacctaataatgttctgataaatattttctaacattgcctaatccattgctgtagtaactggtggtttcagacagacagcaatcatgagtcttgcttgccttgtatgccatggcatgaacagcccctcgcactctcttagaagctactcagtgtcaagttcagaggaggagagccgctgtggtgctgctgtggcctgcttagctcgaagagtaactccagctggaacttcgactagtgtcgggacatcaaaggtgaccccatttccaccc

SEQ ID NO: 63418 - DNA, 499 bp, Setaria italica
  Peptide Sequence Number=SeqID_129392
gatcttcatagttactatcaccatcagaaaggctacgagccctttcaaagttctatgatgcaaattttggttatctgtctcctcgtggttccaagatagagacattctattatctgtgaattgtgcagtggcactagaaggtggcgtgccaaccgcccgttttaaaccatctgaaactcctttaaattgtcgaacaatgtcatccatcgcatcatcaacattaacagccaaagttttcataacagaggtggactttccagcagagtaattctttgatgatgcacttagaaaatcccaaacttcatgctgctctgcaatattcgctatagacaagagatcttgaagatatttgtccaggagaatgcatcgttggtgcacaaggtaatcatcaacactagatgaaagaaaactctttggaggcagatgttaattgaattaatttaggtaattcttcctttcagtttgttcgtattgtaagtacgtcttctaaaattttcgt

SEQ ID NO: 63419 - DNA, 441 bp, Setaria italica
  misc_feature (441)..(441): n is a, c, g, or t
  Peptide Sequence Number=SeqID_129393
cccagtcccagatgactgcttgtcaaattgacttatgccggaattccctttatatccatccaacttggtgaagaatataccattaggccaaagggtatcttgaatccaacgtattacttgaacaatgacatcatctcttcggagccaattgatttgtcttataatccattcatcgattgcatcttccatgaccaactgcaaaatttgtttgatatccaaagaacttgtctccgtatccaaccgcgtcgctttagctggaataccttttcaaccaggttcaataaaggtacgctaacatttgttggcatccactcaggaggaattcctgttggatcctcgaatgtattaagagatgacatgtttgaagaatcagaatatgcctcacaggtttttgtatctgtccgctgacttgtgtatccaaaccagagtatgttcaatgtn

SEQ ID NO: 63420 - DNA, 235 bp, Setaria italica
  Peptide Sequence Number=SeqID_129394
aatgttcttcatgctaagacatttaaatttcattggaacagaacgcagataaacttgatgtactgacaactctatcttgagacattggatcaaacacttcaagggcatgcaacacaacagaaaaacagagcactctgggaacaatctgggctccagaagcttaccagaggctactgcgcagtggcagcggcaccctcagccgcggctgctgccggcttcggagtcggagccggcg

SEQ ID NO: 63421 - DNA, 404 bp, Setaria italica
  Peptide Sequence Number=SeqID_129395
ggatttactacatcatgagtcttaaacatccttttttgcttgtggttccaataagtaggcttctgaagtgcatagctaacagtggtgaatctgaaacttggaattgataacagttgtgctaataggaataataggaatagatggcccacgcttcccatggcctagcctccttcaaacacttgagccaagcatgcgcgaaggccacaggattatcaatggtttgaaatgacaacagccacgctccccaaccaactgatatctcaagctaggaagagcagcaggaaatcttggatcatcgataacattgctaaaatccaccactcctgtaagcatggtcattgcagagttagttgaggttaaaacgatattaaacttcaatgagctgatcaaatccattgcagaaa

SEQ ID NO: 63422 - DNA, 227 bp, Setaria italica
  Peptide Sequence Number=SeqID_129396
cctacgcttcccatggctccttcaaacacttgagccaagcatgcgcgaaggccacaggattatcaatggtttgaaatgacaacagccacgctccccaaccaactgatatctcaagctaggaagagcagcaggaaatcttggatcatcgataacattgctaaaaatccaccactcctctcatccgcattatgcagcaacttaagtgaaactgaaattaaatagaggaa

SEQ ID NO: 63423 - DNA, 359 bp, Setaria italica
  Peptide Sequence Number=SeqID_129397
aatggtttgaaatgacaacagccacgctccccaaccaactgatatctcaagctaggaagagcagcaggaaatcttggatcatcgataacattgctaaaaaatccaccactccaaatagttaaaacttgtttcgtttggtctgaggaatgagattaataccaatacaactacctcctcacatccaaatctccttgaggaatgcaaaactttaatgcagcatcacttcattcctcacatacacataattagtataaacattagtaatgaagtcattccatcacaattcataagatgaactcataatgagcaagacaatgtagaaatgggttcatctatcaaaccaaacaccccaaaaaatt

SEQ ID NO: 63424 - DNA, 370 bp, Setaria italica
  Peptide Sequence Number=SeqID_129398
tgggggaggggatcaacggcgacgcccgctttgctgcggcgccgtacgaccactgggttctgctcgaccccgccggggggtcgccgcgcccgtccgcgcgctataaggtacttacttccacgcgatgctgtgccggggccaagtgctctttcttcggttgccgtggtaggtaatctctatgtgttcctgcgacggcactacttactttggttcgacatttaatcgatacaaggctgagcgacataatgaattcaatgtatatttaccctccaatgccaacacggtgaacgctaactttaagtccggaattcagtaaaacgtagagaggctaacgatcatgtgcgtgatgccatggttcctgtttctgtgc

SEQ ID NO: 63425 - DNA, 474 bp, Setaria italica
  Peptide Sequence Number=SeqID_129399
tttgctaattcaccatatgtacaagtttgccaggtctagtttatcctttagttttgagttctcatatggtgaattagcaaggaacttgaatcagttcaaaatcaactagcagcagagggttcaagatgtcagaaactcgagtcccaaattgctgctgcacgtaagagattggaatcagctggttctttggagaatgagctggaagtactgcggctaacaaatatctcaggtggaacaaaccatgacaactactcagagacaaaaatctggggggtgtttggaagtgggtggcaggaagtgcagaggcctccgacgatgaatagttgacaagcagcttcagaacaggaaatgaaggcggaggatctgctacatttttgagaaagcttgtctgttgctgccggttactgggtgcttgctcgtggatgatcttgaagagatgtctcccaaaataatcttttggatcttgttgagcgg

SEQ ID NO: 63426 - DNA, 407 bp, Setaria italica
  Peptide Sequence Number=SeqID_129400
atgatctttacctacttgacttgcaaactctggagtggtctcaacctgacacccaaggtgcacagtatagctcctagaagtggccatgctggtactatgattgatgaaaactggtacattgttggtggtggagataatgcaagtggttccactgatacaattgtaatgaatgcttccaagtttgtctggtcagtggtcaccagcatctcagctcgagatccactagcttgcgagggtctcaccctttgctcaaccacagttgatggcgaaaaatttctaatttcctttggcggttacaatgggaaatatagcaacgaggtactgaatttaagggaataatttctagtaccttgtaaacgattcatgtgttgaacattgaacttcctatattagatgcatcccccccc

SEQ ID NO: 63427 - DNA, 239 bp, Setaria italica
  Peptide Sequence Number=SeqID_129401
tgacacccaaggtgcacatatagctcctagaagtggccatgctggtactatgattgatgaaaactggtacattgttggtggtggagataatgcaagtggttccactgatacaattgtaatgaatgcttccaagtttgtctggtcagtggtcaccagcatctcagctcgagatccactagcttgcgagttgatggcgaaaaatttctaatttcctttggcggttacaatgggaaatatag

SEQ ID NO: 63428 - DNA, 195 bp, Setaria italica
  Peptide Sequence Number=SeqID_129402
aaagataaactgtatgtaggtagggaaggaaagtacgacaaacggaccgactactactaatacaagatgtccaggttttcgattttaggacattcacgtggtcagctttaaatcttaccagggactcaaatcagctgaatcatgaaaataatgccacaggtgggtcgttcccagcattagctggccacagtttgg

SEQ ID NO: 63429 - DNA, 184 bp, Setaria italica
  Peptide Sequence Number=SeqID_129403
gacactgaagactttatcaatgtactctttaagcgatgtcagcttgttgagagtactgtcgatgacaacgaaataagcttccagtaacatctccagctcagataacacaacgacagaacacattcaggagctggagatgttactggaagcttatttcgttgagagtactgtcgatgacaacgaa

SEQ ID NO: 63430 - DNA, 464 bp, Setaria italica
  Peptide Sequence Number=SeqID_129404
gtagatatttattgggtcttttctttcaaatatcaatatggtttgtaaaataagacctgcttttatcttccacttgcctgatgggatggctgaagccgcatttttcttggttttacatgacttgaaaattttcatgctatgaagtgcaacttagtgccagataaaggagacattcattggttaccttaatagtatttcttactgaatcggctgatcaacaggtatcaggggtgttactgagaagacaccattagactggaactccagagtgaagatcatccttgaaacagcttatggaattgcgcacatacatgcagaaggtggcacgaagctcacccaggcaatgtgaagtcaactaatgtcctcgtagacaaaaatcacaatcctcagtttcagactatggcctcagtgctctgatgagtgtgccagtgaacgcatctcgcgttgtagtcggttaccgtgcc

SEQ ID NO: 63431 - DNA, 393 bp, Setaria italica
  Peptide Sequence Number=SeqID_129405
tttcttatttaattttgttcttaagttttgttctttgttttggtttggttatttcgttctatttgtcttgtatgctagttgtggttgtgttggttgtgtgctttttgaagaggaaacacaaggatgagagtgatgtggaatccaaaggtaagggtacagtcaccaggagtgagaagccgaagcaagaattcagtagtggtgtccaaattgctgagaagaacaagttagttttcttggagggctgcacctatagctttgacttggaggatctactgagagcttctgtagaagtccttggcaagggggagttatggaactgcttacaaaagctaatacttgaggatggtactgtcgtggttgtcaagagattaaaagatgttgtggcagggaaaa

SEQ ID NO: 63432 - DNA, 258 bp, Setaria italica
  Peptide Sequence Number=SeqID_129406
ttgggcaaacatgccaacctagttccacttcgtgcgtactactattccaaagacgagaagcttatcgtctacgattatattgacactggcagcgttttctagtccatgttgcatggtatcaggggtgttactgagaagacaccattagactggaactccagagtgaagatcatccttgaaactaacttgttcttctcagcaatttggacaccactactgaattcttgcttcggcttctcactcctggtgactgtaccc

SEQ ID NO: 63433 - DNA, 310 bp, Setaria italica
  misc_feature (22)..(22): n is a, c, g, or t
  Peptide Sequence Number=SeqID_129407
tagtgtgagaatgaagccaacntaacggttggcatggagctgcttcgcgatgccatcgcttcaccaatggcctgacaaaaaccttcgggcttcccagtggggaagccactgctccgccatcgggccatggcgacacctgagtgactgcccgctgcgatcaagctttgggagcaggccaagtttgccgccaccccttacatacatctttgtggtgtcttttgcgacgttagcagaactcctgctcggagaactttccatttgttcgtaaggtctaacttggtttgtaggttctagtctaggtaggtaacct

SEQ ID NO: 63434 - DNA, 174 bp, Setaria italica
  Peptide Sequence Number=SeqID_129408
catacacatccccagtgtagaacctgtacacgccgtagccatgggtatggcgtgcacacctgtgaggacggcagccgatacatcggagagttcaagaggggcgtcaagcatggccttggccactaccatttcaggaatggtgacacctatgctggagagtactttgctgatagg

SEQ ID NO: 63435 - DNA, 287 bp, Setaria italica
  Peptide Sequence Number=SeqID_129409
agctcaatttcaacatggttggattcatgggggcaatgatctccaacctcgcattcgtcgtccggaccatcttctccaagaagggggatgaagggcaagtcagtcagcgggatgaactactacgcctgcctctccattatgtccctggtgatcctcctccctttcgccatcgccatggaggggcctaaggtgtgggcgactgctttctgccagccagctgcccacaccttaggcccctccatggcgatggcgaaagggaggaggatcaccagggacataattggaga

SEQ ID NO: 63436 - DNA, 315 bp, Setaria italica
  Peptide Sequence Number=SeqID_129410
ttttttaggtactaacctaaattactaaaggtaaaaaaagtaagtatttttgttggttggtatttttctaccttgattagtcgcttatttgcaaaaatttgttcagacattcacattctgaagtctgaacagggtcatttgaagaagaagaaaatactgaatctgtcttgttcgacccactttaggattcatgggggcaatgatctccaacctcgcattcgtcgtccggaccatcttctccaagaaggggatgaagggcaagtcagtcagcgggatgaactactacgcctgcctctccattatgtcccctggtga

SEQ ID NO: 63437 - DNA, 258 bp, Setaria italica
  Peptide Sequence Number=SeqID_129411
ttttgacttttaagacattttggcaccaatcaaggaaaaagagattttgtggtggattttcacctgatagtcgctattgcaaaaattgtcagacattcacattctgaagtctgaacagggtcatttgaagaagaagaaaatactgaatctgtcttgttcgacccactgtaggattcatgggggcaatgatctccaacctcgcattcgtcgtccggaccatcttctccaagaaggggatgaagggcaagtcagtcagcg

SEQ ID NO: 63438 - DNA, 401 bp, Setaria italica
  misc_feature (6)..(6): n is a, c, g, or t
  Peptide Sequence Number=SeqID_129412
cagaanaagataggataattaagagaaatttttaggagtagtggcaggcccttcgtccagggagattgatcttgttgagcttgctggggttcatgaccaggtcccaacttcgtctggtgggtggcggcgcagagcgtgttctaccacctgtacaaccaagtatcctacatgtcgttggatgagatttcgccgctgacattcagcatcggcaacaccatgaagaggatttctgtcattgtcgcgtccatcattatcttccaaacgcccgttcaacccatcaacgcgctaggagccgccatcgccattcttggaaccttcatctactctcaggccaaagccagtaaatgccttggaatctagatggcctcagttcaccgcggatcgactcggtgctcgaatat

SEQ ID NO: 63439 - DNA, 244 bp, Setaria italica
  Peptide Sequence Number=SeqID_129413
tctaccaattaatagtaccctaggtgatcctcctccctttcgccatcgccatggaggggcctaaggtgtgggcagctggctggcagaaagcagtcgcccacaccttaggcccctccatggcgatggcgaaagggaggaggatcaccagggacataatggagaggcaggcgtagtagttcatcccgctgactgacttgcccttcatcccccttcttggagaagatggtccggacgacgaatgcga

SEQ ID NO: 63440 - DNA, 230 bp, Setaria italica
  Peptide Sequence Number=SeqID_129414
cctacaatcatagcacgacacctgaagcatcaactgcatagctgaaaaggattgcaccaagaccagttggccatggccatctaaccaaagaaccagagagcgagtaggatcatgtcaaagctaataagagaggatggagctccgatcgagcaccaggacagactcacttgatggtcacgccgccgtcgaagttgtagcggctgacgttctcgtgcacccagtccctggcc

SEQ ID NO: 63441 - DNA, 447 bp, Setaria italica
  Peptide Sequence Number=SeqID_129415
aagaaagtaaatgctgattctttttactggaagtctgcactttctttacctggagctcattgatgcagcctgcaaggaacttgaggcacttgtcgtgcccatcacagactgtttggtttacaggaaggtggcactgtaccagagcttcggggtgtctgaggactgagggtgagctgtttaaggagttcaagatgcagctaatgggcgaactgtgattatagtgaatagcttgcagaagaacaccatgccaaggtgctctgtcttgagcatgtagatggagtggaagattaagcaaaaatacaatgttgcttcatgcattgatctgggcttgtaagatctctgagaggtatgtgttgaggtatgcccgtgatgtgccacatgttgtcaaggcatatgagggtaaacttaaattcgaaggattcagaaattcggatgtttgagtttcag

SEQ ID NO: 63442 - DNA, 355 bp, Setaria italica
  Peptide Sequence Number=SeqID_129416
acttgtcgtgcccatcacagactgtttggtttacaggaaggtggcactgtaccagagcttcggggtgtctgaggactgagggtgagctgtttaaggagttcaagatgcagctaatggtactgctcatctctcaagaaacatagaaaagttctgattgttctttgaggtgatgactcttgaagtttgcgaggttacagggcgaactgtgattatagtgaatagcttgcagaagaacaccatgccaaggtgctctgtcttgagcatgtagatggagtggaagattaagcaaaatacaatgttgcttcatgcattgatctgggcttgtaagatctctgagaggtatgtgttgaggtat

SEQ ID NO: 63443 - DNA, 423 bp, Setaria italica
  Peptide Sequence Number=SeqID_129417
tactaccgaactacaagtagaacgtaatgtaacgaaggaaccaaccaacggtaacccaatccctctcaccaaaccttggcctgtcttcaaagcgaggtgggccccttgggcggtcaccaggagggccagagccaaacggacggccaggtggcctggcagacttcttgagcgtggcaggcacgatctcagatggcaggttgaggtagttgcgcaggtgctcaatgccatcgttggtgaggtaccagtagtagtactgccacgagaaggtctccctgacgtactccttggacttgaagctctgcatgagcttgatcacctgcaggttgggcacatcgatctgcgggtgcttcgccaggttgtagtccttcttggcgtacagcacgccctccttgaagaggtacttggcagatctcattgcggttc

SEQ ID NO: 63444 - DNA, 378 bp, Setaria italica
  Peptide Sequence Number=SeqID_129418
tggggtccctaccttcgtcttttgtaagtactaggtcctaaggtttttgggttggggtccccctttgggcggttcaccaggagggccagagccaaacggacggccaggtggcctggcagacttcttgagcgtggcaggcacgatctcagatggcaggttgaggtagttgcgcaggtgctcaatgccatcgttggtgaggtaccagtagtagtactgccacgagaaggtctccctgacgtactccttggacttgaagctctgcatgagcttgatcacctgcaggttggactacaacctggcgaagcaccgcagatcgatgtgcccaacctgcaggtgatcaagctcatgcagagcttcaagtccaaggtctcctgacgt

SEQ ID NO: 63445 - DNA, 288 bp, Setaria italica
  Peptide Sequence Number=SeqID_129419
caaactaggggcaacttcactccatggatgaagaggttgaggtagttgcgcaggtgctcaatgccatcgttggtgaggtaccagtagtagtactgccacgagaaggtctccctgacgtactccttggacttgaagctctgcatgagcttgatcacctgcaggttgggcacatcgatctgcgggtgcttcgccaggttgtagtacctcttcaaggagggcgtgctgtacgccaagaagaaccgcaatgagatctgcaagtacctcttcaaggagggcgtgttgtagtcc

SEQ ID NO: 63446 - DNA, 350 bp, Setaria italica
  misc_feature (1)..(26): n is a, c, g, or t
  Peptide Sequence Number=SeqID_129420
nnnnnnnnnnnnnnnnnnnnnnnnnnagtttcaaaacaggagaatagctttcgaaaaggtaatgacatgaaaccacgtttgcgaagactattatactggaaccaaggtatcaagatagcacaatttttctgcatatgtcagcactcgccgatccggataacattactagtacataataactgtccttcaaaattaaacgcctcgcgcgaagggaaacaccatgtccaaactaggggcaacttcactccatggatgaagaggttgggccagcaccaaagccgctgccgccgccacggccaaagccaggtcttgtcctacctagtaaccccttaaaagtattggtcttggta

SEQ ID NO: 63447 - DNA, 368 bp, Setaria italica
  Peptide Sequence Number=SeqID_129421
ttttttttttaggtaataaaggcaaccacaattcatagactcattaacaccaattaccaacttgttagtcacatacaaacacccatttctcatcgagaagtcgtatgataaaactagccagattccagatcaccacagctagtctgcctcttgctgttcaatcaaaacctcgggcacattaaaacataacatgaaaacagaacacagatgaacacggatatagttcatatcatcacactagtagcagatccatataaccaatttaacagatttggtccgatctatagaagatacacccgccaatacgaagttattatactcaacatagcataagcctctaaagtcctcgacctcacagaagcatcacg

SEQ ID NO: 63448 - DNA, 261 bp, Setaria italica
  Peptide Sequence Number=SeqID_129422
tctccccttccccgagcactccgccgcccgctccaatggcggcgccggccaattcctcctgcttccacgcccgcgccgccgccagccagacctcctctctcagcgtgggcaccagggtcttcgtcgggctcagggcgcagaccaagctaggttcgtccgagtcgtcgtgcccgaatgtcagcgctgggttctacaccgccgtcaaccggaggatctctctcgggttgtcaaacaagaaggctaccagagctcgtatttcga

SEQ ID NO: 63449 - DNA, 266 bp, Setaria italica
  Peptide Sequence Number=SeqID_129423
ctactccccttcccccgagcactccgccgcccgctccaatggcggcgccggccaattcctcctgcttccacgcccgcgccgccgccagccagacctcctctctcagcgtgggcaccagggtcttcgtcgggctcagggcgcagaccaagctaggtgagcgagagccgaccaaactcgctgaaatttgtgccgggttcatcttccgtgtttgattttttgatttttctggctgaggatgctgattaggttcgtccgagtcgtcgtcg

SEQ ID NO: 63450 - DNA, 281 bp, Setaria italica
  misc_feature (44)..(44): n is a, c, g, or t
  Peptide Sequence Number=SeqID_129424
aagttagttggtgatgggtacgacacactgtgaagcttctggcnccggtaggtgccaaatcaacaatgggggctgctggaaggagactaggaatgggaagactgtctcagcctgctcaaatgaagaagctaaaggctgcaaatgcccaacaggtttcaagggtgatggagtgaacagttgcgaagatgtcgacgaatgcaaagagaacctttactgcaagtgcaaaaaattgcgcctgtgagaatatatggggaagctacgagtgcagctgtggcggcagc

SEQ ID NO: 63451 - DNA, 486 bp, Setaria italica
  Peptide Sequence Number=SeqID_129425
tgaagcaatgaggaagatcaagaatgagttcatgacacactgggatggactcttgtcaagaccagatcagagaattcttgttcttgctgcaactaaccggcctttcgatcttgatgaggctatcattcgtaggttcgagaggagaatcatggtgggtctgccatcaatggaaagtcgggaactgattatgaggcggcttttgtcaaaggagaaagttgatgaagggctggactttaaggagctagcaactatgacagaaggatatagtggcagtgatcttaagaatctatgcaccacggcagcgtatcgccctgtgagggagctgatacagaaggaaagaaagaaggagctggagaagctgaagcgtgaaaaaggaggagctccgtcggattctacaaagaagaaagaaaaaggaaggaagaccaaatacaattactaaaggaccaactaaaacaatagaacaagaattttagtaaaggtaaagta

SEQ ID NO: 63452 - DNA, 320 bp, Setaria italica
  misc_feature (90)..(90): n is a, c, g, or t
  Peptide Sequence Number=SeqID_129426
caccttgtaagttggaactctcaattagaagaagacatgaagatgattcagtttcaagataaccggaatcatattttggaagtccttgcngaaaatgacctcgagtgtgatgacttaggctcgatatgcctatctgatacaataggccttagtaagtatatagaggagattgtggtatctgcagtttcatatcacttgatgaataacagagagccggagtaccgaaatggaaaattagttatatctgcaaagaggtaggtagcatattggtatagttgtctgttgatctttacatttgttcctcggtttgtgactctttc

SEQ ID NO: 63453 - DNA, 419 bp, Setaria italica
  Peptide Sequence Number=SeqID_129427
ggtgatgtgccttcgagccgtagcttgtaattctgggaatggaccttgagacccatagactcagcaacaacttcgatcgtagctactatagtcatagctggttttctcgagacaaacgggtctggcgcttcacaaactcctgttgcctatcaaacaatgctgagagatccaaaccttgagatagtgtaatcatctcaaaggcattcatcataagaggaccaccatccttgtgagttacctcctcagatacatacttgtcctcaatattgtcaaaaactgcctgaacatcatccaggctagaacaattttacaatacttacaaccaacgacctaaataagactaacaataagttacttacttaaaaccaataagggtaacaagaacccttaaatttaacttaacaaataagtaagaataa

SEQ ID NO: 63454 - DNA, 378 bp, Setaria italica
  Peptide Sequence Number=SeqID_129428
gacattggcatgttgtactacttgggttcagggccactaaagtatgaaaatgacaattgtccactatgctggactaaatggagctacaaattacctgttgcctatcaaacaatgctgagagatccaaaccttgagatagtgtaatcatctcaaaggcattcatcataagaggaccaccatccttgtgagttacctcctcagatacatacttgtcctcaatattgtcaaaaactgcctgaacatcatccaggctgacattttcatcttcaccacgcctaatagctacatagttcttcttaaaccatgggtcagcccttatttcttcaatagtgatacgtagtttttggatttggatcaagttattctctgaatcaatga

SEQ ID NO: 63455 - DNA, 487 bp, Setaria italica
  Peptide Sequence Number=SeqID_129429
acagaccagttaagaactgaagggctgcacgacctcacctccagaacaacagcaaattggcccatcctgttggtgatgtgccttcgagccgtagcttgtaattctgggaatggaccttgagacccatagactcagcaacaacttcgatcgtagctactatagtcatagctggttttctcgagacaaaacgggtctggcgcttcacaaactcctacaaatggaaaattcaagtgatgcaaaaggcatttgaccaaataaatgcctgttgcctatcaaacaatgctgagagatccaaaccttgagatagtgtaatcatctcaaaggcattcatcataagaggaccaccatccttgtgagttacctcctcagatacatacttgtcctcaatattgtcaaaaactgcctgaacatcatccaggctgacattttcatcttcaccacgcctaatagctacatagttcttcttaaaccatgggtcagcccttat

SEQ ID NO: 63456 - DNA, 342 bp, Setaria italica
  Peptide Sequence Number=SeqID_129430
aagatgaaggtgtcttgtagatgatttcagttatttttacacataattgtttacattttttttagcatctttagtgttcccatctatggctgttcaagcatcttgtgatgttcagacagttcagttcgctatcagcatgaaggagacactctggttaaccagaagaggtgtatctggccagacaggttggcgtaagcaagtaaaccacctccagttgatttactttgttgagttattccacaatgtacagatttcagattagatggattttcttattttaactcatgtttctacaacctacaggttttagatttggtagagttcttgttttacctggtgact

SEQ ID NO: 63457 - DNA, 235 bp, Setaria italica
  Peptide Sequence Number=SeqID_129431
agaacgtttaagggctggccagtaccgtcgaacttggcgccaatggacctcaaagcctggagcgcagtgccggctgcgatgggcagccctgcaccttcagcagcagatacctcaggaggcctcttgacggtcagactttcagatgccacagcatactcagcgagtccacctccatactgtgaaaatgccaggcagcgttaacatgagttagaacataactttaccttccaacaga

SEQ ID NO: 63458 - DNA, 220 bp, Setaria italica
  Peptide Sequence Number=SeqID_129432
cattcgatcatggttacaactacgacgctgatggtgcaggagcctacaatggcattgatgatttgcatcgccatcttcatatttagtcttgtatagttcgccaacagctccctcactaacctttgaaccaagtccctttcgtttcagcatgttgaatgttgcttctgctggtgtttcagcaggtgttgagctcttgatgtcctcattacgctttcgtttt

SEQ ID NO: 63459 - DNA, 252 bp, Setaria italica
  Peptide Sequence Number=SeqID_129433
ccgaagatcttccccatttctggatgagcacacctccacgcttctgaattattttggtgaattcttcttctaaccatttggtgtccccaataacttgtttcgctggcttgccgtcaattcttgcgtttaagaaatctggaacctgagtggttgaatggttcccccagatggtcatgtttgatatcttgtcgtagaacacagctagctcccgcgccacaagctctcgctgccatggcactcgtctccgcctcc

SEQ ID NO: 63460 - DNA, 236 bp, Setaria italica
  Peptide Sequence Number=SeqID_129434
cttattcgttggagttggctctccagaatttttctcccaatcatgctctgagtcacattggtgcgatccaaacagtctatgcaatttgttctgacagtgccagtctgctcctcaattttctcgtctttatcatttataaggaagtacctatgtttcctaagatagtccttgatctgatcacacagctagctcccgcgccacaagctctcgctgccatggcactcgtctccgcctcc

SEQ ID NO: 63461 - DNA, 181 bp, Setaria italica
  Peptide Sequence Number=SeqID_129435
ttctttctaaccatttggtgtcccaataacttgtttcgctggcttgccgtcaattcttgcgtttaagaaatctggaacctgagtggttgaatggttcccccagatggtcatgtttgatatcttgtcgtagaacacaccaatgccttgatttgcttgaagaacgcccctgacataccagctt

SEQ ID NO: 63462 - DNA, 379 bp, Setaria italica
  Peptide Sequence Number=SeqID_129436
gtgcttctcagatataacaatgaaaagaataataagaaatagaagacgtaacagtgatgggagaaattgaagctgtcattactcattagtttgtcattgcatactacacaggaagaaatgtatcatgatgatacaaataaactgctccccaatcccgtaagaatgaaaaattacactactggctgcatttagatgattatccatagaatgcaagaagagaagctatcatatgagatgcttctagcttacctccaaatagttgcttccacggaaataattgatttctaatgcctgcccaaccaagcaagctttcttgcccacactctgcttaacgatccaagatccctaaatggccatgcattagacaaaacaataaaga

SEQ ID NO: 63463 - DNA, 479 bp, Setaria italica
  Peptide Sequence Number=SeqID_129437
agtacatagtatgatattgttggtaattaatccccgtgtggtgtggtgcttatcgtgagcaactccataaaactccctcaccatggacgcctcaaagtggaggcaaaagtgcttctaaagacacttggaagcttgtgagtgcaacacaacaataataagtgaaaacacttgatctcatgcccattcaaagtgaagattctttgacatgagaaatcaagaatacaatgagtaagtgatgaggatttcaacgtattcaagatgcaaaaggtagaaataagtgctaagtgttcaacatatgcagaagtttgatattgcttaccaatatttttcatgtcaattcttgaggaagagcaccttctagtcgatgtcgttttgagcaccttctatcccgtcatcaacatccctaccaccaacatatgtagcaccaccagtgagcgccataccttatcctgacatagctagctcacgacccttgcttg

SEQ ID NO: 63464 - DNA, 453 bp, Setaria italica
  Peptide Sequence Number=SeqID_129438
taacctttattcttaattctaagtactttggtaccttgtaaggtctaacttagggtattaaggtattcactttggatcctgtcgtgcagcatcagctggcttggacacatctagcttcgatgatggctctttgtgccatgagcacccagctgatccaaggccttgaccataacaaaaatgctatcctgtacatactacaaatatatgggagtgcccagcccaacttagtgttccgatgctctttctttgaatccgatcttagctatcaatacatcatttcagtcaatgaaattttatcctcaaggacaagtgttggactgtgcatagcctcttaattgcaagcagttacatgcttattatctatataaacttaaaaaaagccattaatggttcatgattctgtccacaattcatgaattttgtcagaacttttggtccatgtgggctcagact

SEQ ID NO: 63465 - DNA, 195 bp, Setaria italica
  Peptide Sequence Number=SeqID_129439
taaaccttaactaacttaactaacaatacgacctaccccaaccccttaccttagagcttgctgtcataattgttgttttctttgcttcattgtgttctagtggagcaagtggcggccacggccaccaccattggtaccgctctattcggacctatggaggaagagaaccccacctcgacagcaaaggaggaggag

SEQ ID NO: 63466 - DNA, 380 bp, Setaria italica
  Peptide Sequence Number=SeqID_129440
ttgtattgtctagtcctaccgtttccggttccttacctaccccgtactattcgttccacgaacccgccatttacatattgaatgaagctgttatgcattttggagagagcatcaaggaaatcatcaatgaggagtttggtgatggaatcatgtcagccatagatttctactgttcagttgacaaggttcaaggtgctgacggcaaagatcgtgttgtggtcacatttgacgggaagtatctgcctcacactgaacagaaatctgaacacatgatgtcaaggctggcccgcaagacatcttaagatggttgatggcgggagaagatgctgtacctacatggagctactatgtagcaatttgttcacttttcattatgttgt

SEQ ID NO: 63467 - DNA, 397 bp, Setaria italica
  Peptide Sequence Number=SeqID_129441
caccaaactcctcattgatgatttccttgatggaatcatgtcagccatagatttctactgttcagttgacaaggttcaaggtgctgaccacaacacgatctttgccgtcagcaccttgaaccttgtcaactgaacagtagacaaggttcaaggtgctgacggcaaagatcgtgttgtggtcacatttgacgggaagtatctgcctcacactgaacagaaatctgaacacatgatgtcaaggctggcccgcaagacatcttaagatggttgatggcggggagaaagatgctgtacctacatggagctactatgtagcaatttgttcacttttcatatgttgtgggtttggaaaggaatcaaggatcgatcaagcctgttttattgatctatttcggta

SEQ ID NO: 63468 - DNA, 306 bp, Setaria italica
  Peptide Sequence Number=SeqID_129442
aataaggaactaagaacaatagaattaccaatacaaccaaaactcctcattgatgatggaatcatgtcagccatagatttctactgttcagttgacaaggttcaaggtgctgacggcaaagatcgtgttgtggtcacatttgacgggaagtatctgcctcacactgaacagaaatctgaacacatgatgtcaaggctggcccgcaagacatcttaagatggttgatggcggggagaaagatgctgtacctacatggagctactatgtagcaatttgttcacttttcatatgttgtgggtttggaaa

SEQ ID NO: 63469 - DNA, 232 bp, Setaria italica
  Peptide Sequence Number=SeqID_129443
atcgtccacgaacccgccatttacagattgaatgaagctgttatgcattttggagagagcatcaaggaaatcatcaatgaggagtttggtgatggaatgtaagagatccacctatgcttcatttatgcacagattgctgttcctgcatgtcagccatagatttcttacttgtttctagtttgacaaggttcaaggtgctgacggcaaagatcgtgttgtggtcacatttgac

SEQ ID NO: 63470 - DNA, 213 bp, Setaria italica
  Peptide Sequence Number=SeqID_129444
gaggagggtgtgaggagatgcgagaggaggagcagggaagtgtctagaagcggatagggtgaggttttcgggagtggcggccgagacggggctcaccaacgtctacgtcgcgcagctgctgcggcgccaggcgcagctcaagccggacacggcgcccaagctcagggcgccctgcccgcgctcaccgacgacctcgtcgacctcatgatgcag

SEQ ID NO: 63471 - DNA, 146 bp, Setaria italica
  Peptide Sequence Number=SeqID_129445
agagacatgatggagaaagtgccaattcaaatggaatggctccaacatgatgttactgtcgaaagtcgaaatccttttattttcgtctattaaaggatgtctcttcccacgagtcatgatggagaaagtgccaattcaaatggaat

SEQ ID NO: 63472 - DNA, 382 bp, Setaria italica
  Peptide Sequence Number=SeqID_129446
caatctgcctcaccatgctgctcatggcactcctcttggctccaagtaggcccatcttcaaacaaagagctcaatcacacaacagatcgaactctctgcatgccaatttcaaagaccaagattaattgcttgcaaactatctgattccttcttggtagcaactactgatggtgactttttttcttcctgccctttgcaggctgtgggagtaaggaggtgtgcgacgagtggctgagcgacacataccgtatgctgctcctgtgcagcagctacatatgcaacgagcactgcatcggcgagggcgccaccagggggaagtgcggcctgctcttcgtcaggtccttctgcttctgcaccaaagaatgcgactgaatccagtgac

SEQ ID NO: 63473 - DNA, 263 bp, Setaria italica
  Peptide Sequence Number=SeqID_129447
ttgtagcgtcaagtctggaaccaagttgcaagatactgatggagccacatcaataccagatccttactctttatgtcctcaagacaagggtgtatacaccagttggagctccaataacttgtgcacagatccttgcgctgcagaaatcgaggaagttcgatgtgtgaagctaactacagaggataattctcaagaatcctgtaagtggtattctgctgctggacacctgtcacagaaaatgggttcctgttggaaagaaagag

SEQ ID NO: 63474 - DNA, 175 bp, Setaria italica
  Peptide Sequence Number=SeqID_129448
catttcctctttttcttggttttggacttggtgttgctcttgcttttcaacactaggccccagattacaagagcaagagcaacaccaagtccaaaaccaagaaaaagagtaaaagaaagatgaaggcataatcatttcctcggcttttaacatcatatacagggcctgggcacgt

SEQ ID NO: 63475 - DNA, 258 bp, Setaria italica
  Peptide Sequence Number=SeqID_129449
gcaaatgcaaggggacgtccaagtacgtgcaccgcgactgcctcgaccactggagggcggtgaaggtgagcaccgctccccttctcccccgcgatgctcagggtttgggtggaaatcgggcaaaatgggcattttcgtggttagctaatttagtggcttccaagtgcagcaattgattgaattgcatgatgaatccggcgaaggttgaaactgttactccgtttgtttgatcctgtgaatgtgcggaggatttatctt

SEQ ID NO: 63476 - DNA, 468 bp, Setaria italica
  Peptide Sequence Number=SeqID_129450
aaaggaagaaacgacggtaggtaggttactactttagacgaatactagacaatagttcaaccggatgaagctgaaggaggtcgaggtggatgagaagataaacggctcgctagctttgctcgcgcagggtggaacctcaagggcgaggaggaaagctgtagggatccttgagaagatgaagaggaacatgcacaacaggcatttgtcctgctaggaacccgacaacaaaagtgccgttgaaggaacaaagacggtcttcatttggcgtatagatatcataatacataagtatagtagctattttccctttccgtgtacaggcatgctgaggatgcagagctagttgtaaaggttttctcttgttgaaactgtcggctcttggtcattttgaacattaaagccgtagcatatgctcaaatttttgcttaaatagtagttgcttctttttatatatactagttagatatt

SEQ ID NO: 63477 - DNA, 212 bp, Setaria italica
  misc_feature (113)..(113): n is a, c, g, or t
  Peptide Sequence Number=SeqID_129451
ttgtctagtaaattagtaaaagtttagtcgttcgggtattgttaattgtattaaaccttcttggtaaccattattgtttcaaagaaagaggtcacagagtcatctggaaaagngctagttccagttgatgtctctgctggaacaactgaccaaattcaccaacctaagattgagaaggctgtcctgaagttaattgaacttattgaggggag

SEQ ID NO: 63478 - DNA, 418 bp, Setaria italica
  Peptide Sequence Number=SeqID_129452
ccatactgagctggaacttctgccctggaagctttaaaccatccttgcatcaaatatgcaacagagcttgagcaatcctttatggaaggtgccataaccgattcttcaatgctcgccaggctgtgccacatgagacatatgtttaccttatggaccttcttgctgaaactgttagagatgaagtagctgaatgcagcgttgatgcatatgactacttgccaatcagtgttgccaagaaaatgctaatgtttagatcagatcaagagcttctcgagtacatatcagaggtacctgttatttcatcttcatccctttgccatatgtgcgatattaatgagttactggtgtcttaataaaggatgctagacatgtttaattgatgcatgggtgaggcccaaaattctaaccatcactcttg

SEQ ID NO: 63479 - DNA, 477 bp, Setaria italica
  Peptide Sequence Number=SeqID_129453
tttttaaaacttttaaaatttttaaattttttgtttttcttttttctttttcttttttctttttcttttgtttcttttgttagttcttaaacttagggtctctcccatactgttctatttaatgtggcttggaatctgatcaatgaagggctacaaagttcactatggcttcagttcaaacctcatcatattgctgctggagctgcattccttgctgcaaagtttctccgttatgacattatgccccacccaaatttctggcatgattcaagacaactccatacattgttcaagatgttgtccagcaattgaaggagctactttaggatatgatattcaatatgtttgccatgtacaatagatccatttacttagtttgtggtgaccactgccaaaaaatatgtacacattggtatatggtcactttcttcagttactgatatgtgttggtattttgagattatacccattcgtttt

SEQ ID NO: 63480 - DNA, 279 bp, Setaria italica
  Peptide Sequence Number=SeqID_129454
acatcttgaacaatgtatggagttgtcttgaactcatgccagaaattgaaggagctactttaggatatgatattcaatatgtttgccatgtacaatagatccatttacttagtttgtggtgaccactgccaaaaatatgtacacattggtatatggtcactttcttcagttactgatatgtgttggtattttgagattatacccattcgttttcatttaggtttttacagccagttgtttgtcttgttgttactaaaatttattcttaaggttacttaa

SEQ ID NO: 63481 - DNA, 212 bp, Setaria italica
  Peptide Sequence Number=SeqID_129455
taagaacaaattaagtaactagaaactaattaatagttttaataacgacaataactacttgggattgattagcaaactaaaacaattgcaactctgctggagtgtgctgtgcaaatcttttgtgccatgcaaatcagaccatgtcatgatcaaatgacatttgaaaatcctggaatggcatgtgccaccggacagcattatattgtcaaaga

SEQ ID NO: 63482 - DNA, 169 bp, Setaria italica
  Peptide Sequence Number=SeqID_129456
tgccatgtacaatagatccatttacttagtttgtggtgaccactgccaaaaatatgtaaatggatctattgtacatggcaaacatattgaatatcatatcctaaagtagtccatccatatgcttctctttcttctgctttgagcaaactagggctctacccaataaata

SEQ ID NO: 63483 - DNA, 206 bp, Setaria italica
  Peptide Sequence Number=SeqID_129457
ccactgccaaaaatatgtaaatggatctattgtacatggcaaacatattgaatatcatatcctaaagtagttcatccaattgctgtagttctccctgaagcaccttatttttaaaacatttgatgtatttgtgatgcaaatttgaaagctagtattacagtaaggtatctctaagttgcaaaatgtaacagtatgaagggcttttc

SEQ ID NO: 63484 - DNA, 436 bp, Setaria italica
  Peptide Sequence Number=SeqID_129458
gacaccaagatacagttatctttgtatttgtatttgtgataaaccaagctagtgatatatacttacctttgtatttgtcacagcatctccagtcatgcttgcacattgtgttaggacttaagaaaatatatattggaattgtataaagcaacatgaaaatgaaattgcgttggaaactacctctacaatgcaaaatttcatggtctagtttcatatccactacatccaagatacaaactgtgttggtaactgtacatacatgattacatctagatgaaaccctcttgtactatggcaacgtaattaatgaagaaagagagcaaaaatcctagaaatggtttcctcatgaagaaattaggtcttctcttcacccaatgcaccaagaaaccatgaaatcgccattggggagaaaccaccagtttctaggaggctcgtg

SEQ ID NO: 63485 - DNA, 384 bp, Setaria italica
  Peptide Sequence Number=SeqID_129459
agggcagtccaatgtatattgatgatgatttctatcctcattaaataacttgccacataggcaaaaatgctgacatggcaacgtaattaatgaagaaagagagcaaaaatcctataaatggtttcctcatgaagaaatcaggtcttctcttcaccccaatgcaccaagaaaccatgaaatcgccattggggagaaaccatccgtttctagggggctcgtgccacacttccctattggaggaagaagatagagttgggagagagtaaagttagttttaaaaattaattattactcaaagacacctccactgtggaagatagtttttatagatgatttcttgtgctatggaaaccgcgtcggtttcttccattgggactgccctgt

SEQ ID NO: 63486 - DNA, 377 bp, Setaria italica
  misc_feature (159)..(159): n is a, c, g, or t
  Peptide Sequence Number=SeqID_129460
actgaatacatgccattctcctcagttaactaatttatacccatgtaagaagaaggccctacaatgtgtagttatctttaacaccatctggttgcggcattttacttatgctctgtcgagtaattgaattatccaacatgcattgcctatgcatgatanattcaatgtattgcagtgctagatcaagttctagagtttacaatttaaccttaggagttgtattgcttagtcttgttctttacatttgcttgccttgtgtaggctatagaaaagaggatttctgttttctctcaaatacctaaagaaaatggggaactcattcaagtattgaggtactcgatggatttaatatagcaaattttctttctatattcttc

SEQ ID NO: 63487 - DNA, 189 bp, Setaria italica
  Peptide Sequence Number=SeqID_129461
aagagagaaaatctccagtcattcaggctacagaaatcctcttttctatagcctgaatgactggagaaaagaggatttctgttttctctcaaatacctaaagaaaatggggaactcattcaagtattgaggtatgaagcaagtaatcatgatgtggcctataatattgacttgcttcatacctcaatac

SEQ ID NO: 63488 - DNA, 376 bp, Setaria italica
  Peptide Sequence Number=SeqID_129462
ttaatttagttaatttataattataagtaattagtagtaaccaagaattagggacttttgctggccgtgatctacttcattgtacaatttctgaaaacaactctgtgatcgcgcaccagtttcaacaaattcgccaaatcctccgggtgtagtactgtagtatgtgtatacattgcatgtaactatgtctagcaaaactgtttcatataggtacgccaccatcttaagtggaagagatttgagactttcagacagttgatgatccattcttgctgatattagtctggctttttccccctgcgagctattaatttggcagtcatgacttcgtgttgtcacttatgtgtagccaagttgttgagtcttagtgtattaa

SEQ ID NO: 63489 - DNA, 252 bp, Setaria italica
  Peptide Sequence Number=SeqID_129463
cgtgctctcgtactcaccgttgctgttcctgcacttcacggccgtggggccggtggacaagtccggcgccttcagcgtcccactggccgccgacctcgtcggcgatgacggcgagctgaagcgggaatgcttcgcgcagctccacagcgcgtcgagcgagccatgccccggccaggagccctccaagatcgtcgcggcgccggccgtccaaggcggcggcgacaagactttcgtcgcgctcggcggcgaggt

SEQ ID NO: 63490 - DNA, 365 bp, Setaria italica
  Peptide Sequence Number=SeqID_129464
ctaaagtggagactacattatcaccagcaaatgggagaggcaggaattatggcgtgatgttgggaacgtgaacaaataatccaagggtactcaggagcgagacgttatggaagcgcggtccacactgtttgtcttacgttacagctaatgagcttaacaaaagcaagatatggacacgcggaccacaatgtttatctaggttacagctaatgagctacacaaaacaaatattcatgcttccttgaaaatatactggattccagactgagtttacagttgctccaatcccatgagtattgaatagatgtctggtgtacaaaacctcaaaacaaaagccaagcttcactcttttaaactgggaagaa

SEQ ID NO: 63491 - DNA, 157 bp, Setaria italica
  Peptide Sequence Number=SeqID_129465
gggcccattagaatggcgagcacttgccagatcgagccacccctgacgaagagcggaggagagggagtccatgaggaagaggtaaaccgtaccaaccgaagtaccaatagaaatacgacaaggaatactacctttagttacgttacgttacgtacca

SEQ ID NO: 63492 - DNA, 415 bp, Setaria italica
  Peptide Sequence Number=SeqID_129466
taatcgaatgtaattaataacccaactaatacgaaggaaataattgccccagcaatagattcaaaaatgtctccaaggaccttgggagccttacagtccccaagcccaaaagaattgaaacctggttttgaaagctcctcctggacatcctttacaaactctcgaatctgtgtctccaatgcagacgatccatggcgaagatgtacatgcagcttatgcttaactgcaatccttgcaaagttctcattattaacagctgcagctctcaagtcagtcaagcgaccaggaggtaggtcggtataagtgaaaaataagtgctttgtaatgagatgatctaacacagcatcaccaacaaactccaagcgctggtaacatgaaacaccagatgacggccttgatgcatgtgtgatagcct

SEQ ID NO: 63493 - DNA, 316 bp, Setaria italica
  Peptide Sequence Number=SeqID_129467
aggtaattagtactaatttaggtaagggttgttccggttgtttacctatttggtattctaagttaaaggtcttgtaaaaacctttcctagtacttattcgtattgttatttattacccacttattcgaggaatattgccccagcaatagattcaaaaatgtctccaaggaccttgggagccttacagtccccaagcccaaaagaattgaaacctggttttgaaagctcctcctggacatccttttacaaactctcgaatctgtgtctccaatgcagacgatccatggcgaagatgtacatgcagcttatgcttaac

SEQ ID NO: 63494 - DNA, 268 bp, Setaria italica
  Peptide Sequence Number=SeqID_129468
cctccagcctccaattcccaagcgcaaggagaaagcacgccgccgccgcgccggccccaccgaaccctaaccccgtccccgacgacccgccgctgccgccgtcgcaggaggaggaggacgaggagacgccggatgcggcagacgaggaggaggaggtggacgagaccgggatagagccccgcgacatcgacctcgtcatgacgcaggccagcgtgccgagggccaaggccgtcaaggctctcaaggcgcacgacggcgacatcgtcag

SEQ ID NO: 63495 - DNA, 493 bp, Setaria italica
  misc_feature (422)..(422): n is a, c, g, or t
  Peptide Sequence Number=SeqID_129469
taaaaacgaaaaaaagtaaaagggtaaagaactaagtaagaaaaaccaattagaatactggaaaagctcgtttcgttgagacccggcggtggagagatgaggataacaatgtggtttttatagtgactgctgtcggtgtcttcatgatccagcttgagtacgtcaaatcagtttgcgaatcttttcaagaacagtttcagaaccaccaattttccctccacaagtttctatactgcttactgcaggtgataactgtgctccccagattttgcaatatctactgctattttcttgtagaactgtttctttatatccaccagaaattgaagctcaattgtttgttttgcacctcgtcacatgacatcattttaaggtactgcttgtgcttaaaccatgccgccttcctgtcaccaactgcaacngtactgcctcaacacaatcctcgtcattacaaacacatctgatcactgaactccagctctcaacatgcgga

SEQ ID NO: 63496 - DNA, 170 bp, Setaria italica
  Peptide Sequence Number=SeqID_129470
ggcgaaatcagagtctcaatctccaaaattgatgaagaaaaccacttgttgagtgagatcctcagcagcatcgtagcccaaaacagcccagcaagcctaccactcaggttgtgtttgacgacgcacggtcaccacgatctgagtggtaggcttgctgggtctgtttgggc

SEQ ID NO: 63497 - DNA, 376 bp, Setaria italica
  Peptide Sequence Number=SeqID_129471
tcttgaaaagattcagaaccaccaattttccctccacaagtttctatactgcttactgcaggtgataactgtgctccccagattttgcaatatctactgctattttcttgtagaactgtttctttatatccaccagaaattgaagctcaattgtttgttttgcacctcgtcaccatcacctccccgactaccactccgcaccctgccacgctccactctctcctgcttcgcctcgcccgccgccgtgaccacctaccccacgcgctagcgctcctccgccgcctcccgtccccgccgtctccgcgccttctgctcccgctcatcctcgccagtgctccgcctccgtcggcaacctcaactcttcctctccaccttc

SEQ ID NO: 63498 - DNA, 458 bp, Setaria italica
  Peptide Sequence Number=SeqID_129472
tgtagttgtattgtaggtttctttgtttttcttcttctacttgttgtattaaatttcctttcgttcttgttcattgcagcttatttcgaggtatacagcatggctgtcatctggtctatctgcacgtaaagcttctgatgggagtccaaattcgcctgcagatgctgaatgggcactgtctatacctatagacgatttcatatatataatgcacgatgtacatgctgtaattggtgagctttcagaatcaggcagcttcattggacacgtgaatcaattactagcatcatgccccattgaagtgcttaatcttgtgaagcaaattatactgcaagctgttgaaccttttagaggaggtgttgcctgtcataatgaatgtcatgattggaatcatagttaagaagtctaatgaggacctgaagcacctgaaaggaataacagacgacatataggatgac

SEQ ID NO: 63499 - DNA, 377 bp, Setaria italica
  Peptide Sequence Number=SeqID_129473
atttcaatgaatcaaggtataaccaagatggaaagtgttagtttcatcttggttataccttgattcattgaaattagctctggaatttcatgggtcttgaaaagttattcgcagttccacattattatcgattgctggcaatgtagtgggtgaaacctagctcagcttccaaccgagttccgtgcttgatttcacctgtagctgatgattgaaacttgtgatttaaatactcaaaaactttgtagtgatttcttaatattgtcttgctaacttctctctcgacgcgcaggatcttgcggccttttttgaagaccgattcttcggatcgttggagcttaactgaaaccggaaaggttggcaccccttggaaaagtctg

SEQ ID NO: 63500 - DNA, 136 bp, Setaria italica
  Peptide Sequence Number=SeqID_129474
acttctaggcagtgaccggagtgcttggatggactggggaggtgaagtttcttgctttggccaataatatgggaccaaggatcttgcggccttttttgaagaccgattcttcggatcgttggagcttaactgaaac

SEQ ID NO: 63501 - DNA, 364 bp, Setaria italica
  Peptide Sequence Number=SeqID_129475
atggtgctggtagtgtcgaggaggaggaggagcccccggcacggttcagctgtctccggagcggccgccaacagggacgttgcggagggtgccgccctgcgtccagttgcggcggcaggccttgcagaagtagcgtggctgcgtcatgctgttgttgttgtagtagcagaacttggtgttggtggagttacagcgcgggcagttgagcccctgttcctgctgtggccgcggcttgcgctccccgcttccggtcgccgccacctgctgctgccatgcctggttggccttgatgttcctagctgcagctgcttcctcccttggtggtgatgccaccatcgcggcctcttgcttgttctgcacaaca

SEQ ID NO: 63502 - DNA, 241 bp, Setaria italica
  Peptide Sequence Number=SeqID_129476
gcatgcgccgcctggagcataggcggcgcggcgggcttcttggcgctggcgcgcttgttcttgcggcacccgccgccaacggggacgttgcggagcgagccgcccttggtccagtagcggcggcacgtcttgcagaagtagcgcggctgcgagaggctgtagttgttgtagtagcagaacttggtgtgcgtggactcgcaccgcgggcacttgagcggctggtcgtgctgcgggcgcaggc

SEQ ID NO: 63503 - DNA, 340 bp, Setaria italica
  Peptide Sequence Number=SeqID_129477
tagtgttaaggactatcttaggaatgtaagatgcatggttgaggaatcgattagttatgcccagatgaaacacaagaataataattttaatgcatagctctttttatctcaacagaaacaatggactgacagctacatattttggttgcaggttgcaagacactccaaagcaagagggactatgatctactgaagagcttgaagaccttttcatcttatggctcaggagcaagaaatgaggcctatgagcattgtgtgatatttccactgaattctgtggtgtcattagagcctatgctgagtaatttgtagtcttcgttgtaagatttattttgaattc

SEQ ID NO: 63504 - DNA, 275 bp, Setaria italica
  Peptide Sequence Number=SeqID_129478
accccaaaagtaagtaggacgaacggaactaacaatagacaaccaagactttgagattatgtccctcaatgtgatgacccccctcagtgtttcctttgtcatctacgacatagatcctgtgaatcttctgagagtccagcttcagtataatgtccttgatcgtatcgtcctttttgcaagtgattacatcatgcagtaagggcgaggcctcatgttgctcctgaagatggtgtcggaccgcagtgagaaaatcttttgttgtgatcgtcctgtgc

SEQ ID NO: 63505 - DNA, 218 bp, Setaria italica
  Peptide Sequence Number=SeqID_129479
ctctgcaagcatgtgcataacagaagattgcgtgatgatgttctcaatcttatctccgccaacctctacaactggcaggctcttcattctgtacttggatagaagcagcaacatggtaaggaatgtgtcagacatctgcagtgcgagaaatggtggactaagaaactttctgagcttggactccctatcatgaagccatcgaaacttgtcaaggtaaa

SEQ ID NO: 63506 - DNA, 308 bp, Setaria italica
  Peptide Sequence Number=SeqID_129480
ctagattggagacaggtgatcctattccatttccagaaccggtcgtcgcattagctgcagcatcagactgactgagcagccacatggcaataccagcgaactccacaataccgatgtacttgtccatccaactagcatcttctggagcctcaacatttcttatgggtgcactcaagattttgttttttggataatatttcgacagtttcagcaagactggcatctgaaggtatctcaattacttgacgaacgggtagacgtagactacgggaaaggaacgacgaacgggaatagtacctaaacgaaaa

SEQ ID NO: 63507 - DNA, 190 bp, Setaria italica
  Peptide Sequence Number=SeqID_129481
ggttaattatacatatctggccaatctaccactttgtgagctgagaacgcttatatatgttccagtgccatggttacagacctgactgagcagccacatggcaataccagcgaactccacaataccgatgtacttgtccatccaactagcatcttctggagcctcaacatttcttatgggtgcactcaag

SEQ ID NO: 63508 - DNA, 426 bp, Setaria italica
  misc_feature (172)..(172): n is a, c, g, or t
  Peptide Sequence Number=SeqID_129482
cagcactgtatgacaccgcatcacggtccagttgcactgatatacctacgcaaatgtacattatgaactgtttgcaggcaggggaacaacaccatcgaagaaatccccaaagtagtggcgcggctcatgcaccagctttgagattatgtccctcaatgtgattgaccccctnagtgtttcctttgtcatctacgacattagatcctgtgaatcttctgagagtccagcttcagtataatgtccttgatcgtatcgtcctttttgcaagtgattacatcatgcagtaagggcgaggcctcatagttagactacctagaagatggtgtcggaccgcagtgagaaatctttgttgtgatcgtcctgtgctctttgtatatcttggggctaggttagaagatattggacatctctgatactgatgttacc

SEQ ID NO: 63509 - DNA, 346 bp, Setaria italica
  misc_feature (236)..(236): n is a, c, g, or t
  Peptide Sequence Number=SeqID_129483
attagggaatgggaggtaaatatttgactctgcaaacataacctgaggtgttgctcagcaacagaacagacctatcgcttatatacaaagacacttctttcaggtatggctccctcctttggtgttactgagcctggaaagtaggtagaggcaacctgaggagaggaagattgatgcagcgaagcaaaggaggtcagtacaggatgtaatggtcactctccagctcttctcaaagntgccaaccgagtagactcaagacaaagctgggccatgtcattgtcatgagtctactggttggcatctttgagaagagctggaggtcagtacaggatgtaatggtcactct

SEQ ID NO: 63510 - DNA, 242 bp, Setaria italica
  Peptide Sequence Number=SeqID_129484
aatgccttctcagtctgttccgccatggctgcgcggtgggcgtcgagctgcgatgcggcggcggcggcggcgtgggaacgcttgggtgacaccgcctctgaccgcacgcgcgacctcggcctccacgcccacccggcgcaccccgccgccacgcaagtgagaggcctgagcttcattgccgccgcaagatgattcaaaccgcttcctccaccagtaacttaagtcgccgctttgctcccgca

SEQ ID NO: 63511 - DNA, 248 bp, Setaria italica
  misc_feature (237)..(237): n is a, c, g, or t
  Peptide Sequence Number=SeqID_129485
cgccagttctgcacctcctgtttcagcttctggatcctctccagcaactccgcctgcgacgaggtcagctccttgacgcgcgcgtccagctgctcgaaccccgacagtctctgcagatcacgaaccagaacgggaacgcacaccatgaacacaagcggacttgggaggcggatgacgaagcgcggcggcggttgccggaggaggaagagacggtggcggcggggcagtgctctcggnggccatccggg

SEQ ID NO: 63512 - DNA, 305 bp, Setaria italica
  misc_feature (302)..(302): n is a, c, g, or t
  Peptide Sequence Number=SeqID_129486
aacagaacaacactgcttgattgatgttgctataagttcaaaagggcttaattagctgtgcagatgtgtatatatgctttccttgatgagtcatattcaaaatagcctattagcagtgtaggtactatttcatcaattctagtacagtttggttcttgcttagttctatgcaacatgctttctttcaggtggaagtgtggcttcagacatttggtccaggcaaaaggacacccatccacaggcactcctagtgaggagatttttcgtgttcttaaagggaaggcactctctttctggggttnagc

SEQ ID NO: 63513 - DNA, 419 bp, Setaria italica
  Peptide Sequence Number=SeqID_129487
gaacttttcgcatccgaaatattcacttcatcatcagtttcgttcggttagcaccgtctacaagatgatcttctttttttaaaaaaagaacaaggttatgaaacctcactttctttttgcctgtgctttctttcctcgaactgaatagatagttcatgacaactccattttgttcccaagtacttttgctcctttttgtctgtacatacatccgtaccggatcgggctaatactgtttccaccttttgtctgcagtgtcattctttgaggtgagcaatgcgggatacaaactgagactgcactgcagcatagttcaatggccgatgggtccttccattgaggtgctcttatatgtttacaaagagtaggttcagtgtatttagttttggtactagttccttagggttgtttacccttta

SEQ ID NO: 63514 - DNA, 435 bp, Setaria italica
  Peptide Sequence Number=SeqID_129488
tagggtttaggggaggcgcggcggcggcgggtgcgtcgtgcggctcccgtgaggcggatgatgcgttcggctttgccattttgggggtgatgtgtaggggcaggagaggcggaggtgagtgccttgagcagcgaggaatttggtggtggcggtgttgatgaattcagtgccgttatcggcctgaacacattttaggggaagactgaattgtgttttggcaagcgcagcaagctcgactatgtgttggtggacctcagattttttcccgagtggaaaaacccaacagtagtgactataatcatccaaacataccaagtaatatgaaaaaccagacagactgttgatgggggaagtccatacatcacagtgaacaagttcaaagggtgcatgagttatggaatgcgaggaactgaagggtagacgcgtatgcttgcc

SEQ ID NO: 63515 - DNA, 251 bp, Setaria italica
  Peptide Sequence Number=SeqID_129489
gggaatataattgacatcagagatagcactgcaataatagccaagctaattggtgtaattcaggttaacagaggaaagtgaactaagttcatgcggtccaataacaacagagtagaagaatactataactctataagacagttggggaaaagatttaaggataaaactaaccagcttccagttgtcgtcaatcacagggaagccagagatcctgtgctgcaccaacatctcaagggcttcgtcaactgaag

SEQ ID NO: 63516 - DNA, 268 bp, Setaria italica
  Peptide Sequence Number=SeqID_129490
ttaaaaattaagtagctgatatgtaagatactatttttaaagttagtacactagccaacatgagtaattcaatcatgagataccttccaagtactatccacctcagggaacatgtttgtatttgtgtcagccagtccatttcctgaatcatgagataaatataataaatgaagagataatgaatactaccactaactgtttcccaaaaaagaagaatagtgaatactaccactaactgtttcccaaaaaagaagaatagcgccagaca

SEQ ID NO: 63517 - DNA, 237 bp, Setaria italica
  Peptide Sequence Number=SeqID_129491
agggaaccaagtatgattacctcaaatgaattatagtagtccttatatgaaactatatcagagccctttgcaacttatattaatctgcatacaacaccatatccatctgctggtgtccaggtagaacttggagctgcactcagtgtatatgtaatgaagttcaccaatcaatgtctcaaaataaagaagaaatctgaagaaggcgcttgaatcgcacagtgccttggcattcaattc

SEQ ID NO: 63518 - DNA, 178 bp, Setaria italica
  Peptide Sequence Number=SeqID_129492
tgattacctcaaatgaattatagtagtccttatatgaaactatatcagagccctttgcaacttatattaatctgcatacaacaccatatccatctgctggtgtccaggtagaacttaggagactagacaactacaagtagtaataatagttaaatagtaaagttactaacctaaatta

SEQ ID NO: 63519 - DNA, 397 bp, Setaria italica
  Peptide Sequence Number=SeqID_129493
tttagaaatagaacctagaaatcaaagatcctcgataattatcatttttgaactgtgtaatgtcaggttacttgcagccttatcccaagtaggcagagttgaagagcagttcagtagaacctgttccttaattattagtttattatggccaaagaaactccaagctgaaataaagagaaaggttagttaggattcaagaagctacaattccagtgtgtacaaacattatttcccagaatcattaaaacgtaaagatactcaaggttgtctataaataataatgacagcaaaagtaggaaaatattgaatctttagcatgtgaatgtctgtgtcattgtgcacagatctaaacaaccagaatcacgaagacagatgaaagttcacgcagactattttt

SEQ ID NO: 63520 - DNA, 459 bp, Setaria italica
  Peptide Sequence Number=SeqID_129494
cttgcagccttatcccaagtaggcagagttgaagagcagttcagtagaacctgttcctgtaaacagcatagttcaacgagagcattaactttgctatggtccctatgcataacaaaatataaagaaataaaggctatcatagttaagcaagagcattaacttttaagacaaatgaagaaaggatagccattcatagcagctaagacgtgcccactgaatagtttgacaaggaaaaagaactcaaatctgacaaaatgagttacaaaagaccaattgcttttactgtaccttaattattagtttattatggccaaagaaactccaagctgaaataaagagaaaggttagttaggattcaagaagctacaattccagtgtgtacaaacatttatttcccagaatcattaaaacgtaaagatactcaaggttgtctataaataataatgacagcaaaagtag

SEQ ID NO: 63521 - DNA, 228 bp, Setaria italica
  Peptide Sequence Number=SeqID_129495
agcgtcctgtttagatgatctggccgtttcgagcatgcatggagaattggagattacgtggaatataatccgcgtcaaatctatgcaatgtcacgcactatatataatactagctaccagagcttccgtgcactgtgcactcgtcgaataaagacatcacgctatgtataatactaccagcttcctcgtcgaataaagatatccgttgcttaaattaaaaattataaa

SEQ ID NO: 63522 - DNA, 456 bp, Setaria italica
  misc_feature (40)..(40): n is a, c, g, or t
  Peptide Sequence Number=SeqID_129496
gattactgaactagttggagagctacatcttgagggctcngttaagacaacaaaaattgaagaccacatggctagcagatatagaggagctgccccctttcgttggtggaattcgattatctcatcagcaagaaaaagctggaggaggatgaagacttcctcgacaatctcaacccttgcactcggcgagagaccccagccctcggagatgcaaacatgaagaacctcaagcatggagaggtcatacagctcgagaggaaaggctactacaggtgtgacgccccgtttatcaggtcatcgaaaccggtggtcctgtttgcgatcccagatggtcgacagcaggcctcgctgaactaggcagcgtgccaccgagggcacattggaattcctttaattgttaaggttttggtctaattctaattatttgttggttattattactgtgattaggcttac

SEQ ID NO: 63523 - DNA, 243 bp, Setaria italica
  misc_feature (3)..(3): n is a, c, g, or t
  Peptide Sequence Number=SeqID_129497
ttnttagttcttttctttctttgggttcttagtaattgtcttattcgtagttttggtactattgtttgtcttgtagttggtcttgaatatgcccccatgttcctttccggctctgaatttgaaaatgcctgctcatttgttgatggatacttgacctccaggacttttgtggttggtcatgggctgacaattgctgacattgcagtttggtcaaatcttgctgggattggtcaaacggtggga

SEQ ID NO: 63524 - DNA, 322 bp, Setaria italica
  Peptide Sequence Number=SeqID_129498
gcatcagagactcagggtagacaatccatccaactccaagaacaggttccactccaatcaatgatctcatgtatagcgccttcagaacaatctgatgcccaataagaccaccttgcaaaccgacgaagtatgtatcttccgtgcatccacgagcagatgaaactgcgcagcatgatctgatcgttagcagtttcggtcatcattgctgtagtcgtcaactagctaaacactcgtcagatcatgctggcagcttcagctcctggaggacgcaccacaacaattgtagagagagctagagagatgtatgagagagagagagagg

SEQ ID NO: 63525 - DNA, 314 bp, Setaria italica
  Peptide Sequence Number=SeqID_129499
tttgtttcttagtttcttttcttagttagtcctatttgtaattctaagtaggacagagctggtttgagcttgatgcctttgtggcagtttcattgtcctgtgtgtttggtctgctcatcagcttctttggtttcgctgcaaggaaggcaatctccgccacagcattcacagtgacaggggtggtcaacaagttcctcactgtcgcgatcaatgtgatgatttgggacaagcatgcaagcgtgtttggtttagtttgcttactcttcactctcgccggtggagtgctctatcagcagtcagttacaataaaaggg

SEQ ID NO: 63526 - DNA, 397 bp, Setaria italica
  Peptide Sequence Number=SeqID_129500
ttgtttagttacgtttacttaaccgtttactttgttcgggttccggggttgtacctaagttgtctattgtcttcgtacttgtcttacaagccggccatcagcttcgaccccctgcagctgcccgtctgcctcctcaagtgcaccaacgacgccatggtctgcggctccagctgcgccaccaatctctagacgtcgttcagtcacgcattaatcctgcatgccaccgcttgtacctaactaccgatcgaatgctatgccatagtgccatgcaatgcagaagtataccactaggggaatatgtcccaaatacacctatgattgtaattcatgcatcccatactaccaatgggttgcaaaaccgtccttaccacgaataatgcaatggctacttattaca

SEQ ID NO: 63527 - DNA, 304 bp, Setaria italica
  Peptide Sequence Number=SeqID_129501
agcagctctgcaccttcacacttctcagcgatcgacttggaagaacgtgcgtgcaccatgaaggctgccgcggcgacgcttctgatggcgctggtggtcgcggcggcggtcaccgtggtcccatccggcgcggccaggcccgacgactccgcgacggtgggcaccttcggccatggccacggccacgtcggcggccgcacctggcgcgatcaccacggcggcaaccgttccccgctggcggggctgacggagtgcgtcaccgtctgcgggtccggggtgaccaagtgcatgctcgactgctaca

SEQ ID NO: 63528 - DNA, 286 bp, Setaria italica
  misc_feature (219)..(219): n is a, c, g, or t
  misc_feature (232)..(286): n is a, c, g, or t
  Peptide Sequence Number=SeqID_129502
gaaaaaaggctgattggcaggatacaatcgtagagagacttttgaattgtgaggtaccattacgagctcaatatatacgagtgttattctgttcattgaaattggtcgtttggaagtttcccgaaaagctaattataggttgttctctccatcggaacaatagggccgttatgcttattactaaacttgttgaagagatgaaatagaaccaaggtctanctttttgacttcnnnnnnnnnnnnnnnnnnnnnnnnnnnnnnnnnnnnnnnnnnnnnnnnnnnnnnn

SEQ ID NO: 63529 - DNA, 294 bp, Setaria italica
  Peptide Sequence Number=SeqID_129503
aaggggttgaagaagtggtggctggccgccgcgggcggcgcggcgaacttgagcgagcggagctcctgcagctcccgctggaggcggcggttctcctcggtgagcgactcgcagcagcgcttgaggaactcgcagtccacctccgtctgcttcagcttggtccttgctcgtctgttttggaaccacacctccacctgccgtggccgcaggttcagttgcttggccagcgcgactttctgcttcgggctgaggctgaccaaggagcagtccgcgctcctggaggaccgcttcaag

SEQ ID NO: 63530 - DNA, 456 bp, Setaria italica
  Peptide Sequence Number=SeqID_129504
ttgcctcggcctcagattcagttgctttgccaaagcagccttttgcttctgcccagagagatcatcaaccatgcatcaacaaagggagaatacaaaccaaaaatactgacaattcaatttttacacgatatattttaataattttgcttacagggttgagggtgctgtgctccttgaagcggtcctccagcagcgccgactgctccttggtcagcctcagcttcttccggctgttgcacccttcgtcgtcgtcagccgctaccagcgccgacgacgccaccgagtaaagcgccctgtcggcggtggcctcatcgtcctcctccatcggcagctctctcttcacggcagcaatcctcaccggagccgacaggcggctgtctttggttgggaggctgagcgacaacgacggctccaaccgcgcccatgagcgcgacgacggtcgtagggtcttgttta

SEQ ID NO: 63531 - DNA, 249 bp, Setaria italica
  Peptide Sequence Number=SeqID_129505
accacacctccacctgccgtggccgcaggttcagttgcttggccagcgcgactttctgcttcgggttgagggtgctgtgctccttgaagcggtcctccaggagcgcggactgctccttggtcagcctcagcttcttgcgcgtgctcccgtcgtcgtcgtcctcggcgccggcgccgcaggcccgcgccgcggccgccgtcgacgacgcccgctcgccgtccgcctcctccacgcgctccctcttcaccg

SEQ ID NO: 63532 - DNA, 199 bp, Setaria italica
  Peptide Sequence Number=SeqID_129506
ggcgcggagctgctggagctcgcggtggaggcgtcggttctcctcagttaacgtctcgcagcagcgcttgagaagctcgcagtccacctctgtctgcttcaatttcgttctgcaacaatccatgcatgcacatcaagattaattaattattgttcaatagattattagtacaagataatttttttcagaaaggaaatat

SEQ ID NO: 63533 - DNA, 530 bp, Setaria italica
  Peptide Sequence Number=SeqID_129507
agtacgaccaaggacccaacgttagactagaataccggaaacggtacgtccggccaggctcgacggtgaaggtgtaaccgttccaactccggccgttgatgaggaggtggagggctcccacaccatgcagaccacctactcgtccctggacgtgcacctcggccagtcctactccgtgctcctcaccgccgaccagcccggcttcgactacgccgtcgtcgtctccacgcgcttcaccaccaagatcatctccaccaccgccgtcctccactacaccaactccgccggcaaggctcccgggcccctccccggcggcccccaccatccagatcgactggtccctcaaccaggcccgctccatcaggtggaacctgacggcgagcgggccgcggcccaacccgcagggctcgtaccactacggcctggtgcccgtgacccgggaccatcaggctggccaactcggcggcgatcatcaacggcaagcagcgctacgcggtgaacagcgtgtcgtacgtgagcccggacacccc

SEQ ID NO: 63534 - DNA, 353 bp, Setaria italica
  Peptide Sequence Number=SeqID_129508
agcgggcctggttgagggaccagtcgatctgggatggtgggggccgccggggaggggcccgggagccttgccggcggagttggtgtagtggaggacggcggtggtggagatgatcttggtggtgaagcgcgtggagacgacgacggcgtagtcgaagccgggcttggttcggtcggttgtaggtagcacggagtaggactggccgaggtgcacgtccagggacgagtaggtggtcttgcatggtgtgggagccctccacctcctcatcaacggccggagttggaacggttacaccttcaccgtcgagcctggccggacgtaccgttccggatcagcaacgtgggcctggcgac

SEQ ID NO: 63535 - DNA, 168 bp, Setaria italica
  Peptide Sequence Number=SeqID_129509
ctggttgaacaggatggatggagggacagtggacaccggcgagccgtcagggttacaaccttagagacgccattgctcggtacaccttgcaggtatcattaacacagctgctcgctgcagttcaccttgacgtctcatattacaagaattcaaagaaacacatctgac

SEQ ID NO: 63536 - DNA, 447 bp, Setaria italica
  Peptide Sequence Number=SeqID_129510
agttcagaaggcatgtgccgaccccttggttcatcaagattggctgttggcctgataacaagggctgcatctgatcgaggactgaaaccaggacctccaaatgcagggccacccctcgattctccaggtctaggcctcttaggatcagcaaatcttatgactaatggttgctcgcacccctaacacagaaaatatgccgtaaatatcaagaaagcaaaaatacagaatatgtcagcttggcacagaaatttaccctcattatgtaagtcccactaaggcattcatagctgccactgctggctcttttgatgagaatttgacaaatccacaacctcggctctgcctcatgccatctctcataatgtaaacatcttccacatgaccatatggagcaaagatctcttcaatctcctttggagttgcttgcttattgaggtacgcaacaaa

SEQ ID NO: 63537 - DNA, 349 bp, Setaria italica
  misc_feature (1)..(27): n is a, c, g, or t
  Peptide Sequence Number=SeqID_129511
nnnnnnnnnnnnnnnnnnnnnnnnnnntttttccttttttacgtttttacgttttctttacggttaacttattctactaaattcatgccacaatggtaaggaaaacacaaacgaatgggacccaggaaacgacctccggcagctcctgcgtgggagtaccaacccgctggagaacatgaatcgctaacaagggatacatggcctaggtcacaacgatgtacacatacaggatctaccatctacatatcagtctaatctaaatccagagttacactgatcgggatgggcgcctggctatgcaggctagctgttgttacagatggacagcacggggacagctcaattccga

SEQ ID NO: 63538 - DNA, 254 bp, Setaria italica
  Peptide Sequence Number=SeqID_129512
tctaacttgaacaggacccatcgctccaggtaaagtgtattggttgtgaagacccctgatggccctatctgcctcctccgaagtagcatatttaacaaaacaacaacctgcaaatgtaaaaatgccgattattcagagttactattttctgtactatatctgccataatatcagtcaataatagcagtcagtaaacaggaggcaaataatagcagtcaagaaacagcaggcagaaaggagatatgttgaattta

SEQ ID NO: 63539 - DNA, 255 bp, Setaria italica
  Peptide Sequence Number=SeqID_129513
ctaatcttggttttgcaaatgcacttcagtaaaagccataagtgtcagcaactcctctatgtgcaagggaacgaccacacatggttcatctcattaataacctaatttaattgtccttgtgcaaaactaagtaactgagtgagtagagaaactgaaacctgataacaagggctgcatctgatcgaggactgaaaccaggacctccaaatgcagggccacccctcgattctccaggtctaggcctcttaggatcag

SEQ ID NO: 63540 - DNA, 429 bp, Setaria italica
  Peptide Sequence Number=SeqID_129514
tagagaagcattctgttgcatcaatggctgtgatgctggaggtttggccaggtaattgcatagatggcatatttctggccatatgaaacaggtcctgtggattgcggaacctgaagctgcccaatctgttgaatagatccctgcaggggctgtccttgctgagcattctgcaattgtacggggaagttctgtggtggaccaggtggcttttgcatgggtgggatctgttggcttcccagatgatgcccttgtaccatgggagggttcatgcccacatgcgatgaagttggcacagctgtctgagttgataaggagccatttccaggaaacatcggaggtcgaaaaccagcagtatctgctgatgttacaagcaaccaaccaaagacgaccaaagggaattagtacaagaataccaaaaaattaattaga

SEQ ID NO: 63541 - DNA, 230 bp, Setaria italica
  misc_feature (5)..(5): n is a, c, g, or t
  Peptide Sequence Number=SeqID_129515
ttgtntattggtattggtaagtagtacttgtacccttgttggttggttgtactgcagttgctgtgctgcaatcttttgttggtgctgttgaagcaaaagcagtttctgctgttgctgctcatacagcacaaactcttcaggcttctcccacttactctcacgagtaacgctattgtagtagtacttaaaaccttcagggggactatgctctgtccagttgcaggttgaag

SEQ ID NO: 63542 - DNA, 360 bp, Setaria italica
  Peptide Sequence Number=SeqID_129516
tcgaatgcgttgtctatgcttggaagtcttgagctccagagtgatgaaacctggcttaccgcaaaggagcatttccgtaatgctaaggaggccaccaagggagatgcctactctttgcttcaattggggaactggaattactttgcagccaatcgccctgagaaaaaggccccgaaatttgaggctactcatagggagaaagccatggaactctatcagagtgtatgctgctttacgctttcatttccaatgtgttatttgtaccagttaaaatggatggctcactattatgaaatttacattacaccctatcagattcttctttcatttaaatgctcaattcatgtggcatatcttttt

SEQ ID NO: 63543 - DNA, 304 bp, Setaria italica
  Peptide Sequence Number=SeqID_129517
agtaccaaaattgcctgcggaagttcttcaacaacacagatgcaactatccttttataccttgcccgaacacactatgaggctgagcaatggcaagactgcaggaaaactttgctgagagctatacatttggctccatcaaattatttgcaaggtttaatgtaggtgtgtcaatgcagaaattctcagcttctactctgcaaaagacaaaacgaacagttgatgaggttcaccgtgatgcagctgagcaagctgagcagcaaaacaagcaaaaaatggaagttgcccgccagatttgctttggc

SEQ ID NO: 63544 - DNA, 229 bp, Setaria italica
  misc_feature (4)..(4): n is a, c, g, or t
  misc_feature (10)..(10): n is a, c, g, or t
  Peptide Sequence Number=SeqID_129518
gttnaggggntaacgacggtgacaattcagagagagctcctgatcaccttcttgctgctgctggtcttgaggattctgatgctgaagatgacatggtagggttgtggtctttttcgtactcaatttatgttcattattttctattacctttccctgttcatgtgtttttttcgggtgatacatctaatattgataagcattccattggaaaaattttaagaaataagaa

SEQ ID NO: 63545 - DNA, 230 bp, Setaria italica
  Peptide Sequence Number=SeqID_129519
ctgtagtgtactgtacatcttatttcatactttgaatagggtgctatgtgcaaagttcctcttgtttatcaagtcccttaatggttcattctaatgaagttgtacatttgccagcaagtactaaagcagcatcgtagtaatatgtttgctgcaaatggtattggaatcttatatgctgaaaaagccaaatgggacgttgctaaggagtttgtttacactaggttactatt

SEQ ID NO: 63546 - DNA, 254 bp, Setaria italica
  Peptide Sequence Number=SeqID_129520
aaggcaggggaggatgttcctgttgagttgctcaatggaattggacttcttcattttgagaagggagagtttgagatggctgaacaaagttttaaggaagcactaggtgatggtctttgggtttcaattatggatgggaaagtaggtagctctatggtcaactggagtggtcagtataaggatcagagtttctttcaccaacttgaagaggaaggtgtgcctcttgagttacattcaaataaggtcaccacact

SEQ ID NO: 63547 - DNA, 384 bp, Setaria italica
  Peptide Sequence Number=SeqID_129521
acttaccgaacgttacctgaccgatcccgatgaccgcgcgtacctggacctgctcgtgaaccagttcgccggcctcgacacggccgaccacgtcctcgtcaactcgttctacgagttgcagcctcaggtataatcatcgctgcctaccacagatgcatgcgtcgatcgataaggttcactgaaatcgtttgggcatattgcaaggaatcggagtacatggcgtctgcttggagagccaagacagtgggcccaaccgtgccgtcggcgtacctcgacaaccgcttgccggacgacacgtcttacggcttccacctctacacccctctgacggcgatgacaagggcctggctggttgcaatgccccaatggtctgatcagaccatg

SEQ ID NO: 63548 - DNA, 517 bp, Setaria italica
  misc_feature (3)..(3): n is a, c, g, or t
  Peptide Sequence Number=SeqID_129522
ttnttcttcttaacttatttaccctttcctttctttgttccttttctttccgttccggggttagtatttctattggtacttccggcacggtcatcacgaggctgcagcggacggcctactcggcgctgtcgtcggcgttcaaggccgggatgaagcagtacccgcgggccccgtccagcggcatcctcgacacgtgcttcgacttcagcggccagagaagcatcacgataccgaccgtcgccctggtgttctccggcggcgcggtcgtcaacctcgacgcgaacgggatcattctgggcagctgcctcgccttcgctgggaacagtgacgacagctccttcggcatcatcggcaacgtgcagcagcgcacgttcgaggtgctgtacgacgtcggcgggggctctgtgggcttcagggctggggcgtgctgatcgccgcgcgcaaggactgaaggacactgtcactacttgttggtggctcatggctgcgaggtaacagacgtgaagtgggcaaccat

SEQ ID NO: 63549 - DNA, 383 bp, Setaria italica
  Peptide Sequence Number=SeqID_129523
caccaggcatacaccagtactcattgagcaacaaagtctttaacttgctaaacacagggcatcatttcaaatccattttgaaaataaacatgtcgtgtgcagattccaaatccaaatccttagcttctgataaacctttaagaagcacatgagagttatttccatcaccaacgttaacagaagtgccacaatactgacactcacattgtgagcagtttggatccagtagtttatcacatgcatcctcacaatcaggagttattcggacaaatgccttaattaacgatggcatactgtcaagaatgggagtcctccctcaaggtcatctatgtacagagaaccaaatttggggcataaatgtggatgcgggaatgctcggatgc

SEQ ID NO: 63550 - DNA, 379 bp, Setaria italica
  Peptide Sequence Number=SeqID_129524
tttaacttgctaaacacagggcatcatttcaaatccattttgaaaataaactggacaagatgcaagaaaataagttgaaatgatctgaacatatgatttgagcttaataagttgatggcaacacaagcgaaaggtaaatcctgtctaattgacatatatcaatgtccaacaatgatgtagctataggatttgttattataataagtgggaaaatgtaggtgtaccatgtcgtgtgcagattccaaatccaaatccttagcttctgataaacctttaagaagcacatgagagttatttccatcaccaacgttaacagaagtgccacaatactgacactcacattgtgagcagtttggatccagtagtttatcacatgcat

SEQ ID NO: 63551 - DNA, 450 bp, Setaria italica
  Peptide Sequence Number=SeqID_129525
ttcctttggttaagtttccttttgtttaaatttatttctttgggttctttattctactagttggtaaggtaagtattggttcttacctttgtacccttgttcactggggataccagagagcagcatccacttggtgaaaggaatgagatgtgggtaaagttcttcaatttcacccttcttaagagcatggatgaggatctagcagaagaagcggatgatggcatgcatcctggaaatgatcaatggctgtggccattaactggtcaggtgttctggtctggcattgctgatcgggaaagggaggagaaatatataaaaaaagctggacaaaaaagctcaagaacaaggtgaaattgctcgaaaggcagaagtctggttacaagcagaagcccctgggacaatgacactgaaagaagctaacaatccgagatctcttatgatccaccattg

SEQ ID NO: 63552 - DNA, 331 bp, Setaria italica
  Peptide Sequence Number=SeqID_129526
tgtcctacttttctagttgtattgtctaacttgtcctactagtctacttagtcctaattggtatttccctacctaaattgttactttcctattgtttccccttggttcttgtattacacaacatgatgtccttatctgcaagaactgcactgactggaacaactccagcaccaagtgctttgccgagaatcaccatatcaggccttatgccttcccaatcacatgccaacattctcccagttctagctatgcctgtttggatctcatcagcaatcatcagaatgttgtgcttagaacacaagtctctgacagctttcaaatagccatctgg

SEQ ID NO: 63553 - DNA, 444 bp, Setaria italica
  Peptide Sequence Number=SeqID_129527
cgattagctgtacccaacgatcaaaaaatataattacccggaacctagggacgcacccccacatgggaccccacgtctagcttgatctccatgtgagttttaggttgcacccatgcctttccactgcacgccaagcacaggtaaaaaatatttccaataggagagccaactaacctaccaggctttgctggtcccagagacagtaagcaactaggtaatatcacttgatcattggttaaaacaacgaacgatccttaaccagattaacttagtagacagaactaccatctctagcttctgtccacatttcaaaattccaaactatttccttgtatttaactattgttattgtactaattattttaaccttttaagtttgtttttcttttagtttttaacttttagttttaagttttactttaaagggttattttaaccttattt

SEQ ID NO: 63554 - DNA, 348 bp, Setaria italica
  Peptide Sequence Number=SeqID_129528
acctgttcttgaatttaaataacttacaaggggtagactagtactagaacaatagtttccttcacgtatcttgtgacagcaacttaggcacagcttaaatgggcatgccgggcagcatctcaggaactggctcgctgagagcttacagttattgcagtacagtgactcgctctggccattttcagcaacctggactcgaacatcagatatctttgttccttgtattttagcttctaattccaattcatcaagctgttcctggtcaagttttacaggtaaaagcttgtaaaattgatggttgaaatttttatgctgagtatcttcccctcaccacttggtgattcctta

SEQ ID NO: 63555 - DNA, 306 bp, Setaria italica
  Peptide Sequence Number=SeqID_129529
actaatagaaacctagaagacaaataaccttaacaactaccaagaaatagaattagacctggagcatgtagttcatcatctgaactgagctcttcagactgtccagaaggggatgcgtatatcaagttcagcggcgcatcaccgcagccaccaagctcaattgaagggcaagtaatgctgccatcctcatggacagactcttgctgaagcaacctgttcttgaatttatcttcaggggtgctgtctgacatgtttccttcacgtatcttgtgacagcaacttaggcacagcttaaatgggcatgcc

SEQ ID NO: 63556 - DNA, 257 bp, Setaria italica
  Peptide Sequence Number=SeqID_129530
gggcggtcggtgcggtggtcctcggagaagggcgcgtcggtgttgagcccgtacaccgacgacgaggaggcccagacgatcgccggctgcgggtcggcgtgcttggccgccacctcgaagacgctgacgagcccggccacgttggacgccacgtaggtctgcggcgcaggccggcgtgcgttacgccatggaggcgccgcagacctacgtggcgtccaacgtggccgggcggtcggtgcggtggtcctcggagaagg

SEQ ID NO: 63557 - DNA, 329 bp, Setaria italica
  Peptide Sequence Number=SeqID_129531
gtaattcagtgcgtcggtgcttgctgctcgtctcatgatcgtcgagctatacatttgcattgtatcagtctgtatctgtattctccccaattgagatttgagaggggttcttcctctctccctctctggaagaagaacaccatagtccttgtcaattctgctacattccaagtgatccctctttgggtggatggggaaaaaataatcttatcttatcttggaaatgtggtagattgacattgtgaaatttgtgatatgatgatgaaaaagtgaattaaaggagctaattctttgtccgtcttgttgtagtctttgttgtattattcaaa

SEQ ID NO: 63558 - DNA, 394 bp, Setaria italica
  misc_feature (306)..(306): n is a, c, g, or t
  misc_feature (369)..(369): n is a, c, g, or t
  Peptide Sequence Number=SeqID_129532
tataacatcattggggaatgaattgctaggagatcccaatgatgttataattcaggctaacactagttggtccgttatgttcacccaggacctaatattggtgacatggacatggcgcaacggtgatttgatgactcctgtgtgccattttcttgttgcttctggattcttcaactgaggcagctttgaacagcaccaaatgagaagatccatggggatgttccgcgacaaagcataataccaatggacctaatagagatggtaaccagtttgtacaggaataaccttgtagaggattcagtttcngttagtaatagacgaaggttggtctctaacgcaaaatgtatcgtcgatggaacagcttattcnggcatcaaacttcttttccaacaac

SEQ ID NO: 63559 - DNA, 188 bp, Setaria italica
  Peptide Sequence Number=SeqID_129533
tgctgcccaagttaatgcagtatttcttcaagatataggggggaaatccccattgtcacagtgggccattgaattcctttcactgatggtacagagctaaatgaattttaagctctgtaccatcagtgaaaggaattcaatggcccactgtgacaatgcagtatttcttcaagatataggggggaaat

SEQ ID NO: 63560 - DNA, 314 bp, Setaria italica
  Peptide Sequence Number=SeqID_129534
caagttaatgcagtatttcttcaagatatagggggggaaatccccattgtcacaagtagggaccaatttagaaaatttccctttttacaactgatggtacagagcttaaaattcatttagctagcgttaaaggttaaactacaagctgaccatagcacagcagctgcgaatgctacagaactaaaaaaccactccacaggaaagcagaacttaggacccagagatatacactagcagtagctggcgtctcgtaccatcaggattgggaggcgcgatctcagggggaagggcggcagccgcagcacggcctgggt

SEQ ID NO: 63561 - DNA, 421 bp, Setaria italica
  Peptide Sequence Number=SeqID_129535
tgagtttgctatgcatgatgatcagccgtaccacagatcctgctacaaagaaacggccatggccaattgggttatggcatccagcacaggtcctgaatccacttcctgggtaaacatgtggaggtggctcctttgctggaacatactgttgaggaggaacatcctcaataggaacattccgtcgaggaggcacattctcaacaggaacattctgtcgaggaggagactcggcattcaggctctcctgcagcgctcttgcaagttgttcgtcttcctccaaatcatagtgagtatcaatagctgcttttcccttattttgatcttcctctgctagcgataatgcaatagcacgatctatatcctcattatcactgtcaccataagtatctctgttgtaatcagatgaatggccttcatgcca

SEQ ID NO: 63562 - DNA, 377 bp, Setaria italica
  Peptide Sequence Number=SeqID_129536
tcttaaggaggtgggaataagagagaatatttaaagatgaaatagataagtaccacaacaccaagagcttgtccagcaaattcagcaattggaccaccaaatagtggttcatcaccaaacatggtcattgatccaatattttgtccttcctttggaatatccttggcagaaacaactgtgataatcttctgcgatgctaatgaagacttaaatttaatattcttgacaaaagcaagaggctgtgtgctgtaaataaattctccatggaggcaatgctttggagctggaatgtcgtccacatatacggcctcacctatataacccaaaaagaaatatgtgtgatgtcctttaagaaagacacttttgaaaaaatttat

SEQ ID NO: 63563 - DNA, 417 bp, Setaria italica
  Peptide Sequence Number=SeqID_129537
accaacaagttaaagaattaggtaggacttacaaaatcttcagtatcatactcaacaacagcctgttttgctgccatgtcggcatgtctctgtgtttctgcaatcacaacaccaagagcttgtccagcaaattcagcaattggaccaccaaatagtggttcatcaccaaacatggtcattgatccaatattttgtccttcctttggaatatccttggcagaaacaactgtgataatcttctgcgatgctaatgaagacttaaatttaatattcttgacaaaagcaagaggctgtgtgctgtaaataaattctccatggaggcaatgctttggagctggaatgtcgtccacatatacggcctcacctgaagcttgaagctcaactccatacttcttcattggctcaccaattggttat

SEQ ID NO: 63564 - DNA, 223 bp, Setaria italica
  Peptide Sequence Number=SeqID_129538
tgttttccaaatcagacaattaacaaggtgaactaaataaaattgagtaacagaataattgagtaaaaagagcatatatagaagatgtcccctacatgtattgctgcaaccgtggacaagagatccttcgattggtccaacaacatttgttcttgtgtggcgagtttagcaagctcagacactacagagcttgttccctcaacctgaagatgaataaatatat

SEQ ID NO: 63565 - DNA, 273 bp, Setaria italica
  misc_feature (249)..(249): n is a, c, g, or t
  Peptide Sequence Number=SeqID_129539
ttagttcgtttgttagttatttgttcttttgggttctttgttccttacggttctagtaccttctagaagaacttcgcatgccaggcctgcaaaacaagcaaggggatggagaccgtggcgatgccatatgtgttcaggtacctggctgccgagctggctgccatgaacataaagctggagctccggctgagcaacaaatcagaattgcctccgagccaaggatcatgaagttctgcattcaccagagcncggttaggcacctggcaggagaaa

SEQ ID NO: 63566 - DNA, 195 bp, Setaria italica
  Peptide Sequence Number=SeqID_129540
gaggcaattctgatttgttgctcagccggagctccagctttatgttcatggcagccagctggagctccggctgagcaacaaatcagaattgcctccgagccaaggatcatgaagttctgcattcaccagagctcggaggcacctggcaggagaaagcttaaacgtgcctgttcaatcgcaatagtcctcgccgga

SEQ ID NO: 63567 - DNA, 246 bp, Setaria italica
  Peptide Sequence Number=SeqID_129541
gcagaattacactgatcaggacctgaaagatcagctaggagggcacgagcggggccctgcaccgtattatttgcaaggtccaacatccagaatccaagtatgaaaacaatagcagctcgaaaccttgaacctttatatgtactgcagtgctcagtggtatctcctaagatgtaaccaaggtctgcagaaatccgactaaagttacctatgtatgaagtctatgtattagagcatgaggagtatggg

SEQ ID NO: 63568 - DNA, 421 bp, Setaria italica
  misc_feature (20)..(20): n is a, c, g, or t
  misc_feature (323)..(421): n is a, c, g, or t
  Peptide Sequence Number=SeqID_129542
gatgctctccgcgacctccnctcggcttccaggacgccagccctcttcacctccaagtgcatcgtcgcagagctcaggcgacttggcaagtcacatgccgaatccttcgactccgcgcagcttctcgccacaacccaagtggggttccttttcttttccacagtattgccaccttctcagctactagtaccattctttcttttttatcactcccaacttggttgtatctctatcgctctgaggccctggtaatttgattttgctattcagttcacaaatgtacttacacgaatatgattatcaggttacaataacttaacggnnnnnnnnnnnnnnnnnnnnnnnnnnnnnnnnnnnnnnnnnnnnnnnnnnnnnnnnnnnnnnnnnnnnnnnnnnnnnnnnnnnnnnnnnnnnnnnnnnn

SEQ ID NO: 63569 - DNA, 423 bp, Setaria italica
  misc_feature (404)..(404): n is a, c, g, or t
  Peptide Sequence Number=SeqID_129543
caaaaagtacaacagaaaacatggataacattaagctattacacccgaacgcatcaagcagcaaacaaggaaaaagggccaacatatatgtaccctgctggctgttgggcatgtaccaaaagcatgctaacagaaacactactttccacacaaaaaaacgccatgtccacccataataagggacctgcagctattctctaccgcatgcttctacattgttttaattatagcatccaaattagacaaatcggactctgaggcacgcccaatcagtagtaaatgtcagagaaattcaccttcagtcgtctcccaagcaacgcctccaacgaaaatcttccccgacgagtcgccgccggctcccctcccgtcctccccgcctacatcgccgtacccggagcccccancccggacctaaccccgaaa

SEQ ID NO: 63570 - DNA, 262 bp, Setaria italica
  Peptide Sequence Number=SeqID_129544
atctggtttcctgcgtcgactacctgactacaaccatcagaggggaggggtgatgcagcaattgtaaagaaaatagacccagaaaacacttacgttttccgttctttttcttgttttgttttctgtagagagaaccatcaacttcatcaatgtattgctttgcgcgatgtatattctaaagcgaaactttctccttcccttcaagctgcttgtaagtataacaaagatgtggactgttggatgcctgcagcgtcgatatcca

SEQ ID NO: 63571 - DNA, 321 bp, Setaria italica
  Peptide Sequence Number=SeqID_129545
ggaccaccgtacatggaaccaccataaactgagccataaccagacccatagccagcagtattgccatatccataacctctgccataggcgccataagctgtgctgccataataggctgcagctgatcggtagccacctccatatccatagccaccaccaccactgctcccagagccccgaccgccagtgccaccaccaccaccaccaccaccaccacccatgcctccagccccaatctccgcgccgccgccgtccccgtcgtcctccgccgttgcagccgcggcctcctcgtcgcctaccgaccgcgcccttccttcgtcc

SEQ ID NO: 63572 - DNA, 259 bp, Setaria italica
  Peptide Sequence Number=SeqID_129546
tagcccaccaatgaagatctttcttgtcttggggccatctttggtggtcatttcttccctagggactgtcctctttacttcaaccgttctgccatctataacgtgctcatcctccaaaaccttgtctataacagatggatcagaaaatgtaacaaatccaaatccacgaggcatcttagtatgcttgtcctccagaactccagaagcaccaaatgcaagagcaccaacaccgaacaaaaacataatcaaattgcgagcc

SEQ ID NO: 63573 - DNA, 494 bp, Setaria italica
  Peptide Sequence Number=SeqID_129547
cccggggccgcgtccccccgcggatgctagcctgatcgcgtccccacggtcgatgggttcgccggggtccgccaatggcagacacggcgagtacgtgaggatcccggaggaggtggaggtggcggtcaagggggaggccgacgccgcggccgccttgacggtgctccggtggcgcgcgatccggtggtgggcaaaggtcgccgtgctcgggatcttcctcgcgggggccggagctgctgcggtcgtcttcctcggcccggggctcgtcattaagaaggttgttgcacctattctttactgggaatcaacaactttcagcagaccagctattgctctaatatgtttttggcgcaatcgccttattcccaagtgttttgttaccttcttcacccttcatgtggcttgcggggatgacttttggatatctttatggctttttgataatcacagcgggatgagcataggcatgtcattgccgtattttataggctctg

SEQ ID NO: 63574 - DNA, 116 bp, Setaria italica
  Peptide Sequence Number=SeqID_129548
ccaaaaccagacccaaagccgagccattgcctccatagccataccctctaccgtacgccataagcaccccctccataggcaccaccaccgtaggcaccatatgcaccataagcgcc

SEQ ID NO: 63575 - DNA, 432 bp, Setaria italica
  misc_feature (403)..(403): n is a, c, g, or t
  Peptide Sequence Number=SeqID_129549
ccacactaggaacttttaggaaacctttaggaacaataattagtaccgacaacggaaaggtttaaggggcctgtatagaggaattctgcctgagtactgcaaagtggttcctggtgttggcatcgtatttatgacatatgagatgttgaaggccatcctcacaggactggaatcagatgattagatctccgctgtactttcacgctcgacaatttttgatatatggtggcataataacttttgaggcttattagggtgggagaagtatgagtatgtagcatatggtaggatttagaacatgctgagttttgcagttcgtgtgacatggttacaggttttcttgtagtgcaccttgaaagatgccataggcctttccaaaaacttttttaaaaaaaaaaaaaanaaaaaaaaaaactaaaagagaactagacc

SEQ ID NO: 63576 - DNA, 442 bp, Setaria italica
  misc_feature (4)..(4): n is a, c, g, or t
  Peptide Sequence Number=SeqID_129550
tttnttttgttttacgttttttgttttacgtttctttagttttgttctttccggttcttaaaccgtccgtagttactattcttgcgcgctagagctgaaggtggccatcttgcggaggctctcagacatctacggcgtgtagagcgagctctggtgaaggcagtcgatcgtttgcatgccaatcaccactgcacatgtaagagggaagagagaacctagctacatttcttgccatggccatctctgttcaactcctccctaccacccaccaaagtagtagcatattgtgccactgcctccccctatgtgattggttggtcgcatatggaagtgtgtctattagttaaatctggctggaaaagccagcccttttatccagctgattgcaagaaaatgactttgattggtggttgtcgataggctagctggtctgcatgcatgg

SEQ ID NO: 63577 - DNA, 306 bp, Setaria italica
  Peptide Sequence Number=SeqID_129551
gttttaccacctgcatgtgtcaaaacggccggccgtttcactgtcatgcgggtatcgagttttaccacctgcatgtgtaatttttttttcttttttactttcctcgtccgtgataatcgatctcgatatatagggtcggtcggtgaggagacgagataaacaagggcttgttgtggttgcagctaattaagcccggacctcctgtgtatctgtctactatctgtctgcgtatgcatatatgcgtatgaatatgatcgagatggatacacaggaggtccgggcttaattagctgcaaccacaacaag

SEQ ID NO: 63578 - DNA, 404 bp, Setaria italica
  Peptide Sequence Number=SeqID_129552
tcttagctccgcgaagctgaaggagatgagtggcagtgacatcttcgctgatgggacgcccgctcctcgagaataccttggtggtgtccgaaagccccctggtgatgagagcagcatcgcactgatctaattgttatcggctgcttgaatccggactggctagctcccctcctcactgaagcgcacagtgtctgcattcttgaccttgctcgaatctcaggactggtccttgaatcatgcatgctttggggatcttaatttacgatgagtatctttagtctaatataatgtagagtcagcagaatctgactcggtcacttggctcgtatctgatacgcctgtgtgtgaatactacaatactttaggtttagtagactaactacaattaatagtaattaagtaca

SEQ ID NO: 63579 - DNA, 167 bp, Setaria italica
  Peptide Sequence Number=SeqID_129553
ggatcttaatttacgatgagtatctttagtctaatataatgtagagtcagcagaatctgactcggtcacttggctcgtatctgatacgcctgtgtgtgatctcatctttggtttgtgctacttatttcacaagttctcagtgcggagagactaatacataatgagta

SEQ ID NO: 63580 - DNA, 461 bp, Setaria italica
  Peptide Sequence Number=SeqID_129554
cgccttcctcgtcgtgccctgggtcttcgtcgagctgcccaggctgcgcgccgtcggcaccttccagccggatctcttcgtcttcggcaccaactcgctctgcgccttcgcgctcaacctcgccgtcttcctgctcgtcggcaagacgtccgcgctcaccatgaacgtcgccggcgtcgtcaaggactggctgctcatcgccttctcgtggtccgtcatccgcgacaccgtcactcccatcaacctcttcggctacggcatcgccttcctcggcgtgggctactacaaccacgtcaagctgcaggcgctcaaggccaaggaggcgcagaagaaggcggcgcaggccgacgaagaggccggctcgctgctgcaggagcgcgactcgcacggcgaccgcaagactgacaaccaggcctagcgtagtgttgtacggtattcttgtaagtattcctaaccgtctt

SEQ ID NO: 63581 - DNA, 356 bp, Setaria italica
  Peptide Sequence Number=SeqID_129555
tcggcgcgctctacgcgctctcgctctggttctccaactccgcctacatctacctctccgtctccttcatccagatgctcaaggcgctcatgcccgtcgccgtctactccctcgccgtcgccttccgcaccgactccttccgccgtgcctccatgctcaacatgctcgggatctccgcgggcgtcgccgtcgccgcgtacggggaggcccgcttcgacgcgttcggcgtcacgctccagctcgccgccgtcgccgccgaggccacgcggctcgtgctcatccagatcctgctcacctccaggggcatgtccctcaatcccattctaccttcgtcttcttacttactattcgttctt

SEQ ID NO: 63582 - DNA, 242 bp, Setaria italica
  Peptide Sequence Number=SeqID_129556
acgcaacgcaacgcaacgcaggtcgcagcgcgtgctcgacgggacgcctccacccgcctccagatccggcgtcgcatctgctgccatgagctgccgcggcgggtgcgcgtgctagccagctaagggcggaggcggagggtgagggagaggggggcaggcagatccggggtgctcttcaagaaggagaccttccggtcctcctccatgctcaacactgctgtccatctcctttggcgtcgcca

SEQ ID NO: 63583 - DNA, 321 bp, Setaria italica
  Peptide Sequence Number=SeqID_129557
gggaggtgggtggtggcggcggcggatctgggatccggggggtggcgagggttaggttgtgaaggcgcggcgcgaggggggaagaagggccgggagtggggaggtgctggagaagagaaggtgctcctctcctactgctacgtcgcggtgtggatcttcctctccttctccgtcatcgtctacaacaagtacatcctcgaccccaagatgtacaactggcccttccccatctcgctcaccatggtgcacatggccttctgctcctccctcgccgtcgcgctcgtccgcgtcctccgcgtcgtcgacctccccacctccccc

SEQ ID NO: 63584 - DNA, 257 bp, Setaria italica
  Peptide Sequence Number=SeqID_129558
gcagggaggcggcggcggcggcatggggcgggacggcggcggcggcggcatgtcggagtcggtgctccggaaggtgctcctctcctactgctacgtcgcggtgtggatcttcctctccttctccgtcatcgtctacaacaagtacatcctcgaccccaagatgtacaactggcccttccccatctcgctcaccatggtgcacatggccttctgctcctccctcgccgtcgcgctcgtccgcgtcctccgcgtcgtcg

SEQ ID NO: 63585 - DNA, 323 bp, Setaria italica
  Peptide Sequence Number=SeqID_129559
tcgtacttgacggtgcgcacgcttcagcagtcgtcggctccggtgcgcggcggctcgtcggcgactgacggtgcgcacgcttcagcagttcggtagctcatcgccgtgctagctgacctccagaatgcatgttgtttaatttggcatgccactttattcatcagttcagtgcactctcgtcagtagtttgctttgtcgtcacctctgatcatgtcacttgttgacagtatgctattgccactcatgaatcatgatggtgaatctgcttcgtacgatgtaaggttttacgatctagtaactgcttcttttaatttctccaaaga

SEQ ID NO: 63586 - DNA, 467 bp, Setaria italica
  Peptide Sequence Number=SeqID_129560
cgaggcagccaagaggcttgcataagttgcaagggaaatgcattggaccattccgagatgcaaggatcgcctctgggggtctcctggaaaatacagattttgatgtctggggtgctggaggtgacaaaacagcatcagcatcatcatgtgctctgaacaatcagcagttgttcaaccctgatcacagtatgacaaactacagaggaagtgacttgctagacagattgtcagctaaagacaatgataacgcttgatggcttcccaacaaaagtgtaacactggtgaagacatcatgatgggatccagaattgaagcaataatcaaataacggcgcacataagtctgaggctggtggtttcatgccatattgaagttggttcagtggctagagtattggttgtaaaacttaactttcttgggtaattgggttgttcttagttaagttatttaagttagttaagttattt

SEQ ID NO: 63587 - DNA, 336 bp, Setaria italica
  Peptide Sequence Number=SeqID_129561
actaagacaaaatattggtagtcttaacatccctgtgaattatgcccctgtaaacaaaaaagtaaaccaaaagtaaagtaagaaaaggtaaagtaaaaagaaccctacttagaccgacaccaatgcagatttcaagcctttgcttccatgtcagagcaggaaggtcacttccataaaggtggctcctcaaggtgccatttgccatgtgctcataaactaagatcatctcattttgttcatcacaatagccaatcaaggacacgaggtgccggtgtcgcagccttgagagcatctcgatctcagtttcaaattccttcacaccctgctgagattgtg

SEQ ID NO: 63588 - DNA, 433 bp, Setaria italica
  Peptide Sequence Number=SeqID_129562
aagtgggtaactgccttaagtgtgctggtgaaactgtgccttcttatttagtagagattttctttcgacgttcagcagctgctgaagcaaccgcatctttccttgcctctgatgaatattttggcttgtcaagaactgattctccacggatagtatgactaagatccttcttgcttgcaatcttatcttctgaaatcccattgactccaccttcagcgagaagctcaggcgaggctttcttctttgcaacaacaactgtccgtcgcctaacatcttggctagaatgtgagtccaaacttaatgcatggttcccatttgtattcgcagttggaatcgcagcagtggaggctgacattgctgtacactataaagcagatagtgttctagaaataatgatgctcctgcctgcagggtgtgggcggttgcgtcggca

SEQ ID NO: 63589 - DNA, 407 bp, Setaria italica
  Peptide Sequence Number=SeqID_129563
cttagcttcacatccacaaacccactacttcccttaagcgcaaaacactctcctggctgcccaaaacttggctccagcatctttttggctgttttatgcacactgttgcgactatggaaatagttcttgccattcatgaaaggctctgaatgacttacacttttccaccaccagatccgagggcataatccaccataccaaggccatcagcagaatgccttgctatctcgatctcaactatctctttggcatatagccttatatcttccaaggttatgtcaatacaatactagtaaccaacccaaatacccttacttttaccttacaaactagaactacaaaaatactacctacaaaattactttacttaagaaaagaaaatacccaatagtaccctaaagactaca

SEQ ID NO: 63590 - DNA, 225 bp, Setaria italica
  Peptide Sequence Number=SeqID_129564
cctatcccctgtgtgccttgcctatccccttgcgtgtctcagccaaaacttggctccagcatctttttggctgttttatgcacactgttgcgactatggaaatagttcttgccattcatgaaaggctctgaatgacttactacttttccaccaccagatccgagggcataatccaccataccaaggccatcagcagaatgccttgctatctcgatctcaactatc

SEQ ID NO: 63591 - DNA, 463 bp, Setaria italica
  Peptide Sequence Number=SeqID_129565
acgttcgtgctgatccagagccaggtcgaatgacgtgaaggagtagggagcgagcaaggcctgcatctcttctcccgcattcggcagctctctgctaaccggcaccacattatttgggttgctgaacgaattttcatccatcacattgctggatgtcagaacagtgactcttgatcgcattgtatcaacaccaacttggagttcttgtgcacttattgtcaggctcacagcatgaggcccgaagtttacgatctacaaaggatttggaggtcaaagtaataaccatatctaaggatatccaaacttcacgaatattatagcgcttgtcaaatgagctgaatcaattacacgcaggctacaacaaattagaaactgttggttttacctttaccctcaggaagctattctcagtgtccctccaggtaattgcggatgctgccaatgaatcagagtagctggaata

SEQ ID NO: 63592 - DNA, 179 bp, Setaria italica
  Peptide Sequence Number=SeqID_129566
ttagttaaattttgttaaagttaggttgtctattatttttactatttgtctattcgattgaacaaaggccatacacaagcctcatactttcatagatgcagatcgtctcatggagcgagggaagcaccggagaaggctctgatgatggttgtggtggtggtggtgatgatgatggttgt

SEQ ID NO: 63593 - DNA, 511 bp, Setaria italica
  Peptide Sequence Number=SeqID_129567
aacaaagaaataactttaaaaaagttaacgtaaagaacaaaagaaaactttaccaacaatagaacaaaatacaaaaggtacctgcagggaagtaccttatggagctcgtagcgattgactggtttaaggacaccaagcgaatggaccatgttgctaggcggaaaggatgtgcagctcaggttgctgctgagaagggaatgttcacttttctcgtgaacatacaaattcctggatcaagtcattacagcttggtcctttattttgtctcaagctccttgaagaaaggatcattgttgcagcgctttgcagatggtgatgatgattttcggaacagcagattgaagcttattccatctgttccgaaggggtcttggatagtgcggcagagcgttggaagcacgccttgcttactggggaaggctgttgactgcagctatttgcgtggtcctgagtacttagaagtggatgtagatattggttcatcagcagtagccaacggggtcctgggctt

SEQ ID NO: 63594 - DNA, 242 bp, Setaria italica
  Peptide Sequence Number=SeqID_129568
cagtctgccggattctcttgtttgaacctctttttctttgtggcaatgtatatttatatcactgatatgaatactatgccaatgctgcacttttcttcaaccagatgggtgcatatgatattgaagatgccctaacctggaagaggaagctggagtttctgattgatcagcaacaggatagtatgacggctaaaaaccgtaaagcttttgcttcattggacttcgacatagatcttggacgg

SEQ ID NO: 63595 - DNA, 220 bp, Setaria italica
  Peptide Sequence Number=SeqID_129569
ttgactggtttaaggacaccaagcgaatggaccatgttgctaggcggaaaggatgtgcagctcagattcctggatcaagtcattacagcttggtcctttattttgtctcaagctccttgaagaaaggatcattgttgcagcgctttgcagatggtgatgatgattttcggaacagcagattgaagcttattccatctgttccgaaggggtcttggatagt

SEQ ID NO: 63596 - DNA, 332 bp, Setaria italica
  Peptide Sequence Number=SeqID_129570
atactgtttactatctggatggcaatggtcagctttgtggacagcttcttgacacaaatctccattgcctcaagcttatgagattcagcaccgctatagtacaatcttttctgctctttacgcttctggtcataaagcccccttatcttctccatagcctgtggtaaacagcatataaaacaaaaatacctgacttcaactaacacatcagaagaagaaaatgaataataactagaataaatagtatgaaactccaaataatataaagtgctagattggaattctccaccgtgtaactttcttattagttaagtattgtcctttggtagtct

SEQ ID NO: 63597 - DNA, 343 bp, Setaria italica
  Peptide Sequence Number=SeqID_129571
actgtcctagaaatagccttaaggaaagtacacaaaagttactgttagatgagttcaatgtgacaatgaaggcaggttttgaaaatgaattttttcttcgcagaaaattagtaagtgatggagttgagcaatgggttccatatgataataccaattactgctcaacttcagcatttgatggcgcatcatctatattacaagaaatatattcttctctcaaagcttcaaacattgtggttgagcaggcctgatttgaatgatattggatctggttctcatgtgcatctgagtttgtgggagaacgaccagaatgttttcatggggtcaagtacagataatttcc

SEQ ID NO: 63598 - DNA, 315 bp, Setaria italica
  misc_feature (281)..(281): n is a, c, g, or t
  Peptide Sequence Number=SeqID_129572
tttaatttaccctttttttacttaaaaggttaaagttacttttacttttaacctttgttcttattcttgttttacttccctaggttcttattctttgtatttttggtctttggtcgttttcctaaaactttagttgtttctaaggtaattgtactattctattctacttgaaagagcttctggagctagctcccataaagaaggtcatgttcagtacagatggatatgcttttccagagacatattatctaggtgcaaataggtcgcgggatgttgtttancgtgtcctagctgccgcatgtgaagacggagacc

SEQ ID NO: 63599 - DNA, 330 bp, Setaria italica
  misc_feature (40)..(40): n is a, c, g, or t
  Peptide Sequence Number=SeqID_129573
caatttgcgcaattaccattttcaggagtcattcagtggntcaagctggacactggactcattcattgaaagctatgtaactaagcttaagtcatatccttcagattcctgataggctgataccttttcagattaattggattatttcctttagttccttttgatttatgaatatccttaacttattgctcacagtgtgtaaccaaattgttgcattgaaaagcatagctgcatatagaagtggcttagagatcaatcccaatgttagcaagactgatgcagaggatggtcttcgaaaggagctaacaggtcctaggccaatcggattac

SEQ ID NO: 63600 - DNA, 346 bp, Setaria italica
  misc_feature (219)..(219): n is a, c, g, or t
  misc_feature (259)..(259): n is a, c, g, or t
  misc_feature (281)..(281): n is a, c, g, or t
  Peptide Sequence Number=SeqID_129574
cgattgtgcagcacatggaggcatggcatatctttatctactttatatagaaggagcatgctttgccctggtttctcactttttggtagtggggggataaaaaagggcacagtttttggtggtttagttgaggctccattgcagccatccagttcaaagaagtatcagggggaccaataattgttttgttttcactaatttacacgaccgccctgttanataccgaccgactggtaattttcagtattattcattttanggtttgcaaaatagtttttccngttatttccatgctcttgagatatagatttaccagcaccgcagtgactttgttaagcattccgag

SEQ ID NO: 63601 - DNA, 267 bp, Setaria italica
  Peptide Sequence Number=SeqID_129575
tcttgctatacagcacatggaggcatggcatatctttatctactttatatagaaggagcatgctttgccctggtttctcacttttgttagtgggggataaaaagggcacagtttttggtggtttagttgaggctccattgcagccatccagttcaaagaagtatcaggtttcgcctctacactgcgataaactgtttgttacatattttccttgtactgaatattttcaaaataatcttgcaggggaccaataaattgttttgttta

SEQ ID NO: 63602 - DNA, 224 bp, Setaria italica
  Peptide Sequence Number=SeqID_129576
cgaccgccctgttatataccgaccgactggtgcaaataactatttcacagtttgttccgccgactatttggctctaggaggaggaggtcattttgcactttatctagatggagacctgtaatctatctctcctattcacagaattcaccactagtatatgagtcattgttaattaccctcgcagcctcaactttcttttctgcatttctctttgcagtttgact

SEQ ID NO: 63603 - DNA, 193 bp, Setaria italica
  misc_feature (168)..(168): n is a, c, g, or t
  Peptide Sequence Number=SeqID_129577
taaaaagtaaaaagtaaaaactaaaaccgaaaaactaaaacaaaagtaaagaaacgtaaatagtacaataacaatacaatgcttcgacttgattatgcaggcattgctgcacttattgccacatccttctaccctcctgtatactattctttcatgtgttaccccttnttttgcaacctgtacctcagcttca

SEQ ID NO: 63604 - DNA, 256 bp, Setaria italica
  Peptide Sequence Number=SeqID_129578
acaggagttgcagaagttcatccccaagagccaagaagaagacatgaacatccataccaaacggaactcaaaatcacccatgaagagaaaaaccggagaagaaagcaaggacgcaagaaaaggagtgtgaggactcatcggcgttcttctgcctaccttgtccgccatgggaatggcgctcgaggctccgtcaccttcctggtgcggactccggactccgggatggcggctgtcggctgcagaagtagagagagtg

SEQ ID NO: 63605 - DNA, 483 bp, Setaria italica
  Peptide Sequence Number=SeqID_129579
ataggattttcatatgactgcatggttttgtcatagtatcaacaaattctagcttgctggttcaaatcatattaggcttcttttggaaatccacattttcaagtttgcattctgagacagtcagctagcgcacatatttccgcacttgaaatattcttgtacatagtagatgttactttgcttttaatagacaacatattcttttgtgcagcctggatatgtagattgggatttctaccacaaaaattattaacacttacgaacaagaccaagcatatgtacagtactttgaagaggtagcgaaccggaccaaaggtatgattgattcgatcgaagtgtaaaactactggtcacattatctttggctaaatagccttcttttcatatgacagtgggttgaagattatctgggagacagcacaattcagtgggaaaaaagttagatgtctggcttacatgcaagcactggatattgcagcaggc

SEQ ID NO: 63606 - DNA, 453 bp, Setaria italica
  misc_feature (88)..(88): n is a, c, g, or t
  Peptide Sequence Number=SeqID_129580
cctgcagccatgactgacatgcacaaaagcaattacactttcaccttcttgctataggtttctcaaccttttcagtttcaacattcancttttttatggaatccaatagggatggtgactgctctttgctggatgatgatttgcgaaagggttaactggtcgctgaggctcttttcgattgcagtcttcagtgctcatcttttttgagccagtctgatccatgcctccttttttattctgatcgactgatgctccattgctgtctctctttgtttcactatttttgggtactttggtcaatggagtaaagggaggtgaaacttttaaagcgcttccagtaattcctctcacttgttctccttttggcttctttggttcaattaaactgctttcttgattgatggaatcttcattacctataccgaatcctagcaatcaagaaagcagtttaat

SEQ ID NO: 63607 - DNA, 378 bp, Setaria italica
  Peptide Sequence Number=SeqID_129581
gtgagggctgatatttgtaaaattatctgaaattcagatttatttgatgttatttggtcattagcgtgtgctaactgattatgacagatgatgtaacccataaacttggaaatgtgcagagagggagataggaagcagtgactcattgaattgcatgccatagataatttcctgtgtgtgatctaatagctctgccatactgtaccgttaaccgttgccctttggagttgttttcttttgtgatgcattacaattgctcaagcggttggaattaagttatatgtgcactaaactcccattgtgcttgcctctgcagatttgttgtaatagatatttcagcgggcccttgtacatatgggaaaatagaaaccgagaagg

SEQ ID NO: 63608 - DNA, 304 bp, Setaria italica
  misc_feature (68)..(68): n is a, c, g, or t
  Peptide Sequence Number=SeqID_129582
gtcgacaagctgaaacacgtagattctcacaaagacagacaaccattatagttcaaaaaggataaacntaaatcggtgctgactgaaaaatgacactgaacagaccacaattcacctttcaccatgataatatggtctattgaccgatgtactggactgcagtgcacaacgtactgcataactacatggatggatcaattgaagcttgggcagataggccccttggacaagccaaggcgaacctccattccattggttgtctattgttctaggtttgtacggtaaacttgttctagtaattctt

SEQ ID NO: 63609 - DNA, 260 bp, Setaria italica
  Peptide Sequence Number=SeqID_129583
gtggggaggtggatataatgagggtatggcaacggaggtggttatggggaggttacggtggcgggtacggtggaggcgggggctatggaggcggatatggtggtggcggctaccctggaggtggacaccatggtggatggaattaagtggagcaactatataagtttctctgtgtcaaatattaatgtgccgtggtgatgggtttgaatgatgcatggggattacttggcggtacaacaatgtctgcatagtataaatga

SEQ ID NO: 63610 - DNA, 422 bp, Setaria italica
  Peptide Sequence Number=SeqID_129584
ggccagtcagttggcacatatcaggtgacagagttccagtcagtgagttaccctcaagcctaggtactgcagtacttcattccagtagatgagcctcgggatgtcgccagtaagcttgtctgagcaaggtccaaggtcttgagatttggaatctgggacaatgtggaagggatgggtccggtgagttggttgttcttcaaaatcaggtcctcaagctgcttgagcttggagatggagaaggggatgtctccatacagcaagttgccagacaaatccagatattttaaggagacacaatccccaatctcatctgggatttggcctgtgagcttgttcaacttgaagaataccaacgaaactagtaagaactacttagaagactacccctaataagaccggtagaagaatactacccctaccta

SEQ ID NO: 63611 - DNA, 381 bp, Setaria italica
  misc_feature (294)..(294): n is a, c, g, or t
  Peptide Sequence Number=SeqID_129585
tgtagtaacgtattggtaagttgggtctagtaagtctacttgtctaccggtccaattatttcgactactggtcatgcgttgacaagtgtgtggcaccaaagctccttgacaagctcaagtgatgatggcatgctactacatttgacgtgtgacttcgttggacactcgcactcccccatttcagttctcatgaacttaaataaattgacctgtttgtcgtgcctctgcttttatttgccgaccctgtaacaggatgccttattttgtctaactcttcgagcagcacagcaaacncggatgggtgcttgaatttaaacgggtcttatcatctaattcgtgcaggcgtttacatgtacaagaggaatcacgttcctctgtttt

SEQ ID NO: 63612 - DNA, 235 bp, Setaria italica
  Peptide Sequence Number=SeqID_129586
cccagtgcggtcgtcaaagcgaatagagtaaccaacttcttcacctaatcgacatccgcactgggcctgaaactgtcatcaagtatatgacagatggtatgctcctacgagagattttggtggacagagatttgtcgtcttattcggtggttatgcttgatgaggcacatgagagaactatctacacagacattctcttcggcttgctaaagcagctaattaggcggagaagtga

SEQ ID NO: 63613 - DNA, 175 bp, Setaria italica
  Peptide Sequence Number=SeqID_129587
tacccctagacaagcccacatctcgtcacgcgaacagggtggaagtagaatcctacacgccatgtcttctcgctggctcaaggcggaggtatatgtgaatcttttttacaaaagttcatcgtgtgcaagtttggaagtttcttggctgtttcgttccttcattatgataatggag

SEQ ID NO: 63614 - DNA, 279 bp, Setaria italica
  misc_feature (29)..(29): n is a, c, g, or t
  Peptide Sequence Number=SeqID_129588
gtttcatctcctggaaatcaaaggtctgngcaaactcatgaagcacctgaacacaaaactcatcatgattgcctaggaaatctcctacaaggttcttatccaaaccagctgtgtagcggaaaaaacagccacactctggggatcaagcttctcgggcaacagatgagtgccttgaagaaactccagacctttctttgggtccctgttgaagtgatcagcgccaatcattagcctccttttgacatacttcctttgacggacaaacttcacccaatgccg

SEQ ID NO: 63615 - DNA, 144 bp, Setaria italica
  Peptide Sequence Number=SeqID_129589
cttttggtacacagaggacttctgcaatgctctatcatattaaatacatctattttacgtcaatagatgtatttaatatgatagagcattgcagaagtcttttggtacacagaggacttctgcaatgctctatcatattaatac

SEQ ID NO: 63616 - DNA, 286 bp, Setaria italica
  Peptide Sequence Number=SeqID_129590
gtaggaataaccaaaagtaaacaaaaaacatttctaccttagaaaaaaccatttacagttaatgttctttcccacattccaggcagcgatgcaaagcttgtgagttttgcaggctgatagataatatgctcatagattttcatcagataaaacatgaaaaaaaatgatatgtcataacattcatcaagaaaaatgtaacagcagatcataacttgattaaaaaaccacataaaccaaagaacctaccagaagcctaggatgcttcttgactatatcagctatttcc

SEQ ID NO: 63617 - DNA, 310 bp, Setaria italica
  misc_feature (261)..(261): n is a, c, g, or t
  Peptide Sequence Number=SeqID_129591
aatgcaaatgtggttggcatctgctctgcgcagttcttctcatcaacgccgacctgatagcgtccttgttgcaggaccttgtagccggtgagacagcgaggaggttgccaaattgctctcacactttccaccagccttgcgtggacaaatggctcgtcgaccatggctcatgccccgtgtgcaggcaacaggtgtaagataggtaaccggcttaaattagatgaagaaattagttgggtgaagtgaagtgtttgctcccanacttcgtatagagatactccgtcctgctgcgtacggtgatgtaaattac

SEQ ID NO: 63618 - DNA, 455 bp, Setaria italica
  Peptide Sequence Number=SeqID_129592
tacgggtaaagttagacaatcatggcaaattaaacgagaggatcagaaagcatctcaccttgatgttaagtgtttctacgcaagggaaatagttaagcacctgcagcataagctccacttgagcaggattacacaagttcaagcacagtccaaggatcttgacactgcggattgggcatgacggctccagaatcatgcccagcatctgcgacgacgaacatatatttatatatatggagcataagcacagttcatgtatggaccagaaaagaaagcactaaaaatcttggaaacaaacggtggaaagatcatatcaccataaatgtttcccgcgatcgatcgtcgagtccgaggaaggtccaatggtcaggaagccaaggatctccaacttcggcgcgtggacgagggtcaccttgcagtagctcgtgtcaatcgagacctctccgagtaggcgc

SEQ ID NO: 63619 - DNA, 270 bp, Setaria italica
  Peptide Sequence Number=SeqID_129593
agatagtggtgtggcatttttagttcattaaggttccaagttgaatttgcatttttttaaataggattgtcaatttatgttaccgttgctagtttaggattcatggattcgactctagatgatgtatcaatagtttgaatttttttccctcttttagctaaaaaatattagaaagttattggagaacatgatatgataatccattagtgacatttgaatttcaggagaaggctcttcaccatgattaataacctgcccactgtttatgaa

SEQ ID NO: 63620 - DNA, 324 bp, Setaria italica
  misc_feature (283)..(283): n is a, c, g, or t
  Peptide Sequence Number=SeqID_129594
cgcggccgtgcaccaccacaacgcgctccccccgaggacgtcttccgcgacttccgcgcgcgccgagccggcatcgtcaaggcgctcaccgacggatgtggagaagttctaccagatgtgcgacccaggttgccctactgtgagtgaaaaaggaatgaggagtatatgttagcagaaggaattccaaattgtaggaagaagtggagacaagataaatgtcagatacagacatcagcagtggctggcctaccattgcccaatatccataactaatgctgatgtntaattcatggaaaacaatatgagtaaagtcgcttctagtca

SEQ ID NO: 63621 - DNA, 481 bp, Setaria italica
  Peptide Sequence Number=SeqID_129595
ttttcccttatgcactttaaagaactagtgtcattaaccgatttgttggtccttttgttgcttgagcctatatgtgaaattagttatcttgtatgttgtgtaacatttttttgtcaaccagtgtaaccatagagatatgggaattagctgcttcatgttgttcactgcctgatctttatcttggggaatcattgctagctgtgtttgatagttttacaaatgggattgttcaatactgacatttaatgtattgcagtttgatatcaatagaaaaataatacatgctttctgccctccaaaattggtggaaggcaacccgtgtttggagtacataaaatatatcatcttaccatggtacggaaagtttgaggtggttcggaagatagaggatggtggtgacaagacgttcctgagcatggaggagcttacagctgattatttaagcggggctctgcagcctgatgacttgaagctggccctt

SEQ ID NO: 63622 - DNA, 413 bp, Setaria italica
  Peptide Sequence Number=SeqID_129596
aggatcctattctgaaattccaaatgttattataacaccacatgtggctggagtcaactgaatactcttacagaacaatggcaaaggtttgcacttgtctttgcaaggcccatcgttacttctattgctcatctatctttcttgaacatcgagtaactgtcaattactacaattaaataacagtatgaattgtacatttaaattccttgtatttgttagatgtcatgtttatagaatctccgtaggctcagatgaaaacactaatggggagaaaatcttttttgcataatttaaagtatcacaaagcaagaacctttttcttgaatagaaggtactgtcatgaaggtctttcatgatattgtgtgcgctatcgcacaggtgtgcaactgtgcgtgcactgatttccttgttgg

SEQ ID NO: 63623 - DNA, 498 bp, Setaria italica
  Peptide Sequence Number=SeqID_129597
atatgttttgttctctttgaggtggtgtgaagcaaaagaactaatattaatccatacccacattgataatacattattattgtgttgtgccttagaaggtaggcaaatacacacagaaggtcatggactgatagtttgttaccactacttatatttgtatttgtcttgtactcttcgagtctctgactttcaagaagttgctgtcaaaagttgccttgtttgctattttttcatggttagtaatgtgtgtatttttattgcaaaatgcaggggagaattatcaacatagcatctgttgttgggcttactggtaatgttggccaagctaattatagtgcagccaaagctggggttattggcttcacaaaaacagttgccagggaatatgcaagcagaaatatcaatgtgaatgctattgcaccagggttcattgcatctgatatgactgccgagcttggggaagagcttgagaagaaaattttgtcaaccattccatta

SEQ ID NO: 63624 - DNA, 206 bp, Setaria italica
  Peptide Sequence Number=SeqID_129598
ttgggcttactggtaatgttggccaagctaattatagtgcagccaaagctggggttattggcttcacaaaaacagttgccagggaatatgcaagcagaaatatcaatgtgaatgctattgcaccagggttcattgcatctgataatagaactagaccgaagacttaggggaaagaagacttaagaaagaaaagaaaaaatttttaa

SEQ ID NO: 63625 - DNA, 444 bp, Setaria italica
  Peptide Sequence Number=SeqID_129599
atttattcaaagctactgccagtatgttcatccgacttactatctctccgggctcctcccagatgctgcaacgacataggccacgtaaatggaagctcaagctgataaagtatccattcggtggtggtgggtcgaggaggaatcgaggaggagatcaaggtgcgtccgggcgtgcgaggaagaaggcgtagaagcccgcgacgatggtgaagatccccatggcccagacgagcagctgcgcccagagcggcatgatgtcggcgaccttggatgagaacatgagcgtgaggagcgtggagagtccccagacggcgagtttgatgccttgtccgcccctgtggcctgggccggcgcgctcgagcaggtggaggcagcggaagaggaggatgagggcgacgtaggcgattgacgtacgtaaggtcgtacggtattgtaggggttcgt

SEQ ID NO: 63626 - DNA, 255 bp, Setaria italica
  Peptide Sequence Number=SeqID_129600
gttcgtaggtaggtaattcgtaggtaggtagtattctaaggttgtcgttccgggcgtgcgaggaagaaggcgtagaagcccgcgacgatggtgaagatccccatggcccagacgagcagctgcgcccagagcggcatgatgtcggcgaccttggatgagaacatgagcgtgaggagcgtggagagtccccagacggcgagtttgatgccttgtccgcccctgtggcctgggccggcgcgctcgagcaggtggagg

SEQ ID NO: 63627 - DNA, 386 bp, Setaria italica
  Peptide Sequence Number=SeqID_129601
catcacatattcacatttctcttcacgaaatagcagaatgttcagcaacatgtccattgtcagcagtactgatatcctgtggcacgagagagcatgtttttaactgacaaaagcattttgcctaaatccccatagctgcattgccttaaatatcatgtgattttgcaaatttgtacactgatggccctataggttttcttggttgcagctttcaagcatgcaacatgtgccaaactctgatatatgggtattgtaattctgttctgcagggaaaacggatcgagaatggtatatatttgggccccattgggtgcttaacctttgaagggaggctatcatggaaaaagaaaatacttgcattcatcttcgagcgggttcgcaattaa

SEQ ID NO: 63628 - DNA, 481 bp, Setaria italica
  Peptide Sequence Number=SeqID_129602
ttaccgttcgtttcgttccttatttgtttcggttagtttgttcgttactttgttccttactttccttaagttcgggttaaggtctttccgtcggtcttttgtacgtcgtccgtcccaagcagcagcagccgtcgaaggcctcggtggacaagcgggagagcttctcgatctccaagatatggatgcgcggcgggccgaggcggaaggacgtgtcctccggcggcgcaatcgctgccgggtcgtgctcgaattcgcgccgcgtttcctcgttccggctctcctcggcgctccagcgcgcggcgagcgacgtcggggtggcggcggcggttccgaagcggcgcgcggacgtggtgagccccgtgacggagtcggagtacaacgtgtcgacgtgggacaagagcgcgagcggcagcgtcgtggactgggacctcgagtccgccggcggcggtcacagcctgagctccagggccgacgaggcgcg

SEQ ID NO: 63629 - DNA, 241 bp, Setaria italica
  Peptide Sequence Number=SeqID_129603
gtggatggatggataagactcctctttcttttgtataactactagcaaaatgcccgtgcgttgctacggtaaagactacaatgataatctaagtatctaacagatatcaattaagtttgaccagcaaagaaatcacacaggatgacaaatgcatatacagacctgtccaaacgtcccatggattcaggtggatgtacaaatggcactccagggcgtgaaggcatgggatattgctgcgaag

SEQ ID NO: 63630 - DNA, 381 bp, Setaria italica
  Peptide Sequence Number=SeqID_129604
ttcctaattcttttttctattctattctattcgttctagttctaagggtccctattcgtaaggtagttaagtctaactaagatgtgcccctccagcatctgaatgagagcagcacacaaccgcactggcaagagcacggaggtgactgatgctgctctttgcgcattggatctgtccaataaacctctagcatcttaatctgagaggagctagcaacagcaccaagaatagagctgacaagaccattgaggtgactggtcccagcccttcacttctcagcttctttgcgcattggacctaggggtctgtccaatgaatctgaagtacctctcaacagcgtatcgcccctcctgcatcccaatatgcagggagcaacacacc

SEQ ID NO: 63631 - DNA, 460 bp, Setaria italica
  Peptide Sequence Number=SeqID_129605
agcctataattcccatatcatactattattcaaacaaacatgccgatacccttatccaaaattcagatctttgaactgtcatactattcaaagtaatgaatcgattcgtcccgcccactaggagactagatccacgcacgcataatggaagggtagatggatgagttagtgagtgagtgggtaggaggaaccttccagtcgacggcgtggaagaatccgatgaaggagtcgacggctggtgcgaagccggtgcgaagctcggaggagacgcggccgaagagctcggctacgacgtcggcgtgctcattgagggcggagcgcacctcctccacagcacgcccgaccaccgacgaccccgcggcggcagcctcctccgccatctctctcgatcgagatctcctcccctctcctctcctctcctctcctctcctccaaaactgcgagagaaagcaaagtcaac

SEQ ID NO: 63632 - DNA, 265 bp, Setaria italica
  Peptide Sequence Number=SeqID_129606
tggtagctgcttctatccagacaacattgcatcgcacgcatcatatgcgttcaatagctattggcagaagaatgaagcagattggttgggaggctgcaattttggttggtactgctttgctgatcaattctgatccaagctatctacagtgccgcttcatgctgagttgaaagggctgtgctaggatcttattctatggtcagtattctcaattgaatagttctgaaatatgcctgctattcattcttattaagcaaactactgt

SEQ ID NO: 63633 - DNA, 212 bp, Setaria italica
  Peptide Sequence Number=SeqID_129607
tatcccctgtgtgccttgcctttcccctgttgcgtgtctcagggtcggcgccggggagggccccggcgtcgacgcgctcgtcgtggcgggcgacgtggccgagaccagggacaacttcgcgcgcaccatggaggtgctcagggaccggttcggggccgtcttctacgtgcccgggaaccacgatctctggctgcgccgcgagggcggacgct

SEQ ID NO: 63634 - DNA, 463 bp, Setaria italica
  Peptide Sequence Number=SeqID_129608
taactttttaagaacaaactagttaggtagactacaaagttagaataatatgggatcctaacaggtcggagccagtaaatagctttgagtggggtaaagatacagttctttctgtgcgatttgatcctggagattgcaatattttgattacatcagccagtgatcggagtctaacactttatgacctgcgcatgtcatctccagctagaaagctaataatgaagacaaggtgcaattcggtatgctggaacccaagggagcccatgaactttactgctgcaaatgaagacacaaactgttactcctttgatgctagaaggctggaggaagccaaaattgttcacaaaggccatgtttcggctgtgatggatattgactactcaccgacagggcgtgaatttgttactggttcctatgatagaacagtaaggatttttaattatcttggtgatcatagcagaga

SEQ ID NO: 63635 - DNA, 414 bp, Setaria italica
  Peptide Sequence Number=SeqID_129609
agatcttcgaatctacaaccgtacctgggagtatgtttccactcctgtcaattgaattttgatcattgtggttgtgagcaaataatctggtatgatggcgcttctgaaccacaacaaaagtcaccttcggttggtagttcgcttccagggaggcacatgcctttcggattgcatggagctcatacagcagaacttgataaaattgtccttcactaacaccatccctgtaaaatattattcgctggggcttctccccagttgattttttgaaggatataagtagatcccttatcattcccccgctaactgtccctctctgtgggtcttgccagaccttatataaatcctcatcctggagagcacagcagtccctcaattgctgctgttcgtggcctcccaagattggccagaggt

SEQ ID NO: 63636 - DNA, 358 bp, Setaria italica
  Peptide Sequence Number=SeqID_129610
cgcttcaaatcacctagcatcaggcaaggagacaagcaatgatggcaaagacctcacatgaacaacaataataatgagaatccacaaacaagaagctaggaggactgcagtccatgtaccgtaaagtgagccgttattgtcaggtagtattccgataagtaaatcaagttccctgcgttggggtccaagacattcatggcatcatggtacctagctttcagagctcgctccacttgatcaggacgtgcatatagaggtggaagaacaggctcccgagaaagtccattcctgacgcttggcacatcagtgcaagttcatgacagaacccacgaacaacactctcttgcacattgcggcg

SEQ ID NO: 63637 - DNA, 235 bp, Setaria italica
  Peptide Sequence Number=SeqID_129611
atcttgaggtgcctccttaatgtcaatatggaagttttgcaggagatgtgtcaagaatacttgccattcctgacgcttggcacatcagtgcaagttcatgacagaacccacgaacaacactctcttgcacattgcgggcgaaattgacacatatccagcttctgactttaccaccatttaccattttcttgttcatcatattccactgaccaactctaggcaagcaatccttctc

SEQ ID NO: 63638 - DNA, 223 bp, Setaria italica
  Peptide Sequence Number=SeqID_129612
ctgctgtccacggcctgcaggaccacttgccacagaaccactgtcagaggtctctggttccatgtagaaacgagctcggaaggcagccaggtgagcataatacgccggtggaacgattgatacagagcgtgtgcaccttgcataagtgtaacagaggttgtagattcgaagatctgccatcctactgagtttgacttctacttgtgcagccatgctggcatta

SEQ ID NO: 63639 - DNA, 113 bp, Setaria italica
  Peptide Sequence Number=SeqID_129613
taaaaaataaagaaccaagcatggctgcacaagtagaagtcaaactcagtaggatggcagatcttcgaatctacaacctctgtttacacttatgcaaggtgcacacgctctgt

SEQ ID NO: 63640 - DNA, 333 bp, Setaria italica
  Peptide Sequence Number=SeqID_129614
gcaagtaattcctggatgggttattacttcttcgatttgagtttggagtaacaacagtgtaaaatccaaatactggtgggaccagaaaatgatatgttgtgcaaagtacgtatttgtgttttgggacatgctattctttgtctgggtgttctgagctattgagttttagactgaaatacatcataccgaaatgcttccctttgtacattttgatgtccttatagttgagtgaggaatctgatgtcaagttattttgcagatcaagttgatacggttggcctttgctcaaattgtttttaggaagtcaaaaaacaatatgcaatgatattgatt

SEQ ID NO: 63641 - DNA, 386 bp, Setaria italica
  Peptide Sequence Number=SeqID_129615
ctcctttcttcccttggatgatccatcttccccttcactgtcggagaaaacttcatctttatcattgcttccagttcccttgttggattctggaggtgcagcattgctttctttagcaactgtgctacccgaggagtcagcatcagttttattatctgatccagcagctggttttggttttggtgcttgtgagccatcataatctactagaacaacctcaacctggaagccaggtgatggcaattttctcttatcaaaatcatcaagatcggttggattcaaagtcaccctgttctccatcattgtttcatgatcgacagggagatttcactgctggctaaatcaacaatgatggagaacagggagatttctactgctggctaaat

SEQ ID NO: 63642 - DNA, 259 bp, Setaria italica
  Peptide Sequence Number=SeqID_129616
ttctttgttttggtttgttatttctttgtaccttgtattgtaaggtcttgtaggtaattttttaggtttctttagtcccaggatgataaaccagatgtagaaaacatggatgccggtgcctcacgtcccgcagcatcttttgcaggagcagcagttggtgcagagataacagcaggatctacaccagcaacctgactggaagaatcagttgaagcagccggacgaacagggtcaacagtggtaacaggaggagttgcag

SEQ ID NO: 63643 - DNA, 420 bp, Setaria italica
  misc_feature (4)..(4): n is a, c, g, or t
  Peptide Sequence Number=SeqID_129617
gtgntacccgaggagtcagcatcagttttattatctgatccagcagctggttttggttttggtgcttgtgagccatcataatctactagaacaacctcaacctggaagccaggtgatggcaattttctcttatcaaaatcatcaagatcggttggattcaaagtcaccctgttctccatcattgttgtatttagccagcagtagaaatctccctgtcgatcatgaaactggatcttgaaatcaccagaaacctcagctaagccaggttctcccggcaatgcaaaaaccataatccccttctttggtgcactaaaccagaaatcttctggcattagttcttttgttcttggatgcttcaatggtgaaagtcagccgccccgcaggtgtatgcttagagggtttcgtcttcatagatgcccc

SEQ ID NO: 63644 - DNA, 243 bp, Setaria italica
  Peptide Sequence Number=SeqID_129618
cagaaatcttctggcattagttcttttgttcttggatgcttctttgtagaaaaaagaacgccgttgtgattagagactgtaattgatggcctgatccaataggggcatctatgaagacgaaaccctctaagcatacacaatctgacttggaagaataagccccttgccgtctacacatcttttctggttatagtattcaatggactcctcagcagtaggcaagaacaggattgatgatctcga

SEQ ID NO: 63645 - DNA, 248 bp, Setaria italica
  Peptide Sequence Number=SeqID_129619
aaccataatcccttctttggtgcactaaaccagaaatcttctggccactatgcaaacaagcatcaagccatgaagaatccataatatgagctactcgaatattccatagcaaacattagttcttttgttcttggatgcttctttgtagaaaaaagaacgccgttgtgattagagactgtaattgatggcctgatccaataggggcatctatgaagacgaaaccctctaagcatacacctgcggggcgg

SEQ ID NO: 63646 - DNA, 213 bp, Setaria italica
  Peptide Sequence Number=SeqID_129620
ccgtgtcttggcatccgtcagtggaagataaagtgacgatgtgcttgtgcgtcacccgtgtcggggtcgtagagcgccgggagcaggtacttcctcccgcgggccccgttggcgttgtagctggcgcccgtcgccttatccacgagcagctccccggcgtacccggggtaggcgcccctgccgtacacccccgcgcacgccgcggcgcgccgc

SEQ ID NO: 63647 - DNA, 370 bp, Setaria italica
  Peptide Sequence Number=SeqID_129621
gcggcagcgagcccagaagttgacgtggaaccacaactggcccttgaagcgcacgctggctcccatcagaggcttcacagcatcaaacccttcacgtcttctgagatcagggaatgtacaaatgggagagaattcttcttccaccgcttcaggatgcgctcgtgctcgcgcaagtggctctgcaatcgtagctgctcctcgcgggagagctctgggagcaggtcctccaacgctggtgatgtccacggctccaatccaaacgcccaatctcctgtcaaacccatcattgatttggcaatacgcccagggtgaaggtgatctatagaaggaatttttcattacatttttgctaaggaatttcaaaacaatt

SEQ ID NO: 63648 - DNA, 204 bp, Setaria italica
  Peptide Sequence Number=SeqID_129622
cgatgtctggtgtcaaagccaagccggccagcccttcttctactggcttgatgttggagaaggaaaggagctagaccttccagagtgtccaagagcaaagctgaaggaaagacaaatagacaattaaagtaatacttaggtaccgacaaagaaagacgtaagaaagaaaactaaataagaaaataaacaaataacaaattaaaa

SEQ ID NO: 63649 - DNA, 134 bp, Setaria italica
  Peptide Sequence Number=SeqID_129623
atgagggaaagattatacacaaacagtctggagaaccacttgatacaagccaaggtcctaaagggactaaatggattgcttcctcagctttgctcttggacactctggaaggtctagctcctttccttctccaa

SEQ ID NO: 63650 - DNA, 256 bp, Setaria italica
  Peptide Sequence Number=SeqID_129624
atccctccccagcgcgacgtagctcttgcaggacttgatcttctgctggtaggggttgtccttcttgcgcaggtcctccaggcagcgcacctccgacatgcacgcgaacgactgggacttgccctcgtagtaccgcgacaggcccttcctgcaccatagcaagttcatgcgcggtcagcccaagaaatccttaattaacccttccgaggaggaatcgagtccgagttcatcaccgcccggggagagctagtagcgt

SEQ ID NO: 63651 - DNA, 257 bp, Setaria italica
  Peptide Sequence Number=SeqID_129625
ccaagaaatcttaattaaccttccgaggaggaatcgagtccgagttcatcaccgcccgggggagagctagtagcgtcacttacttggctgggagctgcgacatcatggacgccatgtcgtagatgctgtccgagttcatcctccggagcggctgcggcacgaacaagcgctggtggtcctggtcgccctgcccagcagcgccgctgtcagggaagtggtccccctgtcggcgtcggactcctcgccgccggagaccg

SEQ ID NO: 63652 - DNA, 476 bp, Setaria italica
  misc_feature (473)..(473): n is a, c, g, or t
  Peptide Sequence Number=SeqID_129626
cgaacccgaagaacccgtatggggacccggtggcgatgctggagtaccgggagcacctggtgcgggagaagtggatccagatcgagaccgccaagatcatccgggagcgcctccgctggtgctaccggatcgagggcatcaaccaccaccagaagtgccgccacctcgttgaccagtacctcgaggccacccgcggcgttggatggggcaaggatgcccgcccgcccgagttccatgagcccaagaaggtcgccgaggcggagtagcggcgctgctgctgcggcttctcgtactgctgttccaggattggagaggtgaggcctggtgaaactaatcgtagcttcaaatgaaatgctttcgtccctgtgaatgttatgcagtaatctatgtggtggaaacgaagtggattccgaagttattgaggtgctggaaatacatagcaatcactctccattagcacatttttttggggnggt

SEQ ID NO: 63653 - DNA, 193 bp, Setaria italica
  Peptide Sequence Number=SeqID_129627
ggttgatgccctcgatccgggagcacctggtgcgggagaagtggatccagatcgagaccgccaagatcatccgggttcttcgggtcgaagttgtccggcggctgttcatcgaactcaaccttcgccttccgcaccatcttctccgtcaccaccgccgccgcctccccgccgccgccttttctccccttccctt

SEQ ID NO: 63654 - DNA, 195 bp, Setaria italica
  Peptide Sequence Number=SeqID_129628
cagttctttttacatctgaagctgctgatagacttcaaataatgttgtccaagaaaacgagtaacttggaactgctgcagttcttttacatctgaagctgctgatagacttcaaataatgttgtccaagaaaacattcttgtgcctgtaccttttcaaggatcggtttgctacaatatcacaacaggccaacgaa

SEQ ID NO: 63655 - DNA, 468 bp, Setaria italica
  misc_feature (16)..(16): n is a, c, g, or t
  Peptide Sequence Number=SeqID_129629
gtaaagcatccgcggntaaattccacgtgtggtattttacacaggccactcaaaaatgaaacacacccgaaaatgccgaaccacgtcattgcctacctagctaaaattatacaggttacacaatatatcggattcaaaagacaaaattactcgccaaaaaatgaagctacttgatagatgcaagctgcccctacgctaaagaaatgtttctgtgtacaggtacaacaaaataagcaatctacctgggctggccctggatcttgaaaacctgcaggacccactgccaagaatggtccccgattacgatgggtaatggcagaagttcatacaatttgattggtacgaaaacctcccttccacctattttgcaaccgtgatgtggtttttctaaatcccataccacaatctttacctattcctaattccttgtattgtttgttctttgttaatttcgttttttatttagtt

SEQ ID NO: 63656 - DNA, 266 bp, Setaria italica
  Peptide Sequence Number=SeqID_129630
cctgcaggacccactgccaagaatggtccccgattacgatgggtaatggcagaagttcatacaatttgattggtacgaaaacctcccttccacctattttgcaaccgtgatgtggttttctaaatcccataccacaatcttaccatccaatcctgatgtgctgaatcgttttatagtaccatcccttccttttgtcaacggcacgatacacgttctgtaatgctaacatatttctctttcctgtgatgctaacatatgaaatactt

SEQ ID NO: 63657 - DNA, 246 bp, Setaria italica
  Peptide Sequence Number=SeqID_129631
atagtaccatcccttccttttgttcaacggcacgatacacgttatgcaattctcatgggcaccacctcgcggctttgatggttcaacagtgtcgctactagtcccttgctttgattggccatatagctttccaagggcttcagagagactggtcactatctgctgagtaaggaccaattttcctaaccagtaaaagaactagattggtttggcatctaaataggttacaagccacgaaatagattg

SEQ ID NO: 63658 - DNA, 259 bp, Setaria italica
  Peptide Sequence Number=SeqID_129632
ttagttttaaggttacttccctctccgagcttagttgccttggagaatagctcctgatacacttcattactagcatccatatttctttttattgcatctcccagtttctctgtatatcacaaatgcagcataaaaattagtctgcatggattcatcaattgtttgaggatgaataccgtggtttgggcctctgctttcctgttaccctttaagcgaattcattgtttactccaagcaggttcgaagagaaattaatgat

SEQ ID NO: 63659 - DNA, 249 bp, Setaria italica
  Peptide Sequence Number=SeqID_129633
gtgtcagcgcaatcagacaagccaagaatcttaataatatagttagttttaaggttacttccctctccgagcttagttgccttggagaatagctcctgatacacttcattactagcatccatatttctttttattgcatctcccagtttctcctttaagcttcacaaggcagtcatgtcatttgacaaatgatccatcgaattcattgtttactccaagcaggttcgaagagaaattaatgatctctct

SEQ ID NO: 63660 - DNA, 362 bp, Setaria italica
  Peptide Sequence Number=SeqID_129634
agcagcagcaagcagcagggttgagcacaccggtagtgatggagaactgaagggacggcgctcgtcggcgtccagttgcccaggatcacgtcgtggcacgacggcttgggcgactgcgccgtcatccagaaccagatggccgtcttgaacgagatcacggggtccgtcgacaccaggtccgggttgcccaccaagtcggcgccgatcgcgctcccagcctgctggtagttggcctgccctgtcaattggatgggtccccgtccgtagtagggaggagaggttgccttgctgatctcctccttgaagcagtacccccatgtgtactgaccagcagcaccgccgttggtctcgtgggaggtctg

SEQ ID NO: 63661 - DNA, 265 bp, Setaria italica
  Peptide Sequence Number=SeqID_129635
tattctaggcgcgaaaacgagaccttggaccaggtcgaaatcggtggctaagatgtcaacactcgtgtacttttcaagaagatatcctacgttcgatggatcgatcacttcgataaacaaatttgtgttcgtccagatggtatatatgttttaattgcagtttgcgtatatggatcagctatatattttggtttatattacttaccctgtcaattggatgggtccccgtcgtagtagggaggagaggttgccttgctgatctcct

SEQ ID NO: 63662 - DNA, 317 bp, Setaria italica
  Peptide Sequence Number=SeqID_129636
cgaggtttgttcgtccgtagccgacgcccaacatgtcgcagtagtgcttgtagtagccgatgcggttgacgttggcgtcgttgggccccatgccgcactcgagcccgccgttgatgatgttggtgatcacgccgtacccgggcacccgccccgcggaggtgtcggcgctcgtcggcgtccagttgcccaggatcacgtcgtggcacgacggcttgggcgactgcgccgtcaataccaagaaaccaagaatggaccgtacttagaaacgaagaatacaacggggtaccgtacgaacaaccaaggtaccgggttagaca

SEQ ID NO: 63663 - DNA, 252 bp, Setaria italica
  Peptide Sequence Number=SeqID_129637
cgactgcgccgtcatccagaaccagatggccgtcttgaacgagatcacggggtccgtcgacaccaggtccgggttgcccaccaagtcggcgccgatcgcgctcccagcctgctggtagttggcctgcctgcgaccatggagtagcaaccattaatcctgtcaattggatgggtccccgtccgtagtagggaggagaggttgccttgctgatctcctccttgaagcagtacccccatgtgtactgaccagcag

SEQ ID NO: 63664 - DNA, 387 bp, Setaria italica
  Peptide Sequence Number=SeqID_129638
agcatgtccaggtcaagatgtgtacaggcccaatggaaccctggggggatgctcccaagcctaggaggcgcaagcagtccgatgaagagatcgcacgcaattgcaccgtgccatgaatagctcaccgaggatctctcacactggaccacccaagaggcctcgcggcaaagccggtgatggcaaagatggagccgcccccggtgaaggtaacagggaaggtcgtgacgatgcttgcaatggttcttcaactcatgcgccaattgaggctggcggtggcttatctaatggatgctgtgaggagaaatctagcgagacaactgttccatttgtttctaagtctattgggggttccttgtattgtattggtggtgatgacccatcttaggt

SEQ ID NO: 63665 - DNA, 298 bp, Setaria italica
  Peptide Sequence Number=SeqID_129639
ctaggcatgctgcaaagagtagaggcgatgttactgataatggagtttggcactggaaacttgagcgctgctcggaaagtgaagatcaagaggaaggaattgcttctgaaccaacataacaataaagaaacagaagagcccaaggaaacagaaccctctgtacaacctataggacaggatgagccaaaagacgaatggaaaatggaacagaaaaagcatgggagtccaagacaagaatagacaaaaggaaccccaaaggtaagaaacggaacaaacggaacgtaaccaaataaacaaa

SEQ ID NO: 63666 - DNA, 322 bp, Setaria italica
  Peptide Sequence Number=SeqID_129640
gatttgacagttatgtttggtgatatcattaatgatgaaacggatcattggaaccctatgacttccaaccctatcataccccaaaatcatgatactcctattgatgtagacaatgatgatggtgaaaaccttgatggtggtagggatgatattcatgtgtccccaacagaagaagacaatggaggtactgctgggagtgacattgaggaggtgtccccatcctttgacaatggaaaaagagatcgagggttgtcatagacaaaggaaagaaagcaaaaacaggtacaacacttgtgattcaagaaaaattgagtgagatagc

SEQ ID NO: 63667 - DNA, 250 bp, Setaria italica
  Peptide Sequence Number=SeqID_129641
tggttgcgatgcgacttctgatattactaaatttgagtgaaatggttgtccttgagtttactttggactcttcatgtgtgtatatgttcccccaaatctcattttgagtgatatcaggggagctactgatgtcgatgtgaagcgcctaccaaagaggccggcaccgccccggttcggacggaaattgactgacgcacaaaaggagagagccacacacatctgccttgattgtggatacatatacttccta

SEQ ID NO: 63668 - DNA, 424 bp, Setaria italica
  Peptide Sequence Number=SeqID_129642
cattaatatttagtagaggaacacatattcatttgactgacaaaagctatatttgcagatgtaacaactgcagcagttgctaaacaagccctggagggacactgcatatatgatggtggttactgtaagcttcatctgtcatactctcgtcatactgatctcaatgtaaaggcgcatgatgagagaagcagggattacacactttcagaccctaatgcgcaactgcaagctgctgcacaagcaccagctccaggagtggcatggcagaacacttcagcaccagctgctccgttttatgcaagcacagcagcatcacctcctgctggagttggacaagtgcctgcttggaatcctaacatgcaggcaggggctttcgcatctgcatccacccgtaccctagccaaccgatgatggcaaacgccat

SEQ ID NO: 63669 - DNA, 224 bp, Setaria italica
  Peptide Sequence Number=SeqID_129643
gttagaccaaggcgaaaacaggaagctccaaggaaaacaatgttgagaaagcgtacttttgtcaaattgaatgaacagcaataggtattccgttttactaattgagccaacttcattattattagtccacaagatattgaagtcaatcaattatttgctaatttacatgcatatatgatggtggttactgtaagcttcatctgtcatactctcgtcatactgat

SEQ ID NO: 63670 - DNA, 212 bp, Setaria italica
  Peptide Sequence Number=SeqID_129644
ttgttactttttagtcatcaattgagaacatgcagtatgctgtgacagtggatgttttgcacactgtgttttctgcttttggtactgttcaaaaaattgcaatgtttgagaagaatggtggaatgcaggctctaattcaatatccaggtatgctaactcaattgcacccaacaagatataccctggccttggtgaactctgaaatagattcc

SEQ ID NO: 63671 - DNA, 120 bp, Setaria italica
  Peptide Sequence Number=SeqID_129645
tatcctccatcaacgcgcttatctccggtgtagggcacctccctgtttattcaagttactgatgaaaggttaaattccaaacctttagaccataagtatctctatggtgcttatttttgg

SEQ ID NO: 63672 - DNA, 411 bp, Setaria italica
  Peptide Sequence Number=SeqID_129646
gtttcaccaagccaggctccatcccagattcccagaacagatacctcagaatacacagtggtgagaaaaatgtcacttggaacaggccgcggcatcaggggattaaggcacattttggttgtgcccaagactccatggtgagcttccttccttgacgctttactccggtgatcaaatattgcagcatcgggcattgttttgaattcctattgttgcataacctgtcatgcttttttgacaaacctgtgcctttagctaatttctttcttgtccattgcagagagccagatacctctcgttgttgggatcctgacgaggcacgatttcatgcccgagcatgttcatggaccttcccgaatctccacaagtcccgttgaggaagaagcgttcagtatcatgttcagtttgatg

SEQ ID NO: 63673 - DNA, 171 bp, Setaria italica
  Peptide Sequence Number=SeqID_129647
ttttttttttttttggtttgccctggtccatgtgccagcgaccgagacgagccttcattccgtgcattatttcaggttcctacaggttacagcagcagaggcatggcctattattggcggctcacactcactatcgattgctttagtagctagaacagcacatgacagcat

SEQ ID NO: 63674 - DNA, 250 bp, Setaria italica
  Peptide Sequence Number=SeqID_129648
ctcttgcactgctgtaccctttggagtttctggcaagaatttggattgttccttaatcactgatgaaattcagttgttttcctcagctatttggttggcatcaacgccgttacagctgcctacgcggtagcatccatcttgctgtcgtcgttcaagtccttcgctcggtatgactggctgattctcgtcctggatcaggtctgtctgacccaacaccttctctgttatttttcgcttttgagattgacta

SEQ ID NO: 63675 - DNA, 214 bp, Setaria italica
  misc_feature (182)..(182): n is a, c, g, or t
  misc_feature (195)..(195): n is a, c, g, or t
  Peptide Sequence Number=SeqID_129649
gcagaccagaagggcagccactaaatatgttgaatctgtcattgatgaggtacttggttcttgtgaggtatttgaggaaaaacaagtgggcaatgaaagattcaacatatttagtggctgcccttctggtcagacagcaactattgtcctccgtggtggtgcagaccagttcattgaggaanctgaacgaagtcnccatgatgccatcatgatt

SEQ ID NO: 63676 - DNA, 177 bp, Setaria italica
  Peptide Sequence Number=SeqID_129650
caccagctagaagcaccacagtagtagtcccatcaccaacctcggagtcctgcaacaacgctctcatcgaagttaataggcggcgagaaagagttctttgcttctatggttgttgatgctgtgcttgctattggaaccttttttattccaatcatgttaagcctgtcatcatttcca

SEQ ID NO: 63677 - DNA, 161 bp, Setaria italica
  Peptide Sequence Number=SeqID_129651
tgccaattctttaaccctttgaattgccatattgcccgcagccctataactgcgaattagactgtgggggtgcaaaagaattctttgcttctatggttgtggatgctgtccttgccatttgcaatgatgacaggcttaatctcatggtacctccaggaacc

SEQ ID NO: 63678 - DNA, 234 bp, Setaria italica
  Peptide Sequence Number=SeqID_129652
cttattagtcggtatagatcctgtcagctggttccagctaatatccagatagccaagttgaggtatgctactcagatcaggaatagctccttgcaagctgcagttcctaagactcagctttagtagtgtggatatgttgctatatgtagtagggatggagcttccactgaagttattattatcagcctgactagaaaccaaaatatatgaagtcagaaacaggtacatgtttcc

SEQ ID NO: 63679 - DNA, 185 bp, Setaria italica
  Peptide Sequence Number=SeqID_129653
ttttcctctgaccactaaagtgaggtgaatataaatccgtcacaagaaaattaagttacacacaatatttttaaagcaggcgcctttgcaaattctggaggaagaggtccagatagattgttgttgtcaacaagcaggtgaagaagtagaggcaatctggacagttcggatgggatgctcccgct

SEQ ID NO: 63680 - DNA, 476 bp, Setaria italica
  Peptide Sequence Number=SeqID_129654
taattaaataagatatttagatggaaatacaaagaaattgcttaactacatcaatcacacaaaattcaatacaaatttacccatcatttatttcttgatgtaggacatgcatacatggttgatgcagccatgacatcatttattagagtacttcatgagatgacgaaggaacactgaagctaacaccaaattttgttgtttatttagcttcttcaatgctaccacttgaggtggtcgacatggtgaggtcttcatcattctttaactccaatggatctggttgagcgttgattgcaggaacaaggttgtctttagggatctggaaggcttgatcccttggtttggtcaaaggatccattgcaccattttctttttagtgttggatgttgctgcaagaaaatgagattccatatgaacctgatgtagctggggcgcattactcgacatggatgcctgagtatgatttgctcaagcct

SEQ ID NO: 63681 - DNA, 371 bp, Setaria italica
  Peptide Sequence Number=SeqID_129655
gatgtaggacatgcatacatcagaaataaatgactggtaaacttcaatcaaattttacccgatcattattcttgatgtaggacatgcatacatcaatcaaatttacccatcatttatttcttgatgtaggacatgcatacatggttgatgcagccatgacatcatttattagagtacttcatgagatgacgaaggaacactgaagctaacaccaaattttgttgtttatttagcttcttcaatgctaccacttgaggtggtcgacatggtgaggtcttcatcattctttaactccaatggatctggttgagcgttgattgcaggaacaaggttgtctttagggatctggaaggcttgatcccttggtttga

SEQ ID NO: 63682 - DNA, 466 bp, Setaria italica
  Peptide Sequence Number=SeqID_129656
ctttttaccttgagtgcatgcattctttttctttttacgaaacacagtaacagtacagatgatgtagacgctcattacattcggcattgctttacgtgctgttgttttctatattattatgaaattctaatatgtttatttatagtttgatagccagacgcttatgtggcgtagtttagagatgttccatccagagaatttcggccattcagccctctcttgtagttttgtgaagctcgactgacgactgcgattgagaattttagtaacgtgggccaactgacccactcaatttgggccggagcccggaatgccaggagaaaaaaaaggtgcaattgcttttggttggagtccgcgatcttttcccccccttttttgtgcctgcgatagtcgagcagcaagacaaattgaggttgagtcaatgacctcattgtacaaattgaagttgatcgagtaactattttat

SEQ ID NO: 63683 - DNA, 299 bp, Setaria italica
  Peptide Sequence Number=SeqID_129657
acccagataactaagatatatgcatgttttcaaagatatggagccatgacatgatgctgccaagctatcgccgattcaaacttatccagtttgatagccagacgcttatgtggcgtagtttagagatgttccatccagagaatttcggccattcagccctctcttgtagttttgtgaagctcgactgacgactgcgattgagaattttagtaacgtgggccaactgacccactcaatttgggccggagcccggaatgccaggagaaaaaaaggtgcaattgcttttggttggagtccgc

SEQ ID NO: 63684 - DNA, 309 bp, Setaria italica
  Peptide Sequence Number=SeqID_129658
acctatcgtgtgcatccttagtttcaggaataggtagatctacataaacttttgctgcattggttgatgatattgaataccctgagaaaatatcaatgatttattttcttaggaggttagttttgttgaatgaaaaatattgaatagctcatattaaatgatgactcactgccgaatttcctcacagttgtagatgttattgcgatgactatgggattttgttccttattctattctaaccttccttctaacttttgtctcctcaaaatctaactttaacttcatggtcactgcaaatttaaaattttg

SEQ ID NO: 63685 - DNA, 476 bp, Setaria italica
  Peptide Sequence Number=SeqID_129659
ttaactaattccaagcgtgagctagtaatccttaacatcaactggtttacagtagtgatcaacaaaagagtctagcttgaaaataagcactcaatttagcccaataattttattgctacatcctacaattgcagtatacaaaaaactattattgaaagacgaaatagcatgttaagaacagcctaactgcttaaaaaggaactaaaaccccatcaagtgtcaagacctgaagttgcatcaccgaattaaaggagcaagctcagaactaggaatgaagtattagagcaccaagatacttgagacttagcagcagcataacaaattacacataagtgcacatacattgaatgaacaagacgatctgtcatgcaatctggaaaaggggagttttgcacataacttaaagcacttcaaggattaagtaactctgtagctggaatctgcccatgtcctgtgctttaaaatgtaagtaatcc

SEQ ID NO: 63686 - DNA, 217 bp, Setaria italica
  Peptide Sequence Number=SeqID_129660
tatctgctgggcaagcttccatcaattcatcaggggccatgcctggtgttagttccattgtagcttgtgaatgaccataagactggttattgtgcgcatcaatctgcccattctgttcccttatgttctgttcatcttcctctgtattctacaataacggggttacttaattagtaattaaaaattactaattactaaaaatttactttagttttaa

SEQ ID NO: 63687 - DNA, 175 bp, Setaria italica
  Peptide Sequence Number=SeqID_129661
accatcagtttgcggatggtaagatgagctcatcaataattgagtatccgacaacttgaacaactcctgccaaacattgctagaaaaaattttatccctatctgtaatgatggcttcaggcaacccatgaagcttgtaaatgttgtccatatagacttgagccacttgtaaggca

SEQ ID NO: 63688 - DNA, 404 bp, Setaria italica
  misc_feature (33)..(33): n is a, c, g, or t
  misc_feature (186)..(186): n is a, c, g, or t
  Peptide Sequence Number=SeqID_129662
cgaagtgataatcgcgtctgtcggatgtccagnaacccgatggaccaccactgtagaatttttgaggaatcaaggtattctcatcaacgtactctgcatccacaagcaaacatcatggaaagcaagcataagaccatggtagcagatgagcacactgaactaactgtaattcaccaaacaaaattntaaaactacctagcatcccaagaagctgaatcatgaaactctaatgcgaacagatcaagattacagtggttgtaagacatgtacagcaaattcccctcttggaaacgcagagaacacctcggcatcgaacagaaatggatgcccggccggcccccaattcgcgacacgacccgatcaagaaaaccccatcctcctctaacattgattctatacaacac

SEQ ID NO: 63689 - DNA, 315 bp, Setaria italica
  Peptide Sequence Number=SeqID_129663
aggcatccgggactacattattgcgcaataatgtagtcccggatgcctgatgacagaaaacaaataggatttatcacagaaactatcataacagcacttgcttgtcaacattgcgtctgtcataaccttcttgcatagtgggcagtggagttctgctggcaagctatcactgacactgctagacatggcccgggcaagttctgctgggatgccattatcagagctagatattatgggaatcagtgaactggttcttctggaatcatatttcgtgtcgccataatttgggcaagaatgaataaagtgccctgggac

SEQ ID NO: 63690 - DNA, 224 bp, Setaria italica
  Peptide Sequence Number=SeqID_129664
taacataaggaaattgtttgagttttccaggctactgccacaaaagggtacagcggtatatatatcttaccacttaatctcagctgcatcaatcacagttctcattgatgctgcctcttcatcatcagcttcagtaaatccacttgatttcaatgttgattcagtaactggcttgttggatgccatcccatcattctctaagaccatgggcctgaaatataaat

SEQ ID NO: 63691 - DNA, 372 bp, Setaria italica
  misc_feature (335)..(335): n is a, c, g, or t
  Peptide Sequence Number=SeqID_129665
actaatgaggacaatgttctgatagaccttcagtgtcacaataggaccagcaaaaacttggcgccttccgtagatttggaagatgggatggagagcacgaagtttttgctggtcctattgtgacactgaaggtctatgaggacaatgttctgatccgtgagttccttgaggagaaaggccacggcagggtccttgtagttgatggtggtgggagcatgcgctgtgccatactgggtggcaaccctgtccagcaggcacagaacaatgggtgggccggcattgtggtgaacggctgcatcagggatgttgatgagattaatggctgcgacattggntccgagctctcaactcccaccccatgaaggcaaacag

SEQ ID NO: 63692 - DNA, 287 bp, Setaria italica
  Peptide Sequence Number=SeqID_129666
tcgtggtcggcggcccctccttctccccctttcaccgccgggcgccgccatcaccgccgcgcccacccgcacccttctcgctcagtctccctcctttctttggtcttcctttcctggcggcgacgactgggccctttgccggcgacgagccccgaccaggtatgcccttcccttcccttcccttcctgctgcacgcaacggagaccctaggataagctatttgtatttggatcccacccagttgctgtgcgcaacggcggttttgtttgcacaaattgtctaggtcc

SEQ ID NO: 63693 - DNA, 238 bp, Setaria italica
  Peptide Sequence Number=SeqID_129667
tgctcttgatggccgcctccgtgtccgcccggatcctgctctcggccgggctggtcttggacagggcctcctgtatcatccacatccacgcatatttgcatcgctcagcaccagaagatattaccaggatgcagctgggaatgttgggtccgccagaaggccttgctctcggcggtgtcgccgccgctggagccctcgtcgtcgtcgtcgttctccggccaccgctccctctcgaaat

SEQ ID NO: 63694 - DNA, 256 bp, Setaria italica
  Peptide Sequence Number=SeqID_129668
agaaagcgttccttctacttagagagatttcgaacaagtcatttaaagctcgatagttaacaccccaatcttctttcgatgtgcctggtccactcattgtgtaagtctttcctgaaccggtttgaccataggcaaaaatgcacacattaaacccatcaagaactgatctgatcaatggctggatgtcagagaatacttcagtttaacaaggtgtttaatacacgtgcttctcaagctgaagtattctctgacatcc

SEQ ID NO: 63695 - DNA, 252 bp, Setaria italica
  misc_feature (212)..(212): n is a, c, g, or t
  Peptide Sequence Number=SeqID_129669
tcccttacttttagtttaacttacttagacaagacaacctaactctactccagaaaccctttcagcaaactttaaagtgctcattgtttctgaatatgattcggtatctggatttatttgaacaaacatcagtgtctttgcttgtccacctaaagagctctgtagaacttgagtcagcttgctgtttctgtatggaacatgggcatttttcngtgccaaagcaaaaatcacatcaccaagagcagacagaga

SEQ ID NO: 63696 - DNA, 148 bp, Setaria italica
  Peptide Sequence Number=SeqID_129670
ctgggaagccagtgtcatgcgtctgtaatatgacgcagacagattgtgctgaactcgtgtggttttgttgtagggtatgtagttcaagagattgagcatcgcattgctattcaagcagatcacataagaatcaaaatgcatcataaag

SEQ ID NO: 63697 - DNA, 469 bp, Setaria italica
  Peptide Sequence Number=SeqID_129671
agtaaggtggatgggcccttctatgccaaactttgggacgaaactatgaaccatttgccttgacctttactatcctagcttcagtatcagttggccttgtcctgaaatatatgagggtgtggagttcaactgatgctctgcttgccatctgggcatttcgatgtctgtaattcaaattgtcagcgatgcctgtaagttgtggaccatcctgaaagattggtgggagctttgcaatttctagagctgcagctagcaacctatgaacaacaacatctgcatatctgcgaataggagaagtgaaatgagtgtaaagagaagctgcaagcccataatggtaatactcagaaaaggtcaaatctccactgcaaaaataaacggcctgtgtcatgcatctagttgccaaaattctaataagcttattgaagcacttccccctatgttctttactaaggcgtcatcctagcccaac

SEQ ID NO: 63698 - DNA, 434 bp, Setaria italica
  Peptide Sequence Number=SeqID_129672
cacaggagcatttcagatccacctgtaagctccactgcccttactaattttcaccattccaaccttatgttactaagttataattattgtgaatgacttctacaggtaaggctgtacacagctaagaaattataccaccaactggagcaagccaggactgagttcattcaagcaaatgtcatggtcaggaagcagaccatcttcctgcccaaagttctccacttttatgcaaaggatgctgctctagagttgcctgacctaaactgctgcaaccaaccaaatttcatggcaaacttcttctgattacagtctagcatctcgctgaggctgcaacttgagttcttctgcttgagcaccttgtgacggtactccaggctcctcttgaggccatggcgaaagaactgggggtaatctaccacctcacccatgtcccg

SEQ ID NO: 63699 - DNA, 465 bp, Setaria italica
  Peptide Sequence Number=SeqID_129673
cgtattttgtaagcataatcaacgcagggtgttagcgcggaggcatataattttgttcaattcacttttagatgcaatgtctaagtggacatcaaatatggtaatacctttaagaaaatctggccttctgattctttattttgcttctaatttgcaggtatgtagttcttgtaatttacgaaatgcatgttcgaggggctacatccttacacgtaaagaagatgaagctcggactcttgatgttatgcgtattttattgatatatggttttgatcacataaaggaaactgtagagaacaaacctcttctcaaattaaaatctttgaagactgttgtccggaaattaatacatgagattgtgaagctgagcgctgttcctattgatcctaatcttccaccccctgtaataaagaaacctcctcctaaggtgaagcaaccacctcccccaccaaagaagcgagtcgg

SEQ ID NO: 63700 - DNA, 423 bp, Setaria italica
  Peptide Sequence Number=SeqID_129674
ccgcgaccggttcgacatcctcaagtcctgccaaggaaggatcttcagatattgattggccatgggtgccccagcatggatgcaaaagcggtgtttctgcaaagcttataagaaaacttgtccatcttgatgagggtgatgtatgtagttcttgaatttcgaaatgcatgttcaggggctacatccttacacgtaaagaagatgaagctcggactcttgatgttatgcgtattttattgatatatggttttgatcacataaaggaaactgtagagaacaaacctcttctcaaattaaaatctttgaagactgttgtccggaaattaatacatgagattgtgaagctgagcgctgttcctaattagaatacctaaataacttaaccaaaccccctaaagttaaaaataaaaagtaaaaacctaa

SEQ ID NO: 63701 - DNA, 251 bp, Setaria italica
  Peptide Sequence Number=SeqID_129675
aacaaatggagggattgtcaatccaagttaccaagaatgttgttggtgaagtgaaacatgagaagtattcaaaagctacaagacctcccgctcctactccaagaaggtcatcatcgacaccgagaagacgattacagccttcaaagacatttcatgccagaactgctcacaaggaggtatgacatatctgacaatttgaaatgttaaacatgttgtgggtagccttaacatccattcagattttcaccgca

SEQ ID NO: 63702 - DNA, 258 bp, Setaria italica
  Peptide Sequence Number=SeqID_129676
cattcatttaaactagcaagggctgtaaaacttgaccaaagcactgatgcacatgatcctcctagttctaccagaactgggaaggattgtccagaattgctaagtgaacaaatggagggattgtcaatccaagttaccaagaatgttgttggtgaagtgaaacatgagaagtattcaaaagctacaagaccacgttgcggaagtagccgttgtcgaagcggacggggctgagcgcgtcgagcggggcgaggttcccgt

SEQ ID NO: 63703 - DNA, 224 bp, Setaria italica
  Peptide Sequence Number=SeqID_129677
cgccaccaggtcgcgcgagtccaggcccttggacgcgaacgccgagacgagggtggccgcggaagaggacggggatgggaggttgctgttcgccgacgcctggctcgccgtccgcgtgtcgcgacggcccagcggcaccgcccacgtcggaccgctcagctgcaccatttattcagtatatcagagtgaaaccaaattcaaacgaactgactaaattatgctct

SEQ ID NO: 63704 - DNA, 275 bp, Setaria italica
  Peptide Sequence Number=SeqID_129678
ggtacacttgtggactgattttaggctctctgaagaggaggtactctttatcagagagcctgacatcttgggtacacttgtggactgattttagacaatccgtgaacccatcactagtggtgctagtgtgagagatgcttaggatttgatgccatgaaacaatgcttgagaaattcacgtgatgatgtcatagaattttgtggtggaacatcgtgaactggaataacattgttgcttatttctgttgagatgagtaaaacttcaccatctgaagt

SEQ ID NO: 63705 - DNA, 402 bp, Setaria italica
  misc_feature (212)..(212): n is a, c, g, or t
  Peptide Sequence Number=SeqID_129679
aaacgaaataagaaataacctaaggtaagacaagttacaaagaaagaccgaattaactacaagaaccaaaggaagccagtggtgcagagcaatcaactggtgacacagaatgctcggagacgcatgtggccgaggagaatggctcatgatgaacaggtatatccaggaaatggctcttgaagcatggcttgatgctggacctggcttaaacnggagtacgatgttgcaatgtacataccaaccatgtgttgaattggcgtaaaagctgttctttgttccaattgttgtctgtaacccaacctgctattttcttccgggtgtgattttggccatctgacataacctaactgtacatttgtgggtggaaatggtgttatacgatagttcatttgtccgttcgag

SEQ ID NO: 63706 - DNA, 249 bp, Setaria italica
  Peptide Sequence Number=SeqID_129680
cgtttaaaacttgtcaagggctattggagacatggaatttaaacaaaacaagttcttgtcccctgataagcaaattttgaccgcaaatcctgacataaacatcccaacagctggttgatttcatccgtgagcatataaacaatgaggaaagcctttccgcagtatgtgaaagagtgcttgacagatgcctggctccatcgaccatgggcggcgagggatgcgataacatgacgatgatcctggtgcagt

SEQ ID NO: 63707 - DNA, 283 bp, Setaria italica
  Peptide Sequence Number=SeqID_129681
aacaaattaagaaagaatagagctgccagagattaatagtacacatagagaagaaggatgcaccggatggtttcatcaacgaggaggatgcacattggtctgatgaagagcgtggtgtacaaatgcctgatgtgcaagaagtgtatgtttctggaaatgatgatgataatcttggggatatttttgattggtactaggctactagcacaacaatcacgatggaaattaggactcatgacctgggatattatgattatgactgtttactttcttctctatggac

SEQ ID NO: 63708 - DNA, 465 bp, Setaria italica
  Peptide Sequence Number=SeqID_129682
caatataagatagtatacaaacaaggtgtttctaatagagtagcagatgttttattaagaagaccacactatgaccaccaactatgtgtagtttctacatgtgacccttcttggattactgtcattgttgaaggatataactctgacccttctacactgcatattttgaccaagttggctgtctccagcaattctgtacctcacttctctttgcaaaatgggctccttcggttcaacggcagattgtggattggcactaacaaatccctccagccaggggcggatccagaacgggactgcgcctcgggctgagctgttaaatcacacctaaaatagtctaatcttatcttctaaacctcattttgttaggctaaacaacacatatgttaaagggactccatgatctcgccccgggctgcagcccgggcagcccgggccctggatccgcccctgcctccagctgca

SEQ ID NO: 63709 - DNA, 272 bp, Setaria italica
  Peptide Sequence Number=SeqID_129683
caaatcgcttggtaagcgagcataccttgaaatggcaccaggggcggatccagaacggggctgcgccccgggctgagctgttgaatcacacctaaaatagtctaatttttgttttcctaagcttcattttgttaggctaaacagcacataggttaaagggactccatggtctcgccccgggctgcagcccgggcagcccgggccctggatccgcccctgaatggcacgacaaatcccttcttgagcatgtttctcttcttcatgtagtccac

SEQ ID NO: 63710 - DNA, 251 bp, Setaria italica
  Peptide Sequence Number=SeqID_129684
aacacaaaactgtcaaactgatcaccatctctagttacattctcaatctcaaccatggagactgaaaatggaggtgatgagagcgaactatcattctggaggaaagaactcctcaagagctcacttgcagaaagtctttcagctgctggagctaaacagttctcaatgaaggatcttacttctgaatctttaaccttgtagagagcagctggtttcttacctgagaaacgttcttgaatatatgacccatg

SEQ ID NO: 63711 - DNA, 250 bp, Setaria italica
  Peptide Sequence Number=SeqID_129685
taaacaataattctgtttgcatatacccgagatcccaccctctcatcgacgagttcatacccacaatagatggggaggacggcatatgttacacccaccccgagaaacttccaggtgagagagctatctagctaagctagacatgagcagaaatattactcgaaccgtatacttatacagacatattcctgtacttttcgagctttgcttttcatggagtgatatattgtatgttgggattatatcgcca

SEQ ID NO: 63712 - DNA, 150 bp, Setaria italica
  Peptide Sequence Number=SeqID_129686
catacacgaccggcacgcgaaagcggcggaaggttcacaccgacgagcagggcggcgagacgcggtggcacaagacgggcaagacccggccggtgttcaccctcgtcggagcccaggtggtactggtgcatcacccagttggtcttctcc

SEQ ID NO: 63713 - DNA, 402 bp, Setaria italica
  Peptide Sequence Number=SeqID_129687
tgtaaattgtctttggtagtattcttgtcttaagtaccttggttgatgttgagccagactttgcccctgagctcaaagacgatgagtcgctctggagctgagacagacgggctttttctcgcaacagtttgcacttcaactttagatcctcaacttcactttccaaagatggaacacggcactgaagctgatttaggcattccaatgctttcagaagactcgtgtcaggttcagggtttacaactccagctaccttagaatgctagtgcataaatttgacagattttctgccagtttgcttctatcttgttcgctttcatctaatttcttcctcaagagctcttcctcttcaatctgctcgtatggatctttcccatttgaaaccctgtagcgggcaagctc

SEQ ID NO: 63714 - DNA, 392 bp, Setaria italica
  Peptide Sequence Number=SeqID_129688
tttttttttatgattgcattgaatttcattgaatatacacaacagatgagtcagcaggtacaatatcagcaaaaggagattgctgtaccaaaatggatcctaatcatccctactaccagtttgactgtactaggggtaggggatgatgcgtgaggcctgcaggtttgctgttagctgacgactaactagttacagagaatatgttatgtacactttgttccgcctgcaatgtccccaccgtatcaccggaaggacgaaatgcttggagatctgctaagacctggtgatgttgagccagactttgcccctgagctcaaagacgatgagtcgctctggagctgagacagacgggtctttttctcgcaacagtttgcacttcaactttagatcct

SEQ ID NO: 63715 - DNA, 359 bp, Setaria italica
  Peptide Sequence Number=SeqID_129689
ggaaacatccgctacagatttgccagcagatgaaggccccgagcaggcttccaggtcaaaatggccagagcaatcagaggaacttttagggttgattgttaattcattgagggcattggacagcgcggtaccacatggatgccctgaaccacgaaggcggcctcaagctgtccagaaagggcaccaaaaaactggtaatctcaatgaaggctccgcatctgactttttgaagatgatctaacagtgcacaagctgcaagggagtgttctgaaccatccaccaactttggtacaagggcaatcaagtcttgctggagctgttttggagctttctctaggacaagtgtctaatcttactta

SEQ ID NO: 63716 - DNA, 319 bp, Setaria italica
  misc_feature (76)..(76): n is a, c, g, or t
  Peptide Sequence Number=SeqID_129690
caaaaagtcaagcacacaatctggaacttcagttcccagatctttcaatctccatcgaacagctctaaccgctagngaaagatgctgacaatgtgatgccgccttaagaacataagtaatggcagttacaagaggctcatcgttagagtcggacaataattcaagtgcatgaacagatgcttgtttccagatatcactttcgaattctaactcagaaagggcaccaaaaactggtaatctcaatgaaggctccgcatcttgactttttgtaagtattgtattcttaacttagtttgttcttacttaagtcttgtcctaa

SEQ ID NO: 63717 - DNA, 467 bp, Setaria italica
  Peptide Sequence Number=SeqID_129691
taaacttaagtaactagtaccaatcaggattcagaacactcatggtatagcatttgatatgttcagactgcaaaatgtctcagatttctttaagtctcagaaaacaatcatttctacgcatcagcaaatggatattgaccattaacctgtggtaggtagttcccggtgaagatctccgtcagatgtgttgacaaaaggacctttggagggaaatcacagtttgcaaaatgactgatagtccctccaagaagaccaatgccatcttcagttagagtgcccttaccgaattcatccaacaagcacagagatctcaatgttgcatgccttagcattgttccaacttgatgtaaatcaatcataaaagttgactgttcagttgtcatggatttgcttcccattgcacagaatatcctatctgtcaatccaacaatagcagaatcagcaggaacgaagcttccgatatgagc

SEQ ID NO: 63718 - DNA, 254 bp, Setaria italica
  Peptide Sequence Number=SeqID_129692
gtggaggtatttgtgagagtggtctcagaatcaccagggtagggcaaaaaatttgaggtgaaagatgggcttgtcagagaaccattctctcagcaagcaaaccttctcactcagatgttttgcccgttggcaaatttgatgggaaggttgtttcacagcagaaaaagcggaaaagggcaacagaaaatcttttagtagcacgagcccaatccaactccgatgttcttctatgacacatgctcccacacccaatg

SEQ ID NO: 63719 - DNA, 294 bp, Setaria italica
  Peptide Sequence Number=SeqID_129693
aaccaaagaacgaaccgaacgaaccgaccctacaaacaaccaactacaaccaacccaaaaccctagcctccgcctcccgccgccgcgatgagctactacggccagcagcagccgcccgtcggcgtgcctccgccgcaaggtccgtatctcgatcgccggctaattacatctctcgtgctccactgttccatccacctgacgtctgcgtctcctctcttggatctcgcagggtaccccgggaaggacgggtacccgccggcgggctacccgcccgcgggctacccaccgccggcg

SEQ ID NO: 63720 - DNA, 236 bp, Setaria italica
  Peptide Sequence Number=SeqID_129694
aaaaacttaaaaaataaaaacgaaaaataaaactaaaagtttaaaactaaaagtaaagttaaagaaaagaaataagaattaggtgtacttagtggtatgatgaagtttatgtcaccagtggaatccttggtctagctagcattgtgagataatttaatctctggagtcatcgcattttgctccaaggcattgtcttgcatgtgggatgtgtctataatcttttatttttcatcact

SEQ ID NO: 63721 - DNA, 323 bp, Setaria italica
  Peptide Sequence Number=SeqID_129695
cggccaccgttgcggagaaggtgtcgtcggaggtggccgagcagctgcccgagggcgggaggctgaggaccgcggccgtgatcatggagcacgcgtccaaggaagtcgcccaggaggctcaccttgcacaggacatcatccacaaggtggatgaaattgaggaggacgtgaaggccatccattgagccgattatggatcacagcaagcatgttcatgcgaaggcatgccacacgagtaacagctctcaaaaaccaaatgggggaacctaaagtataggaaaataatcaaaagatcccaaatgtctatgtggctatttcattct

SEQ ID NO: 63722 - DNA, 198 bp, Setaria italica
  Peptide Sequence Number=SeqID_129696
gtcctgtgcaaggtgagcctcctgggcgacttccttggacgcgtgatcatggagcacgcgtccaaggaagtcgcccaggaggctcaccttgcacaggacatcatccacaaggtggatgaaattgaggaggacgtgaaggccatcattgagccgattatggatcacagcaagcatgttcatgcgaaggcatgccacacg

SEQ ID NO: 63723 - DNA, 359 bp, Setaria italica
  misc_feature (231)..(231): n is a, c, g, or t
  Peptide Sequence Number=SeqID_129697
gcgacgttcgagcgtgggaagatggtgttcctggaggacctcagctgcagcaacggcaggacgagtccgtggacgagtcctcgggcgtctccgactcgcccgccgtgtcggagggcggcgcgctcagccagtgagcgagggggcgcgctcggggtggtccttcggatttgccttgtgatgcgtgcctttggtttactgcctgcatttgtttcttctgatggtttttggggnaggaggtggattgggcatgggccgtttggatctggtgatgggcttttatatgtggctctgattctgatcgtttgctgttgtttttttaactagcagtagatccctagaggagctgcagcgccggcttg

SEQ ID NO: 63724 - DNA, 242 bp, Setaria italica
  Peptide Sequence Number=SeqID_129698
cgaagctaagctacccttctcttcctagcttggattgcaaggagaagagatggagaggcaggctattactagtaccgctgatgacgactgagctagtgagctgacgtctacctcctacctgaatactgctaggctcgagcagccgtgcgcgaactgcgaagtcgtcttcaggtcttctaccggcgtcttctactacctcccgcctccgcgcaaacaggagcagccgcaggaagctttatgag

SEQ ID NO: 63725 - DNA, 273 bp, Setaria italica
  Peptide Sequence Number=SeqID_129699
gctgcgggggcgccatcggagcacgcgcaaatcagtacccagggatcaatcaatcaatggacacgaaaggagagttcttttggggggcgaagaaaaaaatctttacacgatgggcttcctctgattcgccgccggtctcgcattaccatccatgtcgtcacgattctagcccctgaggagaacgtttcctgcaatcggaaaaaggttccggggcaagaacagcaaaagcgtcagcaaacctaccaaaacaagaaacctggccatcgaagtaga

SEQ ID NO: 63726 - DNA, 224 bp, Setaria italica
  Peptide Sequence Number=SeqID_129700
ccattggtggcatgaattggtgagcaccaggaaacatcatcggtgccatcccagaagtcatccacatgatctgaacttgcatttggagggacttcagatactcaattgtctcatctaatatcgacgctttgtcagtctgaaaattattgcaaccaataaattcaaccaaaatatcaaagagaaacatattgacaacaatcaagtacatatgccaccactcacca

SEQ ID NO: 63727 - DNA, 276 bp, Setaria italica
  Peptide Sequence Number=SeqID_129701
ctgtccaggcgttcggagggcgccggccgctggtgcgcctggggctgcgcgacgagcccccgttgtgccacaggagctccacgaggtcgtcgtccgtgacgatgggcttcctctgattcgccgccggtctcgcattaccatccatgtcgtcacgattctagcccctgaggagaacgtttcctgcaatcggaaaaaggttccggggcaagaacagcaaaagcgtcagctaaaccttacctaaaactaagtaaacctggccatcgaagtagagcccca

SEQ ID NO: 63728 - DNA, 399 bp, Setaria italica
  Peptide Sequence Number=SeqID_129702
ctacattaatctatgatgaaatgattaatgatatgtctgcttctgctactagattatatctcccatgacaattgcaaaaacctttcaggacgattacttggattgtttcgctaatcctaataccataggcaaggtaaaatagaagcacaagttgtcagaaattcattttctaacagaataagtaatattcatggagtgctcttctccattttagattgggactgacattgaggatcacaagtgttcctggttaattgtgcaagctcttggccatgccaatattaaccagatagaagtattacttgtaaggaatttcttataaccgtatagctgaacatgtttaaggaacattgacgtcttatatgttcatttctagaaaaactatggaagaaggattca

SEQ ID NO: 63729 - DNA, 340 bp, Setaria italica
  Peptide Sequence Number=SeqID_129703
caagtgttcctggttaattgtgcaagctcttggccatgccaatattaaccagatagaagtattacttaaaaactatgggaagaaggattcaacctctgtttccaaagtgaaaagtacttactcgactcttgatttaaaggacatgttctccgagtttgaagatcgagcatacaatcacttggtcacatctatcgaagcccagcatgaccgtgctgcgcaggagatcctgaaatcgtttctgaagaaaatccacagaaggaaaggtagaagagtgaaatctgactcgtgtggacaacaggacagctgctcgcgtcagggggacatcttcagccctatcctt

SEQ ID NO: 63730 - DNA, 193 bp, Setaria italica
  Peptide Sequence Number=SeqID_129704
tgcggggttcctgttccttcattggttaattaatcatgaactgtatgtatatgtacaagtacacacacatacagttcatgattgattcggtgcggggttcctgttccttcattggttaattaataattaattatacataaaagggcttgtagtgtacgggagtaatgggactagcacactacctctggactag

SEQ ID NO: 63731 - DNA, 145 bp, Setaria italica
  Peptide Sequence Number=SeqID_129705
cgagcgaatcgatcgatcgagagggagacacgatgagcggcggcggtcaggacctgcagctgccgctcatcgtgtctccctctcgatcgatcgattcgctcgctgctgctagcctgctactgctgctctctctgctgttctcctt

SEQ ID NO: 63732 - DNA, 268 bp, Setaria italica
  Peptide Sequence Number=SeqID_129706
tatttctaagaaggcgctcgtcttctacgccggcaaggcgcccaagggcgagaagaccaactggatcatgcacgagtaccgcctcgccgacgtcgaccgctccgcccgcaagaagaacagcctcagggtaagcatctcgcttctctcctctcgccggtgatgaacacggccgtaacgtaaggacaagttctccgtgtgtgtcatcatccgacaaaaaaaaaaaataaaggaactcgatgataacgtgttgctttcgaaatgaatgcgg

SEQ ID NO: 63733 - DNA, 241 bp, Setaria italica
  Peptide Sequence Number=SeqID_129707
caagaagaccaacaacaacgcgctcaggctggatgactgggtgctgtgccgcatctacaacaagaagggtgtgatcgagcggtacgacacggtggacgacgacgaggtcgccgccgcggccgccgacgacgtcaagccggccgcggccaagaacccgcgcggggcggcggcgccgatcgaagcagagcatccccgcggagggcgtctcgtaggttcgttagttcgttcgttagtttacctt

SEQ ID NO: 63734 - DNA, 247 bp, Setaria italica
  Peptide Sequence Number=SeqID_129708
tacaaaaggaagaaattagggtaggaatacaatactagacccgaatacgaatacaagacggtcgggtgtccagttcaccattcagatgatcagatcgacagttgcacacgatctctgcacctgatcgcgccattgctcttgggaagctgccacatggaaatggtgccaaggatggtagatgactggtgatcatcgctgatagagagctatgctagccgtcggatcgggtctcgattaatctaacccg

SEQ ID NO: 63735 - DNA, 243 bp, Setaria italica
  Peptide Sequence Number=SeqID_129709
ccgggaagcgcccaagggcgtcaagaccaactggatcatgcacgagtacaggctcgccgtcgccggcgctcttcgcacgcgtcgacgccgccgcttcggggacatgttcgcgtacctgcagaggccgccgttctgaacttctgatcagggaacgtgaagcgtgcgccgccatgcgtgctccaggccactgaccatggtcgatgtccaggtcgtctagctcggtatctgcaggtgaaatcacga

SEQ ID NO: 63736 - DNA, 241 bp, Setaria italica
  Peptide Sequence Number=SeqID_129710
cctatcccctgtgtgccttgtatcccctgttgcgtgtctcaggagcggtacgacacggtggacgacgacgaggtcgccgccgcggccgccgacgacgtcaagccggccgcggccaagaacccgcgcggggcggcggcgccgatgaaggtggagatggccgactacggcgggtactacgacgactacgacctcgagacgccctccgcggggatgctctgcttcgatcgccccagcgaggacc

SEQ ID NO: 63737 - DNA, 291 bp, Setaria italica
  Peptide Sequence Number=SeqID_129711
tcactagtatcatcacactggatcgtgtatctctgaaacaaaggtattcaactttgtctagtctgctctgtttccttatcatcatatcatggtttcctcaataacaagaaatttgacaggtggtagatgcaccagaaatcctggctgtgattgggaaagtacctcacctctctgagttcctcaattccctgtacaattgccagtacaagtcgttctttgttgcattctctggcttggcagagcagatcaaagttagaccgataccttcagcctcatttccgctactacatg

SEQ ID NO: 63738 - DNA, 246 bp, Setaria italica
  Peptide Sequence Number=SeqID_129712
aaaaaccaaaaccaaaagaaaataaaagaaaagaaaaggaaaataagaactttactaaccaaggacaaaccatcaagcaaggggacttcttgctgaaccgcatacagaagctttcacgagtcattgacctataagagttgctgtttctgttgcagctccttcagcgccctgccaatgtttcccgcactggacttcttgcgtcgtcttcacctaggcttccattaagacatgagcgttgctcttctt

SEQ ID NO: 63739 - DNA, 244 bp, Setaria italica
  Peptide Sequence Number=SeqID_129713
tatggataatttctgtggttgggctggctagcgtggatttctcatcactgcttatttttcagctggcttgacggaacagatcaagttggaccgttacctgcagcctcatttccgctactacatgcgtgaagtgcgcactgttgtttactcacagtttctggaatcgtacaagagtgtgacaatggaagcaatggcttctgcgtttggcgtaaccgttgatttcattgaccaggaattgtcgcgt

SEQ ID NO: 63740 - DNA, 123 bp, Setaria italica
  Peptide Sequence Number=SeqID_129714
catgagcgttgctcttcttgcgccgggaacaagtttctaagagaacttgtgttttaagcgtgaattcggtacatgtatcccaaggttggccacaaaagtaacgtccatgggatggagctgcac

SEQ ID NO: 63741 - DNA, 187 bp, Setaria italica
  Peptide Sequence Number=SeqID_129715
ttttggaaagttttaaaggaacactctcctcctccataatacctgttgcatgttctatgcagctattggatctacaattgtcagataaagacttcagatcttggattaaagccttgtcaggactatttgcaagctgctgcagttgcggtaattcttgttgttagttagtttacgggttcgtttggtt

SEQ ID NO: 63742 - DNA, 237 bp, Setaria italica
  misc_feature (236)..(236): n is a, c, g, or t
  Peptide Sequence Number=SeqID_129716
aatttttattaagcgatgcaaacaagcaaagaaactgcacgctcgcttatactattttcatatggaaaagcagctctctaaatactctaaaaggcaacatgtacaccacacgcttatgcgtaactaaaagcccgatccgccaccgccatgtaacaatcaaggccaagaataataaccccgaaggggacgaatagactaaaccaagaatacttaagttactactagggaagaagaana

SEQ ID NO: 63743 - DNA, 349 bp, Setaria italica
  Peptide Sequence Number=SeqID_129717
cagaagtactacacctatctaatttacctccacgctgtttcagcatgctgctgcttctgtagtttcttcctcctcagatgtctctcgagcatctggaattgtctctgcaacaccttttccagcttcgaatctcgctctcctctcgacggcctcccgcaccctctctgcaaattcttcatcagatccagtcaacatgtaccgcagcttcatgttgatcctgttggccaccagtgtttggtgccgaggctctatcctgtcctccagggagtaactgaagaacctgacaaccatccagcagagaggcacaaggggtgagggtcacaactcacaacaaggacaggcatcaatt

SEQ ID NO: 63744 - DNA, 266 bp, Setaria italica
  Peptide Sequence Number=SeqID_129718
cgaatctttcccgtgaatcttcttttcagcgttcccaagcatttccagcgcttcacactgccaagaagctctatctgtagcagatatggcacttctagcttgattagaaagcgtaacaccaagcaataggtcttacaaaagaaactttgggagcttttttcagagcattagaccttgatcctaaacatgtcccaagtttgacatctatagcccctgtacatgtatcttgttctattcttgtaaaggttctttctttacttaggttt

SEQ ID NO: 63745 - DNA, 246 bp, Setaria italica
  Peptide Sequence Number=SeqID_129719
ccgccggctgctaaccaggtggagggatcttcgcgaaggagagcaggtgctcgagctcttgcacgcgaagatcccgccggctgctaaccaggtggaggtgaacccgtgttgccggcagaacaagctgcgggagttctgcagggccagaggcatccagctatgcggctacgctgcattgggcgggaacggcacgccgtgggccaacaattctgtcatgaagtgccctgtcctgggcgatctgcttca

SEQ ID NO: 63746 - DNA, 161 bp, Setaria italica
  Peptide Sequence Number=SeqID_129720
tagaatcggatacacagcgtcagaagaatggggcgatcataattgctgtgtatccgattctaaacagatcgaccaggggtaactgccagaatcggatacacagcaattatgatcgccccattcttctgacagttacccctggtcgatctgtttagaatcgg

SEQ ID NO: 63747 - DNA, 155 bp, Setaria italica
  Peptide Sequence Number=SeqID_129721
agctatacatcgctaacaaccacagaagacacatggcagttggaatggagaggctggcatgatcagaacaagaagtgaagtccatccagtaaacgaccgtgcaccctttccctttcctttgttgttctggtcatagttttcccagaagaatccag

SEQ ID NO: 63748 - DNA, 318 bp, Setaria italica
  Peptide Sequence Number=SeqID_129722
gctggtccacatccaatgagacagggtgataatcagtccccaaccaatatatgctggttggggactgattatcaccctgtctcattgttgggcatgccatcatccaatgagacagggtgatggcatgcccaacaatgatttttgatcagtgacaataggctgcattcatgataagattaatgttgctggaaatgcaagaggtttgtcagactaacatgagttgagtttgataattattcatattttcagactaacagagtttgtgagatcaaagacaacaatgagtagattcttgtatttgtacttcctattttctta

SEQ ID NO: 63749 - DNA, 367 bp, Setaria italica
  Peptide Sequence Number=SeqID_129723
acattttgaaaagaacccacacagatttacgatgtggaccagcatatattggttggggactgattatcaccctgtctcattggatgatggcatgcccaacaatgatttttgatcagtgacaataggctgcattcatgataagattaatgttgctggaaatgcaagagggttaagtgctttcaagcatccctgaatggagtcaatcagatctactcattgttggctgcacaaaataaggtagaattttttggacttcctattgctcaagtgcaacccagtgtcattcaacatggagaagcatgagattgccatgtccaagtggtcaggagcaataacttgagttgccaaggttagaaagggattcttg

SEQ ID NO: 63750 - DNA, 367 bp, Setaria italica
  Peptide Sequence Number=SeqID_129724
gcaaaccagaaattgtcattcaatctttgggccgttcaagattttgagcaagattggacctgttgcttacaaactggatctcccagcatctgcttcaatccacccggtctttcatgtctctcaactgaagaaagcccttccatcaactcatcagggtttttcttcagtgcaacaagtactgatcaaatggtccggctagcctgagtctttggcaacttgggaagacatggaggcgctacatcaacgttttccagcagctcctgcttggggacaagtaggttcattacaggggaggggggagtgtcagtgcaccttctgtcaagcaagcagcaagggagacggcaaaggaagctgggcctcaccgttc

SEQ ID NO: 63751 - DNA, 287 bp, Setaria italica
  Peptide Sequence Number=SeqID_129725
ttggttagttatttcctttagttttttgttttaagttctttaacttaggtttccttaatttctttacccggtttctttttctattgtctctcaactgaagaaagcccttccatcaactcatcagggtttttcttcagtgcaacaagtactgatcaaatggtccggctagcctgagtctttggcaacttgggaagacatggaggcgctacatcaacgttttccagcagctcctgcttggggacaagtaggttcattacagggggaggggggagtgtcagtgcaccttc

SEQ ID NO: 63752 - DNA, 332 bp, Setaria italica
  Peptide Sequence Number=SeqID_129726
ttacttaccgttaagttagtttaatttttatttagtcttggttattattatttaattattcttcttctacctacagtccagtccacaggtccagacatgctaattactaaaataattacaagggtcttgataaatcaatcactaggtgatccacgaccgaattaacagtacgcacagtaactagatgcacacgatacatcacaccgtgccaccgtaccatatgctactcacaagtactagctagattcagtaccttaattatgagctgatccgtggagctcccatgagctggcactggccgagcacgagcagctagcttaagttaccctact

SEQ ID NO: 63753 - DNA, 164 bp, Setaria italica
  Peptide Sequence Number=SeqID_129727
cttccctgtactctaggcccagttgccttgatgccgatggcacctgaatgttgtatcgacctatcagtcatctcaggcagtacatatatcaagggggtgtttggattccagctaaattttagctcctgttacatcgaatgtttgatactaattaggagtattaa

SEQ ID NO: 63754 - DNA, 221 bp, Setaria italica
  Peptide Sequence Number=SeqID_129728
tgcagccattcatagctataggaaaacggttgcaggactatggtcatcgcgttagactagcaacccatgccaacttcaaggattttgtgatgactactggattggagttttacccccttggtggagatccaaaagttcttgctggattacagggttggtaatttgagcagacatggttaagaataaaggattcttgcccgcaactccatcagaaattccta

SEQ ID NO: 63755 - DNA, 423 bp, Setaria italica
  Peptide Sequence Number=SeqID_129729
acaacacaatctaaggccctacctttccttttcgtgaaaagaatatgaatcaaatgaatttccatcagtgttcgtgttgtgcaacagagttagcatattaaatggctgcatacaactgttaccaacaacagaaccagggacctgtgccagtagaatctccatccggaggagatatcatgtgaattgacggtatatgttgcgcccgttttgtcatccttaatttatgctcgacgaacctgtttacaagcgatgaataggaaacaagaggcaaccatgagtcctatttttagaattcagagcaagcaatgcttgtactacacaacaatggcatttttcaccttttcactctctttatttcagaaagaagaagttgtctttaaccagaaaaagaaagaaacataaaaaaggaaataaatagtagat

SEQ ID NO: 63756 - DNA, 191 bp, Setaria italica
  Peptide Sequence Number=SeqID_129730
cattttggaatcccacgcagtatacgtcattcccatttgcgaaaaagtactcatgtggatacacatgcagtgcaagatcgtcctcaaaatggaaagtgatagttgggaatccatcatctacacttccagagtattggaaacacagaactgagacacgcaacaggagataggcaaggcacacaggggatagg

SEQ ID NO: 63757 - DNA, 344 bp, Setaria italica
  Peptide Sequence Number=SeqID_129731
ccccgcggctcatctggaacctccacggccctcatgctgatgactgcaggcgttgccctgaggctgcgcagcccacgacatgttcgttggaacgcctgaccagtgcttccatctctgcaatggctgtcaaaggagtacaagtaatgtttcagatgatgcagataatctgaatggagctaagattcttcggaggatcacaagacctaatcatgtgaactaatttgcatgacaagcggcaatccatgtggacagtttctgataaagaggttctaactgtttgttatgtgattcttatgtcatctctgtatcctgtttgagtgtttaccatttttgcaaggatccat

SEQ ID NO: 63758 - DNA, 361 bp, Setaria italica
  Peptide Sequence Number=SeqID_129732
acctccgatcagccagaactgctcgttacgccaccactcttccaggctgatccctgaccacttgatctccaacactgccagaaggcacagcgtcagggtgatcaccagcaggtaggtcaggaaggccacgttgagtgtcttcacgatgaactgccccgagaagagggagagcgccggcaggaagcagtagacaatgaggaagattgatgtgaacgggtagatgccaacgttcaggtatgcaatcctctgaaggaacttcatcttgcggcttgcgagcagcgcattgttgacgggaagaaagaaagaatttaccaactagaaaccaagtaagacccaatacggaagacaacctaggtaggaa

SEQ ID NO: 63759 - DNA, 225 bp, Setaria italica
  Peptide Sequence Number=SeqID_129733
tccacggttgtgcatccggtatccagtgaccacatcctctgtgactgaaccatagatccaaccgacacggtggccccactcagtcttgtcttcataccagcatgagatgacactgatggcctcagcaactgtggaggcatcaagaaggtcccgggggacagtgagagcacccggaccttcttgatgcctccacagttgctgaggccatcagtgtcttcataccag

SEQ ID NO: 63760 - DNA, 390 bp, Setaria italica
  Peptide Sequence Number=SeqID_129734
cgcaagacaacatgcacggagtatgttatcttgcggttccttttagctgataagaggaaccgcaagacaacatgcacggagtatgttatctcgatggatgccgacaacatctcaaggtcaagcagcacatatattggaaagctgaggtccaacttcctaggcacaaaatttatgatctatgacacacagcccccttataatggggctgttgtccctcacgctgggcgaaccagccggagattcaactccaagaaagtctcccctaaggtgccaactggtagctacaacatagctcaggtgacatacgagctaaatgttctcggtacgaggggccctaggcggatgcactgtgtcatgcactccatacctgcctccgcggttgagcctggg

SEQ ID NO: 63761 - DNA, 234 bp, Setaria italica
  Peptide Sequence Number=SeqID_129735
cgtgtctcagcacgatggtaccaagcagaggacaagcggcgttgctgaccttctgcacctgcattagcctcgggagcgttgggcttgttctatcaatcgctgtcccagaaggtggcaacaactggttctggcttatgaccctaagccccttggcgtatgtctctgcaactctcagctcccagcaattcagaatgaaacttccagtgcaaatatagtaactatcccttcatgatg

SEQ ID NO: 63762 - DNA, 244 bp, Setaria italica
  Peptide Sequence Number=SeqID_129736
aatgaaacttccagtgcaaatatagtaactatcccttcatgatgctccaggggagtgtactactggacaaaagcgtcaaggaaagaagagatcaaggtcaagatgatcctgtccgatgatgggaatgtatctgagatccttgtgcaaggtgacgatgtccaagttgaacagatgaggaaggaactcaaatttagcgaaaaggggatgatatatgtgaagggcattctttgaaacatgataacca

SEQ ID NO: 63763 - DNA, 242 bp, Setaria italica
  Peptide Sequence Number=SeqID_129737
gtggtgtcccggaggggaggaggagaggctcgggctaggagtctgggagtggcggggctgtggtcgctcatcaagcgctccgtcaagtccaagattgtgcaaaagacatttgtcaaagagggagcgcagtcgatggcgccaaatcaggtggctggagagatcctgtcgttcttcacccgcaacaatttcactgtctcagaccgcggtgaggttatcacctttgagggcacgatggtaccaag

SEQ ID NO: 63764 - DNA, 257 bp, Setaria italica
  Peptide Sequence Number=SeqID_129738
gaaggaaggacgcgaccaagggaagagatttggtgtggaacagtatgagatgcggaccttctcaaaggaccgggagaagcttgagaatctggtaacaacataacgtactttagtacaataacgtgactgtatatttttcttgtttttctattgaaattgagaaaacaaacataggccttgtttgggaggaggggctaaaatttaggccttgtttgggaggaggggctatgttttgtttttctattgaaattgaaacg

SEQ ID NO: 63765 - DNA, 247 bp, Setaria italica
  misc_feature (3)..(3): n is a, c, g, or t
  Peptide Sequence Number=SeqID_129739
ttntttattagtttgttatttaattatttcttaattttacgttaaggttaaggttacgttcgttaccttaagggttaagttagttattttggttgttggtaactagtatgagatgcggaccttctcaaaggaccgggagaagcttgagaatctgaaacttggggaaggtgtaaagggagtgtatgtctcagttgatgtggactgccttgacccggcgtttgctcccggtgtctctcacattgagcca

SEQ ID NO: 63766 - DNA, 336 bp, Setaria italica
  Peptide Sequence Number=SeqID_129740
aagttcttgaaaacggctataggatgaaggtgatcaaagtggaccatgatgcccatggtgtggatgcacctgaggatgttgagaaaatcgaagaactgatgcgagccagaaacattcagtagaaaatgaagagagtatctgctttgcgttgccatcggctaggctcactgggagactttgggctgtgctgcacccttgtctgcagatagcatggtagtagcatgcaaacctgctgagttgatcagtttggagctgttcggttagctgttcttattcgtgcccctttttcgagacccactacaccagtctacaacgaaacaagtcatgcaagtatta

SEQ ID NO: 63767 - DNA, 150 bp, Setaria italica
  Peptide Sequence Number=SeqID_129741
tattgttatgtagttatgctatcttttcatgattatgtggtaaaccactgtatgcgtttattggcatttgtaggatctgaacgctgctgtgaggcacttcaaaagcttgggaaacgttatgatattgttgtcaatattcaaggcgatgag

SEQ ID NO: 63768 - DNA, 438 bp, Setaria italica
  Peptide Sequence Number=SeqID_129742
ctatcggatccagtctctgtgagagtcttattaattaacttgtttataggctctatggcagctgaatctgcctgtgggagaacaacatagcgcttgtaagattgcttcctcgttcctcccacaggtaacggtttcgatacgtggcccagtctatcggatccagtctctgtgagagcttattaattaacttgtttataggctctatggcagctgaatctgcctgtgattgtgactgttttctcctgaaggaagacttggagatggtgcttggtaaagaatcctgttttgtctgtgtttcagtagtgatggtggaagaatttttgcctccagataggacatcaccgacgaaacggaggtctagcagtatttgcagaactcctttctctgaaacctgagaattcccagattcaataagaacaacaaaggaaaattttacta

SEQ ID NO: 63769 - DNA, 191 bp, Setaria italica
  misc_feature (32)..(32): n is a, c, g, or t
  Peptide Sequence Number=SeqID_129743
cttaacagcacaggctgcaaggcatcacgttnaagccctgtagacgaggtccttcaaggtgatgccttacagcacaggctgcaaaactgcactgtctaactttgaggcagcactggactacaggactgtacctgacccagcagtaatggtatccttccctattgtcggtgatgcggacaatgcggctcttg

SEQ ID NO: 63770 - DNA, 381 bp, Setaria italica
  Peptide Sequence Number=SeqID_129744
tggtttgggttggtaaaattctttaaacgtattacgttttaagtaaggtcttgtcgtaaagttaagttaacttgggtcctattcctagttacaaatttaagcccgtcatcgaatcgacagacccataaaaattgggctccgtgcgagcccaggtagcagtacaaatgggcctcactcggtccaccaagtggtgagtttccactttcgaatgactcgttatttcaccaaaagcattttaaaaaaaaccctcaacaagaaaacgaatgaccaaacgtaagcaaataccacacgataaaataatattccaatacgtattcctactaattaacctcctcgcgagggtgttaagcatgtggcatgtccttttttgagtggagggtg

SEQ ID NO: 63771 - DNA, 367 bp, Setaria italica
  Peptide Sequence Number=SeqID_129745
aaatttggggaaggagatgacgagtatatccagaagttttttgggaacatgcagaacaagaatccttatttcttctacttagtagatttggattatcaagggcgtttgaggaacttgttctggagtgacgctaggtcaagggcagcaaatgattacttcggtcatgatgttgtttactttgacacctcgtacttgacagaaaaatacgatttgccacttgttttcttctctgggatgaataatcatggtcagccttgttctgtttggtactggtttactttcagatctaaatgctgacagttatgcttggttatttagggcatttttagcatgcatgaagggtcgctgtccaatggcaatcattact

SEQ ID NO: 63772 - DNA, 428 bp, Setaria italica
  Peptide Sequence Number=SeqID_129746
aatatgtatcagattttcgtagccaattccttttaagctgattccaaaagtgaaaacataattccctgctttcttagatagtcgtttacaattatataaatcatatgtcacaaaggaggattcttgtgcattagcatgaaggttctaaatagctagctatagttgtcgtatagctgatttctgaactttccgcgaagtcacaaacagatagcttttatggtgccaaacctgtgattttaaacctcagttagcatcactaccagtatccctagctcagctatccatttgccataataggtttccccgtgtaaatttcaggtacaatgacttctctgactcctgtaatgactgcctgaaatcctgaactaacctgaggatatggatgccgtggcacactactaaaggcaagaacttggcggagggttcca

SEQ ID NO: 63773 - DNA, 357 bp, Setaria italica
  Peptide Sequence Number=SeqID_129747
ggtccaagggccgccctctgcctcccatctttgaaggtcctcacatgggagtgcaaggaggcattgatttaatggaaggaataccaaatctctcatttggtaatcattttggaatggatattaatcaccaacatcaagtacccagccaccaaaggatgcagcagaacaatttcatgcaggtgcaggcagaaccccatgggtttgcgagtcagtgggtttaccacccaatgttgcaggtatttgtagtcaatcttggttcttgactttgaagtttatgtatgggtatctgtgtcaaaatgactcgtatgaccatgttgcaggataatccagtgctaagaactcctacgcgaagaacag

SEQ ID NO: 63774 - DNA, 254 bp, Setaria italica
  Peptide Sequence Number=SeqID_129748
ccgccaccgagcttcgccatacacgggacccgtcgatccacctcaaataggaagaccacaggaggaaaaccaattcctgatcagagattgcgtccgctgctgcggttggggatgtcgccacttccccgtcgactgccacgctcggggtcgttgccccgtccccaaccacctccggccttgaggcggtcgcccctttcccgcctggatccaaggccgttggctcgggacctgcggccgccggctcaaggaactca

SEQ ID NO: 63775 - DNA, 325 bp, Setaria italica
  misc_feature (170)..(170): n is a, c, g, or t
  misc_feature (244)..(244): n is a, c, g, or t
  Peptide Sequence Number=SeqID_129749
ccaaactccaccgcacatggacccatcacctcctcttcaatctccgccactgagctacgctccgcatgaatccgccggtctcctgttcgatctccgccaccgagcttcgccatacacgggacccgtcgatccacctcaaatggaagaccacaggaggaaaaccaattccngatctagagaaaaaaaaagttgggaaatggaaaaaagggtatgtgagagggaagatggagaaggataagggaancaaggagcagcagccgcgtgctcaccagagattgcgtccgctgctgcggttggggatgtcgccacttccccgtgactgcca

SEQ ID NO: 63776 - DNA, 407 bp, Setaria italica
  Peptide Sequence Number=SeqID_129750
aaataagaaactaagaaaccaaggtagggtacaaatttacaacaacgacaaataactaatcttctgtaggtgtttcttcaatggcgacagtgcctgcggtttcttctgccttttcaagctgactgttctcactgtccacatgctgtgctggttggacataagaatctggttcacttgtcagttcactcctttctccagttgcatcatctggaatgtcaatattactttgctggatgacttcttcagcctccattgcttgattgtcttttacttctggtactttgtcctcgtgcacctgttgatcatcaacattgggctcactgtctactgctggctcctcaaaggtagaaactccgtgttgttgatgattttcagttccctcggattcaatgtctctggtttcttgc

SEQ ID NO: 63777 - DNA, 354 bp, Setaria italica
  misc_feature (234)..(234): n is a, c, g, or t
  Peptide Sequence Number=SeqID_129751
tttagttaaactaatagaactagaatagaaagaatagactagttacaaagtcctggtgatgatagactagagacttcaaataccgatcatgttctcacttccctgagttggcaaaacagtttcgcccaaatcacatgcaccatcctttagttccacgaacgtctgtatttcatctttgacatcatcagtttcattccctgtaatttcttcattcaactctgcagaatgcccttntggtgttgtttcattatctgttggagatgggtcctctgaagtagcattctctgtttgctctccatcattgacggcttcgatgccgttaatttcttttgttgcctcaattcgttctcttgc

SEQ ID NO: 63778 - DNA, 217 bp, Setaria italica
  Peptide Sequence Number=SeqID_129752
ctgaaagttccttggaaggagtaacatggccgtgttcggtgatttcttgagcttcagtggcttcatgagcattggttgctggctcatcagcatgttcaaatttaggcacctcttcctgcaccacatctgcatccactgcatcagcttgctggctctgtggatcttccatttggccacctcttctgtaggtcctgcaatagatgtttcttctggaaag

SEQ ID NO: 63779 - DNA, 244 bp, Setaria italica
  Peptide Sequence Number=SeqID_129753
tacgtgcagaggggagcacggtggcgacgcccgacccgacctgctgctcggggctcaaggacgtggtgcgcaacgaggtggcctcgcctctgccaggtgttccagggcggccagaacctcggcatctccctcaacatgaccaaggccctgcagctgcccgccgcgtgcaaggtcaagacgccgcccgtcagcaagtgccacggtacgtcctggtgctgtttcttgcctctgcaatcgtggagct

SEQ ID NO: 63780 - DNA, 182 bp, Setaria italica
  Peptide Sequence Number=SeqID_129754
ctcttccatcatcactctcacccctttccatcctcattgatcaggttgttgacgttctggaaggcattgtcaaggtgggaaccccaatttgacaatgccttccagaacttcaacatcacaaacaattggatcctttttatggtagacacggtttggcagaatcttaagggtgcatggggtga

SEQ ID NO: 63781 - DNA, 430 bp, Setaria italica
  Peptide Sequence Number=SeqID_129755
ggttggtatatgttttgttaaccacttgggattgcaatcggcagctacaaggacagcctgcaatgttgcattatgagatcaggcatatttgtcagtttcagaattcctcatcaaattgtggtcatagatgtattcaacacttgaaattgcccttctttgctcttgactgaacatgatcaccacatatccctaattgactcatttaattgttgcccacagagctgaaacagaataagctaatgatgtagaagtaaaacaatacaaatgaatatgtttgcactttgcagaagatggtatatatttggtgcaataatgtattattaggcataacatcacagtatgcaacaaaaatatgttcaagtgaccaaagttcaggattttttcctaggagcagtaacacactgatgtcttcgtcttcactaaaacgcat

SEQ ID NO: 63782 - DNA, 258 bp, Setaria italica
  Peptide Sequence Number=SeqID_129756
cgtaagcctttgcaacctctacactcctgacaagtttcgacaataggtcgtcaagagcgtctcctacaatgtaatctggagttagtacttcttcagcatctctcaacgacttggttggcttcagagacttcctcttcttgctcatcggcaccaaacagagactgccaatagcccaatacccaggagagcggaacgctactgagtagaagccgccgggcgccggattgaggtcagccgtcggtaggtcgccgggtgaag

SEQ ID NO: 63783 - DNA, 444 bp, Setaria italica
  Peptide Sequence Number=SeqID_129757
caagccaaatccaattgcagccatctcagcaacaacctcaattgcagaaatcatcttggaaccccaggaatccatggtctctttccactcaggcaatccatcagggataacaggttcagagttcagctccttaaagcaagtattttgacatcgcacggaaaaggtcacagaggaattgcaaccttaaagcgggtatttgcgggccgaggaccaactctccacatgtaccgccatttcgggtctgggccttttaggggtggttggctgaaactcctcgggcatactcctgatcttctcctgcatgtccttgtcgaccaagctgcgaggaacctccaccccttctggtgtcacgccaacctggtagtggaggtggggccgttcctggaggcgcttggcctcggcggatcgggagaagtagcgctcgacgacgtcgaggaagcggtc

SEQ ID NO: 63784 - DNA, 407 bp, Setaria italica
  Peptide Sequence Number=SeqID_129758
cagttgatagcagccgcagcgatccctcattctctccccagcgccgccgacatggtgcagcagcagccgcagccagccaccagctcaggcatcctcgacgacgactacaagcacttgacggacgcggtgtgccgcgtctacagccacgcgcccagggagttcaccatcatggacagggtaaggaaccatgagaaagaactccgtcgttgttcagtgatctatgcattcggttggataggaatgcagggccaggagagtgatggctgatgcgagttcttggaactgcagggtaggaggaactccgttcgcttgcacaggagtgggttcgaggagctgtacgtgttcagcccaggatcccagtaccagtggtacggcaagtacgcctacgtggtcgtggggcctgccat

SEQ ID NO: 63785 - DNA, 366 bp, Setaria italica
  Peptide Sequence Number=SeqID_129759
taggtcctatttgtacttcttgtcttacttcctagtagtttccgttggtctactaaagtattgttcggtactagttattgtctaaagtaaagttgtcaaaaatgtgataagcaagctttggaggaggattgacaaagagggtcatcaaatcatacctaatatatcttcttggtggcggaggaatgaaaattcctcattcagaggtccagctggtagcacccttgacctacagaaagttgaacagcgagttgatggatttgagtatagcgctgtaactgagttcatagtggacatgcagcagatgttgaagagtgtggttcagcatttcagctataggcatgaggtccggatagaagctgagaccct

SEQ ID NO: 63786 - DNA, 278 bp, Setaria italica
  Peptide Sequence Number=SeqID_129760
gggaggaagacgacgactagcctctgggggtcgtggactggacagagagggggagggaggaggcggcgatgcgtaggtgtgcagagcagaggggaaggggagaaaagacgaggggggacgtggggaggcgcggcggcaagtgggaggggcgaggggcgggtggtgggcaggtgggggatatgatgaaacatcatcaaggttaccaaaagtaggctccgtgcaagctccactgaagtagatgctgttgtggcaagtctatccaaaaaaccattgaggaa

SEQ ID NO: 63787 - DNA, 258 bp, Setaria italica
  Peptide Sequence Number=SeqID_129761
ggtgaggatgaacaggtcttgcaaccaaaaataaaaacgcaaacgtagtattcgtattcgtccgaggcctaatgcagaaaagcaggaagataaatctggtggagaaggggtcttccctcaacgtggtactcatcttgcatttcaaggagatggtggttataattcacaatttaagtctgacctatatgcctgtgcttttgctgatccagccgccaggcagcaagacgcggttcatcctatagtcaaacagaagcgcaa

SEQ ID NO: 63788 - DNA, 191 bp, Setaria italica
  Peptide Sequence Number=SeqID_129762
catcgctgttgcgagcaggaactttaagggactaccaactggtgggatgtctacttttatatgaagcaatattcatttcattgtaattatgtcctgtcacaggagatcttagaattcattttgttggtttattcaggtgggcctacagtggatgctttctttgtacaataataagttgaatggtattttgg

SEQ ID NO: 63789 - DNA, 127 bp, Setaria italica
  Peptide Sequence Number=SeqID_129763
tccatttcagagggatggtccgacacacagtgcagaagaagatgattggcttgagacggagaagaaagtaataatcattcacagattacactgtgtgtcggaccatccctctgaatggcttagagaa

SEQ ID NO: 63790 - DNA, 396 bp, Setaria italica
  Peptide Sequence Number=SeqID_129764
ctccattcagcgccttcagcaaaatgggtcagccgagagccaacaaccatcacatgatctgtggataatagacagtggcatataggggtggcttagatttgtaagtcttgcactactggtaatttccctgatggacagtttgatgcaagcgctgaggaagctgaagcgaagatcggtgtcttattggtaaacatgtgaagacgaagatcggtgtcctattggtaaacatgtgaagacgttccttttctgaaatgtagtaaaatcagttcatcttttttactcggcttactgggacgggataggatgctgagatctggaaacattgtaactggcggaaaacacaaagaaggcaagtttactttgtgaggatgtaaatgtgtcacaacttatacccgg

SEQ ID NO: 63791 - DNA, 257 bp, Setaria italica
  Peptide Sequence Number=SeqID_129765
ggaaaccggcaagctgaagataaggcttttgcagtcgggtggcaaacaaaggtgcacacctatggcgcacacattttttcttctacagacagaaaaaaatgactctatccccctgaagattgattggggaacaaggagaaatctgacacctaaattgtgagaataaatagcatggggtatttgcaatgaataccccggaacgaaataaaaattacaagaaaataagacaaaacaagactagttaatacaaaaaaaaa

SEQ ID NO: 63792 - DNA, 238 bp, Setaria italica
  Peptide Sequence Number=SeqID_129766
aagaccatgttggggatgtgcccctctccaagaagattgccgctggcttcaccactggcgccatcgctattaccatcgccaaccccactgaccttgtcaaggtcaggctccaggccgagggcaagcttgcgcctggcatgccacgccgctacgctggcgccatggacgcttacgcaaagattgctaggcaggtctgctcttctcccgactagcacttcgcttgctatgtttgtcccca

SEQ ID NO: 63793 - DNA, 189 bp, Setaria italica
  Peptide Sequence Number=SeqID_129767
cgggcgccgtggtttccctggtcgacgaaatcggctccgccgccgccgttgccgacggccaccacctcaaggtctccgtcgacatgtccgtctccttcgtcgacctcgccgccgccgcgcggctcgtcggtccagcgcgtccacccgcgcgccatcctcgtcgctcacccgcagcaaatcagaggctcc

SEQ ID NO: 63794 - DNA, 441 bp, Setaria italica
  Peptide Sequence Number=SeqID_129768
attggtatcctcgttattgttcttatctgagtgtgcgaatcctgctgagctgtgaaggaatgcatcaagctgttcctgatcaggctgccgatgtcccggcagttcatcgtgcccaggaacatgaagctgctggccgtgcctctgtcccagattcataacaacgctcaggtttatggtccggtcatatctgggattccaaatctactgtccaagttcgcgttgaacgttatcagtgactgagctgcgtgtgcagactgcagacccgagttctgaattttgagaagcggttttcatgttaggctagccatacaacaatgtgatgttcagtcttcagaccacataggaatatacactagcagctcgtcttgtgtgttttgtaacgttttcgttattggtgtgcggataatgtattgatttgtattgtataatgtctcttgccgc

SEQ ID NO: 63795 - DNA, 191 bp, Setaria italica
  Peptide Sequence Number=SeqID_129769
gtttccatacatgccaccaaacttccgcatgccaaaggaatgcatcaagctgttcctgatcaggctgccgatgtcccggcagttcatcgtgcccaggaacaatgaagctgctggccgtgcctctgtacccaagaattcaataaacaaacgactacaaggtttaataggtaccggtacaataatactaggga

SEQ ID NO: 63796 - DNA, 183 bp, Setaria italica
  Peptide Sequence Number=SeqID_129770
accctaaggaacatgtataatgaaggcgaagtggtacctgtgggccaagccttcacggtttccaccatccccgatagttatgtgaacagcaccacaagggtcaagtctgccattgtatactcgctcctgcattaagagtgaaatagcatcatatggaattttcattcagatcaactaaatgat

SEQ ID NO: 63797 - DNA, 503 bp, Setaria italica
  Peptide Sequence Number=SeqID_129771
tgtatgccggtagtctattggtattgtttctaattgtttgttaactattctagtttggttattctattctattggttctaacaaagccttaatggcaacacatggttttagtttcgctacaacattgactggacttcattttgcaaccacaacattgatgacattagtgatgaaatggctgggatatattcaaccatcctatttgccattaccagaactagtaaaatttgtcttttttgcaaacctatccattgttgggatgaatgttagtttgatgtggaactctgtcggattctatcagattgcgaagttgtgtatcattccagtcttatgctttctggaaatcctattggataaagtccgttactcaagagatacgaaactaagtatagtacttgtcctggttggcgttgctgtatgtactgtcactgatgttagtgtgaactctcaagggttattagctgcagcaatagctgtttggagcacagcactacaacagcatt

SEQ ID NO: 63798 - DNA, 248 bp, Setaria italica
  Peptide Sequence Number=SeqID_129772
ccccaaatagtcacaggcacgttgccagactctcctgtctgaggttcgggtacgagcaaccttagccaatgatacgcgtgctctcggaagcaactcactgtggcatgttgctagttttgcaattgccgtcaccacgaagcagaggagcctagcttgggatgattttctagaagatgcacccatcgaatcaaatccccggttcctggctagttgccaggttttcatacagtaacaattccaaattttca

SEQ ID NO: 63799 - DNA, 251 bp, Setaria italica
  Peptide Sequence Number=SeqID_129773
tgacctgaaaatctgagacacagaaatccttgtaatttatgtacttgaggcacagagttctcgaaacattgatagcttatattattatgattctcttcatgcagtcgagaacttagttgttattgtatatgcagttgcattgattggagggtcccttttctttctgcaacagtttgctggaataaatggtgttcttttacttttcatcattaacattccgtgatgttggtattacaagtggtgctttagac

SEQ ID NO: 63800 - DNA, 376 bp, Setaria italica
  Peptide Sequence Number=SeqID_129774
agactacttagggaagaatttcttgttggcattggcattggtgtaaatactgttcttgttccgctatatatctctgaggttgctccaacaaaatataggggtttttttggggactctctgtcaaattggaacgtgtttaggaattaattagctgcactttccttggggataccttctgaaagtgatccacattggtgaggcatttctcgttggcatttctgcatcttaatgatgtaagtcatcatttgataaatttctgttgtgcaatggcatgatcatggaaaaagtacaaccacatcaaagaagacacatcacctgttgttcatgtaacttccattgtatagaagaataaactcaagacatgtacaatgaaatc

SEQ ID NO: 63801 - DNA, 282 bp, Setaria italica
  Peptide Sequence Number=SeqID_129775
tcagaccttaacatttcagaccttaacatttcagacacaggtctcattggtgtgatcccggattggttttggactacattttctaatgccacatctttggacctctcttacaaccaactttctggtaagttacctcttgatttggagttcatgtcttcaacggtgcttcttctccagtcaaataatttaactggttcagtaccaaggttaccaagaagcatttatttattaggacatctcaaaaaattcttaaatggacaacttccatcaaaattttggagg

SEQ ID NO: 63802 - DNA, 489 bp, Setaria italica
  misc_feature (1)..(21): n is a, c, g, or t
  misc_feature (86)..(86): n is a, c, g, or t
  Peptide Sequence Number=SeqID_129776
nnnnnnnnnnnnnnnnnnnnnactttagttcacttatttgtcatttttattgtcataacaggacaagtgctgaatgcacattacgntcccagcagcagcatgtaactgagatccatgtcctctgcagacacatgggaattgggaacggataaaagatcgacaacatcctgaatcacttgtgctcttgcttcatgtctccttctgaacgttcttgaggttcgtggtgagattgagcgacgaccctagtttgacaacactatagatgcgcttgaactcgccgaacgtgagggtgcggtagcacggcgggttgtcctcgctgaggaactcctccgcggggccgataaggcagtctgtggtgggcatgatgaacgtcgccacggtcgtcctcgccacccccaagttggtcaccacacggtgttctaataactacttacaaaaagacccaattaggtacaacaaacctacaaagttaggacaagaccgaaagta

SEQ ID NO: 63803 - DNA, 350 bp, Setaria italica
  misc_feature (307)..(307): n is a, c, g, or t
  misc_feature (349)..(349): n is a, c, g, or t
  Peptide Sequence Number=SeqID_129777
taatttccgttccgttccggttcttagttctttggttaagttaacttccttggtctactacggcctccatgtcctgcatcgcctgctcagagacgccatggttgaccacctggaagaagccgatctccttgccggcgtcgaggatagcacggcggacctcgtcgcggctgcgggacaggtcgatgatgggcagggagacgacggcggcggtcgccggtgggcgcttgtcggctgggaagacgaagcagtccgggaggttggtgtggatcggggctgagtggagcatcttgtccatggttgaaccggngaagcccgccggagagcagaggtgcagccttcttcagcaagnt

SEQ ID NO: 63804 - DNA, 407 bp, Setaria italica
  Peptide Sequence Number=SeqID_129778
tattgttcttcctttcttgtaacgtttctttgtaggtttcgttggttgtagtatttgtagtcgtacgtacccttagttttgtacaacactatagatgcgcttgaactcgccgaacgtgagggtgcggtagcacggcgggttgtcctcgctgaggaactcctccgcgggccgataaggcagtctgtggtgggcatgatgaacgtcgccacggtcgtcctcgccaccccaagttggtcaccacacggtgttctatactcttcaaaagcccattggtcacaacctcaagttggcagccgaagttgacgacgaaggcgttgggcacgggctggaccttgatccagtcgccatagtaggcgacctcgaggccagggaaccatgcttgggaggagcaaggtgaggaggttcct

SEQ ID NO: 63805 - DNA, 571 bp, Setaria italica
  Peptide Sequence Number=SeqID_129779
tggggaaggatcggtttctcgtgtatatgcgaggcgacggaggtgtttttcgcttccacgtattttttacaggaaggatgaggaagccgttagagtgagtttttttcctttaaataagattttggtgagttttttcccctcaaatttttgggtaattttaaaggagtgtcttggagttgctcttgcccccttttgcccgtccccacgtccgcagaaataacctcctcggacgcacctctcctgacggctgccgcgccgccccccacgagccgcgccaatccgcgccctgctcggctgagccggtgatctcccgctgccagtggcggagcttcgtatccccttcgcgcggatcccctgcccgccgccatgacggaggtactcccccttccctgcttcccacgatgttcgaggccgcgtcaaattccccgtgatctccgatccgattcgagcgaaatcgcggcgttgttggggtcattaggcgatctgcgccgccgccacagggaggcaaacttttgcgggctgggtggtactagcttggacctcgcgtggttgcttcgtgtccctgggttct

SEQ ID NO: 63806 - DNA, 207 bp, Setaria italica
  Peptide Sequence Number=SeqID_129780
gtttagggaaatgggttactcaagaagaggcctacaaatctgttgcaaacttccaaaacagacgttggtcaatcctcaacttcacgaacaaaagcgtcctgggactttactatgattcaaactccggcttctattattctgatggtttagggaaatgggttactcaagaagaggcctacaaatctgttttggaagtttgcacagatt

SEQ ID NO: 63807 - DNA, 124 bp, Setaria italica
  Peptide Sequence Number=SeqID_129781
gtttgcattttgtgccaaccatgtgttcctgaccgtttgcagatgtaaaagaatatgaacgcatattatttttcgcggatgcatatgctcgtaacgagacatggcagtgaccgttttcgggaaa

SEQ ID NO: 63808 - DNA, 322 bp, Setaria italica
  misc_feature (249)..(249): n is a, c, g, or t
  Peptide Sequence Number=SeqID_129782
actacgttagaccgttacaaatcttagaaacaaagttcttcccatctgtctgatcctgatccccgagcggtttccaggaacccttccttgttcataaggtggaacataattctgctggcctggcctgtggaagctttctgtgtcgctgatgttcgtcaattttgtgtattttcggatggaatggagtaattggacagtagagatgggactagaattgaagtatatcgtgttctttttatttggacctanacgtatcaatgtctgataaccttaataccgatgtacaatgccagcttgacaaaagaaactaccagtaccaggt

SEQ ID NO: 63809 - DNA, 304 bp, Setaria italica
  Peptide Sequence Number=SeqID_129783
gtggctctatgcttacattctcaccattggtggtgcttacaagaattctccaccgaagacacaggtgcattgccgtgttgatcgttcaggcttgttggaggagctccttggataagtgttccctatccctttcagtgggggtgctccaacatttgatgctggagaagcttttgcaatgatgatgacttcattcatcgttcttgtagagtcaactggcgctttcattggtgcttcaagaataatagacaaagtagacaaactaatagaattacctaccaattacaaattaattaagttacgggga

SEQ ID NO: 63810 - DNA, 471 bp, Setaria italica
  Peptide Sequence Number=SeqID_129784
ccttttatgttcattttgttcttacattattgaaatcctggcaaagggaatcaccgttaacaattcttgtgcggatcaaacaggcctactatttgccggagaccgagtacgttcactgggcacggtctcatccagaatatagcaaaagtcaggtcgtcgggttggttaaccttgtggccaccatgaaaggatggaaacggaagacgagactagaaacagttgagaagattgaggcgtagacccggcggaaggttctgctgtgattgattttgttttgtttgcttcaactgctgcacatagagctgtatcttattctctctttctttttcttccctcctttttataatcatttttgtcgtattctttcacctgttggcctattttgattgctaaccccatcaccatcaggccatcacccgccatccatggtgtatatttaagcgatgacaccctgtatcatatcaaagcatg

SEQ ID NO: 63811 - DNA, 232 bp, Setaria italica
  Peptide Sequence Number=SeqID_129785
agagagcatagcagaagttggagctccttagaaattcctccatggtctaatcttgttattgggtgagttcaaacactacaaaacaagattagaccatggaggaatttctaaggagctccaacatctgttgatggagtacggtatagagagcatagcagaagtcttggtggaaggtctctctagagtgaaacggtgcattaattagtacctgcaggtcaagcgacatcaatgc

SEQ ID NO: 63812 - DNA, 154 bp, Setaria italica
  Peptide Sequence Number=SeqID_129786
caggtactaattaatggttgcagcacattgtatcagcaaatgtaaggccttcatcagtgcaccgtttcactctagagagaccttccaccaagacaggagtcaaagcggcaggcatttaccagatcatcaatcatctcggcttaaagctgcttta

SEQ ID NO: 63813 - DNA, 146 bp, Setaria italica
  Peptide Sequence Number=SeqID_129787
aaccttgtggccaccatgaaaggatggaaacggaagacgagactagaaacagttgagaagattgaggcgcagaaccttccgccgggtctacgcctcaatcttctcaactgtttctagtctcgtcttccagtcgctagactgagtcg

SEQ ID NO: 63814 - DNA, 348 bp, Setaria italica
  Peptide Sequence Number=SeqID_129788
gaggagaagcaccatgagactgcattcaagaaagaagtcataccgaagctttggttcgaatggagtgaacactgtacaacagaagactttaagctcagtcaagttgacattgatgactctggggatgaattattggatactaaagcagtgcgccaggatatcaaggcactgtatagaaggtaacaagctctgtggccactggacaccatgtaaatattggaatgctgatcttcggagctgttccttgatctgaacagggtgttacagtggctccattgtggtgacaagaacctagaagtttagactactaaagactaaggaacttagaataaacaatagaaagtacca

SEQ ID NO: 63815 - DNA, 157 bp, Setaria italica
  Peptide Sequence Number=SeqID_129789
ttaaccgttaaagtacttttaggtttacgtaattggtagttgtaactacttgtacaacagaagactttaagctcagtcaagttgacattgatgactctggggatgaattattggatactaaagcagtgcgccaggatatcaaggcactgtagtagaa

SEQ ID NO: 63816 - DNA, 249 bp, Setaria italica
  Peptide Sequence Number=SeqID_129790
tataataaaggatgctatgctggcaattgagaagttagcagatataaaagctgtagctcagggtggctacccacaggctgagcggtgccgaatttctgttggacacccggactctatgacaagtaacccagatgtagttgctgctttgagcatctcagggaatttccgattggaaccctgttctcatggtgactttcttggtgccattctcggaacaggaataacaagggagaaggttggagatattct

SEQ ID NO: 63817 - DNA, 447 bp, Setaria italica
  Peptide Sequence Number=SeqID_129791
gaccaggaaggaattattcttcctggtcaagcagttcgggaacagcaatgccaaggttcagttcagcaaggagcccaacaacctctacaatgtccactcctacaagtactctggccttgccaacaagaagactgtgacagtgcaaccggccagtggcaaggagatggcggtggtcctctccacaaccaagacaaagaagcagaacaagcctgccagcctctaccacaagtctgtcatgcgcaaggaattccgcaagatggccaaggctgtcaagaaccaggtcgctgacaactactacaggcctgatcttaccaagccagctcttgcaaggctgagcgcagtgtaccgcagcctccaggttgccaaatctagaaacctggaaacataaacaccacccatcataacaagttcttgtgacttagttcacctgcctgttcttcttcttga

SEQ ID NO: 63818 - DNA, 255 bp, Setaria italica
  Peptide Sequence Number=SeqID_129792
cagcaaggagcccaacaacctctacaatgtccactcctacaagtactctggccttgccaacaagaagactgtgacagtgcaaccggccagtggcaaggagatggcggtggtcctctccacaaccaagacaaagaagcagaacaagcctgccagcctctaccacaagtctgtcatgcgcaaggaattccgcaagatggaccaaaggactagtacaaagaaaccaaggtacgactagaacaaactaactaacaagga

SEQ ID NO: 63819 - DNA, 414 bp, Setaria italica
  Peptide Sequence Number=SeqID_129793
tgtggatggtgaatggcagcaggttaccacagggtcacattgttgttaccgtcggacacagcaagtatattccctgtcaacgaccatgacagcctccacacaggggttctgaaatcatacaggaccctgccttcccactgctcgccttctttcgctgctgtccagataaccacggtaccatcctgagaggcgctggccatggtggactttgggaggccaaggtttggcgcccacgcgacgtccctcacccagtccttgtgcatctgtagtgcggggaaacaatccatcctccaacttccattggtgagcttccacaccttgactgtgttgtcgcagccaccagacgcgagtttctgaacatattcatactggccagaaggtcctgcactgattagagcaccaggtgccatcgaa

SEQ ID NO: 63820 - DNA, 297 bp, Setaria italica
  Peptide Sequence Number=SeqID_129794
tctattctattagtcttgtctaggtattgtctaagtctattggtaacctaaactttaggatgagcccatgcgacttgccaaactgggccctggtgtccactcaaagttgcaagctgctgatgcgaggcgccacttacgccaatgatctttatcgtgttgtcagaggaggctgtagcaagacgcttcccatagtaatccatggcgatatcatgcaccacatcttgatgcccggtctcaatcttatgaggcggcattgttcctcagcttgaagacacgacaaccagctctttggtgttt

SEQ ID NO: 63821 - DNA, 411 bp, Setaria italica
  Peptide Sequence Number=SeqID_129795
agccatccattgaccaagtacaggactgtatagagaagaggccaccaaggatatctaatggcatctctgaactgatcgagaagctaaaagctagaaatactgatgtgtatcttgtttctgggggcttccaacagatgattaagtctgttgcattggagcttggtgtcccccatgagaacatttttgctaatcagttactgtttggaacctctggagagtatgtcgggtttgaccccaccaagcctacttcacgaagtgggggtaaagctgtggcagttcaacacataagacaggtctgaatgcaactcttaccactgcacctttttctgcttggcattggcaatttggtgcattgttgatgtactgttgtgtgtgcagaaatgcaggtacaaatcacttgtatgattggag

SEQ ID NO: 63822 - DNA, 259 bp, Setaria italica
  Peptide Sequence Number=SeqID_129796
gagaactgttggctctgaaaaagaaggcactaactttgaggagggaagggaaggtggatgagtctgaggaaggctaagattttggaaaaacaactagaggaacaggagattctgggtgaagcagaagactctgatgatgatttggctgcaattattcggaacatggatgatgataagcatgatgacatattgatggacgatacaaaatttaaagcaggttttttttttggcgataagaataagatattcaccaaaacaa

SEQ ID NO: 63823 - DNA, 250 bp, Setaria italica
  Peptide Sequence Number=SeqID_129797
caaccgggaagcaagaaaggatttgttcacaggaaggcaaggattcagggagatggaaaatcgatgtacctcctttaggttctccatggatgatctctcgctttctctccctcctgttcttggcgtcttccttggcccctgtcgtccctgatgatgaagctgtggagcaaattcagcagtcacgcagcaacagtgttggacttgtcttcttcgcgaggcacgggcaccgcacaggcgactgttttgagag

SEQ ID NO: 63824 - DNA, 316 bp, Setaria italica
  Peptide Sequence Number=SeqID_129798
gtcccttgagggcaaagaatttctgcaatgctgtttcaagaggaatccagcagagaggccaactgcaagcgagctgttggatcatccattcatccgcaattcaagtcactacaacaaacatggctccatacattcatttgcagggattaaagtcaatgtaggtaccttttttttcttgcatgaccaatgaggggtaaggataaacctagagaatggcatacatataatgccactgttgtattacagaataattgctcacagtttaagagacaacaaaccaacctcgaagagtgactcgagcatgaaaggaaaaaat

SEQ ID NO: 63825 - DNA, 336 bp, Setaria italica
  misc_feature (1)..(89): n is a, c, g, or t
  Peptide Sequence Number=SeqID_129799
nnnnnnnnnnnnnnnnnnnnnnnnnnnnnnnnnnnnnnnnnnnnnnnnnnnnnnnnnnnnnnnnnnnnnnnnnnnnnnnnnnnnnnnnnaatttgttaagcttggtgttggtgagaagaaacaaagacagtacaagcagcagcagcagcagcagcaatacatgcatttctggattctgatcaactagagagaaagagtgaaccttaacaacagttgtgaaaagagaaacaacaggaagagattcatggcgtcgtcgtctgattgctgttggttttacatgtcgcgtccaagaaggcaagaaagtgtgtcaagcaggtcgagcggcggttgattggc

SEQ ID NO: 63826 - DNA, 253 bp, Setaria italica
  Peptide Sequence Number=SeqID_129800
ctacatggacactatcccgcctagtgcattgcaccaaaacgtcttttcccacccactttaccgttcaatttccccaattctatgatagatgctcccaattcctcttcctcacctctagcacatcgatggctagcgacacaccggcagctgcaagccaccgcatcggatcaggctcgtacattagttccactgcggccctgaaagcatccaaattctccaccccatccacctctattctcttctcgccaccccc

SEQ ID NO: 63827 - DNA, 422 bp, Setaria italica
  misc_feature (394)..(394): n is a, c, g, or t
  Peptide Sequence Number=SeqID_129801
taaataaaaagaatttaggtaacaaggactactaccttagtttaagaccctagaggtagtccttttgatagactgaacttttgcttagaagaccatttaccagagattgcatgtcttttcttgctccgctgttggtgctgctagtgacagattggataagctgcaccgtgaggtcatctgagctttttccagctgtgcggacgcaatcttgccagtatatcctgggatattgcttcatcaaacgtgaatcttgcaaagagattcttcagcttgtcttcctcattctcactccagggaacagcttctatgtatgtcaagcatgattttattcctctgtcgaacatgattgaggaaccataccctctagcacatcgatggctagcgacacaccggnagctgcaagccaccgcatcggatcaggc

SEQ ID NO: 63828 - DNA, 227 bp, Setaria italica
  Peptide Sequence Number=SeqID_129802
ctgcaggacatcggcatgatcagcgccatgccggtgacgatcatgcctggcacgacctcactccctccggccggcgccggcggagaggaagcccaggtccatgtcgatggacgccgacgccgacgccgaggccgccacggccaggagcaggatgagcgccagcgcgagcttcgccatcgcctgagcttcgcgcaggtgctcgacggaatgcaagaaacggcggcggc

SEQ ID NO: 63829 - DNA, 320 bp, Setaria italica
  misc_feature (216)..(216): n is a, c, g, or t
  Peptide Sequence Number=SeqID_129803
tggcgtgagatcatggaggtaaaaggaacaaaggaatgtggtatcagcagcggttagcatctgataccacattcctttgttccttttacctccatggcgtgagatcatgtgatctagtgagagttttacccacgtgtgcgtgattttgcgaccgccattgttcgaagaacaatgcaatttgctgactggctgttaaatcttccttcacctgtttgngtgactgtaagctcgaggcttccttgttcatcctcgttagcctcacagctcaatgaaacaaacacattttacttgcatctgtttgatctatcatcatgttaatt

SEQ ID NO: 63830 - DNA, 384 bp, Setaria italica
  Peptide Sequence Number=SeqID_129804
aaacaaaccaaattaagttaacttaagtaagaccaacaaattaggaatttagtacgaccgcgcaactttgcatgcctcttcattcgacacaacgtcccacagcccatcacttgcaagaacgagacagtcgtcgtctttcgccctaggaatgaccgtaacttctggttttggaatgacgaacggtttcaaatatcgatcccctattgatcgcgacatagcaagtataccggacacccggtaaccgttccattggatgaccttgcctcccagggcctcgatcctccctcgctcatcctttctgtcaggcttgtgatcaatggacaacgccaccggctccttccctcggcagagcacaacacgtgaatctccacagtttgcgaccac

SEQ ID NO: 63831 - DNA, 242 bp, Setaria italica
  Peptide Sequence Number=SeqID_129805
ctgaaacagcaagtgtcagtcacaagagccctggatggatctcaagactcaacaaaagacctcaccttgtgatcaatggacaacgccaccggctccttccctcggcagagcacaacacgtgaatctccacagtttgcgaccacaagatgagatgagcacacgaccgcgacaaccgccgtggatcccacgttctccgcggcaactggcctggactccgggacaccaccgacgagcctgctcgc

SEQ ID NO: 63832 - DNA, 235 bp, Setaria italica
  Peptide Sequence Number=SeqID_129806
taatttccagctcacttgaataaggaacagttattctacctaaatcaagcacatgaatgagcattcatacctattgatcgcgacatagcaagtataccggacacccggtaaccgttccattggatgaccttgcctcccagggcctcgatcctccctcgctcatcctttctgtcaggctgaaacagcaagtgtcagtcacaagagccctggatggatctcaagactcaacaaaaga

SEQ ID NO: 63833 - DNA, 228 bp, Setaria italica
  Peptide Sequence Number=SeqID_129807
tttttaccaccaagtctcttgcttcattctgaactttcgatgagcatacctccatacagagtattaccaacctactcagggttaaacccaactccaaccattttaataatctagctcccaaggactaaaacctgatccagtctcataaactctcaagataaatacttcttcccaggtgcataatctgagacacgcaacaggagataggcaaggcacacaggggatagg

SEQ ID NO: 63834 - DNA, 446 bp, Setaria italica
  Peptide Sequence Number=SeqID_129808
ggacttcaggttctcagagatggagtctggtatgatgtgccaaccaaacctcacaccctgctcatcaacctaggagaccaaatggagataatgagtaatgggatcttcaagagcccagtgcatagggttgtgacgaatgcaaagaaggagaggttatcagttgttctgttttattctgtagatcctgaaagagaaatccagcccgtgggtagacttatagatgagaaccatccagcactttacaagaaggtgaaggtcaaagaatatgttgctgggctctatgaacatttctctcaaggaaaaatggttatcgagactgcgaagatatagatatgatatatctatgaagtaactttgatatatccagcactttggagactagagcaatggaggtctttgccaaacatgaatggaggtttagcaacagattatgctaaaggctttga

SEQ ID NO: 63835 - DNA, 396 bp, Setaria italica
  misc_feature (66)..(66): n is a, c, g, or t
  Peptide Sequence Number=SeqID_129809
ttccattgccttaatatcttgatcaacctcatcaacatcattgttgaggaatgtaataatctcatnaaggcaaagctttattctctccttatcattattcgataggccactgattggttctgtgaataatggaaaagttctattgcaaatgttgccatcttttgcctttattttgagtactaccaccttgaacttctttacaacctcctttacggaaagagtcatcttgccccctcaagagcttagagagaacatatttgtagtgctccatatgatcaacattggactcattctcctcgaaagacttcctcgacactttccttaaggtctaattacttactaagaataccttacaaatacaacttaagtagacgtaacttagtaagttacggaaga

SEQ ID NO: 63836 - DNA, 419 bp, Setaria italica
  Peptide Sequence Number=SeqID_129810
cgccgatggccacaagacggtggggcctgagcacggcagcggcggggagctgatccttgacggcaacctggagaccaatagcgacaacattcagattctcgcaggctgctctgatcctcttcagggggcacaggttctggacgccggcacaggcggggaagcggccatgggcaccaacacccagcaaggcggcatcctcaccggcaacaacgtcgtgcttcaccaagccacaccagctgctgcaagaacttttcagggaagaccaggggcccacggaccacaaccatgaatcaagcaaggacaggatcacaagccgccaccctcgacgcatcttcgacatgtccatgcccgttggggctgcactgcaggaattcttggctatgtttcagggacccctcccgcaagacattattgcggcg

SEQ ID NO: 63837 - DNA, 458 bp, Setaria italica
  Peptide Sequence Number=SeqID_129811
gcaacctggagaccaatagcgacaacattcaggtgcaggcagtacagaaagatcgggaaccacacgctctctctgccccaatgtgcttggccaatggccacgactctactgtccttcgggcgggtctgatcttctccatgatgctcagattctcgcaggctgatctgatcctcttcagggggcacaggttctggacgccggcacaggcggggaagcggccatgggcaccaacaccccagcaaggcggcatcctcaccggcaacaacgtcgtgcttcaccaagccacaccagctgctgcaagaacttttcagggaagaccagggggcccacgggaccacaaccatgaatcaagcaaggacaggatcacaagccgccaccctcgacgcatcttcgacatgtccatggtacgcgtagcgcacgcctgtccaatagatgaccaatgccggcgattcaaaggg

SEQ ID NO: 63838 - DNA, 434 bp, Setaria italica
  misc_feature (170)..(170): n is a, c, g, or t
  Peptide Sequence Number=SeqID_129812
tagttatagtgttacattcttttgatttgagctattgtgcactgtccaagcacgagcgccagtttgtgttatggtgtgttgttgctgttcgagtttttatgttttttacttctctgttaatacatagaccaacggcaatctgtcggcttcttcttcttctttaaaaaagngaagtagtaagctagctcatgctgctacaatattgttgtcacatcacgatatagtttatctgatacctagcatgtgcttacatttttttttcaggatacgctcaagcaagcaacagcagcatgactgccaaggattttaccaacgacacaggaagagttgattacatccgtgactacctgacctttttggcgttcagcaataaggtactctgctcaactctgcccagttcaagagtgttttagctacagcacatgtaattcttt

SEQ ID NO: 63839 - DNA, 461 bp, Setaria italica
  Peptide Sequence Number=SeqID_129813
tccctgtccgtggccgtgcgcgtcggccgccgtcgaccgcggccagttccccgacggcttcctgttcgggaccaccacctctgcgtaccagattgaaggcgcgaatttgagggtaacagaggcctcagcaattgggacgtattcgcccatacgccaggtaaaaattgaggatgggagcaatggtgataccgcagatgatcactatcatcgttacatggtaagctggtgcttctctttttccaagatgcaaatagtatcaaaggagaatcgattggatgattgctgtgcaatgaaaatctataccggtaatgttgtttagatggagcttcatatctattaaactacttgacattggaagtatgcttctactttatactccaggaagacattgaattgatgcattccatgggtgtcaactcataccgtttctccattgcgtggacaaggattctaccaagagg

SEQ ID NO: 63840 - DNA, 447 bp, Setaria italica
  misc_feature (408)..(447): n is a, c, g, or t
  Peptide Sequence Number=SeqID_129814
catcgttacatggaagacattgaatgatgcattccatgggtgtcaactcataccgtttctccattgcgtggacaaggattctaccaagaggtcgatttggacatgttaatccagatggggtagcattctataataatcttattgatgcacttctgcagaaaggcatacaaccgtttgtaacaatatctcattacgacattccacaagaactggaaacgcaatatggtggatggttgagcccagaaattcagaaggactttggctacctcgcagaagtatgcttcatgatgtttggtgaccgagtaaaattctggataacatttaatcagccaaatttgtggttgaagttcagttatatggatggatttgttaccctcccgggtcgtcttgttcttctttctttaaccnnnnnnnnnnnnnnnnnnnnnnnnnnnnnnnnnnnnnnnn

SEQ ID NO: 63841 - DNA, 483 bp, Setaria italica
  Peptide Sequence Number=SeqID_129815
ttattgatgcacttctgcagaaggtaggttaacaaaatttgtgcaatgggaacatgattttgaagacaggagcttttaacggcatccataaataggcatacaaccgtttgtaacaatatctcattacgacattccacaagaactggaaaacgcaatatggtggatggttgagcccagaaattcagaaggactttggctacctcgcagaagtatgcttcatgatgtttggtgaccgagtaaaattctggataacatttaatcagccaaattttgtggttgaagttcagttatatggatggattgtaccctcccgggcgctgctctcaaccatttggtaattgtgcctttgggaattcttcaatagagccatacatagcaggtcataacatgatattgtcacatgcaaatgcagtcagtatttacagaaaaaagtatcaggggaagcaaggtggtcatattgggatttctatgtgctcgagatgg

SEQ ID NO: 63842 - DNA, 376 bp, Setaria italica
  Peptide Sequence Number=SeqID_129816
ggcaagtatgccaaggcgtaacatttcacgaataacattgctccaagtctgaggttgaaattactgaaagcgccacattctgcgatcaaaaggtttaggattcttctgtaaaatagtggtgcgctggcgcttcacacccaggttttgcttgcagtttgagagtttatagtgttgcttggttagacggacaggtggtgccgctgctagcgcgcgatggcaccaaacttctcagctgtaacttttgtagaagatttatttgaagattggactttatgtagcgaagtacgcaaggtgtggactataggaagtagaactcagaggcatgctgattgctaacttgctgagcacacaccacaccacatgtaagtttatctcc

SEQ ID NO: 63843 - DNA, 230 bp, Setaria italica
  Peptide Sequence Number=SeqID_129817
ggagctaccaaattgctcatccagcttcgttcttctactcaatgcacttactgaagtgcttactttaattcagaggcgacatatcgagcaagtaaaagtggtacttcctgctgtccttaaagttatgagtgctactgtatctgaatgtgatgaggaacatggaaaggctgctgttgatctcttcaatgcagcacatggaattggcaatgccattcaagaaatgtgcaaaa

SEQ ID NO: 63844 - DNA, 351 bp, Setaria italica
  Peptide Sequence Number=SeqID_129818
tcttagcaattcacaaatgctaacagtatagccaaatttatcataaacataaactaagccaaaatgctcgacatgtaacagatccatcatggttggtaagcaagcatagggtaggcatatacaaatatccttgaacattaataagaatggaagaatgcaagtgcagggtaagcatacacatccttgaaaagctaatagcaaaggcagaatatatcaataacattattaccctgacatgcgcactggatagcaacaaaaacaacaacattcatggcaggacatttaggataggagcttatgaaataccgaccataagaaaggaataatgttgttcatacaggtgacacaagg

SEQ ID NO: 63845 - DNA, 236 bp, Setaria italica
  Peptide Sequence Number=SeqID_129819
aactaccgaactacaagtgtgaagtagtatatgcctaccctatgcttgaacattaataagaatggaagaatgcaagtgcagggtaagcatacacatccttgaaaagctaatagcaaaggcagaatatatcaataacattattaccctgacatgcgcactggatagcaacaaaaacaacaacattcatggcaggacatttaggataggagcttatgaaataccgaccataagaaagg

SEQ ID NO: 63846 - DNA, 297 bp, Setaria italica
  Peptide Sequence Number=SeqID_129820
tacgacgaagctcaggggcaaacaaagaagagatctttctgcctcaccttcgtaagcgcagaacgcaggcatgtctccgaatctcccacgaccaaagggaccccttcccctcccagtactcgaatcaagaccagaagcacgaacaagaacgcagccaccgccggatctgaggcgccggtgagggccggaagcatttacagcccgccggagcaaggaaaacggaaccctatcgccgccggcgacagggaaaaaaggggaacgaagggaaggaaggggaaggggaacctctggggggag

SEQ ID NO: 63847 - DNA, 414 bp, Setaria italica
  Peptide Sequence Number=SeqID_129821
tatttagttcttagtttatttctttttcttaatttgttacttaccttactttactttttccttatttgttttcttatttgttattcagcctttctcacaatgtttgggcacactgtggttgatgcatctggaagttggaacgctgaacacggtactcttctcaccttaaacataggtccaaaattccctccatcacacacctcacactcaaacagtgaaccagtaactctatcatgccagtatgatgtaaacccaacaggccatatctggtaggaattatggtagcttgtccgattgtcaatttctcccaagctggtaataaagaaatcaactgtattgaacaggtaggacaactggacaatgatgtggttgatgactactcttctccacaagaaattttgggaggctttaaac

SEQ ID NO: 63848 - DNA, 275 bp, Setaria italica
  Peptide Sequence Number=SeqID_129822
aatccttctcatccttggattcctgggtgaatctatccttgagggccatgtaagttttttttcccttgcatcctttgtgtcccacaattgataccttccacctttaaaatcacgttcctttatggcttatatgaaggttttcggacggaatcttttctggtatactgttgtttttggaaccatagcaactgtaagtcggaaagttgtggcagatgagcttcaagtgattgacccagaaggagccatgacccttgttgtccaacatacacactaca

SEQ ID NO: 63849 - DNA, 192 bp, Setaria italica
  Peptide Sequence Number=SeqID_129823
ggacatatatgactattttttgtgtttttcttcaaattaaactgggtcactgcttcgaggtacgatccgtacatggaaacgaagacaaagctgatggccatggcgtaaccggtatttgtagctctatgccagccagcctccatgtacggatcgtacctcgaagcagtgacccagtttttcttcaaattaaac

SEQ ID NO: 63850 - DNA, 218 bp, Setaria italica
  Peptide Sequence Number=SeqID_129824
ctgtcatgatttgtactattcctactatggttgtgtcttgttcctcattgctacttcacaagctgctgtcatgatttgtactattcctactatggttgttgctcatcaggtcatacaattctgtgttataagttaacccacatagaaggaatagtacaaatcatgacagcagcttgtgaaagtagagcgatgccaatggagaacaagacaccaccatt

SEQ ID NO: 63851 - DNA, 216 bp, Setaria italica
  Peptide Sequence Number=SeqID_129825
gaactcgcacgtcctgcccgcgctcatccgcaggttccacgaggccaaggcgtgcgacgcccccgaggtcgtcgtctggggctctggctcgccgctgcgggagttcctgcacgttgatgacctcgctgacgcggtcattcttcctcatggatcactactccgggctggagcatgtcaatgtgggagtgggagcgaggtcaccatcaaggagctcgc

SEQ ID NO: 63852 - DNA, 350 bp, Setaria italica
  Peptide Sequence Number=SeqID_129826
cttgatgtgaataatgagattatataacaactgcctctaaattatacagtatagctacatggatgaacttcaccaagcattaaaaacttcttctattggaaacagttaactaataagatatgtatttcttctccaatgttgcagatcaacaggagatgtttgagagggaaattggtcgtcttagacaattgttccagcaacaacagcagcagcagcagcatgtaccacagcagcaggctccaacccacagccgcagtaacagcagagaccttgattcacaatttgcaaacctgtctctgaaacacggcgatcccaactccacgcgcgatgctgtctctggccttcgcatt

SEQ ID NO: 63853 - DNA, 281 bp, Setaria italica
  Peptide Sequence Number=SeqID_129827
gtcagcaaaatatcatgttagacctggaaaataaagccttgaagcaacggcttgagagtctatctcaggagcatcttattaaacgctgtaagtattcctcttttttccccatatgccagtaccgtaccttggggtttctttgtgacttgtcttcttggttttaactttggtatggttgttttcatagggtagcaatcaggtttaatatctctatgagtttggtgaatagtatcaaagtaattttttgatgggatgttatttgttaatactgtaatcgattt

SEQ ID NO: 63854 - DNA, 450 bp, Setaria italica
  misc_feature (220)..(220): n is a, c, g, or t
  Peptide Sequence Number=SeqID_129828
gcgccatctctagctgacttagcttcatattggacctgacttccatccatggaaatgctccctgaggaagatccggcctgcacagcagccgaggaaccagcagcaaggtgatagtaggccccaaccccacgggcagaagatttctcctgtgcctgtgctgccctggcggccttgcgctcacgcgaatagtagcggcggttgcagaaccaagttttaaccngcttcggatcgataacaaccttgccgatgcgttcagcggaggcgctgaattcctcgcgagctcctccacggcgacgtggttggggctagggttttggagtggctgcaggcgcgcttccatctcctccacctcggccggtaggaagcggaacggcgccgccgccagcatcccgtcgctgctccttgcgcttggtggccgacccatgcctcttccgttcatcatcgatggag

SEQ ID NO: 63855 - DNA, 382 bp, Setaria italica
  Peptide Sequence Number=SeqID_129829
gttttttaaaggatatattcttatcatttgtactcacagtgcagaatgatgttgcagggattggagaatggtggttggtatgttaggttttgactatgggagcgatggatcataggctatttttggtcaccggatggcaaagaaaggtgctgcttaattctaaggcaagaaagtggtggttacggattagctttgggatcccagtatagctcttacgatcgtagccgtgcaatatgaatgattccgggacgtctgtagacaagtctagcctttatgctaaaacttccatttgtgacgttcgatggttgcagtagtcatattatgtgttggctacatattgcagttttgctctgtatccatccattatctagcagtataattt

SEQ ID NO: 63856 - DNA, 219 bp, Setaria italica
  Peptide Sequence Number=SeqID_129830
aacgaactaacgtaacgaacgtttaataggacgaattagaacatcaatcattatagaatacctagacgcccgcagcctcgcatgtgatggcttccttcagcaatgggatttgggagaatggtggttggtatgttaggttttgactatgggagcgatggatcataggctattttttggtcaccggatggcaagaaaggtgctgcttaattctaaggcaag

SEQ ID NO: 63857 - DNA, 374 bp, Setaria italica
  Peptide Sequence Number=SeqID_129831
tcttctttcgttctattctattctaagtcttcggtttccttaaggtcctttccgtctttcgtccttcggtcggcggccggcggcggcgcgcagcagagccgttgaggtgatttgatcttgggaatatatgtccttgatcccacatatatatgaagtcatgttgtgtcctttgccataatatatgtatgcgatgctcttcgtatattgttatcgaagggtttcccatgagttcttcgtgtattgttcaactaataaaaatctttatggtcgcgtatgtacttgtaacattgtcacaactctaaatgatatatgtgatgtactctaattaccgaaaatcagccgataggagcgacaattgactagaaaaaaaaaaa

SEQ ID NO: 63858 - DNA, 458 bp, Setaria italica
  Peptide Sequence Number=SeqID_129832
aaggtgtgagacattcagtaaactgaaacgattgcacctgggcgagtggtttttgagtggtgggtgctatccactaatattacttgcttcggcgctctcctagtgtggaaaaagttatcctgcaacttgacactggaatctgatttggtgactcgatagcaatcggaccatatggattagagcttctgacacttggaagacttgttatttctcccccctgatgatgacagtatcaatgacttggctagtgctactggctgtgcgcaactaatgtattcgttagtgtttcttattgctactttcattcttctcatgtccttttttcggcgtaaaactgcccttcgccgtatcgtggttatggcagaagcagcattgtatttgtctgcgaattcatgacgccgtggattactggcgcattggagcatggtattggttggtcgggggtaattctaaaaaaa

SEQ ID NO: 63859 - DNA, 295 bp, Setaria italica
  Peptide Sequence Number=SeqID_129833
ttgtcaacaacatagcgatgtttgtcaattgcctgcctcgataaacatcgctatgttgttgcagggaatctgatttggtgactcgatagcaatcggaccatatggattagagcttctgacacttggaagacttgttatttcctcccccctgatgatgacagtatcaatgacttggctagtgctactggctgtgcgcaactaatgtattcgttagtgtttcttattgcttactttcattcttctcatgtcctttttcggcgtaaaactgcccttcgccgtatcgtggttatggcag

SEQ ID NO: 63860 - DNA, 425 bp, Setaria italica
  Peptide Sequence Number=SeqID_129834
tttaaagtttattttattttagtttttttctttttttgtttagtttaattttcttttaatttttgtttaaggttatttagttttttgttgtatttaattttcttttcaagaatattgattttcgaatgtcttttagaaagtgtgaagttttgtagctctgtatttcagctcacttgaaagcaagatagtaattgaaccactcatgtttcatcatattgcattttatatatccattgtagaaagttattgattttaggatgatttctaaaattgcctgctaactgttgctcgtgttttttgacaaatgaaatgctaattttgtgctgcctaagttttctgctgattgcgatggttgttgtataaattatttagcattattgtgaatatttagcattcatatccctgctgggatttaactttagttg

SEQ ID NO: 63861 - DNA, 195 bp, Setaria italica
  Peptide Sequence Number=SeqID_129835
gaggcaagctagcttcccacagcacatagacatgtaattgcacaattttaccgtttcccctctccagccaatgcggtgtgtcaccagctctgaacatggatgctgtaaaattcttctccgaacacacaagaccctgcatgcctgtgttaatctacttgcatgcaaatagattaacacaggcatgcagggtcttgt

SEQ ID NO: 63862 - DNA, 412 bp, Setaria italica
  Peptide Sequence Number=SeqID_129836
caacgagcgtgtgctgccgcagatgacggctctgcttcttccgttgtatccggcacatggacgccttctcctttgagctcctggaaggctcgcatggtgtccacgtcgaatccgcccgcaaactggtgtactctgaaggcgaaccgtactccttgaagcatcagttcctcctcttcagggcctcccttgattgcctcgagctcagaggtagacccgttttctaggttactttctatttgccaacttcaccgactggagtttgatctggctgacgatgccggcgtcctgtttcatccactcccacgggatctggaaccgggtgtaccggctcgtggcggcgtcccggaacgacgggtacgtaaggtttagttaaactaaacgtaaccgttaagtaacttaaacctaaaactaa

SEQ ID NO: 63863 - DNA, 326 bp, Setaria italica
  Peptide Sequence Number=SeqID_129837
acgaccgaccaacgaagccggtacacccggttccagatccccgtgggagtggatgaaacagggtgtaccggctcgtggcggcgtcccggacgcgggcgaggttgtacacgccgtgctccaacttctcgaagagcgcctgcatcttcttgagcgccgcggcgcagggctgccgggcgtcgtcgcggaacgaggcggcctccccctccagcttcttgaggtcgcagtagccgaacgccgcctcccggagcgcgtccgccttgtgctccggccactcgaagtgcttcagcaccgcgcgctcgtccaccaggcgcgagagctcgtcgtcg

SEQ ID NO: 63864 - DNA, 261 bp, Setaria italica
  Peptide Sequence Number=SeqID_129838
gacttgatcgcgaggaggtgagccgaccggttctcgatctcgccgatcatgtcgcgcgccgccgccacgccgccgccgttcgcggcctcgctcgcggcgcagccgtccctcttggactcccgccgcatcagcgagtggtagaactccaccacctccggcacgcgcctcacgcattgccccgagcgcacgccggcgggaacgcggcgccgaacggcctcctcgatggagggggagcggcggcggcggcggcggcggagccgg

SEQ ID NO: 63865 - DNA, 418 bp, Setaria italica
  Peptide Sequence Number=SeqID_129839
cgtaaagaataattagtgcatcctaagcatgaggcccaggccaactggtggtgtcctttggagctgagctagagcacatctgtggaggcccttacgttcagtgattcgatgtctcccgtcatccttaactgaagaaactgcaatcagacataaggtgaggtgatcaatataagtattaatttaagggagatcattttgagcatgttatgatggagctctaccatggatatcttgaagatcatttcaacctccacaagcttagttcgcggcggtgcctgtcagaatgggggtgtacgagcggccggcgccggcgcccgtgatgggcatggtggaacagcgatccgttcaaggtcgatagcggccaggccaccagcggctccaccgtcatggaagcggacaagaagttcgacaataggct

SEQ ID NO: 63866 - DNA, 204 bp, Setaria italica
  Peptide Sequence Number=SeqID_129840
gtccggcatgtggaagacacccgccgagcggttcttcctgtggatcggcgggttccggccgtcggaagtgctcaaggtggccggctcagactcacttaccgtgcagcttcagacataaaacaagtgctgtcctcccgagagattttgtctcacacgttggatcttgctgttgctggtgtcactcagatcctaaggccgcagctg

SEQ ID NO: 63867 - DNA, 175 bp, Setaria italica
  Peptide Sequence Number=SeqID_129841
tcttcctgtggatcggcgggttccggccgtcggaagtgctcaagatcctaaggccgcagctggagccactgacggagccgcagctcatggccgtgggcggcctgcagcacacctcgacgcaggccgaggacctgagacacgcaacatgggataggcaaggcacacaggggatagg

SEQ ID NO: 63868 - DNA, 434 bp, Setaria italica
  Peptide Sequence Number=SeqID_129842
ttcttctttctttcctttattctagtctaccttcttttctattcttgctttctttctcatgtcaaccacactagcactttgctttgttttggcactctccatgatctaacaagaatacaaaccaaccataattgcccaactctacagtacatagaacacgaatgcaaaagaagcaccatcatcattcaaatagctaagtaacttaacttgatccatagtgacaatgtcatgtacagaaagggaaaaaaatcatttctcaacctgttgatacttaagtttgaaggcctgaatgctctccagtcgttcaaacttcacaagttggtcccaaaaggactcagcaacatattcaataaggaactcaagattttcctttcttatgaaatccaacaggtcaaggaacgtcgagtgtagcatgttgtatctatcgccatttt

SEQ ID NO: 63869 - DNA, 359 bp, Setaria italica
  Peptide Sequence Number=SeqID_129843
tttatttttagcggatatttgcttactcggagctattccattgtgttagctattacaactcagtaacccctttgctggagcagagaatgcctgtcaaactgtcttttgatccctgcaatcttaaggtgaaaggcgaaaagggatgcatctctataactgaattcaaacaacaataccacatctatgaaaaggaaacttggacaggaaagacccttactatcaaatctgagcctcgtgttctctatggcaactatggctactctgtttggtattctgtgtttattgacttattgaagtggattgtatttgtatgtgaaatgtgtttgtctgctttgcacattgaaattcaagtctatgtt

SEQ ID NO: 63870 - DNA, 461 bp, Setaria italica
  Peptide Sequence Number=SeqID_129844
ttagtttgttccttattgttactttttcctttctagttcgtttttatttggttgttctagtattggtactagtagcgtgtaaaactatccgaaagctctacatcctcctcattggacctaaagtgaggagggcatttcctctttgatccaggtagaaggtccagtcctttaaatgtactggaaatggtacattgtgattccatcgcactgctgcagtcagtggagtgataaattctgtgcatttgctccacaaaatcatcaatcagaacaggccaagcacctcgtgggtcatagccttccagatcttcatttacacacctgctgaaagccagtagctgctgccaggtgtcctcagatatgttgtggcgttggtacttctcaacaaagttacaccatcgatcaagcaaccggaaccttccatttagaacaatcttccatgctgctacagctctctcgaatgg

SEQ ID NO: 63871 - DNA, 213 bp, Setaria italica
  Peptide Sequence Number=SeqID_129845
cgctttttttagaagtacatggcgtacaaaagtgtactcaagacagctaacctcattccttcgattccatctatagcgtgtgaaagctcaaccaatccttgtcttgccttcacgtttgtacctcctgacacagtacctagcaaaacaaaggccaaaagaaccaattggatgatatagtgccccaatgaacataatctagctaactatttcaac

SEQ ID NO: 63872 - DNA, 124 bp, Setaria italica
  Peptide Sequence Number=SeqID_129846
acaaaatcatcaatcagaacaggccaagcacctgctgaaagccagtagctgctgccaggtgtcctcagatatgttgtggcgttggtacttctcaacaaagttacaccatcgatcaagcaaccgg

SEQ ID NO: 63873 - DNA, 459 bp, Setaria italica
  Peptide Sequence Number=SeqID_129847
tgcctagaatcggagcaataccaactcgctggtggctagaatatcatttctgtccgaggactggtttaaagtcctcactttaaagaacacctaatgggtgttttctgtttggctttgctctccaccatgaaccacaaccttgcctacaatttgacatggcgaaaattaactgatccagcacgcatgtcatccaattctgtacaagagcagttaggacatagcctttttgtcctctgttaagtatgcctacacggttgaccaaagggactcaagcataaggcctacacgtggatatgcttttctgtcgtcttctcaagtaggaggtcttgcaccagggagcaaatattcacggtttcttagacaggtatatcttgacttcctttgtcctctatcctttgagttgcttagaaaatactaagaagtttaacaacaactaacaaccttaataaattagaaata

SEQ ID NO: 63874 - DNA, 391 bp, Setaria italica
  Peptide Sequence Number=SeqID_129848
agaatctagtgcacggtacatcagtacttttgtttattaataactgaactgatttgaactgtgacatgttcattcttttgttggttccctgtcaggaatttgatcttcgagtggctttgcctctgggtgtgctgaatggtgctctcaatgccggagttgctgcaggagtcatccatccattggaaaggggatccacaggatctgtctcaccactttcagaaaggttttacttggggggtaacaggtctcttgtatgccgcttgggtggaccatcgtcactcttaggcttcaaaacaagaggacttggggctacagaactcagaacctgtgaccccaataattctgaaaacggtacttccacttctcctgagctaaatggtcttggaaggta

SEQ ID NO: 63875 - DNA, 281 bp, Setaria italica
  Peptide Sequence Number=SeqID_129849
acagtttgaccatgacaagggaaagacaggcatacagtttaacttcgcttcaccctaatttcattggtgctggcttgtggatttgatgttatgacttgtaaagcacaaaaacaaaagggaagtggttgggagcttcagtttccattgctgatctcaaggttctggactgaacttgatgaaactatgttgtataaagatctgctgcgtgaataagctaatggtggttggaaacaaaagagaaatttggaaattttaaaaaaaaaaaaaaacaaaaaaaaaaa

SEQ ID NO: 63876 - DNA, 253 bp, Setaria italica
  Peptide Sequence Number=SeqID_129850
aggagttctgcgggatttggtgtagttgtgccaacgagattgtttcgcatagaggtaaactactgccacatcctgagacagtttgaccatgacaagggaaagacaggcatacagtttaacttcgcttcaccctaatttcattggcaagatgttctcatcaaaatgaatagttgtgctggcttgtggatttgatgttatgacttgtaaagcacaaaaacaaaagggaagtggttgggagcttcagtttccattg

SEQ ID NO: 63877 - DNA, 393 bp, Setaria italica
  misc_feature (36)..(36): n is a, c, g, or t
  Peptide Sequence Number=SeqID_129851
accatcaccgccatggcaaagttgttctccacatcncaaaacccggtggacccgcccatcccggagtgcccaaagcacctcagcgtgccgccgctggggttgttgtacctcctgaacccgagcccgaacttgccatttgggtgtaccatgctctggtattcaccgacacccatgaacgcgtccaggatcttgtcactgctgaagatcctgccgccgcttcctgctgctgcttcatcgttagcgtcactggtgcgtagctggctgtacccattcttgtcagtgttgctcacatcttggagatttcctgttggaaccgtacacccctttattttcctagtcgtcctttttttcttttcttttgttagtttggggttcggtttagggtttaactta

SEQ ID NO: 63878 - DNA, 342 bp, Setaria italica
  Peptide Sequence Number=SeqID_129852
gagaatcatgttgaacaggtcgtggatcgtacttccccaacataccagcggcagtatctattatgacctttccatctttatatgcgcatacctggtgaaaaaaacaaatgtaaggcacataatatttgtagagaatcactgtacaggtatttgattcataggagaatcctacttgtattcctaaaaattttgtcacttcccaactcaagcagataatttctcagtttagactccacgtcagagttagcaggtgagtcataaatccactgactgttaggtatttgtccatgcatcaaactcccgagcaaagttgattcagcaaatggctcatgatgtctagat

SEQ ID NO: 63879 - DNA, 265 bp, Setaria italica
  Peptide Sequence Number=SeqID_129853
cggtaggtaggaattagaaaccaaccaagttagacaaagacgactagacaataagtaatacgaagacaaagtgctcgagcagagcagtggccattcgcagcaggaataatggcccgacgaacatttaacgtgttgaaaagaactggtacaccagacgccatttgcgcaatattgctcagcaattctggtggaacacctggccctgccctgattcctgataacttctgaagttcttcagtgtcaactgtcaaggttgccagacgag

SEQ ID NO: 63880 - DNA, 151 bp, Setaria italica
  Peptide Sequence Number=SeqID_129854
gcaccattcatcaatcattggattaaaattatactgaggttctgcccacgcttatccattcaatcaatgatttatagaatggtgcaaggaggcaccaaaggaacttgatttcaaccatgaagcagagagcactggaactactgccactccc

SEQ ID NO: 63881 - DNA, 332 bp, Setaria italica
  Peptide Sequence Number=SeqID_129855
cgccatcttttcttggcagatccttgacagtgcttctacatggaaattttgtagctcttcaaggactttaacacctagccccctgaggtcctcgcccttcaatctggacacgacgctctccaattctttgcagcgccttctttcaaaattgtacgcagctcttgcttcttcaatggtactgaggccatcccagctcccattatctgaagattgcaattcacttaccgctctttgaaacaaggacccacatacttgccagctcgttttccaactcatgctcacggcattttgcatcgtcaattatctttataagctcactctctcttcgatcc

SEQ ID NO: 63882 - DNA, 454 bp, Setaria italica
  Peptide Sequence Number=SeqID_129856
gtccggctgtttggggctgagacaagaaaataacaacctagtaggaaacaagtaatagattctggtatggtgccgtctgatgcactgtagtataattctgtggactgtgattggggtgcgcaactgctgtttggcggacctgtggatggttacgaaattgtactcctgcttggtgcgctgtagtatttgcctgtgggtttttgtgaactgttctgcttcccgtaaacctggatacctggtaacgtcgatcactctccgcacgtcctccagttctggcatgctgattattcctttgtggtggagttcttgtgtaataattagctgtgactctcccaccaagcttcaagccaacaccaggggtacacaacaacgccaataattctttccggtcgatatgctcaagagagtcaaacttgtggcaagcatcattgaatgcactagcaattcggtcaag

SEQ ID NO: 63883 - DNA, 362 bp, Setaria italica
  Peptide Sequence Number=SeqID_129857
tggtcttgttttggggtcttgtagtctagtaattactaccttgttggtaactagttattgtatttcttggttatggtgccgtctgatgcactgtagtataattctgtggactgtgattggggtgcgcaactgctgtttggcggacctgtggatggttacgaaattgtactcctgcttggtgcgctgtagtatttgcctgtgggtttttgtgaactgttctgcttcccgtaaacctggatacctggtaacgtcgatcactctccgcacgtcctccagttctggcatgctgattattcctttgtggtggagttcttgtgtaataattagctgtgactctcccaccaagcttcaagccaacacca

SEQ ID NO: 63884 - DNA, 235 bp, Setaria italica
  Peptide Sequence Number=SeqID_129858
caaatgttgcccccactagccaattgactgctggactccggatgatattgtatcatgttgttaatgatcgtcaatcgtactgcttctaacaactctgggtcatcgattttgcggccagtggacctgtagagcattcctgtcactcattctaggcaagaactgatagatgcaggaagtacaatgaagaaagacgtcatattctgttgtaagtaggagtgtaggacactaaatttaa

SEQ ID NO: 63885 - DNA, 231 bp, Setaria italica
  Peptide Sequence Number=SeqID_129859
ctgcaatgcatatgcatgctcatccaagcgctgagctgaacctttgaagtggtgttgtgtttgcaggcatctttccagggcaagtacggcggcatttcgcccaagaagcccctcatcaataaggaccatgagcgcgcctacttcgactcggcagattgggtcctcggcaagcagcaaggcgcgagcagcaacagcgcgaaggtcccagccgcggagaccctcaagcccaag

SEQ ID NO: 63886 - DNA, 385 bp, Setaria italica
  Peptide Sequence Number=SeqID_129860
aggatagaagatttcctctggcaggagcccaaggatatagattgaggtgctcagccaggcacagatgtgctgtaagcttgatcatggttggctggagcaaagctgttggcttggtgaggtcacattgatccgacaagcttgggggatgggtttgcactaatggcggcattgggtaatttccatacatgtactgacaaggaaggggaaagaggaggcccttggcatcaccaattagccgccgtttctcgtgttttgatcattctctatttaattcatggctggttcgtaaccttgccattggaaacatttcaaatttcaagttggtggttgccatctctatatcagaaatttaggatgcggtgttgccgcaaaagaatgtccaggg

SEQ ID NO: 63887 - DNA, 324 bp, Setaria italica
  Peptide Sequence Number=SeqID_129861
acaaaaattttgcgcagcgacaaggtatgacaaactggcgcaaggagtccactacattactcaagtttagaagaaaagaacacaccattaccccactcctgatgctaaagcttagccgatgcagcccctttgcgctccaaaatcctaaaactcctctcaacccatagcatgcttgaggaccaaggcatgtgcttgagcaaaaacaaaaacagtggactgcttgccacgagagccagaggtagacatgttagcttgcatcatgtcccgtatatatgtggttgaaggatttggcgcacctgttcacagacatatatacgggacatg

SEQ ID NO: 63888 - DNA, 384 bp, Setaria italica
  misc_feature (313)..(313): n is a, c, g, or t
  Peptide Sequence Number=SeqID_129862
taaagaaactaaaggtaaccggttaagaatactaatttaggacaattgaacatcctcaataacaggcaatccaaaatcaatcaagcacattgcccttgtactgtataccacaactatcgatgagctttgtggcggaaatgataggccaatgacctcaccaggaaattcctggaaacttctgggcaagtgatgtgtgtatcgcttggaccattcacctaactgttttgcttccacatcaaatacatatacctcatttttcgatgtagttatcacaagagcattgttcttggggcaaaaaccgccagatgtaacngagccaccattcattctagatatgaaccagtgttgcctttgtacttcaagattaaatacataaatatcccc

SEQ ID NO: 63889 - DNA, 270 bp, Setaria italica
  Peptide Sequence Number=SeqID_129863
ctttttcacgccggcgaatctttaaccgcctttttcctccgataattcgtcttctctacagattggtacagccatggtcaatgcccttacatcatgagtgtgagctcttacgtatcccacatagacccacttgcgaacttgctctttgaccacgtttttactagtgccagaatcatcttttgatactttgtaaagaattacctgccaaacccttcccctgctcaccaccctccaccccctcatcatcgcacgccaccgcctcatttttca

SEQ ID NO: 63890 - DNA, 353 bp, Setaria italica
  Peptide Sequence Number=SeqID_129864
cacctttgaagagcccatcgcaatggtgaagaggaatcaacccttggttcatctgcatccgttggcacagatgagtgcccagccacaatgctcagatcacggataagcattgtgaaggcctaccaatctgacctctcatgatcatcgatctaacaagctccagttgcgcaaagtactcccttctgcatgcaaaacttggccaaccagtcaaacgtctataacaattgctgctgatggcagaagatggtagggaagcggcaatcttaatcccaaagaggcttatgattggtcacagattgaatatctgaataggccagctgcgcttccagccatctgagctgaatgctgtggtt

SEQ ID NO: 63891 - DNA, 249 bp, Setaria italica
  Peptide Sequence Number=SeqID_129865
agcatgagagcaggaagcccaatgttccagcttagggggctagctgaacaatcatccaagtatatgggattgaggtgtcttcttttgtttatctagaattgttggcattttttcctaaaccgaaaactgaagtttgagtcagctttatggggttcacaaatgttcaatatcaggactgtcatggaacactgtcacgcaattcagttagcaggcttgatatttgctgagttctctgcaacactttactaa

SEQ ID NO: 63892 - DNA, 434 bp, Setaria italica
  misc_feature (333)..(333): n is a, c, g, or t
  Peptide Sequence Number=SeqID_129866
tgcttggtgcttctagctcaaccctgggacttacatgtcaataaaattttcagatacgagtttaaggaaaatcatgagaattgggttaacactgttaaacctaagcttggccttgatatctctacttgtgtgcttcgagctgtgaactttgcacatgataacattaaatctttgtatgcaataagaaatgaattgcgggcggcactcaagaatcttctcaaggtagtcttccacttaagcccttctcttattcacaggttttttaactagatactcggcagcgtgcattttattcacaggtttttaacagatactcggcagcgtgcattttanatttttcagaaagttcatgctgcaatgtgcagtagctagtgaataagagtgtaccttgtataggataacaacaaaatcctaccatttaaaaatcactttgt

SEQ ID NO: 63893 - DNA, 233 bp, Setaria italica
  Peptide Sequence Number=SeqID_129867
cttgatcttgcagactaacatggattcagagccctcatcgcagaacccaacagatatgactgcttttgtgcaaaacctccttgggcagatgcaaacaaggtttgagtcgatgtcgcagaacattgtgtcaaaaaaaggtttgagtcgatgtcgcagaacattgtgtcaaaaaaatatccttatctgcaatcatttcattgttttcattctgttcatattttctttgaaaagat

SEQ ID NO: 63894 - DNA, 115 bp, Setaria italica
  Peptide Sequence Number=SeqID_129868
cgactaacatggattcagagccctcatcgcagaacccaacagatatgactgcttttgtaagttctgattctgtatgctgttacacattgtaagatctgttagcatgcattattta

SEQ ID NO: 63895 - DNA, 417 bp, Setaria italica
  Peptide Sequence Number=SeqID_129869
tctttggttcttggtagtacggtattgtccttgggttctattctacctagtcttctaattgttcctttgggtcttctaactaccggttattcgttcaaccttcctcctcgttgtcctcctgaccgagcccagaagtctcaggcttggagatcatctggctcaagtcaggagccttgaactgttcagcagcctgggtctgcagctgggagctgaggtcctcaatcttggcctcaccaaagatgacataggtgtccgagttcgggctcttgaacacatctggcttggagatgacaaacagtatgttcttgcttttcttcacggtgacacggctgacaccagtgatgggcttcatgccaagcttcagcatggccttgcggctcttcttctcgctcctgctttgctttgatttgccactgg

SEQ ID NO: 63896 - DNA, 401 bp, Setaria italica
  misc_feature (247)..(247): n is a, c, g, or t
  Peptide Sequence Number=SeqID_129870
tagaaagaatagaaaatacaagactaaataaaaggaaggaactcaaagaaacaagttacaatagaaggaataatgggagaggctgcacattacggagctcggtgtgggaaccttcctcttctcctgcggatggtatgatctcgcgtatgggagggaccatttttacatctacctcttcttccagtccatagcttttcttcattatcggttttggctacgttggcacaatcgtcccgcagtcgtaacngaagtgttcagatcatccgcctccggcttctgcattgtcttcagcaagtttcgtagtggataaccagtttgaagtaaagatcataaggtcctctctctcatcgtctttttggggaccggtcatgtagccttccgttgcatgcgctactgtaaat

SEQ ID NO: 63897 - DNA, 382 bp, Setaria italica
  Peptide Sequence Number=SeqID_129871
aacttaacaaacggaaaccgactaggacgtagtaggacgacaattagaccgcagttaatgaggccggagggtggaaggacaggaccacagtggaggacatggaccttgctattcgggcaagcctcaagggttggaagtttgtctacctcggtgatgttcaggtaaaaagtgagctgccgagcaccttcaaggctttccggttccagcagcacaggtggtcgtgcgggcccgcaaacctgttcaggaaaatgctcatggagattgtgacaaataagaaagtgacgatctggaagaagatccatgtcatctacaactttttcttgatacgcaagattattgcacatattattacatttttcattctactgcctcatcatcccgg

SEQ ID NO: 63898 - DNA, 179 bp, Setaria italica
  Peptide Sequence Number=SeqID_129872
gtgatgtgtttcaaggggcggcaggatggcttcttccaatgtactagtaacatacagaaaaagaggatatgggagaggctgcacattacggagctcggtgtgggaaccttcctcttctcctgcggatggtatgatctcgcgtatgggagggaccatttttacatctacctcttcttcca

SEQ ID NO: 63899 - DNA, 375 bp, Setaria italica
  misc_feature (364)..(364): n is a, c, g, or t
  Peptide Sequence Number=SeqID_129873
aataagcatgaaaacaataatacaagtacaaacaactaaatggacaaagaaaaactaatcttgctatgatggaaatgcagtgtttacatttagtccatgacctaatgtttaatttacctcatctgtgtgatttattttccgctctgacctccttggtatcatgcctttggtggtactctagttcagtgtccgatatgctagtctagttggagactttgctctctgcagtccagggactggggaactgaacgattgcagcggcactggcgcactgcttaaaaagaattcatattcattgaaatttccatctcagttctgatacagcttgcttaggatattcctatgtaaggatcactggtaaacntctgcattatg

SEQ ID NO: 63900 - DNA, 260 bp, Setaria italica
  Peptide Sequence Number=SeqID_129874
aacggaagggaattttctagtttcagccggagaatcgggaggcgatgatggggtctcgcgctcgcctcgtctccctcctcctagccttcctcctcgcgcgcgccgccgaggccggcggcggcagcggcagcaggtacctgaccaaggacgagcggtggatgaaccagcgcctcgaccacttctcgcccactgttggagagtcggctgggcctgagtgcaaagctgtccttcaggaaataacgaaacttgttgatgaacag

SEQ ID NO: 63901 - DNA, 266 bp, Setaria italica
  Peptide Sequence Number=SeqID_129875
gaggggaggtgggggattgataaacgcagcgccgaagcctctggctcggcggcgcccgggatgcggctcaactgctctgcttccggcggcacgccgctgcgggaggccccaatggcgcgggattgatcgttcctcaggtgccggcggcggttgaaggtcagaccttgccggtggaatgtacgggcggcaaggcccgttacttctcccgcaattcgagatcggctcccctgattgcgcccgcttcttggttgcttcggaggttcaat

SEQ ID NO: 63902 - DNA, 274 bp, Setaria italica
  Peptide Sequence Number=SeqID_129876
tacatgacatgctggatgaactggagcaactcttgaaaggtatcgcaatgatgaaagagctgacacttcgaaccagagactaccttgtttcatttggagaatgcatgtccacacggatctttgctgcttatttgaacaaaattggtgtcaaagcacggcaggtactgcttgacatttccttcaatcaccttaaatcagtgttcttctcaggttacgagtgcaccaaccttcatgaatttgttgtaatattcctctccttatttgttgggtatta

SEQ ID NO: 63903 - DNA, 399 bp, Setaria italica
  Peptide Sequence Number=SeqID_129877
aattggtgtcaaagcacggcagtatgacgcattttgatattggtttcataacaacagacgatttcggtaacgctgatgtcttggaagcaacttatcctgctgttgctaagagacttcatggagactggatacgggatccagcaatacccgtagtaactggattccttggaagggctggaaatcaggagctgttactactttaggccgaggtggtagtgacttgactgctacaaccattggtatggaaggatgttgatggtgtactcacttgtgatccaaatatctacccacatgcaaagactgttccgtacttaacatttgaagaggctacagaacttgcttattttggtgcccaggttttgcatccacaatcaatgagacctgactaagaagaaagga

SEQ ID NO: 63904 - DNA, 320 bp, Setaria italica
  misc_feature (293)..(293): n is a, c, g, or t
  misc_feature (311)..(311): n is a, c, g, or t
  Peptide Sequence Number=SeqID_129878
tttctttattttgttttaaccttttggttatttgttcttaatttgtttctattcttactttcagcagagggcaataatttcgctcatcggaaacgtgaaacgatcatctcttatactagaaaagaccttccaggtgctgaggaaatgcggtgtcaatattcagatgatctcacaaggggcatccaaggttaacatgtcgctgatagttcatgacagcgaggcgaaggcctgcatcaaagccctcatcaggcattcttcgaggacgaggatgttctcacacaagttgaaacggngaacctgctggtgggttnaccgataca

SEQ ID NO: 63905 - DNA, 229 bp, Setaria italica
  Peptide Sequence Number=SeqID_129879
ccaccaccaggctggccgctagtccagccatcggagctcttgagaaggcgtccaactatctcctggacaagtacaaggtgatggagggtatggagaagcagcacgaggtcctcaagcgcaagctgcctgccatcctcgacgtcatcgccgacgctgagaagcaggcgtcgtcccaccgggaaggagtgaagaaatggcttggcgtgctcaagacggtggcataccaggc

SEQ ID NO: 63906 - DNA, 402 bp, Setaria italica
  Peptide Sequence Number=SeqID_129880
caacaaccaatggcttggcaaccaagggccaggttagtccagccatggctacagctgttggtatggaggatggatcctttgtgatcaccagttggcgtggggtacaaacttctccatagagatttgacaggttcagatcagccacttcctcgagcattgattgtcgattgttcagatgctcaatagcattaggtgggtcaagaacagtaacttcaggatgttcttcgtgatagtcctacaagaaaatggaagaaattaagttagcagagctatgcaaagcggtaatatcgacttgcaagccaagaacaaagtacaacaattatgataatcttgtgatcaacttcagaacagaatgctatattgcaaaaacagaaatgctggcagcagctttcccgaagatgt

SEQ ID NO: 63907 - DNA, 301 bp, Setaria italica
  Peptide Sequence Number=SeqID_129881
taaaaataggcatataatggtggcagctgtgcttccccaccaatgtacatattctggagacataagcataagccattttgtcagtctccgctcttcgcaaacttccttgcacttcaggtcccgcttaagtactttttgtacttgctttgggcaagactaagtaagaagtcggtgaacataatctcatatcccggcattttcccaaaaacctgggaagtagttgatgtcaattatgtagtaccgatctttggttccaagttctctaatcatatctacattgaacaatctcaagcccagccgg

SEQ ID NO: 63908 - DNA, 442 bp, Setaria italica
  Peptide Sequence Number=SeqID_129882
aaaccaagggccaggttagtccagccatggctacagctgttggtatggaggatggatcctttgtgatcaccagttggcgtggggtacaaacttctccatagagatttgacaggttcagatcagccacttcctcgagcattgattgtcgattgttcagatgctcaatagcattaggtgggtcaagaacagtaacttcaggatgttcttcgtgatagtcctccagaacctgctgccactccttgctagtaatcttgtgcaaaaataacatcaaaaagggccttgttctgagaggggaagagactcatcaatggatacaaaagtgattccattcttcctcgccagctggagcagcttggggctgggaggaagctcttcaccttcttcttcgtgagggctagcccacactagcctgggcgccgcggccgccgccgccgccgcgccc

SEQ ID NO: 63909 - DNA, 236 bp, Setaria italica
  Peptide Sequence Number=SeqID_129883
ggatgcctcatcatatgcaagatagagctcatggcctttagatgtcccatcaacaaccaatggcttggcaaccaagggccaggttagtccagccatggctacagctgttggtatggaggatggatcctttgtgatcaccagttggcgtggggtacaaacttctcctgcgatatttcaaggcacatataatcacatgtttaatgctaacacagcatgtcctctgaaaatttaattaa

SEQ ID NO: 63910 - DNA, 138 bp, Setaria italica
  Peptide Sequence Number=SeqID_129884
agggtcaagttctgcatcatccgcacttgctgcagcacatgaaactcttggcaaccgatagacgcccacatttgtttagttaagttctattattgtcgtttaactattcttggtttagttagttagttaatttcttta

SEQ ID NO: 63911 - DNA, 348 bp, Setaria italica
  Peptide Sequence Number=SeqID_129885
ttaagaaataacaaaacaaaattaacaaagtaagaaagttaggtaggaaggactttaagtaaaggtagacgaaagttaatagtacaaaatggatcaaaagaacgatttggacatccacaagagttgcatggattgccaccaacacctttgacatcactacaacaaaaagaacttgatgagttctggaggaagactgtggaggacatagagaaacacaatgaacttcgacaatcacattttacccatgagctatgttgcaaaaaatcataagagataaccaaggtagcttaatgatatcatccgaaacaccatcatgcctgacaaaggtcctagagatattcatccaag

SEQ ID NO: 63912 - DNA, 138 bp, Setaria italica
  Peptide Sequence Number=SeqID_129886
aacccatctctatacaatggtacaaagtttcggtacggaggaaatgctgtgcactacaaagatgactcaagcaggattaccatttctcccacaacggattgagattgttccacaaatgtcctatagtctgtgagaccc

SEQ ID NO: 63913 - DNA, 395 bp, Setaria italica
  Peptide Sequence Number=SeqID_129887
taattaaatttaagacaagcgtaccagccaatgaaaagtttatgcgacaacagggcaacattacatgctgagtagctaatggtaatcaagatgccagcactcagttgcctgtagagcagatatcaaactaatatgtggatttaactcatgtaggaagcctatgaaagaagtatttatgttatatgcatgttcaatctgaagtctaatttagttcaacataatcagattcagatggcaaggaaataacgtatgtaaaagtaactgggaaacagctctaaacctgcatgagcatattagttgagattgaatgcccaaagcaaatgactaattcttgctttctatcacaaggctacaattaacttcaaaaacttataggcaacaatagcatccagaaa

SEQ ID NO: 63914 - DNA, 247 bp, Setaria italica
  Peptide Sequence Number=SeqID_129888
tggtaagtccttattgtaaagtaagttattttattgtttattattgtctattgtttcaattctgaagtctaatttagttcaacataatcagattcagatggcaaggaaataacgtatgtaaaagtaactgggaaacagctctaaacctgcatgagcatattagttgagattgaatgcccaaagcaaatgactaattcttgctttcatcacaaaggctaccaaattaacttcaaaaacttatggcaac

SEQ ID NO: 63915 - DNA, 357 bp, Setaria italica
  Peptide Sequence Number=SeqID_129889
aggtcagatgcatccacacctgcaagctttccatctgcatccttgagcttgtttataatctccatcaactctggataggtgacatcattgatcgaaggcatgtcattagcagcaagtatcacctgtagcaaccaaggttctcaattttattgatgatactaacaggaaaaaatttcataaagctcaattaatatatacaaaagcgcaagacaaggaaatttgtgagggctgaggcagaaaatctgtgaaatccaaaccagattgataagttcaaccacaatgtttcagccttcccctaaggtacttgtaggttcgtcgtattgttactttggtttactttgttttattttattttta

SEQ ID NO: 63916 - DNA, 218 bp, Setaria italica
  Peptide Sequence Number=SeqID_129890
taccaattaccactgatgcatcgtaaccaatcattgtagactatcaacgggaacaaatacgaactgaagttcagatgtatctcaaatcgaaggaggcacatcaaattcattcaagcaacaatttcctaaccacccttgctgacacttgcacgaagccacatagacaacttatttgactcgctatcactcctaatgcgaacaaagtgtttcagatgttg

SEQ ID NO: 63917 - DNA, 247 bp, Setaria italica
  Peptide Sequence Number=SeqID_129891
ccgcacctcggcgcccgacatcaagtcgatgcagatccaccacgaggcgcgccaccccaagctccccttcgagccggagaagctcctcaacctccactcctccacccccgtcgctatcggaggccacctcctccaactccaagcccaagcccggcatccgcggcagcctcaagaagtagcgtgcttgcttgctagcttgggcgatgtacagatttaaggtcgtccaagtcccaagcttacaatggcc

SEQ ID NO: 63918 - DNA, 297 bp, Setaria italica
  Peptide Sequence Number=SeqID_129892
aataaatatcaaagaaatacattggtatttggctattattaacacacagaagtgtgaaatacaaatacttgactcgttgtgttgggacttcaaccgaggtgacctcgctgatacgctgcaaggactacaatatcatttgaacataattggaaggcaacaaaacttgattagccataactggaaagaccttcaggaagatattaatcattttaggtacaagttagcaggcatactattatgttggaaaacaaacacaacacaaacaactcaaaatatctcattgttgggaagttcaga

SEQ ID NO: 63919 - DNA, 417 bp, Setaria italica
  Peptide Sequence Number=SeqID_129893
tggaaacaaaacatgattagccataactggaaagaccttcaggtaatttcatggataatcttcatggataatcacagaacaactacaagagccaatgcagaaagatggctcatcttgtggactgttcatgcttaagtttatggaatactggactggagattcactatctcatcctattacacaggaagatattaatcattttaggtacaagttagcaggcatactattatgttggaagtcacaagtcacgcgatttttcacgtgaaatatgcgcgtgcgcgctgcgtgggattcgaactcacaacctccagcctcgcgcgtagcttccttgccaatcccaacctacacaccacatctgactatgtagggatgctatccttttgtattaacttgtggggacccttttatcccggttgg

SEQ ID NO: 63920 - DNA, 414 bp, Setaria italica
  Peptide Sequence Number=SeqID_129894
cagtatgtgccttctgaattgcagctggctgatttcttttaccaaggcacagacacgtattcagcatagatttttcctctccaaactcagtgttcttgacccaccatgagtttgagggggggtgttagatgtatatgtactgttggtgtttacctttttctattagggagttttctgtatattttccccttcttgtacctgtatatatatatgggcctagagcccctgttatgaatacaagtgctattcctaacaatttcaactttttatctagtacagtactagttctaatttatgacttgaggatcttctatgtgtataataatcttatccaatttatgaaggctactcagatgaaaattcttgtaagctcagatcaactacaaaaattaaagtaagaacgaaaacaaacaa

SEQ ID NO: 63921 - DNA, 268 bp, Setaria italica
  Peptide Sequence Number=SeqID_129895
aagaagatttatggagggggaaatgttctagccctacaaagcctggagtgcttggattaattgaaaaggtatggtaaacctggaataaaagatagcgtgttgtatttgttagatgtatatgtactgttggtgatttaccttttgtattaggggggtttctgtatattttccccttcttgtacctgtgtatatatgggcctagagcccctgttatgaatacaagtgctattcctaacatggtattagagccgaactagggttagaattt

SEQ ID NO: 63922 - DNA, 248 bp, Setaria italica
  Peptide Sequence Number=SeqID_129896
cggctccgcgccgagttactccaccccgattgattccccgccgagctcctccgcgccgcgccgagcgcatccccgtcgagctcctccggcgacgacctcctccacctccgcgccgacccaggcggcggggaggtggagcagcggtgaacaagcggcggcgggcctgagagagggagaggagagagaggtaggcgcggcgtgggtccatgcgagtcgccgagtcaacggcgcacgcgattggagtgctg

SEQ ID NO: 63923 - DNA, 328 bp, Setaria italica
  Peptide Sequence Number=SeqID_129897
acgcgaactcgatccttttatccgagcgtacctcaagtacaagctcactgcagcagcttctagctgatgttgaggaactaagcaacaagcgactgcccctatgcagtatcatccagcagcttcgctttgagccggctgagagcctttattttgttggccagctgactcctctcctctgagcaacgaacggcaatgccagtaggaatatggaccatgcgaacagccgtttccaccttgttcacgttctggcctcctttacctccagctcttgtgaagcttatctccaggtcctcttcaggtatttccacagccattggtatttctttcc

SEQ ID NO: 63924 - DNA, 502 bp, Setaria italica
  Peptide Sequence Number=SeqID_129898
acggcggtcggcggcgggcagcattcggcattggcatcggcaaaaggactactgaacagggtgagatgggaatacccaactttcaaatcctggcttcaccactatcgacggcgtcctccgacgacactaccaccaccaatgtctctgacgaacacttgagtcccccgtcgtcgccttccatatgcttcgactctgtttccgaatccgatgcctccacctcctcctcagtggcctcggatgggctcctccggggtccgaacccgtcgtttccaagaaaccccgcctccccgtgcgctcgtggctagcctccgacgagatcgcgcttctcgaggccgtctcggagcaccgccagaagcacggccgactgccgtcgcccaaccacctcgccgcggcgctccgcagccgccttcgcgcgaaggaccgcctgagcgccgatgagatctccaggaggctgcgcgcactccgctcccggtacgataatgctgtgctccgcatgtcccgc

SEQ ID NO: 63925 - DNA, 418 bp, Setaria italica
  Peptide Sequence Number=SeqID_129899
aacccgaaaattttagttttaacaataagtacttacaaatactaaataattgaagtctgttttaagtagtttttttcgcgatgctgttatcccagttagacatcttgtttcccttgtcatttaatctggatgtgttctgtactgtgtcttcacatgttataagttatcatatatagatcctcaatcgtgaccatggatacccactccgtgttgttgttcctggtgttattggtgcacgttctgtaaaatggctggacagtatcaacataagcgaggaagaatgccagggtttttttacgcaaaaagattaacaaaatgttccaccaaccgtggactgggacaatattgattggtcaactagaaggccacagatggacttccctgtacagtctgctatctgtacactggaagatgtaga

SEQ ID NO: 63926 - DNA, 412 bp, Setaria italica
  misc_feature (45)..(45): n is a, c, g, or t
  Peptide Sequence Number=SeqID_129900
cccgaaattttgttttacatagtcttcaatctaatattgaagtcngttttaagagttttttttcgcgatgctgttatcccagttagacatcttgtttcccttgtcatttaatctggatgtgttctgtactgtgtcttcacatgttataagttatcatatatagatcctcaatcgtgaccatggatacccactccgtgttgttgttcctggtgttattggtgcacgttctgtaaaatggctggacagtatcaacataagcgaggaagaatgccaggttttcagaaaatatgaatgctatgccttttcaactttattttttcaatgttcaaatctgactgctattcttcgaccagggtttttttacgctaaaaagattacaaaattgttttccacctaaccgttggtacttggt

SEQ ID NO: 63927 - DNA, 356 bp, Setaria italica
  misc_feature (35)..(35): n is a, c, g, or t
  Peptide Sequence Number=SeqID_129901
gtcatcatgcagtactgcatgcaagggttcatggngcccaatgggacataggtagcagtagtggcgcttgcacaaagagcaagaagtgcaaacagtgcaaacgaattcgtcgtgcgttggaagatctaagctgtgaaatagataagctgtgaaataagaacacgctgctgatcgcttggagcaatcgtggtggtgatccttgcaagtgttaccacaagcgttaccattgtaccaaaacaataataaagtcattgcagctttcagtgtttctcgcatcggactgtaacacaagtgttggagctgtgttgttcatgggatttgagtttgaccgtaactcctatgtaccgtcataacta

SEQ ID NO: 63928 - DNA, 276 bp, Setaria italica
  Peptide Sequence Number=SeqID_129902
tagtaaagtactaacgttgtcctattacgttattcttgtattggtaccccaaagtgataagtgggcttgggtcctctttgaggctacattagacataccagcaaatgctgagatagtagcaaaggcggtggactcagctgcgaacgtccaacctgaaaacgtggaagacatatggaacctgagaggaatccctcaacacatcttggcatcggatcaaaatcagaattcgtcgtgcgttggaagatctaagctgtgaaatagaataagctgtgaaat

SEQ ID NO: 63929 - DNA, 484 bp, Setaria italica
  Peptide Sequence Number=SeqID_129903
tctgagcgcccagccaaatctctgtaggtctaaaatgcccaaaccacctagctcctttggacggctcaccttgggccatgctattaaacagtgaccttccttcgcctccttctggcctctccacaagaaattacgacgaatcttatccaccgcctttaggcaccatggaggaagctccaaggcagtggcgaaatagatcagaactgagcaaccttctcaatcagaggttgtaactgtgccttagacagcttcttgatggaaagagggagaccaagatatttcagggaaactcctgaactacacagggaaagtgagtctgaaccacaatgaacattgaataggtctgtggtgactgggtgaaggaacaggaccacatcatcagcatacagggagacacaatgatagatacttcgagtggaaattggctgcagcagcccttcagtgctcaccttttcaatcaagctattcaggacatccattacaa

SEQ ID NO: 63930 - DNA, 360 bp, Setaria italica
  Peptide Sequence Number=SeqID_129904
gaactctgagcgcccagccaaatctctgtaggtctaaaatgcccaaaccacctagctcctttggacggctcaccttgggccattctattaaacagtgaccttccttcgcctccttctggcctctccacaagaaattacgacgaatcttatccaccgcctttaggcaccatggaggaagctccaaaggcagtggcgaaatagatcagaactgaggtgagaaccaattgcacatatgtagcacgaccagctcgattcatcaactcaaatttccatcctggcaaatgatcagcaaccttctcaatcagaggttgtaactgtgccttagacagcttctgatggaaagagggagaccaagatatt

SEQ ID NO: 63931 - DNA, 389 bp, Setaria italica
  Peptide Sequence Number=SeqID_129905
tgtatttattcaggcagcaaataaagatgtctcttctcccaagtgtacaaccattccatgctatggcattcccgattgatccaactcttgcactggagatcaggttctgtttctgtactgacctctgtaatcaatggtaattcaatagccacttattggagcacaatgtcttgacttttttttgtttagtaaaaaatatgcagatcattactctttggttgcatcacgttttgggcttcctgcattctcacacccctcttgtgctcctatcaaggctgatgacaaaacttctcgccttaggattggatatgtgagtagtgacttcggcaatcatcctctatctcatctgatgggatctgtatttggaatgcacaataacgacattgtag

SEQ ID NO: 63932 - DNA, 176 bp, Setaria italica
  Peptide Sequence Number=SeqID_129906
acctgtgtaagtggtatcagttgtttgtacaacaggaagatgaaccttgcacaggtaccgaacaattagagcggctagactatgtggaagttcaacatgctttagttgcaacagttttacgagaaatgcaggctcagaaagtcagaggaacacttctgataccacttacacaggta

SEQ ID NO: 63933 - DNA, 166 bp, Setaria italica
  Peptide Sequence Number=SeqID_129907
gtttgcttgcatgtaactcttcaagttttgtgtaaactcctcaatattaagattgatggtaggaatttcatcaggacagtgagggcaccgaggccgctctatgcgaggctgcattttcctgccagcaaggttgttagaggaaaaaagcctggagcagcaagagagg

SEQ ID NO: 63934 - DNA, 377 bp, Setaria italica
  misc_feature (1)..(1): n is a, c, g, or t
  Peptide Sequence Number=SeqID_129908
ntaaatgggccactaagtcaggagaggagcacttgcccttctgatccttcacaacaaggcgacttaccaccaataattaaacaaaacttccagccgttacatagttcagaggaagtactgttttccaaggagcactcttcctgtggaaacgattttgtgaggaacaaaaactgaagctccttttgtggaatcacatgtctattcaaatcttaaagaggtgcacactaccacaagagagcaggttcaatcaggatgcagtcaacatgataatgatgtcagtgttcagacaacagcagatgaaaagcatcggtctcctaaacttgtcgttgtaaaacctagtaacttcttctatttctagtaaagttactttagtacta

SEQ ID NO: 63935 - DNA, 410 bp, Setaria italica
  Peptide Sequence Number=SeqID_129909
cttctctaggtgcatagcatttctacatatctagacataccatatatttaaatgcatagcaaagttatgtaactagaaaagccagggaatacaaacttgttttatcatctagaacttgcttatgcttagttgccttctgtcttaaaatgtctgcaggatttgtgtgtgtgaggggctttgacaggacagtgagggcaccgaggccgctctatgcgaggctgcattttcctgccagcaaggttgttagaggaaaaaagcctggagcagcaagagaggaagaataatagtacattgaagaaatatagtggagctaaccagactaccagaggatggatagcccaaaatgaggtgctgacccaataagtcgccaatcatttctaacagaatgtcttgcatctgtagtgaatgcc

SEQ ID NO: 63936 - DNA, 377 bp, Setaria italica
  Peptide Sequence Number=SeqID_129910
caagcaaacaaaaatcgagattgaagatgctgacatgtcaaaggcattggtggccattacccctgaagctgcttcccttccaaccccaaagctcaagaatgttagtcgcctgaggacagaacaccaagtttatgaactgccggattcacaccctcttctggaaggattcgaacagagggaacctgatgatccctgcccatatcttctttctatatggaccccaggtgaaacagcacaatcaaccgatgcacccaagacattctgcaactcaggggagactggtaagaactaatgtaggaaagttacaaacaatagacttttaagttagacaaacaagtttaacgaagaaaatagacaaggactacaagaaaagtaca

SEQ ID NO: 63937 - DNA, 256 bp, Setaria italica
  Peptide Sequence Number=SeqID_129911
tccgtacgcgccggaccccctcatcaacacctgcaacggcttctactgcgaccagttcacgcccaactccgcggccaagcccaagatgtggaccgagaactggagcggctggttcctctccttcggcggcgccgtcccctaccgccccgtcgaggacctcgccttcgccgtggcgcgattctaccagcgcggcggcaccttccagaactactacatggtatggtagtaactttcttccctctgtttttctttttca

SEQ ID NO: 63938 - DNA, 186 bp, Setaria italica
  Peptide Sequence Number=SeqID_129912
acagagcggctgtgttaacctcgtgcaactacagaggatcctacagttcgagcaaatgcctgaagaagtgtgggcagccatcacagactttgtaagacttccagagtcctcgtaatattttcaataaccctttctgttcctagcatgaggagccagttctagtattcatctatgttcgatttatat

SEQ ID NO: 63939 - DNA, 236 bp, Setaria italica
  Peptide Sequence Number=SeqID_129913
tcggcgaggtcgcggtcgaaggtgccgtccgcccgccggagcatgttgtacgccagcttgaagttggagatgagcacccatgtgtggatcggcaccgccgtctgcgcaggcacacacaacaggaagccaaacatcaacagcagcaacagtaagacgaagaagcatcgcaaacacctattcctttgctgtttgctcgcatgggcgagaacgccaatgcgggcggcgatctttcgccg

SEQ ID NO: 63940 - DNA, 145 bp, Setaria italica
  Peptide Sequence Number=SeqID_129914
ttgttctaactttttctaattgttgttgggtctagttgtctacctagtcagcaccatatctctaggactctaggtatagcggtagacaattcatcagataccttgcattgctggtaatgaggaaaaggtcacagatatagcattg

SEQ ID NO: 63941 - DNA, 307 bp, Setaria italica
  Peptide Sequence Number=SeqID_129915
tttttcttatttttgtaaagtttctactattctaagttagtacttattttcctattgttgttccaatattgattgttttagtgaatgcttatgttgcttgctacaatgctctctggatgcatttagaaacgtcgatgtatactattgtatgttggttccattttcatggtattagatctgtgaatctaggcttctgttctatggcatagccaataggaaaggctagttgggtctccccaccaacatacctctagtaaccgtaaactgtcatcatgcacaatgatttatcctgacagataaatctgga

SEQ ID NO: 63942 - DNA, 181 bp, Setaria italica
  Peptide Sequence Number=SeqID_129916
agccttgtcagcgtgcgtgttgatgctggcagcctggccagagtggttctcttgcagctgttgcagctctgctaagtgagcctccaccgttgacactactctcaaacttgaattgcgtgcctcgtccaggacattgacaatctcctggacgaggcacgcaattcaagtttgagagtagtgt

SEQ ID NO: 63943 - DNA, 399 bp, Setaria italica
  Peptide Sequence Number=SeqID_129917
ttagaatgtgttaggtgcattattgcatcatgtctagtattctaatagcgctagcatgtcctttttctcaaattagctacaagaaaacaatgcatgcttcattttttatatccaattttcagaatcttgaggttgctggaagaggaggaagaacgacaacgtcaacaaaactgtccccaaattgagtttctgattgttgagctatctcgtaagaacaaagtggactagttctctgtaaaaattactgcagatggtttttaagttgaatttcagcttattggttcacggtgctgatgcgttactcttcaacagcggtggttgacatcgacacctagccggaatccacgccttggaggagctgtgcagagcgctcgtaaagtgcaaaattcagctggtcct

SEQ ID NO: 63944 - DNA, 259 bp, Setaria italica
  Peptide Sequence Number=SeqID_129918
tttagggctgcttaattttgtcaatgcagagggcacctgttgttggcatactgacaaggcacgatttcatgcctgaacatgtactgggtctgcatcctttcctcttcaagagccgatggaagaaggtgcgacttggtaagttataagtcaccagcatattatgatgcccccaagtaactgatgattgcgttactgctaggttaggggaatacaataggaatttttacaagaagaaataaactacaacttagaaataaga

SEQ ID NO: 63945 - DNA, 285 bp, Setaria italica
  misc_feature (19)..(19): n is a, c, g, or t
  Peptide Sequence Number=SeqID_129919
gtagacttgcatccattcncaaacacgtctccttatactgtccttgagactatgtctttggctaaggctcttatacttttccgtgaagttggattgaggcatcttttggttctgccaaaatcctctacgagggcacctgttgttggcatactgacaaggcacgatttcatgcctgaacatgtactgggtctgcatcctttcctcttctaagtagtccgtattggtaagtaaggttgttcgttacttttggttcggttttctttactaacgtttaggttgtctagt

SEQ ID NO: 63946 - DNA, 279 bp, Setaria italica
  Peptide Sequence Number=SeqID_129920
tttcagtcttattggtcctttgtccccttacctattcttggtccttttttgttgtccttgtttatttttgtacttggtcgcagcttatggtcgtctggtaggcatgttgattgggtcacaatcaactttggatcatggtctttttgcggttcttggctctgctgctcttctaggtggatcgatgagaatgaccgtctcagtttgtgttattatcctggaactgactaataatctgcgtatgcttcctctagttatgcttgtccttctgatatccaaggt

SEQ ID NO: 63947 - DNA, 199 bp, Setaria italica
  Peptide Sequence Number=SeqID_129921
ggacgaagtaaaagaactaagaacaagacaaccacggttctagcacttgatcggttggaattttggcgtggaagtggtgttgactgagaagttaatttggtcagacacgggtcggcgtttgcggtgttcctggcgtccaactttgcgctcaccatgttagcggcggtgctgacggtgtatgtggcgccggcggcgccgg

SEQ ID NO: 63948 - DNA, 436 bp, Setaria italica
  Peptide Sequence Number=SeqID_129922
tcgtccgtcgtcttctttcgtagtccgtctaggggtttcttgtctacctaccggtcggtcaagcagatgcagatgatggagctctgcgccttcctcgggcacgtcggcgccaagacctcctgtgggtatggcgtggcgaccggcgggccgacggcgtgggggctgtgctacaaccacgagatgagtcccgaccagacctactgtgacaagacctatactcagtacccctgcgtcgagggcgccgagtactatggccgcggcgcgatccccgtctactggaactacaactatggcgcagcgggcgacgggatcaaggcggacctgttgcaccaccccgagtacttggaacagaatgcgacgctcgcattcatggcggcaatgtggcgatggatgacgccgatcaagaagagtcagccatcggcacacgaggcctttg

SEQ ID NO: 63949 - DNA, 427 bp, Setaria italica
  Peptide Sequence Number=SeqID_129923
tcttactaacctacgtagtattgtagttcccgtacctagtaccttacttgttgtactaagtaccttattactcagtacccctgcgtcgagggcgccgagtactatggccgcggcgcgatccccgtctactggaactacaactatggcgcagcgggcgacgggatcaaggcggacctgttgcaccaccccgagtacttggaacagaatgcgacgctcgcattcatggcggcaatgttgcgatggatgacgccgatcaagaagagtcagccatcggcacacgaggcctttgtgggtacatggaagcccaccaagaatgacacgctcagcaagcgcctgcctgggttcggcgccaccatgaacatactctacggcgaatcaatctgtggcaggggattccgtcgaccgccatgaacgtcatcatctcgca

SEQ ID NO: 63950 - DNA, 443 bp, Setaria italica
  Peptide Sequence Number=SeqID_129924
tcttgatcggcgtcatccatcgccacattgccgccatgaatgcgagcgtcgcattctgttccaagtactcggggtggtgcaacaggtccgccttgaacatactctacggcgaatcaatctgtggcaggggattcctcgacgccatgaacgtcatcatctcgcactaccagtactaccttgacctcatgggggttggccgtgagcactctggtgacaaccgcgactgcgctgagcaggcaccgttcaatccctccagcaagccggatgaccaacagcagcagcagcaatcaggaagctagaagggacccattacctgcggccacacgtgttgtacacctgttcttgccattgccactgatcaagcttcctgtgctactgtgagctactgattcttcagaatgtgtggagctgctttggattgatgttgctttgagtggctgatc

SEQ ID NO: 63951 - DNA, 232 bp, Setaria italica
  Peptide Sequence Number=SeqID_129925
tactcacccagaagtaatcttcatggtgagtgcatgtgctgagccttcatatagaagtccaattcccattactgctgctgattcatacctgggtgttggtttctactacccacaccctaattttgggcccttggatcttcatcaaacatttcatccaagggttctttcttctactaccagccatctccttcctccagctatggccatggtgcctgagcaagagcccaatgct

SEQ ID NO: 63952 - DNA, 480 bp, Setaria italica
  Peptide Sequence Number=SeqID_129926
ggggtctgtggggactgccatacagtaatgaagttcatcagtgaaatctcacgagaggaagatcatcgtgagagatgctagtcgtttccaccattttgagggtgggaagtgttcttgtagtgaattctggtagctcatctgctgatgttcagttgtgcttaagtcctctaggcacttggtgggatcaaagtgaggaatacaggagatagcaccagagcctcagtttttatcatcctttggtgcactgatatttattgatcagtgatcaactcaggccagagaacctgagaccttgatgggagttcgagaggctggttgtttgaaagcggttgagatggggtaagtgaacatgaccttttctttcaatgcattttacatgatatttaggcaatatggtatatcttgtcgatatcaaagttttctgtctgatcttgatcctgagtatttaccatttagtgactcaccgtctgaaaggtgtaa

SEQ ID NO: 63953 - DNA, 234 bp, Setaria italica
  Peptide Sequence Number=SeqID_129927
agagatgctagtcgtttccaccattttgagggtgggaagtgttcttgtagtgaattctggtagctcatctgctgatgttcagttgtgcttaagtcctctaggtatggtggaagctcttaccttgcttcgggggcatacttttctggtagtctgaggaaaaagcaaagagacctgcactaaagaattttcagcctttcagactttatactgcttttcttgtttgttgacttcatg

SEQ ID NO: 63954 - DNA, 265 bp, Setaria italica
  Peptide Sequence Number=SeqID_129928
aggtcttggttcctttctattagtttgtagtctttgtaggttaagttcctattggggggtcaaatgggatctgcaactatgaaattgaggtgtttgttattctgattgtagaaaacaaaacggtcaacatttataaatagctatcttatgtgatttattagtggattcactggatacatatccaataagatctactatatacagtccctcatgatttagcaaaattaatttgattcattgctgacatgatttttaggatcacttt

SEQ ID NO: 63955 - DNA, 244 bp, Setaria italica
  Peptide Sequence Number=SeqID_129929
cgccttcgttctcctcgcatcgctcctcgccttctttcttttggaggaagcggaggcatggcaatagcaagaagaagaagaagaaccccaagatctgtgaagaggggtcggcggagcggcggtcgcacccgcggcccaacaccggctcgattctcttcgacattgccgagctcgccaaggccaccaatggcttcgcggagcgcaacctcgtcggccgcggcgggttcggggccgtctaccgcgg

SEQ ID NO: 63956 - DNA, 411 bp, Setaria italica
  Peptide Sequence Number=SeqID_129930
aatcaaggtcacattaacaggactctcctgctggtattttggaggtgggagagtctgctgcagatggagcctctagagaaacattggaagaagcatgtgcagatgtagagataggtctcaccttttgctcagttagatattccgctgattggccaatagagttacattattttccgagcaagattgaagacccccaacttttcacctggatcggagtctctagaatgtgcactttttgctctggatgatataccattcgattctctagcattttcttcaattattgtcaccttacggatggtatttacccctccctgttctccctgccctacccaccatctgttcttgccattgtaggtttaacattaaaaacttttaacttatctaatatttagttagacaagtaacaaa

SEQ ID NO: 63957 - DNA, 206 bp, Setaria italica
  Peptide Sequence Number=SeqID_129931
tgggagagtctgctgcagatggagcctctagagaaacattggaagaagcatgtgcagatgtagagatagtctcaccttttgctcagttagatattccgctgattggccaagtgagtgaaaattggcatagtcataaagttgtgctttactccgtacaccactaagttgattcttcttgtgtattacgctgagatgcagtagagtta

SEQ ID NO: 63958 - DNA, 276 bp, Setaria italica
  Peptide Sequence Number=SeqID_129932
gagggtataaacctttcgtgattgatgagaatgattgtggctacaacgggcacaaggcaacacagcgaaagacattgactatcgatccgaccactctttagggttgaacctccatcggagccttgtttggcgtctcgcagtggattggaatagtttcaagtaggtggtgggagcctggaactgtatatgcttcgcttttgttaaagttttgttgttaagtcctttgtaatttccgttcttttctttgggtttttcttttggttagttcgttcctta

SEQ ID NO: 63959 - DNA, 246 bp, Setaria italica
  Peptide Sequence Number=SeqID_129933
aactttcaaagacaccggtaggaagctcttgcacacatgaaatttactagtggaaaggaaagattgagacatacttccatgatcaagaggtgatggaactcgttccagctttcagcgaagtgaacctttatataatcagctctcctcgaccagccaaaggtctcatacaagtgaagcaccgatataaatgctgttcacaaccaagcagacttaaaacaagcactcaattgatatggcagaaatcaa

SEQ ID NO: 63960 - DNA, 233 bp, Setaria italica
  Peptide Sequence Number=SeqID_129934
agtgctctgcctcatcgtctcttatattgacaaacacatcatacaagttatctgcaatggaatatgggaaccggtgagcacttgcaacctacaagtctattttaggcctcctagaacatggaactcttgctgtctgaaactcatcaaataagtaaaggtcctcgttcaggtaatagtttagagctgcctctggagctggtagtcttttcaactcctcttcatggagcttgaga

SEQ ID NO: 63961 - DNA, 356 bp, Setaria italica
  misc_feature (341)..(341): n is a, c, g, or t
  misc_feature (346)..(346): n is a, c, g, or t
  Peptide Sequence Number=SeqID_129935
agttcaccatccaacagacgctactaaccaaccgaccgaccgaccgaccatcacgaggtccaaaaatttaccaccacaaagtgccaaccgaaccgaccatagattaagtgcgataaaacagagcaaagataactcgcggcagcaacctccacctggcgccaccgcagacgactcagaaacgagtcgcttagtcgacctcctcgatcttggggccggggccgccgcttcccgcaggcgcgtcctcgtccattcccgcggcgccgcccattgttccgtcttcccgtcgtcccttggttactattctttggttcgtttattttgttttaatttttgggtttttnttttnttttatttta

SEQ ID NO: 63962 - DNA, 258 bp, Setaria italica
  Peptide Sequence Number=SeqID_129936
cttgaacctctccatgaaggagccgtcgttggcgaagagctccttatccatgcctcggcgcagatgtgatgcttctgcagcactcgcttgccgcctcaaaacagctacaattctttcaacctccaattaacacaccgcagtcgtcgcacaaaaaatctaacaacgcacactcaatcctccaaaataatcaactcgaatggcccaaatacaaagaggccgcgaaactccgccgcgggaaatttgcgggcggaagagtcc

SEQ ID NO: 63963 - DNA, 436 bp, Setaria italica
  Peptide Sequence Number=SeqID_129937
ctaactcaggtatgaattcacgcaggaaaagcgtatgaagaaccaaaatcatatcctgccatttggttagtcatcatttgccaagcctggtaaaccatcttccatggctcgatcttctctgctcagccgctcattaaatgcaatggaacagccatcatgccaacgcctgaacatctcccagtccaaggcatgctcaccaattgaacgagatcgcaattgaaggcacaccatacactcttgcaacagcaaaggcggaagagtggaaccattttttgatgcttagcatcatttgatcgaccaagagccttttcctcttcagcaagttgaatggtgtatctccaggattcctctgccgtgtgatattctcaaactatctcccatttttggcaacaaacttgccaatttgtcagcaacttgcttcactgtcatatcattt

SEQ ID NO: 63964 - DNA, 392 bp, Setaria italica
  Peptide Sequence Number=SeqID_129938
caatacatcacattatgaaactatgctccacgtttcaacacatcaccatggaagtgaatttaaaagcaacaaagatcaacactacacaaagaacaaagctacggttgaaccccccgtaagcctcagatctgtggcattccaagatatatgctgactaaatgagcttctagtttttctgctgatgaacaaaaactttcaatgctgttagtcatactccctagctgttagttatgtgagcaaaaatacagcaaaattggtgtcttacatcttagatgaactaacctgtatcagtaatattgtttccttggattgttcagagggtttggcctatagcggtatccaagcatcattctcttcttgtattgctcgtagatgtcatcttcagattgttg

SEQ ID NO: 63965 - DNA, 363 bp, Setaria italica
  Peptide Sequence Number=SeqID_129939
gcattccaagatatatgctgactaaatgagcttcttagtttttctgtatcagtaatattgtttccttggattgttcagagggtttggcctatagcggtatccaagcatcattctcttcttgtattgctcgtagatgtcatcttcagatgtgacctcaccaggcttgacagcaccaacaccaagatgatccttcttcacatctccagccataatgggatccgcacggcctcttctctcactaccaagaccctcaccttccctccaacccatcttagatagaagtttgtggccaatattgtctgcctgaatcttagccttctcggcagcttctttcgtagccttttgtgcttcagcatcattaca

SEQ ID NO: 63966 - DNA, 361 bp, Setaria italica
  Peptide Sequence Number=SeqID_129940
cagtgctagaactagcattttttgtatgcttcagcatcctttgactgaccaagagccttttcctcttcagcaagctgaaactcataatatttgtagtctggacagtgtttgtcaaatagaaatttgaatggtgtatctccaggattcctctgccgtgtgatattctcaaattgtctcccatttttttgcaacaaaacttgccaatttgtcagcaacttgcttcactgtcatatcatttggtgggggtggggcaacagcccctgccggggtagctgccacaggagcatcagcttgcaacaagaacttagtaggacgacttaggacaaggactacctaccctacttacctaactaattaccta

SEQ ID NO: 63967 - DNA, 406 bp, Setaria italica
  Peptide Sequence Number=SeqID_129941
aaagttacacaacaaatcaaattaccctcatatgccccatacaaagctaatgcagttgtctgatagttaagacttttgttcaaatgagcttctatacggaccacttggtgctttgaagcttgcaatgctacattaacaagagtatatagcatcaagactttatagaacttttaaatataaaaataaaaaaattgtgccacaaaccattttttgatgcttagcatcatttgatcgaccaagagccttttcctcttcagcaagctgaaactcgtaatacttgtagtcaggacagtgtttgtcaaatagaaatatgcaaataacccaagatttatatcaataatttattaaggtcagattctaatttaaaagtaaaacagagtttatgagaaaataagtagtgcagtcg

SEQ ID NO: 63968 - DNA, 253 bp, Setaria italica
  Peptide Sequence Number=SeqID_129942
ttgtcatccaagaaggcaatacatcacattatgaaactatgctccacgtttcaacacatcaccatggaagtgaatttaaagcaacaaagatcaacactacacaaagaacaaagctacggttgaaccccccgtaagcctcagatctgtggcattccaagatatatgctgactaaatgagcttcttagtttttctgtatcagtaatattgtttccttggattgttcagagggtttggcctatagcggtatccaag

SEQ ID NO: 63969 - DNA, 242 bp, Setaria italica
  misc_feature (3)..(3): n is a, c, g, or t
  Peptide Sequence Number=SeqID_129943
tgntccacgtttcaacacatcaccatggaagtgatttaaagcaacaaagatcaacactacacaaagaacaaagctacggttgaaccccccgtaagcctcagatctgtggcattccaagatatatgctgactaaatgagcttcttagtttttctgctgtatcagtaatattgtttccttggattgttcagagggtttggcctatagcggtatccaagcatcattctcttcttgtattgctcgt

SEQ ID NO: 63970 - DNA, 305 bp, Setaria italica
  misc_feature (44)..(44): n is a, c, g, or t
  Peptide Sequence Number=SeqID_129944
gaagcttgcagtgctagaactagcattttttgatgcttcagcancctttgacttgaccaagagcctttttaccgtcttcagcaagctgaaactcataatatttgtagtctggacagtgtttgtcaaatgaaatttgaatggtgtatctccaggattcctctgccgtgtgatattctcaaattgtctcccatttttttgcaacaaaactttgccaatttgtcagcaacttgcttcactgtcatatacaatttaggtagggggtaggggactagacaaataagtaacaaacttaaaaagaaaactaa

SEQ ID NO: 63971 - DNA, 204 bp, Setaria italica
  Peptide Sequence Number=SeqID_129945
acaacaacaacaacaacaacaacatagcctttcagtcccaagcaagttgggtaggctaattataacaatactttatatatatggagataaaaaaggctaaagtaatactgtgaacaatccaaaatgaatgtatgcagtactatcagtaaacacattcctaatgtgactaatctgtattgcatacaatccaaaatgaatgtatgc

SEQ ID NO: 63972 - DNA, 456 bp, Setaria italica
  Peptide Sequence Number=SeqID_129946
cgacaacggatacggccgcagcgctctattgaaggatggacaattcttgtctgtggagttaaagaagatgcagaagaagaagatctgcacaacgttttcggtgaatttggtcgtgtcaaggacttgcatttgaatctagaacgccgcactggatatgccaagggatatgcgctgattgaatatgaaagctttgaggaagcacaggctgcgatcagagcaatgaatgggactcagctgttgacaaagactgtctatgttgattgggcattcagcagaggtcctataaagaacgccatgagcacaaggccaccacgcccaagatccaggactccaccgcgcaggcttaatgccttgatgctgacgccatattgagtggggagtggttggtcttagggtttattgttgttctagtttcttaactttggtttttattttgttttttggtttttcgttttt

SEQ ID NO: 63973 - DNA, 200 bp, Setaria italica
  Peptide Sequence Number=SeqID_129947
taagtttaggctttgttaacttgtcagggttaaaggatgctaatgctcattaagtattaagtgttcattagcatcctttaaccatgtaagtttaggctttgttaacttgtcagggttggctttttttcttgttttactttgatctgaagacatgttttgcattggaaatattttatttcaatcaagccagatagtgaagt

SEQ ID NO: 63974 - DNA, 243 bp, Setaria italica
  Peptide Sequence Number=SeqID_129948
gttgtttattgcatgggggaaactgaacagctagctacatcatgacctttggaggtcgtttattaatgttgctaacaaggcttatcatctatattacatgagtaacattaataaacgacctccaaaggtcatgatgtagctagctgttcagtttgtctgttgtttattgcatgggggaaatagttgtgctgtaacgcgttcaatgtttttagaggaaactatcaagccgtattctttttaaag

SEQ ID NO: 63975 - DNA, 462 bp, Setaria italica
  misc_feature (442)..(462): n is a, c, g, or t
  Peptide Sequence Number=SeqID_129949
ttttattcgtctattggtcgtacttggttgtccccctaaagtattcttaagtctagtctaagtagttgtatttctgtgaactaatgaactgggatgaatcagatgatcacccggaaacttgggcttggaagattatggccctctgctttcgatttccctcagcgttcaattcaggcaagctcggtttgtctctagtgtcttaggtgtcactgcacagtgacacatggattcagaagaactgcctgcttactcggcctctctgccacaaatcgttgctttactcatgtaatatagatgataagcctgagcaacattaataaacgacctccaaaggtcatgatgtagctagctgttcagtttgtctgttgtttattgcatggggaaatagttgtgctgtaacgcgttcaatgttttagaggaaactatcaagccgtaattaacnnnnnnnnnnnnnnnnnnnnn

SEQ ID NO: 63976 - DNA, 298 bp, Setaria italica
  Peptide Sequence Number=SeqID_129950
ctactatcattcttcttcgagggtagttttcagttctactccagtatggctggttcccaaaaatttttcatgggtcctcctcagtggggtggtggcagcctttttacttttatcgcatggcgactggtgccccccaaagatctaagcagcaagagtgattctgtgaactaatgaactgggatgaatcagatgatcacccggaaacttgggcttggaagaattaatggaccctactagactttacgaatttaccctacaagacgttacaaattaacaaaggaacaaaagaactaacgaa

SEQ ID NO: 63977 - DNA, 404 bp, Setaria italica
  Peptide Sequence Number=SeqID_129951
tacgatccaaaaaggttactaatgcttcaaccaacaatttaacaaggctcagctgtgtgcatcctagttgatacatatgtcgggagttaatacttctatcatctaaagactaacacaaactttgaaattgaaatggcaaaacaaaacatacgggtcgagaaaacagggccaaaacatgcgtctattagccaaagcatagcacggatgtccaattacgtctagaaacaacaaggactagcattctacaattacgtctgcaaggtaggctgcagactagtcgggatgccaatcaggcgcccagcaaagctgagcaagggctctctgtggcagggaactgaaactcttcttaccctagtctagtcttgtccgtattcttattctacttgtccgttagtctattgtta

SEQ ID NO: 63978 - DNA, 323 bp, Setaria italica
  Peptide Sequence Number=SeqID_129952
tttagaaaaatcagagcaaaccaagtatctctaaatacagaaaagaggttcaccaactaccatgttaaacaagattccctattgtttcccaatacagccattgatagatgccaacttatatattggcagcaaccagcaagattccctgtggagtcatataaattaaatacatgataaaatcaggagcttcatctttttcgcaaaaaaaaaagaagaggaacttcatcttgaacttacagagccacagttgaccaccaacgttctatttaagttgagtctctaaacccagatggtctagtaaagtaacgtcttttcttcttgtt

SEQ ID NO: 63979 - DNA, 201 bp, Setaria italica
  Peptide Sequence Number=SeqID_129953
ccggttgacatttggctatcttcgttgatctcctcaagttcaaagcaaccggaccactgtacttgcgaagaatattcaggcttgcaagttcccatgcttcaatgtttccttgcccgttcacatggagcaacttgcatatgccttgatgaacatcttggtggtttgggtggcctgatactccgtatgaatcaaggcatatgc

SEQ ID NO: 63980 - DNA, 430 bp, Setaria italica
  Peptide Sequence Number=SeqID_129954
cgactcagtcgcactagtgctctgctagcttccaacactccaacgaaccagcttagagcgctgctaacaaaccttctcaaaagccctttcaccagagtcacatggaggatgcacctaaaacaagacttgaacatgtaaaattacggctcgcgggcccatgtctccaaacattcaactcatctcttttgatcgcatcctgatttaatctagccgctcatactcttctagcatgtcaatgacatccttgacaggccagccagccagacaacatagagaagaggtaacgtaagcttgagaataaagcttcattcagacagtctgcagaagctcaggctatagataggtaggcaatagctcagtttctgcaggagcttcattcatgaatcttgtccataaagcctgacacatattccatgctgttgcttctgaa

SEQ ID NO: 63981 - DNA, 478 bp, Setaria italica
  Peptide Sequence Number=SeqID_129955
cattgacatgctagaagagtatgagcgcttcccaaaaaccttattcgtcgtcttcagcgatcctgcaccgggagagggcgaataaggtttttgggaagcgctctgcgcgactgctcgatcgctttctccccttcgtcaagttcttcgtcgactccttcaccacggcttgtctacctcttcgttgctcgggcgtcacttgtcgtcgcgaacaacgtcaggctgctgatcgtcgtcgcctgctgtacccggtagtcgtccaggagctccgaacaaataggtgtgctctgctagcttccaacactccaacgaccagcttagagcgctgctacaaaccttctcaaaagccctttcaccagagtcacatggaggatgcacctaaaacagacttgaacatgtaaaattacggctcgcgggcccatgtctccaaacattcaactcatctcttttgatcgcatcctgatttaatctagccgctcat

SEQ ID NO: 63982 - DNA, 417 bp, Setaria italica
  Peptide Sequence Number=SeqID_129956
ttcagtcatttctgatttccttcttcgcaggcatttaccaacaaagtccttgctgatagtgataagcatagcaggacgtcagtgttgcaagcatgaggtggtcttggagtcgccgcgcttggagccgcagagggaatcactgcgctcagagccacaacggatcggagatcagcgacgctgtggtcacgctccaaactatctgcgtagctgctaaatttgaaggctctacagtatataaaaacacctcacttgaagatatgcaattgtatgaccatagcttccttcaagatcaacgtcaatttggctgtagtgcttgcttggcaatttcttcaaccatagattaaaaatacttcaaaatcataagcctctccgaacaaataagtgtgctctgctagcttccaacactccaacgaacca

SEQ ID NO: 63983 - DNA, 253 bp, Setaria italica
  Peptide Sequence Number=SeqID_129957
agcttgccataacttccaaagcggtggcaaatttgcaattgcccaaattagtaatgtctttaatatcactgcatttctgccttttcacaaagaactaactagcttgtcctaaatgtctacaaacagagggagtacaagagaacactgatttcatacttacaatcttcaagcggttcaagctctcaaagtctggtctagctcttccgaagtggttcaatacttcttctcttgcttgctcttgccattctgggtg

SEQ ID NO: 63984 - DNA, 375 bp, Setaria italica
  misc_feature (3)..(3): n is a, c, g, or t
  Peptide Sequence Number=SeqID_129958
tanaagtaaacttaacttaactaacttaagaacccgactacttagaccaattccgggtgcatgcttagcacaacgagagtccaagtaagcaggactgatgttgtctccataccggcaaagtaaaatagcttgcattcctcaatcacatcttctgttgtcaatcccaactttgcattcccatttgattgcttcatgttagactccagcaataagcccagcaagtcatcattatttgtttcgccatttttcatggccttctctctttttcccaattatctcatgcagaattgtgcggatctccgatcaatttctctcatccttctgttatttttggtgggcaaaaaccatagcctgggataaatattgtttggaaag

SEQ ID NO: 63985 - DNA, 285 bp, Setaria italica
  misc_feature (9)..(9): n is a, c, g, or t
  Peptide Sequence Number=SeqID_129959
ttttttttnttttttttaacgaagaaccaagtatatgctcatcaagtactgaagtatacggtaatactacaatcaaagtaaggaagaaccaagcggcactatgtatttatttctggtgaatacaaaaaatagaagttctagaagatgcagatgaagaggcacaccgatagaaattcctttgcagctacttctttatcgttaaagtacaactttgacaattaaaaaaagcttcagtcatttctgattttccttcttcgcaggcatttaccaacaaagtccttgctg

SEQ ID NO: 63986 - DNA, 285 bp, Setaria italica
  misc_feature (272)..(272): n is a, c, g, or t
  Peptide Sequence Number=SeqID_129960
cagctacttctttatcgttaaagtacaactttgacattaaaaaagacttcagtcatttctgattttccttcttcgcaggcatttaccaacaaagtccttgctgatagtgataagcatagcaggacgtcagtgttgcaagcatgaggtggtcttggagtcgccgcgcttggagccgcagagggaatcactgcgctcagagccacaacggatcggagatcagcgacgctgtggtcacgctccaaactatctgcgtacgctgctaaatttgaagntctactagttatt

SEQ ID NO: 63987 - DNA, 251 bp, Setaria italica
  Peptide Sequence Number=SeqID_129961
ggtgaatcaaaaaatagaagttctagaagatgcagatgaagaggcacaccgatagaaattcctttgcagctacttctttatcgttaaagtacaactttgacattaaaaaagcttcagtcatttctgattttccttcttcgcaggcatttaccaacaaagtccttgctgatagtgataagcatagcaggacgtcagtgttgcaagcatgaggtggtcttggagtcgccgcgcttgggagcccgcaggagggg

SEQ ID NO: 63988 - DNA, 347 bp, Setaria italica
  Peptide Sequence Number=SeqID_129962
gagaataaagacttcattcagacagtctgcagaagctcaggctatagataggtaggcaatagctcagtttctgcaggagcttcattcatgaatcttgtccataaagcctgacacatattccatgctgttgcttctgaaacttgccgcatttcttcagaagagtgctgcttcttgcttgtgacttccacttgtacctgcaaagatgaggtcacaattctctttccagtacatctccaaaccctcaacagcaattttcactggatcagactccatatagctgccaaacaactgttagagagaacagatataagaataatattaacaaataactgaaagttagtagaaga

SEQ ID NO: 63989 - DNA, 250 bp, Setaria italica
  Peptide Sequence Number=SeqID_129963
gtccattgttcaagtggtggatgaatgtagcttgaagctctaggcgagagttcaacttaacagtcctcgctaaaacactagtatataaatagcagtgagaaacaggcaaaatctctgatgggcatttgagatctggtgggggattgttagatatatgggcttggcccatataaatgataattctgaaaaatctcaaaggcccattagcgtaagagggggtacaccatctattagtcccatattgctaaat

SEQ ID NO: 63990 - DNA, 240 bp, Setaria italica
  Peptide Sequence Number=SeqID_129964
ttcagaagagtgctgcttcttgcttgtgacttccacttgtacctgcaaagatgaggtcacaattctctttccagtacatctccaaaccctcaacagcaattttcactggatcagactccatatagctgccaaacaactggattgaaagggagagattgtcagggctcgagctcgcgcagggctggtggcgagaagcctccttcgcgccacccaatgccacctctcaccgccgcaatacgg

SEQ ID NO: 63991 - DNA, 215 bp, Setaria italica
  Peptide Sequence Number=SeqID_129965
attgaattctcccatctagtaatggtttcgtcgcaacacgtagaaatacaggcagcatcctctgcaaataagacatcaatgacactatagactacttagagaaggcgttatccgataaacgaacatactgtgatttgaaatgtaaaaagggaaagccatctacagagaaaaaaagagagtaagcaattacctttattttctcatgatgaaatgca

SEQ ID NO: 63992 - DNA, 198 bp, Setaria italica
  Peptide Sequence Number=SeqID_129966
cctatcccctgtgtgccttgcctatccccgcgtgtctcagggtgtttggtagcgttggagatgccgtcagagaaccttgcaggattgaactcgctcgcgtcttttccccaaatgtccggatcatggtgaatgaagagaatgggcagcagaaggttcactcctgcagggtatctgatgccgccgagctccatgtccttg

SEQ ID NO: 63993 - DNA, 326 bp, Setaria italica
  misc_feature (292)..(292): n is a, c, g, or t
  Peptide Sequence Number=SeqID_129967
cttcgtattgaatgctagagtgcttcaattgatgaggttggagataccaccagtcatgcccgcagaatggattgagatgcagcctgagctactccagctcaacgatagagcttcaagtgatgctcagcttgatttttccactgacagtgccagatggttgtgttgccctgtaaatcttaagtgggtcagtgatttgtcaagagctgatcccttcttatcgagttctcggaactgggcatgatagcctgtaaatcttaagtgggtcagtgatttgtcaagagctgatcccttnttatcgagttctcggaactgggcatgatagcctt

SEQ ID NO: 63994 - DNA, 314 bp, Setaria italica
  misc_feature (312)..(312): n is a, c, g, or t
  Peptide Sequence Number=SeqID_129968
atgaccgaaggatgtgcataatttgtgaaatcaccaaaagacaacctgcagagcttattaaagtttgttgcaacccgcatgggactcgtgtaatgcaaaaggtcatagagactataaataccacagaggcttcgatggttgtgactgcattgagccacggaatagtgcgtttgatgacagatactaatggaaaccatgttgtgaaccgctgcttggatacattcttacctgagcacagggcgttcattattgaggctgctgcatcatgctatcttcaactagcaagggatcgtcatggctgttgtgtccttnag

SEQ ID NO: 63995 - DNA, 264 bp, Setaria italica
  Peptide Sequence Number=SeqID_129969
cttcacaattcttatcagcaactataggcccctcagttgcccttgtgtctgccccaagcacaaccccatcctggaagacgaggccgacgatggtggtcccagtcttgaggaaaccggggatcttgagcccgttcttctccagagagtcgttccgccggcacaggtcgaagctgaacccgcccttcgccgggagatccatcatcctgattggtttgagtttggaggcgatgcgacagcggcgagcggcgaagctccttcccgcgc

SEQ ID NO: 63996 - DNA, 437 bp, Setaria italica
  Peptide Sequence Number=SeqID_129970
gcacctttgcacatcctgtagctattgtgaatttgtcctgctgctttcggaacttcttattggattgaaatatggatgagccatggtttcctttgctgtaggcctttcctggtgatcgtaccggaggagcttatctaccaaatcgatagcctataaaaggtagaaattctcagttattttcactaactggtcataattatcctggccactaaagaaagggtccacccggaatatcattgatgcaaacatgcaaccaaggctccacaaatccaatgagtaatcataatctaacaaatccacaagaagttcaggacccttgtagcatcttgaggcaactctagcattgtattccatcttgggatgatagaactctgcaagacccaatcaataagacgaagctggcgttttcatggtcatcatgatattgtgtaggtttg

SEQ ID NO: 63997 - DNA, 401 bp, Setaria italica
  Peptide Sequence Number=SeqID_129971
ctgctttcggaacttcttattggattgaaatatggatgagccatggttcctttgctgtaggcctttcctggtgatcgtaccggaggagcttatctaccaaatcgatagcctcggagctaactaggtgtatgttcctagcattgacaaactttgtccatggtttcctattatgtctcagttattttcactaactggtcataattatcctggccactaaagaaagggtccacccggaatatcattgatgcaaacatgcaaccaaggctccacaaatccaatgagtaatcataatctaacaaatccacaagaagttcaggacccttgtagcatcttgaggcaactctagcattgtattccatcttgggatgatagaactctgcaagaccccaatcaataagacg

SEQ ID NO: 63998 - DNA, 244 bp, Setaria italica
  Peptide Sequence Number=SeqID_129972
gaagttcaggaccttgtagcatcttgaggcaactctagcattgtattctatcatccaagatggaatacaatgctagagttgcctcaagatgctacaagggtcctgaggcaactctagcattgtattccatcttgggatgatagaactctgcaagaccccaatcaataagacgaagctggagaccatatttttcaaggtagttatagaaatcttctgtgccaagaacctcagttattttcactaa

SEQ ID NO: 63999 - DNA, 204 bp, Setaria italica
  Peptide Sequence Number=SeqID_129973
cggggtggatcgggaggacgcaaggtttcctctggcgctcgtcggtggtagtagcagagagacaccgggaggcatggcggcggcggcgtcgccgacgtgggtgttcgggtacggctcgctgatctggaaccccggcttcgcctacgacgcgcgcgtcgtcggcttcgtccgggactaccgccgtgtcttctaccaggggagcac

SEQ ID NO: 64000 - DNA, 396 bp, Setaria italica
  misc_feature (61)..(61): n is a, c, g, or t
  Peptide Sequence Number=SeqID_129974
gattcttccaaggacgaacatattaggatcagctgtgccttcaggtgtaatcacaacctcnggtttcccaaagagtgcctctgtgtgcttctcgataatgccaaaggcctcctttgggaaaccagaggttgtgattacacctgaaggcacagttgattcttccaaggacgaacatattaggatcagcttcgccgggctgagaaggctgatcctagaggctgttactttcggatccttcctctgggatgttgagagctttgtggactccaggtaccatttcgtgaccaactaagattgtcatcccaaagagtcaaggcagattcatggtttacaactgtgatgccataaaactgggcaaatcataaataggatagcataaagcatgggtgcagtaac

SEQ ID NO: 64001 - DNA, 249 bp, Setaria italica
  Peptide Sequence Number=SeqID_129975
cagcttgccggaattcggttacaagttggactagtatttcaggagtccagacgtgcaatgtctggctgcagagatttggcgtcactggctattgttggtttatggctatctggtctcatttgaggacctcttttggcgaaataattgtatttgactgatcaataatcaattgttgaatagctcgaattcgaaatactgactgcctgttcggtcagggcctggaacttaagtgttcgctaatcctataat

SEQ ID NO: 64002 - DNA, 266 bp, Setaria italica
  Peptide Sequence Number=SeqID_129976
aaataacaataagacttaatacccaataccggtagtagaaaccaaaactacccaaccttttgtgtcgcaatggtcaccaaagaacccatgttctgcaacaccatcaaaaccactcctgtagtggtgttcggcaacacggtggtcatcgacgacaagctgaccgagggcacatcgcaatcgtcggccaccgtgggccgcgcgcagggctattacatggtggcgtcggtggccaacctggagctcttggtgaacatgaatgtggtgct

SEQ ID NO: 64003 - DNA, 250 bp, Setaria italica
  Peptide Sequence Number=SeqID_129977
ccgacggccgtgcgggtggtgacggcccgcccgtcacgtcgtgcatgtaaaagtgcaggtgtgccgacgtccgtgcgggtggtcagcggcccgcgcggctacttcggcaacacggtggtcatcgacgacaagctgaccgagggcacgtcgcggtcgtcggccaccgtgggccgcgcgcagggctactacatggtggcgtcggtggccaacctggagctcttggtgagcatgaacgtggtgctcacgtcgg

SEQ ID NO: 64004 - DNA, 349 bp, Setaria italica
  Peptide Sequence Number=SeqID_129978
caaagatggcatccatagctatggagatggcacgtaagatgcaaggatctttcatgtacgcgcacattggttcagcattgttaagagccaattttagcattaaaagttggtccatggttctcaccaatttaagagagtttctgcaaaagaatatgtcattgctgggtgaagaatacccagatgatctcaaggccaaggatcatcctcaatggacttggaacttaaccaaacagaaacatgacgagtactttatgctgtatgaaatttacccaaggggatctggtgcagaggaggtcccagatataacaatgatagatctgctatttggatgtgctcagccgcgagggaa

SEQ ID NO: 64005 - DNA, 302 bp, Setaria italica
  Peptide Sequence Number=SeqID_129979
agaccgacgaagggaaagtaacgaagcaacattggttcagcattgttaagagccaattttagcattaaaagttggtccatggttctcaccaatttaagagagtttctgcaaaagaatatgtcattgctgggtgaagaatacccagatgatctcaaggccaaggatcatcctcaatggacttggaacttaaccaaacagaaacatgacgagtactttatgctgtatgaaatttacccaagacctcgtacttccctcgcggctgagcacatccaaatagcagatctatcattgttatatctggg

SEQ ID NO: 64006 - DNA, 444 bp, Setaria italica
  Peptide Sequence Number=SeqID_129980
aataagttttaaactagaaagggttacttacaacaattaattacaagaaggaagttggtgcgaatattctatcaggaatggcaggagctggagttctttccggctacgaccagctccaacagtttgcaagtcggcatggtcacaattttgagcgcaagatgaaaggggtattgaaatgatgtgtatatggatatgaatatatttgaatccttggttcaaggtttgatcattcaaaggggatgcacaagcaagatatcccgggtctgaagaacttcacaaaagttaatggtggaaaaaggcaaaaattccaggaggtgaatctccttgctgctcggacgcgattgactatagattgggttatctatatatcttcaattggctatatgctgtagcccttgatgaaatgttacctcagcaatctctggaatggaatttgcaggctcc

SEQ ID NO: 64007 - DNA, 283 bp, Setaria italica
  Peptide Sequence Number=SeqID_129981
aattacatggaaattcagacagcttctcccttgggaaaccagaacggagatgtaggctgtcaacattctggcttatgacaaactttagaagtcctgctatttccatgtaattcagacagcttctcccttgggaaaccagaacggagatgtaggctgtcaacattctggcttatgacaaactttagaagtcctgctctttccaattcaacgagtgccatatgagtcaagcttggaacagcgtgcaggcaaaggtgttcctgatgcattctacttcccttttctt

SEQ ID NO: 64008 - DNA, 498 bp, Setaria italica
  Peptide Sequence Number=SeqID_129982
aggaagaatttacaaaatacggacttacctaattgctcctgtgcaacacctagcgatctggtcaattggtgacaattccagctgcaagtcctatctctgcagtgatgcctccccaaactgcacaattactaacgaagcatcagaggtagcccttgaggaaagtcaaatgtcgaagtatgttggaaggagagaggcttattagtgaacaaacacacggaaccccacacggttccgattgctcaagcagaatcaaactccccctccaatccatccatccatataaaatccgactgctggagaagaaccaccagcccgaatatcagaattgcagcggacagaaatttaagagtaatggaccaataagaaaggagctgagaggtagagatatccaaacgatggggttctcccggcgctatgaactcagtccagtcaacgtctcaatcgacctccaaacaccaccctgctgcctctgcagatccagctaacaggaatggccat

SEQ ID NO: 64009 - DNA, 398 bp, Setaria italica
  Peptide Sequence Number=SeqID_129983
aagaacggaacaaaccaaattaagttagaagactaaaatagaatctgcgaacataggaatgcaagcagcaccggaattaaagctacgctcaaagcatataacagataaaaacagaaacaagttaagtgttaaaggtgtaaacgagttgtagttataaaattccccacgctgcttgaatctcccaggtatgctcccaaccttttaccactgcgtaacggggtatccaagattttcaactcagtaaagttatcataattccataaactagcatgttgtctcaaaattaggagcaggttagaagtactcccaacacattccgcttccgcttcccactatcagttcttcaaatggaataggagaagctggtgacctgcaatgatgactatactgtgatcatt

SEQ ID NO: 64010 - DNA, 349 bp, Setaria italica
  Peptide Sequence Number=SeqID_129984
cttttcctggttttgatccaaaaaaaagggaatgcaccagatggaagtccaaaaatgagggagttgcagatcaaggttcaggaggaaggactaatctctcgattctgcataaaataaagatgagggcataaacggtgcagtgaagaagcttaactccaggagatcaatagcacgattaccaacaaaactaaataagagaatgcagcttggctattcacagaagctagggtttgaataatcgtgatatgatgattatctggattataactggaatttgagacagaaataaatcagtgtaggggtacttaaagtatttattacctaaattctaggtaacctattatttact

SEQ ID NO: 64011 - DNA, 293 bp, Setaria italica
  Peptide Sequence Number=SeqID_129985
acaagagaatatgtcctcttacttccctaggatctttgtagagcttattctgctagggctagttcgttgtcactgggcaaagacatccagatcactcgcctgacgtcaagtttggtcctatggttctgagtattggccaggtcttcagattggctagtgcctgatgcgggtagagtatgcataggatttgatttttcagatcatatatcatcgtcttctagattgcctgacagcaaccatgatatgcatagaatcaacaatctcattgatgccatctattgtgaagaaaaatc

SEQ ID NO: 64012 - DNA, 254 bp, Setaria italica
  Peptide Sequence Number=SeqID_129986
agggagttgcagatcaaggttcaggaggaaggactaatctctcgattctttagcttgaagttgcaaaatgaatggggccaacatctagctgagaccttactcaaaatagattgaacttccaccaacggatgggcatgtagggtgactgccaaatcgagcttgtgcaaagcattgtatattactggatggaagaacccacagatgaaatcgggtaaaactcagaatgtagttaagatagaaccaaccaaacagcc

SEQ ID NO: 64013 - DNA, 227 bp, Setaria italica
  Peptide Sequence Number=SeqID_129987
attagtgtgttcaacttctatgtaaaatagtgatcttaggttagctacaaactaatttgtccatgaccaaacagaagcaaccccatctttacaaacaatacgtacaactgacaaatcgaaaccaagcacagaatttaggttcacaaggcaaaggtggacaaacccagttgattactgaaaagagtcaaagcaaacctaagatcactatttacatagaagttgaacac

SEQ ID NO: 64014 - DNA, 434 bp, Setaria italica
  Peptide Sequence Number=SeqID_129988
tattcttttctcttctctttgggcatcactctggcaacacactgtggaggacctttagctgcagctggagccccggcgaatcagctgatcaaccggagaaggagcaggggcgtcggcgttgctgccattgaagcagtaagccggcgcctgccacttgccggagtccggcagcactgcccctgcctcaaagctcagcacatgccgctccatccctggaaaacaaagatcacatgaagcaatcatcataaacttgttctgctagcttcatcaagctgattcattcgtactgaccatccgcagaacggagagaatttagaataattctaggcagaataatcaggaaaactaattcaagacgggatttgcaggtcgtaattagttgaacaccgaccgttgaagttcatccgacgggcgccggtggcgagtcctcgtag

SEQ ID NO: 64015 - DNA, 392 bp, Setaria italica
  Peptide Sequence Number=SeqID_129989
tttagtaagtaagtacttaaaaactttagttttagtaatttaacttgtttatctagaggccttttacccaaatttcgcgggccgtttgaatcattatttaaccccttgctggaagaagtcaattttaggtttccacttccagaaacttttgagaatcgggccgccaatggcttttcgtcctctgaatcttcagaggcattacctccactttttggagcagcattagtaggcaacctacttgccaatggcttatcatcgtctgaatcttcatcaggctgctcaacttttgcaacagctttctgcaaaacaggcctactcgcacagttggaagacattttggatgagttgatcttgagactcaatggcttatcatcatctgaatcatctgcttt

SEQ ID NO: 64016 - DNA, 396 bp, Setaria italica
  Peptide Sequence Number=SeqID_129990
ggtttttaccaaggagtgttctccagtcagtgaaaaagttctcaatgaatgttggcttgcccgcgtagtctgtgtctttcatcacagcaaacattgttgcaacctcctcttgctctggtgtaagatcaacaggttgcccattgtaaagcattttgacaccatgaggcttgtatggtggagggaaaataacaccattgtgctccaaggtagtccatttctttccaccaccagatccaggagggaccttcattgtctttgagaactgagaatttttcatcatctttgttttcactttccctttcatcttcttgatgcccttcttcatagaagcaggactcttcttgacgacattcttcgaaaggcaagccatctgcaaagaatgtcgtcaagaagagt

SEQ ID NO: 64017 - DNA, 361 bp, Setaria italica
  Peptide Sequence Number=SeqID_129991
actaccaacttttaggaagacaagacaattaagtaaggacaaacctaacttgccaatggcttaatcatcgtctgaatcttcatcaggctgctcaacttttgcaacagctttctgcaaaacaggcctactcgcacagttggaagacattttggatgagttgatcttgagactcaatggcttatcatcatctgaatcatctgctttctcatcaactctctttaacttcttctcctcaaccttcttccttaacccaatcggcacatcatcatccgaatcatcagagttctcttctttcacaagaggtcttttcagtttgctcttatcgttgctgttactcttcgaactatgcgctgccgaactg

SEQ ID NO: 64018 - DNA, 318 bp, Setaria italica
  Peptide Sequence Number=SeqID_129992
ttagttaacggtaaactaactttttgtctagttaagtcccaggcattaggttccttcaggtgagcgtttagcctagttgtatcaagctggtcaaagagatcttttcctggtttcttaccagcacggaaaccctcaattgccttgtacacaagctcttcaacctctacggtgttaaaatatcttatagaatctttacccagaaagtcaaactgtagcgctcatgcaaaaattgtatattcagaaagcatcagaatttagtagtcatataatcatattgagaaaacatgctgaatattgaagatcaatacctggatctta

SEQ ID NO: 64019 - DNA, 234 bp, Setaria italica
  Peptide Sequence Number=SeqID_129993
ctccttggtaaaaaccatgttattaatgaatgttggcttgcccgcgtagtctgtgtctttcatcacagcaaacattgttgcaacctcctcttgctctggtgtaagatcaacaggttgcccattgtaaagcattttgacaccatgaggcttgtatggtggagggaaaataacaccattgtgctacaatgaaggtccctcctggatctggtggtggaaagaaatggactaccttgg

SEQ ID NO: 64020 - DNA, 216 bp, Setaria italica
  Peptide Sequence Number=SeqID_129994
ttgtcctactagtctaatttgcctctttgccacatctttgcttctgaaatccttcgtgtagttgtcacgaatgtcctgtatgtaacccctgccaatgacacatccaaaaaaaaattatatgtacaagcagattcaaaacatacttgggactaaaaggctttgttgttgttcaatctgttgcagattcaaaaccttcatacatacaaaatcaaactt

SEQ ID NO: 64021 - DNA, 361 bp, Setaria italica
  Peptide Sequence Number=SeqID_129995
aagaaacattataataaagaacagttgagtctgccctttttttttgttaaatgtaagtgatttttcctgggttccgtattattcaactgcttcaggtgagaaatctgattgagaagagtagccaaccaacagccagcagatcagagcccaaacttccgttagttagaatcaaggtagattactctgggttttcaacaataaacccacaacgttttggtcagaaatacgtaggcaaggtggcaaaccctcaagatattctcattttctctaaatcagcaaagaagcgtcaggctacaggagaccatattgacgattccgagaaacttcgtcctgaagaactaaaccaacaaactattagaag

SEQ ID NO: 64022 - DNA, 320 bp, Setaria italica
  Peptide Sequence Number=SeqID_129996
agaagtccatcattgcagccacacaaagtagtaaggaaaccaaaaactgtagcgctcaacattatttgagcagcaacatactggactgaaactattattaaattaaccaatgtgcaacaaagccaaatgaaacaaagcagcaaacttgcttgggaacagcagcaaaacatgtccaagggaaaaacgaaatagcagtagactatggaactggaggagctcagcatcttattattcaaatgaatatcatcaacaacaacaacatcatcatcatactagcactgaacacttaacaagaagctgccaatgctagcacaattgag

SEQ ID NO: 64023 - DNA, 397 bp, Setaria italica
  Peptide Sequence Number=SeqID_129997
agactaaattagaagtaaatactactagaaaggaaacaaggaagtagttaccaaatagtactccttaattccagctaagcagcttgcatcaacaatagccaccacagaatcaaactcttttagttggctcctgagagcttgcacaagaagaatgtggcacttctcatcagattggagttctgaaaactccagcttttctgaaccatgtttgtctctggtatcaatgtgacaccttgctgcattgtttaaacccattctgagagcctctatagcaattctaaaaatgtacacatcggatagcataatcgctgctgattggctccccctcatgaacttgtttaagcaactcctgagcagaagccatagccctcccaatcgatggaatatcgacaaaata

SEQ ID NO: 64024 - DNA, 376 bp, Setaria italica
  Peptide Sequence Number=SeqID_129998
ttagctaggttgtggtaaaatggaagcgatgatggcgctagccgagccggtacagcccgccatcattgatgaagtgtccatccatatagaaggcgccggttgtgtggtacccgtccatcatcaggtggtgcatctcctcagatggcttccagtgccgcttccgctggttgatgaaccaattgttgatctgcttcaggtcaagcccagtcgactccgccagtgccaccttctgagtctcctgttgagcacgtgaggagttaattcgcatcctcaaaaaaatatggaccggatagttcaatacatctgttgtaaatgtgacaggagaacataaaggccatgtcatgcataaaacatctgaataaaatgaagatgtaat

SEQ ID NO: 64025 - DNA, 385 bp, Setaria italica
  Peptide Sequence Number=SeqID_129999
tttcttaggtttggtttaaagtttaaatttgttcttaaactaaagtttagtatggcaacaaaacttgggattacattgactttagaaaggatcagattgaaaaaattctagaaaattagaagagacgtgaagaagactactcaatcgagaaatgtattgacattgtgaatgccatggaaaggctatcggatgaacaaaaggttgatgcaaatgaagttttccaaagtgaaacgatcagaaaaatattggtgggagccaaaaaatcaagtgtccggctaatttggttgaagaaaagattgctcggatatgttccctttctcagttttgtaccctgctcaagtatcggttgaatcctctatttgcatatataaaatataaaattttg

SEQ ID NO: 64026 - DNA, 461 bp, Setaria italica
  Peptide Sequence Number=SeqID_130000
agcattaaagacaaccaaagctttggctgaaaccagcgaattggttactagttctagtccagtaactgtgaccccagccagttccatggcacccttcgtagagcaaaaagtgaaaatgatccaaattcttggagtgcgcctggtggggagaagtttatgatcagaggaaagacttacttgacagattacaccaagggttgttggtggagatccacttctaaagctaattgcagtcgattggttcaaggttaatgagcgctttgattcagttgccttgcatcccaaaagccttgtgcagtcagaagctgcgaagaagatacctttcatattggttataaatttagcaaggttacccgacaaaaaccaaaattaataaacttaggttaatagtaactaacgacggacaagaagaagaaccaagttaaacaaaagaattactttagttagggtaagaattacaa

SEQ ID NO: 64027 - DNA, 174 bp, Setaria italica
  Peptide Sequence Number=SeqID_130001
ttgagggacatttgcacatttatgtgcggttcttgataattgatgcccatgtacaggttgttagtgctcagagaagagccaaggagaaaggccactctgatgttctatacttggattctgtccataacaagttcgtggaggaagtttcttcttgtaatatattcatggtgaagg

SEQ ID NO: 64028 - DNA, 372 bp, Setaria italica
  misc_feature (350)..(350): n is a, c, g, or t
  misc_feature (360)..(360): n is a, c, g, or t
  Peptide Sequence Number=SeqID_130002
catgtcaccaccgtgacatgcctcaggagcatctgaatgacttctggggagatgcttttgaggcatgtcaccaccgtgaagaactgagtgcttctgtgcccaaaaatatgattgcagcttgtatcatctgtctatttattatatcagagagtcgtggtgagaaataatttgtggcttgtggctgtaattcctttgttcttgaccacggaataagctgctccagtagagcagcaaccgtgcctggtactatcagaacttgcccattgtttggtatattggtaaaatattttcttcatgttggaatttttgaacacactactgctagtttccgaaactaaaaaaaaaaaaanaaaaaaaaanaaaaaaaaaaaa

SEQ ID NO: 64029 - DNA, 240 bp, Setaria italica
  Peptide Sequence Number=SeqID_130003
gattgcagcttgtatcatctgtctatttctcaccacgactctctgatataataaatagacagatgatacaagctgcaatcatatcagagagtcgtggtgagaaataatttgtggcttgtggctgtaattcctttgttcttgaccacggaataagctgctccagtagagcagcaaccgtgcctggtactatcagaacttgcccattgtttggtatattggtaaatattttcttcatgttgg

SEQ ID NO: 64030 - DNA, 341 bp, Setaria italica
  Peptide Sequence Number=SeqID_130004
tggccaccagtccggtttgaacgcctgaaccctcacgtccctgttatcgctgatgcgaagggacgagccttgtttcagtgcttcttcaagtctcaacaggcccattccgcgggagcccagggcggtgcttactgtgcctattttcttgcctgaagcctcgtccacgacttctgaacctggagccacagcctgctcgagttcttgccccttttcgtcaacaaacttcattggcatcaggcgtttccgaatagaacaaccaacgaataggtagacgtaccgtagacaaaataaaaacttaaccttaagtaaccctaaaattaagttaaagtaactaaacctaa

SEQ ID NO: 64031 - DNA, 395 bp, Setaria italica
  Peptide Sequence Number=SeqID_130005
ttttcctttagtttcttagggttttccttaattctaagtagtctaccttactagttcaacggagtttaagattccgtttgccttgtcgggcttcaagatgtctttggtggttcgtcacttatcggcagatcatcttcatcatggtagatgttctcagccatctgccatatctggaggatgttgtcttcagcgacgctagcaatcacccagtcctcgcaggggttccaggagaaatcagagatcttgctggtatggcctccatggatgaacatgagctcaggagggccgtcttctgcatcctctggtgtttgttcttggtcaatcctgctcaggtcccagaccatgagtcttctgcccaggcaacaggatgcaagtatagtctcattcttcgggct

SEQ ID NO: 64032 - DNA, 189 bp, Setaria italica
  Peptide Sequence Number=SeqID_130006
caacatcctccagatatggcagatgttgtcttcagcgacgctagcaatcacccagtcctcgcaggggttccaggagaaatcagagatcttgctggtatggcctccatggatgaacatgagatcttgctggtatggcctccatggatgaacatgagctcaggagggccgtcttctgcatcctctggtgtt

SEQ ID NO: 64033 - DNA, 156 bp, Setaria italica
  Peptide Sequence Number=SeqID_130007
ctctgcctatttagagccgtgcggcaccctgatttgttttacaacacagaaaacgcatctgatttctcccgtcagaaaaacgatcactaggaggtgctggtgcatgtcggttttgatcagctgagatccattccctcccagcttccctgttgaaaa

SEQ ID NO: 64034 - DNA, 390 bp, Setaria italica
  Peptide Sequence Number=SeqID_130008
tacgaaggaccggtacgtacgaccaaggaactacggacttctttggccggtgcccgccctgtcccagcccgccgcccggtgccaggccaccgccagcccctacacgccctccggcctccagcccagcgacctcgcacgcttctccgaggaggatgggccgctgccggcgaactgctcggtcatggtgccgtggccggcgatctgtagtgctatgaggggactcaagaggtgcgtgtggaggctcatatggctgggcttctagctgtacgtcggtgccggatcttgtggatgcagctcccgtgagctagctgtgcagtgctcttcgaggatcatcaccgaggaggtggagtgctccctatgctgtcagacgagctcgtctgctactgctag

SEQ ID NO: 64035 - DNA, 275 bp, Setaria italica
  Peptide Sequence Number=SeqID_130009
ccatggtgatggctggggttctccgatcattactactccaatgtgattctccaaggatgggccgctgccggcgaactgctcggccatggtgccgtggcgacgatatgtagtgctgtgaggggactcaagaggtgtgtgtggaggctcatatggctgggcttctagctgtacgtcagtgccggatcttgtggatgcaactctcgtgagctagctgtgcagtgctctccgaggatcatcaccgaggaggtggagtgctccctttgctgtcagacgag

SEQ ID NO: 64036 - DNA, 328 bp, Setaria italica
  Peptide Sequence Number=SeqID_130010
aggaaataaataggtacaacctagtaaccaagtaatacaataagttagtacctacaaaataatgagatgctgaaatccagcttttagtgcctgctttaaccttttcaactcgctttggtggtcatcaaagaaaacaagcaccctactggaatcagaaatgccatgatttctcaatagtttttcccaatcaacgcttccaaaatcgacaaaattcttcccagcaagataagtacagttctcatcaacatatgcaggtcccttcttcatatatttctcagggtgcctaggagagagtgatataatcctagtatttggcatggcctgccgc

SEQ ID NO: 64037 - DNA, 340 bp, Setaria italica
  Peptide Sequence Number=SeqID_130011
tagtatttactattccggtaaaaggttgttctaacgttggttcttattgatttcttgtttggcaaggatacatacaaggcttctgttgagtgcctggcatcgcgcggcttcatggtgtcctttgggcaatcgtccggcaagcctgacccgattccaatgagcgaccttgcttccaagtccctgttcctcactcggcccagcctgatgcattacactgctacccgcgatgagctgctggagtctgctggcgaggtgtttgccaatgttgccaatggggtgctgcgcgtccgcgtcaaccacacctatccgttatcggaagcggcccgagcccatgcagatc

SEQ ID NO: 64038 - DNA, 249 bp, Setaria italica
  Peptide Sequence Number=SeqID_130012
attcatcaaggaaaccaaccaacgtacatacctagctgagtatataacaattcgatcgattcccacacgcacacaacctaggcatggaagctgttggcgtcgtcactgcagttgggcctggcctcactggcagaaaagttggggatgttgttgcctacgctggcaaccccatgggatcctatgcccaggagcaaatccttccagccagtgtcgccgtccccgtgccgccttcagttgatcacaagcaag

SEQ ID NO: 64039 - DNA, 181 bp, Setaria italica
  Peptide Sequence Number=SeqID_130013
tgttgatggtgctcgctagtaacaaggtgatacagtacaaaggcacggctaatttctcccaacgaataagttagccgtgcctttgtgttgttgtgccatgagaagagagactttctgttgatggtgctcgctagtaacaaggtgatacagtacagttgttggtgctgatgccagagatggc

SEQ ID NO: 64040 - DNA, 260 bp, Setaria italica
  Peptide Sequence Number=SeqID_130014
cgagatgggctccgcggacacggcggcgtagtccgacgtgaacaccagcgtcttggagtccgggctgaaccaggggtggttggtgcggccgccgtcggcactgtgcacgacccggcgcaggccggtgccgttggggtggatcatgtagatggcgaagctgccgccgccggggttgtgccggtcggaggagaacgcaatccactcgccgtccggggacctagtttgtctactattggttgttcggtacctagggtcccctt

SEQ ID NO: 64041 - DNA, 367 bp, Setaria italica
  Peptide Sequence Number=SeqID_130015
gccccctttttttaaagatggttctagttctagtcgaagtggtaagagagctgctcaattgttctgaaaactttgtttattcttccatgagaaattattgatatataggcaccacaaccttaacaaattacaataaatatgtcgcaagagcgtacttgatcagaatgcaaggtaacaatcaatcatcataactagctatataatcctgttgtatattcaattatagctactgcagctgcacttggaccccagaatcgtacgtggctcctgctgtccagttctgtggtattgtgcttgtggaaaccagccatttctggtcgccgcgatgtggagctccgctgctaaatgcatccttatgttcagaggg

SEQ ID NO: 64042 - DNA, 115 bp, Setaria italica
  Peptide Sequence Number=SeqID_130016
tcagaggctaagttacggaacaaataacgtctcgtgccactgacttttgacgcataacacttgactcaacaaggatcatcctcccgtgtacaatcatgttgagtcaagtgttatg

SEQ ID NO: 64043 - DNA, 201 bp, Setaria italica
  misc_feature (153)..(153): n is a, c, g, or t
  misc_feature (189)..(189): n is a, c, g, or t
  Peptide Sequence Number=SeqID_130017
ggaagatggggaggagaggagaggagaggagagggcgaagcggtggttgttcgtgggaagtcctatgatgctattgtcaccaagatgcccttcgtgccaacaaagtactacaagccctcatagattgtacaaatggatgttccttcagctacngttctcttttgcatctctcttgtcctgtccatgacnggctgctgcagt

SEQ ID NO: 64044 - DNA, 365 bp, Setaria italica
  Peptide Sequence Number=SeqID_130018
agtttttcacttctggggcagacatctacgtggtcggcctcaacatcacaacccaagtcagcttcacagataaggacctcttggagctgaggaactcgaaagggaagcacgcgcagttcctctgcgacgtatgcaagttctacctggactggcacatcgagtcttacggcgctcctgtgattttcctccatgacccggtgagctttgccgcgctggttcgcccggacctgttcacgttcaggaagggcgtggtgagggtggagacccagggcatctgcgccgggcatacctccatggacatgttgctgaagaagtaaggagattgattcacaatttccttgcgttgtttgcatatggtttggacg

SEQ ID NO: 64045 - DNA, 318 bp, Setaria italica
  Peptide Sequence Number=SeqID_130019
tttgtttctacggtattcttgtattggtcctttgggtaactattagtagtctttcctgatcccactatcaagaaagttgagcaaagcgctgcagagttcttggttgataaggtctcgcagtttcctggagaggtctctgtacttgccttgggtcctctgacgaacttagcattggccatcaagaaggatccctcctttgtgaaaaatgttagaaagattgttgtgctgggtggagccttcttttcagctggaaatgccacccttctgctgaagcaaatatccacagtgacccggaggcagctgatatagttttcactt

SEQ ID NO: 64046 - DNA, 286 bp, Setaria italica
  Peptide Sequence Number=SeqID_130020
agggcatctgcgccgggcatacctccatggacatgttgctgaagaagtggaactcggagaacccgtggactggctactcgccgatctcggtggcgtggacggtggacgtgcccaagatggtcgcgttcgtgaaggagctcgtcaccggagagtgacgaaactagctgacatgagtcgtcgtaccatgtcagatccgagcattcaattccttccgcattgcgttgtcgctgcgcacaaatcttgtagtattgtctagtaaactattttgtacgttacttgtcaaaac

SEQ ID NO: 64047 - DNA, 310 bp, Setaria italica
  Peptide Sequence Number=SeqID_130021
tctcagaatagcaaagttcttgaggttcctctatcctttattagtcttctgttccagtgtcttaattagaagttcaacagctaaagaaatttcaactttgccacaacaggctgttgcagttaacaacttggggaagtggaaaacagcgacgcagatgacagcattgactctgcttcttgccagcagagacccaagtctacctgcgcaaggtgctctagttaccccccggtgttgtgctgctttatgtatccgctggacttgccatatggtccctagtggtgtacatgagaaagatatggcggatacttct

SEQ ID NO: 64048 - DNA, 251 bp, Setaria italica
  misc_feature (148)..(251): n is a, c, g, or t
  Peptide Sequence Number=SeqID_130022
tgcgtgtggagttctaccatgtaatttacacataataccatatgccaggagcatacagttattcttttcgggagtgacaaagtcccgtctccgacgtgccgcttcatttccaaagaaatttatgcttcatttccaaaaaaaaaaaaannnnnnnnnnnnnnnnnnnnnnnnnnnnnnnnnnnnnnnnnnnnnnnnnnnnnnnnnnnnnnnnnnnnnnnnnnnnnnnnnnnnnnnnnnnnnnnnnnnnnnnn

SEQ ID NO: 64049 - DNA, 391 bp, Setaria italica
  Peptide Sequence Number=SeqID_130023
ttgggtggtagaagtatcagaccgtctcctttgcagcataatggtgggattgtggtatgtttatgcttaaatacatcgatttccatagcagaggtctcgaaccatctttcagtcaggaacacataatgtattttaggaaacgaacagcaaaagagattttgagattaagagctgactgaagaatggccattgtatggctaatattctttgacatcctgtcaagtcaggcatgtattatctaggacctgattttgctagagtagggagaagggaaaagataagttggttaagatgataatgcttggctagagaaaatgtatgagttcagaagtagtttgactcagtactctcacccttgtaagttgtaactgaggtagtacaagtaactgac

SEQ ID NO: 64050 - DNA, 450 bp, Setaria italica
  Peptide Sequence Number=SeqID_130024
tttaagaacaaagacaataaatgggtgggattgtggtatgtttatgcttaaatacatcgatttccatagcagaggtctcgaaccatctttcagtcaggaacacataatgtattttaggaaacgaacagcaaaagagattttgagattaagagctgactgaagaatggccattgtatggctaatattctttgacatcctgtcaagtcaggtattcttcttgcatttttttccagcaacgatacaaattaaatactccctccgttccaatttgtaagtcatttttggttttttagattacatagcttttgctatgcatctagatatatgttttgtctaaaattccaaaaacgacttacaattttggaacgggggagtatgtttttctgttgaactctggagatgttattataagttgttggtgtcaaatcatagtccatgactacattcttg

SEQ ID NO: 64051 - DNA, 239 bp, Setaria italica
  Peptide Sequence Number=SeqID_130025
atgccgcgtcgctgctcaccaaaaaggatcctctcaaggttgaagctgatactaggcttggggagctcatccagtatgtttagtgctagctagcattacgtgaagctcactaaattgctgtgtattattttgagcgggctcaagtttcactgatcttccgcaggtcattctccgacctgggaaccattgtggagaacagtaactttgagctcactggtgacagagagaagatgaaggag

SEQ ID NO: 64052 - DNA, 268 bp, Setaria italica
  Peptide Sequence Number=SeqID_130026
cctacgactggcatggcaaatgaagaaccagctcgtgctcgagtcacgttacgcttttcaagactttctccaccctggccggctgcttggactgccagaagaggaaccccagcaccacccgctggaaggcctccttgagcggcttcacgacgaacctggacagcgggctgctttcttcctcctcctcggccggcgcggcggccggcttgttggggtcggcgaactggccggcggagttgagcagcacgacgccccggaccagctccgg

SEQ ID NO: 64053 - DNA, 310 bp, Setaria italica
  Peptide Sequence Number=SeqID_130027
ttaacaagctcttgctatggagttctgtgctgagagcccccagtggctatacaagtgtggaagaacaattgaagcagagatgcaattcgaaaagcttctaggcccccttcatgtaaaatcagccatggcagaactttctagatctgaaagagacgatggagaaagtgtaaagtactcagaattgtcaatggtcgccacttcaatggtacaagctatcctgttatcctattttgttgcatctatgctgctcttataacctgagttctgtgtgaccatgaagtttgttcattacaagttccctttttgctac

SEQ ID NO: 64054 - DNA, 424 bp, Setaria italica
  Peptide Sequence Number=SeqID_130028
ttttcgtaattcttagcaggctcaattatagcaatggttctaatggacaagctgggtagaaaaatgcttctttcagggagtttccttgggatggccttttcgatggggcttcaggctattggagcaaaccgtcatcttggttctacaagtgtatatctttcagttggtggcattctgttgtttgtcttgtcattttcattgggagcaggcccagttccaggacttcttttgcctgaaatcttccccaacaaaatacgagcgaaggctgtggctctctgcatgtctgtgcattgggtaagaagtctgttgatatctggcacatgtaaattgttatatgaagaaataagcatatctagtgtgggacaattatacgctatatatctctgctactggtttgcctttatttgttttagttcaattggga

SEQ ID NO: 64055 - DNA, 192 bp, Setaria italica
  Peptide Sequence Number=SeqID_130029
cgcctctattaggaaggccttcaagagaccgccaatggatcttttgatttttagttggctgacaggcagaagtgatgtcattgagactgaatattgacagctaaacttgtaggagccttgtcatataagctacttaccgtcatatttcgagcaagccaagagaattctacattccgaccaaatacctcatac

SEQ ID NO: 64056 - DNA, 406 bp, Setaria italica
  Peptide Sequence Number=SeqID_130030
aacgaacctagtaccttagacctacaaggtagaaagtagactaacaatagaaacaattactttccgggattgaacactgccataacaatggtgttctgcaccgtgacatcaagagctcgaacctacttgtcagcagtgatggaattcttaagatagctgactttggacttgccacctcttatgatcctgacaacatgcagccaatgacgagccaagtgatcacgctttggatcgtccacctgaactcttgttaggagcaactcactatggtgttggtgttgatctttggagtgtcggttgcatattggcagaattgcttcttggtgagcccatatttcctggaagaacagaggtggaacaattgcacaagattttcaagttgtgtggtactccatcagaggattac

SEQ ID NO: 64057 - DNA, 259 bp, Setaria italica
  Peptide Sequence Number=SeqID_130031
ctcttgttaggagcaactcactatggtgttggtgttgatctttggagtgtcggttgcatattggcagaattgcttcttggtgagcccatatttcctggaagaacagaggtacttggtttggtccagctgaaatgttaattttggataaatagtgcaggatgtcacttgatttagctattaacgagtggtttgtttaggtggaacaattgcacaagattttcaagttgtgtggtactccatcagaggattactgggagaa

SEQ ID NO: 64058 - DNA, 359 bp, Setaria italica
  Peptide Sequence Number=SeqID_130032
cttgctgaacctgatagcaatcctcatgtcaaagaggtggctaaagcagcatcagacctggaatctggcatcgttacgatatcagctcaggttgaagctgaactggctgagctacctttggaagagagagtagaatatctaaaatctcttggtgttgctgcaagcggactaggcaatttggtaaaagcgacatatgacctattgggactaagaacttatttcacaaccggagataaggtgcatcttctgtcctgttaaaggttcttttcccctggccgtcaacacaaaacttttaactgtgtatatttttatcaggaaacgaaagcttggactattctttcaggcatgactgcgcctca

SEQ ID NO: 64059 - DNA, 236 bp, Setaria italica
  Peptide Sequence Number=SeqID_130033
cagaggctcactattatatttgtttgtttgttggagattgcaaaacactaggatattaattaccaaggctctaggaataactattcattgtgactggatcctcaggttgtgctatgctttgaggatgatgatattgttcatgtcaatggcaaagttgatcccaggtcagacattgatgttattaacctagagctgatattttcagatcttgaacagatagagaagaggttagataa

SEQ ID NO: 64060 - DNA, 498 bp, Setaria italica
  misc_feature (481)..(481): n is a, c, g, or t
  Peptide Sequence Number=SeqID_130034
aaattaacaccttcatttgaagccataccatcctgatgtgaattccttaaagaaaattcatgcagtgttaaatatcaaatctcaagcattaatttcttgcacagataaatggttgcttgctataggctggagatctttcttggtctgaattttcaaaactcgacaactgtagtttcctatttagagttgtctagcatgagttactgttagtcatgaaaataatcctctggccacagaaaaaaaataagtctttttgtagttgctttaacttggtttcagttagtttctgttcctgaatagatcattccctcggaataatgttcgacccatactaatttgccaagtgcactgataactggcgaagtgacagcttctgaacctgaataaacatgcttgtgtgaatcttgttggttctgcagcttgtgttaatttattatcattcagttcatttcagtgtcaagaattcaagcatgcatcaacnttcttgttaaaagcaaa

SEQ ID NO: 64061 - DNA, 346 bp, Setaria italica
  Peptide Sequence Number=SeqID_130035
cttttaacttggtttcagttagtttctgttcctgaatagatcattccctcggaataatgttcgacccatactaatttgccaagtgcactgataactggcgaagtgacagcttctgaacctgataaacatgcttgtgtgaatcttgttggttctgcagcttgtgttaatttatttatcattcagtcattcagttgttctaagtaatttctaagtctattgtcatcaacattcttgttaaagcaacctaatatctttaatgactcttgcataggttgatggaatggggtttgctcccattggatgttggcttagtaaaagttttttgtagtaagtaaactagggtcct

SEQ ID NO: 64062 - DNA, 470 bp, Setaria italica
  Peptide Sequence Number=SeqID_130036
aaaagcttccaacattttaggagtaagacgactgcgatgctcacttaaaaccctcccactagtactgaaagccgattcagaagctactgtggtgattggaatagccaaaatgtcacgagcaattagcctcaaagtaggataacgagctccctccaattctaacaaagcttgtagtcctcttatttgcagtaagagttttaaatatggacaacacagcagctgcactaactgtagaaggggcaccagcagaggatgtagccacattgtcttggtctgtcacatgataatgtttcattaaactagtaagcaattcctgagcctctgtaacatattttccagcagcctcttctccaaaaagagcaatatagcaagcatgtaacattgtcatcttaagacgtggatcaagataacagcaacagccataagaccatggatgtcagcccaatacttatcatactttctatcatggc

SEQ ID NO: 64063 - DNA, 446 bp, Setaria italica
  Peptide Sequence Number=SeqID_130037
agtacttttaggaagtaagacaaataccaaataaagacaaacaactttactacggaatgtgcgcaactgcagttccaattactgccatgccatctttcacaatgaggttgagaatatgtgcacagcaccgcatgtgcagccattttcctttcaatagcatattagccgccccaagccttgtgtccattaagccaatcatattatcattggcactgcaattgtcaagagtcacagttgataccctccgatcaagatcccaactctgcaggcatttatgcaatgcatcacaaataacctctcctgtatgggggcatggcacatacataaacctcaatatgcagcttctaagcgtccatgagtcatcaataaaatgtccagtcactgccatatagcctctcttttgattttcagctgtccaaagatcagttgtgatagcaacacgacaa

SEQ ID NO: 64064 - DNA, 308 bp, Setaria italica
  Peptide Sequence Number=SeqID_130038
tctaaagtaggataacgagtctcctcctaaaacttaaccaaaccaaagaacctaaaggaaataaataacaaaaataaattaattactacaatacaatagaaggaaagagtttacctcttctaagtagcgatcaagctcattcttacttctaacaaagcttgtagtcctcttatttgcagtaagagttttaaatatggacaacacagcagctgcactaactgtagaaggggcaccagcagaggatgtagccacattgtcttggtctgtcacatgataatgtttcattaaactagtaagcaattcctgag

SEQ ID NO: 64065 - DNA, 137 bp, Setaria italica
  Peptide Sequence Number=SeqID_130039
tcagtaagctcatagaatatccctaatttctcacaaacattagtagcaaatgtccaatcatctgctgctggacaatcattaggttccttattctaagtcttcttacccttaaacgtttcttaaaaaccttttcctta

SEQ ID NO: 64066 - DNA, 241 bp, Setaria italica
  Peptide Sequence Number=SeqID_130040
acaaggcggtccagaacgcaataacaaatgtggttcaattgaatttgcttctactatattttcttatatggaggcacttattcgacaaagttgaatttggaccacagagtgagattatacccttttgaccgagaaaaacatcaagagcttttgtttagtgcaagctatacatgaatggtgtaccatttagtctgccagtaaagaacaaggtggagccactgtatctctttcaacagcaaaa

SEQ ID NO: 64067 - DNA, 219 bp, Setaria italica
  Peptide Sequence Number=SeqID_130041
accatgcattttttgaagcaagaaggcattgatgaatcactgaaactcttgcgaaaatgaaggaagatggttgtggccctaacagtgatacatttctcatgcttatggattaaatttttgtactgaatgagtctggaaatgttctaagagtgtaggaaataagaaaataaagaaaagaaaataaaataaaagaaaacaaaataaaagaaacctaaagaa

SEQ ID NO: 64068 - DNA, 251 bp, Setaria italica
  Peptide Sequence Number=SeqID_130042
aggatagctctgacgacagacacgacgaacaagcttgcgatcaaaaacacagatgggcaacaacaggaaacagaagaccaacacaggtcggagacgacgacgaagacactagacgacacatagggataactctggtaacagtagtagcgacaagataacctttctgttaattgcattgtgttgtaggattgtactattactagtatcagtttttttggcactgagagtgagaaatgtgccaagcttcaatt

SEQ ID NO: 64069 - DNA, 336 bp, Setaria italica
  Peptide Sequence Number=SeqID_130043
tgtacgtaatttggttctaggtccctaactagtagttattcttgtacttgtaggtagtaattgggttaccctatttgaacgttggacaggctgactgaggtcacagaaggaccatttaagggccacctatgtgcggagccatcagttgatcatctgagggctttaatgagacatgtctttggtgatagagaggaggcaaggagtaaagggaagaaggcaagggaggacatgatggagaggttctctccagaaatcgttgcaaggattgttgctgataagatacaacaggctcttgtcaatactcggtcgacggaagattaaaccatgaccacaaag

SEQ ID NO: 64070 - DNA, 273 bp, Setaria italica
  Peptide Sequence Number=SeqID_130044
gtacaaagctgcagatgcatttgttctgcaaccgtggcgaggggtgggtagaccggtggttgaagccatggccatggctctgccagtgattgtgacgaattggtcaggcccaacagagtatctgactgaggataatgggtacccattgaacgtggacaggctgactgaggtcacagaaggaccatttaagggccacctatgtgcggagccatcagttgatcatctgagggctttaatgagacatgtctttggtgattagtagtaggtaggtct

SEQ ID NO: 64071 - DNA, 327 bp, Setaria italica
  Peptide Sequence Number=SeqID_130045
cagcagcaccagcataacacgacaactcaaaatgtgtctcgcgcatacataactcttccgaaataacatcagggcaaaattctcgcccacaaacttgggaactactgactgtcagcaaacaactgtacacatccgaaaggcaaaataccagtgactagttgcctgctctatggacacttgccacaacaaagacgcatgagatatgttctgataactaccgctgctactgaagcaaagctacaacatatgcatagatgattcacctgagggaatccaacatcctcacatacaatagacttacttagacgacctagacaagacggtaga

SEQ ID NO: 64072 - DNA, 297 bp, Setaria italica
  Peptide Sequence Number=SeqID_130046
aagactttaagttaacaaaaagaacaataacttactagttagactaaagaaattgctgaacatgttctttctgtctttctagtagctggtcatacgttcctcgagttgacaactgagatccattcttcccattgccatacacctgatacggtaagggtgagctcgcatcagttgaagcagcatcaataacctgctcattttcatatttatacctaagcagttctgcatcagcacgtatgtcaatcttgtctgtttctctatgtataagtgttttcatgcgtgatgtgtaggtgatga

SEQ ID NO: 64073 - DNA, 219 bp, Setaria italica
  Peptide Sequence Number=SeqID_130047
tagggagtacaaggctttgttgttgttgttgctgtagttgatttatgacataaaagaccagcatatgtatttctgaaccaaaacatataacgacaccagttgcactgaacataccagaattatactgaagagcagcagagatgcggcatatagatggcacagcagacggatctctggcaccagctcttgcggtcaacaaagctgcatgcttttctgcag

SEQ ID NO: 64074 - DNA, 372 bp, Setaria italica
  misc_feature (317)..(317): n is a, c, g, or t
  Peptide Sequence Number=SeqID_130048
tagtaattagttactaattaaaaaaaagttacttttagtaaagtactaacgtaacttttagtttactttttaaactaagggttgatgatgctaacagcaagccttgctgttttcaatacaggctcacaccatggagcatattgcttagtcggttggcgtagcttgtaccaggccacatcagtccgaatggttatacagatcattgagccaccaaattctataagccattctttgattgggcttaaataaatagggactccagcgtccgattggtcagctttgctggaggaagaagatgatttcacagactcagctgnggaacagcaactgccatcatcatctctcatgaaaccagaccccaaaatataaact

SEQ ID NO: 64075 - DNA, 294 bp, Setaria italica
  Peptide Sequence Number=SeqID_130049
cctctaatgcttctctgcaatcaccacgtccgttacaagcaccgctacaaagaaatcaggttctcagacatcatcatctgtgcctagtcggaggaagagttcaactgcagatagcggtgcttgtaacggaacgtggtgattgcagagaagcattagaggccactctcctcgtgctgccactgctgccattggagctctctgtctttgactggaccttcttcagtgttgaagttggggatgccttgacagcaggtctcttcaccaaatctgcctttgcgctctcagtcaaggatg

SEQ ID NO: 64076 - DNA, 450 bp, Setaria italica
  Peptide Sequence Number=SeqID_130050
cacgcccatacacacaagctgccacgctacgaatcctactaaattacacgcacactaaccagcaattgcactgtcaggtggagcaggtaggtatgaggtatccctattcctcatgcctcgatcttgagaagggtattgagggaggtgctgttgaacttctgggcaaggcctctgatcgtgaggatgacgacgtctcgcatgtgccgcgtctgcaccatcaagtcgacttcgttgtcactgtcgacgacaatcttgaagcggtgctgatcgttgcgatacagctcaacctgaaaggttcgattcattgttaccatcgtatctgcatctaatagtcgagcaaatatctacatgtaatagatgtagtaacaggataacagcaatttctatctgctgatttcgcgggaagaactcacatggaagggtggagcatatgttcctcgtacttcggta

SEQ ID NO: 64077 - DNA, 358 bp, Setaria italica
  Peptide Sequence Number=SeqID_130051
tctttgttcctagtccaagacaggctttgcagggtcctcaatgttgtactgcctgataatggccaagaagaacagtacaatgtgccccaggtcaaggagcatcgacttagaggcggaccacagatgattcagctgagcttggatggcaagaggatttacgtaaccaattcacttttcagccgatgggatgaacagttctatggtgatgatcttgtcaagaagggctcccacatgctgcagatcgatgtcgacactgataaaggagggctggctatcaaccccaacttctttgtagattttagcaaagagcctgatggtcctgccttggcccatgagatgagatatcctggtggggact

SEQ ID NO: 64078 - DNA, 290 bp, Setaria italica
  Peptide Sequence Number=SeqID_130052
cggcggtcgacgtgccggcgccggcggcgaccaacggcggggcgtgctgccacgccggcgcgaaggggcccgggtacgcgacgccgctggaggccatggaaaagggccccagggagaagctcatctacgtcacctgcgtctacaacgacaatacctaatttctgaaacagtttcggttagtggcagaagttcacatggtttctgccttgggaatttccgaagaccacagaaatcatgtactggaattaacaagccggattaccttgcgacggtggtatttggaccccgcc

SEQ ID NO: 64079 - DNA, 227 bp, Setaria italica
  Peptide Sequence Number=SeqID_130053
taaagcaacacgcattgccatcccacgcccatacacacaagctgccacgctacgaatcctactaaattacacgcacactaaccagcaattgcactgtcaggtggtacagggaatctagtgatggaaccaggactcgtatagatggtgccaattcagtcacatatgaagtgacagatgcagattacagctgccatctattgtttggatatactcctgttcgttcagat

SEQ ID NO: 64080 - DNA, 213 bp, Setaria italica
  Peptide Sequence Number=SeqID_130054
ttaactttaacttaacaaaaagggaacaaagacgaatagttagtactaatacttaactagatagaatggccaagaagaacagtacaatgtgccccaggtcaaggagcatcgacttagaggcggaccacagatgattcagctgagcttggatggcaagaggatttacgtaaccaattcactttttcagccgatgggatgaacagttctatggtg

SEQ ID NO: 64081 - DNA, 193 bp, Setaria italica
  Peptide Sequence Number=SeqID_130055
tttgccagaaccactcaaaatcgagacacttgttttcaaacaatagatggcagctgtaatctgcatctgtcacttcatatgtgactgaattggcaccatctatacgagtcctggttccatcactagattccctgtaccacctatacaagcttgatccctcgcatccacgaatggttcagattacatgacgatg

SEQ ID NO: 64082 - DNA, 435 bp, Setaria italica
  Peptide Sequence Number=SeqID_130056
tgatgctgaacttgagtaggtatcctctgcctgtcatactaacatattccatttcttctctaccattgtagtaataggttcattatataattgtttgaacttgattttttgagcgcatgcttccattcaacatggttcatgtctctgttaagatgaataaacatttgtatgtgtactgtctttctccaggttattttctgtttgtatgttgcacaacagccttttccctagtgcttctttctgaaatttttacaaatgtaaaagtgaagggattctattttacttctcgtgtacttgagctacaagacctctttattgccgtttgtcacgaataggaaattttcatttccttctctgcaatttcaggaaaatgtgaaaagaagaataaaatacaacgacaattacctttacaattagacaatagaactaggaaaa

SEQ ID NO: 64083 - DNA, 405 bp, Setaria italica
  Peptide Sequence Number=SeqID_130057
gcggcggcggggggaagcggaaggaaggggacgggatgaggaagcgggagcgggagaacccgtgcgggatctgcgggcactaccacaaggtacgaggagggggaggtctgcggggtgtgcggccaccggtggaagccgtcggacggggagggcaccccggcgaagcacgagtccgccttccccaccgaggtgctcaaggacttcctcttcctcgggagctacgacaacgcctcccgctccgaggtcctcaagacgctcaacgtctcccacatcctcaacgtgacaattaacatgaggattcatttgaactggaagtgaaactcaaacagagcatatgactgtgcctgattgccacaatctatacaagaattcattcacatatcacagtcttcagcgcgacaggcc

SEQ ID NO: 64084 - DNA, 227 bp, Setaria italica
  Peptide Sequence Number=SeqID_130058
gcgaaaatatgctgctacctgatgctgaacttgagaaaatgtgaaagagataaatcacgcattccttttcattgcatgactggaaacagcaggtcacagatgttgttgcagccttcttgatgaagtctagaggatggggacttgctcagtctttccagtgggtgaaagaccagcggccccaggttcatctgacagatgcttttgagcacgatcttctggcgtacgag

SEQ ID NO: 64085 - DNA, 217 bp, Setaria italica
  Peptide Sequence Number=SeqID_130059
gtaaatacagcaccggcaaatcagggtgtgaatccgcaaaatcaaaaggcaaccatatgccctttggtaacgtatgtgcacattcatgagctccttttttagtctgtgcaagcactttgcctaataaaggagctacgattcttctgagaaagtactcaaggttattagaacatttagggagaaaggcattccttgcgatgttgtctggatggatatt

SEQ ID NO: 64086 - DNA, 486 bp, Setaria italica
  Peptide Sequence Number=SeqID_130060
ccggacaagaatttggactatgtatcagtgtcaccctggagtctggttcttccgactcctccagcagcaagtcatttttatacttgtctcatctgaagaaagtaatgttgcgttgatctatccgtggagtagggggtccatcctggcgtagccttgtgtgatttgttaggaaggacggatggtgacggccgagcaggcaccgatgttcaaatcaggattgtttcgcctgctaagcaccaatttgctcattcaagcaagcgaaagagaagtggttgcacggcctgaatgaggtgctctctcctccaaatggataggcactaggtgaaaaatgacaaagagcggcggtctgggccggccaaacctaatcgtgacgttcaaccgccgaagagacatttagtgacacgatttatgggatcaatcaaatttctctaaagcctgagaaactaattctcaataacatggaaaaggtaagaaccaacaataaag

SEQ ID NO: 64087 - DNA, 303 bp, Setaria italica
  misc_feature (20)..(20): n is a, c, g, or t
  misc_feature (22)..(22): n is a, c, g, or t
  misc_feature (30)..(30): n is a, c, g, or t
  Peptide Sequence Number=SeqID_130061
ttatataaatataattgttntntagtcttntattgtaggttgtcttcttcttccttcctaaattggtattaggtctacttaggttgtaaaaattgtactaaagagcggcggtctgggccggccaaacctaatcgtgacgttcaaccgccgaagagacatttagtgacacgatttatgggatcaatcaaatttctctaaaagcctgagaaactaattctcaataacatggaaaaggtaagaaccaacaataaagtttaacagaatcccagcagaaatcaagagggtaatgatgtatcgagcaat

SEQ ID NO: 64088 - DNA, 262 bp, Setaria italica
  Peptide Sequence Number=SeqID_130062
gttggaagggagttgaaagaggctcgtattccaataggctcctcaacagagatgtatgattcattgcggtgaatctgaacttcggggctactttaccctgccagatatcatctacaaaagccactctcaaagttcagttggtgctagaagtcaaggagggacacgagcagagcttggtgtgtgctcagccctgtacaccgatccgagcaaccggtctgaccggtttggcctgaccagtgcggctgagtgagttgaagtttta

SEQ ID NO: 64089 - DNA, 261 bp, Setaria italica
  Peptide Sequence Number=SeqID_130063
ctccttctattctttctcaaagaaggctaaacctcggaaattggtgagcctgtgtcttggcacacttggtcagcatcttgaggatatcatcgctgatatttctgaatttgctgccttctttccaccccatataaagttgatctgatggctcgcaacgctattaatttaatttacgggatgttctttcttccagttggcttgtaagttgtaactcttgctttgaagctcaaatataagggtataagggtattaaacaacaga

SEQ ID NO: 64090 - DNA, 304 bp, Setaria italica
  Peptide Sequence Number=SeqID_130064
tcaaacaagcaatctcttgcaagtattacatcataaagaatgcctcatgtttactttagccagggaaatgggcaacaaggatgttgattcccagtggatggccttgggatgctatgaaaacatatgccaaacagttaccatcattatcttgtaatgaaaatgaatcatcctttctttcttctgacctgttcagaaatgcattttgtattattcatcaaactggtgagcaaggagttaatttgaggaaatttcgcaggcattgcatccactaggcatgcaatctatcaacttggttgttgatacg

SEQ ID NO: 64091 - DNA, 208 bp, Setaria italica
  Peptide Sequence Number=SeqID_130065
ttaagaagtctgcaatgatcaggatccagaaacgagaagcggctctccattccaataaccatgagcagccaaggcgcctaagaagattgggccccaccttccggaggctgcaacggcttcccctccgccgtgtaaacgaccgcgcgcggcggcgcgtacatcatctgagacacgcaacaggggatatgcaaggcacacaggggatagg

SEQ ID NO: 64092 - DNA, 433 bp, Setaria italica
  Peptide Sequence Number=SeqID_130066
cagtctcagcttgcgcagatttgccagtttgcggagcagaacccggatgtgctgttcttgcaagtgaaccatgaggagcacaagtctatgtgctacagcctccatgtccacgtcctcccattcttcaggttctacagggggagctcagggacggctctgcagcttcagttgtaccaacgcaactgtaagatcctgatccgaacagtagttcatgtttatttaatatgagtaatggcgagcaacttgtttacaaattacaaccggctacaattttggactatgttccatttgttatggtgttccaaaatttaacaagcacagaatggccttaaagatttctgatattggttctcccccctgaaccccaactgaaatgatgataatcatgtgatcaatttcctggctgttatgaaattttagctatatttagctt

SEQ ID NO: 64093 - DNA, 305 bp, Setaria italica
  Peptide Sequence Number=SeqID_130067
ccgtgcggcagcagggccgcgccgggggctcctgagtcggcggaggggcgccgtggcgacgcggatggcgccgtcggcggtgcggatcgggggctcctggaggaagaccgcgttcctcggcggtaggctggcggtcgggccgaggagatccaggtccgcgtcccggaccctcgtcgcgtcgccggtgcaggtgaatatagatttagacgtagttattatatatgcgttcccttttaatcttctttttctcttgtttttccgttagttttttcttcttattttttgcttgtttaatttagtttcgc

SEQ ID NO: 64094 - DNA, 311 bp, Setaria italica
  Peptide Sequence Number=SeqID_130068
tggtaggtaattctagtagtttatttagtctatttggtcttgtctaaacaaggtacttgcagttcaccttacaccaagaagccagaactgatccccagcggagatgctgctgctgaggtcattgctcccgagcctacaaagcttcctgcggcaacaaagccgtcggtcaagatagggtccgaggagaggtccttggtctcatcaggaagatgagatgaatgacctctagtgtggtggtggtttgtgatgtgtacaggttgtagcttctcatggtagtagagcgcaggctaagatttttactgtgaagcctg

SEQ ID NO: 64095 - DNA, 280 bp, Setaria italica
  Peptide Sequence Number=SeqID_130069
gcagcttacagttgtaaccaacgcaactatcaagaagttcaaggatgcacttgcaaagcacaaaccggatagatgtagcattggcccaactagagggctggaggaatcagagttattagcattggctgcaaacaaggacttgcagttcacctacaccaagaagccagaactgatccccagcggagatgctgctgctgaggtcattgctcccgagcctacaaagcttcctgcggcacaagcctgcgctctactaccatgagaagctacaacctgtacacat

SEQ ID NO: 64096 - DNA, 132 bp, Setaria italica
  Peptide Sequence Number=SeqID_130070
tcgagcaatgtgtcccttatttgtgaaccttgtgattccaatgcagatccaggctgatctattgggtagcccagttgtcagacctgctgacattgagacaacagcccttggagctgcatatgcagctggatt

SEQ ID NO: 64097 - DNA, 484 bp, Setaria italica
  misc_feature (443)..(443): n is a, c, g, or t
  Peptide Sequence Number=SeqID_130071
aggtaccaatcatagaaggttaatacctaacctaaagtgtcctcaggaggttcatatttctggcttgacctcagatcatcatttttgtcttgggtgcttcctaaaagtggagaagttggtggattgattatagagccaatccattcctcaaatataaaaagcaacatagcagtactcaattattataaggtcatacacagattgaacatttaggtatccaagcaagtaaatggttgtccttttttcttctccacgtacggaccaaggtagagtcttgaagggaaaaaagttcgtgcgagattgcactttgcagatctgatgttacaaaatgtgcgggcctgataccacaagctgtcacattaaaattattcagcatgtgtagcagtactattattggttacaattagtgagaaacaaacactctagcaccaagaaggatttanatggtacttaactgtgatttcagtaatgacatacatagaag

SEQ ID NO: 64098 - DNA, 376 bp, Setaria italica
  misc_feature (277)..(277): n is a, c, g, or t
  Peptide Sequence Number=SeqID_130072
ttgttctattactactagtatttgtaactattttaggttattcctaagtctaagttaaattggtttgttccttttttctttctccacgtacggaccaaggtagagtcttgaagggaaaaaagttcgtgcgagattgcactttgcagatctgatgttacaaaatgtgcgggcctgataccacaagctgtcacattaaaattattcagcatgtgtagcagtactattattggttacaattagtgagaaacaaacactctagcaccaagaaggattttanatggtacttaactgtgatttcagaatgacatacatagaagtgaagacaactgtggtattgttcaatctcatggataagtatttagcttttcatgaaact

SEQ ID NO: 64099 - DNA, 263 bp, Setaria italica
  Peptide Sequence Number=SeqID_130073
gggggaggttgcgctcgccgttgtccaggaggatggaagcgtcgcagccctgttggttttttacatatccatggattaggatggatggaacagcatcatatctatcagaggagaagaaacaaacaagacaggaacctgcgggaagcagtcgtggaagaagaggcggagtaggccggcggtgaggcggacgttctggcggagcgcggcgtcgacgttggagcggacgagggtctccagctgcgggcacgactccaggtggaacg

SEQ ID NO: 64100 - DNA, 450 bp, Setaria italica
  Peptide Sequence Number=SeqID_130074
tgtaagtaggtctatttgtcttggggtttttggtaggtctaaactttctattaagtaccttactactattgtattaagtcaagtatttttgagaggactggacttttccagagacttgagacacgactaaaagacatggcaactgagtattggacttaccattgtcatctggttggttacactcaggtggcaaaaaggcctcctccagcacattatatatcaactactgccgaccacgatgatcataacttagtagctcaagccaccacaaatacttgcgattacaattcaagagccagggcatctgtagcattgcacccttgttccaatggatataacatgctatatcctttgcatgttgatcttgatgccttgccagatcaaatggactgtgatgcatgcccttcggcaagcataatgtaggggactacgatcatatacaccacgcaa

SEQ ID NO: 64101 - DNA, 222 bp, Setaria italica
  Peptide Sequence Number=SeqID_130075
tgcaacagctggtgagcactaccgaaaccaagggaaccaggtgaagaagatctcctccatctggacagacgacgaggcctctgtggcctgctcctggacctgatcactcgcgaaacttgtatgatcctcatcagtccaaacataaaaaaggttaggtctacgtgcaggggatttgctcactctttttcacaaaaggatcaccacactggccagtcctgcaat

SEQ ID NO: 64102 - DNA, 186 bp, Setaria italica
  Peptide Sequence Number=SeqID_130076
aagtctgtgaggaggcagcggtctccattgccggtaggattgttgcccgaagggcatttggaaagctgttttcatgactgtaagagacgatactgggactattcaggtaggttcttgaaactgacttgccttattttgtatttttgttagccaacttatttttctagttctagtctttaattgtta

SEQ ID NO: 64103 - DNA, 308 bp, Setaria italica
  Peptide Sequence Number=SeqID_130077
aagtaaaccgaaagtaaattttacaaatgagatgttcagttggagttggacccaacttcagttggcacgcagaatttaatcccatctcaaacatcacccagcctcaagtgcttattgagctgatcaaattcacatcaatttgcatgtacatccgcctgcttgccatctaacatgccactgattatgccgcattgctgctatactgcttcttcctatctctccacaaattgatatggtagccactaagtctgccatcagctcaaccacccgcatctcttcagataagatgatagagctagatctgcaag

SEQ ID NO: 64104 - DNA, 286 bp, Setaria italica
  Peptide Sequence Number=SeqID_130078
aggactaattgctgcatgaagaggtgtagactttcaaagcaactagcaattgagtaaatacagctagttaaccaacaaagcatgcatgcatgcaatcccaattcatgggtaagcaagccatggaaaagcttgtcgacatgcaattttgccagcaaaataccatatccacataattttgaaagcaactaatactcactcctcaacattttcttctagtctgtgatccacagtaagcaaagaaacagtcccaccctgagcatctaaaatacagcgagaatcgccaaca

SEQ ID NO: 64105 - DNA, 438 bp, Setaria italica
  Peptide Sequence Number=SeqID_130079
aaaggaaaacctaaaaacctttaactaagaaataaagaacaataggactagaaaccttcttcaaatatctcttcaacgacaccagcccctgaatgttgcttagtcaatttctgagaaggatcctttgctttctttctgaagattaaagacttcaacttgttcatctttttaggcggagaagcaggtcgtattgtttgaccaggtgggattatgtcaacaacaatgcaagttgtatcatcctttagccctcttgtcctgagcgcctccttaacaacttgctttgcagcaagctcagcaggtaaacctctgcaagacttagcagctgcctctgagggcaatgcatcccaaatgccatctgaagcaatgataagccttcctccagcatttgacaacttcacttgccttcacataaggaacaggaacaataaattcgaccaa

SEQ ID NO: 64106 - DNA, 226 bp, Setaria italica
  Peptide Sequence Number=SeqID_130080
catcctttagccctcttgtcctgagcgcctccttaacaacttgctttgcagcaagctcagcaggtaaacctctgcaagacttagcagctgcctctgagggcaatgcatcccaaatgccatctgaagcaatgataagccttcctccagcatttgacaactaagggaaagaagaatgaaccgagtcaatcagcatactgatggatagtatctacatggagagtggaaa

SEQ ID NO: 64107 - DNA, 414 bp, Setaria italica
  Peptide Sequence Number=SeqID_130081
tcttaacttgggttattggtattctttgttgtattaatttccttgtcttggttgttcccttcggtaaccttgggtattgtactaagggtacgtattcttgtttaacatcaatgctggaatcgtccgtactctttgtgagggaattgcaaaatgctgccctaaggcaattgtgaacgtgatcagtaatcctgtcaattccactgttcccattgccgctgaagttttcaagaaagctggcacatacgatcctaagcgccttttaggggttacaacacttgacgtagtgagagccaacacttttgtgggagaggttcttggacttgatcccagagaagtcaatgttcctgtcattggtgggcatgctggagttacaatattaccactcctttcacaggtgaatcctgcctgctcact

SEQ ID NO: 64108 - DNA, 374 bp, Setaria italica
  Peptide Sequence Number=SeqID_130082
tttgttctttaaatttttgttcttagttattgtctattgtccttgagaggactgcgtggtgatgccggaatagtggagtgctcttatgttgcttctcaggtgacggagctacctttctttgcatccaaagtgcggttagggcgctctggtgttgaggaaatattgccacttgggccattgaatgagttcgaaagagctggtcttgagaaggcaaagaaagagctggccgagagtatccagaagggcgtctctttcatcaacaagtgagaccggccatctagcagatgtccaaccccaacatagaaagacatgtgctgtgttttggcttcctggaaagccttgctgtaatttctctgtaaaactgtgtacatggc

SEQ ID NO: 64109 - DNA, 204 bp, Setaria italica
  Peptide Sequence Number=SeqID_130083
atcaacaagtgagaccggccatctagcagatgtccaaccccaacatagaaagacatgtgctgtgtttcggcgaccacatatttatcctttttagtacagccgtgtaggttattcacgccattgttactactagtttttactagtagtaaatttacttagttcttaaggttcttttttcctttaggttttaagtttcctttaaaa

SEQ ID NO: 64110 - DNA, 318 bp, Setaria italica
  Peptide Sequence Number=SeqID_130084
ctttcagcttcacaaagttgcaacagaatagaaagtatcttagcctttagcctggaaactgaagcaacaagatcagttgatcccttcaaacattcaggaacaactaactttaatatagtgtgagaaagcgacagtatgcctccgtttctagagagttccttatttttttaaaatacgatctcgaaacagcttttgctgacacagcagcaaaagaaattgccaccttgctcacttcatctgccaacagtgtgaaacatcgttggcagatgatgttcctgttggttctttggagtgccaccttgctcacttcattcttgt

SEQ ID NO: 64111 - DNA, 204 bp, Setaria italica
  misc_feature (7)..(7): n is a, c, g, or t
  Peptide Sequence Number=SeqID_130085
ttattcntaaaggagtcaggagtgcttgcttgtgttggcaagggctgctgcactgggtgcaagtcttccttgctttctgatggagtatcagtatgtaccaccttaacaattgcacgtcttcctcatttaagaagttaggaatcaatgttttagcataatcagacaaagatcctaagtttatacagactttagtggccttaaaat

SEQ ID NO: 64112 - DNA, 270 bp, Setaria italica
  Peptide Sequence Number=SeqID_130086
gccgggaggcgctccgccggcgagacccgcggcacctggcgctcgaagaggcgcttgaaccgcgaccggggcggcgccgcggcggacggatcgatctgcgcggccctcatgtcggcgcctcggcggatcaaactcggcggcagcggcaagcgtcagtggaggcgttggtcttggtctccggggatcgcagcaggcatagccgtcgccggcgattgacgcttcgatcggtgcggctaggggttttgtttttcctctctgttttttcgtttt

SEQ ID NO: 64113 - DNA, 267 bp, Setaria italica
  Peptide Sequence Number=SeqID_130087
cgggctgcggcatccgccgaggcgggggccatcctcgtcgtcggaggtgtcaccggcgtggaagcagttgcagcaccgcgcggcgcctcggcggatcaaactcggcggcagcggcaagcgtcagtggaggcgttggtcttggtctccggggatcgcagcaggcatagccgtcgccggcgattgacgcttcgatcggtgcggctagggtttgttttcctctcttgttttttcgttttctttctcacaagatttattcttctgttcggg

SEQ ID NO: 64114 - DNA, 344 bp, Setaria italica
  Peptide Sequence Number=SeqID_130088
gctcccattgctttgcttgcactttgtaaaccagtagccactgaagtgttggcatgcattgcctgagtatgagtcgcaatcccccgaatctgagctcggttaccttgcaaattagaaatctgctgccttaacctgatcagctgccgggctagaattttcgttgctgcctcattgccagtttttgctgtccttttaatttcagcaactagcttcttctcctcttgttgtagtgacgcaatatctctctcaatccctcgtgtagcattcgtcaggttcttcgtctttgtcttgtcttccgtctattctaccttcttcgtcggtcgttggcttcttcgcgaaaggga

SEQ ID NO: 64115 - DNA, 328 bp, Setaria italica
  misc_feature (246)..(328): n is a, c, g, or t
  Peptide Sequence Number=SeqID_130089
gggcggtcacggcggcagaggagagggaggccatgctggtagctagtggtaggtgggtggtgattatggaggagcaagagagaggtcgagcagcaagcggggagttgcaaaattgacccacaaaagttttgtgctcagtttgtttgacacgaaagttccaaaaatgatagatgttaactgttgaacctttatttgaaatgagaagataagtaggcttgtgtaagtaaaaaaaaaaaaaaaaaaaannnnnnnnnnnnnnnnnnnnnnnnnnnnnnnnnnnnnnnnnnnnnnnnnnnnnnnnnnnnnnnnnnnnnnnnnnnnnnnnnnn

SEQ ID NO: 64116 - DNA, 339 bp, Setaria italica
  misc_feature (296)..(296): n is a, c, g, or t
  Peptide Sequence Number=SeqID_130090
tggtagtagtcttgtattctattcgttttctatttagtcctagtcctaggtcgtcttgtattctttgatcatcaaacaagagatgccgcgatcgcaactccagcatgcaggtgattttagatgcatggattgctctgaaacatttcgacgtgatggggccggccatggatcatcgacaatagccaatcgaacgccgtcgtcagtcagggctcaggagctatctccggcaggccataaccggagatggtcacactactcacggcgacgagcataattggggcgctggctgaaaaggngattcaccctcaagtcagtgtgtgaaatgcaatgggatgccgg

SEQ ID NO: 64117 - DNA, 392 bp, Setaria italica
  Peptide Sequence Number=SeqID_130091
tacggtccgctgttcttctactctgcatcaccttgctgagtatattcatcggggtatatgctctcatcgacctcgagccacatgaggaatattgggaatttggatttgttgccacgagaaacaaggcattattgtcaccaaagtaatattgtgtgcccttgcgatattcaactgctgcagatagggatgtactgcgcctctgattgggcaaaagtatctctggtttgcaagtacatggcagaacccgcatggcatgggaactcatacattgggaaacttttcctgttaatcggacaagtttcaatctttctggaggaatgcaaatggtttggccgctgggagaacaagatcggccaatactcactcatggattctttcagaataaccctaga

SEQ ID NO: 64118 - DNA, 344 bp, Setaria italica
  Peptide Sequence Number=SeqID_130092
cagataaaggcacggcatgcaatagcaagatgatgcaaaatctgtctctcatcggtatcatcatctaattccaaaggagcatttggaatatgagccttcttgctgttatgcggttaggacaaaaacatgtttagaagcaatcggtacatccatcatatttgtgccatctatccatttaccagaagacttcatgaagttttccatatagcagataaggtccacatccttactgaatgcattgacaagatgatgtgaaagttcaaagcagacttctcttagttgactgctggtggagttcaactccatcagcagtcaactaagagaagtctgcattgacaagatga

SEQ ID NO: 64119 - DNA, 240 bp, Setaria italica
  Peptide Sequence Number=SeqID_130093
ttcaaggcatgaggaagaacgggtggaaaatagcatcctgaagatggttcgcagctgccaatacggctcaagtattcagtaacatttccaaaagaaaatcatggtattagtgctgactgcttgcttagcatagttttgctatggacatagacacagtactgtacagtcactcgccaaggacatcactacagctgcacaatagcatcaggagaatttcgttaatatgaatgggaaaaaaaa

SEQ ID NO: 64120 - DNA, 306 bp, Setaria italica
  Peptide Sequence Number=SeqID_130094
ctgcatgaaagcaactagtcttaaatatacttctttgacaattttgtttgtttattattgtcatatttgaatggtttataagatatagatgtgaagaatgacatatttccgtaataccaccgctgttgtgtttctttccagttcgccgtgaagaggaaggcggttggaatttggggatgcaaggactgcgggaaggtcaaggctggtggtgcttataccatgaacactgctagtgcggtcactgtcaggagcacaatccgtcgcttgagcgagcagactgaagcctgatctcttcatatcaggcat

SEQ ID NO: 64121 - DNA, 397 bp, Setaria italica
  Peptide Sequence Number=SeqID_130095
taggagactctagggtttttggtaataagaaatggagaagtttatgagaaatcaaaacctatggtttatggtttcaatttcccactacaaattgagaagggagatgaaccccttgaaactcgtacaggtgcaaacaatttaacatgaaaagctgtattccataacatgctaacattaacatttgggctaattttcactctaatttcagaattatactattgatctagaggaaggagatgcgattgtgacagcaacagatggccttttcgataatgtctatgagcatgaagtagctgcaataatctctaaatcgttacaggcggatctaaaaccagcggtcagaatcaatatcattctaaataaaaaaagtgctcctatagggaaacaaaagactaag

SEQ ID NO: 64122 - DNA, 229 bp, Setaria italica
  Peptide Sequence Number=SeqID_130096
ggctctgtcatcatattgagctcacatgttgtgccaccgctagctgaattttaagtgtattataatagttcatgggaaaaccacagccagtgctgatgtaaattctgggctcaggaatcaatgcagggctttatgcaagagaactaatggatggttgtaaaaaattcataactgagaatcaaggggccttagattttggaccggagcaaatcctttccaaggcagcaga

SEQ ID NO: 64123 - DNA, 167 bp, Setaria italica
  Peptide Sequence Number=SeqID_130097
ctttaattgctatatggctgtttggcctaagaacatccttcaatattctggttatgctttagcaccataactttagagatccttaagcataaccagaatattgaaggatctctaaagttatggtgctaaaatttgtacttggttgccgttgcaaaaaaaaaaaaaaa

SEQ ID NO: 64124 - DNA, 455 bp, Setaria italica
  misc_feature (102)..(102): n is a, c, g, or t
  Peptide Sequence Number=SeqID_130098
atatttatcctctacacaacaagaatgctcgaccacactccggagatcatcaagcccttcatgcatatcacaccacagagctctggcatgctaggcttggtnaccccggcactgctagtcttcatcgcatcttgaatacattggtttttcatgctccaagtctgacactcatacatgccatgcctgtcgtcttagcaagcacgtacggctgccattctttgagtccactcatgttgcttcctttccatttcaactcttgcattgtgatgtatggacgagtccaataatcagcaattctggatacaaatattatcttgtgatgttggatgattattctcactttgcctggaacctttcctttaacgaccaacaaagtactaaatagttacttacctagactaatacaataagaccttaccaatagacaatttagtagtagacaacgacaaatttaa

SEQ ID NO: 64125 - DNA, 326 bp, Setaria italica
  Peptide Sequence Number=SeqID_130099
gttcctcaaattccaccctcgctgccttcggagccatctcaagcttcagagcctgcaactgcaatgcaagtcaacagcatcagcagcattgcagtagctgagacatccacaaccaacagaatcgaggtctgcatgggtggcaaatgcaagaaatcaggcgcgcttgctcttctgcaggagttcgagaagactgtgggcactggaggtgcggtcgtcgggtgcaagtgcctaggaaagtgtggcctagggcccaacgtgcggctgaaggaagacgaaggtactacaagaacggaaaaggtttaactttaactaaaaagttaaggtaa

SEQ ID NO: 64126 - DNA, 235 bp, Setaria italica
  Peptide Sequence Number=SeqID_130100
ccagaaatgttgagagtgcatatgtacatatgaatgagaacgaagaacagaggctttatgtctgctaatcatggaaaatgtgcggcagtagcttggtcctgcacttcagtaatttacagttgcctttatggcgtccaggaccttgttctttgtgaagatgcagaaaaggatggggtatcatgtgagctcattgatctgaaaactctgataccgtgggacaaggaaacagtagagg

SEQ ID NO: 64127 - DNA, 330 bp, Setaria italica
  Peptide Sequence Number=SeqID_130101
gaaatccagtttgcagactatatctttccagcctttgatcagattgtcaatgaagcagctaaattcagatatcggagtggaaatgaatttaactgtggaggcttaacaattagaactccttatggtgctgttgggcatggtggtcactaccattcacagtcaccagaggctttcttctgtcacgttcctggactcaaggttaagtttgcggctctagcatactcccttcatgaactactatccttctcccagaaaatgccaaaccaacattttcctgaatgtatacatctttgatattcttctgaacatctcttcaactgttggtctagt

SEQ ID NO: 64128 - DNA, 185 bp, Setaria italica
  Peptide Sequence Number=SeqID_130102
cggcggcgtctttcgctgcacaacggggctcgccgaccggtttggcaagaacagagtgttcaacacgccgctatgtgaacagggcattgctggatttgctattggcctagcagcaatggtgagttcacacaatgtttaactcttctatgtaatgatttcatgataaactgtatgaggaaccctct

SEQ ID NO: 64129 - DNA, 180 bp, Setaria italica
  Peptide Sequence Number=SeqID_130103
acagcacaagtattggcagggggtatagcaaaatctgcacatgtcttgtgctgtggctgcccaggaaattttcctccttttttccatttccttcctggcaccaacgtgggagttgtacatagatgataatttttgcttgttaaatggacagataatagagcatggagtttaatttaaaaa

SEQ ID NO: 64130 - DNA, 294 bp, Setaria italica
  Peptide Sequence Number=SeqID_130104
aaagcgcacggaaacagcggttctttgctggtaatttcatgagtaatcctgaccaatatggtggtgtatcagaaagccctccgggccattcagttggatatttctacggatctactccagaaaatcacaggtaggctaatagttaatccatattcacttacagtaaaacctacctttttactgtctcaaattgctgttgtcttgatgattccaatgctgattagctataagagttcgaagctgagttcttctcctcatggaattcctactgggagcttcaccttgtttggtatt

SEQ ID NO: 64131 - DNA, 349 bp, Setaria italica
  Peptide Sequence Number=SeqID_130105
tggggaagatgaggaagcaccgtttaccaccaagcttaaatttgaagtcctttaatttagggccccctccagacataacaaatgctctgacatcagtaccagttaagggtgcacccataacctcaaggaggcgaaggcgacaatggcggtggcgagggcgaggaagccgtacttggccatgccctcggagaggccgacgaaggtgctggcgatgccgaacatgatcctccacagcgcgacgcagacgatgacgcccccggcgccgacgaggatcatgtagttgcgcctccagaaggcctcgtacctgcagcccgacggcggaccggtaccgcgccgccgcgctcctcgc

SEQ ID NO: 64132 - DNA, 379 bp, Setaria italica
  Peptide Sequence Number=SeqID_130106
tacgattcattatttcgaaactgttcctccagtagaaacatcatgctagtgcatgtgaaacaaatacatgaagatcagcgaatttcataccagtgttcttggtgatccagctgcacctatgcatgctccccggctcactgcaatcgaaatcctcctcacccccttcaacgtcatggtcactggccttgtcgtcgtcctctctcctcatctccagagacaccatcacatcgccccaggggctgaaggtgccgccatagaggagcggcaccttgggctcccagctggagttggagctgctgagcgaggagtcgttgggagtttctgcgacagcgacagcgacgacaatgtcaggttggagctgctcctctggacttcccag

SEQ ID NO: 64133 - DNA, 287 bp, Setaria italica
  Peptide Sequence Number=SeqID_130107
cggaggtggtggtggaggcggcggctacggcggaggagccggcggcgggtttggcggaggcagcggcggcgggctgggcggtggcgttggccacggcatcggcggtgggtttggcaaaggtggcggtctcggcggcggtgtcgggcacggcatcggcggtgggttcggcaagggtggtggcctcggccatggcatcggtggcgggtatggcaaaggtggaggccttggcggcgggatcggccatggcgttggcggtgggtacggcaaaggtggcgggcttggaggcg

SEQ ID NO: 64134 - DNA, 313 bp, Setaria italica
  Peptide Sequence Number=SeqID_130108
ccaatcagtgctgagtaggctgctctctgtacagatggtacccagaaattcgcaagaggcatcatcactgcatgagaaatgtctgaaaatgtactatatatcagtatcaggaggtaccgcaactttttgtcaagctgttccaggagaccatttactgtgtaagtcgaatggcaccagatgataatattttcaaaatggtgtcatcaatttaccacaaggtacttaccagaatagcgtcatcaattttacctactaaagttaccttaccggtaattatttcgtttcttatttcttaacttttaccttaaaagtt

SEQ ID NO: 64135 - DNA, 401 bp, Setaria italica
  Peptide Sequence Number=SeqID_130109
agcgttgccgtttgtgttgccatctgcactgcattgaacctattagctgctcgttagtgagcgcatcttgcccaggacttgccagaagacctcatcaccagaaaactaaattgggctccttttccttacaaaatcatctagagcatggcaactggcaggtaccactttgatgctgttgttgatcacaagctcatttgcctaataaatctgctcctgtgcctctgccttatgaggttgtctccctgtcactgttatttgtgctccagtgcctatctgcaatcgtaactcccaattcctcacgctactaattcccaagggacgtcgccgaccagcacccggtcgccctcctcgtcctcgtacaccagtgtgtactcgccgctgatcacgggtcttccttcggt

SEQ ID NO: 64136 - DNA, 194 bp, Setaria italica
  Peptide Sequence Number=SeqID_130110
tgcaaataatcagccaatgtagataagatcaaggcctctgtgtgccccaagtccagtaagaaccttcttattgtcaatacatgttgaactagtgcatgcaagctatggtaaatgttcaggcagctagttcaacatgtattgaccaataaagtaggttatatgtttaattttgatgcaaataatcagccatgtag

SEQ ID NO: 64137 - DNA, 412 bp, Setaria italica
  Peptide Sequence Number=SeqID_130111
cacatctgtaataagtgtttagatgattgagagcaaatatgcatgcagattaggcataaatcaacatctgggtagataaaattgcaaaaatatgaagaatcatgcagcgcataatgaattgacaacagccgagtagaaggaaactaacttgcaagcactaacacaatagggatacttggtcctctattttgcaactgaaaacagagcagctgaaagatcttaatactgaatatactatactacaactgaaaaactagagcagtcttagtaaaagcaaacaatgctaattatacccataaaattctcatacactactaccattttgtatggtcttgtgtctcggatttgtgaaaaaacaaatttacaacaacacatctactataatatctttgcagttattggaagctacggc

SEQ ID NO: 64138 - DNA, 429 bp, Setaria italica
  misc_feature (1)..(72): n is a, c, g, or t
  Peptide Sequence Number=SeqID_130112
nnnnnnnnnnnnnnnnnnnnnnnnnnnnnnnnnnnnnnnnnnnnnnnnnnnnnnnnnnnnnnnnnnnnnnnnacttatgatttgataaagaaagttcttgacaactaatgaacatgagtccatgaaactactataacattcagttccaacaaattaaaagtttactagtgaaatccacataagtcgaaaggtaataaagtatttggttaatttaccactgtgcagggtcaatggaggcctagtaaattacaagaattatttactatgaagcctgataatttactataagagcgataaatcatccaaaaaattgtttgtacctaaaacctatgcagccagctggtgcctaaagtactaaacctgcatcacaaaatcacaggcaagtggcaagtgtactgtcatatactgagatgttaacttgttcacttt

SEQ ID NO: 64139 - DNA, 417 bp, Setaria italica
  Peptide Sequence Number=SeqID_130113
aaaagataacacagattcaaaagtggaaattctccctaaattagctgtaccagaatggtgctcgttttttagtacagtggctacactaattgaaaatggagaagtataatagaagttaataaggacacaagcacatatgtacggcatactttatgggtcaaaattgcagtaacacaatgtggattgacgtaatttttttactatgatttatgaaaaaaaaacattctgataagttattaacaggaaaccatgaatttgccataacatttgacaaagttccaacataattctgagctcagatcttagataaatcaaacactactctaaaacttggtgaaatctgcaccaagcacgagcactagaaaaataccactctgagaaggaacaaattggcctagggttcaaattacatgcagc

SEQ ID NO: 64140 - DNA, 356 bp, Setaria italica
  Peptide Sequence Number=SeqID_130114
cactcatgaagacttccaccaccactctctgagagagaaggaattagccaccatgagtggagtatgagtggaggtatgagtggtggagtgtgtcttcgtgattcttggtggtgatctggttgatgtcttcgtgtgattcttggtggtgattaactagccgagcggcagaccagtccttccatctgatcatgctggtaggcaccatgatggtggagagaaggcacaagggagctggagcactaccaatcagtgctgagtaggctgctctctgtacagatggtacccagaaattcgcaagaggcatcatcactgcatgagaaatgtctgatgatgcctcttgcgtaatttctctgtac

SEQ ID NO: 64141 - DNA, 242 bp, Setaria italica
  Peptide Sequence Number=SeqID_130115
gagcgcatcttgcccataacttgccacaaggcctcatcacctgaaaactgggcagataaattgcaaaaatatgaagaatcatgcagcgcataatgaattgacagcagccgagtagaaggaaactaacttgcaagcactaacacatagggatatttggtcctctattctgcaactttgtcaacttccataccagtttcttcaacaataaactccattgtctcctttccaatacgttcaagcac

SEQ ID NO: 64142 - DNA, 252 bp, Setaria italica
  Peptide Sequence Number=SeqID_130116
tcactgcatgagaaatgtctgaaaatgtactatatatcagtatcaggaggtaccgcaactttttgtcaagcagaatagcgtcatcaatttaccacaaagtacctaccggaatatcgtcatcaacttaccaaaaaggtatttacaaaaaagaatttcatctgagggctgtcaaaaatgggattcttgagcgtacgagcaaagacctgcatgacgcagccttcaacctcatctgtagttcaggtttgaactctt

SEQ ID NO: 64143 - DNA, 239 bp, Setaria italica
  Peptide Sequence Number=SeqID_130117
cggacttggcagaaggcctcatcacctgaaaaccgtgctatgcatgtactggttttcagcttggctggggcatttacgcaaacagagagcgtgcgtcatctctcatcctggtgtaagttgcactctggtgattaaaaattgccagtgatctcaggatcctatctccgagatccaagggtacatcgatgacgcactggccgggaagcttgggctccgtgcgcttcacggcgaccgtcgcg

SEQ ID NO: 64144 - DNA, 187 bp, Setaria italica
  Peptide Sequence Number=SeqID_130118
ttccagtaaactgggtattgttttgtagtaacacaaacataggttttctgctatgcttttcctctaggctgaagctctttgtagcacattccattttccctgctatatatatcaccacatgaatgaggcagggaaaaatggaatgtgctacataggttttctgctatgcttttcctctaggctgaag

SEQ ID NO: 64145 - DNA, 436 bp, Setaria italica
  Peptide Sequence Number=SeqID_130119
gcaacctcctccagcgccgcaaccgcccgcagctcgtcatcgccgtcctcctccagatcttccagcagttcacggggatcaacgccatcatgttctacgcgcccgtgctgttcaacacgctgggggttcaagagcgacgcgtcgctctactcggcggtgatcacgggcgccgtcaacgtgctctccacgctggtgtccgtctactcggtggaccgcgtcggccgccggatgctgctgctggaggccggcgtgcagatgttcctgtcgcaggtggccatcgccgtggtgctgggcatcaaggtcaccgaccactccgacaacctgggccacgggtgggccatcaatggtggtaggtcaataggtactagacaaccttacgtactacctaccttacgacctaggtacctagggggaatagaagaccaacccgaaggga

SEQ ID NO: 64146 - DNA, 439 bp, Setaria italica
  Peptide Sequence Number=SeqID_130120
gtgctcaacccgagaagatcctacagcatgatggctagccaaaggatatgtgcctcatattctagaccacaaatctgcgatgcttgtaaaattgtcagatttgtctcactttgtggactgcaatgcctcaaaagtggcttgacttgcaagttccgatatttcgctgaatttccccttcctcatcaattctttgtcaaaaatagcatcagataacaccactgcggatgcccctgcttccacataccccttgattgaacctatttggattccttgagaagcaaccatcggtacaagaggaaatggtttcttcagagcagacatgtacacctctccacccatcactgacactgggtacacctatgagaagaaatgtgcagttatgaaaccttaacgactttttgcgccaagcaacttagtctaaggtactaagtaattaaaa

SEQ ID NO: 64147 - DNA, 259 bp, Setaria italica
  Peptide Sequence Number=SeqID_130121
cactccagatgttaaatccttgaacacaccaacggatttccctccatgcagatcatgcaagcccgaagcttccattaccctaatatcctggtcagcaagctgaatagttgggacttgatttttctctttacaacaagttggtttcataggatgaagagtcttggcacggggcaatttcttagaactgtacatatccacaattttggttctttttgactttgtacatagaatgctaatggaaatgaaagctgaaagtgaa

SEQ ID NO: 64148 - DNA, 183 bp, Setaria italica
  Peptide Sequence Number=SeqID_130122
ttagttaattaggttaggttagttatttgttttgttattgtttagttgtattatttctactagtcctagtccaaagtgtttatgcaaaccagttgctggacatgctagatccagagaataaacttttctccaagcgatttttccgggaatcatgtctattcacagacagcagctacacaaaag

SEQ ID NO: 64149 - DNA, 268 bp, Setaria italica
  Peptide Sequence Number=SeqID_130123
cctctcgatcccggccgcctgctccgccctctcgaacacgccgttccatatcctcgcttccctggagtgctccatcttggggaggtagaagaaggggccgaacccggcgccctggccggcgcggaaggcggcgtggttgtggaagaagtagaggccgaagtcgacgaggcaaccgatggccggctcgccgtcgatgaggacgtgcgcctcggggaggtgaacctgcgggacgccgtggccggcaccatcagcttccgcgacgcggcgc

SEQ ID NO: 64150 - DNA, 216 bp, Setaria italica
  Peptide Sequence Number=SeqID_130124
ccaaatgacattcaacttattgatgctcatttggattgttatatttttcaaacgatgtgcctcaataagctagagaaaggaaccacaaatcagatgaaaagacactattcatttggattgttatatttttcaaagatgtgcctcaataagctagagaaaggaccacaaatcagatgaaaagacactattcaacaacaggacctctgctaagacatg

SEQ ID NO: 64151 - DNA, 330 bp, Setaria italica
  Peptide Sequence Number=SeqID_130125
gccatctgatttgcttgacttcggcgagttctcagattgcatgaatttcagtactcaggatggcagccccctactaaatgttgtcaatccgacatttgactatgtgccaccgaagcttgtgagcctatttgtcactgatactgggggccacagtccatcttatatgtaccggctcattgctgagtactactcagcagatgatctcgtagtgcaacggaagtcaacagcatgaaggaacacaaaagcattcaacttcgtgttctagaagaagactaagaagaatagttacggaatttacggtttaacttagttactaaattagtaagggta

SEQ ID NO: 64152 - DNA, 410 bp, Setaria italica
  Peptide Sequence Number=SeqID_130126
cataattcatgctacttcaccttgggaatttatggttattggtgctcttgctatagcgaagatgatatcagttcctatggtgatgtcttatcatacacatcttccagcgtacataccgagatacaatttaaattggttacttgagcccacatggagttttataagtaagtcaaaaatatttttactcctatttcattctcagtaaaaaaggtctaaaaaatgtttttttttctcactagtgtggtagtggtgctgactcactttcttgtttcaaaggatgcctccacagagctgcagatcttactctagttccttcagtagctattgccgaagactttgaaactgctaaagtagtaccagcaaacagaatacggctttggaacaagggtttcgactccgaaagctttcat

SEQ ID NO: 64153 - DNA, 302 bp, Setaria italica
  Peptide Sequence Number=SeqID_130127
ccgccccgccgaggattccagcgccgccgctaattgcgagagcccgccgcgcacgcagccaaccagcccccgaggattggattccgttccaatccacccgcgggggaagacgaagaggactccgtcgattccaccggtaataataaggtaagaagccaacggcactgccccctcccccctcctccgccatgaccggaccatccaccggtacggtgtgtgccattggattccattcccttcgccgtgggggtgggggcgtgaatttctcttgtcgtgttgccgtccgcctcgttaactccccc

SEQ ID NO: 64154 - DNA, 397 bp, Setaria italica
  Peptide Sequence Number=SeqID_130128
tctaagtaaactattaattcctagtccccgtacttttgtctaaagtaattgtctaacttgtacgaaggctccccaccatgttctccacagatgcccaccttcaagttaggcctagctttgcgacccctctctgtagcaaacttaaccagctcgcccactcccctctgatccagcacctcaaagggatcatgttggaggataccctgagacagataaatgggaagaaacttccccacatcatccctgctgtagccaaatgtcatctagtagtagaaggtcgttcgttccaaaagagaagaattcagcctgctctgctatctcatcagctactagagctgccctcggaatttcaatcatagttccaattttgtagtcaattggtttacccagtagcaga

SEQ ID NO: 64155 - DNA, 202 bp, Setaria italica
  Peptide Sequence Number=SeqID_130129
tagtaattagggtaaacccttagtaaaaggtacgtaagtctaaagtaaactattaattcctagtccccgtacttttgtctaaagtaattgtctaacttgtacgtaaggtcttcccctacctattgtttcttcctactagtattgtccctacctttctaagtttaggtccttagtcttttgtcgtaccccttcttcttgttag

SEQ ID NO: 64156 - DNA, 263 bp, Setaria italica
  Peptide Sequence Number=SeqID_130130
ggttgttgcccatgtggtacctttcatgctctattgtgtagtaatcccgctgtcagtcctgattcctgaggtcacagttcctgtatggggggtggtttatatcccaacaacaataacacttctctacgcaatagagcatgaaaggtaccacatgggcaacaaccttcctaatgaaaaagaagctatagatcaaataaagcttcctccacaacgacacctccttagtcagaattatctctgcacccgtcttcctgaataaattt

SEQ ID NO: 64157 - DNA, 245 bp, Setaria italica
  Peptide Sequence Number=SeqID_130131
tttttttttggtaaatgggttcactccaaatttcataggatgacttcatgatagaccatttcatctattctagatgaggtgattcgtcgaaccaaacacccgatgctagctagtagtatcgtgcagcgcaaaactgggccgcttacagatgcaagcacggtagtccgattctacaaactcattccattgtgccgtggcaccagataactcacgcatcatgcatttctctccaaaacattctacca

SEQ ID NO: 64158 - DNA, 225 bp, Setaria italica
  Peptide Sequence Number=SeqID_130132
ctttcttctagcttatgtaaatgccttttgggttatttctacagttaacagtatgtgatccaaccttggtagctaatgttatatcttctgcttggtcaggaacttgagctataattcactgacaggaagcttaccacctggtttaggccaaccttcacttgtgtcactggatctgtcatcaaatgagtttactggaagcattcctggcaccataggttcatcaaa

SEQ ID NO: 64159 - DNA, 212 bp, Setaria italica
  misc_feature (186)..(186): n is a, c, g, or t
  Peptide Sequence Number=SeqID_130133
tcaaggtgccaattattggagggaaaggatttggatcttcatcagctatacaaggaagtcacatcacggggtggtattgataaggcaagaaatggatagaatgttgttgattcaaactttaaatttccttaacaaagtgaaggcagagaatagatggagggaagtgactgcatcatttgtttcccngccactgcgacgaatgctttctttta

SEQ ID NO: 64160 - DNA, 418 bp, Setaria italica
  Peptide Sequence Number=SeqID_130134
agatcagatatagtgcgggagactattaaactgaaaagccatgtcagaggcgcaggcgagaatattagaaacaaaagaaactgaagatgtgaagcggcgattgcttgtggatcagataaaagctgacagggagaagtggatcgaagtgataaatacaacctttgagcatataggaggtggtttgcagacgatattaactgatcaaaataagctagttgtagcagttggaggtttaacagcacttgctgcggggatatacacaacgagggagggtgcaagggtagtctggggctatgttgaccgtattttaggtcagccatcattggtaagggagtcatcacgagggaggtacccctggtctggttctttatcacgttgtcttactaagttagtccttctacttagtctaaacttgtaa

SEQ ID NO: 64161 - DNA, 344 bp, Setaria italica
  Peptide Sequence Number=SeqID_130135
tattctaacacgtattaattagtctttattccttttgtattggttgtttgaagtaagagaacccaatatcgtgttgatggaaaaaccggctgcagatataaatgacacgatttctgaaaaattgatgatccaaattaatctcaatgaagatattgaagaagatatcccacccagtcaatataccaggtgtgaagagagagctactatgactcccactgccatctcaacggaagttggcccgccgggatatgggcctggagaaaactttcttcaggtcagttcaaggaatactagctgtgagcagaatgtgataatgactcctcctgccatcttaagagaagttc

SEQ ID NO: 64162 - DNA, 291 bp, Setaria italica
  Peptide Sequence Number=SeqID_130136
taagaaaacaaataaactaacctaacaagaagtagaagacaagacttaacaaggttactagacaaagtgagcatcgaactgaagttctttgctccaatagcagcagtagcaaagcctccaaacatcatttttggtcctatagttagtcagaagctgaaggcacattttgaaaaagatccatatcctagtcgtgcaacaaaagagagtctggcacaagagctaggactgacatttaatcaggtcagtaaatggttttctgctactcgttattattcaagaggtgctgctgcc

SEQ ID NO: 64163 - DNA, 176 bp, Setaria italica
  Peptide Sequence Number=SeqID_130137
ccttgtgcactgatgagtcagtagctgcaaaaggtgcacttgaactgtgtatgactcagatgaagattgtgcttagctcccaacaattgccccttgatgcctctatggataacattagcttcgtagtctttattctattgtcgtacggtaaactttattgtttacttaggttcctt

SEQ ID NO: 64164 - DNA, 385 bp, Setaria italica
  misc_feature (4)..(4): n is a, c, g, or t
  Peptide Sequence Number=SeqID_130138
tttnttttcttttatttactttacgtttcttacgggttcgtattctattgttacggtctttcctacggtttcttggtctaggtaagtctattttgaggctgcatatgaggagcttgctggtgatgacacacaggctagtgatgcggctatatctgagattgctcgcatgtcagtccataggcctgaggttgagcagtcgtggaataagaattaggtatggactaattgacctatctgcaaacttagtcactacatgtacatatgatctccttttttatacatggcatcaaatctttatacttgctttcccttgtgagcatataaagtgacatcatattgtatttctgtaaccttcgtaagctaatgaaaaaaaaaatactaaaag

SEQ ID NO: 64165 - DNA, 255 bp, Setaria italica
  misc_feature (46)..(46): n is a, c, g, or t
  Peptide Sequence Number=SeqID_130139
cggaaaccgtgggaaaactcaaatgacggaagcacatgagttgcanggttttcggtcccatcatccacctcggatcttgaccgcggtgagtcttttgaaggaagatccttccctgatgaactatcaccactctataatgaagaattaagtcttccggcttcttccaaatatatgttctcactgtagccaaactcatctctggcgatagaacctggatactccacaatgcttttctgcagaatatatgcggttgac

SEQ ID NO: 64166 - DNA, 403 bp, Setaria italica
  Peptide Sequence Number=SeqID_130140
ttatttctttaagttttgttttagtttagttttagtttttgttttgtttctttaaactttatttgttctttgttaacgttctttcttggtagtaacaaagtgagcatgtacatctggagctgcgatcatctcgactgcaccactctataatgaagaattaagtcttccggcttcttccaaatatatgttctcactgtagccaaactcatctctggcgatagaacctggttattgcacaatatctctacaacaataggctttagtttttgccatgcctttagtccaatccgcgaagaactatctagcgctgagagctgcgattgaccagaactcaatcccatagcaaatgtgctgtcagagcctccgtccaatggtttttcaagaacgagtttctcgaccacat

SEQ ID NO: 64167 - DNA, 199 bp, Setaria italica
  Peptide Sequence Number=SeqID_130141
ttacttaggtttactaactaattaagtactttagttcgaatggtgatagttcatcagggaaggatctcctgagccaaattaatcttaaaggtcttcttgtgctccagaaacgtttaggtcaaccgcatatatttctgcagaaaagcattgtggagtatccaggtgtacagacaagcatcccaatcgagcatccatggtg

SEQ ID NO: 64168 - DNA, 196 bp, Setaria italica
  Peptide Sequence Number=SeqID_130142
ggctacaggagcaagagcagcatcaaggtcccaaatgaagacctcaccaccaagaccaccagaggcgacaatgttactattcttctcagcagcagcaagacaagtcacatgtcgattgggttaatgatgctatcatagttggtgagaagcttgtttcctgttcctcagtactacctacccttgtaaggttgttggt

SEQ ID NO: 64169 - DNA, 367 bp, Setaria italica
  Peptide Sequence Number=SeqID_130143
taattggcagacagacaaattagacagtagacttcaactgagaggaacttaggagttggtagacacggctcctttgcatttataatcgatttccaaaactgtgtcatcacatcaccacaaactcgacccacaatttgatggcacacgaagtcgccatgatttgatggcatagataccggaaccgaagtagaagcccagactgcatgtcatcttgcggtgtatggtacatataaaatgatctgaaggcattcataagctatctgaaaacaagtatcaatgtatatggacaggaccgcacagtcccgcgccgctcctcctgctgcagacaatccttcatcggcatcaacacaaccaggacaccatcaac

SEQ ID NO: 64170 - DNA, 335 bp, Setaria italica
  Peptide Sequence Number=SeqID_130144
ccagctttgcactatgaatgagatttagatggttactccaaacaacatactggtactaagatatatcaagatttagcactgactacatcacttactttgcatgcccaatagcattgtggcacaaagctaacacgcggaccatcgcaagatctcgagccctagtagtcccatatctttgttggcagctcctttcagagaagaaatctgcaaaatcatcaacaatgactgcagcggggaagttgtcaagaaggtgaaatgcagcaaagtactttctgatctcgtcaccatcttcaacgtatctatgagcagacaacacataatttgagcataaaatt

SEQ ID NO: 64171 - DNA, 403 bp, Setaria italica
  misc_feature (1)..(48): n is a, c, g, or t
  Peptide Sequence Number=SeqID_130145
nnnnnnnnnnnnnnnnnnnnnnnnnnnnnnnnnnnnnnnnnnnnnnnnccttttgtaacaatcagttatgtgtcactctgcatttttccgatgccactttgctcacattacatgtatgtatacctgtacccaaattagcttcagttccaaaacgtatgataccagttcctcatcttaaatacgtacaatataacaccaagagctgggggagaaatgccctattcctgctaccacccaaaacaacagctttatcctctagccctcgttggagccaagctctggatcaacaacatagcctcgtagggagggtgtcttgccgaaggtggcgcttgggcctttgttctgacaataccttttacctaggacgaacgtaggaccaacggaataccaataggacaagaca

SEQ ID NO: 64172 - DNA, 273 bp, Setaria italica
  Peptide Sequence Number=SeqID_130146
acatgttgatgaatgaacgcttggcagggtgcaagcctgcatcaggaagctggcctggctgccgcctgaatccagcaccgttccttttattcgcgagatatcattgactttctcccttgcggcgtagtaatactgggacctgctgtatgatgcaatcaacttcctgatggcttctgatgtggtcatcctatccagggggtcgtcaagaacctactacaaataccttagactttacaattagaatacctttagaagggtaggaccttacaacca

SEQ ID NO: 64173 - DNA, 237 bp, Setaria italica
  Peptide Sequence Number=SeqID_130147
ctctttcttcgtatggttccatgtcatcataatcatctacgtagcatcttatttattttcatgaaactaccactgagactggcgttgttggcgccaaccatttcttcatctgttttcaaaaggagccaataaatcctgaacaatcagttatgtgtcactctgcatttttccgatgccactttgctcacattacatgtatgtatacctgtacccaaattagcttcagttccaaaacgt

SEQ ID NO: 64174 - DNA, 173 bp, Setaria italica
  Peptide Sequence Number=SeqID_130148
ctcagcgcagcagattatggagtggaggagcttatgattctgatacagaggatcctgacaatgtgaaaagtgagggtaatgacttaatcataagctcctccactccataatttgctgcgctgaggtggcctcttgtccatgtcctcctgaagctccagaggagaaagaggagg

SEQ ID NO: 64175 - DNA, 364 bp, Setaria italica
  Peptide Sequence Number=SeqID_130149
caactagaaacggcctttgctgtttctttgtatcctcatttgccttagatttattttttagattcacctttgttactcttaaaggcagcatccagttctgcttccacttcagccaattcttctgaatctccgtcttctttgaagccttcccacaatgaccaaatgccaaatccaaagaacagaagagtggtcacatgatgagtccatttacgtgatatcagatttggtgcagcccaacctagacaggctgatagagctgtcatcactgttagtgcagtcaaacagcctgccaggacgagcttcctggatttactcatgctttatttatctttgtttagattctggccatgcgccatcccaggaa

SEQ ID NO: 64176 - DNA, 212 bp, Setaria italica
  Peptide Sequence Number=SeqID_130150
agagctgtcatcacctaaaattagtgatgttagtgcagtcaaacagcctgccaggacgagcttcctgggatggcgcatggccagaatctaaacaaagataaataaagcatgagtaaatccagtactcgaaacaagggccataaagaaaagaagcgtatgaaagcaggcattggaaaaatattgatgagcctatcacgagaaaggggtatgtt

SEQ ID NO: 64177 - DNA, 252 bp, Setaria italica
  Peptide Sequence Number=SeqID_130151
tcaaacagcctgccaggacgagcttcctgggatggcgcatggccagaatcgcggcggcgaagaaggtcttgtccccgatctcggagagcaccgtcatggccagcgacttggtgaaccccccgagcagagacggcgccatggcggcgggcgatcccgatctcgggggacgcgcggcgggggttggagggagagagcaggcagagcggaggcgctgcgggcgtgggccgcggggcagatgcgaggtagtagtag

SEQ ID NO: 64178 - DNA, 434 bp, Setaria italica
  Peptide Sequence Number=SeqID_130152
tcgcgcgccgagtacctcaagctcaagggagagggacgcgtcgtccccgaccggatccaacgccaagttgctgacttggcacgggtcgcttgcggatcgcaagcccagcagagtcgtgtacccaccctccgttgcagagcatgcctgaacgaaggccgctacacttgagttccgcttcgatctgcttcattcagccctctgaaagggcccacgtacatttgtgatgtatcaagagttaataatacacgtctaggcgttgcgtatgtatacggaccgctgtcgacggtcgtatggtgattacacgtacaatggcatgttgtttatgcttatctgtactactagctagtgctgtgagatgtagcaacctatgctttgccatcagtaaataaggaacgtgtattcatttagggtgcacggctagattccaaaaaaaa

SEQ ID NO: 64179 - DNA, 393 bp, Setaria italica
  Peptide Sequence Number=SeqID_130153
tccttaacgttccttaagttttgttctttgttacttttggttcttacgggttcgtcttgcggatcgcaagcccagcagagtcgtgtacccaccctccgttgcagagcatgcctgaacgaaggccgctacacttgagttccgcttcgatctgcttcattcagccctctgaaagggcccacgtacatttgtgatgtatcaagagttaataatacacgtctaggcgttgcgtatgtatacggaccgctgtcgacggtcgtaatggtgattacacgtacaatggcatgttgtttatgcttatctgtactactagctagtgctgtgagatgtagcaacctatgctttgccatcagtaaataaggaacgtgtattcatttagggtgcacggctagattc

SEQ ID NO: 64180 - DNA, 197 bp, Setaria italica
  Peptide Sequence Number=SeqID_130154
acgacttagttaagtaggacttactagtaaataacttgggaggatatccagcatctctcatggaaagagtggagatcttgcacggagcaccagcaatcttggaactcttcattctttcttgaacgatgcatatgaaagggttgaaacggtagaaagttgcagtgcgaatgatacgctagctgtcattatattatacc

SEQ ID NO: 64181 - DNA, 205 bp, Setaria italica
  Peptide Sequence Number=SeqID_130155
cgacgtccaggatgatgtcgtcgatggccttctggatcgcctcttgaaggaggcccttctctccaagaggcgatcagaaggccatcgacgacatcatcctggacgtcgacaaagacaaggacgggaagatcagctacgaagaatttgagctgatgatgaaagctggaatggactggaggaatacatcgcggcagtactcgagagc

SEQ ID NO: 64182 - DNA, 430 bp, Setaria italica
  Peptide Sequence Number=SeqID_130156
ttgttgtaactttgtcttctaagtctttggttaggttggtttcttattggttttccgtatttgtcgttgtaattctaactattgtagttctcgtaaaatatcactgaatgagctcaccatgtctgagggagcagaagttttagccattcttaaccgtggagctgttcatgaggtatttcgtctccgggtcagtttggcggacatggataagtgatctgaaagtatgcacaccataagtacttcagtacttggcttattgtgccctttgtaaaatatgtatgacttttgtgccctcgtggctctgcttagttgtaaatgcaagcataggtatagaaccatgtaaacttttattacatagtcttgtataaaaaataaaataaataaaagggccaatgtgtaaagttggtcctacacatttcgccatttattt

SEQ ID NO: 64183 - DNA, 242 bp, Setaria italica
  misc_feature (235)..(235): n is a, c, g, or t
  Peptide Sequence Number=SeqID_130157
ttaattaagtaagtctaaggccaatatgatacataaactccctcgtccgaactgcagttcgaaggtgaacaaggtaccaacaccgaaactaaaacagcatccgttcattgttcaatctttttccaacttccaagcaatcaatccacacaatgacgccatctgagtaaagcaaccaagttccacagttaagcagcaaatgcagtgcgcatatatatgggcccttgtttacttcctnttttttc

SEQ ID NO: 64184 - DNA, 405 bp, Setaria italica
  Peptide Sequence Number=SeqID_130158
cacagcatatagaacaaatagatagtgaattagttcttcaaaacaaaggttgaagcaacaatggaagaatgcaagaacagaacttgccctagttgaaacggcagagcaagagagaagatccagctggcatcaggacaaggctaaatgacagggtggtattgtctgtaaggcaggcaaagtatctgtcctctgcatttgtgcaccttaaatagtagcatgttggcagtagagcctgttcaatcatcaccatattacctgtctccacgatggattacagcataaaaaaagaaaccagtttgggcgggtctacatcatctaggaaggttagaactaaatactaccaaattaacaacaaatttagaagacaaaccttagaccaagtaataaacaatagtacgactttaa

SEQ ID NO: 64185 - DNA, 221 bp, Setaria italica
  Peptide Sequence Number=SeqID_130159
cttcccgatgaaccagggcatgcagtggcaccctggctcaagcacgctgtcaaacttgccaaactgctccctgatggccacggtcgactgatcaacttgaacacagcagcacaagttgcccatagctgcagtccacggatcacttctgctggtaacctagttgaaacggcagagcaagagagaagatccagctggcatcaggacaaggctaaatgacaggg

SEQ ID NO: 64186 - DNA, 278 bp, Setaria italica
  Peptide Sequence Number=SeqID_130160
cgacatatacttgtccgaatccaccctttccaagtttcctttcaagcttataggttggcgaatttccaatttgtacctgttccaagcaagcgtgtgagcatccgaaataaatatgcagacagcagaacagatcatgcaaccacaaacacaagcaagcctgtaacttaattctgtacccccagatttaaaagtcaggtaatcttataatagcataatgcaaaatacaatgaagatgtacaattaattgagcatatattagatagatcgtaggaatcaat

SEQ ID NO: 64187 - DNA, 228 bp, Setaria italica
  Peptide Sequence Number=SeqID_130161
cgcgtcggtgcagctctcctgcaggatcaggatgctgttctggctcgcgttcaggcctcgtagcaaggagatgcaattcccagggtgcgagccgttggggatgcgcgacacctcctgcacctggttgccgtgtgacagcacgtcccactgcaagcaaacgctggttagaacgcgacgccatgcggaggacagtagcaaacacactgatcataattcttgaggcatccg

SEQ ID NO: 64188 - DNA, 368 bp, Setaria italica
  Peptide Sequence Number=SeqID_130162
gatcatggataaacatctgaaggcccttgctccagtctatgttggaacaaaatttgtcaagcttgatgctgaagtctgcatactatcactgttagctttaaattacttcttgtaacaattgtgaagcctaatcttataaatcactaactgcagaatgctccattcttcgtggccaaactggcaataaaaacattaccatgcatcatattgttcaagaagggtattgctgttgaccggttaattgggtttgaagaccttgggaggaaagacgacttctcaacaagagcattggaaaatattctcaagatgaaaggtagtcaacttaatccgttttaagcagcactccacaatttggaatggaaaacatt

SEQ ID NO: 64189 - DNA, 105 bp, Setaria italica
  Peptide Sequence Number=SeqID_130163
tgactgtggagatcgaacaattaggctctgctcacttcacaatcaagttgtactaactccatatcatcactatatagcacgttggtcgtaataactgatcatcaa

SEQ ID NO: 64190 - DNA, 244 bp, Setaria italica
  Peptide Sequence Number=SeqID_130164
cttggcagtggaatgtcttgagagagcatctatgactaataaccctgatgaaagagatatttgtagtctgactcgttgaagtaactagggcaaccctccctcaatttagtactgatttcctcaacagttcctctgccctctgggccaatatagtactccatgagtgcagaaataagccgcatcgcaagctggtcgccgtcctctgaacataccaattgatgaaacgttaattgaactaatttct

SEQ ID NO: 64191 - DNA, 466 bp, Setaria italica
  Peptide Sequence Number=SeqID_130165
gtcggtgataaaactcatgtttccacaagagtgatggggacatatgggtattgtgcccctgagtatgctatgaccggacagttgaccctaaaaatcagacatttatagctttggtgttgtccttttggaaatcattacaggacgaagggctattgacaacacccgagctgcgggggaacaaaatcttgttgcatggatgtctgcctcttagcttggaagttctgtaagctcagtgttatcgcttcagtctttggtatcgtatcacctgaagggaaaatctaggaggcccggcccttgttcaaagacaggaggaaatttcccctgatggcggaccctgcactagagggtcagtatccatcaaggggattgtaccaggcacttgctgtcgctgcgatgtgtgttcaagagcaaccgagcatgagaccgctgattggagatgtggttacagccctcacttaccttgctt

SEQ ID NO: 64192 - DNA, 275 bp, Setaria italica
  Peptide Sequence Number=SeqID_130166
ttggcagtctcagaaatcattacaggacgaagggctattgacaacacccgagctgcgggggaacaaaatcttgttgcatgggtaagccactgatgctgttcttttgctatgttttgatccttgtccatgctaagactagtataaatgctgagtatggagaacagcacattgtgctatcttccgcctcttgcgagtattgattgttaacttattctggaaaaattgaccagatgtctgcctcttagcttggaagttctgtaagctcagtgttatcg

SEQ ID NO: 64193 - DNA, 440 bp, Setaria italica
  Peptide Sequence Number=SeqID_130167
cactggaatccttgactgctgattgtatacctgattccagaattacccgtaacgcgaacagtaatagagaggagcataggcaaacttgctaggatattttatcccttcctggcttactagtccaatactgaggcgggtcaggttgactagcgagctgatgatttgatggggcatgacacttggtccacgacgttcgcgaaagatgagcttccgaaggggtggtcgagtagagccacacgaagccatgaatgaaagtatgtcatcagcagcatcctgcatgatgtgcagttctcgaagggttgtgacaagcttggagagtaacgagatacatgcttccttgtggccttccacgtccacgtgatgtacttgtacttctccataaatgtaccaccaatcaatttcaagtaccttcagattggtcagatcgccgagcccttgga

SEQ ID NO: 64194 - DNA, 381 bp, Setaria italica
  Peptide Sequence Number=SeqID_130168
gaggcggcgaggatccaagcgcacggtagcgtttggcccgctcactctgctctgtcacgagtatcttgagtttttggatctcctctgctatgccctggtccttccacaacttcttcaccttacgcatggcttgttcctccaatctttatccattggatccatttggtcgtcgtccttgtctgcgagcttctgcagcacggcatccatggtgctcagctcatccttcaggaagcggatcccttgctccacgtctctggcgaactggtacttgtcgccgagcatggcagtcagcttgccgatgacggaccccatcacgctcgtggcggcgctcgccatcagtttcggtcctattcttctacttcttaccgtcttcttgtctta

SEQ ID NO: 64195 - DNA, 498 bp, Setaria italica
  Peptide Sequence Number=SeqID_130169
tgtccgggtaccctttaactattcttagttgttctcttagatgttgcagcttttctatatcttttgggagtttgcattcgcatattaatgaccaattttctaacctcaagtacttcatttgaccaaaacttttgacatgtccaagatagcaatcttcatataactcctcccaaatataatctcctttatttagcacattcaccactcgcaagacttggctacttaaaaccatagagatgtttttaaacaccagcaatgaattagaggcaaaaaatattaattgatcgaatatgagctgcatgttcttttatcttgaccatctcttcagcccgcctagaaatgccatgttggatagataaacggcgaatcttgttagaagaataattttcagaaaacccattacgattccatatagtaacaaaattgtcctccacagcctttgatacaatgaactcaagtatgacatcatgaactctgcattcttcactgttgcaccat

SEQ ID NO: 64196 - DNA, 250 bp, Setaria italica
  Peptide Sequence Number=SeqID_130170
tagttttacaatagcatcgacatgaagatgcactaatctctgcagttggagaatgctagccggtagttttccaaggaagctacccctaacatctagtgtctctagatgttgcagcttttctatatcttttgggagttcgaagttgcatgttgaaaacctaggtaacctcaagtacttcatttgaccaaaacttttgacatgtccaagatagcggtgcacttgaaatgccaccttcccatcgttaacataa

SEQ ID NO: 64197 - DNA, 253 bp, Setaria italica
  Peptide Sequence Number=SeqID_130171
ccaaatttctaacctcaagtacttcatttgaccaaaacttttgacatgtccaaggtagcaatcttcttcaagaaactcatcccgagtttctatattcagcactcgcaagacttggctacttaaaaacatagaggtgtttataattagcagcactaaattagggtcaaaaatattaattgatcgaatatgagctgcatgttcttttatcttcaccatctcttcagcccgcatagaaatgccatgatggatagat

SEQ ID NO: 64198 - DNA, 189 bp, Setaria italica
  Peptide Sequence Number=SeqID_130172
tcccacctttccgactggtcaaactcgctcttgcttactatttgagacaatatatctctgagtagcttcttcagatccagagtctgagatacagacacgaaagccctgcaatcaaattgctttttgttgtattttttcggttattaccttcctattggtcttagtagttagttctttccccttgtccct

SEQ ID NO: 64199 - DNA, 245 bp, Setaria italica
  Peptide Sequence Number=SeqID_130173
aaatcctgcaggcaaatgcagtatgtcttgcgaaaatgagactctttcttgagatcaatgccatctctccttgaaaaggaatattcttctatttcttttctactaaaataccacgaattaccaagtttgccaccttctgcatttctgctatatggtattctatatgggctatgctaccatattaggaagaagccttaattttgttcagaaggccccttggaactgacctgagacccaaccaagtc

SEQ ID NO: 64200 - DNA, 247 bp, Setaria italica
  Peptide Sequence Number=SeqID_130174
cttgtctgcatggcatccatgtaggatgttcctcttctctgctcagcaatctgagaagtcgatacgagccctcctcgcgcgcaggggttcgctgatgcgcgcggcaaggcagagcggaacgaaccggataagcgccgccggaggggcgcggcggagacgttgggctgcggcggtagaggcggtggggcggcggtagaggcggtggggtggcggcggcgtgtcggcggggaggctgcgagcctgcgtg

SEQ ID NO: 64201 - DNA, 250 bp, Setaria italica
  Peptide Sequence Number=SeqID_130175
cgatgattagcaacgctagcggggctcctatcagtatcatttccttgcgatggtggtggcgcaacattactttgctcatagagctccaagatttggttgctaatctccatcattgacaaagttccaggcaacttgagcaagggcattttcagcaaccttgaatctctttattgcttcaaccaagggcttgtacggatggtggatattcaagtcaaaaccaagtgttacaagaacaagacgctccccaagt

SEQ ID NO: 64202 - DNA, 192 bp, Setaria italica
  Peptide Sequence Number=SeqID_130176
accggaactatgatcgtgatgaaagggaccttaaaaggctaaggtcatgagagtcatacacctttgtgggagttcctctcagggtaccggtgctcgtgtgcatccttcctcttccgattgccatgctccggggaacggtattcctgactgtccatggacagctcgccttcttcagtattatcacgattggtg

SEQ ID NO: 64203 - DNA, 187 bp, Setaria italica
  Peptide Sequence Number=SeqID_130177
aagaaaccccaagacctcttagggatgtcatactcctttcctatgagatcatccacaaaaaggaatcctgctgcggttgatctcataggaaaggagtatgacatccctaagaggtcttggggtttcttcaacttttcccgccaagaacatacaaactgttgcaattgtccgcctatcatttttttgc

SEQ ID NO: 64204 - DNA, 228 bp, Setaria italica
  Peptide Sequence Number=SeqID_130178
gattcactgtcatacccttgtctatttcagaatgtaatatgctaaaaaagccaaagattcccttgcagcatagaatgcaaaatggtgtcttcacctaaactagctccacatagattagcaccgaatatcggtgttcaaaatgattgtggagctagtttaggtgaagacaccattttgcattctatttcagaatgtaatatgctaaaaaagccaaagattcccttgcag

SEQ ID NO: 64205 - DNA, 171 bp, Setaria italica
  Peptide Sequence Number=SeqID_130179
gccatttgcacttgtaaatggctgctgaagtgtgctagtagcaatgcatgtcaaaccaggtactttcactctagaatatttgttatctgggtgcttgtgttgtgctctgtaattacaagagattgaaagtacctggtttgacatgcattgctgctgaagtgtgctagtagc

SEQ ID NO: 64206 - DNA, 364 bp, Setaria italica
  Peptide Sequence Number=SeqID_130180
tccctccatttttccaattcaatgacattcagaccagacaaccacacacatgcatcggagttgaaactatgttcggcaatataagctcttaactgtcctaatgtaactccacagaactggacagcaccgaccactttaccatccatatcgaggttccacagagatgacaagtctttttggacaatcaaatcatcatccagaactactactctattcaagttacgaagaaggtcaggcaacaggaaatgtgaatggccaaaaacagatatgtactcagttttcatctgcctctgggaagattgacttgagatgcaacaattatggccttcagaggaattccgtgttacaattcataattattctg

SEQ ID NO: 64207 - DNA, 297 bp, Setaria italica
  Peptide Sequence Number=SeqID_130181
ttagacaaaaagtgcaagttcccttgctgctcatgttttgtataaactggtgaaagaaccgacacatctcttagagggtctgtaactttactccaaaggtttcacgctggtgtccttctgatgtcttagatgctgagttgctgacaattgcaaggttttgcagaggacatttcagtttattagccttttgggatttgagcatcgccttcgcaggggtgtatttgggtcatctgtaggcctggagtgattttctagttaccataactttgtcaattcattaagttcatgaggtctgcg

SEQ ID NO: 64208 - DNA, 405 bp, Setaria italica
  Peptide Sequence Number=SeqID_130182
gtgtttgtagaaaaagggttgcggatataatcagcttctgctttgcataactcaaaactttcaaatcactattcatagtcttgttatcacatccttatttcatttgcaacataatcatgtagcttgttatcacatctgaaattttgtatttatcttattctgtgttgttacgtacaggtaatcatgtagcttcactagatggacaagttagtgtattgcaaagcgctaagcatggaacttctcatgccaccttgttaatgataatcatgacagatctatcatctgtcagatttaacttttttttttcttgcgggtttgttttatttcaggtataaagaagctgagctcaatatgggtgagaacagttgcatcgatcgatgtgtttcgaagtactggcaggtgaca

SEQ ID NO: 64209 - DNA, 466 bp, Setaria italica
  Peptide Sequence Number=SeqID_130183
ccgcaatggctgcgaaaggcgggccaaccaacttggagaaggagcagatgtttgggatggcggagaaggagatggagtacagggttgatcttttcaataggtgagtaatattgctttttttttcttgcctgggatcattaatttctcaagaattagaccatttccttcaaaaagaacaagaattagaccggagctagttgttagcgcttgagttataacaggctccttgcattcaaattgatctcgatagtgcagtctgacagaaatctataaggccggtcactataaccctgtcttaaattttgcaagctagtcttttcgtatgatgtgtctatacatgcgctcagcctttctttggctgctgatcctaattgtcttaatgaatatgcattggaacggtgagatgctatatttaactatttattctctttttttaagaaatattgcctccttagttaaagtagta

SEQ ID NO: 64210 - DNA, 246 bp, Setaria italica
  Peptide Sequence Number=SeqID_130184
taacaaaagcaaacagaccaaaacatcagatgtactgtttgcttggcatatttcttaggggcaaagaatcaggaaaacatacctccagggacacacaagataaccagctgaccgattcttataatctgaattggaagaatcgcaggctgcatgataatacagaattcaatagaggaccaatgaacaataaacaatcagctgtgcaaattcagtaagaaagtcacttgattcataagggaacaacct

SEQ ID NO: 64211 - DNA, 143 bp, Setaria italica
  Peptide Sequence Number=SeqID_130185
cacaggataaccatttgtccgattcttatgatctgaattggaagtatcgcaggctgcagaaacaatagttgctcgagattgatgtgaccttggtatcaactattaaataaggcatttgcattttctaggaaactagaagtact

SEQ ID NO: 64212 - DNA, 361 bp, Setaria italica
  Peptide Sequence Number=SeqID_130186
aactggacccagttcatcatctacaaactttataagggtcatttctttgtcaacagtatactgatacttgcttctctcctcaggagggttattcagatatgcacttgggctgcgattcacaccagcatcaaggaggtcacctttgttcacatagattttcccagggcggaggttgttgtgagcttcaacaatacactgctcaatgccgttgacaattacatcaaatggattggcgaacaaacccaagagacgtaacaatataaactacatactgcagataaccaccaggcccggcatgagtatggattccaagagacgtaacaatataaactacatactgcagataaccaccaggccccgg

SEQ ID NO: 64213 - DNA, 252 bp, Setaria italica
  Peptide Sequence Number=SeqID_130187
gcgtctgtttccaaatagcactttgacatcggcattgcattatacattttgaggattggtcctgtactcctgttagtctcattaattcatggagaaagaaagaggagaatgggaaaaacaccttatgctgatatggttttattgggcaaggtttcaggtcctctctcttcagtatggaaagaatgggtcaaatggtgtgtcgagtttggcattgaagctaatgcaattatcgctgttccttatgattggaga

SEQ ID NO: 64214 - DNA, 244 bp, Setaria italica
  Peptide Sequence Number=SeqID_130188
ccagaacaatgaacagagataagattaactgaaagtaaatgaaatacaagtgaatcatttaatcgcagaagaaacatactcccaaggtacatccccaaccatcatccagtctccatcctggtcttcataggtgaggacatgtgcagccttctcgcggggaattcgttgatggtactccataacatcagcataggtgatgggagtcttgaacatgtggcgtagtttggcaaggaggctgtcgtac

SEQ ID NO: 64215 - DNA, 283 bp, Setaria italica
  Peptide Sequence Number=SeqID_130189
ttactttaagtttagtttcttagggttccttatttgtttgttctattcgtcctatgagcacagccatggaagttctattactgtcaccacccatcaccaccaccacccaagcactggacaacatcatgatgctgaggaaccattgcttaagcatgaagctggttgtgagggtacccaatctgctgccaaagctgctaagaagacctacgaccacaaatatacaaatgtaacaacagtgcttatcttcacgtgattgggattccatccagagcgtggggtcatg

SEQ ID NO: 64216 - DNA, 335 bp, Setaria italica
  Peptide Sequence Number=SeqID_130190
actgctaagtaagatatctaattctatctctaactctaaccctaatggaggcccaataggctcggcgtcggcccagtcgaacgcccatgacataaggagctttaggattggtgctagcaccatggaagcaaattgaactcctatgatacaaaaaaggggcaaatacacactaaataagaatgaggagcatggagacggtcattatgaaacaaatgcatgagtcagtcaggataattacctgagaaattgtggtggtactgacaggtgtttcatccttatccccaccaggagggccagcttcaggcttccgttcctttcttttgtagtagtctttt

SEQ ID NO: 64217 - DNA, 385 bp, Setaria italica
  Peptide Sequence Number=SeqID_130191
tttggcacttgtgtctgaaactttttgtatggaattgttttttttcatctgcaactaataccagtataccactgattatcacatttgattctctattctgaacaattggtgcattgtcattaagctacagttttctcgactttgggctaccttgtatgattctgaacaatgtccatttgcctgcagctccaagaaccatagagcagacaggtcagaacaagtaagcttggccatcgtctgcgaccacgaaagactttgagttagctgggagatgatgttgaaggctgaaatagttcctggggattatctaaaattcccttatgttagtttagattcacgtgttcctaagttgtgcatttgtatgtctgtaatgtgagtcattcag

SEQ ID NO: 64218 - DNA, 338 bp, Setaria italica
  Peptide Sequence Number=SeqID_130192
tctccccccgccgcgccgccggccgccaaggcgcaggtggtaggatggccgacccgtagacggaaactaccggaagaacaccctcgccgccagcgcctccaagaccaaggcgccggcggaggaggccgcgtccggaggcggcggcccgatgtatgtgaaggtcagcatggacggtgcgccctacctcaggaaggtggacatcaagatgtactccagctacgaggacctctccatggcgctcgagaagatgttcagctgcttcatcactggtcaaagcggtctgcgtaaatcatctaccaaagacaggcttaccaatggctcaaaggcggatggcctcc

SEQ ID NO: 64219 - DNA, 264 bp, Setaria italica
  Peptide Sequence Number=SeqID_130193
gggtggtgaataattggatggtggtttgtggacctcattggtagggtagtctgtgcttgtgtagggaggagatgaatgattggggttttgtttgtgggaatcagaagaaggatagtctgttgcttggtacgagggagaggatgttgaaggctgaaatagttcctggggattatctaaaattccccttatgttagtttagattcacgtgttcctaagttgtgcatttgtatgtctgtaatgtgagtcattcagatcgtgcaatcg

SEQ ID NO: 64220 - DNA, 376 bp, Setaria italica
  Peptide Sequence Number=SeqID_130194
gtaaccgtaacctaaccgttactaacctaacctaattagtaattactaagtactaattcccttacgcacaggagcgcctcctcggattcgccctgggctccgtctccatgggcggcttcgtcctccaccagcgccgcgccatctaccgctccctcgccgaagccgacggatcgtcttacttctaccagcctggtgagatcatcagtcgaaaaagttcacctgaactggctcgtgtatggaacaaggcggtggacgagactcttggacgacttgttgtataccttagctctcgtgggtggtgattcaagcaccttgttgaacatgacaggtgaagaagtgcgcagggcggcttgtgaccgtttttacgccgttgtgc

SEQ ID NO: 64221 - DNA, 243 bp, Setaria italica
  Peptide Sequence Number=SeqID_130195
ttctagctcatgatgaagctatcctcactgtctcaatctttcctgttgcacagcctggtgagatcatcagtcgaaaaagttcacctgaactggctcgtgtatggaacaaggcggtggacgagactcttggacgacttgttgtataccttagctctcgtgggtggtgattcaagcaccttgttgaacatgacaggtgaagaagtgcgcagggcggcttgtgaccgtttttacgccgttgtgcta

SEQ ID NO: 64222 - DNA, 235 bp, Setaria italica
  Peptide Sequence Number=SeqID_130196
tacttaatacaaaaaagaatgaaataatgaaattactatgatacccttttaattatatgtaaacctttaattataataaaaggtatcatagtaatttcttactatttttgtatacttgttccaccaaactggtacttcttggtacttctctttagatactttatggtacttcctttgtttccactgttcgatttcgccggatggacggttctctattttttcaagcattctaaaa

SEQ ID NO: 64223 - DNA, 325 bp, Setaria italica
  Peptide Sequence Number=SeqID_130197
gccaagtgtggttgtattggtgatgcaaaaggcgggtttcagcagttgtgtgatgttgatgacgttgtcctttggacggcgatgattgctgggcatgatgccctctttgtccatcttggcatacaacaccagtgttcttagagcatgtgcatgccttgcagcattggagccagggaagcaactgcatgcccaaattattaagtgtggttttggtttgggtggttctgttggaagtgctctgtctacaatgtattcaaagtgtgggaatcttgaagatggcatggttgtcttcagaagcatgcctgataaggatgttattgcatgg

SEQ ID NO: 64224 - DNA, 385 bp, Setaria italica
  misc_feature (251)..(251): n is a, c, g, or t
  misc_feature (320)..(320): n is a, c, g, or t
  Peptide Sequence Number=SeqID_130198
ttttttttgttatcaatagagcattttgtgactttttctagcttatgtcggcaaaagttacacgtaaccagttccctatgtattccataaccacgacatacgttacaagttgtttggcaagttcttcgggaggcatgatgtaaagtccaacaaactcagcattcacccaactggtgccatcttcatgatccaatctgtgcctcttcaggatcttttattttatcacgccttttcaggatctggcagggaanatggagacccttctagcacagcttgtggttacacagaatccgctttcaggaaaagcttgtgaaaaaacngattctgcttattcagttcattcttggattgtgcttattcataagctgctgcataatcctgccgc

SEQ ID NO: 64225 - DNA, 481 bp, Setaria italica
  Peptide Sequence Number=SeqID_130199
agatggagaccctgttgagaaggatcagatgctgataggagaaatcatttaaatttgattctgggtggccaccatttccaaagagacgtgccaaatcaatagatgtacagtaagaaactatggacaattatgcaccttctagcacagcttgtggttacacagaatccgctttcaggaaaagcttgtgaaaaacagattctgcttattcagttcattcttggattgtgcttattcataagctgctgcataatcctgccgcttagcatagcctctgcttaatctgataagccaaacaaggcctaggttatcagtgatcaccctcttaagcattattcaatggatttctccctccttgtcatcttagaacttgcctaccaatttatcccactgttcccttgtttgggactttgggtaacaatcaagcagcttagtttgatgattgtgacaggacctacactattattactattgtaaatttctt

SEQ ID NO: 64226 - DNA, 233 bp, Setaria italica
  Peptide Sequence Number=SeqID_130200
atagatcatcatcaaactcggaagaggtgaaatgtctgcctggtggtaaggccaagaaaaagaacacatggatcacaacgtggccaacatgcatctcagcatcaaattctcacatggaagcaggtgatagcattcagggatcgcactatatgaaggagggtccactgcttttctgattgtggatcaactgatgaagctgctttttggacggttaggactttgaggatctaggg

SEQ ID NO: 64227 - DNA, 211 bp, Setaria italica
  Peptide Sequence Number=SeqID_130201
ggttcaagtctccagatcacgtacgcggccaccacataaagactctgggcttcgctgggatggcaagcgtggaacgcctgaaatatgatatctagtttatgctctatgatcctgcgctttgcttttaatgtggtctgttgcgatggttatgtgtctggtgtaatttttcgcaaggaacttgaaaagttgtgtgctttgcaaacaaaaaaaa

SEQ ID NO: 64228 - DNA, 213 bp, Setaria italica
  Peptide Sequence Number=SeqID_130202
aggtgaggatgtggcggagtttgaggccgagcgggacgtagaactaagaaataacaaaaagacccaacgaaggaagaacgaaagaatagaagctcaagaaagagtacaatggagaaaggaggttgagctggagaaggagctggacgctgccctgacaagcctgatggagaagcacaagccggacaccttccaggccttccagctcgcgaagag

SEQ ID NO: 64229 - DNA, 161 bp, Setaria italica
  Peptide Sequence Number=SeqID_130203
gggcctcccggctccgatgcttggctgggaaacgatagggaagaagtcgaagaaccagggcaagcagctgggaaacagtgggcaccgtgggatgagtgtgttaatatttgaaagctcggctgtgggctgtatggaggcgacatacgtcactgaagtacgga

SEQ ID NO: 64230 - DNA, 426 bp, Setaria italica
  Peptide Sequence Number=SeqID_130204
ctcctgtagacctgcatggccgtcatcaggagcttggtggtaatgccacgctgatattcttcggtgccgtagaatatcagcgtggcattaccaccaagctcctgtagaggcaaaggaagggaagaatgcgtacatggagagacgacgcccagatttctccaagttcccacggaaaccttgaagcttcactttgatgcgtctaataaattatttactactacataaaagctattaatctacagtcccgaataattgccaggcggtgcataccgtagatcaattaccatttactgcactcgaggaggcaacggatgatgcccattcttgtcaacctcttttttgaaagacttcgtcaacccatttgcatacgtgagaatgtaattcatctgaaaattttcagattgatcagaaataaatcttggtgca

SEQ ID NO: 64231 - DNA, 233 bp, Setaria italica
  Peptide Sequence Number=SeqID_130205
tgctctctttggtccaaccaaccgggacattatggaagatccatacccagcatcaaagcttccaaccttgggccctgtctgcccaaatattgcgttgtctgctgcaattgtcatgtcacagaccatatgcaaaacatgtccaccaccaacagcataaccagcaacctgatagtaaacggcacaagatgagtctataggatgatgcaaacgaaataagaaaaggggaatgatag

SEQ ID NO: 64232 - DNA, 383 bp, Setaria italica
  Peptide Sequence Number=SeqID_130206
accattgtaacaagtaactaaattgacgttccaacaattatcccctaagatgtacagactagcctttgcactaaattctattatacagtatacagtgtacactgacacgagtcatggtttaatatagcttcttaagaatcaaaggcacgccattcccaggctcaatggtcagtctgaacgctgggcaatgcacgtactttggcgaaagagcaaactcgaaccttgacagcaggagtgacaggataaccttgagctcaaccatggccaggttctggccagcgcaggtgcgggtaccgacaccaaagggcaggtttgccaatggcatagcaggcgcctgcaagccccctcatatgtacatgccctttggtgtcggtacccgcacc

SEQ ID NO: 64233 - DNA, 252 bp, Setaria italica
  Peptide Sequence Number=SeqID_130207
tcacctctttcctcgcaatttctcgttgattaagaacgaatgatattcttgaggacgtacggtggcccaatcgtgttattttatatttgtcgccatgaatatatatgcagctcattgccgtcattgggcccgtggtcatcttcctaatggtctacataaggcggaggaacgtgtacgatctgcaccatgcgattctaggtatcctatttgccgtggtgataaccggagtcctgaccgatgcgatcaaggacg

SEQ ID NO: 64234 - DNA, 252 bp, Setaria italica
  Peptide Sequence Number=SeqID_130208
tgatcaggtctatattaaggtgcctattgaattgtagttcaatccaaactgaagggataaatataccttccaatcaattcttctagctgtggctgaagctctttgtcccttagatcctcgatgttcttcgaaatcatgtctattctctgaatggccactaaaattctggagtgcaaatccttcacaacagcacgggttttgtcaatactcatttggctttctcctcttgattcctggtgtctaagttgccta

SEQ ID NO: 64235 - DNA, 432 bp, Setaria italica
  Peptide Sequence Number=SeqID_130209
gaggtttttgtagactttcgttgaatctactctagtacaaccaacatttgtgcttgattacccagttgagatatcaccattggcaaaaccacatcggaggtaaatactccccctgtttcagtttacatggtgcctacatattttgagggtcaaatactgtaaggtttatgcttcttaaacattttattagtttagtgacataaatcttactgtttgattccttgtgaccattgtcaacataacataaaagaaattaacattaagttccattttggggcattaaaaagtcaaaacacaacttatatctcactatttcaatatggaggggtatttttctggttaagcactttttaggggctttcgatagatatgcaactccatgacaaaaaatctcgttaatggaaaattgtgcgcacaaatacacaatagtta

SEQ ID NO: 64236 - DNA, 420 bp, Setaria italica
  misc_feature (189)..(189): n is a, c, g, or t
  Peptide Sequence Number=SeqID_130210
cgtcataaatcctgaattttaccactattgagatgtatgaagcatattcagaactatgaaagcatgatgaatatggccgaagaaattgtcactcgatgtgctatggctactcatggcaagcttaaggttgattatcagggaactgaaatttctctcgaaagaccatggaggagggaaaccatgcattcncttgtcaaagaagcaactggaattgacttcaacaactttggccaagatgttgaatctgctaaaattgctgcaagaggactgccagggatcaaagtaggaagcagtgaaagtacttcactgcaatcctgttcatctgttggacatgttctcaatgaggtaggctttttatacactttttagtttcaataaaggtaacgagtcatcccttggttatttaacaagtggaattag

SEQ ID NO: 64237 - DNA, 256 bp, Setaria italica
  misc_feature (71)..(71): n is a, c, g, or t
  misc_feature (89)..(89): n is a, c, g, or t
  Peptide Sequence Number=SeqID_130211
tatggctactcatggcaagcttaaggttgattatcagggaactgaaatttctctcgaaagaccatggaggnggggaaaccatgcattcncttgtcaaagaagcaactggaattgacttcaacaactttggccaagatgttgaatctgctaaaattgctgcaagaggactgccagggatcaaagtaggaagcagtgaaagttactttctacttgttcttaatttccttttgtttttctttatttttcttttgttttt

SEQ ID NO: 64238 - DNA, 390 bp, Setaria italica
  Peptide Sequence Number=SeqID_130212
gtcctggtagtataatttaattattggaaagtcacatacaccatagaagacacatccagaaaaaggaaacgacacatcacccttttatggaagacaagtttggcatggtgtagcacaacaaatgtaaatctatatgtgctatgccgttatctgataattgcaactaatcacgagcaagagacagcttgatttacctgaaccactgatgaatgaacataaaagttgtgtgctattacatttccgccaagaagtgccatcagtgagtaagcattctcaccactcaaacttggggaacatcacattcatattgatggagacttttggtgactgactaacaaacctagaacgaaacaaaagaagacgcaaagcctgcaaggcaagcattgaatg

SEQ ID NO: 64239 - DNA, 410 bp, Setaria italica
  misc_feature (348)..(348): n is a, c, g, or t
  Peptide Sequence Number=SeqID_130213
tgtttttacttcttcctagtaaggttctagttgtactaactaggtctaggtattagtaggtacataaatctagtgtgattgtttcacttttctccatcagaacgcttgccatatcagcagatacagcatgatcacacatcttctccatcgcagagagaacacctctgatgtcgtttcttacccacatttgatgaataatctgcaattttgtcaggcgagaccgtgttgagcttagaaatagctcatgttgctccattagaagggatagaacatcctcatcgctagctatggttggagtttcagaagcttgattgcttcctctagatgaatatgaacggcctgtagganccagcgaagactgctcgttgttggttcttcatgactaggggattgatccctccttcccaatt

SEQ ID NO: 64240 - DNA, 256 bp, Setaria italica
  Peptide Sequence Number=SeqID_130214
gtgtcttcagtcaactcataacttcctggaagacaagagtgagctcctgtgctgcgtttgcaactgccccttttcttcttgtaagaaaaggaagcttattttttactttctccaattcaatgaagcataagttgcagcgctcccgcctacaatgaaaaaacaagcaaatcacatcctgtactgtagtaatggcctttcatagaagcaaactgtctgaaacaatacctttgctctgcctcaagatctacaccaacag

SEQ ID NO: 64241 - DNA, 223 bp, Setaria italica
  Peptide Sequence Number=SeqID_130215
cgcttgccatatcagcagatacagcatgatcacacatcttctccatcgcagagagaacacctctgatgtcgtttcttacccacatttgatgtggaacctgttgttcctaaagcaagctcaagaatggaaatatcctctgattcagcacctgttgttatttccaagtcaagcagaaggctggagtctggtgctgattccaaaaaggaaagcgccgatgcagcat

SEQ ID NO: 64242 - DNA, 422 bp, Setaria italica
  misc_feature (332)..(332): n is a, c, g, or t
  Peptide Sequence Number=SeqID_130216
tgtctacggtcgtaaatttaaaagtctaggtctaagtactttagttgtaattggtcttgtctaattctattgttccttttcacccaaaaaaaacggatgtttatctaggaggcaaaagacagagagagcatttgatggaagtgaccaggtgagaagtaaaatgtggcaacagctttctatctctatcagacttatcatgccaagagattgattcacaacagtatgataatacatttcatgcaatagtagggaataatgtacatgcttgaaggattgcacagaaacacatatgtctctggtgacagatgcatctacttctttttacggaaacngcagaggacctttatctacaaagaggggtggaggtggggggtagggagtataggatgggccaaaagatggtcgttatccatcttttggcc

SEQ ID NO: 64243 - DNA, 248 bp, Setaria italica
  Peptide Sequence Number=SeqID_130217
tcttgggaaactgtatgttgagagataaaaagtacatgcttatgacaacagcaactctccagagaatagtttttctcccctgcacagtacagacatacatagagtatcgaatgtagctaaccttcgatctgcccaccggcattgctgctgggactagaagatatggtggacgtggcatttgaatttggaactttaatcgaattgttagaatttccaaaaggacgattgttcatgagaccaccaggata

SEQ ID NO: 64244 - DNA, 371 bp, Setaria italica
  Peptide Sequence Number=SeqID_130218
cctgatgcacaggtgtttcataaccattcagtgagaattttcgaacaacaaattcaagaggttgttataatattaaatagagagtaataatgatgagcacctttccatttgccaatgggacctcagtgattcatatacagaaaagctgattgctatactaggtccaactccctgtaattcctaaaaattactggcaacccaactttaaaataacatatatcagtaaaaggttcatggcctaccagtaatgtggccccaaggcctttgtacaatcctttgacaccctcatctctacaaattgtagacaccgcatggaagatgcccttgtaatacctagttgttttctgcagatattttgacaaaagaataac

SEQ ID NO: 64245 - DNA, 322 bp, Setaria italica
  Peptide Sequence Number=SeqID_130219
gaactgcaggggaccggtcggtgacgctgcacatcccccacatcagcctcatcgaggtcggcatgatctactacgtgtagccccttcgcaggcagcagtggcgcctcaaagcagcagcggattttgtgctatggctgctttgaactcaatcagccttctgcccaagacatgtatcagtgtagttgtctgtgcatgtactataatgtttatagtttcttttacaaccgaaggtagtagaactagtagaaggaaaagaacaaacaaaaacaaagaaagaaccgaaagtaacggaaccggttaagaaccaaaccgtttaaagaaa

SEQ ID NO: 64246 - DNA, 249 bp, Setaria italica
  Peptide Sequence Number=SeqID_130220
ggtaccgaagctatgtttgccgatcttggccacttcactgctgcatctatcagggtacgaagaatggtttatatgtttgtcaaaactcaaaaaggattttatgcataattcagttcttgtcctggttgcagctggctttcgttggtgtcatatatccctgtcttgtgctgcagtacatgggacaggctgcatttctgtactaaaaacttgacagctgtagataactgtttttatctttctgttccaggt

SEQ ID NO: 64247 - DNA, 410 bp, Setaria italica
  Peptide Sequence Number=SeqID_130221
ctaggtctgttaattgttaaatttgattttttccccctgttgttgaggttagtttttaattacactttgtctattcacttctgtcgattccgtctatatttgtttgcgtatctgatgttgtggtaaactaggactatccatcagtatttgccatgtttctcttactttggagcagttgtctttttccaacatcttgcgtgcatgggtgtttataaattttataatttgatatgccttccatgttccaaaaggcaatccttatcatagtgcaacctcaggagagatggcaatttacagggcaaatagccttattttgagaaaggtgatgccattggcatattcctttggtggggcatgctatccaatggcaacgggctagttctcaagttgtttgtgctcctgctcaccgc

SEQ ID NO: 64248 - DNA, 340 bp, Setaria italica
  Peptide Sequence Number=SeqID_130222
tgtcctaaactaatttgtccttttgttttctaccttgtctaatttttctattgtattgtcttttccttcttgttggtattcttggactgcctccctgggaaattgttgcttttcttacaagtggtctagcactctccagcttcgcattttcagggctttattgcacgcatcaagatatctctcatgaatatgcaagcattctcctgggtatcacaaacactgcaggcgccgtgcctggaattgttggtgttgcgctgacaggctatcttcttgattcaactcattcatggagtatatcactcttcgcaccttctatcttcttttatttaactggtactgc

SEQ ID NO: 64249 - DNA, 384 bp, Setaria italica
  misc_feature (36)..(36): n is a, c, g, or t
  Peptide Sequence Number=SeqID_130223
tagcactctccagcttcgcattttcaggtcatgttnttagatggcaatcaaattttcactttttacatggttccaaggtccaaacctcaatattttggttggtaaacagggctttattgcacgcatcaagatatctctcatgaatatgcaagcattctcctggtaagtcattaaattactatttttctcaaattgcatgtatcttctcgaaaagaaatagaacagtaacgttctgtcgcttagatgcttaaaaggatgactgaaagacagtttgcagtcggtgcaagttgcatttctggtaccctgtactccttagattccatcatgagcgattgttactgatttgttgcctttgtgctccagggtatcacaaacactgcaggc

SEQ ID NO: 64250 - DNA, 302 bp, Setaria italica
  Peptide Sequence Number=SeqID_130224
cagatctatactttcccgtatcgtcatcagaaattcagaaccgaaagaggtggtgtcagcattgttgctgtgtccaccattattcatcgcattattacacttacaaaacattgatttgattgatctcacgggaaagactacatgggcaacatcttggttagagaaggctgccgttgcaatacgatatacattctccacgtggtgattgcactgaaagaattcaaccgttaccaaaccaaatagaaagaataatttttacctacaacggacgaaataataacaataatacaacgtacgtaata

SEQ ID NO: 64251 - DNA, 237 bp, Setaria italica
  Peptide Sequence Number=SeqID_130225
actgtgaacatctccagcatctttgagatacttgctagcagcggatctgtcaaagggtagtggttgaccatttttcattagtggaatagctcccagagaaatatctccacgtggtgattgcactgaaagattcaccgttccaaccaatgaagatatttttcctcacggcgaatatacatatcacgtcgtatattcagcatttatttcaacatatttgtagctcagatcacagcccca

SEQ ID NO: 64252 - DNA, 308 bp, Setaria italica
  Peptide Sequence Number=SeqID_130226
acgttgcaccctcaccatcccacgcaatggattttgcaagaccttgcattactgcatctaggcatgcttggaactgttgagcctccgtgctgtcaagactgagaattccagataaaccagataacccacttgccatagcaataacacagtcattggtacttgtatcaccatccaccgtaatttggttgaaacttctactcactgacgttcggaccatttctctccagacatcactgctgacttgaagcatcaagtggttaaaaacaaccgaagacaataagttagaccaataatttagggtagaaata

SEQ ID NO: 64253 - DNA, 378 bp, Setaria italica
  Peptide Sequence Number=SeqID_130227
tatacataccagcaaattgtcattgccctctgtctgctccacaatctgcctgatcagaagatcccgctccgcaatgtcaccatgctgaaacacttctctatcacatttgatgcgaatttattttggctcatggtaacaacctgtccagccaatttagtaataatttggctcctctcatgagctttttcctctttctagaacatgctgtgtaacatagttgccatactgatcttgagcaaggatgcacgctgactgcgaaaatctcatctattatgcactggccttgtgaattaccaccacaatgccagtgcataatagatgagctttttcctctttctagaacatgctgtgtaacatagttgccatactgatcttgag

SEQ ID NO: 64254 - DNA, 341 bp, Setaria italica
  misc_feature (1)..(1): n is a, c, g, or t
  Peptide Sequence Number=SeqID_130228
nggttagcattgaaaggttagcaacttgtccttgaaaagcagatactatgaaaccaatatgttcagtagggacacattcaatgcacttctgtataacatgatttccattgaatatgttcatagggacacattcaatgcacttctgtataacatgatttccattttgatcacgaacacatcgcataacatgtccatcaagctcacgaactagatctattttctggtcaatttccataacttcaagagccttctgaattactctgcagccatacatctgaagactcaaaggcaaaacatgaccaacaagcttagtggcaagatccctcctttgtcttctacgt

SEQ ID NO: 64255 - DNA, 238 bp, Setaria italica
  Peptide Sequence Number=SeqID_130229
tttctaattgtcactttcttgttattaactattgtattttcctatttttgtatcacgaacacatcgcataacatgtccatcaagctcacgaactagatctattttctggtcaatttccataacttcaagagccttctgaattactctgcagccatacatctgaagactcaaaggcaaaacatgaccaacaagcttagtggcaagatccctcctttgctcacgagttccatgttcaaag

SEQ ID NO: 64256 - DNA, 248 bp, Setaria italica
  Peptide Sequence Number=SeqID_130230
agcaacttgtccttgaaaagcagatactatgaaaccaatatgttcagtagggacacattcaatgcacttctgtataacatgatttccattttgatcacgaacacatcgcataacatgtccatcaagctcacgaactagatctattttctggtcaatttccataacttcaagagccttctgaattactctgcagccataacaatactagaaagaactacaaaaggacaaaaacaatagaaccaaacaaa

SEQ ID NO: 64257 - DNA, 191 bp, Setaria italica
  Peptide Sequence Number=SeqID_130231
ccctgaaacaccggacttgtagggtaactcatcggtactccaacatagggtgacatgcctggataatttggaacagcccctcctcttctggctgtaggagaattaggtaaaacctaagtttctttggtaagtttgtaagtccttcttgttattcttagttatttgggtttatttgtttctttaagttttta

SEQ ID NO: 64258 - DNA, 316 bp, Setaria italica
  misc_feature (1)..(97): n is a, c, g, or t
  Peptide Sequence Number=SeqID_130232
nnnnnnnnnnnnnnnnnnnnnnnnnnnnnnnnnnnnnnnnnnnnnnnnnnnnnnnnnnnnnnnnnnnnnnnnnnnnnnnnnnnnnnnnnnnnnnnnnagttacaatcaccgcacacaccagattcaattaccaaacactaatcaacctgcagtactgcaggtgctccacacagcttagaacagtgacatagtgttaccaagtaagagttacattatacatgccaaaaccacagtatagcatgaaatttattagacaacataaataaggttttagacaataaccaataaattaagaccaaacaagtaagtaacttaa

SEQ ID NO: 64259 - DNA, 427 bp, Setaria italica
  Peptide Sequence Number=SeqID_130233
ttgtaattgtcttggtaaccttggtcctatttcaaggtcatcgattgtttctttcaggacggcagacttaacggtaaaagtgactggtgtattcccatcatgctcaaaattgtaatcccaggagattgtgtctggaattctggttctgatttctgcatacagacatgcatctggggagtccactgatttgaggagaagctgcatgtcgggggccagggtaccggatctcgacggcggacgcgtgccctggggccgagaagatgttgaggcagtcgacgaagagccccaagctgagcccgaaccgctcacgcccgtcccccgcatagtcatactccacgaacagctcgcgcttgaggaagaccttggactggaggcaccgctctcctcgacggtgagcacgatcccgtgcgccgcagctccatcaccg

SEQ ID NO: 64260 - DNA, 300 bp, Setaria italica
  misc_feature (239)..(239): n is a, c, g, or t
  Peptide Sequence Number=SeqID_130234
ttaagttaacttaaattgttctatgtgataagttctggaatctaaacaggctcagccagcccttaatgggaccaggtcgggccacaattctgctcaggttttgccacaattctggatgcatccacttaaacgagcacaacatgagcaccagagtgcacacatacttgaggagaagctgcatggtcggggccaggggtaccggatctcgacggcggacgcgtgccctgggggccagaagntgttgaggcagtcgacgaagagccccaagctgagcccgaaccgctcacgccccgtcccccg

SEQ ID NO: 64261 - DNA, 283 bp, Setaria italica
  Peptide Sequence Number=SeqID_130235
ttttttttttagtaattaaaaagtacttgcaagaataaaaggatataggtgcgaatccaaagacagaaacttgtggttcacttgattaggaacaacatgatgcctgtctgattgtaacacgattcacatgattagtaacaggattactgcctgactgtagccagttcagaaactaagacctgacacctgagttcagtttcacataaactactcaaactaggagtttatccaaagagagctgaaactagtaattaaggcgacgataaactagctctactggatg

SEQ ID NO: 64262 - DNA, 259 bp, Setaria italica
  Peptide Sequence Number=SeqID_130236
tacttgtcgtgggtactgcatttcattcttttggctagtggattcttagcatgcctgaattgcaaattttcatttgttataagcttgggttttatccttggatgtttcatttgttagagctaggtcaacttcttgcaaagtaaatccatgcctctttactgaaattgtttcctgtattgaatatttcagctacctcgcatgctggaaactgatgctgttgctcgctaccacggccttggcaagggaaccgttgttaaag

SEQ ID NO: 64263 - DNA, 137 bp, Setaria italica
  Peptide Sequence Number=SeqID_130237
ggaaccatgtgacgtacaggtgtattttctgaggccctggtgcctttcgatggatggtctcctaagcaattagtaaaatacacctgtacgtcacatggttcccggtaagctcactgtcaaagttacgtatgacagtg

SEQ ID NO: 64264 - DNA, 256 bp, Setaria italica
  Peptide Sequence Number=SeqID_130238
cggaggatgatgcggatgaaatcacttggcaaacctacaaaggtcagcttactgatagacaggagaaaacacgtagcaagatagtaaaacgaatggaaaagattgccaacatgaagaaagagatcgatgcaataagggttaaggacatttctcaaggtgggctaacccaaggtcagcaaacacaaatagcaccaacactttcccgtatgctgtcatttaaagtttcttctagattatccagctcctccataatctg

SEQ ID NO: 64265 - DNA, 268 bp, Setaria italica
  Peptide Sequence Number=SeqID_130239
tttcttttattttttcctttttttcttttaagtttcttttcgtttcctttatttcttaacttagtaattgtagttcttcagctccaattgcactgccctcacagaatatggcaccaaacaagcttgcaatactgtaggcacaggacaactcctccacagcaagagttgttgatggaggtgcttcaataacccaaacggtcattcaacgcagtgcgcccatcaccagtttgaccttcaggtggcacccatgtttcagaatctggtcctg

SEQ ID NO: 64266 - DNA, 255 bp, Setaria italica
  Peptide Sequence Number=SeqID_130240
tctccttgtactcggacatcatccgctgccgcagcgcctggaagtcaagcatgaggtccttgccgccttttcttcatttatgaagttttcttcaggttctataatcctcttatcaccaagccactgaggttttggtaaggaaaatgcaggtttgctcccgttttcttggtttttggaggtatcagtctctactttagcaggcttattcgttgatgtctcattagaagaatcctttggcttctccacagctgaagt

SEQ ID NO: 64267 - DNA, 173 bp, Setaria italica
  Peptide Sequence Number=SeqID_130241
aacagaaagaaggccgtcctgtgtattttactggagccttaacaggatcaaacaaactttcatattcaccgcgaatcttttcagcagaccattttgatcaaaatcctctttatgcccttttgcacgagtctatctactgtgagggctcttcatcaaaatggtctgctgaagag

SEQ ID NO: 64268 - DNA, 155 bp, Setaria italica
  Peptide Sequence Number=SeqID_130242
gcaagcattagctcctatgcttttgtcagatgtttaaatgcttgctgagcacagaaagtagtgctttctgcatcaaacaccaggtaacatttttatcttgtttcctggtctgcattgctatactctgatgaacctgatgccatcacctacaccaa

SEQ ID NO: 64269 - DNA, 421 bp, Setaria italica
  Peptide Sequence Number=SeqID_130243
tgtacttctagttgtacgtattgttggagagcttactgtatttgggagacttgctgctggtgcttgtgcgggttacttacccactggatgttcttcggctcaggctggcagttcaatctggacacagcactatgtctcaggttgctcttaacatgctgagagaagaaggattggcctctttctacggagggttgggtccatctcttataggaattgcaccttacattgccgtgaacttctgtgtttttgacctgatgaagaaatctgtaccagagaagtacaagaacagaacagaaacatctttagcaactgctcttctttcagcaacatttgcaactttgatgtgctatcccctggacaccgttagaagacaaatgcagatgaaaggcacaccgtacaataccattttgatgctattcca

SEQ ID NO: 64270 - DNA, 346 bp, Setaria italica
  Peptide Sequence Number=SeqID_130244
aaaggaaaacaaaacaaagaacaaactaaataagtaactacaaggttagactacttaaacaatgactgagagaagaaggattggcctctttctacggagggttgggtccatctcttataggaattgcaccttacattgccgtgaacttctgtgtttttgacctgatgaagaaatctgtaccagagaagtacaagaacagaacagaaacatctttagcaactgctcttctttcagcaacatttgcaactttgatgtgctatcccctggacaccgttagaagacaaatgcagatgaaaggcacaccgtacaataccatttttgatgctattccaggcattgtggagcg

SEQ ID NO: 64271 - DNA, 249 bp, Setaria italica
  Peptide Sequence Number=SeqID_130245
tttggatacatgtggcttctgcttttgccttttatttggttatggcagatcctgaacttcgtccttgtacttgctcataggttacttacccactggatgttcttcggctcaggctggcagttcaatctggacacagcactatgtctcaggttgctcttaacatgctgagagaagaaggattggcctcttttctacgggagggttgggtccatctcttataggaattgcaccttacattgccgtgaactt

SEQ ID NO: 64272 - DNA, 155 bp, Setaria italica
  Peptide Sequence Number=SeqID_130246
cagatgggttgacttgtatagttatagttttgaaggaaatttcgcagtgacattgatacactatcctctactaaaataaataagatatgctcctactgacactagctaaatctgtgctaacactataaaaggcaatgagttgattctatagtgtt

SEQ ID NO: 64273 - DNA, 258 bp, Setaria italica
  Peptide Sequence Number=SeqID_130247
ttttttttttaaaaagtttggttttgttactttgttttgttaaagttctttaaagttaaactaaagtcgtctacttctagttcaaagacacaacttccacaaattaaacatgagcgcgaagcagttcatcacgatggagacacacgactgtgcggacatgaagctgttgatgcatgcggtctcctgatcaagtaccagaaggtgatgtaccattacctgctactgctggcggaggagatggtgccggcggagggttct

SEQ ID NO: 64274 - DNA, 241 bp, Setaria italica
  Peptide Sequence Number=SeqID_130248
ctggagctagtgcttaaatcattcgttcttggagcaggcagctcaagttctcgaggttggcatggttacaacaagttgatcgacagtatgcacaacagatgctggttggtgggttctcatggtgcaaaaaaggccgttttacattcatcacctagggattattagttggttgtccatggattcccatgttcccgaaaaataaagaagatgcaaaagttcatgttagttaaaaaaaaaaaaa

SEQ ID NO: 64275 - DNA, 484 bp, Setaria italica
  Peptide Sequence Number=SeqID_130249
tacaaagtaaagaaccaataaatacaaacttaggtacttaaatactagtttagtacctagaaaaatagaacaagggagaagcatgcccaagtgctatcaagcacagacaagcaagtagtcgtgtgcgtggactccgatcatgtattaacccaactactgaacggaaaccttttccatggtccgttgatgcaaatgtcgaagcaacttctctgttgttccgaatgactgcagtaacagaatctaaacaagcatcccgtagattcatagaacctccaaaaaggctaacaagtttctgtggaactccagcactgcatagtgacaattgttctgaactattctcacaagagtgcgatataatagtagcagccagctcggtgacattctcgttctcactgttcaaaagagaaagaacaaaatccaatgtttttcccattattaacgtcaaactttggagctagttttgattgatatatcattctgagag

SEQ ID NO: 64276 - DNA, 385 bp, Setaria italica
  Peptide Sequence Number=SeqID_130250
gttcacatgaaacaatcatcggcattgtccacgcagtgctcaagcagcatccgtactctaagcttgcaatccaagcaggggtcatttatcatgctttttacttgttggatcactccagcagtttgtagtctgataactcgaccggatgaggcttcacatttcgggtaaatcaagttcagaagacaccatagggtggcaacccgcaactgtttatccttgctttgcagaaagttcacaacaaaggatggtttaatgcgatctggtcggtgaggaagaaggacattcatcacagcttccttgttcattcgtttccagcaagcaaatagtttagacaaagacaacaaaacaataaccctagaaatagacaacaactacccaagggaca

SEQ ID NO: 64277 - DNA, 318 bp, Setaria italica
  Peptide Sequence Number=SeqID_130251
aaaaacgggattcctggagctagtgcttaaatcattcgtcttggagcaggcagctcaagttctcgaggttggcatggttacaacaagttgatcgacagtatgcacaacagatgctggttggtgggttctcatggtgcaaaaaaaggcagcagttggctccagctgacccggagagatcagttagaacggcttcctgctggtgctcatgttccacagttcagggcaatagtagttaggaataccgttagacaactactagaataatactacgacccgaatactaggaataattagttaccaataagaacttacaagtta

SEQ ID NO: 64278 - DNA, 237 bp, Setaria italica
  Peptide Sequence Number=SeqID_130252
taaacgatgatctctgttgcgcactggttggaactactgtcattgccaagcacatgtaaaattccatcatctctgaggtatgcaggcaacagtaagcaaggtgacggcacgttggactcaagatgtggacagaatctagaattagtgtttgtcacaaacagggccgaaggataatttgaatagccagaggttaataatatcgagtctgcagactcaccgctgactctttcaacatcc

SEQ ID NO: 64279 - DNA, 375 bp, Setaria italica
  Peptide Sequence Number=SeqID_130253
tttgtcactcttcctccttcctctcctagcgacgagagggattggatcggagggtgcaagtccttcctccatccttaactccttgctggtaaggtgttccactgcaggtttgttttgctttgatcgactgatcatccttgattaatttatttggtgggctcatcggtcctttatatacctgccgtatacagcgagcttggtggaaggagaaggaacccatggacaagatcttcaacactacctgcaaacactactatgccgtccactctccagaaccagcaggaggaggcagcgataccaccacctgctgctgctaggaacgtgaagaaggccaagcagcagcaggcgggcggggagcgcatgccacggccacag

SEQ ID NO: 64280 - DNA, 254 bp, Setaria italica
  Peptide Sequence Number=SeqID_130254
ggcatcattttgcactcttcctccttcctctcctagcgacgagagggattggatcggagggtgcaagtccttcctccatccttaactccttgctgcgagcttggtggaaggagaaggaacccatggacaagatcttcaacactacctgcaacactactatgccgtccactctccagaaccagcaggaggaggcagcgataccaccacctgcctgctgctaggaacgtgaagaggccaagcagcagcaggcgggc

SEQ ID NO: 64281 - DNA, 288 bp, Setaria italica
  Peptide Sequence Number=SeqID_130255
taactcattgtaatccttcttatatgtcatgtatgctctgcactttgaagaaatcgtgtcaggagcaacctcacgcctcactcacgtcgaggtcaaagtggaagacctgaagaacaaggcccaagagtacgagatctacgacctgaagccgttcttctccagtgcacacttcagagacaacagcttcatcctggatgaagggcgcggcatcatcaggcatccagtggcagcatgacaactcacttacctcctgtctacgattagcgtagcttgacaccctggatgaac

SEQ ID NO: 64282 - DNA, 253 bp, Setaria italica
  Peptide Sequence Number=SeqID_130256
atggtatgatgcagggaaattatatttaagcgtgagagatttaatcaaggattatgtaagaataagaaggattaattagcagccgaaccttgagagcgggtgcggggtgaatctccagctgaactcgccgtcgtcccacggcaggctgagcctgcgggccgacagcgcgtagcacctgacgccggtggccctgtccagccacacccagcacccgccgtcgtcgtcccgacggcgacggcgctggcggcgtcgc

SEQ ID NO: 64283 - DNA, 492 bp, Setaria italica
  misc_feature (33)..(33): n is a, c, g, or t
  Peptide Sequence Number=SeqID_130257
caccaagatatgcagggatccctctttcaagtncaattgaatctgattctgatgcacatcattttggtgaccaaagacattgctatcacattagaagaaagaaggtatcctccaaaactagcaactccacaaccaacatcaagcactgtgcgaagcattccctcattgtttatattgttatcttttgaaattttagcatatttgcaatattttgatatatatttgtcagctccatgatgaaaatgggttccaccacctggaaacttgatctttttcacctgcttcaaccatccagttctggtctgacttctctttagcaaggtgagtgtgtggaatatttgctttccacactacatcgcggcttttcggccattttataggaaccttatatccgtgtaggtaggaaggaaatacaaagacaaattaaaagacgtactttacaaggaaggaagggacaaaattaagaaccttaacttaactaaattaaagtaa

SEQ ID NO: 64284 - DNA, 151 bp, Setaria italica
  Peptide Sequence Number=SeqID_130258
ttagttactttagttaccttaacttaattttaccgttattcctttttctaaattgttgttctagtctagtaacatacaaatcagcaagacggggaggcgggttgttaatcgagcaggccaaggagccagcccagttcccccatctctgtgc

SEQ ID NO: 64285 - DNA, 444 bp, Setaria italica
  Peptide Sequence Number=SeqID_130259
tctagtctaagttcctagtaggtcctaagggtagtctagtattagcttgattgcagaagccctgctggaccttgccaccagtttggtaacatcagtaaggtcccattcagttctgggaatcacgccttctgatttcgttgctggactgctgaagaagtttggaaagcaaaggggtcctgatgatgagcatgcctcgttggactgggctggtgttgggcgtgctgcctctcatgtttttcatgaacgctgctggatgtgccaccatggttggccctatgaagacagaagtgaagccgcgaagggtttgtattagaaaaaagaggaactgcaagacctcgtggaagtgctcgtcctgaacagcttgtggacccccacagtgaaaacaaagagtgatactgataagaatatgtctgctatatttaaccttctgaggagaaagaaaat

SEQ ID NO: 64286 - DNA, 458 bp, Setaria italica
  Peptide Sequence Number=SeqID_130260
caggtttggtgtttctactttgtaccaacaaactctttatcacaatatgattatattgcacaaaatagctgtgaactatattggaaccacaagatcattatcagttttattttgctatcattttgtgatggatgcattaagatggagaccatagttattatttttggacatagatgtttgtaacattcaaaattctttccaacttttctacagatcattaccaacttcttacaatctactcactcttaatctgcagcttgtggacccacagtgaaacaaagagtgatactgataagaatatgtctgctatatttaaccttctgaggagaaagaaaaatgccaggctggaacaccttgttttaaacaggacatcattcgcccaaacagtggagaatgtctttgccttgtcgtttctagtgaaagatggcagagttgaaatcaatgtgaatgatgagggg

SEQ ID NO: 64287 - DNA, 261 bp, Setaria italica
  Peptide Sequence Number=SeqID_130261
tctaatccctcatcgtccaagcgagatcactgcttgcagaagcttctccatgctaccacccgcgaaaccgcagccggcaacatcgccgggcgccttcctcctcctccctctacgcggcgggcttgtagagcttctccaccatcttcctgaactcctcctccaccaccaaacctagccgcctcccctcgccgccgccgccgctgaccggccatgtcttcctcgtcctccgacgcggccagggacgacgtcgtctcctccccg

SEQ ID NO: 64288 - DNA, 152 bp, Setaria italica
  Peptide Sequence Number=SeqID_130262
tgtatccattctgtacgcatccaagcgatccacatacaggatacactggatgaacaggttataagagccatcaccaattcatttggaaaggacatcaggcggtgagagctgagcatgggtcaacacaaccagtgcccttcacatacgtcact

SEQ ID NO: 64289 - DNA, 229 bp, Setaria italica
  Peptide Sequence Number=SeqID_130263
cctatcccctgtgtgccttgcctatccccgttgcgtgtctcagggtgtactcgagcggagctcgttcccatcatgacgcattcaattacctaccgttccttttcctaattctgtgttgggggctttatagagttcgctgggacaacttgaacaaatttgctcatgtcgtagttgacaagaatccgcacttcattttatgatgcttgccctcagcgcaattttgaagtga

SEQ ID NO: 64290 - DNA, 445 bp, Setaria italica
  misc_feature (441)..(441): n is a, c, g, or t
  Peptide Sequence Number=SeqID_130264
acatcaatgagcaggctgttgaaatcataaagaggtttcttctgggcaagactgttgatgttctcctgtatgtggatcgcttggatgcgtacagaatggatacactggatgaacaggttataagagccatcaccaattcatttggaaaggacatttggcgaagggcactggttgtgttgacccatgctcagctctcaaccgcctgatggaatcgattataatgagttctttacaagaagatcagaggcacttttgcgatacatccgttcaggcgcaggaatcaataaacgagaatatggggatttccagttgccaaataagacaattaggtaggaagaaacaagtaggaaaggtagacaaagaactaaatagaagacaataggggaagaaagaattacttaccaagaataggacaactaccaatagggttaccaaacctanaata

SEQ ID NO: 64291 - DNA, 374 bp, Setaria italica
  Peptide Sequence Number=SeqID_130265
tttacaacttgatacaccgcagttgaaggcagctaatatcgacaatgacgcggtggtgcagctcaacgccatttttcgatcccttttgaagttgccgtcacaagtttcttggtgttgataaccagctcgtcgaataaagcaacaacagtgtccctggaatagaggaggaagaaatgatgaaaacaataaacactgcattacaatagtcatgttcttttactagccaaattgggatactgaaaacaatgtgaggtgcaaaagaacaataggctgggagaccaaacaaatccaatgtaatttatggtatcagacaatagtatgtcctctaatagaagaattgaagtttttcgttctcaccgtgaaataaaatactg

SEQ ID NO: 64292 - DNA, 437 bp, Setaria italica
  Peptide Sequence Number=SeqID_130266
ttgtgacattatgtgaggaagctggagagatcctctcgaatatgaatcatccagcaggggattgtccactgtgtctatatcctttaatgagagaggataaggatggctctgagttgcctttcatgaagttgatgtcatgctaccactgcttccacagtgactgcattatgagatggtgggaatggctccaacatggtgatgctaaccttaaggagcgtaatactagagctcaggcaagcattataatgtgaatcagaacaaaggattttgtccagtttgccgcaaagtgttcgatgagaaggatattgagcatgttcgtgatctgttgggtgaaagtacttcccggctggaatcattgacacttgacctgggtgaagatgagaaggaattgttccattctgaggcagagcaaatcaggagaaaaagaatcgaatcac

SEQ ID NO: 64293 - DNA, 437 bp, Setaria italica
  Peptide Sequence Number=SeqID_130267
tagtattgtcttcggtcgttccttcgtccgttggtagtcttcgttctttcgttcgttcgccattcgccgcgggggtgctcctcggcgcccacacccacgagaagcgctcgctcatcgtcggcagcgtctgcatcttcttcggcacgctcatgtacgccgcgccgctcaccgtcatgaagcgggtcatcaccaccaagagcgtcgagtacatgccattcacgctctcctttgtcagcttcctcaacggcatctgctggacgacctacgcgctcatccgcttcgacatcttcatcacgatcccgaatggcataggaacgtttctgagctctgcgcagctgatcctctacttctgctactacgggtcgacgcccaagaacgacaagagcgtggagttgccggtgacggccagcgacgacagcaacaactagcgctgccgg

SEQ ID NO: 64294 - DNA, 392 bp, Setaria italica
  Peptide Sequence Number=SeqID_130268
taaaaagaaaaacaaaaaagggaaaaaattaaaaaatttttttaaaaggttaaacaaaaataacaaagtaagacaaatttttacctaaaacactctgcaacaacattccgaactccctcctcttcactttcacagtgattaaagagcaatgccaatatcttctcaatgtttgaatcctggagctcgctctggccattatgatcaacagtttgccgcacaattacctctttaagcgaatgaagcaacagatattgcttcttctgtttgattgtcaatctgatccaaaataaatggtaaatacttggacaggttgccaacagcaatgtttccaagtgcataggatgctgcagatttaatctcctcaaaaggtgattgaaatgattcaatgacaa

SEQ ID NO: 64295 - DNA, 309 bp, Setaria italica
  Peptide Sequence Number=SeqID_130269
taggttaggggtttgttaattttcgtctaattaacttgtagtaattgtcctttgtactagtcttgttaagttctttgtttattttctatttaccctattccttattcaactaagttatgggaaggcatgctggtaattctctttgaaggccatcaccaaaagtggagaccaccagactcatgcatgatatggcacattccttaacctcctggtcctgatcttgattagccaaacgtcccagtatagcgttatagattggaccaatatatggcctgaaatccacagcacttgcctcgagatttggacgaa

SEQ ID NO: 64296 - DNA, 256 bp, Setaria italica
  Peptide Sequence Number=SeqID_130270
ggggaaaataaatcaaaataaagtcagtaaaggttcatgtatgtatatcatcaccttacgaaggaaagctgtgagctcagaaacaacatggtccaggacaaatgagagatcaatacggaggggtgaattcgcaataactgagaatgccttgacagctgtaagtcttgttatttcattacccatcctatcaacaagtatgggaaggcatgctggtaattctctttgaaggccatcaccaaaagtggagaccaccaga

SEQ ID NO: 64297 - DNA, 264 bp, Setaria italica
  Peptide Sequence Number=SeqID_130271
taaagggaatcccgagcttttgggagacgaagatgggagggaggagagtgaagactaagatgactgaccgacgcctggacggcggtgaagatggcgatggtgaggtagcggccgaggaaggagtcggcgacgaagccgccgaggaggcagagcatgaaggaggtgcccatgaagttggtgacgacgttggccgactccgcgttgcccaggtgcatcgtcgccgtcaggtacgtcaccaggttcaccgcgatgcccaagacgtac

SEQ ID NO: 64298 - DNA, 279 bp, Setaria italica
  Peptide Sequence Number=SeqID_130272
cggcatgaggaggaacacggtgatcgtgaccccgtgcttggaggtggtctggcggtggcgctcgatgagcgcggcgacggccatgccggcgacggagaggaagaggccgacgaagacccgctggagcgggctgaggccgtgcgggttgccggtgaggcgcttgacgacgggcgcgatgaggcggtcgtagaggggcacggtgaggaggatggagccgatgaaggaaaaacggtagaagggaagaccgggacggggaatagaaggaaagacccgaagacc

SEQ ID NO: 64299 - DNA, 232 bp, Setaria italica
  Peptide Sequence Number=SeqID_130273
acggtgtacgcgcagatgaccaccgtccagaacatgatggtcgtcgcccagatggggagcatccgcaccaccgtctgggagcccgccgggatctggaaggacgggccgatcgcggcccggtccattggtcggttcggccctgggacaccgaggaaggtggtcatctgcgcgtacaccgtccagaacatgatggtcgtcgcccagatggggagcatccgcaccaccgtcttca

SEQ ID NO: 64300 - DNA, 258 bp, Setaria italica
  Peptide Sequence Number=SeqID_130274
tcgtcgttccctagtcgtcccgggcaaaatgggtgctggaaggaagactgagacttttatgctggaacaccaagtacaccggcacgaaccaatgcatggtatgggacctattctgttgctgctcgtaatctccgagaagatgagctaggaggagtgatcttcggttgcaaacacaacacgatgaatgaatgcctcactaaacagttgtttggtttgccttcaggccatatctcatatgtgaagaatgttaaacctggc

SEQ ID NO: 64301 - DNA, 251 bp, Setaria italica
  Peptide Sequence Number=SeqID_130275
cagttttcatgttgaataagattgtatggcttcattacttttgtgcattcttagtattcaattcattatttctgtgcatcaaccattctgtggattctaggcactctgtttggtatttatgatttcggatgtaggttaaagatttggaggttgaattggaagccacaaagcaaaaaggtagagagacactgcagcaagctatcctggccctgagacacgcaacgaggggataggaaggcacacgaggggag

SEQ ID NO: 64302 - DNA, 456 bp, Setaria italica
  Peptide Sequence Number=SeqID_130276
aacctgcaaaagaccattcatataagctgacatggttcttttctgctctttcaatatcgaggatagtatctgtacctaagatacaaccatatagtcatggaggatatactataatataaactgaagcacaagaagggaaacaaataggggcatgcaatatggacatgcatgttgatgtgaatttacactatatgcttcactgatggactcaccaagaaattaatgtgctcaaaaccatcacgaattgcaagatttcgtgcaagctcaattgcgccttcactatagtcaatcccagtcagatcagaaaacccttgctttgcgagctgttgcaagagtctgccactcccagtcccgatgtcaagtacactgcagctggcaaatccttgctcgagcacaaattttggccagcctacacggacatccatgacctcagtgccaaaccagtcatcagcgtgg

SEQ ID NO: 64303 - DNA, 269 bp, Setaria italica
  misc_feature (248)..(248): n is a, c, g, or t
  Peptide Sequence Number=SeqID_130277
gcactggtccattgccctgaacacctccttctctttatccaaccttctgtgcttgcacaacccttcaacactgaattgtacgtcacgatcccaggcttcaaccccttattagccatcgaatcgaccactgccattgctcagagtcggacgagaggacgaggcggtaggcctccgcggcgaggtgaggccactcggcccgggagagcgcggcgaggagggcgttggatgcggaggccgggacggggacncggtggtcgaggaggaggcgg

SEQ ID NO: 64304 - DNA, 476 bp, Setaria italica
  misc_feature (1)..(1): n is a, c, g, or t
  Peptide Sequence Number=SeqID_130278
ngaactggaagcgcatttgggttatgactctctggctctcaatctgcattggcctcttcatttggaagtttatccaataccgtaatcgagctgtattccatatcatgggttattgtgtgacaactgcaaaaggtgctgcggagactctcaaattcaatatggccctggttctttttcctgtttgccgaaatacaatcacttggattcggtcgaagacaaagattggagctgtcgtgcccttcaatgacaacataaactttcataaggtaaaacatatggactcaactagttttgaacacagcgatgaatctttccatgtgaagctatccattcccttcaaacatagccctttttttgtcctagatgactaacaaaagtgaactgttaacctgctgatctgatcgatagttcttctttaatcatactatgagttagatggaaatttcattgtataatatgcatgctaattaattcta

SEQ ID NO: 64305 - DNA, 231 bp, Setaria italica
  Peptide Sequence Number=SeqID_130279
catgtatactgccactggaagaagctatggatgaacagagtattcctgccaaaaaaccaacatcgtccactacttttgacaggaatactctgttcatccatgtatactgccactggaagaagctatggagtgactatttctgttgtagcctaaatagataaagcatctttatatttgaaagttgcgagtaagcatgtcattatgtatctgaagtttatgttacattctggc

SEQ ID NO: 64306 - DNA, 400 bp, Setaria italica
  Peptide Sequence Number=SeqID_130280
ggatggttgggctgcagtggagaagcgcttcaatcagctacaggtcgatggcgtcttgctacgttcaagatttgggaaatgcattgggatggacggatctgatgagtttgcagtgcaagtgttcgattcattggcaaggaagagagggatagtgaagcaggtgctgactaaggatgagcttaaagatttctgggtagtctaactcagtgatcagggttttgacaaccgtctccggacattctttgacatggttgacaagaatgctgatggaaggatcacagcagaggaggttaaggagatcattacccttagtgcatcagcaaacaaaactttaccaaagactagaaaggaaacgaagactagaaagaagtaacgacaagacaactacaattaataggaa

SEQ ID NO: 64307 - DNA, 421 bp, Setaria italica
  Peptide Sequence Number=SeqID_130281
aagggaactgaagggtggacaggcgtggtcatgcttgtacttatggccatagcttttgtattagcccaaccatggttcagacgtaacaggctcaaggattctaatcccctcaagaaaatgactggcttcaatgccttctggtttactcaccacttatttgttattgtgtatacactgctcgtcgtccatggaatctgcttgtatctaagcagggaatggtacaagaaaacgacttggatgtaccttgctgttcctgtgctcttgtatgtaagtgaacgcattattcggctatttaggagccatgatgcagttaggattcagaaggtaccttaaattctgtcccttgcctttttttgtcctttttcaacttgaggactacaactaaacatcgttcatttggtgtgaggtgtggttgtacccc

SEQ ID NO: 64308 - DNA, 362 bp, Setaria italica
  misc_feature (316)..(362): n is a, c, g, or t
  Peptide Sequence Number=SeqID_130282
tgttagtttctttctagttctttctaggtattgttgaatttattaaggtttgttacttattgttattacaggtagagaaaataaaatgacaggagttgtcctgtagatgtcaaaagtagtggacgatgtggttttttggcaggaatactctgttcatccatgtatactgccactggaagaagctatggagtgactatttctgttgtagcctaaatagataaagcatctttatatttgaaagttgcgagtaagtatgccagaatgtaacataaacttcagatacataatgacatggtatttcgtttctgagaaactnnnnnnnnnnnnnnnnnnnnnnnnnnnnnnnnnnnnnnnnnnnnnnn

SEQ ID NO: 64309 - DNA, 427 bp, Setaria italica
  Peptide Sequence Number=SeqID_130283
taacttcctagggtctaacctattattgttactagttggggtcctagttcgttgtccggtcctactaggttcattcttcccaagccatggaaaagggattacaaaacttccaccagcctgggcaattataggtttacaaccctcgcatttttaatttacatggtgtagaagactttgacgacgctatatataatctgtcctacgatctgtacacactgtacaagtttgcccctccaccattggaggagactgcagcacgtgtgctccccaaccagctcgtccaagatagagacaatgcaaggagtgcaaaaagaatgaagggacacctcagtcttctcaatgaaattctacaaattgagaaaggtccgtggtatttgcacatggattctttcttgtgctcaggatcaaggctgttccttagcccaaa

SEQ ID NO: 64310 - DNA, 204 bp, Setaria italica
  Peptide Sequence Number=SeqID_130284
gagaccaccactctgccctctacggaggagaagaacccggggaggaggctgagggaaggaggcggacaagatgaggatcatgataaagggcggcgtgtggaagaacacggaggacgagatcctcaaggcggccgtcatgaagtacggcaagaaccagtgggcgcgcatctcgtcgctgctcgtccgcaagtccgccaagcagtg

SEQ ID NO: 64311 - DNA, 404 bp, Setaria italica
  Peptide Sequence Number=SeqID_130285
tgttggtcttttggagtaagttcttacaaagggattcttggtgatgactgtgatttagttgcggtgaagagatatattcgtggagatctgagagaagagttcatggaggaagtaaggatccacagtaaaataaagcataagaatgtagtgaagctcataggctgttgtataggggaaaacactctaaccattgtaacagagtatgtctccggagggaatttggatgatgcacttcataaaagaaagacttcaatcccgttggatataaggttgggtattgctataggttgcgcagaagcattaagctacatgcattcaatgcatttatcaagtgacagtctagtatgccatggtgatgttaagcctgcgaacatacttttagatgacaatcttatggcaaaagt

SEQ ID NO: 64312 - DNA, 377 bp, Setaria italica
  misc_feature (246)..(246): n is a, c, g, or t
  Peptide Sequence Number=SeqID_130286
aggtagaaagaagaataataattacgtaggaagaatactagaagaagaagagttcatggaggaagtaaggatccacagtaaaataaagcataagaatgtagtgaagctcataggctgttgtataggggaaaacactctaaccattgtaacagagtatgtctccggagggaatttggatgatgcacttcataaaagaaagacttcaatcccgttggatataaggttgggtattgctataggttgcgnagaagcattaagctacatgcattcaatgcatttatcaagtgacagtctagtatgccatggtgatgttaagcctgcgaacatacttttagatgacaatctttaatggcaaaagtatcagattttggactgtc

SEQ ID NO: 64313 - DNA, 187 bp, Setaria italica
  Peptide Sequence Number=SeqID_130287
taaaacaaaaagaaactaaagaaaggaaaggaactaagtaaaggaataattacaataacaagtttagagcgggcagaagaagcaaacaaaaggctctgatcgatctgcaagggcggttctttggcgggcggttggtgcagtcatccttctttgacgaggaaaggtttggaaggaacgaacttgctcc

SEQ ID NO: 64314 - DNA, 226 bp, Setaria italica
  Peptide Sequence Number=SeqID_130288
agacaaatactacaatacaaatttacaaccttggctggcttccaacacaacttgtgaatccagccaaggtgaaattgatgagattgccttggttgcagagatgtgtttaaggactaaaggagaaacgagacctaaaatgaaagaagtggagttaagattgcagctcctaaaagctaacatatctaaaacatgcaaaaaggggtcaaaaaggggcagagaaaccaag

SEQ ID NO: 64315 - DNA, 446 bp, Setaria italica
  Peptide Sequence Number=SeqID_130289
accaatgttaaaagtgtaaaagaatggattatatagcccatggccaaacaacgaataactactactttacaaaagatggaatggggtagagaatttaaaaaaacaaaaattgaaatgtggggggttaatgctgcatccaagtccaaccagggaaactcaaccgtgtggcagggagcattgcctggataggcaggaaataggaaggtcacagagtctatggcaggttcccattggcaagagccagatcacccatgcctgatgttccttctctggatgcaaagtcctgtaacattcaaaaacattgagcaacaaaatccggttagcaattcccatgcgcatcaatctagcccgaaacacccaggatgagattgtgacagcatggttgagtacctgaagtcggtgcagcaagtgcatcaagaacaaatgcacaaacacctggtgcaggc

SEQ ID NO: 64316 - DNA, 382 bp, Setaria italica
  Peptide Sequence Number=SeqID_130290
taactaaccgtacttaaagtacttaccttactaaaatttacctaactaaaaaagtacaattaaattaagccaccagtctcctttcggcttctgatagcaacaccatcaggaataagtcggccaaactttttgaattcattttcaagatcagcctcgctgacagatgatggcacattccccaaacataaaacagacttgctctcttcatcatcatgggcagcaacttcaccatagacatcagatctcggtttatcggccaccatagatgaagccataaccaaatgctgggcctggttcgactccgtcgcagggtgagaaggcttactcacagggacttgctgggctaccgggaatgcaggtggagcctttgcagtttttagaa

SEQ ID NO: 64317 - DNA, 411 bp, Setaria italica
  Peptide Sequence Number=SeqID_130291
aaggaaccaaaccaaataaagaaataagaaagaccaataaaccaaaatagactagggacctggttcgactccgtcgcagggtgagaaggcttactcacagggacttgctgggctaccgggaatgcaggtggagcctttgcagtttttagaatggaagcgtaagtcttcttcactggttcaccaacaggctcctccacatgaggagttggcacaggaggaggttgcactggctcctctggtgccactgcaatttcatttgagaaggaagaaggtggttcttcaggaagaggttcatctccccagttgtcagatgacactacttgctgtgtgcctcggaataagcatagctgtcgaccacatcacgtccttcagatgttatttgtgttgtttgagtttcttcctcgtgatgta

SEQ ID NO: 64318 - DNA, 194 bp, Setaria italica
  Peptide Sequence Number=SeqID_130292
ggcaccagaggagccagtgcaacctcctcctgtgccaactcctcatgtggaggagcctgttggtgaaccagtgaagaagaaggtggttcttcaggaagaggttcatctccccagttgtcagatgacactacttgctgtggtgcctcggaataagcatagctgtcgaccacatcacgtccttctagatgttattt

SEQ ID NO: 64319 - DNA, 423 bp, Setaria italica
  Peptide Sequence Number=SeqID_130293
atcgcatgtttggtaacattgaacttaaactatctcccttgaacatacaaggagtcttggaattaatgcattatctggatctgttccaaaggagcttgggaagcttgtgaatctcgtatcgctgagtttaagcacgaacgacttaaatggatcccttcctcccgaactggatatattgacagctctggcttaagtggtccactaccaccatcattttctaagcttacaagcctgaaaacattgtatgcctataaaagacgttttgtcaacagtattattcatttaaccttatgcgttattcttatttgtgattaggtgggcatcagataatgatttactgggcaaataccagattacattgggagcctcagtaatttatcagatctgtaagatttacaactttatactttcagatggtgttga

SEQ ID NO: 64320 - DNA, 484 bp, Setaria italica
  Peptide Sequence Number=SeqID_130294
agacaaacaatacggaaatactcgtgaagttgtatggttgctgccttgagggcgaaaatccactgctggtttacgagtacttagagaatggaagtcttgataaagcattgtttggaagtgggagaaagaacctagactggcttacacgctttgggatatgcttaggcattgcaagaggtctagcttatttgcacgaagagtctagcatccgtgttgtgcatagggatataaaggccagtaatatcttacttgacaccaatttcaaccctaagatctcagatttcggactcgctaaactttatgatgacaagaagacgcatgtcagcacaaaagttgccggtacattgtaagcgcatttgcatcttgccccatttatagtaagtagggaatgagaggttatcttgcacactggagtgcacctttatacaatttgcagaaagtttatactttagtttgattaatctgtgagctaatacaatatttt

SEQ ID NO: 64321 - DNA, 301 bp, Setaria italica
  Peptide Sequence Number=SeqID_130295
ctgccttgaaggcaataacccattgttggtttacgagtatctagacaacggaagccttgataaagcattgttcggaaatgggagattgaacctggactggccaacacgctttgagatatgtttgggcattgcaagaggcctggcttacctccatgaagagtctagcatccgtgttgtgcatagggatataaaggctagtaatgtcttacttgatgccaatcttaattctaagatatctgattttggtctcgccaaactttgtgctgatatgcgtgttcttgtcatcataaagtttggcgag

SEQ ID NO: 64322 - DNA, 194 bp, Setaria italica
  Peptide Sequence Number=SeqID_130296
atcaggagttgagcatgatgctgcaagaaccatcctgggtgccgtgtaatgctcaactcctgatgctgcaagaaccatcctgggtgccgtgtaatgttcagcaacaaattcctccaagatgctaacatccaatcggttcacagcggattcagaagccatcaaaggttttgctagcgccccagaatatccagctg

SEQ ID NO: 64323 - DNA, 271 bp, Setaria italica
  Peptide Sequence Number=SeqID_130297
tgttttgggtaacattgaaacttaaactatctcccttgaacatacaaggagtcttggaattaatgcattatctggatctgttccaaaggagcttgggaagcttgtgaatctcgtatcgctgtaagaaatttaccttctatgtttcatggccctatttcagtagaaatctttgctaatgtccaaactacaaagttttataaatctcgacttggctttgtacacgtacctatgaatttatttaaatgtgtaagaatcaacaaataaagaacag

SEQ ID NO: 64324 - DNA, 296 bp, Setaria italica
  Peptide Sequence Number=SeqID_130298
gaacttcaaccatttctggtgtatagctcttcaatgcatcataggtatagctcatttgttcacgggaagccagcgtttttggattgggaggtcaaagagcagctccagaagataaaatctgaaatagctgaagtgtctgctaatcctcaaggcctactactggaggcgcttcattcagctggatattctggggcgctagcaaaaacctttgatggcttctgaatccgctgtgaaccgattggatgttagcatcttggaggaatttgttgctgaacattacacggcacccaggatgg

SEQ ID NO: 64325 - DNA, 236 bp, Setaria italica
  Peptide Sequence Number=SeqID_130299
ccacctggcacctcaaaagcaagtgcaatgtgtgtgctactgattttggctcttcaggacgtttcacactgggaaggtcagatagaagtggttctacaactgaaaccaaagtatcatgctcaactcctgatgctgcaagaaccatcctgggtgccgtgtaatgttcagcaacaaattcctccaagatgctaacatccaatcggttcacagcggattcagaagccatcaaaggtttt

SEQ ID NO: 64326 - DNA, 217 bp, Setaria italica
  Peptide Sequence Number=SeqID_130300
catggttaaacttgagcaactatatattgacagctctggcttaagtggtccactaccaccatcattttctaagcttacaagcctgaaaacattgtatgcctataaaagacgttttgtcaacagtattattcatttaaccttatgcgttattcttatttgtgattaggtgggcatcagataatgattttactgggcaaataccagattacattgggag

SEQ ID NO: 64327 - DNA, 225 bp, Setaria italica
  Peptide Sequence Number=SeqID_130301
cgaggccagagagaggggaaggagatgaggaggcctggacccagcagttcgtgccgccatggctctgctgcgctcccgacgttgctgctgctgctgcttcttctagctgcatctgcgcaagctcagcaagcgaggacaaggaccgatccggttgaaggtaagcgtgcatgtcttatttctttcagattagcgaggggtttcaaatcagcttgcatcaatccatcg

SEQ ID NO: 64328 - DNA, 249 bp, Setaria italica
  Peptide Sequence Number=SeqID_130302
tttgggggctagggtgccttcagcgagacacaccctgctttcttggctcttcagaatgtgagcttccacttttgcactttaaggatacgctaaataacatcagtattaaataatttaacatgcttgcagcttcctccgttgttgtggactgtgggagcagtagatttatatcaggttcaaataatggctcagataattccatatatcagcctgactacaccgatctgggacctgcttcctattatgtta

SEQ ID NO: 64329 - DNA, 243 bp, Setaria italica
  Peptide Sequence Number=SeqID_130303
agaatttggaatcatatggaaaaaaataagtttgtttgcattcctacaacagtgaagttctcctacatgcatgagccctatgctttcaggtctggcaattgtacgaggaaggccgtcctctcgacgtcgtggacccgagtctcatggaattcgtcagcgacgaggttctccgtgccatccgcgtcggcctcctctgcatccagagctcacctcggcagcggccatccatgtcaaaggtggtgt

SEQ ID NO: 64330 - DNA, 390 bp, Setaria italica
  Peptide Sequence Number=SeqID_130304
caaatctcgcacttcttggaagcacatgaaagcacccctttcgacacctacaagaagtcaaaatagagagacattgatagctatttataacaaaacagtgattctatactgacgatccacaggcagtgctttcatagtctcagctatgcaactgatatagtaaaaagtggaatcatgtgaaggataacaaatgaacccctcatcaatcacataaagataacattaacagcacagttgccacaagaaggatctttgaaagtgttatggcattgcatagctgcttaaagtacttaaaatattaaatgcatgaaaaattattttcctgagcaagacagcctagagtgataaaacacaatattataggcaagtacaagacacttagaagattac

SEQ ID NO: 64331 - DNA, 379 bp, Setaria italica
  Peptide Sequence Number=SeqID_130305
cggaattcggttgttctcttatactgtttacaaaactgaaaagccctatgagcagtcatctgcatatggaagttgatcagtcacaaaaagactttagcggagaacaatttgtacaaggaataaacctatgagtaaaaggtaggtacatgatccaacaggtaagttagcaatgctaaactaaaaccagaatatataagataatacattaagctattgactccagaagacaaagtttctacgtaacattaacaaaaaaaggatgaaatcggatgaacaactggtgctatagctacatatatccgaatacggttgttgttgaacatgacagaagtgaaaagaagtgtagagaattcataacaaagaaaaacttgcaggaact

SEQ ID NO: 64332 - DNA, 391 bp, Setaria italica
  Peptide Sequence Number=SeqID_130306
ctccaattctctctctctctgtcgctgcttctctgcaatagcatcaagcttagctttcctctcagcctcttctctcttcctcttctcttcctcttcacgttttctagcttcctctgcttttgttcatagaggagtctattcctttcctcatccgcacttttcttctgaatactgagtctctttgattcctcctctttttccttctccaatatttggcgctcaaggtcttctttgcgcttctcaatgatagattttcttgcaagaagcctcctgtgttcattctccactactccagctaaactaatgagactttcaccaagtttagatggactttttaaacttaggttaggtaaacgtaaaattttaaggtttaaccttaacgtaactttaa

SEQ ID NO: 64333 - DNA, 411 bp, Setaria italica
  Peptide Sequence Number=SeqID_130307
aattctctctctctctgtcgctgcttctctgcaatagcatcaagcttagcttcctctcagcctcttctctcttcctcttctcttcctctgcattattagagaaaaaaaaaacaatcaatatggaagtaggattcaaatcctgcagttccaaaaggtgctgaagagtactacccaacaattacaatgaatgaacgatacgtgtaatcagtttagaattcacttaccttcacgttttctagcttcctcttcctcacgaagcctttcaatccgctgttcctctaggttcagataatacatcaatttccttactgtctctctttcacgcttttgatgatatcaattgattgatccgttcatctctctctttcttcagacgaccaaactcagtctcacggcgttggacgaattcta

SEQ ID NO: 64334 - DNA, 229 bp, Setaria italica
  Peptide Sequence Number=SeqID_130308
tgtgagattatcagaaaccatcttgccaatctcacacaacctacggaattcggttgttctcttatactgtttacaaaactgaaaagccctatgagcagtcatagcatacaacgcttcaagctttgaattattccttagtatctcaagcactgtcctctgggagacctacaggaacttaaacaaagaagttgttactccatggtttaagttcctctgggagacctacagg

SEQ ID NO: 64335 - DNA, 194 bp, Setaria italica
  Peptide Sequence Number=SeqID_130309
tttcttcttacgaatccgctcatgctccctctgcttttgttcatagaggagtctattcctttcctcatccgcacttttcttctgaacacaggaggcttcttgcaagaaaatctatcattgagaagcgcaaagaagaccttgagcgccaaatattggagaaggaaaaagaggaggaatcaaagagactcagtatt

SEQ ID NO: 64336 - DNA, 489 bp, Setaria italica
  Peptide Sequence Number=SeqID_130310
ttaattaacttaactttaatttaatttaaacctttaatttaaggttaaagttaagttaaacttaagttaagttacttaaaagttaaaatttctttctttcttctagtagtttccttattaattactcagctatcccacgtgcaagaaaaccttcagtacacatggttaaaggacccgtttttcactgccatacttcttggcaaacttcctggtgatctggatgggtccgatccatcgtacaatctcttgttcatgctgaaagttcttgaagggctgaaccgtttttcatatcaactgttgatggatgaacagataaacaaatttgctgaaggaactctacaagatatcaatgatcttaaggtggcaatttatccagtcccacagcatcagttcatcagcagccttttgacgaataagctagagctgcaaatgcaagatagcttgtttgaggatggcctcataccctcgtggtgtgtctatcttgttgag

SEQ ID NO: 64337 - DNA, 378 bp, Setaria italica
  Peptide Sequence Number=SeqID_130311
caaatggtaacagcaaattagatgacgggaacagatcctcaaaactgagattcttgtacaatggtgtgatactccaaccatctgctactttttttgagtctatccttcgtctgatgaacaaggggcaatctgatctcgagattgacccatctttctgggatgaagaacactatataacctataggaagagaaacagaagcaaagaaatctcttctcagagttcctataatactcagctatcccacgtgcaagaaaaccttcagtacacatggttaaaggacccgttttcactgccatacttcttggcaaacttcctggtgatctggatgggtccgatccatcgtacaatctcttgttcatgctgaaagttcttgaagg

SEQ ID NO: 64338 - DNA, 348 bp, Setaria italica
  Peptide Sequence Number=SeqID_130312
tctttactaaggtcgtacgtttggttccggtaggtttccgtactacggttgtcttgttggttggaaattagttcttttcagagcacagcgatccttacagggagactccaatccaatgcacctacatgggcatgacatgattgtgcttgcacaaggccttggcaactatgatccagcgaaggccgtggccacgtacaacctggttaatccactaataaagaacactgtgcttgtcccaaatcttgggtggatcgccatccgatttgtcgccaataatccagggcatggttcatgcattgccactatgagtttcatctatcaatgggcatggcagcagtctttattgta

SEQ ID NO: 64339 - DNA, 235 bp, Setaria italica
  Peptide Sequence Number=SeqID_130313
gtcagccacagcgccggaaatggcacaactatactgaggtcgagccggggtgcagaagaagaacaaggaggatattcgtcaggtgatgcgccgatggttcctaagatgcctgatatacatgacacaattacgtcgttctatttccacagcaacctgaccagcctgcgccaccatgggcactctctggtccagcagagagtcgacgagcgcctgtacgtcgtgcttagcctcggca

SEQ ID NO: 64340 - DNA, 239 bp, Setaria italica
  Peptide Sequence Number=SeqID_130314
gcattgattattcgtagcaggtaggtcttgccaggctccacatccagaacatatccttcttttgttgacaccggagcaattgaagagatctccgaccaagccattgactgtggaggcactagcatcagacaaaaagatgcccttcgtcatgttcctggccatctctgcgttctatcttaagatcgctgggcacaagttcacggtggttgctgccgacgctaactacgtcagccccttca

SEQ ID NO: 64341 - DNA, 190 bp, Setaria italica
  Peptide Sequence Number=SeqID_130315
tgccttaaccatcaactaacagtaaactacagtagaagtcgtggcatggcacaagtagcagtgaagcacaaggaggatattcgtcaggtgatgcgccgatggttcctaagatgcctgatatacatgacacaattacgtcgttctatttccacagcaacctgaccagcctgcgccaccatgggcactctct

SEQ ID NO: 64342 - DNA, 385 bp, Setaria italica
  Peptide Sequence Number=SeqID_130316
cgtaacaatgtcgaatcaccacattctaatagaatgtagacatatgggtgcttcccagtcaacttctgttgccactttgggtgattaccctagtccaaacaccaaattgagtcaacaactgaacaacagctgccatcacttggttgattctttttgttaccagcagaaaatgtaaaaccagccttccacatctacccagaatggcgccaactgccgaggtttcccacctgcaacaaaattaagcatcaattgaaccaatagtgaattacatcatgattattcaaagtgccaccacaaataattgctgcattgttagttcatttattgattcattccatttaggctgtagcgatgcataagaacattagcagcaggcctctatggg

SEQ ID NO: 64343 - DNA, 415 bp, Setaria italica
  misc_feature (262)..(262): n is a, c, g, or t
  Peptide Sequence Number=SeqID_130317
aagtagaaaataccaagtaagtacaacctacaaatgaactaccaaagagatgatgtaagcattccgtgacccaaaaattaccgtacatgtcgaatcaccacattctaatagaatgtagacatatgggtgcttcccagtcaacttctgttgccactttgggtgattaccctagtccaaacaccaaattgagtcaacaactgaaacaacagctgccatcacttggttgatttcttttttgttaccagcagaaaatgtaaaaccngccttccacatctacccagaatggcgccaactgccgaggtttcccacttgtgaatatgaacggactcaaaatcatatatgcttgaaacattcttatgaaagttgtgtctggtcagtgtcagagtcagtccatcacatcacctcgttacttgta

SEQ ID NO: 64344 - DNA, 500 bp, Setaria italica
  Peptide Sequence Number=SeqID_130318
cggtaagtcatgagcgaatgactttatgtgtttatcgagtgctgtttgtttgtgcgaagaaggcaatgactgcactttgctaattttacagtattgcaaagcgcatacaagtatgtattcgtgtgcactattatgccaccagcttgaaataattcactgcctgcttcctgaaacttgctgggtatttgtagaatcttccttaggggtgtttgtgattttggcgattgagtgacaacatagttatcgggactaattgtttgtcaagtatatgccttgtaggttttctaggtcccaagtatgcaaaccaaccataggcaaggtccaaatcatggtattcaagtatgcaaaccaaccatggcaatgtctaaatcatggtattaaagtattcaagctagggtattcaagtgaccaagccatggcccatcggagtaagcatcggagcaattggtccaacagggaaatcaacttgagttccaggaagcaccggatgattcgacggt

SEQ ID NO: 64345 - DNA, 227 bp, Setaria italica
  Peptide Sequence Number=SeqID_130319
gggaaacgtcgacctgatggggcacaagggagatccgtttctccgtcacgctttgcccggcctgagcagagcggtgatggccgtccacggcggagaaggatccgtgagatgatggcatgaggcactggccttctcagccagcgcctcccgctgcccagtgtccaaatgtacatcacggtgttgtgatcgggttggatcatacactgatcaccgtacacggcactcta

SEQ ID NO: 64346 - DNA, 384 bp, Setaria italica
  Peptide Sequence Number=SeqID_130320
gctgaacaagccagggggatgatgcagtcagtatggtacagtgcttgcatggcatcatcccctggcttgttcagcacaattcttgccctgtttgccgccatccgctgccatcacaacgatcagggaatgccaatagcacccgcacaccttcagcctactccaacgaggctgctgttcttggtgtcactgaagcagatcctgaacctgtgccaataaacaatggtggtgcaaatcaggaaacgcacagctccttctcgtttctctggccatttggtccctcaagttccaatcccacttcttaccagtatgaagaaactgttgatgagcctgcagtatatgatccaaaccagataggatattctgagtggtactatgaccactgat

SEQ ID NO: 64347 - DNA, 239 bp, Setaria italica
  Peptide Sequence Number=SeqID_130321
tgtccttgtctaattggtttgtcttcttccgggttaaaaaaggtattgtcctactttgtccttgttagttcttgtcagtgtataccttgtttttcatttgcagtgtggacctgtgtaagtgtgtatagagagaatagagacttctgggcgcaatgaacgctcctgtaatgcccgtatattcctgttcggtatatcaaaggttgcttcttccctgtccaaaaaaaaaaaacaaaaaaaaa

SEQ ID NO: 64348 - DNA, 192 bp, Setaria italica
  Peptide Sequence Number=SeqID_130322
catcgatcttgtagatgaggtttccccttgtcaattgtctcgaacatctcaaggtactcagctgcacaacggggcctgcgaggacattgtaggcatttgagcgtgacaattcattaccgttagtctagtaacttttggtcgtctaaattttctaaattgtccgcaggaccgccagggattaatcagagtatt

SEQ ID NO: 64349 - DNA, 344 bp, Setaria italica
  Peptide Sequence Number=SeqID_130323
caaatatacgcaaaagccgtggacatcttgatgttccacagatcagcagttttgcaaggcactgcaacatcctcaggcactggtgaagacacatgctcagcattacctatcatacaatgaattccatgccaaattgcatccggtctacaatcacactttgttatccctgtgcgccttcaagcttaggccttttgtagtcatctcttccattctgctcatgtcttccagcaagctgagcatcatggcccttgtcatgcttcaatatgtgatcatcctgctgggactttgttgcttctattaacctattctacttttgtctttattctaaattggtttgtagggtt

SEQ ID NO: 64350 - DNA, 275 bp, Setaria italica
  Peptide Sequence Number=SeqID_130324
gatggaagcttcactttgagaaatttagcagccaaaaagatagcacctgctgcaatatgatgaggctcgaattgcaggcaaagcgaagtacgcagcccatcatttcaaaattccaggcaacctgaggaagtgcatttgcaccaccaacattgaatctccttattgcttcaaccaagggcttgtaagcatggtgaatattttaaggtcaaaaccccaaagtagttaacaaagtaacaaactacgactaccccaaagtaaaaataaagttactttta

SEQ ID NO: 64351 - DNA, 150 bp, Setaria italica
  Peptide Sequence Number=SeqID_130325
ttagaccaacaagtttgtaatgttcttggcaattaattcgtctatcatttttcgcatgggattggcgaaggtaaagcgatgacagaataccatagctgtagcaatcgaaacttgatagacgaataattgccacagtttgtatgttcttgg

SEQ ID NO: 64352 - DNA, 321 bp, Setaria italica
  misc_feature (1)..(68): n is a, c, g, or t
  misc_feature (152)..(152): n is a, c, g, or t
  Peptide Sequence Number=SeqID_130326
nnnnnnnnnnnnnnnnnnnnnnnnnnnnnnnnnnnnnnnnnnnnnnnnnnnnnnnnnnnnnnnnnnnngacccacgaactgttcattagactatctgaactgtcaacagtcaaattttacaacaagagctgatatacaacaattaattgatntaaaaatgctccactacacatacaaatctgacgttatgctagattacaattttcttatcttcggatgtggcaactccatatgaacagtgactcgattttatctaggtaacccttaaattgtaattattagttatttaatttgtttacttaagttcgttctttccccctt

SEQ ID NO: 64353 - DNA, 142 bp, Setaria italica
  Peptide Sequence Number=SeqID_130327
tcctatttcttggtctattattgtaaacctttttctattgtctaactacgggtccttgtactattcttttcttggtagggtaaagtattgtctttctagtaagttggtaaattattaaccgttctattgtagtcttgtattc

SEQ ID NO: 64354 - DNA, 251 bp, Setaria italica
  Peptide Sequence Number=SeqID_130328
gcccgatcctcagtccactactgccgccgggccgccgctcctctctcggcctactggggtggagatccgtccgggtggggattagcttcgctttcgtcttggcactttcccaacagcatgtccacagaagataagaaactgagtatgctaaacaagggcactgcattgaatccaaatgcagaggaatttgttccttcatcccttagaactgtcaatgacgcctccaggagatcagatgcagctttggttgt

SEQ ID NO: 64355 - DNA, 222 bp, Setaria italica
  Peptide Sequence Number=SeqID_130329
tccggagacgactgtaacctcaaggtcgaacgccttgggcggcgccgctggcggcggcggcatcgaaggcggtggggcttggaattgggggtgggcattcggaggaagcgggtgctggtgctggtgcggagtagtacccactgggccggtagtattgctcggatccgtactgcggcggggccgagtaggcgggaggcggaggtggtggaaagtagtatgggg

SEQ ID NO: 64356 - DNA, 320 bp, Setaria italica
  Peptide Sequence Number=SeqID_130330
agaattaacttttaacgtaagttaattaggaaccaagaatagaaggaaaaggaataactgtagtttgcttgataaccaaaattttactacagttgaatagttgatatgatttgtgcaactccaaaaagtgtgttgcctttttctggtgtataagtagacttctagtttgtactataggatgggtttagttccagtcaatctgatcaattattgaaatttgtaggcctgcaggcactggacttctcggcaactcggtggggatgttatcgcctacccttcggcctgtgccggtgacaccaacggcgccccgatggccacca

SEQ ID NO: 64357 - DNA, 368 bp, Setaria italica
  Peptide Sequence Number=SeqID_130331
gggcatttttatgttaaccaaatctcgtagactcgaaacattttctgcctgagcatagatgttgctatgatatcacagagaaatacagtttctggtggaatcattggtatgcgtgatttttgtgccttacatttctaacctctattggtagacagagacaattctaactctatatctttaaccatttacagcaggctggaaagaaagaggaggaggaatttagcacaggtcctctgtctgtcctaatgatgagtgttaagaacaacacccaggtgctcatcaactgccgcaacaacaagaagctccttggtcgtgttcgtgcttttgatcgccactgtaacatggtgcttgagaacgtgcgggagatg

SEQ ID NO: 64358 - DNA, 379 bp, Setaria italica
  Peptide Sequence Number=SeqID_130332
aacggggaaggtaagtagaacaataaaataacaataccgggcgcgttagtgtctggtaattggaatgagtacaatctaaatcccttaacgaggatccattggagggcaagtctggtgccagcagccgcgtccaatgccaatactgttgggggtaatcaagcagtagaaaaacttactaatttgaatgcttttgacatcatctcactttctaatggatttgatctctctggcatatttgaggagaactcaaacaaggaggaggctaaattcacatctaccaacacagcttcgacaatcattacaaagctcgaggaaattgcaatgagcttgcgactaaagataacaaagaaatgtggtggattgctgaagatggaatgtt

SEQ ID NO: 64359 - DNA, 255 bp, Setaria italica
  Peptide Sequence Number=SeqID_130333
ggcaaggtgagcagcctgaaaaggagaagcaacaatcttagatgttgtgacaagtgtaataatagtagagattgtgacaaaccaaaactctaatattattacacttgtcacaacatatgggcttgtggagtgattctctatgtgttgttggcaggctatcttcctttccaggataagaacttggtagacatgtataagaaaatttgcaaagcacaactcaaatggccaagttggttttcttcagatattcgaaag

SEQ ID NO: 64360 - DNA, 433 bp, Setaria italica
  Peptide Sequence Number=SeqID_130334
aataaatacaaaacaaattttaccaatagaatttggaatagaaccaaattactaaaaccaaaggaaaattagtttgattataccatgaattcgacagataatgttatgcccattgacatgaatttggctttggatcattccaatgccaatactgttgggggtaatcaagcagtagaaaaacttactaatttgaatgcttttgacatcatctcactttctaatggatttgatctctctggcatatttgaggagaactcaaacaaggaggaggctaaattcacatctaccaacacagcttcgacaatcattacaaagctcgaggaaattgcaatgagcttgcgactaaagataacaaagaaatgtggtggattgctgaagatggaatgttccaaaccaggaaggaaaggtgtgatgtccttaaatgactgaagta

SEQ ID NO: 64361 - DNA, 188 bp, Setaria italica
  Peptide Sequence Number=SeqID_130335
cagcctgaaaggagaagcaacaatcttagatgttgtgacaagtgtaataatagtagagattgtgacaaaccaaaactctaattgttgactcaataatgtactctaattgttgactcaataatgtactcttcttttttttctcatcctcatattttagtccagagttttacacttacaaaaaaaaaaaa

SEQ ID NO: 64362 - DNA, 150 bp, Setaria italica
  Peptide Sequence Number=SeqID_130336
ttgcaaagaattcttgatcctaaccccagtacgaggatctcaatggaaaaaatcatggaacatccttggtttagaattggtcatccaaatcatggaaaattgtttgattataccatgaattcgacagataatgttatgcccattgacatg

SEQ ID NO: 64363 - DNA, 132 bp, Setaria italica
  Peptide Sequence Number=SeqID_130337
ctgctgctagttattcggttgttgttacagggtccaaagcccagcagaggaatcgcatctaggcgaactctcttctcgcgcactggggttcctctatctcttactgaaagcccaatactgatcccggcgatc

SEQ ID NO: 64364 - DNA, 209 bp, Setaria italica
  Peptide Sequence Number=SeqID_130338
ggggggggtagtggagctcgtgggtaggggggcgggagggagagaggaggagagagtgggagatgagaggggagaaatggggaagatggacatcttcgcgaggctcgccaagcctgttccgtttgacggtggcagaagggaattctgggtagagaagaccaaaggtggcatttgcatggcgctgtcatcgaaagcgctggtgataacgg

SEQ ID NO: 64365 - DNA, 414 bp, Setaria italica
  Peptide Sequence Number=SeqID_130339
tccatctccttcctggcagcctccccatcgtctctcgcaactcctcgcatgacaagagacgctcaatcttgctaacgcagtcatcaacatcccctggcgtgtacagaaagctggtcttccttcctggtcctccggtataatatcaggtattcctccagctcgagcgccgactaccggaactcctgatgacatggcctcgagcaccacaaagccaagcgtctctgactctgaaggcatcacaaacacatccccactggcataggcctgcgatagctcttccccttgcaacgtacccgtgaacactgcaggcatacctgagaacatctgctcaagctcagccctgcacagaaagatggtaagaaagaatcacgtttcccttctaccatcttcccaataacacttgctctggtgctg

SEQ ID NO: 64366 - DNA, 249 bp, Setaria italica
  Peptide Sequence Number=SeqID_130340
gttttttttatggaaatgcttcctcttctatgattgcttgtttttttaacattcttctatgattgcttcgcaacggcagccccaggcgttgtcggcctcaccagcttccggaccacccactgaacgggcctcagcagctgtgccctcttcttgcgccagaaccagatcgcagcgctgtaactagactacaattaccggaatacttacctacgtacgaccgactacgaccaagtacgaaacttactacca

SEQ ID NO: 64367 - DNA, 205 bp, Setaria italica
  Peptide Sequence Number=SeqID_130341
gccttggtgcaaaggaactagccaaggattttgttgtttctgggacagcatcagaatctttgtatggtgcttgagatacagtctcgaagagttcgtcaggttccatgtttggcttgtacatggattcacaagcaccatacaaagattctgatgctgtcccagaaacagaatctttgtatggtgcttgtgaatccatgtacaagcc

SEQ ID NO: 64368 - DNA, 412 bp, Setaria italica
  Peptide Sequence Number=SeqID_130342
aacccgactaaaggcagtcacggtctacagatgacatcagtgcttgagatacagtctcgaagagttcgtcaggttccatgtttggcttgtacatggattcacaagcaccatacaaagattctgatgctgtcccagaaacaacaaaatccttggctagttccctgcgtaggaagatacatcttcaatcagttcactagaacacagcagtgacagaggcataaaggcggagatgaacaagagatatcaaatttggtggacaaacaaattatcatcaagcgaacttcctccgattccaaacattgttttaggatttttagacttttagttggttggacttctttaacttgtccattactaaatacaaagttacatagattgacaaaaagatggtagatgttactgattcgttgta

SEQ ID NO: 64369 - DNA, 190 bp, Setaria italica
  Peptide Sequence Number=SeqID_130343
gccgaggcggcggtcgctggacgatcgcgaagcagttcttccccaccatggccaccacggcgctcccgttgtactcgaagatcgacatggctggcggtgatgttgcggccgtcgagctccttgccgttcatgttctcgatggcttcgagcatcgactgctcagtggagaaggtgacgaagccgaacccgc

SEQ ID NO: 64370 - DNA, 441 bp, Setaria italica
  Peptide Sequence Number=SeqID_130344
gtactccgcagatgtggttgctagctagaaaagttagcaatataaaatctaacagagcatatacgcctgaatacaatgttagtacatgatgatcatttagtgcttaatttatgacagtaaaaggtagcaagaagtagcaaagctttaatatgtcttacacttgtatgccaacaaagaaatcattcatctgacaaagcaaagatagagttacctgcgaagcagcactcagatcggagcttttctcaaccaagctatccagtctctctcctctctcaaggacactctcaatagttttatgtaggatgatctttgtttcatccaagtccctctggattttcattaatttgtcagcttctgcagggtcctgaaattttgtcaaagcatctgtcaggaaaggccactgttgagttccatctgcagtagcagatttccaagagtccc

SEQ ID NO: 64371 - DNA, 280 bp, Setaria italica
  misc_feature (1)..(54): n is a, c, g, or t
  Peptide Sequence Number=SeqID_130345
nnnnnnnnnnnnnnnnnnnnnnnnnnnnnnnnnnnnnnnnnnnnnnnnnnnnnngtaaacaaagatgtatgtgatttcagcggtttgcggcaaagccttatagtacaataaatgatgttagtgggttctacaaggttgaatgatcaccaagaattacggtacacagcaattttcacatgtaaacaaccaaattctggtactcatcaagaaccttattcagaagagaaaatgcacttcgtacaggatagtgatcatccatgaatgccaccgcactaaagta

SEQ ID NO: 64372 - DNA, 303 bp, Setaria italica
  Peptide Sequence Number=SeqID_130346
ttttttttttttttttgttaaactaaagtattgttattgttgtattttcagtcggttttgcggcaaagccttatagtacaataaatgatgttagtgggttctacaaggttgaatgatcaccaagaattacggtacacagcaattttcacatgtaaacaaccaaattctggggattcagggaaaatcgctgcctccctaacatgaacccaacagcatcaacctcgagtcttgtaaccacgcttcacgagaaatttaacttacagtagattcatacaatattggtcgttttttgtttcttctggc

SEQ ID NO: 64373 - DNA, 325 bp, Setaria italica
  Peptide Sequence Number=SeqID_130347
taagtccctcaaaaagttacagatactagtaggttgtggacatgaaaggaactagtagggaagtgatcgaggagctcggtgaactcagttagctaagaaaaattaagtgtgacatcaaaaggtgccagtgagaacaaatacaagatattttgtgcagctattgaaaagctttcttcactccaatctctctatgtggatgctgagggatcctcagatggttgggaacactaggagtggctggactctatttgctctcctccgcccctcataaggaatctaaagttgaatggatctcttttggatctgccaaagtggtttggtaacc

SEQ ID NO: 64374 - DNA, 267 bp, Setaria italica
  misc_feature (177)..(177): n is a, c, g, or t
  misc_feature (252)..(252): n is a, c, g, or t
  Peptide Sequence Number=SeqID_130348
taaaaacaaaaataaaagaaaagaaagaaattaaggaagtagaaagaaagcttttcaatagctgcacaaaatatcttgtatttgttctcactccaatctctctatgtggatgctgagggatcctcagatgttggaacactagagtggctggactctatttgctctcctccgcccctnataaggaatctaaagttgaatggatctcttttggatctgccaaagtggttggtaaccttaagcagctggtgaagntgcactttatcaagg

SEQ ID NO: 64375 - DNA, 237 bp, Setaria italica
  Peptide Sequence Number=SeqID_130349
taatccgttctaatgctattctttcagccttggcacgaacctcagcaaatgccctttcatgtgcttctctagtagccctctgaacagcaagtctatctttcccttcttttccctctcctcctttcctcctccactctctatctctctgaggtccgcatctctcctctttccagttgtcctcgcctcccatctttttcacctgtccctcatgtactgatcgtctcatcacctccattc

SEQ ID NO: 64376 - DNA, 378 bp, Setaria italica
  misc_feature (372)..(372): n is a, c, g, or t
  Peptide Sequence Number=SeqID_130350
aatagcacttcccgaacgtaagataaccttcctcttcaggagatccagatacctgatccacatcgccctcttgaaatatccacgtgcatcttcgttctcctcaatcccatgttttgtcatctcttcatggatgagtgattctgaagttacttcatttactctttcattttttgttctgtaggcatgcttcatcaacaaaattgaatagcatttctttctcaaaaatttcatatggtttggcagactcttctaattttgatattttcactaaaccttccttgatttcgtcagtattaaggaacaatttagacaaggttacctagtaaaaacctagaactaccttagactagaaagtaacaaagaagaaattanaataca

SEQ ID NO: 64377 - DNA, 412 bp, Setaria italica
  Peptide Sequence Number=SeqID_130351
gctgcatatttacaccgattcaaaaaaagataatatttggatatataaataccgaaccaatttctgtccctacaaaagaataatcaaccgcctattttccccgctagcgctcttcagaattgtacttattccaagcttccttcagaagatcaaacaccttctcacaaatgtatttctgtctgattgtagcacccctttgttgtactttatctggatggacacaaagggttgccttcctgtatgccttcttgacaccagcagctgtaataagctctgtgaggggaactggctgccaaccactgtctgaaccaagtatctgcccagaagaaaagatttgcatgactggactgatgtgtagtttgagttcaaattcaacatgatagctcaaaatgatgcaatgcagaatggaagt

SEQ ID NO: 64378 - DNA, 374 bp, Setaria italica
  Peptide Sequence Number=SeqID_130352
ctctgcctgctccctctgagccagcatgtaccgcatgtctttcagcaagggcttttgccgctcgctcagctgtgcgttgatgcctctccgattttgctttatgtcttagagctgactcaacttcaactacttcaatatctttgctttttccgtggttatttgaagccgtcttctgaaattgtacctcgtgttgattatcctgattaggtgccttaaaactgtccttgaaagagcccctgaacctctccattctctccttcgcatctgcggcagcctttgccttttcaattgccctctcccgagcttcagcagttgctctctcaactagactagacaacgactactagactttacaaattaactaaagaacttaa

SEQ ID NO: 64379 - DNA, 328 bp, Setaria italica
  Peptide Sequence Number=SeqID_130353
ccatgattctggccttccttaccatcatggcttagtacttcttccaccagtatcttgtcaacattctctagcaaggatttttgcacctctctttcctcaccatgagatacgatatcctcaactctgtccattctgttctccaaatcttggggtccccatgacccttgtgattcttggaactgatatggatcttcgtcacaagtaccacatgttctcacattggattccaccaattttccttctcccaaaaaatgcatcaacttctgcttcttcattatttcgtctttttcttattttagcaatagcactttcccgtaagttaagtatt

SEQ ID NO: 64380 - DNA, 249 bp, Setaria italica
  Peptide Sequence Number=SeqID_130354
tctcctgaaaaggattcagatccaacttcatcacaagttgtatcgcactttgcatccacatcactttgtcctctgttggtactttcaggtgacttctggtcctcccagttacaaggatcagatccttcttcactacctgtcttgtcagtattttctaatggggtttcgtctgcttctttatcattaacatcagagacgagtccatcctttccttctcttcagcaagttctctttctttctgcaatctcc

SEQ ID NO: 64381 - DNA, 412 bp, Setaria italica
  Peptide Sequence Number=SeqID_130355
ctctctggcctctgcagatgcccgttgtcgtgcagcagtaattctttccaaagccatttttttctgccatttcgcgagcttcagcaaatgctctctcatgcgcttctcttgtcgctctttcaacagcaagtctatctttttttcgttccctctccctttcctcctcttccaatttccgtctttccttctcttcagcaagttctctttctttctgcaatctcctttcactttcttttgcttcttgcgttttttcgagaagaccaattgtccttttcaaatgcactatctgctcttgttatattttccctctctttggccctctgaactccaagtgagtcttttttccatgtctcagcagaagcttggttgtaggtctattgtcgttcgttctttcttaaagggttagttattt

SEQ ID NO: 64382 - DNA, 335 bp, Setaria italica
  Peptide Sequence Number=SeqID_130356
cataatcgggtgtcacagtactgcgtgttgaatgactatcagaggtcttgtggttttcatttgcagaaacatttccagaaataggtgtccacgatgcacttggctgcttctgatcaactataaaatcactctcaggactcctcacactcgcactaacagagcttgggttcttgtcactatcgtcattggccattgtgccattgtcagttcttgaaacatgatttgttgctggaccatgcgacaaattgcgtgaatcaatcacaaagtccatcgaaggttcaactgtgcaaggtacggacaatactacaaatacaagaatacaatacaaggtacta

SEQ ID NO: 64383 - DNA, 106 bp, Setaria italica
  Peptide Sequence Number=SeqID_130357
gcttcagcagttgagagagcaactgctgcacgctctgctttcattctagcttctcttgaagccttttcaagagctgcttgacaggttgtcttgaagccttttcaag

SEQ ID NO: 64384 - DNA, 442 bp, Setaria italica
  Peptide Sequence Number=SeqID_130358
cctcccaaagtttttcataccttgccaagtcagaatccgctgcactgagttcagtttcactgtgatcattgatgacactagtaatgggattcatttgctcacatttatcatcctcccttctggcttcatcagttttgcatttctgatcatctccagttagctcaaaaaagtcattaccggacttccacttgcctaatttctctagtttactggaaatttgacaggactcagtggagcgttgcatcatcttctgaggcttctccagcggaaataccttttttccattgtcatcaaaatgataaaatctatccacacttagttttttatgcttgtcagacaaagaatcatcatggttcttttcttcttccgatgactttttcactgatagtattttgtttcggtaagttattcttaccttcttacggtattacttggtagcctt

SEQ ID NO: 64385 - DNA, 486 bp, Setaria italica
  Peptide Sequence Number=SeqID_130359
taattttgcatatatgtatattctgcatgtgtgctaactttgaattcagtgtgtgctctttatatagccaatttatccctgtagcttgaacaatcagcttatatggttgcaagatgtttcatgattctaaattcctgtgtgcgctgctttaatctctccaacttgccccgttgactgacgaattgtgcatttgaagtgaattgtgcggctactacaactccaatctgtcaggtaacccacaacattgtttattcatggcctctttatcaatcatttcttctccgtcatcaacacatcccctattttccttccactataaatttctcaagaaatcgattgatcaaaaagggatcaagacattagcgtttactagcaattggacgatcagattggagaagaaagtgctgattgttgagacctaagtgtggaggttcattgtaatttactgttgatccgaaggatgcttcttaccaatactgtccgggc

SEQ ID NO: 64386 - DNA, 247 bp, Setaria italica
  Peptide Sequence Number=SeqID_130360
gttgatttgtgaatcatttgtggacaaaatgtgcagctcaaggtgttgtaacatgatttttcatatacagcaacaatttctgggatctaaaacttgaggtgcgctgctttaatctctccaacttgccccgttgactgacgaattgtgcatttgaagtgaattgtgcggctactacaactccaatctgtcaggtaacccacaacattgtttattcatggcctctttatcaatcatttcttctccgtca

SEQ ID NO: 64387 - DNA, 424 bp, Setaria italica
  Peptide Sequence Number=SeqID_130361
atcacaattcacaatagtaccttacgtgtaaccaaatcgtaatcgttttacacaactgtcactgaaagtaacaatacagtacaagccttaaacgctgtcaattcagaaacatgtctgggaagatggtgtcaagctatgaaataacagaacgcagggataaggtccagcttcctcttcaatttgaaccgactatggtccatgtgctgacaactctatggagacctgatcttcaaaaataaggtctgcgcgggcggcggaatctggggaacctcccatagccataaggactataaccatacggcctcatggtaggggtgcccatgggatgaagccaacccgcggccgaggttcaatccataccatggcacccctacatgaggccgtatggttatagtccgtatggttatagtcccatagccataag

SEQ ID NO: 64388 - DNA, 367 bp, Setaria italica
  Peptide Sequence Number=SeqID_130362
ttgtctagacaaaaaatttagatttcaaaagtactaggttttaggttagacaatacttagtacaagccgaattggttattgaattacatggaaatacaaatccactcactttttgtgtgatcacaactgcaggttgactatgcctgcactccagaagaagtacagcagcacttcaattcttgcggaactgtcaacagagtgacaatactgactgacaagtttgggcagcctaaaggttttgcttatgtggaatttgttgaagttgaagctgttcaggaagctgttaagctgaacgagtcagagttgcatggccgccaactcaaggtggcaccaaagaggactaatgttcctgggatgaagcaacccg

SEQ ID NO: 64389 - DNA, 478 bp, Setaria italica
  Peptide Sequence Number=SeqID_130363
agatttagattcaaagtctggtttggttgcatcttgtcagccgattggttattgaattacatggaaatacaaatccactcactttttgtgtgatcacaactgcaggttgactatgcctgcactccagaagaagtacagcagcacttcaattcttgcggaactgtcaacagagtgacaatactgactgacaagtttgggcagcctaaaggttttgcttatgtggaatttgttgaagttgaagctgttcaggaagctgttaagctgaacgagtcagagttgcatggccgccaactcaaggtgtgaatcttgttatttcttgctttcactaagtacagctgacggtctatttccattttgctccctccattcccttattcttcaggtaaacattcgcattttgagattagtaccttgttttttcctcatcaggtggcaccaaagaggactaatgttcctgggatgaagcaaccccgcggcc

SEQ ID NO: 64390 - DNA, 216 bp, Setaria italica
  misc_feature (17)..(17): n is a, c, g, or t
  Peptide Sequence Number=SeqID_130364
taataagtactagtttntaattctattactattggtctacccttactattgtaggtccgttattggtttattagttcctttattggtcttattgggtaggtttcccctagtattttccgtccgtcccgtcgtcagaccttatttttgaagatcaggtctccatagagttgtcagcacatggaccatagtcggttcaaaattgaagaggaagctggg

SEQ ID NO: 64391 - DNA, 243 bp, Setaria italica
  Peptide Sequence Number=SeqID_130365
ccgaacttgccgtccttgaccgccggcatgtacgccagatcgttgatgtgcgggtgtccgtgccacggccggtgcggatgcactggacggggtgccccaacagctgcgcccaggtgcaggtcgccgacatcggcttcatgggatgcctcaccaagggcagcgacggcaaggtctgcgaggcggcggacatcttcgtcggcggccgcgtcggcagcgactcgcaccaggtcatcgcacggcacg

SEQ ID NO: 64392 - DNA, 258 bp, Setaria italica
  Peptide Sequence Number=SeqID_130366
ggtggggagcgggcggcgagctcgcggcgggggggaagatggggaggagaggagaggagaggagagggcgaagcggtggtggagaagcgggtgtccgtgccacggccggtgcggatgcactggacggggtgccccaacagctgcgcccaggtgcaggtcgccgacatcggcttcatgggatgcctcaccaagggcagcgacggcaaggtctgcgaggcggcggacatcttcgtcggcggccgcgtcggcagcgactcg

SEQ ID NO: 64393 - DNA, 226 bp, Setaria italica
  Peptide Sequence Number=SeqID_130367
aacatgatggcttggcatgtggaattgtagcttcagttccctcagttctgcgggcaggccatcatcgagaccaaggcgcgggcgctgcaggtgacgcgggaggtggagaagcgggtgtccgtgccacggccggtgcggatgcactggacggggtgccccaacagctgcgcccaggtgcaggtcgccgacatcggcttcatgggatgcctcaccaagggcagcgacg

SEQ ID NO: 64394 - DNA, 404 bp, Setaria italica
  Peptide Sequence Number=SeqID_130368
gagcgccctcacacaactgcaaccaaattcgtttcgctaccacagtgacgtgtgttgaagcattcctaactaagtcgccatcagtgtccatgtctattgaaagtcttgattgaatccgtccgatgttcttcttgcatcgtcaggtgcccatacaggtggcgacgaagctggcgtccatcaggaagcccaccttcctggcgccgtcgccggaggcgtacgcccgcgccgccgtccgacgcatcgggtacgagccgcggtgcacgccgtactggacgcacgcgctggtggggctcctcatctccctcgtccccgagcccatcgccgacaggatgttcctccacagaaacctcagcatccgcgccaggggccgcgccaaggacgccaagaagaaggcgactagtaga

SEQ ID NO: 64395 - DNA, 305 bp, Setaria italica
  Peptide Sequence Number=SeqID_130369
ttaacatgcaactgtctacgaccaagtaggcaagtacaatgtacaagctaaagttttatggtatttcagcaagttattaccattgtgcaaatgttttatgagaacaggtgataaaactagttgtggtttatttgccagctatgtcgatcaattctcgagatgcatgtatgtcgagtacaagagcaaaggcatcgacgtgcaatgccaggtgcccatacaggtggcgacgaagctggcgtccatcaggaagcccaccttcctggcgccgtcgccggaggcgtacgcccgcgccgccgtccgacgca

SEQ ID NO: 64396 - DNA, 480 bp, Setaria italica
  Peptide Sequence Number=SeqID_130370
ttttctagagtggacagatgatttggagggttttgttctaaaaggctatggtgagtcaattaactaccggatgggactgccattgctcaaggatgttgtccagtcaatggaagaagcaatcatagctaaagaagaacaccaccctgatggtacgtatgaaaaggcaaggctccgatttgcacacgcagaaactgttgttcctttcagctgccttcttggtcttttttcttgaaggctcagattttgagaagatacagcgggaggaagcattggatctgccacctatgccaccacagggaagaaactggaagggcagtgttgtagcccccctttgctggtaacaatatgctggttttgtaccagtgcccaggcaaaacatcggatggcagcaacttttagggaagtacaaaaataaactaacaaataaataagtaacaaattaacaaaagttaactaaacaaacaaaacgaaaataaccca

SEQ ID NO: 64397 - DNA, 240 bp, Setaria italica
  Peptide Sequence Number=SeqID_130371
cggtgttgtgcgtaaaagaaactaaaggaagacactgtacaccctccgcgatgcccattttattccaaaggagcacataatgtacaacacatactgaaacatctacaaacagcccagaaacgtgcagcctgtgtctaaccctgcttcttccgccccctgaataatggtgtgccaaaatgatcttacttctcctcgtattctacatcaatcacatcagcttctgctcttcgtgaacttcta

SEQ ID NO: 64398 - DNA, 316 bp, Setaria italica
  Peptide Sequence Number=SeqID_130372
agaagactacctacgccgtaacgtctccgcgtaggctcggcggatggcgcggtgctcgccaacgaggcggccaggaagtggcagcccgggaaccgcgtgctcgtcgagatcgcgtgcacgcgcggctccgcgcagctcttcgcggtcaggcaggcgtaccacgagcgcttcaagcgctcgcttgaggaggacatcgctgcgcacgtcacaggagacttccgcaagctgctggtgccacttgtaagtgcataccgctatgatggaccagaggtcaacacaaggctggcacactcggaagaccaaaatgcttcatgag

SEQ ID NO: 64399 - DNA, 221 bp, Setaria italica
  Peptide Sequence Number=SeqID_130373
gttagttcgtcttcttctgtatagcaaatggctgaagattatccttaactcccatgatgtgtggaagatcctgatgatgtgttctctaagcaggatcacaaaagccgctgtaaccaccagcagtgccctctgttttgacatgcatctgaaactccagacctcagctgctggtgccacttgtaagtgcataccgctatgatggaccagaggtcaacacaagg

SEQ ID NO: 64400 - DNA, 217 bp, Setaria italica
  Peptide Sequence Number=SeqID_130374
tccaattgtcatgaactcatattcaatgcactatttggtgttgtcaattgaatgcgacctctttttttctgcagggtgtagaactcgagcttcagaaacttgaagtggcagtccaggccattcatcagaacttgatatacctcaaaacaagggaagcagagatgcgaattgtgagcgagaaaacaaacgcaagggttgcctggttcagtattctgtc

SEQ ID NO: 64401 - DNA, 254 bp, Setaria italica
  Peptide Sequence Number=SeqID_130375
caagtgactaaatgggaatcaataccctgagcagctgagcttcagtggtaactccaagagaatcaataccatatcttggaggtgacgaacaggtcttctcgcttgacgacgccatcagcgaagactttcttcagagcaacaccaatctccttctcgttgttgtacagggacgcgcagtcgatgtgccggtacccggccttgacggcggcggcgatcgcgtcgccgacgacgccggggccggccttgtaggtgcc

SEQ ID NO: 64402 - DNA, 204 bp, Setaria italica
  Peptide Sequence Number=SeqID_130376
taactaaagtaagtactttcctaactaagtagtattaatttttgtacttgtattaacttcttgtattcgttgtctattcagttttcagaaatatcagaaaatgtaaatcattctaatgatcaggatgatctcaggcttcagattgaaaggttgagggacaaattacaacattttcataagctacatgaatgtgctcagcaagaa

SEQ ID NO: 64403 - DNA, 268 bp, Setaria italica
  Peptide Sequence Number=SeqID_130377
ttttcctgccgtctcagccttgccccccaaaagaattttgctatcttcagatgtgccgccaaactcacatctctgacatccccattgcaatcgtgctggacagagctaagggtacgtaccaggacgccggcggtcttgttgtcgaggccggtgccggcggaggcgaagcagacgccgcgggcgaagtcctggatgccgtaggcggggtcgaggtaggccgggaccagcggcggcaggccgagcgcctcggagatgaagtccggcgggg

SEQ ID NO: 64404 - DNA, 410 bp, Setaria italica
  Peptide Sequence Number=SeqID_130378
agaagggggaacgacgacggaaacgtggccgcgtaacctctggaacaactacctcggcggcacgtcgtcgtcccggcccctcggcgacgccgtcctcgacggcatcgacttcgacatcgagctcggcgccgccaaatactgggacagactcgccagggacctgaagaacatgggcaagaagcagcagggcggcaatgggggtgctcctgagcgcggcgccgcagtgcccgttcccggacgagtgggacagcggcgccatcaaaacggggctcttcgacttcgtgtgggtgcagttctacaacaacccggagtgccagttcagctcggggcgcagcgcgttcctggccgcgtggaagcagtgggagtcggtgccgggcggggaagatcttcctgggactgccggcctccaa

SEQ ID NO: 64405 - DNA, 377 bp, Setaria italica
  Peptide Sequence Number=SeqID_130379
cccggcccctcggcgacgccgtcctcgacggcatcgacttcgacatcgagctcggcgccgccaaatactgggacagactcgccaggtaaaatcacgcacgcgctggcggagttcagcacacgatcctgagtcctgttatggctgcgcgacatgcagggacctgaagaacatgggcaagaagcagcagggcggcaatggggtgctcctgagcgcggcgccgcagtgcccgttcccggacgagtgggacagcggcgccatcaaaacggggctcttcgacttcgtgtgggtgcagttctacaacaacccggagtgccagttcagctcggggcgcagcgcgttcctggccgcgtggaagcagttgggtagttcggttgtct

SEQ ID NO: 64406 - DNA, 221 bp, Setaria italica
  misc_feature (163)..(163): n is a, c, g, or t
  Peptide Sequence Number=SeqID_130380
tgttggtcagcaatcagcatgtactggcttggtaagcagagggcacattaagaaacacattggcacctatgctccgtgcgttcgatcccaaactgtaactccattcttaaaaccgtcctagagacaatgggactcagctcccagcagagccaattaaatttanaaagaaatggctagtcctgtcctgcatcaagtatgaatgaatacagaagagcatagct

SEQ ID NO: 64407 - DNA, 194 bp, Setaria italica
  Peptide Sequence Number=SeqID_130381
ttgttgttcatttttcacttgttcatcttgtccctgtgaatttcctccagtcttcttctcatctctagctttgttaaatattacagtaaatccctcagctgaagcagggtcgttgacatcccactccccaaacttgggcagagggcttcctttttcctatttgagtttgtagcatctcttatcatatgtcaata

SEQ ID NO: 64408 - DNA, 314 bp, Setaria italica
  misc_feature (1)..(32): n is a, c, g, or t
  misc_feature (41)..(41): n is a, c, g, or t
  Peptide Sequence Number=SeqID_130382
nnnnnnnnnnnnnnnnnnnnnnnnnnnnnnnnaggtagccncaacggatccataagatcgaatgtagttgtcatcagaagtacagcatatatacactttacaggccaaataatgcttaacagcttgcatcacttagcaaaaagaataatatctgctccaaacatctcgatcagctttgaagaaatcaaatagcttcaacagcagccatctcttccagaattcgagccaaatgtaacaatactaaaatttgagcaatgggcaatggctatcgcggaaccatatcctggtgttatcatgatcccagtgtaccacca

SEQ ID NO: 64409 - DNA, 514 bp, Setaria italica
  misc_feature (499)..(499): n is a, c, g, or t
  Peptide Sequence Number=SeqID_130383
gtctcccgtgtcccgtgatttgattcgggagacgaggtcattacacacgaagcgcgcgcgggggcagtgggaccggggaattatttggcgacgatgcggcggatgaagtcgtcgtagcggatggtgccgtcgggcgcgacgtcgacctcgcggatccactcgtcgaactcgtcgacctcgcggatccactcgtcgaactcgtggggctcgagcttctcgccgatggatgtgaggacgtggcggaggtcggcgacggagacggtgcccgaggcgtccttgtcgaggacgcggaaggcgtcgcggagcgggcggtcgaagggctcgggcctgaggtgggcgcgcatgaggtcgaggaagcgcgggaagtcgaagggggccgtgagcttctcctgcgccgcgatgtcccggagctgcgcctgcgtcgggttcccgccgagggagcgcatgaggacgccgagctccgagggcgcgatgcggccgtcgccgtccgtgtcgaagngcgagaaggcctccc

SEQ ID NO: 64410 - DNA, 396 bp, Setaria italica
  Peptide Sequence Number=SeqID_130384
ctagtcagcttctccattggctgacgcctcatctctccctcaccaatcccctctcatcaatgcatgcccttaacactacactgtgcgaaccagaagcagaaggtcaatttgaaagcacaaagtatcataaactgtaccagtgaaggactctcgtaggtatcaccaagtccaatttcctcaatccaccagcagcagttaaagaaacttcaccagaagcgcctgagaaaacgttgcactggatctgaataatgcaatgattattcagttaactacatcggtaatgcatgagattgtgcaactgacaaaaaagtataaagaatattagtctacttcacaaggaaaaggagtgaaaggccatagctttagaatacatcaggaaaggttaggatcaatgat

SEQ ID NO: 64411 - DNA, 392 bp, Setaria italica
  misc_feature (357)..(357): n is a, c, g, or t
  Peptide Sequence Number=SeqID_130385
acaagaccccaacaagtgcgatgtcccagcttactgtcccagtccaaggtacgaattcaaaaaaatttccatcacagtgtattccaatctgcagaataaaaacgagagtccttatacatgatatattggatttgcttttttaagaaaggttatatattgatgtaacgacccagcccaggaaaacagctagttaagttggcctcacactcacttggctagcagtatgggactatcccatacatgctacctttggtggagtggccgcatggccattttggcccatgggcctcacaattgatgccttcatgcgtacgccagtgaaggactctcgtaggtatcaccaagtccaattttccncaatccaccagcagcagttaaagaacttcaccaga

SEQ ID NO: 64412 - DNA, 264 bp, Setaria italica
  Peptide Sequence Number=SeqID_130386
ggtccttgtgctcgccggacttgtcgccgtgctcgccggtgatcttgtccttgatcttgtcgacgatgccctccttgtgctccccgtccttcttgtggtgctcctccggcaggggcaggttgctcagcagcgtgactctggattccgcgatctgagggcccttctcccccgtggatggatccatcttccacagcttcacctcccaaacctgggtggagcggccgacgtggacggggagggcccgcgcgaggacggtgtcgccgg

SEQ ID NO: 64413 - DNA, 329 bp, Setaria italica
  Peptide Sequence Number=SeqID_130387
tttcccccgatttttttcgctcatttttccgagcttttcaagagcagaagaggcagtttcgaattccgatgcaccgaagcctcaagatccaaatttgaggcctttcccaagctctccgcgtcgatctgcgcaagaggatgggtaacgcgggcagcaacggtggaggcgccgctcctggtcaccgccgtcggagctccagccacggccacggtcaccaccaccaggcgccaccgcctcccccgccgcaggaggctgcgacccaaccgacttaacgttagtttacgtacggtaccgttaccttaacgttaccgtttaacccgtttaactta

SEQ ID NO: 64414 - DNA, 420 bp, Setaria italica
  Peptide Sequence Number=SeqID_130388
ctagggctttgggggattcgctgctgcgatagagtcccccaatcttgggtaatgaatgtcgtgccaactattgcgaagatgcctaccctgggtgctgtgtatgagctaggattaatcggcatataccatgactggtatgacattttacactcaaaatatgtactaaaaaagtaatgttctaatgggcatgaactttacaatttgatgcaatgtatgccaggtgtgaggctttctctacttatccaaggacatacgatcttatccatgctagtggtcttttcactttgtataagaacaagtaagctattcttgccttctgtagcgaatccattgctctaatttcctgtgcttatccattttatttgttgaaactaacaataggtgcagcatggaggacattctcctggagatggaccgcat

SEQ ID NO: 64415 - DNA, 329 bp, Setaria italica
  Peptide Sequence Number=SeqID_130389
atgctgtcgaagggggtgtattctagaaaccttgaggccttctcatgcaagcacacttcgacagaccgtcggctttcaataagcctagaacatgaggtacatgcatttcagacccatgaattatattaccactgagatcatttttcttccaacaacgccatgaatcagcacatgtaactttgtcctctctttggaatcgtgtgaatagtgtgaaacaaagtattgtgattgaccacatcctttcagatagttctttgagccctggttgtgttcactcctgtttgggcttctatgcctcccctcactttgcttctagatatgctttgttt

SEQ ID NO: 64416 - DNA, 254 bp, Setaria italica
  Peptide Sequence Number=SeqID_130390
tgaacgttgcaaatggcatatcacagttgtagtttgtatgttgttgtttcgtgtaatgtatctccctagtaattgtagagcattttacggggagaccaaacatttcattccaaccatttgcttgttttttatttaacagcacagaattggtgcatgttattgtaattatgccaatctaacttctctgttgtgctttcagattcttgattacctaggcaagtcctctgacagtgatccttcttcaccagtggagc

SEQ ID NO: 64417 - DNA, 347 bp, Setaria italica
  Peptide Sequence Number=SeqID_130391
agctctgttagtacttcatattcggttctatctctgtttgcacaaactatgcctaattttatacttcgcgctgttgcagtcttttgccctgatctctgcggtgtcattgcaaaacaagatggtttccttcgagatgaatgacctcaagaagattgggcttggcctgacaggttttggaatattcttctcctttctgggaataattttcttctttgacaaggggctcatcgcaatgggcaatattcttttcctgtcaggattgggtttgacaattggtctaaaaatcaaactaatagacaaattacttacaaccaaagacctaaagaaattaacaaagggtacaatct

SEQ ID NO: 64418 - DNA, 273 bp, Setaria italica
  Peptide Sequence Number=SeqID_130392
caatctcatttggtgtttggcttttttcctagtcctcatcgggtggccctttttcggcatgctcttagaggcatatggctttattgtactcttcagtggattctggccaacacttgtagtgttcttgcagaggattcctatcatcggctggatatttcaacaaccgtttgtgacatcgttccttgaccgctacagtaggtaaagtcgggttttccggtctagcatccattttgctactgccactaaaaaacatcatgtgctagttactacgcc

SEQ ID NO: 64419 - DNA, 387 bp, Setaria italica
  misc_feature (290)..(290): n is a, c, g, or t
  misc_feature (371)..(371): n is a, c, g, or t
  Peptide Sequence Number=SeqID_130393
acgactagttaactagacaactaagacaaaattaatacaaggaagaatagaacttacctaactggtgcggcgtctgatggtgaagaggaagatgccttgatcgacatggacatatgactgaccgcattctgctcggaacctgttgtgtgtgtaatatagagcgttatgccccattcctgccaggaagcttttaatataactacccttgtatcgcagcctgtgaaaaccatggcccttgttagtgttgtttgtatatgcggattgggacttcgcagcggcagacttttaancctgaaagcttgagctgccaggtaatttggtactctagtgtttgctggaactggatctatgttctgcctggttaacatagntattcagacaattggg

SEQ ID NO: 64420 - DNA, 217 bp, Setaria italica
  Peptide Sequence Number=SeqID_130394
acttataactgaatcaagagcaagataaaagatgatttcactgatagtgatgccaacccaatgttggcatgcaatacttgtggctgcttggagcattcattaaagatgctaatatgtgattcttgtgaagcagcatttcatctgtcttgttgcgcccctcctattaggtttcttacacaagcatggcgcacagtaccattcatcagttggtagttcc

SEQ ID NO: 64421 - DNA, 406 bp, Setaria italica
  Peptide Sequence Number=SeqID_130395
tgttaaaaaccgtcactgcaaatgcatttgtgtttgacgggtgatgtaaccacccgccagcacaaatgcatcgtaatcactcgccatcataaatgtatttcaatttatattgattggaagggctaaatgtttctaattagccaaaaacttaatcgtatatgtcccaatatatttttgacatgtattactgagatactttttcctgaggatatcctgccataggcctttctcattaaaaaagtttgaacaaccacttactcagtaaacatttatctcttcttgcagtaggagtagtagtagttggcttgttgctgatgctaacacaggtgagctgatgctttctgcagcatggcccgaacgagtgcctgctcaacaccgtggaagcttgcgccatcgacgcctggcc

SEQ ID NO: 64422 - DNA, 247 bp, Setaria italica
  Peptide Sequence Number=SeqID_130396
atcccattgagatagaaaggatcagtagccgcgaaactgtttttctgatggttccaacagtgaccacccaagttgtgattccaactggccgcacgccactgctgttgaagtttaagtattcaaggacaggaacgttggtgttagcaatgcttacagtttggaagatgaggctgaagaggacaagagggaatagctattttcttgtttcttttggcttatgcccaggccccagaagacaagtgattta

SEQ ID NO: 64423 - DNA, 257 bp, Setaria italica
  Peptide Sequence Number=SeqID_130397
cggccagggccagcaccacacgcaacaaggacaccgtgaaattccaggttccgttcagggtttacccagaaaagcaaggggaaaagcacacgcggacgcctcccggccgggcagcatgattgctccccatccccggcgtctactcctcctgcggtgattagcactgaagtgtgtgtctagcacatagggccaatctggatcatcagaggatggccttctgattacttctccttgcttgcagccctctagtttagcgg

SEQ ID NO: 64424 - DNA, 368 bp, Setaria italica
  Peptide Sequence Number=SeqID_130398
caacctacgaccaagggtacttacgaaggaacggacctacctcgacgccgtcggcctcacgctcgtcccctacggcaacgccagggtccacgccggcggcgagatcacctgccagcatggcccgaacgagtgcctgctcaacaccgtggaagcttgcgccatcgacgcctggccggatttggacgtgcatttccgtttcatctactgcgtggaggagctggtgatgaagcgccagtacaagaagtgggactcctgcttccaaaagctggggcttgaccccaagcctgttactgactgctacaagagcgaacagggccacaagcttgagctcaagtacgcgaaccagaccaacggctctcgtgccgccg

SEQ ID NO: 64425 - DNA, 401 bp, Setaria italica
  misc_feature (240)..(240): n is a, c, g, or t
  Peptide Sequence Number=SeqID_130399
taaggaaacgtaagaacaaatttaccgtttacaatactaactgacgtaggaaggagctggtgatgaagcgccagtacaagaagtgggactcctgcttccaaaagctggggcttgaccccaagcctgttactgactgctacaagagcgaacagggccacaaggttcgtcctccaatcttcatcggctctagcttatgctacctctttgtgatgttgtgcgaatttcaacttccatcccgtnacttcaatgttcaatcacaccgttaacttgcatctcgtttattccgtccagcttgagctcaagtacgcgaaccagaccaacgctctcgtgccgccgcaccggtacgtcccatgggtggtcgtcgacgggcagccatgctagaggtatgttacagttccaca

SEQ ID NO: 64426 - DNA, 241 bp, Setaria italica
  Peptide Sequence Number=SeqID_130400
tatggttgttctcatgttatgctctttctagcaattcttgtccgcttgctcctggtgcacatgccgtaacactacttgtttccccagctcaaaggttttgaattcatcaaagatgtacacctcgaaccagtgccctttgatatggatcgtgacttgatcactccgacatataaaaagaaacggccgcagttgctcaagtactaccaggtactgctcattgcaatattgttgcagagtagct

SEQ ID NO: 64427 - DNA, 382 bp, Setaria italica
  Peptide Sequence Number=SeqID_130401
ctctgttcaatcttgcttacaagttcaagcagtttagaatgatgagagtgctctttataaaaccaccagaggaaatttttagcttgtagtccagaaaatatcctctggtggttttataaagagcactctgttcaatcttgcttacaagttcaagcagtttagaatgatgagaggagctaagcacgatgaagctgctgccatatgtgacaaagtagtttttagtaaggtgaaagagggtcttggtggcaatgttagggtcattttatctggagctgctccacttgctacccatgttgaagaatacttgcgagtggtgacgtgtgcacacgtcatacaaggatatggtctcacggaaacttgtgctggacatctgattcggtaa

SEQ ID NO: 64428 - DNA, 451 bp, Setaria italica
  misc_feature (47)..(47): n is a, c, g, or t
  Peptide Sequence Number=SeqID_130402
aggagtgttattttccatggtgcctcattgggttttggcgtggggangttaagctgctggttgaagatattggtgttctgaaaccaacaatcttgtgtgctgtcccacgtgttcttgatcggatattttctggactacaagctaaaaatttcctctggtggttttataaagagcactctgttcaatcttgcttacaagttcaagcagtttagaatgatgagaggagctaagcacgatgaagctgctgccatatgtgacaaagtagtttttagtaaggtgaaagagggtcttggtggcaatgttagggtcattttatctggagctgctccacttgctacccatgttgaagaatacttgcgagtggtgacgtgtgcacacgtcatacaaggatatggtacactttttgtgatgtgaaaagaagaaattccttacttctttgttgtatttggtt

SEQ ID NO: 64429 - DNA, 223 bp, Setaria italica
  Peptide Sequence Number=SeqID_130403
ggcgggcgagtgggcgccaagtgttcgggcgcggtggcggtggaggttgttgttgcgttggtgcgctgggcggatgctggagtggaccggctacttaactgtgtaaacgaggagctggcagaaagtgatgtttacatgtcttaccttcctctcgcgcacatctttgaccgtgttgtggaggagtagcttaacatccccacgccaaaacccaatagaggcacca

SEQ ID NO: 64430 - DNA, 397 bp, Setaria italica
  Peptide Sequence Number=SeqID_130404
ccagtttacccctattagtctgttcaatttatgaatgagcatgtttcatttctgctcttactacatgaagtattggtaggtgaggtgttttagtctttcatataagctcatgcgtgaatgtggtgtgtagttcttggtctatctattggagcagtttgcttttactgttaaaaaggctttgagactgcaactgtgtgtacaagtttgagtgtccatgggtatgctcttctcacatttacctaatttttcaggactacaagctaaaaatttcctctggtggttttataaagagcactctgttcaatcttgcttacaagttcaagcagtttagaatgatgagaggagctaagcacgatgaagctgctgccatatgtgacaaagactagtgcgactgagt

SEQ ID NO: 64431 - DNA, 394 bp, Setaria italica
  Peptide Sequence Number=SeqID_130405
taaaagaagacaactactagttacaatacttagacttaacaagttcaagcagtttagaatgatgagaggagctaagcacgatgaagctgctgccatatgtgacaaagtagtttttagtaaggtgaaagagggtcttggtggcaatgttagggtcattttatctggagctgctccacttgctacccatgttgaagaatacttgcgagtggtgacgtgtgcacacgtcatacaaggatatggtctcacggaaacttgtgctggatcttttgtctcgttaccgaatcagatgtccatggtagggactgttggcccccccagtgccaatattgatgttcgtctggagtctgtcccagaaatgaattatgatgcacttgcaagaacagctcgtggagag

SEQ ID NO: 64432 - DNA, 378 bp, Setaria italica
  Peptide Sequence Number=SeqID_130406
agaataacacttataagggtcacagaacaatggagctttaagtgacatcacatgataatctcaaataatgacaataaatatcataacaaaagcattagtaaaaggttccttaaaacagttccagaaggagatagcaaatattccgatgcctgctgagccagtaatgcttcatgctttcttaagcatgcaacctctgcaaaggtcacaacagcacacagcaaggttaagatgtgagtcccaaacttccaacaagaaataaatcaggttggtataagctccaagaaagatcaagccttttgccctttgttggaagaatcacccaaagcttaggactacaataatacaacttacaatttactagaacaataaacttaatta

SEQ ID NO: 64433 - DNA, 270 bp, Setaria italica
  Peptide Sequence Number=SeqID_130407
ggctgatatgtaggatagtatgtggagtaactataaggtggtggagggtacattggtggtgcatttggtgcgccaccaatgtaccctcctccgccaccagctagtgtcgatccctctcagagtattgcaacggcaccttgggccacccacaatgcagtgccaccaccgccaccacctttgtcctccaccaccgaccagccagcttcctatggtgctgatgcggagtatgataagtttatgtcagaaatgaagtgatatgagccaagcttg

SEQ ID NO: 64434 - DNA, 253 bp, Setaria italica
  Peptide Sequence Number=SeqID_130408
gactgatcaatcctgcatcatccatttgtaggtggcaagtaaccaatatacagatttgtctcgtcgtagtctttcttgataccattggcccccaatggcagccgcaccaccaccagcagaccaaggcgggttactcccactaccagcagaagcgccaccgctgccaccgcttcctgtaagagccaacatgggaccaccagatttttgttctattggtacttcaggttgtctacttccctacctacctaagtct

SEQ ID NO: 64435 - DNA, 146 bp, Setaria italica
  Peptide Sequence Number=SeqID_130409
aactcatcatccctaattgtcccattgagcgcggcaagctcccgaagctgctgcctcttgtgctcgttcagcacctcatccaccggggttagcagctgaacgagcacaagaggcagcagcttcgggagcttgccgcgctcaatggg

SEQ ID NO: 64436 - DNA, 197 bp, Setaria italica
  Peptide Sequence Number=SeqID_130410
acgagaagtactcggagttcgacgacgagtccggcggaaggcagcggcgggcgcgccggagggccgagcgcgagaggaagaggcgaaattgactgaaacctcgcctcgcctccatgttctgcctgatcgagaggaaacaagaacagggcgaggatggtacacacatactcgtagagccatttaagcacgtcgctgga

SEQ ID NO: 64437 - DNA, 376 bp, Setaria italica
  Peptide Sequence Number=SeqID_130411
gacgacatcaacgacctcgagcagcagcttgagtacgaccgtcaacaaagtcgcgcaagaaagcatcagctcctgaaccaacagcttgacaacctgcgtcgcaaggtaatccacaatccaacaacaggcgtatacgcatgatcatatgagtgatatctgtctgttctgaatgcaatttggtctatcaatggtcaggagcacatcttggaagaccagaacaccttcctgtaccgaatgatccacgagaaccagcaggcggcgctgggcgccgaggtgaagctgggggagatggcgccgctggcgatgctgccgccgccggcgttcggggcgccgcaccccggctgctactacggcggactactcacactgagtcgga

SEQ ID NO: 64438 - DNA, 258 bp, Setaria italica
  misc_feature (215)..(215): n is a, c, g, or t
  Peptide Sequence Number=SeqID_130412
caggatcagcaagtatttgtggagatgacgcagatgaagaacgagatggacaagctggagacgggcatcaggaggtacagcggcgacgacctctcctccctcaccctcgacgacatcaacgacctcgagcagcagcttgagtacgccgtcaacaaagttcgcgcaagaaagcatcagctcctgaaccaacagcttgacaacctgcgtcgcaaggngcacatcttggaagccagaacaccttcctgtaccgaatgatcc

SEQ ID NO: 64439 - DNA, 246 bp, Setaria italica
  Peptide Sequence Number=SeqID_130413
agtataaagtatagcacaaaatgatgtaacagattacatgttcgaatttaaggattgatctttagttcaagttggaatcagagtggtttatgatgccgggggagttgatgctcacctcggtggccctctttcgcagcgacgtgcagagcatcgaatccggacttgttcttccttgtgaggctctccttgtcggagtgcttaagcagctcaacgacgatgtcaagaaaccccttctcggcggcgatg

SEQ ID NO: 64440 - DNA, 285 bp, Setaria italica
  misc_feature (1)..(32): n is a, c, g, or t
  misc_feature (274)..(274): n is a, c, g, or t
  Peptide Sequence Number=SeqID_130414
nnnnnnnnnnnnnnnnnnnnnnnnnnnnnnnnccgaaaaactaaaaaacaaaaaccaaaaataaaggtaacaaataacgttaaccgaccaaggacaactagtaaagattgcagcaaatgccaccgtagcgaagagcacagccacaacagtgaccgaattcgttgcattgttgatgccttccctatggagtttccttagctcctttgcgataccatagacatttttgttggtttttcttggcctgctcaagctgagtatgcacatccttttgtanctcggtcactg

SEQ ID NO: 64441 - DNA, 379 bp, Setaria italica
  Peptide Sequence Number=SeqID_130415
gttccgctaagtctataatgtgaacaccaaaccccaaaactagctggctaccaacttcaagctaaaacactagctgattggaataaacggtatgctcaacacgttttcatgctagtgttttccctcttttagatcacggaaacacccaccgcccagcacactgacatgcccaataccacatataggtatcaaaatcaacattttcagagaatcacggtttgttgtgtgcatggatggatgcatgtgcaacatgatgaggagctggagcattctcgttaatcagaatttgttccggaaagtccaactcgtaattagaatactagaaactagaataagacaacttagtacttaaccaataactaacaagaaatacctagga

SEQ ID NO: 64442 - DNA, 368 bp, Setaria italica
  Peptide Sequence Number=SeqID_130416
ttcatgctagtgttttccctcttttagatcacggaaacacccaccgcccagcacactgacatgcccaataccacatataggtatcaaaatcaacattttcagagaatcacggtttgttgtgtgcatggatggatgcatgtgcaacatgatgaggagctggagcattctcgttaatcagaatttgtccggaaagtccactcgtattgatctgaactgatagcacttgtctttccatgatgcatccaggattctgtagtatggttcgtataatatcactcgatcaccctctttaatctatggcagagaagactgcatcattccgtagcccatagactgaaagtataaaataagactgatccaagtcacat

SEQ ID NO: 64443 - DNA, 249 bp, Setaria italica
  Peptide Sequence Number=SeqID_130417
cttacgagacttctgaatcatcagaagatcctactactagatcgcgtccatcttccatgtcatcatcacattctgaggcagtggaagcagatacccaatcatttactaagccatcagtgaatgaggatgtttacaattgggctccctcaagaatttccaataatgaatcagagggagcttttgcttacagtacccgtagaacgggtccaccaaaggcttttcttaggaaaggcaatgggactcaccctg

SEQ ID NO: 64444 - DNA, 191 bp, Setaria italica
  Peptide Sequence Number=SeqID_130418
aataggaataaggaagcaaacagatgtcttttggttttgggtggaagcaacttctctgacttaagaaaagaaaatacaaggccttcacctggactcagaagagcaaccaccagggttcagcaaaaatcatttgcccgtagcaagagcattattgaagagtcaaagagtatcttgaaagaagatcaatcaag

SEQ ID NO: 64445 - DNA, 202 bp, Setaria italica
  Peptide Sequence Number=SeqID_130419
atctgcagaccgagagaatttggctatcatctcagccttgctccgttctaggctctcatgcattgcctttaacattgcttcctgctcctatccataagcgttcgtcaaggactgtcagctccagttatgcaaaccgcaggaatccaccagaaaatcctcttgcacagtctgtccccaacttttcttaagtcagagaagttga

SEQ ID NO: 64446 - DNA, 247 bp, Setaria italica
  Peptide Sequence Number=SeqID_130420
tactacccagctctttactcaggttaccgtactacagcatcacttgattccttatacgcgccatttccttttggaggcaaggactagcttcaggaaaggctggaacatctaggcaaccaatagatgaagagagcttccaagaggatactgaagatgtagaagaacaaccgttagtcagacgtcgttctaggcgtgtcccatctgaaaacactgagtcagcacaaatggtgcaaccaggccctcctag

SEQ ID NO: 64447 - DNA, 455 bp, Setaria italica
  Peptide Sequence Number=SeqID_130421
ccaccagaatcagatgatagagcatctcacgtgatgattgcccgtagtggagcccaaaaccagtaatgctaaggagtcaggtgattcaactgctattgtggataagagtgcaaccgacaatacaaaggaagtaacatatgtgcaagtgatcctaaacaagtaaaggacaaaccaagtgttgaggtggaggctcgtgatgattcatcttcaaaaggcaaggatgagctcaataagactgaagatgcagttgcttcaccagctaacgtacaggaacaaaagcaaagtgaaacattggaaaatggcaaaatgggagaacctaacagcatcgaaagtgtagttgccaatgaagagaagggctctggagttaccgctaaccagaatgattccattacgaggctcagacgagcagctagtcctacttgtcttattttcttagtcttagttctttgttcttt

SEQ ID NO: 64448 - DNA, 348 bp, Setaria italica
  Peptide Sequence Number=SeqID_130422
gagaacaatgagaaagaagtataattctttatctatggaaaaagcataataattcatccatctcacataatgaccaccaagatcagatgataagagcatctcacgtgatgattgccccgtagtggagcccaaaaccagtaatgctaaggagtcaggtgattcaactgctattgtggataagagtgcaaccgacaatacaaaaggaagtaacatatgtgcaagtgatcctaaacaagtaaaggacaaaccaagtgttgaggtggaggctcgtgatgattcatcttcaaaaggcaaggatgagcttcaattaagtacttgtaagtattgtctagtttgtctttctaccta

SEQ ID NO: 64449 - DNA, 170 bp, Setaria italica
  Peptide Sequence Number=SeqID_130423
gccaaatcagcctggtgtagctggaagcagattaccgcctggatatggcaaccccgctgtaaggccgccaaacgcaatgccgctgtaaggccgccaaacgcaatgccacggcccagcagctgagaaatccggattccagacacctatacttctaaaagaatgaagtatag

SEQ ID NO: 64450 - DNA, 455 bp, Setaria italica
  Peptide Sequence Number=SeqID_130424
aagaaccctacctaccgacgacgctcgcaaactcggggctcatcgagccggcctcccaccgcctcgaggatatcgacgcgtgctccgccgagtgcgaggtccacatcgcgcaggagtggctcgagaagctgccgccgccgtcctacgaggagcggtacgtgctcacccgcgcgtccaggaaccgagagctcaacaagcacgcgcgcctgggctgccaggtcgtcctcgcgcccgagctgcaggggatggtcgtcgccgtccccgagcccaagccgtgggacatcccgtaatgacgtgccttgacgataggcaaggcagaaaggcataactaaaacatcaatcctccgtttgtacttagagttcagagcttcagatgctgtaatttgtggtgccctgatgctgctcagactgcagaacctgaaatgggtggcgctgagtgtattttgcttgctatt

SEQ ID NO: 64451 - DNA, 253 bp, Setaria italica
  Peptide Sequence Number=SeqID_130425
aacaagcacgcgcgcctgggctgccaggtcgtcctcgcgcccgagctgcaggggatggtcgtcgccgtccccgagcccaagccgtgggacatcccgtaactgacgtgccttgacgataggcaaggcagaaggtgcggctttgacgctgtgagccttccttcattccccaggctctgtgcagctgtgccatccctttatgttacggtttgctcatacaaataacaaattaaattaaacttaaacaaataaacaa

SEQ ID NO: 64452 - DNA, 387 bp, Setaria italica
  Peptide Sequence Number=SeqID_130426
cggccggccgctgcggatcggcgtgccgtaccggacgacgtacaagcagttcgtgtccagggacccgtcgggggggcccgacggcgtgagcggctactgcgtcgacgtgttcaaggcggccgtggagctgctcccctacccggtgcccgtgtccttcgtcctcttcggcgacggcgtcaagaacccgagctacggcgagctggtgcagcgggtggccgatggattcttcgacgcggcggtgatggcccacatccccggcgtgaagggcttgaggaaggcccactcgttggagctcttggccttcaccggcgacacgatcaccagcccggactccacgtacggctgcgtgaagtccaccacgcgcgtccggttcgtcacgatcgagat

SEQ ID NO: 64453 - DNA, 259 bp, Setaria italica
  Peptide Sequence Number=SeqID_130427
gagaagctgaaccagaagattgtgaccatctgcttcctcggcgaccccctgaactccgggttgaagcggtgctccaggatccacaccacggcgccgacgaacaggaagaagccggcggtgatggcccacatccccggcgtgaagggcttgaggaaggcccactcgttggagctcttggccttcaccggcgacacgatcaccagcccggactccacgtacggctgcgtgaagtccaccacgcgcgtccggttcgtcacga

SEQ ID NO: 64454 - DNA, 200 bp, Setaria italica
  Peptide Sequence Number=SeqID_130428
ccgccgcctccgtcaacgcctggtcgggacggccagcctcatgcccctgctcggcgccttcctcgccgacgcctacctgggacgatacaaatccatcatcatcgcatgctccctctacgtcctggtatttctttctggctgctgctcctctccctccttccagtcgtagacagaggccggcaatggcaaccacagcagag

SEQ ID NO: 64455 - DNA, 391 bp, Setaria italica
  Peptide Sequence Number=SeqID_130429
tacgaaacgccaaactgggagcaggtcccggcggcgctgcccgtgatcatcttcacgctggtcttccacgacatcgcaccagtgatctgcgcgtacctggaaggggatctcgcgaggatccggctatcgatactcgtcggcagcctcgtgccgctggtgtccctgctggtgtgggacgacatcgcgctcggcctcgccacggacctcggcgggtttgacgttcaggacatgttaaaggcagaatggagctataccgtggtggagactttctcgctgctcgccgtcgggacgtccctcatcggaacgctgcttggggcttctcagttcttcatcgagcagatgaccgacctagtgtcttcatcaaccaaagaacatagtaaataataaaagg

SEQ ID NO: 64456 - DNA, 359 bp, Setaria italica
  misc_feature (137)..(137): n is a, c, g, or t
  Peptide Sequence Number=SeqID_130430
cagcctcgtgccgctggtgtccctgctggtgtgggacgacatcgcgctcggcctcgccacggacctcggcgggtttgacgttcaggacatgttaaaggcagagtaaggacgccgcggtaccaagaacgtgcctgcanctttttcggcaatctgcatcgctgctcaacgcttcagatggagctataccgtggtggagactttctcgctgctcgccgtcgggacgtccctcatcggaacgctgcttggggcttctcagttcttcatcgagcagatgaccgacctagtgtcttcatcaaccaaagaacatgtaaatataaaggaaatagaatacaaacaaaaggtaactaaattaacgtaaa

SEQ ID NO: 64457 - DNA, 402 bp, Setaria italica
  misc_feature (1)..(83): n is a, c, g, or t
  Peptide Sequence Number=SeqID_130431
nnnnnnnnnnnnnnnnnnnnnnnnnnnnnnnnnnnnnnnnnnnnnnnnnnnnnnnnnnnnnnnnnnnnnnnnnnnnnnnnnnnagtttttgtagcaatgtagtctcatttctttttccattggagactccgcattagttcccacgagacaagctagaaaaaagagagaaattctcataaaaattaaaaacatcaaacgccaatcgtgtaaactctaataatcatagccatcgatctattataatttttaaaaagttacccaccactatcattgtgaaaatattcaaaaatgagctctaaacctatatctaaattaccgagctcagctattataaacataatcttaaagttaaccttctattaattctttcttatttccttaattttttacttttaattttta

SEQ ID NO: 64458 - DNA, 328 bp, Setaria italica
  Peptide Sequence Number=SeqID_130432
gagagagcacagatcagcaccccatgacagcacagttataaacaaagttaccagaaggtttgcttccgatcatgttccattgcaatggcccttcccttgggatccaagaatggagttcaatcatcccaccacccaacactcttggtccaccgataaccaaaagccgctctccacagccccggaatgcaataccccagccattcacagcttcaggtcgctctggtaactcacccaatgttgtccatgagttatacgcagcacagtacgcagggaagctagtactgtgctgcgtactgtgctgcgtataacagtacgcagggaagctagt

SEQ ID NO: 64459 - DNA, 222 bp, Setaria italica
  Peptide Sequence Number=SeqID_130433
cccttgagatcaaccaggacctggcaacaagactgcagggtccaagtaatgacactagaggcaccatagttcgcgtgccgaatggcctccgtctacgtctagcggcgcagctgaatctgaacaccacgaccgcgacgcaggtacctgttgtccggcagaagggtcttgctttgtcgtcccggctgcgcctgccctgtttcatgctcttcatcttgtaactgc

SEQ ID NO: 64460 - DNA, 290 bp, Setaria italica
  Peptide Sequence Number=SeqID_130434
gaatggccaaaagctggtttgtcccttcaaatgaacaaataagtcccaaattagttcaccttttagctatatggaatcagcgattgattagtgagaaagatatacgttaaacttaccagaaacaaattgaagctatattacaatccagtgtgactgacaaacaagaagcagataaaaactaaagcatccagtgtgagatgtagaaattttgaagattacaacatgaattatttaaactaacttgaacagtaacagcatttatctctggcaataacaaatagttaaaccaa

SEQ ID NO: 64461 - DNA, 386 bp, Setaria italica
  Peptide Sequence Number=SeqID_130435
ctgaacagcagtcagcatcactgaggaattatgacatatctcatgctttttccttatgttctcttgccagttcttaccaagtcaatgtgcattcagtgagcaagacaaatgctgcacaatcttgttagacagccgactaatactatcctgaagttttagtcctgctgtacttagtctggggttctccccctctctatgtactcttttttctctctatcttaaatgaaatgacacgcagctctcttgatcaagcattagctattttgagcatgcaagatttgccaatgaatgcttgacttcttcatatctaatagacaaagaaataaaccaaaaataaaaacaaaaaacaaaaaaacaaaaaaaacaaaaaaaagaaaaaaattaaa

SEQ ID NO: 64462 - DNA, 342 bp, Setaria italica
  misc_feature (178)..(178): n is a, c, g, or t
  Peptide Sequence Number=SeqID_130436
tttacttagcagacaggaaacacccttgtcaatgtctacagatatcagtaggtgtcacttctgcaaaagaaggaacaaacatgccgaatatcctcctccagtactgatacttgccaagatgaataattaagcaagaattaaaaaataaatcctcagtgctataaattgttctaaaacnctataccagggaagtgcgtacgtaattacagtgaagcagccaaggctcaccaatagtgaattgaattctcaggaacttgccaaatatctgaaatggaactatggtcacatttagcacatctgaaggttcatgtcacaaatgttgatgcgagagggcattggaat

SEQ ID NO: 64463 - DNA, 380 bp, Setaria italica
  Peptide Sequence Number=SeqID_130437
tccagttcatccttcaggctttgagcttctgcatgaaatttcacctggttggtgaactttgaacagagtttctgtgtacagtcttcttaatcactcattatctctgttaagatatgaaatatgagattcaagggcttcacgcttcttgtttttagtactgtagtttactcttaaagcctggatctccataagtgcttctttgtacccgtaattacagtgaagcagccaaggctcaccaatagtgaattgaattctcaggaacttgccaaatatcttgccatagttgcacgcccgcatgaactgttggatcccaatcaaatgaaagtgttacttaactaaagaccaaagtagacttttaccaattagtagaaaaaattaca

SEQ ID NO: 64464 - DNA, 225 bp, Setaria italica
  Peptide Sequence Number=SeqID_130438
agaagctacatgcagtaatacttttaccacgtattacaagctgcaaggtgtgattcttgtacaattagttattagcacaccttgcagcacgagattgtgtacatgatgtccattagaaactaaatgtactgatgatatattcaactcatattgatatgtgtcagcttaaatttactttgatagctgcatcctattagatcttgcagagatgaaagacattattcc

SEQ ID NO: 64465 - DNA, 289 bp, Setaria italica
  Peptide Sequence Number=SeqID_130439
tttggtttccctttaacttttagtttatttagttacttagttaatttcttccttcgttcgcaaagcaggttctggtagaagcttagcagcccggacaacagatgccccaactcctagtgcagaaggatcataagccaccagtgcaaagttatgaacaggatgcaggaaaacaacctctgcaggtatttcaatgggatatgcagcaaacgaagcattatatcagagatagatacagcaactgtattcctatcaacagcaaccagacccagattatcagaatgatatatta

SEQ ID NO: 64466 - DNA, 301 bp, Setaria italica
  Peptide Sequence Number=SeqID_130440
tttttgttaaacttaatttaactagtctaaacctaacttgtctagggggttagttcacccaatcgttcgatagaacaagcaaaacaactgtttacacatgcggatgaggctggcaacagtatccggctctttccctgctaatagttaaacgggcactccagcatgtcatagccctagggtaccttccatctacaggttctccttacagcatataacatcaaaaggacagcagcatatcaagctaagtcaaaagagcaaacacccaattgcacagctgctgttccccatcctactatttact

SEQ ID NO: 64467 - DNA, 260 bp, Setaria italica
  Peptide Sequence Number=SeqID_130441
tattgttcgagcaaggtcagagccttctgcgttcgaaggatgcctcaaaacaccacttttcacatcctctagatctccataagatggtaaagttcccccagcattaccaaaccccacctcagtttactcaatattctcaacctccccatcctgcaactgttaacccctcagctgcacctccacccccagtgccccagcaacctgaagagccagcaccgtatggccctcctgctcagagctatccaccaaatgccccgccc

SEQ ID NO: 64468 - DNA, 223 bp, Setaria italica
  Peptide Sequence Number=SeqID_130442
ctcctctgaggctgggtgtcggcatcgttcatcagcttgtcgagcaccagtcagctctgcaccaggtggctcctccggcaccagagtgcccatcgacgacgtgatcgacaaggtggccacgatggggttctcgaaagagcaggtcagggcgacagtgcgcaagctgaccgagaacgggcagaacgtggacctgaacatggtgctcgacaagctgatgaacgat

SEQ ID NO: 64469 - DNA, 243 bp, Setaria italica
  Peptide Sequence Number=SeqID_130443
ctggctcaaagctaagctcccaggttggccagtagtgaaggtcctgctttagggtaagtacacgaggctttccattcaaatggacggtccttaccctaacaaattcaccatcttccaggcccttcaccacctgtataaaggtttccagatctggagttggttgcccattaatttcaatgatccactggagagcatagagaaccaataatactaatagtaaccggaacttaccgtagaacaaca

SEQ ID NO: 64470 - DNA, 263 bp, Setaria italica
  misc_feature (143)..(143): n is a, c, g, or t
  Peptide Sequence Number=SeqID_130444
caggtgcatgagtcctggcttcatctaactactcggattccatcatggaaacctgacggtacaggaggtaaccgctcgcaagataaccaacagatgcccattaaaatagcaaaaacctagtaatattacctttttcttgtttntgggcttgcttgccttgtcttcctgcttcttgcccccaccatacttcttcttttcctcatcggacatagagcgccacttctccccagccgcctttgtcacctgtaagcaaagccacaaac

SEQ ID NO: 64471 - DNA, 205 bp, Setaria italica
  Peptide Sequence Number=SeqID_130445
agcttgcaaagctccaagttcccaaagcagaagatgttcaatcagaaaatgctgatgctgggcaggcagactcacggcagcagccaactccaccccagcaaaccattcaattgcagaaccaagcccctcccctttcccaaccaccagcaccgctgccttgcttctttccttgtcttcctaaccgttcgttccttacctttccgtt

SEQ ID NO: 64472 - DNA, 169 bp, Setaria italica
  Peptide Sequence Number=SeqID_130446
tgcttctccaggtactgcggcctgaactcagccagaaacgcgaagaaaggggtgagcccgcgcttggggccgccggccttcttgcgcttggcaccggaggccttgaatctgcatcgaaacagcaaaccacaggcgcagctaacgtctactagtaaattcttagttctta

SEQ ID NO: 64473 - DNA, 361 bp, Setaria italica
  misc_feature (122)..(122): n is a, c, g, or t
  Peptide Sequence Number=SeqID_130447
tagatacggagttaatttaattgatatgatggtgcgatgcatttatgcagaaggaatctagcatacctgtggttcaatgttcggctctcctgttccatcacattctgcagaaaaaaaaaagntcaatagtcacagaatgggagatagagtgctgcaggtcatttttcagtacattacagaaggttaacaaaactcaggggaagaatggatatcagactgactgacttagtacatcagacatcaaatagggctttagagaacagtagagtgaggtaggcctggaaaaggttctactgtaatcttgctataatttcaaacagaataacagccgcttggcaattataagtgtcttggcggattg

SEQ ID NO: 64474 - DNA, 219 bp, Setaria italica
  Peptide Sequence Number=SeqID_130448
gggaaggatgtaccatcatttgttgaaaatacctgtgaagcttctgctgtggaggcatcgtatgagtggctgcctgggagtatcatacttctgcacttgctgagcgtggatctaatgcaatctgtgtaagttgttggttctgcagatatgttacatttttctcattcaatttctagagaaggattaccaagcacttttagctgaggggtggggtgttca

SEQ ID NO: 64475 - DNA, 444 bp, Setaria italica
  Peptide Sequence Number=SeqID_130449
cacgataaccatgcaagccagcacccatggcggaagttcacggtgcccagcctggatgcaagccactcgggcatcttggcctccttgaataacactgcagctaccaccgtcattgcggcgaccccaatcaccatcttcgtgatcggcttcagcaaagaatcctataaaccatgaaagatgcaaacgcatgaagtaaggttccccacttctaaattaactagacaacaaggtatgctaaacaattgttaaatcaaggagcaagtaaattgaggggaaagtgatgtgaggtggtgtttggaggagcaagttctaagagtaccttgggttcgccgtcgaggaagatggtggaatcgggggcgtaggtgaggagggagcggccgttgcgggggttgaagcggatggcgacgccgcgtttgcgggttgcggggtcgaaaggacgaaaga

SEQ ID NO: 64476 - DNA, 285 bp, Setaria italica
  Peptide Sequence Number=SeqID_130450
ttactttcttagtttgtttgttagtttagttttgttttgttcttcctagtagttattggcgaaggttctccaatctcaactgtcggtgatgtttatagccttgggatatctctacttgagatgtttacgggtaggagcccaacagatgatatgtttagagaatcagtagaccttcacaagttttctgaggctgctctccctgatagagtcttggagatagctgatccgacaatatggctgcacaatgacgccaaacgataatatcacaagaagcagagttcagga

SEQ ID NO: 64477 - DNA, 471 bp, Setaria italica
  Peptide Sequence Number=SeqID_130451
tttgtttaggttttctttatttttcccttttttactttacgtttcttttggtttcttttgttagttaatttgttcttagggtctttaaccctaattcttccattgtcactgagctcaggaatcgccatgctagaggtgagaagaacacgggcatcaatgttaggaaagggcagatcacaaacatcctggaggagaacgttgtgcagcccttactggtgagcacaagcgccattacgctagcttgtgagtgcgtcagaatgatcttgaagattgatgatattgtcaccgtaagataagggcatgaagttgattatcacgtcagcctgccctgttgtctggattgacagtgtactacttaatttagaactttattcgtgggctttggtgtttgtcaaccttgatgttttgtacccgtggctttgatgtcagtagaggagaggagtttgtcatattgttacagtaatgtttgct

SEQ ID NO: 64478 - DNA, 198 bp, Setaria italica
  Peptide Sequence Number=SeqID_130452
gtttcgggtgcgcagggggacaggaggtggcggcggcgcgatgggcaaaggagcttcaagggatggagagctactgcatcaaggagtatgctgaggcactcgaggtcatcccttacacgctggctgagaatgcagggcttaacccaatctccattgtcactgagctcaggaatcgccatgctagaggtgagaagaaca

SEQ ID NO: 64479 - DNA, 229 bp, Setaria italica
  Peptide Sequence Number=SeqID_130453
ctgagtgtatattacagttgggattctgatttttcttttgatgttccgattggttaatacttctccttttgatgcttcaggtgcttggtgaacaagaggtttttgattgctggtggtggtgctccagaaatagagatgtcaatgcaactggctgcttgggcaaaggagcttcaagggatggagagctactgcatcaaggagtatgctgaggcactcgaggtcatccctt

SEQ ID NO: 64480 - DNA, 345 bp, Setaria italica
  misc_feature (305)..(305): n is a, c, g, or t
  Peptide Sequence Number=SeqID_130454
ttaatttacgtaattgtagtaggttttctgcagcctcccctcgccgcgctctgttatggtcagcctccgtgctactttcatgaagtcactgcataaacagaatgaaatgatttaggtacatcgtacatgcctgtttgacaaagatatcatatactagcatatgcaccatagaatagacatggctcaaaaaggtaaataaagctaaagatattgaggaaggtctcacctgaatggttcttcaccagtatgcttgacagcaccagcggcgtcgcggtaatggaggtggctcattatttctgctttcncgattccgaacatgtcagctaactgaaccatacagctctt

SEQ ID NO: 64481 - DNA, 356 bp, Setaria italica
  Peptide Sequence Number=SeqID_130455
ccttcacttggacgcatggttctgccactcatgaccaactcaaggcatgtcacctgatatcaaaaacgggcagagctgatgcgtgatctcttctgcgctcgtctgggatcacactactctttcttgaggagatcgtagaacaccgccggcttcttgtggccctttgcgcacgcctcctgcatggcgaaggcgatgtggagcagcgtcgcctcggaccagggccggccgatgaactggagcccgatggggagcccgcccttgtcatgcccaaccatgacggtgatggccggcaggccgaggaagttcccggcgattggtagttaccggtacttaagttcgttcggttctttccgtta

SEQ ID NO: 64482 - DNA, 484 bp, Setaria italica
  misc_feature (401)..(401): n is a, c, g, or t
  Peptide Sequence Number=SeqID_130456
tgtcctttagtctattttgtctttgttgtaattgtctaattacttggtttaaggtttaattagttgtctttcttccctttcgtattaggtttttggttcttgttttagctgggtaccttttgcttatttttccttttgctaggtagcaagcacatcttttccagcacagcaccttgtaacaagttcaaccaatcacctaatcgcaagttactccctccgtcccaaattttaggtcgttttggcatttctaggttcataacttttgctatgcacatagatatacactatatctagatacatagtaacagctatgaatctagaaatagcaaaaacgacctacaatttgggacggatggagtactttacaatttcattcacttttctttcaatttccaaagttntgtacctgtttatctttatcctgtcaaagagccctgcagtgtgctagtacatgagttgggaagtgtgacactttggtcttgtt

SEQ ID NO: 64483 - DNA, 205 bp, Setaria italica
  Peptide Sequence Number=SeqID_130457
gccttagcaattttgcttgtgaatgcaatactggttaaggttaatagtgcttctcccttcgataggttttggttctgttttagctgggacctttgctatttttccttttgctaggtagcaagcacatcttttccagcacagcaccttgtaacaagttcaaccaatcacctaatcgcaagttactccctccgtcccaaattttagg

SEQ ID NO: 64484 - DNA, 370 bp, Setaria italica
  misc_feature (197)..(197): n is a, c, g, or t
  misc_feature (318)..(370): n is a, c, g, or t
  Peptide Sequence Number=SeqID_130458
ccttgaggctaccgacttaggtggcgttccagtggttcttcacggcgttctccgatcgcccgggcagctgcctggcgatcatcgaccagcgattgccgtggatcttgtgagccttgatcagctcgatgtcgtcattctcagtccagattgtcttcgcctgttgcaagttagtgatcgatcaatcagtgaataaagtnttagcgtgagcacacaacaagtgcagccgaaaaacacaaagattttcgcaacatatgcgaaatccacctgaaatcaagcaaatgtagcatgtgtgcacactatactactgcagaattttgnnnnnnnnnnnnnnnnnnnnnnnnnnnnnnnnnnnnnnnnnnnnnnnnnnnnn

SEQ ID NO: 64485 - DNA, 371 bp, Setaria italica
  Peptide Sequence Number=SeqID_130459
ggggttgggttgggttggggttgggttgaggttggggatatgcatgttgcggatatacaggttgttgatatgtaggttgaggaaatgctgcctgaggatatgcttgcattccctgaaacactccggcaggatattgcatgctgtatcccattccaaattggggagctctctgccaaccgggcatcattggagttgatgttggatatagtgcagtaaagatatcctgtgacatgtttagtctgtcaagtatgcgcaaatgactttgtcgaaaggcatggtgtcagatccatcagcatatcatttgctttctaacaaactatttttacaaacagaagatacttatacacttgtcttcaattgactaattagat

SEQ ID NO: 64486 - DNA, 319 bp, Setaria italica
  Peptide Sequence Number=SeqID_130460
cactccggcaggatattgcatgctgtatcccattccaaattggggagctctctgccaaccgggcatcattggagttgatgttggatatagtgcagtaaagatatccgctggaagttctttcctgccactggatttactgtcattagaagatgctgctccttgaataccactggttccttgtggatttgcagttacttgagatgggagtccagctgtaggggcagcaagaggagattgttgaactgaagatccttggttggacataacttgtttgatgcgccctttggaatctcaggcaaccaggcctcaacagtgatga

SEQ ID NO: 64487 - DNA, 220 bp, Setaria italica
  Peptide Sequence Number=SeqID_130461
tcaccaacccgaacgttgaggagcattgtcacccagtatatccctcactggccgcacaacaggatgctgttgagtcgtagaggctggctgtggtggtggtgcaggtgcagtaggttcaagaagtccaccaaatggaagttactctgaccgtaggagttatagtggacggagtgatgacagaaactccagattttcctatagtcattttggtcatagccag

SEQ ID NO: 64488 - DNA, 219 bp, Setaria italica
  Peptide Sequence Number=SeqID_130462
agaatgacagttgcgcaagtgcagactcaagtggatttgcactgctggttgtttgtggcgtttgttgttggccaaaagcatcaaaagatgcccagtcaccaccactcacagaaggagcactattccctttatcaagaacaggctgtggtgcaggtgcattaacaggatgctgttgataaagggaatagtgctccttctgtgagtggcgtttgttgttgg

SEQ ID NO: 64489 - DNA, 194 bp, Setaria italica
  Peptide Sequence Number=SeqID_130463
caagttatgcgactggtctacaatggatgggtgtcctccatcattcactttcaaagtgggatcatttgaagctggaaaagctgacacattggttgcagaaggtgcttcagagaatgacagttgcgcaagtgcagacttctaagttggtattttgtctacttgtcttggtttgttttgttggtcgttttgtttgt

SEQ ID NO: 64490 - DNA, 236 bp, Setaria italica
  Peptide Sequence Number=SeqID_130464
gcctcaatgtgccactgcacacctgccacggcagatggaggcagccccagtcgccgtgcagtaggtgcgggggagacgccgatgagtaggggccactcgtcaagctggccgcgccgtccaattctagccacttgcaatgggggagaatagctccttaatccgaataaatccacgccgaaggggagggataggaagctgctgccatcgaggagcaacgcctcaaatgcgattcatgt

SEQ ID NO: 64491 - DNA, 437 bp, Setaria italica
  Peptide Sequence Number=SeqID_130465
cgggactgttgttggaatcaagtgcaaagatggcattgtcctgggtgttgagaagctggtaacttcaaagatgatgctggaggggtccaaccagaggatccattcagtgcaccggcactctggcttgtctgttgctggtttggcagcagatggcaggcaaattgtttcaagggccaaatcagaagctgccagctacgaaaaggtctatggggaacccatttctgtgaaggaattggcagatcgtgtggcaagttatgttcatctttgcacgctgtactggtggctgaggccttttggttgtggtgttattcttggaggttatgatagggatgggccacagctgtacatgatagagccctcaggaagtactacctaacaaaataacttacggtagactagacaattaggggaaagggtaagaacaaggactaagacaa

SEQ ID NO: 64492 - DNA, 250 bp, Setaria italica
  Peptide Sequence Number=SeqID_130466
aagccgccgagctcagcgaaccccccgccgctccaccttgctcgccggccggtccagatccaggagtgatctgtactagcagtgttgaggtgacacaaacaagtcgacaatgagcagcataggcacaggttacgatctgtcagttaccaccttctctccggatggccgtgtcttccaggtcgagtacgccaccaaggctgtcgatctgtcagttaccaccttctctccggatggccgtgtcttccaggtc

SEQ ID NO: 64493 - DNA, 366 bp, Setaria italica
  Peptide Sequence Number=SeqID_130467
ccgaggaaagagaggaacaccgacgatggcacctctgtggataaagtagccaaccgtatattgagcgaagctaggaatttgcggaccaaggacaatacatccgtagtatttgtagatttcgacattctgagaacagatccctgtatctccaaatgacatgtcggatccgagacaccccgttccatgaatcatcctcccggctgcttatagctccaagttttgcttcgctctcggctgcacccgttttgttgctgatgacatcccaaagcccgtcactagcaataacggcaaaagctgtacacgctttggtgatacgaacagcttggctcacatatggttctgagctgaagcgtgaaatctttgaca

SEQ ID NO: 64494 - DNA, 251 bp, Setaria italica
  Peptide Sequence Number=SeqID_130468
gtcctctgcagggggctgaacaggtgggtaatcagagagttctttcaaagtcttgatttagaggtcatagctggtccatctcatggaataagctgttctcggcagtcaagtagaccttctatgctcccaataactcttggaagggttcccccaagtgatatagtgttaaaggattcggaagtgtcagggaagcatgctcggataaactggaatgcaaagacatttaaatgggaacttgtggacatgggcag

SEQ ID NO: 64495 - DNA, 424 bp, Setaria italica
  Peptide Sequence Number=SeqID_130469
ttctttttggaacctgactctaatctaacatctcaccaggttcccaggagctcagattttcttaatcaggtcagaaatatatttgatcagatgaagaacgcttcaatggagaatacccgaatcaattctcttgcatgtagtcagcaacctatcatcacttccttgagatctgcaaatgacattcttgtacataacacagtcaacccattgcaaagtgagaagcttgaggataatatagagaaagcagaatctataaggagttcgatctgttctccgagcaattcacagaggcctttaaatgatttaacctcctatgttactggtaacaccaatattgatactcacatattggcgatgcctgttaactccaagtctatatatgagctcaaaggatttgataaggtcactgacttttttcatcaaa

SEQ ID NO: 64496 - DNA, 237 bp, Setaria italica
  Peptide Sequence Number=SeqID_130470
tgccaaccccacattcagccgagaatcattcatttgaccatcatagtataccactgttcctcttaggctaataacgataactggtggaaaatggacgacctatagaagcatggctgaagatgctgtaaatgcagcagtaaggtctgggaatttgaagccagctaatggttgtgtgaccgataacttgcatatcgttggtggatatggatgggatcctgcttcttttactgtccattg

SEQ ID NO: 64497 - DNA, 307 bp, Setaria italica
  Peptide Sequence Number=SeqID_130471
tagcttctgtttccatcataagctgaagatcgatatgctagagtgtcatttagaacagggatatcacccatcagagtcctgaaacgcaaacacaaggcatgggtctgaccagacatgtcgaaatagcgatgacagggctgatccaggcatattattatcagatgttccaccttgtccaatttgttgtggcagaacaggtgccccagctggtgcattctggcatgcagcatctcctgaagagttagggactgattgtcttcctttgtaactttgtatttgggtaactgaagggtacttagtcttacaa

SEQ ID NO: 64498 - DNA, 440 bp, Setaria italica
  Peptide Sequence Number=SeqID_130472
tatccattgactgggtcaatatagaacatgtcacccttgattctagatccatttcgattctttctaggtctgcattctttcaaccaaccgtcaggtaacccctctccagcaggctcgtacttgccatcagccatggcatttgggttttgcaaggacaatctcactttgagttatagaatgagagccctcacaagatcaataactatgcttcaattcaccaattcagcttcagaaagagacaacctattatgctcatgttagcagcgagcaacagaacttcatagaagaatggacccacctccccgtataatcttagattcggccggcgctacggcctggctgcggcggccatggagctcggcttccgcggagattgccgccgacaggaggagagaggagggagaggaggacacggcaaggtagctgttgctcccactgct

SEQ ID NO: 64499 - DNA, 249 bp, Setaria italica
  Peptide Sequence Number=SeqID_130473
tctcactttgagttatagaatgagagccctcacaagatcaataactatgcctccccgtataatcttagattcggccggcgctacggcctggctgcggcggccatggagctcggcttccgcggagattgccgccgacaggaggagagaggagggagaggaggacacggcaaggtagctgttgctcccactgctccacctccacgcactaggaaggagcaggaggaaaggcagcagctttcttttacccgc

SEQ ID NO: 64500 - DNA, 193 bp, Setaria italica
  Peptide Sequence Number=SeqID_130474
gttactgcatggctcaaaatgaacgagagcaacttctaagtagtgcttaagtgctccatggaacaagggcacactcccatggagcacttaagcactacttagaagttactgcatggctcaaaatgaacgagagcaactgaaattatattaatccatccttacttcaattcagttgcacactcccatggagcac

SEQ ID NO: 64501 - DNA, 250 bp, Setaria italica
  Peptide Sequence Number=SeqID_130475
tgtctaatgcgtcactcttttgccctgtaaatcttcgtttcatgctcgtaaaaatctcgtattcatggagagcctcccacgcgacacagttccatataggatagataatgatttcgattttattattgtgggatcagaactggagcttaaaaaaaacagagcgtgcttctcttgagctcgttcccatgaagttgagcacaaagagtcgtactgaatatagaattggtgttgcaatttatatacctatata

SEQ ID NO: 64502 - DNA, 486 bp, Setaria italica
  Peptide Sequence Number=SeqID_130476
gctctttgactgcgctgaagcaatttctgagtatagcgtcgaagaagcacaatcaataataacagaattgcgacagaaggttgcaattcagggagacccttcgcagagaattgcagcctatcttgtggagggccttgctgccacaatacagtcttcagggaaagggatctacagggctctgaggtgcaaggaggcccctactctgtaccagctttcagctatgcagatcctcttttgaaaatatgcccatgcttcaggctaggcttcatgtccgccaactatgctattcttgaagcctgtaaaggtgaagaggttgtgcacattattgactttgacatcaaccagggtagccagtacataaatttgatccagttcctacggaataacagtaacaagccacgccttttgaggataacaggagttgatgacccagagttctagttgtctactagggtcttgtttggtaggtacttgtaaggtttgttt

SEQ ID NO: 64503 - DNA, 338 bp, Setaria italica
  Peptide Sequence Number=SeqID_130477
aacagcaacgtgattgatggcataaaatctctactgaaatcatactgtgacaagtacaggttcgagaaggtacacgatggcctccattttggctggggaggacaagacgctcgtcgtctcgtcggcatggcaatagaagcacatgtctcagatcttagcactgctgcattttaggcgcccctggtgcaagagtagagatttctaccaccgtattgttaacctatcatatactcatatcatatctgaccttagcgtgctgcttgtagacttaatgaaggtctagtactaagtttagttaagaatagaaaataatagttagacgtaattaagtaacaaca

SEQ ID NO: 64504 - DNA, 386 bp, Setaria italica
  Peptide Sequence Number=SeqID_130478
tagaattagtaaattaaatttttttctaaaaattcttgcaagagagatgtttgtagagatccaaaagattgatagcaattactatccagagacattaaatcaactttatataattaatgctggaactggatttagagcactgtggaaagtattgaaagcattcatggaagcaagaactttagcaaagattcaggttctggggaccaattaccttaacacattattagaagctgttgacccaaggaggatgcttgctccaatataaaggaccctggactgacccacaaatggttcgtgcttctaaggcagcatttggtaaaggtcagaagtctttcaatgaactgactgctacaattgcctgtgaaagcttcacaggttgtcaggag

SEQ ID NO: 64505 - DNA, 282 bp, Setaria italica
  Peptide Sequence Number=SeqID_130479
ccttaacacattattagaagctgttgacccaagcaatttaccagactttttaggtggaacatgcacttgtcctgcaacaggaggatgcttgctccaagataaaggaccctggactgacccacaaatggttcgtgcttctaaggtaaggcagcatttggtaaaggtcagaagtctttcaatgaactgactgctacaattgcctgtgaaagcttcacaggttgtcaggagccttctgcgaaacaagtagattccactttcttcgttaggaaaagtaacttcttt

SEQ ID NO: 64506 - DNA, 292 bp, Setaria italica
  Peptide Sequence Number=SeqID_130480
cttgatgccgatagaagatgttttctctatccagggtcgtggaactgttgtgactgggcgtgttgaacagggaacaattaaaactggtgaagatgttgagatcttaggtttgacacagagtggcccattgaagactactgtcactggtgttgagatgttcaagaagattctggatcatggagaggctggtgacaatgttggtcttctccttcgtggcctcaaactttgtgcatgtctttagagtaccaggcttgcacaccacctggccacgctcgacatcaccacgcttaag

SEQ ID NO: 64507 - DNA, 375 bp, Setaria italica
  Peptide Sequence Number=SeqID_130481
tggttaaattattgtctttattgtattgggtacttgttctttatttctaattctactttgtagttgttgcgcaacatgcgtgttaaccaaactaactgcggtgttatacaagcaccacctcaacaaggaaacaaaagcgactgtccagaatggtggccaggccagccagccctgcctttgtgctcatgcattccaagaaaaatggaaacaggttcctttgctctcgttttctaacccggtcggacatatatcaacattcattcgtttgctaaatcgctacgggaaacaaagtgatcagctaataactttggagacaactccggcaccaacagttctccctccttccctcagcgcaaatctttgccctggttcaag

SEQ ID NO: 64508 - DNA, 214 bp, Setaria italica
  Peptide Sequence Number=SeqID_130482
actctcttgtagattagcactgacgagatctatcacttctcatgctcctctccgaacagaaacccaagcgacgacggccctcctggtgcacagcgtaccctcgtcgatggtcggtcctaaaaacacaagcatagaaggaacacatatatgcagctcatgttatgccatatccgaactctgatggaacacatatacgcagatctgttcatcccaa

SEQ ID NO: 64509 - DNA, 234 bp, Setaria italica
  Peptide Sequence Number=SeqID_130483
aagcaaatctcatcattcatttattgccaactgaaaacaaacatctctacatgcagcacttgctgttacaattggacctgggtgtaagtatataccagaaagaaccactccatctctattattatgtataccggagtcgctgcagtataacaccagcaaccactccagaaatagaatcccaaatcgaatatcgacgaatcaatgaaacattgatcacaggtagtacaaactgaa

SEQ ID NO: 64510 - DNA, 365 bp, Setaria italica
  Peptide Sequence Number=SeqID_130484
tagacggactaatagtaaaggttagtaaaccggtttaagaaacagtccgcttgagtacgaggatcatatgcaaatcttgtttgaatttgttattgttataaatgagacttcatatgttccaagtggtgatggcaatgttgatgaacatgatgttgctgatgttgggggcaacagtgatagagaggcacctaaggtcccaacaagtgaaagcatctaggcctctaacttgtgttttggtaattaataacgaccttagtggactaacaatttcattgagaatatgagtataggttagtcctgaagttgagttgagcttcaaaggatactatgacgatatcttggttggtttagaacggttaggaaag

SEQ ID NO: 64511 - DNA, 228 bp, Setaria italica
  Peptide Sequence Number=SeqID_130485
tgaattggctgaggagggcttgggagataaggaagaagcactagggtcttgcattagtgtgccatttctcttttgtttcttttatgttcctaagtatgctgtgtgagactatgtaccttttgtttcttttatgttcctaagtatgctgtgtgagactatgtaccttttatcagttgtgttgtacagcatacttaggaacataaaagaaacaaaaggtacatagtctca

SEQ ID NO: 64512 - DNA, 327 bp, Setaria italica
  Peptide Sequence Number=SeqID_130486
ctcctatacagtaacaagaaaaggggggggaaataaccttaccagtcagagaaccaataatggtaggattgatgccaatgccatctatttttaattgttcaaacaaatccaaacctagttgtgcttcaccgtttctacatgccagctgttagtaactgaagagtaccatacacttaatttgaaaggtgcaattcatgctcagaatcattacctttcgcaagcaacaaataagacagaatatgttatctcatttggacagattcctattcctttcatctcattaaggacatcaacagcctttaggacctgatcaccatcacacagaga

SEQ ID NO: 64513 - DNA, 204 bp, Setaria italica
  Peptide Sequence Number=SeqID_130487
gacaaaaatgcttcacacactataaattaaattgttttatgcatcctgtttacaaaatttgatgtactgtgatttctttcttttgaataatcttttcacagattactacatttatatagtaatctgtgaaaagattactatataaatgtagtatttttatttctttccctgaacaaactcttaagacattttactatcctggac

SEQ ID NO: 64514 - DNA, 198 bp, Setaria italica
  Peptide Sequence Number=SeqID_130488
acctagttgtgcttcaccgtttctttcgcaagcaacaaataagacagaatatgttatctcatttggacagattcctattcctttcatctcattaaggacatcaacagcctttaggacctgatcaccatcacctgacaagttacaattaacatggttaataaaaagcatagaagcaacattattaacattatttgaatg

SEQ ID NO: 64515 - DNA, 375 bp, Setaria italica
  Peptide Sequence Number=SeqID_130489
aatacaataactttaatttagaattgatacctgttaatctgtcttcctcagggacaaattaacaggtatcaattcatttcaggatataaacaaggttctcgctatgtctcgcattatggtggcgtggcaaccgataggcatatcaatgggagtttttgacatctgccatcggtatttgaaagaaaggaacaatttggagccccgctggcggcctttcagctcaaccaaagaagaaagcttagtaccgaaatgacttggcaacattcaggccatgcttctcattggctggcgactatgcaagctgtacgagtcaggcaaaatgacgccaggccatgctagtttaggaaaggcgtggacgtctaggaaggccaggga

SEQ ID NO: 64516 - DNA, 330 bp, Setaria italica
  Peptide Sequence Number=SeqID_130490
atttgtccctgaggaagacagattaacaggtatcaattcatttcaggatataaacaaggttctcgctatgtctcgcattatggtggcgtggcaaccgataggcatatcaatgggagtttttgacatctgccatcggtgggaatcaccttacgacatctatattcagtttattcagcctgatatgtttaagatttccactttatcacattcttttactgaacaggtatttgaaagaaaggaaacaatttggagccccgctggcggcctttcagctcaaccaagagaagcttgtccgaatgcttggcaacattcaggccatgcttctcattg

SEQ ID NO: 64517 - DNA, 255 bp, Setaria italica
  Peptide Sequence Number=SeqID_130491
caaaaatccatttagttggtttgtatctgcattcctcgctaaaatggatttattgtaaagaaaggagctcccggtctgaaagccacaaaaattgaaaacaaaattggactgagaatggtacaaaatggagacatagttctaaataaagtatttgtccctgaggaagacagattacatggcaaacaccttgtttatatccttaaatgaattgatgccaggtaatctgtcttcctcagggacaaatactttatttag

SEQ ID NO: 64518 - DNA, 386 bp, Setaria italica
  Peptide Sequence Number=SeqID_130492
gtgtagctctttgtggatctgaggctcaaaagcagaaatacttaccatctcttgcgcagttcaaaactgttggttgttgggcattgacagaaccagattatggaagtgatgcaagctccttaaggactgcagcaaccaaggtgtattttatttggaagcatgattttttttctgaatataaatttggatatttctattgatgataacagtgtggccttttcacactaacttatcatgttggtttttattttggaaggttcctggtggttggcatttagatggccaaaagcgctggataggtaacagcacttttgcagatgtgctcatcattttagctaggaatgcagatacaaaccaactaaacgggtaatcatcttccgcacccc

SEQ ID NO: 64519 - DNA, 176 bp, Setaria italica
  Peptide Sequence Number=SeqID_130493
atcaggacgaaagggcatggatcgatgcagccgccgccattgcagcggagcttgatgcagagggctactgctgcatggagcactcggcggggaggccctgcagcagcgcatgcgctgggtgcagcgcaagtacatgatctacaactactgcaccgaccccaagcgctacgcgcagg

SEQ ID NO: 64520 - DNA, 215 bp, Setaria italica
  Peptide Sequence Number=SeqID_130494
cctatcccctgtgtgccttgcctatctcctgttgcgtgtctcaggtcctcgacgccggcaccaccatccaccacaagcccggcgccggtactggctgcatgagcgcgagggcgcgctcgaactgcgcccaacgctgctcgagcgtgccgttgtagccgacggacatgcggacgagccccggcgagatcccggccttggcgcggtcctcgggcggc

SEQ ID NO: 64521 - DNA, 206 bp, Setaria italica
  Peptide Sequence Number=SeqID_130495
tggtcggtcgtccgggtctttgttggttgtctagtcggtcgtccggttactggctgcatgagcgcgagggcgcgctcgaactgcgcccaacgctgctcgagcgtgccgttgtagccgacggacatgcggacgagccccggcgagatcccggccttggcgcggtcctcgggcggcatctcgctgctggtactagtgcgactgagtcg

SEQ ID NO: 64522 - DNA, 140 bp, Setaria italica
  Peptide Sequence Number=SeqID_130496
ttttgttttcttttaccttttagtttctttagttcgttagtattgtccgtctcccggagcaggacatgagcgtctcgtagtaccccaggctgacggccatgaggccgaactgggtggtgttctggaggtggtgcatgagg

SEQ ID NO: 64523 - DNA, 405 bp, Setaria italica
  misc_feature (405)..(405): n is a, c, g, or t
  Peptide Sequence Number=SeqID_130497
ttaaaaataaggaactactagactaataggaaaatagaataggaaaagcaccctggatgtgatcagtcatatgttggacgtcgggagttttcatttacactagagaatgacatctacctgcggttccagtcctttgatagtgcttctgaattggagagttctattaaggagaagtgccctttcaagattgatattgggcctgtctacagcgtagatcctgcaaagcgtcatgcttatgcccaatctggcaataatgtctttgtacctgtggaaagggaactaatttttgacattgatatatctgattatgatgatgttcgctactgctgctctggagctgatgtctgcttggactgctggcccttaatgaccattgctatcaaaattctggatacttcgcttagn

SEQ ID NO: 64524 - DNA, 156 bp, Setaria italica
  Peptide Sequence Number=SeqID_130498
aggtaatcaaagcacatgaatcatttactaaaagctcccttttgtatacacccaaagacaggtcgtgtttgtgttccaaaatcctcgcagttattgggatcaattggaacacaaacacgacctgtcttcttatacacatatcctagacttgacatg

SEQ ID NO: 64525 - DNA, 266 bp, Setaria italica
  Peptide Sequence Number=SeqID_130499
gcgctcagccaggactgccaggcggggtacctcatcctccaggtcaagatcgacggccgcgtcaggtggaaggtcggcagctggatctcgggacactaccacctcttcgtcacatgcccggccttcctcgtcaccaacggcggcaacggcgcgccgggggccagcggatttaagttccagaccaccaccacatgccacgtcgaggtctagagactttggcatgtggtggtggtctggaacttaaatccgctggccccggcgcgccg

SEQ ID NO: 64526 - DNA, 196 bp, Setaria italica
  Peptide Sequence Number=SeqID_130500
tagttcttagcttttcctcgagtgtccggatagtttttgagtacatttttatccggccggttatatgcaaacctatagtttaagtatttcccaaataattaaatatttcccatattaagagaaaagatgtattctcttagtatatttacattttataattctatttgtggacacccacaagaccagtacgactcaa

SEQ ID NO: 64527 - DNA, 134 bp, Setaria italica
  Peptide Sequence Number=SeqID_130501
caatcagacagtatacatcttagcatgagaggacagagcaaacacgagcacttgtcatactgatgttgctagtgtttgctctgtcctctcatccttccaatgtaacaatcagacagtatacatctttacattgt

SEQ ID NO: 64528 - DNA, 322 bp, Setaria italica
  Peptide Sequence Number=SeqID_130502
agggacaagacaagacaataataatctgcataacatgtcgtatgttcttcatataggagctttcaagtacacaaaagcaacatcactcgtgtttgtgagagaacaaaacacaagtctgcagccatgagtgggggacctgacatgatcgcaagtgccgtgattcagcatgttggcagcatgctcggtgacaaagcctgggagaggatcgagctgctatggaactttgagaatgatgccaaggagatgaaggacaaaatgttaacctgcaggttgcacttaacaatgctgagaagcgctcccaggagtccgaggatgtattggc

SEQ ID NO: 64529 - DNA, 254 bp, Setaria italica
  Peptide Sequence Number=SeqID_130503
ttgaagtcacggtagatgacgggttttgcagcttcgtggaggaaggccaaacctttggcagctccaatggatatcttcaatcgcgctgaccacggcagggaagcagagtattctgtacatccatgaatccatttgggcagcaatggttagccaagtaaatgtaaatcgggagaatactgaagttattgttggcgattaacttttctaagtgtcggtatgactagctatttgcaactattacttgtcatctatta

SEQ ID NO: 64530 - DNA, 402 bp, Setaria italica
  Peptide Sequence Number=SeqID_130504
tttttttttaggtaaattaggtaacggtcttcgttattaatttgtttctactatttcagtggctcagtctgataaagagtacaaacccgtgcacatacaaacgcttgctagttgtaacacagagggtcacagcgcacatatacaagtactgactgattctgtggttcacatgcctagtcggtggtgatgtgtaccccgatggcgatgaggaagacggccgcgagggcgaagaagatgatggcgtggacgaagatggaggcgccgctggtctggaagttgccgaactcgacgaagcggccgcccttggccggcagctgcagcagcagccccggagagagcagcacgaacagcaccaccgccaccaccaccgggccccagtcagacatctcgctcactctcttc

SEQ ID NO: 64531 - DNA, 270 bp, Setaria italica
  Peptide Sequence Number=SeqID_130505
gaatacacagatgatccttgtagtaatcataccttatgaaaggcagtgctttgagcataactttcataaggtatgattactacaaggatcagcaaggtgaatacacagatgatggatcaatccccttctttgaatacctgaattctaatattcagatgagtatagctgccggaatgggtccagccttagaaaatgcatcatggatgattttcttcgcacacttgtaatttgccttaagctgtaaaaggtccagtttccggcgctccacgt

SEQ ID NO: 64532 - DNA, 361 bp, Setaria italica
  Peptide Sequence Number=SeqID_130506
gctgtatatgatactcctaatttgtaagcatccattctatgagctactctgtttcgtaaataatctgtgaataacttcccctcactgtattccatggccttctgaccttggatatttttcttggcatattgtggcttcttggagttgtatattcccgccagcaaatcattcgtccggacaagtgttcgccaatcaattttatacttcatgcgccccatcacgcacatgatctgatacacttgaggtactgataggaccttcagatgctcatgcatcctcatgtacatgcctcccctaatcggaacaaaagaaccaaaagaagaaagacaataggaacaacggaaaaagaagaattacgtta

SEQ ID NO: 64533 - DNA, 333 bp, Setaria italica
  Peptide Sequence Number=SeqID_130507
tggggtaacacctaatgagttcacatttgtagcactagtaactgtggcaagcaacttggcaagcatgttccatggtcagcagtttcatgctcagatcatcaaagcaggtgctgacattaatcctcatgtttcaaatgctcttatagacatgtatgcaaaaatgtggcttcattaaagaaggatggttgttgtttgagtcaacatgtgggaaggatgtcatttgctggaattccatgatttcaacatattcacagcatggtcatgctgaagaagcccttagagtcttccagctgatgagagaggccggagtagaaccaaactatgtgacttttg

SEQ ID NO: 64534 - DNA, 226 bp, Setaria italica
  Peptide Sequence Number=SeqID_130508
atgacatatagctgattatgaccatttagtaatgatactttagctgtttaggaattaattggtacctcagttttgacttgggcttcaagtctgttcccaaacttgactaatcattttgctgaagtgggccttctcaacttggatcaggtcatcattccttagtaaaggggttagtttatttgcatctttcatcggatcactccagccctcaattacaaggggcatt

SEQ ID NO: 64535 - DNA, 484 bp, Setaria italica
  misc_feature (100)..(100): n is a, c, g, or t
  misc_feature (107)..(107): n is a, c, g, or t
  misc_feature (146)..(146): n is a, c, g, or t
  Peptide Sequence Number=SeqID_130509
atcgcaattggatgggcttcctccggtgcgccgttggcttgtgcagcagtcaggttgtttagatcggtgtgcggcgcgaggtcaagcccaggcactgtanccatggngaaagcgaggctcacgccgttcccaagggagcaggccgngaccaggatatgcatggtgtctagctttgctacagaattgctagagataatgtccaaggagccgtccctccatgtgctagttattcctggaaatccaggtattgctgcattttacaaggactttgtcgaagctctctatgaaaacctcgatgggcaagcatctattacggcggtagggcatatttcacatagccagaaggattctgagcatggacggttgttttcattgcatgaacaaattgaccataaggttgatttcattgaacaaagaagacttacaaacaattactagaaacaaatacaaataagttttaggttaggaccaattacaaattgga

SEQ ID NO: 64536 - DNA, 439 bp, Setaria italica
  Peptide Sequence Number=SeqID_130510
taaatgaatcgaacggcttgggaagttgcggggcgttgatgagtatgatttaggtacaatatcatattcacttccatcagaacgagaggaggtggaaccaccactattctgctgtcctgatattccctctgacaacaataaagcaccaatcggctcagcaactgaaactgcatagtaaaaaaacagcaattaacacaactgatcatgttgtaaagttctttagaaaaggctgcatgcacatgccagtagatatacaacacccaattaacacaacatatattattgtaaagtgctttgggaaaaaaggttgcatggacctgttatatccatgtgcacacataaaaggatgatacacaatcattatattaagctattaaaaaatactataaatgctcatccagcagtaacgaacagcgaactttaaccatgtcagagaggc

SEQ ID NO: 64537 - DNA, 315 bp, Setaria italica
  misc_feature (313)..(313): n is a, c, g, or t
  Peptide Sequence Number=SeqID_130511
cgggtgcaacatatatattaaaatcaaacagcagtagaggataatgtgacacataaagtaatcttaaattgatgcatagtcaatacagaaaacaaaaggaaagtataggtgtcgattttgaacaatcttgggcacgcttaccctgagaaatattaatgatacagaagcagctggaacatcagaatggatagagacaattttggtacacatacctctcatgtattcatcaacactagaatctcgcagcattggcagcatagcatggtggttctggaagctgacatctgggctgttgaaatacgaatggcacctnag

SEQ ID NO: 64538 - DNA, 246 bp, Setaria italica
  Peptide Sequence Number=SeqID_130512
tcagatgtagagtaacggtgctcttgtggaagctcattcctctcccaactcctactagcctctttactatttgatgacagtgatgacccataattggcagcaaccccgctatcaccatgggatccataagacaatccttccgaattgatcctgtactcccaccccctagtacttagttaggttttggtttagttttagttttaagttttccttttagacattacgtccgccagggcgggtcgctcc

SEQ ID NO: 64539 - DNA, 353 bp, Setaria italica
  Peptide Sequence Number=SeqID_130513
ggcactcaggcatctgctgcacctggtgtatgtgctgctcgattgttggttcctggagctcaagctattaacctaattgggaagcaaggtgccacaatcaagtcaatccaggagagcactggtgctacaattcgtgttatatcagtaggtaaagtattcttggctgatgtatagtgtgttaatacaccattgctctggtgcagtagttgattctcttgctgttagattgtagtatattatcttcatatcctacaatttaatggctgatttcctgcaagctttaacttttataattccaagctgcacattcttggcacaaaagtgtgtcacccactcacccttttagagttttt

SEQ ID NO: 64540 - DNA, 146 bp, Setaria italica
  Peptide Sequence Number=SeqID_130514
tatcttgaacgagaacctctagtagatcataaagtgacacgccttgtcaacattacgaccctctgggatgcatggtgctggacctctacttacacagatgactcaaaccatgcaaatcccacttacctacgcagaggacattatag

SEQ ID NO: 64541 - DNA, 462 bp, Setaria italica
  Peptide Sequence Number=SeqID_130515
taagtagttgtccctaggtaagtttattaaaattcttctttgtctagtagtaaatttggtagtaaacgttgggtcttagtattgttgtaaaattaatatacagtggtggccaggaccttgatatattacctcaaggggctggaaagggccaggcacttgcatatttgcttaagaagctaagttcatgcggaaagccaccaaacaatactcttgtttgtggtgactctggtaatgatgcagaattattcagcatccctgatgtgcatggtgtcatggtcaacaatgcccaagaggaactacttcagtggtacacagaaaatgcgaaggataaccctaagataattcatgcaagtgagagatgtgcagctggtattatacaagctattgggcacttcaagctaggacctaacgtttctcctagagatgtggacttccctatgtgaaggaggcctccttcaaacc

SEQ ID NO: 64542 - DNA, 270 bp, Setaria italica
  Peptide Sequence Number=SeqID_130516
tactaccaatagacaataccaataagaatagacaattcggaatcatgctatggtgacaaacaagggaaaaagtaccgagcatgggtggacagactttttatcacacagactggttcagatagctggatggtgagatttgacttgtgggaatcagaaggcgatgtgcgtgtgtgctctttgtcaagtcttgccttgagtctaaagactgaatcccccgagggccttgtggtaacacacatccacaagacatggctcaacggatactctaca

SEQ ID NO: 64543 - DNA, 237 bp, Setaria italica
  Peptide Sequence Number=SeqID_130517
cacagccacagccacagccacagccacacagccgcgccttcttctccgtccgggctcagccgctctctcttcctctcttcctccggttcatgctcatccagctttggtgggggtagtggcagacggccggcgacgagaaccatcttctttgcaggttactaaaatggataagctcaatggttctgcacgtcttatgattgtttcagaccttgaccatacaatggttgatcaccatga

SEQ ID NO: 64544 - DNA, 237 bp, Setaria italica
  Peptide Sequence Number=SeqID_130518
tcttctattgtctaaattggggtttattctattcctattccttgtcttgggtcttcgtagtgctctctccatgcatccatagatgcattcggatcatgctatggtgacaaacaagggaaaaagtaccgagcatgggtggacagactttttatcacacagactggttcagatagctggatggtgagatttgacttgtgggaatcagaaggcgatgtgcgtgtgtgctctttgtcaagt

SEQ ID NO: 64545 - DNA, 388 bp, Setaria italica
  Peptide Sequence Number=SeqID_130519
ttcttaaagttcttttaaatttaccttatttgttactttctttggttaaaagttaaaaggtttctttgtttaatttccttttccgttttggtcctagttggtaactattgtatttaactaagtagtaattggtttgtattggaggatccatcaaacactgggcatgtctaacttttgcctctcgtatcaatccaaatgagattgggaggttttgtggggatcttgtaatgatgtgcaatagcattggcatgcaagtgaatacccaaccgtgtgtacaaatcaaaaaaagcacgccaagatgatgtagaagctgcaatcagagatatccatggacattcttcacaagtgcttgctcaaaaaaggtctaaactgggcaacatcttgagtt

SEQ ID NO: 64546 - DNA, 385 bp, Setaria italica
  Peptide Sequence Number=SeqID_130520
ttgatgctcgtgtgcttccagctccaaagcttaataccatgactctggtaaaagaaaaagggtactgtaatccttccgttggccagtggaacatgattaacaagagaatggttgatggaggatccatcaaacactgggcatgtctaacttttgcctctcgtatcaatccaaatgagattgggagggtttttgtgggggatcttgtaatgatgtgcaatagcattggcatgcaagtgaatacccaaccgtgtgtacaaatcaaaaaagcacgccaagatgatgtagaagctgcaatcagagatatccatggacattcttcacaagtgcttgctcaaaaaggtctaactgggcaacatcttgagttactcatcataattttacctga

SEQ ID NO: 64547 - DNA, 247 bp, Setaria italica
  Peptide Sequence Number=SeqID_130521
aaccgtaaagcaagcatccagtttccaagtctaccgtcttgaaaatattcttgctgtgaaggtgttccagtagcttcacaagaggatcgatggaattggcacctttgtcaagagcaagattgatggcttctttaacaacttctgggtagtaatcgggactcttgagctcctcaatgcactgttgtgcttcatctagaatacagacatggaaatactcctcaagaagagagacagccttcttttgaag

SEQ ID NO: 64548 - DNA, 283 bp, Setaria italica
  misc_feature (114)..(114): n is a, c, g, or t
  Peptide Sequence Number=SeqID_130522
gagacgggctcaggctcccgccgcggctgatccggagcgactcgatcgacttctggatctccatggtcatggcgctgtcgacactgcctgcggagagccgcttgtgcgccttcngcaggtgcagcttgagcgagctcgtgctcagcccgacgttcttgctgcagatcgggcacaccttcatttcaggcctcttgtgctgccagtccatagactaccttgtccgttgtaagtctttctttgttctttagggttctttaggttagtttagtttcctttttgttta

SEQ ID NO: 64549 - DNA, 309 bp, Setaria italica
  Peptide Sequence Number=SeqID_130523
gcattgctcccagtagcataagccttccgaataccttacaaattagacacccatgacctcttcaggcaggagtcaggatgtttgcttatttttggatacctcatagacagagcaacatttacattacttttacttcatgtaaaaccagctgggcagccgtcgtcgccgtcccgccgagggttcaccgcgcgacgccggggatgttgacccagtgcaggtgcaggacgagctcgccggtctcggtgttcctgagtttgaagacaacgaatagtacctagggaagaatacttagaccgtaccttaccaaca

SEQ ID NO: 64550 - DNA, 253 bp, Setaria italica
  Peptide Sequence Number=SeqID_130524
aagccttccgaataccttacaaattagacacccatgacctcttcaggcaggagtcaggatgtttgcttattttggatacctcatagacagagcaacatttacattacttttacttcatgtaaaaccagctgggcagccgtcgtccccggcgtcgcgcggtgaaccctcggcggggatgttgacccagtgcaggtgcaggacgagctcgccggtctcggtgttcctgagtttgagcacgatgtcctgggagatc

SEQ ID NO: 64551 - DNA, 243 bp, Setaria italica
  Peptide Sequence Number=SeqID_130525
cgtcttcatcaccgtgccgtcggggacgtcgctcaggtcccgcttggcgatctccacgaagtccaggatgcagaactcggcgtcgcccatgctgtcgtccttggtgaacgtgtcatggtcgaagagctcctgtgatgtcaaccgaagcgccaggagaagaagagttcactttcagggtcaggggtactgaaacgatccttgagactgttgaagtttcatgcattgtgttcatggagatcatgg

SEQ ID NO: 64552 - DNA, 223 bp, Setaria italica
  misc_feature (180)..(180): n is a, c, g, or t
  Peptide Sequence Number=SeqID_130526
ttcatcaccgtgccgtcggggacgtcgctcaggtcccgcttggcgatctccacgaagtccaggatgcagaactcggcgtcgcccatgctgtcgtccttggtgaacgtgtcatggtcgaagagctcctgctggccgaggcggaggacgacgtaggggtcgctgctgtgggtgagggggtcncagatggccaggttcacccctcgcaccaccttcactttgagca

SEQ ID NO: 64553 - DNA, 417 bp, Setaria italica
  misc_feature (48)..(48): n is a, c, g, or t
  Peptide Sequence Number=SeqID_130527
tatgcattgattctcaagcaacacttcaatcctcaagttttcaacaancttgttctcatcaccagaatttctaaccaagcttgctgatgtcaaaattatcgtagatccattccactcaatagaaaaacccgtgcatgcaaaaaaccttttttctccatcgtatgaagccagtgcaacaatattgcgatttatgttagaagctcttttgctgaattttctccaaacaccttcaccatgcatgtcgccaaaagtttcttcaaaagtatttaccaaaatcatgccatctcctaacatggaggatggtaacttagggtaacccatggagtctagatctaacagttcctggttgacaaaagctccatgttactttcttggtattggtcttgtttattattttcttctactattacgggttct

SEQ ID NO: 64554 - DNA, 382 bp, Setaria italica
  misc_feature (117)..(117): n is a, c, g, or t
  Peptide Sequence Number=SeqID_130528
cctcgcagcttaagtagacaggtttgtctttcttattccttgttggtattatttttcttttcgcgggtactatcgtgtggattatgaaagaaccacgtacgaagaaaaattgtattnaggttctaatgccaatttgtttttgattgatcgagcaggcgaccggggtgaggtgaatcggaatctttaaaaaattcccataaaaaacaaggcacgtatattcaactttttttttgagcctacgtatattcaactttagaatgaagttgaccaggagcggggtggatgagttgtgcgtgctgttgttggctggtgtcgtttttccttttgttttcccccgtttaggtagccttccagggctactttcttgacaggcactgttcga

SEQ ID NO: 64555 - DNA, 307 bp, Setaria italica
  Peptide Sequence Number=SeqID_130529
aaaaggatcaatagttggactgatcgaccactgtctagagctggtaaagatgtcttattaaaagcagttgtcaagcgatttccaacatatgagttgctttcagatactgacagccatttgtgagaggacgaggaaacttattgcagaagcatggtggggggtgtgaaaaaatcgaaagaaaaagatacattagcgttcataggaatggctttcttctccaaaatatcttggtggtcttggctttagggatctccaactctttaaccaagcgatgttaggtcatcaaggatggagacttaaccaagta

SEQ ID NO: 64556 - DNA, 282 bp, Setaria italica
  Peptide Sequence Number=SeqID_130530
ttaaaagcagttgttcaagcgatttccaacatatgagttgctttcagatactgacagccatttgtgagaggacgaggaaacttattgcagaagcatggtgggggtgtgaaaaatcgaaagaaaaagatacattagcgttcataggaatggctttcttctccaaaatatcttggtggtcttggctttagggtattctcctaactctttaacctaagtcgtattgtttaggttcttatttctttaaggtttattttggtttagttttacttttactttagttta

SEQ ID NO: 64557 - DNA, 224 bp, Setaria italica
  Peptide Sequence Number=SeqID_130531
aagttaaattaaaacaaaagaaagaaaattaagaaagacgaagtacttagaattacgacaacggaaggtggttcttaccagcaacgcatacttgttgagtatctaaagagatacaggctagagcagaggaagttgtcaaagtgcttcaaggaccaacaatttaaatctgctgatccactttacacatacatgtttttgctgtttgatcatagtctgatgggcca

SEQ ID NO: 64558 - DNA, 242 bp, Setaria italica
  Peptide Sequence Number=SeqID_130532
ttagtctaactttgcaattggcttctctttattgccttttcagaaagattatgaagagctggctgaaaatgtaatgaacattgttgaccggcttgttcacaagactgatgtaagaaccatgtttccatcatgcacaagtgttcacacagtaacactgactgtgtcttgacgtgaagagaggaaacttttgcatttgttttgtgattcagatatgtgttgcatgctgctaattttacccttat

SEQ ID NO: 64559 - DNA, 233 bp, Setaria italica
  Peptide Sequence Number=SeqID_130533
atgctgagggaagcaaatcatagagagcttgatcaaattgtggttgaaaatgttctggcattcgacgctggtttctgggttcggctggcagctagaattgatctctgcaaatcggatgatgaataaaaaagattatgaagagctggctgaaaatgtaatgaacattgttgaccggcttgttcacaagactgatacaaaagattgaacagtcaactgatgtgactagaaaggac

SEQ ID NO: 64560 - DNA, 231 bp, Setaria italica
  Peptide Sequence Number=SeqID_130534
cttgctagggctgaaactaacttttcccggatgaagtccttccttggactgttgttaaaatggttggggtttatgcttgtctgttagtacacccccatccttggggcatgaagctttgtgtccatctctaacaccaaaaggcactattgtagatcctgttcatcagtcaaagtgctcacctccgtatcccacatagttatgtggtgattggaaattagctttagccccaag

SEQ ID NO: 64561 - DNA, 310 bp, Setaria italica
  Peptide Sequence Number=SeqID_130535
tctaggtctattgtacttattggtctacttctactagtctccaacactgccaactccaactcaggctgctcatccttaccggctgattccctcacactttgcggtgtccgctgctccagagcaacccttggcctaaccatggtctcccttcccactgttgactgtcttgttctcgtttccaacatgttgagtccatgtgtccatctctaacaccaaaaggcactattgtagatcctgttcatcagtcaaagtgctcacctccgtatcccacatagttatgtggtgattggaaattagctttagccccagg

SEQ ID NO: 64562 - DNA, 183 bp, Setaria italica
  Peptide Sequence Number=SeqID_130536
aggtgatgaaatccttcagccagcaggcagggatccaaggtggactgggagcagcttttccttctcatgccaccttccctcattatgccatcccacaaggcctcccctaccatgtctatgggtactctaccctaataactaccaagaattaacaagttaataccaaacaaaacttactaacaa

SEQ ID NO: 64563 - DNA, 360 bp, Setaria italica
  Peptide Sequence Number=SeqID_130537
taccggtactaccggtacggtcggtacctagtaaggtttgtctatttgtcttgtaaaaactagtctttttgtctattacccaaaaacgaagtccactgtccccgaaatgttacaagtgtgataaaactggcggttgcagtctgcgttgagggtgtcctggtaaccgtcaatctcacatttgtagcagatggagctatccgccaagttcatgagggccaccgccggacccgcatccaccccggcggtgttcttgatcgtcagatctcgggccatgaaaccagttccattaacgctcaatgttgctgactggagcacgtcgtggccggtgcgattgcagtggttaccggtgatgacggtgcg

SEQ ID NO: 64564 - DNA, 338 bp, Setaria italica
  misc_feature (222)..(222): n is a, c, g, or t
  misc_feature (259)..(259): n is a, c, g, or t
  Peptide Sequence Number=SeqID_130538
tccggcaccggacggcggaccagaaggttgcattgctgaaaaacagctttttgcatacccaaaaacgaagtccactgtccccgaaatgttacaagtgtgataaaactggcggttgcagtctgcgttgagggtgtcctggtaaccgtcaatctcacatttgtagcagatggagctatccgccaagttcatgagggccaccgccggacccgcatccaccccggnggtgttcttgatcgtcagatctcgggccatgaaaccngttccattaacgctcaatgttgctgactggagcacgtcgtggccggtgcgattgcagtggttaccggtgatgacggtgc

SEQ ID NO: 64565 - DNA, 415 bp, Setaria italica
  misc_feature (33)..(33): n is a, c, g, or t
  Peptide Sequence Number=SeqID_130539
ctcatatcttgattattatgtcccaaaaggacncttaaagctccaacacatagcataagttgccaaatctcttgtacatagatgcaaaatagcctgccttagcactcaaatgggtgtcagcgacattaacaaagaagtgtggttctctgtttggaccctccatcacgcctatgtctagctttgattttactcctgcaaaaaagatccatattttatctcagatttagagattaaaaatctatcaagtaaacaaccataatattacacgacaacccttagttccacaaatgtcagaaaaggatggacagtggaccagagaagtcgtataatttctatgtttgactggtgcgaagttttttatctctcttaagttaagaatactgcaataagtaattactaggtactactattaatt

SEQ ID NO: 64566 - DNA, 413 bp, Setaria italica
  Peptide Sequence Number=SeqID_130540
tcaggtaattcaatacctgatcaaataaaattcaatatcgagagttattctaactaggagaacagttttccatgtgaatgtttccttgtgaaaacctagtctgtgaaccatgataattaagtagcatacctctattaaagagttcaagaccttcttctaaataaagagggcgttcatgatgagtggaaagaaaggatgccaaaagtgctctaaatgcggctaactggaagtctgatatacttgggtcttcagtccagggtggactttgttcatacatccctgctttgtaacaggctttagtagcaacatcaataaggagcaggtccatttctgatctccaggagccattaaataaacccccctgctcaagtttagagaaatgagcaccaaactcgccagaacatatgaaagat

SEQ ID NO: 64567 - DNA, 129 bp, Setaria italica
  Peptide Sequence Number=SeqID_130541
atttcctttaagtaaaacctaagtagtaattgcaagctgtggacggtgtccatctgagagtggattcaaattcagtattaattccagcgtctccagtgcagcaattttgacacatagtggaggcatcag

SEQ ID NO: 64568 - DNA, 403 bp, Setaria italica
  Peptide Sequence Number=SeqID_130542
gaaaactaggactgataaggttgatcgagtcctgtactcatcagttgtgtaccctcacaattatggtttcattccgaggactctttgtgaagacaacgacccaatggatgtttttggtcttaatgcaggagcctgttattcctggttcattcctccgggcaagagccattggtcttatgcccatgattgaccagggtgaaaaggatgacaagataatagctgtctgtgctgatgatcctgaataccgtcactacaatgacatcagtgagctgtctcctcaccgcctgcaagagatcaagcgcttctttgaagactgtatcctgtataattcatctgctgttttgttactacatgctctagcatactttgcacgatcacattcacaggtacaagcttccttagc

SEQ ID NO: 64569 - DNA, 318 bp, Setaria italica
  Peptide Sequence Number=SeqID_130543
aataggtttcattccgaggactctttgtgaagacaacgacccaatggatgttttggtcttaatgcaggagcctgttattcctggttcattcctccgggcaagagccattggtcttatgcccatgattgaccagggtgaaaaggatgacaagataatagctgtctgtgctgatgatcctgaataccgtcactacaatgacatcagtgagctgtctcctcaccgcctgcaagagatcaagcgcttctttgaagactacaagaaaaatgagaacaaagaaggttgctgttgacgactacaagaaaaatgagaacaaagagg

SEQ ID NO: 64570 - DNA, 129 bp, Setaria italica
  Peptide Sequence Number=SeqID_130544
cagttttcttgtcaagctcatatttaactttgcttccctttgtaatctcaacaacaacattgaagacagcaggagcccctaaactcaatgaaaggatcctctcttctctgtccaggagatcagtagctg

SEQ ID NO: 64571 - DNA, 372 bp, Setaria italica
  Peptide Sequence Number=SeqID_130545
ggatctatgttcacacaaatgcacttcacatctcacaagagttgctaaaggtacaagattaattaaaaaaagtgttgcttatagactaacaaagaaaagagggtgcagagctacaatttgtcaaattgaacctttttgcccttccagccacatgctgcttccactgacgccttcaaagtagagttgtatcctacactctgttgtatgccacgtttttactgaacaagcggcggatgtagacgacttgcaaagcgctagctgccatgaaagctaggtactccgccattgtgtagaacatgacacgctttctggtgctcccattaatgttaaaattgcggagctgaaggaagcattagagtccgtcactgctga

SEQ ID NO: 64572 - DNA, 243 bp, Setaria italica
  Peptide Sequence Number=SeqID_130546
tacatgccaccccttggagctttaaactcaaatttttcaccagatttccccttcaacgtatgtacagtattgccacctggtgaagttacctgcatttgtagaggtgaaaaatcaatatagagcatcattaaaagtgatcaagagatcaacagtatgatacagctatatgcgcacacattacaacgcactcacaatgaaaatactatgtgcaggtaatgccatatcaattttacaagtacgaat

SEQ ID NO: 64573 - DNA, 431 bp, Setaria italica
  Peptide Sequence Number=SeqID_130547
agtaggtacaaggaaggaagggaaaccgcaagcaaaggttccggattggtggccggaggtgggagtgacaattgtagaaccaaggctagagatggagaagaggctggccaacagattggtccgaggtgaatacccataaatatttactgctagtataattcataaatatttagtgctactataattctgaaattgtgttgcacaaatgctccgctttgctatatcgtttagttttatacttttgatggtgctgcatatatattgcttgtaaattgaataagtgtgtactgtcaaaagacaaaaaagttgaggaattgtggacttgtaggtttgttgtgattgatagaagtataacttttgcattgctcagggtggtaagattagttatgattgctctgatgatgttatgttccatgaatttggccgccttt

SEQ ID NO: 64574 - DNA, 257 bp, Setaria italica
  Peptide Sequence Number=SeqID_130548
agttcttggattggatcaattgtaatggcaaaaaaataagtgtaaccatttcggttactatgttcttcagttgtttgtaaatgtctgctgtgtaccttttttttaccatatatgttctccattcttgatctggattcttgatatttgtgcttaataaagagcggcacaggatgttggagcagtacaagttaatggtgagaatccaagggattttcttgctggtcttgctaccaatattggattggacaagtctcatg

SEQ ID NO: 64575 - DNA, 318 bp, Setaria italica
  misc_feature (300)..(300): n is a, c, g, or t
  Peptide Sequence Number=SeqID_130549
aatgaagttaataactttttttctttgccaggtaaagtggaaaatatttcatcactgtcaagaatgttacaactgtttctttactgaactttgtaaatcttttgtttgtgccagcaataattgataatagaatcacggggagggattacagatatgatgatgcaattcaacttaggcaattatgcaagatatctggcataaaggtctcctttgacactgagaatgctcgtaattctttctacagagcagcagtaaactttgtctagatgattgcagcagagcggcaacaggatgttggancagtacaagttatggtga

SEQ ID NO: 64576 - DNA, 201 bp, Setaria italica
  Peptide Sequence Number=SeqID_130550
gagggattacagatatgatgatgccactcttgtacgtgcttcagttgctgctcggacacgtacatgtttcttacaatgctgggcccttgagattcaaggaaaacgacaagaagcactggatgagcttttgaagatttgtggaattcataacatgtttcctcctgaggacaattcttttcgagtccagcagccaccatttca

SEQ ID NO: 64577 - DNA, 459 bp, Setaria italica
  Peptide Sequence Number=SeqID_130551
atcgatattgggacctcgccaacacaataaatgatctcaacattgaagcacgagactcaagggttgaccgcaatatacaggagcagcagtcatctgttggctctttacctgatcagctgaatatcgttgctcaacgggccatggaagcaagtgtggacgagctgagcatggccgagataagaagcttggaggaaacagtaaccgacgctctggcagctatcagggtcatactgcactgcacacatttcttctagcagaactactgcatgcatgagcttgacctgcgtcacgatcgtgcagcgttcgtgccgcacacatgagatttctgagagcttcttaattcggtggttgcagaataaactgagggcaaaggtggttggattattgccccaagcctaaggttaattattagctcatctggaactagtttttgcagcagataaagaaaaggagaagacc

SEQ ID NO: 64578 - DNA, 320 bp, Setaria italica
  Peptide Sequence Number=SeqID_130552
aatcaaaggacttctgagcttctttgagttctcctgtatacgctaatcacttctgtattttttgtgcatcccctcctggatgctcaggagcagcagtcatctgttggctctttacctgatcagctgaatatcgttgctcaacgggccatggaagcaagtgtggacgagctgagcatggccgaagataagaagcttggaggaaacagtaaccgacgctctggcagctatcagggtcatactgcactgcacacatttcttctagcagaactactgcatgcatgagcttgacctgcgtcacgatcgtgcagcgtttcgtgccg

SEQ ID NO: 64579 - DNA, 133 bp, Setaria italica
  Peptide Sequence Number=SeqID_130553
gcaagtgtggacgagctgagcatggccgagataagaagcttggaggaaacagtaaccgacgctctggcagctatcaggaataaactgagggcaaaggtggttggattattgccccaagcctaaggttaaaatt

SEQ ID NO: 64580 - DNA, 265 bp, Setaria italica
  misc_feature (241)..(241): n is a, c, g, or t
  Peptide Sequence Number=SeqID_130554
ctgatgtagcatgaaagatactccgcatatggtcaattccacaaattgaattcctgatgaactctgcaattctccacatgaacatgtaataatatctctgaaatgtgaagcatttagtctatcactctcatcaggctcatatagccacctagcttgaatctgcacccgtttcagaagacatggacttcaacggcaaacatgctcctttaacccttcggtgacttcccgcaagaacttttcngtacttggcccgtgcagtgtaatt

SEQ ID NO: 64581 - DNA, 322 bp, Setaria italica
  Peptide Sequence Number=SeqID_130555
cctggtatcgatttgtgccatcagcgagcctgagacgaggacggaggtgaagcagggaactagctcacgaacaggcacagtatcacatttcagatgtagaggttggcaggttgcagacactaaaggtagtacccactaagtccctcttatcagcagcagggcccgataataggttacgttttctgaacggtaaaatctgtgcaaagtgaagcaatgaggcccctcttcaacagcggtgtactgagctccaaggtggaggattcaccatgcaggcgcctttgacttctccacaagaatgatccttccattccactcaagtcta

SEQ ID NO: 64582 - DNA, 276 bp, Setaria italica
  Peptide Sequence Number=SeqID_130556
gcaagaactggaaagggacacaccatccccagatgggagggtatcccctgataggtttgcaagactagaaagggacacaccatctccagatgggagggtatctcctccagtcggaagtcctcatacccatcattctgtgcatgtggagacatctcccttgaagaaggtcgtttgcggctgggatcatgcttttcagaagatccggaccgacgtcttgctggtgggctttcagaatgaccaacatctttggcatgacgttgtgactccatcttcttc

SEQ ID NO: 64583 - DNA, 380 bp, Setaria italica
  Peptide Sequence Number=SeqID_130557
cattattactcttactcctagtacagcatcaaagccagttcggatgaacttgcgacatgtaccgagtatgtcataccgataataggttacgttttctgaacggtaaaatactgtgcaaagtgaagcaatgaggcccctcttcaacagcggtgtactgagctccaaggtggaggattcaccatgcaggcgcctttgacttctccacaagaatgatccttccattccactcagtctcgtcacatgcacggattgctgcatcagcatcctcatccttctccaaggataagaacccaaagccacgagaatctccagttcgtttatcgcgaacaacacgtagcaacttagttaacgacgtaccaaaatttagacaaaaatttaca

SEQ ID NO: 64584 - DNA, 233 bp, Setaria italica
  Peptide Sequence Number=SeqID_130558
ttctggttgaaagtttgatgcatcattaccactgctttcaggaagctctggaggcagcactgcaccaatcacttctgtgttctgatgtacatcacagtctacagaagtggcctgttctttagagttactattgtgaacattttgttcaagatgcatcattctgtacatcagaccctgccttaagaggttcttgaaagcagtggtaatgatgcatcaaactttcaaccagtaaa

SEQ ID NO: 64585 - DNA, 231 bp, Setaria italica
  Peptide Sequence Number=SeqID_130559
cgatgccttcgtctacatatatgacatcctgcatagtcaattggtggtactcgactatttctcgcaggaatctgttttctcgagcatatacagagttctcatgtgctagccgtgccttctctgctaatagcgtctctaactggaggcggatctgcaaaagcaatgaacaatgtatggtcaaccacagtagcaggtcgacttagaaccctgtccattaagttagacatataa

SEQ ID NO: 64586 - DNA, 212 bp, Setaria italica
  Peptide Sequence Number=SeqID_130560
ccgtgttcgtgcttgggatgcttgtactatctatgtaacttatacgagtgacaaccgtgggtacttgattacaagaacaatggcagtataaaatgtatcgtcccaccaccaaccacctcgttgctcttctgcgatggttggaggcagcgggcttgctctattgctcaattgctcagagaggaagcccgcagaagggactttggagaagctgg

SEQ ID NO: 64587 - DNA, 352 bp, Setaria italica
  misc_feature (323)..(323): n is a, c, g, or t
  Peptide Sequence Number=SeqID_130561
gaggcttgagcgtggatggtttacttctgttttctttaccccagtaatcttctcctttgaaagcaagagggcttgaccgacaacaaaataatctaggatgcttcttttgtatcgcaattgtctgaggctgagattctcccgtacattctgttcgtgtttcatgtcagagaagcacatgaacatcagaactctgattgctgaaatgctgaggcatactgaacgtgcatgggatggtcgtaaacccaacacatgaacatcagaactctgattgctgaatgctgaggcatactgaacgtgcatgggatggtcgttcagtatgcctnagcacatgaacatcagaactctgattgct

SEQ ID NO: 64588 - DNA, 437 bp, Setaria italica
  misc_feature (227)..(227): n is a, c, g, or t
  Peptide Sequence Number=SeqID_130562
gttgccgaagtggtgcacgacgttgtcgagcccatcctgctcgaggtcgaccagatctaccacctcgcgtgcccggcgtcacccgtccactacaagtacaaccccgtcaagacaatcatatcctttcgccatgaattccttacgctccgttcctttcgttcatgatgattcattgatgcttggatcgcgatcgcgtctttttttttctttcgtgccaaacaaaaggnttttattgttcttggatttttgcgtggttgagatttgatttctagtatattgctttttgctgggggaatttgttcgttttacgcgggtttatcagttactcccgcaatgcatctggcgagcactgatttaataccttcctgagattccgtttccgtccctgaaatggaatatgggacggaaggggaatttgtccgagctcgggatttgtg

SEQ ID NO: 64589 - DNA, 219 bp, Setaria italica
  misc_feature (215)..(215): n is a, c, g, or t
  Peptide Sequence Number=SeqID_130563
gatacgtgcaatcctaacctcaatccgtgcattcgggtcaatagtgtcctgaacaaccttggcaagctcaagcatggtgaactcgccggggtttccaaggttgaatgggccaatgtgatcccctccagcacccccaggtggagacttactggggcaatgtcaatcccatcggtgtcaggagctgttacgacgagggtaagcgtactgctgaaacnttga

SEQ ID NO: 64590 - DNA, 205 bp, Setaria italica
  Peptide Sequence Number=SeqID_130564
ggagccattgacggtttatggtgatggtaagcaaaccaggagcttccaatacgtttctgatctggttgagggtctgatgaagctgatggaaggtgagcacattggcccattcaaccttggaaaccccggcgagttcaccatgcttgagcttgccaaggttggttcgggtcaatagtgtcctgaacaaccttggcaagctcaagca

SEQ ID NO: 64591 - DNA, 270 bp, Setaria italica
  Peptide Sequence Number=SeqID_130565
ttctgaaataggcataatccatctgatgttattaaaaattaggaaagaagatatggaaaatcgtctaaataggaccgagggggggggggggggcggaagaatctgtaaattactagcagcttttgtaaccttattccttgactactctttccaaatgatctgagtcgaacacatgcttcattgaagaatttagaaaggagatcatacaagaaaaacatcatctctggtttattacaacaagatactccagaaatgatgtaatatgagaat

SEQ ID NO: 64592 - DNA, 346 bp, Setaria italica
  Peptide Sequence Number=SeqID_130566
ttgtttttttttttttttttctttgtcatactgaataccattttagatgaaacatttttgcacataaatgtctggaaaaactaatgctgtcatttccaggattttcctgcaggagttgatccgagacaaagaacattttccttcttgtatgcttgttctcccttgccttttatgatttatcacttctctattcatccaaatttatattagtaataatggttcatcagctcaaagtataagaagcgtcgaagaatagttacaatgactgaggggatcattacatcaaaagtgactgaggcgatcgttccgtcaaaagcaactgaggtgatccttccatcaaaagcaa

SEQ ID NO: 64593 - DNA, 257 bp, Setaria italica
  Peptide Sequence Number=SeqID_130567
ttacttacttatataatgatgtcccaccatcttctttaccgcatatcataaggttaagagttggaaatgtgctctttaagtatggagacaatatttgcaagacagaagttactgaagatttttgctgctcattttgcttggtaaagtgtggaagcttcacgggtctgcaatgtcacttactctcatcgcatgaccagttcaactttgggttcttgatatctaagaaggaacaggtcgttaatgttagtttgaagcac

SEQ ID NO: 64594 - DNA, 226 bp, Setaria italica
  Peptide Sequence Number=SeqID_130568
gtaggactgtaccacaacatctagaaccttaagattattaatttggttatgctgcatgcagtcatattttggaagaataatctctactaggtgccctttttttggagtgccttcccaagaccagagatcacatctgccaaaccaccaacctttgcaacaggagccatctctgctgctatgtggacaatgtgctagtacctagtaacttggtttccttgtcttagtt

SEQ ID NO: 64595 - DNA, 378 bp, Setaria italica
  Peptide Sequence Number=SeqID_130569
tagtaggactacctaatgaggggtttatatcccagctggagaacttcgacaaatccctgcaagcaagatctggaggaatcgaggaagtgagtggttgttgttgagcaacaaattcaagcattatgtgaagaactcaataggaggtttgatcagctagcagtgatggttaaaaattatatacctgctgctggaactcaagaaaattcatcaaaagaggaggaagacagacagcaatgcaggcaagctaatcttgaagctaagctacaaaacaaaaaacatgccgctgcacattcaaggcctcttagtgatagaagttgaagtagaggatttacatgaagaggatgatcttcatgaacaaccaagtaggaataatgaata

SEQ ID NO: 64596 - DNA, 349 bp, Setaria italica
  misc_feature (189)..(189): n is a, c, g, or t
  misc_feature (228)..(228): n is a, c, g, or t
  Peptide Sequence Number=SeqID_130570
ttgtctattctagtattggttatcagggcctcgttgatcatctctagctgctgttttcctttgtgagaacctgcagcaagatctggaggaatcgaggaagtgagtggttgttgttgagcaacaaattcaagcattatgtgaagaactcaataggaggtttgatcagctagcagtgatggttaaaaattntatacctgctgctggaactcaagaaaattcatcaaaagnggaggaagacagacagcaatgcaggcaagctaatcttgaagctaagctcaaacaaaaaaacatgccgctgcacattcaaggcctcttagtgatagaagttgaagtagaggatttacatgaa

SEQ ID NO: 64597 - DNA, 458 bp, Setaria italica
  misc_feature (52)..(52): n is a, c, g, or t
  Peptide Sequence Number=SeqID_130571
tactattctgtgaaggcttaatacttaccatttataactgcttttactgggngaaattcgctgccagcatgactttgtcaatatcccatcttttttttttatccacatagctcacaacattatcaatcatccatcatctggtgcctctggattttcactaatataagatgttaaagaagtcccagaagaatggattgtcttattattttcacggcattgcaccaactgttgctgaagattctggatgaagtcattcaatttctgaatcatcttttcttgagataagattatctgaaacaagtataaggttatagccaaatttgtacaggcacctacaaaacaatatcaagcaacattcctatggatgccagggaaacttccaattgtcttgtataaataatcttctttctaagcaatacaataatcttcactatgtgcagggccaataacatataaat

SEQ ID NO: 64598 - DNA, 379 bp, Setaria italica
  Peptide Sequence Number=SeqID_130572
tgttatagtaataagttattaccagaaaacatgtggcattggatcctttactatgtcaattaaacagattataacctccacactacggccacggtgtctgcatatttcacctatatccccgtgaaatctgtcgacaatagaacagatccgttctagtaaaaaggttgcagcatgctatgaaatggggacaaatggaggctgtaacatgccaaaccagagtcctctcctatctggagagctctgtccttatccttgacaagctcttctctacttgaaatatgttgatggttgcgagttgtagattccaactcattgacaagctgttgcttccattcaaactgggatgtaactatgagaatcaccaacagaaagacaagca

SEQ ID NO: 64599 - DNA, 224 bp, Setaria italica
  misc_feature (212)..(212): n is a, c, g, or t
  Peptide Sequence Number=SeqID_130573
aagacaggcaatcaaactggtcatagtaggcaaaacgctcaggatcatgtgatgcagcccttcggagatatgctatacacctataggcatgtacacatggtcacactgatttattcaatggaagaaatgttaccttggacttgccattggtaagttacttcttgagactccagttccgttggcaccgtccacagtttctgatgcatgagganatgaaacgacca

SEQ ID NO: 64600 - DNA, 343 bp, Setaria italica
  Peptide Sequence Number=SeqID_130574
ccaccaaggcattgattgtatccgtggtagcgcctctgttcagatccaaatcctcgtggacgcccagaatggagattatgcagggcaggcagcagcatatcattgtacagagaatgaaaggcaatgcgtagccaataaagccgaacgcaaggaatactatacagatcctgaaaatggttacaaacaaagatgaagagtataatctgcgaatgtgaggaaggtattaagaattgaaaacaagcagcacatacctgtacaagttaggagcatcatgggcagaagaacggctgccaaatatccacacattccccacaacaaaccatatggcaaagaacaatccaga

SEQ ID NO: 64601 - DNA, 432 bp, Setaria italica
  Peptide Sequence Number=SeqID_130575
aacttgataggtcattgatcatatgagcagtatgaagtgatacataaatcggcgcaatacaattatattagcagcataaaagcttcagccaagctttagttaaaaaactaagtacaacattgcctgatggcataatactgagtactagtgcaccgccgacacaatttgagagaacatttaccatcgtagaaaacaaatataggatacacacaaagctgaaacttgtaggcacatctagagcagttgagctgtgataatccccgacacttcattcggataatcaagtttcttccttttcctccgccgcctctgccaaactcttcatcacgcactggagcttgctgccacattctgacattcctgcatcaaattcacaaaattcagttataccagaagcccctgcatcactcaaaaagttcagctctaccaaga

SEQ ID NO: 64602 - DNA, 222 bp, Setaria italica
  Peptide Sequence Number=SeqID_130576
ataagcagacaacagcacagtcatcactcttggatgtcgggaacttcaatctccaagatctgactgcgcagtcaacgagagccctggctgctgttgcacgagatggtgctgatgctacaatatcatatcgccgtctttctgagaaggatgaatttataatattggccactgatggggtttgggacgtcctctcaaacaaggaggctgttgatattgtagcat

SEQ ID NO: 64603 - DNA, 332 bp, Setaria italica
  Peptide Sequence Number=SeqID_130577
cgttaagaaccttgtattcgaacagaggagaccagctcagtaagctttggacacgaactggtggtagaagtcaattgacgttgtattcaacagaggagaccagctcagtaagctttggacacgaactggtggtagaagcaattgacggttgtgtgtatgtccctcgcaggaggcccattgcaatggccttgtacgcagcttccgatggatggaagccatcccatgagccatacttgtctgggttatcacacaccttgtattccccatatccacaggctgcagctggagacacaccatgggttccttctccaccgcagcaagccactaaaaga

SEQ ID NO: 64604 - DNA, 254 bp, Setaria italica
  misc_feature (246)..(246): n is a, c, g, or t
  Peptide Sequence Number=SeqID_130578
gacaccgttcgttttcgcccacggcgatgactaatttggttctgcatttccctcttcttcctgcagtctcccttaaatggaactgctctgggcggctacatgcaaatgcagtactccccggctcctgtcaatccgatgcccacgagacaggtgagcagaggtgcgccggagaagaagaggtggtgaccgccgagtgctggttgatcgaggagctttcgccggtgccggctggagtgaaggaaaggntgtcatgg

SEQ ID NO: 64605 - DNA, 345 bp, Setaria italica
  Peptide Sequence Number=SeqID_130579
tctagttcttctttagttttttttttttttttttttttatttagaatatactcatcctcattcatcaatttataaacagtttacacctttcgagagctgttttccttttgttaacaacattatctacactgaagaaaaatttcatttgttacagtcacactgaagaatcaatttctagtagtgtttaacaatagatgattcctgctacagttacaactataatctaatctaataatgctgaattttggtcatgctggatttacacacaacaaaagaaccaagacagaggttatgattccaattactagaaattacgaagaaaattagggaaataatacccaacca

SEQ ID NO: 64606 - DNA, 253 bp, Setaria italica
  Peptide Sequence Number=SeqID_130580
gtatcttcagttttcgatgccagaaatacacacacagctgcaactgtctgaaacaggacaaaaggtactgttaaaaccaacacatgaaaataaaaagataagttccagaagaaatcaagagatgtcaataaggaaaccataaatagatcatgtactccaaacagagtaaacattatggacaatagcatcaaacatgaaatgctattagtgttgcaaataactaagggctgcagaataacggagagataatctt

SEQ ID NO: 64607 - DNA, 265 bp, Setaria italica
  Peptide Sequence Number=SeqID_130581
cttttttaagttgtaacagtaagttgcaacccagttggctgtcggggttaatttgcaacgttaagttggaaactgagaacagattggtgatcattccaataaatgcttggcaaagaaactctgcactcttcttgcttttcaaagacagcatcgatcatcactgccacaacaaaacagggtttctcacctgccatccattttttgcaagggactggtgtaaatagaagcgatgacaaaacattattgctgtcgctagagttctatt

SEQ ID NO: 64608 - DNA, 430 bp, Setaria italica
  Peptide Sequence Number=SeqID_130582
ttgggggttatttgttgaacgattcgttacgccctcaaatccccgcatggtgtgatcctgagtggaaggcgttgatggaaagctgttggtccagtgatccaactgagagaccatcattcactgatatatctcaacggttgaggaaaatggctgctgcaatgaatgtgaagtaaaggctcagaaactctaaagggatcatcatctcaatttaccctactctaagtgatagttttattaagtgcttcatggaagaaaagtttttgtcatggagattccaaagcatgcttaatgaactttttatcctggagtaaccagctttcatttttgccttctgctctaaacagtttgctatatagggtatcatctcttgatgggaactgttggactgtaatgtaaataagtttgactcgcttcatccggctggcacatt

SEQ ID NO: 64609 - DNA, 508 bp, Setaria italica
  Peptide Sequence Number=SeqID_130583
cccgcatccaatatatgattacaagaggaaggcaaagttcaaactggattatatggagttaaatatttttcaaatgtcttggcagcatctcaatttaccctactctaagtgatagttttattaagtgcttcatggaagaaaagtttttgtcatggagattccaaagcatgcttaatgtgagtcagcagtttcttgggtttctgtattccttgtataatgattagtagaaactgacatttccctttcctatttcaggaactttttatcctggagtaaccagctttcattttgccttctgctctaaacagtttgctatatagggtatcatctcttgatgggaactgttggactgtaatgtaaataagttttgactcgcttcatccggctggcacatgttagatgtgcacagtaaaataggcacggttcagagctggacacagctatcctttttccctacagattgtgtccttggagagatggaacgaactcgaatagatagccttgttca

SEQ ID NO: 64610 - DNA, 389 bp, Setaria italica
  Peptide Sequence Number=SeqID_130584
gggagaatatagtccattttgacctgaagtgtgagaatctgctcgtgaacatgagggatccacagcgtccgatctgcaaggtttaatcccaagccttgccccttgctatcttatctttttgggaaaactcatgttgccatggtggacattgtctcctgatttttccccaattcggtactttctgatcagattggtgatctcggactatcaaaggttaaacaacatactttggtatctggtggtgttagaggaaccttaccatggatggcaccagagcttctgagtgggaaaagtaatatggtgtcagagaagattgatgtctattcatttggtattgtcatgtgggagctgcttacttggggtaagtagtcccttacttcttgttactt

SEQ ID NO: 64611 - DNA, 389 bp, Setaria italica
  Peptide Sequence Number=SeqID_130585
aaatttcaatgaagggctttgctggtgacacagcaaaggcacatgccaagagcagtatggttgctggtgaaggagtgagcaatattcgcaccgtggctgcattcaacgctcaaagcaagatcttttcactcttcagccatgaactgcgcataccagagcagcaaatccttcgtcgtagccagacatcaggtcttctgtttggactttcacagctatgcctgtactcctcggaggcgctcattctctggtatggttctcatctcgtccgatcacatggatccaccttctccaaggtcatcaaggtgtttgttgtccttgtggtgactgccaactctgtagctgagactgtgagcctagccccagagatcgtccgtggaggtgaatccatc

SEQ ID NO: 64612 - DNA, 343 bp, Setaria italica
  Peptide Sequence Number=SeqID_130586
tattggtttgggtaggtacgtacggttagtttgtttgtccctattcgttcttgttcctacttataagaaacgtgaacatgattgctgtgattcaacaaggccaagttgttgagactgggacacacgatgaactcctagcaaaaggaagcactggagcatatgcctccctggttcgttttcaggaatcagcacggaatagggatcttggaggtgcatctacccgcagatcacggtcaatgcacttgacaagctcactttccaccaaatctctcagcctcaggtctggaagtctaaggaacttgagctaccagtacagtactggagcagatggacgcatagagat

SEQ ID NO: 64613 - DNA, 336 bp, Setaria italica
  Peptide Sequence Number=SeqID_130587
caggaactgatcacccagttgctcatctgtatgatgtaaacactttcacatgctatttatcagcaaatccacaggattctggttctcccattaaccaggttcgttactcttgtactgggagcttgtatgttactgcttctaaagatggctctctgcgcatctgggatggagtttctgctgaatgtgttcgtcctattattggagcacatggatctgcggaagctactagtgcagtttttaccaaagatgagaggtacctcctgtcttgtgggaaaggaattacttactagtacaaagttagtagggaaagttagggaacttaggaacgtaacttaa

SEQ ID NO: 64614 - DNA, 271 bp, Setaria italica
  Peptide Sequence Number=SeqID_130588
ccagagtgtgaatagaaggcatgctggtgaaactgtcattgacatctcaaaccttcctccagcaatattggtgctgtttgctcttttcatgtcagtaagccccccaatcccttccttctgatggctcatctcttccaaacagtgtagatgaccagaccctgacagagaaaggagaagataaaaacagcagaacattatggaagaatttcatcattagcaagcccacttgtttagcaacgttcataattttagcatgtataacagaaaggaa

SEQ ID NO: 64615 - DNA, 378 bp, Setaria italica
  Peptide Sequence Number=SeqID_130589
agcctcattttgaagtctgctgcacagtgattcgcacacatggtccttgttaaatcccatattaacaacatctcgaagtgtatcctcatcaatcattttggcttgctgcgtcgtgtctggtggaggcactgccaagtaacgaggaaggcgattctggaaccattgatgctcccgaatttcacgaattgtgattctcttcataggctcaacaacgagcattcttgggatcaaatccctagctaaagcagacaaatgacttggaagagtgtagatacctcccttaatctttttgaaacaaggttgggaaataattactacaatacaatacaaaataggaaagaagttaccaacaaaagaaagtagacaataaaaggaata

SEQ ID NO: 64616 - DNA, 235 bp, Setaria italica
  Peptide Sequence Number=SeqID_130590
caggttgggaatattctcatcatcaaatggaagagttccacaaagaagtgcataaaggatcactccacaactccatacatcaacctcaggtccagcatataatttaccagatattacctcaggagcagcgtagtttggactcccacagctagtcttcaaaaaaatagaaccaatacaatagactaattagaacaattagactacaaagaccaaaagtaccgacaaagttttaaca

SEQ ID NO: 64617 - DNA, 449 bp, Setaria italica
  Peptide Sequence Number=SeqID_130591
atcctcatgcgctgcaattgttctaggtgaaggacaaaacaacgctgatggcattgtgtccaaactgggtcgtggagaggcttgtatgaagtatgtccgatccgtggcggaccaagagtctgagacatgagaaggtgaaaaaatgttgtcacttccaaatagaaggtaagacaggaaagatccacatacacatgttatgttcagggtttttgagggcaccgcggaaaagggggtggtgcactagcacgtaagaagggagcaaggaaatgactccgttatttttaaccaaacaataatgccatgtttggatcttagcagctaaaattagcatgccgagctccaaactgacttgctataaattagtccattagcactaatggatccatttatatactaccgaagctttgtgtgaagctgatgcaagtcaagttctacacaaattctacatg

SEQ ID NO: 64618 - DNA, 251 bp, Setaria italica
  Peptide Sequence Number=SeqID_130592
gcctgcgggaatcaaacagaggtccactaagcaacatatgaagtgagagaagagttcgggtgctccgaactattctcatgaagtgatcccataaaataatccaaataatattattggttgcgagtcgtttccatgatacaaatcaaacatacagtaaatctttcttgaatgataatctgtgtccaccatatgaggcactgtctgtttaaacaagaagactccaagatattatggatgtttcccaaataatt

SEQ ID NO: 64619 - DNA, 256 bp, Setaria italica
  misc_feature (21)..(21): n is a, c, g, or t
  Peptide Sequence Number=SeqID_130593
caattgttctaggtgaagganaaaacaacgctgatggcattgtgtccaaactgggtcgtggagaggcttgtatgaagtatgtccgatccgtggcggaccaagagtcttgagaattcacttcttctccttgtaaatgaagaaggtgacgaagcctccggcgatggtcgcgaaagccatcagccacacgaccaccgccaccggcggtggcatgacagccgcgactttgccggagaaggccaacgttagcagagttgta

SEQ ID NO: 64620 - DNA, 260 bp, Setaria italica
  Peptide Sequence Number=SeqID_130594
cccgtaagtagtagaatatgtacttaggggagtgcaatgatgcgagcagaggcacatcgacatattctactacttacgggagtgcaatgatgcgagcagaggcacatcgacatatcatcgatccttgagaattcacttcttctccttgtaaatgaagaaggtgacgaagcctccggcgatggtcgcgaaagccatcagccacacgaccaccgccaccggcggtggcatgacagccgcgactttgccggagaaggccaacg

SEQ ID NO: 64621 - DNA, 277 bp, Setaria italica
  Peptide Sequence Number=SeqID_130595
ttacgtagtaagtccgtacgtaaggtcttattggtcctattccttgttccccctttcgtcgcccggagtatcgccataactgagttgaaggtgaggaagccaaaccccaggagcgtcagccaggggaaggccccgtcgccattgttgccttggcggccgtcctgctggtagtcggcctgctgctccacggggacgaagatcaaacgctcggctgcaggatcctcctctcttggcctggggtaacagcttgatgtgcagtcgccattctctcttaaaa

SEQ ID NO: 64622 - DNA, 327 bp, Setaria italica
  Peptide Sequence Number=SeqID_130596
ttcttaagtttgtcaaacggtctaaactacgtcttgtattcatagatggatcgggtgctcttatttcacatgtccaaggatgttcagactggtgtggtggtgacaaggcaggaggcggacgctttcagcactcaagtccagcgaccactttcagcttcagccctggagtccaatgatccccacaggcaatgcggccaccagcgtttccagtgctcttgctcagctcgtgccccaccctttccaacgatcatcaggatcagcgtgaacaacaacagctctgccaatgatcgagttcggcccagtcagtgggatctggctgtcggtaac

SEQ ID NO: 64623 - DNA, 400 bp, Setaria italica
  Peptide Sequence Number=SeqID_130597
cggcaggtgctacaagtgcgaacggcaaacacgctgatcatagatggatcgggtgctcttatttcacatgtccaaggatgttcagactggtgtggtggtgacaaggcaggaggcgacgctttcagcactcaagtccagcgaccactttcagcttcagccctggagtccaatgatccctggaaatgataatacaatgcaatgagaaatccatatagtataacaaggagcatttggtatttgttattatacagaaaatgatgcttgtttggaggaaggaatggggctggccagctggggaaacagtgaacataccacaggcaatgcggccaccagcgtttccagtgctcttgctcagctcgtgcccacctgaacatacaaacacaaaaacacaatataaact

SEQ ID NO: 64624 - DNA, 297 bp, Setaria italica
  Peptide Sequence Number=SeqID_130598
tggttgggtcaacgtagcttgagcaagagcaaacgctggtggccgccctttccaagatcatcaggatcagcgtgaacaacaacagctctgccaatgatcgagttcggcccagtcagtgggatctggctgtcggtaacatggatgttagcaacaccatctgctcccgctgtgacatttccgagatctccagcatggcggttgtcatcttctggtgctccatgctccttgcccgcaggattgtaatgcggtccagttgacatgcagccatttgtggtgtcaccaagtgcatgcacatgg

SEQ ID NO: 64625 - DNA, 245 bp, Setaria italica
  Peptide Sequence Number=SeqID_130599
agagacacttccggtcacagtggtggggccatctccctcttgggtgaagtagatggtgcccttgacaccctcactgctaccaagcacaacaacagccttcaccattgttcatgtgatcaacgatctgagatccgaccgcgactgcttccacggaatcggagaccggagtagattacgcggagcaacagcacagtgaggcgatcgaaacccccaaaatcgtggggttttggtcaagcagcatacct

SEQ ID NO: 64626 - DNA, 224 bp, Setaria italica
  Peptide Sequence Number=SeqID_130600
cagtttccttaatgcaagtagccaagtacccactacatgggtatgcaacagatgggaacaaagaggagcaagagatctttaccatctgctcccgctgtgacatttccgagatctccagcatggcggttgtcatcttctggtgctccatgctccttgcccgcaggattgtaatgcggtccagttgacatgcagccatttgtggtgtcaccaagtgcatgcacatc

SEQ ID NO: 64627 - DNA, 245 bp, Setaria italica
  Peptide Sequence Number=SeqID_130601
tgtccaaggatgttcagactggtgtggtggtgacaaggcaggaggcgacgctttcagcactcaagtccagcgaccactttcagcttcagccctggagtccaatgatcccacaggcaatgcggccaccagcgtttccagtgctcttgctcagctcgtgcccaccctttccaagatcatcaggatcagcgtgaacaacaactagtcttcttgtccttaatttgttatttcgtttagttttcggtttc

SEQ ID NO: 64628 - DNA, 203 bp, Setaria italica
  Peptide Sequence Number=SeqID_130602
gtgcgaacggcaaacacgctgatcatagatggatcgggtgctcttatttcacatgtccaaggatgttcagactggtgtggtgggtgacaaggcaggaggcgacgctttcagcactcaagtccagcgaccactttcagctttctagtcccttggtagttcctaattgtattccctactaggtctaatgtcggtcctacctagta

SEQ ID NO: 64629 - DNA, 149 bp, Setaria italica
  Peptide Sequence Number=SeqID_130603
tccctcttggtgaagtagatggtgcccttgacaccctcactgctaccaagcacaacaacagccttcaccattgttcatgtgatcccttccttcctcgccgcgggggtcgcctgagatcacatgaacaacagccttcaccattgttcatg

SEQ ID NO: 64630 - DNA, 196 bp, Setaria italica
  Peptide Sequence Number=SeqID_130604
tggagaaacccagacgtgcccagcttctacggacagcatcagacggtcctcgtagtgaatctccatttctgggctgagctgttgaggcagggttggcattcttactctgctcccctccaatcttcagcacagaggccatggagttgcaggagagggggaatcaggcccaaagttaactgctgcttgatttccattg

SEQ ID NO: 64631 - DNA, 231 bp, Setaria italica
  Peptide Sequence Number=SeqID_130605
ctctccggttagcttcttcatcaccaagtgtgacactcttctgagaagaaagctgagcgtctgctataacaattagttgctagattgcacttaagcattagccttgacgatttttagaactaatgtcttcctgtattcctcccacaagcatctctagtgatggattcatgatcagattctctattgttacaccatgggcagttgcaacaagctgtattccccgctgggcaa

SEQ ID NO: 64632 - DNA, 304 bp, Setaria italica
  Peptide Sequence Number=SeqID_130606
aaatacaaaatttgatatgttgcattcaagcagcaagaccaaaaagagtaaaattacagacaggaacagcagaagacgacattttggttcgggaaccggacactgaatgaaatgcagaatgtccttacctgtattcctcccacaagcatctctagtgatggattcatgatcagattctctattgttacaccatgggcagttgcaacaagctgtattccccgctgggcaatggtgctagcagccatagcctctaattttgttccaatttcatcaattaacaattagtacctagtaaggtaactaa

SEQ ID NO: 64633 - DNA, 246 bp, Setaria italica
  Peptide Sequence Number=SeqID_130607
agaaacaacgcctctgccgaatatactatgtccagatcaccgtccatagtactagcactggtagtggtactatgtccagatcaccgtccatagtactagcactggtagtggtactagtttcttatggtgtgatccctccacgcgtcagcctccggttggctggagcgggaactaatcacgcgtttgccctcttaaactaggcttcgtctacctcaggacgcgtagaaaggaccccccggtagacct

SEQ ID NO: 64634 - DNA, 433 bp, Setaria italica
  Peptide Sequence Number=SeqID_130608
aaagttcttcaaattaaagcaagaatatggttctaaatggtctggagcctattagacaaatggttatcaatttacatttggaacttataataaaatggcttcaacttggttcaaaaagtaacacctagcgtttaattgtatgagcaagctggaccgctaaaaagatttagtaaaacataatcgtaggaacaattcccataacaagctgaagtatgaatgcttcttgcacaaacatatctagatacatgtaaaatggactaactggttatgtcgtttcaaacagacaaaatgtgtacaaatatgtagttgtcagatcatgaactgtcgtcataccaaatccagcaaagaaggcccaatttgactcaaagaactcaagcctcttattcagactcactgcaaagaagttccacttgtactcgaagcagtagtaggc

SEQ ID NO: 64635 - DNA, 417 bp, Setaria italica
  Peptide Sequence Number=SeqID_130609
cgaagatgtacagcccactcctaattatggagaggcgaacagcttatggacaaacggcgttgcgacaagcacaaagcagcgtcttctttgaaatggccgcgttgtgataagcacaacgcagtgtcttctttccttgactgttcctgtggatctttcattcttctttctgcatcgctggaaatagttgcagtacctgcgtcgttagtcgcttcgcgacaaagaacacaggtactctttgcagtttcccttcgtgtgcaggtttcagttcatcaatcacttgttcagcctgagtgcctgcagcagtcaagacaaactggaaaagcaatgttgtcaagttggattcacagaatttagtgcttgttatttgtattttacgatccaacatgtatgcactaaattctgtgaatccaacttgac

SEQ ID NO: 64636 - DNA, 247 bp, Setaria italica
  Peptide Sequence Number=SeqID_130610
gcttggcaatgtcattatacctgacataagatggtccccatcacatatgggataacaggatgctcccttctgtttagtctctgaaatacgcttaatttgaggataataaaatgagaatccataccaaagtgtacttaatatgaagctgaagacataaagtggataaaaccaaaatacataaaaaatctcaacaaggccccagcgtaagaatgaatagatagctgtggctgccgtgtgatcacaaaga

SEQ ID NO: 64637 - DNA, 139 bp, Setaria italica
  Peptide Sequence Number=SeqID_130611
ggagatgactgcttaagcacattgttgggtagagaatgctcatgtggtgaagagtcatctccaagctttagcacattgttgggtagaagaatgtgcttaagcagtcatctccaagctttagcacattcttctacccaac

SEQ ID NO: 64638 - DNA, 229 bp, Setaria italica
  Peptide Sequence Number=SeqID_130612
atctctgcctcatctttcggcgcttcctcttgagccgcctcatccgcttcttcttccactgaatatcacagaccaacaaaaaacacatcagtgaaaccgcacaatacacaagttgcttaagaggaagcgccgaaagatgaggcagagatccaagtagacagatttgcctcgtccgtgctcgggattctgcagttcggttgcacttttactgctcaccaatggtttcaga

SEQ ID NO: 64639 - DNA, 186 bp, Setaria italica
  Peptide Sequence Number=SeqID_130613
gtgctcgggattgtgcaaatctgtctacttggatctctgcctcatctttcggcgctccccgccgccgcgatgagggccaagtggaagaagaagcggatgaggcggctcaagaggaagcgccgaaagatgaggcagagatccaagtagacagatttgcctcgtccgtgctcgggattgtgcagttcg

SEQ ID NO: 64640 - DNA, 264 bp, Setaria italica
  Peptide Sequence Number=SeqID_130614
ccggcgaggcctccgccgacaagcgggccgacccagtagatccagatgttggtgaagtcgccgctggccacggcggggccgaaggagcgggccgggttcatggacccgccgcttgtagtcatcttcttcgtaccttcctccatgacccccaccacttgaagccccatagccatatccaccaccactaggcttcttgtacccatcatcttcctcatacctccctccaccatgaccaccacttggcttcttgctgtactcatcttc

SEQ ID NO: 64641 - DNA, 228 bp, Setaria italica
  Peptide Sequence Number=SeqID_130615
agatggttacaataagaagcctacaagtggtggctatggtgggggagatatgagcaccagtcttcttgtacccctcctcttcttcatatcttccccctgaatgcccactaggcttcttcttgtagtcatcttcttcgtaccttcctccatgacccccaccacttgaagccccatagccatatccaccaccactaggcttcttgtacccatcatcttcctcatacctcg

SEQ ID NO: 64642 - DNA, 346 bp, Setaria italica
  Peptide Sequence Number=SeqID_130616
gttttgacttcggctacagaaatgctaaatctttataggcttctttgtccatccgatggttttgatggttttcatagtcgacccttgaaaatgatttcttttgcaccttgcgtttcagcttcacgaggctatcatgagagaagaatcaacggagtatgaagaggggatcatcctccaggaattcaggaagggtttcaaactcggggaaagactacttcgcccggcaatggtcaaggtatctgcaggaccaggcccagaaaagtctggggatgatgaggaccccacagaggtcgaagatagtgtggcacctcttaaggttgaagatgctgaagatgatgacggcgat

SEQ ID NO: 64643 - DNA, 161 bp, Setaria italica
  Peptide Sequence Number=SeqID_130617
gcaatttattgagattctgaactcattgggtgttgaagatgttgaaactgttggcaaaccatttgatcctatgcttcacgaggctatcatgagagaagaataggatcaaatggtttgccaacagtttcaacatcttcaacacccattgagattctgaactc

SEQ ID NO: 64644 - DNA, 494 bp, Setaria italica
  Peptide Sequence Number=SeqID_130618
ggttcccagcgagccagcggtgccaggggagcgggcgggagaggaggacgcgcacggagccgaagaacgggacgcgggtggatggggtggtgacgcgccgacaccgtcgggggtcgtagacgaggctcatccggtcctcaaagcaggggacctagctggcatcaaattggaggttacatttttttatttagggatgaggtgttttttggttgacaaaaggacctctcatgcttatgctggacttgaaagaaatccaaacatagaagagccacacatggacaatttcaccagtgagtttaatcctaattaaattgtatgtgatccagctcttagaaaacaaatatatgagtatgcccctgaaattcaagaccaagctaggagagcatacatattgaaaggtccatcacaaccaacaaatatattgaaagttctaggttcaaggagcttctcagttgggtttggttaattaaagtaaaattaattaatttggttta

SEQ ID NO: 64645 - DNA, 256 bp, Setaria italica
  Peptide Sequence Number=SeqID_130619
atttttttattttagggatgaggtgttttttggtttgacaaaaggacctctcatgcttatgctggacttgaaagaaatccaaacatagaagagccacacatggacaatttcaccagcaatcttctagagttgatagattttctaaaagacaacaacgaagaagtcaggaatgcctatgatcgaggtggcttaaattctaagatgacttctcctgatatccaaaaggattttgaaaggtgttgtgcagaagaaataa

SEQ ID NO: 64646 - DNA, 406 bp, Setaria italica
  Peptide Sequence Number=SeqID_130620
gaagaaactgttgagagttatcggtttacaagaagaaggaagctcacttgaatttctcagaagaggatacaagaatgctacatggtgggaagagaacgttgatcaggagagtcggccgcatggcgaacttgagttgctgcacctgctggctggatgttgatctgatcaacaacaaatggaaataccaaacgagttcatgacttggtgtaaacgaaattacagaaacaaggcatgtacagtgtggcattgcctgtgctgcaactacgtgtaccggcctgcgagttatggatttgtttttcccttttttgtgactttatggtggttgagttttggctatgtaaaacctgaaggatcaactgcaaaaatgcagggaactccaaacttgatttaaaatctcgtgactcgt

SEQ ID NO: 64647 - DNA, 407 bp, Setaria italica
  Peptide Sequence Number=SeqID_130621
cgtgtagacaattgcagttactccgtacatagtcaattacagtggcgctgattccgccaatacccaggcccttggcaggttatgctgaagcaggctgatggttcttatgcatgtgttgcagagagtgcagctcggttcactttaggacaggtcagaccataagttacttgaatgaatttagttaccttttcctgctctcgtgtgtgtttgaaaaagtaagaaaaaaatactaacttcgttcgagcttgttgcgtctgccattcaacatcttgtctttaggccaaagaagaactgttgagagttatcggtttacaagaagaagaaggaagctcacttgaatttctcagaagaggatacaaggttcagatctcatcccagtcaatagttgataggacgaatacgcttcc

SEQ ID NO: 64648 - DNA, 268 bp, Setaria italica
  Peptide Sequence Number=SeqID_130622
cgccccgactgccggccacctcctcgcggctccggccccgccgcctggccgtctccccacgcgctgaggcggggacggggaccggcatgggggacgtggaggcgctcagggccggggtgtccgtgtacaagccgcgctcctacgacgtgctcgtctccgacgccgcgcgctccctcgcctgcgccatcgacgacggcaagacccgcctcgagatcgagttcccagctcgccgctcttcgttttgctgcgtcgctgtccccgtgcccgc

SEQ ID NO: 64649 - DNA, 464 bp, Setaria italica
  Peptide Sequence Number=SeqID_130623
aagactgaaactccaatggctgactacagccttgtactattatcacattactatctatcatcaacatagcttacgtctgaacaaaccactccggtgcaattgcgacgcccccgcagtgttcttgcttgcttcaggcatgacaggaagacgaaaagttccttgacaacgtcactttcccggggttgtgaagctacgaatgaatcagagtacatagatactttaaacatgtcgagtggatatatatgcagatagttatcaggtgcagtgagtcagacaacacaaatctggacaagtcatgttggtgggctgaattctgcaaattggcactgctccagggagaggacatggccacatgggtgcagtttcacctgccagcactacatcagtaaaccacacaaccaaactttcagcaacatgaagcactgtcaactagatcaattatgtgaagtaaaattactgattta

SEQ ID NO: 64650 - DNA, 197 bp, Setaria italica
  Peptide Sequence Number=SeqID_130624
tttcttaattagtatactttaaacatgtcgagtggatatatatgcagatagttatcaggtgcagtgagtcagacaacacaaatctggacaagtcatgttggtgggctgcaatgattaaacaaagcattgtcaatatgcatgggccactgaagaagattaacaaaaaagaatatgataactttgacctgaaaaacaac

SEQ ID NO: 64651 - DNA, 522 bp, Setaria italica
  Peptide Sequence Number=SeqID_130625
cggcgactacctcgcctgcttctgggcgcccgaccaccgcccgcccgtcaccgtcgcgttcgagttcgactggcgcagcggcgtgtccgccagggactggagcgccgtcgccaagaaggggcaggttgaaatgatggagctagagctcaggaaactggaggataccatcaaatccatccatgaagaaatgttttaccttcgtgaacgggaagaagaaatgcaggaattgaatcggagaacgaactcaagaatggcttggctcggtttcctttcactcgccatctgcctatcagtggcagggttgcagttgtggcatctgaagaatttcttcgagagaaagaagcttctatgatttcattctttttataacctcgtagcatttaggcacatgttttgtgttaacctccctactatttttagaggtccaaaaaattcctcaagaggaacaaagatgctagtacagctgagaaatactagccttctattttcctaggccaaatgaaatagatgtaaagttcaatg

SEQ ID NO: 64652 - DNA, 361 bp, Setaria italica
  Peptide Sequence Number=SeqID_130626
ttaatttagttacttaatttattaggtttgtatttgtttacttcctagtctttgttaaagtactttatttcactttgcactatcttcatgatagaactttaatatttaagttgataaagtataaaatgatattttaaagcagctactcaaatcacccgcacagctgcaagtgccgaacatttgtcacgaataaaagtttgttaactatttatctaatctcccatgatttgttgtagatgatggagctagagctcaggaaactggaggataccatcaaatccatccatgaagaaatgttttaccttcgtgacggtatgcaatctacctgagaaacaaaactgctcttcttcttttttgggtg

SEQ ID NO: 64653 - DNA, 301 bp, Setaria italica
  Peptide Sequence Number=SeqID_130627
catccatgaagaaatgttttaccttcgtgaacgggaagaagaaatgcaggaattgaatcggagaacgaactcaagaatggcttggctcggtttcctttcactcgccatctgcctatcagtggcagggttgcagttgtggcatctgaagaatttcttcgagagaaagaagcttctatgatttcattctttttataacctcgtagcatttaggcacatgttttgtgttaacctccctactatttttagaggccaaaaatagtagggaggttaacacaaaacatgtgcctaaatgctacgaggt

SEQ ID NO: 64654 - DNA, 270 bp, Setaria italica
  misc_feature (210)..(210): n is a, c, g, or t
  Peptide Sequence Number=SeqID_130628
ttctttccttgtctactaaaccccctattggtcttactaagtctatttctagttacactgttaaattgttaatcttgttaggcaccaatccttttgactccatcctggtgaagagctccagagcccttgcactgcaaccattcgctgtgaaaccagctaacattgcattccaagtatccaagctcatcttttctccagcgttctcaaacncataaactgcaccctcaatgaacccgcattttgagtacatgttatcaatgccgagctcaa

SEQ ID NO: 64655 - DNA, 280 bp, Setaria italica
  misc_feature (48)..(48): n is a, c, g, or t
  Peptide Sequence Number=SeqID_130629
taacctaatttaaactttagaactatttctcttagaatgctactctcngcacaccccatggctacaagcattcagtacactgttaaatgtaatcttgttaggcaccaatcctttttgactccatcctggtgaagagctccagagcccttgcactgcaaccattcgctgtgaaaccagctaacattgcattccaagtatccaagctcatctttctccagcgttctcaaacacataaactgcaccctcaatgaacccgcatttgagtacatgtttatcaatg

SEQ ID NO: 64656 - DNA, 263 bp, Setaria italica
  Peptide Sequence Number=SeqID_130630
ccgccacggcgaggcgcgtcgccgggttcgggtcgagcaggcgggacacgaggcggcgcgccggctgcgacacccaccgcgggacgacgtactcgcggcggtgcgccttgcggcacatgtcggcgatgttggctccgcctccacgaggtgctcgccacgcgctccaaggtgtacctcgtcatggagctcgcccccggcggggacctcctgtcccggctggcctccctgccgacgcgcaggctccccgagcaagcggcgcggcg

SEQ ID NO: 64657 - DNA, 477 bp, Setaria italica
  Peptide Sequence Number=SeqID_130631
ttgttcgtttcggttcggttaggttccttaagttcggggttcctttcttaagttctttggttccttaaggtttgttcttggtagtcttcgtcctaactttctattgtaaggtccgttcgggtagggttgcccaccaagcgctccttcttctagccgccgacccggcactcgcctcgccgtcccttcagttctccatcactaccggtgtgctcaacccctgctgctttgctgctgctccatcgaggcatcgatcatcatagctactagctagtagcaagcttgtgtgacgatgtatgccgctgcatccgagaaccctaattgtaaaaaaagatttgtatacgatgtactgtcgccgcccatgtgatgcctgtgatccatcatccatcgcagcgcagagcggccgttcttctcttttttgttggcttgtatatcgatccatccgtatggtgtttgagtgatctgtttgcgtaaccgtgc

SEQ ID NO: 64658 - DNA, 425 bp, Setaria italica
  Peptide Sequence Number=SeqID_130632
actacaaagaaagaatcgagaggaagcttgagccaggcggatgccttctccacctggctcaagaagatcgagaggaagcttgacgagcagcgcgccaaggcgttggagaagacgcagaacgacatcgccaaggcgcggcgcaaggcggaggagaagcgggcgtcggcggaggccaagcggggcctcaagctggccaaggtgctggagctcgccaacttcatgaaggccgtcgggagggtgcccaccaagcgctccttcttctagccgccgacccggcactcgcctcgccgtcccttcagttctccatcactaccggtgtgctcaacccctgctgctttgctgctgctccatcgaggcatcgatcatcatagctactagctaagtaagacaaagcttagtgtgacgatgtatgccgctgcatccga

SEQ ID NO: 64659 - DNA, 475 bp, Setaria italica
  Peptide Sequence Number=SeqID_130633
gggtatccataatcgcgtcatatgaagcagggttatattacaggcatacaaatggatgtcttagaaggacatgagccatcacactaacatgaattttctacactcccttgagctatttcagccttcaccatcatctaacagcttttttggatgtctttcacaatgcaatcaaaactcaagcttgttgttttgagcaatctgttcgaattaccttggagctgcaggaggatggaaatagttcagaactactcatatataatagatagctaatgactcggcataatggtcactcacccaatatgatcatacaacagtaggttcaatccatgtagattaataagtctttgccagttttctaggcttctgaacagaatggatcagaaattactaccttcttaggtacgagttgcaggctaccatggtggtcgcaggtgatggcagtaacgttgcaagggaagccaccatggcacccatg

SEQ ID NO: 64660 - DNA, 352 bp, Setaria italica
  Peptide Sequence Number=SeqID_130634
ttcttaaaccaaaatataaatcaacatagatgaatggaagaggggattagccacccttgaatttttatggattcattgcatgatttactgacagcaaaactcaaatgacaggttgatttgaggggccgaataccgtcaatctgaagcaacttccaccacaatggaggccagaatcacagctgttgcacattaagaaactcaaatgaggaacagtaaaattgcaacatttaacaaacaaaattatatgaggaacacaaaattcatagagtaagcatgaccagatcctacaatacattcctcggagactacaccatgaatctagcatgatttgtgtaggtgaagttgccacaaa

SEQ ID NO: 64661 - DNA, 317 bp, Setaria italica
  Peptide Sequence Number=SeqID_130635
tgtctaacctattattcgtaagtccttaaggtctttactagtagggttggtaggtactacttgttctttatgtgctaggatggattttctataccaagagaattgtagcaaggagaaagaaatatgggaaataaatgtttgatcgaggctgtgtctttgcgtagttaaatggtgaaatacaagtggagaggagatgatgtacattagattcgttggttgtcttctcttgttttgggtgcagttggtaagctctgctggtttcttgtgctgtatatgagcatttttatcagctagggttccgatatgaggctgtaaat

SEQ ID NO: 64662 - DNA, 242 bp, Setaria italica
  Peptide Sequence Number=SeqID_130636
ccctcacggtctcgattggaatcccccggtttggattgtgccgattagtgggcgtcgctctctgattcggggctgtggtggcttcctcttcctgcagtgtgatcacggaggtgatgcggaacaccagcattgagaagttcttcatggcgatcgagcccctcatccggagagtggtaaaagaagaaatcgagtcagcatttgcgaatcatacctctatgatggcaagaagtgtcacggacact

SEQ ID NO: 64663 - DNA, 391 bp, Setaria italica
  Peptide Sequence Number=SeqID_130637
cttccgtagtggtcttcttacgcaatatagacccccagagctttggctgccaatggcgacccagcacatctctctgcaatcggaccaaccaggtttacaagctcatcatctcgcttatgcaaactgaatgctcttgtttcaataatttcctgtatgaattccttgcccaaagttccgacatcaaggtatttcctttcgtgtgagatcccaactgtacctattaattgagctatttctgtgttacgggtggttgtcagtacggcactaccgacaccaccttgttcaaggcctgtctggaacaaggtggtgtcggtagtgccgtactgacaaccaccttgttccagacaggccttgaacttttcccacttgtccaagaagctcttctcatcca

SEQ ID NO: 64664 - DNA, 237 bp, Setaria italica
  misc_feature (182)..(182): n is a, c, g, or t
  Peptide Sequence Number=SeqID_130638
cggcgaagtcggtcgagcaggagcgcaggaaggggatcgcctggacagaagatgagcacagattgtttcttcttggacttgaaaagtatggcaaaggtgactggcggagcatctcacctttgccatacttttcaagtccaagaagatgagcacagattgtttcttcttggacttgaaaagtntggcaaaggtgactggcggagcatctcacctttgccatacttttcaagtccaaga

SEQ ID NO: 64665 - DNA, 231 bp, Setaria italica
  Peptide Sequence Number=SeqID_130639
gcaataaagcaatatcaataaactcaatgtacattacaaactgttgttacatgtagcattttgaggacattgcagattatgttcttgttgcatgcaaactttccatgtacacctgccccaagtgtttcaggttggtgctgtcactatgtgtcgcggattcgcgatctggcagccttcaggatagatactgactgaagcacaagtccacaacatctatcctgaaggctgtct

SEQ ID NO: 64666 - DNA, 230 bp, Setaria italica
  Peptide Sequence Number=SeqID_130640
ctggacacagcaacctttttcagaatcacggacagtaagcatacacatgatttttacatatgcagaaacttgcatactgtctcaattgacacgttctctcccctcaacagtttccttgacaaagctgcggtcattttgtggaatgaacgtgatggttatcatgatccatggagactttgcacagtcacacaagttgaagagcttaaaatattactgaggatgtttccaat

SEQ ID NO: 64667 - DNA, 236 bp, Setaria italica
  Peptide Sequence Number=SeqID_130641
ggaacagcggtatcaggatgcctcaaggttgaccaggcttgctggaaccagcttggtaggttggtgggtgggatatgctaaggacaccgatgattccattgggagaattgtacgaataagccctggtgttgggagatatgtggctaagagctacagcccaaggtggtttctctcagttcataacttttatcttaaggttaaaattaggcaagatatcatagtgcaattccaactta

SEQ ID NO: 64668 - DNA, 435 bp, Setaria italica
  Peptide Sequence Number=SeqID_130642
gagagcctgatgttcctggcacacttcgtcggcgacgtgcaccagccgctccatgttggttatgaggaagacgaaggcgggaacacgatcatcgtgcactggtaccggaggaaaacaaacctgcaccacgtctgttcttttacctctcatagaaattaaatttacctgcatatgtactctgctagatattcagtctgatagtcagacccttgtgtttttctaggtgtgggatgtcagcatcatagacaccgcaatcaaggacttctacaacagaagcatggataccatggtagaggctctcaagatgaaccttacaggtggatggtctgacgacattacacattgggaaaattgcaagaacaaatgggcaacctgcgcaaacgactaatgcgattgagagcaattcattattcctgcaactatgcctataaagat

SEQ ID NO: 64669 - DNA, 238 bp, Setaria italica
  Peptide Sequence Number=SeqID_130643
actcgatatccggttgtggagaagaggctagcacaggctggcatcagattggcgttgatacttaaccggatctttgatggggataaagcagatgatagactattgcaagtacagtaatagttataatcaacagaaatataggctgattatcctttgttgcctactatttaactaaaggtaattagggttacctaatttaacttaacttttaagtttaaatttacttaagttactttaa

SEQ ID NO: 64670 - DNA, 182 bp, Setaria italica
  Peptide Sequence Number=SeqID_130644
aagatgaaccttacaggtggatgtcagcatcatagacaccgcaatcaaggacttctacaacagaagcatggataccatggtagaggctctcaagatgaaccttacaggtggatggtctgacgacattacacattgggaaaatcgcatagtcgtttgcgcaggttgcccatttgttcttgcaa

SEQ ID NO: 64671 - DNA, 408 bp, Setaria italica
  misc_feature (285)..(285): n is a, c, g, or t
  Peptide Sequence Number=SeqID_130645
taacgtaaaccttaacgttaacgtaacccttaacttaactaaaggggtaacgtactaacaacgttacgggacgggtagacaagtgccagttcgtgacgccgcggctgtacaacttcagcgggacgaaccggccggacccgacgctggacagggggtaccgggcgttcctctccctgcggtgccccaggggcggggacgggacggcgctcaacgacctcgacccgaccacgccggacgccttcgacaacagctactacaccaacatcgaggcgcgccggggggacnctgcagtccgaccaggagctgctgtcgacgcccggcgcgcccacggcggcgatcgtcggccggttcgccggcagtcagaaggcgttcttcaagagcttcgcgaggtccatgatcaacatgggg

SEQ ID NO: 64672 - DNA, 423 bp, Setaria italica
  Peptide Sequence Number=SeqID_130646
caactcggcgcgcgggtaccccgtggtggacgccgtcaaggccgcgctggaggaagcatgccccggcgtcgtctcctgcgccgacatcctcgccatcgccgccaagatctccgtcgagctgtccggcgggccccggtggcgcgtgccgctcggccggcgcgacggcaccaccgccaacatcaccgccgccaacgacctcccgagccccttcgacaacctcaccgcgctccagcagaagttcggcgccgtcggcctcgacgacaccgacctcgtcgccctctcaggggcgcacacgttcgggcgggtgcagtgccagttcgtgacgccgcggctgtacaacttcagcgggacgtaaccggtccggtacccgtacgtctttggttacttagggggtttaccgggttcgttttcctttcttccctt

SEQ ID NO: 64673 - DNA, 397 bp, Setaria italica
  Peptide Sequence Number=SeqID_130647
gcgcgacgtacgcgtggatggacttcttgacggcgccgtaggcgtagtggagcatgagcaccgcgtcgccgcgggcgaagtgcccctcgtcgacaacgccaccaccgccgccgccatcgtcctccagcacgccgcgtggagcttcgccgaggggcacttcgacaacctcaccgcgctccagcagaagttcggcgccgtcggcctcgacgacaccgacctcgtcgccctctcaggggcgcacacgttcgggcgggtgcagtgccagttcgtgacgccgcggctgtacaacttcagcgggacgaaccggccggacccgacgctggacaggggggtaccgggcggttccctctccctgccggtgccccaggggcgggacgggcggcgctcaacgacctcg

SEQ ID NO: 64674 - DNA, 241 bp, Setaria italica
  Peptide Sequence Number=SeqID_130648
ctcaagtgtgatgatattagatatacttgaggagccaaatttgagctcttatttgtaatcaagtatataaataagagctcaaatttggctcctcaagtgtgatgatattagatatacttttcattttccaactttaattatttgtttctgggaggcaaggaggaactgcagatcaaggatttacgctcatgtcgtgtggatgaatcagtttgaacaatgttttgagagccggaagggggag

SEQ ID NO: 64675 - DNA, 475 bp, Setaria italica
  Peptide Sequence Number=SeqID_130649
gtgtcttattagggtattattgcacttgtccaccaacaataataccctatgcacaaattaaagaatctacatacgacaggaacaagagcctacatagcagcaggtgcgtgcaaacaaaaggacgtttgtcctgctgcagaacgcagggccccatccaatgtgtgcattattcgaacacggaataaatccatcgatcgataatacaactactgctggctgtaattagtaatttttcgcttcactctaatctccgtgcgcagtccggcggcccaaagtggggcgttctgctggggaggctggacggcacgacggccgacttcaacggcgcatccaacctgccggcgcccttcgaaaacctcaccgtgctccagggcaagttcaaggccgtcggccttaacgacgttcgtaccttcgttcgtcttcttcttctaggtctacgtagtcccgtctacctttattctagtttccggtttaa

SEQ ID NO: 64676 - DNA, 287 bp, Setaria italica
  Peptide Sequence Number=SeqID_130650
cgcgccgacatcctcgctatcgccgcggagatctccgtcgagctgtcgggaggacccagctggggtgtactcctgggaagactggacggcagaacgtcagacttcaacggctcccaggacctgccggcgcccttcgaaaatctcaccacgctccagagtaagttccaagccgtcggccttaacgacgtcgacctcgtcgccctctcaggggctcacacgtttggcagggtacaatgtgacaaaacgtacgaccgaaccaaaccggaccgaaccggactactaacaaa

SEQ ID NO: 64677 - DNA, 258 bp, Setaria italica
  misc_feature (220)..(220): n is a, c, g, or t
  Peptide Sequence Number=SeqID_130651
gggccacgtacgcgtggatggacttcttgacggagctgtaggtgtagtggagcatgagcaccgcgtcgccgcgcgcgaaggcgccctcggcgaagctccacgccacgtgctgcatgacgatggccgccgccgtggtggcgttgtcgacgagggacacctcggacgtaccgcccgcccgacggcggcggccaccgcggcgcgcgagcgggcgagccccggntgggagggagtggaagtagaacgcagtcgggctgcgag

SEQ ID NO: 64678 - DNA, 235 bp, Setaria italica
  Peptide Sequence Number=SeqID_130652
cgtgcccgtgcccatgcgtgatcatgcagcattcacgatgcattattgtttcattggtgagtgtggtgatgaccgtttattgttcatagggctgcgacgggtccgattctgctggacaacatgacagggatgcagtccgagaaggagtcaccgcccaacaacggctcggcgcgcgggtacgaggtggtggacgccgtcaagtgcgcgctggaggacgcctgccccggcgtcgtct

SEQ ID NO: 64679 - DNA, 262 bp, Setaria italica
  Peptide Sequence Number=SeqID_130653
cggcgcgggtacgaggtggtggacgccgtcaagtgcgcgctggaggacgcctgccccggcgtcgtctcctgcgccgacatcctcgctatcgccgcggagatctccgtcgagctgtcgggaggacccagctggggtgtactcctgggaagactggacggcagaacgtcagacttcaacggctcccaggacctgccggcgcccttcgaaaatctcaccacgctccagagggctcacacgtttggcagggtacaatgtgcaaacg

SEQ ID NO: 64680 - DNA, 259 bp, Setaria italica
  Peptide Sequence Number=SeqID_130654
ttccacgattgcttcgtccaaggctgcgacgggtcgattctgctggacaacatgacagggatgcagtccgagaaggagtcaccgcccaacaacggctcggcgcgcgggtacgaggtggtggacgccgtcaagtgcgcgctggaggacgcctgccccggcgtcgtctcctgcgccgacatcctcgctatcgccgcggagatctccgtcgagctggtaaggtggttcgaaggttcgtgcgaggtttgaggtcgtgcgttcg

SEQ ID NO: 64681 - DNA, 111 bp, Setaria italica
  Peptide Sequence Number=SeqID_130655
aacaaagggaacgacaacaacgttacgggacgggtagacaagttagaccaagttacgtagacgccgacggctgtacaacttcaagcgggacgaaccggccggacccgacgc

SEQ ID NO: 64682 - DNA, 394 bp, Setaria italica
  Peptide Sequence Number=SeqID_130656
gctgtaagttataggattctcagttcactcccaacttttgcttcccaattagttggcaaattatcttagcgcttggtggtgctctacctttctcgtacggggaagctaaagcggaagctgacctaaagagggacacttggaaactcatgctatagtaggtggtgttgaatattcatcattcttattgtatttgtaactgtgttatgtttgcaatgcaggttaagtttaagattgataaagattgccttcctctcactgagagtagtatcaagcaagctattaaggagaattacagtgcaaggagcaaatttgacccggagctcactgcaagacaagtccataggctacttgcgctgtttaagcctgccaatgcacctcagccactactcacact

SEQ ID NO: 64683 - DNA, 368 bp, Setaria italica
  Peptide Sequence Number=SeqID_130657
aaaggaacaaagaaagggaaccggaagtaggaactacaagacaaatcatggcagtggaggagatgatgattcagacatcagacaaactgaaatgcaggtccatttcgtcagcaaaagccaggatcggtagaaaacatggccgggtcaaaagtgctcagaatgggccccgtccaataacatattagatctggggcaggctacccattttttgccactccagtctccagttcagaaatcaatctcgtaccacaatgatactgtccaggatgcagtagatggcagggagttacgagtcttatcatctgccattcacaaatacaggtaacagcagtcaaagggtaaacattgcagtatatcataggaaaata

SEQ ID NO: 64684 - DNA, 186 bp, Setaria italica
  Peptide Sequence Number=SeqID_130658
ttttcgtttcggttactctctctacccgcttggccgccgaccggcaggcagcttttaacatgccattttcctgtcgcttttcttctccagtgaagcggccgcaccaggggtcctcggcgccgccacagcggcccagaaagccgcggagctccagcggtggagatcactagctgacctgttgcaagc

SEQ ID NO: 64685 - DNA, 371 bp, Setaria italica
  Peptide Sequence Number=SeqID_130659
ggcgatcaacgccaccgcgcacgcctcgcctcgcctgccgcctcctactccggcgaggcgggcgagctgcttgctccgaccgcttctagctcatcacgttgacgaaaccaatttggttctcccggcaaggttgatggtgcgatttggtaacattgcctacgacttaccacggcacattgtccgtaagaccctcgtaaacctccaaggaaagccatgtccagaccctgtgtgcacagtggcagaatacactgctcgccacccagtggttgtgccagtgccaagtgagggtgtccggctggttggtgagaagctcgggaggtgcttctccacgaccagcgagccaggtatgaagctcatctcgtctctcacca

SEQ ID NO: 64686 - DNA, 265 bp, Setaria italica
  Peptide Sequence Number=SeqID_130660
ggtcgatcaacgccaccgcgcacgcctcgcctcgcctgccgcctcctactccggcgagggcgggcgagctgcttgctccgaccgcttctagccccaggcccttcgtagccgacgagagaagacctaggcgcggcgtctggggactcgagggatcgaaatcatctcggccgcattggtgaatgctcatcacgttgacgaaaccaatttggttctcccggcaaggttgatggtgcgatttggtaacattgcttacgacttaccacgg

SEQ ID NO: 64687 - DNA, 406 bp, Setaria italica
  Peptide Sequence Number=SeqID_130661
aagacttccaccgtcaccgtttcccaactttacactgatccaatatccggtacaagtcgcttccatttgttaccttcgtaccattcacagaagtaattatatcccccaggataagacgaccgtaggcatctcgcttggttgattgcagacctgctttgccagctggtccatttgaaggagcatccaagacaagcactccacttaatccaagctgctccaaagattgatcaggggcaaattttattcccaaaataggtctggtcaccttaccaaactttataagttgatccacaatgcccccaacctgaaaacaggccttatttatattattgtcaaaatatgtgatttaactgctgggaagaatgagaaagaacagaaaaatctgaactgatgagctgacttgagt

SEQ ID NO: 64688 - DNA, 446 bp, Setaria italica
  Peptide Sequence Number=SeqID_130662
tttattgccatagtgcaggatgtaacactaacaccatatatttccagccatggtgcccatggtttttgaatttcttatatgatcagataggtcatagaaaactttacaaattacagatatcttttcatatattcatccatgcgggtgtactcaacctccgggtacagaagagtagcttctgctccgtcctccccaatgtcaaagtttgtcaggcaaccttcatagaaaatatgataaaagtgtcccactgcgatttggccgccaatatccatatctgctttaacatgttcaacacacgatgtatatttaaccgggaaagaagagaagaggtataaaatgagattttcaaatgaggattatgtgacaaatacaaaggccaacacactcaaactttatagtggcggtgctacatcatagctataagcttatatccagcttagccttgt

SEQ ID NO: 64689 - DNA, 456 bp, Setaria italica
  misc_feature (49)..(49): n is a, c, g, or t
  misc_feature (70)..(70): n is a, c, g, or t
  Peptide Sequence Number=SeqID_130663
atctgatcatataagaaaggtcatagaaaactttacaaattacagatancttttcatatattcatccatncgggtgtactcaacctccgggtacagaagagtagcttctgctccgtcctccccaatgtcaaagtttgtcaggcaaccttcatagaaaatatgataaaagtgtcccactgcgatttggccgccaatatccatatctttcattgaagccaagaactcgtcaaccggaatgtaaattttctcgatgacatttccagagagcttttcccatttcgcgatcagctcattttgagtgaggatgttttctggtggtcttaggtaaactgtcttgttcaaggtgcgagggtcatcaagggatttgattgtataagatgccacatcatcttcatccacaaatcccttgatgaccctcgacgtcgacaagctccaggccctgctgtccttcaaggc

SEQ ID NO: 64690 - DNA, 431 bp, Setaria italica
  Peptide Sequence Number=SeqID_130664
ccagccatggtgcccatggttttttgaatttcttatatgatcagataggtcatagaaaactttacaaattacagatatcttttcatatattcatccatgcgggtgtactcaacctccgggtacagaagagtagcttctgctccgtcctccccaatgtcaaagtttgtcaggcaaccttcatagaaaatatgataaaagtgtcccactgcgatttggccgccaatatccatatctttcattgaagccaagaactcgtcaaccggaatgtaaattttctcgatgacatttccagagagcttttcccatttcgcgatcagctcattttgagtgaggatgttttctggtggtcttaggtaaactgtcttgttctaaggttgtcgtagggttctattcttaagggttattttaagttaaaatttaaaagtttaaaa

SEQ ID NO: 64691 - DNA, 149 bp, Setaria italica
  Peptide Sequence Number=SeqID_130665
cagatttcgtgggtgcagactggatatttggttctgcgagttttctgcagcaacctaggatgctgcagaaaactcgcagaaccaaatatccagtctgcacccacgaaatctgccaattcagacttgataattctctacttgaatgttcg

SEQ ID NO: 64692 - DNA, 426 bp, Setaria italica
  Peptide Sequence Number=SeqID_130666
aataaaattaaagctgctattaactaaattgacgttagtatatcattacatatggttgtatgatgagatttgctagcagctaactctgaactattgaattctctcccctatttctcatgccagttgttactgtgcaggtggtgcgcgaacctggggcaagtaatgcaattgagatcccaccccctaggccaaagagaaaaccactgcatccatatcctcgcaagtgtgccgattccagcaccttggcaaatcctgcagtgggccaaccaaagcttgcccctatatcatcgtcgtctggttacaacgtagagaatggttcacctgtgtctgtgctatctgcaatgcagtcggatacttttgggtcatcagtatcaaatccatcaacagggtgtacgtcccctgcatcatcagatgatgggaataatg

SEQ ID NO: 64693 - DNA, 259 bp, Setaria italica
  Peptide Sequence Number=SeqID_130667
ttagactcatctgggttgtcaattgacaaaaggttgccgttggatgctgtcaaatctcctctgaaggatgatgcagtgcaacccaaggaggggatggatgggtaccctgtcaaggtacccatttcttttcccacttttgagatccgtatgcaaatgccagttggttcttttcagtgtgtatttgtgtactatcctacagcactgtcaccatccctaatgacagcacaccggttcaaataggttaggaagccttacacga

SEQ ID NO: 64694 - DNA, 241 bp, Setaria italica
  misc_feature (17)..(17): n is a, c, g, or t
  Peptide Sequence Number=SeqID_130668
attattattacagtgcngaaaaaaggcctgcttagttaatcactttcctccatctcctgataataagcacacacgttaattattctccagcgtacgtatgagcgaggtgattcagagcagccggcgctactctgctacacccagagcgcgccggcattccgcagcagcgggacgaggttgccggcggtgttcatcggcggcaggctcgctggctccaccgacaaggtcatgtcgctccacc

SEQ ID NO: 64695 - DNA, 271 bp, Setaria italica
  Peptide Sequence Number=SeqID_130669
caatggaattgcaccagggccaatcaagacactccaggaatgaggaagcttgcacctgaggaaaatgagcaaggggcgtcgagaaatgacaccattatttaagcttggggagaaatgggacatagcgatggccgcactctatctgggttctgatgcaggtgggttgtgttcttcactgttttctatccagattatcaacaggttcaactgtacacagagttttctattttagttactttagtctattccgtctttattcttgtaagggtta

SEQ ID NO: 64696 - DNA, 248 bp, Setaria italica
  Peptide Sequence Number=SeqID_130670
cctcgtcctcaccaccgacccaagccccgcctccggtggacggtcgagctccatgagcgcttcgtcgacgccgtcacgcagctcggcggcccggacagtacgtgcctgtgtggcgctgtgcaaggttcgtcagctcatgagctggttcttttcttcatttgattcttggcctgttcttgcagaggcgactccaaagactatcatgagggtcatgggagtgaaggggcttactctctaccacctcaaga

SEQ ID NO: 64697 - DNA, 244 bp, Setaria italica
  Peptide Sequence Number=SeqID_130671
caagagtaccctgcaagataataatgaaagaggcaattccctatatgtcatcatgaaatctgaaagaggaaaagatggaaattgtgcttccaatagttcctaaagaaaaggttagaacttggaggcaagcacataaggggcttcaaggaaacttactaaggcaagcttatgaactgaatgactctgtctagcttcttcagatcgtgcataaaatgccatgcatagcgcatcaatattgaggttt

SEQ ID NO: 64698 - DNA, 239 bp, Setaria italica
  Peptide Sequence Number=SeqID_130672
cggattgtaaggactgactgttgtcgggcttgactgtactggagtaactgtgctggctgtctgatcagttttctgttcatgaggaacttcacctgtttccttatcatcaacaacaactggatttatctcaacagccggagaatcttgagatggcaattcagtgtgagatccgtccacactccacactaccccagccagccagccagctaagcctctcctcatcctccaactcctccaag

SEQ ID NO: 64699 - DNA, 252 bp, Setaria italica
  Peptide Sequence Number=SeqID_130673
atcgcggcgcgtcgcggacggcctgcgcgagcgcgtcctgctcggtgccgacgcagtgcgcacggccctgcacgacgacctgcggcgtgaagagcgtgtcgaggcggagcgcctccacgtaggccttctggcgcacggtcctggcgcaggactccgcggctcagcaggaaggcggcggcggcgggccggccgtggtggtgctggcgttccacgtggactactgggaccacagcgggtggaaggccccttgcg

SEQ ID NO: 64700 - DNA, 276 bp, Setaria italica
  Peptide Sequence Number=SeqID_130674
accttgaacagggcgacctcaaagttcatgccgaaaactcccgagaccacgccgaagatggccaccacgaatgtggcggtggtcaggagcagctcgaactggatcagctggttccggacgttatccagctgtatgctgataaaatacctctgtatcatcaatatactccttcagcgaagttaacttgctgagggtgtaatcgatgacaacaaagtaaggcttccaacaacatttccagttcttctatgttgtactgactgctatctgagctcttga

SEQ ID NO: 64701 - DNA, 353 bp, Setaria italica
  Peptide Sequence Number=SeqID_130675
ccttagcatcctgggcaagagcagagctgcagcaggataactccatcacacagcttgaaatttttcgtcagccaaaccagtgttgacattgcctattcgttcttccagagccagcagttcctcgtaactcatgtcatcaatgtccaatctcatgtcccagtgaggatcagaatcttctcttgattcatggataactaactggtccagcatcataaaccgctcggctgctgatcctctcaaattatttcctcgatgatcaacggatggaaagcatgctagaagtagaaggctgagggattcctaccatgcttccatccgctgatcctctcaaattatttcctcgatgatcaacg

SEQ ID NO: 64702 - DNA, 398 bp, Setaria italica
  Peptide Sequence Number=SeqID_130676
tgatcactccaatagcttgaaccatatttggggtagttcgaggagggcagggttcaggaacaggaataggatttggaggcatgtagcgagggaactgaggattggatgaactagcagcataacagctcccaacactggctccatccattggatgaataattgggtttctccgcttctgtgcaacccttctgtcatccatatgggaacttggaatgaagcaatcctcagacctatgtggatagctcaaagcaggcgggtgatgagtattatgtggtgcataggtgctactggagcttccagcatgaaggaataagaccaagacaataaggaatagacaaagacaataggttaccaaggggacttacaaatacggactagggtaatagaaggttagacca

SEQ ID NO: 64703 - DNA, 324 bp, Setaria italica
  Peptide Sequence Number=SeqID_130677
ttagtcctagtctattaggtatgcaagcatggttccaggggcttcaatcggctgggtatgaggttgcccaatgtgacttgaggatggaagctcatttgatcttattgttgcacccccataacttgatgcatttgctgcatcacttctagggtgcataaatagctttggaccaaaaggcggtggttcattctgaaaccggttcacctgatccatcctgggcatatgtgtgttgttatgatgatgtcccgccatagcacatgaacagcaggattagatttcctttaaccttcgcggacggccgatcggctggtcgaatcggcgcct

SEQ ID NO: 64704 - DNA, 322 bp, Setaria italica
  Peptide Sequence Number=SeqID_130678
catggcattcagagagaggccatactatcctgctccacagaggaccaacgtaaatgtcccccctgttccgacacttcctggttcttctgatagcataccctttttgcatgggggatatgcccccagggcagttcctcgtaacaccatccgctcttatcccgccccagcatttgggtcttcctccaactctgctgcggtctctcatgagcctgctatccctagctacccacctgctgtcactagctacccacctgctacctcagcagcaacttcagcatgaaatggaggggcacttgatgttgctgctgaggtagcaggtggg

SEQ ID NO: 64705 - DNA, 133 bp, Setaria italica
  Peptide Sequence Number=SeqID_130679
tttgcctgatggaacttatagagtcccaacatggattgaaccatcaaagggtgtcttcaataatttaatggctgtggaagagtcacaggaagaaggtacatttgaagtctgagacatagcgcgagtcatacat

SEQ ID NO: 64706 - DNA, 269 bp, Setaria italica
  Peptide Sequence Number=SeqID_130680
ccatcctgggcatatgtgtgttgttatgatgatgtcccgccatagcacatgaacagcaggattagatttcctttaaccttcgcggacggccgatcggctggtcgaatcggcgcctccctccccggcgggacggagggggagggggggggggcggctccccgcaccgcctccctggccttcttctcgcgagcacgcaaccgcccctgtttgcctctccagagagcggaggaattgttgctgtggcttcttccaggcaggagggatcaaag

SEQ ID NO: 64707 - DNA, 494 bp, Setaria italica
  Peptide Sequence Number=SeqID_130681
ctatcatccttggaaaccgctgagaagttcagtggtgtggctgtcagacgcctgttgtccttgaagtagttgttgtaccggccagaatatgagcgtgggggttagaagctccggggtggcactgccagctgaaactcggcggggcactggggtcatgaatccagtgccatttccatttgaatggtggctgctcgtcctcctattgaagctgtttgtctttttgggactaggtttggacccgaaaatcaactccttctccttaagcaataaactctgcagcttcttctggtcctgtaataaaggttcagtcagtaattatatgtgcaggagctcttgtggttgcaatggacaaaaggaaggatattaatttctacccggcagcgtctcttgtcttcctccctttgtgcccttctgagtttttgctcttccaaaatggcgaccaaacgaaccttcacacacaaattcaatattcctttactatatggaacaaaact

SEQ ID NO: 64708 - DNA, 486 bp, Setaria italica
  Peptide Sequence Number=SeqID_130682
taaggctgaaatgcaacatccttttacgacaaaatcaagcctttcttcacttgcaaaacatgcctgacctgtagtacagaactccaagaaggggagggaagagagcacacacagcacgaacaattacattgcacagcttatcccattcacatatttcctaaccaaacgacttaaatttagaaatagagcagaaccatgaatgttagaaattatatctacaagcaatttcacctaaattttgtcacaatctgtcgtcactcatcagcaatgttaacagctaccacacactggtccaatcttgaggctattcatactcctcaccaagaaatctcttccctgaccaacctgaaaccaatcgaaaaccaggatcagcaaagctttaagcgatgaaacatcatggaaagcactgcaacaaaacctcagagttctcacacttagtgcaaatacaatggtgaatcaggttccgagccgctaatggaggcgaag

SEQ ID NO: 64709 - DNA, 258 bp, Setaria italica
  Peptide Sequence Number=SeqID_130683
gtcttcctccctttgtgcccttctgagttttttgctcttccaaaatggcgaccaaacgaaccttcacacacaaattcaatattcctttactatatggaacaaaactactcaacctgattcattataaatatggttgatacagcaacttactccgtcatataaaaatggcacatttctttcatcctcccatgcgaaagttttggctatcaagttgtcgatcatagttggaatcttttgcacaagtatccttgtcctttt

SEQ ID NO: 64710 - DNA, 390 bp, Setaria italica
  Peptide Sequence Number=SeqID_130684
tcgaaagctgtcgaacaccggcatggagtagatctggaagctgctgaggcagttgagcacgacgaggaggcacgtcgtcgccaggagcccctgcggcgtgtcgtggctgtggaaagcgtagagcgccgccagcatccctcccggcggcatctgcacatacaaggggttccagggatcattattaggtgcagaacacggtgaagtcatggcggctgtgattagcaaagcattattgtggtgcacttgccatgtttccgtaggcccagtagcctccgacggcgacagggaagaggcacattgcgatcaggaggtacgcgactttgggccccacgccacattggcacatgtgctggatgcttgaaagtcgatggcattgtcgcctgaatttcc

SEQ ID NO: 64711 - DNA, 332 bp, Setaria italica
  Peptide Sequence Number=SeqID_130685
acatctctgctcttcagcaatgaataccttttccgtccctttgatcaaaaaagtagccaccagaatcaaactggcactcactttcctgaagtttatgcagccagcacaaatttgacttcaccatgacgggtaacattccaatgctgacctgtttagtttctttcattatatctcttctagaaacatgcatagcattaccagtttttgtctttatcaattttgtcgactgtataaacctgaacagttatttctacattcatcctggatgaatatgtcatcttctggaggagagcatgtctaggcttcaacttgagatcttgcacttcaagatc

SEQ ID NO: 64712 - DNA, 220 bp, Setaria italica
  Peptide Sequence Number=SeqID_130686
ttgtcttattgtctattgttttcttagaagagatataatgaaagaaactaaacaggtcagcattggaatgttacccgtcatggtgaagtcaaatttgtgctggctgcataaacctgaacagttatttctacattcatcctggatgaatatgtcatcttctggaggagagcatgtctaggcttcaacttgagatcttgcacttcaagatcactgttttcaa

SEQ ID NO: 64713 - DNA, 454 bp, Setaria italica
  Peptide Sequence Number=SeqID_130687
cagcctacagcccacatcagtttttccaaagccacagccaaccaaacacaccctatatcagctaagcagttagcctaagggttccattgtgtcttcaagacaaacaataaccatccaatgaagctccaaaataaattacagcaacgtagctatcaagaaggcattagatgcttataagtttccgacctttcaggcctttgacgaattcaacttgtagactcaccattctcctctttattctcgcaaacattttttcctttcggacagcagcttcttcacagtgctccttgtttttacatgcgtctttggagcctggcagatatgcatcgtttgtattatcctgttcagaagattctttagcaacctcttgcttgtgaactaatccattattaccttggttcaaagaatcacccttgctggcattgacctcctggactggttcattacaaaacac

SEQ ID NO: 64714 - DNA, 323 bp, Setaria italica
  Peptide Sequence Number=SeqID_130688
aagccacagcccaaccaaacacaccctatatcagctaagcagttagcctaagggttccattgtgtcttcaagacaaacaataaccatccaatgaagctccaaaataaattacagcaacgtagctatcaagaaggcattagatgcttataagtttccgacctttcaggcctttgacgaattcaacttgtagactcaccattctcctctttattctcgcaaacattttttttcctttcggacagcagcttcttcacagtgctccttgtttttacatgcgtctttggagcctgttcagaagattctttagcaacctcttgcttgtg

SEQ ID NO: 64715 - DNA, 441 bp, Setaria italica
  misc_feature (60)..(60): n is a, c, g, or t
  Peptide Sequence Number=SeqID_130689
atattcgctggctcgtctgctggttatgcacattgctgggacttaaggactctcaggccncttgggaacaaagagtcagcccaaacgtcatctacagtgcacatcacttgccaggtgacacgacagcactggcagttggtggcatcgacggtgtgcttcgcttgatatcgcaaagaaccggtgaaatcattcgaagcattgtcgtggacacagaccgcccagcagaacccacatccagatccaggcatcaaattgagaagaagcgtgttcgcgaggttgcccctgatgcccgagtggataacatctccacacgtttgcgccctcagattaccagcctatcggttggcattaagaaaatcgtgaccaccctattggtcgtaaaacttactattctagggttctttgttaagttttttgtttcccttaaaaaacttttcttta

SEQ ID NO: 64716 - DNA, 349 bp, Setaria italica
  Peptide Sequence Number=SeqID_130690
tgtccataaaattcctgcaatagatggtgctttttggttcgactttctctgtttcatgatgcatttctcctgtttggattgtttgataagtttttccttgtgacatttctgaaactctgtggctatgtaccagtgttgattaatatgtgcagtatgatttttctccttggtttataggaataggataattgtaaccgctcatctcatgagggatctgtattacaagaggaatccaccagcaagaggttcaaaactctaacatttcagtaaaaagttactttgaagctcttgcaatggatgagcatgcatcctctttgctaatggaccagctgatgcctatcagtgggtt

SEQ ID NO: 64717 - DNA, 213 bp, Setaria italica
  Peptide Sequence Number=SeqID_130691
aaatccaaatggccacggagatcatgaaccgcttttcctgaattggcatcaaccagaagtccatcaggactgtcccccaccatcacagcaagtttgccatcagggctcagtgatgtatgctgcaggaaattaaacagggggcaaaacaagatcagtaatactcgttttccaaccccatggaagaggtaagacactctttgaaaaaagagagta

SEQ ID NO: 64718 - DNA, 259 bp, Setaria italica
  Peptide Sequence Number=SeqID_130692
gggttccatgatgatgcgaaggagaaaatccaaaatggccacggagatcatgaaccgctttcctgaattggcatcaaccagaagtccatcaggactgtcccccaccatcacagcaagtttgccatcagggctcagtgatgtatgattcacgggccaagcaaatctgaagttattgcatatttgaaacttttccatgtcaaagtctctaactccactaattctatttctttttggttagttatttatttatttgttagtt

SEQ ID NO: 64719 - DNA, 437 bp, Setaria italica
  Peptide Sequence Number=SeqID_130693
aatgagcacagtccaatcacacagtaccatgtttaagagggttacagccacaaagctaacaaatttaaagcaaattgaaaccacagtgcattgttagtggtacaaataaaagaaaaggtcgcaaccaatagttctcctggtgcatccttcattctttaacacctagaaaacttgttggcgatgaagaaggcaacccaattcaacttgcgattgaaaggcagcttgtagaagtccttagcaatgtgaggattagcaatcaggtatgcataatagtaggatatgtgtgcctcctcaaagcctggaaggcttgtcaggacattaaatagatcttcaggcagctcatctgctggaggggatggaggagggggtgcaggagcagcaatcttctctatagcattggagagcttctcaccaacaaacttgagtacaccaaccag

SEQ ID NO: 64720 - DNA, 401 bp, Setaria italica
  Peptide Sequence Number=SeqID_130694
ttttgtaaattgtagtctattacctagttagttatttattctcacgccatctttagcactacgttaggtagtattactggtgctgtcagaaatggtgagcacaatccaatcacatggtaccatgtttaagagggttacagcccacaaagctaacaaaattaaagcaaactgaaaccacagtgcactgttagtggtacaagcaaaagaaaggtcgcagccaatagttcaacttgtgattgaaaggtagcttgtagaaggccttagcaatgtgaggattagcaaccagatatgcataatagtatgatatgtgtgcctcctcaaagcctggaaggcttgtcaggacattaaacggatcttcaggcaactcatctgatggagggggtggaggagggggtgcgagg

SEQ ID NO: 64721 - DNA, 309 bp, Setaria italica
  misc_feature (279)..(309): n is a, c, g, or t
  Peptide Sequence Number=SeqID_130695
ggtagatgtgaaaggaagtttgagaggaaaggcatgtaaatagtaaatagttaaaaagtttggttggcgcgcgtgcgctttcggtgtgcagtagtagcagacaaaagaaaacaaaaagtaaaagtaaaagaacgacaagttagaatagcgaggaatctttctagaggagatggattgattgccttggttcggaagcaaagtccgagagggctactacctacatacatgtactgatttgattatcaaagctccgccgctaattaaatcgcacgttgatcnnnnnnnnnnnnnnnnnnnnnnnnnnnnnnn

SEQ ID NO: 64722 - DNA, 298 bp, Setaria italica
  Peptide Sequence Number=SeqID_130696
cgcaataaatgtggcttcagcttccacgtcagaaggtattgcgaaagcagatggtgttattgctggacgggcagcatcagacatagcctttgttagggtcgcgataccactcattctctgcatgaaattgagcacaaccctttcagcaacaatgatgctccgagcgcacccatatactttgccaaattgcaatcctttatggacataatttccatcactttcaaaccattcaaccttcaatgatggatcaacctggttaaatatcatgtcttgtttggccacaatacctttcttgtac

SEQ ID NO: 64723 - DNA, 390 bp, Setaria italica
  misc_feature (171)..(171): n is a, c, g, or t
  misc_feature (229)..(229): n is a, c, g, or t
  Peptide Sequence Number=SeqID_130697
gcaacagaaatatgattatcctttatcataaccatatcaataaaccaagcctgtggtctttccaccaccaatcagtacagcccacttgtcaaccagacgtaaacctggggcagtttccttgtttccaatatggatgctggacgggcagcatcagacatagccactcattcnctgcatgaaattgagcacaaccctttcagcaacaatgatgctccgagcgcacccatanactttgccaaattgcaatcctttatggacataatttccatcactttcaaaccattcaaccttcaatgatggatcaacctggttaaatatcatgtctgctaggcttattccagcaataacaccatctgctttcgcaataaatgtggcttcaagacttaccaa

SEQ ID NO: 64724 - DNA, 436 bp, Setaria italica
  Peptide Sequence Number=SeqID_130698
gactgtctgattagatttttgggcaccatctttcatttgtaatcttccttatatagctttatttcagtaccatttaaatgactatataattgccatttaccacaggtcggtggcaccaaattttaacaagcgcttcaagcctgattttccaaggacaatgcagagggttccttatggaacatattccaggatagaaggccatgttccttgagaggtttgcatagttaatgtgcctgggcactggacttttaaactggatgaaacttcgagctgtcaactccagacaagcagtgcaaaccatggattcctggcttctggttgacttccaaggctctccccgtccccgggccccattggtgacaaaggagattgttatggttgcaccaagaaagttgaagtatttatggtggccatgacttcatgcagaattttttta

SEQ ID NO: 64725 - DNA, 423 bp, Setaria italica
  misc_feature (13)..(13): n is a, c, g, or t
  misc_feature (59)..(59): n is a, c, g, or t
  Peptide Sequence Number=SeqID_130699
ccactgcaaggcnctccagctagagaagaagggtgaagttcctgaatctgagttggganccagacacaaggaggaggcttctcatattacagcatggtcaagacacaagagatgctacacctccactcccagcaataccaccagtgcaagtcccagttccaccagtgcaacctcatgggaactggtttcccgcagaagatggtatgaatccaagtaatctgaatataggtccagcaggtttcactgtagaatctgattctctgctctatgagaaaaaagcaaccacctcatccttcattctttcatggtggggacaatcctatgtcctctgatagatttagctatcagaatcagaggtttcccttcttctagtcttaccgtctattgttctttgttatttgttattttctttacctttacttt

SEQ ID NO: 64726 - DNA, 351 bp, Setaria italica
  Peptide Sequence Number=SeqID_130700
tatcaggtcggcatgttcccacaaaccagagaaacaaccagttagaatcaggaagacactttgcacaatatacagggacccctgctggcatattagaggggattgcactgaagtgtggatctaaggtggagtacaggtcaacattatgtgatactgcagagctacagttctctattgagataaatacttgtcatctgatccaaataagatgactgatctgaaagaaaatggtttcagtagcaacgaaacttttttggatactctggaaaataatagggatgatattttgccagttccaagtacttccgaggaatctcgctttatgaaaattggaggaagaataactccaag

SEQ ID NO: 64727 - DNA, 255 bp, Setaria italica
  Peptide Sequence Number=SeqID_130701
ggacatcgcccgcagcgaccacgacggcctctaccacgccatcgacgtctacctcaaggtaagaagaaatctctctccaacgaacatgaaaattttgacgggattggagttgaccaattcaatggccatggcggttacttgcaggagcacccggagctcagcaaggcggacaagaagcggctgtgccggctgatcgactgccggaagctgtcgccggacgtgcgggcgcaggcgatatccaacgaccggatgccg

SEQ ID NO: 64728 - DNA, 237 bp, Setaria italica
  Peptide Sequence Number=SeqID_130702
tctacagggaaaaaccaaaggcaatttcatgtcagcgccctatgaaaaaattaacagcctttaagcagttcatcaacagagcatcatttgttttgagaatgacgagcaactgctctactcaactattatatgtaccttggtagatgaatcttctggagcattagaaataatatctttcgtttcaactgaagatacaggtgctgctgcaattttgccattgtttggcatcattgcatc

SEQ ID NO: 64729 - DNA, 466 bp, Setaria italica
  Peptide Sequence Number=SeqID_130703
caagtcactgaaacttgaacttcacctctgcaggagaatgttttagctgagtcgaggatgatggttccagactgccacaagcgacttgagactgctctggcagacttgaaagcaacactggtactctaaaaatatccacctccctatctagaaattgtgtggccttgtccatccattgcaacaattgttttattgcaggctgaactgaaggaggcaaatgaacaaggtgctgagattggagaagctgagagtactatcacggaggtcgaagctgtggtcaagccaacagaagtaatgaattctgaactcacagttgctgaactattagcaagcatccgctttgctcgtgttgagaccttgtgagctcgctagtaagatgtgtttgatgtaaaactcatgtaccagtatcttgacttggaaattctacagttgggcacggaatttgtgtttgctgctcttaaaaaaa

SEQ ID NO: 64730 - DNA, 133 bp, Setaria italica
  Peptide Sequence Number=SeqID_130704
gggttgggtgggtatttattagtagttgggaaggggaatatatgagatgagaggatcgtcaaggagctgcgctcgtacgagaaggaggtggagaaggaggcggccaagaccgccaacatgaaggagaacggcg

SEQ ID NO: 64731 - DNA, 187 bp, Setaria italica
  Peptide Sequence Number=SeqID_130705
ctccttctacatatccgtcacatatcaataatgtttggaaagctggagatcctttctcttgggaagcattcagaggagtttctggttgacggattgacaaatacaagtgacgagctgaacgaagaacatcctctctttcacttgggtgtgttgctattgcagcacattcttctcccatagcagactg

SEQ ID NO: 64732 - DNA, 450 bp, Setaria italica
  Peptide Sequence Number=SeqID_130706
aggctgagttaccagcgaatatcattgatacaagactcagacaggcacaagaagtcatggaagaactgctaaagccagtgagatatacagcttaatcctggaaacgaaggctccaaacttcacaggcaatcgactgggggtcgcgtacgcctatgaactcagcatcatcttcagcaaacttcatagcaaccccttcttctgagcggcggttagcaagggacgagtcacaagatttctacaaaaggcaacagctgagggaactggccatgctaaactcaactctgagagaagatagtcctcatcctggaagcgtctctcctttcagtaacggtggcatgaaacgcgcaaaaccgagtcagtagagaagctgcttctccatccttcagtccttgttgcaggcgtgcatcatcaacaaagggggacaacttagaagacctagacgactagaca

SEQ ID NO: 64733 - DNA, 400 bp, Setaria italica
  Peptide Sequence Number=SeqID_130707
gggttccatcaaagatacagagaaggaagagaagcttaaggaaaacctggctatgaacatctaaatgagccactgcatatattaatcgaggctgagttaccagcgaatatcattgatacaagactcagacaggcacaagaagtcatggaagaactgctaaagccagtggacgagtcacaagatttctacaaaaggcaacagctgagggaactggccatgctaaactcaactctgagagaagatagtcctcatcctggaagcgtctctcctttcagtaacggtggcatgaaacgcgcaaaaccgagtcagtagagaagctgcttctccatccttcagtccttgttgcaaggacgtagacaatacaatacaaacaaaggggacaacttagaagacctagaca

SEQ ID NO: 64734 - DNA, 447 bp, Setaria italica
  misc_feature (174)..(174): n is a, c, g, or t
  Peptide Sequence Number=SeqID_130708
gctacctatatctgtgctagatcaagtttcatacatataatgacatcatcagtgaataacagtaacaatatcacgtaaaggaatataaataatgacttacgagtctatcagagatatacagcttaatcctggaaacgaaggctccaaacttcacaggcaatcgactgggggtcncgtacgcctatgaactcagcatcatcttcagcaaacttcatagcaaccccttcttctgagcggcggttagcaagggacgagtcacaagatttctacaaaaggcaacagctgagggaactggccatgctaaactcaactctgagagaagatagtcctcatcctggaagcgtctctcctttcagtaacggtggcatgaaacgcgcaaaaccgagtcagtagagaagctgcttctccatccttcagtccttgttgcaggcgtgcatcatcaacaag

SEQ ID NO: 64735 - DNA, 225 bp, Setaria italica
  Peptide Sequence Number=SeqID_130709
cttgccttattgcagtctctgctttcctgaatcgcaaatttcagattgcagtctcaattccttcacttccgcagtacttggttgattcagcagtttggtgatttgtgcgctcgttttccccagggatgcagcagcatgtgatgagctttgaggtgggaggagtgctggaagactccaagtggcaggcgccagcttattgcttcaatggcgacaatgccgacactg

SEQ ID NO: 64736 - DNA, 506 bp, Setaria italica
  Peptide Sequence Number=SeqID_130710
gctggaagaggctatgaatggcacagttacagtgagaccactccctgttggaacatcagctaccggaaaggttgataagcaatgtgctcatttttttggtgtaacaataagtgaagaacaagctcattctggaatagtagtcagagtcacttcacctgcacaaagtaaatttaagcttctatacttcgagcaagaagttaatggaggttatggactcgctttgcagtttaatattatcttcagttttccctttgaccttcaggaagatagtcagaagactggcaaggtgacatctgcaggcatgtatttcttgcatttccaggtttaccgtatggactcaacagtgaatgcgttggcaatggccaaagatcctgaggctgccttctttaaaagattggaaggtcttcaaccttgcgaagtgtcggctctcaaacctggaactcatattatttgctgtatataggtagaattaaaattttttaacaaaaagaaacctaaagaaacaa

SEQ ID NO: 64737 - DNA, 235 bp, Setaria italica
  Peptide Sequence Number=SeqID_130711
gattaacgaagggtgatgctgatgcacgctctctgtttgcgtaaatgccccagcaaagctgacgacccgagcagggagcattgcctgttaatatatccgtaatcgctgcaggtcagcagcaggagtaagaaaagggtccaaaccagaactgagatgagtttgagatgctacgtcgtgcaggacatgaggctggcaaatgcagggagacttcaatttgaccaccagcttccagtaa

SEQ ID NO: 64738 - DNA, 202 bp, Setaria italica
  misc_feature (24)..(24): n is a, c, g, or t
  Peptide Sequence Number=SeqID_130712
aggtcaacggatctcgttctgaanaaagggaccaaccataggacatgcagtggttcttccattggttaccatctttctcagaaccttttttggttctccttttttttaacacagtgcagtctgcagcgtttggtgcacatttcttagtggaaagccattcagtatcttctgcagtctgcactttgttcatccaaagacaaca

SEQ ID NO: 64739 - DNA, 221 bp, Setaria italica
  Peptide Sequence Number=SeqID_130713
ttgcaagctgtttaaagctatccaatccccattgcaagctgttgactagttggagtcttacagacgtaacgctactcccaacagagaggcaaggtcgataatctatctcaggtgcaatcagttgtaacctgtttccacatctcagcgacgatccggccaagcacgccaggtccgacgatcagtaggtcgttttgcccgacgctctccaacgagcgagcgtc

SEQ ID NO: 64740 - DNA, 388 bp, Setaria italica
  misc_feature (12)..(12): n is a, c, g, or t
  misc_feature (23)..(23): n is a, c, g, or t
  Peptide Sequence Number=SeqID_130714
tgtctaggtctntctctctattntctagtccccttccgtcgtacgttcgtccgtctagtccgtcctagtcggtccggattcaccatgagcaacgacctgtggtacggcccggaccgcgtcaagtacctgggccccttctccgcgcagactccctcctacctcaccggcgagttccccggcgactacggctgggacacggcggggctctccgccgacccggaggcgttcgcccgcaacagggcgctggaggtgatccacgggcggtgggcgatgctgggcgcgctgggctgcatcacgcccgaggtgctcgagaagtgggtgcgcgtggacttcaaggagcccgtgtggttcaaggccggcgcgcagatcttctccgagggcgggctgg

SEQ ID NO: 64741 - DNA, 282 bp, Setaria italica
  Peptide Sequence Number=SeqID_130715
gcagccgccagcggccggatcaccatggtacgtacccctttcggtgccaaaaccacccgcctacagcatcagtccagcttgcttaggtgctgacgaacaagtccttgttgtttgcagagcaacgacctgtggtacggcccggaccgcgtcaagtacctgggccccttctccgcgcagactccctcctacctcaccggcgagttccccggcgactacggctgggacacggcggggctctccgccgacccggaggcgttcgcccgcaacagggcgctggaggtg

SEQ ID NO: 64742 - DNA, 256 bp, Setaria italica
  Peptide Sequence Number=SeqID_130716
cgtaggaagggacgaacgaaagataaccatctacttccatcaatggggcaaggagctgaaatgtgttccgacatgcaagacgaacacttaggtcatcatcgtgaagatggaggatcaaacggggaagggttgcatgtatctgctcaatgaaagcagtccgctgcaagcctaacaaccaataaggaacaaacttaaaaagaacaaaccaaataaaaagaaactaaagaaacaaaaaataaagaaacaaattaaagaa

SEQ ID NO: 64743 - DNA, 190 bp, Setaria italica
  misc_feature (33)..(33): n is a, c, g, or t
  Peptide Sequence Number=SeqID_130717
caaaatgactgaaatgcattaacaacgatcgcngaagttcatttcggcccaactctgcaagaccatgaagactccccagttttagtataaggccagcaagaacggaagggtaacttttctcaactgcttgtttcccaatcttcccaccacctgtacagcaacccctcgcagtttgatgatttattttttc

SEQ ID NO: 64744 - DNA, 244 bp, Setaria italica
  Peptide Sequence Number=SeqID_130718
ccctggtgatcctcgccgcggatggcgcagctggccgcggcgtactgcgcctcgccgacggatgagcaggaggcggcgcccccgccgccctcgccgcgcttcttgcggcgcacgatgcgcggcagcaggtgcgtctggccgcgcaggaacgactcgtgcgcgaactcccaccggtccgggtgcaccttccggaacccgtatgtgttgagctggcgcacgaagctggagaagttgctgtgcttga

SEQ ID NO: 64745 - DNA, 386 bp, Setaria italica
  Peptide Sequence Number=SeqID_130719
tacacacattacccaaaaaggcctaagtcagcgtagggccagattcaatgaaatgaatggaatacatagctattgcactgtgaaataatacacggcactgtacttgtatctagaaactagcgaggacttctttcatttcagcgacagacatgatgggctcgtttacatagatccgtgttaccatctgaacgaagctctcgtacttgtccaaaaattccttcttgcacttgtcccacagcgaaggaaacaactcatcggaggtcagtgtcttctgcaacctcctgtacatggcaccaattgacctgtcaatcccagataaactggattttagcaccctccttaggttctagtttttcgtattaacccctagtcttgttaaacgggtt

SEQ ID NO: 64746 - DNA, 264 bp, Setaria italica
  Peptide Sequence Number=SeqID_130720
tattctaagttgtagtctacttctaagtattggtactattgaaacattcagttgcttacttcaaaccgagaggaaagtaacagtaacagttgaaaatgatctcgtgtcccaagcaaaggaggaggaagaagacatggaggcacttcttgatacgtatgttatgggcatgtgaagcagatgcattctctgagagattgaaacaggagcttgtggctttggaagcagcaaatgtgtaccaattactggaaagtgagcctttaatag

SEQ ID NO: 64747 - DNA, 249 bp, Setaria italica
  Peptide Sequence Number=SeqID_130721
tattcatctggggcagtgcttgagccagccaaactttacaagctgaaacatctaacaaaggttgaggttatttccaatgatcccagtggttgtacatttgttctggtatttactttaacctcttctgcactgcttcttgtggtacatttgaagaaaccattggttatatactaccaactctttatgcttggactgcagggatttgataatcttagaagtcagagtgttgctccgccacaatggacgatg

SEQ ID NO: 64748 - DNA, 148 bp, Setaria italica
  Peptide Sequence Number=SeqID_130722
cgctgaaatgatgggctcgtttacatagatccgtgttaccatctgaacgaagctctcgtacttgtccaaaaattccttcttgcacttgtcccacagcgaaggaatttttggacatgatgggctcgtttacatagatccgtgttaccat

SEQ ID NO: 64749 - DNA, 324 bp, Setaria italica
  Peptide Sequence Number=SeqID_130723
cactggcttgatgatagaacttcgcaagcgttggcacaacatttgccaagtcataaagactgttctggaaagcagcataattctctattagcacaatgtctgcagttttaggatcgctctgtgcaattttctccaaagttgcgaacattgtgctaactagctttgtgtacgctttatcaattaaatctctggactgcccttgaatatattgtttcatccgtgatgcgaggacagcaaatcttggaatgtaggctaggatccccgtttgacgcacatttcttgatgacttggaatcaagaatatcagtacagttcagccggttta

SEQ ID NO: 64750 - DNA, 297 bp, Setaria italica
  Peptide Sequence Number=SeqID_130724
gtaatcccatgcattgagatgcagcgcaaggggtcaattttgtatgcccaatctacgactgcatagaagtcttcctggatcccgtcgagtagttcttgaagagcttcattcaatgtacccagttcagcagatgtactgtcgggtttaagatcattgccatctggatccataagacccaggtcgtcatctgcatcatttcctccagatttactcttaattaaacaattaaggaagaaaccaagactaggtaacgaagtagacaaggtaacttacgaaagacaacaattaaaaattaga

SEQ ID NO: 64751 - DNA, 195 bp, Setaria italica
  Peptide Sequence Number=SeqID_130725
ttgttccgttcttttcttaattttgtttcctttcgttcttgttgtaaagttagtcttttgtctacttatcatgaagtctaccaagctggagaaatagttccgcaaaaactctgatgctcgtcgaacaaaagttgtttcagtttctccaattcggccttttctctctaacagcgcgcatgttaacatagcatgggt

SEQ ID NO: 64752 - DNA, 338 bp, Setaria italica
  Peptide Sequence Number=SeqID_130726
gttgcaagggtctgggtggtacaggggctgctaatagtggagggttgggtttgtttggatctggcctcccagaattagaccagatgcaacaacagctagctgaaaaccccaacttgatgagggaaatgatgaatatgccactcatgcagaatctaatgaataatcctgatctcatgcgcaatataataatgaacaatcctcaaatgcgtgaactcattgatcgcaatccagatcttgcccatgtcctcaatgatccaagtatcctgcgccagtactgttgtaagtctagttctttaggttaattttccttttgtttaactttttattttgtttagttt

SEQ ID NO: 64753 - DNA, 464 bp, Setaria italica
  Peptide Sequence Number=SeqID_130727
ccactcatgcagaatctaatgaataatacctgatctcatgcgcaatataataatgaacaatcctcaaatgcgtgaactcattgatcgcaatccagatcttgcccatgtcctcaatgatccaagtatcctgcgccagactgttgaagcagctaggaatcctgaacttatgagggagatgatgcggaacacagatagagccatgagcaacattgaatcttcaccagaaggtttcaacatgctccgccgcatgtatgaaactgtccaagagccttttctgaatgcaacaacaatgggtggtgagggtgatcgaaatccaaacccatttgctgctcttctaggaaatcaggggtccaaccaagcaagggacccagctgtctaaacgtctacctaacttactagtctttctagtacccggcagtcagggtctccaagctccaaacattaatccacttccgaatccctgg

SEQ ID NO: 64754 - DNA, 249 bp, Setaria italica
  Peptide Sequence Number=SeqID_130728
ttcctagttcttcctaaactatttaattcctactttccgtaattcccttggggtctacaaatgctggatctgcccaaggagcagcaaggccccctcctgctagcaacacaaacacaaggagtgctacagcaggtggtctaggaggattgggctcagcagatttaggaagtgtgcttggtggtggctctgatgcttccttcttgagtcaggttttgcaaaaacccaactatgatgcagatgatgcagaac

SEQ ID NO: 64755 - DNA, 519 bp, Setaria italica
  Peptide Sequence Number=SeqID_130729
ttctttaagttagggttttcttaggtttttaatttgttcttatttgttaaccgttattggttttcttagtcgtagtcccttacattcattgttgtggaattctgtagtaaagcagagtcctttgttaaaccttcgtgcacatcaacgctctttttgtaatttgttccaactgacccattcatttgcttatcaacattagtgcatcctccaccttcgatgtacagatcgctggaataagctgggttgtttataagtccattgatttttccatatccacctaacaaccttacttttcctgtaccactgtttcttgaagcaagacttttcaacatgtattcttctggagaactttttcatacatgcccagtctggccaatcccacctggtattagcaatagatccccgccactcctatgcagaatttgaaccattgcgcaatagtcatgccattctccacgtggacaatttcaccagctttttctggagttccacccgcatgctcgcagaatttagctacag

SEQ ID NO: 64756 - DNA, 253 bp, Setaria italica
  Peptide Sequence Number=SeqID_130730
ctccgacgggtcgcacatgggccgggaggttcagcccgaagtagcactcggacgaggcgtacatggtgcacgccatgggaagcccgtcgctgtagtacttgagcgtcgggatgtactgcgccatggcgccggtgacgatcacgtccaggtacttggtgttgggccacaccctggtgatgatgccctcccacttgttttccttgtcggcggcggcgcacacggcctccacgaagccggcgaggtccgggtccgg

SEQ ID NO: 64757 - DNA, 411 bp, Setaria italica
  Peptide Sequence Number=SeqID_130731
tagtaattcgtaatttaattctattcgttgtctatttggttgtactaagttagttacttattattgtttattgtccttcaaaattccaatagcaagttataggatttatggggaaagataattttactcaaaatttatttgtaggagtcgccactccatcttttagatgatagaaccttcacactctataccttcttccccgattccagtgacatgccaattaatgaggtgaggaatcaaggtaggggccttgctcactggagtgtagtgagtgaaaaggaaagctgcactgattttagtgatgaacaggaacggagacgagggtgtcaagttgtcatactggcgaagccaattaattatagtgcaatgaaaaaatctggtcatagggagccatcgaagaggagtagctaa

SEQ ID NO: 64758 - DNA, 285 bp, Setaria italica
  Peptide Sequence Number=SeqID_130732
tgtaattacgtaattaaatcatcgtgcattggtgacaagtagtactatatgttatgcctcaaaatccaatagcaagttataggatttatggggaaagataattttactcaaaatttatttgtaggagtcgccactccatcttttagatgatagaaccttcacactctataccttcttccccgattccagtgacatgccaattaatgaggtgaggaatcaaggtagggggccttgctcactggagtgtagtgagttgaaaaaggaaagctgcactgattttagtga

SEQ ID NO: 64759 - DNA, 403 bp, Setaria italica
  Peptide Sequence Number=SeqID_130733
cacaacttgtattgctacagcggacaaggaatattgacaacttgactggccaatacgtcttcttcttgggtgcataccgtgtgctttatatctttaactggatctaccgatacttcactgagccccattttgttcactggataagtatgaacttcctgcatctgttttcagttcctatgatgatggatgtaaccattatttatgctgccactgccttttgctttttatcaatgcaggctgggttgcaggaattgtgcaaactctgctgtatgctgacttcttttactactacacaatgagctggaagaacaatgtgaagctagagctgccagcttaagcttgttattcccttcaagatggactagggtaatacatggtaatacaatggataggcagacctgat

SEQ ID NO: 64760 - DNA, 392 bp, Setaria italica
  misc_feature (37)..(37): n is a, c, g, or t
  Peptide Sequence Number=SeqID_130734
actaaattacatggcgatgcatcacttcttgctatangttttaatatggccaccactttggcggccagacaggatacatacacatcagagaagtttctctgcttcattcatcaaaactttgggcttccggaccctttggctcctcctgctatttacagccaccagcacagccttctcaatcttcatattcaagggggcgctctcagcctcctttattgtggagggcttgttttcagtctcctgattctttgtagctgaggatgggttttcagttttctgcttctttgctgctgaggatggcctcccagttttgtgcttctttggtgctgccgattcgctcccagattcaacgacttacttacaatagtactagacaaggttaacaaatttaa

SEQ ID NO: 64761 - DNA, 317 bp, Setaria italica
  Peptide Sequence Number=SeqID_130735
ctcggaattgagcaatgtaatagtgtcaagtccacctctgatacagccatcaactgtactgccacaatcatcatcaattaagataccaccagtttcagctcccttattttgcttatctgccaaatattggaagattcttaaaattaacaactaaactaggtgcaaaatcaacttggctatgaataaattgatgtcctatccctacaaaaaggtagacataattggatgtcagactagaaccattatagtatgacaatatctggtgcttgttgatgtacaagggcccatccacatttcttcaatagtactacttacca

SEQ ID NO: 64762 - DNA, 406 bp, Setaria italica
  Peptide Sequence Number=SeqID_130736
ctcttcctctttctcctcttcataatactgtccccatggcctttgtgaatctgcctcgattctaacctagaaacatttgctttgcttactgctagctgtagttccttttctttcttgattagagcaagctccctgtcatactttgatacttgagatgacagctccttcacacgcaactctaaccactggcatctccacagaattggaagaacagaatccctccactcagctgtcaccttttttccttcttggcagctttgagtacccactaccattggcatcagctgaaaatgacagaatccacctccggttcacccccatcagccttcaccttcgaaaccggagctggtgtccccgaacgagcttcgtagtctatttcgtacggtctattctacccttccccgta

SEQ ID NO: 64763 - DNA, 245 bp, Setaria italica
  misc_feature (228)..(228): n is a, c, g, or t
  misc_feature (237)..(237): n is a, c, g, or t
  Peptide Sequence Number=SeqID_130737
ggcagatgcttggccttaccaaactgccgatacactacattggctgcttgattgtctatgaggatatcataagtgttttctttgcataaatccccaatgtgaccatttggtatggaattgtcagtacccaagagttggtccattgtgacatatttctccctcaagcgattgtctacttcttcctactttcttttctttcttagttcttattttccttttatttttttntttattttnttttttta

SEQ ID NO: 64764 - DNA, 242 bp, Setaria italica
  Peptide Sequence Number=SeqID_130738
aacgagctcgagcattcgacggcatcacctccccgatctgtagcaaggccaggagccaccaccttctgagggccaccgttcgtgcagacggcctcggctatcaccaccaccatgctgctttggttcctgccttcctggcgccaccaccgcccccgtcctcagcacatcaatggctgcagcaggagcagtagcgggcgccacggaaaccaggggcggagccagcataggacatggtgtacacg

SEQ ID NO: 64765 - DNA, 267 bp, Setaria italica
  Peptide Sequence Number=SeqID_130739
cgacggtaattaagggggatgctgcaggggcagtacgagcagatcgaacctctcccattcatacggcccaaacagcgattccccgaccttgaccatctcctccactccggcgaactccctcaccctgccccccgacaccacctccttccggctcaccttctccacctcccccgacgcctccgcgctgcagtggctggccccgccgcagaccgcctccgggcagcccttcgtcttctcgcagtgccagtccatccacgcccgctccat

SEQ ID NO: 64766 - DNA, 262 bp, Setaria italica
  Peptide Sequence Number=SeqID_130740
gtgtctatggatttgaacttgaacgtggcaatgtacttctttaagaactcatcaaaagcaggacggccaatctaacacaataaacaagcagaagacaaactaatttagaaaataatccaatattgcaacgattgtaagtgaaaaagttgcaatgccccgtactcccacccacctggcgctcaatgcgccaaagaactggaagcctttctcgtagggcacttcagagtacacatcatcagggtcaatccctgccatcttcggt

SEQ ID NO: 64767 - DNA, 283 bp, Setaria italica
  Peptide Sequence Number=SeqID_130741
aagtaaagctcccattcttgcccactccagtctgccacctcatcttcacttggaagcttacctgacttgaattctgcagctaagtcacagatcttcttgtaagtagctgaatctggttccatggcatcaggaggaataccagtcccctcaacccacagttgaaggtcaatttggttttctatcccaggtacattcgttttcaaggaaattacaaagaaaacgtactacaagtagtactaataggaaatttaagaaactaaactaacaaacaaactaagaaaga

SEQ ID NO: 64768 - DNA, 238 bp, Setaria italica
  Peptide Sequence Number=SeqID_130742
gctgccgccattgccacaacgacgccaagaactcgctcgaggtcgacccgcgcgaccgccacgagatccctcgtcacgaaataaacaaggtgcaacagaattgttctaactgtggggcctgcatggggaaatacttctgtgaaatatgcaattttttcgacgatgatatctctaagggccaataccactgtcatggatgtggcatatgcagaactggcggtgcagacaacttctttca

SEQ ID NO: 64769 - DNA, 111 bp, Setaria italica
  Peptide Sequence Number=SeqID_130743
gacgtactgaaactgttttactatacaggtgatctgcactctctgttccaaagaacaggatgtaagttatcaaaccaaatagtactccaagtcattcaagaacatttattg

SEQ ID NO: 64770 - DNA, 264 bp, Setaria italica
  misc_feature (3)..(3): n is a, c, g, or t
  Peptide Sequence Number=SeqID_130744
cgngaagaagagcaagaaggtgtcgtacaagcggaactacacgggtcggtggcgctgcccacgggcgggcacggcggcgacgtcgtggtgtacgccgacgaggccgaggagacgctgctgcggttccacgagaaggcgcggtactgcgccaagaggggcgggaacgtgggcgccgccggtggcacgctgagctcgaggatgcacagcgggttcgccggggagacgctcaggatacccgtgcctgtaggaactgttgtgaagcgc

SEQ ID NO: 64771 - DNA, 280 bp, Setaria italica
  misc_feature (45)..(45): n is a, c, g, or t
  Peptide Sequence Number=SeqID_130745
tatattcaatctttttcctagctataagacacaaattttagaaangtttaacttacagacgcaaattgctctcagtagcccaagaaggaaagcttccggtgagctggttgtatgaaaaatctaaattttttaatgaagggcttttcacatcaggcaggcttcctgtaaggctattgttcccaagaaacctgaaatgggtacagtacaagatggtgaaacatggacaccggcttaggtggtgtttgtatagtggaaataaccgattatgaattccttacag

SEQ ID NO: 64772 - DNA, 470 bp, Setaria italica
  Peptide Sequence Number=SeqID_130746
ttatttctaggtagtcctagtattagtcctaaattgttgtcctagcgatcctcgtcgtgctgacatgggacttgttctcctcgtagagcttggcgagtccaaagtcggagaccttggggctgagattggtgtcaagtaggacattgctggctttgatgtccctgtgcacgatccggatgctggactcctcatgaaggtaagttaggcctcttgcaatgcctaaaataatctcaaagcgtgttgaccaatctagcttcatgctactatctccaaagagagctcgatctaggcttccattttcaaggtactcataaaccaacaaatgcgtgttactgtcaatgcagcatccatgcagtttgacaagattcctgtgttggactgcagaaatcgttgcaacctctgccacgaactgtcttttcccctgatgagatgattgagaaagttgtttcacagctatcactcttccatca

SEQ ID NO: 64773 - DNA, 340 bp, Setaria italica
  Peptide Sequence Number=SeqID_130747
tgaccccccagtagctgctcgtggtggtgcagctactgctgccgccgcccctgagctgccagtcagtgacaacgtagcttggcttcgccacctcgtctgccacctcagcttttccggtaagcattgccacgaccctcgacatcggcggccgctggtgcggtgagccctgcgtgcagatgagcgcgacatggatgaccctcagagcttcctcggcgtcgaattccttaagcctcggatccaggattcggaagacggactagacttacccttacgtaacaaactacccaatagacccaactactaaaaagaataagaatagactagactttaccttagaaga

SEQ ID NO: 64774 - DNA, 395 bp, Setaria italica
  Peptide Sequence Number=SeqID_130748
taaattaattagtactttagttaagtaccttacaattgtacgtagtatccattcttattaatccaattactgtattttaaacaattgacggttgcaaagcagcttccaattatctttatcgcgtagtgaaaatgccatgttagctagaggacattgtttccctcatccttttgacacttgtttcagtaaggaaaggaaggattggacgagacgggttggaaatgacaggcatctcatatgcatcgaagatccttttgagacctcccatgatctcggtcgtgttgttgacaagttcaccatcaaaatacttcgggaggaattcgagcgagctgccaatatattacagtttgatccgaaccctagcgtgacgctctttgagccgtatgtcgcccccg

SEQ ID NO: 64775 - DNA, 338 bp, Setaria italica
  Peptide Sequence Number=SeqID_130749
cgtagctgtaggaggtggatgcacattatcacataggcataactagaatactcccatgtctacaggaaatgtgcatccacctcctacagctacgaagaatactcccatgtctacagctacgaagaatactcccatgtctacaggaaatggaggccacttactttgtcacggtggatgaaagtaactgtgcttacttcgaccaagtggacaagctaaataactatggtgctcacagcagagataccgtatcgaggctgctctgggcctttttccattactgggcatacgagcacgattacacaagggatgtcatatcaattcgtactggaaggattatt

SEQ ID NO: 64776 - DNA, 244 bp, Setaria italica
  Peptide Sequence Number=SeqID_130750
catctggtgcttcctgatgccttatgttctgaagtattgttctgttgtgttttgtgcatagctgtacaacagagatattttgctgtgtagttcccaggtgggtaacggtacttggctgcctcagtaaggttgagctgacagttatccagcatgggactcgtggcatggcagattgccttagtaatgttgtgcgagaggatacatccacctttcttattttctatccaagttacaaaaaaaaaaa

SEQ ID NO: 64777 - DNA, 310 bp, Setaria italica
  Peptide Sequence Number=SeqID_130751
cctccaatgaacatgcagattcaaggtgcttcagaattacccaacccatctcaatattcgtatggtttttcaagcagttcatgtactcattcctggagttcaaaagatccccttgcactgcataggcccgacacagttgcaagtgtgcaaagaaagtatcaacacagctagaggcagtcattcttagagcttctttagcttgaccaatgcaattctcatagtctaaatattgcaaacagatttctgaagaacaaagttgtgcagcatgaggttgtttctttgtctttctttctttttattctttctagta

SEQ ID NO: 64778 - DNA, 213 bp, Setaria italica
  misc_feature (1)..(1): n is a, c, g, or t
  Peptide Sequence Number=SeqID_130752
ngttacgcagagctaccaatgttcttaacaaagcgtgtacataagctaagcacctgtagaattaagaaatgaacttgtgcatctgtcccttgtatcatttataaggtggaccatggaagatacagttttagatgaagcagagatgtttctgcaaagattaagaaagtgacgtgaaggtttgtcaggtcatcttgcttaatctttgcagaaaca

SEQ ID NO: 64779 - DNA, 250 bp, Setaria italica
  Peptide Sequence Number=SeqID_130753
cgaccaatatgcactgcaaaagtgcaaagtcagatgaactctttcaattaaaccgtttccatgctaaattgcacaaagtgtaattggtgccatgttgagtctcaggtctgatgagcttttgtggaggtggtccgtaagtgtaccattggatacaacgggctctgctttatcctcattcaagagctttctatcttctccattatttaatctgtcaagagttgataatagagttaattcagtaacacctttg

SEQ ID NO: 64780 - DNA, 237 bp, Setaria italica
  Peptide Sequence Number=SeqID_130754
acattctctgtatttcactttcgaacatgagggcaagttcacatgataacatttcacaagcattagacaggcaacatgatcccagtaggatgaataggctggtttacacaaatatatgcatgacaatagaaatggcctatttagtttggatccagtaaaaacatacctcctccagattcacagagtagcaaatcagctttacacaagcttgatagctcctccagaggaccaagattt

SEQ ID NO: 64781 - DNA, 257 bp, Setaria italica
  Peptide Sequence Number=SeqID_130755
tttttttttttttgtactacaattgctttttcatcaaaggtaaggtagcacgtggatttaaacagagtgtatactgtattactattgcctatcagtcaaatgcatcctggttctcttttggggttgcttttgacccttttacagttttacctccccaattggcctcaaacaagagctatgggtatatatattgtgctacagattcaacagccaaagaatgtacatctgaatttgacgtaaactaacttttttaacta

SEQ ID NO: 64782 - DNA, 210 bp, Setaria italica
  Peptide Sequence Number=SeqID_130756
ccttgatccaaaccagaaaatcctttagaatcttctcgacggggagcgtgaagagcgctacgccgacggcgacgagcagaacggtggcgacggcgaggcggacggccgagggccacgagagcgccatggacgcgagcagcctcctgcgccagggcctgagcctgccctgagacacgcaacaggggaaaggcaaggcacacaggggatagg

SEQ ID NO: 64783 - DNA, 426 bp, Setaria italica
  Peptide Sequence Number=SeqID_130757
tgggtacgtaccttgtcttcgggtcttgtttgtcttggtaggtcgttggtacgtccgtctagtcggcgagggagcgccgagacgctgacggccgacgaggtgatcgacgagtgcaagaccttcttcgccgcggggcaggagaccacggccaccctcctcgtctgggccatgttcctgctcgccgtgcacccgcagtggcaggacagggtcagggaggaggtcctccgcgaattccgcggcggcgacggcgaggcccccagcgccgatgtcctcggccaactgaagctgctccacatggttcttctcgagacgtcacgcctctacccgccgatcgtgtacatccaacggaggccgccatggacgtcgagctagcaggaatcaaggtgccccaagggacggtgatatcgatccccatcgccatgctgc

SEQ ID NO: 64784 - DNA, 382 bp, Setaria italica
  Peptide Sequence Number=SeqID_130758
gcgggtgggaagtaacgaagaaataggtaagaaaccccgtctcttcgtgctcggctccttcgatggacggatccatccctgtatctctctctggatctccagcggcagctcctccactactgctgggtcgatgtcttcaacgttgaacaaccaggggttactgccagagggttcaccaccactgttgatgttgctcctatctgcagcttgcccagacacattgtgttcttcagctttgtttgcttccgaagaactccctggacctaacattatcacaaatattcagcaaacagagaaacgtgtaagcagttagatcggtatttgcatcattgcatctgtacagaagtagtccaccaaaccttgaggactgcaattagtacat

SEQ ID NO: 64785 - DNA, 414 bp, Setaria italica
  Peptide Sequence Number=SeqID_130759
gtcttatgctgagagccacaaaactagtactcatgattctggtgtattctcaagaaaaaaatcccaaagatgaaagtgatgggcacaaagatttgggccaaccgaagaataacactgccaagaaagataaacctgctgctgaaccgatagttgttccaattgtgctgaggatgtctgactttgatcacaaggcattgttagaggaatggatagccactagagctttcagagataattgccttcctcaggatcatcgaaaacttataaacaaccttaagcttattcaggactacctttgttcttttgagtcacagggattgaccattgttgacataatacagacaaaattacgtttacctaacaaaacgttaaggaaaattaaaggaaacttaaaacaaaaacaaaaaagaaaaa

SEQ ID NO: 64786 - DNA, 352 bp, Setaria italica
  Peptide Sequence Number=SeqID_130760
ggccatatttatcatggatcgcttctacactctcattacatggatttttgattcatgtttaagctcctattctcatttgctttattactgtgttcaggcattgttagaggaatggatagccactagagctttcagagataattgccttcctcaggtatctacacctctatggaagctctggtacacatgcaattgacaaactgttatttctttgaaattgttgtgcaaccgatatgctgaaaacaaattgtaattgacattaaatggtagttgtttttcatgggaggaaatgttgcacggtgaatggtcaatggtgatacctacctgccagctaatatcatacttgtctatt

SEQ ID NO: 64787 - DNA, 238 bp, Setaria italica
  Peptide Sequence Number=SeqID_130761
taaaattaagggaacaaacttaacttaaataaagaaataacaatttacaatacgtactcaatttagctgtggtatattagcctccagcatcagaacttggatttgttattaggaaggttgttttgctgtgatatgtattgaagctgcagcctgctcatcgactcgatgctctgctcgatcgatttgtattctattctcaatagcatttccaaagctgctcgatttcaatgccattgaa

SEQ ID NO: 64788 - DNA, 329 bp, Setaria italica
  Peptide Sequence Number=SeqID_130762
tgagcctagagttgtgcctgctcctcaggagagggccaaggagcaagtcattgagagcttcgacatcttcaagcagattgagcgcagcatctagaccagatcaggtcgaccgatggtgcagtagcccaggatcgagctagtatcattagataaccggcctatatatcccatatcgccgttatatatatgcatcatgcatccacccatcatcctgtactgttcctgttcttgttcttgttgtgttgttaggaagtagtaacgacaacctactttaaattaatagaaacaagactagactaaccctaataataaataattagaccgtacca

SEQ ID NO: 64789 - DNA, 249 bp, Setaria italica
  Peptide Sequence Number=SeqID_130763
ttacttgttctaagttgtcggtccacttgtcaactaaccttcttccttacctcagcccacggccgccgatggtgcagccgctctccccgactgatcaccacccgctggggccctttcagggaccctgcaatgactgccggaggaaccaaccaatgccgctggcctcaccgacatcagatgccagcccgagaatgcccttcgttgtcaagcccccggagaagaaacaccgcctcccatctgcttacaatc

SEQ ID NO: 64790 - DNA, 348 bp, Setaria italica
  Peptide Sequence Number=SeqID_130764
agactagactagactacgaagaacctaacaataccgacgaacggacgaccgagaaggaccgcctcttccgcgccatcgacaccgtccccgccgtacgccgcaaggccgactgggccatgcgctggattgacggcggggagcgcttcgccgagcgactcgtcgcgttcgcctgcgtcgagggaatcttcttctcgggctccttctgcgccatcttctggctcaagaagcgggggctcatgccgggcctcaccttctccaacgagctcatctcccgcgacgagggcctgcactgcgacttcgcgtgcctcctctacgacctcctccgcaagcaagctcgacgagcccccg

SEQ ID NO: 64791 - DNA, 249 bp, Setaria italica
  misc_feature (233)..(233): n is a, c, g, or t
  Peptide Sequence Number=SeqID_130765
ctctttctccaatgctttcccatcctttaccgcgagactccaatgttcaagcattggagaaagagtggaggagcgagataccaataccacgtggaggtcctcatagggcttgtgttgttgcaaatgataaactttttgttattggtggtcaagaaggtgacttcatggccaagcctgggtctcctatatttaaatgtgttaggagaagtgaggttgtgtatagcaatgtttanatgcttgatgatggga

SEQ ID NO: 64792 - DNA, 399 bp, Setaria italica
  Peptide Sequence Number=SeqID_130766
acctacctctagactagagcctagccgcccgcccatggcgaggccggcggcgaaggcgcggccgcctaagcacctggtaggacgactcgaccgtcgtcgccgtcctcggcctcgtcctcgtcgccgactacctctgggcttcgtcctcctcctccgccgtctggtcctccaggcttaccctcccaaccagccccgccgtgcaggcgccgcccgtcgcgaaggagacttgccggctccagaattagaatggggaggggatggctgaagcacctgttgcacgtttggatggtgctgctatacagattaagaatctcttatatgtatttgctggatatggcaccattaaccatgtgcattctcacgttgatatatacaatttctcggataatacgtgggtgg

SEQ ID NO: 64793 - DNA, 247 bp, Setaria italica
  Peptide Sequence Number=SeqID_130767
ggaggataggcatgaacctgggcttgaacattggagtctcgcggtaaaggatgggaaagcattggagaaagagtggaggagcgagataccaataccacgtggaggtcctcataggtctataactttcccttcatatgttatcaacagtttcaccttcattggaaagcaatgttgctagatgcctatgccctagattgtcttggcagtttcctattgggtgcatttctgcttttcttatgctttgggc

SEQ ID NO: 64794 - DNA, 479 bp, Setaria italica
  Peptide Sequence Number=SeqID_130768
tgtcgttccccggcggccgcctcgttcccctccaccgtctccacgggggcgcgctccaacctgtccttctccacggcgtcgtcggccgttggcatgagcctgtccgaggactcgagcgcggcggtgcgggccgcggcgagcaagtcttcgggctcggcctcggtctcgtcggcgcggagcatcccggagctgtacgaggagagggggagccaacagcctccgcgagttcgggttccgggagctccgggccgccaccagcgacttcagccgcctgctcaaggtcggcgagggcggcttcggtagcgtctacaagggcgtcgtccggctgcccggtgggtccgccggcggcacggtggtcgccatcaagaaactcaatcccaatggccatcaggggcacaagcaatggttagcagaagttcattttctgggagttgttgagcacccaaatctcgtcaacctcattgggtactgcgcctcgc

SEQ ID NO: 64795 - DNA, 335 bp, Setaria italica
  Peptide Sequence Number=SeqID_130769
ggggaggctccggggccgccaccagcgacttcagccgcctgctcaaggtcggcgagggcggcttcggtagcgtctacaagggcgtcgtccgggctgccccggtgggtccgccggcggcacggtggtcgccatcaagaaactcaatcccaatggccatcaggtgcccatcggtggcttcttggctcatcgtatcaccttgtcttggttcatcatgaatttatttacagtctattgctttgtgccttcagtagatggccaccataaaaatcagttttctgcaattgggtaaagtcttgtaacctaattctttgtttattccccctaaccttgttctt

SEQ ID NO: 64796 - DNA, 435 bp, Setaria italica
  Peptide Sequence Number=SeqID_130770
taatcttgcttgcaaaacactagtgtgatagtcgattttccgaggattaataagaactctctgggctaattttgcaatttcaggatcaaatcctggcatcagctggtcaagagcttcaacaaaagtgacctgcccagtattcaatgaagtaaattcaggtgagaaaagaactcataacaaccatgttcaatatgcaactgcagatgatctttcaggagcattctagaatccatccagtttattgaatccttgagcacttgcattaaaatgctggagtcatactttgcatgacagccaaataatttgttagccaacatgaaaatcagagagaatgacaataggtatttaaactaaaggacaaacagtactctgggcaccttttgtattttatctggtgctttggaccatggttctaggaaaccagtagcatctaat

SEQ ID NO: 64797 - DNA, 317 bp, Setaria italica
  misc_feature (233)..(233): n is a, c, g, or t
  Peptide Sequence Number=SeqID_130771
tttcttgtacgctgcggacgtttacaccgcagatgttagataatacaacacctcctccccttgttgaactattgttgccgatcctgtctcgggaaagatagcagggccgtgatgaagctgagggccttcaggagcggttggggtggctggctcagcttgctgtcccgaccttctctaggctgcaacttagctgctttgaagagttcatccaggacctcagacaatgtggggtncgcatggacggcaagcttgatgtcttgcacacgagttcctagggcgatggcattcgacgcctcatggatgagatcagcagcatg

SEQ ID NO: 64798 - DNA, 309 bp, Setaria italica
  Peptide Sequence Number=SeqID_130772
acgtcccagagctttcattgagttcgtcaagttgcttcggattttggaggcaagattgtttgcatgatcagcaacagcttgtctatcatatccagtagaggaaacctgtagacccaaagatttcatatgatgttcatcatgaagctcccgcatccgaccactgacagcaaggagtgctttcgatgggacacaacctctgtttacacaagtcccgcccacaacatctccctcaattatggcaagttttacaaagaccctacctacgaacggacgtagacaagacgacggacgaccgttaggtacccccta

SEQ ID NO: 64799 - DNA, 263 bp, Setaria italica
  Peptide Sequence Number=SeqID_130773
atttctgacgctgcggacgttacaccgcagatgttagataatacaacacctcctccccttgttgaactattgttgccgatcctgtctcgggaaagatagcagggccgtgatgaagctgagggccttcaggagcggttggggtggctggctcagcttgctgtcccgaccttctctaggctgcaactaggttacaatttaacaagaaataaagaaaacaacctagaaattaaaccttaagactagactttagtaaagtaaagtaa

SEQ ID NO: 64800 - DNA, 376 bp, Setaria italica
  Peptide Sequence Number=SeqID_130774
aacgggaacggaacggaaaggaacggtaaggtaaggaaccgtaacgaacgaagaagggtacgcctccaacgtggacccgttcctcgtcgaggcgctcgacaaccctcgccaccgcctcatggttttacggatggaactggatatacagaaatttatgcagaaccctcagctgcaagaatttgaattccagaactttccaacttcataccttcgctgtgctgctcatcgtgtcgcacaacattatggcttagagactacagtagcagatagtttagtagatggttcagttagcaggatagttgcaagaaaacaccggaaagcagatatccaccgattgctttatcagaagtttccagcaaacagcaagaatgaccat

SEQ ID NO: 64801 - DNA, 354 bp, Setaria italica
  Peptide Sequence Number=SeqID_130775
tccaacttcataccttcgctgtgctgctcatcgtgtcgcacaacattatggcttagagactacagtagcagatagtttagtagatggttcagttagcaggatagttgcaagaaaacaccggaaagcagatatccaccgattgctttatcagaagtttccagcaaacaagcaagaaatgaccatgaagcagcagagaagcttaagttgtcatctatcaaaggcccaaagtattccaaaatggcgcagctgatgctggaaacaagaacggtgcaccaaaaactgttgaagagaggatagaggaatacaataaagctcgagcgcgcatcttcaatggttccatttctgcagatactg

SEQ ID NO: 64802 - DNA, 342 bp, Setaria italica
  misc_feature (118)..(118): n is a, c, g, or t
  Peptide Sequence Number=SeqID_130776
caagcaagaaatgaccatgaagcagcagagaagcttaagtttgtcatctatcaaaggcccaaagtattccaaaatggcgcagctgatgctggaaacaagaacggtgcaccaaaaaacngttgaagagaggatagaggaatacaataaagctcgagcgcgcatcttcaatggttccatttctgcagatactgatgctgcaagtgttttgggagctctttccactggcagagatgagccagtgaatgttgagcctcctgctgatgagatcaaagtcagcacaatgaacagccgttccagggtcgacaagttttacaaaggaataactagaaaaaagaatacgta

SEQ ID NO: 64803 - DNA, 305 bp, Setaria italica
  Peptide Sequence Number=SeqID_130777
agttgaagagaggatagaggaatacaataaagctcgagcgcgcatcttcaatggttccatttctgcagatactgatgctgcaagtgttttgggtaggctctttccactggcagagatgagccagtgaatgttgagcctcctgctgatgagaatcaaaagtacaagacaacaaatagaaacaagaccgttaccaagggtacgacaagttttacaaaggaataactagaaaaaagaatacgtaagtagaatacctagaactaatagaatacggaaaattaacaaaaaggtaatagttaaggaagaca

SEQ ID NO: 64804 - DNA, 351 bp, Setaria italica
  misc_feature (341)..(341): n is a, c, g, or t
  Peptide Sequence Number=SeqID_130778
aaaacaaacgacaaagaaaatacgaacccaaatacgaaacgccaagcagagaagcttaagtttgtcatctatcaaaggccccaaaagtattccaaaaatggcgcagctgatgctggaaacaagaacggtgcaccaaaaactgttgaagagaggatagaggaatacaataaagctcgagcgcgcatcttcaatggttccatttctgcagatactgatgctgcaagtgtttttgggagctctttccactggcagagatgagccagtgaatgttgagcctcctgctgatgagatcaaagtcagcacaatgaacagccgttccagggtcgcagtttttcaagganactgaaaaaa

SEQ ID NO: 64805 - DNA, 367 bp, Setaria italica
  misc_feature (313)..(313): n is a, c, g, or t
  Peptide Sequence Number=SeqID_130779
aaaagaaacccaaaagtaagaacctaagaaacttaacaaagaacttaagaaaccctaggtagaccttacaaactttagttagtaacctcaaatttaatgcagtatggtgttggttatgtgcaatctcctggcatgtccacaaaccagcctactgtgtactttggccaacctgatctatcaatggggtcatcttctggagcagctgtttacccacattggcccccccagcaatgatgtatccccattgctatgacaacactggacccatgatgtctcaggttccattgtaccagtcgttcaaccatggctaagngattctttatgctggaaagttgggaactatttctgttgaacttgcactatgtcg

SEQ ID NO: 64806 - DNA, 277 bp, Setaria italica
  Peptide Sequence Number=SeqID_130780
aggatactgaaaaagatcgtagtgatcctgactatgatcggaattacaaaaggtatgttaggagcccagtgcctgacttcagcttgaaccctggtgcaccgttcttgtttccagcatcagctgcgccattttggaatactttgggcctttgatagatgacaaacttaagcttctctgctgcttcatggtcatttcttgcttgtttgctggaaacttctgataaagcaatcggtggatatctgctttccggtgttttcttgcaactatcctgctaact

SEQ ID NO: 64807 - DNA, 351 bp, Setaria italica
  misc_feature (27)..(27): n is a, c, g, or t
  misc_feature (32)..(32): n is a, c, g, or t
  Peptide Sequence Number=SeqID_130781
ctttgttgtacctcaatttatgcagtntggtnttgggttatgtgcaatctcctggcatgtccacaaaccagcctactgtgtactttggccaacctgatctatcaatggggtcatcttctggagcagctgtttacccacattggccccccccccagcaatgatgtatccccattgctatgacaacactggacccatgatgtctcaggttccattgtaccagtcgttcaaccatggctaagagattctttatgctggaaagttgggaactatttctgttgaacttgcactatgtcgttttgtaatagaaatggctcaaatctgaagactccacttttaacttaacttacgtta

SEQ ID NO: 64808 - DNA, 267 bp, Setaria italica
  Peptide Sequence Number=SeqID_130782
cacacacacacacagcgagagcgagcccccaagagaaggaaaaaaaacgcattccacaacacgcggctgcgcgacgagggcgcgcgggcggcggaggcggtggtggccgtcgacgagagggtcgcctccaacgtggacccgttcctcgtcgaggcgctcgacaaccctcgccaccgcctcatggttttacggatggaactggatatacagaaatttatgcagaaccctcagctgcaagaatttgaattccagaactttccaacttca

SEQ ID NO: 64809 - DNA, 220 bp, Setaria italica
  Peptide Sequence Number=SeqID_130783
gacacgatgagcagcacagcattatggcttagagactacagtagcagatagtttagtagatggttcagttagcaggatagttgcaagaaaaacaccggaaagcagatatccaccgattgctttatcagaagtttccagcaaacaagcaagaaatgaccatgaagcagcagagaagcttaagtttgtcatctatcaaaggcccaaagtattccaaatggcg

SEQ ID NO: 64810 - DNA, 233 bp, Setaria italica
  Peptide Sequence Number=SeqID_130784
gaaatgaccatgaagcagcagagaagcttaagtttgtcatctatcaaaaggcccaaagtattccaaaatggcgcagctgatgctggaaacaagaacggtgcaccaaaaactgttgaagagaggatagaggaatacaataaagctcgagcgcgcatcttcaatggttccatttctgcagatactgatgctgcaagtgtttttgggagctctttccactggcagagatgagccag

SEQ ID NO: 64811 - DNA, 185 bp, Setaria italica
  Peptide Sequence Number=SeqID_130785
caagaaaacaccggaaagcagatatccaccgattgctttatcagaagtttccagcaaacaagcaagaaatgaccatgaagcagcagagaagcttaagtttgtcatctatcaaaggcccaaagtattccaaaatggcgcagctgatgctggaaacaagaacggtgcaccaaaactgttgaagagag

SEQ ID NO: 64812 - DNA, 154 bp, Setaria italica
  misc_feature (149)..(149): n is a, c, g, or t
  Peptide Sequence Number=SeqID_130786
gagctcccaaaacacttgcagcatcagtatctgcagaaatggaaccatttctattacaaaacttcgtgtagtgtcgaacgtagtttgtataaggagtcctaattcgatgaaactattattgtgaactagtctggaaaaaaaaaaaaaanaaaac

SEQ ID NO: 64813 - DNA, 129 bp, Setaria italica
  Peptide Sequence Number=SeqID_130787
tgactttgatctcatcagcaggaggctcaacattcactggctcatcgctgcaagtgttttgggagctctttccactggcagagatgagccagtgaatgttgagcctcctgctgatgagatcaaagtcag

SEQ ID NO: 64814 - DNA, 319 bp, Setaria italica
  Peptide Sequence Number=SeqID_130788
atcatgaacacggtggatgaactgaaggacgaccttttctgaattgttccataaaccctcagaatccaagccgaaggcttatcctccacgcccttccaaacaagatggccacatgactcgtgcagcactcacatccagtgcaccgcttgcagcataccatcctgctgccaagcattctggctacgcagctcgcataagcaggtctggccaggtcgctccccgtggcctgccctcgctgcgttaccgccggcacagggtttattccgttgtcctattctactaacgttgttcttaaatttggttaaatttgttagtttaa

SEQ ID NO: 64815 - DNA, 363 bp, Setaria italica
  Peptide Sequence Number=SeqID_130789
ttgttttaggttagtttaactttttggttagttcggttagttcttagttaggttcgttacgttcttttgttccggttcgtattggtcttagtttccgttcgttcgtacgtccgcgtgtgccactaccgcccgacggcccgacctgcggataacgccatcatcctccaggcgttcgtgtcagcatacactgatccacgtcgagcttctgcacgtcctcgccgtacgctgtcaggtgcctccgccggcggcggcgatggctgcgaacttggctcggagctgcgcccttccttcatcccccgtgacagcctgggacacggtaccctccgcggggagcgtgccggtcctcatccgcgcacagcaagg

SEQ ID NO: 64816 - DNA, 384 bp, Setaria italica
  misc_feature (9)..(9): n is a, c, g, or t
  misc_feature (18)..(18): n is a, c, g, or t
  misc_feature (27)..(27): n is a, c, g, or t
  misc_feature (32)..(32): n is a, c, g, or t
  Peptide Sequence Number=SeqID_130790
taccttttntactaattntataaattntattntattattattggtctttctagtcctatttgtaacttggtcccctacccgtacttcttggttattgtctaagagtgtgactgtttaagattcctctggatctcaactcccccatgatcaaaagcaatacaatcctccatttgatctctgtaaggatctccagcatcctcaacataagtaagtggcacaccatgtgcactgaagaaaatcataacctcttcaggattggaaaaaggcagatatctctttctcaattaagtcagccattgatttcacatagccatcacgctggtaccatgattcaatgatggaaattggcaagccagcaaaaaaacgatcttcctgacaatgttt

SEQ ID NO: 64817 - DNA, 226 bp, Setaria italica
  Peptide Sequence Number=SeqID_130791
gtgaaggaaccttgccacagtggtagtcatcttgcaagcacttattctgccctctctatcctgaagattgtaggctatgatctagcaaatattgatagcaaggcacttctatcatctatgaaaaagctccagcaaccagatggaaggtaggtagattcagtctcccatctcatgattactagacttgtacattggccctggaagtatctatgctccaacatctgct

SEQ ID NO: 64818 - DNA, 284 bp, Setaria italica
  Peptide Sequence Number=SeqID_130792
aagactataagcgaatccgcaccgacccggatctcgaaaacttgaggaaatcggagcaattcgatcccctgatgaagaactacgacgagtcgttcatcaacgagaacgccctcaatgccatcaaatccttgttcagattcggcaagaactgagcaactgaaacatggtagcagcagcaggcaatgccactcttgtctggtcttgacaagaaagaacctaaactaagtaaagaaactaaaaagaaaactaaaacaaaaataaaagaaaacccgtaaaaacaaaaa

SEQ ID NO: 64819 - DNA, 273 bp, Setaria italica
  Peptide Sequence Number=SeqID_130793
ggggagatgacggaggagggggaggttgcttggatcgtagagaagggtgtttggtccgggaggcattggtgtcaacatgtgacgtacaagagaaggtggagcgcccgtacgaggagtacgagatcacgatcgagaagccgtacgggctcaagttcgccaagggccgcgacggggcacatacatccaggccatcttcccccggcggcgccgccgagaagaccggccagttcaccgtcggcgacaaggtgctcgccaccagcgccgtctcgggga

SEQ ID NO: 64820 - DNA, 253 bp, Setaria italica
  Peptide Sequence Number=SeqID_130794
ggaatggaggatggtgaggggcgagggaatgaggaagaagggagagcagagcagaggaggtggggtgttgcagtgtctgggaagaggacctccgcacggggctcaggctgtacaaggatgggaagtatgaggaggcattggagaagttcgagtcagttttgggatcgaaaccggagagcaatgaggcttccattgccagctacaatgttgccttgctgctactccaaactcgaccggatacaagcagggcttt

SEQ ID NO: 64821 - DNA, 225 bp, Setaria italica
  Peptide Sequence Number=SeqID_130795
tgccttagcagatctaatcaaaacaaatattagttggacacagataccatcgctcgtatgcagcgttggtatctgtgtccaactaatatttgcctatgtgtaagcatatttgttttgattagatctgctaaggcataggcaaatattagttggacacagataccaacgctgcatacgagcgatgcatgtcatgatatcactgttactgtttatttcatatgatac

SEQ ID NO: 64822 - DNA, 237 bp, Setaria italica
  Peptide Sequence Number=SeqID_130796
caattcttgacttagatcactaagatctgcagctaagtcaccgacctcccttccaatcagtctcaatgaagccatagtttcaggaagtttttctcttgctgaatcaaagtatttctcgagaaactctgcctccctcttacatgccagcatagagcgaattgccgaaaagaatatcaagcacgcagatactgcaaccgcggaagcagtgagggtaaggtgacgaggtcgctgccgccg

SEQ ID NO: 64823 - DNA, 385 bp, Setaria italica
  Peptide Sequence Number=SeqID_130797
tgttgtagcaccatatgtgcatgttgtggcttccttcattgatgatgatgcacctgatccatttgaggctcgtcatacactgcttttctttcgaggccgtactgtcaggaaagatgaagggaagatccgggcaaaacttgcaaatatattaaaaggaaaggaatggtgtgcgctttgagaatagctttgccaccggtgacggcattaaaatatctacagaaggtatgcggtcatcaaagttttgtcttcaccctgctggggacactccttcctcgtgccgcctgtttgatgccattttgaagaagctctaagacctgattacttgctcaatcaactcaggcagatccccaaaaagaagtggatggagatgtggttgaagctaaaa

SEQ ID NO: 64824 - DNA, 469 bp, Setaria italica
  Peptide Sequence Number=SeqID_130798
ttcggggcccctctctaatatacaaacacttgcaaagatgttatccgttcatatgaagagaactgaggtctctaaatttattttaaattgtttcttctgacaaaaggtcatttttttagcttgtcacatgcatttttcgggttagtctaatgcttttcttcctttatagattccttatgatattattgaagatattctcatccaaggtgaccacttgaaagatgctttgcaacaaattcaagaggctgtatatctgactaaggtggtgtttaaagtttattgttgctagcaaaatcttgtggttctactcaaatgtctcatttgtatttttcttcttttcctttgggttggaattcttatctacaaactagcaagtaaatgtaaagagtcttcgcaaaaaaaaaagtacaatgtaaagagaatccccagcagcagagcttagtattgttttctctgccatatcctctcc

SEQ ID NO: 64825 - DNA, 215 bp, Setaria italica
  Peptide Sequence Number=SeqID_130799
atgggcctgacatgcaatacatgactcagatgcgctccctggccccatttggatcagaccttcttgcggatgatatgcaggtgaagcacctgcaggaggtacctctcgtggtcattgatgatgatgggcctgacatgcaatacatgactcagatgcgctccctggccccatttggatcagaccttcttgcggatgatatgcttgaagttccaagt

SEQ ID NO: 64826 - DNA, 153 bp, Setaria italica
  Peptide Sequence Number=SeqID_130800
tccctcccccccacacaagcgcgccggcgtgcgcggcgctgctgctgcgacgccgtcctggtcgttcccaaacccgcgcctccgagcggcctacgccgcgctccaggcgtggaagcgcaccgccatcttctccgacccgtacctaactttcta

SEQ ID NO: 64827 - DNA, 222 bp, Setaria italica
  Peptide Sequence Number=SeqID_130801
ccgggttgtcctccggctgttagaagagaagtcaaacacggcttctgggaagaaggccgagagccccgagaagaagaagccagaggaggcggtgaaggagccgaaggccgagagccccgagaagaagaagccggagcaggagggcgccggcgcagagaagaagccggaagcagagtcgaaggcggagaagaaagtggaggcgaagaaggagggcggtgatga

SEQ ID NO: 64828 - DNA, 230 bp, Setaria italica
  misc_feature (202)..(202): n is a, c, g, or t
  Peptide Sequence Number=SeqID_130802
aatcgatagtggggcaggtgcaatgcctgctttttgggcataatcatcctcatagagttcagcaagacccttcttgctcttactttcatccagttccttatgctccctgggagctttagatggcaagagagaaggcttctcaacatccatcaaaactgaccctctgcaattcttgaacccagtacgtggaccatgcaggganaggttactgcttccagcaggcccaaaaa

SEQ ID NO: 64829 - DNA, 385 bp, Setaria italica
  Peptide Sequence Number=SeqID_130803
agcagatcagaaaaggctctgcttattctcttgctccttgcatcactggccatctcttcgggggatacgtccggaagcctctcaggcctcacttgaccaatgagaactcttctccggacgtatcccccgaagagatggccagtgatgcaaggaagcaagagaataagcagatcaaggaaaaggctctgtttgactgtgagcgtggaggagcaccgaaggcaacgactgaccagttcaaatgtggcaggtgtggccagcggaagacgacttactatcaactccagactcggagtgctgatgaaccgatgacaacatttgtgacatgtgtgaactgcaacaatcactggaagttctgctgagtggccatcctgcttaaatgtttgcg

SEQ ID NO: 64830 - DNA, 340 bp, Setaria italica
  Peptide Sequence Number=SeqID_130804
tattgtctaaggtaagtctaagtagtaattaagtctagtattctaaggtaaaaggtcttcttgttttgtacttgtgagcgtggaggagcaccgaaggcaacgactgaccagttcaaatgtggcaggtgtggccagcggaagacgacttactatcaactccagactcggagtgctgatgaaccgatgacaacatttgtgacatgtgtgaactgcaacaatcactggaagttctgctgagtggccatcctgcttaaatgtttgcgtagttgtgctgagcaccagcctgctaaaatgcgtgctctgctagctagggctggtcatttgaattttgactaggaca

SEQ ID NO: 64831 - DNA, 287 bp, Setaria italica
  Peptide Sequence Number=SeqID_130805
caaggaaaaggctctgtttattctcttgcttccttgcatcattggtcaagtgaggcctgagaggcttccggacgtatcccccgaagagatggccagtgatgcaaggaagcaagagaataagcagatcaaggaaaaggctctgtttgactgtgagcgtggaggagcaccgaaggcaacgactgaccagttcaaatgtggcaggtgtggccagcggaagacgacttactatcaactccagactcggagtgctgatgaacagatgtcacaaatgttgtcatcggttcatc

SEQ ID NO: 64832 - DNA, 197 bp, Setaria italica
  Peptide Sequence Number=SeqID_130806
ctttttgggtactggaaaaaggtcgttcttgaagagacaggaaagaaaaatggaagctcagagaatgaaagatcaagtgattcttcaggaaaggttgagaaggcgaggcccataaagattgaaaggaattcttcttcatcaagcatgaaggttgagaaaagagatagggatgtaagttttggaggtccagtggggac

SEQ ID NO: 64833 - DNA, 210 bp, Setaria italica
  Peptide Sequence Number=SeqID_130807
cctatcccctgtgtgccttgcctatccccttttgcgtgtctcaggcgaaactgagcacgaacgagtggtacttcttcagcttccgcgaccgcaagtacgcgacggggcttcgcaccaaccgcgccaccaagtccggctactggaaggccaccggcaaggaccgcgtcatccgcaaccccaaggccgccggccgcgccgtcgtcggcatgc

SEQ ID NO: 64834 - DNA, 384 bp, Setaria italica
  Peptide Sequence Number=SeqID_130808
tgcttattcaatgttcttcataactgccactggtatcattagcgtattttgtatttgatcagcacgggcactttcaacccataatctattaagcagttgtattgagatgctcttcacggttaatctaatgcatggctttttttcaggtgctgttgtatgttgtacaatatctagaacatcatggatggacaatcatatttaacaaggacgacatagatataatgtggcattttatcgtccaatttgccttctatggaggaactgcatttggaaagaaggctagaccatactgtatcctaacacatacagtattttgttgatcatttctttaatctttttggttgataatgtgttgataatgatgttcctccattgtagacactt

SEQ ID NO: 64835 - DNA, 404 bp, Setaria italica
  Peptide Sequence Number=SeqID_130809
ccccacgtcgccattgttgccgttctgcacgtcgtagcagttggactgctcggtgaaggagcccagcccctcggcaccttgaggttgttggacgagtccaccaactgtatgttcctgaagtagctggccttgccaaacccttcctccgggaagtggccgctacccatctgtgtggaggtgtggctgccatcaggctccgagttcaccacctcgcctccccactcgatcatggaggcactgtcagccaggtaggagaagaggaaggacggccagtagcccagaacgtaattgttaccgaactgcaaccaccaatttccctcctttgggtcctgcagaaaaccgcaattttcggacgaaatcagcagataggaccatgattcagattaattatttgtaagttaggt

SEQ ID NO: 64836 - DNA, 367 bp, Setaria italica
  Peptide Sequence Number=SeqID_130810
ctctgcatgtctctgataattctcaacgtactaggcatggcatgtggtaagttactagtttaattacttgctcaccttccagatcagtatactgatatcatattgggagccagagtagcttgaggttgggaagatgctggcgcccatggcaatctcgctgttaatctgaacgaaccctgagcacaatatgttgtagcaccctgttgcttggtatgcatcactggtccagtaggtgaacagccttgtgttgttgtccccatagaggtccgggctaacctgatgtagcaaagcaacacaagtgttcagagctcgtgataaagcacagtgcactgcagcagggctcccaaccgctaaacggtgctgcatt

SEQ ID NO: 64837 - DNA, 303 bp, Setaria italica
  Peptide Sequence Number=SeqID_130811
cgtcagctgaaaatgccagggtaatgaggacatgtttctacagtcacacttgcaccagtgcgtttagcatccttcataagttcaagggaagtttttgcatctgacagatgaacgatgtgaatatgggctccttctgaccgacctcctgcctctgtatccttcatcgcacgttgcaaatctctaatagctgattcctcccatgctggtggtctagacttcagatatgtcgcataggatcggggatctagttcacctttgcttgtccatgctgaacgtatacctgatgtcgaggattgtaaagta

SEQ ID NO: 64838 - DNA, 291 bp, Setaria italica
  Peptide Sequence Number=SeqID_130812
aatgtaagaatctaggcagaagacaaagataaactacaaacaaattgctcatgaggattgaaaggaatgtgatgtttatcttacagtccagtaggtgaagagcctagtgttgttgtccccgtacaagtctgggctaacctgccatcctgcttcgatgctgttgaggtcctggccgaaggagcccccccaagatccagagctgggacaggctgaactcattggcctgctcgattttcggttgcccacacattgatggtggccttggcgccatagtacttgtccccctcaaca

SEQ ID NO: 64839 - DNA, 255 bp, Setaria italica
  Peptide Sequence Number=SeqID_130813
atatcgagcagtagtgctgtcactgcattctttcttgcatagacgggtcaatcaaaaaggaaggaaggaaatataaaaattgaagtgcttggttaattaccagtcgtggttgacgccgatgagccctctgtcgtagacgacgccgagggagttgggcccataggaggagacgacgttcatgacccagatggggtccttgatgaggctggccgcgaaccctccatagaccgtgttcatgtccatgacgttcctgat

SEQ ID NO: 64840 - DNA, 276 bp, Setaria italica
  Peptide Sequence Number=SeqID_130814
tatagttggagatgggggagatgctggcgcccatggcgatctgattgtttatctggatgaaccccgagcacaataggttgtagcatcctgttgcttgatatgcatcactagtccagtaggtgaagagcctagtgttgttgtccccgtacaagtctgggctaacctgcaaatttcgtggagagcagagccattagccttaatgaaagagactgcccatgttagtccaccattacagcatgcttagctcctaaagacacactgccagtagagatcatg

SEQ ID NO: 64841 - DNA, 264 bp, Setaria italica
  Peptide Sequence Number=SeqID_130815
gctgcctgtggtgtccaaatcctcgccaaataaagatttcctctcacaaagtagacaggaccttaccagaaagctctttacctaaatatgctgaaatattccgatgtttatgatatacagaatggctgtcatcaagttcgaactgtgcctcaggtttccatactacaatgtcagcatggtatcccggcagaatagctcccttgttcttttgccctgcaagcttagctggattttcactccaccatgcggctagttgattcagag

SEQ ID NO: 64842 - DNA, 265 bp, Setaria italica
  Peptide Sequence Number=SeqID_130816
tttgctcttgatccttttctttttttcctgtttgcttccttgttttgatacaaagaggtcttcttgctcctcttgcacttttttccgattggtttccattatccacaagagtaaacacttgaaacaatcaatttgttataagttatcatctactaattgtaagctccaatattattctcactgcagaatatgcaacacaaattgcaaactgaatatgagtggtcaatgtttagaggagaaaatgtatagtggttgtttctctagt

SEQ ID NO: 64843 - DNA, 231 bp, Setaria italica
  Peptide Sequence Number=SeqID_130817
agcctctgcggccacttgggggtggcgttgagccccagcttcttgtacttggcgctgggtgccgtgacgcaggagcgcatgggcacgtaccaggcggcgtccgggtcgacgctgtcgtcgcacttggccggcgtggtgatgggtgtgagcttgtcgtagcaggcggtggcgtcgggcgacttctgccctgagacacgcaacaggagataggcaaggcacacaggggatagg

SEQ ID NO: 64844 - DNA, 256 bp, Setaria italica
  Peptide Sequence Number=SeqID_130818
ttttttttgtcaaaatccgagaggtcactcaccagcccatgcttcttctcttcagaaactttacatggcacatgggagaaaaaaaagaatggaaaaaaaaatacactagggtctaaggcacatgcacatgttacacactacctaggagggaacaagatgcagatcaacgctgtattgcacacttgaatgcttggttacattttttcatggtgacagcactcacactacacactagaagtagtcatgggcaatttag

SEQ ID NO: 64845 - DNA, 254 bp, Setaria italica
  Peptide Sequence Number=SeqID_130819
ttccgggtggtacgcaggccgcatctggatggtgtggttcttgaggaacgggtgatcgaaggcaggctggttggagatgggcacgcagtctatgatgtcaccgtctgggctctgtaagttggtgtcgaagaatcagtagttgcaaaaatgcagaaaaaggagaggatgtgctaaaattagtgcaggaatgatgtgaaggatatgtgaattttgtcaacataattttctttttctctgaacaaatgtaaaaacgt

SEQ ID NO: 64846 - DNA, 244 bp, Setaria italica
  Peptide Sequence Number=SeqID_130820
atcataggtgcgtgggtatgtcgagaatgcctcacaccagtcgtggttgacgccgatgagccctctgtcgtagacgacgccgagggagttgggcccataggaggagacgacgttcatgacccagatggggtccttgatgaggctggccgcgaaccctccatagaccgtgttcatgtcccacaggttatgcaataatcagggagagcacctacttcctggactctgtagcagccattgccaaagg

SEQ ID NO: 64847 - DNA, 239 bp, Setaria italica
  Peptide Sequence Number=SeqID_130821
agtccaggaagtaggtgctctcccctgattattgcataacctgtgggacgaaggatacggtccatctcaagaagtacaaacttcatctcgcacctgcaattagcgatgtcatcaagtagtaagtatattttgctcatctatgaaaaaaacacatgtctgatcagtaaaaggacaagtactatagagttgatttgatattgcttacctgtgagactccgcggtaaacaagccatcaagat

SEQ ID NO: 64848 - DNA, 165 bp, Setaria italica
  Peptide Sequence Number=SeqID_130822
atttatgtgagcagggatgaaattgcacaatcgaagaggttgcttcatgaaaatcatgagaatccttcgatggaatcaatgcaagaggacagcctttgaagattcgagttgtacactatatgagaatccttcgatggaatcaatgcaagaggacagcctttgaag

SEQ ID NO: 64849 - DNA, 227 bp, Setaria italica
  Peptide Sequence Number=SeqID_130823
aatgatcccccccaagatccagagctgggacaagctgaactcgttaggctgctcgatcttgggttcccacacattgatggtcgaccttggcgcccatagtacttgtcaccttgaacatacgctatcgcatgctgatggccaccctcgttcagcatggtgggattgaccgacattggggtgcgtggtgggattgggagtgggagtaaatggctcctcgttcttgggcg

SEQ ID NO: 64850 - DNA, 103 bp, Setaria italica
  Peptide Sequence Number=SeqID_130824
ccagtggagaagccctcccactggtacaaaggcagctgctgcaggcgggataacaacgctagtggcatgtccactagcgttgttatcccgcctgcagcagctg

SEQ ID NO: 64851 - DNA, 222 bp, Setaria italica
  Peptide Sequence Number=SeqID_130825
aagaacaaaccaaaggaaccctaagaaataactaacaaagacaattttagctgttaatgctcccgttccgtccagcttgctccttcccattagaagaagtatcaatccgtggagtggtcttggctccagctcattaggatggacaccatttcgtcctggtcctggtgatgctgaaccaggaagatgccgtcgtactgatggcaagaagtggcggtgctcgag

SEQ ID NO: 64852 - DNA, 364 bp, Setaria italica
  Peptide Sequence Number=SeqID_130826
agttttactaattttacttagttgtcttcttgactgatgctcatttggtaacatttcctgttaccaatgtgatgccctcatgctacatgattttagatatataaaacacatgctagcattgggattccattacgttgaacaagatgcccaggatatgcgacttcagcattttagatgcaaactagtcacttgggtgatatgaaattctgaatgttgctaaaatttttgggcggtttgtgtcattgtcatatctaatgggggattggcattttacagtaggatggacaccatttcgtcctggtcctggtgatgctgaaccaggaagatgccgtgtactgatggcaagagtggcggtgctcgagag

SEQ ID NO: 64853 - DNA, 175 bp, Setaria italica
  Peptide Sequence Number=SeqID_130827
agattaaatcagctttataatctttttataatcaaattttgttaatctacaggcaagtcagatcacttttgctcaggaaggcagcattgctcacaggaaaccaactacagtagctgaggtggccaggcagcgtgagcttagccataccgttcagagtgggagggggcggtaagat

SEQ ID NO: 64854 - DNA, 290 bp, Setaria italica
  Peptide Sequence Number=SeqID_130828
cctgtagcaagttgctcaagcgctgctccttgacctccatgggcagcagatcatcaatctctttctctatgtcaaaaatggtctcatcaactggtgcgtcaatgttacccatgcttgaagctagctggactgtcgagtctttgagctcatttaagcctcttctgacagactgttgctgataaacaagcggtgtctgcatctgctgataagcatcctgcatgctgccataacaagttaggactacaaagactaagacgttacttagtaacttactaattagtacttactta

SEQ ID NO: 64855 - DNA, 407 bp, Setaria italica
  Peptide Sequence Number=SeqID_130829
tactttcgttattggttattgttaagtaaacttcctagttcctattacttagttacctattctaattggtaactaccgttagttcagcaatgaagccacgcagccaacctgctccatagcgccatgatcgcgccttcctgctccgcagagcggtaagcaaaaggccaaatgacaagacgattgcaaacatcccattggcgaagcaccacgatggaacaaactcaagtgcctttcggttctctctctcaggaatgcggaactcatcaacaagccccttgatagcctgctgcatgaagagcatagcaatcagaagcccaaacagctcgccagcgatgcgggtgaaccggttgatgatcgagcatgcactagtatcgccagcaagacagcagaatggcagtccatacgca

SEQ ID NO: 64856 - DNA, 260 bp, Setaria italica
  Peptide Sequence Number=SeqID_130830
tactagacaatactagactagaataaagcaatcctgcatgctgccatacagttggctcaagctagcgttctgactcatgctcttccgtgcagtggctactagccggttacgaagcagctgcacagaaacgttttgccatgcgagtgagaaatcagatatgcagatggtatttgaggtactattcaacactttcatagctcacctgatgcttgagagtagccaagctctttgtatgcatgggtgactgtggaatgacacca

SEQ ID NO: 64857 - DNA, 185 bp, Setaria italica
  Peptide Sequence Number=SeqID_130831
ttccgtgcagtggctactagccggttacgaagcagctgatgcttgagagtagccaagctctttgtatgcatgggtgactgtggaatgacaccatttgatggagggataccgataaggccacacagtaaggtcagaaagacctaagaagaaagacaagaattactaattaagttaggttaaagtta

SEQ ID NO: 64858 - DNA, 336 bp, Setaria italica
  misc_feature (1)..(34): n is a, c, g, or t
  Peptide Sequence Number=SeqID_130832
nnnnnnnnnnnnnnnnnnnnnnnnnnnnnnnnnncccgttaatgcatcagctcgcttatttcaaagatcaggttcgcatggtggtcagaaccgggactttattttccatcccagtgtattcagaacaggtggcttctattcctacatagctcccccacgagttcctaggataggaagatctgttgtattggttctcttgcatagttgcatgattacattgaacagtttggagcaaccaagaaaaccaacctagacgaccaggttaaaagtagcggaaagaatgcaacagagcctacttccatcagttactaaggatgtgagcatattatcctgttt

SEQ ID NO: 64859 - DNA, 305 bp, Setaria italica
  Peptide Sequence Number=SeqID_130833
agcattacattggttctccactctgctggttcgatatcgtgttgaggtactgaaagactatggtgccttttggactacaattccaatagataccaacaagttatgacctgcatgttttcaagcttttacactgtcctggttttaatttatcaactttgaattggacacttgagagttgcaattcattttgattaagaaaacagcaagagccctatgatttatttacatattttctggaacagtttttggcgtacctgaatgatattttcaatccacttctaaatgcactttctgatccttcagat

SEQ ID NO: 64860 - DNA, 223 bp, Setaria italica
  Peptide Sequence Number=SeqID_130834
tgtgcagagtgcagctcatcttcttgacaggcttgttaaggatattgttactgagagtgatcagttcaggtatgctgcgtatgatttaccttttccatattagtgatatgcttatcttaatgctagtgttggtttctgatttccccttatcttgcttttgctctttagcatagaagaattcataccactcttgagagagcgcatgaatgtgttgaacccttat

SEQ ID NO: 64861 - DNA, 347 bp, Setaria italica
  misc_feature (8)..(8): n is a, c, g, or t
  misc_feature (291)..(291): n is a, c, g, or t
  Peptide Sequence Number=SeqID_130835
ccggtgcngctgctgcatgttctcaaattgctggagaagggatgggaaattgattgcactatagttctgtgtgtcttggtttcgattgccatcttctgtcacttgcagaatctgagagtacggatttgctgaagatgtgcgcttgagattttcactgaatggcacagtcttcagtcgagtcctcaagatcttgaaggccgcactttgctgaggcaacagcatcatgagaccataaagagttttcagaagccaggtgtgttttccaggttcaagaagctgctatttttttanaaagtatatgccatgccaaaatgaattagtaagaacagtgtaacagctaaattctt

SEQ ID NO: 64862 - DNA, 232 bp, Setaria italica
  Peptide Sequence Number=SeqID_130836
cttggtttcgattgccatcttctgtcacttgcagaatctgagagtacggatttgctgaagatgtgcgcttgagattttcactgaatggcacagtcttcagtcgagtcctcaagatcttgaaggccgcactttgctgaggcaacagcatcatgagaccataaagagttttcagaagccaggttgcatagattacactctatgtaccctatgcaacctcctttagaaaaaatca

SEQ ID NO: 64863 - DNA, 443 bp, Setaria italica
  Peptide Sequence Number=SeqID_130837
gtcctgcagggcaggctctgagtagcttgtatctactcaactgctcctcctgaactgagaggatgagcatgctgctgccagttatctaaacatatcactagccaaatttataatccctgatttgaatattattccaactgttgtgctgttagctagatccactatgttgctcaaggctgaaaacctgatgttctttgacgaacctcggattgcatagcgggaatctaaggtagctatgaaaccacgaccagactactttctggtgcagaatagctgtatggatttagccaccactaaaacattttgcagcgtagctttgagcattgcgattgtttatgatagcatttttacttgtgcaggtcgtcctattagtattggaagttcatgcacgtatagctgaagagcctcaccacttccatcatcttgtatcctacctaacccgc

SEQ ID NO: 64864 - DNA, 476 bp, Setaria italica
  Peptide Sequence Number=SeqID_130838
tagcttgattccaacttgagggattttgatattggagcaattctttcaattgcaaaaagagaattgaatagtgaacatgaggccactcgaattgaagcattacattggttctccactctgctggttcgatatcgtgttgagtttttggcgtacctgaatgatattttcaatccacttctaaatgcactttctgatccttcagatgcgatccactatgttgctcaaggctgaaaacctgatgttctttgacgaacctcggattgcatagcgggaatctaaggtagctatgaaaccacgaccagactactttctggtgcagaatagctgtcgtcctattagtattggaagttcatgcacgtatagctgaagagcctcaccacttccatcatcttgtatcctacctaatccgcaccttccacaacaatcatgttctgctggagaagcgtggtgctttgatagtccgtcgactctgtgtt

SEQ ID NO: 64865 - DNA, 417 bp, Setaria italica
  Peptide Sequence Number=SeqID_130839
agaagtgcagctcatcttcttgacaggcttgttaagataattatttatcaaccaggatattgttactgagagtgatcagttcagcatagaagaattcataccactcttgagagagcgcatgaatgtgttgaacccttatgtgagacaatttttggtggggtggataacagtgttagacagtgttcctgatattgacatgcttggtttccttcctgattttctcgatggtaatccctcctttttctcaagtgcattacttatgttggctgttcagcaacctttctatcgttacccctgcaggtttattcaatatgctaagtgattccagtcatgagataaggcagcaagccgatgcagcactttcagagtttctgcaggagataaagaactcaccaaatgtagattatggtcgtatgg

SEQ ID NO: 64866 - DNA, 153 bp, Setaria italica
  Peptide Sequence Number=SeqID_130840
ctggaataacaggacatgatgtccctacagacaaaaggcagctaataattgttccatttacctttagataatccaccagggccatcagcagcccagcactccaaccactgactccgtgagccttgtgctcctctgccacacttccctccccac

SEQ ID NO: 64867 - DNA, 473 bp, Setaria italica
  Peptide Sequence Number=SeqID_130841
ttctctgtgttgagcagcctcctgtcttgctgctccagtccgcaccgtcaggatcatctacaagccgaatcgaaaagctggacggtatctacagatgcaggcacaaacaaagccgttacaaaacacgaagatgctgcaatttcgtttctctgacgggaagggcacagatcatacgggaagggcacagatcatacggaggccgggtaggagatcttgacttcgtaccacgcggacggccgcagcccgttgatcctgtacacccgccggccgttgcgcaacggcatcgtctcgcccaccagctcctcgcctacgctaagcaccctcgtcgattcctccgcgctgtgcgcggcggaggagagcagcagcagcgccgagagaaggacggcgacgacgatgcggccgcggcatggcgaggcgagcggccgccgcggagatggcatgccgatggttcggctctgtgcgactagtgcgac

SEQ ID NO: 64868 - DNA, 292 bp, Setaria italica
  misc_feature (199)..(199): n is a, c, g, or t
  Peptide Sequence Number=SeqID_130842
tctaagtcgtaattgttctacgtccctttctttgttcctattgttcctttgtagtcgtactattgttcattcatagaggctcgcgttcaggaccagccggtaattgcccttggtcctcatgacgagccgggctctctcaccaccagaaacagggacgttcagcttcacctcaccttttcctctttctttccagcccccntctaagtactcatacaaagcagagtcagcagtaaatacagccttctcgttttcttcaccagtttcaacagggccctctgccatagcaaatttc

SEQ ID NO: 64869 - DNA, 202 bp, Setaria italica
  Peptide Sequence Number=SeqID_130843
cctatcccctgtgtgccttgctttcccctgttgcgtgtctcagtctcgggtgtcttcagcggcacatcaggtgccttcagtgccttgtgagtctccaccgcgcccttgaactcctccctggtggcagtgtccttgaacttcagagcaaaagtcacgaggctgctctgagactcgccgatgctgttcatgcaagcgaatgtca

SEQ ID NO: 64870 - DNA, 248 bp, Setaria italica
  Peptide Sequence Number=SeqID_130844
agataaaacttgttgatgcattaactaaatgtaaattatttcctacatgaagaattttgcatagaagaacttacctcattaacaaacacctttacctttatgttttgcatttgttaacccagttaatttttttgttatgcattacacttacaccagtttctatcttcacatttagattgtccgagtcgcatggatcctctccatggtaattatgggatttaattatttttattttcttttgcacaagt

SEQ ID NO: 64871 - DNA, 235 bp, Setaria italica
  Peptide Sequence Number=SeqID_130845
ccacagtgaataatgacgaaggagagggaggcttgaagcaactgtgtctgtgtgtgcacgcctagtgggaggtggacggcatgtggcggccagctaagggtttctccgggatgaggaaattcatcatttacatcattgctccctgtttcaccatcatacctagtttgataatttgcagtattggtggtgccgctcatgttcgacaacttatctacatatctgcaatcatattagt

SEQ ID NO: 64872 - DNA, 380 bp, Setaria italica
  Peptide Sequence Number=SeqID_130846
agaccaacggacaaggcggcgccgccggggcctcgtcgtcggggcagcaacacgacgatgatgcggaaggcagcctcctccggcagaaatcgacatggaagagatttctagcgcatgctggacctggttttcttatttccttggcttaccttgaccctaagcaaatgtgcagactgatttgcaggctggatcaagtcacagatacgagttgttatgggttctcttctttgggttcatttttgtattgatcatacaatcattggcagcaaaaattgggcatcattacaggaaagcatcttgctgagctgtgtatgcgtgaatacccaaagtatgtgaagtatggcctttggttgctcgttgaggttggtgtgattgctgcc

SEQ ID NO: 64873 - DNA, 150 bp, Setaria italica
  Peptide Sequence Number=SeqID_130847
tctttacgagtatttatgtatcgtatggttgtatgtttggaacagtgcagactgatttgcaggctggatcaagtcacagatacgagttgttatgggttctcttctttgggttcatttttgtattgatcatacaatcattggcagcaaaat

SEQ ID NO: 64874 - DNA, 399 bp, Setaria italica
  Peptide Sequence Number=SeqID_130848
ttgtaaacggcctcgagaaattagaagtagccccctttcatgacgaaaaggaggtcaaaatcgacaatgtggctaagcacacctacatacatccccaagaagcttggggaggacaggaccttgcgtctaaagactagatcactcatgaaagaaacagcataagagctactgaacacctccgtatcgtctcatcgcctttcttcattgtcgtacttggagctggggcagagttctgctccgtgatcatcttcaccagattcacaagggaccgcaacctgtcccaaacactatagccatacagagtttgcacaaggagctcctggaactcaaatccatgcttcgagacaggatactggataggttttgggatcattgttttaatataaggccagaatctat

SEQ ID NO: 64875 - DNA, 312 bp, Setaria italica
  misc_feature (43)..(43): n is a, c, g, or t
  Peptide Sequence Number=SeqID_130849
caaaaaccagttattatgtgcacaagagcttggcctgttcggnaaaaccagttattatgtgcaccagattttcaggtgcaccaacagctgaaaagagctgcttgtatgatacgaaaaataaaaagcagcctgaccaagtcgcatgttcagagacctttatccccttccataatgtctttaatccaatgctggctgcactattctctggtaatgcagcagtgataaaggtctctgaacatgcgtacttggtcagggtacctttatcactgctgcattaccagagaatagtgcagccagcattggattaaaaga

SEQ ID NO: 64876 - DNA, 273 bp, Setaria italica
  misc_feature (18)..(18): n is a, c, g, or t
  misc_feature (246)..(273): n is a, c, g, or t
  Peptide Sequence Number=SeqID_130850
ccaaacgtccaaaccatnaccctgacatttatggtagcgtggtcattgatgtgtaggagtatgcctcttggtgaatattctggatgtattattggcaggactgtcgtgtttgctttccccgagcgaccgttcctggagatgaattagactaggtaacaataagtttaaggaacctaactaaggttaaattaaagtaaaccttaaaacttttaaacgttaaacgtaaagaaaaccaaaaagtaaagnnnnnnnnnnnnnnnnnnnnnnnnnnnn

SEQ ID NO: 64877 - DNA, 364 bp, Setaria italica
  Peptide Sequence Number=SeqID_130851
agaggagaccaggccgacagaaccgcggtttcaaggatcctctcagcatagattgggtggttagatgtttggctgtatgattggagtcctcacctgatgacaaagttgcatctgaactgcatttgcctcagagacaatgagtgagtcttttcttgataggatggtttcccaacttcggtcgacatgcaagttctacactggatatcccaaggacctagggccatcaagaattataccattcacatctgagcgtcagtttgtgcagctattgcatgaaggaaggcctgtcgttgttgcctttactattaagtgtaccttatacacagcatcttgataaagtaaaaactaaaaaaaagaaaaaaaa

SEQ ID NO: 64878 - DNA, 400 bp, Setaria italica
  misc_feature (147)..(147): n is a, c, g, or t
  Peptide Sequence Number=SeqID_130852
acttttcaaatattctcgaaatccatacacgctctgatcatagttgaaaggtgctaccttttcaaatattctcgaaatccatacacgctctgatcatagttgaaaggtagcacttttacagaatacttagtgatgttaggatttcgngaatatttcaagaagcatggtttcaagtactctgaaacaaactagggagttaacatggaggcattttgttgttttggagttaaaaccattagactctactggtgtcctgcctagtccaaggaatacttgtcatgtactcatgtatatgggggtacagtccatgccaatagcttagcactgcccatacccaaaatgtgcactgacctatcgaccaaattgaattcggtgaattgaacatttccccgacgacaaa

SEQ ID NO: 64879 - DNA, 408 bp, Setaria italica
  Peptide Sequence Number=SeqID_130853
aacaaagaaaccgcggtttcaaggatcctactcaaggaacaaaagttgcatctgaactgcatttgcctcagagacaatgagtgagtcttttcttgataggatggtttcccaacttcggtcgacatgcaagttctacactggatatcccaaggacctagggccatcaagaattataccattcacatctgagcgtcagtttgtgcagctattgcatgaaggaaggcctgtcgttgttgcctttactattaagtatactaactctgctgtattttgttcagaaacaccaactagaatgtcaaatcatcatatatacagtttccactcacttcaatcctgaatattacctttttaggtgtacttatacacagcatcttgataagtactggaagaggctgctgccacatttta

SEQ ID NO: 64880 - DNA, 459 bp, Setaria italica
  Peptide Sequence Number=SeqID_130854
taagttctgttacctatattctgtgaactactattcttcctgtatgcttgctgtgaactagtaataatcttcctgttcctgttctctgcagtttgttgttattatctagggattcttcaacatgattacatagtcatgcaagattctgtcagttcgttgtttttgttaactattgatgtaattcgttcattaccataggacaaagttgcatctgaactgcatttgcctcagagacaatgagtgagtcttttcttgataggatggtttcccaacttcggtcgacatgcaagttctacactggatatcccaaggacctagggccatcaagaattataccattcacatctgagcgtcagtttgtgcagctattgcatgaaggaaggcctgtcgttgttgcctttactattaagtgtacttatacacagcatcttgataaagtactggaagaggctgctgcca

SEQ ID NO: 64881 - DNA, 270 bp, Setaria italica
  Peptide Sequence Number=SeqID_130855
gagaggggctcgcggggatggggatctcgaggcccctcgcggtggcgctgctgctgctgatcgccgtcgccggggcggccgccgccatccctccctccctccggcggccacaaccctcgccgcagccacaaccctcgccttgttgcgagctgtgactccgaagctgccggtctccgtccacatcgcgtcataaatccctctccaccccatccccgacctggcaccctaccccccgccattccaatcccccaatccgcctggtgcacaacg

SEQ ID NO: 64882 - DNA, 227 bp, Setaria italica
  Peptide Sequence Number=SeqID_130856
gtcctgatttgtttcatgagcatgtagctgaggctaatctttcaaaatcttgtttgaggatctggctgaagcagtttgttcagggtttcaagcttggaattttgactatgaacatctggggacgtttaaccaagtagcttttatagaatctgtggagacgtttaaccaagtagccttcatagatctgtggtatgcttaactgtgaaactggaaattatttgctagga

SEQ ID NO: 64883 - DNA, 273 bp, Setaria italica
  Peptide Sequence Number=SeqID_130857
gctctcccgatggcggtggcgaacggcggcgcctcccggcgctcgcggccgaacgtgttggtgacggggactccgggcacggggaagacgacgacgtgctccctcctctctgaagctgcgggtctccgccacgtcaacatcggcgacctcgtccgcgagaagagcctccacgacggctgggacgacgacctcgagtgccacgtcatcaacgaggacctggtaagcctccacctccgccgctaatcccccattctcccagtcctggctcctgtg

SEQ ID NO: 64884 - DNA, 260 bp, Setaria italica
  Peptide Sequence Number=SeqID_130858
ccggtcgggcctcaggttcaggctccgggccagcagctccagcagcttgaacgccagctcttccatggctttcatgtactcctccagcgcctccctgaagtctggcaggtcctcgggccacttgttctcgtacacgacctcgccatcggtcacggttcccgccgccggcggcggcggctcgtgcgcgacgaggtcgaacacctccttccagtccctgacgttcttggtgtgctccgactcgtggtacccgagcggcgccg

SEQ ID NO: 64885 - DNA, 451 bp, Setaria italica
  Peptide Sequence Number=SeqID_130859
actgtttcggatcatgcagcaaataagatgctacatgtgtaatcagaatggtcatctatgctgtttcgacttctctgacaatagccccaaacaaattagctgttacaattgtgccaaatctggtcattctggtctggtaagttttaatgcttacaagttattatttgtgctgtttccatatgttgcttttcatggcaggtgattaacattgggccttctattctaggggtgtgccaagcaacgcagggaaactagtgctgtcataactccaacccaatgctacaaatgtggggaggaaggccacttcgcacgtggctgcacaaagaatgccaagtccgatcggtcgaaaggcaagtcatcatcgcacagtcagagaaaggaaaagtggaaaaaagattccagtgctagatcggctcctcatgatgcccgtaaaacaagtaaaaggaaaagc

SEQ ID NO: 64886 - DNA, 401 bp, Setaria italica
  Peptide Sequence Number=SeqID_130860
atttgtactgcattaattcgtcacgcaagattcaagataactgaacttctaggtgatacgacaaatgtgcaggctcttactttgaatttccacggagaaagatttggattgcaccagaaggaaagaacttcaaaattccttcaagacactaaggaagctattcctacatgggatctatgtggaatttgatcttctatggacactggtcctacttgagtctgcaccttctgtccaaatattcggtatcaagatatggaaccatatttgtggaaaggacacacagaggagagaaatatgttctgaaagaacaattggttcttggagcactacaaagcttggtggctcgacatctttcttgcaattaaaaggcttgaatttggtggattccagcaagtaaagca

SEQ ID NO: 64887 - DNA, 330 bp, Setaria italica
  misc_feature (302)..(302): n is a, c, g, or t
  Peptide Sequence Number=SeqID_130861
caaaatcttgtattggcatgtacaaatgaattccaacaaagtatgctcttgtggaatgcagatatggaaccatatttgtggaaaggacacacagaggagagaaatatgttctgaaagaacaattggttcttggagcactacaaagcttggtggctcgacatctttcttgcaattaaaaaggcttgaatttggtggattccagcaagtaaagcagcatttggatcttattagaactgtcatcaagcgggctcccaacttggagactcttcttttagaagacaaaaaatactgccaaaaatgtnaagcagttactaactcagtctgttcttc

SEQ ID NO: 64888 - DNA, 239 bp, Setaria italica
  Peptide Sequence Number=SeqID_130862
agggaggaagccctaccagcagaagaagacgggaaaggcgcggtggagggcggcgcgccatcatcaccgaccgccagaacgcgcgccggggcacggcctccacgctcacccgcggtgaggtcagaggcggagggaggaagccctaccagcagaagaagacgggaaaggcgcggcgcgggtcgcagcggaccccgctccgcccaggaggtggggtcgtgttcggccccaagccccgcgac

SEQ ID NO: 64889 - DNA, 282 bp, Setaria italica
  Peptide Sequence Number=SeqID_130863
caacagcaggcacgcagcaaaattatgaggactcctttttctcttcagcggcctcctcaaatgtctctccagggacaagctcgggaacgtcgtcatcatcatcctgagcagcacctgcgctggcaccagcctcagcgcttgaagctccagggcctgcttctggaattgctccgcaagcctcctcaggttgtccaagttgtcaggactgttgactttgaagtttgaactcaacaggtgaagagaaacataccaagctgtatttgtattgtattgatggaagca

SEQ ID NO: 64890 - DNA, 268 bp, Setaria italica
  Peptide Sequence Number=SeqID_130864
tattatgccagatgattgacatgattggaccagaggtagattctcacacataatcataaagcattttaacgggatttgataaagctttccctttgtacagaatgagagctattttacactacgggacttaaaacggtgtaaactctcaggaaatatattcaatattcttttcaatctgaacaagttcatggcatttgaaactcgtgatccgttcctcattcgccaggaacgtgaaaacccaactctaaccgagtgggatcggttcgcc

SEQ ID NO: 64891 - DNA, 226 bp, Setaria italica
  Peptide Sequence Number=SeqID_130865
ggagctatgaatgacttgcaaccttgctcttatctctcagtagttctgtccatttaggcatgcccagtggtggaatacttgattcaaaatggagcaaatgttaatgccacaaacttggagaagaacacacccctccactgggcatgcctcaatggacatatagaggtaatcaaggctttgatatctcatggctgttcagagcactcacactagcgccagcagatat

SEQ ID NO: 64892 - DNA, 449 bp, Setaria italica
  Peptide Sequence Number=SeqID_130866
ctggcaggagtgtaatgagagatatactaaaatagagcaatgccatgaagacctatggaagaacatcttcttctcattgtgtgaatggggaagaggaaaatcctggctacctgggcaggaagcatgggcaacagctggagaacaactgatgatatcgttgacaactggggcagcatgacatctcgtgcagaccagaatgacagatgggcttcctatgccggacctggtggatggaatgatcctgacatgcttgaagtgggcaatggtggtatgtctgaggcggagtaccgctctcacttcagcatctgggcacttgccaaggctcctcttctgatcgggtgcgatgtacgctcgatgagccagcagacaaaggacatactcagcaactgggaagtcattgttggattgcactttctttccttggacgcctagactatcttggttgacag

SEQ ID NO: 64893 - DNA, 236 bp, Setaria italica
  Peptide Sequence Number=SeqID_130867
aggaaagaaagtgcaatccaacaatggcttggacgcctagactatcttggttgacagcaatgacttcccagttgctgtcaaccaagatagtctaggcgtccaaggaaagaaagtgcaatccaacaatggcttggaggtttgggccgggccactcagcaacaacaggaaggctgtggttctctggaaccggcagggctaccaggcaaccatcaccgcccatagattctacgtagtct

SEQ ID NO: 64894 - DNA, 222 bp, Setaria italica
  Peptide Sequence Number=SeqID_130868
atctatgggcggtaagcttgctttcttcagatccatactgcatatcataatcaagtgaagaaggttgatggtccagacatcatatttcaaattccattttcttgtgcagcactcgtccttctcggctcagggccaattatcagcttcagtggcacctcatgactgcaagatgtatgttctgacaccaaagtaacttatacaagagctagtccgtagtgtggg

SEQ ID NO: 64895 - DNA, 234 bp, Setaria italica
  Peptide Sequence Number=SeqID_130869
cctctatataggggaagagaaaatcctgctacctgggcaggaagcatgggcaacagctggagaacaactgatgatatcgttgacaactggggcaggtgctgctcatttcgttgtgatctacttggatgactaattaactactgaaattgtccggactgaccatatttaccatgatatttcagcatgacatctcgtgcagaccagaatgacagatgggcttcctatgccggaccg

SEQ ID NO: 64896 - DNA, 247 bp, Setaria italica
  Peptide Sequence Number=SeqID_130870
aacattccaaagcaaatgacttggccctaataaaggtggaggatatggcaaatgcccaacctttacaaacagtgaagattggcccatccacttcagaacaaaaagaagattcagtggcacatgataaaggtggtgtcctaggagctaagccgttagaaggtccttcaacaactggaggccttttgactactgctaatattgtcacaaatgatgcaaacaaatccagcagcgctgaacgagggcagag

SEQ ID NO: 64897 - DNA, 270 bp, Setaria italica
  Peptide Sequence Number=SeqID_130871
ttttaagttttttgttttacttttattttttgttttatttttgggtaaaagtaagggtagggtctaaattaaaattattcttcgtccgacaggctgttatcaagatggatgaagctgggtcttttcatatcaagaacattgggaaatgtccaatctttgttaatagcaaggaaataccaagctgcaaacgcatcaacttaagctctgactcattaatgaggtaaaggatatgaggttatttccatgtaaaccaggatgctgtgagacagt

SEQ ID NO: 64898 - DNA, 210 bp, Setaria italica
  Peptide Sequence Number=SeqID_130872
tttaaagttaattttaggttcctattcctactttctagtaactaaaaagtaagtatttctagtggcacatgataaaggtggtgtcctaggagctaagccgttagaaggtccttcaacaactggaggccttttgactactgctaatattgtcacaaatgatgcaaacacatgcatgctagctctgccctcgttcagcgctgctggatttgg

SEQ ID NO: 64899 - DNA, 179 bp, Setaria italica
  Peptide Sequence Number=SeqID_130873
taattaaggtaaccaaggaattactaacttagatcacatgacgtattggcttcattagtcgtgccatgtcctggcgtgtatgttgagtgcaaattgaacacagaagatcctgaaatcccttgcaatgatgatgttgctacacctcctgagtatcctcttgaatgctgtaccttgggcca

SEQ ID NO: 64900 - DNA, 359 bp, Setaria italica
  Peptide Sequence Number=SeqID_130874
ggtttagaacacgaggcagatttcatggacttcccatttttcagtaatagtgaagaatttgatatcctgaatggtgaaaactttttgaattctccgagcgagggaaaccaggaggatttagatgattctgccttcaaagttgttcctggggttagatcaaccatgcaaagtctggcgcattccaatgaagccaatacgtcatgtgatcaaatagatcctggccatgtggaaagtaatgtagacgtttctggtataatgttggctcctacttcattagtggtgccatgtcctggcgtgtatgttgagtgcaaatttgaactactagtaagtattccttgttaaattccctttgttcttaa

SEQ ID NO: 64901 - DNA, 293 bp, Setaria italica
  Peptide Sequence Number=SeqID_130875
cagcgctgctggatttggcgaaggatctccttgtagtttaggacaatattagcagtagtcaaaaggcctccagttgttgaaggaccttctaacagcttagctcctaggacaccacctttatcatgtgccactgaatcttctttttgtcctggcgtgtatgttgagtgcaaattgaacacagaagatcctgaaatcccttgcaatgatgatgttgctacacctcctgagtatcctcttgaatgctgtaccttgggccagaaatcggagaacactatctatccagtctcccctgc

SEQ ID NO: 64902 - DNA, 194 bp, Setaria italica
  Peptide Sequence Number=SeqID_130876
tcactgaactcagccctggctcaatattattaggtaggcctccacagacacactggtggacatacatatcctggaatgaatgggcattcttttcacacaaagcatgctgagagcatggtaagagacggggatgacaccaataacattgcgtatggctactcagatgtaggtcagatgtatgaacatcatgccta

SEQ ID NO: 64903 - DNA, 354 bp, Setaria italica
  Peptide Sequence Number=SeqID_130877
aatcacttgcaaatacagttttgtgccagaaaaattgaacacttgtgttgtcgagatttacaagaagtagattcaagttcttctgattcagttaaagagaacgcaagtgctgaatagaacatgtcatctttacatccaccatgcttttgaagccctgaatttgtgttggatagaatcgattcatacatagcaagattatatgaaagtttggagtaggagcttctaggtattgaggagcccaattcaacatcctggggatcaaccaaccagccatggtgtagagggacaccaagaaaaccaaatagtgcagtttctgagctctgctcaaagccacaagagctagcaaatgtcaca

SEQ ID NO: 64904 - DNA, 325 bp, Setaria italica
  Peptide Sequence Number=SeqID_130878
aaaaaaatatatccacaaccttaggctgaaggccatgaatgcaacaaaaatcgagtttgcaagagttgtgaacctgcattttcacactttctttaagaaaagagacgacaaggttcagtagatattctattgataccacagtttcatgtggttcaaaaaagatgctccccttgagcagtagaacattgcagactgcaataagggcgcatgggccatcatttatctggtggataacatgggtagatcgtccgaaaaaatcaataggccttatattcaagttgccatgcatgccagatatatttgctttctcctcgatacttcctaa

SEQ ID NO: 64905 - DNA, 268 bp, Setaria italica
  Peptide Sequence Number=SeqID_130879
tatactccgtcaccattgacctcatgaagcatctgccaaactgcactagttcttaaatagtttgaatcagtgactaaagaaagtaatactccattaatcttaactatagtattgtaatgattgttccagtacagaatgtatggaacattttcaacaaggtcttcttgtagggaaaccaagctgtagcattggcacatggttatttaaaatattaaccagtggcaaacaacaaatagtttccaaaccaaaaaaagactgcacatagaaa

SEQ ID NO: 64906 - DNA, 267 bp, Setaria italica
  Peptide Sequence Number=SeqID_130880
ttaaaccatgcaaaaaaaacaagttagcatattataatcacatgcaacataaaaagatcaactaacatacctgtgttaacctttcccacaccgcattggtttcagtacttaacaaagacaaatcgttcagcaacacatatattttctcttcaaacttagatattgtaattaacttttcattccaaagcaggacagtgggctgtctcgctttgaggtcatcatgtaatgaagagaatccatatggggttagctgagggccccgcaaaa

SEQ ID NO: 64907 - DNA, 223 bp, Setaria italica
  Peptide Sequence Number=SeqID_130881
agtcaaagttcccgttccaacttaaccccgcatcatgagaaaaaacaaagttcttccagtaaatccaatccaataactctcccaatcttcgtggtatcagcaacatctaaggaagtgccaccagcaaatatagtttttaactcagagaaggcattacatcacatggtgatggattatatttggactgcagctttacaggattgtattcaggacccgatgcagc

SEQ ID NO: 64908 - DNA, 122 bp, Setaria italica
  Peptide Sequence Number=SeqID_130882
caagattatatgaaagtttggagtaggagcttctaggtattgaggagcccaattcaacatcctaatgaaatatcaaaagtatcagccttgaattaccccaataaagatctcaaatcttacag

SEQ ID NO: 64909 - DNA, 250 bp, Setaria italica
  Peptide Sequence Number=SeqID_130883
aggaggatggcggagaacgagtccaagcctgatggaatcccgccatcccagggcggcaagtacgttgggttcggatctagccccgcgccctcggcgaatagcaatggcggtgccacccagggcgatgtcatgcaggtcgtctcccaggtaaaaagatcatctttgtgctattgtgtataccatttagaatatgcaatgaacaggttcacaattcaccaatataaggacatattttcccttgatttgataa

SEQ ID NO: 64910 - DNA, 236 bp, Setaria italica
  misc_feature (33)..(33): n is a, c, g, or t
  Peptide Sequence Number=SeqID_130884
tggacggaaggtggattccgctgaagttggccnctttgcatagagctatactttcagagttgttatatgagcgcccagtggttggtattattcggatactgaaacggtcgtgtaaaagggtttgtgtttctgtacgatgtctacaactgttatatctagtggtagtttcgaaggggccttgaccacagaaatataccactagatataacagttgtagacatcgtacagaaacacaa

SEQ ID NO: 64911 - DNA, 215 bp, Setaria italica
  Peptide Sequence Number=SeqID_130885
tcatgagaggagttatggccttggcttcacaaaaggtcgaggaatatgccaaggaaggaggagtgggtggctggggagacgattggcaacgcggggagcagaacaatgagccttaccaaaggtttgagcatgagaccaacagcaatggttggagctcttctcaaaattcttcctgagacacgcaaaggggataggcaaggcacacaggggatagg

SEQ ID NO: 64912 - DNA, 237 bp, Setaria italica
  Peptide Sequence Number=SeqID_130886
gtgtatatttagtaggtaattccgttgctgcttgtggtcagttatatggatcaagcatatatcccagtcgtctgtttatgtacatatttcatcaagtagctggtggtatgaagagaagtagtagatgagtttgatattctttgtgcatgacgaaaatacagggaaatctgaagtaaatgttatagatgcgaagacaatgtctgctgatccagttgctgtggttgagcttcctaacag

SEQ ID NO: 64913 - DNA, 334 bp, Setaria italica
  misc_feature (240)..(240): n is a, c, g, or t
  Peptide Sequence Number=SeqID_130887
aaagaaaaagaactaacgttttaaggtaaattaactacccaacgactaatagaccaaaggaatgacaaaactcataagatggtttgaactccccaattgcttcatattccacaatgctaatgcttgggaagagggtgatgaagttgttctcattacctgccgccttgagaatcctgatttggataaggtgaatgggcatcaaagtgacaagctcgagaactttgggaatgagttgtacgngatgagattcaacatgaaaactggagctgcttcacaagaagaaactgtcagtgtctgctgtagattttcctcgtgtcaatgagagctatactgg

SEQ ID NO: 64914 - DNA, 351 bp, Setaria italica
  Peptide Sequence Number=SeqID_130888
ccacagaccccacaccccatgcagtaaccatactcatgcagagcatgccacattttcagatgtagttaaggtcctggaagatggagacttgcagactcttggtttgttggattatgacaaaaggttgaaacattctttcactgcccatccaaaagtcgacccatttacagatgaaatgttcacctttggatactcacatgagcctccttactgtacttatcgtgtgattaccaaagatggggctatgcttgatcctgtgccaataacaataccagaatctgtaatgatgcatgactttgccataacagagaattattctatttcatggaacctaccctttagttagttaca

SEQ ID NO: 64915 - DNA, 169 bp, Setaria italica
  Peptide Sequence Number=SeqID_130889
cgatttttgttcccaagcagccaggtgtatctggagaagaagacgatggctatttgatattctttgtgcatgacgaaaatacagggtactccattccttggctgtgtatcctcttatccccagacagtgcttctgatgtggaaaactcaacataccgagcatatgtcta

SEQ ID NO: 64916 - DNA, 186 bp, Setaria italica
  Peptide Sequence Number=SeqID_130890
tgccgatgagaagcaataccgtgagaaatcttcatctgacctattagggtattgcttctcatcggcatacattgtggctctactgcatgacagtcttggtgtaccactggatgacaagaggattgagtattccaaccaggttggaatactcaatcctcttgtcatacattgtggctctactgcatg

SEQ ID NO: 64917 - DNA, 441 bp, Setaria italica
  Peptide Sequence Number=SeqID_130891
cggcaagatcttatttagacgctggcctgctactatataatacggttctggggggttctccttcctcctcgatcgtgctccatggcggcggcgcctcagttgcagctgcagcaggagcagccgcagctggtgccgcaattgcaggtgttgcagtcacagccgccgctctccatggcggcctcgaacccgccggagctcgccttgttggtggcggcggcgatgaccatggtggtggtggtggtggaggtggcctccacgtcagggaacatgttgcagccgccgcatccattgccgcacttgcagccggagccgcacccgcagttgccgttgcagcaagacatgctgatgatcttgttgatcacgagaaagggaaagacaaggaaactaggtagactagaaggaaaggtagtaagtagacttacttagacgactactagacta

SEQ ID NO: 64918 - DNA, 227 bp, Setaria italica
  Peptide Sequence Number=SeqID_130892
gtagcatgtcgtcgcctctccggttccaaggtagtgaattggcttgcctcctcttctggcaaatttcagcggctgcatttgactgttccattcaaaatgatttcgatcagatgcgccgaggctgtcgctgctccgggtgaagtctttcctccgacgacacctcggccgccagcggcgacgagctcatcgccgacttgaaagccaagtgggacgccgttgagaacaag

SEQ ID NO: 64919 - DNA, 233 bp, Setaria italica
  Peptide Sequence Number=SeqID_130893
cagccatggccggcacgcgcacgcggcgaacatcgtcttgaagcaggtggtgcgtccccgctccgccgccgcctcgcgccacggcgccgtgtcgtgcagcttcctcaaggcttgctccctctgccggcgggacctcagccctagcaaggacgtctacatgtataggtacacgaatcgatcagcaacgaacctgcagatgccgacgtctcttgattaacaggcggcgttgctca

SEQ ID NO: 64920 - DNA, 238 bp, Setaria italica
  Peptide Sequence Number=SeqID_130894
atcgatcgccggagtttgtcaccgatgcttgcacacgcatgcctgacccgtatcgtgcgcgcagaacgcgatgctggagttcgagaggctggtgaaggtgaggcagcaggtggtggccgggaccatgcaccacttcaccgtcgaggtgagggaggccggcggcgccaagaagatgtacgaggccaaggtctgggagaagctctgggagaacttcaagcagctccagagcttcgagccc

SEQ ID NO: 64921 - DNA, 409 bp, Setaria italica
  Peptide Sequence Number=SeqID_130895
caacaatcttcttcaccttgttttttgtcttctgcaaacagcatcctcaaatcaccatatatgatagactacaaatttgagcatataggtcatactcattgaattcttctggcaaaaggagtagagaagctgaagttgccatttcaagattaattgtgttaaccttccttatatcccagttatcaacaagaacatgaaccggtttctgcaatcgtccactgaggtagaacctgtcccaggtcaagacatccatggccaggtccttcattcgcaccacgccatactttatcctcttgtctctccactcaacaaatgggttgaagtataccccgacgccaatgcgatcagcaagcccagtgatggcgctggcaccgaggcaccccatccagcgggagtagtgcgcagggtt

SEQ ID NO: 64922 - DNA, 338 bp, Setaria italica
  Peptide Sequence Number=SeqID_130896
taggtcatactcattgaattcttctggcaaaaggagtagagaagctgaagttgccatttcaagattaattgtgttaaccttccttatatcccagttatcaacaagaacatgaacctacacaaatacagatagcaaattatgtcaacttcacactgcaagatatcaatttgcacataaaaggcagtagaattgtacaacaaatagtctaaatactacatggtgccaaagcttctcgcggtggaccggttagagcgtcgaactctgggagtcgttgaaactcccatcccaatccgggttcgaagcacggcaccttctagaacaaagcccagggagagtct

SEQ ID NO: 64923 - DNA, 264 bp, Setaria italica
  Peptide Sequence Number=SeqID_130897
caaaaatgatgtgtcatcctttcttgacggaccataattaaatgacattgcgccatgcttagaaagtatagacttgatacaaaaaaatgctaagaccctgtttaggaattataaatgtaaagacttacagaattacggaaggacaataatgatgttagagctgttatcaaagtaaatggcttcaacgatgatgacaaaaccatggtaacaaatggtggataaggcagtaaatcctctggtaatttggacaggatgtaatatata

SEQ ID NO: 64924 - DNA, 385 bp, Setaria italica
  Peptide Sequence Number=SeqID_130898
gggatgggctgggcggcgatccgttcgtcaagcggcgctgcagttcacgtcctcgggctcagccacgttgtagtacagcgtggacgtccggtcgtcgaacttggagacgacgtggtgcggcgtcaggccgcagtagcacttccgcaggcgctgtatgcagatgtccattatcttctggaacatgtggtcttcctggatgaagggctgcttcacgaactcctccagcggcatccactttgctgcctgaatctctgtctcatcaatcttgatctcacttgaaacgggcctcagcatgcagatgaagaacaggtcggacttctggaacgccacgttgtgggcatgccttgtaaagtctaacgtactattcgtacgtaatttcggttgt

SEQ ID NO: 64925 - DNA, 242 bp, Setaria italica
  Peptide Sequence Number=SeqID_130899
ctggaaatgagaactacgtattttaataggcaggttcattttaaagatgacgcacctttgctgcctgaatctctgtctcatcaatcttgatctcacttgaaacgggcctcagcatgcagatgaagaacaggtcggacttctggaacgccacgttgtgggcatgcctggcaacacaaatgaggaaaaactgagactccagtttggggatactcggcctgttttctccgcttgctaaactttag

SEQ ID NO: 64926 - DNA, 223 bp, Setaria italica
  Peptide Sequence Number=SeqID_130900
ggatgggctgggcggcgatccgttcgtcaagcggcgctgcagttcacgtcctcgggctcagccacgttgtagtacagcgtggacgtccggtcgtcgaacttggagacgacgtggtgcggcgtcaggccgcagtagcacttccgcaggcgctgtatgcagatgtccattatcttctgctgagacacgcagcgaggggataggcaaggcacacgagggggatagg

SEQ ID NO: 64927 - DNA, 244 bp, Setaria italica
  Peptide Sequence Number=SeqID_130901
atcgccttggacttgcacaaggcatcgggctggttgcagcttctcatttggatacagtgttgtctgaaagtggccctcctttacttgatttcgagacatacaatgaactccagcattgctttttggtaattggtttagcatatcctgaggatctttgcatgttccttttgaataaatgcaagtcaaaagatgaagcatctattgttggggcgcttagcacaataaaacacctattgcccagatt

SEQ ID NO: 64928 - DNA, 249 bp, Setaria italica
  Peptide Sequence Number=SeqID_130902
ccgtcaatctttgttctggtggattcggtgcattgggctcctatccaactttcacaatgaacaaacaaattgatcaaggagggactaggagcttatcaagtttgccgtgtatgtttaatgatcttcttagattgcttttataagtgtatgatatcatctctgtgtaagatgcctttaattttatggcagctgcatttgtgttgcctagtcgagattctttaagcttgggagagaggacaatggcatacc

SEQ ID NO: 64929 - DNA, 313 bp, Setaria italica
  misc_feature (196)..(196): n is a, c, g, or t
  Peptide Sequence Number=SeqID_130903
ttttttttttgcatacaaagaatttgctcttgttaaacactgtcaataatacaagttgaaaccaaaggggtatgaaaaataaaaaataaacatctgcacatctacatacacacgtggacactaacacaatttacatatctacaccatttgcaaaacaacccaactgatcaaacagaaatcaagcatgaacccaacnttacttctgaagatcttccagctgcacaaggttaatccatcaattgatccagaggctaatctaaaactcacctcatcaatggttaggttagagccttgtctctgaggatccccagca

SEQ ID NO: 64930 - DNA, 255 bp, Setaria italica
  Peptide Sequence Number=SeqID_130904
tttttttttttgttcttatttacttaaagttaatttttgttctttcttttgttttaaactacttgttctaattaattacaagttgaaaccaaaggggtatgaaaaataaaaataaacatctgcacatctacatacacacgtggacactaacacaatttacatatctacaccatttgcaaaacaaacccaactgatcaaacagaaatcagcatgaacccaacattacttctgaagatcttccagctgcacaaggtt

SEQ ID NO: 64931 - DNA, 396 bp, Setaria italica
  Peptide Sequence Number=SeqID_130905
aaaaacgttactaacttacaagactaacttagactacttagttaggacaaagacagccagctttccatcaattgcgatcagttgagcaacttggctacatagcgctgcttaggcaaagaaatgattcaggtgtccgtgggttgcaatttataatccagtcaactgcgaaggatcctgccaatctggatgctagagttgaaaattttcttaagatgtttgaagacatcctttaccagatgtctgatgcagaattcaagagtaatgtcagcgctcttattgatatgaaactggagaaatacaaaaatctacgcgaggaatcagcgttcttctggggagagattgctgaaggaaccctcaaatttgatagaaagaagcagaggttgctgcactgaggga

SEQ ID NO: 64932 - DNA, 365 bp, Setaria italica
  Peptide Sequence Number=SeqID_130906
gatcttgagaaatttttgcctcatttgctagcaaagactttcatcgagtgttattttgcagactcatcaggataatgtcaaacaaaacgttctacttcagctacttgctcttgttggcaagcagccagctttccatcaattgcgatcagttgagcaacttggctacatagcgctgcttaggcaaagaaatgattcaggtgtccgtgggttgcaattttataatccagtcaactgcgaaggatcctgccaatctggatgctagattgaaaattttcttaagatgtttgaagacatcctttaccagatgtctgatgcagaattcaagagtaatgtcagcgctcttattgatatgaaactggagaaat

SEQ ID NO: 64933 - DNA, 456 bp, Setaria italica
  Peptide Sequence Number=SeqID_130907
atagcagcagatttaggtggttaatttaatgagatatcacagtgctgcaccatgttaacggtgtgatgtagtcgatgctgtgctcctttttattttgtgcgtgcatgcattaattccattgcatcaggactcaagatttccacctgccagcataaattagtttattttgcagtttgagcctggatccctgaactttggctcttattccatattttaaccagtatagtacacagtgtaatgctataacggatatcttcatctgtgcagactcatcaggataatgtcaaacaaacgttctacttcagctacttgctcttgttggcaagcagccagctttccatcaattgcgatcagttgagcaacttggctacatagcgctgcttaggcaaagaaatgattcaggtgtccgtgggttgcaatttataatccagtcaactgcgaaggatcctgccaatc

SEQ ID NO: 64934 - DNA, 352 bp, Setaria italica
  Peptide Sequence Number=SeqID_130908
ttgtcttagtctaaaagtacttttctattcgtagttgtttattttgtctaggttaactatttgtaaccctaattgtaagtctaaaaggttgttctattcctagcatgttgaagatgtcttgttcaatgcacccattagcgtttgcaagccattatccccatcacagcatcttgcaaagagaattgtaaagcttgaaaagggtttgagatactattatccagcaatgtgctcaaataaccaagatgaaaattctgctcttctgcactatattcagactcatcaggataatgtcaaacaaaacgttctacttcagctacttgctcttgttggcaagcagccagctttccatcaa

SEQ ID NO: 64935 - DNA, 243 bp, Setaria italica
  Peptide Sequence Number=SeqID_130909
tctatttgctttctctattgaaggatggtctgcatcaacccgtcttattaattgcaaatatcaattttaggtaacattgaacccaatgaagcaaaaggtgtcatccagcatgttgaagatgtcttgttcaatgcacccattagcgtttgcaagccattatccccatcacagcatcttgcaaagagaattgtaaagcttgaaaagggtttgagatactattatccagcaatgtgctcaaataac

SEQ ID NO: 64936 - DNA, 148 bp, Setaria italica
  Peptide Sequence Number=SeqID_130910
ttatttcttagttatttcctttttggttcgttaatttgttagtttctagtctttctagaagcatctttgcgcagataatcaccccttatcataagttcagcactggaaattggggatactcttgaagttaaagcaaaggagaaaggga

SEQ ID NO: 64937 - DNA, 261 bp, Setaria italica
  Peptide Sequence Number=SeqID_130911
agctcgtcgacgcgctccgcgcgcgcgtgccgcaggccatcttcgggcagggtacctgaacgacccggaggccaccgcgaggaccgtcgacgtcgacggctggctccacaccggcgacatcgggtttgtcgacgacgacgacgaggtcttcatcgtcgaccgcgtcaaggagctcatcaagttcaagggattccaggtgccaccggccgagctcgaggcgctgctcctcgcccacccttccatcgccgacgcggccgtcgt

SEQ ID NO: 64938 - DNA, 363 bp, Setaria italica
  Peptide Sequence Number=SeqID_130912
aaggagtgatgtcaatcgtgagtattttgcagaagagcatgatcgaagggccagagctggcatagactatgattcttcctaatggaaaaggcccaaccaaatgataccattctgaagcttcagagaacagcaccatattacaagaggaacagagcccatgtgtgcagtttctatgtgcgtggtgaatgtactagaggtgctgagtgcccatatcgacatgagatgcctgaaactggggagttatctcagcagaacatcaaagatcgttactatggagttactgatccctcaaatcctgttcagttactctgctatcgagtccaccaatgtatagtgtccttatagtctcatcattcttggtct

SEQ ID NO: 64939 - DNA, 247 bp, Setaria italica
  Peptide Sequence Number=SeqID_130913
agaggtttgaaaaaatagacatggatgggcatacccttacagtgaaacatttcgtatttcgcatttagttttctgagcatttcttgtaaatgcaagattcagtgccttacaggctcttgttttactgtcagttaagggcagaatatgacaaggagtgcaaaatatgtgcacgtccatttactgtcttccgatggcgacctggtcgggatgcaaggtacaagaagacagagatctgccagacatgttg

SEQ ID NO: 64940 - DNA, 256 bp, Setaria italica
  Peptide Sequence Number=SeqID_130914
gtacaaactgttgagtgaatgtatctattcacttcccttaattttcaattcttactatctgcagagttaagctagacaaacgtctagacaaacatctagtctggttaagctaaacactctgcattggtttctgacagtctcttcttactatctgcagagttaatgatccagttgcaatgaaacttttgagtaaggcaggtgagatgccatccctgacaccgcctagtatttgttatttgttagttactataaggac

SEQ ID NO: 64941 - DNA, 270 bp, Setaria italica
  misc_feature (245)..(245): n is a, c, g, or t
  Peptide Sequence Number=SeqID_130915
aatagacaaaggtaacaaagaagacagagatctgccagacatgttgccatcggaagaacagtaaatggagtgcaaaatatgtgcacgtccatttactgtcttccgatggcgacctggtcgggatgcaaggtcaagaagacagagatctgccagacatgttgcaagctgaaaaatgtctgccaggtctgcctgctggatcttgaatatggtctaccagttcaggtcagggatacagcgctcgctancaattcgaatgatgcaattccaagg

SEQ ID NO: 64942 - DNA, 222 bp, Setaria italica
  Peptide Sequence Number=SeqID_130916
cctatcccctgtgtgccttgcctacccctgttgcgtgtctcagtgagcatgtccaggctgcagccctggtttgccttcgccatactaccatggtcagtatccgccatactatgctcctccaccatacgttggctacatgcctccacctcgcatgccctacccacccctgtacccaccataccagccgatgctagcaccaccagcacaagctcacgctagttc

SEQ ID NO: 64943 - DNA, 374 bp, Setaria italica
  Peptide Sequence Number=SeqID_130917
tggactcgatagcagagtaactgaacaggatttgagggatcagttttatgcccatggtgagatcgagtccataaggatggtgcttcagcgtgcatgtgcatttgtgacatacactacaagagaaggcgctgagaaggctgcagaggagcttgctaacaagctagtcatcaagggtgtgcgactgaaactcatgtggggcaagcctcaggctccaaagcccgaagaggatgagtctgggaggcaggggcaggtttcccatggaggactgctccctagggctgtcatatctcagcagcagagcggcgaccagcctcaaccccctggaatgttaaagtagtatgatgctggtggtttgcttgtcttggtcccttcct

SEQ ID NO: 64944 - DNA, 441 bp, Setaria italica
  misc_feature (17)..(17): n is a, c, g, or t
  Peptide Sequence Number=SeqID_130918
ttcatgttgtacaggcncctcttctgcagcctccttccgtgccatgtttgctttcatcaaatctgctgaagcttcagcagcctcaattccagccaaacctgtgcagtaactgttcttgatagtctgcttgcagcatttatagccccactgatgatccttccaccatgaaccccaaacactcgtgtggttattaatgtagacatcttcttcatacttgctcttaggaacagatgtatcctgccctttaattatacgaccagtccgatcatattcaatctctctctcgctttgtccaagaagaagctcccggggtagtggttcttcagaagcagacaattacccaataacttaataccaataaattttactacctttagtttacaagaacttacaaatttactactttacttaaatacttagaaaactacttagtaacaagta

SEQ ID NO: 64945 - DNA, 325 bp, Setaria italica
  Peptide Sequence Number=SeqID_130919
aaggggaacgtaaggaactaactaacggaaggacggcaaggcgtggcggctatggctatgactatggctatggcggccgaggcgggtactatgaagagcaggatgaatactatgatgagcccgaagaatatggcccgccccctggccgtgggcgtggcaggggaagaaggggtgcggcgccctggcgcgggcgtggtggcccaggccgtgggccaccacgcggcggccgaggtggctactattagtcgagaagcatgtcatgccaagtgggtggtgtgctgaagctagcactggtgtgcttagttatcctttagcgtttgctccc

SEQ ID NO: 64946 - DNA, 262 bp, Setaria italica
  Peptide Sequence Number=SeqID_130920
gtggtggcgcgcaggaccgccgcggaggaggaagaggtggtggcgtggtagagcgcggtggtggagaagagcaggaagaagaggaatgctcagcaatggcccccctccacctgcttatggctacaacgaagagtgggaggaggaaggagattattacaacagagggcgtgggagagggaggtcgcgcggtagaggaggaagggggcgtggctactacggaggcggcaggcgtggcggctatggctatgactatggctatggg

SEQ ID NO: 64947 - DNA, 180 bp, Setaria italica
  Peptide Sequence Number=SeqID_130921
tgctgtgccgtgccaagtgggtggtgtgccgtgcctgtgcgactcgttggagcaagtttttgtggctcgctcgtggttttgtagctaggttggcgagtgaagttacactcggtagcgcagtgttgtttccccatccagcatccatacgaaataagttggtaaattaactgagacacgcaa

SEQ ID NO: 64948 - DNA, 312 bp, Setaria italica
  Peptide Sequence Number=SeqID_130922
gactttggtttccttcacagaaggccatgtttcttcagagtgggttcagagcaatccaactgcatcgaatataaaatctatcatcaaggtgctcagtatggagcagctcaggacaagattcagctgacagtggccctggttaagtggttagcctgagagggcagctccatctccatgtgtgctactctcccgatcccgagaagctaagccaacttaatttcgaatcataattggagcaaccgagaaagctcgaaggatcgagctgaattggagaacggtgggatcaaaattagaagacaccgacactgcacg

SEQ ID NO: 64949 - DNA, 227 bp, Setaria italica
  Peptide Sequence Number=SeqID_130923
ttagaagatgaaagagatgcagctgttggagtgggcatgctacttacgacatatccatcaggagtccactgcataatatcccattttatagtgatgttgccatttggatccaaggaatcataagcctctgcaggagcaacaaagggtccacatcaaacacagatcccaattacagaagcaagaacaatgaatgggatgtaacatagacttcatctactgtgccaatt

SEQ ID NO: 64950 - DNA, 190 bp, Setaria italica
  Peptide Sequence Number=SeqID_130924
atgaggattcacctaatctacaatctgcaattgatggccctggaaaatgatgaaagagagacacagcaggatggagtcttttgagcaagaaattgggaatatgtgcaagtcacattccatgtcataagagcttgggttgccctgcgcccatccgaggtgaaaactttgtcggcctgccaacaatggcacg

SEQ ID NO: 64951 - DNA, 251 bp, Setaria italica
  Peptide Sequence Number=SeqID_130925
caggttgcagactttggtctatcaaaggaggaagtttatgatggaaggaaatcgggtctcaagggcacctatggatatatggatcctgactacatgtccacaaataagttgacaaagaagagtgacgtgtatagttttggcattatactttttgaattgataacagccataaatccacaacaaggtctaatggattacattaatctggtaagtcattttaacgttactgaaagtccatcagaattagaaag

SEQ ID NO: 64952 - DNA, 238 bp, Setaria italica
  Peptide Sequence Number=SeqID_130926
gtagtgctgtggacatttgactctaatgatctgatcaaagtgcaatcgtgactacattttaattatttgcaggtagcattgcttagcaggttgcatcataggaaccttgttaatttggtcggatattgcgtcgaaaaaggtcagcgcattctgatttacgagtacatgagcaatgggagtttggcaagacttttgtatggtgacaataaacggagtttgagctggcaagaaaggctgc

SEQ ID NO: 64953 - DNA, 240 bp, Setaria italica
  Peptide Sequence Number=SeqID_130927
agagcgcgggtccggcgatgaggcggacccggtcgagcgcctcggggacggagttgtggaagttgtcgacgacggtgacgccgtagccccgctccagcaggcgcagcaccgtgtgcgtgccgatgaaccccgcgccgcccgtcaccagcacgctcctcttgtcccgctgcccagcgctcgccgagccacacgtcgccgccggcaccaatggcctccgctgaccatggagctctccctacc

SEQ ID NO: 64954 - DNA, 219 bp, Setaria italica
  Peptide Sequence Number=SeqID_130928
aatttgattaaccatacaaggaacgctgctactagtgaaaagatgactgtaggagttagggagatatcgacccgaactgctggttctttggaagagggttcctcagcttgataagcagaaagcccaggccaaggaggaaccctcgcgtcattactggtaacctgaaacagcttctgagaaatctctgacaaggaagggagccccttgcttgaggagttg

SEQ ID NO: 64955 - DNA, 166 bp, Setaria italica
  Peptide Sequence Number=SeqID_130929
aaatccaaatagggccatgctactcacatatatttcttgatttttgcagttttctttcgttcattatgtctaccctctcattaatttgtctgtaggaattggagaaagtgatggaaggtcaagcttttcgccagttcaccgataagattcttgacattgtcagtcc

SEQ ID NO: 64956 - DNA, 273 bp, Setaria italica
  Peptide Sequence Number=SeqID_130930
gtggaacgcagcgtgagcgccatggttctgccttttggatcagggacgaaccgaccaaaaaatcagcaaggctgcaagagaggaagagaggtgcttgcgcttggcgagtgcgccgcaaaaccccaccacggcagccaccagcgacgcccttcgcgtggccgacctcccgggccgcggccgcggtctcgtggccgcccgcaacgtccgcgagggcgaggtgctcctttccgagccggcgctcctcctctacccgtccaccctcgcctccctccg

SEQ ID NO: 64957 - DNA, 229 bp, Setaria italica
  misc_feature (3)..(3): n is a, c, g, or t
  Peptide Sequence Number=SeqID_130931
ccngaagccaagctgctggtctacgagtacatggagaacggcagcctcgaccggtggctgcaccaccgggaccgagagggcgcgccggcgccgctggactggccgataaggctggccatcgccatcgacgccgccaaggggctcagttacatgcaccacgactgtgctcagtcgtagtccacctggcacgcctccgcggcaatctgttcgcacctgatgagctggtgca

SEQ ID NO: 64958 - DNA, 243 bp, Setaria italica
  Peptide Sequence Number=SeqID_130932
ggaacaccgggggatcgcagaagtagtagaggtattccagtgctgctgcaatatcaatggcgacctgcaaccttgtccgccagtccaacggcgtcctgagaggatctgtcactcaagagacatcagcgccgaggcgacgtaatgaagaagaacttggaacatgtctgtctgtcagttaccgtggaggcactctttcaggctcctgttctccatgtgatcgaagaccaggaacctggcgtggtc

SEQ ID NO: 64959 - DNA, 258 bp, Setaria italica
  Peptide Sequence Number=SeqID_130933
ctttcatgttagggccaagcttgaagcaatatgaaagacattaactgcttgttgtctttcaagcttggccctaacatgaaagacattaactgcttgttgtcttaaaattttactttacgcgttctgaaataactcatgcgttgccaataaatgtgctagtcatcgaatcgtattatggacagaatttccttctgagcatatagacatatactgactctaaaccatcattgctcctcagatctaactgaaagcttagtt

SEQ ID NO: 64960 - DNA, 425 bp, Setaria italica
  misc_feature (321)..(321): n is a, c, g, or t
  Peptide Sequence Number=SeqID_130934
aaaaggagagcgagagggagagcgaggaggtgcccgacgtgcatggcgggtggaagagtgaggatgggagtttaaattgtggatattcaagcattagaggtagaagagcaagcatggaagacttctatgacataagatcatctagaattgatgataaacaaataaacttatttggagtatttgacggtcaggcattcacttctctcaaacaccttttttgcactatttaatgaacctcacaccattcatcattacaggtcatggaggtacccgtgctgctgagtatctgaagaagcatttatttgaaaacctcatgaaacntccagcttttgttgctgatactaaatctgctataagtgaggtctataaaaaaactgaatgcagatttcttggatgctgaaggcaatattcaggttggtcaactg

SEQ ID NO: 64961 - DNA, 285 bp, Setaria italica
  Peptide Sequence Number=SeqID_130935
gctgcgttctcttttgttttctcgtcagcatatattattgctttacttacatgattctctaaaaatgccgcctgggatcataagaggattgatgttgtaaatcaaatccacggtgtgcctgttgactgggcattaggtgctttcattgtgcaaacagcgttgaaccggacagagtactcagactcatcagtttcatatctaaacagctatgactcttctggcttggacaaccaaacttttaaacttaaagaaaattaaaacaaaagaaactaaagtaaaggttaa

SEQ ID NO: 64962 - DNA, 231 bp, Setaria italica
  Peptide Sequence Number=SeqID_130936
acccaatagtacggaaaatactagaccccaagacaatgaagcaatggtagcagcatggaggagaaccaccagggtaatcctaaccttgccacgcctttgcaagcccccaaaagaaccggctttgatgttgtaccctgccctgaccgggactcagtcatctcacgctataaagagaagaggaagacaagaagatttgacaggcaggttcggtatgaatcacgcaaagttcgt

SEQ ID NO: 64963 - DNA, 261 bp, Setaria italica
  Peptide Sequence Number=SeqID_130937
ttttgcctggattgggtctcaggagtttgaaggagcatagatccctatcaaacttgatattgtagatgaatttcttattccatttctctaattgtccaaaaactcacgtagccacttaataatcacacagttggagcagaagggagccgggccaggagcaagaagctcccacgccatcaccctcgtcggcgacatggcctacgcgttcggcggcgagttcaccccacgcgtgccggtggacaagaccatgtacgccttcga

SEQ ID NO: 64964 - DNA, 252 bp, Setaria italica
  Peptide Sequence Number=SeqID_130938
ctaagctggattccgtgttgcagcttcaatattgtttcggtgatcatcgtatatttgtaggccagaagaattgatatgttctttgtaattggtggaaatggtagccatgcaggagccaatgctattcatgaggagtgtcgtaagagaaaactaaaagtttcagttgttgctgtcccaaagacaatcgataatgatattactttttatggataagacgtttggttttgatacagctgtggaagaagcccagcg

SEQ ID NO: 64965 - DNA, 347 bp, Setaria italica
  Peptide Sequence Number=SeqID_130939
gcaaaaatcaaatgcaactgatgcttcaggaaatgtgatacttagtgactttggtgtccacatgcaacagaagatcaagaagcatttcaaggacatcggtgttccagctgatttaaaatacattgatccaacatatatggttcgggcctgccgggcaaatgcgtccgatgctattctctgcaccgtgctcgggcaaaatgctgtacatggagcctttgctgggttcagtggcatcacgtcaggtgtttgcaatacacactacgtctaccttcccattccagaggtcatcaagaaacgaccaaaagacaatagtagaaaccctaaataagacaaggaatagtaggaca

SEQ ID NO: 64966 - DNA, 252 bp, Setaria italica
  Peptide Sequence Number=SeqID_130940
cttctatggtacacacagcatgatgtactgaaatgtatcttctatggtacacacagctgatgtgtatacatatgctgtgtgtaccatagaagatacatttcagtacatcatgcgtccatttatagaactactattaggcatttgatgttatggtttgtgcccagcaacgagacacatgtatagcatttcttatatccttactagcagcagcaattaattcggactccgcactgcgtatacatttatacgacg

SEQ ID NO: 64967 - DNA, 175 bp, Setaria italica
  Peptide Sequence Number=SeqID_130941
cacagcatatgtatacacatcagctgtgtgtaccatagaagatacatttcagtacatcatgcgtccatttatagaactactattaggcatttgatgttatggtttgtgcccagcaacgagacacatgtatagcatttcttatatccttactagcagcatatgtatacacatcacc

SEQ ID NO: 64968 - DNA, 233 bp, Setaria italica
  Peptide Sequence Number=SeqID_130942
agcactcagtatccagtaggcattccagtttctgatcagtgtgttattttctccaatatcagatcccagttggttgttgtggcataacttagctttgttgattatcctaatcactgagaatacttaaaggtggcagctcttcttcttgttgttttgcacattccactatgctagtgttggtgctcttactcagttgtgattataatcttcagggagcttgatgcatgtgaata

SEQ ID NO: 64969 - DNA, 284 bp, Setaria italica
  Peptide Sequence Number=SeqID_130943
ggtggagtccacgcgaccacacgccctcgcctctctttcccactcgtgtccttcccttcccccgccaggccgccaccaccaccatcatgcggcgaagaccacgtcagcgggaagcttcatcgcatttgctcccgccccaactccgcccgcctaccgcgccccgcgtcgaaggggaaaggaggcgcccgcgcccccaagtcgaaaccctagatcccagttggttgttgtggcataacttagctttgttgattatcctaatcactgagaatacttaaagggagctt

SEQ ID NO: 64970 - DNA, 480 bp, Setaria italica
  misc_feature (389)..(389): n is a, c, g, or t
  Peptide Sequence Number=SeqID_130944
tcttaccttggtaagtaagtattaggtagtattgtaagtttttactactattcgtagtcttgtcggtaaattgggtcttgtattattatttggtgattgcaccattatcagcaaataccctggctaagattgccagtgggctatgtgacaacctcttgacatgcatagtgagagcatgggactacagcaaaccactctttgtggccccagctatgaacacattaatgtggaacaacccattcacagagcgtcatcttcagacgatcaaccaactgggcataatcttgatccccccagttaccaaaaggctggcttgtggcgattacggaaatggtgcaatggctgaaacctcgcagatctatacttctgtgaggcttgcatgcaaaacncaaccccatgattcaagcagttcagttgtgattcctgtcagtaacaatcagccgtctagctgattcagctatcaacctcaccaactgttaa

SEQ ID NO: 64971 - DNA, 391 bp, Setaria italica
  Peptide Sequence Number=SeqID_130945
tgttgtcttgcccaccaccggagatccatcaggtcgagggctgattctcctttttgttgttgagcagttcaagcagagctgatggctacatcagagccagtacaagaaagtttgatgctggactacccacaacctaataggagatgaagttttacacatcgagctgcggaaatgggctgatatattggtgattgcaccattatcagcaaataccctggctaagattgccagtgggctatgtgacaacctcttgacatgcatagtgagagcatgggactacagcaaaaccactctttgtggcccccagctatgaacacattaatgtggaacaacccattcacagagcgtcatcttcagacgatcaaccaactgggcataatcttgaccccca

SEQ ID NO: 64972 - DNA, 403 bp, Setaria italica
  misc_feature (70)..(70): n is a, c, g, or t
  Peptide Sequence Number=SeqID_130946
actcatgaaaccggacaggagctgacattgcttcttcaagatgtagcaacaacaaaacaactcttgagcnctaaaaacctatgatttaactacattacatgcctcaaagtaggccaagtcaaaactactcccacaccgtgcactcggccaccattgcttgattctctcttcttacaagcagttgtgcgtaacagattttcaatcattatggtgccccatcgatgagctcgcattaacgtgtcagttgggtgccaggtaaggtttctcacaggatctcacgaagccaccattgctgttaaagtggtgaattttgcagcagaaatcagcaccctggtagcgactgagatgacgtgtcagtaattctaggtactaattgtcttgttaggttagttagttctttgtt

SEQ ID NO: 64973 - DNA, 317 bp, Setaria italica
  Peptide Sequence Number=SeqID_130947
taaagtaagaaataataagaaatagaaaattagaccaatagaattagaaccaaagactagaagttactcgtatgttggtattatccacaactctgcttcagtttgacctgagtatttcttcaacacctctcctgaggccttagagatgaataccgcatatatgtggactccggatgagcttccagccattgaaacaagaacgccgttgtcttcattatcatatactatagcagccttgaatccagcattctgtgcatttctaactttgtcatcaaattggcaaccgcctcttataaccaaagcaaatgctgaggcag

SEQ ID NO: 64974 - DNA, 302 bp, Setaria italica
  Peptide Sequence Number=SeqID_130948
cgtttgccgtccttggtgtagaactcgcgcatgtcgacgtagaccttgcccttccagctcctcaccgacaccttcttattcttcgatatctgcgagaacccacccgaaaagggatccaccgagttagggttctagggtttcgctttcgcaacagggatttggatggtaacggagcacgggaccccgtacctcggccactacggtgccgtcttcggcggattcagagggcccctcgtccccggcggcctggcgcttggccgccggctcgctcccgcccccgccgccgaagcgcttccttcccc

SEQ ID NO: 64975 - DNA, 209 bp, Setaria italica
  Peptide Sequence Number=SeqID_130949
tatgctactgtgttacttcgaaatgattgcgtgacgaacgttggagcttgtgtctctctgtggatgatgacggcgactgactgaccaactgacggttcgtgcgtgtgtgtttttatcgcagcaactgtcgatgaagggcttcgcgggcgacaccgccaaggcgcacgccaagacgagcatgatcgccggggagggcgtgagcaacatcc

SEQ ID NO: 64976 - DNA, 208 bp, Setaria italica
  Peptide Sequence Number=SeqID_130950
aaaatttcgctgaattatgcaatgttatgaagtatgagctgagaatctcatgctcattgacgacgacgaactgaatgaatgaaaaccacgaacaaatgaaacaggtggcgttcaagacgaaggtgttccacccgaacattaacagcaacggcaacatctgcctggacattctcaaggagcagtggagcccggcgctgaccatctccaa

SEQ ID NO: 64977 - DNA, 380 bp, Setaria italica
  Peptide Sequence Number=SeqID_130951
cagtctcagccaacgtgaaagcatacttcgcgtggtcgctgctggacaacttcgagtgggggaacggcttcacggttcgcttcggcctcaacttcgtggactacagcgatgggaacaagcggtaccccaagaaatctgcgcactggttcaaggagtttctcaggaaatgagcatgatgaacgacgctgggacaatgctaaggtctcagtttgtacgttggcaccctcccttatggctctcagcagggcaagcaggtgcctgtggtagaaatccaccctggtgtcatccttgagcgactcctgcagtgtcacagtcttgttgttggcttcatcaacgccattttcagtgatgtagatggtcgggttgccgtagtattgctt

SEQ ID NO: 64978 - DNA, 313 bp, Setaria italica
  Peptide Sequence Number=SeqID_130952
atggacccctcattagaggtgactacccagcaagcatgaaaggattggtcggaaatcgcctgcccatgctcactaaagaacaatccgagttggttaagggttcattcgacttcatcggactcaactactacactacaaactacgctgaccaccttcctccatcaaatggccttaacaccagctacagcactgattctcaagcaaacactaccggtgttcgaaacggtgtgcctataggtccccgggccgcttcatcaatggactactaacaatactaacccaagaaaggaaataactaactacaacaactaga

SEQ ID NO: 64979 - DNA, 311 bp, Setaria italica
  Peptide Sequence Number=SeqID_130953
ccccctcggtccagttaagcaccttctgcccgggcttcaggaacacgcccttgccgtgcggcagcttccgcgccagcccgttcaggatctggtggaaggcgtcccggggctcggtcggctgtgggaacagcatggcctgcttcatcgatgggttcgcgagcagcctctgcttccgaaggatttcctccatcggtatggaggtcaagatggtatcaagcttggtgacgtcgtcctcagccacaaagacaccaatctcctcccatgggattagtcattccgctaaagggtaagtaactaattgttctattcgt

SEQ ID NO: 64980 - DNA, 438 bp, Setaria italica
  Peptide Sequence Number=SeqID_130954
tctattcgtattgggtttcgtcgtagtctagtccttcttgtctttccgtaaggtattttccttcctattcggttattggaggtcaagatggtatcaagcttggtgacgtcgtcctcagccacaaagacaccaatctcctcccatgggatagcatccgcaaagggaagaacaatgtcatcggcaatgatcacggggatgcagccgaacaccacagcttccaccaaacgggggctccatggggcccagccaagtgggcacaagcagaagacggaacgctgcatgtcctcatagtaggttggtggatggtctgtcgagatgtcgaacattgggttgttcttgaagttctcccaaactgatgcacgggcgccccttgcatagtaaccaccctcaggatcatttgaagtatcatagaacaaaccacggaaatagacaaagatt

SEQ ID NO: 64981 - DNA, 364 bp, Setaria italica
  Peptide Sequence Number=SeqID_130955
tgtctacttcgtattaattaggtaagtcgtattgttattgtaagtattcttccgttagcaaactattgttgcttgaggcatctagaatcttttgccaaaatattcttgttgtatttgggcggcaactcatagacatataccttgagccttccaacaggatcatcttctagcacatcaccagcacttccctggatccgctcggtgacctgcgccgcgacgacggcgacgtcggagcaggcgaggagcaaggtgagcgccaggggcagcgcccgcgccctcgccgtcccccattagtcccgtcacccgcaccgacgcctcgtcccttccctccacgctcggcggctcgggggcagcggggagagga

SEQ ID NO: 64982 - DNA, 325 bp, Setaria italica
  Peptide Sequence Number=SeqID_130956
aagcatgcaccaaagtcatgaggcacaacaaagaaatgatctgctccctctgtcctgttccagtatggccaacgcttggaaatgaactgaattgcacttctcattatccttggagacttgaagggtaagggatgaccccatggggtaaggtcgcaagttgtatatactggagtatagaaccaatcagcttcttctggatttaaagtccggattgcactagacaataggaaccggtgcatgaagatctctgcaagacgaaacaatagtaggactagaaggacaatactaagaaataccttaggaccaaccaatacttacttagtta

SEQ ID NO: 64983 - DNA, 206 bp, Setaria italica
  Peptide Sequence Number=SeqID_130957
catgatccttctgcccgaaagtctggaccagtgtagcacggcgcagcactggaaggatacctcgctcgatagccttcgcttcctggaaatagaagcatgctccaaagtcatgtggggtgactaaagaaatgatctgctccctccgtcctgttcctagttagggtcctaacgtctttggtaaaatttgtttactttgttaatttaaa

SEQ ID NO: 64984 - DNA, 272 bp, Setaria italica
  Peptide Sequence Number=SeqID_130958
cacacactgtctccaggtacagaggtttctttgatacttcagctgtagccgtcactaactgacacaccagcatctatcccacagcaggccgccagtacataacacgtacaatactaatacaaacactcttatgtattcaggtagtagctacgagtttgtattagtattgtacgtgaatacataagagtgtttgttgattacataatttctttcttgcctcgatacctgaatcccaaaccttcttattttctttcttgcctgataacttggtg

SEQ ID NO: 64985 - DNA, 274 bp, Setaria italica
  misc_feature (90)..(90): n is a, c, g, or t
  Peptide Sequence Number=SeqID_130959
gccctggtgcagatctcgcccctacaccttctccgccatcggcatcgccgtctccatcggcgtctccgtcctcggcgcggcatggggcancttcatcacggggagcagcctcatcggggccgccatcaaggcgcccaggatcacatctaagaacctcattagtgtcatcttctgtgaggctgtcgcaatttatggtgtaattgtggcaatcatccttcctagtactaaagtctttgtaaagttgttgttccttatttcttagttctttcttaaa

SEQ ID NO: 64986 - DNA, 217 bp, Setaria italica
  Peptide Sequence Number=SeqID_130960
tacctaacctgggaccgacaaggtgatcgatggcaagatctcagaggaaggaattctctgctggtgtcatgggtcctgccccaacaatcacagctgatgcaccatcaccaaacagggcagcaccaacaaggtcgtaaggacggtcataacttggtggcctgaagcctagcacagtggtctcagcagctgttactaggacacggctccctgggttgtt

SEQ ID NO: 64987 - DNA, 442 bp, Setaria italica
  misc_feature (433)..(433): n is a, c, g, or t
  Peptide Sequence Number=SeqID_130961
tttacctagtagaaaacaatagttagacaatagactaagaatagttgagctagaggcttcaagagaaggagagacagcatctgtaataacagggcgcagaacaattttaggggtagaatagattccaaggtcccaaaagaacttgagcctagcccactagtagatggtagtaacaaattttgacgagaggtgaaagccatgttgctacccccattacttccatctcctagatacagatcttctgtctggtctgccatagggaaatctggaagatagtctgacacagataaatcttgactattcaactgaggctttgtatcttctgaagtcgatgtccaatccatcggcagatcaccatcaccgttaccatttatcagatctatgacacctgaagacgatgaatcagtttcatgtatctccattctgctgaacngcatcacct

SEQ ID NO: 64988 - DNA, 422 bp, Setaria italica
  Peptide Sequence Number=SeqID_130962
atatgcaaaatttcgcctccgcgaaccttttagcaagcctatactaagttcggagccatcaatcagtgtgcaaccactacaaccacatgatcagtttctcatatttgcatctgatggactttgggagcacttaaccaaccaagaggctgttgatattgttcaaagtagccctcgcaatggctgcgctaggaagctgataagagcggcactgcaagaagcagccaagaaaagagagatgaggtactcggacctcaagaagatcgagcggggtgtccgccgccacttccacgatgacataacagtcatagtagtgttccttgactcgagcctcgtaagtagggcgagcactcaccgaggtcccgctctttccctgacgaaggtaggacggacgaccaagacaatagacgacaagacaaacaaca

SEQ ID NO: 64989 - DNA, 307 bp, Setaria italica
  Peptide Sequence Number=SeqID_130963
aaaagtaaaaactaaagaaaaagaaaaaagaaacgtaaaataagaaaagaactaaacaagaaagaataggaattacttactactagttgttaaccaaacagtggcctgtaaagcctcagatagcggctgttggctcatgctgcctggtcggtgtaatctgcggtggcatgctttatgttgccaatgttggggattcccgtgttgttttaggaagacatgttaaggccactggagaagttttggctgtccaactgtcagcagagcataacgtaagtattgagtcagtgagaaaggaactgcagtcaat

SEQ ID NO: 64990 - DNA, 391 bp, Setaria italica
  Peptide Sequence Number=SeqID_130964
caaacacatcagctaccaaccaagcaccaccatcctattgtcactctcgcgcttcaacaaggccgtcccgtttcatccatggcggaggagaagcaccaccaccaccacctcttcaaccacaagaaggacgatgaggcggcggagcagcccgccggcgggtacggcgagtacacggaggcgaccgtgacggaggtggtgtccaccggggaggacgaggagagaggaggagcgcatcgtggcaacaggcagcaagagtgattgtttcgaggagcgtggagtggagccatggggaagaagggcaaaggtggttcggcgcggtcaagaaggtgttcagtcctgaatccaaggagaagaaggctagagaggccaagaaaatagacaaaagggaggt

SEQ ID NO: 64991 - DNA, 167 bp, Setaria italica
  Peptide Sequence Number=SeqID_130965
caggcaagaggcagcaataagaagagaaagagcgcttgcatatgcattttcacatcaggtatgaattctttgttctcaaaacagatgccaatctatatgtacttcaactcagtttatgatggaaagcttaaaatgtctcaaaatgtgtgtgtgtgtgtgtcttttac

SEQ ID NO: 64992 - DNA, 174 bp, Setaria italica
  Peptide Sequence Number=SeqID_130966
cggagaaaggaggctctgctggaccggtcaaggagaggttgtcctttcaaggtggaacagcagctgcctcaccaatgcggcgacattctggtcctcccaaggtggagagtgcagctgcctcaccaatcgcggcgacattctgggtccttcccaaggtggagagtgcagtgaagg

SEQ ID NO: 64993 - DNA, 366 bp, Setaria italica
  Peptide Sequence Number=SeqID_130967
ggcactttcagttcatatgatacattctaaacaagagtcacaataatccatcttttgcaggtctggcacgatcctacaaggaagtcacagcgcataggaagtcagcattaggagctagcaacatttcaaatcaatcatcaagaacactaatattacaaaccttggtgatatctttgcaaaaataccttggagataactttctttggtcaggccttgatctactatttcgagcacaccagcttcctgattgaacgtttccaggttggttctggcaatcaggccatgatcatagatgatgttagaattttatagtcatgcaaatcaacacaaagttagaaagtatatatacacaggagaatatgctgt

SEQ ID NO: 64994 - DNA, 263 bp, Setaria italica
  Peptide Sequence Number=SeqID_130968
tagacaagaccaataaaatgttaaagaactctaagagatgagtatgcttgaggcccatccggtaaggataccaaacttctacattcagaaagcttgagtttttccagcgaccggaggtctcctgatagggattgaagcttgtcgcagtcagaaatgtcaataactctaagagatgagatgcttgaggcccatctggtaaggataccaggctttcgcattgccaagtatgagtttttccaacaaccagaggtctcctgataggg

SEQ ID NO: 64995 - DNA, 248 bp, Setaria italica
  Peptide Sequence Number=SeqID_130969
ttagaactttgccttgactttactggagaatatcttcagaatgcgcatatgatacattctaaacaagagtcgcagtaatccatcttttgcaggtctggtaggatcctacaaggaagtcacagcgtacagggagtcacagcgaacactaatactacaaaccttggtgatatctttgcaaaaatacctgactgataactttctttggtcaggccttgatatactatttcgagcacaccagcttcctgatt

SEQ ID NO: 64996 - DNA, 235 bp, Setaria italica
  misc_feature (62)..(62): n is a, c, g, or t
  Peptide Sequence Number=SeqID_130970
ctgtgtgctaaattcttcagcttgcaatctaggatttgtaaacaagagtcacaataatccancttttgcagatctggcacgatcctcggagataactttctttggtcaggccttgatctactatttcgagcacaccagcttcctgattgaacgtttccaggttggttcttagtcatctccagcttgtttcaccacatagaagctcatgaacatagctgctagtatatctgatact

SEQ ID NO: 64997 - DNA, 468 bp, Setaria italica
  Peptide Sequence Number=SeqID_130971
taaaaaaaggtaaaaaaaggtaaaaagttaaattaaagttaagtacctaagactagagctctgatgtataagccaaagaacagctcagtggatgacttcagagataagtgataagtgatgagtcacaacaaacagtatcccggggtcctagcgccgggaatcttaccctagccttgctcctgagatccatgccagatccaccgatcctgtaaccgaaaaggagccatgcattaatatagggtcaaatcgctaacaaactgaccaactgctcgccgtgctcctcggatcagagcaatctaagacgcgcttaacaacaatcaaagcttgcggcatctggcatcaagagggatcaattaacgcgtaaaaacataggattagggagccggcagatcggccgtggtcagtggcacaaggaaacagccggtgccgtgagggacaaggtggtcagcagagactgccgctccaaag

SEQ ID NO: 64998 - DNA, 193 bp, Setaria italica
  Peptide Sequence Number=SeqID_130972
ttcgttactttcttagtttgtttgttagtttagtttcgttaagtagttaccttgtatatatttcaggaggcttacaaggctgccatgcactatctccatcatgatccttggtatgtggaggtaaatatgaattctggtgctactgttggccactattcaatagcctgcaggctttctggccaggacttcagct

SEQ ID NO: 64999 - DNA, 270 bp, Setaria italica
  Peptide Sequence Number=SeqID_130973
ggagggagaaggtgaagaggacgatgaggtagaggaactggtaggcgaagaggcggagccactgcgcggggtcggcgccggagctggcgcgctggatgcggaggaggacggggtgggtgaagagggagtgcgccagcacggcgaaggagagcgggaagacgggctgacacgtggatggccggtagcagtgtgaaatttgattgggaccaaaaaatgggcttggctagctaatctaggctttctcttgtttctttactgggcttttgtgta

SEQ ID NO: 65000 - DNA, 469 bp, Setaria italica
  Peptide Sequence Number=SeqID_130974
aagggtacttgaagtatgacattgaagctgagcgttcgtcaaaacaaggtcaaggacctgaaaaggtctggactcaacatggtcatttgatatttttattttattaccaccttctaccagagcgggtcacagtagaactagagaattaaattctcaggacttgctggagcaattgcctgcgctgcagcaattgttatatcgacttattggatgccggccagaaggagccgcaaataacaattatctggtgcaatatgctctagctctggttcttaaagaaagcttcaaaatttactgtgcgataaatgatggaattatcaaccttgttgacaagtttttcgagatgccaaagcatgaagcactcaaagctcttgacatttacaggagggctggtcagcaggctggaagcctatctgacttctatgaaaagttgccggggcttagagctcgcaagaattccagtttccac

SEQ ID NO: 65001 - DNA, 263 bp, Setaria italica
  Peptide Sequence Number=SeqID_130975
cgttcgtcaaacaaggtcaaggacctgaaaaggtctggactcaacatggtcatttgatatttttattttattaccaccttctaccagagcggtaccatgttatcaattatttgtcactatattactgatttactggtgctactttaacatataattaaactactttattttcagggtcacagtagaactagagaattaaattctcaggacttgctggagcaattgcctgcgctgcagcaattgttatatcgacttattggatg

SEQ ID NO: 65002 - DNA, 273 bp, Setaria italica
  Peptide Sequence Number=SeqID_130976
agagcggcaagaaggccgggcggtccgtcgtccggatccgcggcgtcaccgacgacgccgcggccgcgttcgtccgcctcctctacgccggcaggtataccgcgccgcctccctccctccctaatttgattcgctgttcctagtctttgtttctgctgcgcacgtccgtccgtccgtcccttacttgcaaggctgggcaagcaccgtttgcaaggggggactaattctgacgagcttgttctaaacgcacgaggagatataggcgatctagct

SEQ ID NO: 65003 - DNA, 259 bp, Setaria italica
  Peptide Sequence Number=SeqID_130977
aactgaagtgcggcaagattaacatgacgccttgctcgctcagtgcgctagtgtggggagcatgttttctttagcgtcaagctttgttccagggaatggcggacatcgggacatggccggacctccatgtcgcgttcgtgggcgtacgacgtgacaccgcaagagagtgtttttctatgtggttggtgcgtctgtttggggcggcggtttattaggacgggttggccgtcaatgccggatggtcgtcggatgttcacat

SEQ ID NO: 65004 - DNA, 245 bp, Setaria italica
  Peptide Sequence Number=SeqID_130978
ctcctcgccaaggagttcgccgccgtcgagcgcaccgaggcctggcgattcctccaggagaacgacccatggcaggagctccaactcctgcagcgcctgcacgaggccgacatggtacgtacgattttccttttctttttctttccgatcaggttccattgggcacgatgtgaattgcgtcaatgcgtgctgacacacatgctcgcaccaaattaaattgaagaattgttcgaaaaagatttaaa

SEQ ID NO: 65005 - DNA, 262 bp, Setaria italica
  Peptide Sequence Number=SeqID_130979
tcctggagcggcgcctgcggaaggacagggagagcggcaagaaggccgggcggtccgtcgtccggatccgcggcgtcaccgacgacgccgcggccgcgttcgtccgcctcctctacgccggcagcggcggcgcaagtggcggcggaagcgcgcggagcagcgcgtgtacgtggagctgagcgaggcgatggactgcctcgaccacatctgcacggaggggtgcacggaggtcgggccggcggggcgggcgccggcgccgtcg

SEQ ID NO: 65006 - DNA, 269 bp, Setaria italica
  Peptide Sequence Number=SeqID_130980
ccggcgcattcctctgtcctggccacggcgtcgccggtgctggggagcatcctggagcggcgcctgcggaaggacagggagagcggcaagaaggccgggcggtccgtcgtccggatccgcggcgtcaccgacgacgccgcggccgcgttcgtccgcctcctctacgccggcaggttggtgagtggtgggggtgtggccgtgtgggtggcacctggccggttggagccctccccgcgctccccggccgacgtgcgcatcatcgcgtagcg

SEQ ID NO: 65007 - DNA, 427 bp, Setaria italica
  misc_feature (379)..(427): n is a, c, g, or t
  Peptide Sequence Number=SeqID_130981
taataataacgtgaattgaagccatagagaattacaggatatacatgtgcgaattattgtaaatttcattttatgattgctactgttggcgaaactagaatattgaaaatgatggtattttccttcttgttacagatgtaaagcaggtctgagacagagaaccagctgaatggagaagttggctaacatacgccaaggcagcacgcaatgctcggattaatgaataaagttggaaaacttttagttcgatgatgttcagatataagaaatgtattggtgttcacctatttaaagctgtagttagctttattcacataatgtggttctgtatcaatgccagattcaatctatggctcatgagatgtcttaattttaaacnnnnnnnnnnnnnnnnnnnnnnnnnnnnnnnnnnnnnnnnnnnnnnnnn

SEQ ID NO: 65008 - DNA, 439 bp, Setaria italica
  misc_feature (62)..(62): n is a, c, g, or t
  Peptide Sequence Number=SeqID_130982
tcttaagccaccaccgggatggaaggctggtgatccaatcacgctgccactggatgacattntacctggtgtcaaggtgagaccaaaggcccctgtgccacaggcacctgtctcagtgcggccaatggtgccaatgggcccagcgccaatacaagtcgcggctgttcagcttgattttgggagcagtagcagtgatgagtacagtagtgacgtcgggagctcagaagaagatgacgaggattagtgcttggattggagcgagcttgaggcgccaacctcgcatgtgctcaccatttcattattgggcatatctgcatgtctctgattgtgtgaaatgtacatgcctgtcaatctcaagccaattccggcatcgtttctgcgctactgaatcccaatccagcttctgatgtcttgtgtcttcctaccctaagtttaccca

SEQ ID NO: 65009 - DNA, 334 bp, Setaria italica
  Peptide Sequence Number=SeqID_130983
aggaagactaggtttaagttaaggaccgaccgaccgtacggacaagacaaggaaggaccgcggaggttgacggagagcaggttggcgcagtggccgcaccgcacggtgaccgtcttgaagaggctggctgcacggcacgcccaccgcgaggatggtgtcgcagcacttgcagtgcacgtagcagagctgctcctgctccgccgccgtctgcaactgcggcggcgcgaggtgctggtccatggcgaacgccgcctccggcaccgacgacatcatcgcgccaagctttgccgtgcttgcacagaacagtcgtagccccccctcggccggcgggtgt

SEQ ID NO: 65010 - DNA, 389 bp, Setaria italica
  Peptide Sequence Number=SeqID_130984
atctgatctgatcgatcggatgacacacagctttgagcctcttccttcatgtcatcaagaaggaagaggctcaaagctgtgtgtcatctgatctgatcgatcggcgaggtagccacgagatattgagaaggttgatgcaatttgggtaatgaggttgatgagaaggggccgggttgtaagtggaataagtgtggccgtgtaatttaattaggtagatttttggtttgaattttgataaagtaaatacttttccactttttttgtttttttgttttttcctttcttttgtttgtacacataaaaatttagtgaattgtgagcactgttgtaatttgtataggtgcatgatgttttctttttgtcaaattaaagaaaaaaaaaaaaaaaaa

SEQ ID NO: 65011 - DNA, 244 bp, Setaria italica
  Peptide Sequence Number=SeqID_130985
ccttcctcacattacattcagcacacgtttacaactgcacgtttccctaagattttatatcaccgctgttttgtgcaactttcttccacttatacgggagtacttgccatcagctgctgaggaaattgagtcggatattatttcattggcacaatcagaagattcagaagtttatgacatctatactgtcaaggaggtggatgatacaaacatggaggatacctcggcagcttcatatccacgg

SEQ ID NO: 65012 - DNA, 257 bp, Setaria italica
  Peptide Sequence Number=SeqID_130986
gtccggtcgtaagtcctccacctcggggcccgctacgagggagaaacccatcgtcgtccgggtcaagcgcaagccctcacagacccgcccggatgctttctggctagagattaatgagaggccggcgaagaaggcgatgctcgatttctccagcctctccatctccgagccctcctcttcctccgccgcaatccaaacagaatgcaactttggcgccatgatacttgccaaaacgattctgccaccgtgcattgata

SEQ ID NO: 65013 - DNA, 405 bp, Setaria italica
  Peptide Sequence Number=SeqID_130987
acagccagcatcttatagttagctctgtttctggatcaaggacaggagatgcctagctgctacttctccaatcaccaaattcccccatgaacgggaaccacttagtaatgttcccacaataccgggttttttgcgtgttcagagtgagaattctggatcaggtgatatgcatcagtcaagcgtccagtacgacagagcatatcaacaacacatgaaatatgctcaatatgaggttctagaccatacttctctttcatgcacttaagcaagcccattccctctgcaacaagacccgtgtttttacaggcagccaacaccgcaacaaaagtatagtggttcggttgtacttctgtttccttcatcagctcaaaaagcttaacaacatctgcagcaagcccattccat

SEQ ID NO: 65014 - DNA, 271 bp, Setaria italica
  Peptide Sequence Number=SeqID_130988
ctgatccagaattctcactctgaacacgcaaaacccggtattgtggggaacattactaagtggttcccgttcatggggattgtgattggagaagtagcagctaggcatctcctgtccttggatcaggtgatatgcatcagtcaagcgtccagtacgacagagcatatcaacaacacatgaatatgctcaatatgaggttctagaccatacttctctttcatgcacttaagcaagcccattccctctgcaacaagacccgtgtttttacagg

SEQ ID NO: 65015 - DNA, 379 bp, Setaria italica
  Peptide Sequence Number=SeqID_130989
tcttagatccagaaaagaggataaccgtatctcaagcacttagccatccttttatcactgctacgagaccgagtacgtggatgaagcacggaactatggaagagatggctacctgcagaccttgctgcatgcacttatcatttggatatgttctgttgcttgattctgccagggcctctgctgtgtgcgcattttatatgcgtaagggccaacataagaaggtcctgggatggagatcgctgacccactactcacttgacatggtaaatcctttgaactctggatgtcttccttttgttttattcttaaagagttcacctaatagttggtagtgttttggtataccatggatggttcatttttttcagttttggtctag

SEQ ID NO: 65016 - DNA, 360 bp, Setaria italica
  misc_feature (311)..(311): n is a, c, g, or t
  misc_feature (319)..(319): n is a, c, g, or t
  Peptide Sequence Number=SeqID_130990
tgttagttagggtttctaccctaagtagttgtagtagtattcagcagacatgttctgtgatgacatttttggagaatcacctgcaggcattagaaaatcgggcaaggatgatggtttgcatgttgagagaaatgctcttcatgacaactgggacgatgcagatgggtactacacttatcggtttggggaattactggatggccgttatgaaatcacagcagcacatgggaagggtgtgttctcaacagttgtgcgggcaaaagatcttaaagctggtaaagatgatcctgaagaagttgctatcaaaattntccggaanaatgatactatgtacaaggctggcaagcaagaggtttcgaa

SEQ ID NO: 65017 - DNA, 266 bp, Setaria italica
  Peptide Sequence Number=SeqID_130991
ccttgcgtaatattaatttgtttcttacatctacttgcgtttggatttataagattctaatttgttctttcattcaggattctgccagggcctctgctgtgtgcgcattttatatgcgtaagggccaacataagaaggtcctgggatggagatcgctgacccactactcacttgacatggtaaatcctttgaactctggatgtcttcctttttgttttattcttaaagagttcacctaatagttggtagttgtttggtataccatg

SEQ ID NO: 65018 - DNA, 396 bp, Setaria italica
  Peptide Sequence Number=SeqID_130992
agaaatttaacggaaccgtaggaagttagtagacaataggattcggccgtggagttgccctccttcaaccccgatctcttcttggccttctccgcccagcccaggacgccctgctgcacgtgctcgttgaagatctccttcttgtagtagctccccatctgggttacaattgcatacagaggcagggtgctgtagctgcagagaagctgaatgacgaccccaagaacgagccttggcaccaagaaaccgacatggtccatgaagcaggagtgaaatccataggtcatctggaaaaaggaagatggaagccgatacacgatgttgtgttcagtcatggcatctgagctgaccagtgaccacaatttggaaatggtgtgtcgcagtggttacttacta

SEQ ID NO: 65019 - DNA, 431 bp, Setaria italica
  Peptide Sequence Number=SeqID_130993
tgcagccaactcaatattatagattcttttgccaatacccttaaaacgtttcttaatgaattcgtgacgatgcacatcggttaccttcttaggaccgtttccaggatcatctttctgaattccattctcccactgtttccattggtgtatctgcgcacctcccaaaaagcatagttgtaacgctgaaaataacatgcgtgatagccagaacaaatatgaaaatgtgcagctgatgtatggcttctacggacagaagtggaacttttcgctgtaaaaacaaaacgtagacttcagattgaccattaaaacattagtaaaacaaagaaacataaaaattgacgaaccatcctagcattgtttactgcttaagtgatagaaaagtaaggtatgaagtacaattgtagaaacaatcattcgtaggaaggttgttt

SEQ ID NO: 65020 - DNA, 191 bp, Setaria italica
  Peptide Sequence Number=SeqID_130994
acaatactacagtgcagtttaggaatgatgtaccacaatacttaccagtatccagaagaagaacgcaatctcaaatgcattctgaaacaggatgaagtggattagaaaaaggataacccttggcttgccgaaccagaagtggtcatctgatggttttacaaccacttcaccctcaatcgccgtgtgcttct

SEQ ID NO: 65021 - DNA, 349 bp, Setaria italica
  misc_feature (23)..(23): n is a, c, g, or t
  misc_feature (26)..(26): n is a, c, g, or t
  Peptide Sequence Number=SeqID_130995
tattatactatctatcctaattnttntctacggtctattggtccttacggtcttccctacgtaccttgcgcctcggctgatctgatctagctagcagttgcctgcttgccacgcgtgcagctggtgtcgctgcacgcccaatgcaaagcaagttcatcacggagtaatcgtccaggtattattgctacgaataaatgaagagcatgtaccgtccggcaccagctagctctcttcgtagtactgtcatgtaatgcattattgtctgtgatcgtctatgattattgtatcgtggcactacgtttgtactgttgattacattgtttgcaaatataatgctactgtattactg

SEQ ID NO: 65022 - DNA, 153 bp, Setaria italica
  Peptide Sequence Number=SeqID_130996
tattgtaagtagtctattgttaccgttccggtctacctagtcttagtcttcttctttcgttagttacttgttcatgtaatgcattattgtctgtgatcgtctatgattattgtatcgtggcactacgtttgtactgttgattacattgtttgc

SEQ ID NO: 65023 - DNA, 367 bp, Setaria italica
  Peptide Sequence Number=SeqID_130997
gcaaaggaagcatggcactggcattagcgatgatccttccttttattgcgctgttagctggagtttctatctggtgttatctttctccttcgagtattatgaggaaccagccacatttgcttgtaattggaactggctttaattttggatatttggtgggaagaatgatacttgcccatttgtgtgacgagcccaaaggtctaaaatctgggatgttcatgtctttggtgtttctctgttttctgattgcaaatgctcttattgcaaagatcaatgatgggtaaactctctacatttattccacctagtacccataacatccgaagtcaactcttttattataactacagtaaacgtttcatttttc

SEQ ID NO: 65024 - DNA, 355 bp, Setaria italica
  Peptide Sequence Number=SeqID_130998
ttattcctatttgtttggtattttggtaggtacttagggtaagtacttacttctttgtcgaaagcggttatttgacatgcttgaaaagcaatttgagtgtactgcttttgttccggtgggccgagaatcagacataaagaaagttttcagaaacatcctaattgcacttgacaagcataagtacatgggatttgacacagcagcactgagtgattggcagcttattaatgagctccgggaacatctcgacaagaggaggtatttgattgttattgatgatgtatgggagacatcaacgtggaagttaatcaaaatgtagctctggtggatggtagttgtggaagtagagtaatca

SEQ ID NO: 65025 - DNA, 145 bp, Setaria italica
  Peptide Sequence Number=SeqID_130999
ttacatacctcgacggtctttacaacagataaagcaacgcccttatagtttcctaatgattccaagctactacaatttcacgctaccatcgtaccatgtcagtctaaccctttcctcacctcgacggtctttacaacagataaag

SEQ ID NO: 65026 - DNA, 325 bp, Setaria italica
  Peptide Sequence Number=SeqID_131000
aactaaccgaaatacggaagtacgaatttacaacccgacgtacgggtaggaccggaagacaaggtaccgacaaaggtgctcggctccgcttttctgtacctgcggtcagggacctgctcggggatcaaggtggggaggctggacatggaggaagaggagatcgtggagaatgtgatggccgcagtggtggcggctgtggaaaggtgccaaagatgtgggccaacgtaagggcactgcatctgaaggctgtggattcagttgcgctgccaatttaccagattgtgccggagttgggtatgaagattgaggtgcctgtagcgagatt

SEQ ID NO: 65027 - DNA, 146 bp, Setaria italica
  Peptide Sequence Number=SeqID_131001
ggggggagggagaggagagctcgctctgggagttgcttagtggggagggagagggagaaggtactggaaggaaaggagatcgtggagaatgtgatggccgcagtggtggcggctgtggaaagggtgccaaagatgtgggccaacgt

SEQ ID NO: 65028 - DNA, 266 bp, Setaria italica
  Peptide Sequence Number=SeqID_131002
cacaaaagagagaatactttgctacccatgtcatcaggaaactttatcctgcccctattgcatcagacgatgcgaaatgacaaaatgcagcatcaagtcttccggtccgatttgtacactttgacattgtatggaaagagtattagattccttcagggctacttccaagttggccaattatttcactgctcagtctgaaactatctttctggggacccaacaaaagatagtttcagactgagcagtgaaataatcttttgttgggt

SEQ ID NO: 65029 - DNA, 212 bp, Setaria italica
  Peptide Sequence Number=SeqID_131003
atctgtgcaaagtgatttgggaatgcacaccaaagtttgtcacaaggtttccaccagcacggctgggacctatactcccaaacttaccctgtctcatgtacgatgtgtctggtgattcaggattatagcaggatgcagtatcagctagatttagaagaaaatcgttactggaaaagacactcggacaacattgatgataaaaagcatcttcg

SEQ ID NO: 65030 - DNA, 203 bp, Setaria italica
  Peptide Sequence Number=SeqID_131004
aagaaatggtgtccccgccagagttgtgaaaccagatgcagtagaagcagatgaagcatgaaatatatgatcggcaaggatgttcctgttggagcttttcccaatgggtttcattggaggatatcctggagataacccagtaatatggttaccacccaaggggctcatcccactattaaatgcattttcactgagtgtattga

SEQ ID NO: 65031 - DNA, 157 bp, Setaria italica
  Peptide Sequence Number=SeqID_131005
tgttgttctggaaatgaatgtgaattgtgaaaaattggaaacaccatgaaatatatgatcggcaaggatgttcctgttggagcttttccccttgggtggtaaccatattactgggttatctccaggatatcctccaatgaaacccattggggaaaag
